United States Patent Application Publication US 2005/0244851 A1 - sequence listing, part 20

SEQ ID NO: 758671 - DNA, 25 bp, Homo sapien
tggttccacgtgaatatagaatggg

SEQ ID NO: 758672 - DNA, 25 bp, Homo sapien
ctgagcttgtccctgtgtggaagtt

SEQ ID NO: 758673 - DNA, 25 bp, Homo sapien
tccagggctgatttgcgtgtgatga

SEQ ID NO: 758674 - DNA, 25 bp, Homo sapien
ctgatttgcgtgtgatgaacactgc

SEQ ID NO: 758675 - DNA, 25 bp, Homo sapien
atttgcgtgtgatgaacactgcttc

SEQ ID NO: 758676 - DNA, 25 bp, Homo sapien
cagggctgatttgcgtgtgatgaac

SEQ ID NO: 758677 - DNA, 25 bp, Homo sapien
cagctcagatatccacattctcttg

SEQ ID NO: 758678 - DNA, 25 bp, Homo sapien
tctcttggcaatcccgagtcttctc

SEQ ID NO: 758679 - DNA, 25 bp, Homo sapien
acattctcttggcaatcccgagtct

SEQ ID NO: 758680 - DNA, 25 bp, Homo sapien
ttggcaatcccgagtcttctcgctc

SEQ ID NO: 758681 - DNA, 25 bp, Homo sapien
ttctctctggatctacacagctcta

SEQ ID NO: 758682 - DNA, 25 bp, Homo sapien
ctctctggatctacacagctctagc

SEQ ID NO: 758683 - DNA, 25 bp, Homo sapien
ctctggatctacacagctctagcat

SEQ ID NO: 758684 - DNA, 25 bp, Homo sapien
tctctggatctacacagctctagca

SEQ ID NO: 758685 - DNA, 25 bp, Homo sapien
ttgcaggccaggtgatttttaccct

SEQ ID NO: 758686 - DNA, 25 bp, Homo sapien
caagtgccagttgtcaaagaatttt

SEQ ID NO: 758687 - DNA, 25 bp, Homo sapien
acagcacatactcgacaagtgccag

SEQ ID NO: 758688 - DNA, 25 bp, Homo sapien
caggtgatttttaccctcactggtg

SEQ ID NO: 758689 - DNA, 25 bp, Homo sapien
cttccaatttatccagtttacctgg

SEQ ID NO: 758690 - DNA, 25 bp, Homo sapien
gattcactaccgtcttccaatttat

SEQ ID NO: 758691 - DNA, 25 bp, Homo sapien
tatccagtttacctggtgctgcgtg

SEQ ID NO: 758692 - DNA, 25 bp, Homo sapien
gtggctgcagattcactaccgtctt

SEQ ID NO: 758693 - DNA, 25 bp, Homo sapien
tggaagcattcaagggacagacagc

SEQ ID NO: 758694 - DNA, 25 bp, Homo sapien
cagaggtggccaaagactagattac

SEQ ID NO: 758695 - DNA, 25 bp, Homo sapien
cagttgggatgaaaccttccaggga

SEQ ID NO: 758696 - DNA, 25 bp, Homo sapien
tagattacatggagtctggtgccca

SEQ ID NO: 758697 - DNA, 25 bp, Homo sapien
tccagttctagattactaaagttta

SEQ ID NO: 758698 - DNA, 25 bp, Homo sapien
acctcttaagaagtaaacaggacag

SEQ ID NO: 758699 - DNA, 25 bp, Homo sapien
cagggcatggcaaaagcgaatggct

SEQ ID NO: 758700 - DNA, 25 bp, Homo sapien
tattttggctaacttgacaattttg

SEQ ID NO: 758701 - DNA, 25 bp, Homo sapien
cttttaacatatgaagagtatagat

SEQ ID NO: 758702 - DNA, 25 bp, Homo sapien
ggacaagttatagtttacttcacag

SEQ ID NO: 758703 - DNA, 25 bp, Homo sapien
acatatgaagagtatagataatctg

SEQ ID NO: 758704 - DNA, 25 bp, Homo sapien
tgatattcagtacatcatgtaagtc

SEQ ID NO: 758705 - DNA, 25 bp, Homo sapien
ctctcagactcacatggaacactca

SEQ ID NO: 758706 - DNA, 25 bp, Homo sapien
tcaccaaggtagacaacatcctgat

SEQ ID NO: 758707 - DNA, 25 bp, Homo sapien
taaactactatccaggctaaccaag

SEQ ID NO: 758708 - DNA, 25 bp, Homo sapien
aatttaagcctaaaacaagcagagg

SEQ ID NO: 758709 - DNA, 25 bp, Homo sapien
ctgtagctctctcattggtgttggc

SEQ ID NO: 758710 - DNA, 25 bp, Homo sapien
ttccatctagtcctgcatcgtccag

SEQ ID NO: 758711 - DNA, 25 bp, Homo sapien
tcggcttccatctagtcctgcatcg

SEQ ID NO: 758712 - DNA, 25 bp, Homo sapien
atcgtccagctctgtagctctctca

SEQ ID NO: 758713 - DNA, 25 bp, Homo sapien
gcctcctcccctttaagcataaata

SEQ ID NO: 758714 - DNA, 25 bp, Homo sapien
atgtcagtggtctaacagccagcca

SEQ ID NO: 758715 - DNA, 25 bp, Homo sapien
cttgatgtcagtggtctaacagcca

SEQ ID NO: 758716 - DNA, 25 bp, Homo sapien
gcagtaataatgcttagatgggagt

SEQ ID NO: 758717 - DNA, 25 bp, Homo sapien
gtggaggcatgcagaattgaggcag

SEQ ID NO: 758718 - DNA, 25 bp, Homo sapien
catggctccaaattgctctaccgta

SEQ ID NO: 758719 - DNA, 25 bp, Homo sapien
aattctctgcactggaagtttggac

SEQ ID NO: 758720 - DNA, 25 bp, Homo sapien
cagatgactggaaagacatccattt

SEQ ID NO: 758721 - DNA, 25 bp, Homo sapien
tgtagcaaacttccgtaggacagga

SEQ ID NO: 758722 - DNA, 25 bp, Homo sapien
tgagtagtttgttcccagggctaaa

SEQ ID NO: 758723 - DNA, 25 bp, Homo sapien
taaacggacgtgctcatttcttgtc

SEQ ID NO: 758724 - DNA, 25 bp, Homo sapien
caggcactctttacagtcttctatg

SEQ ID NO: 758725 - DNA, 25 bp, Homo sapien
gactgcaccaagcatgtgttaatgg

SEQ ID NO: 758726 - DNA, 25 bp, Homo sapien
tattccactgtgtccttaacaatgc

SEQ ID NO: 758727 - DNA, 25 bp, Homo sapien
ttattccactgtgtccttaacaatg

SEQ ID NO: 758728 - DNA, 25 bp, Homo sapien
attccactgtgtccttaacaatgcc

SEQ ID NO: 758729 - DNA, 25 bp, Homo sapien
cttattccactgtgtccttaacaat

SEQ ID NO: 758730 - DNA, 25 bp, Homo sapien
gacttggcagaaaaagtaggagcct

SEQ ID NO: 758731 - DNA, 25 bp, Homo sapien
gcccatgctcagcatagcctgcaca

SEQ ID NO: 758732 - DNA, 25 bp, Homo sapien
tgtgtaaggcttgtgggacttggca

SEQ ID NO: 758733 - DNA, 25 bp, Homo sapien
ctcagcatagcctgcacagcaaggg

SEQ ID NO: 758734 - DNA, 25 bp, Homo sapien
tactgagcgtggcttgcagcgcctg

SEQ ID NO: 758735 - DNA, 25 bp, Homo sapien
ctactgagcgtggcttgcagcgcct

SEQ ID NO: 758736 - DNA, 25 bp, Homo sapien
gcttgcagcgcctgcaaagcagctg

SEQ ID NO: 758737 - DNA, 25 bp, Homo sapien
aattagctgactttaagtctttgtc

SEQ ID NO: 758738 - DNA, 25 bp, Homo sapien
tgcttagtggttttctacaagtcct

SEQ ID NO: 758739 - DNA, 25 bp, Homo sapien
tattgatataactcctttttggtga

SEQ ID NO: 758740 - DNA, 25 bp, Homo sapien
gtctttgtctagtaaattcactctc

SEQ ID NO: 758741 - DNA, 25 bp, Homo sapien
caaaactgtctagtcgagcttgcac

SEQ ID NO: 758742 - DNA, 25 bp, Homo sapien
ccgtgaatcccaaagttctcagggt

SEQ ID NO: 758743 - DNA, 25 bp, Homo sapien
gattgcatggcaccaagcagagcct

SEQ ID NO: 758744 - DNA, 25 bp, Homo sapien
tagctggcaccccaaatgcagattg

SEQ ID NO: 758745 - DNA, 25 bp, Homo sapien
cgttaccaggttcagaaatgtagat

SEQ ID NO: 758746 - DNA, 25 bp, Homo sapien
tttctccttaatctaggccagttga

SEQ ID NO: 758747 - DNA, 25 bp, Homo sapien
gccagttgatgagtgaaatcctggt

SEQ ID NO: 758748 - DNA, 25 bp, Homo sapien
catgagtatgctcagacgttaccag

SEQ ID NO: 758749 - DNA, 25 bp, Homo sapien
tgcctacaggaagaaagcgataatt

SEQ ID NO: 758750 - DNA, 25 bp, Homo sapien
gcatgtaaagagtatctagcacact

SEQ ID NO: 758751 - DNA, 25 bp, Homo sapien
tcatccagggctgaatcacaaggcc

SEQ ID NO: 758752 - DNA, 25 bp, Homo sapien
taagtaatgtggagacaactcatcc

SEQ ID NO: 758753 - DNA, 25 bp, Homo sapien
taactttactaggcaccgtgaccat

SEQ ID NO: 758754 - DNA, 25 bp, Homo sapien
ctcatcctgggaataactttactag

SEQ ID NO: 758755 - DNA, 25 bp, Homo sapien
ataactttactaggcaccgtgacca

SEQ ID NO: 758756 - DNA, 25 bp, Homo sapien
ggctgaggtgtaactcatctgtgct

SEQ ID NO: 758757 - DNA, 25 bp, Homo sapien
cggctgaggtgtaactcatctgtgc

SEQ ID NO: 758758 - DNA, 25 bp, Homo sapien
ctggcagacacagaggaagggtgat

SEQ ID NO: 758759 - DNA, 25 bp, Homo sapien
tattttgcgggtaagagcgtcagtg

SEQ ID NO: 758760 - DNA, 25 bp, Homo sapien
tcatgaggaaaccataggtgggtcc

SEQ ID NO: 758761 - DNA, 25 bp, Homo sapien
aatgttctagtaggaccttgctggg

SEQ ID NO: 758762 - DNA, 25 bp, Homo sapien
taggtgggtccatatattttgcggg

SEQ ID NO: 758763 - DNA, 25 bp, Homo sapien
tcgttgtgggcagtatcagtctcac

SEQ ID NO: 758764 - DNA, 25 bp, Homo sapien
ggaccacgatagaacaacttagcaa

SEQ ID NO: 758765 - DNA, 25 bp, Homo sapien
tctcacagtcatggtaagaatgtag

SEQ ID NO: 758766 - DNA, 25 bp, Homo sapien
tcatcactcagtactggtatcgttg

SEQ ID NO: 758767 - DNA, 25 bp, Homo sapien
tacgtgacaatgaagaaacacatgc

SEQ ID NO: 758768 - DNA, 25 bp, Homo sapien
acgtgacaatgaagaaacacatgct

SEQ ID NO: 758769 - DNA, 25 bp, Homo sapien
ctgtacgtgacaatgaagaaacaca

SEQ ID NO: 758770 - DNA, 25 bp, Homo sapien
gacaatgaagaaacacatgctcaag

SEQ ID NO: 758771 - DNA, 25 bp, Homo sapien
tctgatggcagcacaatagtaagct

SEQ ID NO: 758772 - DNA, 25 bp, Homo sapien
taagctgcaccgcttctgtggacat

SEQ ID NO: 758773 - DNA, 25 bp, Homo sapien
ggccacaaagtagagcttttcttga

SEQ ID NO: 758774 - DNA, 25 bp, Homo sapien
tgaacacataaaacctctccctcaa

SEQ ID NO: 758775 - DNA, 25 bp, Homo sapien
tcacaagaggaccagtagctccagg

SEQ ID NO: 758776 - DNA, 25 bp, Homo sapien
tgaaatgacatctcaggccatgtgg

SEQ ID NO: 758777 - DNA, 25 bp, Homo sapien
tatacggtgtgctaacctcacatgc

SEQ ID NO: 758778 - DNA, 25 bp, Homo sapien
gaagccctaagatgtgtccaaatga

SEQ ID NO: 758779 - DNA, 25 bp, Homo sapien
tgagtgcgacttctagccttccaga

SEQ ID NO: 758780 - DNA, 25 bp, Homo sapien
cataatgaaaaggtggcatgtgtcc

SEQ ID NO: 758781 - DNA, 25 bp, Homo sapien
cactctgtgctcaggtaggaaagca

SEQ ID NO: 758782 - DNA, 25 bp, Homo sapien
gatctacgcagcaagtcataatgaa

SEQ ID NO: 758783 - DNA, 25 bp, Homo sapien
taactggggacttgtggactatgac

SEQ ID NO: 758784 - DNA, 25 bp, Homo sapien
tgctctttgagctaaagcctgttct

SEQ ID NO: 758785 - DNA, 25 bp, Homo sapien
tcaggctcccagtaccctcaggaag

SEQ ID NO: 758786 - DNA, 25 bp, Homo sapien
tcaggaagcccctcaagatgctgct

SEQ ID NO: 758787 - DNA, 25 bp, Homo sapien
gatcatctgccggtggactgtgttc

SEQ ID NO: 758788 - DNA, 25 bp, Homo sapien
catctgccggtggactgtgttctgg

SEQ ID NO: 758789 - DNA, 25 bp, Homo sapien
tctgccggtggactgtgttctggca

SEQ ID NO: 758790 - DNA, 25 bp, Homo sapien
cagatcatctgccggtggactgtgt

SEQ ID NO: 758791 - DNA, 25 bp, Homo sapien
taagtcacagccaccgctggtcctg

SEQ ID NO: 758792 - DNA, 25 bp, Homo sapien
ctaatggagccagctggtgctgtct

SEQ ID NO: 758793 - DNA, 25 bp, Homo sapien
tcttctgcatcagaggcccttgcta

SEQ ID NO: 758794 - DNA, 25 bp, Homo sapien
ttgctaagtcacagccaccgctggt

SEQ ID NO: 758795 - DNA, 25 bp, Homo sapien
aattaacaggttcagatcggcatag

SEQ ID NO: 758796 - DNA, 25 bp, Homo sapien
gcctgtgaccgagagcctaatagaa

SEQ ID NO: 758797 - DNA, 25 bp, Homo sapien
gaaccatcagcgtggctttctgggc

SEQ ID NO: 758798 - DNA, 25 bp, Homo sapien
gggtcctgctcttgcggttgcgtaa

SEQ ID NO: 758799 - DNA, 25 bp, Homo sapien
ccggcccggaaactggcgctgcact

SEQ ID NO: 758800 - DNA, 25 bp, Homo sapien
gacctgcgttcctctctcgcggttg

SEQ ID NO: 758801 - DNA, 25 bp, Homo sapien
cggcccggaaactggcgctgcactg

SEQ ID NO: 758802 - DNA, 25 bp, Homo sapien
ctgcactgggcgctggcggggcgac

SEQ ID NO: 758803 - DNA, 25 bp, Homo sapien
tagtgaaaccggacgaaggcgaagc

SEQ ID NO: 758804 - DNA, 25 bp, Homo sapien
gcgtcttgcgcgtcgctccggtagt

SEQ ID NO: 758805 - DNA, 25 bp, Homo sapien
gcgtcgctccggtagtgaaaccgga

SEQ ID NO: 758806 - DNA, 25 bp, Homo sapien
tgatcatgccatccacgtcgggagg

SEQ ID NO: 758807 - DNA, 25 bp, Homo sapien
aggtcccggcggccatagcgcgcca

SEQ ID NO: 758808 - DNA, 25 bp, Homo sapien
agtgagatctgctgcgggacctaga

SEQ ID NO: 758809 - DNA, 25 bp, Homo sapien
gatctgctgcgggacctagagtagc

SEQ ID NO: 758810 - DNA, 25 bp, Homo sapien
ccccatagtgagatctgctgcggga

SEQ ID NO: 758811 - DNA, 25 bp, Homo sapien
tctgctgcgggacctagagtagctg

SEQ ID NO: 758812 - DNA, 25 bp, Homo sapien
cgagatctcctgtagggagacgggc

SEQ ID NO: 758813 - DNA, 25 bp, Homo sapien
tccctgtagtgagattccctgtagg

SEQ ID NO: 758814 - DNA, 25 bp, Homo sapien
ttccctgtagtgagattccctgtag

SEQ ID NO: 758815 - DNA, 25 bp, Homo sapien
atctcctgtagggagacgggctata

SEQ ID NO: 758816 - DNA, 25 bp, Homo sapien
ttgatggagatcgagagcgagaccc

SEQ ID NO: 758817 - DNA, 25 bp, Homo sapien
gattgatggagatcgagagcgagac

SEQ ID NO: 758818 - DNA, 25 bp, Homo sapien
ggagattgatggagatcgagagcga

SEQ ID NO: 758819 - DNA, 25 bp, Homo sapien
atggagatcgagagcgagacccaga

SEQ ID NO: 758820 - DNA, 25 bp, Homo sapien
gatctagacatggaccgtgagcagg

SEQ ID NO: 758821 - DNA, 25 bp, Homo sapien
agatctagacatggaccgtgagcag

SEQ ID NO: 758822 - DNA, 25 bp, Homo sapien
attcaatgatagaaacatggttata

SEQ ID NO: 758823 - DNA, 25 bp, Homo sapien
ccatgttataagtacctacacttac

SEQ ID NO: 758824 - DNA, 25 bp, Homo sapien
gttcatgtatgttgacatgatcaga

SEQ ID NO: 758825 - DNA, 25 bp, Homo sapien
tgttataagtacctacacttacaaa

SEQ ID NO: 758826 - DNA, 25 bp, Homo sapien
tgcttccggaagtactgaagctcat

SEQ ID NO: 758827 - DNA, 25 bp, Homo sapien
ccaggacttgaatactaggggagaa

SEQ ID NO: 758828 - DNA, 25 bp, Homo sapien
catgtgtcagacttcaaagtatcca

SEQ ID NO: 758829 - DNA, 25 bp, Homo sapien
gagaatacttcagggacaagtcccc

SEQ ID NO: 758830 - DNA, 25 bp, Homo sapien
catcactgctgaacatgggccgagg

SEQ ID NO: 758831 - DNA, 25 bp, Homo sapien
aatgccataatggaaagcaatgcct

SEQ ID NO: 758832 - DNA, 25 bp, Homo sapien
tgcccaatcctacatgccagggaga

SEQ ID NO: 758833 - DNA, 25 bp, Homo sapien
gcatattggtcagcagagactccgg

SEQ ID NO: 758834 - DNA, 25 bp, Homo sapien
tgttgccacgagtaagcacagctcc

SEQ ID NO: 758835 - DNA, 25 bp, Homo sapien
gcttgttcccgtgtgaacgatctgg

SEQ ID NO: 758836 - DNA, 25 bp, Homo sapien
cattcttgatcgtagtgaagtttcc

SEQ ID NO: 758837 - DNA, 25 bp, Homo sapien
tgaatcgtgcagaatgtttccctga

SEQ ID NO: 758838 - DNA, 25 bp, Homo sapien
tgccacgtgcggctgtgagagtctg

SEQ ID NO: 758839 - DNA, 25 bp, Homo sapien
ctcttggtggtgtactgatgctagg

SEQ ID NO: 758840 - DNA, 25 bp, Homo sapien
gctgccttctgccacgtgcggctgt

SEQ ID NO: 758841 - DNA, 25 bp, Homo sapien
gctagggcagtgacatctgctactg

SEQ ID NO: 758842 - DNA, 25 bp, Homo sapien
ttccaagaagactagttgaagaagc

SEQ ID NO: 758843 - DNA, 25 bp, Homo sapien
agaagctgcctttgggtgaatccgt

SEQ ID NO: 758844 - DNA, 25 bp, Homo sapien
cctttgggtgaatccgtcacatctg

SEQ ID NO: 758845 - DNA, 25 bp, Homo sapien
tgaatccgtcacatctggcaatatt

SEQ ID NO: 758846 - DNA, 25 bp, Homo sapien
taagggggggaagacctgtgactgc

SEQ ID NO: 758847 - DNA, 25 bp, Homo sapien
ggaagacctgtgactgcttcaaaag

SEQ ID NO: 758848 - DNA, 25 bp, Homo sapien
agacctgtgactgcttcaaaaggaa

SEQ ID NO: 758849 - DNA, 25 bp, Homo sapien
ctgtgactgcttcaaaaggaatcat

SEQ ID NO: 758850 - DNA, 25 bp, Homo sapien
atcagtgtctcctgtgcaataaaaa

SEQ ID NO: 758851 - DNA, 25 bp, Homo sapien
gtgtctcctgtgcaataaaaagtgt

SEQ ID NO: 758852 - DNA, 25 bp, Homo sapien
tgtctcctgtgcaataaaaagtgtg

SEQ ID NO: 758853 - DNA, 25 bp, Homo sapien
gttgtgaacgttacgaaggttgtca

SEQ ID NO: 758854 - DNA, 25 bp, Homo sapien
caacgctgtgatgggaatcaagttg

SEQ ID NO: 758855 - DNA, 25 bp, Homo sapien
gaatcaagttgtgaacgttacgaag

SEQ ID NO: 758856 - DNA, 25 bp, Homo sapien
cgttacgaaggttgtcacagcttgc

SEQ ID NO: 758857 - DNA, 25 bp, Homo sapien
gatgaggaagatggatactcgctcc

SEQ ID NO: 758858 - DNA, 25 bp, Homo sapien
accaagatgaggaagatggatactc

SEQ ID NO: 758859 - DNA, 25 bp, Homo sapien
cgtgaccaagatgaggaagatggat

SEQ ID NO: 758860 - DNA, 25 bp, Homo sapien
ggaagatggatactcgctccaccca

SEQ ID NO: 758861 - DNA, 25 bp, Homo sapien
tgggtgtcatgggctcatcaatctc

SEQ ID NO: 758862 - DNA, 25 bp, Homo sapien
ctgtgggtgtcatgggctcatcaat

SEQ ID NO: 758863 - DNA, 25 bp, Homo sapien
ggctcatcaatctcattggctgctg

SEQ ID NO: 758864 - DNA, 25 bp, Homo sapien
tgtgggtgtcatgggctcatcaatc

SEQ ID NO: 758865 - DNA, 25 bp, Homo sapien
aaggagcgacctctgactgaggctg

SEQ ID NO: 758866 - DNA, 25 bp, Homo sapien
taaggagcgacctctgactgaggct

SEQ ID NO: 758867 - DNA, 25 bp, Homo sapien
aggagcgacctctgactgaggctgt

SEQ ID NO: 758868 - DNA, 25 bp, Homo sapien
ttaaggagcgacctctgactgaggc

SEQ ID NO: 758869 - DNA, 25 bp, Homo sapien
aaggctgttgtcagtggacaggtac

SEQ ID NO: 758870 - DNA, 25 bp, Homo sapien
gcctggcagacgctgaagcatacat

SEQ ID NO: 758871 - DNA, 25 bp, Homo sapien
gtccttgagagagctccagccaagg

SEQ ID NO: 758872 - DNA, 25 bp, Homo sapien
gacaggtacacaggttaggacagat

SEQ ID NO: 758873 - DNA, 25 bp, Homo sapien
actggttggctgaaatggctctatc

SEQ ID NO: 758874 - DNA, 25 bp, Homo sapien
tggttggctgaaatggctctatcct

SEQ ID NO: 758875 - DNA, 25 bp, Homo sapien
gactggttggctgaaatggctctat

SEQ ID NO: 758876 - DNA, 25 bp, Homo sapien
tgactggttggctgaaatggctcta

SEQ ID NO: 758877 - DNA, 25 bp, Homo sapien
gaaatctgggctggcaaacaattta

SEQ ID NO: 758878 - DNA, 25 bp, Homo sapien
ttgagggtccctttagcatgtgatt

SEQ ID NO: 758879 - DNA, 25 bp, Homo sapien
gggaaatctgggctggcaaacaatt

SEQ ID NO: 758880 - DNA, 25 bp, Homo sapien
caatttagaagtcgtggggttgaat

SEQ ID NO: 758881 - DNA, 25 bp, Homo sapien
ctactggtccccattgcattttttt

SEQ ID NO: 758882 - DNA, 25 bp, Homo sapien
gacatcttgagacatcgtccaactc

SEQ ID NO: 758883 - DNA, 25 bp, Homo sapien
tgagacatcgtccaactcctcaggc

SEQ ID NO: 758884 - DNA, 25 bp, Homo sapien
gatatgtgtcgaggacatcttgaga

SEQ ID NO: 758885 - DNA, 25 bp, Homo sapien
tactgatatgtgtcgaggacatctt

SEQ ID NO: 758886 - DNA, 25 bp, Homo sapien
agagaccagtcaacaatatcagata

SEQ ID NO: 758887 - DNA, 25 bp, Homo sapien
ggaaggcatggacatgagctgacat

SEQ ID NO: 758888 - DNA, 25 bp, Homo sapien
gagatatcattagggcttgtagaga

SEQ ID NO: 758889 - DNA, 25 bp, Homo sapien
catgagctgacatgaggccactgaa

SEQ ID NO: 758890 - DNA, 25 bp, Homo sapien
gaagaagaagcttcgaaacgagcac

SEQ ID NO: 758891 - DNA, 25 bp, Homo sapien
gcacagccctgcagaaagtagcgct

SEQ ID NO: 758892 - DNA, 25 bp, Homo sapien
aagcttcgaaacgagcacagccctg

SEQ ID NO: 758893 - DNA, 25 bp, Homo sapien
gaagaagcttcgaaacgagcacagc

SEQ ID NO: 758894 - DNA, 25 bp, Homo sapien
ggttttaggtaagtcatcagcctct

SEQ ID NO: 758895 - DNA, 25 bp, Homo sapien
gaacctggcagcccggagagcagca

SEQ ID NO: 758896 - DNA, 25 bp, Homo sapien
ctggaacctggcagcccggagagca

SEQ ID NO: 758897 - DNA, 25 bp, Homo sapien
acctggcagcccggagagcagcatg

SEQ ID NO: 758898 - DNA, 25 bp, Homo sapien
ctggcagcccggagagcagcatggg

SEQ ID NO: 758899 - DNA, 25 bp, Homo sapien
caaagctgctgatgcggatggcaga

SEQ ID NO: 758900 - DNA, 25 bp, Homo sapien
agacaaagctgctgatgcggatggc

SEQ ID NO: 758901 - DNA, 25 bp, Homo sapien
actctggcaacagacaaagctgctg

SEQ ID NO: 758902 - DNA, 25 bp, Homo sapien
cagatctccactctggcaacagaca

SEQ ID NO: 758903 - DNA, 25 bp, Homo sapien
gggccactccgagctgtcagaggat

SEQ ID NO: 758904 - DNA, 25 bp, Homo sapien
ggacatctccggaatggcctttgga

SEQ ID NO: 758905 - DNA, 25 bp, Homo sapien
cagaggatctactggctgaggacat

SEQ ID NO: 758906 - DNA, 25 bp, Homo sapien
gggcaagctggaataatcgcacaac

SEQ ID NO: 758907 - DNA, 25 bp, Homo sapien
ctactgccactcagctttccaaagc

SEQ ID NO: 758908 - DNA, 25 bp, Homo sapien
tactgccactcagctttccaaagct

SEQ ID NO: 758909 - DNA, 25 bp, Homo sapien
agctttccaaagctgatgctcgcca

SEQ ID NO: 758910 - DNA, 25 bp, Homo sapien
ctcagctttccaaagctgatgctcg

SEQ ID NO: 758911 - DNA, 25 bp, Homo sapien
gccagatgatgagctgttgatattg

SEQ ID NO: 758912 - DNA, 25 bp, Homo sapien
ctgccagatgatgagctgttgatat

SEQ ID NO: 758913 - DNA, 25 bp, Homo sapien
tgccagatgatgagctgttgatatt

SEQ ID NO: 758914 - DNA, 25 bp, Homo sapien
agtgtgctgtcgatgtcacagccag

SEQ ID NO: 758915 - DNA, 25 bp, Homo sapien
gtgtgctgtcgatgtcacagccagc

SEQ ID NO: 758916 - DNA, 25 bp, Homo sapien
ctgtgagtgtgctgtcgatgtcaca

SEQ ID NO: 758917 - DNA, 25 bp, Homo sapien
tggcctgtgagtgtgctgtcgatgt

SEQ ID NO: 758918 - DNA, 25 bp, Homo sapien
tccttgctgacatatggaagagtct

SEQ ID NO: 758919 - DNA, 25 bp, Homo sapien
tgctgacatatggaagagtctcctc

SEQ ID NO: 758920 - DNA, 25 bp, Homo sapien
cactccttgctgacatatggaagag

SEQ ID NO: 758921 - DNA, 25 bp, Homo sapien
gacatatggaagagtctcctcccca

SEQ ID NO: 758922 - DNA, 25 bp, Homo sapien
tcatgggtgtgtgcgagggcttctg

SEQ ID NO: 758923 - DNA, 25 bp, Homo sapien
cgctgagggctgcaatgcatgctgt

SEQ ID NO: 758924 - DNA, 25 bp, Homo sapien
aatgcatgctgtcatgggtgtgtgc

SEQ ID NO: 758925 - DNA, 25 bp, Homo sapien
ctttagttccttgttaccgctgagg

SEQ ID NO: 758926 - DNA, 25 bp, Homo sapien
gacagttcctaatataggtggctcc

SEQ ID NO: 758927 - DNA, 25 bp, Homo sapien
cagttcctaatataggtggctccat

SEQ ID NO: 758928 - DNA, 25 bp, Homo sapien
gggatggtgacagttcctaatatag

SEQ ID NO: 758929 - DNA, 25 bp, Homo sapien
ggtgacagttcctaatataggtggc

SEQ ID NO: 758930 - DNA, 25 bp, Homo sapien
gtggtacagctgacctctgatttca

SEQ ID NO: 758931 - DNA, 25 bp, Homo sapien
caaaggtcagatgaccatactgatc

SEQ ID NO: 758932 - DNA, 25 bp, Homo sapien
agatgagcttatccctcaagcagag

SEQ ID NO: 758933 - DNA, 25 bp, Homo sapien
catactgatcttgtcttgacttctc

SEQ ID NO: 758934 - DNA, 25 bp, Homo sapien
tgttcatcttcgtccactgccctgt

SEQ ID NO: 758935 - DNA, 25 bp, Homo sapien
ctgttcatcttcgtccactgccctg

SEQ ID NO: 758936 - DNA, 25 bp, Homo sapien
gttcatcttcgtccactgccctgtg

SEQ ID NO: 758937 - DNA, 25 bp, Homo sapien
ttttcattcgatcataacaagaaac

SEQ ID NO: 758938 - DNA, 25 bp, Homo sapien
tttttcattcgatcataacaagaaa

SEQ ID NO: 758939 - DNA, 25 bp, Homo sapien
ttttttcattcgatcataacaagaa

SEQ ID NO: 758940 - DNA, 25 bp, Homo sapien
gaagcaagtttccacgatttctgaa

SEQ ID NO: 758941 - DNA, 25 bp, Homo sapien
gagtaaatgcggagagttcacgaac

SEQ ID NO: 758942 - DNA, 25 bp, Homo sapien
ccaacgcatgttatagccagggtcc

SEQ ID NO: 758943 - DNA, 25 bp, Homo sapien
cctccagtgttaagctatagccatg

SEQ ID NO: 758944 - DNA, 25 bp, Homo sapien
tcaggaagccctgcaaacgtgcttt

SEQ ID NO: 758945 - DNA, 25 bp, Homo sapien
gaagtcagagcaaactagggtctca

SEQ ID NO: 758946 - DNA, 25 bp, Homo sapien
catgtttaacccaaagagtgcaggc

SEQ ID NO: 758947 - DNA, 25 bp, Homo sapien
tcagtattgagaaacgcagcctgcc

SEQ ID NO: 758948 - DNA, 25 bp, Homo sapien
gcttaaaaggaagactgtggcatgg

SEQ ID NO: 758949 - DNA, 25 bp, Homo sapien
gaaaatagggctccaactgtaatga

SEQ ID NO: 758950 - DNA, 25 bp, Homo sapien
cagttgaccttaagctgtagaacaa

SEQ ID NO: 758951 - DNA, 25 bp, Homo sapien
ggattcccatttcagccctggctgg

SEQ ID NO: 758952 - DNA, 25 bp, Homo sapien
ctactggccatgtgccagatagagc

SEQ ID NO: 758953 - DNA, 25 bp, Homo sapien
gacacggttccagcagtgtgctact

SEQ ID NO: 758954 - DNA, 25 bp, Homo sapien
tccgtaagagggaatcagggagcgg

SEQ ID NO: 758955 - DNA, 25 bp, Homo sapien
tcttgagggctttagagggcttcat

SEQ ID NO: 758956 - DNA, 25 bp, Homo sapien
gcagcagctcaacaatcccgggatt

SEQ ID NO: 758957 - DNA, 25 bp, Homo sapien
gcagctcaacaatcccgggattctt

SEQ ID NO: 758958 - DNA, 25 bp, Homo sapien
ggattctttcccgggcctgagctct

SEQ ID NO: 758959 - DNA, 25 bp, Homo sapien
cgggattctttcccgggcctgagct

SEQ ID NO: 758960 - DNA, 25 bp, Homo sapien
cctaaaaggacacggcagagtggtg

SEQ ID NO: 758961 - DNA, 25 bp, Homo sapien
tctcagcagatagggaggcctaaaa

SEQ ID NO: 758962 - DNA, 25 bp, Homo sapien
gcatccatatgaagggcggttccct

SEQ ID NO: 758963 - DNA, 25 bp, Homo sapien
gagccctagtttcatgtcctgtaca

SEQ ID NO: 758964 - DNA, 25 bp, Homo sapien
tatcaggcacacctgtgtgatgtcg

SEQ ID NO: 758965 - DNA, 25 bp, Homo sapien
gatgtcgcgctttattcctagaaga

SEQ ID NO: 758966 - DNA, 25 bp, Homo sapien
ggagcttccagaacctatcaggcac

SEQ ID NO: 758967 - DNA, 25 bp, Homo sapien
gactttaccttctagtgcccagata

SEQ ID NO: 758968 - DNA, 25 bp, Homo sapien
tccaggtgtcgttatttccgtactg

SEQ ID NO: 758969 - DNA, 25 bp, Homo sapien
tcagatccgtgctagggacacaggg

SEQ ID NO: 758970 - DNA, 25 bp, Homo sapien
ccagttatgggcatcatcctgccag

SEQ ID NO: 758971 - DNA, 25 bp, Homo sapien
ccgtactgtgtgttataactgagca

SEQ ID NO: 758972 - DNA, 25 bp, Homo sapien
gcagcaacgttggtgaagatccgca

SEQ ID NO: 758973 - DNA, 25 bp, Homo sapien
ccttggcatggacggcccctatgag

SEQ ID NO: 758974 - DNA, 25 bp, Homo sapien
tgaagatccgcagggcaccctcgtt

SEQ ID NO: 758975 - DNA, 25 bp, Homo sapien
tatctgacggttttggcagcaacgt

SEQ ID NO: 758976 - DNA, 25 bp, Homo sapien
tcgatggcagcctttacgcgaaggt

SEQ ID NO: 758977 - DNA, 25 bp, Homo sapien
tatttgtttagacagatgcacacgc

SEQ ID NO: 758978 - DNA, 25 bp, Homo sapien
ccattcagagggtgtgaggctcact

SEQ ID NO: 758979 - DNA, 25 bp, Homo sapien
tgactgaaagcctctctccggtttt

SEQ ID NO: 758980 - DNA, 25 bp, Homo sapien
tggaggtgcaccctcatggcctgca

SEQ ID NO: 758981 - DNA, 25 bp, Homo sapien
atggaggtgcaccctcatggcctgc

SEQ ID NO: 758982 - DNA, 25 bp, Homo sapien
ggaggtgcaccctcatggcctgcat

SEQ ID NO: 758983 - DNA, 25 bp, Homo sapien
tcttccgtgcgtagaacctttctct

SEQ ID NO: 758984 - DNA, 25 bp, Homo sapien
tgtgtcttccgtgcgtagaaccttt

SEQ ID NO: 758985 - DNA, 25 bp, Homo sapien
ctgtgtcttccgtgcgtagaacctt

SEQ ID NO: 758986 - DNA, 25 bp, Homo sapien
tgtcttccgtgcgtagaacctttct

SEQ ID NO: 758987 - DNA, 25 bp, Homo sapien
gtgtcctgtgcatgcagacgggtct

SEQ ID NO: 758988 - DNA, 25 bp, Homo sapien
tatcccactggacggggtgtcctgt

SEQ ID NO: 758989 - DNA, 25 bp, Homo sapien
cagacgggtctacaaggtggatggc

SEQ ID NO: 758990 - DNA, 25 bp, Homo sapien
ggtggatggcttgtttgtatttctg

SEQ ID NO: 758991 - DNA, 25 bp, Homo sapien
tggccataccgcgttctcagagtac

SEQ ID NO: 758992 - DNA, 25 bp, Homo sapien
cgcgttctcagagtactgttccgag

SEQ ID NO: 758993 - DNA, 25 bp, Homo sapien
tgaagtggccataccgcgttctcag

SEQ ID NO: 758994 - DNA, 25 bp, Homo sapien
tcagagtactgttccgagctccagg

SEQ ID NO: 758995 - DNA, 25 bp, Homo sapien
cagaatccacgctttggggctccca

SEQ ID NO: 758996 - DNA, 25 bp, Homo sapien
gggctgctagagcaggcagacagag

SEQ ID NO: 758997 - DNA, 25 bp, Homo sapien
tttgtctgcagccttcgcaataaga

SEQ ID NO: 758998 - DNA, 25 bp, Homo sapien
ctgcagccttcgcaataagacacag

SEQ ID NO: 758999 - DNA, 25 bp, Homo sapien
gggctctgccactttaagtggatac

SEQ ID NO: 759000 - DNA, 25 bp, Homo sapien
aggacgagggccgtggcattgccag

SEQ ID NO: 759001 - DNA, 25 bp, Homo sapien
gacgagggccgtggcattgccaggc

SEQ ID NO: 759002 - DNA, 25 bp, Homo sapien
agggccgtggcattgccaggcctgg

SEQ ID NO: 759003 - DNA, 25 bp, Homo sapien
gggggacggcagtcgtgtcagtgtt

SEQ ID NO: 759004 - DNA, 25 bp, Homo sapien
acggcagtcgtgtcagtgttccctg

SEQ ID NO: 759005 - DNA, 25 bp, Homo sapien
gcgggggacggcagtcgtgtcagtg

SEQ ID NO: 759006 - DNA, 25 bp, Homo sapien
gggacggcagtcgtgtcagtgttcc

SEQ ID NO: 759007 - DNA, 25 bp, Homo sapien
ggagccggccttgaatccgttccaa

SEQ ID NO: 759008 - DNA, 25 bp, Homo sapien
tggctttgatgtgtgagcgcaacat

SEQ ID NO: 759009 - DNA, 25 bp, Homo sapien
gcaagtgattacaaacgccctgtct

SEQ ID NO: 759010 - DNA, 25 bp, Homo sapien
ttctatactcagaaaggagccggcc

SEQ ID NO: 759011 - DNA, 25 bp, Homo sapien
gaattacaatattgcgaacatctga

SEQ ID NO: 759012 - DNA, 25 bp, Homo sapien
aattacaatattgcgaacatctgaa

SEQ ID NO: 759013 - DNA, 25 bp, Homo sapien
cagcgtgcggcctgcatgagaagat

SEQ ID NO: 759014 - DNA, 25 bp, Homo sapien
tcaccagcctttatcctgagcacgt

SEQ ID NO: 759015 - DNA, 25 bp, Homo sapien
tatcctgagcacgttcagcgtgcgg

SEQ ID NO: 759016 - DNA, 25 bp, Homo sapien
tgagaagatgcggtggacacgtgag

SEQ ID NO: 759017 - DNA, 25 bp, Homo sapien
cagaaaagagactaagggattcatg

SEQ ID NO: 759018 - DNA, 25 bp, Homo sapien
caaagcagaaacatgataagttgcc

SEQ ID NO: 759019 - DNA, 25 bp, Homo sapien
gtgacttttcctacttcctggcaac

SEQ ID NO: 759020 - DNA, 25 bp, Homo sapien
ttgcagccattagagtaacaaagca

SEQ ID NO: 759021 - DNA, 25 bp, Homo sapien
tatttcagaaactcttggcggcagt

SEQ ID NO: 759022 - DNA, 25 bp, Homo sapien
actcttggcggcagttccagttcag

SEQ ID NO: 759023 - DNA, 25 bp, Homo sapien
gagtctcctcttgacaagcacagta

SEQ ID NO: 759024 - DNA, 25 bp, Homo sapien
tccagttcagtatggggcctggttc

SEQ ID NO: 759025 - DNA, 25 bp, Homo sapien
gacctccaagtgtttgatccacagc

SEQ ID NO: 759026 - DNA, 25 bp, Homo sapien
ggccagtttgtcacgtggccaggat

SEQ ID NO: 759027 - DNA, 25 bp, Homo sapien
gagaaagggagtttagtgacctcat

SEQ ID NO: 759028 - DNA, 25 bp, Homo sapien
cagctgtcattttaccggaagagaa

SEQ ID NO: 759029 - DNA, 25 bp, Homo sapien
cacgacataggcttggtttgctgca

SEQ ID NO: 759030 - DNA, 25 bp, Homo sapien
gcagctgactctactcttcacactg

SEQ ID NO: 759031 - DNA, 25 bp, Homo sapien
ctgcaggatacgcacccgtgccagg

SEQ ID NO: 759032 - DNA, 25 bp, Homo sapien
gtgccaggcgcacagtgctgaacgt

SEQ ID NO: 759033 - DNA, 25 bp, Homo sapien
gggacgtcagtgaaggatgctccat

SEQ ID NO: 759034 - DNA, 25 bp, Homo sapien
cccatggcaatgggacgtcagtgaa

SEQ ID NO: 759035 - DNA, 25 bp, Homo sapien
gacgtcagtgaaggatgctccattt

SEQ ID NO: 759036 - DNA, 25 bp, Homo sapien
tcagtgaaggatgctccatttgaaa

SEQ ID NO: 759037 - DNA, 25 bp, Homo sapien
tcacacatggcccggcagctgtgat

SEQ ID NO: 759038 - DNA, 25 bp, Homo sapien
tgatctgtgtctctcgtcaccgggc

SEQ ID NO: 759039 - DNA, 25 bp, Homo sapien
acatggcccggcagctgtgatctgt

SEQ ID NO: 759040 - DNA, 25 bp, Homo sapien
tgtgtctctcgtcaccgggctgttc

SEQ ID NO: 759041 - DNA, 25 bp, Homo sapien
gcaggggaaggagcgaaacgtagga

SEQ ID NO: 759042 - DNA, 25 bp, Homo sapien
gagcgaaacgtaggaggagctgttt

SEQ ID NO: 759043 - DNA, 25 bp, Homo sapien
aaggagcgaaacgtaggaggagctg

SEQ ID NO: 759044 - DNA, 25 bp, Homo sapien
ggaaggagcgaaacgtaggaggagc

SEQ ID NO: 759045 - DNA, 25 bp, Homo sapien
tgccgagacattaacacgaagaggg

SEQ ID NO: 759046 - DNA, 25 bp, Homo sapien
caggctctcccacctggtgggctat

SEQ ID NO: 759047 - DNA, 25 bp, Homo sapien
ccagagctgccgagacattaacacg

SEQ ID NO: 759048 - DNA, 25 bp, Homo sapien
tggttctggggactcccacactcac

SEQ ID NO: 759049 - DNA, 25 bp, Homo sapien
ttattgctgctgttcacagtcagcc

SEQ ID NO: 759050 - DNA, 25 bp, Homo sapien
gcatttggcttcacatccaggcaga

SEQ ID NO: 759051 - DNA, 25 bp, Homo sapien
tgcatttggcttcacatccaggcag

SEQ ID NO: 759052 - DNA, 25 bp, Homo sapien
tatgcatttggcttcacatccaggc

SEQ ID NO: 759053 - DNA, 25 bp, Homo sapien
atttggcttcacatccaggcagaat

SEQ ID NO: 759054 - DNA, 25 bp, Homo sapien
aggaaggattcctctaaggctttgc

SEQ ID NO: 759055 - DNA, 25 bp, Homo sapien
tcaggtagggaacataaatctggaa

SEQ ID NO: 759056 - DNA, 25 bp, Homo sapien
taaatctggaaaagaagtgcacgtc

SEQ ID NO: 759057 - DNA, 25 bp, Homo sapien
gaacttgccaccctggagcttcctt

SEQ ID NO: 759058 - DNA, 25 bp, Homo sapien
gctttttgggcagaaacttcactca

SEQ ID NO: 759059 - DNA, 25 bp, Homo sapien
cctcaggtcactgaaggcatcttga

SEQ ID NO: 759060 - DNA, 25 bp, Homo sapien
caggtcactgaaggcatcttgagct

SEQ ID NO: 759061 - DNA, 25 bp, Homo sapien
ttcctcaggtcactgaaggcatctt

SEQ ID NO: 759062 - DNA, 25 bp, Homo sapien
caaaagggatactcatgtagaaaac

SEQ ID NO: 759063 - DNA, 25 bp, Homo sapien
ctgcaaaagggatactcatgtagaa

SEQ ID NO: 759064 - DNA, 25 bp, Homo sapien
aagggatactcatgtagaaaaccac

SEQ ID NO: 759065 - DNA, 25 bp, Homo sapien
gatactcatgtagaaaaccacacac

SEQ ID NO: 759066 - DNA, 25 bp, Homo sapien
gctgccaagtctgatgactggacgt

SEQ ID NO: 759067 - DNA, 25 bp, Homo sapien
gtaagcagtgtttcgaatgaatgaa

SEQ ID NO: 759068 - DNA, 25 bp, Homo sapien
tgtaagcagtgtttcgaatgaatga

SEQ ID NO: 759069 - DNA, 25 bp, Homo sapien
aatgctgccaagtctgatgactgga

SEQ ID NO: 759070 - DNA, 25 bp, Homo sapien
tgaagtattgtcgtgtggtccctgg

SEQ ID NO: 759071 - DNA, 25 bp, Homo sapien
aagtattgtcgtgtggtccctggac

SEQ ID NO: 759072 - DNA, 25 bp, Homo sapien
tggctgaagtattgtcgtgtggtcc

SEQ ID NO: 759073 - DNA, 25 bp, Homo sapien
caaaggcacctttggctgaagtatt

SEQ ID NO: 759074 - DNA, 25 bp, Homo sapien
atttctctgcgctggggatctcttc

SEQ ID NO: 759075 - DNA, 25 bp, Homo sapien
catttctctgcgctggggatctctt

SEQ ID NO: 759076 - DNA, 25 bp, Homo sapien
tgttcctgaagctattgtcccacct

SEQ ID NO: 759077 - DNA, 25 bp, Homo sapien
aagtggtgggttggatactgttcct

SEQ ID NO: 759078 - DNA, 25 bp, Homo sapien
ccgtcaatgtgagcctcacacaagc

SEQ ID NO: 759079 - DNA, 25 bp, Homo sapien
tgtgagcctcacacaagcaggcgct

SEQ ID NO: 759080 - DNA, 25 bp, Homo sapien
ccctctggagggtgcttcgttgttg

SEQ ID NO: 759081 - DNA, 25 bp, Homo sapien
cagcgcccctctggagggtgcttcg

SEQ ID NO: 759082 - DNA, 25 bp, Homo sapien
cccctctggagggtgcttcgttgtt

SEQ ID NO: 759083 - DNA, 25 bp, Homo sapien
cgcccctctggagggtgcttcgttg

SEQ ID NO: 759084 - DNA, 25 bp, Homo sapien
cgtgggcgatcacactcagattggg

SEQ ID NO: 759085 - DNA, 25 bp, Homo sapien
ctgcgtgggcgatcacactcagatt

SEQ ID NO: 759086 - DNA, 25 bp, Homo sapien
tgggcgatcacactcagattgggag

SEQ ID NO: 759087 - DNA, 25 bp, Homo sapien
gcgtgggcgatcacactcagattgg

SEQ ID NO: 759088 - DNA, 25 bp, Homo sapien
tcagtcatcacagagtggtgtttag

SEQ ID NO: 759089 - DNA, 25 bp, Homo sapien
gtggaggacgatgggtgtggatgct

SEQ ID NO: 759090 - DNA, 25 bp, Homo sapien
tagttagcctgtgcatacagcattc

SEQ ID NO: 759091 - DNA, 25 bp, Homo sapien
tgtgcatacagcattcgggcattgg

SEQ ID NO: 759092 - DNA, 25 bp, Homo sapien
gctgtgattgttcttgcttggcctt

SEQ ID NO: 759093 - DNA, 25 bp, Homo sapien
ttgttcttgcttggccttggccact

SEQ ID NO: 759094 - DNA, 25 bp, Homo sapien
ttcttgcttggccttggccactgtg

SEQ ID NO: 759095 - DNA, 25 bp, Homo sapien
ctgtgattgttcttgcttggccttg

SEQ ID NO: 759096 - DNA, 25 bp, Homo sapien
tccgccttctggtggcggcctctgg

SEQ ID NO: 759097 - DNA, 25 bp, Homo sapien
tgtccttgaaggaggccggtgtctc

SEQ ID NO: 759098 - DNA, 25 bp, Homo sapien
ccactgtccttgaaggaggccggtg

SEQ ID NO: 759099 - DNA, 25 bp, Homo sapien
aaggaggccggtgtctccgccttct

SEQ ID NO: 759100 - DNA, 25 bp, Homo sapien
ctgtgatgttcgttttcatattcct

SEQ ID NO: 759101 - DNA, 25 bp, Homo sapien
catattcctggtagcagaatcttct

SEQ ID NO: 759102 - DNA, 25 bp, Homo sapien
tgtgatgttcgttttcatattcctg

SEQ ID NO: 759103 - DNA, 25 bp, Homo sapien
ggcatagggtgcctttgtggctccc

SEQ ID NO: 759104 - DNA, 25 bp, Homo sapien
atagggtgcctttgtggctccccgg

SEQ ID NO: 759105 - DNA, 25 bp, Homo sapien
ctgcaggcatagggtgcctttgtgg

SEQ ID NO: 759106 - DNA, 25 bp, Homo sapien
caggcatagggtgcctttgtggctc

SEQ ID NO: 759107 - DNA, 25 bp, Homo sapien
gacaggactgtaagggtgtctgtca

SEQ ID NO: 759108 - DNA, 25 bp, Homo sapien
ccaggacaggactgtaagggtgtct

SEQ ID NO: 759109 - DNA, 25 bp, Homo sapien
tcccaggacaggactgtaagggtgt

SEQ ID NO: 759110 - DNA, 25 bp, Homo sapien
ggactgtaagggtgtctgtcatctt

SEQ ID NO: 759111 - DNA, 25 bp, Homo sapien
gcaatggccatagaggtgctctcta

SEQ ID NO: 759112 - DNA, 25 bp, Homo sapien
gccatagaggtgctctctaacctag

SEQ ID NO: 759113 - DNA, 25 bp, Homo sapien
aatggccatagaggtgctctctaac

SEQ ID NO: 759114 - DNA, 25 bp, Homo sapien
tggccatagaggtgctctctaacct

SEQ ID NO: 759115 - DNA, 25 bp, Homo sapien
gcagcctgccgatatgcggctgtgt

SEQ ID NO: 759116 - DNA, 25 bp, Homo sapien
gccgatatgcggctgtgtcctccat

SEQ ID NO: 759117 - DNA, 25 bp, Homo sapien
tgaaggcctgcgcaccaggcacatg

SEQ ID NO: 759118 - DNA, 25 bp, Homo sapien
ggcctgcgcaccaggcacatgggct

SEQ ID NO: 759119 - DNA, 25 bp, Homo sapien
taaactgaatttcgaaggcaactgc

SEQ ID NO: 759120 - DNA, 25 bp, Homo sapien
cgagtgccccgaagtgtgatatttg

SEQ ID NO: 759121 - DNA, 25 bp, Homo sapien
tttctcatctccgagtgccccgaag

SEQ ID NO: 759122 - DNA, 25 bp, Homo sapien
ttcgaaggcaactgctaattctttc

SEQ ID NO: 759123 - DNA, 25 bp, Homo sapien
cttgcaccgtctcggcatctgcggg

SEQ ID NO: 759124 - DNA, 25 bp, Homo sapien
gctccttgcaccgtctcggcatctg

SEQ ID NO: 759125 - DNA, 25 bp, Homo sapien
caactgaggaagtgcgtcagctggg

SEQ ID NO: 759126 - DNA, 25 bp, Homo sapien
tcagctgggcgacaccagctgccag

SEQ ID NO: 759127 - DNA, 25 bp, Homo sapien
ccaccagccagctccgctctgctca

SEQ ID NO: 759128 - DNA, 25 bp, Homo sapien
atcccaccagccagctccgctctgc

SEQ ID NO: 759129 - DNA, 25 bp, Homo sapien
gccagctccgctctgctcagggcag

SEQ ID NO: 759130 - DNA, 25 bp, Homo sapien
agccagctccgctctgctcagggca

SEQ ID NO: 759131 - DNA, 25 bp, Homo sapien
aaacacgagttgagcgtctctcccg

SEQ ID NO: 759132 - DNA, 25 bp, Homo sapien
tatgcctcttgtgaactccagctcc

SEQ ID NO: 759133 - DNA, 25 bp, Homo sapien
gcctgagaattctctgactcccgca

SEQ ID NO: 759134 - DNA, 25 bp, Homo sapien
ttgctcgtatgcctacagaacctac

SEQ ID NO: 759135 - DNA, 25 bp, Homo sapien
cagcctggctgcgaaggtccagctt

SEQ ID NO: 759136 - DNA, 25 bp, Homo sapien
tcggtttgcacccttcttggatata

SEQ ID NO: 759137 - DNA, 25 bp, Homo sapien
tctgcatgtgcctcggtttgcaccc

SEQ ID NO: 759138 - DNA, 25 bp, Homo sapien
ttggatataaaatacaggagtgctg

SEQ ID NO: 759139 - DNA, 25 bp, Homo sapien
gagcacttgcgcctgtgtctacagg

SEQ ID NO: 759140 - DNA, 25 bp, Homo sapien
ccctctgtgtgggagcacttgcgcc

SEQ ID NO: 759141 - DNA, 25 bp, Homo sapien
tgtgggagcacttgcgcctgtgtct

SEQ ID NO: 759142 - DNA, 25 bp, Homo sapien
ttgcgcctgtgtctacaggctccac

SEQ ID NO: 759143 - DNA, 25 bp, Homo sapien
tggtgcctttgtccgcattgcttgc

SEQ ID NO: 759144 - DNA, 25 bp, Homo sapien
ccctgttgtatggtgcctttgtccg

SEQ ID NO: 759145 - DNA, 25 bp, Homo sapien
tgtatggtgcctttgtccgcattgc

SEQ ID NO: 759146 - DNA, 25 bp, Homo sapien
tttgtccgcattgcttgcaccttgg

SEQ ID NO: 759147 - DNA, 25 bp, Homo sapien
accgtggcagccaataacggggctg

SEQ ID NO: 759148 - DNA, 25 bp, Homo sapien
tccgtgctcagagggggaggttcca

SEQ ID NO: 759149 - DNA, 25 bp, Homo sapien
ccaataacggggctgcatggaagga

SEQ ID NO: 759150 - DNA, 25 bp, Homo sapien
catggagcttcgtggaaggcaccgt

SEQ ID NO: 759151 - DNA, 25 bp, Homo sapien
cccaaggctcgtggagacgttgtga

SEQ ID NO: 759152 - DNA, 25 bp, Homo sapien
tgggcgtttgcaagccagacagctc

SEQ ID NO: 759153 - DNA, 25 bp, Homo sapien
taacttggtcaatatgtttcgagtg

SEQ ID NO: 759154 - DNA, 25 bp, Homo sapien
tgtataaaagattctgacaaccctg

SEQ ID NO: 759155 - DNA, 25 bp, Homo sapien
gggctgctctgtctcgaatgggagc

SEQ ID NO: 759156 - DNA, 25 bp, Homo sapien
cacacgggcgcacagagagggctgc

SEQ ID NO: 759157 - DNA, 25 bp, Homo sapien
gctgctctgtctcgaatgggagcat

SEQ ID NO: 759158 - DNA, 25 bp, Homo sapien
tgtgccacacgggcgcacagagagg

SEQ ID NO: 759159 - DNA, 25 bp, Homo sapien
tgggtggggcagggagtgtgggcat

SEQ ID NO: 759160 - DNA, 25 bp, Homo sapien
gtgggtggggcagggagtgtgggca

SEQ ID NO: 759161 - DNA, 25 bp, Homo sapien
gagcacagaggagggacaggcaatt

SEQ ID NO: 759162 - DNA, 25 bp, Homo sapien
tgggagcacagaggagggacaggca

SEQ ID NO: 759163 - DNA, 25 bp, Homo sapien
ggagcacagaggagggacaggcaat

SEQ ID NO: 759164 - DNA, 25 bp, Homo sapien
cttgggagcacagaggagggacagg

SEQ ID NO: 759165 - DNA, 25 bp, Homo sapien
ccgtgtgaggagtgctttatcagag

SEQ ID NO: 759166 - DNA, 25 bp, Homo sapien
atgcccacggtgaccaaggcttcga

SEQ ID NO: 759167 - DNA, 25 bp, Homo sapien
ggcagctggtgcattgcgatgccca

SEQ ID NO: 759168 - DNA, 25 bp, Homo sapien
gcacacttttactgagcaggtgcgg

SEQ ID NO: 759169 - DNA, 25 bp, Homo sapien
ggtccattatcaggagaaggaacca

SEQ ID NO: 759170 - DNA, 25 bp, Homo sapien
ttgtggtgggtggtggcaagcacac

SEQ ID NO: 759171 - DNA, 25 bp, Homo sapien
gaggtccattatcaggagaaggaac

SEQ ID NO: 759172 - DNA, 25 bp, Homo sapien
tcctttctttgtggtgggtggtggc

SEQ ID NO: 759173 - DNA, 25 bp, Homo sapien
gctgagacctttacgcttcctaata

SEQ ID NO: 759174 - DNA, 25 bp, Homo sapien
ccttgaccccttgattaggtggaga

SEQ ID NO: 759175 - DNA, 25 bp, Homo sapien
tgaatcacaggtggcgctgaccatg

SEQ ID NO: 759176 - DNA, 25 bp, Homo sapien
catcccacgacgcatggaagctgag

SEQ ID NO: 759177 - DNA, 25 bp, Homo sapien
gaagaagccctgaagtgtggcagtc

SEQ ID NO: 759178 - DNA, 25 bp, Homo sapien
cagggcgggcaaaaacaccatgcaa

SEQ ID NO: 759179 - DNA, 25 bp, Homo sapien
catgcaaaggatgtcagaagtcacc

SEQ ID NO: 759180 - DNA, 25 bp, Homo sapien
gaactctgtgacgagtcagagcaga

SEQ ID NO: 759181 - DNA, 25 bp, Homo sapien
ttggggcattttcggtcaggaagaa

SEQ ID NO: 759182 - DNA, 25 bp, Homo sapien
gtcattttctgatctaagtcaggca

SEQ ID NO: 759183 - DNA, 25 bp, Homo sapien
caatgttggggcattttcggtcagg

SEQ ID NO: 759184 - DNA, 25 bp, Homo sapien
ctgatctaagtcaggcaatgttggg

SEQ ID NO: 759185 - DNA, 25 bp, Homo sapien
tatagtatgagtggggtatgccgca

SEQ ID NO: 759186 - DNA, 25 bp, Homo sapien
ggcacacgcgtagtttatagtatga

SEQ ID NO: 759187 - DNA, 25 bp, Homo sapien
ggtatgccgcaagcccatgtctgtt

SEQ ID NO: 759188 - DNA, 25 bp, Homo sapien
tgagagaccgtggtcttggcacacg

SEQ ID NO: 759189 - DNA, 25 bp, Homo sapien
gccttctacgcagccctctggaaaa

SEQ ID NO: 759190 - DNA, 25 bp, Homo sapien
aggccttctacgcagccctctggaa

SEQ ID NO: 759191 - DNA, 25 bp, Homo sapien
tacgcagccctctggaaaagaggcc

SEQ ID NO: 759192 - DNA, 25 bp, Homo sapien
ttctacgcagccctctggaaaagag

SEQ ID NO: 759193 - DNA, 25 bp, Homo sapien
gcaggtgtacacagaggaatgtccc

SEQ ID NO: 759194 - DNA, 25 bp, Homo sapien
caggtgtacacagaggaatgtccca

SEQ ID NO: 759195 - DNA, 25 bp, Homo sapien
ctcgagggggtcatgcaaagcttcc

SEQ ID NO: 759196 - DNA, 25 bp, Homo sapien
caaggagggcttggacttggaccct

SEQ ID NO: 759197 - DNA, 25 bp, Homo sapien
gggctcgagggggtcatgcaaagct

SEQ ID NO: 759198 - DNA, 25 bp, Homo sapien
ggaagggctcgagggggtcatgcaa

SEQ ID NO: 759199 - DNA, 25 bp, Homo sapien
tgaagatgcatggtggagcttgggc

SEQ ID NO: 759200 - DNA, 25 bp, Homo sapien
cagctctctctgcgtgtcctggtcc

SEQ ID NO: 759201 - DNA, 25 bp, Homo sapien
tgatgaagatgcatggtggagcttg

SEQ ID NO: 759202 - DNA, 25 bp, Homo sapien
ctctctctgcgtgtcctggtcccca

SEQ ID NO: 759203 - DNA, 25 bp, Homo sapien
tgcacaccgcagagtggaggccgca

SEQ ID NO: 759204 - DNA, 25 bp, Homo sapien
caccgcagagtggaggccgcaggca

SEQ ID NO: 759205 - DNA, 25 bp, Homo sapien
aggccgcaggcagggaagtaactgg

SEQ ID NO: 759206 - DNA, 25 bp, Homo sapien
gatgcacaccgcagagtggaggccg

SEQ ID NO: 759207 - DNA, 25 bp, Homo sapien
aatgcgatatggcacagcagccgct

SEQ ID NO: 759208 - DNA, 25 bp, Homo sapien
gggtttccataacgcactgttctgt

SEQ ID NO: 759209 - DNA, 25 bp, Homo sapien
gcagccgctcatagacctcaggctt

SEQ ID NO: 759210 - DNA, 25 bp, Homo sapien
cagctgcacgaatgcgatatggcac

SEQ ID NO: 759211 - DNA, 25 bp, Homo sapien
gatgagcaactgctcagatccctgc

SEQ ID NO: 759212 - DNA, 25 bp, Homo sapien
agatgagcaactgctcagatccctg

SEQ ID NO: 759213 - DNA, 25 bp, Homo sapien
cagatgagcaactgctcagatccct

SEQ ID NO: 759214 - DNA, 25 bp, Homo sapien
tcagatgagcaactgctcagatccc

SEQ ID NO: 759215 - DNA, 25 bp, Homo sapien
ggttgtcgttcctccacaggtttgc

SEQ ID NO: 759216 - DNA, 25 bp, Homo sapien
gaactgtcctttgtcctgagaggtc

SEQ ID NO: 759217 - DNA, 25 bp, Homo sapien
ctccaggcccagtgtactttggtcc

SEQ ID NO: 759218 - DNA, 25 bp, Homo sapien
cccagtgtactttggtcctgctgaa

SEQ ID NO: 759219 - DNA, 25 bp, Homo sapien
gagaccaattcgttgatgctttgaa

SEQ ID NO: 759220 - DNA, 25 bp, Homo sapien
cgtggcacctcttgtgtgtagagtt

SEQ ID NO: 759221 - DNA, 25 bp, Homo sapien
tacactggaatacactcgtggcgat

SEQ ID NO: 759222 - DNA, 25 bp, Homo sapien
gcagccacagtgtgacgtggcacct

SEQ ID NO: 759223 - DNA, 25 bp, Homo sapien
tatccgtttctcgtaaaagcagaaa

SEQ ID NO: 759224 - DNA, 25 bp, Homo sapien
gagctttctgtttgtactctgtgac

SEQ ID NO: 759225 - DNA, 25 bp, Homo sapien
tgttgaatccggatgcaggcccgtg

SEQ ID NO: 759226 - DNA, 25 bp, Homo sapien
tagactctccaagtttcgtgagctt

SEQ ID NO: 759227 - DNA, 25 bp, Homo sapien
caatcaacaagtattaagaaaggct

SEQ ID NO: 759228 - DNA, 25 bp, Homo sapien
ttttctgtgctgaggccttgagggc

SEQ ID NO: 759229 - DNA, 25 bp, Homo sapien
ccattacacagagatggaggtgcac

SEQ ID NO: 759230 - DNA, 25 bp, Homo sapien
tttgcaaatcaatcaacaagtatta

SEQ ID NO: 759231 - DNA, 25 bp, Homo sapien
ccagggcgcacctcggcagggcggg

SEQ ID NO: 759232 - DNA, 25 bp, Homo sapien
tgggctgctcaatgggtctgataat

SEQ ID NO: 759233 - DNA, 25 bp, Homo sapien
tgcaagcctccagaccacttggagc

SEQ ID NO: 759234 - DNA, 25 bp, Homo sapien
gctcaatgggtctgataattccagg

SEQ ID NO: 759235 - DNA, 25 bp, Homo sapien
caggacaaaccgctgatgaaatttc

SEQ ID NO: 759236 - DNA, 25 bp, Homo sapien
agttcagggccatctgaatctcagg

SEQ ID NO: 759237 - DNA, 25 bp, Homo sapien
ccattcccccgatctcacaaatggg

SEQ ID NO: 759238 - DNA, 25 bp, Homo sapien
aaactgaggctaagcgactgagttc

SEQ ID NO: 759239 - DNA, 25 bp, Homo sapien
tgttcccgaatccaaagcagttctt

SEQ ID NO: 759240 - DNA, 25 bp, Homo sapien
ggtgggattctgagaccgcctgctc

SEQ ID NO: 759241 - DNA, 25 bp, Homo sapien
gctccacgtggcagatgaaatctag

SEQ ID NO: 759242 - DNA, 25 bp, Homo sapien
gactgtcctccaagacttgccctgg

SEQ ID NO: 759243 - DNA, 25 bp, Homo sapien
taattattcttgctcggtttctctg

SEQ ID NO: 759244 - DNA, 25 bp, Homo sapien
ccaggataattattcttgctcggtt

SEQ ID NO: 759245 - DNA, 25 bp, Homo sapien
aggataattattcttgctcggtttc

SEQ ID NO: 759246 - DNA, 25 bp, Homo sapien
attattcttgctcggtttctctgcc

SEQ ID NO: 759247 - DNA, 25 bp, Homo sapien
tctggggactcgaagtttctggtgg

SEQ ID NO: 759248 - DNA, 25 bp, Homo sapien
agtggagtcagagcgtggctcaggc

SEQ ID NO: 759249 - DNA, 25 bp, Homo sapien
cacattctcagctgtttggatctgg

SEQ ID NO: 759250 - DNA, 25 bp, Homo sapien
gagtggagtcagagcgtggctcagg

SEQ ID NO: 759251 - DNA, 25 bp, Homo sapien
gaaaccagaagcagactcttgctat

SEQ ID NO: 759252 - DNA, 25 bp, Homo sapien
tgacctaagaacatcgccacagagc

SEQ ID NO: 759253 - DNA, 25 bp, Homo sapien
agcaacgtcccaggcccaagtatgg

SEQ ID NO: 759254 - DNA, 25 bp, Homo sapien
gaacattctggaatcctacccagga

SEQ ID NO: 759255 - DNA, 25 bp, Homo sapien
ctgggccacccgttggagaaactct

SEQ ID NO: 759256 - DNA, 25 bp, Homo sapien
tgcgctttataatctgggccacccg

SEQ ID NO: 759257 - DNA, 25 bp, Homo sapien
tgtgtggtccggcaagggcagagct

SEQ ID NO: 759258 - DNA, 25 bp, Homo sapien
cagagctccttccttgcgctttata

SEQ ID NO: 759259 - DNA, 25 bp, Homo sapien
acctccacctttagactgctcacca

SEQ ID NO: 759260 - DNA, 25 bp, Homo sapien
tcacaccgggcacttgcacgcacct

SEQ ID NO: 759261 - DNA, 25 bp, Homo sapien
ggggctgacctgctcacaccgggca

SEQ ID NO: 759262 - DNA, 25 bp, Homo sapien
tcagtgaagagctgaccagcgcggg

SEQ ID NO: 759263 - DNA, 25 bp, Homo sapien
ggtgctcttcggcttgatgacattc

SEQ ID NO: 759264 - DNA, 25 bp, Homo sapien
gagtacagcacccacacttccagat

SEQ ID NO: 759265 - DNA, 25 bp, Homo sapien
gatgacattcctgtctgagtacagc

SEQ ID NO: 759266 - DNA, 25 bp, Homo sapien
tgtctgagtacagcacccacacttc

SEQ ID NO: 759267 - DNA, 25 bp, Homo sapien
ggaatagagataatgggccagcctt

SEQ ID NO: 759268 - DNA, 25 bp, Homo sapien
cactggtcagccgaagtgtcctttc

SEQ ID NO: 759269 - DNA, 25 bp, Homo sapien
gccagcctttctggttgcccatggc

SEQ ID NO: 759270 - DNA, 25 bp, Homo sapien
ttccctcgtttgataatcagaccag

SEQ ID NO: 759271 - DNA, 25 bp, Homo sapien
ccgtgtgataaggaagggagtctaa

SEQ ID NO: 759272 - DNA, 25 bp, Homo sapien
cacaggcggccggatattgagagaa

SEQ ID NO: 759273 - DNA, 25 bp, Homo sapien
caagacaagaaaccccaggatacag

SEQ ID NO: 759274 - DNA, 25 bp, Homo sapien
ccatcgactggcagaatgaggcgga

SEQ ID NO: 759275 - DNA, 25 bp, Homo sapien
tctactgcatgctggaaaacgcggc

SEQ ID NO: 759276 - DNA, 25 bp, Homo sapien
aaaacgcggctactcttagcagggc

SEQ ID NO: 759277 - DNA, 25 bp, Homo sapien
tgtaggctctaagatcctgcagcga

SEQ ID NO: 759278 - DNA, 25 bp, Homo sapien
cagaggcttgggcagcaatacgttc

SEQ ID NO: 759279 - DNA, 25 bp, Homo sapien
tccatgcggtgagcagaaggacctg

SEQ ID NO: 759280 - DNA, 25 bp, Homo sapien
ggtgtggcatgtggcttccctaaga

SEQ ID NO: 759281 - DNA, 25 bp, Homo sapien
taacaagttcattcagtcatgcagc

SEQ ID NO: 759282 - DNA, 25 bp, Homo sapien
taagagtcagctatccaagggaaag

SEQ ID NO: 759283 - DNA, 25 bp, Homo sapien
tatgcaactggccatgcaggtttgt

SEQ ID NO: 759284 - DNA, 25 bp, Homo sapien
cttcatgggtgatagtgtgtccgga

SEQ ID NO: 759285 - DNA, 25 bp, Homo sapien
acctgagtaatgcagtgtgctacaa

SEQ ID NO: 759286 - DNA, 25 bp, Homo sapien
tatcactatcacgtattatgggctg

SEQ ID NO: 759287 - DNA, 25 bp, Homo sapien
ttccagcccaggaggattccagtca

SEQ ID NO: 759288 - DNA, 25 bp, Homo sapien
ccagtcacttcttcctcatcaggtt

SEQ ID NO: 759289 - DNA, 25 bp, Homo sapien
gtcacttcttcctcatcaggttcca

SEQ ID NO: 759290 - DNA, 25 bp, Homo sapien
cagcccaggaggattccagtcactt

SEQ ID NO: 759291 - DNA, 25 bp, Homo sapien
aagttcacgcccagaagtacacccg

SEQ ID NO: 759292 - DNA, 25 bp, Homo sapien
acaggttcgtccagcgcaccacgag

SEQ ID NO: 759293 - DNA, 25 bp, Homo sapien
ccagtgagcgtgaagttcacgccca

SEQ ID NO: 759294 - DNA, 25 bp, Homo sapien
cgtccagcgcaccacgagaggctgg

SEQ ID NO: 759295 - DNA, 25 bp, Homo sapien
gcttgacatcgccatgaaaaaataa

SEQ ID NO: 759296 - DNA, 25 bp, Homo sapien
aaatgtttctgcttgacatcgccat

SEQ ID NO: 759297 - DNA, 25 bp, Homo sapien
gacctggaaaatgtttctgcttgac

SEQ ID NO: 759298 - DNA, 25 bp, Homo sapien
ccaggacctggaaaatgtttctgct

SEQ ID NO: 759299 - DNA, 25 bp, Homo sapien
ttatggtagaccttcatccaccatt

SEQ ID NO: 759300 - DNA, 25 bp, Homo sapien
ctttgaactcctagatctttatggt

SEQ ID NO: 759301 - DNA, 25 bp, Homo sapien
tttatggtagaccttcatccaccat

SEQ ID NO: 759302 - DNA, 25 bp, Homo sapien
aactcctagatctttatggtagacc

SEQ ID NO: 759303 - DNA, 25 bp, Homo sapien
atgactctagcttctttcatctgca

SEQ ID NO: 759304 - DNA, 25 bp, Homo sapien
tctagcttctttcatctgcacgaag

SEQ ID NO: 759305 - DNA, 25 bp, Homo sapien
tagcttctttcatctgcacgaagtg

SEQ ID NO: 759306 - DNA, 25 bp, Homo sapien
gactctagcttctttcatctgcacg

SEQ ID NO: 759307 - DNA, 25 bp, Homo sapien
ccaacctgtccttcgggtccagttg

SEQ ID NO: 759308 - DNA, 25 bp, Homo sapien
cctgtccttcgggtccagttgaaca

SEQ ID NO: 759309 - DNA, 25 bp, Homo sapien
cttcgggtccagttgaacagaaata

SEQ ID NO: 759310 - DNA, 25 bp, Homo sapien
tgtccttcgggtccagttgaacaga

SEQ ID NO: 759311 - DNA, 25 bp, Homo sapien
gccagtaagcccactggtctggaag

SEQ ID NO: 759312 - DNA, 25 bp, Homo sapien
cagacaatgctcaggttacagctgg

SEQ ID NO: 759313 - DNA, 25 bp, Homo sapien
cttgatcctgggccaaaccgagcca

SEQ ID NO: 759314 - DNA, 25 bp, Homo sapien
gatgtattgtcctgcattccagaca

SEQ ID NO: 759315 - DNA, 25 bp, Homo sapien
catttgagtgaatcgaaaccacatt

SEQ ID NO: 759316 - DNA, 25 bp, Homo sapien
tttaacatttgagtgaatcgaaacc

SEQ ID NO: 759317 - DNA, 25 bp, Homo sapien
tgaatcgaaaccacattggcagagc

SEQ ID NO: 759318 - DNA, 25 bp, Homo sapien
gagtgaatcgaaaccacattggcag

SEQ ID NO: 759319 - DNA, 25 bp, Homo sapien
gttctgtcatatggggccatgccct

SEQ ID NO: 759320 - DNA, 25 bp, Homo sapien
cttctgtttgctgttgttccctggt

SEQ ID NO: 759321 - DNA, 25 bp, Homo sapien
cagggctcgttctgtcatatggggc

SEQ ID NO: 759322 - DNA, 25 bp, Homo sapien
gctcgttctgtcatatggggccatg

SEQ ID NO: 759323 - DNA, 25 bp, Homo sapien
cggccagagccgtcttccttctgtt

SEQ ID NO: 759324 - DNA, 25 bp, Homo sapien
gcccggccagagccgtcttccttct

SEQ ID NO: 759325 - DNA, 25 bp, Homo sapien
ccggccagagccgtcttccttctgt

SEQ ID NO: 759326 - DNA, 25 bp, Homo sapien
ggcccggccagagccgtcttccttc

SEQ ID NO: 759327 - DNA, 25 bp, Homo sapien
ctctttggtgaatagctgtgtggcc

SEQ ID NO: 759328 - DNA, 25 bp, Homo sapien
tgtggcctgggcaagttgcttaact

SEQ ID NO: 759329 - DNA, 25 bp, Homo sapien
ctttggtgaatagctgtgtggcctg

SEQ ID NO: 759330 - DNA, 25 bp, Homo sapien
gcttaacttctctgaagttgtttcc

SEQ ID NO: 759331 - DNA, 25 bp, Homo sapien
taccctcagatgtcaggcaggccgt

SEQ ID NO: 759332 - DNA, 25 bp, Homo sapien
cacaatgagtatccaggcctgagca

SEQ ID NO: 759333 - DNA, 25 bp, Homo sapien
tgtagaccgtggaggatctgagccc

SEQ ID NO: 759334 - DNA, 25 bp, Homo sapien
gacaatgtacacctgcctgaactgg

SEQ ID NO: 759335 - DNA, 25 bp, Homo sapien
agtactcatcaaaaagggactcatg

SEQ ID NO: 759336 - DNA, 25 bp, Homo sapien
taggaagtgtcacggccctcagcct

SEQ ID NO: 759337 - DNA, 25 bp, Homo sapien
agccttaggccccagtactcatcaa

SEQ ID NO: 759338 - DNA, 25 bp, Homo sapien
agtgtcacggccctcagccttaggc

SEQ ID NO: 759339 - DNA, 25 bp, Homo sapien
cgttcgtaggggatggttgccacct

SEQ ID NO: 759340 - DNA, 25 bp, Homo sapien
tcgtaggggatggttgccaccttga

SEQ ID NO: 759341 - DNA, 25 bp, Homo sapien
atcgttcgtaggggatggttgccac

SEQ ID NO: 759342 - DNA, 25 bp, Homo sapien
tcatcgttcgtaggggatggttgcc

SEQ ID NO: 759343 - DNA, 25 bp, Homo sapien
aagggtgggagatgtctgtgttgag

SEQ ID NO: 759344 - DNA, 25 bp, Homo sapien
atgtctgtgttgagaagcagcaaag

SEQ ID NO: 759345 - DNA, 25 bp, Homo sapien
tctgtgttgagaagcagcaaagcag

SEQ ID NO: 759346 - DNA, 25 bp, Homo sapien
tgggagatgtctgtgttgagaagca

SEQ ID NO: 759347 - DNA, 25 bp, Homo sapien
tgagtttggagttggaagctccttt

SEQ ID NO: 759348 - DNA, 25 bp, Homo sapien
tgcacccagctctctattctgagtt

SEQ ID NO: 759349 - DNA, 25 bp, Homo sapien
attctgagtttggagttggaagctc

SEQ ID NO: 759350 - DNA, 25 bp, Homo sapien
cgcaaagggctttccctcctgctcc

SEQ ID NO: 759351 - DNA, 25 bp, Homo sapien
ctcactgtctagagagaaacaggtc

SEQ ID NO: 759352 - DNA, 25 bp, Homo sapien
taagggcctggactctttgaatccg

SEQ ID NO: 759353 - DNA, 25 bp, Homo sapien
tctgctgtgcccgaatctctcactg

SEQ ID NO: 759354 - DNA, 25 bp, Homo sapien
ctttgaatccgtgggccccgcagga

SEQ ID NO: 759355 - DNA, 25 bp, Homo sapien
cttccccaacgctgctgctctgagc

SEQ ID NO: 759356 - DNA, 25 bp, Homo sapien
agacaatcgccccaggatgacagag

SEQ ID NO: 759357 - DNA, 25 bp, Homo sapien
tgcaggaggcctcagacaatcgccc

SEQ ID NO: 759358 - DNA, 25 bp, Homo sapien
cagcgtcagacttgccctgtatcct

SEQ ID NO: 759359 - DNA, 25 bp, Homo sapien
caaaaaaccagtggagagttcctcg

SEQ ID NO: 759360 - DNA, 25 bp, Homo sapien
tgttgcccactgaataccgtggtag

SEQ ID NO: 759361 - DNA, 25 bp, Homo sapien
tgttggcagtaaaccgtgcacgtgc

SEQ ID NO: 759362 - DNA, 25 bp, Homo sapien
catggcaaagtctccactgaacagt

SEQ ID NO: 759363 - DNA, 25 bp, Homo sapien
cagagtgagactccgtgaaagaaag

SEQ ID NO: 759364 - DNA, 25 bp, Homo sapien
gagtgagactccgtgaaagaaagga

SEQ ID NO: 759365 - DNA, 25 bp, Homo sapien
gtgagactccgtgaaagaaaggaag

SEQ ID NO: 759366 - DNA, 25 bp, Homo sapien
agaaagaaagaaagcagggagggag

SEQ ID NO: 759367 - DNA, 25 bp, Homo sapien
gactttcagcacatcaagaactggg

SEQ ID NO: 759368 - DNA, 25 bp, Homo sapien
gctttaaggacctgatcccgctgga

SEQ ID NO: 759369 - DNA, 25 bp, Homo sapien
tctccctatgggaaaatgaaagttc

SEQ ID NO: 759370 - DNA, 25 bp, Homo sapien
gaactgggatacatcttcactatga

SEQ ID NO: 759371 - DNA, 25 bp, Homo sapien
catcctgcaggaacaagatgttctg

SEQ ID NO: 759372 - DNA, 25 bp, Homo sapien
tgagagtgatggtgattcggtcccg

SEQ ID NO: 759373 - DNA, 25 bp, Homo sapien
tgtgggcgagcgtgcctgactgtgg

SEQ ID NO: 759374 - DNA, 25 bp, Homo sapien
ccgcgcctgcaaacaggagtgccat

SEQ ID NO: 759375 - DNA, 25 bp, Homo sapien
catgtcctttctcgggtgcagtaga

SEQ ID NO: 759376 - DNA, 25 bp, Homo sapien
gccttcttaattacttgactgattt

SEQ ID NO: 759377 - DNA, 25 bp, Homo sapien
tctcgggtgcagtagagatctagct

SEQ ID NO: 759378 - DNA, 25 bp, Homo sapien
tttgccactgtcatgtcctttctcg

SEQ ID NO: 759379 - DNA, 25 bp, Homo sapien
aaatggcaaacaggcatatgaaaag

SEQ ID NO: 759380 - DNA, 25 bp, Homo sapien
aatggcaaacaggcatatgaaaagg

SEQ ID NO: 759381 - DNA, 25 bp, Homo sapien
atggcaaacaggcatatgaaaaggt

SEQ ID NO: 759382 - DNA, 25 bp, Homo sapien
tggcaaacaggcatatgaaaaggtg

SEQ ID NO: 759383 - DNA, 25 bp, Homo sapien
gcaggccaagggtcagcggtcaaca

SEQ ID NO: 759384 - DNA, 25 bp, Homo sapien
gatgctgtttaaaatcggaattcct

SEQ ID NO: 759385 - DNA, 25 bp, Homo sapien
ggtcaacagagctgctccagcaagc

SEQ ID NO: 759386 - DNA, 25 bp, Homo sapien
tccagcaagctctgtgtggtgcctc

SEQ ID NO: 759387 - DNA, 25 bp, Homo sapien
cttgaggcaccagtgcaaatacact

SEQ ID NO: 759388 - DNA, 25 bp, Homo sapien
cccgtgggcatcagggcttgaggca

SEQ ID NO: 759389 - DNA, 25 bp, Homo sapien
gcaccagtgcaaatacactgacact

SEQ ID NO: 759390 - DNA, 25 bp, Homo sapien
gggcatcagggcttgaggcaccagt

SEQ ID NO: 759391 - DNA, 25 bp, Homo sapien
gtcgtagttgcagggaggaacctca

SEQ ID NO: 759392 - DNA, 25 bp, Homo sapien
tgtgacttgacccaatgcatgtgcg

SEQ ID NO: 759393 - DNA, 25 bp, Homo sapien
tgcgggagtcatagggtctctgcat

SEQ ID NO: 759394 - DNA, 25 bp, Homo sapien
tgctgcctgctataggtccacatgg

SEQ ID NO: 759395 - DNA, 25 bp, Homo sapien
caaggaccgaagaggaaattgaacg

SEQ ID NO: 759396 - DNA, 25 bp, Homo sapien
aatctgcttcgtggatgtacggtgc

SEQ ID NO: 759397 - DNA, 25 bp, Homo sapien
cctatatgcgactgggaattgtcag

SEQ ID NO: 759398 - DNA, 25 bp, Homo sapien
tacaggtcttactgggtgcaccaag

SEQ ID NO: 759399 - DNA, 25 bp, Homo sapien
ccacaatggtgatggtaatgaacat

SEQ ID NO: 759400 - DNA, 25 bp, Homo sapien
cttaggcccacaatggtgatggtaa

SEQ ID NO: 759401 - DNA, 25 bp, Homo sapien
taggcccacaatggtgatggtaatg

SEQ ID NO: 759402 - DNA, 25 bp, Homo sapien
ggcccacaatggtgatggtaatgaa

SEQ ID NO: 759403 - DNA, 25 bp, Homo sapien
ccagtccactaaaccacttattcct

SEQ ID NO: 759404 - DNA, 25 bp, Homo sapien
gcccagtccactaaaccacttattc

SEQ ID NO: 759405 - DNA, 25 bp, Homo sapien
cagcatttttgtcagagtcattcca

SEQ ID NO: 759406 - DNA, 25 bp, Homo sapien
agcatttttgtcagagtcattccac

SEQ ID NO: 759407 - DNA, 25 bp, Homo sapien
tgtgagacttcttcactatcacaag

SEQ ID NO: 759408 - DNA, 25 bp, Homo sapien
cttgtgagacttcttcactatcaca

SEQ ID NO: 759409 - DNA, 25 bp, Homo sapien
ttgtgagacttcttcactatcacaa

SEQ ID NO: 759410 - DNA, 25 bp, Homo sapien
gcaagagaaaaatgatccagatgca

SEQ ID NO: 759411 - DNA, 25 bp, Homo sapien
aaaaatgatccagatgcaaaagtgg

SEQ ID NO: 759412 - DNA, 25 bp, Homo sapien
gaaaaatgatccagatgcaaaagtg

SEQ ID NO: 759413 - DNA, 25 bp, Homo sapien
agagaaaaatgatccagatgcaaaa

SEQ ID NO: 759414 - DNA, 25 bp, Homo sapien
ggaagtcttcaagtggtctaagcct

SEQ ID NO: 759415 - DNA, 25 bp, Homo sapien
gaaccatacacagctcagatgccaa

SEQ ID NO: 759416 - DNA, 25 bp, Homo sapien
gcttgagctagagtctgtagaccac

SEQ ID NO: 759417 - DNA, 25 bp, Homo sapien
gaaccttgatcctgtagcttgagct

SEQ ID NO: 759418 - DNA, 25 bp, Homo sapien
gcaggcctccaatttgctctgcatt

SEQ ID NO: 759419 - DNA, 25 bp, Homo sapien
tccaatttgctctgcatttgatagt

SEQ ID NO: 759420 - DNA, 25 bp, Homo sapien
ttgctctgcatttgatagtttgaca

SEQ ID NO: 759421 - DNA, 25 bp, Homo sapien
ggcctccaatttgctctgcatttga

SEQ ID NO: 759422 - DNA, 25 bp, Homo sapien
gctctcctatccgtgcaagtgcaca

SEQ ID NO: 759423 - DNA, 25 bp, Homo sapien
tttcagctctcctatccgtgcaagt

SEQ ID NO: 759424 - DNA, 25 bp, Homo sapien
tcagctctcctatccgtgcaagtgc

SEQ ID NO: 759425 - DNA, 25 bp, Homo sapien
catttgtgaaaccagcagttatttc

SEQ ID NO: 759426 - DNA, 25 bp, Homo sapien
gagagagggttattcatacgcagca

SEQ ID NO: 759427 - DNA, 25 bp, Homo sapien
tgacccactcgtaaggtaagacctg

SEQ ID NO: 759428 - DNA, 25 bp, Homo sapien
taatggctaatggatattgtcccct

SEQ ID NO: 759429 - DNA, 25 bp, Homo sapien
ggaagtcccagtgctatgagtctgg

SEQ ID NO: 759430 - DNA, 25 bp, Homo sapien
tgtacagcttggactcgccatcgga

SEQ ID NO: 759431 - DNA, 25 bp, Homo sapien
gaaaacgagctaagacggctgcacc

SEQ ID NO: 759432 - DNA, 25 bp, Homo sapien
tcagcgtaggcacaagtatcagcag

SEQ ID NO: 759433 - DNA, 25 bp, Homo sapien
gaaaaagcgtatgccttcgggacag

SEQ ID NO: 759434 - DNA, 25 bp, Homo sapien
gtatatttcccctcgttgtgcagcc

SEQ ID NO: 759435 - DNA, 25 bp, Homo sapien
gacccactgcggtgtgtccagatga

SEQ ID NO: 759436 - DNA, 25 bp, Homo sapien
cagaacaagggctgaaactggcctt

SEQ ID NO: 759437 - DNA, 25 bp, Homo sapien
taagcatcgtgtatagagcccatga

SEQ ID NO: 759438 - DNA, 25 bp, Homo sapien
gatgaaaccaaatcaaggtatcccc

SEQ ID NO: 759439 - DNA, 25 bp, Homo sapien
tatctaccttttagtgcagaaagaa

SEQ ID NO: 759440 - DNA, 25 bp, Homo sapien
atgtcatatctggtgaatcttgcat

SEQ ID NO: 759441 - DNA, 25 bp, Homo sapien
ctggtgaatcttgcatttattatag

SEQ ID NO: 759442 - DNA, 25 bp, Homo sapien
tgttataactggaaatacgctgaga

SEQ ID NO: 759443 - DNA, 25 bp, Homo sapien
ccattgggacagtgctattgggaat

SEQ ID NO: 759444 - DNA, 25 bp, Homo sapien
ggagataaattagccccattgggac

SEQ ID NO: 759445 - DNA, 25 bp, Homo sapien
gataccactttcctggagtctagtt

SEQ ID NO: 759446 - DNA, 25 bp, Homo sapien
gaaaggaccatagtgtgcccctgtg

SEQ ID NO: 759447 - DNA, 25 bp, Homo sapien
gagaaattctccaagtgcggtgcta

SEQ ID NO: 759448 - DNA, 25 bp, Homo sapien
aatggtgcggaaggtgaatgcccac

SEQ ID NO: 759449 - DNA, 25 bp, Homo sapien
tacagcccgtgtagtgccaaatggt

SEQ ID NO: 759450 - DNA, 25 bp, Homo sapien
gttcataaacttcttgcccatataa

SEQ ID NO: 759451 - DNA, 25 bp, Homo sapien
ggttgtcgcttcactatcggttgtt

SEQ ID NO: 759452 - DNA, 25 bp, Homo sapien
ttttgaagtcttgttcataaacttc

SEQ ID NO: 759453 - DNA, 25 bp, Homo sapien
ttctataggttgtcgcttcactatc

SEQ ID NO: 759454 - DNA, 25 bp, Homo sapien
acactctagttaaaggcaaagcacc

SEQ ID NO: 759455 - DNA, 25 bp, Homo sapien
gcttggtactttccctccaggcaga

SEQ ID NO: 759456 - DNA, 25 bp, Homo sapien
gaattcgtaaagctgttgcctggga

SEQ ID NO: 759457 - DNA, 25 bp, Homo sapien
ggcctgtagcgcacagtcagtcttg

SEQ ID NO: 759458 - DNA, 25 bp, Homo sapien
tatttagacttggtgtagtagccag

SEQ ID NO: 759459 - DNA, 25 bp, Homo sapien
catggtcatctaatttgacctgctc

SEQ ID NO: 759460 - DNA, 25 bp, Homo sapien
agttgcctcttgattctggctgggc

SEQ ID NO: 759461 - DNA, 25 bp, Homo sapien
tcagagtgccagacacggtttggct

SEQ ID NO: 759462 - DNA, 25 bp, Homo sapien
tcctttctgtggctatgctggcctg

SEQ ID NO: 759463 - DNA, 25 bp, Homo sapien
tatcgattcagggtccatggcacac

SEQ ID NO: 759464 - DNA, 25 bp, Homo sapien
gataccgcacccataggaattgaga

SEQ ID NO: 759465 - DNA, 25 bp, Homo sapien
cctcaaagtggttcatacttgcctg

SEQ ID NO: 759466 - DNA, 25 bp, Homo sapien
aaggccatgccacatgtccagaata

SEQ ID NO: 759467 - DNA, 25 bp, Homo sapien
gaaacagcggaatagagaggtcact

SEQ ID NO: 759468 - DNA, 25 bp, Homo sapien
actgttagcttataaatcccctgaa

SEQ ID NO: 759469 - DNA, 25 bp, Homo sapien
cttatagttggcttcatagttctgg

SEQ ID NO: 759470 - DNA, 25 bp, Homo sapien
taaattagccacagggagtaactga

SEQ ID NO: 759471 - DNA, 25 bp, Homo sapien
cggcgttggagtttttacacggctg

SEQ ID NO: 759472 - DNA, 25 bp, Homo sapien
tggagtttttacacggctggctggc

SEQ ID NO: 759473 - DNA, 25 bp, Homo sapien
ggctgcagccaaccaaacccaaact

SEQ ID NO: 759474 - DNA, 25 bp, Homo sapien
gctggctgcagccaaccaaacccaa

SEQ ID NO: 759475 - DNA, 25 bp, Homo sapien
ccggacctggtgttcgcgggtgcgc

SEQ ID NO: 759476 - DNA, 25 bp, Homo sapien
cctgcttgaccagttgccaggagct

SEQ ID NO: 759477 - DNA, 25 bp, Homo sapien
gctgcctgcttgaccagttgccagg

SEQ ID NO: 759478 - DNA, 25 bp, Homo sapien
ttcgcgggtgcgctggacgctgcct

SEQ ID NO: 759479 - DNA, 25 bp, Homo sapien
cgcagggagcgtagcggtgcgtggc

SEQ ID NO: 759480 - DNA, 25 bp, Homo sapien
gggagcgtagcggtgcgtggcgccc

SEQ ID NO: 759481 - DNA, 25 bp, Homo sapien
gcgtggcgccctgaagttccttgct

SEQ ID NO: 759482 - DNA, 25 bp, Homo sapien
gaagttccttgcttgtgttcctcat

SEQ ID NO: 759483 - DNA, 25 bp, Homo sapien
ggccttctcagagcgcttcactggg

SEQ ID NO: 759484 - DNA, 25 bp, Homo sapien
cttcactgggacgtggtaataccaa

SEQ ID NO: 759485 - DNA, 25 bp, Homo sapien
gccaccttgtttcgcgagcttcaca

SEQ ID NO: 759486 - DNA, 25 bp, Homo sapien
gtatctccgagtcccaggcaggttc

SEQ ID NO: 759487 - DNA, 25 bp, Homo sapien
ttgctggctggctgtcggtggcttg

SEQ ID NO: 759488 - DNA, 25 bp, Homo sapien
gtggcttgctgtggtggatatacca

SEQ ID NO: 759489 - DNA, 25 bp, Homo sapien
tgtggtggatataccagtctggcag

SEQ ID NO: 759490 - DNA, 25 bp, Homo sapien
gcttgctgtggtggatataccagtc

SEQ ID NO: 759491 - DNA, 25 bp, Homo sapien
tcttctggatgcatagctaccattg

SEQ ID NO: 759492 - DNA, 25 bp, Homo sapien
tcatgtcgaagtcgaagggccctct

SEQ ID NO: 759493 - DNA, 25 bp, Homo sapien
catgtaatccggcatggagacagcc

SEQ ID NO: 759494 - DNA, 25 bp, Homo sapien
catagctaccattggcttgatcggg

SEQ ID NO: 759495 - DNA, 25 bp, Homo sapien
ggaaggagagtctacttcctgcagg

SEQ ID NO: 759496 - DNA, 25 bp, Homo sapien
ctttgagtcaatggccggtagcctc

SEQ ID NO: 759497 - DNA, 25 bp, Homo sapien
tgctcagatactttgagtcaatggc

SEQ ID NO: 759498 - DNA, 25 bp, Homo sapien
tcctgcaggattcttagggccaagt

SEQ ID NO: 759499 - DNA, 25 bp, Homo sapien
tgcaggacaagcagtccccgtgaac

SEQ ID NO: 759500 - DNA, 25 bp, Homo sapien
agcagtccccgtgaactgtggtgag

SEQ ID NO: 759501 - DNA, 25 bp, Homo sapien
aggacaagcagtccccgtgaactgt

SEQ ID NO: 759502 - DNA, 25 bp, Homo sapien
caagcagtccccgtgaactgtggtg

SEQ ID NO: 759503 - DNA, 25 bp, Homo sapien
tcagtgtgtctgctatatcttccaa

SEQ ID NO: 759504 - DNA, 25 bp, Homo sapien
tctgcagctggaggatcagcaaatg

SEQ ID NO: 759505 - DNA, 25 bp, Homo sapien
tgtcagtgtgtctgctatatcttcc

SEQ ID NO: 759506 - DNA, 25 bp, Homo sapien
tggaggatcagcaaatgtcagtgtg

SEQ ID NO: 759507 - DNA, 25 bp, Homo sapien
tagcattaaacttggattctgggag

SEQ ID NO: 759508 - DNA, 25 bp, Homo sapien
tccccattggacaagaagctgtttg

SEQ ID NO: 759509 - DNA, 25 bp, Homo sapien
taagaagacacctaaggcctcaggg

SEQ ID NO: 759510 - DNA, 25 bp, Homo sapien
tgttatcaaggccactcctaatgct

SEQ ID NO: 759511 - DNA, 25 bp, Homo sapien
ctaatgagtttggaaaaattggtag

SEQ ID NO: 759512 - DNA, 25 bp, Homo sapien
tgagtttggaaaaattggtaggtga

SEQ ID NO: 759513 - DNA, 25 bp, Homo sapien
atgagtttggaaaaattggtaggtg

SEQ ID NO: 759514 - DNA, 25 bp, Homo sapien
gataacactgatgccctggaggtct

SEQ ID NO: 759515 - DNA, 25 bp, Homo sapien
tgctgctgcaaccactcatccttat

SEQ ID NO: 759516 - DNA, 25 bp, Homo sapien
tcttgtctgagtcagctcgctgctg

SEQ ID NO: 759517 - DNA, 25 bp, Homo sapien
gtcctcaggaccttcagaagcctct

SEQ ID NO: 759518 - DNA, 25 bp, Homo sapien
accgctacactccaggcccggcaac

SEQ ID NO: 759519 - DNA, 25 bp, Homo sapien
atgatggcaccgctacactccaggc

SEQ ID NO: 759520 - DNA, 25 bp, Homo sapien
tggcaccgctacactccaggcccgg

SEQ ID NO: 759521 - DNA, 25 bp, Homo sapien
ctacactccaggcccggcaacagag

SEQ ID NO: 759522 - DNA, 25 bp, Homo sapien
tgtcagcctcggcatggcacgtgtc

SEQ ID NO: 759523 - DNA, 25 bp, Homo sapien
agtgtaccagtttcctaatgcccag

SEQ ID NO: 759524 - DNA, 25 bp, Homo sapien
aataaatagtatgagcacagcctgg

SEQ ID NO: 759525 - DNA, 25 bp, Homo sapien
cagctttagggcacgtcaaaacatc

SEQ ID NO: 759526 - DNA, 25 bp, Homo sapien
agctctgctggtgttgatgcagata

SEQ ID NO: 759527 - DNA, 25 bp, Homo sapien
tgctggtgttgatgcagatacagat

SEQ ID NO: 759528 - DNA, 25 bp, Homo sapien
ctggtgttgatgcagatacagattc

SEQ ID NO: 759529 - DNA, 25 bp, Homo sapien
ctctgctggtgttgatgcagataca

SEQ ID NO: 759530 - DNA, 25 bp, Homo sapien
gcagagggtaccagaggccttagtt

SEQ ID NO: 759531 - DNA, 25 bp, Homo sapien
caatgcctgctaagagtggttcaca

SEQ ID NO: 759532 - DNA, 25 bp, Homo sapien
tagttaagaatccagtagcaatgcc

SEQ ID NO: 759533 - DNA, 25 bp, Homo sapien
gaggagcaagtgatcagttctgaga

SEQ ID NO: 759534 - DNA, 25 bp, Homo sapien
cgtctcaggcgtctttcctggtcct

SEQ ID NO: 759535 - DNA, 25 bp, Homo sapien
gaacgcgcactctggtgagagcaca

SEQ ID NO: 759536 - DNA, 25 bp, Homo sapien
ggtgcccactctccgtctcaggcgt

SEQ ID NO: 759537 - DNA, 25 bp, Homo sapien
ctgcttcccgaacgcgcactctggt

SEQ ID NO: 759538 - DNA, 25 bp, Homo sapien
gaaaccgggctagaagcggctctag

SEQ ID NO: 759539 - DNA, 25 bp, Homo sapien
cactgtcactgtgtgtaccctggat

SEQ ID NO: 759540 - DNA, 25 bp, Homo sapien
agagaaatgacagcgtggaaccagc

SEQ ID NO: 759541 - DNA, 25 bp, Homo sapien
cggctctaggactaacccaaggtca

SEQ ID NO: 759542 - DNA, 25 bp, Homo sapien
tgccctgggccggcgaactcagctg

SEQ ID NO: 759543 - DNA, 25 bp, Homo sapien
taccgctaggctcgggccccgcctg

SEQ ID NO: 759544 - DNA, 25 bp, Homo sapien
ctgggccggcgaactcagctgaccg

SEQ ID NO: 759545 - DNA, 25 bp, Homo sapien
ggccggcgaactcagctgaccgcat

SEQ ID NO: 759546 - DNA, 25 bp, Homo sapien
tctcatatggagtctgcgagcggcc

SEQ ID NO: 759547 - DNA, 25 bp, Homo sapien
tcatatggagtctgcgagcggcccc

SEQ ID NO: 759548 - DNA, 25 bp, Homo sapien
ctgcgaggtgaatctcatatggagt

SEQ ID NO: 759549 - DNA, 25 bp, Homo sapien
atctcatatggagtctgcgagcggc

SEQ ID NO: 759550 - DNA, 25 bp, Homo sapien
tctcgggaggctcgcagacggcggg

SEQ ID NO: 759551 - DNA, 25 bp, Homo sapien
cggcgacaaacgcaatgctccaggg

SEQ ID NO: 759552 - DNA, 25 bp, Homo sapien
actcggcctgcgcagagagccgcta

SEQ ID NO: 759553 - DNA, 25 bp, Homo sapien
cagggccggacgaagggacggctct

SEQ ID NO: 759554 - DNA, 25 bp, Homo sapien
acgtgtcgacgagctgcggagttcc

SEQ ID NO: 759555 - DNA, 25 bp, Homo sapien
ctgcggagttcctcgcttctctggg

SEQ ID NO: 759556 - DNA, 25 bp, Homo sapien
gacgagctgcggagttcctcgcttc

SEQ ID NO: 759557 - DNA, 25 bp, Homo sapien
gacaggagacgagacgtgtcgacga

SEQ ID NO: 759558 - DNA, 25 bp, Homo sapien
acagacgtctgcagtgggaggcgct

SEQ ID NO: 759559 - DNA, 25 bp, Homo sapien
cgtcagaggagagcggctggaggcg

SEQ ID NO: 759560 - DNA, 25 bp, Homo sapien
agtcacccgcgaccgcgagtcacct

SEQ ID NO: 759561 - DNA, 25 bp, Homo sapien
caggcagtgtcctgccggcgagtca

SEQ ID NO: 759562 - DNA, 25 bp, Homo sapien
agtcagtgcaatgaagtggaattcc

SEQ ID NO: 759563 - DNA, 25 bp, Homo sapien
tgcagagccccactaatatgtagaa

SEQ ID NO: 759564 - DNA, 25 bp, Homo sapien
tagaaaccaagatcgtgcagagccc

SEQ ID NO: 759565 - DNA, 25 bp, Homo sapien
gaatggagtgaatccactcagtaga

SEQ ID NO: 759566 - DNA, 25 bp, Homo sapien
ttgtgactttcagctttctctgcat

SEQ ID NO: 759567 - DNA, 25 bp, Homo sapien
cgacagccgacattatcacagaagt

SEQ ID NO: 759568 - DNA, 25 bp, Homo sapien
tagaacatcagtgcccgacagccga

SEQ ID NO: 759569 - DNA, 25 bp, Homo sapien
ttatcacagaagtggcctatgtcag

SEQ ID NO: 759570 - DNA, 25 bp, Homo sapien
ggcctatgtcagacacgaggctcat

SEQ ID NO: 759571 - DNA, 25 bp, Homo sapien
gatttaaaagtctgacggggcaatc

SEQ ID NO: 759572 - DNA, 25 bp, Homo sapien
atttaaaagtctgacggggcaatca

SEQ ID NO: 759573 - DNA, 25 bp, Homo sapien
tggatttaaaagtctgacggggcaa

SEQ ID NO: 759574 - DNA, 25 bp, Homo sapien
aattgtgtctgctagtggtgagatt

SEQ ID NO: 759575 - DNA, 25 bp, Homo sapien
tggtgagattgaaatgatagagaat

SEQ ID NO: 759576 - DNA, 25 bp, Homo sapien
gaaatgatagagaatatcttctttc

SEQ ID NO: 759577 - DNA, 25 bp, Homo sapien
tgtgtctgctagtggtgagattgaa

SEQ ID NO: 759578 - DNA, 25 bp, Homo sapien
tccgtcatgtagaaggcggcctgtg

SEQ ID NO: 759579 - DNA, 25 bp, Homo sapien
caatgcttgagaagagccagccgaa

SEQ ID NO: 759580 - DNA, 25 bp, Homo sapien
tagtgcactgtctatagcagaggtc

SEQ ID NO: 759581 - DNA, 25 bp, Homo sapien
caaaatgggctactgaccgctctct

SEQ ID NO: 759582 - DNA, 25 bp, Homo sapien
gatgaaggctttcatccgggagggg

SEQ ID NO: 759583 - DNA, 25 bp, Homo sapien
ggctttcatccgggaggggcttcca

SEQ ID NO: 759584 - DNA, 25 bp, Homo sapien
gctttcatccgggaggggcttccac

SEQ ID NO: 759585 - DNA, 25 bp, Homo sapien
ctgatgaaggctttcatccgggagg

SEQ ID NO: 759586 - DNA, 25 bp, Homo sapien
catggcatagcggtcagttcccgca

SEQ ID NO: 759587 - DNA, 25 bp, Homo sapien
gggatagtctctacctgggcagtca

SEQ ID NO: 759588 - DNA, 25 bp, Homo sapien
gatagtctctacctgggcagtcaag

SEQ ID NO: 759589 - DNA, 25 bp, Homo sapien
gacagcaccggtcctactttataca

SEQ ID NO: 759590 - DNA, 25 bp, Homo sapien
cggatgatagtgacgttggagcacc

SEQ ID NO: 759591 - DNA, 25 bp, Homo sapien
caccgggcatagtacagcagcttta

SEQ ID NO: 759592 - DNA, 25 bp, Homo sapien
caccagaagtgccaatgcggatgat

SEQ ID NO: 759593 - DNA, 25 bp, Homo sapien
agctttatgagctcatgcaacatga

SEQ ID NO: 759594 - DNA, 25 bp, Homo sapien
gacattttaagctaatttaaggaca

SEQ ID NO: 759595 - DNA, 25 bp, Homo sapien
ccctgttgaggatagggacatttta

SEQ ID NO: 759596 - DNA, 25 bp, Homo sapien
tttctcctaaggtgcttcaaaatcc

SEQ ID NO: 759597 - DNA, 25 bp, Homo sapien
tatctgagttttgtactgcgcctct

SEQ ID NO: 759598 - DNA, 25 bp, Homo sapien
ctcggtgggagcaggaatcactaga

SEQ ID NO: 759599 - DNA, 25 bp, Homo sapien
aagcaagtcccctttcaaggtcagg

SEQ ID NO: 759600 - DNA, 25 bp, Homo sapien
taaatcctagatagtccaggcccta

SEQ ID NO: 759601 - DNA, 25 bp, Homo sapien
ccccagagagcaagaccacgtattt

SEQ ID NO: 759602 - DNA, 25 bp, Homo sapien
tgatgccttggtgaacccacagggc

SEQ ID NO: 759603 - DNA, 25 bp, Homo sapien
tatgaatccgaaagttagccctcac

SEQ ID NO: 759604 - DNA, 25 bp, Homo sapien
gcatcactcacattgggacgcacag

SEQ ID NO: 759605 - DNA, 25 bp, Homo sapien
taaacccaggtgagctatgaccaac

SEQ ID NO: 759606 - DNA, 25 bp, Homo sapien
cactgtggtgaactcgctcagctct

SEQ ID NO: 759607 - DNA, 25 bp, Homo sapien
cactgcctgctctgttatgaccaca

SEQ ID NO: 759608 - DNA, 25 bp, Homo sapien
actctgccttgaagcaggtatccac

SEQ ID NO: 759609 - DNA, 25 bp, Homo sapien
tctgccttgaagcaggtatccactg

SEQ ID NO: 759610 - DNA, 25 bp, Homo sapien
cttcatagaagtccaaggtgcacat

SEQ ID NO: 759611 - DNA, 25 bp, Homo sapien
tccatctcgatattgcggacgccgg

SEQ ID NO: 759612 - DNA, 25 bp, Homo sapien
ttctccgtgtaggagcagagagccc

SEQ ID NO: 759613 - DNA, 25 bp, Homo sapien
taggctgcctccagatacgcctgct

SEQ ID NO: 759614 - DNA, 25 bp, Homo sapien
acatggcggcaaacaccgaggactc

SEQ ID NO: 759615 - DNA, 25 bp, Homo sapien
ggacgggatgaagaacccacgagct

SEQ ID NO: 759616 - DNA, 25 bp, Homo sapien
agaccacatcaaggcaaggtgccgg

SEQ ID NO: 759617 - DNA, 25 bp, Homo sapien
aaccaggctgcccatgcagtcaggc

SEQ ID NO: 759618 - DNA, 25 bp, Homo sapien
tctaacatttcacagggacgggatg

SEQ ID NO: 759619 - DNA, 25 bp, Homo sapien
cggttcaggagggtgacacacacca

SEQ ID NO: 759620 - DNA, 25 bp, Homo sapien
ccttccaggcggttcaggagggtga

SEQ ID NO: 759621 - DNA, 25 bp, Homo sapien
gagcacattgcgagggctgctgatc

SEQ ID NO: 759622 - DNA, 25 bp, Homo sapien
ggcctctgctggtactcgctgagca

SEQ ID NO: 759623 - DNA, 25 bp, Homo sapien
ctcagtttcttcttgatgaagtagc

SEQ ID NO: 759624 - DNA, 25 bp, Homo sapien
gtttcttcttgatgaagtagctcac

SEQ ID NO: 759625 - DNA, 25 bp, Homo sapien
ccttgctcagtttcttcttgatgaa

SEQ ID NO: 759626 - DNA, 25 bp, Homo sapien
cagtttcttcttgatgaagtagctc

SEQ ID NO: 759627 - DNA, 25 bp, Homo sapien
aggtctgcggaggtgcagggcagcg

SEQ ID NO: 759628 - DNA, 25 bp, Homo sapien
tcacagcaggtctgcggaggtgcag

SEQ ID NO: 759629 - DNA, 25 bp, Homo sapien
atcacagcaggtctgcggaggtgca

SEQ ID NO: 759630 - DNA, 25 bp, Homo sapien
agcaggtctgcggaggtgcagggca

SEQ ID NO: 759631 - DNA, 25 bp, Homo sapien
tagtttcctggcactattgtcagat

SEQ ID NO: 759632 - DNA, 25 bp, Homo sapien
tgtgtaaagtgtgctcaaagtccac

SEQ ID NO: 759633 - DNA, 25 bp, Homo sapien
caagattctctgtctcttaatcgcg

SEQ ID NO: 759634 - DNA, 25 bp, Homo sapien
tcccatgcggttaatccaagattct

SEQ ID NO: 759635 - DNA, 25 bp, Homo sapien
cttgctgaaagcaccgaaagtgaac

SEQ ID NO: 759636 - DNA, 25 bp, Homo sapien
aatgataccagcgtggcacaagggc

SEQ ID NO: 759637 - DNA, 25 bp, Homo sapien
tctttatcaccagcgctgggaatgg

SEQ ID NO: 759638 - DNA, 25 bp, Homo sapien
ggtgtcattatattcctgctcagaa

SEQ ID NO: 759639 - DNA, 25 bp, Homo sapien
cactgggccaggattaccttttggg

SEQ ID NO: 759640 - DNA, 25 bp, Homo sapien
cttgatccagtgttacaaagaaggc

SEQ ID NO: 759641 - DNA, 25 bp, Homo sapien
ctgggtagatctcggggctgcaaat

SEQ ID NO: 759642 - DNA, 25 bp, Homo sapien
cgaaaatgatgctccattgaccctt

SEQ ID NO: 759643 - DNA, 25 bp, Homo sapien
tcatagctgaagttcctacaccttg

SEQ ID NO: 759644 - DNA, 25 bp, Homo sapien
ccttctcttcttgagtttaaggcca

SEQ ID NO: 759645 - DNA, 25 bp, Homo sapien
tctccttctcttcttgagtttaagg

SEQ ID NO: 759646 - DNA, 25 bp, Homo sapien
cttctcttcttgagtttaaggccaa

SEQ ID NO: 759647 - DNA, 25 bp, Homo sapien
tccttctcttcttgagtttaaggcc

SEQ ID NO: 759648 - DNA, 25 bp, Homo sapien
tgctgcatcgcgagcaggtagctga

SEQ ID NO: 759649 - DNA, 25 bp, Homo sapien
agctctccactaagttatgaaaggg

SEQ ID NO: 759650 - DNA, 25 bp, Homo sapien
tgaccacgacagagctgactgcata

SEQ ID NO: 759651 - DNA, 25 bp, Homo sapien
cagtgtgcagaagccatggtgctgc

SEQ ID NO: 759652 - DNA, 25 bp, Homo sapien
cagctgcagtttggaacctagacaa

SEQ ID NO: 759653 - DNA, 25 bp, Homo sapien
aaaggccaggttgttgactttcttg

SEQ ID NO: 759654 - DNA, 25 bp, Homo sapien
gccaggtcttgtatctcttttaaaa

SEQ ID NO: 759655 - DNA, 25 bp, Homo sapien
ttccatgaatttcctctgccaggtc

SEQ ID NO: 759656 - DNA, 25 bp, Homo sapien
attccatcagagcctttcttgtcaa

SEQ ID NO: 759657 - DNA, 25 bp, Homo sapien
cattccatcagagcctttcttgtca

SEQ ID NO: 759658 - DNA, 25 bp, Homo sapien
caatgctccatgacatcccagtaac

SEQ ID NO: 759659 - DNA, 25 bp, Homo sapien
tctgtgatccaagctccgcagttgc

SEQ ID NO: 759660 - DNA, 25 bp, Homo sapien
taggtggaaaaacaccccaatgctc

SEQ ID NO: 759661 - DNA, 25 bp, Homo sapien
tgagcccgcatgctctccctaggtg

SEQ ID NO: 759662 - DNA, 25 bp, Homo sapien
cctcctcggtcttattgagatccat

SEQ ID NO: 759663 - DNA, 25 bp, Homo sapien
atattacctcctcggtcttattgag

SEQ ID NO: 759664 - DNA, 25 bp, Homo sapien
ttccagtttcaatattacctcctcg

SEQ ID NO: 759665 - DNA, 25 bp, Homo sapien
cttgtgtgtagtctcggcagtaaaa

SEQ ID NO: 759666 - DNA, 25 bp, Homo sapien
tgatcctcagagttacgcaccagaa

SEQ ID NO: 759667 - DNA, 25 bp, Homo sapien
ggagaccaacgtccagctaactgaa

SEQ ID NO: 759668 - DNA, 25 bp, Homo sapien
taacacagtcagagcttcgggcaag

SEQ ID NO: 759669 - DNA, 25 bp, Homo sapien
gcttaagggtaatgtggctctcacc

SEQ ID NO: 759670 - DNA, 25 bp, Homo sapien
tgtcagtgtcgaaatggtcacattc

SEQ ID NO: 759671 - DNA, 25 bp, Homo sapien
ttcagtacaagttcagaaacctggg

SEQ ID NO: 759672 - DNA, 25 bp, Homo sapien
ggaagccaatctaaatcttctaggg

SEQ ID NO: 759673 - DNA, 25 bp, Homo sapien
ggtgactgctactccatgttgctgc

SEQ ID NO: 759674 - DNA, 25 bp, Homo sapien
tgaaatatagcaatagctacaaggc

SEQ ID NO: 759675 - DNA, 25 bp, Homo sapien
tagcaatagctacaaggcacccata

SEQ ID NO: 759676 - DNA, 25 bp, Homo sapien
cattttagctctatgtcaactgtca

SEQ ID NO: 759677 - DNA, 25 bp, Homo sapien
cagaaacaattgatacttttttgaa

SEQ ID NO: 759678 - DNA, 25 bp, Homo sapien
ggatcccacactatattctgcatgg

SEQ ID NO: 759679 - DNA, 25 bp, Homo sapien
gccaaactgggatttgagatcatac

SEQ ID NO: 759680 - DNA, 25 bp, Homo sapien
tactggactttctgtggatcccaca

SEQ ID NO: 759681 - DNA, 25 bp, Homo sapien
ttccgtgtgaagatcatcaaagcca

SEQ ID NO: 759682 - DNA, 25 bp, Homo sapien
gcagcatgctctagatccagtctcc

SEQ ID NO: 759683 - DNA, 25 bp, Homo sapien
cagcagcatgctctagatccagtct

SEQ ID NO: 759684 - DNA, 25 bp, Homo sapien
ccaggaaaggcccagcggtgtgaga

SEQ ID NO: 759685 - DNA, 25 bp, Homo sapien
cggtgtgagaagcagtcaagcatgt

SEQ ID NO: 759686 - DNA, 25 bp, Homo sapien
tctccaaggaagtgtctgtgggaat

SEQ ID NO: 759687 - DNA, 25 bp, Homo sapien
tgttggtagactcgcagccagctga

SEQ ID NO: 759688 - DNA, 25 bp, Homo sapien
tctgaccacttagggtggcagcctc

SEQ ID NO: 759689 - DNA, 25 bp, Homo sapien
gctagacaagactgaacacaccatc

SEQ ID NO: 759690 - DNA, 25 bp, Homo sapien
ctttgaacagaacatagagagaggg

SEQ ID NO: 759691 - DNA, 25 bp, Homo sapien
tttgaacagaacatagagagagggg

SEQ ID NO: 759692 - DNA, 25 bp, Homo sapien
agaacatagagagaggggacagcac

SEQ ID NO: 759693 - DNA, 25 bp, Homo sapien
aacagaacatagagagaggggacag

SEQ ID NO: 759694 - DNA, 25 bp, Homo sapien
tagtgccacgaagcagacgacaaca

SEQ ID NO: 759695 - DNA, 25 bp, Homo sapien
cattttacgacacggacatggtgag

SEQ ID NO: 759696 - DNA, 25 bp, Homo sapien
acatgagacagagacggcaaagcct

SEQ ID NO: 759697 - DNA, 25 bp, Homo sapien
tagtgccggatgactttagtgccac

SEQ ID NO: 759698 - DNA, 25 bp, Homo sapien
tgtcttctgaagcaggctaccctgt

SEQ ID NO: 759699 - DNA, 25 bp, Homo sapien
tatgattatcttttgggccatctgc

SEQ ID NO: 759700 - DNA, 25 bp, Homo sapien
ctccagactatggcccatgcctgtg

SEQ ID NO: 759701 - DNA, 25 bp, Homo sapien
agtgtgcagagcttccaccaccttc

SEQ ID NO: 759702 - DNA, 25 bp, Homo sapien
tttctgcctttagcgcaagcacctc

SEQ ID NO: 759703 - DNA, 25 bp, Homo sapien
tatttctgcctttagcgcaagcacc

SEQ ID NO: 759704 - DNA, 25 bp, Homo sapien
gcccggatagggaactgtatttctg

SEQ ID NO: 759705 - DNA, 25 bp, Homo sapien
ctgcctttagcgcaagcacctcagg

SEQ ID NO: 759706 - DNA, 25 bp, Homo sapien
cttgccaaaatccacgctatctgct

SEQ ID NO: 759707 - DNA, 25 bp, Homo sapien
cgctatctgctagagcctgggtgaa

SEQ ID NO: 759708 - DNA, 25 bp, Homo sapien
aaaatccacgctatctgctagagcc

SEQ ID NO: 759709 - DNA, 25 bp, Homo sapien
acacctcagccacccgtactgcagg

SEQ ID NO: 759710 - DNA, 25 bp, Homo sapien
gtaaattctgagctatcgcatttct

SEQ ID NO: 759711 - DNA, 25 bp, Homo sapien
tctgagctatcgcatttctgagagc

SEQ ID NO: 759712 - DNA, 25 bp, Homo sapien
gctatcgcatttctgagagctccat

SEQ ID NO: 759713 - DNA, 25 bp, Homo sapien
aattctgagctatcgcatttctgag

SEQ ID NO: 759714 - DNA, 25 bp, Homo sapien
ttccagtttcaattggttaagttca

SEQ ID NO: 759715 - DNA, 25 bp, Homo sapien
aaatcattagctgatgtctccaggc

SEQ ID NO: 759716 - DNA, 25 bp, Homo sapien
tccagtttcaattggttaagttcaa

SEQ ID NO: 759717 - DNA, 25 bp, Homo sapien
tttaaaatcattagctgatgtctcc

SEQ ID NO: 759718 - DNA, 25 bp, Homo sapien
ggcagacagcattcttcgccaacat

SEQ ID NO: 759719 - DNA, 25 bp, Homo sapien
tgtttaaaacactcgtctcagagga

SEQ ID NO: 759720 - DNA, 25 bp, Homo sapien
gcatcctctactgaaccaagtagct

SEQ ID NO: 759721 - DNA, 25 bp, Homo sapien
ccaccccatatgctggagtttccag

SEQ ID NO: 759722 - DNA, 25 bp, Homo sapien
gaggagttacaatagcacaacagtc

SEQ ID NO: 759723 - DNA, 25 bp, Homo sapien
tttttgtgccaagtaatgacctctt

SEQ ID NO: 759724 - DNA, 25 bp, Homo sapien
gtcactagaaaagacatcattctca

SEQ ID NO: 759725 - DNA, 25 bp, Homo sapien
gcttgcttctgacagctgcatctca

SEQ ID NO: 759726 - DNA, 25 bp, Homo sapien
gcatctcaagttcctgccagtccaa

SEQ ID NO: 759727 - DNA, 25 bp, Homo sapien
tgaaggctttccaataatatgcttg

SEQ ID NO: 759728 - DNA, 25 bp, Homo sapien
ttgaaggctttccaataatatgctt

SEQ ID NO: 759729 - DNA, 25 bp, Homo sapien
gaaggctttccaataatatgcttgt

SEQ ID NO: 759730 - DNA, 25 bp, Homo sapien
atattgggccacttcgcaagtcttc

SEQ ID NO: 759731 - DNA, 25 bp, Homo sapien
gtctgttctggaaactctcttgcat

SEQ ID NO: 759732 - DNA, 25 bp, Homo sapien
tcttgcatatttacatattgggcca

SEQ ID NO: 759733 - DNA, 25 bp, Homo sapien
tgttctggaaactctcttgcatatt

SEQ ID NO: 759734 - DNA, 25 bp, Homo sapien
aattcccaaggagagatggaaatag

SEQ ID NO: 759735 - DNA, 25 bp, Homo sapien
gagagatggaaatagacaaccagct

SEQ ID NO: 759736 - DNA, 25 bp, Homo sapien
aaaccagggcagaagataattccca

SEQ ID NO: 759737 - DNA, 25 bp, Homo sapien
aagataattcccaaggagagatgga

SEQ ID NO: 759738 - DNA, 25 bp, Homo sapien
gtccaagtccctgacgtccaagatg

SEQ ID NO: 759739 - DNA, 25 bp, Homo sapien
gctttctaaggagaagctgataacc

SEQ ID NO: 759740 - DNA, 25 bp, Homo sapien
ggcaaggtcgtaatagccacagaaa

SEQ ID NO: 759741 - DNA, 25 bp, Homo sapien
tacagagggagtatctctggcagcc

SEQ ID NO: 759742 - DNA, 25 bp, Homo sapien
tttcttcaaaacaaggagattcctc

SEQ ID NO: 759743 - DNA, 25 bp, Homo sapien
ttcttcaaaacaaggagattcctca

SEQ ID NO: 759744 - DNA, 25 bp, Homo sapien
gatatggaagctgttggagacttga

SEQ ID NO: 759745 - DNA, 25 bp, Homo sapien
gagacttgagtaagttattcaaaaa

SEQ ID NO: 759746 - DNA, 25 bp, Homo sapien
ggaacaatggaggagtcaaaaagat

SEQ ID NO: 759747 - DNA, 25 bp, Homo sapien
tcttttccatcattagaaggtgctt

SEQ ID NO: 759748 - DNA, 25 bp, Homo sapien
tgttcatcctcaagggtgtgcaact

SEQ ID NO: 759749 - DNA, 25 bp, Homo sapien
gattaggcaacaataatttctcaaa

SEQ ID NO: 759750 - DNA, 25 bp, Homo sapien
gagcatcagtggcagatgggtctct

SEQ ID NO: 759751 - DNA, 25 bp, Homo sapien
tatccagtgacttccgagagtctgc

SEQ ID NO: 759752 - DNA, 25 bp, Homo sapien
caaatcacttcgttgccaaattcca

SEQ ID NO: 759753 - DNA, 25 bp, Homo sapien
tgccataggcccataattctagtaa

SEQ ID NO: 759754 - DNA, 25 bp, Homo sapien
tgcattcctgatagcgtagactgtg

SEQ ID NO: 759755 - DNA, 25 bp, Homo sapien
taaggaaagtcaacgaagagcctct

SEQ ID NO: 759756 - DNA, 25 bp, Homo sapien
caacattatgggtgggaagtatacc

SEQ ID NO: 759757 - DNA, 25 bp, Homo sapien
tttgaagccatgaaacggtacagtg

SEQ ID NO: 759758 - DNA, 25 bp, Homo sapien
aatttatatgtgagccatttgatga

SEQ ID NO: 759759 - DNA, 25 bp, Homo sapien
tatttagaaagtcagttacatcttt

SEQ ID NO: 759760 - DNA, 25 bp, Homo sapien
tttatatgtgagccatttgatgaac

SEQ ID NO: 759761 - DNA, 25 bp, Homo sapien
tctttcaagtaaatattgacacaat

SEQ ID NO: 759762 - DNA, 25 bp, Homo sapien
tttgtggaatcatttaaaagagcta

SEQ ID NO: 759763 - DNA, 25 bp, Homo sapien
gctttgtggaatcatttaaaagagc

SEQ ID NO: 759764 - DNA, 25 bp, Homo sapien
ccttacttgctttgtggaatcattt

SEQ ID NO: 759765 - DNA, 25 bp, Homo sapien
tggaatcatttaaaagagctaataa

SEQ ID NO: 759766 - DNA, 25 bp, Homo sapien
taaataccttttacaagcttctgaa

SEQ ID NO: 759767 - DNA, 25 bp, Homo sapien
tctgttgttaagttgttgatactca

SEQ ID NO: 759768 - DNA, 25 bp, Homo sapien
ctgaaggcaaggtaactagctaagt

SEQ ID NO: 759769 - DNA, 25 bp, Homo sapien
ccaattggactgagatgcaaaatca

SEQ ID NO: 759770 - DNA, 25 bp, Homo sapien
ccttatcagttgaataccaagacct

SEQ ID NO: 759771 - DNA, 25 bp, Homo sapien
gtgatgaactacaggcattaaggag

SEQ ID NO: 759772 - DNA, 25 bp, Homo sapien
ctgtagctttcattatttcaggtga

SEQ ID NO: 759773 - DNA, 25 bp, Homo sapien
catataacctgcattttgtggacta

SEQ ID NO: 759774 - DNA, 25 bp, Homo sapien
gccttcttaagggtacgcatgacag

SEQ ID NO: 759775 - DNA, 25 bp, Homo sapien
ttcaagctgatccactaaaaggtct

SEQ ID NO: 759776 - DNA, 25 bp, Homo sapien
cattccaagaatgtgagctgtctgc

SEQ ID NO: 759777 - DNA, 25 bp, Homo sapien
tgcaggagccttacagcatgaggaa

SEQ ID NO: 759778 - DNA, 25 bp, Homo sapien
tgaaataatatctggcttatctgat

SEQ ID NO: 759779 - DNA, 25 bp, Homo sapien
caatgacggtgaatccaggatttcc

SEQ ID NO: 759780 - DNA, 25 bp, Homo sapien
gacagagttcagagatgctatccct

SEQ ID NO: 759781 - DNA, 25 bp, Homo sapien
gacatgagcccatggacattgcagg

SEQ ID NO: 759782 - DNA, 25 bp, Homo sapien
gaaatgatcaagtatactggccact

SEQ ID NO: 759783 - DNA, 25 bp, Homo sapien
gcaactgcatatatgacacaaagca

SEQ ID NO: 759784 - DNA, 25 bp, Homo sapien
agtagtttgagatatatcgcaactg

SEQ ID NO: 759785 - DNA, 25 bp, Homo sapien
tatatcgcaactgcatatatgacac

SEQ ID NO: 759786 - DNA, 25 bp, Homo sapien
gatctttcaaaggtattagatacaa

SEQ ID NO: 759787 - DNA, 25 bp, Homo sapien
caatctgtcttgtatcatcagggta

SEQ ID NO: 759788 - DNA, 25 bp, Homo sapien
cagggtaagaaattgatccagtttc

SEQ ID NO: 759789 - DNA, 25 bp, Homo sapien
gaacttcagtccttgatgagtatca

SEQ ID NO: 759790 - DNA, 25 bp, Homo sapien
taaataaatcttgcatgaacttcag

SEQ ID NO: 759791 - DNA, 25 bp, Homo sapien
taaaaactgtggacatcttccccga

SEQ ID NO: 759792 - DNA, 25 bp, Homo sapien
tgttaaatgctaccgcaagactcct

SEQ ID NO: 759793 - DNA, 25 bp, Homo sapien
tgtggcaagatctctcaggtcagca

SEQ ID NO: 759794 - DNA, 25 bp, Homo sapien
ccaaagagcttctaaggtgagacag

SEQ ID NO: 759795 - DNA, 25 bp, Homo sapien
cactgtaattcctgcatggttctat

SEQ ID NO: 759796 - DNA, 25 bp, Homo sapien
tcctgcatggttctattttatagct

SEQ ID NO: 759797 - DNA, 25 bp, Homo sapien
cccgattcactgtaattcctgcatg

SEQ ID NO: 759798 - DNA, 25 bp, Homo sapien
ttcctgcatggttctattttatagc

SEQ ID NO: 759799 - DNA, 25 bp, Homo sapien
tgcaacgatggtgagcacacgtacg

SEQ ID NO: 759800 - DNA, 25 bp, Homo sapien
cttctgagggcttcacagtctgctg

SEQ ID NO: 759801 - DNA, 25 bp, Homo sapien
gagggcttcacagtctgctggaaaa

SEQ ID NO: 759802 - DNA, 25 bp, Homo sapien
tgagcacacgtacgaccatcatctt

SEQ ID NO: 759803 - DNA, 25 bp, Homo sapien
ccactgccatcagctaagacagggt

SEQ ID NO: 759804 - DNA, 25 bp, Homo sapien
aagacagggtactcaggcccagtag

SEQ ID NO: 759805 - DNA, 25 bp, Homo sapien
tcagctaagacagggtactcaggcc

SEQ ID NO: 759806 - DNA, 25 bp, Homo sapien
tcaaaacccactgccatcagctaag

SEQ ID NO: 759807 - DNA, 25 bp, Homo sapien
tgttgggaatacgtccactgtgccc

SEQ ID NO: 759808 - DNA, 25 bp, Homo sapien
ggatgttgggaatacgtccactgtg

SEQ ID NO: 759809 - DNA, 25 bp, Homo sapien
tgggaatacgtccactgtgcccctt

SEQ ID NO: 759810 - DNA, 25 bp, Homo sapien
tcttctgatagtggatgttgggaat

SEQ ID NO: 759811 - DNA, 25 bp, Homo sapien
agcttctttctagcacttatcaata

SEQ ID NO: 759812 - DNA, 25 bp, Homo sapien
cataccgctccccagtagatgctgg

SEQ ID NO: 759813 - DNA, 25 bp, Homo sapien
caccctcatggccatactttagctt

SEQ ID NO: 759814 - DNA, 25 bp, Homo sapien
tctagcacttatcaatacaaagaaa

SEQ ID NO: 759815 - DNA, 25 bp, Homo sapien
cctaacttgtacttagattgtaaca

SEQ ID NO: 759816 - DNA, 25 bp, Homo sapien
tacttagattgtaacactttactga

SEQ ID NO: 759817 - DNA, 25 bp, Homo sapien
caaatgctgaaatcatgtaccaacc

SEQ ID NO: 759818 - DNA, 25 bp, Homo sapien
catgtaccaaccatcctaacttgta

SEQ ID NO: 759819 - DNA, 25 bp, Homo sapien
tgacaacgtggagtcgacagtgacc

SEQ ID NO: 759820 - DNA, 25 bp, Homo sapien
acgtggagtcgacagtgaccaagcc

SEQ ID NO: 759821 - DNA, 25 bp, Homo sapien
aaatgacaacgtggagtcgacagtg

SEQ ID NO: 759822 - DNA, 25 bp, Homo sapien
aacgtggagtcgacagtgaccaagc

SEQ ID NO: 759823 - DNA, 25 bp, Homo sapien
gagatgccttatcccattttgcttg

SEQ ID NO: 759824 - DNA, 25 bp, Homo sapien
aagtgaccccttgtatagcagataa

SEQ ID NO: 759825 - DNA, 25 bp, Homo sapien
tcagagtagcacacaaaatgtcctt

SEQ ID NO: 759826 - DNA, 25 bp, Homo sapien
tggaagtggtcctgcgccaaagtga

SEQ ID NO: 759827 - DNA, 25 bp, Homo sapien
cagcagacagctgtaggggcaaact

SEQ ID NO: 759828 - DNA, 25 bp, Homo sapien
caggaacactaccagcagacagctg

SEQ ID NO: 759829 - DNA, 25 bp, Homo sapien
gaggttcacaacccagtgcaggaac

SEQ ID NO: 759830 - DNA, 25 bp, Homo sapien
acactaccagcagacagctgtaggg

SEQ ID NO: 759831 - DNA, 25 bp, Homo sapien
gttggtaagggtgtgcaggataggg

SEQ ID NO: 759832 - DNA, 25 bp, Homo sapien
agggtgtgcaggatagggaaacctt

SEQ ID NO: 759833 - DNA, 25 bp, Homo sapien
gtaagggtgtgcaggatagggaaac

SEQ ID NO: 759834 - DNA, 25 bp, Homo sapien
gtgtgcaggatagggaaaccttgtg

SEQ ID NO: 759835 - DNA, 25 bp, Homo sapien
caatttagctgattcggcgaggacc

SEQ ID NO: 759836 - DNA, 25 bp, Homo sapien
tcttgaagctctccaaggtgctaga

SEQ ID NO: 759837 - DNA, 25 bp, Homo sapien
gcctcggctggcttgtgcagtcctg

SEQ ID NO: 759838 - DNA, 25 bp, Homo sapien
aagattcttgctaagactttcacaa

SEQ ID NO: 759839 - DNA, 25 bp, Homo sapien
agaaaagtcatgatgggattccctg

SEQ ID NO: 759840 - DNA, 25 bp, Homo sapien
caagtttcctcgaggcttttggcca

SEQ ID NO: 759841 - DNA, 25 bp, Homo sapien
tgaccaagtttcctcgaggcttttg

SEQ ID NO: 759842 - DNA, 25 bp, Homo sapien
catgatgggattccctgatgaccaa

SEQ ID NO: 759843 - DNA, 25 bp, Homo sapien
tttggatggaagagcgaagctcctc

SEQ ID NO: 759844 - DNA, 25 bp, Homo sapien
acttggtgatattcttcatcaaatc

SEQ ID NO: 759845 - DNA, 25 bp, Homo sapien
aatgctatggatagtctcattcgag

SEQ ID NO: 759846 - DNA, 25 bp, Homo sapien
ggatagtctcattcgagatttggat

SEQ ID NO: 759847 - DNA, 25 bp, Homo sapien
ctctgtacaggaagataaaacccca

SEQ ID NO: 759848 - DNA, 25 bp, Homo sapien
gtcagctccacggttactacttctg

SEQ ID NO: 759849 - DNA, 25 bp, Homo sapien
ctggaaggttctctgtacaggaaga

SEQ ID NO: 759850 - DNA, 25 bp, Homo sapien
aaatctcctgctaaggatccaggtg

SEQ ID NO: 759851 - DNA, 25 bp, Homo sapien
tcagctcagttgtgaccggaaggga

SEQ ID NO: 759852 - DNA, 25 bp, Homo sapien
gaatcgcattcagaggagagcacca

SEQ ID NO: 759853 - DNA, 25 bp, Homo sapien
aaaataggccctacgcccttcagag

SEQ ID NO: 759854 - DNA, 25 bp, Homo sapien
tattggacatctgctgaaacccgaa

SEQ ID NO: 759855 - DNA, 25 bp, Homo sapien
gagtaacctgctgtacaggtttgta

SEQ ID NO: 759856 - DNA, 25 bp, Homo sapien
cacagtattcagtagagtaacctgc

SEQ ID NO: 759857 - DNA, 25 bp, Homo sapien
gcccacagtattcagtagagtaacc

SEQ ID NO: 759858 - DNA, 25 bp, Homo sapien
cacgatgttacaattgcccacagta

SEQ ID NO: 759859 - DNA, 25 bp, Homo sapien
gagcttcatcggcagggagtcgccc

SEQ ID NO: 759860 - DNA, 25 bp, Homo sapien
tcagaccggagcttcatcggcaggg

SEQ ID NO: 759861 - DNA, 25 bp, Homo sapien
tggatttcccaactcccgggactga

SEQ ID NO: 759862 - DNA, 25 bp, Homo sapien
cagggagtcgcccaagagtggattt

SEQ ID NO: 759863 - DNA, 25 bp, Homo sapien
gtaaatgaaagctcgcacatccaag

SEQ ID NO: 759864 - DNA, 25 bp, Homo sapien
ttccagacagagctacggtgagggc

SEQ ID NO: 759865 - DNA, 25 bp, Homo sapien
gaatacacttttgaccctggcaggc

SEQ ID NO: 759866 - DNA, 25 bp, Homo sapien
ggatttcctgatcacactttccaga

SEQ ID NO: 759867 - DNA, 25 bp, Homo sapien
gaggatcatgcttgtcagagccggc

SEQ ID NO: 759868 - DNA, 25 bp, Homo sapien
aggatcatgcttgtcagagccggca

SEQ ID NO: 759869 - DNA, 25 bp, Homo sapien
tcatgcttgtcagagccggcacaca

SEQ ID NO: 759870 - DNA, 25 bp, Homo sapien
gatcatgcttgtcagagccggcaca

SEQ ID NO: 759871 - DNA, 25 bp, Homo sapien
agaggcactctgcttataatgacag

SEQ ID NO: 759872 - DNA, 25 bp, Homo sapien
aatgccagctcttcgcacagagcag

SEQ ID NO: 759873 - DNA, 25 bp, Homo sapien
actttcagggctccgggatcacagc

SEQ ID NO: 759874 - DNA, 25 bp, Homo sapien
tagagacaactctagcaggagaaat

SEQ ID NO: 759875 - DNA, 25 bp, Homo sapien
agacgtgctgggctttggcaagcaa

SEQ ID NO: 759876 - DNA, 25 bp, Homo sapien
ggcgctgaggctggaaactatatcc

SEQ ID NO: 759877 - DNA, 25 bp, Homo sapien
ctcaggaagatactcaaagacgtgc

SEQ ID NO: 759878 - DNA, 25 bp, Homo sapien
aaagtccagggtttctagcaaggca

SEQ ID NO: 759879 - DNA, 25 bp, Homo sapien
gaacttctggcctggacattttgtg

SEQ ID NO: 759880 - DNA, 25 bp, Homo sapien
ctgaacttctggcctggacattttg

SEQ ID NO: 759881 - DNA, 25 bp, Homo sapien
acttctggcctggacattttgtgaa

SEQ ID NO: 759882 - DNA, 25 bp, Homo sapien
ttctggcctggacattttgtgaaac

SEQ ID NO: 759883 - DNA, 25 bp, Homo sapien
gaatgatgcttggtccttgcaaacc

SEQ ID NO: 759884 - DNA, 25 bp, Homo sapien
taataaacatattagaatcgctaag

SEQ ID NO: 759885 - DNA, 25 bp, Homo sapien
tattagaatcgctaaggaatgatgc

SEQ ID NO: 759886 - DNA, 25 bp, Homo sapien
taaggaatgatgcttggtccttgca

SEQ ID NO: 759887 - DNA, 25 bp, Homo sapien
ttttccatgcaatatgggttttagg

SEQ ID NO: 759888 - DNA, 25 bp, Homo sapien
caaagcaccatttggcaattgtaga

SEQ ID NO: 759889 - DNA, 25 bp, Homo sapien
tgataaagcttcaagcaaaacggtg

SEQ ID NO: 759890 - DNA, 25 bp, Homo sapien
tttaggaaggtccacaccaaagcac

SEQ ID NO: 759891 - DNA, 25 bp, Homo sapien
taaggctgatagatggaggtgcaca

SEQ ID NO: 759892 - DNA, 25 bp, Homo sapien
ggctgatagatggaggtgcacacag

SEQ ID NO: 759893 - DNA, 25 bp, Homo sapien
aggctgatagatggaggtgcacaca

SEQ ID NO: 759894 - DNA, 25 bp, Homo sapien
aaggctgatagatggaggtgcacac

SEQ ID NO: 759895 - DNA, 25 bp, Homo sapien
agatacttcttaagaaggttggagg

SEQ ID NO: 759896 - DNA, 25 bp, Homo sapien
ttgggggtgcctgaggagagaagat

SEQ ID NO: 759897 - DNA, 25 bp, Homo sapien
tacttcttaagaaggttggaggata

SEQ ID NO: 759898 - DNA, 25 bp, Homo sapien
tgggggtgcctgaggagagaagata

SEQ ID NO: 759899 - DNA, 25 bp, Homo sapien
cttctccaactgctggaggctccat

SEQ ID NO: 759900 - DNA, 25 bp, Homo sapien
ccccttcttctccaactgctggagg

SEQ ID NO: 759901 - DNA, 25 bp, Homo sapien
ttcttctccaactgctggaggctcc

SEQ ID NO: 759902 - DNA, 25 bp, Homo sapien
ctgggctcctaagaagtccccttct

SEQ ID NO: 759903 - DNA, 25 bp, Homo sapien
tgcagctggttgaacatctggccac

SEQ ID NO: 759904 - DNA, 25 bp, Homo sapien
tagtttgtccacaatataaaaggtg

SEQ ID NO: 759905 - DNA, 25 bp, Homo sapien
cagctggttgaacatctggccactt

SEQ ID NO: 759906 - DNA, 25 bp, Homo sapien
ccacaatataaaaggtgtaattagc

SEQ ID NO: 759907 - DNA, 25 bp, Homo sapien
tgcaactggttttctacaaagtttc

SEQ ID NO: 759908 - DNA, 25 bp, Homo sapien
tgtctacatcaatgtgcaactggtt

SEQ ID NO: 759909 - DNA, 25 bp, Homo sapien
ttcagtaagtttgtctacatcaatg

SEQ ID NO: 759910 - DNA, 25 bp, Homo sapien
catcaatgtgcaactggttttctac

SEQ ID NO: 759911 - DNA, 25 bp, Homo sapien
ccaggtactgtttataggatgaaga

SEQ ID NO: 759912 - DNA, 25 bp, Homo sapien
tcaaatagtcacctcagtttccagg

SEQ ID NO: 759913 - DNA, 25 bp, Homo sapien
ctcagtttccaggtactgtttatag

SEQ ID NO: 759914 - DNA, 25 bp, Homo sapien
caaatagtcacctcagtttccaggt

SEQ ID NO: 759915 - DNA, 25 bp, Homo sapien
ctgtgggcatttgtccccggacatg

SEQ ID NO: 759916 - DNA, 25 bp, Homo sapien
catttgtccccggacatggcagcat

SEQ ID NO: 759917 - DNA, 25 bp, Homo sapien
tttgtccccggacatggcagcatca

SEQ ID NO: 759918 - DNA, 25 bp, Homo sapien
gcatcagtacccactgacagctgcc

SEQ ID NO: 759919 - DNA, 25 bp, Homo sapien
tccaccctccatcgaagcttggagc

SEQ ID NO: 759920 - DNA, 25 bp, Homo sapien
accctccatcgaagcttggagccta

SEQ ID NO: 759921 - DNA, 25 bp, Homo sapien
tttccaccctccatcgaagcttgga

SEQ ID NO: 759922 - DNA, 25 bp, Homo sapien
caccctccatcgaagcttggagcct

SEQ ID NO: 759923 - DNA, 25 bp, Homo sapien
tctccaggatgtcgacagactgcag

SEQ ID NO: 759924 - DNA, 25 bp, Homo sapien
gagagattgaccaagatgctgccca

SEQ ID NO: 759925 - DNA, 25 bp, Homo sapien
tgctgcccaagaaacggaagcgtcc

SEQ ID NO: 759926 - DNA, 25 bp, Homo sapien
cggttcagtgccacgcaggaagaga

SEQ ID NO: 759927 - DNA, 25 bp, Homo sapien
gcatcttggcgaacatattttttca

SEQ ID NO: 759928 - DNA, 25 bp, Homo sapien
ggcatcttggcgaacatattttttc

SEQ ID NO: 759929 - DNA, 25 bp, Homo sapien
ctgaagttcttgtcgaataaggaat

SEQ ID NO: 759930 - DNA, 25 bp, Homo sapien
tagattctgagggtggaacttccaa

SEQ ID NO: 759931 - DNA, 25 bp, Homo sapien
cattggtccggattgtgtatgagac

SEQ ID NO: 759932 - DNA, 25 bp, Homo sapien
cacatctgttcgcacgctgtataac

SEQ ID NO: 759933 - DNA, 25 bp, Homo sapien
tggctctttcgatcatgtcttgcag

SEQ ID NO: 759934 - DNA, 25 bp, Homo sapien
ctggcctccctgatggctgttttaa

SEQ ID NO: 759935 - DNA, 25 bp, Homo sapien
cctgatggctgttttaatgcctcca

SEQ ID NO: 759936 - DNA, 25 bp, Homo sapien
atagtctcccgtcctctctgcaaac

SEQ ID NO: 759937 - DNA, 25 bp, Homo sapien
tcactgagccccagtccgaccatag

SEQ ID NO: 759938 - DNA, 25 bp, Homo sapien
cgctgagggtcatcaagaatgggaa

SEQ ID NO: 759939 - DNA, 25 bp, Homo sapien
caggacagagcctgcgggcaacaga

SEQ ID NO: 759940 - DNA, 25 bp, Homo sapien
agctctgagcgctgagggtcatcaa

SEQ ID NO: 759941 - DNA, 25 bp, Homo sapien
tgcgttggtgggacaggacagagcc

SEQ ID NO: 759942 - DNA, 25 bp, Homo sapien
atacaccaactttctgaccatgctg

SEQ ID NO: 759943 - DNA, 25 bp, Homo sapien
caccaactttctgaccatgctggcc

SEQ ID NO: 759944 - DNA, 25 bp, Homo sapien
tcatacaccaactttctgaccatgc

SEQ ID NO: 759945 - DNA, 25 bp, Homo sapien
tacaccaactttctgaccatgctgg

SEQ ID NO: 759946 - DNA, 25 bp, Homo sapien
agtagcactgcttatggtcaacaca

SEQ ID NO: 759947 - DNA, 25 bp, Homo sapien
tagcttggctgaaaaatgcactcaa

SEQ ID NO: 759948 - DNA, 25 bp, Homo sapien
tacaccaggctggtacaaagggccg

SEQ ID NO: 759949 - DNA, 25 bp, Homo sapien
acttgttttcagaacgatggccaga

SEQ ID NO: 759950 - DNA, 25 bp, Homo sapien
caaaggcggttgtcgaaagaaggca

SEQ ID NO: 759951 - DNA, 25 bp, Homo sapien
tgtccttccaggaatgtaataaaaa

SEQ ID NO: 759952 - DNA, 25 bp, Homo sapien
cttgtccaaaggcggttgtcgaaag

SEQ ID NO: 759953 - DNA, 25 bp, Homo sapien
tcttgtccttccaggaatgtaataa

SEQ ID NO: 759954 - DNA, 25 bp, Homo sapien
gatagtgtctgaagcaagggatgcc

SEQ ID NO: 759955 - DNA, 25 bp, Homo sapien
cagacgtcaagggtggtataaggaa

SEQ ID NO: 759956 - DNA, 25 bp, Homo sapien
gtataaggaagacccaagcattggc

SEQ ID NO: 759957 - DNA, 25 bp, Homo sapien
gccatgattattcttgattgttctc

SEQ ID NO: 759958 - DNA, 25 bp, Homo sapien
aggcttgaatcaaaaagaatcatcc

SEQ ID NO: 759959 - DNA, 25 bp, Homo sapien
aagttgctcaagtaccatccacaca

SEQ ID NO: 759960 - DNA, 25 bp, Homo sapien
tcatccagcaaacccagccaaatgt

SEQ ID NO: 759961 - DNA, 25 bp, Homo sapien
aggaatcaagttgctcaagtaccat

SEQ ID NO: 759962 - DNA, 25 bp, Homo sapien
tggaagtcgtacaaagataaatatg

SEQ ID NO: 759963 - DNA, 25 bp, Homo sapien
aatatgatttcaaacttagggccat

SEQ ID NO: 759964 - DNA, 25 bp, Homo sapien
tcagctctgcttcacttcgatataa

SEQ ID NO: 759965 - DNA, 25 bp, Homo sapien
tgagtgtacgcaaggaaatcctgaa

SEQ ID NO: 759966 - DNA, 25 bp, Homo sapien
cccacactcttccaatatgaggcag

SEQ ID NO: 759967 - DNA, 25 bp, Homo sapien
gactagaacttagaaagtattgcct

SEQ ID NO: 759968 - DNA, 25 bp, Homo sapien
ccacactcttccaatatgaggcagt

SEQ ID NO: 759969 - DNA, 25 bp, Homo sapien
attgaagaagaacagactagaactt

SEQ ID NO: 759970 - DNA, 25 bp, Homo sapien
agccttgtggccctcatattccttg

SEQ ID NO: 759971 - DNA, 25 bp, Homo sapien
tgactcccggggcacttccttcaag

SEQ ID NO: 759972 - DNA, 25 bp, Homo sapien
gtcaggctgaggtcttggaccacag

SEQ ID NO: 759973 - DNA, 25 bp, Homo sapien
ccagcagggcggtgatttggtctct

SEQ ID NO: 759974 - DNA, 25 bp, Homo sapien
aatgcccagtgtttgataagggtaa

SEQ ID NO: 759975 - DNA, 25 bp, Homo sapien
cagtgtttgataagggtaaaatggg

SEQ ID NO: 759976 - DNA, 25 bp, Homo sapien
tcaaatgcccagtgtttgataaggg

SEQ ID NO: 759977 - DNA, 25 bp, Homo sapien
tgcccagtgtttgataagggtaaaa

SEQ ID NO: 759978 - DNA, 25 bp, Homo sapien
tgaacgtcagcaatccagtcagctc

SEQ ID NO: 759979 - DNA, 25 bp, Homo sapien
cgtcagcaatccagtcagctccagg

SEQ ID NO: 759980 - DNA, 25 bp, Homo sapien
aacgtcagcaatccagtcagctcca

SEQ ID NO: 759981 - DNA, 25 bp, Homo sapien
ctgtgaacgtcagcaatccagtcag

SEQ ID NO: 759982 - DNA, 25 bp, Homo sapien
gacagcatggagaatacgcgttgct

SEQ ID NO: 759983 - DNA, 25 bp, Homo sapien
gcatggagaatacgcgttgctgata

SEQ ID NO: 759984 - DNA, 25 bp, Homo sapien
cagcatggagaatacgcgttgctga

SEQ ID NO: 759985 - DNA, 25 bp, Homo sapien
agcatggagaatacgcgttgctgat

SEQ ID NO: 759986 - DNA, 25 bp, Homo sapien
aaagagcagcaaatgttcccggacg

SEQ ID NO: 759987 - DNA, 25 bp, Homo sapien
cactgaggcgcctttatggaagcaa

SEQ ID NO: 759988 - DNA, 25 bp, Homo sapien
cccggacggtgaggttgtccaacag

SEQ ID NO: 759989 - DNA, 25 bp, Homo sapien
caggtctgtctgtaggttcttgcca

SEQ ID NO: 759990 - DNA, 25 bp, Homo sapien
ggaggagcagagagacaactgttta

SEQ ID NO: 759991 - DNA, 25 bp, Homo sapien
catggttgacgttctgctttgcaaa

SEQ ID NO: 759992 - DNA, 25 bp, Homo sapien
acacactcacgccatggttgacgtt

SEQ ID NO: 759993 - DNA, 25 bp, Homo sapien
tcacgccatggttgacgttctgctt

SEQ ID NO: 759994 - DNA, 25 bp, Homo sapien
aagcatgcagcactagccccaggag

SEQ ID NO: 759995 - DNA, 25 bp, Homo sapien
tacttgagcagaatgtcccacaggc

SEQ ID NO: 759996 - DNA, 25 bp, Homo sapien
acggtcctcgacatgcccatgaaag

SEQ ID NO: 759997 - DNA, 25 bp, Homo sapien
tcccacaggctatgccgggagcaag

SEQ ID NO: 759998 - DNA, 25 bp, Homo sapien
tgctgagttaagtccacatcctgaa

SEQ ID NO: 759999 - DNA, 25 bp, Homo sapien
acagtagcaatgcatttcctgcaac

SEQ ID NO: 760000 - DNA, 25 bp, Homo sapien
cctgcaacacaatattgtgggaaga

SEQ ID NO: 760001 - DNA, 25 bp, Homo sapien
tgggatacaacttgattctactgta

SEQ ID NO: 760002 - DNA, 25 bp, Homo sapien
gattctactgtacagtagcaatgca

SEQ ID NO: 760003 - DNA, 25 bp, Homo sapien
aacatggacaagaggttcaacatcc

SEQ ID NO: 760004 - DNA, 25 bp, Homo sapien
cctagctgtcaggattgcagaaaga

SEQ ID NO: 760005 - DNA, 25 bp, Homo sapien
tagctacaagtaaatcacatgcccg

SEQ ID NO: 760006 - DNA, 25 bp, Homo sapien
caagggaggcttgtcctatgatctg

SEQ ID NO: 760007 - DNA, 25 bp, Homo sapien
actcagcgcttcagcttcatccagg

SEQ ID NO: 760008 - DNA, 25 bp, Homo sapien
tggaggacggccacgcggtcactca

SEQ ID NO: 760009 - DNA, 25 bp, Homo sapien
ctcgtgagtgtcaggcggagcccct

SEQ ID NO: 760010 - DNA, 25 bp, Homo sapien
ggcagaagggaggaccgcagcacct

SEQ ID NO: 760011 - DNA, 25 bp, Homo sapien
ggaatatagatctttatcagggatg

SEQ ID NO: 760012 - DNA, 25 bp, Homo sapien
tccagggcctggaagagccctttca

SEQ ID NO: 760013 - DNA, 25 bp, Homo sapien
cctttggaatggtgtaggtcagctc

SEQ ID NO: 760014 - DNA, 25 bp, Homo sapien
tgtctgagatcccatagcccgtcag

SEQ ID NO: 760015 - DNA, 25 bp, Homo sapien
attaaagcacgcttcagttttctca

SEQ ID NO: 760016 - DNA, 25 bp, Homo sapien
tgtggactggtcaaaaaggcataaa

SEQ ID NO: 760017 - DNA, 25 bp, Homo sapien
gactggtcaaaaaggcataaataat

SEQ ID NO: 760018 - DNA, 25 bp, Homo sapien
ttaatgtggactggtcaaaaaggca

SEQ ID NO: 760019 - DNA, 25 bp, Homo sapien
tggaaggactgaagtacagcaagct

SEQ ID NO: 760020 - DNA, 25 bp, Homo sapien
aagtacagcaagctcttaacaggcc

SEQ ID NO: 760021 - DNA, 25 bp, Homo sapien
attctgagcatggaaggactgaagt

SEQ ID NO: 760022 - DNA, 25 bp, Homo sapien
acagcaagctcttaacaggcccgag

SEQ ID NO: 760023 - DNA, 25 bp, Homo sapien
ggaatcttgcaaaagcatcaaaaac

SEQ ID NO: 760024 - DNA, 25 bp, Homo sapien
tgtcctgtaggcctgtggttctgca

SEQ ID NO: 760025 - DNA, 25 bp, Homo sapien
tgttggaatcttgcaaaagcatcaa

SEQ ID NO: 760026 - DNA, 25 bp, Homo sapien
gccagacagatgtcctgtaggcctg

SEQ ID NO: 760027 - DNA, 25 bp, Homo sapien
catgcaaatccattaccaggagggt

SEQ ID NO: 760028 - DNA, 25 bp, Homo sapien
gaagccatgatttggtcccaaaggg

SEQ ID NO: 760029 - DNA, 25 bp, Homo sapien
acagaggtcgcatgaaggcaaagcc

SEQ ID NO: 760030 - DNA, 25 bp, Homo sapien
gctgcatacaaaagctgaagccatg

SEQ ID NO: 760031 - DNA, 25 bp, Homo sapien
taaaaattctgcatatatgtgacat

SEQ ID NO: 760032 - DNA, 25 bp, Homo sapien
tatgtataccttgtgaagcggctaa

SEQ ID NO: 760033 - DNA, 25 bp, Homo sapien
taaaccgagctaatcaacatatgca

SEQ ID NO: 760034 - DNA, 25 bp, Homo sapien
tatgtgacattatgtagcatttgcc

SEQ ID NO: 760035 - DNA, 25 bp, Homo sapien
catgccacttgacttgatctagagt

SEQ ID NO: 760036 - DNA, 25 bp, Homo sapien
gagtttgactggttgattcctcaac

SEQ ID NO: 760037 - DNA, 25 bp, Homo sapien
gacttgatctagagtaaaagctggc

SEQ ID NO: 760038 - DNA, 25 bp, Homo sapien
acatgggcaacgtgagagtttgact

SEQ ID NO: 760039 - DNA, 25 bp, Homo sapien
tgggaaaaccccagcttatgtgtgg

SEQ ID NO: 760040 - DNA, 25 bp, Homo sapien
ttcattcagggaataaccccacggc

SEQ ID NO: 760041 - DNA, 25 bp, Homo sapien
ttccccgcagggcataggagagccc

SEQ ID NO: 760042 - DNA, 25 bp, Homo sapien
ttatgtgtgggtcgggattcattca

SEQ ID NO: 760043 - DNA, 25 bp, Homo sapien
gaggtgacagcgctttgcctcgttt

SEQ ID NO: 760044 - DNA, 25 bp, Homo sapien
tgaccctgcggcatctcgcagccat

SEQ ID NO: 760045 - DNA, 25 bp, Homo sapien
tcggtgaccctgcggcatctcgcag

SEQ ID NO: 760046 - DNA, 25 bp, Homo sapien
cctcgtttgccctctcggtgaccct

SEQ ID NO: 760047 - DNA, 25 bp, Homo sapien
gacgccctgcacagttgcgggccgt

SEQ ID NO: 760048 - DNA, 25 bp, Homo sapien
ctggacgccctgcacagttgcgggc

SEQ ID NO: 760049 - DNA, 25 bp, Homo sapien
agttgcgggccgtgctagggagcca

SEQ ID NO: 760050 - DNA, 25 bp, Homo sapien
ccctgcacagttgcgggccgtgcta

SEQ ID NO: 760051 - DNA, 25 bp, Homo sapien
agcaggtcggcgagggtgctcttcc

SEQ ID NO: 760052 - DNA, 25 bp, Homo sapien
caaggccacgaagaggactggcagc

SEQ ID NO: 760053 - DNA, 25 bp, Homo sapien
ccgggccaggatcgcggccacttgt

SEQ ID NO: 760054 - DNA, 25 bp, Homo sapien
ttcccggcgcgcagcgtgcggcgga

SEQ ID NO: 760055 - DNA, 25 bp, Homo sapien
aagtaggtctcggcccgctggtaat

SEQ ID NO: 760056 - DNA, 25 bp, Homo sapien
cccgctggtaatgtccaggtgtgag

SEQ ID NO: 760057 - DNA, 25 bp, Homo sapien
tggtaatgtccaggtgtgagtctga

SEQ ID NO: 760058 - DNA, 25 bp, Homo sapien
ggtctcggcccgctggtaatgtcca

SEQ ID NO: 760059 - DNA, 25 bp, Homo sapien
acagccatggccgtgcccggcaagg

SEQ ID NO: 760060 - DNA, 25 bp, Homo sapien
tgaatctagagaggagcccgctaaa

SEQ ID NO: 760061 - DNA, 25 bp, Homo sapien
tggatcacagccatggccgtgcccg

SEQ ID NO: 760062 - DNA, 25 bp, Homo sapien
cctgactctgcacagattctcctga

SEQ ID NO: 760063 - DNA, 25 bp, Homo sapien
tctgctggcatgctaacaggagaag

SEQ ID NO: 760064 - DNA, 25 bp, Homo sapien
gagtcctacacttgctccttctagg

SEQ ID NO: 760065 - DNA, 25 bp, Homo sapien
gaactggtgtagcaaccaggacttg

SEQ ID NO: 760066 - DNA, 25 bp, Homo sapien
catacatccactggccctcttgggt

SEQ ID NO: 760067 - DNA, 25 bp, Homo sapien
ccatgactgagaggaagaatgctct

SEQ ID NO: 760068 - DNA, 25 bp, Homo sapien
ttacattgagaaagcagcttctgtg

SEQ ID NO: 760069 - DNA, 25 bp, Homo sapien
gacatgcaaagtcggtccagagttt

SEQ ID NO: 760070 - DNA, 25 bp, Homo sapien
tatgacctggacgaagcctggtgtg

SEQ ID NO: 760071 - DNA, 25 bp, Homo sapien
tggactgtaaaaggaccatgggcga

SEQ ID NO: 760072 - DNA, 25 bp, Homo sapien
actggactgtaaaaggaccatgggc

SEQ ID NO: 760073 - DNA, 25 bp, Homo sapien
cactggactgtaaaaggaccatggg

SEQ ID NO: 760074 - DNA, 25 bp, Homo sapien
cccactggactgtaaaaggaccatg

SEQ ID NO: 760075 - DNA, 25 bp, Homo sapien
tatgggatttgctactagccaagca

SEQ ID NO: 760076 - DNA, 25 bp, Homo sapien
ggtcttgggctctatgggatttgct

SEQ ID NO: 760077 - DNA, 25 bp, Homo sapien
agtctttcgacctctcctgatccaa

SEQ ID NO: 760078 - DNA, 25 bp, Homo sapien
tgttgataaatttctggttccaggt

SEQ ID NO: 760079 - DNA, 25 bp, Homo sapien
tccgcagaagcacacgggtgaggtc

SEQ ID NO: 760080 - DNA, 25 bp, Homo sapien
tgatctctaaacttccgcagaagca

SEQ ID NO: 760081 - DNA, 25 bp, Homo sapien
cacgggtgaggtccaagttgtcgcc

SEQ ID NO: 760082 - DNA, 25 bp, Homo sapien
cgtgggtttaaatctgcacagggca

SEQ ID NO: 760083 - DNA, 25 bp, Homo sapien
ggatctgtgcgccagcatgaagaat

SEQ ID NO: 760084 - DNA, 25 bp, Homo sapien
gatctgtgcgccagcatgaagaatt

SEQ ID NO: 760085 - DNA, 25 bp, Homo sapien
gggatctgtgcgccagcatgaagaa

SEQ ID NO: 760086 - DNA, 25 bp, Homo sapien
gggagcactagcacttctatttgga

SEQ ID NO: 760087 - DNA, 25 bp, Homo sapien
ctgagagattcaacagtgtgtggcc

SEQ ID NO: 760088 - DNA, 25 bp, Homo sapien
gagagattcaacagtgtgtggccca

SEQ ID NO: 760089 - DNA, 25 bp, Homo sapien
caggtagggagcactagcacttcta

SEQ ID NO: 760090 - DNA, 25 bp, Homo sapien
atggtgccagcaagtactcctccat

SEQ ID NO: 760091 - DNA, 25 bp, Homo sapien
tgccagagttgggggttttgatatg

SEQ ID NO: 760092 - DNA, 25 bp, Homo sapien
atatgtttccatttgcacctccagc

SEQ ID NO: 760093 - DNA, 25 bp, Homo sapien
agcttcactggggatttttaatcca

SEQ ID NO: 760094 - DNA, 25 bp, Homo sapien
ttgcacctccagcttcactggggat

SEQ ID NO: 760095 - DNA, 25 bp, Homo sapien
catctatgtcgatgaatgtagccta

SEQ ID NO: 760096 - DNA, 25 bp, Homo sapien
tatgtcgatgaatgtagcctaaggg

SEQ ID NO: 760097 - DNA, 25 bp, Homo sapien
tcatctatgtcgatgaatgtagcct

SEQ ID NO: 760098 - DNA, 25 bp, Homo sapien
tctatgtcgatgaatgtagcctaag

SEQ ID NO: 760099 - DNA, 25 bp, Homo sapien
gcttggtagaattaccgctgcctca

SEQ ID NO: 760100 - DNA, 25 bp, Homo sapien
cctgagtgcaggattcaaagtaatg

SEQ ID NO: 760101 - DNA, 25 bp, Homo sapien
tggagaataaagtagcatgcctgtc

SEQ ID NO: 760102 - DNA, 25 bp, Homo sapien
tgtgacagataatccgcttggtaga

SEQ ID NO: 760103 - DNA, 25 bp, Homo sapien
aataaggttgtttagatgatttaag

SEQ ID NO: 760104 - DNA, 25 bp, Homo sapien
ggttgtttagatgatttaagtagga

SEQ ID NO: 760105 - DNA, 25 bp, Homo sapien
tagatgatttaagtaggaaggtagg

SEQ ID NO: 760106 - DNA, 25 bp, Homo sapien
tgtttagatgatttaagtaggaagg

SEQ ID NO: 760107 - DNA, 25 bp, Homo sapien
ctgcccatccatgtgaaattctgcc

SEQ ID NO: 760108 - DNA, 25 bp, Homo sapien
tacctcaagggctacagaacctttg

SEQ ID NO: 760109 - DNA, 25 bp, Homo sapien
tgacccgtgcaggatctcactttac

SEQ ID NO: 760110 - DNA, 25 bp, Homo sapien
gaactagccctctggaagtcaccag

SEQ ID NO: 760111 - DNA, 25 bp, Homo sapien
gagaatactgcatgtttgttcttta

SEQ ID NO: 760112 - DNA, 25 bp, Homo sapien
ccctgtgtgttcttagagaatactg

SEQ ID NO: 760113 - DNA, 25 bp, Homo sapien
ttttctatacccgattcctctagct

SEQ ID NO: 760114 - DNA, 25 bp, Homo sapien
ttcccctctgatcagttttactgtg

SEQ ID NO: 760115 - DNA, 25 bp, Homo sapien
aaggaaaggtagattccagatgcac

SEQ ID NO: 760116 - DNA, 25 bp, Homo sapien
aggactatgtcctgtgtaaggtcac

SEQ ID NO: 760117 - DNA, 25 bp, Homo sapien
taaggtcacctaagaggttgggtgc

SEQ ID NO: 760118 - DNA, 25 bp, Homo sapien
tctaaggaaaggtagattccagatg

SEQ ID NO: 760119 - DNA, 25 bp, Homo sapien
caagaagttaccgagtcctgttact

SEQ ID NO: 760120 - DNA, 25 bp, Homo sapien
cccacacatccaagaagttaccgag

SEQ ID NO: 760121 - DNA, 25 bp, Homo sapien
tactttcacgtgaactccatcctcg

SEQ ID NO: 760122 - DNA, 25 bp, Homo sapien
ccgagtcctgttactttcacgtgaa

SEQ ID NO: 760123 - DNA, 25 bp, Homo sapien
tgtgtggtcttgatccctcacctgt

SEQ ID NO: 760124 - DNA, 25 bp, Homo sapien
gaaaagtgagccttcagcctgctcc

SEQ ID NO: 760125 - DNA, 25 bp, Homo sapien
aaaagtgagccttcagcctgctcct

SEQ ID NO: 760126 - DNA, 25 bp, Homo sapien
tgaaaagtgagccttcagcctgctc

SEQ ID NO: 760127 - DNA, 25 bp, Homo sapien
attgaaaagtgagccttcagcctgc

SEQ ID NO: 760128 - DNA, 25 bp, Homo sapien
catatgggtggctgtagagtgttat

SEQ ID NO: 760129 - DNA, 25 bp, Homo sapien
ttcagcaaggcccctccatatgggt

SEQ ID NO: 760130 - DNA, 25 bp, Homo sapien
cagcaaggcccctccatatgggtgg

SEQ ID NO: 760131 - DNA, 25 bp, Homo sapien
caaggcccctccatatgggtggctg

SEQ ID NO: 760132 - DNA, 25 bp, Homo sapien
tacaacagatgtcagctagcctact

SEQ ID NO: 760133 - DNA, 25 bp, Homo sapien
ccatcgtgtcgcattctacaacaga

SEQ ID NO: 760134 - DNA, 25 bp, Homo sapien
ttcaggaggccgacacgatggaact

SEQ ID NO: 760135 - DNA, 25 bp, Homo sapien
gtcagacactgttaaagctagaacc

SEQ ID NO: 760136 - DNA, 25 bp, Homo sapien
agagctgccgatggatgcagacagg

SEQ ID NO: 760137 - DNA, 25 bp, Homo sapien
cacagagctgccgatggatgcagac

SEQ ID NO: 760138 - DNA, 25 bp, Homo sapien
acagagctgccgatggatgcagaca

SEQ ID NO: 760139 - DNA, 25 bp, Homo sapien
cagagctgccgatggatgcagacag

SEQ ID NO: 760140 - DNA, 25 bp, Homo sapien
gaagtttgtgaaccagtacatcctg

SEQ ID NO: 760141 - DNA, 25 bp, Homo sapien
gccaaggccacttatgtgctgcaac

SEQ ID NO: 760142 - DNA, 25 bp, Homo sapien
catataggaagtttgtgaaccagta

SEQ ID NO: 760143 - DNA, 25 bp, Homo sapien
tttggctccaatcaccctgtccctc

SEQ ID NO: 760144 - DNA, 25 bp, Homo sapien
ggaaggcgacaataacggcaacaca

SEQ ID NO: 760145 - DNA, 25 bp, Homo sapien
gacaataacggcaacacacaggcag

SEQ ID NO: 760146 - DNA, 25 bp, Homo sapien
aggcgacaataacggcaacacacag

SEQ ID NO: 760147 - DNA, 25 bp, Homo sapien
caggcagacggaaaccaagtaaaag

SEQ ID NO: 760148 - DNA, 25 bp, Homo sapien
tggctgccaagttcttgcggaaagt

SEQ ID NO: 760149 - DNA, 25 bp, Homo sapien
tcttgcggaaagtaaaagctgttaa

SEQ ID NO: 760150 - DNA, 25 bp, Homo sapien
caagttcttgcggaaagtaaaagct

SEQ ID NO: 760151 - DNA, 25 bp, Homo sapien
tgccaagttcttgcggaaagtaaaa

SEQ ID NO: 760152 - DNA, 25 bp, Homo sapien
tgcagcagcgtttctcatcacatac

SEQ ID NO: 760153 - DNA, 25 bp, Homo sapien
taggaaatgaaagccacgtccgaac

SEQ ID NO: 760154 - DNA, 25 bp, Homo sapien
tttggagatgatggctagcaaccgg

SEQ ID NO: 760155 - DNA, 25 bp, Homo sapien
atggttatgagcatggtacaaaggc

SEQ ID NO: 760156 - DNA, 25 bp, Homo sapien
gacatcaggtacatccatggaagag

SEQ ID NO: 760157 - DNA, 25 bp, Homo sapien
agttcttcctgaccacgggcctcag

SEQ ID NO: 760158 - DNA, 25 bp, Homo sapien
gttcttcctgaccacgggcctcagg

SEQ ID NO: 760159 - DNA, 25 bp, Homo sapien
tcttcctgaccacgggcctcaggct

SEQ ID NO: 760160 - DNA, 25 bp, Homo sapien
gaagttcttcctgaccacgggcctc

SEQ ID NO: 760161 - DNA, 25 bp, Homo sapien
accctcaagaggagaagtactgtgc

SEQ ID NO: 760162 - DNA, 25 bp, Homo sapien
caatgccgaagttgtgggtcaggtc

SEQ ID NO: 760163 - DNA, 25 bp, Homo sapien
gggactcacataggaatcaatgccg

SEQ ID NO: 760164 - DNA, 25 bp, Homo sapien
gcgaggccagttgcacgaagatcca

SEQ ID NO: 760165 - DNA, 25 bp, Homo sapien
gaagatttgactgtgccttggagag

SEQ ID NO: 760166 - DNA, 25 bp, Homo sapien
tctggaaaaagcgtcgataatgttt

SEQ ID NO: 760167 - DNA, 25 bp, Homo sapien
ctaaggttgtataacacaagaatgt

SEQ ID NO: 760168 - DNA, 25 bp, Homo sapien
caagaatgtctccattggtccttcc

SEQ ID NO: 760169 - DNA, 25 bp, Homo sapien
taccactcatgcacctttcagttct

SEQ ID NO: 760170 - DNA, 25 bp, Homo sapien
attgaagacaataccactcatgcac

SEQ ID NO: 760171 - DNA, 25 bp, Homo sapien
acagcattgaagacaataccactca

SEQ ID NO: 760172 - DNA, 25 bp, Homo sapien
cactcatgcacctttcagttctttt

SEQ ID NO: 760173 - DNA, 25 bp, Homo sapien
gagaaacttcaccattcagcatttt

SEQ ID NO: 760174 - DNA, 25 bp, Homo sapien
cctgaagttagagaaacttcaccat

SEQ ID NO: 760175 - DNA, 25 bp, Homo sapien
gagtcctgatgatagcatgtcctga

SEQ ID NO: 760176 - DNA, 25 bp, Homo sapien
cattcacccctagaagtccaaagca

SEQ ID NO: 760177 - DNA, 25 bp, Homo sapien
gaattaccctaggaacataccagga

SEQ ID NO: 760178 - DNA, 25 bp, Homo sapien
gggtaaagcctgtgactgccgactt

SEQ ID NO: 760179 - DNA, 25 bp, Homo sapien
gacagctgcatgtgaagactcatat

SEQ ID NO: 760180 - DNA, 25 bp, Homo sapien
tgagacatcggaaaaccatgagtcc

SEQ ID NO: 760181 - DNA, 25 bp, Homo sapien
ataagccatagcgtgaggttgcttt

SEQ ID NO: 760182 - DNA, 25 bp, Homo sapien
agccatagcgtgaggttgcttttga

SEQ ID NO: 760183 - DNA, 25 bp, Homo sapien
gcgtgaggttgcttttgacgtttaa

SEQ ID NO: 760184 - DNA, 25 bp, Homo sapien
catagcgtgaggttgcttttgacgt

SEQ ID NO: 760185 - DNA, 25 bp, Homo sapien
catgaagcgctagggagctcaaaca

SEQ ID NO: 760186 - DNA, 25 bp, Homo sapien
tctatgtaacgagagcagctgaaag

SEQ ID NO: 760187 - DNA, 25 bp, Homo sapien
cagctgaaagggagataaggtctcc

SEQ ID NO: 760188 - DNA, 25 bp, Homo sapien
tcccagtgaggacttcccatgaagc

SEQ ID NO: 760189 - DNA, 25 bp, Homo sapien
ataaggatctacgaagaccaacctg

SEQ ID NO: 760190 - DNA, 25 bp, Homo sapien
gctctgtgaatagctaaatttcttt

SEQ ID NO: 760191 - DNA, 25 bp, Homo sapien
gctgctctgtgaatagctaaatttc

SEQ ID NO: 760192 - DNA, 25 bp, Homo sapien
tttgggggcaaataaggatctacga

SEQ ID NO: 760193 - DNA, 25 bp, Homo sapien
acagtagccaatgagcacgcctgcc

SEQ ID NO: 760194 - DNA, 25 bp, Homo sapien
gtcagaagctcgtccagggcatcct

SEQ ID NO: 760195 - DNA, 25 bp, Homo sapien
agctacagtaataatagagatgttc

SEQ ID NO: 760196 - DNA, 25 bp, Homo sapien
tgcactgccttggaatcccgcgtaa

SEQ ID NO: 760197 - DNA, 25 bp, Homo sapien
ccttctcctcatagggtgagagagc

SEQ ID NO: 760198 - DNA, 25 bp, Homo sapien
tcaccaagcattcctcaatgggtcc

SEQ ID NO: 760199 - DNA, 25 bp, Homo sapien
gccagaggtggtcaccaagcattcc

SEQ ID NO: 760200 - DNA, 25 bp, Homo sapien
ctcatagggtgagagagctgccttg

SEQ ID NO: 760201 - DNA, 25 bp, Homo sapien
ccatgtgcacaccagcattcaccaa

SEQ ID NO: 760202 - DNA, 25 bp, Homo sapien
tgtccatgtgcacaccagcattcac

SEQ ID NO: 760203 - DNA, 25 bp, Homo sapien
gagaggcatgtccatgtgcacacca

SEQ ID NO: 760204 - DNA, 25 bp, Homo sapien
ctggaagagaggcatgtccatgtgc

SEQ ID NO: 760205 - DNA, 25 bp, Homo sapien
gccagggctgtagagagtttccgct

SEQ ID NO: 760206 - DNA, 25 bp, Homo sapien
ccacaggtttgtccgcgtgggcttc

SEQ ID NO: 760207 - DNA, 25 bp, Homo sapien
cgtgggcttcgaggtgtaagcgcct

SEQ ID NO: 760208 - DNA, 25 bp, Homo sapien
tgtagagagtttccgcttggttccc

SEQ ID NO: 760209 - DNA, 25 bp, Homo sapien
caggtaccgcttagagcagggatcc

SEQ ID NO: 760210 - DNA, 25 bp, Homo sapien
cccgaacctccttcattattgtttg

SEQ ID NO: 760211 - DNA, 25 bp, Homo sapien
ggtcagcaccgcagcacagccttcc

SEQ ID NO: 760212 - DNA, 25 bp, Homo sapien
ttattgtttgccacaggtaccgctt

SEQ ID NO: 760213 - DNA, 25 bp, Homo sapien
tagatgaactgctaactaaaataat

SEQ ID NO: 760214 - DNA, 25 bp, Homo sapien
gcacaagtatcactagctgaattga

SEQ ID NO: 760215 - DNA, 25 bp, Homo sapien
tgcacaagtatcactagctgaattg

SEQ ID NO: 760216 - DNA, 25 bp, Homo sapien
atgcacaagtatcactagctgaatt

SEQ ID NO: 760217 - DNA, 25 bp, Homo sapien
gctccagccatggttaaattgtccc

SEQ ID NO: 760218 - DNA, 25 bp, Homo sapien
cagataaatcccaggctactggtcc

SEQ ID NO: 760219 - DNA, 25 bp, Homo sapien
agagtgcaagcagtaagccttggtg

SEQ ID NO: 760220 - DNA, 25 bp, Homo sapien
ttaaattgtcccagataaatcccag

SEQ ID NO: 760221 - DNA, 25 bp, Homo sapien
acatttgaagctgccgttaaccatt

SEQ ID NO: 760222 - DNA, 25 bp, Homo sapien
tgaggagaaccaagacatttgaagc

SEQ ID NO: 760223 - DNA, 25 bp, Homo sapien
cattatggccagtcttgtgcaaaga

SEQ ID NO: 760224 - DNA, 25 bp, Homo sapien
tgccgttaaccattatggccagtct

SEQ ID NO: 760225 - DNA, 25 bp, Homo sapien
tgacgtagcaggtgcaagcctcagc

SEQ ID NO: 760226 - DNA, 25 bp, Homo sapien
cccacttcaccctgaaaaatggctg

SEQ ID NO: 760227 - DNA, 25 bp, Homo sapien
aaatggctgctttgtccgagtgaac

SEQ ID NO: 760228 - DNA, 25 bp, Homo sapien
cacgggcgaatttgctgagacctgc

SEQ ID NO: 760229 - DNA, 25 bp, Homo sapien
ggacattcttccctctatatttctg

SEQ ID NO: 760230 - DNA, 25 bp, Homo sapien
gacattcttccctctatatttctgt

SEQ ID NO: 760231 - DNA, 25 bp, Homo sapien
cggacattcttccctctatatttct

SEQ ID NO: 760232 - DNA, 25 bp, Homo sapien
cgtaggaattctccaaacagcccat

SEQ ID NO: 760233 - DNA, 25 bp, Homo sapien
cagccggctgtaaagttctattatc

SEQ ID NO: 760234 - DNA, 25 bp, Homo sapien
taggaacatactcaacacccagaat

SEQ ID NO: 760235 - DNA, 25 bp, Homo sapien
tatcaacagcccttcctcgtaggaa

SEQ ID NO: 760236 - DNA, 25 bp, Homo sapien
caaggccatggcagcaattaggact

SEQ ID NO: 760237 - DNA, 25 bp, Homo sapien
taggactgaatcgtacacctgatag

SEQ ID NO: 760238 - DNA, 25 bp, Homo sapien
ggtgtacaccagcactaagtctggc

SEQ ID NO: 760239 - DNA, 25 bp, Homo sapien
aattcttggcaagccggtgtacacc

SEQ ID NO: 760240 - DNA, 25 bp, Homo sapien
tgagagtatgtttcatgagcagatg

SEQ ID NO: 760241 - DNA, 25 bp, Homo sapien
tgtcaagtgtcaaagttaagtctag

SEQ ID NO: 760242 - DNA, 25 bp, Homo sapien
tgggtaaagtagtctgtggatgcct

SEQ ID NO: 760243 - DNA, 25 bp, Homo sapien
gtattattatgtggctgcctaagtc

SEQ ID NO: 760244 - DNA, 25 bp, Homo sapien
aatatcaaactcttcagcttgtcca

SEQ ID NO: 760245 - DNA, 25 bp, Homo sapien
tccatgatgtaacgagtgccttcct

SEQ ID NO: 760246 - DNA, 25 bp, Homo sapien
gacttcgcatctaagagtatccttc

SEQ ID NO: 760247 - DNA, 25 bp, Homo sapien
ttcctctctgacttcgcatctaaga

SEQ ID NO: 760248 - DNA, 25 bp, Homo sapien
cttgtgagcacccatggagctcttt

SEQ ID NO: 760249 - DNA, 25 bp, Homo sapien
tctgtcctcttgtcttaatttcagg

SEQ ID NO: 760250 - DNA, 25 bp, Homo sapien
acccatggagctctttgccctggtg

SEQ ID NO: 760251 - DNA, 25 bp, Homo sapien
gtcctcttgtcttaatttcaggctg

SEQ ID NO: 760252 - DNA, 25 bp, Homo sapien
agtgcaatgttgatttgcttcctta

SEQ ID NO: 760253 - DNA, 25 bp, Homo sapien
tcaagtggtcagaaacagtgcaatg

SEQ ID NO: 760254 - DNA, 25 bp, Homo sapien
caatgttgatttgcttccttacaga

SEQ ID NO: 760255 - DNA, 25 bp, Homo sapien
cttcaagtggtcagaaacagtgcaa

SEQ ID NO: 760256 - DNA, 25 bp, Homo sapien
tctttttggcacatgatattctaat

SEQ ID NO: 760257 - DNA, 25 bp, Homo sapien
tgaacaagtcagctaggcatcccca

SEQ ID NO: 760258 - DNA, 25 bp, Homo sapien
tggttaatggaataatgcttaatat

SEQ ID NO: 760259 - DNA, 25 bp, Homo sapien
gttctctataactttgaacaagtca

SEQ ID NO: 760260 - DNA, 25 bp, Homo sapien
tcagtggatggatcaagagtagatt

SEQ ID NO: 760261 - DNA, 25 bp, Homo sapien
tcagatgggcaagtgatgtgtgtgg

SEQ ID NO: 760262 - DNA, 25 bp, Homo sapien
tggtgactgtcagtggatggatcaa

SEQ ID NO: 760263 - DNA, 25 bp, Homo sapien
gattgtagagtttgctgctgctcag

SEQ ID NO: 760264 - DNA, 25 bp, Homo sapien
tccagctccttgattgtgcgcgtgc

SEQ ID NO: 760265 - DNA, 25 bp, Homo sapien
tgtttagagtggacatgtcacacac

SEQ ID NO: 760266 - DNA, 25 bp, Homo sapien
gatcacaagctaccggtactcaacg

SEQ ID NO: 760267 - DNA, 25 bp, Homo sapien
ccatctggcatggtaaagagaacaa

SEQ ID NO: 760268 - DNA, 25 bp, Homo sapien
taaattaaagcacatctcatttatt

SEQ ID NO: 760269 - DNA, 25 bp, Homo sapien
attaaagcacatctcatttattcac

SEQ ID NO: 760270 - DNA, 25 bp, Homo sapien
gggttaaattaaagcacatctcatt

SEQ ID NO: 760271 - DNA, 25 bp, Homo sapien
ggttaaattaaagcacatctcattt

SEQ ID NO: 760272 - DNA, 25 bp, Homo sapien
gagaaacgtcttttgtcccttgcat

SEQ ID NO: 760273 - DNA, 25 bp, Homo sapien
agagaaacgtcttttgtcccttgca

SEQ ID NO: 760274 - DNA, 25 bp, Homo sapien
ccatcatgagggataggcattcgga

SEQ ID NO: 760275 - DNA, 25 bp, Homo sapien
ctggatgtaaccatcatgagggata

SEQ ID NO: 760276 - DNA, 25 bp, Homo sapien
taaccatcatgagggataggcattc

SEQ ID NO: 760277 - DNA, 25 bp, Homo sapien
gatgtaaccatcatgagggataggc

SEQ ID NO: 760278 - DNA, 25 bp, Homo sapien
tacagggaatccagagaatggataa

SEQ ID NO: 760279 - DNA, 25 bp, Homo sapien
cctacagggaatccagagaatggat

SEQ ID NO: 760280 - DNA, 25 bp, Homo sapien
agccactgagcaaacaatcctacag

SEQ ID NO: 760281 - DNA, 25 bp, Homo sapien
cagggaatccagagaatggataaac

SEQ ID NO: 760282 - DNA, 25 bp, Homo sapien
cttcctagttggaaatgcacactgt

SEQ ID NO: 760283 - DNA, 25 bp, Homo sapien
ccctcttgatgtcttcctagttgga

SEQ ID NO: 760284 - DNA, 25 bp, Homo sapien
tattgcagacccaattccatcagca

SEQ ID NO: 760285 - DNA, 25 bp, Homo sapien
gaagatcactgctgtatatttgtag

SEQ ID NO: 760286 - DNA, 25 bp, Homo sapien
taaatagcgagcatttaaagctttc

SEQ ID NO: 760287 - DNA, 25 bp, Homo sapien
ccattggaagtttttgacaaaatgg

SEQ ID NO: 760288 - DNA, 25 bp, Homo sapien
tgaaacagttcctacccatcttgtg

SEQ ID NO: 760289 - DNA, 25 bp, Homo sapien
gatccctcagaatgccagagagttt

SEQ ID NO: 760290 - DNA, 25 bp, Homo sapien
cactgatgcaagatttcctgatccc

SEQ ID NO: 760291 - DNA, 25 bp, Homo sapien
tgaggagtaacccatggcctactcc

SEQ ID NO: 760292 - DNA, 25 bp, Homo sapien
caaccatttagtgttaatcagctca

SEQ ID NO: 760293 - DNA, 25 bp, Homo sapien
tcatctgtgttataaggcttcaacc

SEQ ID NO: 760294 - DNA, 25 bp, Homo sapien
cagtaattcagtgcattatcatctg

SEQ ID NO: 760295 - DNA, 25 bp, Homo sapien
cagcatatccacaggcatactgcat

SEQ ID NO: 760296 - DNA, 25 bp, Homo sapien
tatgcaccacaaatgggtttgcagg

SEQ ID NO: 760297 - DNA, 25 bp, Homo sapien
catatgcaccacaaatgggtttgca

SEQ ID NO: 760298 - DNA, 25 bp, Homo sapien
ttcaaagaaggacatatgcaccaca

SEQ ID NO: 760299 - DNA, 25 bp, Homo sapien
atatgcaccacaaatgggtttgcag

SEQ ID NO: 760300 - DNA, 25 bp, Homo sapien
gataaaattccgggtcatcaggcag

SEQ ID NO: 760301 - DNA, 25 bp, Homo sapien
gctgaattctgagtgctgtagtgaa

SEQ ID NO: 760302 - DNA, 25 bp, Homo sapien
agggcccattctggatcccgctgga

SEQ ID NO: 760303 - DNA, 25 bp, Homo sapien
tcccgctggagaaagtgcagcactg

SEQ ID NO: 760304 - DNA, 25 bp, Homo sapien
gaggatcggacttaattgaccccac

SEQ ID NO: 760305 - DNA, 25 bp, Homo sapien
tagtgcaagacagatctccatgtgg

SEQ ID NO: 760306 - DNA, 25 bp, Homo sapien
tggctccgaggcacatatggcgact

SEQ ID NO: 760307 - DNA, 25 bp, Homo sapien
ctgaatagcggccaagggtctgaga

SEQ ID NO: 760308 - DNA, 25 bp, Homo sapien
cagggcaaacaggcttaggcttgat

SEQ ID NO: 760309 - DNA, 25 bp, Homo sapien
caaacaggcttaggcttgatgactt

SEQ ID NO: 760310 - DNA, 25 bp, Homo sapien
gcaaacaggcttaggcttgatgact

SEQ ID NO: 760311 - DNA, 25 bp, Homo sapien
agttgagccagagggataaagggca

SEQ ID NO: 760312 - DNA, 25 bp, Homo sapien
acagggggccactcgtgggagcacc

SEQ ID NO: 760313 - DNA, 25 bp, Homo sapien
ccactcgtgggagcaccagcgtcag

SEQ ID NO: 760314 - DNA, 25 bp, Homo sapien
ggagaacacagcgtgccatgccaca

SEQ ID NO: 760315 - DNA, 25 bp, Homo sapien
tcaaaaattatgtcaagggcagtcc

SEQ ID NO: 760316 - DNA, 25 bp, Homo sapien
tctcggtaaatgacagtaagtgaca

SEQ ID NO: 760317 - DNA, 25 bp, Homo sapien
cagtgctgggtcagccagatattcc

SEQ ID NO: 760318 - DNA, 25 bp, Homo sapien
taagacagtgaatacgcaagccacg

SEQ ID NO: 760319 - DNA, 25 bp, Homo sapien
gagctggatcttgaatctcatcagt

SEQ ID NO: 760320 - DNA, 25 bp, Homo sapien
ctgggaatgggtggagaattcctca

SEQ ID NO: 760321 - DNA, 25 bp, Homo sapien
tcagaaccggagttgtggtcttcct

SEQ ID NO: 760322 - DNA, 25 bp, Homo sapien
ttggaggttcttcaaaggcgaagtg

SEQ ID NO: 760323 - DNA, 25 bp, Homo sapien
attcaatggccatggacttaagaag

SEQ ID NO: 760324 - DNA, 25 bp, Homo sapien
tcaatggccatggacttaagaagtg

SEQ ID NO: 760325 - DNA, 25 bp, Homo sapien
ttcaatggccatggacttaagaagt

SEQ ID NO: 760326 - DNA, 25 bp, Homo sapien
tatacgaggcaaacactaaccagtg

SEQ ID NO: 760327 - DNA, 25 bp, Homo sapien
caaacttcaagctgcctacaagaga

SEQ ID NO: 760328 - DNA, 25 bp, Homo sapien
tggctgccaggttgcacaatagcac

SEQ ID NO: 760329 - DNA, 25 bp, Homo sapien
taaccagtgaatgctagtgctccaa

SEQ ID NO: 760330 - DNA, 25 bp, Homo sapien
ccagaaccaaacttcagtgatgaga

SEQ ID NO: 760331 - DNA, 25 bp, Homo sapien
ctagggagattccaaaccaactata

SEQ ID NO: 760332 - DNA, 25 bp, Homo sapien
ggctgaattctgctaccagcagtaa

SEQ ID NO: 760333 - DNA, 25 bp, Homo sapien
ctgctaccagcagtaacaaagtcat

SEQ ID NO: 760334 - DNA, 25 bp, Homo sapien
tcaacattttcagctgttgttccaa

SEQ ID NO: 760335 - DNA, 25 bp, Homo sapien
ttcagctgttgttccaatttccttc

SEQ ID NO: 760336 - DNA, 25 bp, Homo sapien
attttcagctgttgttccaatttcc

SEQ ID NO: 760337 - DNA, 25 bp, Homo sapien
cagctgttgttccaatttccttctt

SEQ ID NO: 760338 - DNA, 25 bp, Homo sapien
ggtgaagccattgtaatggcatgac

SEQ ID NO: 760339 - DNA, 25 bp, Homo sapien
gcatgacaaaaccaggtgtccaggg

SEQ ID NO: 760340 - DNA, 25 bp, Homo sapien
cacattgataacgagggtgaagcca

SEQ ID NO: 760341 - DNA, 25 bp, Homo sapien
gggagcagataaagggctacactat

SEQ ID NO: 760342 - DNA, 25 bp, Homo sapien
acctctttctttggtctgcacccat

SEQ ID NO: 760343 - DNA, 25 bp, Homo sapien
ctctgtccccactccgacctctttc

SEQ ID NO: 760344 - DNA, 25 bp, Homo sapien
gacctctttctttggtctgcaccca

SEQ ID NO: 760345 - DNA, 25 bp, Homo sapien
ccactccgacctctttctttggtct

SEQ ID NO: 760346 - DNA, 25 bp, Homo sapien
gtcttttcagggcagcctgtctcct

SEQ ID NO: 760347 - DNA, 25 bp, Homo sapien
agggcagcctgtctcctggagcttc

SEQ ID NO: 760348 - DNA, 25 bp, Homo sapien
ttttcagggcagcctgtctcctgga

SEQ ID NO: 760349 - DNA, 25 bp, Homo sapien
tcagggcagcctgtctcctggagct

SEQ ID NO: 760350 - DNA, 25 bp, Homo sapien
gaactccctccacggcattttctaa

SEQ ID NO: 760351 - DNA, 25 bp, Homo sapien
agcttcatttgaactccctccacgg

SEQ ID NO: 760352 - DNA, 25 bp, Homo sapien
ccgctgatggagtcatgtgcactca

SEQ ID NO: 760353 - DNA, 25 bp, Homo sapien
cattttctaagagggcattagcgag

SEQ ID NO: 760354 - DNA, 25 bp, Homo sapien
cagcaaactgttcaaattcagtgga

SEQ ID NO: 760355 - DNA, 25 bp, Homo sapien
tgctgtccttggagtgtaagaaaag

SEQ ID NO: 760356 - DNA, 25 bp, Homo sapien
ccttggcaggcttcaaccctctggg

SEQ ID NO: 760357 - DNA, 25 bp, Homo sapien
tcagctcagccttcgctgctatgtc

SEQ ID NO: 760358 - DNA, 25 bp, Homo sapien
aatactattaaggtgacatggttac

SEQ ID NO: 760359 - DNA, 25 bp, Homo sapien
atactattaaggtgacatggttaca

SEQ ID NO: 760360 - DNA, 25 bp, Homo sapien
tgctcgccacgggtattcttctgtt

SEQ ID NO: 760361 - DNA, 25 bp, Homo sapien
taaggaggtggagtcattaaggacc

SEQ ID NO: 760362 - DNA, 25 bp, Homo sapien
caggaagtggggtcattaaggaggt

SEQ ID NO: 760363 - DNA, 25 bp, Homo sapien
ataattggccatttgccaggaagtg

SEQ ID NO: 760364 - DNA, 25 bp, Homo sapien
gtcttggagttactatagctgaaag

SEQ ID NO: 760365 - DNA, 25 bp, Homo sapien
gcccattgccgaggtatttctgcat

SEQ ID NO: 760366 - DNA, 25 bp, Homo sapien
aaagacatttcttcacgtctatata

SEQ ID NO: 760367 - DNA, 25 bp, Homo sapien
tcttcacgtctatatatctgcccat

SEQ ID NO: 760368 - DNA, 25 bp, Homo sapien
tcacagaggaggacagccaagggag

SEQ ID NO: 760369 - DNA, 25 bp, Homo sapien
gagaaagagggtgagggcagcctgt

SEQ ID NO: 760370 - DNA, 25 bp, Homo sapien
agagggtgagggcagcctgtggtag

SEQ ID NO: 760371 - DNA, 25 bp, Homo sapien
ggtgagggcagcctgtggtagacat

SEQ ID NO: 760372 - DNA, 25 bp, Homo sapien
tgggccggatgtcctgggcttgtgc

SEQ ID NO: 760373 - DNA, 25 bp, Homo sapien
ggccggatgtcctgggcttgtgcat

SEQ ID NO: 760374 - DNA, 25 bp, Homo sapien
ccagtgtgctcgaggccagtgtgct

SEQ ID NO: 760375 - DNA, 25 bp, Homo sapien
tgtgctcgaggccagtgtgctcgct

SEQ ID NO: 760376 - DNA, 25 bp, Homo sapien
tcataaatagtaatccaggtagttg

SEQ ID NO: 760377 - DNA, 25 bp, Homo sapien
ggcttttcatcccatcagaacaagt

SEQ ID NO: 760378 - DNA, 25 bp, Homo sapien
tcacggtgaacaagcctcctggtgt

SEQ ID NO: 760379 - DNA, 25 bp, Homo sapien
catctgattccttcttagtttggct

SEQ ID NO: 760380 - DNA, 25 bp, Homo sapien
tatgagaacttctccgaagactttg

SEQ ID NO: 760381 - DNA, 25 bp, Homo sapien
tgccattctctacagcagaccaaag

SEQ ID NO: 760382 - DNA, 25 bp, Homo sapien
gaagactttggaccactcaatctgg

SEQ ID NO: 760383 - DNA, 25 bp, Homo sapien
tggacatcaccgatcgccttcgttt

SEQ ID NO: 760384 - DNA, 25 bp, Homo sapien
aagcggcggtcgagctgggccgccg

SEQ ID NO: 760385 - DNA, 25 bp, Homo sapien
tccaggaagcggaaaagcaagcggc

SEQ ID NO: 760386 - DNA, 25 bp, Homo sapien
tgctctttgaccttgcagggtgtga

SEQ ID NO: 760387 - DNA, 25 bp, Homo sapien
cctctgctggcagcgctgctctttg

SEQ ID NO: 760388 - DNA, 25 bp, Homo sapien
taggtctccttgtggacaccagaag

SEQ ID NO: 760389 - DNA, 25 bp, Homo sapien
ttccccaggagcataaacaagcagc

SEQ ID NO: 760390 - DNA, 25 bp, Homo sapien
caaaagagtctattcctgtggctac

SEQ ID NO: 760391 - DNA, 25 bp, Homo sapien
cagactagccagacaattgcaggag

SEQ ID NO: 760392 - DNA, 25 bp, Homo sapien
gcatcgttcgttcatcattctcagg

SEQ ID NO: 760393 - DNA, 25 bp, Homo sapien
cctgcagctgggttctaaataagat

SEQ ID NO: 760394 - DNA, 25 bp, Homo sapien
taagatttccagtttcgtccagtcc

SEQ ID NO: 760395 - DNA, 25 bp, Homo sapien
caggaaaagcggcaacctgcagctg

SEQ ID NO: 760396 - DNA, 25 bp, Homo sapien
attgttgtaacatcccccagtttca

SEQ ID NO: 760397 - DNA, 25 bp, Homo sapien
ctgaattgttgtaacatcccccagt

SEQ ID NO: 760398 - DNA, 25 bp, Homo sapien
ttcacccatccaaatacatttccac

SEQ ID NO: 760399 - DNA, 25 bp, Homo sapien
cagtttcacccatccaaatacattt

SEQ ID NO: 760400 - DNA, 25 bp, Homo sapien
cagcaggaaagacggtcctaaaagt

SEQ ID NO: 760401 - DNA, 25 bp, Homo sapien
tactgggaagccatgtctaactttc

SEQ ID NO: 760402 - DNA, 25 bp, Homo sapien
gcactcagggtctcatttgacagtg

SEQ ID NO: 760403 - DNA, 25 bp, Homo sapien
tctcactccagagaatgagttgatg

SEQ ID NO: 760404 - DNA, 25 bp, Homo sapien
catgcagccggatccttctgacctg

SEQ ID NO: 760405 - DNA, 25 bp, Homo sapien
tctagtcccatgtcttcacagccag

SEQ ID NO: 760406 - DNA, 25 bp, Homo sapien
cagccaagcttggactcagcctcta

SEQ ID NO: 760407 - DNA, 25 bp, Homo sapien
agcctctagtcccatgtcttcacag

SEQ ID NO: 760408 - DNA, 25 bp, Homo sapien
gcctctagtcccatgtcttcacagc

SEQ ID NO: 760409 - DNA, 25 bp, Homo sapien
tctcaggctcttgtgtaggactctg

SEQ ID NO: 760410 - DNA, 25 bp, Homo sapien
gaatgctgatacgtgtcgttcgcct

SEQ ID NO: 760411 - DNA, 25 bp, Homo sapien
gagaccaatgctgcaaggttgctga

SEQ ID NO: 760412 - DNA, 25 bp, Homo sapien
gagttgctcctcatagagaccaatg

SEQ ID NO: 760413 - DNA, 25 bp, Homo sapien
tttctgctgaattggtcaatgctga

SEQ ID NO: 760414 - DNA, 25 bp, Homo sapien
ggttctgggtagaaatttctgctga

SEQ ID NO: 760415 - DNA, 25 bp, Homo sapien
ttggtcaatgctgaaatcaaaagct

SEQ ID NO: 760416 - DNA, 25 bp, Homo sapien
aggcaatgatgaggctgctgaagac

SEQ ID NO: 760417 - DNA, 25 bp, Homo sapien
catgacaaattggtctttagtccac

SEQ ID NO: 760418 - DNA, 25 bp, Homo sapien
gtccacaaactgataacaaactgat

SEQ ID NO: 760419 - DNA, 25 bp, Homo sapien
tcctggccggagatgaacaaccatg

SEQ ID NO: 760420 - DNA, 25 bp, Homo sapien
tataaacagatataagcatgcgttt

SEQ ID NO: 760421 - DNA, 25 bp, Homo sapien
tctttcattcctacaaccagtccta

SEQ ID NO: 760422 - DNA, 25 bp, Homo sapien
tgaacacaagtgtaaatttcctgcc

SEQ ID NO: 760423 - DNA, 25 bp, Homo sapien
gactctgtgtggaagcttgtaaaag

SEQ ID NO: 760424 - DNA, 25 bp, Homo sapien
tcaacactagagtagataccatctc

SEQ ID NO: 760425 - DNA, 25 bp, Homo sapien
tatccactgatctgatgatttctcc

SEQ ID NO: 760426 - DNA, 25 bp, Homo sapien
cgtatccactgatctgatgatttct

SEQ ID NO: 760427 - DNA, 25 bp, Homo sapien
ttatcgtatccactgatctgatgat

SEQ ID NO: 760428 - DNA, 25 bp, Homo sapien
tcgtatccactgatctgatgatttc

SEQ ID NO: 760429 - DNA, 25 bp, Homo sapien
cagcaggagcttgggtgcctcttct

SEQ ID NO: 760430 - DNA, 25 bp, Homo sapien
tgagagcttttgcatgagctgcagt

SEQ ID NO: 760431 - DNA, 25 bp, Homo sapien
caggagcttgggtgcctcttctaat

SEQ ID NO: 760432 - DNA, 25 bp, Homo sapien
ctcttctaattccaggtaagagatg

SEQ ID NO: 760433 - DNA, 25 bp, Homo sapien
ctgggaggcttcacagatccggata

SEQ ID NO: 760434 - DNA, 25 bp, Homo sapien
tagaaaagcagactgcgggttggcc

SEQ ID NO: 760435 - DNA, 25 bp, Homo sapien
gatggtctctgctaatgttacatgt

SEQ ID NO: 760436 - DNA, 25 bp, Homo sapien
tacatgttagaaaagcagactgcgg

SEQ ID NO: 760437 - DNA, 25 bp, Homo sapien
tgaattgtagccaagagtagccttc

SEQ ID NO: 760438 - DNA, 25 bp, Homo sapien
tgtagccaagagtagccttcagaat

SEQ ID NO: 760439 - DNA, 25 bp, Homo sapien
tgtgtgtgagggtaaccatgacctt

SEQ ID NO: 760440 - DNA, 25 bp, Homo sapien
atctgtgtgtgagggtaaccatgac

SEQ ID NO: 760441 - DNA, 25 bp, Homo sapien
caagtggttcacacttcttgccaca

SEQ ID NO: 760442 - DNA, 25 bp, Homo sapien
aagtggttcacacttcttgccacat

SEQ ID NO: 760443 - DNA, 25 bp, Homo sapien
gccaagtggttcacacttcttgcca

SEQ ID NO: 760444 - DNA, 25 bp, Homo sapien
agccaagtggttcacacttcttgcc

SEQ ID NO: 760445 - DNA, 25 bp, Homo sapien
ccgtccacaatatttctgtccagtg

SEQ ID NO: 760446 - DNA, 25 bp, Homo sapien
tgtccagtgaatgcattgtattttc

SEQ ID NO: 760447 - DNA, 25 bp, Homo sapien
ccagtttctgttggaatacccgtat

SEQ ID NO: 760448 - DNA, 25 bp, Homo sapien
actgtcccaatgcttgccccccgtc

SEQ ID NO: 760449 - DNA, 25 bp, Homo sapien
gcgccgccaaggctggcgccagtgc

SEQ ID NO: 760450 - DNA, 25 bp, Homo sapien
gctggcgccagtgccgcgcgggctc

SEQ ID NO: 760451 - DNA, 25 bp, Homo sapien
ccgcgcgggctctcaggacggcggg

SEQ ID NO: 760452 - DNA, 25 bp, Homo sapien
gccagtgccgcgcgggctctcagga

SEQ ID NO: 760453 - DNA, 25 bp, Homo sapien
gccgccgcggccagtcagggagcaa

SEQ ID NO: 760454 - DNA, 25 bp, Homo sapien
ggccgccgcggccagtcagggagca

SEQ ID NO: 760455 - DNA, 25 bp, Homo sapien
ccgcggccagtcagggagcaacgac

SEQ ID NO: 760456 - DNA, 25 bp, Homo sapien
cgccgcggccagtcagggagcaacg

SEQ ID NO: 760457 - DNA, 25 bp, Homo sapien
ctgcagcgtggagctgcgcatcttc

SEQ ID NO: 760458 - DNA, 25 bp, Homo sapien
tggcaaaacgaaggcgatcggtgat

SEQ ID NO: 760459 - DNA, 25 bp, Homo sapien
aatggcaaaacgaaggcgatcggtg

SEQ ID NO: 760460 - DNA, 25 bp, Homo sapien
gtcctgcagcgtggagctgcgcatc

SEQ ID NO: 760461 - DNA, 25 bp, Homo sapien
agtggtccaaagtcttcggagaagt

SEQ ID NO: 760462 - DNA, 25 bp, Homo sapien
gaagttctcatattcgagttcatta

SEQ ID NO: 760463 - DNA, 25 bp, Homo sapien
attgagtggtccaaagtcttcggag

SEQ ID NO: 760464 - DNA, 25 bp, Homo sapien
gagtggtccaaagtcttcggagaag

SEQ ID NO: 760465 - DNA, 25 bp, Homo sapien
gtatctccaaagattaatattctat

SEQ ID NO: 760466 - DNA, 25 bp, Homo sapien
gaatatagggtgtatctccaaagat

SEQ ID NO: 760467 - DNA, 25 bp, Homo sapien
taatattctatatgctgcttctggg

SEQ ID NO: 760468 - DNA, 25 bp, Homo sapien
tgaaaggaatatagggtgtatctcc

SEQ ID NO: 760469 - DNA, 25 bp, Homo sapien
tgatgtagcaggctatcagagtgcc

SEQ ID NO: 760470 - DNA, 25 bp, Homo sapien
cacgcaatggtctcggctgctgtca

SEQ ID NO: 760471 - DNA, 25 bp, Homo sapien
tcgaagccagcatccgtaaagcgtt

SEQ ID NO: 760472 - DNA, 25 bp, Homo sapien
gaggtccacagaaggcaataaatcg

SEQ ID NO: 760473 - DNA, 25 bp, Homo sapien
gttcattactgaaaccccgtggaca

SEQ ID NO: 760474 - DNA, 25 bp, Homo sapien
taggttaccaaggtatcacctggta

SEQ ID NO: 760475 - DNA, 25 bp, Homo sapien
caaggtatcacctggtattacaaca

SEQ ID NO: 760476 - DNA, 25 bp, Homo sapien
tattactacagtattacaaacagtc

SEQ ID NO: 760477 - DNA, 25 bp, Homo sapien
tttcccacagtcctctgcagaacct

SEQ ID NO: 760478 - DNA, 25 bp, Homo sapien
gaatttcccacagtcctctgcagaa

SEQ ID NO: 760479 - DNA, 25 bp, Homo sapien
tcagaatttcccacagtcctctgca

SEQ ID NO: 760480 - DNA, 25 bp, Homo sapien
tcccacagtcctctgcagaacctct

SEQ ID NO: 760481 - DNA, 25 bp, Homo sapien
cacatgaccctgttttgggcagagt

SEQ ID NO: 760482 - DNA, 25 bp, Homo sapien
gaaggagttaccatccactgtcatc

SEQ ID NO: 760483 - DNA, 25 bp, Homo sapien
tgggcagagtgtaagacaagctcat

SEQ ID NO: 760484 - DNA, 25 bp, Homo sapien
tcatttgtcaagaggcctatgttac

SEQ ID NO: 760485 - DNA, 25 bp, Homo sapien
tgacatttcaagcttctcacctgca

SEQ ID NO: 760486 - DNA, 25 bp, Homo sapien
cagaggagattcaagaatctgtacc

SEQ ID NO: 760487 - DNA, 25 bp, Homo sapien
agatgacatttcaagcttctcacct

SEQ ID NO: 760488 - DNA, 25 bp, Homo sapien
agctgctgggcaatgccttggtgcc

SEQ ID NO: 760489 - DNA, 25 bp, Homo sapien
taatttagtctaatctggtacactt

SEQ ID NO: 760490 - DNA, 25 bp, Homo sapien
ggtacactttgtcttgttctgtaat

SEQ ID NO: 760491 - DNA, 25 bp, Homo sapien
tcaaaacctgcttctcacggatttc

SEQ ID NO: 760492 - DNA, 25 bp, Homo sapien
tatcattatctcaatcactgtccaa

SEQ ID NO: 760493 - DNA, 25 bp, Homo sapien
caacttcaaacaccggaaatcttct

SEQ ID NO: 760494 - DNA, 25 bp, Homo sapien
tctctacaacttcaaacaccggaaa

SEQ ID NO: 760495 - DNA, 25 bp, Homo sapien
caccggaaatcttcttacgttgcct

SEQ ID NO: 760496 - DNA, 25 bp, Homo sapien
ctacaacttcaaacaccggaaatct

SEQ ID NO: 760497 - DNA, 25 bp, Homo sapien
ccaggcccgctagtgcttggagcat

SEQ ID NO: 760498 - DNA, 25 bp, Homo sapien
gagctcttttagcagccatcagcca

SEQ ID NO: 760499 - DNA, 25 bp, Homo sapien
tagtccttgaccaactgagagccat

SEQ ID NO: 760500 - DNA, 25 bp, Homo sapien
tgtcctttgcatccgagattcccgc

SEQ ID NO: 760501 - DNA, 25 bp, Homo sapien
aaatcttagataacaactctccagt

SEQ ID NO: 760502 - DNA, 25 bp, Homo sapien
ttgtgccgatatcaggacaggccat

SEQ ID NO: 760503 - DNA, 25 bp, Homo sapien
aacaactctccagttatgaacagag

SEQ ID NO: 760504 - DNA, 25 bp, Homo sapien
gaacagagttgtgccgatatcagga

SEQ ID NO: 760505 - DNA, 25 bp, Homo sapien
tgggcttcatggatttgagtctgtc

SEQ ID NO: 760506 - DNA, 25 bp, Homo sapien
ctgtgtccctgtaaagatttgggct

SEQ ID NO: 760507 - DNA, 25 bp, Homo sapien
gtctgtctaatatctcatcctgcat

SEQ ID NO: 760508 - DNA, 25 bp, Homo sapien
ttgagtctgtctaatatctcatcct

SEQ ID NO: 760509 - DNA, 25 bp, Homo sapien
ggatgccagaacatggggttcccca

SEQ ID NO: 760510 - DNA, 25 bp, Homo sapien
ctaatctcgcattgtgaccagggag

SEQ ID NO: 760511 - DNA, 25 bp, Homo sapien
gaacatggggttccccactgaagca

SEQ ID NO: 760512 - DNA, 25 bp, Homo sapien
ccagggagttcagccagcatggatg

SEQ ID NO: 760513 - DNA, 25 bp, Homo sapien
ttccacctgagaagcgagggtccag

SEQ ID NO: 760514 - DNA, 25 bp, Homo sapien
caggttcctgtgtaggtaaggagtt

SEQ ID NO: 760515 - DNA, 25 bp, Homo sapien
caggggaggaggcattccgtctatc

SEQ ID NO: 760516 - DNA, 25 bp, Homo sapien
ttcttccacctgagaagcgagggtc

SEQ ID NO: 760517 - DNA, 25 bp, Homo sapien
tgttctggtcaagagaatatggtta

SEQ ID NO: 760518 - DNA, 25 bp, Homo sapien
tgtatctcagataacttgtataaga

SEQ ID NO: 760519 - DNA, 25 bp, Homo sapien
tgtcctctaatgcacatctgagatt

SEQ ID NO: 760520 - DNA, 25 bp, Homo sapien
gtatagcagggcagtgttggaaaca

SEQ ID NO: 760521 - DNA, 25 bp, Homo sapien
caaatgctgagagattttgtcacca

SEQ ID NO: 760522 - DNA, 25 bp, Homo sapien
tccagccaaactaagtgttataagt

SEQ ID NO: 760523 - DNA, 25 bp, Homo sapien
agaaataaaattctttacagacaag

SEQ ID NO: 760524 - DNA, 25 bp, Homo sapien
ccaggcctgccctaaaagagctcct

SEQ ID NO: 760525 - DNA, 25 bp, Homo sapien
actatcactactgtgtaaaacttct

SEQ ID NO: 760526 - DNA, 25 bp, Homo sapien
aaaacttctaaatgacctcttcgtg

SEQ ID NO: 760527 - DNA, 25 bp, Homo sapien
ctactgtgtaaaacttctaaatgac

SEQ ID NO: 760528 - DNA, 25 bp, Homo sapien
cactactgtgtaaaacttctaaatg

SEQ ID NO: 760529 - DNA, 25 bp, Homo sapien
taggcttggctctcatgaggttcca

SEQ ID NO: 760530 - DNA, 25 bp, Homo sapien
gacatagttgtaggagtgtaggctt

SEQ ID NO: 760531 - DNA, 25 bp, Homo sapien
cccatggtgaggcacacttcttctt

SEQ ID NO: 760532 - DNA, 25 bp, Homo sapien
tgtgactcattcactaagccgctgg

SEQ ID NO: 760533 - DNA, 25 bp, Homo sapien
ctgcctgataaagaccagccactgt

SEQ ID NO: 760534 - DNA, 25 bp, Homo sapien
cctgcctgataaagaccagccactg

SEQ ID NO: 760535 - DNA, 25 bp, Homo sapien
gcctgataaagaccagccactgtcc

SEQ ID NO: 760536 - DNA, 25 bp, Homo sapien
tgcctgataaagaccagccactgtc

SEQ ID NO: 760537 - DNA, 25 bp, Homo sapien
ctgggatgtctggcgatggctatga

SEQ ID NO: 760538 - DNA, 25 bp, Homo sapien
atgtctggcgatggctatgaagaaa

SEQ ID NO: 760539 - DNA, 25 bp, Homo sapien
gggatgtctggcgatggctatgaag

SEQ ID NO: 760540 - DNA, 25 bp, Homo sapien
gatgtctggcgatggctatgaagaa

SEQ ID NO: 760541 - DNA, 25 bp, Homo sapien
ggtggcttgatggcttaagcagctg

SEQ ID NO: 760542 - DNA, 25 bp, Homo sapien
gacttgcagtagttgcaaaggttgc

SEQ ID NO: 760543 - DNA, 25 bp, Homo sapien
tggtgtctgagtctagcagtgaatg

SEQ ID NO: 760544 - DNA, 25 bp, Homo sapien
tggtaaaagatttaggggacttgca

SEQ ID NO: 760545 - DNA, 25 bp, Homo sapien
gctcctgtgggagttgatgaacgca

SEQ ID NO: 760546 - DNA, 25 bp, Homo sapien
agacatgggtcagactaagtgagcc

SEQ ID NO: 760547 - DNA, 25 bp, Homo sapien
taagtgagcctcgaaataaccaaga

SEQ ID NO: 760548 - DNA, 25 bp, Homo sapien
gagatacctaactgaaacccttgag

SEQ ID NO: 760549 - DNA, 25 bp, Homo sapien
tgtccttaatcatgttataagccgt

SEQ ID NO: 760550 - DNA, 25 bp, Homo sapien
gagactgggagatggctgctacagg

SEQ ID NO: 760551 - DNA, 25 bp, Homo sapien
taagccgtagcaaagtcaattgtaa

SEQ ID NO: 760552 - DNA, 25 bp, Homo sapien
tggacagagggttccgaggcgtaaa

SEQ ID NO: 760553 - DNA, 25 bp, Homo sapien
cagggcacagaacatcagggcacat

SEQ ID NO: 760554 - DNA, 25 bp, Homo sapien
ctccagggcacagaacatcagggca

SEQ ID NO: 760555 - DNA, 25 bp, Homo sapien
tcattcaggctaagaattagggagg

SEQ ID NO: 760556 - DNA, 25 bp, Homo sapien
tttatagtgaacgtctcctcctgtg

SEQ ID NO: 760557 - DNA, 25 bp, Homo sapien
gaggaaatctgcatctccacctggg

SEQ ID NO: 760558 - DNA, 25 bp, Homo sapien
tgtggtctctcaaggccatctggta

SEQ ID NO: 760559 - DNA, 25 bp, Homo sapien
tctcccaggctacctagctgtggtc

SEQ ID NO: 760560 - DNA, 25 bp, Homo sapien
gggtcacaggacatatccctttaag

SEQ ID NO: 760561 - DNA, 25 bp, Homo sapien
ggttaagatcattgctaaggctatg

SEQ ID NO: 760562 - DNA, 25 bp, Homo sapien
cattgctaaggctatgctcacggaa

SEQ ID NO: 760563 - DNA, 25 bp, Homo sapien
tatgctcacggaagctcctgcttcg

SEQ ID NO: 760564 - DNA, 25 bp, Homo sapien
taaggctatgctcacggaagctcct

SEQ ID NO: 760565 - DNA, 25 bp, Homo sapien
gagaatcgcttgaaatcgggagatg

SEQ ID NO: 760566 - DNA, 25 bp, Homo sapien
aatcgcttgaaatcgggagatggag

SEQ ID NO: 760567 - DNA, 25 bp, Homo sapien
gatggaggttgcagtcatccgagat

SEQ ID NO: 760568 - DNA, 25 bp, Homo sapien
cagagaatccatctcaaaacaaaca

SEQ ID NO: 760569 - DNA, 25 bp, Homo sapien
gaacttgtgcttcgatattaggccg

SEQ ID NO: 760570 - DNA, 25 bp, Homo sapien
aacccggcctgaggtagaacttgtg

SEQ ID NO: 760571 - DNA, 25 bp, Homo sapien
ccgttaacagtcagtttcagccaga

SEQ ID NO: 760572 - DNA, 25 bp, Homo sapien
gaacttatctccctcttgcctgaat

SEQ ID NO: 760573 - DNA, 25 bp, Homo sapien
tagccttcttattagactaggtaaa

SEQ ID NO: 760574 - DNA, 25 bp, Homo sapien
caaatactagatgaagatgcaactc

SEQ ID NO: 760575 - DNA, 25 bp, Homo sapien
tggaacaacagcagggcgtattttc

SEQ ID NO: 760576 - DNA, 25 bp, Homo sapien
tcttgaatgatttcccctataaatt

SEQ ID NO: 760577 - DNA, 25 bp, Homo sapien
caaaggatgcttgcagagccctgca

SEQ ID NO: 760578 - DNA, 25 bp, Homo sapien
aatgcctcggtaggggacctctgta

SEQ ID NO: 760579 - DNA, 25 bp, Homo sapien
ccttgacagtgtcctggccaaagga

SEQ ID NO: 760580 - DNA, 25 bp, Homo sapien
aacatggtgagctctataagccgcc

SEQ ID NO: 760581 - DNA, 25 bp, Homo sapien
ggtggtacttccctggtattgctgg

SEQ ID NO: 760582 - DNA, 25 bp, Homo sapien
ccctgcggtggtacttccctggtat

SEQ ID NO: 760583 - DNA, 25 bp, Homo sapien
agaagccctgcggtggtacttccct

SEQ ID NO: 760584 - DNA, 25 bp, Homo sapien
tgcctgaacgacaccagaaccgtca

SEQ ID NO: 760585 - DNA, 25 bp, Homo sapien
agggtcttttatgagtgcagtgaca

SEQ ID NO: 760586 - DNA, 25 bp, Homo sapien
cttgccgatattgccagggtctttt

SEQ ID NO: 760587 - DNA, 25 bp, Homo sapien
tgacaccagccttgccgatattgcc

SEQ ID NO: 760588 - DNA, 25 bp, Homo sapien
aggacagggccaatggcctgacacc

SEQ ID NO: 760589 - DNA, 25 bp, Homo sapien
gctccacaaatcatgtgctatccca

SEQ ID NO: 760590 - DNA, 25 bp, Homo sapien
ctgctccacaaatcatgtgctatcc

SEQ ID NO: 760591 - DNA, 25 bp, Homo sapien
tgctatcccatctaggaagaggagt

SEQ ID NO: 760592 - DNA, 25 bp, Homo sapien
tgtgctatcccatctaggaagagga

SEQ ID NO: 760593 - DNA, 25 bp, Homo sapien
tgaactcttagctcccttgccacag

SEQ ID NO: 760594 - DNA, 25 bp, Homo sapien
atcacaccatcaatctttatcctct

SEQ ID NO: 760595 - DNA, 25 bp, Homo sapien
cctctggtttggttcaacgacctgc

SEQ ID NO: 760596 - DNA, 25 bp, Homo sapien
catctgtctgaaatcacaccatcaa

SEQ ID NO: 760597 - DNA, 25 bp, Homo sapien
tgttctgctccgtagtctgctgcag

SEQ ID NO: 760598 - DNA, 25 bp, Homo sapien
attgagaagggtcttcttgttttga

SEQ ID NO: 760599 - DNA, 25 bp, Homo sapien
actggtgttctgctccgtagtctgc

SEQ ID NO: 760600 - DNA, 25 bp, Homo sapien
ggacactggtgttctgctccgtagt

SEQ ID NO: 760601 - DNA, 25 bp, Homo sapien
tgtgggattttgattctttacttaa

SEQ ID NO: 760602 - DNA, 25 bp, Homo sapien
agttttataatgtgggattttgatt

SEQ ID NO: 760603 - DNA, 25 bp, Homo sapien
gttttataatgtgggattttgattc

SEQ ID NO: 760604 - DNA, 25 bp, Homo sapien
gctagctgggatgtttctccggaag

SEQ ID NO: 760605 - DNA, 25 bp, Homo sapien
tgggatgtttctccggaagccacaa

SEQ ID NO: 760606 - DNA, 25 bp, Homo sapien
tctccggaagccacaatacctgttt

SEQ ID NO: 760607 - DNA, 25 bp, Homo sapien
gtttctccggaagccacaatacctg

SEQ ID NO: 760608 - DNA, 25 bp, Homo sapien
aaatgtgggcagctctccaccaata

SEQ ID NO: 760609 - DNA, 25 bp, Homo sapien
tggtgtaagctgtaaatgtgggcag

SEQ ID NO: 760610 - DNA, 25 bp, Homo sapien
tttggtgtaagctgtaaatgtgggc

SEQ ID NO: 760611 - DNA, 25 bp, Homo sapien
ttggtgtaagctgtaaatgtgggca

SEQ ID NO: 760612 - DNA, 25 bp, Homo sapien
ttggattttgtcagcaatcctccac

SEQ ID NO: 760613 - DNA, 25 bp, Homo sapien
attttgtcagcaatcctccactcag

SEQ ID NO: 760614 - DNA, 25 bp, Homo sapien
tcagcaatcctccactcagggagtg

SEQ ID NO: 760615 - DNA, 25 bp, Homo sapien
atcctccactcagggagtgtgcgtg

SEQ ID NO: 760616 - DNA, 25 bp, Homo sapien
cagaacgtctcttggaatgccccaa

SEQ ID NO: 760617 - DNA, 25 bp, Homo sapien
agctagtactcttgttctgaatgac

SEQ ID NO: 760618 - DNA, 25 bp, Homo sapien
ctaggtctgggaccagaacgtctct

SEQ ID NO: 760619 - DNA, 25 bp, Homo sapien
tggaatgccccaagctagtactctt

SEQ ID NO: 760620 - DNA, 25 bp, Homo sapien
tgaagtccgtaaacatctcaaactt

SEQ ID NO: 760621 - DNA, 25 bp, Homo sapien
tctcaaacttccgaagggctccaga

SEQ ID NO: 760622 - DNA, 25 bp, Homo sapien
acatctcaaacttccgaagggctcc

SEQ ID NO: 760623 - DNA, 25 bp, Homo sapien
catctcaaacttccgaagggctcca

SEQ ID NO: 760624 - DNA, 25 bp, Homo sapien
tgtggtgaacaatggcagtccccat

SEQ ID NO: 760625 - DNA, 25 bp, Homo sapien
gggaagtgcttttgtggtgaacaat

SEQ ID NO: 760626 - DNA, 25 bp, Homo sapien
gcttttgtggtgaacaatggcagtc

SEQ ID NO: 760627 - DNA, 25 bp, Homo sapien
gaagtgcttttgtggtgaacaatgg

SEQ ID NO: 760628 - DNA, 25 bp, Homo sapien
ccaaagccagattatatccactaga

SEQ ID NO: 760629 - DNA, 25 bp, Homo sapien
acaggtgttgccagcaagaagtgca

SEQ ID NO: 760630 - DNA, 25 bp, Homo sapien
tgttcttcactaaggattgctcgtc

SEQ ID NO: 760631 - DNA, 25 bp, Homo sapien
gactggaaagcccttgtctacccac

SEQ ID NO: 760632 - DNA, 25 bp, Homo sapien
aggccccaagccgtcatacggatgg

SEQ ID NO: 760633 - DNA, 25 bp, Homo sapien
cggatggcggttgatcatctgccga

SEQ ID NO: 760634 - DNA, 25 bp, Homo sapien
ccgtcatacggatggcggttgatca

SEQ ID NO: 760635 - DNA, 25 bp, Homo sapien
ggttgatcatctgccgaaagagccc

SEQ ID NO: 760636 - DNA, 25 bp, Homo sapien
taagattcatcatgatgtttatatc

SEQ ID NO: 760637 - DNA, 25 bp, Homo sapien
ctaagattcatcatgatgtttatat

SEQ ID NO: 760638 - DNA, 25 bp, Homo sapien
tgatgtttatatctaaacttcctac

SEQ ID NO: 760639 - DNA, 25 bp, Homo sapien
tcatgatgtttatatctaaacttcc

SEQ ID NO: 760640 - DNA, 25 bp, Homo sapien
gctacatcctggcaataaagcagct

SEQ ID NO: 760641 - DNA, 25 bp, Homo sapien
gagggctacatcctggcaataaagc

SEQ ID NO: 760642 - DNA, 25 bp, Homo sapien
ttgtgagaacatccaagggtagagg

SEQ ID NO: 760643 - DNA, 25 bp, Homo sapien
agctctaatcccttgtgagaacatc

SEQ ID NO: 760644 - DNA, 25 bp, Homo sapien
cagtgtgcaatggtgagacttggta

SEQ ID NO: 760645 - DNA, 25 bp, Homo sapien
acccagtgtgcaatggtgagacttg

SEQ ID NO: 760646 - DNA, 25 bp, Homo sapien
tgcaatggtgagacttggtagaact

SEQ ID NO: 760647 - DNA, 25 bp, Homo sapien
ataaacccagtgtgcaatggtgaga

SEQ ID NO: 760648 - DNA, 25 bp, Homo sapien
gacacatggctgtaggagaacgtat

SEQ ID NO: 760649 - DNA, 25 bp, Homo sapien
cagattgtttggtgtgccagcagga

SEQ ID NO: 760650 - DNA, 25 bp, Homo sapien
cccatggcagctcttggagatgact

SEQ ID NO: 760651 - DNA, 25 bp, Homo sapien
gcatctgttgatgaatggccattcc

SEQ ID NO: 760652 - DNA, 25 bp, Homo sapien
tgatgagtcaggcactctatcctgg

SEQ ID NO: 760653 - DNA, 25 bp, Homo sapien
actttcacttcggctgcctctggca

SEQ ID NO: 760654 - DNA, 25 bp, Homo sapien
cttttgcttattctggatgatgagt

SEQ ID NO: 760655 - DNA, 25 bp, Homo sapien
aggcactctatcctggccactttca

SEQ ID NO: 760656 - DNA, 25 bp, Homo sapien
tccaatacagtccaggagcccattt

SEQ ID NO: 760657 - DNA, 25 bp, Homo sapien
tagaattcctctggtaggcagcaaa

SEQ ID NO: 760658 - DNA, 25 bp, Homo sapien
tcccaactgagttcctgtggccttt

SEQ ID NO: 760659 - DNA, 25 bp, Homo sapien
cccatttagggttagcttgctggct

SEQ ID NO: 760660 - DNA, 25 bp, Homo sapien
tcaggcttaggagacaggccttcca

SEQ ID NO: 760661 - DNA, 25 bp, Homo sapien
atcaggcttaggagacaggccttcc

SEQ ID NO: 760662 - DNA, 25 bp, Homo sapien
caggcttaggagacaggccttccat

SEQ ID NO: 760663 - DNA, 25 bp, Homo sapien
tgccagatgacagaacagaagctcc

SEQ ID NO: 760664 - DNA, 25 bp, Homo sapien
gacagaacagaagctccagagtcac

SEQ ID NO: 760665 - DNA, 25 bp, Homo sapien
agaacagaagctccagagtcaccat

SEQ ID NO: 760666 - DNA, 25 bp, Homo sapien
ctgccagatgacagaacagaagctc

SEQ ID NO: 760667 - DNA, 25 bp, Homo sapien
tgaggtaagcaattagaaaagtgga

SEQ ID NO: 760668 - DNA, 25 bp, Homo sapien
gagagggtaaaagcttgactccatc

SEQ ID NO: 760669 - DNA, 25 bp, Homo sapien
tcctattgtagcacacagttctatt

SEQ ID NO: 760670 - DNA, 25 bp, Homo sapien
ttggtacagagacatggagaatatt

SEQ ID NO: 760671 - DNA, 25 bp, Homo sapien
tgccgtcgctgctgctattacaact

SEQ ID NO: 760672 - DNA, 25 bp, Homo sapien
gctgctgctattacaactactgctc

SEQ ID NO: 760673 - DNA, 25 bp, Homo sapien
gtcgctgctgctattacaactactg

SEQ ID NO: 760674 - DNA, 25 bp, Homo sapien
aggagcactagcattgcgcctgccc

SEQ ID NO: 760675 - DNA, 25 bp, Homo sapien
tgctgtggcctcagcggtacagagc

SEQ ID NO: 760676 - DNA, 25 bp, Homo sapien
gatcggcttgttccccgtgtcgggc

SEQ ID NO: 760677 - DNA, 25 bp, Homo sapien
gttgagctacacagaaactcactgc

SEQ ID NO: 760678 - DNA, 25 bp, Homo sapien
ctggacttagacaggcgttgagcta

SEQ ID NO: 760679 - DNA, 25 bp, Homo sapien
ccgcggcccagacatgtgcttaaca

SEQ ID NO: 760680 - DNA, 25 bp, Homo sapien
tgcttaacagtgagaacaacagcga

SEQ ID NO: 760681 - DNA, 25 bp, Homo sapien
ttgcacattgagcagaggttttcac

SEQ ID NO: 760682 - DNA, 25 bp, Homo sapien
cagcgaacacgtgggatttgcacat

SEQ ID NO: 760683 - DNA, 25 bp, Homo sapien
gtgagggattgggtctgttactccc

SEQ ID NO: 760684 - DNA, 25 bp, Homo sapien
tgagggattgggtctgttactccca

SEQ ID NO: 760685 - DNA, 25 bp, Homo sapien
gggtgagggattgggtctgttactc

SEQ ID NO: 760686 - DNA, 25 bp, Homo sapien
gagggattgggtctgttactcccac

SEQ ID NO: 760687 - DNA, 25 bp, Homo sapien
gccatggcagagaaaaacacggtac

SEQ ID NO: 760688 - DNA, 25 bp, Homo sapien
cagatgccatggcagagaaaaacac

SEQ ID NO: 760689 - DNA, 25 bp, Homo sapien
agatgccatggcagagaaaaacacg

SEQ ID NO: 760690 - DNA, 25 bp, Homo sapien
caaattatgtatccgacatattggt

SEQ ID NO: 760691 - DNA, 25 bp, Homo sapien
gaaagcccaattgtatgaccagaga

SEQ ID NO: 760692 - DNA, 25 bp, Homo sapien
cccaattgtatgaccagagacagaa

SEQ ID NO: 760693 - DNA, 25 bp, Homo sapien
tatcacacaaattatgtatccgaca

SEQ ID NO: 760694 - DNA, 25 bp, Homo sapien
ttatagggagcagctttctgtttct

SEQ ID NO: 760695 - DNA, 25 bp, Homo sapien
gcagctttctgtttctccatttgct

SEQ ID NO: 760696 - DNA, 25 bp, Homo sapien
ctttctgtttctccatttgctgtac

SEQ ID NO: 760697 - DNA, 25 bp, Homo sapien
agctttctgtttctccatttgctgt

SEQ ID NO: 760698 - DNA, 25 bp, Homo sapien
ttaaagtgggcatgctggtttcaac

SEQ ID NO: 760699 - DNA, 25 bp, Homo sapien
gggcatgctggtttcaactccccat

SEQ ID NO: 760700 - DNA, 25 bp, Homo sapien
gctggtttcaactccccattttgct

SEQ ID NO: 760701 - DNA, 25 bp, Homo sapien
aaagtgggcatgctggtttcaactc

SEQ ID NO: 760702 - DNA, 25 bp, Homo sapien
caagacgaaatccaccctttgataa

SEQ ID NO: 760703 - DNA, 25 bp, Homo sapien
caccctttgataaggtatgcccagc

SEQ ID NO: 760704 - DNA, 25 bp, Homo sapien
ctggatggcaaagtcaagacgaaat

SEQ ID NO: 760705 - DNA, 25 bp, Homo sapien
taaggtatgcccagcagcctttagc

SEQ ID NO: 760706 - DNA, 25 bp, Homo sapien
aggtgctgcccaagtacacttgagt

SEQ ID NO: 760707 - DNA, 25 bp, Homo sapien
tctttcctgaactaccatgactttc

SEQ ID NO: 760708 - DNA, 25 bp, Homo sapien
gggtcactgccaaagagattgtcag

SEQ ID NO: 760709 - DNA, 25 bp, Homo sapien
ccaaagttagcatgtgatgaagaca

SEQ ID NO: 760710 - DNA, 25 bp, Homo sapien
tctattgtctcagtgacctcaggca

SEQ ID NO: 760711 - DNA, 25 bp, Homo sapien
attgtctcagtgacctcaggcaggc

SEQ ID NO: 760712 - DNA, 25 bp, Homo sapien
ttctattgtctcagtgacctcaggc

SEQ ID NO: 760713 - DNA, 25 bp, Homo sapien
tattgtctcagtgacctcaggcagg

SEQ ID NO: 760714 - DNA, 25 bp, Homo sapien
tgactctgggttccagtgcttgtct

SEQ ID NO: 760715 - DNA, 25 bp, Homo sapien
tgctctctatctgagcctttcttct

SEQ ID NO: 760716 - DNA, 25 bp, Homo sapien
tctgtgctctctatctgagcctttc

SEQ ID NO: 760717 - DNA, 25 bp, Homo sapien
tctgcatcccgcctgctgccagcaa

SEQ ID NO: 760718 - DNA, 25 bp, Homo sapien
cagctcaggcccctggtagggcaga

SEQ ID NO: 760719 - DNA, 25 bp, Homo sapien
catattgtcattggaagcaaggctg

SEQ ID NO: 760720 - DNA, 25 bp, Homo sapien
ttgtcattggaagcaaggctggtgt

SEQ ID NO: 760721 - DNA, 25 bp, Homo sapien
ttagcatattgtcattggaagcaag

SEQ ID NO: 760722 - DNA, 25 bp, Homo sapien
gcaggcagttggaggattgggtcta

SEQ ID NO: 760723 - DNA, 25 bp, Homo sapien
aattgtggaaggtgttgtttgctac

SEQ ID NO: 760724 - DNA, 25 bp, Homo sapien
gtttgctacatcacacaggattcca

SEQ ID NO: 760725 - DNA, 25 bp, Homo sapien
ggcatggaacttgctgctatatttc

SEQ ID NO: 760726 - DNA, 25 bp, Homo sapien
cactctgctgatagcgcattattaa

SEQ ID NO: 760727 - DNA, 25 bp, Homo sapien
gctgatagcgcattattaataattc

SEQ ID NO: 760728 - DNA, 25 bp, Homo sapien
gacactctgctgatagcgcattatt

SEQ ID NO: 760729 - DNA, 25 bp, Homo sapien
caaagacactctgctgatagcgcat

SEQ ID NO: 760730 - DNA, 25 bp, Homo sapien
cgctgtcggccggtgccataagagc

SEQ ID NO: 760731 - DNA, 25 bp, Homo sapien
gagtttcccgctcatctttttgtgg

SEQ ID NO: 760732 - DNA, 25 bp, Homo sapien
ggtgccataagagcaaagaaagctg

SEQ ID NO: 760733 - DNA, 25 bp, Homo sapien
cttccatcccgctgtcggccggtgc

SEQ ID NO: 760734 - DNA, 25 bp, Homo sapien
ttctgtaactgtggtcctcagcaag

SEQ ID NO: 760735 - DNA, 25 bp, Homo sapien
ctgacttctgtaactgtggtcctca

SEQ ID NO: 760736 - DNA, 25 bp, Homo sapien
tgtggtcctcagcaaggatcaatct

SEQ ID NO: 760737 - DNA, 25 bp, Homo sapien
taactgtggtcctcagcaaggatca

SEQ ID NO: 760738 - DNA, 25 bp, Homo sapien
cctcacattccgatattcctcagta

SEQ ID NO: 760739 - DNA, 25 bp, Homo sapien
tttggattcctagggcaaattgtgt

SEQ ID NO: 760740 - DNA, 25 bp, Homo sapien
tcctcagtaagctctgtttttggat

SEQ ID NO: 760741 - DNA, 25 bp, Homo sapien
ttccgatattcctcagtaagctctg

SEQ ID NO: 760742 - DNA, 25 bp, Homo sapien
cttgtgttcgttagtgagtcgaggc

SEQ ID NO: 760743 - DNA, 25 bp, Homo sapien
aggtgctgagccgctctgggacttt

SEQ ID NO: 760744 - DNA, 25 bp, Homo sapien
tcagctccttgtgttcgttagtgag

SEQ ID NO: 760745 - DNA, 25 bp, Homo sapien
tctccttgattgatccctgggccgc

SEQ ID NO: 760746 - DNA, 25 bp, Homo sapien
gccttaatattctctcccggtctag

SEQ ID NO: 760747 - DNA, 25 bp, Homo sapien
cctgaggaattctcaccgtggcgcc

SEQ ID NO: 760748 - DNA, 25 bp, Homo sapien
tcaattcgcctcctgtcagccttaa

SEQ ID NO: 760749 - DNA, 25 bp, Homo sapien
ctaaagggcaggaagcgccatcgcg

SEQ ID NO: 760750 - DNA, 25 bp, Homo sapien
tacggggtgccaggtacactggtca

SEQ ID NO: 760751 - DNA, 25 bp, Homo sapien
ggtacactggtcagtgtgacccagt

SEQ ID NO: 760752 - DNA, 25 bp, Homo sapien
cagcagcagcgtttacggggtgcca

SEQ ID NO: 760753 - DNA, 25 bp, Homo sapien
gtgtgacccagttggcgagctggta

SEQ ID NO: 760754 - DNA, 25 bp, Homo sapien
taatgttcaagtcagattggccctc

SEQ ID NO: 760755 - DNA, 25 bp, Homo sapien
tgttcaagtcagattggccctcaaa

SEQ ID NO: 760756 - DNA, 25 bp, Homo sapien
aacataatgttcaagtcagattggc

SEQ ID NO: 760757 - DNA, 25 bp, Homo sapien
gcagaaaacataatgttcaagtcag

SEQ ID NO: 760758 - DNA, 25 bp, Homo sapien
tataaatggactaaattctgcaatt

SEQ ID NO: 760759 - DNA, 25 bp, Homo sapien
taaatataaatggactaaattctgc

SEQ ID NO: 760760 - DNA, 25 bp, Homo sapien
aatataaatggactaaattctgcaa

SEQ ID NO: 760761 - DNA, 25 bp, Homo sapien
ttaaatataaatggactaaattctg

SEQ ID NO: 760762 - DNA, 25 bp, Homo sapien
atgggaaaggtgatttgtcagctct

SEQ ID NO: 760763 - DNA, 25 bp, Homo sapien
tgggaaaggtgatttgtcagctctt

SEQ ID NO: 760764 - DNA, 25 bp, Homo sapien
gaaaggtgatttgtcagctctttca

SEQ ID NO: 760765 - DNA, 25 bp, Homo sapien
aggtgatttgtcagctctttcagga

SEQ ID NO: 760766 - DNA, 25 bp, Homo sapien
atccatccaggatgaaaggcttttt

SEQ ID NO: 760767 - DNA, 25 bp, Homo sapien
aatccatccaggatgaaaggctttt

SEQ ID NO: 760768 - DNA, 25 bp, Homo sapien
atgcgtcgccgcagcgctgccagct

SEQ ID NO: 760769 - DNA, 25 bp, Homo sapien
cctccgctcctgcacttggtgttgc

SEQ ID NO: 760770 - DNA, 25 bp, Homo sapien
ctcctctggggatgcgtcgccgcag

SEQ ID NO: 760771 - DNA, 25 bp, Homo sapien
ggatgcgtcgccgcagcgctgccag

SEQ ID NO: 760772 - DNA, 25 bp, Homo sapien
gggaaggacattctgcagtagcagc

SEQ ID NO: 760773 - DNA, 25 bp, Homo sapien
catgaaggttgaaggacacatggag

SEQ ID NO: 760774 - DNA, 25 bp, Homo sapien
caggggcttcccttgtgcttgtgca

SEQ ID NO: 760775 - DNA, 25 bp, Homo sapien
cagttgggagagctccctcatcctt

SEQ ID NO: 760776 - DNA, 25 bp, Homo sapien
tcacaactgttgaccaccctctttg

SEQ ID NO: 760777 - DNA, 25 bp, Homo sapien
tgtcttcacaactgttgaccaccct

SEQ ID NO: 760778 - DNA, 25 bp, Homo sapien
ctgttgaccaccctctttgcagtct

SEQ ID NO: 760779 - DNA, 25 bp, Homo sapien
tgtgccctctgtcttcacaactgtt

SEQ ID NO: 760780 - DNA, 25 bp, Homo sapien
gcagccactgcatggacttctctgt

SEQ ID NO: 760781 - DNA, 25 bp, Homo sapien
tggatgcagccactgcatggacttc

SEQ ID NO: 760782 - DNA, 25 bp, Homo sapien
ctgctgagttgtatcaacctcttca

SEQ ID NO: 760783 - DNA, 25 bp, Homo sapien
tgctgagttgtatcaacctcttcat

SEQ ID NO: 760784 - DNA, 25 bp, Homo sapien
tgcgctctgcttgtagccattgcta

SEQ ID NO: 760785 - DNA, 25 bp, Homo sapien
tgtaacttttgcgatcttagagtcc

SEQ ID NO: 760786 - DNA, 25 bp, Homo sapien
atctgaggactcacattcaggctct

SEQ ID NO: 760787 - DNA, 25 bp, Homo sapien
tgagagcctgttcaccaattgcgct

SEQ ID NO: 760788 - DNA, 25 bp, Homo sapien
tataaaatgtcggttctctcttaat

SEQ ID NO: 760789 - DNA, 25 bp, Homo sapien
ctgaatgccgttttgcgaattcttg

SEQ ID NO: 760790 - DNA, 25 bp, Homo sapien
tgccgttttgcgaattcttgaccat

SEQ ID NO: 760791 - DNA, 25 bp, Homo sapien
atgccgttttgcgaattcttgacca

SEQ ID NO: 760792 - DNA, 25 bp, Homo sapien
gaatgccgttttgcgaattcttgac

SEQ ID NO: 760793 - DNA, 25 bp, Homo sapien
cctgggaattctcagactctaccat

SEQ ID NO: 760794 - DNA, 25 bp, Homo sapien
ccgttcctgcctctatgaggctgga

SEQ ID NO: 760795 - DNA, 25 bp, Homo sapien
tctcagactctaccatggtctgtcc

SEQ ID NO: 760796 - DNA, 25 bp, Homo sapien
ctgggctgtattctgcatggactgt

SEQ ID NO: 760797 - DNA, 25 bp, Homo sapien
ttcccaggagccagacactggacct

SEQ ID NO: 760798 - DNA, 25 bp, Homo sapien
tcttcccaggagccagacactggac

SEQ ID NO: 760799 - DNA, 25 bp, Homo sapien
tcccaggagccagacactggacctg

SEQ ID NO: 760800 - DNA, 25 bp, Homo sapien
ggtcttcccaggagccagacactgg

SEQ ID NO: 760801 - DNA, 25 bp, Homo sapien
gaaatctgtggctagtgctgcatgc

SEQ ID NO: 760802 - DNA, 25 bp, Homo sapien
tgtggctagtgctgcatgccatgtg

SEQ ID NO: 760803 - DNA, 25 bp, Homo sapien
tggccctatttggacaggatttttc

SEQ ID NO: 760804 - DNA, 25 bp, Homo sapien
aggaggaaatctgtggctagtgctg

SEQ ID NO: 760805 - DNA, 25 bp, Homo sapien
gggactcatgccttctgctacgatg

SEQ ID NO: 760806 - DNA, 25 bp, Homo sapien
ggggactcatgccttctgctacgat

SEQ ID NO: 760807 - DNA, 25 bp, Homo sapien
cttggggactcatgccttctgctac

SEQ ID NO: 760808 - DNA, 25 bp, Homo sapien
ttggggactcatgccttctgctacg

SEQ ID NO: 760809 - DNA, 25 bp, Homo sapien
gagaggccactttggtgctcagatg

SEQ ID NO: 760810 - DNA, 25 bp, Homo sapien
cggcagggcaacagctccattactg

SEQ ID NO: 760811 - DNA, 25 bp, Homo sapien
cagcaggatcgttgtggttcaggca

SEQ ID NO: 760812 - DNA, 25 bp, Homo sapien
taattaaagttctgccctggaacga

SEQ ID NO: 760813 - DNA, 25 bp, Homo sapien
ggtgaggagacagtgtggctgccct

SEQ ID NO: 760814 - DNA, 25 bp, Homo sapien
actgtgtgttccaggcacagcagct

SEQ ID NO: 760815 - DNA, 25 bp, Homo sapien
gcctcctggggactgtgtgttccag

SEQ ID NO: 760816 - DNA, 25 bp, Homo sapien
tttacaggtgaggagacagtgtggc

SEQ ID NO: 760817 - DNA, 25 bp, Homo sapien
tgcaagagttaaatccatctgctga

SEQ ID NO: 760818 - DNA, 25 bp, Homo sapien
tcatatttagtagccggtgtgagag

SEQ ID NO: 760819 - DNA, 25 bp, Homo sapien
cctgtgtgcaagagttaaatccatc

SEQ ID NO: 760820 - DNA, 25 bp, Homo sapien
tgctgaggtacagtcatatttagta

SEQ ID NO: 760821 - DNA, 25 bp, Homo sapien
gggtagccccaaacacatgtgacta

SEQ ID NO: 760822 - DNA, 25 bp, Homo sapien
aatcaccggtctctctgaatcagaa

SEQ ID NO: 760823 - DNA, 25 bp, Homo sapien
gttttgccaacagtactctcatgtg

SEQ ID NO: 760824 - DNA, 25 bp, Homo sapien
tattaatcccacctcaatcaccggt

SEQ ID NO: 760825 - DNA, 25 bp, Homo sapien
ctgtcactcgtccgcgcggccgcgt

SEQ ID NO: 760826 - DNA, 25 bp, Homo sapien
tgtcactcgtccgcgcggccgcgtc

SEQ ID NO: 760827 - DNA, 25 bp, Homo sapien
gctccctttgctgcgccggaccaac

SEQ ID NO: 760828 - DNA, 25 bp, Homo sapien
cgccgcacccgctccctttgctgcg

SEQ ID NO: 760829 - DNA, 25 bp, Homo sapien
ccgctccctttgctgcgccggacca

SEQ ID NO: 760830 - DNA, 25 bp, Homo sapien
cacccgctccctttgctgcgccgga

SEQ ID NO: 760831 - DNA, 25 bp, Homo sapien
cagccgtggcgcgtcggagggaaaa

SEQ ID NO: 760832 - DNA, 25 bp, Homo sapien
gtggcgcgtcggagggaaaagagaa

SEQ ID NO: 760833 - DNA, 25 bp, Homo sapien
gccgtggcgcgtcggagggaaaaga

SEQ ID NO: 760834 - DNA, 25 bp, Homo sapien
ctgggcagccgtggcgcgtcggagg

SEQ ID NO: 760835 - DNA, 25 bp, Homo sapien
cctcgtccccgcttctccgagacca

SEQ ID NO: 760836 - DNA, 25 bp, Homo sapien
gggagctctccagacccggcagccg

SEQ ID NO: 760837 - DNA, 25 bp, Homo sapien
ttctccgagaccaagcgcgccccgg

SEQ ID NO: 760838 - DNA, 25 bp, Homo sapien
tctccagacccggcagccggaatgt

SEQ ID NO: 760839 - DNA, 25 bp, Homo sapien
aactcgcgtcagtgcccgcgtcgcc

SEQ ID NO: 760840 - DNA, 25 bp, Homo sapien
cggtagtcgcggccccaactcgcgt

SEQ ID NO: 760841 - DNA, 25 bp, Homo sapien
gtcgcggccccaactcgcgtcagtg

SEQ ID NO: 760842 - DNA, 25 bp, Homo sapien
ccccaactcgcgtcagtgcccgcgt

SEQ ID NO: 760843 - DNA, 25 bp, Homo sapien
gcgcaggggtagcagcggcgggcgc

SEQ ID NO: 760844 - DNA, 25 bp, Homo sapien
ccgcctggcgcgcacaccgggctag

SEQ ID NO: 760845 - DNA, 25 bp, Homo sapien
gtggggcggaccactaacagcccag

SEQ ID NO: 760846 - DNA, 25 bp, Homo sapien
gccgggctcgcagcgggcgcagggg

SEQ ID NO: 760847 - DNA, 25 bp, Homo sapien
ccgaggggcgagtcgcattcacagc

SEQ ID NO: 760848 - DNA, 25 bp, Homo sapien
agtcgcattcacagcccgggggcgc

SEQ ID NO: 760849 - DNA, 25 bp, Homo sapien
cggccgaggggcgagtcgcattcac

SEQ ID NO: 760850 - DNA, 25 bp, Homo sapien
gggcgagtcgcattcacagcccggg

SEQ ID NO: 760851 - DNA, 25 bp, Homo sapien
cttctccagcgggatgctcggactg

SEQ ID NO: 760852 - DNA, 25 bp, Homo sapien
ggtacacgtactcctcgggtggctc

SEQ ID NO: 760853 - DNA, 25 bp, Homo sapien
cagcactggctcgtgtcgacgtgga

SEQ ID NO: 760854 - DNA, 25 bp, Homo sapien
caaagtctgataggtcttgccccgg

SEQ ID NO: 760855 - DNA, 25 bp, Homo sapien
ttcctggaaggtgcaaagtcgcccg

SEQ ID NO: 760856 - DNA, 25 bp, Homo sapien
tcaaagggacgtgagcacagtgctc

SEQ ID NO: 760857 - DNA, 25 bp, Homo sapien
tctccacctctcagaaccagagagc

SEQ ID NO: 760858 - DNA, 25 bp, Homo sapien
aaaaagagaggtcatgtcaaaggga

SEQ ID NO: 760859 - DNA, 25 bp, Homo sapien
ttaatgttgaaagtccctccgatac

SEQ ID NO: 760860 - DNA, 25 bp, Homo sapien
cagtgccataggcttcatcctcatg

SEQ ID NO: 760861 - DNA, 25 bp, Homo sapien
ccgatacctgttgggatccttccct

SEQ ID NO: 760862 - DNA, 25 bp, Homo sapien
cctcatgaagcccttttaaagtgaa

SEQ ID NO: 760863 - DNA, 25 bp, Homo sapien
gcacgttccataacgccctctgcag

SEQ ID NO: 760864 - DNA, 25 bp, Homo sapien
gttccataacgccctctgcaggtgg

SEQ ID NO: 760865 - DNA, 25 bp, Homo sapien
acgttccataacgccctctgcaggt

SEQ ID NO: 760866 - DNA, 25 bp, Homo sapien
gtagctgcacgttccataacgccct

SEQ ID NO: 760867 - DNA, 25 bp, Homo sapien
ttttctcaaatccagctcaaacaca

SEQ ID NO: 760868 - DNA, 25 bp, Homo sapien
gctgtgctctttgtcccacatggaa

SEQ ID NO: 760869 - DNA, 25 bp, Homo sapien
ggtaagatgccgagcacatcattta

SEQ ID NO: 760870 - DNA, 25 bp, Homo sapien
aagctgatggttccccacgtgccaa

SEQ ID NO: 760871 - DNA, 25 bp, Homo sapien
caccatgggccttttgccaggctgt

SEQ ID NO: 760872 - DNA, 25 bp, Homo sapien
tcaccaacccatagctggatcccca

SEQ ID NO: 760873 - DNA, 25 bp, Homo sapien
ccaacccatagctggatccccactg

SEQ ID NO: 760874 - DNA, 25 bp, Homo sapien
ttcaccaacccatagctggatcccc

SEQ ID NO: 760875 - DNA, 25 bp, Homo sapien
accaacccatagctggatccccact

SEQ ID NO: 760876 - DNA, 25 bp, Homo sapien
gtcacagtgaccctcttttaggctc

SEQ ID NO: 760877 - DNA, 25 bp, Homo sapien
cacagtgaccctcttttaggctcat

SEQ ID NO: 760878 - DNA, 25 bp, Homo sapien
tgggtcacagtgaccctcttttagg

SEQ ID NO: 760879 - DNA, 25 bp, Homo sapien
cattctgggtcacagtgaccctctt

SEQ ID NO: 760880 - DNA, 25 bp, Homo sapien
aggacaatgtgctagtgccttccac

SEQ ID NO: 760881 - DNA, 25 bp, Homo sapien
taaaagcagcttcctgctcagagtc

SEQ ID NO: 760882 - DNA, 25 bp, Homo sapien
gagtcctccaggacaatgtgctagt

SEQ ID NO: 760883 - DNA, 25 bp, Homo sapien
tcctccaggacaatgtgctagtgcc

SEQ ID NO: 760884 - DNA, 25 bp, Homo sapien
gggatactcactagaaagaccatgg

SEQ ID NO: 760885 - DNA, 25 bp, Homo sapien
gaccccagttgagttgtgtgcccca

SEQ ID NO: 760886 - DNA, 25 bp, Homo sapien
gtgtgccccacgtccatgatacaaa

SEQ ID NO: 760887 - DNA, 25 bp, Homo sapien
catggaaatgggtcgtatcaagctg

SEQ ID NO: 760888 - DNA, 25 bp, Homo sapien
cattcccaagaaagctgtacgtggc

SEQ ID NO: 760889 - DNA, 25 bp, Homo sapien
tgtacgtggctaacgggaccctcca

SEQ ID NO: 760890 - DNA, 25 bp, Homo sapien
gaaagctgtacgtggctaacgggac

SEQ ID NO: 760891 - DNA, 25 bp, Homo sapien
caagaaagctgtacgtggctaacgg

SEQ ID NO: 760892 - DNA, 25 bp, Homo sapien
cctggctaatttatgtgttttttat

SEQ ID NO: 760893 - DNA, 25 bp, Homo sapien
ccgcaacctctgtttcccgagttca

SEQ ID NO: 760894 - DNA, 25 bp, Homo sapien
tggctaatttatgtgttttttatag

SEQ ID NO: 760895 - DNA, 25 bp, Homo sapien
tcaccgcaacctctgtttcccgagt

SEQ ID NO: 760896 - DNA, 25 bp, Homo sapien
ctgatcaggctcgtacacagggtcc

SEQ ID NO: 760897 - DNA, 25 bp, Homo sapien
cagcgacacctctcgcatggagaca

SEQ ID NO: 760898 - DNA, 25 bp, Homo sapien
gggacacgctgacactgtgcatagc

SEQ ID NO: 760899 - DNA, 25 bp, Homo sapien
tgtgcatagcacctcaccgttggct

SEQ ID NO: 760900 - DNA, 25 bp, Homo sapien
atggaacctcatggcccgcacaatt

SEQ ID NO: 760901 - DNA, 25 bp, Homo sapien
gcacaatttcgactgtcatgacaga

SEQ ID NO: 760902 - DNA, 25 bp, Homo sapien
gactctgggaattgtctgagcacca

SEQ ID NO: 760903 - DNA, 25 bp, Homo sapien
tggtcgaaggtacccatggaacctc

SEQ ID NO: 760904 - DNA, 25 bp, Homo sapien
tgactttggcagctagcaactgaac

SEQ ID NO: 760905 - DNA, 25 bp, Homo sapien
ggcagctagcaactgaactgtaatt

SEQ ID NO: 760906 - DNA, 25 bp, Homo sapien
aattttccttctgtcggagaaagag

SEQ ID NO: 760907 - DNA, 25 bp, Homo sapien
taattttccttctgtcggagaaaga

SEQ ID NO: 760908 - DNA, 25 bp, Homo sapien
caggtgagtgttgtgttgcgggctc

SEQ ID NO: 760909 - DNA, 25 bp, Homo sapien
tgcgggctctgcagttttagcagta

SEQ ID NO: 760910 - DNA, 25 bp, Homo sapien
ggctctgcagttttagcagtatgca

SEQ ID NO: 760911 - DNA, 25 bp, Homo sapien
gtgttgcgggctctgcagttttagc

SEQ ID NO: 760912 - DNA, 25 bp, Homo sapien
tattggcagttttgtgtaggttcga

SEQ ID NO: 760913 - DNA, 25 bp, Homo sapien
gagggcttcaaaaattgagttatta

SEQ ID NO: 760914 - DNA, 25 bp, Homo sapien
ggaactgcagaccagcgaggaagct

SEQ ID NO: 760915 - DNA, 25 bp, Homo sapien
aagcaacagagcgaaaacaggtgaa

SEQ ID NO: 760916 - DNA, 25 bp, Homo sapien
acagtgaattctgaagaggtccagg

SEQ ID NO: 760917 - DNA, 25 bp, Homo sapien
tctgaagaggtccaggccaatttag

SEQ ID NO: 760918 - DNA, 25 bp, Homo sapien
gaattctgaagaggtccaggccaat

SEQ ID NO: 760919 - DNA, 25 bp, Homo sapien
tgaagaggtccaggccaatttagaa

SEQ ID NO: 760920 - DNA, 25 bp, Homo sapien
caatgaactgcatcaggtcaacctt

SEQ ID NO: 760921 - DNA, 25 bp, Homo sapien
gaagtttgcctcaaggcccacataa

SEQ ID NO: 760922 - DNA, 25 bp, Homo sapien
tagaggacaagagaacatgccaatg

SEQ ID NO: 760923 - DNA, 25 bp, Homo sapien
tgatattcagctaaccagaacagcc

SEQ ID NO: 760924 - DNA, 25 bp, Homo sapien
tgcttaatacgtccatgggcctcac

SEQ ID NO: 760925 - DNA, 25 bp, Homo sapien
cctctgctgtccaaactcattaatg

SEQ ID NO: 760926 - DNA, 25 bp, Homo sapien
gggctcacccatgagaaaatgaagt

SEQ ID NO: 760927 - DNA, 25 bp, Homo sapien
tagtgcttgtaagctggacctctgc

SEQ ID NO: 760928 - DNA, 25 bp, Homo sapien
tcctctgcgggctttcacactgaga

SEQ ID NO: 760929 - DNA, 25 bp, Homo sapien
gattacccaatcagagctcacatcc

SEQ ID NO: 760930 - DNA, 25 bp, Homo sapien
tttcttgttgattacccaatcagag

SEQ ID NO: 760931 - DNA, 25 bp, Homo sapien
cctctgcgggctttcacactgagag

SEQ ID NO: 760932 - DNA, 25 bp, Homo sapien
aacacatttgtcatacatgaagcaa

SEQ ID NO: 760933 - DNA, 25 bp, Homo sapien
cacatttgtcatacatgaagcaagc

SEQ ID NO: 760934 - DNA, 25 bp, Homo sapien
atttgtcatacatgaagcaagcagg

SEQ ID NO: 760935 - DNA, 25 bp, Homo sapien
catttgtcatacatgaagcaagcag

SEQ ID NO: 760936 - DNA, 25 bp, Homo sapien
gagcttttgaggctggacttttgat

SEQ ID NO: 760937 - DNA, 25 bp, Homo sapien
tgaccgactctccagaaagcagaca

SEQ ID NO: 760938 - DNA, 25 bp, Homo sapien
caggccatgttagtaagggtctgag

SEQ ID NO: 760939 - DNA, 25 bp, Homo sapien
agcagacacaggtggtactggtgcc

SEQ ID NO: 760940 - DNA, 25 bp, Homo sapien
ccccatccgtcacaccaaggtggta

SEQ ID NO: 760941 - DNA, 25 bp, Homo sapien
aatcccgcagattttgatctgtagg

SEQ ID NO: 760942 - DNA, 25 bp, Homo sapien
taagacgatcacttaaatcccgcag

SEQ ID NO: 760943 - DNA, 25 bp, Homo sapien
cttaaatcccgcagattttgatctg

SEQ ID NO: 760944 - DNA, 25 bp, Homo sapien
gacggagtccaagtcatggccaaat

SEQ ID NO: 760945 - DNA, 25 bp, Homo sapien
catctgcaactgtagttcaaggagc

SEQ ID NO: 760946 - DNA, 25 bp, Homo sapien
ccctggctttacagaagccagtttc

SEQ ID NO: 760947 - DNA, 25 bp, Homo sapien
ccagtcactagatggagacggagtc

SEQ ID NO: 760948 - DNA, 25 bp, Homo sapien
tgtggcctccgcttctgtccttggt

SEQ ID NO: 760949 - DNA, 25 bp, Homo sapien
ccttcctgtggcctccgcttctgtc

SEQ ID NO: 760950 - DNA, 25 bp, Homo sapien
tcctgttcagagcccgcagccctgc

SEQ ID NO: 760951 - DNA, 25 bp, Homo sapien
cttggtgcagctgttgtttttaatg

SEQ ID NO: 760952 - DNA, 25 bp, Homo sapien
gacatcagagaacttttggaggtga

SEQ ID NO: 760953 - DNA, 25 bp, Homo sapien
taacatgagggtatacttatgtcca

SEQ ID NO: 760954 - DNA, 25 bp, Homo sapien
gttacgtgttcttaccataacagca

SEQ ID NO: 760955 - DNA, 25 bp, Homo sapien
cggcctcccaatcatgttacgtgtt

SEQ ID NO: 760956 - DNA, 25 bp, Homo sapien
gcctctttctagtaatgcaccacaa

SEQ ID NO: 760957 - DNA, 25 bp, Homo sapien
tactgcctctttctagtaatgcacc

SEQ ID NO: 760958 - DNA, 25 bp, Homo sapien
cagatgcttgtatgttactgcctct

SEQ ID NO: 760959 - DNA, 25 bp, Homo sapien
tcctctgaagcagatgcttgtatgt

SEQ ID NO: 760960 - DNA, 25 bp, Homo sapien
ttagtgatagtttggtcaatatcat

SEQ ID NO: 760961 - DNA, 25 bp, Homo sapien
tagtgatagtttggtcaatatcata

SEQ ID NO: 760962 - DNA, 25 bp, Homo sapien
tgctgacactgaatatgtaaatgta

SEQ ID NO: 760963 - DNA, 25 bp, Homo sapien
gctgctgacactgaatatgtaaatg

SEQ ID NO: 760964 - DNA, 25 bp, Homo sapien
atgtaaatgtaaggacggcctttct

SEQ ID NO: 760965 - DNA, 25 bp, Homo sapien
agctgctgacactgaatatgtaaat

SEQ ID NO: 760966 - DNA, 25 bp, Homo sapien
cagttgacctgtactccttccctta

SEQ ID NO: 760967 - DNA, 25 bp, Homo sapien
tcagttgacctgtactccttccctt

SEQ ID NO: 760968 - DNA, 25 bp, Homo sapien
ttgcgtcagcccaatgggtcatccc

SEQ ID NO: 760969 - DNA, 25 bp, Homo sapien
cgtcagcccaatgggtcatccccag

SEQ ID NO: 760970 - DNA, 25 bp, Homo sapien
gcgtcagcccaatgggtcatcccca

SEQ ID NO: 760971 - DNA, 25 bp, Homo sapien
cagcccaatgggtcatccccagctc

SEQ ID NO: 760972 - DNA, 25 bp, Homo sapien
tcatgtctcgtgcacatggcctgcc

SEQ ID NO: 760973 - DNA, 25 bp, Homo sapien
tggtgcactcgtcagtcttcacttc

SEQ ID NO: 760974 - DNA, 25 bp, Homo sapien
ggatcaccgcggtttctgcaaagca

SEQ ID NO: 760975 - DNA, 25 bp, Homo sapien
gccttcctcataagtacagtggcat

SEQ ID NO: 760976 - DNA, 25 bp, Homo sapien
tctttgactgatagttcccagagtc

SEQ ID NO: 760977 - DNA, 25 bp, Homo sapien
tagagaaggattttatgcccaaagt

SEQ ID NO: 760978 - DNA, 25 bp, Homo sapien
tcccagagtcatctagaatgttcac

SEQ ID NO: 760979 - DNA, 25 bp, Homo sapien
tatataagctctctaatggagggat

SEQ ID NO: 760980 - DNA, 25 bp, Homo sapien
gaaaaagatatgcaggtacacggtg

SEQ ID NO: 760981 - DNA, 25 bp, Homo sapien
tgatccattcatgcgtgactctgcc

SEQ ID NO: 760982 - DNA, 25 bp, Homo sapien
tacctatggtgtacaatacaggagc

SEQ ID NO: 760983 - DNA, 25 bp, Homo sapien
tatcctaggagaatcgaaggactcc

SEQ ID NO: 760984 - DNA, 25 bp, Homo sapien
gctggtctctagtttggctcctaat

SEQ ID NO: 760985 - DNA, 25 bp, Homo sapien
tcaagccttattcccttgttgtcaa

SEQ ID NO: 760986 - DNA, 25 bp, Homo sapien
gatttcatatacttcttatgccaga

SEQ ID NO: 760987 - DNA, 25 bp, Homo sapien
gagaccgaaagtccaagaaggcaag

SEQ ID NO: 760988 - DNA, 25 bp, Homo sapien
gagggatggccaatgtctaccagtc

SEQ ID NO: 760989 - DNA, 25 bp, Homo sapien
gaagactttgagctgcatggactga

SEQ ID NO: 760990 - DNA, 25 bp, Homo sapien
gagaagaggttactaatggcccacc

SEQ ID NO: 760991 - DNA, 25 bp, Homo sapien
tggaaagctgattacacctgagaac

SEQ ID NO: 760992 - DNA, 25 bp, Homo sapien
gatgtcaaggacactgtgcctctcc

SEQ ID NO: 760993 - DNA, 25 bp, Homo sapien
agaccccttgatgtcaaggacactg

SEQ ID NO: 760994 - DNA, 25 bp, Homo sapien
tctccatctgcactagctgcaacat

SEQ ID NO: 760995 - DNA, 25 bp, Homo sapien
ccttgatgtcaaggacactgtgcct

SEQ ID NO: 760996 - DNA, 25 bp, Homo sapien
caggatctgagatagtaaagaccat

SEQ ID NO: 760997 - DNA, 25 bp, Homo sapien
tggcacttgaactggacattgaaaa

SEQ ID NO: 760998 - DNA, 25 bp, Homo sapien
tggctaatactcaacatgctgcaaa

SEQ ID NO: 760999 - DNA, 25 bp, Homo sapien
gggcaggatctgagatagtaaagac

SEQ ID NO: 761000 - DNA, 25 bp, Homo sapien
cttttcagggtgattgtcagtgtca

SEQ ID NO: 761001 - DNA, 25 bp, Homo sapien
taaatcataaactgctcatgggcca

SEQ ID NO: 761002 - DNA, 25 bp, Homo sapien
taggtcagccagaggttttatgtac

SEQ ID NO: 761003 - DNA, 25 bp, Homo sapien
tgttaaggctagaatagcaggtgct

SEQ ID NO: 761004 - DNA, 25 bp, Homo sapien
tgtgtttggaaacagttctttctaa

SEQ ID NO: 761005 - DNA, 25 bp, Homo sapien
agaattgtatttatttgacaatgta

SEQ ID NO: 761006 - DNA, 25 bp, Homo sapien
gcatttagactagggaggctacaac

SEQ ID NO: 761007 - DNA, 25 bp, Homo sapien
gtctattttctagaggtccctgacc

SEQ ID NO: 761008 - DNA, 25 bp, Homo sapien
taagacttcaaatcacgggctctga

SEQ ID NO: 761009 - DNA, 25 bp, Homo sapien
gatttggattcttaactcagcctct

SEQ ID NO: 761010 - DNA, 25 bp, Homo sapien
tcacagcaaattgagagagtaactg

SEQ ID NO: 761011 - DNA, 25 bp, Homo sapien
gaatagcaaactcggccaagcagag

SEQ ID NO: 761012 - DNA, 25 bp, Homo sapien
actgcttaggtccagctttccgtgg

SEQ ID NO: 761013 - DNA, 25 bp, Homo sapien
tcttgccaacaatgcagtgcttctc

SEQ ID NO: 761014 - DNA, 25 bp, Homo sapien
caacactaagcacagtgttctccat

SEQ ID NO: 761015 - DNA, 25 bp, Homo sapien
tatcttcaacactaagcacagtgtt

SEQ ID NO: 761016 - DNA, 25 bp, Homo sapien
cttttgatcagtttgctctcctctt

SEQ ID NO: 761017 - DNA, 25 bp, Homo sapien
ttttgatcagtttgctctcctcttt

SEQ ID NO: 761018 - DNA, 25 bp, Homo sapien
cccatgttactgatgagcaatctga

SEQ ID NO: 761019 - DNA, 25 bp, Homo sapien
taatcctcttagtggttgataccac

SEQ ID NO: 761020 - DNA, 25 bp, Homo sapien
gattagaatcagacctccaaaggcc

SEQ ID NO: 761021 - DNA, 25 bp, Homo sapien
gtaacgtgtacctgataaataacca

SEQ ID NO: 761022 - DNA, 25 bp, Homo sapien
tatttctcgatatgaggtttcataa

SEQ ID NO: 761023 - DNA, 25 bp, Homo sapien
ttagtccatatttctcgatatgagg

SEQ ID NO: 761024 - DNA, 25 bp, Homo sapien
ttctcgatatgaggtttcataatca

SEQ ID NO: 761025 - DNA, 25 bp, Homo sapien
ccatatttctcgatatgaggtttca

SEQ ID NO: 761026 - DNA, 25 bp, Homo sapien
cagatcagctctgcaccttgaatgc

SEQ ID NO: 761027 - DNA, 25 bp, Homo sapien
atcagctctgcaccttgaatgcagc

SEQ ID NO: 761028 - DNA, 25 bp, Homo sapien
gatcagctctgcaccttgaatgcag

SEQ ID NO: 761029 - DNA, 25 bp, Homo sapien
tcagatcagctctgcaccttgaatg

SEQ ID NO: 761030 - DNA, 25 bp, Homo sapien
gaatgcttcactatggggcaccaag

SEQ ID NO: 761031 - DNA, 25 bp, Homo sapien
tgcccattatgcagagtccactgac

SEQ ID NO: 761032 - DNA, 25 bp, Homo sapien
gggcaccaagtgactacacagaact

SEQ ID NO: 761033 - DNA, 25 bp, Homo sapien
actgacccaacagcagtccattcag

SEQ ID NO: 761034 - DNA, 25 bp, Homo sapien
tatatacttaagtgcccatttagag

SEQ ID NO: 761035 - DNA, 25 bp, Homo sapien
cccattagtgatgtatgagagtacc

SEQ ID NO: 761036 - DNA, 25 bp, Homo sapien
cataccaagagtggaattacagggt

SEQ ID NO: 761037 - DNA, 25 bp, Homo sapien
tgtctacgtaaatcctctgccagtg

SEQ ID NO: 761038 - DNA, 25 bp, Homo sapien
ggtgactacgacagggtgctttcca

SEQ ID NO: 761039 - DNA, 25 bp, Homo sapien
cccagggttgcagggtgcattccaa

SEQ ID NO: 761040 - DNA, 25 bp, Homo sapien
tatccagggtatatgaggacgagaa

SEQ ID NO: 761041 - DNA, 25 bp, Homo sapien
aggacgagaaagtgaggcatccctc

SEQ ID NO: 761042 - DNA, 25 bp, Homo sapien
caggttgcgaagactgtcggaaaag

SEQ ID NO: 761043 - DNA, 25 bp, Homo sapien
agactgtcggaaaagggtagtgtct

SEQ ID NO: 761044 - DNA, 25 bp, Homo sapien
ctgcaggttgcgaagactgtcggaa

SEQ ID NO: 761045 - DNA, 25 bp, Homo sapien
ttgcgaagactgtcggaaaagggta

SEQ ID NO: 761046 - DNA, 25 bp, Homo sapien
ctgaagcttacttctgtcagtttat

SEQ ID NO: 761047 - DNA, 25 bp, Homo sapien
gaagcttacttctgtcagtttatca

SEQ ID NO: 761048 - DNA, 25 bp, Homo sapien
cttacttctgtcagtttatcaaact

SEQ ID NO: 761049 - DNA, 25 bp, Homo sapien
gcttacttctgtcagtttatcaaac

SEQ ID NO: 761050 - DNA, 25 bp, Homo sapien
ctgtgattgtaaactgttggttgtc

SEQ ID NO: 761051 - DNA, 25 bp, Homo sapien
tggttgtcatggctccttattgcag

SEQ ID NO: 761052 - DNA, 25 bp, Homo sapien
tgctggttctcactgtgattgtaaa

SEQ ID NO: 761053 - DNA, 25 bp, Homo sapien
ggttgtcatggctccttattgcaga

SEQ ID NO: 761054 - DNA, 25 bp, Homo sapien
gttgcctaacgaccttccgcgcgga

SEQ ID NO: 761055 - DNA, 25 bp, Homo sapien
gtgggcgcgcgttgcctaacgacct

SEQ ID NO: 761056 - DNA, 25 bp, Homo sapien
cgacggcggcgtgtggatggaggcc

SEQ ID NO: 761057 - DNA, 25 bp, Homo sapien
ggacggtgggcaggcgacggcggcg

SEQ ID NO: 761058 - DNA, 25 bp, Homo sapien
cactgagggctttacacgtcttaac

SEQ ID NO: 761059 - DNA, 25 bp, Homo sapien
tatctgttgttcgaaactgggcccc

SEQ ID NO: 761060 - DNA, 25 bp, Homo sapien
tgtaggccccaccagctatgtggag

SEQ ID NO: 761061 - DNA, 25 bp, Homo sapien
tcaaggctaatgagggtctgacgct

SEQ ID NO: 761062 - DNA, 25 bp, Homo sapien
caggccaactgtcaagggtgatatg

SEQ ID NO: 761063 - DNA, 25 bp, Homo sapien
tcaggcacataatcgttaatcaggc

SEQ ID NO: 761064 - DNA, 25 bp, Homo sapien
caagttctagctataaatggcctct

SEQ ID NO: 761065 - DNA, 25 bp, Homo sapien
gtgacagtttttagtccacccatga

SEQ ID NO: 761066 - DNA, 25 bp, Homo sapien
cagagtaagaacagtaagagtttta

SEQ ID NO: 761067 - DNA, 25 bp, Homo sapien
aatgaaagtacaggtacatctttac

SEQ ID NO: 761068 - DNA, 25 bp, Homo sapien
aagtacaggtacatctttacatgcc

SEQ ID NO: 761069 - DNA, 25 bp, Homo sapien
tataatgaaagtacaggtacatctt

SEQ ID NO: 761070 - DNA, 25 bp, Homo sapien
tactaaagttaaattggtacatcta

SEQ ID NO: 761071 - DNA, 25 bp, Homo sapien
cagttcctgaaaggatggacctttt

SEQ ID NO: 761072 - DNA, 25 bp, Homo sapien
tggaccttttagagatacttatctt

SEQ ID NO: 761073 - DNA, 25 bp, Homo sapien
gatggaccttttagagatacttatc

SEQ ID NO: 761074 - DNA, 25 bp, Homo sapien
ccttttagagatacttatctttcca

SEQ ID NO: 761075 - DNA, 25 bp, Homo sapien
taagagatcacaatagtgtgggtaa

SEQ ID NO: 761076 - DNA, 25 bp, Homo sapien
aagagatcacaatagtgtgggtaat

SEQ ID NO: 761077 - DNA, 25 bp, Homo sapien
tgccatagttatgtctgttctcaag

SEQ ID NO: 761078 - DNA, 25 bp, Homo sapien
gttctcaagacctttcacaaaaggc

SEQ ID NO: 761079 - DNA, 25 bp, Homo sapien
ttcaaacctgccatagttatgtctg

SEQ ID NO: 761080 - DNA, 25 bp, Homo sapien
aagaaaagcagggttgcatttcttt

SEQ ID NO: 761081 - DNA, 25 bp, Homo sapien
tgtctggtctgggaactcgatgttg

SEQ ID NO: 761082 - DNA, 25 bp, Homo sapien
cactagggttggtatggttctgcca

SEQ ID NO: 761083 - DNA, 25 bp, Homo sapien
gatagaaatgtctggtacttccctg

SEQ ID NO: 761084 - DNA, 25 bp, Homo sapien
aaccctgaacaggaatcacctaagg

SEQ ID NO: 761085 - DNA, 25 bp, Homo sapien
gagtaactttcagagggcttgtcca

SEQ ID NO: 761086 - DNA, 25 bp, Homo sapien
cgtccttcatgatgaggttgtaagg

SEQ ID NO: 761087 - DNA, 25 bp, Homo sapien
tgtacatgttgcctcctcatcaaat

SEQ ID NO: 761088 - DNA, 25 bp, Homo sapien
taaatatgtgacttaatgagcgtcc

SEQ ID NO: 761089 - DNA, 25 bp, Homo sapien
aagccatccacaaattacagtccat

SEQ ID NO: 761090 - DNA, 25 bp, Homo sapien
tggagcataagcctttgctaaagcc

SEQ ID NO: 761091 - DNA, 25 bp, Homo sapien
ctaaagccatccacaaattacagtc

SEQ ID NO: 761092 - DNA, 25 bp, Homo sapien
taagcctttgctaaagccatccaca

SEQ ID NO: 761093 - DNA, 25 bp, Homo sapien
tttgaacaagtggttcaccttcatc

SEQ ID NO: 761094 - DNA, 25 bp, Homo sapien
gtttgaacaagtggttcaccttcat

SEQ ID NO: 761095 - DNA, 25 bp, Homo sapien
tgtttgaacaagtggttcaccttca

SEQ ID NO: 761096 - DNA, 25 bp, Homo sapien
gcatcttatcccaaggaacatcttc

SEQ ID NO: 761097 - DNA, 25 bp, Homo sapien
gttttggtggtagcatcttatccca

SEQ ID NO: 761098 - DNA, 25 bp, Homo sapien
gagatggggtcagcggttttttcca

SEQ ID NO: 761099 - DNA, 25 bp, Homo sapien
gctggcacccctttatatcttttca

SEQ ID NO: 761100 - DNA, 25 bp, Homo sapien
gactctttgcaaagcacacaacctg

SEQ ID NO: 761101 - DNA, 25 bp, Homo sapien
tagaaggtacttcgcaagcacagag

SEQ ID NO: 761102 - DNA, 25 bp, Homo sapien
caacctggaaacgagcatgggagac

SEQ ID NO: 761103 - DNA, 25 bp, Homo sapien
catctaatccagtgttgggaggtca

SEQ ID NO: 761104 - DNA, 25 bp, Homo sapien
agatcttgtttgaaatctgtcccag

SEQ ID NO: 761105 - DNA, 25 bp, Homo sapien
atctgtcccagagctcaccaaccat

SEQ ID NO: 761106 - DNA, 25 bp, Homo sapien
ttgactggtgccaagaaagatcttg

SEQ ID NO: 761107 - DNA, 25 bp, Homo sapien
aaattaattggtttgactggtgcca

SEQ ID NO: 761108 - DNA, 25 bp, Homo sapien
tttacttctagaacttgaactcaca

SEQ ID NO: 761109 - DNA, 25 bp, Homo sapien
atttacttctagaacttgaactcac

SEQ ID NO: 761110 - DNA, 25 bp, Homo sapien
tatttacttctagaacttgaactca

SEQ ID NO: 761111 - DNA, 25 bp, Homo sapien
tatatttacttctagaacttgaact

SEQ ID NO: 761112 - DNA, 25 bp, Homo sapien
taaagaggcttagagtaccgctgct

SEQ ID NO: 761113 - DNA, 25 bp, Homo sapien
gctagcgatgcgatgtctcccaagg

SEQ ID NO: 761114 - DNA, 25 bp, Homo sapien
gctgcttggctagcgatgcgatgtc

SEQ ID NO: 761115 - DNA, 25 bp, Homo sapien
tagagtaccgctgcttggctagcga

SEQ ID NO: 761116 - DNA, 25 bp, Homo sapien
ttctgaatctggtgatggggttgtt

SEQ ID NO: 761117 - DNA, 25 bp, Homo sapien
ttgttgatggaatattagaatttgc

SEQ ID NO: 761118 - DNA, 25 bp, Homo sapien
tattagaatttgctgggtgggtggc

SEQ ID NO: 761119 - DNA, 25 bp, Homo sapien
gaaatgaaccttgccggtatatcct

SEQ ID NO: 761120 - DNA, 25 bp, Homo sapien
ctagtagtctatggtttctttgtcc

SEQ ID NO: 761121 - DNA, 25 bp, Homo sapien
tgttgaaagggttgtagggtctcac

SEQ ID NO: 761122 - DNA, 25 bp, Homo sapien
gacggaagaggtcaactgccatttc

SEQ ID NO: 761123 - DNA, 25 bp, Homo sapien
tcacagttgtgaccagtcgagacag

SEQ ID NO: 761124 - DNA, 25 bp, Homo sapien
gcgcggagaagcagcctttatttcc

SEQ ID NO: 761125 - DNA, 25 bp, Homo sapien
agcgcggagaagcagcctttatttc

SEQ ID NO: 761126 - DNA, 25 bp, Homo sapien
acgcgcaggccagcggagaacagca

SEQ ID NO: 761127 - DNA, 25 bp, Homo sapien
gcgcaggccagcggagaacagcacc

SEQ ID NO: 761128 - DNA, 25 bp, Homo sapien
gggacgcgcaggccagcggagaaca

SEQ ID NO: 761129 - DNA, 25 bp, Homo sapien
cggagaacagcaccgaacccaccac

SEQ ID NO: 761130 - DNA, 25 bp, Homo sapien
ccttgtgtgatgtcccctgctagaa

SEQ ID NO: 761131 - DNA, 25 bp, Homo sapien
cctgctagaaaagaagaacgcactt

SEQ ID NO: 761132 - DNA, 25 bp, Homo sapien
ggttcccactgacagcatacggatt

SEQ ID NO: 761133 - DNA, 25 bp, Homo sapien
caaagtggtcctgacttagacttca

SEQ ID NO: 761134 - DNA, 25 bp, Homo sapien
ggagaatctttgcttggttccactg

SEQ ID NO: 761135 - DNA, 25 bp, Homo sapien
aggatctggctgtcaagctgagtga

SEQ ID NO: 761136 - DNA, 25 bp, Homo sapien
cagagcctgtactccatctggggag

SEQ ID NO: 761137 - DNA, 25 bp, Homo sapien
tgcagcaccatggagttcacgcctg

SEQ ID NO: 761138 - DNA, 25 bp, Homo sapien
agtggtttggagaaatatcccatgc

SEQ ID NO: 761139 - DNA, 25 bp, Homo sapien
ttggagaaatatcccatgctctcac

SEQ ID NO: 761140 - DNA, 25 bp, Homo sapien
ggtttggagaaatatcccatgctct

SEQ ID NO: 761141 - DNA, 25 bp, Homo sapien
tgtaaaggtcccagtggtttggaga

SEQ ID NO: 761142 - DNA, 25 bp, Homo sapien
agaaaggaaggggtgttgtcactgt

SEQ ID NO: 761143 - DNA, 25 bp, Homo sapien
ggcttgctctcaggagccccagact

SEQ ID NO: 761144 - DNA, 25 bp, Homo sapien
gtgttgtcactgtgaagagggctgg

SEQ ID NO: 761145 - DNA, 25 bp, Homo sapien
cctctctgcagggtgtgccagaaag

SEQ ID NO: 761146 - DNA, 25 bp, Homo sapien
gctgtgtgccaacgactcacttcca

SEQ ID NO: 761147 - DNA, 25 bp, Homo sapien
ggtgtctgcacaagtgaccatcgtg

SEQ ID NO: 761148 - DNA, 25 bp, Homo sapien
ccatttgtagctagaatgtagtgca

SEQ ID NO: 761149 - DNA, 25 bp, Homo sapien
tggcaagcatccctatcaacacgca

SEQ ID NO: 761150 - DNA, 25 bp, Homo sapien
ttccttatggtaattatctgctaga

SEQ ID NO: 761151 - DNA, 25 bp, Homo sapien
tatcttctggaatgcattgtactgt

SEQ ID NO: 761152 - DNA, 25 bp, Homo sapien
aaatgcgagtccttggtgttgagtt

SEQ ID NO: 761153 - DNA, 25 bp, Homo sapien
tgcgagtccttggtgttgagttgct

SEQ ID NO: 761154 - DNA, 25 bp, Homo sapien
atgcgagtccttggtgttgagttgc

SEQ ID NO: 761155 - DNA, 25 bp, Homo sapien
cgagtccttggtgttgagttgctgc

SEQ ID NO: 761156 - DNA, 25 bp, Homo sapien
tttgcattataagcagcagaaactg

SEQ ID NO: 761157 - DNA, 25 bp, Homo sapien
taatgcgagcaaaataaggactgtg

SEQ ID NO: 761158 - DNA, 25 bp, Homo sapien
tcaggacttggtgaataagtggacc

SEQ ID NO: 761159 - DNA, 25 bp, Homo sapien
gttggatatttaacacgctttgcat

SEQ ID NO: 761160 - DNA, 25 bp, Homo sapien
acatctactgccgtggcccaggtgg

SEQ ID NO: 761161 - DNA, 25 bp, Homo sapien
ctccacatctactgccgtggcccag

SEQ ID NO: 761162 - DNA, 25 bp, Homo sapien
cacatctactgccgtggcccaggtg

SEQ ID NO: 761163 - DNA, 25 bp, Homo sapien
atctactgccgtggcccaggtggag

SEQ ID NO: 761164 - DNA, 25 bp, Homo sapien
gcaggctgcagttctacagtatcac

SEQ ID NO: 761165 - DNA, 25 bp, Homo sapien
gctgtgaccatttccccgaactgac

SEQ ID NO: 761166 - DNA, 25 bp, Homo sapien
tcccagatagtgttcctcgaagttc

SEQ ID NO: 761167 - DNA, 25 bp, Homo sapien
ccggattcttcgctatagtcatcaa

SEQ ID NO: 761168 - DNA, 25 bp, Homo sapien
tcaggcacccagcacccaaggagcc

SEQ ID NO: 761169 - DNA, 25 bp, Homo sapien
acccagcacccaaggagcccagagc

SEQ ID NO: 761170 - DNA, 25 bp, Homo sapien
gcacccagcacccaaggagcccaga

SEQ ID NO: 761171 - DNA, 25 bp, Homo sapien
aggcacccagcacccaaggagccca

SEQ ID NO: 761172 - DNA, 25 bp, Homo sapien
gtcctggactgactgtggccctcca

SEQ ID NO: 761173 - DNA, 25 bp, Homo sapien
tccctgctcccccttcgtgccctgc

SEQ ID NO: 761174 - DNA, 25 bp, Homo sapien
tgtggccctccaccccggtccctgc

SEQ ID NO: 761175 - DNA, 25 bp, Homo sapien
gccccagtgccacggaaaggacagc

SEQ ID NO: 761176 - DNA, 25 bp, Homo sapien
caagagccccagtgccacggaaagg

SEQ ID NO: 761177 - DNA, 25 bp, Homo sapien
agaccaagagccccagtgccacgga

SEQ ID NO: 761178 - DNA, 25 bp, Homo sapien
gagccccagtgccacggaaaggaca

SEQ ID NO: 761179 - DNA, 25 bp, Homo sapien
acctgcttcccgataccagcgtggg

SEQ ID NO: 761180 - DNA, 25 bp, Homo sapien
tgcttcccgataccagcgtgtggac

SEQ ID NO: 761181 - DNA, 25 bp, Homo sapien
ccgatgccagtgtgagggtgcctct

SEQ ID NO: 761182 - DNA, 25 bp, Homo sapien
aacatatggacacctcctcccgatg

SEQ ID NO: 761183 - DNA, 25 bp, Homo sapien
aacatgagcttcagcctacagggta

SEQ ID NO: 761184 - DNA, 25 bp, Homo sapien
gattgtctgccaacatcccctggtg

SEQ ID NO: 761185 - DNA, 25 bp, Homo sapien
cctcggtggtcttcggattgtctgc

SEQ ID NO: 761186 - DNA, 25 bp, Homo sapien
cagggtattgttatccacacaggac

SEQ ID NO: 761187 - DNA, 25 bp, Homo sapien
gtacaatagaaatagtggccctcac

SEQ ID NO: 761188 - DNA, 25 bp, Homo sapien
tgtacaatagaaatagtggccctca

SEQ ID NO: 761189 - DNA, 25 bp, Homo sapien
gtctggataaatccctggtgcctcc

SEQ ID NO: 761190 - DNA, 25 bp, Homo sapien
tgtcagagttctcagccacatcacc

SEQ ID NO: 761191 - DNA, 25 bp, Homo sapien
tctggtatgggagcagttctgtcag

SEQ ID NO: 761192 - DNA, 25 bp, Homo sapien
gatgaatgaggtctggataaatccc

SEQ ID NO: 761193 - DNA, 25 bp, Homo sapien
ctccctcagtttccgagtaactcag

SEQ ID NO: 761194 - DNA, 25 bp, Homo sapien
taactcagagctccctctaccaagg

SEQ ID NO: 761195 - DNA, 25 bp, Homo sapien
aataatgagaatcgctgcccctccc

SEQ ID NO: 761196 - DNA, 25 bp, Homo sapien
agcaaataatgagaatcgctgcccc

SEQ ID NO: 761197 - DNA, 25 bp, Homo sapien
gaacccacaggagcctgtggtttct

SEQ ID NO: 761198 - DNA, 25 bp, Homo sapien
gctctcggaacccacaggagcctgt

SEQ ID NO: 761199 - DNA, 25 bp, Homo sapien
tttctgaaatatgggtgggtggctt

SEQ ID NO: 761200 - DNA, 25 bp, Homo sapien
agaggctctcggaacccacaggagc

SEQ ID NO: 761201 - DNA, 25 bp, Homo sapien
ccttccctggactttactgggtgct

SEQ ID NO: 761202 - DNA, 25 bp, Homo sapien
ccacttgggcccatttgtggcagaa

SEQ ID NO: 761203 - DNA, 25 bp, Homo sapien
tgcattgaagacacgacccattccc

SEQ ID NO: 761204 - DNA, 25 bp, Homo sapien
actgtggccccacacggtgaagagg

SEQ ID NO: 761205 - DNA, 25 bp, Homo sapien
agagggctgccgttcctcagtgtcc

SEQ ID NO: 761206 - DNA, 25 bp, Homo sapien
gttcagcagaagctgttagcggcag

SEQ ID NO: 761207 - DNA, 25 bp, Homo sapien
cagaagctgttagcggcagctttcc

SEQ ID NO: 761208 - DNA, 25 bp, Homo sapien
ctgttagcggcagctttccaggtgc

SEQ ID NO: 761209 - DNA, 25 bp, Homo sapien
tcactgtggtctgaacagcctctgt

SEQ ID NO: 761210 - DNA, 25 bp, Homo sapien
ctctgcggttgaagaatcttctcta

SEQ ID NO: 761211 - DNA, 25 bp, Homo sapien
aatcttctctaaatttagcatatgt

SEQ ID NO: 761212 - DNA, 25 bp, Homo sapien
gaagaatcttctctaaatttagcat

SEQ ID NO: 761213 - DNA, 25 bp, Homo sapien
gaatcttctctaaatttagcatatg

SEQ ID NO: 761214 - DNA, 25 bp, Homo sapien
ttctcggggcccttgcgtctgcact

SEQ ID NO: 761215 - DNA, 25 bp, Homo sapien
ggcccttgcgtctgcactgcgagct

SEQ ID NO: 761216 - DNA, 25 bp, Homo sapien
tgttcctcttctcggggcccttgcg

SEQ ID NO: 761217 - DNA, 25 bp, Homo sapien
gctgttcctcttctcggggcccttg

SEQ ID NO: 761218 - DNA, 25 bp, Homo sapien
ttgtttctccttctaacttctgaaa

SEQ ID NO: 761219 - DNA, 25 bp, Homo sapien
tcttgtttctccttctaacttctga

SEQ ID NO: 761220 - DNA, 25 bp, Homo sapien
tggacaccatgggactcacctcatt

SEQ ID NO: 761221 - DNA, 25 bp, Homo sapien
tgaaacttagcactcagttcatgcc

SEQ ID NO: 761222 - DNA, 25 bp, Homo sapien
caaaagggcctactccccgttgatg

SEQ ID NO: 761223 - DNA, 25 bp, Homo sapien
ttaacccagttgctaaattgcttga

SEQ ID NO: 761224 - DNA, 25 bp, Homo sapien
tcccatgttgttgaagtactttaca

SEQ ID NO: 761225 - DNA, 25 bp, Homo sapien
ttgtcagtcttagaagcaacagtct

SEQ ID NO: 761226 - DNA, 25 bp, Homo sapien
caacagtcttggtagagaggtcaga

SEQ ID NO: 761227 - DNA, 25 bp, Homo sapien
tatttcccctaaggccgaattgtca

SEQ ID NO: 761228 - DNA, 25 bp, Homo sapien
tctccaatttgtgggaagcgttttc

SEQ ID NO: 761229 - DNA, 25 bp, Homo sapien
gctccacacgtatcctctttcttcc

SEQ ID NO: 761230 - DNA, 25 bp, Homo sapien
tggctccacacgtatcctctttctt

SEQ ID NO: 761231 - DNA, 25 bp, Homo sapien
tcttcctgcttatgccacatttccc

SEQ ID NO: 761232 - DNA, 25 bp, Homo sapien
tctggctccacacgtatcctctttc

SEQ ID NO: 761233 - DNA, 25 bp, Homo sapien
gtgaacctggcaagatactcctctg

SEQ ID NO: 761234 - DNA, 25 bp, Homo sapien
ctctgggtgcttggtttcctgaaac

SEQ ID NO: 761235 - DNA, 25 bp, Homo sapien
tgggtgcttggtttcctgaaacatc

SEQ ID NO: 761236 - DNA, 25 bp, Homo sapien
tggcaagatactcctctgggtgctt

SEQ ID NO: 761237 - DNA, 25 bp, Homo sapien
ctaagcatagtccactagctcccgc

SEQ ID NO: 761238 - DNA, 25 bp, Homo sapien
atagtccactagctcccgcctgctg

SEQ ID NO: 761239 - DNA, 25 bp, Homo sapien
gggggtgaaggagcaggatgcagag

SEQ ID NO: 761240 - DNA, 25 bp, Homo sapien
agcatagtccactagctcccgcctg

SEQ ID NO: 761241 - DNA, 25 bp, Homo sapien
acatgcaggcgaagaaggcacaggc

SEQ ID NO: 761242 - DNA, 25 bp, Homo sapien
gaaggccctttacccgtgaatcaca

SEQ ID NO: 761243 - DNA, 25 bp, Homo sapien
cccatagggagagcgatgaaagacc

SEQ ID NO: 761244 - DNA, 25 bp, Homo sapien
cgagaacgtgctcctgcttgggcgc

SEQ ID NO: 761245 - DNA, 25 bp, Homo sapien
tgggaaaagttgatcctccgcaagg

SEQ ID NO: 761246 - DNA, 25 bp, Homo sapien
gaaaagttgatcctccgcaagggag

SEQ ID NO: 761247 - DNA, 25 bp, Homo sapien
gggtgggaaaagttgatcctccgca

SEQ ID NO: 761248 - DNA, 25 bp, Homo sapien
aaagttgatcctccgcaagggaggg

SEQ ID NO: 761249 - DNA, 25 bp, Homo sapien
attccagcgcagcatcgcgccgcgg

SEQ ID NO: 761250 - DNA, 25 bp, Homo sapien
ttcctcattccagcgcagcatcgcg

SEQ ID NO: 761251 - DNA, 25 bp, Homo sapien
gccgcggccccgcacgggatgcggc

SEQ ID NO: 761252 - DNA, 25 bp, Homo sapien
cccgcacgggatgcggcggccggcg

SEQ ID NO: 761253 - DNA, 25 bp, Homo sapien
gccaagactgatcctcgggtgcgaa

SEQ ID NO: 761254 - DNA, 25 bp, Homo sapien
aacttggccgcggagctcttcccag

SEQ ID NO: 761255 - DNA, 25 bp, Homo sapien
cgcgcagtcacttgttagagtgtcc

SEQ ID NO: 761256 - DNA, 25 bp, Homo sapien
gaagttgctcactcgcattgttccc

SEQ ID NO: 761257 - DNA, 25 bp, Homo sapien
agactttgaggacctagggctgctc

SEQ ID NO: 761258 - DNA, 25 bp, Homo sapien
gaggcctcgccaaggccaagtgaga

SEQ ID NO: 761259 - DNA, 25 bp, Homo sapien
gatcttggtgcctggctacagggcc

SEQ ID NO: 761260 - DNA, 25 bp, Homo sapien
agggctgctcggagttcccctcaga

SEQ ID NO: 761261 - DNA, 25 bp, Homo sapien
ggtcaggagctgtgcagcaatatga

SEQ ID NO: 761262 - DNA, 25 bp, Homo sapien
cagcaatatgaagtgcaatgaaaat

SEQ ID NO: 761263 - DNA, 25 bp, Homo sapien
gcaatgaaaatagaacctacagctt

SEQ ID NO: 761264 - DNA, 25 bp, Homo sapien
gaaaatagaacctacagctttacaa

SEQ ID NO: 761265 - DNA, 25 bp, Homo sapien
cagagctccaccgaacctgctgggg

SEQ ID NO: 761266 - DNA, 25 bp, Homo sapien
ggccagagctccaccgaacctgctg

SEQ ID NO: 761267 - DNA, 25 bp, Homo sapien
gagctccaccgaacctgctggggct

SEQ ID NO: 761268 - DNA, 25 bp, Homo sapien
cagcatcccaaaggagagtgtggcc

SEQ ID NO: 761269 - DNA, 25 bp, Homo sapien
gtgcagggccaacgtgacagaagct

SEQ ID NO: 761270 - DNA, 25 bp, Homo sapien
taagtgcagggccaacgtgacagaa

SEQ ID NO: 761271 - DNA, 25 bp, Homo sapien
cagggccaacgtgacagaagctgtc

SEQ ID NO: 761272 - DNA, 25 bp, Homo sapien
caaggggaaatagatgcagagataa

SEQ ID NO: 761273 - DNA, 25 bp, Homo sapien
ctgcaagagccagagagctctgcat

SEQ ID NO: 761274 - DNA, 25 bp, Homo sapien
accttcctggagcgcgtctattgtc

SEQ ID NO: 761275 - DNA, 25 bp, Homo sapien
agatcacaccacagcgagcaccttc

SEQ ID NO: 761276 - DNA, 25 bp, Homo sapien
cctggagcgcgtctattgtcagcag

SEQ ID NO: 761277 - DNA, 25 bp, Homo sapien
agcgcgtctattgtcagcagccaag

SEQ ID NO: 761278 - DNA, 25 bp, Homo sapien
agtcatttgcaaacagtccccgcac

SEQ ID NO: 761279 - DNA, 25 bp, Homo sapien
gcagtcatttgcaaacagtccccgc

SEQ ID NO: 761280 - DNA, 25 bp, Homo sapien
ttttgcagtcatttgcaaacagtcc

SEQ ID NO: 761281 - DNA, 25 bp, Homo sapien
ttgcagtcatttgcaaacagtcccc

SEQ ID NO: 761282 - DNA, 25 bp, Homo sapien
ggtgatcaatgctaagtcctctgga

SEQ ID NO: 761283 - DNA, 25 bp, Homo sapien
gaacagtttcaagccggaatcctga

SEQ ID NO: 761284 - DNA, 25 bp, Homo sapien
tggcaaacgcccttccagtggaatg

SEQ ID NO: 761285 - DNA, 25 bp, Homo sapien
tttcctaaggcaaagtcaaggctct

SEQ ID NO: 761286 - DNA, 25 bp, Homo sapien
aatttgctgaagaatgtctcattta

SEQ ID NO: 761287 - DNA, 25 bp, Homo sapien
tacaatcagcaatcaaaaaacgaag

SEQ ID NO: 761288 - DNA, 25 bp, Homo sapien
gctgaagaatgtctcatttacccag

SEQ ID NO: 761289 - DNA, 25 bp, Homo sapien
tgagtcagcttggtgacacgcgtac

SEQ ID NO: 761290 - DNA, 25 bp, Homo sapien
aacttgggacatgtcttgaccctca

SEQ ID NO: 761291 - DNA, 25 bp, Homo sapien
ctgaaacttgggacatgtcttgacc

SEQ ID NO: 761292 - DNA, 25 bp, Homo sapien
gaaacttgggacatgtcttgaccct

SEQ ID NO: 761293 - DNA, 25 bp, Homo sapien
ttgggacatgtcttgaccctcatca

SEQ ID NO: 761294 - DNA, 25 bp, Homo sapien
tgaaacccatcatgataggcacagt

SEQ ID NO: 761295 - DNA, 25 bp, Homo sapien
tatcccacagggttgcggtgaagat

SEQ ID NO: 761296 - DNA, 25 bp, Homo sapien
acgaatgggaacatgagactggtcc

SEQ ID NO: 761297 - DNA, 25 bp, Homo sapien
ggtatatattgcgtcaagctcccac

SEQ ID NO: 761298 - DNA, 25 bp, Homo sapien
tggcctgacatgctatcccaatgag

SEQ ID NO: 761299 - DNA, 25 bp, Homo sapien
gatgctctgagacacccttagatgc

SEQ ID NO: 761300 - DNA, 25 bp, Homo sapien
taaatgtcagtgctccagtgtccct

SEQ ID NO: 761301 - DNA, 25 bp, Homo sapien
cataggtctcctacataaagcaggg

SEQ ID NO: 761302 - DNA, 25 bp, Homo sapien
tgcttctctgctgggatgcatatac

SEQ ID NO: 761303 - DNA, 25 bp, Homo sapien
aaaagtcacttctccccacacaata

SEQ ID NO: 761304 - DNA, 25 bp, Homo sapien
cggtcatggtcaaggtgcctgggct

SEQ ID NO: 761305 - DNA, 25 bp, Homo sapien
gagaacatagatgtgcaaaagggaa

SEQ ID NO: 761306 - DNA, 25 bp, Homo sapien
tcgccctcatctggagtatcgctta

SEQ ID NO: 761307 - DNA, 25 bp, Homo sapien
gcatgggctcatcgccctcatctgg

SEQ ID NO: 761308 - DNA, 25 bp, Homo sapien
ctcatctggagtatcgcttacaggg

SEQ ID NO: 761309 - DNA, 25 bp, Homo sapien
gggatcggcatgggctcatcgccct

SEQ ID NO: 761310 - DNA, 25 bp, Homo sapien
ttaatatgccagttgagggaacaca

SEQ ID NO: 761311 - DNA, 25 bp, Homo sapien
taatatgccagttgagggaacacaa

SEQ ID NO: 761312 - DNA, 25 bp, Homo sapien
aatatgccagttgagggaacacaat

SEQ ID NO: 761313 - DNA, 25 bp, Homo sapien
tgtttagctccacaacggaactagg

SEQ ID NO: 761314 - DNA, 25 bp, Homo sapien
cattagctgattctccaaagacggc

SEQ ID NO: 761315 - DNA, 25 bp, Homo sapien
cctagagtgtggtgcaaggcttccc

SEQ ID NO: 761316 - DNA, 25 bp, Homo sapien
tcccatgtgttctggagtgctgaca

SEQ ID NO: 761317 - DNA, 25 bp, Homo sapien
tctccttctgcgagtgcttgtgcag

SEQ ID NO: 761318 - DNA, 25 bp, Homo sapien
tcatgatgaaccaccgtaaactgtt

SEQ ID NO: 761319 - DNA, 25 bp, Homo sapien
cttatcagagatcagaccaggaggc

SEQ ID NO: 761320 - DNA, 25 bp, Homo sapien
gcagctcaggtatgctaactttatc

SEQ ID NO: 761321 - DNA, 25 bp, Homo sapien
ctttgcactggttttccattttcat

SEQ ID NO: 761322 - DNA, 25 bp, Homo sapien
acagcgattgtgacactgtgcttgt

SEQ ID NO: 761323 - DNA, 25 bp, Homo sapien
gaggtagggcccaagcacagcgatt

SEQ ID NO: 761324 - DNA, 25 bp, Homo sapien
tcctcctggctatattgtaaaagcc

SEQ ID NO: 761325 - DNA, 25 bp, Homo sapien
gtcatcttgtaactgggtttccaca

SEQ ID NO: 761326 - DNA, 25 bp, Homo sapien
ccaggatctccatataacaatttag

SEQ ID NO: 761327 - DNA, 25 bp, Homo sapien
ttcatgtcagccaacttccgggtcc

SEQ ID NO: 761328 - DNA, 25 bp, Homo sapien
ggtccaggatctccatataacaatt

SEQ ID NO: 761329 - DNA, 25 bp, Homo sapien
cctgctaggcctgtttcatgtcagc

SEQ ID NO: 761330 - DNA, 25 bp, Homo sapien
agctctcctatgtagcccatgcatg

SEQ ID NO: 761331 - DNA, 25 bp, Homo sapien
caagtggaaatatgcccagggccct

SEQ ID NO: 761332 - DNA, 25 bp, Homo sapien
gtcacatcccagcatggccatgaag

SEQ ID NO: 761333 - DNA, 25 bp, Homo sapien
caccagggcttgatcctcgtcattc

SEQ ID NO: 761334 - DNA, 25 bp, Homo sapien
tctgttccatgccaaagttcagtat

SEQ ID NO: 761335 - DNA, 25 bp, Homo sapien
tgttccatgccaaagttcagtatct

SEQ ID NO: 761336 - DNA, 25 bp, Homo sapien
tttttatgatgcttgagaggcactg

SEQ ID NO: 761337 - DNA, 25 bp, Homo sapien
ctgtttttatgatgcttgagaggca

SEQ ID NO: 761338 - DNA, 25 bp, Homo sapien
gatttgggaattattgcatggaaat

SEQ ID NO: 761339 - DNA, 25 bp, Homo sapien
cctaaagtcatcagccccatatgta

SEQ ID NO: 761340 - DNA, 25 bp, Homo sapien
ctaaagtcatcagccccatatgtaa

SEQ ID NO: 761341 - DNA, 25 bp, Homo sapien
tcttcatcatgaccacaaggtggtg

SEQ ID NO: 761342 - DNA, 25 bp, Homo sapien
ggcatcaagaccaagtagccgcttg

SEQ ID NO: 761343 - DNA, 25 bp, Homo sapien
gcaactacggacacaaactggaata

SEQ ID NO: 761344 - DNA, 25 bp, Homo sapien
caaggtggtgatattggcccagaac

SEQ ID NO: 761345 - DNA, 25 bp, Homo sapien
cacagatcactatgggcaaggccaa

SEQ ID NO: 761346 - DNA, 25 bp, Homo sapien
caaagtgggtgctggttacatagac

SEQ ID NO: 761347 - DNA, 25 bp, Homo sapien
tcctagtcgaaaaggcacaagagcc

SEQ ID NO: 761348 - DNA, 25 bp, Homo sapien
tcaagcagtgcgtggatttcccgta

SEQ ID NO: 761349 - DNA, 25 bp, Homo sapien
tctgagtctctactttaacattact

SEQ ID NO: 761350 - DNA, 25 bp, Homo sapien
tcacaggcacgcccattctcttcat

SEQ ID NO: 761351 - DNA, 25 bp, Homo sapien
cacaggcacgcccattctcttcatc

SEQ ID NO: 761352 - DNA, 25 bp, Homo sapien
ttcacaggcacgcccattctcttca

SEQ ID NO: 761353 - DNA, 25 bp, Homo sapien
tctctcccgaggcatcaagcattcg

SEQ ID NO: 761354 - DNA, 25 bp, Homo sapien
ttgtgaaccatgagcacattgggcc

SEQ ID NO: 761355 - DNA, 25 bp, Homo sapien
tccgttaggaagtcgaatgcctcca

SEQ ID NO: 761356 - DNA, 25 bp, Homo sapien
caagcattcgtaaatcctccgcaca

SEQ ID NO: 761357 - DNA, 25 bp, Homo sapien
tatgactcggtaccacttggaacca

SEQ ID NO: 761358 - DNA, 25 bp, Homo sapien
tggaaccaatcgcttgcaacaactg

SEQ ID NO: 761359 - DNA, 25 bp, Homo sapien
gctgtaccagaacaaggactctatg

SEQ ID NO: 761360 - DNA, 25 bp, Homo sapien
tactataatagcagccctcgccaag

SEQ ID NO: 761361 - DNA, 25 bp, Homo sapien
agggcagattgctacagacacatgc

SEQ ID NO: 761362 - DNA, 25 bp, Homo sapien
gtctctgcccatcgcagacagaaag

SEQ ID NO: 761363 - DNA, 25 bp, Homo sapien
gacagaaagggcagattgctacaga

SEQ ID NO: 761364 - DNA, 25 bp, Homo sapien
gggtctctgcccatcgcagacagaa

SEQ ID NO: 761365 - DNA, 25 bp, Homo sapien
aggtgctggagtcccatgtctctcc

SEQ ID NO: 761366 - DNA, 25 bp, Homo sapien
gaaagacccccttccgtgctgggca

SEQ ID NO: 761367 - DNA, 25 bp, Homo sapien
aaagacccccttccgtgctgggcag

SEQ ID NO: 761368 - DNA, 25 bp, Homo sapien
ggcaggtgctggagtcccatgtctc

SEQ ID NO: 761369 - DNA, 25 bp, Homo sapien
gaggtatctggtatttctccaaatc

SEQ ID NO: 761370 - DNA, 25 bp, Homo sapien
ggtatttctccaaatccttacagaa

SEQ ID NO: 761371 - DNA, 25 bp, Homo sapien
aggtatctggtatttctccaaatcc

SEQ ID NO: 761372 - DNA, 25 bp, Homo sapien
caggaggtatctggtatttctccaa

SEQ ID NO: 761373 - DNA, 25 bp, Homo sapien
tggaataaaccaatatccaattttg

SEQ ID NO: 761374 - DNA, 25 bp, Homo sapien
atatccaattttgcgtgttgtggca

SEQ ID NO: 761375 - DNA, 25 bp, Homo sapien
taaaccaatatccaattttgcgtgt

SEQ ID NO: 761376 - DNA, 25 bp, Homo sapien
caattttgcgtgttgtggcatttgg

SEQ ID NO: 761377 - DNA, 25 bp, Homo sapien
ttgatgtgccggagcaggttgccct

SEQ ID NO: 761378 - DNA, 25 bp, Homo sapien
cggagtgcgtcctcaggtggccagt

SEQ ID NO: 761379 - DNA, 25 bp, Homo sapien
tccctccggcggcaggcgtagttgc

SEQ ID NO: 761380 - DNA, 25 bp, Homo sapien
atgaggccccgcactgattgcactg

SEQ ID NO: 761381 - DNA, 25 bp, Homo sapien
tccaaagcgggacttaacaacagaa

SEQ ID NO: 761382 - DNA, 25 bp, Homo sapien
cagaaagaattgtacttgaaaacgt

SEQ ID NO: 761383 - DNA, 25 bp, Homo sapien
gggtcttagcagtacacttggtgaa

SEQ ID NO: 761384 - DNA, 25 bp, Homo sapien
tggtgaaaacatttcccgcaaaatc

SEQ ID NO: 761385 - DNA, 25 bp, Homo sapien
caagaccccaattaaatgccagcct

SEQ ID NO: 761386 - DNA, 25 bp, Homo sapien
aaacacaattgagttcaagacccca

SEQ ID NO: 761387 - DNA, 25 bp, Homo sapien
caattgagttcaagaccccaattaa

SEQ ID NO: 761388 - DNA, 25 bp, Homo sapien
gttcaagaccccaattaaatgccag

SEQ ID NO: 761389 - DNA, 25 bp, Homo sapien
aatatccacatttgtgaggtttacc

SEQ ID NO: 761390 - DNA, 25 bp, Homo sapien
tgttcctctaaagagcttcgctgtt

SEQ ID NO: 761391 - DNA, 25 bp, Homo sapien
ttgtggcagcgctctttatgttcct

SEQ ID NO: 761392 - DNA, 25 bp, Homo sapien
tgtttatagcttcggccacaatatc

SEQ ID NO: 761393 - DNA, 25 bp, Homo sapien
ggtggccaggcacgaattatcagtc

SEQ ID NO: 761394 - DNA, 25 bp, Homo sapien
tgtctaggctcctgctcacacgtgt

SEQ ID NO: 761395 - DNA, 25 bp, Homo sapien
tctcagccggctgtgtactgcagct

SEQ ID NO: 761396 - DNA, 25 bp, Homo sapien
catttaagcgatgagctctgggtca

SEQ ID NO: 761397 - DNA, 25 bp, Homo sapien
gtttggcgacgttacttgctagtct

SEQ ID NO: 761398 - DNA, 25 bp, Homo sapien
tctgatcctatcttgcacaggtctt

SEQ ID NO: 761399 - DNA, 25 bp, Homo sapien
tctgtccagcacgagagatctctct

SEQ ID NO: 761400 - DNA, 25 bp, Homo sapien
tctctctgatcctatcttgcacagg

SEQ ID NO: 761401 - DNA, 25 bp, Homo sapien
caagaaatttctgaggcatagagct

SEQ ID NO: 761402 - DNA, 25 bp, Homo sapien
agaaatttctgaggcatagagctct

SEQ ID NO: 761403 - DNA, 25 bp, Homo sapien
aatttctgaggcatagagctcttac

SEQ ID NO: 761404 - DNA, 25 bp, Homo sapien
aaatttctgaggcatagagctctta

SEQ ID NO: 761405 - DNA, 25 bp, Homo sapien
tagctaagccctgtcttcactggac

SEQ ID NO: 761406 - DNA, 25 bp, Homo sapien
gattcctcccattaacccttcagag

SEQ ID NO: 761407 - DNA, 25 bp, Homo sapien
gtgcagccgcccctaagagcgatgt

SEQ ID NO: 761408 - DNA, 25 bp, Homo sapien
ggcaaaacagcaatcctagctaagc

SEQ ID NO: 761409 - DNA, 25 bp, Homo sapien
tggctccagtagagtttcacagatg

SEQ ID NO: 761410 - DNA, 25 bp, Homo sapien
tggtttcaagtctccaaaagctaaa

SEQ ID NO: 761411 - DNA, 25 bp, Homo sapien
atctcaagccaacgcccacattgtg

SEQ ID NO: 761412 - DNA, 25 bp, Homo sapien
gggctgcaaacgttcattcaccaaa

SEQ ID NO: 761413 - DNA, 25 bp, Homo sapien
taaactcagcatccgagaagtggag

SEQ ID NO: 761414 - DNA, 25 bp, Homo sapien
ctagtgttgggagcaccatcacatc

SEQ ID NO: 761415 - DNA, 25 bp, Homo sapien
tctgagcctcagaatagctctggga

SEQ ID NO: 761416 - DNA, 25 bp, Homo sapien
taatagccactctgagcaacagtca

SEQ ID NO: 761417 - DNA, 25 bp, Homo sapien
acctgcaccatactgacgggctggg

SEQ ID NO: 761418 - DNA, 25 bp, Homo sapien
acacctgcaccatactgacgggctg

SEQ ID NO: 761419 - DNA, 25 bp, Homo sapien
acatcacacctgcaccatactgacg

SEQ ID NO: 761420 - DNA, 25 bp, Homo sapien
atcacacctgcaccatactgacggg

SEQ ID NO: 761421 - DNA, 25 bp, Homo sapien
ccacctccggaaccggtcaggtctg

SEQ ID NO: 761422 - DNA, 25 bp, Homo sapien
cacctccggaaccggtcaggtctgg

SEQ ID NO: 761423 - DNA, 25 bp, Homo sapien
ctgtggaaagcaggcgacagtgagt

SEQ ID NO: 761424 - DNA, 25 bp, Homo sapien
gtggaaagcaggcgacagtgagtgg

SEQ ID NO: 761425 - DNA, 25 bp, Homo sapien
tcaggtagatgagaccgctgcgctg

SEQ ID NO: 761426 - DNA, 25 bp, Homo sapien
catgacgtgatccaggaagagcacc

SEQ ID NO: 761427 - DNA, 25 bp, Homo sapien
gcactcaaaaggatcacggaagccg

SEQ ID NO: 761428 - DNA, 25 bp, Homo sapien
tcgttgttgctctcggtgtccgtgg

SEQ ID NO: 761429 - DNA, 25 bp, Homo sapien
atgtggaagcggtgctcccctcgcg

SEQ ID NO: 761430 - DNA, 25 bp, Homo sapien
cgttatgtgcgacgagaactcgtac

SEQ ID NO: 761431 - DNA, 25 bp, Homo sapien
cctcgcgttatgtgcgacgagaact

SEQ ID NO: 761432 - DNA, 25 bp, Homo sapien
agcggtgctcccctcgcgttatgtg

SEQ ID NO: 761433 - DNA, 25 bp, Homo sapien
gatctggtggcattactctccgaag

SEQ ID NO: 761434 - DNA, 25 bp, Homo sapien
gagagctcccgcctaacaaataagt

SEQ ID NO: 761435 - DNA, 25 bp, Homo sapien
caatatcctacaggtgcagagccag

SEQ ID NO: 761436 - DNA, 25 bp, Homo sapien
ttagcacagggtagagcacgctcct

SEQ ID NO: 761437 - DNA, 25 bp, Homo sapien
gaaaggaaggatacactggcatcac

SEQ ID NO: 761438 - DNA, 25 bp, Homo sapien
taacatcatcatagaggcagactgg

SEQ ID NO: 761439 - DNA, 25 bp, Homo sapien
tgttcacagtgagtgccatcgcacc

SEQ ID NO: 761440 - DNA, 25 bp, Homo sapien
tgtgcatgtactcgccagaagggca

SEQ ID NO: 761441 - DNA, 25 bp, Homo sapien
ccctctcatattgggatctcattgg

SEQ ID NO: 761442 - DNA, 25 bp, Homo sapien
cttctcttacgccagtgtggacttc

SEQ ID NO: 761443 - DNA, 25 bp, Homo sapien
ctcttctccctctcatattgggatc

SEQ ID NO: 761444 - DNA, 25 bp, Homo sapien
ctgggccttctcttacgccagtgtg

SEQ ID NO: 761445 - DNA, 25 bp, Homo sapien
tgtgctgaactgctgcgctggccac

SEQ ID NO: 761446 - DNA, 25 bp, Homo sapien
ttagaattcccacgtccagcactgt

SEQ ID NO: 761447 - DNA, 25 bp, Homo sapien
ccagcactgttgtagatgggaggta

SEQ ID NO: 761448 - DNA, 25 bp, Homo sapien
catgtgttcccaagtggtattgcag

SEQ ID NO: 761449 - DNA, 25 bp, Homo sapien
caaaaggctatgttgaggataattc

SEQ ID NO: 761450 - DNA, 25 bp, Homo sapien
ctgaagcatgctgcagtggagaact

SEQ ID NO: 761451 - DNA, 25 bp, Homo sapien
ccggccactcacagaatgactgaag

SEQ ID NO: 761452 - DNA, 25 bp, Homo sapien
gaatactcaagatttacagcgtcaa

SEQ ID NO: 761453 - DNA, 25 bp, Homo sapien
acgtaggaaccgagtgcgcttccta

SEQ ID NO: 761454 - DNA, 25 bp, Homo sapien
ctgcctatagggtgtaggttctggt

SEQ ID NO: 761455 - DNA, 25 bp, Homo sapien
agtgcgcttcctattgctgcacggg

SEQ ID NO: 761456 - DNA, 25 bp, Homo sapien
gctgcacgggggtctgctgcctata

SEQ ID NO: 761457 - DNA, 25 bp, Homo sapien
tggaatgagataagggggctagaag

SEQ ID NO: 761458 - DNA, 25 bp, Homo sapien
ggaatgagataagggggctagaagg

SEQ ID NO: 761459 - DNA, 25 bp, Homo sapien
ctggaatgagataagggggctagaa

SEQ ID NO: 761460 - DNA, 25 bp, Homo sapien
aatgagataagggggctagaaggag

SEQ ID NO: 761461 - DNA, 25 bp, Homo sapien
tttgatctctaagggggatgtggat

SEQ ID NO: 761462 - DNA, 25 bp, Homo sapien
ggatgtggatgggtccctgtctcac

SEQ ID NO: 761463 - DNA, 25 bp, Homo sapien
ctgcttcgcagacacaattgtttga

SEQ ID NO: 761464 - DNA, 25 bp, Homo sapien
cctgtctcacttggctgtcatgcag

SEQ ID NO: 761465 - DNA, 25 bp, Homo sapien
aggcagccaagggaaaaccctctga

SEQ ID NO: 761466 - DNA, 25 bp, Homo sapien
ggagccctgagatgcagttctttca

SEQ ID NO: 761467 - DNA, 25 bp, Homo sapien
ctatgggattgccaaaccctgtcat

SEQ ID NO: 761468 - DNA, 25 bp, Homo sapien
gaagcactgccgagatggaacagga

SEQ ID NO: 761469 - DNA, 25 bp, Homo sapien
tcagccacattgcatgctctgtggg

SEQ ID NO: 761470 - DNA, 25 bp, Homo sapien
tctagttcagattcatgcattctcc

SEQ ID NO: 761471 - DNA, 25 bp, Homo sapien
gttcagattcatgcattctcctttc

SEQ ID NO: 761472 - DNA, 25 bp, Homo sapien
catcagccacattgcatgctctgtg

SEQ ID NO: 761473 - DNA, 25 bp, Homo sapien
tttccaaagcatcggcctccatgag

SEQ ID NO: 761474 - DNA, 25 bp, Homo sapien
tctccttagaaaagtgcagccaaga

SEQ ID NO: 761475 - DNA, 25 bp, Homo sapien
gcattgcagggtcctgtcttctttg

SEQ ID NO: 761476 - DNA, 25 bp, Homo sapien
gtcttctttgccggctgctctccag

SEQ ID NO: 761477 - DNA, 25 bp, Homo sapien
agcttgtctgtggacagtcttgcct

SEQ ID NO: 761478 - DNA, 25 bp, Homo sapien
ggacagtcttgcctgacggttgccc

SEQ ID NO: 761479 - DNA, 25 bp, Homo sapien
agagcttgtctgtggacagtcttgc

SEQ ID NO: 761480 - DNA, 25 bp, Homo sapien
gagcttgtctgtggacagtcttgcc

SEQ ID NO: 761481 - DNA, 25 bp, Homo sapien
tgtgcagtgggaaagctagttagct

SEQ ID NO: 761482 - DNA, 25 bp, Homo sapien
aagctagttagctcctgggtccgga

SEQ ID NO: 761483 - DNA, 25 bp, Homo sapien
tcctgggtccggagcccttctgaag

SEQ ID NO: 761484 - DNA, 25 bp, Homo sapien
ggggaatgctctgttcatctgtgca

SEQ ID NO: 761485 - DNA, 25 bp, Homo sapien
tatatgtactgccaaaatgagcaca

SEQ ID NO: 761486 - DNA, 25 bp, Homo sapien
cattaatgaccttgtagtttctttc

SEQ ID NO: 761487 - DNA, 25 bp, Homo sapien
agctttagaaagtctcgatcccaga

SEQ ID NO: 761488 - DNA, 25 bp, Homo sapien
tcccagaagacatggtagccaccaa

SEQ ID NO: 761489 - DNA, 25 bp, Homo sapien
ttcacaaccatgcaagattcatgag

SEQ ID NO: 761490 - DNA, 25 bp, Homo sapien
tctttacagctagggactttatgtg

SEQ ID NO: 761491 - DNA, 25 bp, Homo sapien
aggagagccacgctttgctctccca

SEQ ID NO: 761492 - DNA, 25 bp, Homo sapien
ggagagccacgctttgctctcccag

SEQ ID NO: 761493 - DNA, 25 bp, Homo sapien
gatccgggtcccagttagtcaagga

SEQ ID NO: 761494 - DNA, 25 bp, Homo sapien
tcattatttactgcagaggccactg

SEQ ID NO: 761495 - DNA, 25 bp, Homo sapien
taaccgctgacctaagtggatccgc

SEQ ID NO: 761496 - DNA, 25 bp, Homo sapien
tcacgtgctgtatggagcgcagact

SEQ ID NO: 761497 - DNA, 25 bp, Homo sapien
tgataagcaactgaagagtacttct

SEQ ID NO: 761498 - DNA, 25 bp, Homo sapien
caagagtcaacctggagcaatgaga

SEQ ID NO: 761499 - DNA, 25 bp, Homo sapien
ttttctggtccgacaagtctatctg

SEQ ID NO: 761500 - DNA, 25 bp, Homo sapien
ccaacaaggatatggtatttactca

SEQ ID NO: 761501 - DNA, 25 bp, Homo sapien
tggctcgttcattataacccgtggg

SEQ ID NO: 761502 - DNA, 25 bp, Homo sapien
tctgagtcaaaatgtgccctgagaa

SEQ ID NO: 761503 - DNA, 25 bp, Homo sapien
gaagccaaagggctaccttctgagt

SEQ ID NO: 761504 - DNA, 25 bp, Homo sapien
gatagacctgtccatggctcctgaa

SEQ ID NO: 761505 - DNA, 25 bp, Homo sapien
tcttaggacatgaactaagctcccc

SEQ ID NO: 761506 - DNA, 25 bp, Homo sapien
gctactgacgatttgctccttcagg

SEQ ID NO: 761507 - DNA, 25 bp, Homo sapien
ccgtgcttctctccgcgaagatctg

SEQ ID NO: 761508 - DNA, 25 bp, Homo sapien
gagctccacctgacatcatgcttga

SEQ ID NO: 761509 - DNA, 25 bp, Homo sapien
gctatcgcacagagccatcgttcct

SEQ ID NO: 761510 - DNA, 25 bp, Homo sapien
gagccatcgttcctgctctgtacca

SEQ ID NO: 761511 - DNA, 25 bp, Homo sapien
ctgagcaggcttgccatggcaacct

SEQ ID NO: 761512 - DNA, 25 bp, Homo sapien
tgccatggcaacctttgtctgctgc

SEQ ID NO: 761513 - DNA, 25 bp, Homo sapien
gcagccagaagcgtcagaccttacc

SEQ ID NO: 761514 - DNA, 25 bp, Homo sapien
gcgtgtctgagtcaaatggcaaact

SEQ ID NO: 761515 - DNA, 25 bp, Homo sapien
tctgctcacggcatcagcagccaga

SEQ ID NO: 761516 - DNA, 25 bp, Homo sapien
gattgtctgtaattggtgaggcccc

SEQ ID NO: 761517 - DNA, 25 bp, Homo sapien
acttgtgggcatcggtctatgtggc

SEQ ID NO: 761518 - DNA, 25 bp, Homo sapien
tggacttgtgggcatcggtctatgt

SEQ ID NO: 761519 - DNA, 25 bp, Homo sapien
caggtggacttgtgggcatcggtct

SEQ ID NO: 761520 - DNA, 25 bp, Homo sapien
ttgtgggcatcggtctatgtggcat

SEQ ID NO: 761521 - DNA, 25 bp, Homo sapien
atgcaggtgacgcactggcacagcc

SEQ ID NO: 761522 - DNA, 25 bp, Homo sapien
gtacccggccatgcttgcggacatg

SEQ ID NO: 761523 - DNA, 25 bp, Homo sapien
gacacggtacctatgcacaagggac

SEQ ID NO: 761524 - DNA, 25 bp, Homo sapien
tgagggtccggatgcacctcgggaa

SEQ ID NO: 761525 - DNA, 25 bp, Homo sapien
gtacctgggtcccccgctctcttga

SEQ ID NO: 761526 - DNA, 25 bp, Homo sapien
tacctgggtcccccgctctcttgag

SEQ ID NO: 761527 - DNA, 25 bp, Homo sapien
atagagcatatcctctgctgctggg

SEQ ID NO: 761528 - DNA, 25 bp, Homo sapien
caagcccgatagagcatatcctctg

SEQ ID NO: 761529 - DNA, 25 bp, Homo sapien
gcagccaagcccgatagagcatatc

SEQ ID NO: 761530 - DNA, 25 bp, Homo sapien
gcccgatagagcatatcctctgctg

SEQ ID NO: 761531 - DNA, 25 bp, Homo sapien
tgtgtgatcgcaggaaaccaggtga

SEQ ID NO: 761532 - DNA, 25 bp, Homo sapien
cacgaatgtttatgaggatggccaa

SEQ ID NO: 761533 - DNA, 25 bp, Homo sapien
gatactcactcacagggcagcagag

SEQ ID NO: 761534 - DNA, 25 bp, Homo sapien
taaggcctatgagcaacgacatgtg

SEQ ID NO: 761535 - DNA, 25 bp, Homo sapien
ctggtggcagctttgcacggacagc

SEQ ID NO: 761536 - DNA, 25 bp, Homo sapien
gctttgcacggacagcctggatcct

SEQ ID NO: 761537 - DNA, 25 bp, Homo sapien
cccatctctccatccgagggatggg

SEQ ID NO: 761538 - DNA, 25 bp, Homo sapien
gatgggagtgcatcatattggccat

SEQ ID NO: 761539 - DNA, 25 bp, Homo sapien
ggttaccatttgtaacgaacatgat

SEQ ID NO: 761540 - DNA, 25 bp, Homo sapien
tggttaccatttgtaacgaacatga

SEQ ID NO: 761541 - DNA, 25 bp, Homo sapien
ggaggtttgccggttgattctagct

SEQ ID NO: 761542 - DNA, 25 bp, Homo sapien
gtccagctctctggatggccgtgac

SEQ ID NO: 761543 - DNA, 25 bp, Homo sapien
gattctagctgtgctgaattctcct

SEQ ID NO: 761544 - DNA, 25 bp, Homo sapien
tccagctctctggatggccgtgacc

SEQ ID NO: 761545 - DNA, 25 bp, Homo sapien
cattttttccttggcctctcgccag

SEQ ID NO: 761546 - DNA, 25 bp, Homo sapien
ggagcctggtcgttctcaaagttgc

SEQ ID NO: 761547 - DNA, 25 bp, Homo sapien
tggagtggagcctggtcgttctcaa

SEQ ID NO: 761548 - DNA, 25 bp, Homo sapien
gtcgttctcaaagttgctgggagag

SEQ ID NO: 761549 - DNA, 25 bp, Homo sapien
tgcaggtccctgcacggctgctgga

SEQ ID NO: 761550 - DNA, 25 bp, Homo sapien
catggctgaactcacagtgtttggg

SEQ ID NO: 761551 - DNA, 25 bp, Homo sapien
taatctccttactgcctccattgtc

SEQ ID NO: 761552 - DNA, 25 bp, Homo sapien
tgctggagggagctgcttatgcaca

SEQ ID NO: 761553 - DNA, 25 bp, Homo sapien
tgttcggttatcgacttcaaggagt

SEQ ID NO: 761554 - DNA, 25 bp, Homo sapien
catctgaaaacatatgcggatagga

SEQ ID NO: 761555 - DNA, 25 bp, Homo sapien
taatcgatggaaatcattgctctcc

SEQ ID NO: 761556 - DNA, 25 bp, Homo sapien
gctgagtacaattcccatctgaaaa

SEQ ID NO: 761557 - DNA, 25 bp, Homo sapien
gggagcttgtgtggtgctttctctt

SEQ ID NO: 761558 - DNA, 25 bp, Homo sapien
cacagtcactccagtgacacatgtt

SEQ ID NO: 761559 - DNA, 25 bp, Homo sapien
ctctggccccatgttactgaacatt

SEQ ID NO: 761560 - DNA, 25 bp, Homo sapien
actctctggccccatgttactgaac

SEQ ID NO: 761561 - DNA, 25 bp, Homo sapien
tgaacatttgcttaaaggttaactc

SEQ ID NO: 761562 - DNA, 25 bp, Homo sapien
cttgactctctggccccatgttact

SEQ ID NO: 761563 - DNA, 25 bp, Homo sapien
ctttctttggtcctcgaagcctcac

SEQ ID NO: 761564 - DNA, 25 bp, Homo sapien
gatttctttctttggtcctcgaagc

SEQ ID NO: 761565 - DNA, 25 bp, Homo sapien
ttctttctttggtcctcgaagcctc

SEQ ID NO: 761566 - DNA, 25 bp, Homo sapien
ctagatttctttctttggtcctcga

SEQ ID NO: 761567 - DNA, 25 bp, Homo sapien
gggtaagtgtgaattccaactgtaa

SEQ ID NO: 761568 - DNA, 25 bp, Homo sapien
caggccaggcacaagcaagagggta

SEQ ID NO: 761569 - DNA, 25 bp, Homo sapien
tttgcaaaatgagactgccaatacc

SEQ ID NO: 761570 - DNA, 25 bp, Homo sapien
tgagactgccaataccacctctgtc

SEQ ID NO: 761571 - DNA, 25 bp, Homo sapien
taaatgtgtgctgtatacaaaactc

SEQ ID NO: 761572 - DNA, 25 bp, Homo sapien
tgcccacggcttcgagtcataaatg

SEQ ID NO: 761573 - DNA, 25 bp, Homo sapien
cagtgagcaaccacccacttctgct

SEQ ID NO: 761574 - DNA, 25 bp, Homo sapien
tttccaattgtaactgaatgcccac

SEQ ID NO: 761575 - DNA, 25 bp, Homo sapien
gctgtatacttacggatgtgcacac

SEQ ID NO: 761576 - DNA, 25 bp, Homo sapien
tacttacggatgtgcacacagatcc

SEQ ID NO: 761577 - DNA, 25 bp, Homo sapien
tgtagctgtatacttacggatgtgc

SEQ ID NO: 761578 - DNA, 25 bp, Homo sapien
tgctgtagctgtatacttacggatg

SEQ ID NO: 761579 - DNA, 25 bp, Homo sapien
tatattcacatgtggatacagatcc

SEQ ID NO: 761580 - DNA, 25 bp, Homo sapien
gatccactctgctgtagctgtatat

SEQ ID NO: 761581 - DNA, 25 bp, Homo sapien
acagatccactctgctgtagctgtg

SEQ ID NO: 761582 - DNA, 25 bp, Homo sapien
tgtactcacacgtggacaaggatcc

SEQ ID NO: 761583 - DNA, 25 bp, Homo sapien
cagatccactctgccgtagctgtgt

SEQ ID NO: 761584 - DNA, 25 bp, Homo sapien
agctgtatactcacacgtggacaca

SEQ ID NO: 761585 - DNA, 25 bp, Homo sapien
ggcaagcggatccactctgccatag

SEQ ID NO: 761586 - DNA, 25 bp, Homo sapien
agctgtgtactcacacgtgggcgca

SEQ ID NO: 761587 - DNA, 25 bp, Homo sapien
cgtggacgcagatccactctgccgt

SEQ ID NO: 761588 - DNA, 25 bp, Homo sapien
tggacgcagatccactctgccgtgg

SEQ ID NO: 761589 - DNA, 25 bp, Homo sapien
acgtggacgcagatccactctgccg

SEQ ID NO: 761590 - DNA, 25 bp, Homo sapien
gtggacgcagatccactctgccgtg

SEQ ID NO: 761591 - DNA, 25 bp, Homo sapien
cctgggcacacggatccattatgcc

SEQ ID NO: 761592 - DNA, 25 bp, Homo sapien
tactcacacgtgggcaaacggatcc

SEQ ID NO: 761593 - DNA, 25 bp, Homo sapien
cattatgccgtaactgtatactcac

SEQ ID NO: 761594 - DNA, 25 bp, Homo sapien
ttcacatgtgggcaaatggatccac

SEQ ID NO: 761595 - DNA, 25 bp, Homo sapien
tgactgtaaattggcctggcgtgta

SEQ ID NO: 761596 - DNA, 25 bp, Homo sapien
tgaccgatctctgcgcctttctggg

SEQ ID NO: 761597 - DNA, 25 bp, Homo sapien
taaacgttttcagggaatgcagaag

SEQ ID NO: 761598 - DNA, 25 bp, Homo sapien
tacactaggtgttagagttccagaa

SEQ ID NO: 761599 - DNA, 25 bp, Homo sapien
aactccatgtagcaaccaggacgaa

SEQ ID NO: 761600 - DNA, 25 bp, Homo sapien
caggacgaagttgagaaggaaaacg

SEQ ID NO: 761601 - DNA, 25 bp, Homo sapien
catgtagcaaccaggacgaagttga

SEQ ID NO: 761602 - DNA, 25 bp, Homo sapien
tagcaaccaggacgaagttgagaag

SEQ ID NO: 761603 - DNA, 25 bp, Homo sapien
gaattccacctgagaacaagtcccg

SEQ ID NO: 761604 - DNA, 25 bp, Homo sapien
tgtacgtagaccagtcccatcagtg

SEQ ID NO: 761605 - DNA, 25 bp, Homo sapien
tcttcactggctcgaggtaaaccct

SEQ ID NO: 761606 - DNA, 25 bp, Homo sapien
ggagaatgtaaaccgcctccacgtg

SEQ ID NO: 761607 - DNA, 25 bp, Homo sapien
cgtccctctcgggtaaacaggcctg

SEQ ID NO: 761608 - DNA, 25 bp, Homo sapien
cattcactcgtctgtagcttcccat

SEQ ID NO: 761609 - DNA, 25 bp, Homo sapien
catctaaaagctaatccatgttcag

SEQ ID NO: 761610 - DNA, 25 bp, Homo sapien
tataccatatacttctgtctccttg

SEQ ID NO: 761611 - DNA, 25 bp, Homo sapien
ttaataagttcctctgtctccctga

SEQ ID NO: 761612 - DNA, 25 bp, Homo sapien
gatatcctaaatttttgccagcaaa

SEQ ID NO: 761613 - DNA, 25 bp, Homo sapien
tctcaagtggagtgcaagtgatgtg

SEQ ID NO: 761614 - DNA, 25 bp, Homo sapien
tgtttctgccccaaatagccatagg

SEQ ID NO: 761615 - DNA, 25 bp, Homo sapien
taatgcaatcgaaacgccatttgag

SEQ ID NO: 761616 - DNA, 25 bp, Homo sapien
gccatttgagtgttgtcggcactga

SEQ ID NO: 761617 - DNA, 25 bp, Homo sapien
ggtcatcagtgggaactggtcacat

SEQ ID NO: 761618 - DNA, 25 bp, Homo sapien
tcatagatcatagaccactcctgtg

SEQ ID NO: 761619 - DNA, 25 bp, Homo sapien
gacatccattgagggcagtattctg

SEQ ID NO: 761620 - DNA, 25 bp, Homo sapien
cactcctgtgtaagccggttttcag

SEQ ID NO: 761621 - DNA, 25 bp, Homo sapien
gatgacagcgttcagactcctcaag

SEQ ID NO: 761622 - DNA, 25 bp, Homo sapien
ctctgtgcagaggacgagcaaacca

SEQ ID NO: 761623 - DNA, 25 bp, Homo sapien
catcttgcggtttgtgttgagtgca

SEQ ID NO: 761624 - DNA, 25 bp, Homo sapien
tcctgtagccaaacaaagtcaggaa

SEQ ID NO: 761625 - DNA, 25 bp, Homo sapien
tctcttgcccagcacttgattgttg

SEQ ID NO: 761626 - DNA, 25 bp, Homo sapien
acgagctgtccacagacggcgcgca

SEQ ID NO: 761627 - DNA, 25 bp, Homo sapien
aggaagcagtacaacgcccctacag

SEQ ID NO: 761628 - DNA, 25 bp, Homo sapien
tgcataaaggtacccacgagctgtc

SEQ ID NO: 761629 - DNA, 25 bp, Homo sapien
ccagtgttgtcacaggaacccagac

SEQ ID NO: 761630 - DNA, 25 bp, Homo sapien
ggccagtgttgtcacaggaacccag

SEQ ID NO: 761631 - DNA, 25 bp, Homo sapien
ctggccagtgttgtcacaggaaccc

SEQ ID NO: 761632 - DNA, 25 bp, Homo sapien
agtgttgtcacaggaacccagacac

SEQ ID NO: 761633 - DNA, 25 bp, Homo sapien
tgtgtggcccgctcactgtcctcgt

SEQ ID NO: 761634 - DNA, 25 bp, Homo sapien
tgggagggtatttcgtagagcagga

SEQ ID NO: 761635 - DNA, 25 bp, Homo sapien
cgctcactgtcctcgtgtgtgctga

SEQ ID NO: 761636 - DNA, 25 bp, Homo sapien
cgtgtgtgctgaagttgggagggta

SEQ ID NO: 761637 - DNA, 25 bp, Homo sapien
gttgagcatctgggaaccggctctg

SEQ ID NO: 761638 - DNA, 25 bp, Homo sapien
catctgggaaccggctctgggaagg

SEQ ID NO: 761639 - DNA, 25 bp, Homo sapien
tctgggaaccggctctgggaaggtg

SEQ ID NO: 761640 - DNA, 25 bp, Homo sapien
tgttgagcatctgggaaccggctct

SEQ ID NO: 761641 - DNA, 25 bp, Homo sapien
tgcaccttcttggtcatccccctcc

SEQ ID NO: 761642 - DNA, 25 bp, Homo sapien
ccctcctccacctctttcaagttct

SEQ ID NO: 761643 - DNA, 25 bp, Homo sapien
ctcctccacctctttcaagttcttt

SEQ ID NO: 761644 - DNA, 25 bp, Homo sapien
tctgcaccttcttggtcatccccct

SEQ ID NO: 761645 - DNA, 25 bp, Homo sapien
cacagtacacagcaccatcttttct

SEQ ID NO: 761646 - DNA, 25 bp, Homo sapien
tcttttctggcaaccaagtttgatg

SEQ ID NO: 761647 - DNA, 25 bp, Homo sapien
tggcaaccaagtttgatgtcatcaa

SEQ ID NO: 761648 - DNA, 25 bp, Homo sapien
ccaagtttgatgtcatcaaaaagct

SEQ ID NO: 761649 - DNA, 25 bp, Homo sapien
cacagtgagggaagcgacttttccc

SEQ ID NO: 761650 - DNA, 25 bp, Homo sapien
cagtgagggaagcgacttttccctt

SEQ ID NO: 761651 - DNA, 25 bp, Homo sapien
acagtgagggaagcgacttttccct

SEQ ID NO: 761652 - DNA, 25 bp, Homo sapien
ctgttctagagtatgctgagttctt

SEQ ID NO: 761653 - DNA, 25 bp, Homo sapien
tctagagtatgctgagttcttcccg

SEQ ID NO: 761654 - DNA, 25 bp, Homo sapien
agtatgctgagttcttcccgctcca

SEQ ID NO: 761655 - DNA, 25 bp, Homo sapien
tgctgagttcttcccgctccacttg

SEQ ID NO: 761656 - DNA, 25 bp, Homo sapien
ctcccatgacagtttctgaggaggt

SEQ ID NO: 761657 - DNA, 25 bp, Homo sapien
tttgaccctgctgtacatttgttca

SEQ ID NO: 761658 - DNA, 25 bp, Homo sapien
ttggcatcacttcacactttgaccc

SEQ ID NO: 761659 - DNA, 25 bp, Homo sapien
ttccatagcatgttaatctgtacca

SEQ ID NO: 761660 - DNA, 25 bp, Homo sapien
tattggttcacatgttgctagcagc

SEQ ID NO: 761661 - DNA, 25 bp, Homo sapien
gaactgctccacacttggtggtggt

SEQ ID NO: 761662 - DNA, 25 bp, Homo sapien
tgtaatgtcaaaaccggggccgagc

SEQ ID NO: 761663 - DNA, 25 bp, Homo sapien
caatgaatgaacctctttttggaaa

SEQ ID NO: 761664 - DNA, 25 bp, Homo sapien
agcaacaagtccttttcgggctgtt

SEQ ID NO: 761665 - DNA, 25 bp, Homo sapien
agatgggaaacaccgtggcagtaac

SEQ ID NO: 761666 - DNA, 25 bp, Homo sapien
cagctttgtggttgttcctggtcag

SEQ ID NO: 761667 - DNA, 25 bp, Homo sapien
gatttgaggaattccgttgtcctga

SEQ ID NO: 761668 - DNA, 25 bp, Homo sapien
taggtccacagttagtgaccatgat

SEQ ID NO: 761669 - DNA, 25 bp, Homo sapien
gttcccatggagactagctgtcccg

SEQ ID NO: 761670 - DNA, 25 bp, Homo sapien
gctgtcccgtcaagctccagcttgg

SEQ ID NO: 761671 - DNA, 25 bp, Homo sapien
gggacgtccatgagtggatcctaca

SEQ ID NO: 761672 - DNA, 25 bp, Homo sapien
cagacatggcgaggttccctgtggc

SEQ ID NO: 761673 - DNA, 25 bp, Homo sapien
gatggttgaggtaataacttgccaa

SEQ ID NO: 761674 - DNA, 25 bp, Homo sapien
atcttgccttggatggttgaggtaa

SEQ ID NO: 761675 - DNA, 25 bp, Homo sapien
acttgccaagggctcagacatggcg

SEQ ID NO: 761676 - DNA, 25 bp, Homo sapien
gcatcactgtggctggattcactcc

SEQ ID NO: 761677 - DNA, 25 bp, Homo sapien
tccgtggggtgattgcatcactgtg

SEQ ID NO: 761678 - DNA, 25 bp, Homo sapien
caagtccgggtcttgtcgtatggga

SEQ ID NO: 761679 - DNA, 25 bp, Homo sapien
tcgtatgggagtgggagagcaagtc

SEQ ID NO: 761680 - DNA, 25 bp, Homo sapien
gttgttgcggttgttgtggttggcg

SEQ ID NO: 761681 - DNA, 25 bp, Homo sapien
tgtgagagttgtgttgttgcggttg

SEQ ID NO: 761682 - DNA, 25 bp, Homo sapien
cagttggtgtgagagttgtgttgtt

SEQ ID NO: 761683 - DNA, 25 bp, Homo sapien
ttgttgcggttgttgtggttggcgt

SEQ ID NO: 761684 - DNA, 25 bp, Homo sapien
caaagattatttggaggttggcaga

SEQ ID NO: 761685 - DNA, 25 bp, Homo sapien
catcagttgcgggacaaagattatt

SEQ ID NO: 761686 - DNA, 25 bp, Homo sapien
cactgacacatcagttgcgggacaa

SEQ ID NO: 761687 - DNA, 25 bp, Homo sapien
gctgccactgacacatcagttgcgg

SEQ ID NO: 761688 - DNA, 25 bp, Homo sapien
gtgagattggaagtaccagagagtg

SEQ ID NO: 761689 - DNA, 25 bp, Homo sapien
ggtgagattggaagtaccagagagt

SEQ ID NO: 761690 - DNA, 25 bp, Homo sapien
tggtgagattggaagtaccagagag

SEQ ID NO: 761691 - DNA, 25 bp, Homo sapien
tagctctacgcgttgactgggtggt

SEQ ID NO: 761692 - DNA, 25 bp, Homo sapien
ttgagatggctggtatacacagggc

SEQ ID NO: 761693 - DNA, 25 bp, Homo sapien
gtacctcttgtgttccttacaaaca

SEQ ID NO: 761694 - DNA, 25 bp, Homo sapien
gtaataggagccctcgtacctcttg

SEQ ID NO: 761695 - DNA, 25 bp, Homo sapien
tgaactgtgagttgctgcgggacaa

SEQ ID NO: 761696 - DNA, 25 bp, Homo sapien
gggccttgacctgctcgagagaacc

SEQ ID NO: 761697 - DNA, 25 bp, Homo sapien
taactgcctgtggtaacaatctccg

SEQ ID NO: 761698 - DNA, 25 bp, Homo sapien
ggcccacctcgtgtgagatgcttga

SEQ ID NO: 761699 - DNA, 25 bp, Homo sapien
actgtgggtcagtgtgtgcaccctg

SEQ ID NO: 761700 - DNA, 25 bp, Homo sapien
ctgggccgtctgtccagggacatct

SEQ ID NO: 761701 - DNA, 25 bp, Homo sapien
tctcggtttctgtgtgaaggtctca

SEQ ID NO: 761702 - DNA, 25 bp, Homo sapien
ggatctcgggtactgtgggtcagtg

SEQ ID NO: 761703 - DNA, 25 bp, Homo sapien
gccctgggcagtgtgctgcgtcctg

SEQ ID NO: 761704 - DNA, 25 bp, Homo sapien
cctccagtatttgaaatcaggccac

SEQ ID NO: 761705 - DNA, 25 bp, Homo sapien
gctcctccagtatttgaaatcaggc

SEQ ID NO: 761706 - DNA, 25 bp, Homo sapien
gggggctcctccagtatttgaaatc

SEQ ID NO: 761707 - DNA, 25 bp, Homo sapien
tctctggtgacgctgtatggccatc

SEQ ID NO: 761708 - DNA, 25 bp, Homo sapien
agttcagtggcccaagtccctggaa

SEQ ID NO: 761709 - DNA, 25 bp, Homo sapien
tgccatagagactaaagagaaccag

SEQ ID NO: 761710 - DNA, 25 bp, Homo sapien
gaaaccgaagttgttctgtaggtga

SEQ ID NO: 761711 - DNA, 25 bp, Homo sapien
acctcgtctgttaaggccagaccag

SEQ ID NO: 761712 - DNA, 25 bp, Homo sapien
gaacctcgtctgttaaggccagacc

SEQ ID NO: 761713 - DNA, 25 bp, Homo sapien
cagaacctcgtctgttaaggccaga

SEQ ID NO: 761714 - DNA, 25 bp, Homo sapien
ctcgtctgttaaggccagaccaggg

SEQ ID NO: 761715 - DNA, 25 bp, Homo sapien
gagatagtatagaggaggcagcgcc

SEQ ID NO: 761716 - DNA, 25 bp, Homo sapien
cctgctgcagtgtgaaggatggact

SEQ ID NO: 761717 - DNA, 25 bp, Homo sapien
caggaagagattggtctccagggca

SEQ ID NO: 761718 - DNA, 25 bp, Homo sapien
ggaatgaggacagttgaggaaggca

SEQ ID NO: 761719 - DNA, 25 bp, Homo sapien
aataccgcagacaccttagcaagcc

SEQ ID NO: 761720 - DNA, 25 bp, Homo sapien
ttatgacaagtcaggcctgtgtggc

SEQ ID NO: 761721 - DNA, 25 bp, Homo sapien
gatttgtgtcttcagaataccgcag

SEQ ID NO: 761722 - DNA, 25 bp, Homo sapien
ctggcttttccgtggctatttctgg

SEQ ID NO: 761723 - DNA, 25 bp, Homo sapien
atgtaccggcgcacattcctctctt

SEQ ID NO: 761724 - DNA, 25 bp, Homo sapien
aatgggaacaccatgtaccggcgca

SEQ ID NO: 761725 - DNA, 25 bp, Homo sapien
gtgtttccgctcacacagtccctgg

SEQ ID NO: 761726 - DNA, 25 bp, Homo sapien
ttgttcacgggtagtgtttccgctc

SEQ ID NO: 761727 - DNA, 25 bp, Homo sapien
ggaatccacagttcacccactggag

SEQ ID NO: 761728 - DNA, 25 bp, Homo sapien
gcctgttacactcactgaacgtgga

SEQ ID NO: 761729 - DNA, 25 bp, Homo sapien
taaatgactgcgagcaaacagcctg

SEQ ID NO: 761730 - DNA, 25 bp, Homo sapien
gagcagccacggagggacttttctt

SEQ ID NO: 761731 - DNA, 25 bp, Homo sapien
catcagagcaagtgatgcaattgca

SEQ ID NO: 761732 - DNA, 25 bp, Homo sapien
caattgcagcgaggcagtcgtgacc

SEQ ID NO: 761733 - DNA, 25 bp, Homo sapien
tctgagaataatcccgaaggcccga

SEQ ID NO: 761734 - DNA, 25 bp, Homo sapien
catgttcccgtgtttgcatcagagc

SEQ ID NO: 761735 - DNA, 25 bp, Homo sapien
tgtgaacgtggcaggacgtccactc

SEQ ID NO: 761736 - DNA, 25 bp, Homo sapien
tcttggagctcaggacagtcaaatc

SEQ ID NO: 761737 - DNA, 25 bp, Homo sapien
agaacccagctccagcgctgatgtg

SEQ ID NO: 761738 - DNA, 25 bp, Homo sapien
tgcccacggcacttggaaggtgctg

SEQ ID NO: 761739 - DNA, 25 bp, Homo sapien
tgggcctgtcccgagcagtttgctg

SEQ ID NO: 761740 - DNA, 25 bp, Homo sapien
tgtattgcacggagagaatgctctc

SEQ ID NO: 761741 - DNA, 25 bp, Homo sapien
cgctggcaagccctgttactcttag

SEQ ID NO: 761742 - DNA, 25 bp, Homo sapien
gaatgctctctcctgcaaatgtgtg

SEQ ID NO: 761743 - DNA, 25 bp, Homo sapien
tgaataacccttcatttcttggagg

SEQ ID NO: 761744 - DNA, 25 bp, Homo sapien
gaggtattggcagactttcattcca

SEQ ID NO: 761745 - DNA, 25 bp, Homo sapien
cacttatcagggagcctcggtttcc

SEQ ID NO: 761746 - DNA, 25 bp, Homo sapien
gaggagcttagcatccaattctgaa

SEQ ID NO: 761747 - DNA, 25 bp, Homo sapien
cctcacccgtggagcagggacagcg

SEQ ID NO: 761748 - DNA, 25 bp, Homo sapien
gctggctttatctccatgtcagctc

SEQ ID NO: 761749 - DNA, 25 bp, Homo sapien
acccgtggagcagggacagcgagtg

SEQ ID NO: 761750 - DNA, 25 bp, Homo sapien
gtgctggctttatctccatgtcagc

SEQ ID NO: 761751 - DNA, 25 bp, Homo sapien
gcagaagtagctcctcgaggcaaga

SEQ ID NO: 761752 - DNA, 25 bp, Homo sapien
ggagggtgtcagctcagcgacatca

SEQ ID NO: 761753 - DNA, 25 bp, Homo sapien
tcagctcagcgacatcagaagtcag

SEQ ID NO: 761754 - DNA, 25 bp, Homo sapien
gcaagactgagcgtcggtgtccacg

SEQ ID NO: 761755 - DNA, 25 bp, Homo sapien
aggctggtgggtacgataccctgta

SEQ ID NO: 761756 - DNA, 25 bp, Homo sapien
tataggtacatttgactgttcaggc

SEQ ID NO: 761757 - DNA, 25 bp, Homo sapien
tgtctccctctgctgtacttcttta

SEQ ID NO: 761758 - DNA, 25 bp, Homo sapien
ccaaaggccttctcggttcctgcat

SEQ ID NO: 761759 - DNA, 25 bp, Homo sapien
gcagtggtcctcctttgcgtcagac

SEQ ID NO: 761760 - DNA, 25 bp, Homo sapien
ggctcacggtctagttggtgccact

SEQ ID NO: 761761 - DNA, 25 bp, Homo sapien
caccacagaaggatgtgctccgaga

SEQ ID NO: 761762 - DNA, 25 bp, Homo sapien
ttgaggaagcgccatgcagtgtgcc

SEQ ID NO: 761763 - DNA, 25 bp, Homo sapien
atttctttctgagtgtttaatttct

SEQ ID NO: 761764 - DNA, 25 bp, Homo sapien
gcgggaatagctgagtttcaaacct

SEQ ID NO: 761765 - DNA, 25 bp, Homo sapien
accctggcttcgtgaccctgcattg

SEQ ID NO: 761766 - DNA, 25 bp, Homo sapien
cctgagtcatctgggttggcgggaa

SEQ ID NO: 761767 - DNA, 25 bp, Homo sapien
tgtgctgagtttgctaagggtaccc

SEQ ID NO: 761768 - DNA, 25 bp, Homo sapien
gaagcaggatggagtagttggtagt

SEQ ID NO: 761769 - DNA, 25 bp, Homo sapien
tgagaccaagaggttgaccgcaaag

SEQ ID NO: 761770 - DNA, 25 bp, Homo sapien
tgggccctgctctcgtgagcttagc

SEQ ID NO: 761771 - DNA, 25 bp, Homo sapien
tgagcttagcacgatggtgacagag

SEQ ID NO: 761772 - DNA, 25 bp, Homo sapien
aggttgaccgcaaagtgggccctgc

SEQ ID NO: 761773 - DNA, 25 bp, Homo sapien
catgtaagatacaagctcagtgccc

SEQ ID NO: 761774 - DNA, 25 bp, Homo sapien
tgtctcctttctagacatgtaagat

SEQ ID NO: 761775 - DNA, 25 bp, Homo sapien
tcactgcagcatttgtgggccctca

SEQ ID NO: 761776 - DNA, 25 bp, Homo sapien
catttgtgggccctcacggatctga

SEQ ID NO: 761777 - DNA, 25 bp, Homo sapien
gagccttaaggtcgggcggcatcct

SEQ ID NO: 761778 - DNA, 25 bp, Homo sapien
gccggaagactggagcagcttgcct

SEQ ID NO: 761779 - DNA, 25 bp, Homo sapien
gcttgcctaaagtccaaaagggcca

SEQ ID NO: 761780 - DNA, 25 bp, Homo sapien
ccatcgcccctcgagttgggactaa

SEQ ID NO: 761781 - DNA, 25 bp, Homo sapien
catttcagtggtgtttaatgcttgg

SEQ ID NO: 761782 - DNA, 25 bp, Homo sapien
catgggtagacactgtgtgcacatt

SEQ ID NO: 761783 - DNA, 25 bp, Homo sapien
tttgcagtcaatccttacagtgatc

SEQ ID NO: 761784 - DNA, 25 bp, Homo sapien
agggcgccccgagactcagcaagtg

SEQ ID NO: 761785 - DNA, 25 bp, Homo sapien
gagacactttgttgctccagctggc

SEQ ID NO: 761786 - DNA, 25 bp, Homo sapien
ggctatggtcctgcctgaaagtgga

SEQ ID NO: 761787 - DNA, 25 bp, Homo sapien
ctttgctgactgcaactgcttgggt

SEQ ID NO: 761788 - DNA, 25 bp, Homo sapien
tgtggttgctttagccttgtgggca

SEQ ID NO: 761789 - DNA, 25 bp, Homo sapien
ctcaaaggttttgcagttgtcaaga

SEQ ID NO: 761790 - DNA, 25 bp, Homo sapien
tgatgttgatacatcagtctggagc

SEQ ID NO: 761791 - DNA, 25 bp, Homo sapien
gatagggtgttttgctatcagtaat

SEQ ID NO: 761792 - DNA, 25 bp, Homo sapien
cagtctggagcaatttgtggcacca

SEQ ID NO: 761793 - DNA, 25 bp, Homo sapien
ggagtccagcagggtaagtccattt

SEQ ID NO: 761794 - DNA, 25 bp, Homo sapien
gagtccagcagggtaagtccattta

SEQ ID NO: 761795 - DNA, 25 bp, Homo sapien
agtccagcagggtaagtccatttac

SEQ ID NO: 761796 - DNA, 25 bp, Homo sapien
atggacctggggcttgcagctccct

SEQ ID NO: 761797 - DNA, 25 bp, Homo sapien
ggcactgggtacaaaggctccttcc

SEQ ID NO: 761798 - DNA, 25 bp, Homo sapien
cctgtgagtctgtgcagaatggacc

SEQ ID NO: 761799 - DNA, 25 bp, Homo sapien
tcctccctcttggcgtgttcacagc

SEQ ID NO: 761800 - DNA, 25 bp, Homo sapien
tctgtggcgagagccccgcttggca

SEQ ID NO: 761801 - DNA, 25 bp, Homo sapien
agccccgcttggcagagggagctgt

SEQ ID NO: 761802 - DNA, 25 bp, Homo sapien
cgcctctgtggcgagagccccgctt

SEQ ID NO: 761803 - DNA, 25 bp, Homo sapien
cctctgtggcgagagccccgcttgg

SEQ ID NO: 761804 - DNA, 25 bp, Homo sapien
ctgctgcttgggcaccttgttgaaa

SEQ ID NO: 761805 - DNA, 25 bp, Homo sapien
gcttgggcaccttgttgaaatcaat

SEQ ID NO: 761806 - DNA, 25 bp, Homo sapien
tgggcaccttgttgaaatcaatgtg

SEQ ID NO: 761807 - DNA, 25 bp, Homo sapien
gcaccttgttgaaatcaatgtgcct

SEQ ID NO: 761808 - DNA, 25 bp, Homo sapien
cgttgaccagacctaaacctgtttg

SEQ ID NO: 761809 - DNA, 25 bp, Homo sapien
tcagtgtgcacgcagcagagaagtg

SEQ ID NO: 761810 - DNA, 25 bp, Homo sapien
cccattgtgagtggtccgtgaagca

SEQ ID NO: 761811 - DNA, 25 bp, Homo sapien
gagcatccatcccatttcatgcgtg

SEQ ID NO: 761812 - DNA, 25 bp, Homo sapien
gaggagcagacagaaaccattctcc

SEQ ID NO: 761813 - DNA, 25 bp, Homo sapien
caggatggaggagcagacagaaacc

SEQ ID NO: 761814 - DNA, 25 bp, Homo sapien
cctggcacaggatggaggagcagac

SEQ ID NO: 761815 - DNA, 25 bp, Homo sapien
gacagaaaccattctcctcacccac

SEQ ID NO: 761816 - DNA, 25 bp, Homo sapien
gggtcgtgtaggattgcgtcttctc

SEQ ID NO: 761817 - DNA, 25 bp, Homo sapien
gggtggactccagcaatgtgcccca

SEQ ID NO: 761818 - DNA, 25 bp, Homo sapien
atctgcagactcagcgcccttgggt

SEQ ID NO: 761819 - DNA, 25 bp, Homo sapien
cctttgcaccaaaaatctgagggta

SEQ ID NO: 761820 - DNA, 25 bp, Homo sapien
atgacatcatctccgagagttgatt

SEQ ID NO: 761821 - DNA, 25 bp, Homo sapien
atcttttggcagtgcgtggaggagc

SEQ ID NO: 761822 - DNA, 25 bp, Homo sapien
ttttctgttgggtgccctagattcc

SEQ ID NO: 761823 - DNA, 25 bp, Homo sapien
ccgagagttgatttgggctcagttc

SEQ ID NO: 761824 - DNA, 25 bp, Homo sapien
cgtgtttggaatgaagcaagcactc

SEQ ID NO: 761825 - DNA, 25 bp, Homo sapien
gacactcctgatgacgggttctgca

SEQ ID NO: 761826 - DNA, 25 bp, Homo sapien
taagatagcgtggtcatattcccgt

SEQ ID NO: 761827 - DNA, 25 bp, Homo sapien
tgtagctctcaggtcactaggacac

SEQ ID NO: 761828 - DNA, 25 bp, Homo sapien
cacatatatctgatcctggcccgat

SEQ ID NO: 761829 - DNA, 25 bp, Homo sapien
tgatcctggcccgatggtgctggtc

SEQ ID NO: 761830 - DNA, 25 bp, Homo sapien
caggtatgggcgagcacatatatct

SEQ ID NO: 761831 - DNA, 25 bp, Homo sapien
atatctgatcctggcccgatggtgc

SEQ ID NO: 761832 - DNA, 25 bp, Homo sapien
caaatgacagtagggatgtggccac

SEQ ID NO: 761833 - DNA, 25 bp, Homo sapien
tgtggccaccgtaaagtggtgctgt

SEQ ID NO: 761834 - DNA, 25 bp, Homo sapien
gacccacgcttacgtttcaaagcca

SEQ ID NO: 761835 - DNA, 25 bp, Homo sapien
gggacttgatgcttcccacaaatga

SEQ ID NO: 761836 - DNA, 25 bp, Homo sapien
ggtggccttcatcaccccacctctt

SEQ ID NO: 761837 - DNA, 25 bp, Homo sapien
gtggccttcatcaccccacctcttt

SEQ ID NO: 761838 - DNA, 25 bp, Homo sapien
gggtatccactctcggtgaatgcgg

SEQ ID NO: 761839 - DNA, 25 bp, Homo sapien
tcattgtgcacatgggttcctcttc

SEQ ID NO: 761840 - DNA, 25 bp, Homo sapien
tgaatgcggcttgagaaggctgcat

SEQ ID NO: 761841 - DNA, 25 bp, Homo sapien
cagtgtgtctagacttcattgtgca

SEQ ID NO: 761842 - DNA, 25 bp, Homo sapien
tccctgccgtccttttctttgactc

SEQ ID NO: 761843 - DNA, 25 bp, Homo sapien
catgaagtcctgtggtcgtggtgtt

SEQ ID NO: 761844 - DNA, 25 bp, Homo sapien
gcctgccggcctgtgatggttctac

SEQ ID NO: 761845 - DNA, 25 bp, Homo sapien
tgttgcagcgcctgcgtcctaatct

SEQ ID NO: 761846 - DNA, 25 bp, Homo sapien
cctgagcatccatcaaggcctgggt

SEQ ID NO: 761847 - DNA, 25 bp, Homo sapien
ccatttctctcagcgttggagcaga

SEQ ID NO: 761848 - DNA, 25 bp, Homo sapien
cagagccctcaacagtgagcgtggt

SEQ ID NO: 761849 - DNA, 25 bp, Homo sapien
ggtgcaggattctgctgactggttt

SEQ ID NO: 761850 - DNA, 25 bp, Homo sapien
tctgtcctccaggagggagacgctg

SEQ ID NO: 761851 - DNA, 25 bp, Homo sapien
ttgacaagtttgagccccttgaggg

SEQ ID NO: 761852 - DNA, 25 bp, Homo sapien
ggtcagcaggtattgaatgaggcat

SEQ ID NO: 761853 - DNA, 25 bp, Homo sapien
ggtcatctgtggtcccacttgacaa

SEQ ID NO: 761854 - DNA, 25 bp, Homo sapien
agatttgttgcgagtgatgctgaga

SEQ ID NO: 761855 - DNA, 25 bp, Homo sapien
cttggacccgtctgcccctttgcat

SEQ ID NO: 761856 - DNA, 25 bp, Homo sapien
ttctggcaaggctttacagtgttga

SEQ ID NO: 761857 - DNA, 25 bp, Homo sapien
gagattccttgagatttgggacgag

SEQ ID NO: 761858 - DNA, 25 bp, Homo sapien
aggcaggtgtgcgagcttcaggaag

SEQ ID NO: 761859 - DNA, 25 bp, Homo sapien
aggtgtgcgagcttcaggaaggcag

SEQ ID NO: 761860 - DNA, 25 bp, Homo sapien
ggcaggtgtgcgagcttcaggaagg

SEQ ID NO: 761861 - DNA, 25 bp, Homo sapien
ggtgtgcgagcttcaggaaggcagc

SEQ ID NO: 761862 - DNA, 25 bp, Homo sapien
tctgcatggccgtagagggaagcac

SEQ ID NO: 761863 - DNA, 25 bp, Homo sapien
ggattattgggcctgttggtcctgc

SEQ ID NO: 761864 - DNA, 25 bp, Homo sapien
ggaggccccacactgaggattattg

SEQ ID NO: 761865 - DNA, 25 bp, Homo sapien
taacccatctttgtgcttgctcggc

SEQ ID NO: 761866 - DNA, 25 bp, Homo sapien
ggcagccaagggctgagctatagac

SEQ ID NO: 761867 - DNA, 25 bp, Homo sapien
ctgagctatagacccatgtggagag

SEQ ID NO: 761868 - DNA, 25 bp, Homo sapien
gggctgagctatagacccatgtgga

SEQ ID NO: 761869 - DNA, 25 bp, Homo sapien
gccaagggctgagctatagacccat

SEQ ID NO: 761870 - DNA, 25 bp, Homo sapien
tttatatagacattaccctgaaaac

SEQ ID NO: 761871 - DNA, 25 bp, Homo sapien
gtttatatagacattaccctgaaaa

SEQ ID NO: 761872 - DNA, 25 bp, Homo sapien
tgtttgtaggaaccctctgtttcca

SEQ ID NO: 761873 - DNA, 25 bp, Homo sapien
ttgtaggaaccctctgtttccattg

SEQ ID NO: 761874 - DNA, 25 bp, Homo sapien
cattctggtattcctgccttggact

SEQ ID NO: 761875 - DNA, 25 bp, Homo sapien
tttggaactggaggatcaggagcca

SEQ ID NO: 761876 - DNA, 25 bp, Homo sapien
gccggcagtctggtactcctgcctt

SEQ ID NO: 761877 - DNA, 25 bp, Homo sapien
ccttgggcatctgtgcgggcattct

SEQ ID NO: 761878 - DNA, 25 bp, Homo sapien
aggaaggcagaacaggtcattgaga

SEQ ID NO: 761879 - DNA, 25 bp, Homo sapien
tttggagagcatcatgggtttctgc

SEQ ID NO: 761880 - DNA, 25 bp, Homo sapien
gcttctcgattgcaacacaggagca

SEQ ID NO: 761881 - DNA, 25 bp, Homo sapien
tcattgagaggcacagcttgggctt

SEQ ID NO: 761882 - DNA, 25 bp, Homo sapien
caatggtcggtcatgcttgccacaa

SEQ ID NO: 761883 - DNA, 25 bp, Homo sapien
gaagtttggttgcacttttggcatc

SEQ ID NO: 761884 - DNA, 25 bp, Homo sapien
cagaactgataaaagcaatggtcgg

SEQ ID NO: 761885 - DNA, 25 bp, Homo sapien
tctacgatcttgaccaatgggtgaa

SEQ ID NO: 761886 - DNA, 25 bp, Homo sapien
tgagaatagctagaactaaagttac

SEQ ID NO: 761887 - DNA, 25 bp, Homo sapien
caatgatttgagaatagctagaact

SEQ ID NO: 761888 - DNA, 25 bp, Homo sapien
gatttgagaatagctagaactaaag

SEQ ID NO: 761889 - DNA, 25 bp, Homo sapien
ggccaatgatttgagaatagctaga

SEQ ID NO: 761890 - DNA, 25 bp, Homo sapien
ctgaaatagaaaaggaggagctgtt

SEQ ID NO: 761891 - DNA, 25 bp, Homo sapien
cccagtgaatggggctccacttttc

SEQ ID NO: 761892 - DNA, 25 bp, Homo sapien
tcagcccagtgaatggggctccact

SEQ ID NO: 761893 - DNA, 25 bp, Homo sapien
ctttgcctctgttccaagaagtaaa

SEQ ID NO: 761894 - DNA, 25 bp, Homo sapien
tggctttgcctctgttccaagaagt

SEQ ID NO: 761895 - DNA, 25 bp, Homo sapien
gtggtcccgggtagctttctgttca

SEQ ID NO: 761896 - DNA, 25 bp, Homo sapien
tctgtggtcccgggtagctttctgt

SEQ ID NO: 761897 - DNA, 25 bp, Homo sapien
tgtggtcccgggtagctttctgttc

SEQ ID NO: 761898 - DNA, 25 bp, Homo sapien
ctgtggtcccgggtagctttctgtt

SEQ ID NO: 761899 - DNA, 25 bp, Homo sapien
ggactcttgggaagcttggcacagc

SEQ ID NO: 761900 - DNA, 25 bp, Homo sapien
tatacgaccgtttctatcctcaggt

SEQ ID NO: 761901 - DNA, 25 bp, Homo sapien
gaaactgtgataccaacgtcattcg

SEQ ID NO: 761902 - DNA, 25 bp, Homo sapien
tgatgtgtcctgtgttggctgccca

SEQ ID NO: 761903 - DNA, 25 bp, Homo sapien
ttctgactctcgctgttcgtgtggc

SEQ ID NO: 761904 - DNA, 25 bp, Homo sapien
ccacctgtgagtgttggcaacccca

SEQ ID NO: 761905 - DNA, 25 bp, Homo sapien
tctaaatgacctggagctatgcatc

SEQ ID NO: 761906 - DNA, 25 bp, Homo sapien
tgagagtagcacgaatcttgggcgc

SEQ ID NO: 761907 - DNA, 25 bp, Homo sapien
ctgctttgagcttgtgcatgctaac

SEQ ID NO: 761908 - DNA, 25 bp, Homo sapien
gaatgtaggaattgtatctgctttg

SEQ ID NO: 761909 - DNA, 25 bp, Homo sapien
ttccaaggtccttgctcagtgcctt

SEQ ID NO: 761910 - DNA, 25 bp, Homo sapien
tgagcttgtgcatgctaacacccca

SEQ ID NO: 761911 - DNA, 25 bp, Homo sapien
tcttgtaggactgagaatggtgcat

SEQ ID NO: 761912 - DNA, 25 bp, Homo sapien
ctgccgttgtacctggacctgtgaa

SEQ ID NO: 761913 - DNA, 25 bp, Homo sapien
aatagttactatcttgtaggactga

SEQ ID NO: 761914 - DNA, 25 bp, Homo sapien
tgccgttgtacctggacctgtgaat

SEQ ID NO: 761915 - DNA, 25 bp, Homo sapien
ctggagtctcctgcgtgtctctgct

SEQ ID NO: 761916 - DNA, 25 bp, Homo sapien
gcagggcccacgcattccccctttg

SEQ ID NO: 761917 - DNA, 25 bp, Homo sapien
gcctggagtctcctgcgtgtctctg

SEQ ID NO: 761918 - DNA, 25 bp, Homo sapien
ctgcctggagtctcctgcgtgtctc

SEQ ID NO: 761919 - DNA, 25 bp, Homo sapien
tgttgatggtacagtccctgccagg

SEQ ID NO: 761920 - DNA, 25 bp, Homo sapien
gttgatggtacagtccctgccaggg

SEQ ID NO: 761921 - DNA, 25 bp, Homo sapien
ctgttgatggtacagtccctgccag

SEQ ID NO: 761922 - DNA, 25 bp, Homo sapien
gtcgcctccttggtcggctgccatt

SEQ ID NO: 761923 - DNA, 25 bp, Homo sapien
cagtcgcctccttggtcggctgcca

SEQ ID NO: 761924 - DNA, 25 bp, Homo sapien
agtcgcctccttggtcggctgccat

SEQ ID NO: 761925 - DNA, 25 bp, Homo sapien
gccagtcgcctccttggtcggctgc

SEQ ID NO: 761926 - DNA, 25 bp, Homo sapien
tggaaggtgcatatcagacaatgtg

SEQ ID NO: 761927 - DNA, 25 bp, Homo sapien
aaaattgtgcatatgaacacgtagg

SEQ ID NO: 761928 - DNA, 25 bp, Homo sapien
taggacgtcctagcccttgctcttt

SEQ ID NO: 761929 - DNA, 25 bp, Homo sapien
caatgtgaattgagcagtgaagatg

SEQ ID NO: 761930 - DNA, 25 bp, Homo sapien
ctggatggcatatagtccggtataa

SEQ ID NO: 761931 - DNA, 25 bp, Homo sapien
tcaacgttgcctctttctccatgaa

SEQ ID NO: 761932 - DNA, 25 bp, Homo sapien
catatagtccggtataaaaaagctt

SEQ ID NO: 761933 - DNA, 25 bp, Homo sapien
aaaagctttgagtaaacacgtatag

SEQ ID NO: 761934 - DNA, 25 bp, Homo sapien
tgacgacgattcgagcgaacctcgc

SEQ ID NO: 761935 - DNA, 25 bp, Homo sapien
tggatctgggcatccgggctactgc

SEQ ID NO: 761936 - DNA, 25 bp, Homo sapien
tatgtaacgagtaataactgtaccc

SEQ ID NO: 761937 - DNA, 25 bp, Homo sapien
gaaaaacataatgctagagcctgcc

SEQ ID NO: 761938 - DNA, 25 bp, Homo sapien
ctgttgtgctccaggaccgggcgct

SEQ ID NO: 761939 - DNA, 25 bp, Homo sapien
cctcggaggctgagtattgcagccg

SEQ ID NO: 761940 - DNA, 25 bp, Homo sapien
gccgcgtcacatgggtttggtcctg

SEQ ID NO: 761941 - DNA, 25 bp, Homo sapien
tcaggagcgcccagtccctcggagg

SEQ ID NO: 761942 - DNA, 25 bp, Homo sapien
catggagggctttcggcatcgtcag

SEQ ID NO: 761943 - DNA, 25 bp, Homo sapien
catcgtcagagtggccagtgtgcgc

SEQ ID NO: 761944 - DNA, 25 bp, Homo sapien
cagtaacgttatgcctgtggcttcc

SEQ ID NO: 761945 - DNA, 25 bp, Homo sapien
aaggttgctcgagcaggcggcatct

SEQ ID NO: 761946 - DNA, 25 bp, Homo sapien
atggcaaagccttctgtgcttctat

SEQ ID NO: 761947 - DNA, 25 bp, Homo sapien
tctgtgcttctattgtaggagggtg

SEQ ID NO: 761948 - DNA, 25 bp, Homo sapien
ttctattgtaggagggtgtgccagc

SEQ ID NO: 761949 - DNA, 25 bp, Homo sapien
ccggaaagcagagcctatggcaaag

SEQ ID NO: 761950 - DNA, 25 bp, Homo sapien
tcttcgtctgaagggtcacctggtt

SEQ ID NO: 761951 - DNA, 25 bp, Homo sapien
tgtccttgcctgtccatatcacaca

SEQ ID NO: 761952 - DNA, 25 bp, Homo sapien
ttgcctgtccatatcacacagtgtt

SEQ ID NO: 761953 - DNA, 25 bp, Homo sapien
ctgttctcttcgtctgaagggtcac

SEQ ID NO: 761954 - DNA, 25 bp, Homo sapien
ggcagtgagtggacacaggctgtcc

SEQ ID NO: 761955 - DNA, 25 bp, Homo sapien
cagggcagtgagtggacacaggctg

SEQ ID NO: 761956 - DNA, 25 bp, Homo sapien
gggcagtgagtggacacaggctgtc

SEQ ID NO: 761957 - DNA, 25 bp, Homo sapien
agggcagtgagtggacacaggctgt

SEQ ID NO: 761958 - DNA, 25 bp, Homo sapien
ctggggccctgcttgagatcgctgt

SEQ ID NO: 761959 - DNA, 25 bp, Homo sapien
gagaagctaccatgaattgagtaac

SEQ ID NO: 761960 - DNA, 25 bp, Homo sapien
gatcgctgttcctagacggtcttca

SEQ ID NO: 761961 - DNA, 25 bp, Homo sapien
gattccctgctttgagaagctacca

SEQ ID NO: 761962 - DNA, 25 bp, Homo sapien
caatagaggaccatgagggatagct

SEQ ID NO: 761963 - DNA, 25 bp, Homo sapien
aatgactgtggaccgcttatcctgg

SEQ ID NO: 761964 - DNA, 25 bp, Homo sapien
ctttcacatgggagtcgagggtcag

SEQ ID NO: 761965 - DNA, 25 bp, Homo sapien
gcactttggcgtgtgttggtcctca

SEQ ID NO: 761966 - DNA, 25 bp, Homo sapien
gaccacttctgaactgatctctgag

SEQ ID NO: 761967 - DNA, 25 bp, Homo sapien
tgagaaatgagctttcctgcacttt

SEQ ID NO: 761968 - DNA, 25 bp, Homo sapien
ggcttttgtccatgctcctggtgat

SEQ ID NO: 761969 - DNA, 25 bp, Homo sapien
atgctcctggtgatcacagggcctg

SEQ ID NO: 761970 - DNA, 25 bp, Homo sapien
cacacttttagggagctgtatctgt

SEQ ID NO: 761971 - DNA, 25 bp, Homo sapien
tggctgggacacctttgcatcagac

SEQ ID NO: 761972 - DNA, 25 bp, Homo sapien
gggacacctttgcatcagactccca

SEQ ID NO: 761973 - DNA, 25 bp, Homo sapien
ttagctgcacacttttagggagctg

SEQ ID NO: 761974 - DNA, 25 bp, Homo sapien
tacgaattgtgggatatctaacagg

SEQ ID NO: 761975 - DNA, 25 bp, Homo sapien
tgtgtagtctcgtacctcatgcagg

SEQ ID NO: 761976 - DNA, 25 bp, Homo sapien
tcctcactgctgtaagtacgaattg

SEQ ID NO: 761977 - DNA, 25 bp, Homo sapien
ggttcatctccaggattagctgttc

SEQ ID NO: 761978 - DNA, 25 bp, Homo sapien
acctactccagatattactaagttc

SEQ ID NO: 761979 - DNA, 25 bp, Homo sapien
aacctactccagatattactaagtt

SEQ ID NO: 761980 - DNA, 25 bp, Homo sapien
gaacctactccagatattactaagt

SEQ ID NO: 761981 - DNA, 25 bp, Homo sapien
cgactgaccaggctgtcattctgag

SEQ ID NO: 761982 - DNA, 25 bp, Homo sapien
cattccttggacactgccatcgact

SEQ ID NO: 761983 - DNA, 25 bp, Homo sapien
gaaagtaactgagggccatccctgg

SEQ ID NO: 761984 - DNA, 25 bp, Homo sapien
cctggcaggatgagcctgatgaacc

SEQ ID NO: 761985 - DNA, 25 bp, Homo sapien
agccctgcccagcccttcaaaggac

SEQ ID NO: 761986 - DNA, 25 bp, Homo sapien
ttgcaggcagccctgcccagccctt

SEQ ID NO: 761987 - DNA, 25 bp, Homo sapien
cttgcaggcagccctgcccagccct

SEQ ID NO: 761988 - DNA, 25 bp, Homo sapien
ggcagccctgcccagcccttcaaag

SEQ ID NO: 761989 - DNA, 25 bp, Homo sapien
gacttagactaaggagacagccagt

SEQ ID NO: 761990 - DNA, 25 bp, Homo sapien
aaatcggccagttggtgccgcagga

SEQ ID NO: 761991 - DNA, 25 bp, Homo sapien
acagccgtcctcatgaaagccagtg

SEQ ID NO: 761992 - DNA, 25 bp, Homo sapien
cttgctgaaggtggaaatcaacact

SEQ ID NO: 761993 - DNA, 25 bp, Homo sapien
taaatttgattcctttcatgaccga

SEQ ID NO: 761994 - DNA, 25 bp, Homo sapien
tgattcctttcatgaccgagccctc

SEQ ID NO: 761995 - DNA, 25 bp, Homo sapien
tttgattcctttcatgaccgagccc

SEQ ID NO: 761996 - DNA, 25 bp, Homo sapien
attcctttcatgaccgagccctcct

SEQ ID NO: 761997 - DNA, 25 bp, Homo sapien
gatatcccatggaggaacacagcgg

SEQ ID NO: 761998 - DNA, 25 bp, Homo sapien
tccctgagacaacgtcctgcaagtg

SEQ ID NO: 761999 - DNA, 25 bp, Homo sapien
tggaggaacacagcggatgttccac

SEQ ID NO: 762000 - DNA, 25 bp, Homo sapien
tgcaagtgcaggacgatatcccatg

SEQ ID NO: 762001 - DNA, 25 bp, Homo sapien
cagcgttcatagtactggactggac

SEQ ID NO: 762002 - DNA, 25 bp, Homo sapien
ttccctgtggttgcgtggctctttc

SEQ ID NO: 762003 - DNA, 25 bp, Homo sapien
catagtactggactggacaagcctc

SEQ ID NO: 762004 - DNA, 25 bp, Homo sapien
ctgctgtgcccgcagacctgctgct

SEQ ID NO: 762005 - DNA, 25 bp, Homo sapien
tagcagttaagcttgcagacaaatg

SEQ ID NO: 762006 - DNA, 25 bp, Homo sapien
atatcaaatgcagtcttaaccaatg

SEQ ID NO: 762007 - DNA, 25 bp, Homo sapien
tatcaaatgcagtcttaaccaatgg

SEQ ID NO: 762008 - DNA, 25 bp, Homo sapien
tcaaatgcagtcttaaccaatggaa

SEQ ID NO: 762009 - DNA, 25 bp, Homo sapien
atctgcaccaggaaatctacctgga

SEQ ID NO: 762010 - DNA, 25 bp, Homo sapien
cccttttctgggtgcaaccgtgcct

SEQ ID NO: 762011 - DNA, 25 bp, Homo sapien
aattgcatggcacacctactatttg

SEQ ID NO: 762012 - DNA, 25 bp, Homo sapien
tagctgctgccacataaacccattt

SEQ ID NO: 762013 - DNA, 25 bp, Homo sapien
caaggtcatagctgccctccatagc

SEQ ID NO: 762014 - DNA, 25 bp, Homo sapien
cttcagggagcacacgcataggggt

SEQ ID NO: 762015 - DNA, 25 bp, Homo sapien
cacgcataggggtgcccgctttcca

SEQ ID NO: 762016 - DNA, 25 bp, Homo sapien
acggctgacagtatgctgtctcttt

SEQ ID NO: 762017 - DNA, 25 bp, Homo sapien
cagtttgtcagcgtgcacataacaa

SEQ ID NO: 762018 - DNA, 25 bp, Homo sapien
tcatctggctggaagtgagatgatg

SEQ ID NO: 762019 - DNA, 25 bp, Homo sapien
taactttccataagctcaaaatact

SEQ ID NO: 762020 - DNA, 25 bp, Homo sapien
tggccggtcaaatagtttgtcactg

SEQ ID NO: 762021 - DNA, 25 bp, Homo sapien
agtttgtcactgtctaaagctacag

SEQ ID NO: 762022 - DNA, 25 bp, Homo sapien
tggtgttggccggtcaaatagtttg

SEQ ID NO: 762023 - DNA, 25 bp, Homo sapien
acttctccattgtgtctgaatggtg

SEQ ID NO: 762024 - DNA, 25 bp, Homo sapien
acacttctccattgtgtctgaatgg

SEQ ID NO: 762025 - DNA, 25 bp, Homo sapien
tccattgtgtctgaatggtggagtg

SEQ ID NO: 762026 - DNA, 25 bp, Homo sapien
aatggtggagtgaaattcttctcct

SEQ ID NO: 762027 - DNA, 25 bp, Homo sapien
gcccaatgaactcttccagcaatgg

SEQ ID NO: 762028 - DNA, 25 bp, Homo sapien
ccagcaatggagagacgttatcaga

SEQ ID NO: 762029 - DNA, 25 bp, Homo sapien
gatcatgacggtgtgagcattctga

SEQ ID NO: 762030 - DNA, 25 bp, Homo sapien
cagttctaggctctgatctcccgcg

SEQ ID NO: 762031 - DNA, 25 bp, Homo sapien
caaattccacctcttgaccgtcttg

SEQ ID NO: 762032 - DNA, 25 bp, Homo sapien
gtatgcaaattccacctcttgaccg

SEQ ID NO: 762033 - DNA, 25 bp, Homo sapien
tttggtatgcaaattccacctcttg

SEQ ID NO: 762034 - DNA, 25 bp, Homo sapien
tgcaaattccacctcttgaccgtct

SEQ ID NO: 762035 - DNA, 25 bp, Homo sapien
gccaccgctctctgaaggaaaaatt

SEQ ID NO: 762036 - DNA, 25 bp, Homo sapien
tttggccaccgctctctgaaggaaa

SEQ ID NO: 762037 - DNA, 25 bp, Homo sapien
ctttggccaccgctctctgaaggaa

SEQ ID NO: 762038 - DNA, 25 bp, Homo sapien
tggccaccgctctctgaaggaaaaa

SEQ ID NO: 762039 - DNA, 25 bp, Homo sapien
ccaggactggccctttgtttcatct

SEQ ID NO: 762040 - DNA, 25 bp, Homo sapien
aggtaatatagcagcaactgtcctc

SEQ ID NO: 762041 - DNA, 25 bp, Homo sapien
atttagcaacaggtaatatagcagc

SEQ ID NO: 762042 - DNA, 25 bp, Homo sapien
aactgtcctctgaagacatggaggt

SEQ ID NO: 762043 - DNA, 25 bp, Homo sapien
ctctagggcctgcgctgaacctgac

SEQ ID NO: 762044 - DNA, 25 bp, Homo sapien
tcttggaccatggacagagaaggca

SEQ ID NO: 762045 - DNA, 25 bp, Homo sapien
ctgtctgaagtcaagcctcttggac

SEQ ID NO: 762046 - DNA, 25 bp, Homo sapien
caggtgtgccctgcctggacctatg

SEQ ID NO: 762047 - DNA, 25 bp, Homo sapien
gaagtcaagcctcttggaccatgga

SEQ ID NO: 762048 - DNA, 25 bp, Homo sapien
cagagaaatgcctgggctcgggata

SEQ ID NO: 762049 - DNA, 25 bp, Homo sapien
gctaaatataaggaaacctggcaga

SEQ ID NO: 762050 - DNA, 25 bp, Homo sapien
taatccaacaatcagtccgtcaggc

SEQ ID NO: 762051 - DNA, 25 bp, Homo sapien
tggtgacgacaatcttcagagaaat

SEQ ID NO: 762052 - DNA, 25 bp, Homo sapien
tgtctccctcagacacccatgtgtc

SEQ ID NO: 762053 - DNA, 25 bp, Homo sapien
cttgtcgagcttgaggggcttctgt

SEQ ID NO: 762054 - DNA, 25 bp, Homo sapien
gcactcagaaacttctaggctgggc

SEQ ID NO: 762055 - DNA, 25 bp, Homo sapien
gcttctgtttcttgtgaccatcact

SEQ ID NO: 762056 - DNA, 25 bp, Homo sapien
tcctctgagcggtagcctcagacct

SEQ ID NO: 762057 - DNA, 25 bp, Homo sapien
ggagcatgctcaacaggcaaatcag

SEQ ID NO: 762058 - DNA, 25 bp, Homo sapien
cccagcctctggagaagactccatt

SEQ ID NO: 762059 - DNA, 25 bp, Homo sapien
tccgcagctctatgtgctatcatga

SEQ ID NO: 762060 - DNA, 25 bp, Homo sapien
gcctggaagatgcaggctgacctgc

SEQ ID NO: 762061 - DNA, 25 bp, Homo sapien
ccataggaaccaggtcccagggcag

SEQ ID NO: 762062 - DNA, 25 bp, Homo sapien
gaagatgcaggctgacctgctcaga

SEQ ID NO: 762063 - DNA, 25 bp, Homo sapien
gctcagagcccgcagaagtccatag

SEQ ID NO: 762064 - DNA, 25 bp, Homo sapien
gatgaagtcagagtgtgaggtgcct

SEQ ID NO: 762065 - DNA, 25 bp, Homo sapien
gaactcatccctgtgttcaagaaac

SEQ ID NO: 762066 - DNA, 25 bp, Homo sapien
gcctgaactgggaactcatccctgt

SEQ ID NO: 762067 - DNA, 25 bp, Homo sapien
gtgcctgaactgggaactcatccct

SEQ ID NO: 762068 - DNA, 25 bp, Homo sapien
ccctttgacagctggtaatggctcc

SEQ ID NO: 762069 - DNA, 25 bp, Homo sapien
acccaagggcacatgaatctgacct

SEQ ID NO: 762070 - DNA, 25 bp, Homo sapien
ctctgcggcatctcaccacggagct

SEQ ID NO: 762071 - DNA, 25 bp, Homo sapien
gacagctggtaatggctcccagagt

SEQ ID NO: 762072 - DNA, 25 bp, Homo sapien
ctggggcttgacggcccaacttgtc

SEQ ID NO: 762073 - DNA, 25 bp, Homo sapien
tggggcttgacggcccaacttgtcc

SEQ ID NO: 762074 - DNA, 25 bp, Homo sapien
gggaaacattccctcaggatacgtc

SEQ ID NO: 762075 - DNA, 25 bp, Homo sapien
gaaagtcccattgctgtacctgcca

SEQ ID NO: 762076 - DNA, 25 bp, Homo sapien
ggatacgtcctattcaaagcgctga

SEQ ID NO: 762077 - DNA, 25 bp, Homo sapien
tagaaagagcgtttggaaagtccca

SEQ ID NO: 762078 - DNA, 25 bp, Homo sapien
cattgaggttagcattgcagagaca

SEQ ID NO: 762079 - DNA, 25 bp, Homo sapien
tgaaatcatgatgcggatccccacc

SEQ ID NO: 762080 - DNA, 25 bp, Homo sapien
tcctggaataatctgccgctgggcc

SEQ ID NO: 762081 - DNA, 25 bp, Homo sapien
tgtctgtaacactctgaggaactgg

SEQ ID NO: 762082 - DNA, 25 bp, Homo sapien
cctcacagtaggcagaccataatat

SEQ ID NO: 762083 - DNA, 25 bp, Homo sapien
cttcccctctgatctggttccagtg

SEQ ID NO: 762084 - DNA, 25 bp, Homo sapien
taggcagaccataatattgccttcc

SEQ ID NO: 762085 - DNA, 25 bp, Homo sapien
tctgatctggttccagtgcccttga

SEQ ID NO: 762086 - DNA, 25 bp, Homo sapien
gcatttcctgaagttactgcctcct

SEQ ID NO: 762087 - DNA, 25 bp, Homo sapien
ccttgcccagcttccaatgtgcccc

SEQ ID NO: 762088 - DNA, 25 bp, Homo sapien
ctatcacagttgtgcagacaggcct

SEQ ID NO: 762089 - DNA, 25 bp, Homo sapien
aatgtgccccactgttgtgcatctc

SEQ ID NO: 762090 - DNA, 25 bp, Homo sapien
cagctccaagattgacagaagtaat

SEQ ID NO: 762091 - DNA, 25 bp, Homo sapien
cagaagtaattgtaaggatcaccaa

SEQ ID NO: 762092 - DNA, 25 bp, Homo sapien
gacgaagagccgaaaatgagacttg

SEQ ID NO: 762093 - DNA, 25 bp, Homo sapien
gacttggtgtgccaagatctgacca

SEQ ID NO: 762094 - DNA, 25 bp, Homo sapien
tgtttttggaggtagtgtggaccac

SEQ ID NO: 762095 - DNA, 25 bp, Homo sapien
tttggaggtagtgtggaccacctgg

SEQ ID NO: 762096 - DNA, 25 bp, Homo sapien
ttttggaggtagtgtggaccacctg

SEQ ID NO: 762097 - DNA, 25 bp, Homo sapien
ggatcagtcaccctgcagcagcaaa

SEQ ID NO: 762098 - DNA, 25 bp, Homo sapien
agcagcaaacgatgagaacctcaag

SEQ ID NO: 762099 - DNA, 25 bp, Homo sapien
gatcagtcaccctgcagcagcaaac

SEQ ID NO: 762100 - DNA, 25 bp, Homo sapien
tgcagcagcaaacgatgagaacctc

SEQ ID NO: 762101 - DNA, 25 bp, Homo sapien
cgccgttgatatgggaacagccttg

SEQ ID NO: 762102 - DNA, 25 bp, Homo sapien
tgaccaatgctctgggaagtgattc

SEQ ID NO: 762103 - DNA, 25 bp, Homo sapien
ctgcgccgttgatatgggaacagcc

SEQ ID NO: 762104 - DNA, 25 bp, Homo sapien
gagtgttttctaatgccctcagcgt

SEQ ID NO: 762105 - DNA, 25 bp, Homo sapien
cctcattggccaagggagcactttg

SEQ ID NO: 762106 - DNA, 25 bp, Homo sapien
agggctgcagaaacgcgtcttccat

SEQ ID NO: 762107 - DNA, 25 bp, Homo sapien
gcaaactcggtgttagattcctcat

SEQ ID NO: 762108 - DNA, 25 bp, Homo sapien
ttccatccaggaacgggctctgaag

SEQ ID NO: 762109 - DNA, 25 bp, Homo sapien
gggttggccacactttgccagcaca

SEQ ID NO: 762110 - DNA, 25 bp, Homo sapien
gaaactggggttggccacactttgc

SEQ ID NO: 762111 - DNA, 25 bp, Homo sapien
actttgccagcacaggccctagact

SEQ ID NO: 762112 - DNA, 25 bp, Homo sapien
acactttgccagcacaggccctaga

SEQ ID NO: 762113 - DNA, 25 bp, Homo sapien
cctttgggttgtggtttacttgctg

SEQ ID NO: 762114 - DNA, 25 bp, Homo sapien
caaagctttcagttacaatccggtc

SEQ ID NO: 762115 - DNA, 25 bp, Homo sapien
tgagaacatttgttagtaagacctt

SEQ ID NO: 762116 - DNA, 25 bp, Homo sapien
cctgtgcatcacagacgcttcagct

SEQ ID NO: 762117 - DNA, 25 bp, Homo sapien
ttgtaagtatccagtcagaagggtt

SEQ ID NO: 762118 - DNA, 25 bp, Homo sapien
gaggctgcggaagccgtggccctca

SEQ ID NO: 762119 - DNA, 25 bp, Homo sapien
gatgcatcgcatattgtaagtatcc

SEQ ID NO: 762120 - DNA, 25 bp, Homo sapien
cgcatattgtaagtatccagtcaga

SEQ ID NO: 762121 - DNA, 25 bp, Homo sapien
cacaggttagagaagtgttggaaac

SEQ ID NO: 762122 - DNA, 25 bp, Homo sapien
ctagacacaggttagagaagtgttg

SEQ ID NO: 762123 - DNA, 25 bp, Homo sapien
tgttggaaacacaggcgtaagccaa

SEQ ID NO: 762124 - DNA, 25 bp, Homo sapien
gacacaggttagagaagtgttggaa

SEQ ID NO: 762125 - DNA, 25 bp, Homo sapien
tccggatccattgtggtggacatgc

SEQ ID NO: 762126 - DNA, 25 bp, Homo sapien
atgctgatttctccgcagcatccca

SEQ ID NO: 762127 - DNA, 25 bp, Homo sapien
cctcttgctttacacgatcctgcaa

SEQ ID NO: 762128 - DNA, 25 bp, Homo sapien
gctgggcaatgttggccaccttggt

SEQ ID NO: 762129 - DNA, 25 bp, Homo sapien
ctgaaggctctgtgagatagccgta

SEQ ID NO: 762130 - DNA, 25 bp, Homo sapien
agtgggaggctttaatgcctctgaa

SEQ ID NO: 762131 - DNA, 25 bp, Homo sapien
tgaagtgggaggctttaatgcctct

SEQ ID NO: 762132 - DNA, 25 bp, Homo sapien
aggctctgtgagatagccgtaatga

SEQ ID NO: 762133 - DNA, 25 bp, Homo sapien
acagtgccctgccaacctcggttgg

SEQ ID NO: 762134 - DNA, 25 bp, Homo sapien
tgccctgccaacctcggttgggcag

SEQ ID NO: 762135 - DNA, 25 bp, Homo sapien
cagtgccctgccaacctcggttggg

SEQ ID NO: 762136 - DNA, 25 bp, Homo sapien
gggacagtgccctgccaacctcggt

SEQ ID NO: 762137 - DNA, 25 bp, Homo sapien
aggaggcttgaacatcatctctctg

SEQ ID NO: 762138 - DNA, 25 bp, Homo sapien
ctctgctttcctggtggaggcacca

SEQ ID NO: 762139 - DNA, 25 bp, Homo sapien
tgcacaggaggcttgaacatcatct

SEQ ID NO: 762140 - DNA, 25 bp, Homo sapien
agggcccagaaccatgccaccatat

SEQ ID NO: 762141 - DNA, 25 bp, Homo sapien
ccgaagccggctgtgtggaacagcc

SEQ ID NO: 762142 - DNA, 25 bp, Homo sapien
tggaacagcccccaagactcagcct

SEQ ID NO: 762143 - DNA, 25 bp, Homo sapien
cttgccgaagccggctgtgtggaac

SEQ ID NO: 762144 - DNA, 25 bp, Homo sapien
tgccgaagccggctgtgtggaacag

SEQ ID NO: 762145 - DNA, 25 bp, Homo sapien
ctgacccagaataagcacacaatgg

SEQ ID NO: 762146 - DNA, 25 bp, Homo sapien
tgacccagaataagcacacaatggt

SEQ ID NO: 762147 - DNA, 25 bp, Homo sapien
cctcacgggagtgtttgttcaggag

SEQ ID NO: 762148 - DNA, 25 bp, Homo sapien
tgtttgttcaggagactgtcttgct

SEQ ID NO: 762149 - DNA, 25 bp, Homo sapien
gaaatgcctcacgggagtgtttgtt

SEQ ID NO: 762150 - DNA, 25 bp, Homo sapien
actgtcttgctcattgttgtcttcc

SEQ ID NO: 762151 - DNA, 25 bp, Homo sapien
catatgcatggagcacttctctccc

SEQ ID NO: 762152 - DNA, 25 bp, Homo sapien
tctgccatttgctaatctgcctaaa

SEQ ID NO: 762153 - DNA, 25 bp, Homo sapien
caagtgtcttaggagcatgcatggc

SEQ ID NO: 762154 - DNA, 25 bp, Homo sapien
catgcatggcaggacagagacatat

SEQ ID NO: 762155 - DNA, 25 bp, Homo sapien
gatgtctgcccatcgggtgcactga

SEQ ID NO: 762156 - DNA, 25 bp, Homo sapien
gaacaagctggttcatctgcccggc

SEQ ID NO: 762157 - DNA, 25 bp, Homo sapien
gcacttgtgacataggcagaagcag

SEQ ID NO: 762158 - DNA, 25 bp, Homo sapien
cctggactcgatgcagatgtctgcc

SEQ ID NO: 762159 - DNA, 25 bp, Homo sapien
ctgagactggctctcccatgagtgt

SEQ ID NO: 762160 - DNA, 25 bp, Homo sapien
ctccctctgcgtcctgtcttgtagt

SEQ ID NO: 762161 - DNA, 25 bp, Homo sapien
cttgtagtacaagatagatggctgc

SEQ ID NO: 762162 - DNA, 25 bp, Homo sapien
tcagaccccaggacaatttccattc

SEQ ID NO: 762163 - DNA, 25 bp, Homo sapien
tttggaaggtctcatggaacacagg

SEQ ID NO: 762164 - DNA, 25 bp, Homo sapien
ggtacagacatcaaagtccaaggct

SEQ ID NO: 762165 - DNA, 25 bp, Homo sapien
gatttcccgcaatgagccaggacct

SEQ ID NO: 762166 - DNA, 25 bp, Homo sapien
cctgcatagggattcgaacatttgt

SEQ ID NO: 762167 - DNA, 25 bp, Homo sapien
atgcaaggacgggcttagtgttgat

SEQ ID NO: 762168 - DNA, 25 bp, Homo sapien
cgggcttagtgttgatgagcctggg

SEQ ID NO: 762169 - DNA, 25 bp, Homo sapien
catctttgctgtcaagtcttccatt

SEQ ID NO: 762170 - DNA, 25 bp, Homo sapien
aaggacgggcttagtgttgatgagc

SEQ ID NO: 762171 - DNA, 25 bp, Homo sapien
tgagtcccaggaccatggagactgg

SEQ ID NO: 762172 - DNA, 25 bp, Homo sapien
gtcccaggaccatggagactgggag

SEQ ID NO: 762173 - DNA, 25 bp, Homo sapien
gagtcccaggaccatggagactggg

SEQ ID NO: 762174 - DNA, 25 bp, Homo sapien
agaccccaccgagtcctggctgtca

SEQ ID NO: 762175 - DNA, 25 bp, Homo sapien
ctccttgggcgtacagaccacctac

SEQ ID NO: 762176 - DNA, 25 bp, Homo sapien
aatgccatgaattcttgttcctctg

SEQ ID NO: 762177 - DNA, 25 bp, Homo sapien
gactgtggagggaaccactccttta

SEQ ID NO: 762178 - DNA, 25 bp, Homo sapien
gaggtcctgcctgcggagatgactc

SEQ ID NO: 762179 - DNA, 25 bp, Homo sapien
tgcctgcggagatgactcagcacag

SEQ ID NO: 762180 - DNA, 25 bp, Homo sapien
ctgcggagatgactcagcacagccc

SEQ ID NO: 762181 - DNA, 25 bp, Homo sapien
tcctgcctgcggagatgactcagca

SEQ ID NO: 762182 - DNA, 25 bp, Homo sapien
ccactggcctgggcccaaggggcgg

SEQ ID NO: 762183 - DNA, 25 bp, Homo sapien
aactccactggcctgggcccaaggg

SEQ ID NO: 762184 - DNA, 25 bp, Homo sapien
ttaaaactccactggcctgggccca

SEQ ID NO: 762185 - DNA, 25 bp, Homo sapien
ctggcctgggcccaaggggcggcac

SEQ ID NO: 762186 - DNA, 25 bp, Homo sapien
tatcctagctgcaatgtaagcctct

SEQ ID NO: 762187 - DNA, 25 bp, Homo sapien
gggagcaggcctgttattaaaccaa

SEQ ID NO: 762188 - DNA, 25 bp, Homo sapien
ctatcctagctgcaatgtaagcctc

SEQ ID NO: 762189 - DNA, 25 bp, Homo sapien
ggcctgttattaaaccaatctccat

SEQ ID NO: 762190 - DNA, 25 bp, Homo sapien
atagagccacagagggacgggtgag

SEQ ID NO: 762191 - DNA, 25 bp, Homo sapien
tagagccacagagggacgggtgagg

SEQ ID NO: 762192 - DNA, 25 bp, Homo sapien
tgagagattcccaaagtacttttga

SEQ ID NO: 762193 - DNA, 25 bp, Homo sapien
aatgactgcgtagttgacaactctg

SEQ ID NO: 762194 - DNA, 25 bp, Homo sapien
tgttctcggtaggaaatgactgcgt

SEQ ID NO: 762195 - DNA, 25 bp, Homo sapien
tgtgtgcatgcaagctttgttctcg

SEQ ID NO: 762196 - DNA, 25 bp, Homo sapien
cctaattggatgtgtcttgaatgaa

SEQ ID NO: 762197 - DNA, 25 bp, Homo sapien
tggatgtgtcttgaatgaacaagta

SEQ ID NO: 762198 - DNA, 25 bp, Homo sapien
ggtggcccggtccttgcagatccta

SEQ ID NO: 762199 - DNA, 25 bp, Homo sapien
tccttgcagatcctaattggatgtg

SEQ ID NO: 762200 - DNA, 25 bp, Homo sapien
gaaggtgcctgaacattgaagttgc

SEQ ID NO: 762201 - DNA, 25 bp, Homo sapien
caacaccatgctcaggtctcagagt

SEQ ID NO: 762202 - DNA, 25 bp, Homo sapien
aagccggagcaaacacaagcctgaa

SEQ ID NO: 762203 - DNA, 25 bp, Homo sapien
ggaatgcgggcgtagctgaaggtgc

SEQ ID NO: 762204 - DNA, 25 bp, Homo sapien
atgggttcaatcaaccgtggatcaa

SEQ ID NO: 762205 - DNA, 25 bp, Homo sapien
gccctccgcatctatgggtttcaaa

SEQ ID NO: 762206 - DNA, 25 bp, Homo sapien
caaagaccaaatagagtcagccctc

SEQ ID NO: 762207 - DNA, 25 bp, Homo sapien
gaataacaaaagtgcctatcaaccc

SEQ ID NO: 762208 - DNA, 25 bp, Homo sapien
caaggagtctgcatagccaggaaca

SEQ ID NO: 762209 - DNA, 25 bp, Homo sapien
tgtctacaggccaaatgcgcacagt

SEQ ID NO: 762210 - DNA, 25 bp, Homo sapien
cccacaggcgtcactcaaggagtct

SEQ ID NO: 762211 - DNA, 25 bp, Homo sapien
tgcgcagctcgtgtgccaaggaaat

SEQ ID NO: 762212 - DNA, 25 bp, Homo sapien
acatgacagccaccgatttcaaggg

SEQ ID NO: 762213 - DNA, 25 bp, Homo sapien
tgtttctcaatgtaggtccatagga

SEQ ID NO: 762214 - DNA, 25 bp, Homo sapien
ggctgatcatcggaaggctctctgg

SEQ ID NO: 762215 - DNA, 25 bp, Homo sapien
tgaagcagtgcgattgggatcagct

SEQ ID NO: 762216 - DNA, 25 bp, Homo sapien
gctgagctgtgtccctcatattgca

SEQ ID NO: 762217 - DNA, 25 bp, Homo sapien
ggtggatcggtcagcctgccaccct

SEQ ID NO: 762218 - DNA, 25 bp, Homo sapien
ctgggtggatcggtcagcctgccac

SEQ ID NO: 762219 - DNA, 25 bp, Homo sapien
cagactctggtttgaaacttgccgg

SEQ ID NO: 762220 - DNA, 25 bp, Homo sapien
cttctgcaccaatggcatgaatggt

SEQ ID NO: 762221 - DNA, 25 bp, Homo sapien
tgtggccaggccacacgggccatgg

SEQ ID NO: 762222 - DNA, 25 bp, Homo sapien
gaagattatccacatggagagcagg

SEQ ID NO: 762223 - DNA, 25 bp, Homo sapien
ccaatggcatgaatggtgtcgcagg

SEQ ID NO: 762224 - DNA, 25 bp, Homo sapien
ggattgctggctctagtcaggagcc

SEQ ID NO: 762225 - DNA, 25 bp, Homo sapien
aggattgctggctctagtcaggagc

SEQ ID NO: 762226 - DNA, 25 bp, Homo sapien
aaccccgaatctgcacccacagtgg

SEQ ID NO: 762227 - DNA, 25 bp, Homo sapien
tctcatatgggcaaaccccgaatct

SEQ ID NO: 762228 - DNA, 25 bp, Homo sapien
catatgggcaaaccccgaatctgca

SEQ ID NO: 762229 - DNA, 25 bp, Homo sapien
aaaccccgaatctgcacccacagtg

SEQ ID NO: 762230 - DNA, 25 bp, Homo sapien
ccacagctaacacccaggctaagaa

SEQ ID NO: 762231 - DNA, 25 bp, Homo sapien
taacacccaggctaagaatccagta

SEQ ID NO: 762232 - DNA, 25 bp, Homo sapien
agctaacacccaggctaagaatcca

SEQ ID NO: 762233 - DNA, 25 bp, Homo sapien
cacccaggctaagaatccagtattt

SEQ ID NO: 762234 - DNA, 25 bp, Homo sapien
tgtgtaaagagccttcccaaagggc

SEQ ID NO: 762235 - DNA, 25 bp, Homo sapien
agcatagcttggcagcaggtgctcc

SEQ ID NO: 762236 - DNA, 25 bp, Homo sapien
aaaagtcagatttggcttgaaattc

SEQ ID NO: 762237 - DNA, 25 bp, Homo sapien
aaagggctcacatccttcaagtaag

SEQ ID NO: 762238 - DNA, 25 bp, Homo sapien
tagatgttggatagaatgaagggcc

SEQ ID NO: 762239 - DNA, 25 bp, Homo sapien
tagaacccatcccttgttacaggtc

SEQ ID NO: 762240 - DNA, 25 bp, Homo sapien
catagaattattggttcgagaggca

SEQ ID NO: 762241 - DNA, 25 bp, Homo sapien
caatagggctaagtcagcttacagg

SEQ ID NO: 762242 - DNA, 25 bp, Homo sapien
ccacggccttgagcacacagcttgt

SEQ ID NO: 762243 - DNA, 25 bp, Homo sapien
tagacggatatgaggtgggaccaca

SEQ ID NO: 762244 - DNA, 25 bp, Homo sapien
cactcatctcgtagtactccttgga

SEQ ID NO: 762245 - DNA, 25 bp, Homo sapien
acgaggttgagacagatccagggcc

SEQ ID NO: 762246 - DNA, 25 bp, Homo sapien
tcaagaaaccggactctgggtgtag

SEQ ID NO: 762247 - DNA, 25 bp, Homo sapien
ggcatgatgagctctttcaagaaac

SEQ ID NO: 762248 - DNA, 25 bp, Homo sapien
cctgctggcatgatgagctctttca

SEQ ID NO: 762249 - DNA, 25 bp, Homo sapien
ctctttcaagaaaccggactctggg

SEQ ID NO: 762250 - DNA, 25 bp, Homo sapien
gaccaggctgagctgcatgtcagag

SEQ ID NO: 762251 - DNA, 25 bp, Homo sapien
tcagaccaggctgagctgcatgtca

SEQ ID NO: 762252 - DNA, 25 bp, Homo sapien
ccaggctgagctgcatgtcagagat

SEQ ID NO: 762253 - DNA, 25 bp, Homo sapien
aggctgagctgcatgtcagagatgc

SEQ ID NO: 762254 - DNA, 25 bp, Homo sapien
ccatttgcagtttgcatgccacctc

SEQ ID NO: 762255 - DNA, 25 bp, Homo sapien
tctgggcacaggtaggagtaagggc

SEQ ID NO: 762256 - DNA, 25 bp, Homo sapien
ggagtaagggcacaagcaggcccat

SEQ ID NO: 762257 - DNA, 25 bp, Homo sapien
cccatttgcagtttgcatgccacct

SEQ ID NO: 762258 - DNA, 25 bp, Homo sapien
cagactcccaaagacacgtttcatc

SEQ ID NO: 762259 - DNA, 25 bp, Homo sapien
gccaatggatgccagactcaagtgt

SEQ ID NO: 762260 - DNA, 25 bp, Homo sapien
gatcctgttccgcagagaggacacc

SEQ ID NO: 762261 - DNA, 25 bp, Homo sapien
cgtttcatcaagaactgaagtgtcc

SEQ ID NO: 762262 - DNA, 25 bp, Homo sapien
taactagaataatacaggaagtgat

SEQ ID NO: 762263 - DNA, 25 bp, Homo sapien
tacaggaagtgataaaactatgctg

SEQ ID NO: 762264 - DNA, 25 bp, Homo sapien
caggaagtgataaaactatgctgac

SEQ ID NO: 762265 - DNA, 25 bp, Homo sapien
ggtaactagaataatacaggaagtg

SEQ ID NO: 762266 - DNA, 25 bp, Homo sapien
gaagagagttgctcatccctttcag

SEQ ID NO: 762267 - DNA, 25 bp, Homo sapien
gttgctcatccctttcagtcctgat

SEQ ID NO: 762268 - DNA, 25 bp, Homo sapien
ttctagagaagagagttgctcatcc

SEQ ID NO: 762269 - DNA, 25 bp, Homo sapien
gagagttgctcatccctttcagtcc

SEQ ID NO: 762270 - DNA, 25 bp, Homo sapien
ggagatgaagaagcgccgagcccct

SEQ ID NO: 762271 - DNA, 25 bp, Homo sapien
tccgtgaagtcggagatgaagaagc

SEQ ID NO: 762272 - DNA, 25 bp, Homo sapien
atctcaggggtgtccgtgaagtcgg

SEQ ID NO: 762273 - DNA, 25 bp, Homo sapien
gggtgtccgtgaagtcggagatgaa

SEQ ID NO: 762274 - DNA, 25 bp, Homo sapien
ccccagatgcgcgtatgagagtcaa

SEQ ID NO: 762275 - DNA, 25 bp, Homo sapien
ctatcagtggtgtggtgacatggac

SEQ ID NO: 762276 - DNA, 25 bp, Homo sapien
tcagatctggaaacggttagcttcc

SEQ ID NO: 762277 - DNA, 25 bp, Homo sapien
tttggtgggcgccattgaattcgac

SEQ ID NO: 762278 - DNA, 25 bp, Homo sapien
caatgagcgagggagacaacgtgtt

SEQ ID NO: 762279 - DNA, 25 bp, Homo sapien
tctctgcggtacctgtgagccctga

SEQ ID NO: 762280 - DNA, 25 bp, Homo sapien
aatggaccatggcagtctgtgctga

SEQ ID NO: 762281 - DNA, 25 bp, Homo sapien
tctgtgctgactcgaaatagggatg

SEQ ID NO: 762282 - DNA, 25 bp, Homo sapien
ctggcttggctggaaatgagcttct

SEQ ID NO: 762283 - DNA, 25 bp, Homo sapien
ttggctggaaatgagcttctgcggt

SEQ ID NO: 762284 - DNA, 25 bp, Homo sapien
gcctgaggacacacatcgcatgtca

SEQ ID NO: 762285 - DNA, 25 bp, Homo sapien
tgaagtttgcaccatgcactgcatc

SEQ ID NO: 762286 - DNA, 25 bp, Homo sapien
catgcatgcctggaagtatctccct

SEQ ID NO: 762287 - DNA, 25 bp, Homo sapien
gtgcatgcatgcctggaagtatctc

SEQ ID NO: 762288 - DNA, 25 bp, Homo sapien
ttctgtatgagaacttgtgcatgca

SEQ ID NO: 762289 - DNA, 25 bp, Homo sapien
catgcctggaagtatctccctggaa

SEQ ID NO: 762290 - DNA, 25 bp, Homo sapien
tgggattgggatgtgtgccagtgac

SEQ ID NO: 762291 - DNA, 25 bp, Homo sapien
ctggctccacacctttaggttggga

SEQ ID NO: 762292 - DNA, 25 bp, Homo sapien
gtgtgccagtgacgcagaccctaat

SEQ ID NO: 762293 - DNA, 25 bp, Homo sapien
tgacgcagaccctaatgatacccat

SEQ ID NO: 762294 - DNA, 25 bp, Homo sapien
ctgcccttccgccatccggtaggtt

SEQ ID NO: 762295 - DNA, 25 bp, Homo sapien
aactgcaccttgagggtctcttctc

SEQ ID NO: 762296 - DNA, 25 bp, Homo sapien
tgtggacgcgtgtgagtgaggaggc

SEQ ID NO: 762297 - DNA, 25 bp, Homo sapien
gaaattttgcatggtaccaattcat

SEQ ID NO: 762298 - DNA, 25 bp, Homo sapien
caggcggacctatagtccttccctt

SEQ ID NO: 762299 - DNA, 25 bp, Homo sapien
ctagggatgcgtcctctaccctgga

SEQ ID NO: 762300 - DNA, 25 bp, Homo sapien
tgcatcttaaatatgtcccaggcgg

SEQ ID NO: 762301 - DNA, 25 bp, Homo sapien
gggatgcgtcctctaccctggagac

SEQ ID NO: 762302 - DNA, 25 bp, Homo sapien
tgagtgtttcctccccgacttttgc

SEQ ID NO: 762303 - DNA, 25 bp, Homo sapien
tccccgacttttgcctgcattcttt

SEQ ID NO: 762304 - DNA, 25 bp, Homo sapien
ttcctccccgacttttgcctgcatt

SEQ ID NO: 762305 - DNA, 25 bp, Homo sapien
aggaatgagtgtttcctccccgact

SEQ ID NO: 762306 - DNA, 25 bp, Homo sapien
gtgcagacagcgatgaggacacctc

SEQ ID NO: 762307 - DNA, 25 bp, Homo sapien
tgatgtggcctggtgcttgtgttcc

SEQ ID NO: 762308 - DNA, 25 bp, Homo sapien
tgaacgtgagtactaatgccccagc

SEQ ID NO: 762309 - DNA, 25 bp, Homo sapien
cagctcgtgctgtcgggtgcagaca

SEQ ID NO: 762310 - DNA, 25 bp, Homo sapien
ctaaggactatgttttctgtctgaa

SEQ ID NO: 762311 - DNA, 25 bp, Homo sapien
ggactatgttttctgtctgaacttt

SEQ ID NO: 762312 - DNA, 25 bp, Homo sapien
ctatgttttctgtctgaactttcac

SEQ ID NO: 762313 - DNA, 25 bp, Homo sapien
taaggactatgttttctgtctgaac

SEQ ID NO: 762314 - DNA, 25 bp, Homo sapien
aatcagggagcactttggttcaggt

SEQ ID NO: 762315 - DNA, 25 bp, Homo sapien
cctattaagtgaagggtttgctgcc

SEQ ID NO: 762316 - DNA, 25 bp, Homo sapien
caaaattgtgatttccgaatcaggg

SEQ ID NO: 762317 - DNA, 25 bp, Homo sapien
tcaggtctgttcataaactggcaga

SEQ ID NO: 762318 - DNA, 25 bp, Homo sapien
gattcaggaggtctcaccctttgca

SEQ ID NO: 762319 - DNA, 25 bp, Homo sapien
gatgcctgaatcacttgcctgcaag

SEQ ID NO: 762320 - DNA, 25 bp, Homo sapien
gacccaatatgttgctggtaccaag

SEQ ID NO: 762321 - DNA, 25 bp, Homo sapien
ccaggtgaaaatcatagggtggtcc

SEQ ID NO: 762322 - DNA, 25 bp, Homo sapien
caccatttcgatacagcagtgaagg

SEQ ID NO: 762323 - DNA, 25 bp, Homo sapien
tcagtgatccagtcccgtccgtgga

SEQ ID NO: 762324 - DNA, 25 bp, Homo sapien
gattgcaagggactttctgtctttc

SEQ ID NO: 762325 - DNA, 25 bp, Homo sapien
gaaggcgcagtcagtgatccagtcc

SEQ ID NO: 762326 - DNA, 25 bp, Homo sapien
taaaatcccagtccatgattctgcc

SEQ ID NO: 762327 - DNA, 25 bp, Homo sapien
gagctcttgctatcagttggcagtg

SEQ ID NO: 762328 - DNA, 25 bp, Homo sapien
gccaccaatggtatagagctcttgc

SEQ ID NO: 762329 - DNA, 25 bp, Homo sapien
ccttcttcttgtcatatctgtatgc

SEQ ID NO: 762330 - DNA, 25 bp, Homo sapien
cagttatctttgctgtaatctttat

SEQ ID NO: 762331 - DNA, 25 bp, Homo sapien
tctctatttcagttatctttgctgt

SEQ ID NO: 762332 - DNA, 25 bp, Homo sapien
taacttccttatgctaactttgggc

SEQ ID NO: 762333 - DNA, 25 bp, Homo sapien
tattcttgttccctgaagtgtaaag

SEQ ID NO: 762334 - DNA, 25 bp, Homo sapien
cgcccccgcatgcacgggccgccca

SEQ ID NO: 762335 - DNA, 25 bp, Homo sapien
acgggccgcccacacgcacaggtca

SEQ ID NO: 762336 - DNA, 25 bp, Homo sapien
gcccacacgcacaggtcacccacat

SEQ ID NO: 762337 - DNA, 25 bp, Homo sapien
tgcccacatgcacgggccgcccccg

SEQ ID NO: 762338 - DNA, 25 bp, Homo sapien
tctcttcctctgaatggttcataag

SEQ ID NO: 762339 - DNA, 25 bp, Homo sapien
ttgtctcttcctctgaatggttcat

SEQ ID NO: 762340 - DNA, 25 bp, Homo sapien
cctctgaatggttcataagatttct

SEQ ID NO: 762341 - DNA, 25 bp, Homo sapien
ccctggaaaaattgtctcttcctct

SEQ ID NO: 762342 - DNA, 25 bp, Homo sapien
cctcctgctgagccccaagcctcct

SEQ ID NO: 762343 - DNA, 25 bp, Homo sapien
cctcctccccgtgacccagagccct

SEQ ID NO: 762344 - DNA, 25 bp, Homo sapien
caagcctcctccccgtgacccagag

SEQ ID NO: 762345 - DNA, 25 bp, Homo sapien
ctgtcctctgtgaggccttcatgca

SEQ ID NO: 762346 - DNA, 25 bp, Homo sapien
gaacagaaatcctgtcacacccttt

SEQ ID NO: 762347 - DNA, 25 bp, Homo sapien
tcagagagaaccacaaagcttcagg

SEQ ID NO: 762348 - DNA, 25 bp, Homo sapien
agaaatcctgtcacacccttttggg

SEQ ID NO: 762349 - DNA, 25 bp, Homo sapien
caggaacagaaatcctgtcacaccc

SEQ ID NO: 762350 - DNA, 25 bp, Homo sapien
tggacttccaggtgtaagcagacag

SEQ ID NO: 762351 - DNA, 25 bp, Homo sapien
gcatgccctggagggtgtagccctg

SEQ ID NO: 762352 - DNA, 25 bp, Homo sapien
ccctggcaggttgtgaggatgtcaa

SEQ ID NO: 762353 - DNA, 25 bp, Homo sapien
gccatcttggtcagatcaggctcag

SEQ ID NO: 762354 - DNA, 25 bp, Homo sapien
gaaccaatggatcgtctgacagttt

SEQ ID NO: 762355 - DNA, 25 bp, Homo sapien
ccaactgaatgtgaggttgaataac

SEQ ID NO: 762356 - DNA, 25 bp, Homo sapien
ttctgaagtgtcttgctggtgtctc

SEQ ID NO: 762357 - DNA, 25 bp, Homo sapien
taacaagaaccaatggatcgtctga

SEQ ID NO: 762358 - DNA, 25 bp, Homo sapien
gtcacagatagccttgccttgaaca

SEQ ID NO: 762359 - DNA, 25 bp, Homo sapien
caggtcacagatagccttgccttga

SEQ ID NO: 762360 - DNA, 25 bp, Homo sapien
acaccattcatctggatctgataca

SEQ ID NO: 762361 - DNA, 25 bp, Homo sapien
acagatagccttgccttgaacacca

SEQ ID NO: 762362 - DNA, 25 bp, Homo sapien
tcctgaaacgacagcacagaatcct

SEQ ID NO: 762363 - DNA, 25 bp, Homo sapien
cctgaaacgacagcacagaatcctc

SEQ ID NO: 762364 - DNA, 25 bp, Homo sapien
tatgcagtccccttcatgaggtcag

SEQ ID NO: 762365 - DNA, 25 bp, Homo sapien
cttatgcagtccccttcatgaggtc

SEQ ID NO: 762366 - DNA, 25 bp, Homo sapien
gcagtccccttcatgaggtcagatg

SEQ ID NO: 762367 - DNA, 25 bp, Homo sapien
tgcagtccccttcatgaggtcagat

SEQ ID NO: 762368 - DNA, 25 bp, Homo sapien
ccttgatgtgaggtcatcggaacct

SEQ ID NO: 762369 - DNA, 25 bp, Homo sapien
tcatcggtcagctgagtggccgcat

SEQ ID NO: 762370 - DNA, 25 bp, Homo sapien
tgcacaatctaagggacaaagcagg

SEQ ID NO: 762371 - DNA, 25 bp, Homo sapien
gggcaacattcagggcctgcattgc

SEQ ID NO: 762372 - DNA, 25 bp, Homo sapien
agcagtgggccctcctgacacacaa

SEQ ID NO: 762373 - DNA, 25 bp, Homo sapien
tggacacagcctgtgagttattgtg

SEQ ID NO: 762374 - DNA, 25 bp, Homo sapien
tgtgcactgaaagccccagcagtgg

SEQ ID NO: 762375 - DNA, 25 bp, Homo sapien
cagtgggccctcctgacacacaaag

SEQ ID NO: 762376 - DNA, 25 bp, Homo sapien
tgtttttccatgagatccgaactcc

SEQ ID NO: 762377 - DNA, 25 bp, Homo sapien
tggatccgggtagtggtgctgcccc

SEQ ID NO: 762378 - DNA, 25 bp, Homo sapien
cagggcatcttccacggtgtttttc

SEQ ID NO: 762379 - DNA, 25 bp, Homo sapien
cgattgagtggatgtggatccgggt

SEQ ID NO: 762380 - DNA, 25 bp, Homo sapien
ttagccagttggtgaccttcatcaa

SEQ ID NO: 762381 - DNA, 25 bp, Homo sapien
ttctcattagagcacctatcatcat

SEQ ID NO: 762382 - DNA, 25 bp, Homo sapien
tgggatctgtgaaaccacgtgacgc

SEQ ID NO: 762383 - DNA, 25 bp, Homo sapien
tatagtgaggtaataaaacttctca

SEQ ID NO: 762384 - DNA, 25 bp, Homo sapien
tctactgagtggagtcttggtgtga

SEQ ID NO: 762385 - DNA, 25 bp, Homo sapien
cactggttctctggatctgtcttct

SEQ ID NO: 762386 - DNA, 25 bp, Homo sapien
gggacgtaattcactattgcacacc

SEQ ID NO: 762387 - DNA, 25 bp, Homo sapien
gcatattcgactgcattgtttggtc

SEQ ID NO: 762388 - DNA, 25 bp, Homo sapien
cagtagaagcatgtgtttttgcttt

SEQ ID NO: 762389 - DNA, 25 bp, Homo sapien
caatgcagtagaagcatgtgttttt

SEQ ID NO: 762390 - DNA, 25 bp, Homo sapien
ttactcttaagtgccacactgcagt

SEQ ID NO: 762391 - DNA, 25 bp, Homo sapien
attactcttaagtgccacactgcag

SEQ ID NO: 762392 - DNA, 25 bp, Homo sapien
ctggcaggagcgctgccactggcca

SEQ ID NO: 762393 - DNA, 25 bp, Homo sapien
tcttcctgcaccatcagcacgggcc

SEQ ID NO: 762394 - DNA, 25 bp, Homo sapien
tgagtgcggtgagcctggcaggagc

SEQ ID NO: 762395 - DNA, 25 bp, Homo sapien
ctgctgtgcggtgagtgcggtgagc

SEQ ID NO: 762396 - DNA, 25 bp, Homo sapien
tcccaggtgtgcccctgtcttgcac

SEQ ID NO: 762397 - DNA, 25 bp, Homo sapien
cctttgaagagtctgcccctcctct

SEQ ID NO: 762398 - DNA, 25 bp, Homo sapien
tccatgtgatggtgactgcatggcg

SEQ ID NO: 762399 - DNA, 25 bp, Homo sapien
ttaatactggcatgtcttcacacac

SEQ ID NO: 762400 - DNA, 25 bp, Homo sapien
catggcgaatgttgccgccagcacc

SEQ ID NO: 762401 - DNA, 25 bp, Homo sapien
aaatcactttgattgtttgccccag

SEQ ID NO: 762402 - DNA, 25 bp, Homo sapien
gttgggtctcaatgcctctgggccc

SEQ ID NO: 762403 - DNA, 25 bp, Homo sapien
tgctgccggttccagttcccaggct

SEQ ID NO: 762404 - DNA, 25 bp, Homo sapien
catgagtgacctactgagggccaga

SEQ ID NO: 762405 - DNA, 25 bp, Homo sapien
tgctgtgtagactttcttgagtggg

SEQ ID NO: 762406 - DNA, 25 bp, Homo sapien
tcaggaggccttcacattggaaacg

SEQ ID NO: 762407 - DNA, 25 bp, Homo sapien
ggtgtcagaaatgccctgaggttct

SEQ ID NO: 762408 - DNA, 25 bp, Homo sapien
gtgtggatgcagatgtggcactacc

SEQ ID NO: 762409 - DNA, 25 bp, Homo sapien
cagatgagcacgcggttgttaaagg

SEQ ID NO: 762410 - DNA, 25 bp, Homo sapien
ggatgcagatgtggcactacccttg

SEQ ID NO: 762411 - DNA, 25 bp, Homo sapien
gtgaggctgaaacagatgagcacgc

SEQ ID NO: 762412 - DNA, 25 bp, Homo sapien
ggcacctcaggtatcacatcatcca

SEQ ID NO: 762413 - DNA, 25 bp, Homo sapien
ggtatcacatcatccagggctttct

SEQ ID NO: 762414 - DNA, 25 bp, Homo sapien
tctgtgcacatgtgctttgggtctt

SEQ ID NO: 762415 - DNA, 25 bp, Homo sapien
gtgcacatgtgctttgggtctttga

SEQ ID NO: 762416 - DNA, 25 bp, Homo sapien
ggcaaaacatctgccagtccacgtg

SEQ ID NO: 762417 - DNA, 25 bp, Homo sapien
cacgtggacagttgatccacatgga

SEQ ID NO: 762418 - DNA, 25 bp, Homo sapien
agtccacgtggacagttgatccaca

SEQ ID NO: 762419 - DNA, 25 bp, Homo sapien
gtggacagttgatccacatggactt

SEQ ID NO: 762420 - DNA, 25 bp, Homo sapien
cagcttttgcctataatacaattag

SEQ ID NO: 762421 - DNA, 25 bp, Homo sapien
ctgcacctggcaatcagttgctctt

SEQ ID NO: 762422 - DNA, 25 bp, Homo sapien
acagcagcttttgcctataatacaa

SEQ ID NO: 762423 - DNA, 25 bp, Homo sapien
acctggcaatcagttgctctttaaa

SEQ ID NO: 762424 - DNA, 25 bp, Homo sapien
tctttattgagagtgggcgagaaca

SEQ ID NO: 762425 - DNA, 25 bp, Homo sapien
tgaggacacccgcagcggacacagc

SEQ ID NO: 762426 - DNA, 25 bp, Homo sapien
aacagtgccccagacggcacgtgga

SEQ ID NO: 762427 - DNA, 25 bp, Homo sapien
acggcacgtggaactgaggacaccc

SEQ ID NO: 762428 - DNA, 25 bp, Homo sapien
ctgggtcactgatgcatgatgtgac

SEQ ID NO: 762429 - DNA, 25 bp, Homo sapien
gctgtactgttttctgtcccctgtg

SEQ ID NO: 762430 - DNA, 25 bp, Homo sapien
ttaggaccccactgctgtactgttt

SEQ ID NO: 762431 - DNA, 25 bp, Homo sapien
tgatgcatgatgtgacttaggaccc

SEQ ID NO: 762432 - DNA, 25 bp, Homo sapien
ctggaggtgagggacattgcgtggc

SEQ ID NO: 762433 - DNA, 25 bp, Homo sapien
tgcgtggcagttgcgtctggaccct

SEQ ID NO: 762434 - DNA, 25 bp, Homo sapien
acattgcgtggcagttgcgtctgga

SEQ ID NO: 762435 - DNA, 25 bp, Homo sapien
gcagttgcgtctggaccctgtgcca

SEQ ID NO: 762436 - DNA, 25 bp, Homo sapien
gagcccacgctcctgagcacacctc

SEQ ID NO: 762437 - DNA, 25 bp, Homo sapien
atgcaccacccagacctgcctagtg

SEQ ID NO: 762438 - DNA, 25 bp, Homo sapien
tgccgatgcaccacccagacctgcc

SEQ ID NO: 762439 - DNA, 25 bp, Homo sapien
acccagacctgcctagtgcccgact

SEQ ID NO: 762440 - DNA, 25 bp, Homo sapien
aagctgagtgtatcttgtgtgttta

SEQ ID NO: 762441 - DNA, 25 bp, Homo sapien
tatggtgaaaccaagtggctgtggc

SEQ ID NO: 762442 - DNA, 25 bp, Homo sapien
cttcataaaatacagggtcgttatg

SEQ ID NO: 762443 - DNA, 25 bp, Homo sapien
gctgtcctctggtttaagctgagtg

SEQ ID NO: 762444 - DNA, 25 bp, Homo sapien
ataaagaacctctagaaaagcagtt

SEQ ID NO: 762445 - DNA, 25 bp, Homo sapien
gaacatcaattttctaattgaggct

SEQ ID NO: 762446 - DNA, 25 bp, Homo sapien
ctataaagaacctctagaaaagcag

SEQ ID NO: 762447 - DNA, 25 bp, Homo sapien
catcaattttctaattgaggctgag

SEQ ID NO: 762448 - DNA, 25 bp, Homo sapien
ttccctgtgtcagtatggccgccag

SEQ ID NO: 762449 - DNA, 25 bp, Homo sapien
tcctgccacgtcctcagtctggaga

SEQ ID NO: 762450 - DNA, 25 bp, Homo sapien
cacgtcctcagtctggagacagagc

SEQ ID NO: 762451 - DNA, 25 bp, Homo sapien
gggtgttattccctgtgtcagtatg

SEQ ID NO: 762452 - DNA, 25 bp, Homo sapien
tctgttgtacaaggcatggcatccc

SEQ ID NO: 762453 - DNA, 25 bp, Homo sapien
gaaaatcctccactgcacaaatagg

SEQ ID NO: 762454 - DNA, 25 bp, Homo sapien
tgttttctagaatacgtctgttgta

SEQ ID NO: 762455 - DNA, 25 bp, Homo sapien
catccctgaacttggagttttcata

SEQ ID NO: 762456 - DNA, 25 bp, Homo sapien
cttggtgctgctgccttttactgcc

SEQ ID NO: 762457 - DNA, 25 bp, Homo sapien
ttttactgccacgacagtccccagc

SEQ ID NO: 762458 - DNA, 25 bp, Homo sapien
tgctgctgccttttactgccacgac

SEQ ID NO: 762459 - DNA, 25 bp, Homo sapien
gctgccttttactgccacgacagtc

SEQ ID NO: 762460 - DNA, 25 bp, Homo sapien
ttggaggtgttccttaaagcttgtg

SEQ ID NO: 762461 - DNA, 25 bp, Homo sapien
ggaggtgttccttaaagcttgtgga

SEQ ID NO: 762462 - DNA, 25 bp, Homo sapien
cttgtggaaggtttgaacgataaat

SEQ ID NO: 762463 - DNA, 25 bp, Homo sapien
acaaggactggcattatcaagaggg

SEQ ID NO: 762464 - DNA, 25 bp, Homo sapien
ggtgtgaggacaggagggctgtgtc

SEQ ID NO: 762465 - DNA, 25 bp, Homo sapien
tgtgaggacaggagggctgtgtcat

SEQ ID NO: 762466 - DNA, 25 bp, Homo sapien
gtgtgaggacaggagggctgtgtca

SEQ ID NO: 762467 - DNA, 25 bp, Homo sapien
ctggtgtgaggacaggagggctgtg

SEQ ID NO: 762468 - DNA, 25 bp, Homo sapien
tccaggtgctgctttggtagaggtt

SEQ ID NO: 762469 - DNA, 25 bp, Homo sapien
tgctgctttggtagaggttgatgat

SEQ ID NO: 762470 - DNA, 25 bp, Homo sapien
catgtgtggccgtcatggaaacagg

SEQ ID NO: 762471 - DNA, 25 bp, Homo sapien
ggcttgggtccctgcgcatgtgtgg

SEQ ID NO: 762472 - DNA, 25 bp, Homo sapien
tgtagcaacactgtaggggcggcat

SEQ ID NO: 762473 - DNA, 25 bp, Homo sapien
ggatccctgtagcaacactgtaggg

SEQ ID NO: 762474 - DNA, 25 bp, Homo sapien
cctgtagcaacactgtaggggcggc

SEQ ID NO: 762475 - DNA, 25 bp, Homo sapien
ctggatccctgtagcaacactgtag

SEQ ID NO: 762476 - DNA, 25 bp, Homo sapien
agcctggtctccctcagagctggca

SEQ ID NO: 762477 - DNA, 25 bp, Homo sapien
ctggtctccctcagagctggcagca

SEQ ID NO: 762478 - DNA, 25 bp, Homo sapien
caaagagttgggcttgggcaagcca

SEQ ID NO: 762479 - DNA, 25 bp, Homo sapien
ccacgggccttggaaggagctttgc

SEQ ID NO: 762480 - DNA, 25 bp, Homo sapien
cttgggcaagccacgggccttggaa

SEQ ID NO: 762481 - DNA, 25 bp, Homo sapien
caagccacgggccttggaaggagct

SEQ ID NO: 762482 - DNA, 25 bp, Homo sapien
gctcattattcagaccccgagccag

SEQ ID NO: 762483 - DNA, 25 bp, Homo sapien
gtttgctatccccacaccttgcgtg

SEQ ID NO: 762484 - DNA, 25 bp, Homo sapien
gcagggattacacgtcacattcagg

SEQ ID NO: 762485 - DNA, 25 bp, Homo sapien
aatttccctcaaacaggacgagcag

SEQ ID NO: 762486 - DNA, 25 bp, Homo sapien
aggcctgaggcgcagacatccgtag

SEQ ID NO: 762487 - DNA, 25 bp, Homo sapien
tggaaggggcgtcctagtggggcca

SEQ ID NO: 762488 - DNA, 25 bp, Homo sapien
gcctgaggcgcagacatccgtagcg

SEQ ID NO: 762489 - DNA, 25 bp, Homo sapien
tgaggcgcagacatccgtagcggac

SEQ ID NO: 762490 - DNA, 25 bp, Homo sapien
cggcgggcccggagcaccgcccgcg

SEQ ID NO: 762491 - DNA, 25 bp, Homo sapien
tcggcgggcccggagcaccgcccgc

SEQ ID NO: 762492 - DNA, 25 bp, Homo sapien
gcgggcccggagcaccgcccgcgtc

SEQ ID NO: 762493 - DNA, 25 bp, Homo sapien
catacagtgacaaatgctcagaaga

SEQ ID NO: 762494 - DNA, 25 bp, Homo sapien
cacacatacagtgacaaatgctcag

SEQ ID NO: 762495 - DNA, 25 bp, Homo sapien
acacacacatacagtgacaaatgct

SEQ ID NO: 762496 - DNA, 25 bp, Homo sapien
gcagcagtcaggagcttgagtgaga

SEQ ID NO: 762497 - DNA, 25 bp, Homo sapien
tagtctagttttcagctctggcccc

SEQ ID NO: 762498 - DNA, 25 bp, Homo sapien
agtgcctagtctagttttcagctct

SEQ ID NO: 762499 - DNA, 25 bp, Homo sapien
cctagtctagttttcagctctggcc

SEQ ID NO: 762500 - DNA, 25 bp, Homo sapien
ctagtctagttttcagctctggccc

SEQ ID NO: 762501 - DNA, 25 bp, Homo sapien
gggatttcaatggggtctggctcac

SEQ ID NO: 762502 - DNA, 25 bp, Homo sapien
gacttctccttagggatttcaatgg

SEQ ID NO: 762503 - DNA, 25 bp, Homo sapien
cttagggatttcaatggggtctggc

SEQ ID NO: 762504 - DNA, 25 bp, Homo sapien
tgtgaggtggacttctccttaggga

SEQ ID NO: 762505 - DNA, 25 bp, Homo sapien
gccaggtgcttggagtatgtgtcac

SEQ ID NO: 762506 - DNA, 25 bp, Homo sapien
ctctgccaggtgcttggagtatgtg

SEQ ID NO: 762507 - DNA, 25 bp, Homo sapien
gggcttcttttgctccatgtcccca

SEQ ID NO: 762508 - DNA, 25 bp, Homo sapien
gagacactgggtcactccgggcttc

SEQ ID NO: 762509 - DNA, 25 bp, Homo sapien
acctgcttcgggcttcctgttgcca

SEQ ID NO: 762510 - DNA, 25 bp, Homo sapien
ccacctgcttcgggcttcctgttgc

SEQ ID NO: 762511 - DNA, 25 bp, Homo sapien
cctgcttcgggcttcctgttgccat

SEQ ID NO: 762512 - DNA, 25 bp, Homo sapien
atccacctgcttcgggcttcctgtt

SEQ ID NO: 762513 - DNA, 25 bp, Homo sapien
tccaggcctagggtcacctgggcct

SEQ ID NO: 762514 - DNA, 25 bp, Homo sapien
aggcttaaccctccacttcatttct

SEQ ID NO: 762515 - DNA, 25 bp, Homo sapien
ttccaaggatctgaggttgtccagg

SEQ ID NO: 762516 - DNA, 25 bp, Homo sapien
tctgagtagatgtctgggggccttc

SEQ ID NO: 762517 - DNA, 25 bp, Homo sapien
agtgtacgccgatgggggctgttga

SEQ ID NO: 762518 - DNA, 25 bp, Homo sapien
ctcgagtcatggagagctgagtgta

SEQ ID NO: 762519 - DNA, 25 bp, Homo sapien
cgccgatgggggctgttgagacccc

SEQ ID NO: 762520 - DNA, 25 bp, Homo sapien
gagctgagtgtacgccgatgggggc

SEQ ID NO: 762521 - DNA, 25 bp, Homo sapien
aactggactgcttccatctgtgtct

SEQ ID NO: 762522 - DNA, 25 bp, Homo sapien
actggactgcttccatctgtgtctt

SEQ ID NO: 762523 - DNA, 25 bp, Homo sapien
taaactggactgcttccatctgtgt

SEQ ID NO: 762524 - DNA, 25 bp, Homo sapien
tgtgtctttgatgtgctttcttcct

SEQ ID NO: 762525 - DNA, 25 bp, Homo sapien
gtgaccatgcaaggccggctgtgct

SEQ ID NO: 762526 - DNA, 25 bp, Homo sapien
gtccacagtcggcagcaatcagtca

SEQ ID NO: 762527 - DNA, 25 bp, Homo sapien
ttggtgccgagtgaggactgacctc

SEQ ID NO: 762528 - DNA, 25 bp, Homo sapien
caaatgtcggacaagcaggtggctt

SEQ ID NO: 762529 - DNA, 25 bp, Homo sapien
agaggagtgggtctaagagcaccac

SEQ ID NO: 762530 - DNA, 25 bp, Homo sapien
aagaggactgcactggaatcagatg

SEQ ID NO: 762531 - DNA, 25 bp, Homo sapien
gagcaccactgctggtactccctgg

SEQ ID NO: 762532 - DNA, 25 bp, Homo sapien
tactccctggtagtgcaaagaggac

SEQ ID NO: 762533 - DNA, 25 bp, Homo sapien
aagcgggccacatccaagttccata

SEQ ID NO: 762534 - DNA, 25 bp, Homo sapien
gcattgcatgatgagttagtgctgc

SEQ ID NO: 762535 - DNA, 25 bp, Homo sapien
gcatcccactggtagtggctctgga

SEQ ID NO: 762536 - DNA, 25 bp, Homo sapien
gaagcgtgagcatcccactggtagt

SEQ ID NO: 762537 - DNA, 25 bp, Homo sapien
gtttactttgccattgctgcactga

SEQ ID NO: 762538 - DNA, 25 bp, Homo sapien
acaccacagtcctgtaagtgcccat

SEQ ID NO: 762539 - DNA, 25 bp, Homo sapien
gtttcatggagcattgcccagccca

SEQ ID NO: 762540 - DNA, 25 bp, Homo sapien
tgtgagaggaacttttgtttcatgg

SEQ ID NO: 762541 - DNA, 25 bp, Homo sapien
tctcacttccgcatgacataacatg

SEQ ID NO: 762542 - DNA, 25 bp, Homo sapien
tcagtcaacactaagggaacttggc

SEQ ID NO: 762543 - DNA, 25 bp, Homo sapien
cttggctaagcgtagctcttttgtc

SEQ ID NO: 762544 - DNA, 25 bp, Homo sapien
aatggcaggcaaactgttccctctc

SEQ ID NO: 762545 - DNA, 25 bp, Homo sapien
taaaacacagacactctcaacatca

SEQ ID NO: 762546 - DNA, 25 bp, Homo sapien
aggcagtccacgttcccagttggga

SEQ ID NO: 762547 - DNA, 25 bp, Homo sapien
tgtaccctctcatttgacctataaa

SEQ ID NO: 762548 - DNA, 25 bp, Homo sapien
catattcatattgtaccctctcatt

SEQ ID NO: 762549 - DNA, 25 bp, Homo sapien
tgcttatctcggtggaaggtgcttg

SEQ ID NO: 762550 - DNA, 25 bp, Homo sapien
gggagctgcatgtagcactgcttat

SEQ ID NO: 762551 - DNA, 25 bp, Homo sapien
tgcattttccctccgttaccactag

SEQ ID NO: 762552 - DNA, 25 bp, Homo sapien
gctttccagccggaggtagctgccc

SEQ ID NO: 762553 - DNA, 25 bp, Homo sapien
agtaataacaagagcagcaggtacc

SEQ ID NO: 762554 - DNA, 25 bp, Homo sapien
tggcgatactgacagtaataacaag

SEQ ID NO: 762555 - DNA, 25 bp, Homo sapien
aataacaagagcagcaggtaccatt

SEQ ID NO: 762556 - DNA, 25 bp, Homo sapien
aaggctcctgatggcgatactgaca

SEQ ID NO: 762557 - DNA, 25 bp, Homo sapien
aattccatacttgggcacagtaagc

SEQ ID NO: 762558 - DNA, 25 bp, Homo sapien
ctgcaattccatacttgggcacagt

SEQ ID NO: 762559 - DNA, 25 bp, Homo sapien
gcaattccatacttgggcacagtaa

SEQ ID NO: 762560 - DNA, 25 bp, Homo sapien
cacagtaagcacagaatcagagatg

SEQ ID NO: 762561 - DNA, 25 bp, Homo sapien
acatgctgacaccaccagaggcctt

SEQ ID NO: 762562 - DNA, 25 bp, Homo sapien
gctgacaccaccagaggccttgctg

SEQ ID NO: 762563 - DNA, 25 bp, Homo sapien
cacaaacatgctgacaccaccagag

SEQ ID NO: 762564 - DNA, 25 bp, Homo sapien
accaccagaggccttgctggacgca

SEQ ID NO: 762565 - DNA, 25 bp, Homo sapien
tggcaggttgctgggcctcacgcgg

SEQ ID NO: 762566 - DNA, 25 bp, Homo sapien
actggcaggttgctgggcctcacgc

SEQ ID NO: 762567 - DNA, 25 bp, Homo sapien
ctttgctctggttggaggccactga

SEQ ID NO: 762568 - DNA, 25 bp, Homo sapien
tgactggcaggttgctgggcctcac

SEQ ID NO: 762569 - DNA, 25 bp, Homo sapien
ggacactcgtgagcaacagctgccg

SEQ ID NO: 762570 - DNA, 25 bp, Homo sapien
gtggacactcgtgagcaacagctgc

SEQ ID NO: 762571 - DNA, 25 bp, Homo sapien
actcgtgagcaacagctgccgactt

SEQ ID NO: 762572 - DNA, 25 bp, Homo sapien
acactcgtgagcaacagctgccgac

SEQ ID NO: 762573 - DNA, 25 bp, Homo sapien
ttccgggccctgggctttcagggca

SEQ ID NO: 762574 - DNA, 25 bp, Homo sapien
aggtggctgcagggggccgcccagg

SEQ ID NO: 762575 - DNA, 25 bp, Homo sapien
gcagggggccgcccagggtcagcac

SEQ ID NO: 762576 - DNA, 25 bp, Homo sapien
gctgcagggggccgcccagggtcag

SEQ ID NO: 762577 - DNA, 25 bp, Homo sapien
tcctcctccatggtgagaggtgggc

SEQ ID NO: 762578 - DNA, 25 bp, Homo sapien
gcagggactcccctgagggcccagg

SEQ ID NO: 762579 - DNA, 25 bp, Homo sapien
tccatggtgagaggtgggcttttac

SEQ ID NO: 762580 - DNA, 25 bp, Homo sapien
cctccatggtgagaggtgggctttt

SEQ ID NO: 762581 - DNA, 25 bp, Homo sapien
ctgacatcatctgaatcgtagaggc

SEQ ID NO: 762582 - DNA, 25 bp, Homo sapien
cggagaggaaagcatcatcgtggtc

SEQ ID NO: 762583 - DNA, 25 bp, Homo sapien
catctgaatcgtagaggcaactggg

SEQ ID NO: 762584 - DNA, 25 bp, Homo sapien
acatcatctgaatcgtagaggcaac

SEQ ID NO: 762585 - DNA, 25 bp, Homo sapien
tgccgcttgctgaagatcgtgaccg

SEQ ID NO: 762586 - DNA, 25 bp, Homo sapien
gcttgctgaagatcgtgaccgccac

SEQ ID NO: 762587 - DNA, 25 bp, Homo sapien
ttgctgaagatcgtgaccgccactc

SEQ ID NO: 762588 - DNA, 25 bp, Homo sapien
ccgcttgctgaagatcgtgaccgcc

SEQ ID NO: 762589 - DNA, 25 bp, Homo sapien
ccaggtcgtggtacttctgcatctc

SEQ ID NO: 762590 - DNA, 25 bp, Homo sapien
ggctgatggtccagttatcctggta

SEQ ID NO: 762591 - DNA, 25 bp, Homo sapien
tgatggtccagttatcctggtaggg

SEQ ID NO: 762592 - DNA, 25 bp, Homo sapien
ggccaggtcgtggtacttctgcatc

SEQ ID NO: 762593 - DNA, 25 bp, Homo sapien
cttgttgcaagtgggccaccttcac

SEQ ID NO: 762594 - DNA, 25 bp, Homo sapien
cactcccacgatccgttgtacactc

SEQ ID NO: 762595 - DNA, 25 bp, Homo sapien
gctccactcccacgatccgttgtac

SEQ ID NO: 762596 - DNA, 25 bp, Homo sapien
tgtgtgtacccccttgtgggagaag

SEQ ID NO: 762597 - DNA, 25 bp, Homo sapien
gctgtgtgtacccccttgtgggaga

SEQ ID NO: 762598 - DNA, 25 bp, Homo sapien
ggcagcagcagggctgcccactggt

SEQ ID NO: 762599 - DNA, 25 bp, Homo sapien
agcagcagggctgcccactggtcac

SEQ ID NO: 762600 - DNA, 25 bp, Homo sapien
cagcagcagggctgcccactggtca

SEQ ID NO: 762601 - DNA, 25 bp, Homo sapien
gcagcagcagggctgcccactggtc

SEQ ID NO: 762602 - DNA, 25 bp, Homo sapien
cactctcagtcggtcacccactcct

SEQ ID NO: 762603 - DNA, 25 bp, Homo sapien
actctcagtcggtcacccactcctt

SEQ ID NO: 762604 - DNA, 25 bp, Homo sapien
ccactctcagtcggtcacccactcc

SEQ ID NO: 762605 - DNA, 25 bp, Homo sapien
aggaggaagcatccgagtatgtgta

SEQ ID NO: 762606 - DNA, 25 bp, Homo sapien
gacggggtgggaccatagactttgc

SEQ ID NO: 762607 - DNA, 25 bp, Homo sapien
gtgggaccatagactttgccaaaaa

SEQ ID NO: 762608 - DNA, 25 bp, Homo sapien
tccgagtatgtgtaggaggaggacg

SEQ ID NO: 762609 - DNA, 25 bp, Homo sapien
gccgtagggggcctgctctgctgcc

SEQ ID NO: 762610 - DNA, 25 bp, Homo sapien
cgtagggggcctgctctgctgccct

SEQ ID NO: 762611 - DNA, 25 bp, Homo sapien
taggggccgtagggggcctgctctg

SEQ ID NO: 762612 - DNA, 25 bp, Homo sapien
ggggccgtagggggcctgctctgct

SEQ ID NO: 762613 - DNA, 25 bp, Homo sapien
tcagatctcttgcaccagaaggtgg

SEQ ID NO: 762614 - DNA, 25 bp, Homo sapien
aaacagatcgccttggaaggcatcc

SEQ ID NO: 762615 - DNA, 25 bp, Homo sapien
ctttcagatctcttgcaccagaagg

SEQ ID NO: 762616 - DNA, 25 bp, Homo sapien
aggaaacagatcgccttggaaggca

SEQ ID NO: 762617 - DNA, 25 bp, Homo sapien
accacgatgactgaggggcctggta

SEQ ID NO: 762618 - DNA, 25 bp, Homo sapien
tgggagggaccacgatgactgaggg

SEQ ID NO: 762619 - DNA, 25 bp, Homo sapien
gttgggagggaccacgatgactgag

SEQ ID NO: 762620 - DNA, 25 bp, Homo sapien
gagggaccacgatgactgaggggcc

SEQ ID NO: 762621 - DNA, 25 bp, Homo sapien
tccagtgcgggatccatgtccgtgg

SEQ ID NO: 762622 - DNA, 25 bp, Homo sapien
gcgggatccatgtccgtggggttcc

SEQ ID NO: 762623 - DNA, 25 bp, Homo sapien
catttgagcgtggtggggtcctcca

SEQ ID NO: 762624 - DNA, 25 bp, Homo sapien
aaggggaagctgttcccatcacaca

SEQ ID NO: 762625 - DNA, 25 bp, Homo sapien
gccggcactagtccagggcgcatgc

SEQ ID NO: 762626 - DNA, 25 bp, Homo sapien
tctccagttccctgagaccgtcctc

SEQ ID NO: 762627 - DNA, 25 bp, Homo sapien
agttccctgagaccgtcctcggctt

SEQ ID NO: 762628 - DNA, 25 bp, Homo sapien
ggcactagtccagggcgcatgcagt

SEQ ID NO: 762629 - DNA, 25 bp, Homo sapien
gaagatgtgtgtatagtgggcctgg

SEQ ID NO: 762630 - DNA, 25 bp, Homo sapien
gatgtgtgtatagtgggcctggagg

SEQ ID NO: 762631 - DNA, 25 bp, Homo sapien
tgtgtgtatagtgggcctggagggc

SEQ ID NO: 762632 - DNA, 25 bp, Homo sapien
ttggaggggaagatgtgtgtatagt

SEQ ID NO: 762633 - DNA, 25 bp, Homo sapien
cccacacttcatggtatgtacaggg

SEQ ID NO: 762634 - DNA, 25 bp, Homo sapien
ctgaaggtcccacacttcatggtat

SEQ ID NO: 762635 - DNA, 25 bp, Homo sapien
ggtcccacacttcatggtatgtaca

SEQ ID NO: 762636 - DNA, 25 bp, Homo sapien
tctgaaggtcccacacttcatggta

SEQ ID NO: 762637 - DNA, 25 bp, Homo sapien
ctcctgccctccgacggcgtctcca

SEQ ID NO: 762638 - DNA, 25 bp, Homo sapien
tccgacggcgtctccaggccccaaa

SEQ ID NO: 762639 - DNA, 25 bp, Homo sapien
agctcctgccctccgacggcgtctc

SEQ ID NO: 762640 - DNA, 25 bp, Homo sapien
cctccgacggcgtctccaggcccca

SEQ ID NO: 762641 - DNA, 25 bp, Homo sapien
gaattgtctccccagaagtaagatt

SEQ ID NO: 762642 - DNA, 25 bp, Homo sapien
ttgtctccccagaagtaagattact

SEQ ID NO: 762643 - DNA, 25 bp, Homo sapien
tgtctccccagaagtaagattactg

SEQ ID NO: 762644 - DNA, 25 bp, Homo sapien
ttattgtcagaaactccaaaaagtc

SEQ ID NO: 762645 - DNA, 25 bp, Homo sapien
ctattaaacatgtagaatgctttcc

SEQ ID NO: 762646 - DNA, 25 bp, Homo sapien
gcattttccttacttttattgtcag

SEQ ID NO: 762647 - DNA, 25 bp, Homo sapien
gtagaatgctttcctaatttctctt

SEQ ID NO: 762648 - DNA, 25 bp, Homo sapien
ctgcacgaacatggccagtgtcttc

SEQ ID NO: 762649 - DNA, 25 bp, Homo sapien
tatgtcatatcatgacatactgcta

SEQ ID NO: 762650 - DNA, 25 bp, Homo sapien
gtatgtcatatcatgacatactgct

SEQ ID NO: 762651 - DNA, 25 bp, Homo sapien
cagaggctgagagaagtttccagtt

SEQ ID NO: 762652 - DNA, 25 bp, Homo sapien
aaataatagtgcatgcatcaagtgc

SEQ ID NO: 762653 - DNA, 25 bp, Homo sapien
agtgcaatgggaagctcttccagag

SEQ ID NO: 762654 - DNA, 25 bp, Homo sapien
aatgggaagctcttccagaggctga

SEQ ID NO: 762655 - DNA, 25 bp, Homo sapien
ctgaaaagaaggcaaggggtcaacg

SEQ ID NO: 762656 - DNA, 25 bp, Homo sapien
agcccagaatgctggaaccgtaaca

SEQ ID NO: 762657 - DNA, 25 bp, Homo sapien
gctggaaccgtaacagaataggaaa

SEQ ID NO: 762658 - DNA, 25 bp, Homo sapien
gagcgtggatgcagaaaagagccca

SEQ ID NO: 762659 - DNA, 25 bp, Homo sapien
tccgtcaggccaccttgagagtgct

SEQ ID NO: 762660 - DNA, 25 bp, Homo sapien
gatactgtcactttgcacactgtaa

SEQ ID NO: 762661 - DNA, 25 bp, Homo sapien
tagacctgtcctgaggaagcctgtg

SEQ ID NO: 762662 - DNA, 25 bp, Homo sapien
taacatgcaaaactcgcagcacgcc

SEQ ID NO: 762663 - DNA, 25 bp, Homo sapien
acacagttgaaaggcgctgaaagcg

SEQ ID NO: 762664 - DNA, 25 bp, Homo sapien
gaaagcgttctgaaacgcttccatc

SEQ ID NO: 762665 - DNA, 25 bp, Homo sapien
tcagtccgtagtcagtgagtacaac

SEQ ID NO: 762666 - DNA, 25 bp, Homo sapien
cttctgtagctcaggcgaggaagct

SEQ ID NO: 762667 - DNA, 25 bp, Homo sapien
aatgttagagttacaatacgactga

SEQ ID NO: 762668 - DNA, 25 bp, Homo sapien
gagttacaatacgactgagcaattt

SEQ ID NO: 762669 - DNA, 25 bp, Homo sapien
tagagttacaatacgactgagcaat

SEQ ID NO: 762670 - DNA, 25 bp, Homo sapien
tgttagagttacaatacgactgagc

SEQ ID NO: 762671 - DNA, 25 bp, Homo sapien
tcctgcattattggactctcacatt

SEQ ID NO: 762672 - DNA, 25 bp, Homo sapien
ctgcattattggactctcacattct

SEQ ID NO: 762673 - DNA, 25 bp, Homo sapien
ctctctcttgtggactcttctccag

SEQ ID NO: 762674 - DNA, 25 bp, Homo sapien
tctctctcttgtggactcttctcca

SEQ ID NO: 762675 - DNA, 25 bp, Homo sapien
gatctgttgtccacaaaggcaagca

SEQ ID NO: 762676 - DNA, 25 bp, Homo sapien
ggctatgggtatgtggagtgtccaa

SEQ ID NO: 762677 - DNA, 25 bp, Homo sapien
gacgtaggttctcagaagggatctg

SEQ ID NO: 762678 - DNA, 25 bp, Homo sapien
caaaaggaccatcatggacgtaggt

SEQ ID NO: 762679 - DNA, 25 bp, Homo sapien
acccagaggccgcagtagtggcctg

SEQ ID NO: 762680 - DNA, 25 bp, Homo sapien
gctgcggctcctctcaaaatgagaa

SEQ ID NO: 762681 - DNA, 25 bp, Homo sapien
gacccagaaatcgtttatttcacat

SEQ ID NO: 762682 - DNA, 25 bp, Homo sapien
cagcaaatggttttggtagacccag

SEQ ID NO: 762683 - DNA, 25 bp, Homo sapien
tttggggtcccagcagcctgttgtg

SEQ ID NO: 762684 - DNA, 25 bp, Homo sapien
catttggggtcccagcagcctgttg

SEQ ID NO: 762685 - DNA, 25 bp, Homo sapien
tcccagcagcctgttgtgtccagca

SEQ ID NO: 762686 - DNA, 25 bp, Homo sapien
ggtcccagcagcctgttgtgtccag

SEQ ID NO: 762687 - DNA, 25 bp, Homo sapien
cctgctggcgagactcctggttgag

SEQ ID NO: 762688 - DNA, 25 bp, Homo sapien
ttcaaggccagaacgcacagggacg

SEQ ID NO: 762689 - DNA, 25 bp, Homo sapien
gccctatgggggtggcatccaacat

SEQ ID NO: 762690 - DNA, 25 bp, Homo sapien
tgactggaggccttgcgttcaaatc

SEQ ID NO: 762691 - DNA, 25 bp, Homo sapien
ccttcactcatacgtgtttctctct

SEQ ID NO: 762692 - DNA, 25 bp, Homo sapien
ctcatacgtgtttctctctctgaca

SEQ ID NO: 762693 - DNA, 25 bp, Homo sapien
tcactcatacgtgtttctctctctg

SEQ ID NO: 762694 - DNA, 25 bp, Homo sapien
gccttcactcatacgtgtttctctc

SEQ ID NO: 762695 - DNA, 25 bp, Homo sapien
tggctgctttattgctggatcacct

SEQ ID NO: 762696 - DNA, 25 bp, Homo sapien
cccaaaccccttggctgctttattg

SEQ ID NO: 762697 - DNA, 25 bp, Homo sapien
accccttggctgctttattgctgga

SEQ ID NO: 762698 - DNA, 25 bp, Homo sapien
ctccagtgtgcacgccacacccaaa

SEQ ID NO: 762699 - DNA, 25 bp, Homo sapien
tctcactgtaaagccaaggtttaca

SEQ ID NO: 762700 - DNA, 25 bp, Homo sapien
ttcacatctgtgatcagcccgtctt

SEQ ID NO: 762701 - DNA, 25 bp, Homo sapien
gccaaggtttacacagcagagctcc

SEQ ID NO: 762702 - DNA, 25 bp, Homo sapien
tcactgcagccctggttacctgacg

SEQ ID NO: 762703 - DNA, 25 bp, Homo sapien
actaaatgtcattactcccatcacc

SEQ ID NO: 762704 - DNA, 25 bp, Homo sapien
tacactaaatgtcattactcccatc

SEQ ID NO: 762705 - DNA, 25 bp, Homo sapien
tatacactaaatgtcattactccca

SEQ ID NO: 762706 - DNA, 25 bp, Homo sapien
ctatacactaaatgtcattactccc

SEQ ID NO: 762707 - DNA, 25 bp, Homo sapien
tgatccatgaattaacacagggctg

SEQ ID NO: 762708 - DNA, 25 bp, Homo sapien
ttccctacaagatatggtgatgtcc

SEQ ID NO: 762709 - DNA, 25 bp, Homo sapien
ctacaagatatggtgatgtccactg

SEQ ID NO: 762710 - DNA, 25 bp, Homo sapien
tcatacttcaagactaagttcctct

SEQ ID NO: 762711 - DNA, 25 bp, Homo sapien
tacttcaagactaagttcctctctc

SEQ ID NO: 762712 - DNA, 25 bp, Homo sapien
ctccactgagaggtgcaggcaccag

SEQ ID NO: 762713 - DNA, 25 bp, Homo sapien
ggctgcttcccctccactgagaggt

SEQ ID NO: 762714 - DNA, 25 bp, Homo sapien
caccaggaggaagggagtaggctgc

SEQ ID NO: 762715 - DNA, 25 bp, Homo sapien
agggagtaggctgcagaagacccat

SEQ ID NO: 762716 - DNA, 25 bp, Homo sapien
catctgggttgaggagaagggttgg

SEQ ID NO: 762717 - DNA, 25 bp, Homo sapien
aacaggctgctgtcacacagctcct

SEQ ID NO: 762718 - DNA, 25 bp, Homo sapien
caacgcggaacaggctgctgtcaca

SEQ ID NO: 762719 - DNA, 25 bp, Homo sapien
ggaggagagaagctccagggcatct

SEQ ID NO: 762720 - DNA, 25 bp, Homo sapien
tttgcatcattctgaagtgggcctt

SEQ ID NO: 762721 - DNA, 25 bp, Homo sapien
ctgacatagccctcttttgcatcat

SEQ ID NO: 762722 - DNA, 25 bp, Homo sapien
tagccctcttttgcatcattctgaa

SEQ ID NO: 762723 - DNA, 25 bp, Homo sapien
tgccaaacttgtccccacctggcca

SEQ ID NO: 762724 - DNA, 25 bp, Homo sapien
agtgttctgtgacgccaggaacctg

SEQ ID NO: 762725 - DNA, 25 bp, Homo sapien
agtaagtgttctgtgacgccaggaa

SEQ ID NO: 762726 - DNA, 25 bp, Homo sapien
gtaatgactggtcagtaagtgttct

SEQ ID NO: 762727 - DNA, 25 bp, Homo sapien
taatgactggtcagtaagtgttctg

SEQ ID NO: 762728 - DNA, 25 bp, Homo sapien
tcatccaggtcgtaggatgtatgca

SEQ ID NO: 762729 - DNA, 25 bp, Homo sapien
ggtgttctcccgatttatcagtgga

SEQ ID NO: 762730 - DNA, 25 bp, Homo sapien
gatgtatgcatgttcttgcaattga

SEQ ID NO: 762731 - DNA, 25 bp, Homo sapien
tatcagtggaccttgttgaacaaag

SEQ ID NO: 762732 - DNA, 25 bp, Homo sapien
tggatgacaaccctccatgacacag

SEQ ID NO: 762733 - DNA, 25 bp, Homo sapien
gacacagccagtgccctatggtggg

SEQ ID NO: 762734 - DNA, 25 bp, Homo sapien
catcagctcctagaaggctgcgata

SEQ ID NO: 762735 - DNA, 25 bp, Homo sapien
ggctgtctggcgttacactggatga

SEQ ID NO: 762736 - DNA, 25 bp, Homo sapien
cacttagagggcacaagctccatag

SEQ ID NO: 762737 - DNA, 25 bp, Homo sapien
cccagaatagggagcaatgtgttcc

SEQ ID NO: 762738 - DNA, 25 bp, Homo sapien
agcggcgatccaccttcaaagcagg

SEQ ID NO: 762739 - DNA, 25 bp, Homo sapien
tccctggtgaatctggcccagcaag

SEQ ID NO: 762740 - DNA, 25 bp, Homo sapien
tgcattttggtgtttggtcacccga

SEQ ID NO: 762741 - DNA, 25 bp, Homo sapien
taagggtaccttccatctcaatggc

SEQ ID NO: 762742 - DNA, 25 bp, Homo sapien
caagcctttgtttcgagaaagggct

SEQ ID NO: 762743 - DNA, 25 bp, Homo sapien
ccgatggccgattgtaagggtacct

SEQ ID NO: 762744 - DNA, 25 bp, Homo sapien
tccttgaacaaagaagctattttga

SEQ ID NO: 762745 - DNA, 25 bp, Homo sapien
gttcacaaaaggccactgcgcaggc

SEQ ID NO: 762746 - DNA, 25 bp, Homo sapien
tctggtccttgaacaaagaagctat

SEQ ID NO: 762747 - DNA, 25 bp, Homo sapien
ttcacaaaaggccactgcgcaggct

SEQ ID NO: 762748 - DNA, 25 bp, Homo sapien
agagccaatcagagggtaaggtgtg

SEQ ID NO: 762749 - DNA, 25 bp, Homo sapien
agccaatcagagggtaaggtgtgtt

SEQ ID NO: 762750 - DNA, 25 bp, Homo sapien
gagccaatcagagggtaaggtgtgt

SEQ ID NO: 762751 - DNA, 25 bp, Homo sapien
gagagccaatcagagggtaaggtgt

SEQ ID NO: 762752 - DNA, 25 bp, Homo sapien
tcttgcctagtctttgattggctga

SEQ ID NO: 762753 - DNA, 25 bp, Homo sapien
gagtttagcctaatgactatctcat

SEQ ID NO: 762754 - DNA, 25 bp, Homo sapien
cctgtgttctcagtaagggcagaaa

SEQ ID NO: 762755 - DNA, 25 bp, Homo sapien
ttaaagagtattcttgcctagtctt

SEQ ID NO: 762756 - DNA, 25 bp, Homo sapien
caaatattgtagtcccctctcttct

SEQ ID NO: 762757 - DNA, 25 bp, Homo sapien
tcttaacactacaaatattgtagtc

SEQ ID NO: 762758 - DNA, 25 bp, Homo sapien
cactacaaatattgtagtcccctct

SEQ ID NO: 762759 - DNA, 25 bp, Homo sapien
taacactacaaatattgtagtcccc

SEQ ID NO: 762760 - DNA, 25 bp, Homo sapien
gctccagttagatgttttgcagcca

SEQ ID NO: 762761 - DNA, 25 bp, Homo sapien
tcatccctgcttctaaggtatagtc

SEQ ID NO: 762762 - DNA, 25 bp, Homo sapien
gcttctaaggtatagtcctccaggg

SEQ ID NO: 762763 - DNA, 25 bp, Homo sapien
tgtggggtttgtaccaatgaacttc

SEQ ID NO: 762764 - DNA, 25 bp, Homo sapien
cctcatggtcacagtgcatgacagc

SEQ ID NO: 762765 - DNA, 25 bp, Homo sapien
tcatggtcacagtgcatgacagccc

SEQ ID NO: 762766 - DNA, 25 bp, Homo sapien
acctcatggtcacagtgcatgacag

SEQ ID NO: 762767 - DNA, 25 bp, Homo sapien
ctcatggtcacagtgcatgacagcc

SEQ ID NO: 762768 - DNA, 25 bp, Homo sapien
cctgtaagggtgtttgtgagaagtc

SEQ ID NO: 762769 - DNA, 25 bp, Homo sapien
catcctgggattagtggtccacagg

SEQ ID NO: 762770 - DNA, 25 bp, Homo sapien
gaagtctgaactgaaccggagtgtg

SEQ ID NO: 762771 - DNA, 25 bp, Homo sapien
taggtctagcccttaacaggactga

SEQ ID NO: 762772 - DNA, 25 bp, Homo sapien
tctttgcttcaggtcttcttgataa

SEQ ID NO: 762773 - DNA, 25 bp, Homo sapien
tggacagatcaccaccctctctttg

SEQ ID NO: 762774 - DNA, 25 bp, Homo sapien
tcaggtcttcttgataaagggaaaa

SEQ ID NO: 762775 - DNA, 25 bp, Homo sapien
tttgcttcaggtcttcttgataaag

SEQ ID NO: 762776 - DNA, 25 bp, Homo sapien
tcagttccttatgatgcctgaggac

SEQ ID NO: 762777 - DNA, 25 bp, Homo sapien
aatactttcaaagcgtgtacactca

SEQ ID NO: 762778 - DNA, 25 bp, Homo sapien
tattcattgagttgcagtgccaggc

SEQ ID NO: 762779 - DNA, 25 bp, Homo sapien
gcctgaggacacactacatccatgt

SEQ ID NO: 762780 - DNA, 25 bp, Homo sapien
aatgagctccactctctggtcctga

SEQ ID NO: 762781 - DNA, 25 bp, Homo sapien
cacggtggctggctcaataaatctc

SEQ ID NO: 762782 - DNA, 25 bp, Homo sapien
cattagctcctacacatgccacggt

SEQ ID NO: 762783 - DNA, 25 bp, Homo sapien
tgtaaatggttcctccctcaggact

SEQ ID NO: 762784 - DNA, 25 bp, Homo sapien
agcactcggaacacagcgagcactc

SEQ ID NO: 762785 - DNA, 25 bp, Homo sapien
tccggtgccagatgctccctcattt

SEQ ID NO: 762786 - DNA, 25 bp, Homo sapien
tcagcgcagctaattgggaggaagc

SEQ ID NO: 762787 - DNA, 25 bp, Homo sapien
catttcctacaatcctcgtcttcag

SEQ ID NO: 762788 - DNA, 25 bp, Homo sapien
gtcctgatctgccggcacagaacat

SEQ ID NO: 762789 - DNA, 25 bp, Homo sapien
ggtcctgatctgccggcacagaaca

SEQ ID NO: 762790 - DNA, 25 bp, Homo sapien
tgctgttccattttcatgttagaat

SEQ ID NO: 762791 - DNA, 25 bp, Homo sapien
tagaaacgcccatcggctgccttaa

SEQ ID NO: 762792 - DNA, 25 bp, Homo sapien
caggtgatatctgtaccaagaagag

SEQ ID NO: 762793 - DNA, 25 bp, Homo sapien
tccattttcatgttagaatcaggtg

SEQ ID NO: 762794 - DNA, 25 bp, Homo sapien
tatgagaacaatatctgggccccga

SEQ ID NO: 762795 - DNA, 25 bp, Homo sapien
cagcattgatctgtgaggctactac

SEQ ID NO: 762796 - DNA, 25 bp, Homo sapien
ccccgaggaagctgtaatggaaggt

SEQ ID NO: 762797 - DNA, 25 bp, Homo sapien
tactacagatgcgttgttgaacact

SEQ ID NO: 762798 - DNA, 25 bp, Homo sapien
aaattatatcttgcccctgagccag

SEQ ID NO: 762799 - DNA, 25 bp, Homo sapien
aaaattatatcttgcccctgagcca

SEQ ID NO: 762800 - DNA, 25 bp, Homo sapien
aattatatcttgcccctgagccaga

SEQ ID NO: 762801 - DNA, 25 bp, Homo sapien
caggagccagagttgtggtatttcc

SEQ ID NO: 762802 - DNA, 25 bp, Homo sapien
tgcaatgcttagtggcagcgagtgt

SEQ ID NO: 762803 - DNA, 25 bp, Homo sapien
aatttcaccaacaacgttgccatcg

SEQ ID NO: 762804 - DNA, 25 bp, Homo sapien
actgcctttgagtgacccgcactga

SEQ ID NO: 762805 - DNA, 25 bp, Homo sapien
ttctgcatgtaaaggttgagaaaca

SEQ ID NO: 762806 - DNA, 25 bp, Homo sapien
cgttctgcatgtaaaggttgagaaa

SEQ ID NO: 762807 - DNA, 25 bp, Homo sapien
agacagtggtaatggggcctcgttc

SEQ ID NO: 762808 - DNA, 25 bp, Homo sapien
taatggggcctcgttctgcatgtaa

SEQ ID NO: 762809 - DNA, 25 bp, Homo sapien
tcagaatctagactgggagatatac

SEQ ID NO: 762810 - DNA, 25 bp, Homo sapien
catcaatgtatctgcattacacagt

SEQ ID NO: 762811 - DNA, 25 bp, Homo sapien
catgtttctcatgaatgcattgatg

SEQ ID NO: 762812 - DNA, 25 bp, Homo sapien
taagatgttcctaattgtacctaac

SEQ ID NO: 762813 - DNA, 25 bp, Homo sapien
aaacctggaaatggataagcctgct

SEQ ID NO: 762814 - DNA, 25 bp, Homo sapien
acgacagaagtctgccagtcattga

SEQ ID NO: 762815 - DNA, 25 bp, Homo sapien
aatggataagcctgctgcagtgggc

SEQ ID NO: 762816 - DNA, 25 bp, Homo sapien
gaaacggagggaacacaacgacaga

SEQ ID NO: 762817 - DNA, 25 bp, Homo sapien
agaaatcaagcgcagggccggcact

SEQ ID NO: 762818 - DNA, 25 bp, Homo sapien
tatgttcccagagtaacccatcctg

SEQ ID NO: 762819 - DNA, 25 bp, Homo sapien
atcgactccatcacctgtagcaaag

SEQ ID NO: 762820 - DNA, 25 bp, Homo sapien
taagaactgtcctttatccatcgac

SEQ ID NO: 762821 - DNA, 25 bp, Homo sapien
ccacaggcactagggtatgttccca

SEQ ID NO: 762822 - DNA, 25 bp, Homo sapien
catggaggaaggtagactgggggta

SEQ ID NO: 762823 - DNA, 25 bp, Homo sapien
aaccaggaccagcaccagggtccag

SEQ ID NO: 762824 - DNA, 25 bp, Homo sapien
tagactgggggtaaccaggaccagc

SEQ ID NO: 762825 - DNA, 25 bp, Homo sapien
gactgggggtaaccaggaccagcac

SEQ ID NO: 762826 - DNA, 25 bp, Homo sapien
attcatggccatgaccaacctggca

SEQ ID NO: 762827 - DNA, 25 bp, Homo sapien
ttcacgtctgtgatctgctcctcct

SEQ ID NO: 762828 - DNA, 25 bp, Homo sapien
cagcccttgttcatggtggtattgc

SEQ ID NO: 762829 - DNA, 25 bp, Homo sapien
tctttactcagtgatgagatgggct

SEQ ID NO: 762830 - DNA, 25 bp, Homo sapien
tctgaacttctgagtaagagtggcc

SEQ ID NO: 762831 - DNA, 25 bp, Homo sapien
agtggcccagtctctctccttagca

SEQ ID NO: 762832 - DNA, 25 bp, Homo sapien
tgaacttctgagtaagagtggccca

SEQ ID NO: 762833 - DNA, 25 bp, Homo sapien
taagagtggcccagtctctctcctt

SEQ ID NO: 762834 - DNA, 25 bp, Homo sapien
caagtccactagaggacatggtctg

SEQ ID NO: 762835 - DNA, 25 bp, Homo sapien
cactagaggacatggtctgagccat

SEQ ID NO: 762836 - DNA, 25 bp, Homo sapien
gaatccggctaccaagtccactaga

SEQ ID NO: 762837 - DNA, 25 bp, Homo sapien
taatgaaggaatccggctaccaagt

SEQ ID NO: 762838 - DNA, 25 bp, Homo sapien
ggtgaattgcctttcatccacagtc

SEQ ID NO: 762839 - DNA, 25 bp, Homo sapien
acagaaaatgcaagaaccttgatta

SEQ ID NO: 762840 - DNA, 25 bp, Homo sapien
tgcactttatttcgaactacagaga

SEQ ID NO: 762841 - DNA, 25 bp, Homo sapien
atttctacggctttgtcttcagtgc

SEQ ID NO: 762842 - DNA, 25 bp, Homo sapien
catttgcttacacccacagtgggaa

SEQ ID NO: 762843 - DNA, 25 bp, Homo sapien
catgtataccatgttgttctacacc

SEQ ID NO: 762844 - DNA, 25 bp, Homo sapien
aatagtccaattaacagtatacagc

SEQ ID NO: 762845 - DNA, 25 bp, Homo sapien
taaatgatagtcttcatccatcata

SEQ ID NO: 762846 - DNA, 25 bp, Homo sapien
tagctgaattgcagggaggctgttc

SEQ ID NO: 762847 - DNA, 25 bp, Homo sapien
ggatctctgccctgagtctacatgg

SEQ ID NO: 762848 - DNA, 25 bp, Homo sapien
gccacacagtcagcattatcctctg

SEQ ID NO: 762849 - DNA, 25 bp, Homo sapien
catagcgatatggtgtccagcaggg

SEQ ID NO: 762850 - DNA, 25 bp, Homo sapien
gcttcgagtcgaccatgcacatgaa

SEQ ID NO: 762851 - DNA, 25 bp, Homo sapien
agatgactgaaagaagaggcgtgca

SEQ ID NO: 762852 - DNA, 25 bp, Homo sapien
tttccactacaatgggcacaatggc

SEQ ID NO: 762853 - DNA, 25 bp, Homo sapien
cagtaattgcttgccaggaaagaga

SEQ ID NO: 762854 - DNA, 25 bp, Homo sapien
caccaaacagtaagttagaaccctg

SEQ ID NO: 762855 - DNA, 25 bp, Homo sapien
cagagagtttagttagaaccctgat

SEQ ID NO: 762856 - DNA, 25 bp, Homo sapien
gtccagcaggcctcaactttaacca

SEQ ID NO: 762857 - DNA, 25 bp, Homo sapien
ccagagagtttaagcatcaattttc

SEQ ID NO: 762858 - DNA, 25 bp, Homo sapien
ttccccacccattgaccactctaga

SEQ ID NO: 762859 - DNA, 25 bp, Homo sapien
caggggcaagaacatcgttggcttt

SEQ ID NO: 762860 - DNA, 25 bp, Homo sapien
ccattgaccactctagatcctccat

SEQ ID NO: 762861 - DNA, 25 bp, Homo sapien
tgggtcaggtttaacctggaagctg

SEQ ID NO: 762862 - DNA, 25 bp, Homo sapien
ttcctccttgtgcagatccaagtgt

SEQ ID NO: 762863 - DNA, 25 bp, Homo sapien
tccaagtgtcccaacacatcgggct

SEQ ID NO: 762864 - DNA, 25 bp, Homo sapien
tagcagcctcatccctcctgtgctg

SEQ ID NO: 762865 - DNA, 25 bp, Homo sapien
acacatcgggctgctgcactagcag

SEQ ID NO: 762866 - DNA, 25 bp, Homo sapien
catgacctggaggtatgtgggccat

SEQ ID NO: 762867 - DNA, 25 bp, Homo sapien
tctgaagtaatacagcttttccgtg

SEQ ID NO: 762868 - DNA, 25 bp, Homo sapien
aatttggttcgctcacactgaaggg

SEQ ID NO: 762869 - DNA, 25 bp, Homo sapien
aatcatatgctgttttgaggcttaa

SEQ ID NO: 762870 - DNA, 25 bp, Homo sapien
ggaagcttccgaagacccagagcta

SEQ ID NO: 762871 - DNA, 25 bp, Homo sapien
agccctctgcataagtgaattccaa

SEQ ID NO: 762872 - DNA, 25 bp, Homo sapien
tctgcataagtgaattccaactgtc

SEQ ID NO: 762873 - DNA, 25 bp, Homo sapien
ctgggcacttgcttacaggaagctt

SEQ ID NO: 762874 - DNA, 25 bp, Homo sapien
ttggagatatgcagggcagccacct

SEQ ID NO: 762875 - DNA, 25 bp, Homo sapien
agcattctgtgattgagttcatccc

SEQ ID NO: 762876 - DNA, 25 bp, Homo sapien
acagatatcctgtcctgcagtagag

SEQ ID NO: 762877 - DNA, 25 bp, Homo sapien
ggttgtatgcgggtagggcacagat

SEQ ID NO: 762878 - DNA, 25 bp, Homo sapien
gaaacgaacctcctgtatcagtggg

SEQ ID NO: 762879 - DNA, 25 bp, Homo sapien
cctcctgtatcagtgggcaacaggg

SEQ ID NO: 762880 - DNA, 25 bp, Homo sapien
tcctgcaataagaaacgaacctcct

SEQ ID NO: 762881 - DNA, 25 bp, Homo sapien
tgcaataagaaacgaacctcctgta

SEQ ID NO: 762882 - DNA, 25 bp, Homo sapien
ctctggacatgaagggagactgcag

SEQ ID NO: 762883 - DNA, 25 bp, Homo sapien
ccaactgctctttcactagactttc

SEQ ID NO: 762884 - DNA, 25 bp, Homo sapien
ggtgtctgcctgcatccaactgctc

SEQ ID NO: 762885 - DNA, 25 bp, Homo sapien
ttcagggtctctggacatgaaggga

SEQ ID NO: 762886 - DNA, 25 bp, Homo sapien
gcagatgttacacgatttttaacag

SEQ ID NO: 762887 - DNA, 25 bp, Homo sapien
tgggcttcagatttggaagcagatg

SEQ ID NO: 762888 - DNA, 25 bp, Homo sapien
tggaagcagatgttacacgattttt

SEQ ID NO: 762889 - DNA, 25 bp, Homo sapien
aggaaggttgggcttcagatttgga

SEQ ID NO: 762890 - DNA, 25 bp, Homo sapien
tcaaggagtaagtgacaaggaactg

SEQ ID NO: 762891 - DNA, 25 bp, Homo sapien
ttcaatgagcgtgtaaaggtggaag

SEQ ID NO: 762892 - DNA, 25 bp, Homo sapien
taagtgacaaggaactgcctcggca

SEQ ID NO: 762893 - DNA, 25 bp, Homo sapien
tgcctcggcaaaatgtgagattttc

SEQ ID NO: 762894 - DNA, 25 bp, Homo sapien
tgttgacatccctggaagggacctt

SEQ ID NO: 762895 - DNA, 25 bp, Homo sapien
ccttagaccatctacagttgttcat

SEQ ID NO: 762896 - DNA, 25 bp, Homo sapien
gaacagaggctataacatggacatt

SEQ ID NO: 762897 - DNA, 25 bp, Homo sapien
catggacattgttgacatccctgga

SEQ ID NO: 762898 - DNA, 25 bp, Homo sapien
acttagccaatgcaaggctcagtgc

SEQ ID NO: 762899 - DNA, 25 bp, Homo sapien
tagccaatgcaaggctcagtgctgt

SEQ ID NO: 762900 - DNA, 25 bp, Homo sapien
tgctgtggtagcatccacaggatac

SEQ ID NO: 762901 - DNA, 25 bp, Homo sapien
ggctcagtgctgtggtagcatccac

SEQ ID NO: 762902 - DNA, 25 bp, Homo sapien
cagcaggagcacaatatggatgaca

SEQ ID NO: 762903 - DNA, 25 bp, Homo sapien
gagcacaatatggatgacaatagca

SEQ ID NO: 762904 - DNA, 25 bp, Homo sapien
aatagcataactgtcctctccaggc

SEQ ID NO: 762905 - DNA, 25 bp, Homo sapien
taggtttggagctgaccatcatggc

SEQ ID NO: 762906 - DNA, 25 bp, Homo sapien
tcagctgttgtggcaataagaactg

SEQ ID NO: 762907 - DNA, 25 bp, Homo sapien
cagaagcaggacaaatatagctggc

SEQ ID NO: 762908 - DNA, 25 bp, Homo sapien
gagaaactggctgatcagccggaag

SEQ ID NO: 762909 - DNA, 25 bp, Homo sapien
tcagccggaagatgggcagagcatc

SEQ ID NO: 762910 - DNA, 25 bp, Homo sapien
tccagaccagatgatctccaacagg

SEQ ID NO: 762911 - DNA, 25 bp, Homo sapien
caacaggcataatgctggctgtgca

SEQ ID NO: 762912 - DNA, 25 bp, Homo sapien
tgatgtcatacacgaaaacctgcag

SEQ ID NO: 762913 - DNA, 25 bp, Homo sapien
ccttcgtggaagactggcgtgcaca

SEQ ID NO: 762914 - DNA, 25 bp, Homo sapien
tgcagtcattgacacatagacattg

SEQ ID NO: 762915 - DNA, 25 bp, Homo sapien
ctgcagtcattgacacatagacatt

SEQ ID NO: 762916 - DNA, 25 bp, Homo sapien
cacagcacaaagaggtccaagagct

SEQ ID NO: 762917 - DNA, 25 bp, Homo sapien
tccaagagctttcagggccaggatg

SEQ ID NO: 762918 - DNA, 25 bp, Homo sapien
cacttctgatgttcctgcttaggta

SEQ ID NO: 762919 - DNA, 25 bp, Homo sapien
ccatctgcacaggaagtcttagttc

SEQ ID NO: 762920 - DNA, 25 bp, Homo sapien
tttagctgtgacacccgacagaccc

SEQ ID NO: 762921 - DNA, 25 bp, Homo sapien
cctttagctgtgacacccgacagac

SEQ ID NO: 762922 - DNA, 25 bp, Homo sapien
tgcctgagaaacgaagggtaggccc

SEQ ID NO: 762923 - DNA, 25 bp, Homo sapien
ggatacaattttgcctgagaaacga

SEQ ID NO: 762924 - DNA, 25 bp, Homo sapien
agaagaggagggctggctctataac

SEQ ID NO: 762925 - DNA, 25 bp, Homo sapien
caaacttggcgtaaatctgagccct

SEQ ID NO: 762926 - DNA, 25 bp, Homo sapien
ggagggctggctctataactgtcaa

SEQ ID NO: 762927 - DNA, 25 bp, Homo sapien
tcagtcgagaggccggtagttggcg

SEQ ID NO: 762928 - DNA, 25 bp, Homo sapien
agctccgccgagtactgggcgcctg

SEQ ID NO: 762929 - DNA, 25 bp, Homo sapien
tctggagtccgtcctggcctcgccg

SEQ ID NO: 762930 - DNA, 25 bp, Homo sapien
cttgtggagtccttgcgtctagcgg

SEQ ID NO: 762931 - DNA, 25 bp, Homo sapien
gattccccgccaggtcagggaatgc

SEQ ID NO: 762932 - DNA, 25 bp, Homo sapien
agctggcttggaccgcagctcctgc

SEQ ID NO: 762933 - DNA, 25 bp, Homo sapien
caggagctggcttggaccgcagctc

SEQ ID NO: 762934 - DNA, 25 bp, Homo sapien
ggagctggcttggaccgcagctcct

SEQ ID NO: 762935 - DNA, 25 bp, Homo sapien
cgggcgctgcaagccatcccaggag

SEQ ID NO: 762936 - DNA, 25 bp, Homo sapien
agggccagggttgtgtgtgaaggag

SEQ ID NO: 762937 - DNA, 25 bp, Homo sapien
gggccagggttgtgtgtgaaggaga

SEQ ID NO: 762938 - DNA, 25 bp, Homo sapien
gcgaacttcgcacctaaccactggg

SEQ ID NO: 762939 - DNA, 25 bp, Homo sapien
agcacagggatgcggagggggcctt

SEQ ID NO: 762940 - DNA, 25 bp, Homo sapien
accactggggacactccagcacagg

SEQ ID NO: 762941 - DNA, 25 bp, Homo sapien
cctccgcgaacttcgcacctaacca

SEQ ID NO: 762942 - DNA, 25 bp, Homo sapien
tcaaagcggtggctgtcaacactcc

SEQ ID NO: 762943 - DNA, 25 bp, Homo sapien
ggtttcaaagcggtggctgtcaaca

SEQ ID NO: 762944 - DNA, 25 bp, Homo sapien
taggggtttcaaagcggtggctgtc

SEQ ID NO: 762945 - DNA, 25 bp, Homo sapien
agtaggggtttcaaagcggtggctg

SEQ ID NO: 762946 - DNA, 25 bp, Homo sapien
cgcaaagtggggctgcgcactcctc

SEQ ID NO: 762947 - DNA, 25 bp, Homo sapien
gcaagacccgccgtccgcatgcagc

SEQ ID NO: 762948 - DNA, 25 bp, Homo sapien
atggttttcccctggcgcaaagtgg

SEQ ID NO: 762949 - DNA, 25 bp, Homo sapien
gggctgcgcactcctccccgtcctt

SEQ ID NO: 762950 - DNA, 25 bp, Homo sapien
actcggcaatgtcccgatgggtcca

SEQ ID NO: 762951 - DNA, 25 bp, Homo sapien
cagccactcatggatcaactcggca

SEQ ID NO: 762952 - DNA, 25 bp, Homo sapien
tcctgaggacccatcctggcttcca

SEQ ID NO: 762953 - DNA, 25 bp, Homo sapien
catggatcaactcggcaatgtcccg

SEQ ID NO: 762954 - DNA, 25 bp, Homo sapien
tctgcacgtgtaacgtagagagcca

SEQ ID NO: 762955 - DNA, 25 bp, Homo sapien
gatgatgcctgtcctcgttggtgag

SEQ ID NO: 762956 - DNA, 25 bp, Homo sapien
gagaaccggaagtgccagtgtctga

SEQ ID NO: 762957 - DNA, 25 bp, Homo sapien
tgagtcctcagcacatcggatgatg

SEQ ID NO: 762958 - DNA, 25 bp, Homo sapien
tgctcacagccctgaggcactgtgg

SEQ ID NO: 762959 - DNA, 25 bp, Homo sapien
ccataatgtaaggaccactctgcag

SEQ ID NO: 762960 - DNA, 25 bp, Homo sapien
cagactgtcatccataatgtaagga

SEQ ID NO: 762961 - DNA, 25 bp, Homo sapien
cagcgatcgtcccaacagactgtca

SEQ ID NO: 762962 - DNA, 25 bp, Homo sapien
tctcaggtgctgttacatacttaac

SEQ ID NO: 762963 - DNA, 25 bp, Homo sapien
tcactgcagattcgtatttttaact

SEQ ID NO: 762964 - DNA, 25 bp, Homo sapien
tttaactgtctcaggtgctgttaca

SEQ ID NO: 762965 - DNA, 25 bp, Homo sapien
ctgcagattcgtatttttaactgtc

SEQ ID NO: 762966 - DNA, 25 bp, Homo sapien
tccagtctccacgtctttgcttgtc

SEQ ID NO: 762967 - DNA, 25 bp, Homo sapien
ctaacattcaccgcagtttccagtc

SEQ ID NO: 762968 - DNA, 25 bp, Homo sapien
aacattcaccgcagtttccagtctc

SEQ ID NO: 762969 - DNA, 25 bp, Homo sapien
cagtctccacgtctttgcttgtcct

SEQ ID NO: 762970 - DNA, 25 bp, Homo sapien
tttcttgaaagatgccataatcctg

SEQ ID NO: 762971 - DNA, 25 bp, Homo sapien
ttctttgtaggactctccctggatg

SEQ ID NO: 762972 - DNA, 25 bp, Homo sapien
aatcctgaacctttagctcccatag

SEQ ID NO: 762973 - DNA, 25 bp, Homo sapien
tctactggaaaccatacttggctgt

SEQ ID NO: 762974 - DNA, 25 bp, Homo sapien
ctctccccagttttctgccccaggg

SEQ ID NO: 762975 - DNA, 25 bp, Homo sapien
ctgccccagccaaagtcctctcccc

SEQ ID NO: 762976 - DNA, 25 bp, Homo sapien
cagccaaagtcctctccccagtttt

SEQ ID NO: 762977 - DNA, 25 bp, Homo sapien
tctccccagttttctgccccaggga

SEQ ID NO: 762978 - DNA, 25 bp, Homo sapien
cctgctgactgccttcctcctttgc

SEQ ID NO: 762979 - DNA, 25 bp, Homo sapien
ccctgctgactgccttcctcctttg

SEQ ID NO: 762980 - DNA, 25 bp, Homo sapien
tgctgactgccttcctcctttgctc

SEQ ID NO: 762981 - DNA, 25 bp, Homo sapien
ctgactgccttcctcctttgctcat

SEQ ID NO: 762982 - DNA, 25 bp, Homo sapien
ccattagtgacctgccagtgagggc

SEQ ID NO: 762983 - DNA, 25 bp, Homo sapien
caagtatgtcactggtcctgttgct

SEQ ID NO: 762984 - DNA, 25 bp, Homo sapien
ggtccactgtgctcgcatcctgagg

SEQ ID NO: 762985 - DNA, 25 bp, Homo sapien
tgcagtcaccacaagtcagcagaaa

SEQ ID NO: 762986 - DNA, 25 bp, Homo sapien
gaagataatactcgcctctccaggt

SEQ ID NO: 762987 - DNA, 25 bp, Homo sapien
tgtggcaaaggcaaactaaggttgc

SEQ ID NO: 762988 - DNA, 25 bp, Homo sapien
ggtagattctcagctagagccttca

SEQ ID NO: 762989 - DNA, 25 bp, Homo sapien
tggaagctgcaaaaagccaagaggt

SEQ ID NO: 762990 - DNA, 25 bp, Homo sapien
ttaaggggcgacctccgtgagccag

SEQ ID NO: 762991 - DNA, 25 bp, Homo sapien
cttaaggggcgacctccgtgagcca

SEQ ID NO: 762992 - DNA, 25 bp, Homo sapien
gcgacctccgtgagccagggcaggg

SEQ ID NO: 762993 - DNA, 25 bp, Homo sapien
ggggcgacctccgtgagccagggca

SEQ ID NO: 762994 - DNA, 25 bp, Homo sapien
gtgcttgtcctctacaacatcggcc

SEQ ID NO: 762995 - DNA, 25 bp, Homo sapien
gggcttttccaagttggagctgcaa

SEQ ID NO: 762996 - DNA, 25 bp, Homo sapien
gctgcaaagctagcttcagcttgtc

SEQ ID NO: 762997 - DNA, 25 bp, Homo sapien
ctagaagtgcttgtcctctacaaca

SEQ ID NO: 762998 - DNA, 25 bp, Homo sapien
tctttctgccagcaagcatgaccat

SEQ ID NO: 762999 - DNA, 25 bp, Homo sapien
cactggcatgagatacagacggcag

SEQ ID NO: 763000 - DNA, 25 bp, Homo sapien
cagtctgagtaagacaagacgactc

SEQ ID NO: 763001 - DNA, 25 bp, Homo sapien
accatagaggtgcaactgtccagta

SEQ ID NO: 763002 - DNA, 25 bp, Homo sapien
aaggagtcagatgggtagacagcac

SEQ ID NO: 763003 - DNA, 25 bp, Homo sapien
atattgtgacactgcagcaagagag

SEQ ID NO: 763004 - DNA, 25 bp, Homo sapien
gagagcagctgaaggagtcagatgg

SEQ ID NO: 763005 - DNA, 25 bp, Homo sapien
tattgtgacactgcagcaagagaga

SEQ ID NO: 763006 - DNA, 25 bp, Homo sapien
tctttagtgaatcctgtggtccagt

SEQ ID NO: 763007 - DNA, 25 bp, Homo sapien
gagagggcataaccaattgcattga

SEQ ID NO: 763008 - DNA, 25 bp, Homo sapien
ccctgtccatattgagcacatgaag

SEQ ID NO: 763009 - DNA, 25 bp, Homo sapien
tgatgacgccttttcactgatgttg

SEQ ID NO: 763010 - DNA, 25 bp, Homo sapien
gaatggaatgggtcattgaacctct

SEQ ID NO: 763011 - DNA, 25 bp, Homo sapien
tctgttcaagatgcccaactgccga

SEQ ID NO: 763012 - DNA, 25 bp, Homo sapien
tctcaacagagctatttgtcgctgc

SEQ ID NO: 763013 - DNA, 25 bp, Homo sapien
tcagtaacgccatggagagctggct

SEQ ID NO: 763014 - DNA, 25 bp, Homo sapien
ggttctcagttacagagctttcagc

SEQ ID NO: 763015 - DNA, 25 bp, Homo sapien
tcagcaatttgcttctgtggttctc

SEQ ID NO: 763016 - DNA, 25 bp, Homo sapien
cagcaatttgcttctgtggttctct

SEQ ID NO: 763017 - DNA, 25 bp, Homo sapien
cttgaaatcttcctcgacaccagac

SEQ ID NO: 763018 - DNA, 25 bp, Homo sapien
ttcttgaaatcttcctcgacaccag

SEQ ID NO: 763019 - DNA, 25 bp, Homo sapien
tgaaatcttcctcgacaccagacaa

SEQ ID NO: 763020 - DNA, 25 bp, Homo sapien
atcacaaatatggaagtttttggaa

SEQ ID NO: 763021 - DNA, 25 bp, Homo sapien
ttccttgcttggaacgccaacagta

SEQ ID NO: 763022 - DNA, 25 bp, Homo sapien
taatggtttccttcaaacatgtaga

SEQ ID NO: 763023 - DNA, 25 bp, Homo sapien
tggtttccttcaaacatgtagaagt

SEQ ID NO: 763024 - DNA, 25 bp, Homo sapien
tgcttggaacgccaacagtaatggt

SEQ ID NO: 763025 - DNA, 25 bp, Homo sapien
ttacacggattttcttacagagctc

SEQ ID NO: 763026 - DNA, 25 bp, Homo sapien
tgagggttaggagatccggcttcag

SEQ ID NO: 763027 - DNA, 25 bp, Homo sapien
acggattttcttacagagctctttg

SEQ ID NO: 763028 - DNA, 25 bp, Homo sapien
tgtgtttctgtctgatagtgagggt

SEQ ID NO: 763029 - DNA, 25 bp, Homo sapien
ctgggcataggcgccaagctggaaa

SEQ ID NO: 763030 - DNA, 25 bp, Homo sapien
cataggcgccaagctggaaaggaat

SEQ ID NO: 763031 - DNA, 25 bp, Homo sapien
agctggaaaggaattccgccctgag

SEQ ID NO: 763032 - DNA, 25 bp, Homo sapien
aggaattccgccctgaggatgtgca

SEQ ID NO: 763033 - DNA, 25 bp, Homo sapien
tgtggtcgcattccccactgatccc

SEQ ID NO: 763034 - DNA, 25 bp, Homo sapien
ctcagtgtgggcctgttcaaatggt

SEQ ID NO: 763035 - DNA, 25 bp, Homo sapien
ggcctgttcaaatggttattctgtg

SEQ ID NO: 763036 - DNA, 25 bp, Homo sapien
cttactcagtgtgggcctgttcaaa

SEQ ID NO: 763037 - DNA, 25 bp, Homo sapien
cacagtcttgcgaattagagggaca

SEQ ID NO: 763038 - DNA, 25 bp, Homo sapien
aagtaatgcccagttcgtgtgaatc

SEQ ID NO: 763039 - DNA, 25 bp, Homo sapien
aagccctcttaactgcacagtcttg

SEQ ID NO: 763040 - DNA, 25 bp, Homo sapien
tcgtgtgaatcatagtcctgaagca

SEQ ID NO: 763041 - DNA, 25 bp, Homo sapien
ggcttatgcagtgccagtgcagtgt

SEQ ID NO: 763042 - DNA, 25 bp, Homo sapien
atcaggagtgtccacgggagccctt

SEQ ID NO: 763043 - DNA, 25 bp, Homo sapien
gggagccctttgtgcaacttgtgac

SEQ ID NO: 763044 - DNA, 25 bp, Homo sapien
gtgtagatcccggtgcagacacaca

SEQ ID NO: 763045 - DNA, 25 bp, Homo sapien
gagagcatgcattcgtttcacagac

SEQ ID NO: 763046 - DNA, 25 bp, Homo sapien
tttcacagacgtatacccatccatc

SEQ ID NO: 763047 - DNA, 25 bp, Homo sapien
ttagccatagtgcagtttcccagtt

SEQ ID NO: 763048 - DNA, 25 bp, Homo sapien
tgggaacttaggcacaaactgcaaa

SEQ ID NO: 763049 - DNA, 25 bp, Homo sapien
ggaacgtctgcagaatggtctgggt

SEQ ID NO: 763050 - DNA, 25 bp, Homo sapien
tgctggcagaaagtcatgtgcagga

SEQ ID NO: 763051 - DNA, 25 bp, Homo sapien
gtgctgctggcagaaagtcatgtgc

SEQ ID NO: 763052 - DNA, 25 bp, Homo sapien
ggcctgagatctaagtacagggaac

SEQ ID NO: 763053 - DNA, 25 bp, Homo sapien
aggctccgcagaaagggaactgctt

SEQ ID NO: 763054 - DNA, 25 bp, Homo sapien
gggccacaaagtatgtctgttttga

SEQ ID NO: 763055 - DNA, 25 bp, Homo sapien
tcctgcagtgttggcaagggcctgt

SEQ ID NO: 763056 - DNA, 25 bp, Homo sapien
gaactgcttcagcaacgtctgcttg

SEQ ID NO: 763057 - DNA, 25 bp, Homo sapien
taagacaatcccttgggcaaaatct

SEQ ID NO: 763058 - DNA, 25 bp, Homo sapien
tgaaacaccataagcctggattata

SEQ ID NO: 763059 - DNA, 25 bp, Homo sapien
gaatgtttgtgaggcaactgcgctg

SEQ ID NO: 763060 - DNA, 25 bp, Homo sapien
tcaagatttaagacaatcccttggg

SEQ ID NO: 763061 - DNA, 25 bp, Homo sapien
tgatttcccttttatcaatgaggaa

SEQ ID NO: 763062 - DNA, 25 bp, Homo sapien
cactgctcagatgtggtggtctgga

SEQ ID NO: 763063 - DNA, 25 bp, Homo sapien
ggaaacactgctcagatgtggtggt

SEQ ID NO: 763064 - DNA, 25 bp, Homo sapien
tcaatgaggaaacactgctcagatg

SEQ ID NO: 763065 - DNA, 25 bp, Homo sapien
cattggttcacggaattcattgtct

SEQ ID NO: 763066 - DNA, 25 bp, Homo sapien
ggttcacggaattcattgtctccac

SEQ ID NO: 763067 - DNA, 25 bp, Homo sapien
ttcacggaattcattgtctccacca

SEQ ID NO: 763068 - DNA, 25 bp, Homo sapien
atgttcattggttcacggaattcat

SEQ ID NO: 763069 - DNA, 25 bp, Homo sapien
tcccataagattgttcctgtgggat

SEQ ID NO: 763070 - DNA, 25 bp, Homo sapien
caggctcaatttctcctagctggtt

SEQ ID NO: 763071 - DNA, 25 bp, Homo sapien
ccataagattgttcctgtgggattc

SEQ ID NO: 763072 - DNA, 25 bp, Homo sapien
aggctcaatttctcctagctggttc

SEQ ID NO: 763073 - DNA, 25 bp, Homo sapien
tcatgtaatttcgatgtgctcattt

SEQ ID NO: 763074 - DNA, 25 bp, Homo sapien
tctacgtgacattgatgttgcaaca

SEQ ID NO: 763075 - DNA, 25 bp, Homo sapien
tgtctgcaccaagcagtctacgtga

SEQ ID NO: 763076 - DNA, 25 bp, Homo sapien
tgtgattgtgtctgcaccaagcagt

SEQ ID NO: 763077 - DNA, 25 bp, Homo sapien
tatagaacctgttttggtagattta

SEQ ID NO: 763078 - DNA, 25 bp, Homo sapien
atagaacctgttttggtagatttat

SEQ ID NO: 763079 - DNA, 25 bp, Homo sapien
ggctttgccgtaatttcaactgctg

SEQ ID NO: 763080 - DNA, 25 bp, Homo sapien
cagacattcgtttatttttctgcag

SEQ ID NO: 763081 - DNA, 25 bp, Homo sapien
ctctgctgtctgtaatgcgatggct

SEQ ID NO: 763082 - DNA, 25 bp, Homo sapien
gatacagtctggaatagtccatcta

SEQ ID NO: 763083 - DNA, 25 bp, Homo sapien
gacttattatccctaaatctgccac

SEQ ID NO: 763084 - DNA, 25 bp, Homo sapien
cacctgacaggcaggcgaccgcaag

SEQ ID NO: 763085 - DNA, 25 bp, Homo sapien
atccctaaatctgccacctgacagg

SEQ ID NO: 763086 - DNA, 25 bp, Homo sapien
aggcgaccgcaagcctggttcccac

SEQ ID NO: 763087 - DNA, 25 bp, Homo sapien
tctagggagctcaacaggctgtttt

SEQ ID NO: 763088 - DNA, 25 bp, Homo sapien
ttttcttctagggagctcaacaggc

SEQ ID NO: 763089 - DNA, 25 bp, Homo sapien
ttcttctagggagctcaacaggctg

SEQ ID NO: 763090 - DNA, 25 bp, Homo sapien
tgaagtgacacgattgggggttttc

SEQ ID NO: 763091 - DNA, 25 bp, Homo sapien
aatggttgggcccataacattgttt

SEQ ID NO: 763092 - DNA, 25 bp, Homo sapien
tcacaatggttgggcccataacatt

SEQ ID NO: 763093 - DNA, 25 bp, Homo sapien
tccccactgtctgagcttcctccag

SEQ ID NO: 763094 - DNA, 25 bp, Homo sapien
ggttgggcccataacattgtttcat

SEQ ID NO: 763095 - DNA, 25 bp, Homo sapien
cctgaagttcaaaatgatgatcacg

SEQ ID NO: 763096 - DNA, 25 bp, Homo sapien
gaccctctcatcattgtcccttgtg

SEQ ID NO: 763097 - DNA, 25 bp, Homo sapien
tcaggcagctgctcgttgccagagt

SEQ ID NO: 763098 - DNA, 25 bp, Homo sapien
gattcgtccattacatgcactcaac

SEQ ID NO: 763099 - DNA, 25 bp, Homo sapien
ccattgctgttggtcttcactcact

SEQ ID NO: 763100 - DNA, 25 bp, Homo sapien
tgctaaacttttacataccccactc

SEQ ID NO: 763101 - DNA, 25 bp, Homo sapien
ttgaaagctggttgctaaactttta

SEQ ID NO: 763102 - DNA, 25 bp, Homo sapien
attgctgttggtcttcactcacttg

SEQ ID NO: 763103 - DNA, 25 bp, Homo sapien
tgagacaatgctgtagtttcaaaat

SEQ ID NO: 763104 - DNA, 25 bp, Homo sapien
tgaactttagtccttcatcagtagc

SEQ ID NO: 763105 - DNA, 25 bp, Homo sapien
caaaattgaactttagtccttcatc

SEQ ID NO: 763106 - DNA, 25 bp, Homo sapien
caatgctgtagtttcaaaattgaac

SEQ ID NO: 763107 - DNA, 25 bp, Homo sapien
ttccaatagcagagtactgccggtg

SEQ ID NO: 763108 - DNA, 25 bp, Homo sapien
gagaccatcgcgcaagtgcagaagg

SEQ ID NO: 763109 - DNA, 25 bp, Homo sapien
tgatcatagcctgccaagagaccat

SEQ ID NO: 763110 - DNA, 25 bp, Homo sapien
cagaaggtaagttgaaatgcggtca

SEQ ID NO: 763111 - DNA, 25 bp, Homo sapien
gattgatttccagatctaacaccct

SEQ ID NO: 763112 - DNA, 25 bp, Homo sapien
tgaattcactttcggtgagttcacc

SEQ ID NO: 763113 - DNA, 25 bp, Homo sapien
ttcctttggaagaccacctttgcaa

SEQ ID NO: 763114 - DNA, 25 bp, Homo sapien
tatgtgtttccccactaccctgtat

SEQ ID NO: 763115 - DNA, 25 bp, Homo sapien
tttcccaaagcgaagggcaggaatc

SEQ ID NO: 763116 - DNA, 25 bp, Homo sapien
ggttggaaagaacaagagatgagtc

SEQ ID NO: 763117 - DNA, 25 bp, Homo sapien
tgtgcccagagttaaataaatcaag

SEQ ID NO: 763118 - DNA, 25 bp, Homo sapien
gttccatgagtttccagagtgacag

SEQ ID NO: 763119 - DNA, 25 bp, Homo sapien
tggttcccctctgccagggtacagt

SEQ ID NO: 763120 - DNA, 25 bp, Homo sapien
ggtacagtgatttggagtcacctga

SEQ ID NO: 763121 - DNA, 25 bp, Homo sapien
gaagctgattctccctgcactaaag

SEQ ID NO: 763122 - DNA, 25 bp, Homo sapien
tggacttctgttcgtgacacctgaa

SEQ ID NO: 763123 - DNA, 25 bp, Homo sapien
ttgtagttcaagaaactccatttcc

SEQ ID NO: 763124 - DNA, 25 bp, Homo sapien
tgaacgcattccttacactggccat

SEQ ID NO: 763125 - DNA, 25 bp, Homo sapien
tgccatgagtccaatgaacgcattc

SEQ ID NO: 763126 - DNA, 25 bp, Homo sapien
tcttccaactgtgccatgagtccaa

SEQ ID NO: 763127 - DNA, 25 bp, Homo sapien
acagtctcctctggcctgaattctt

SEQ ID NO: 763128 - DNA, 25 bp, Homo sapien
cagtgttcgtgacctttcagtccca

SEQ ID NO: 763129 - DNA, 25 bp, Homo sapien
ttatccctacactggaattattttc

SEQ ID NO: 763130 - DNA, 25 bp, Homo sapien
caaaacctctagtatgattctcagg

SEQ ID NO: 763131 - DNA, 25 bp, Homo sapien
cacagtatcattaatgaattcagat

SEQ ID NO: 763132 - DNA, 25 bp, Homo sapien
gtatcattaatgaattcagataact

SEQ ID NO: 763133 - DNA, 25 bp, Homo sapien
ggtgttcaccacagtatcattaatg

SEQ ID NO: 763134 - DNA, 25 bp, Homo sapien
tcacaggacactggtgttcaccaca

SEQ ID NO: 763135 - DNA, 25 bp, Homo sapien
caaagtcctcactagacgaatgtct

SEQ ID NO: 763136 - DNA, 25 bp, Homo sapien
cactggcagagggatcctacactct

SEQ ID NO: 763137 - DNA, 25 bp, Homo sapien
gagggatcctacactctttccatgc

SEQ ID NO: 763138 - DNA, 25 bp, Homo sapien
gcaacaatccagcagaattctgaga

SEQ ID NO: 763139 - DNA, 25 bp, Homo sapien
tcacaagctgccaaataacttgtgg

SEQ ID NO: 763140 - DNA, 25 bp, Homo sapien
ccaaataacttgtggacatgcatta

SEQ ID NO: 763141 - DNA, 25 bp, Homo sapien
gctgccaaataacttgtggacatgc

SEQ ID NO: 763142 - DNA, 25 bp, Homo sapien
cttcttcatttactggacttaaata

SEQ ID NO: 763143 - DNA, 25 bp, Homo sapien
ggtccaaggagggcccgcaggagct

SEQ ID NO: 763144 - DNA, 25 bp, Homo sapien
gagctggcggctgcttcagcagtct

SEQ ID NO: 763145 - DNA, 25 bp, Homo sapien
gtccaaggagggcccgcaggagctg

SEQ ID NO: 763146 - DNA, 25 bp, Homo sapien
cgccaggttgctgcagtgctggtca

SEQ ID NO: 763147 - DNA, 25 bp, Homo sapien
ccaggttgctgcagtgctggtcaca

SEQ ID NO: 763148 - DNA, 25 bp, Homo sapien
gccaggttgctgcagtgctggtcac

SEQ ID NO: 763149 - DNA, 25 bp, Homo sapien
ccgccaggttgctgcagtgctggtc

SEQ ID NO: 763150 - DNA, 25 bp, Homo sapien
ctccaaatgtgaggtgtgctgcctc

SEQ ID NO: 763151 - DNA, 25 bp, Homo sapien
tccaaatgtgaggtgtgctgcctca

SEQ ID NO: 763152 - DNA, 25 bp, Homo sapien
caaatgtgaggtgtgctgcctcacc

SEQ ID NO: 763153 - DNA, 25 bp, Homo sapien
ccaaatgtgaggtgtgctgcctcac

SEQ ID NO: 763154 - DNA, 25 bp, Homo sapien
gaagttgcctcaactgcaccacttc

SEQ ID NO: 763155 - DNA, 25 bp, Homo sapien
gttgcctcaactgcaccacttccat

SEQ ID NO: 763156 - DNA, 25 bp, Homo sapien
agttgcctcaactgcaccacttcca

SEQ ID NO: 763157 - DNA, 25 bp, Homo sapien
tagaagttgcctcaactgcaccact

SEQ ID NO: 763158 - DNA, 25 bp, Homo sapien
cagggcaagtacatccttctgtttc

SEQ ID NO: 763159 - DNA, 25 bp, Homo sapien
gcagggcaagtacatccttctgttt

SEQ ID NO: 763160 - DNA, 25 bp, Homo sapien
agggcaagtacatccttctgtttct

SEQ ID NO: 763161 - DNA, 25 bp, Homo sapien
gcagtggcgtttgcttgccctccag

SEQ ID NO: 763162 - DNA, 25 bp, Homo sapien
aactggggaccctgctatgtcacca

SEQ ID NO: 763163 - DNA, 25 bp, Homo sapien
caaactctgccatgaacttctgcag

SEQ ID NO: 763164 - DNA, 25 bp, Homo sapien
cagctgaacagggttgtgctcggct

SEQ ID NO: 763165 - DNA, 25 bp, Homo sapien
acaggctgcactgagcttttccaag

SEQ ID NO: 763166 - DNA, 25 bp, Homo sapien
gctgcactgagcttttccaagtctt

SEQ ID NO: 763167 - DNA, 25 bp, Homo sapien
caggctgcactgagcttttccaagt

SEQ ID NO: 763168 - DNA, 25 bp, Homo sapien
ctccaggatacaggctgcactgagc

SEQ ID NO: 763169 - DNA, 25 bp, Homo sapien
gatcattcgttaacgccttctcttt

SEQ ID NO: 763170 - DNA, 25 bp, Homo sapien
cccggcccagatcattcgttaacgc

SEQ ID NO: 763171 - DNA, 25 bp, Homo sapien
cagatcattcgttaacgccttctct

SEQ ID NO: 763172 - DNA, 25 bp, Homo sapien
gcccagatcattcgttaacgccttc

SEQ ID NO: 763173 - DNA, 25 bp, Homo sapien
ctgctgcagccctccgtcttttcca

SEQ ID NO: 763174 - DNA, 25 bp, Homo sapien
atgtgtacgcattttggtaagtcca

SEQ ID NO: 763175 - DNA, 25 bp, Homo sapien
tgtaagaaatgtgtacgcattttgg

SEQ ID NO: 763176 - DNA, 25 bp, Homo sapien
tacgcattttggtaagtccaacagt

SEQ ID NO: 763177 - DNA, 25 bp, Homo sapien
tgtacgcattttggtaagtccaaca

SEQ ID NO: 763178 - DNA, 25 bp, Homo sapien
tgtcactcagcggtggcctagggct

SEQ ID NO: 763179 - DNA, 25 bp, Homo sapien
tcaagtagggctttggtgtcactca

SEQ ID NO: 763180 - DNA, 25 bp, Homo sapien
ggctgtgcccagaatcgtgtttatc

SEQ ID NO: 763181 - DNA, 25 bp, Homo sapien
gtggctccaagacactctcaagtct

SEQ ID NO: 763182 - DNA, 25 bp, Homo sapien
gctgggtgacctgctcatgggagcc

SEQ ID NO: 763183 - DNA, 25 bp, Homo sapien
cccactggaagtactgaatatggct

SEQ ID NO: 763184 - DNA, 25 bp, Homo sapien
tactgaatatggctctgagtcaggg

SEQ ID NO: 763185 - DNA, 25 bp, Homo sapien
ccagaagttcccgaggtctgcggac

SEQ ID NO: 763186 - DNA, 25 bp, Homo sapien
ctgcggcttggcggggtcctgggtg

SEQ ID NO: 763187 - DNA, 25 bp, Homo sapien
tgcggcttggcggggtcctgggtgg

SEQ ID NO: 763188 - DNA, 25 bp, Homo sapien
catttttgctcaggggcttgaaggc

SEQ ID NO: 763189 - DNA, 25 bp, Homo sapien
gctccaggtccgtcctgggttccag

SEQ ID NO: 763190 - DNA, 25 bp, Homo sapien
cgtcgaacctagcgcttcccttggg

SEQ ID NO: 763191 - DNA, 25 bp, Homo sapien
gaaggaagcaaccgctccatttttg

SEQ ID NO: 763192 - DNA, 25 bp, Homo sapien
cgcaggaaggcgttgtcgcctccca

SEQ ID NO: 763193 - DNA, 25 bp, Homo sapien
accagcacggaaggccaagcatcat

SEQ ID NO: 763194 - DNA, 25 bp, Homo sapien
aggcgttgtcgcctcccagaagtcc

SEQ ID NO: 763195 - DNA, 25 bp, Homo sapien
tcgagggcgaaggagaccctactgc

SEQ ID NO: 763196 - DNA, 25 bp, Homo sapien
tttgataacgtggtgtcagggcccc

SEQ ID NO: 763197 - DNA, 25 bp, Homo sapien
aagggttctgaaatcaacagctgct

SEQ ID NO: 763198 - DNA, 25 bp, Homo sapien
gaaaaagcaagccttcccgaaatgc

SEQ ID NO: 763199 - DNA, 25 bp, Homo sapien
tagatacgtgggcttgtgtctccgg

SEQ ID NO: 763200 - DNA, 25 bp, Homo sapien
tggtgaggatactgtcttgcagttt

SEQ ID NO: 763201 - DNA, 25 bp, Homo sapien
ttctgagcgacatgaaaatgaagca

SEQ ID NO: 763202 - DNA, 25 bp, Homo sapien
tagtggagtagggacttgcagctgc

SEQ ID NO: 763203 - DNA, 25 bp, Homo sapien
gttggccaaggggaataagtctgct

SEQ ID NO: 763204 - DNA, 25 bp, Homo sapien
cacagaactgctcatctacccttga

SEQ ID NO: 763205 - DNA, 25 bp, Homo sapien
cacttgttcttcacgtcctctgcag

SEQ ID NO: 763206 - DNA, 25 bp, Homo sapien
catctacccttgacctctggaagtc

SEQ ID NO: 763207 - DNA, 25 bp, Homo sapien
ctgctcttgcagaactcattcctaa

SEQ ID NO: 763208 - DNA, 25 bp, Homo sapien
tgcaggtggcaaacctcagtaaatg

SEQ ID NO: 763209 - DNA, 25 bp, Homo sapien
tcagtaaatgccacgaatagcctac

SEQ ID NO: 763210 - DNA, 25 bp, Homo sapien
cagctttgcaggtggcaaacctcag

SEQ ID NO: 763211 - DNA, 25 bp, Homo sapien
aacctcagtaaatgccacgaatagc

SEQ ID NO: 763212 - DNA, 25 bp, Homo sapien
aagttgttgatgtgaatgcttgcaa

SEQ ID NO: 763213 - DNA, 25 bp, Homo sapien
cctcaaagttgttgatgtgaatgct

SEQ ID NO: 763214 - DNA, 25 bp, Homo sapien
ttgttgatgtgaatgcttgcaaaag

SEQ ID NO: 763215 - DNA, 25 bp, Homo sapien
gttgatgtgaatgcttgcaaaagca

SEQ ID NO: 763216 - DNA, 25 bp, Homo sapien
ctgaggtacaactgaagtccagccc

SEQ ID NO: 763217 - DNA, 25 bp, Homo sapien
aggtacaactgaagtccagccccat

SEQ ID NO: 763218 - DNA, 25 bp, Homo sapien
tgggctgaggtacaactgaagtcca

SEQ ID NO: 763219 - DNA, 25 bp, Homo sapien
ctgggctgaggtacaactgaagtcc

SEQ ID NO: 763220 - DNA, 25 bp, Homo sapien
ctggctgcacaggttagtcagccga

SEQ ID NO: 763221 - DNA, 25 bp, Homo sapien
ggctgcacaggttagtcagccgatg

SEQ ID NO: 763222 - DNA, 25 bp, Homo sapien
tgcacaggttagtcagccgatgcac

SEQ ID NO: 763223 - DNA, 25 bp, Homo sapien
gctgcacaggttagtcagccgatgc

SEQ ID NO: 763224 - DNA, 25 bp, Homo sapien
ctttcctgcattatagggttcttct

SEQ ID NO: 763225 - DNA, 25 bp, Homo sapien
tctttcctgcattatagggttcttc

SEQ ID NO: 763226 - DNA, 25 bp, Homo sapien
tcctgcattatagggttcttctatt

SEQ ID NO: 763227 - DNA, 25 bp, Homo sapien
tttcctgcattatagggttcttcta

SEQ ID NO: 763228 - DNA, 25 bp, Homo sapien
cattcctgctatctttggagagaaa

SEQ ID NO: 763229 - DNA, 25 bp, Homo sapien
aaccacccttaagaagccttgcctg

SEQ ID NO: 763230 - DNA, 25 bp, Homo sapien
taccccattcctgctatctttggag

SEQ ID NO: 763231 - DNA, 25 bp, Homo sapien
cacccttaagaagccttgcctgaac

SEQ ID NO: 763232 - DNA, 25 bp, Homo sapien
cactgacggaggcatgactttctgg

SEQ ID NO: 763233 - DNA, 25 bp, Homo sapien
cagccccaatgaaaccgtggcagaa

SEQ ID NO: 763234 - DNA, 25 bp, Homo sapien
gcagccagattcagatttgtctcag

SEQ ID NO: 763235 - DNA, 25 bp, Homo sapien
tcctgatgggaggactttactgaca

SEQ ID NO: 763236 - DNA, 25 bp, Homo sapien
gcttcccatccatcatattttacaa

SEQ ID NO: 763237 - DNA, 25 bp, Homo sapien
tttcagcttcccatccatcatattt

SEQ ID NO: 763238 - DNA, 25 bp, Homo sapien
tcagcttcccatccatcatatttta

SEQ ID NO: 763239 - DNA, 25 bp, Homo sapien
tcttttcagcttcccatccatcata

SEQ ID NO: 763240 - DNA, 25 bp, Homo sapien
gagaatgagtctcttgacgggatga

SEQ ID NO: 763241 - DNA, 25 bp, Homo sapien
tgagaatgagtctcttgacgggatg

SEQ ID NO: 763242 - DNA, 25 bp, Homo sapien
gcaggtccacttaccccttctggag

SEQ ID NO: 763243 - DNA, 25 bp, Homo sapien
caggtccacttaccccttctggagg

SEQ ID NO: 763244 - DNA, 25 bp, Homo sapien
ctcttccagcaggatcagggattcc

SEQ ID NO: 763245 - DNA, 25 bp, Homo sapien
tcttccagcaggatcagggattcca

SEQ ID NO: 763246 - DNA, 25 bp, Homo sapien
cttccagcaggatcagggattccat

SEQ ID NO: 763247 - DNA, 25 bp, Homo sapien
caatgatcttatcagctcctccttc

SEQ ID NO: 763248 - DNA, 25 bp, Homo sapien
agtacatgtttagcccgaatataca

SEQ ID NO: 763249 - DNA, 25 bp, Homo sapien
tccctctttaggccatgaccatggc

SEQ ID NO: 763250 - DNA, 25 bp, Homo sapien
gagtacatgtttagcccgaatatac

SEQ ID NO: 763251 - DNA, 25 bp, Homo sapien
ttcttccctctttaggccatgacca

SEQ ID NO: 763252 - DNA, 25 bp, Homo sapien
aaattttctgcaggagaaccataaa

SEQ ID NO: 763253 - DNA, 25 bp, Homo sapien
aacccagtaaccacaaaggatctca

SEQ ID NO: 763254 - DNA, 25 bp, Homo sapien
ctttctcagtaggagttggaaggta

SEQ ID NO: 763255 - DNA, 25 bp, Homo sapien
tctgcaggagaaccataaacatctc

SEQ ID NO: 763256 - DNA, 25 bp, Homo sapien
tgcagatacatccagagatgctcct

SEQ ID NO: 763257 - DNA, 25 bp, Homo sapien
tggctcgaagccgagcgcctgcaga

SEQ ID NO: 763258 - DNA, 25 bp, Homo sapien
cgagcgcctgcagatacatccagag

SEQ ID NO: 763259 - DNA, 25 bp, Homo sapien
aaagcggtgaccgaggccgagctca

SEQ ID NO: 763260 - DNA, 25 bp, Homo sapien
ctggtccagaaactccgaggtgcgt

SEQ ID NO: 763261 - DNA, 25 bp, Homo sapien
tggtccagaaactccgaggtgcgtg

SEQ ID NO: 763262 - DNA, 25 bp, Homo sapien
aatttgaaaacttctttggcgagtg

SEQ ID NO: 763263 - DNA, 25 bp, Homo sapien
atttgaaaacttctttggcgagtga

SEQ ID NO: 763264 - DNA, 25 bp, Homo sapien
tcaaatgggggccaacaaaatttga

SEQ ID NO: 763265 - DNA, 25 bp, Homo sapien
tcacagcaatgttttcggaattcag

SEQ ID NO: 763266 - DNA, 25 bp, Homo sapien
cacagcaatgttttcggaattcagt

SEQ ID NO: 763267 - DNA, 25 bp, Homo sapien
aatagtgaaccaacaacttgaggaa

SEQ ID NO: 763268 - DNA, 25 bp, Homo sapien
tagtgaaccaacaacttgaggaaag

SEQ ID NO: 763269 - DNA, 25 bp, Homo sapien
gaaatagtgaaccaacaacttgagg

SEQ ID NO: 763270 - DNA, 25 bp, Homo sapien
gtgaaccaacaacttgaggaaagct

SEQ ID NO: 763271 - DNA, 25 bp, Homo sapien
tgttaagaggttcagttttccagcc

SEQ ID NO: 763272 - DNA, 25 bp, Homo sapien
gagcgtttcattcactgaagcccac

SEQ ID NO: 763273 - DNA, 25 bp, Homo sapien
tcaatcttgcttgatcagcctgaca

SEQ ID NO: 763274 - DNA, 25 bp, Homo sapien
tagtgaaggtctaccgtcaatcttg

SEQ ID NO: 763275 - DNA, 25 bp, Homo sapien
ggaatctgattccttgttaagaagg

SEQ ID NO: 763276 - DNA, 25 bp, Homo sapien
gaatctgattccttgttaagaaggg

SEQ ID NO: 763277 - DNA, 25 bp, Homo sapien
agagagctgtggtgaatcagataaa

SEQ ID NO: 763278 - DNA, 25 bp, Homo sapien
gtgaatcagataaaactgctctggc

SEQ ID NO: 763279 - DNA, 25 bp, Homo sapien
tacagggcaaagcaaccacgaagat

SEQ ID NO: 763280 - DNA, 25 bp, Homo sapien
ctacagggcaaagcaaccacgaaga

SEQ ID NO: 763281 - DNA, 25 bp, Homo sapien
ggcaaagcaaccacgaagatcctga

SEQ ID NO: 763282 - DNA, 25 bp, Homo sapien
cagggcaaagcaaccacgaagatcc

SEQ ID NO: 763283 - DNA, 25 bp, Homo sapien
tggttgtgggccacaaagtgttaga

SEQ ID NO: 763284 - DNA, 25 bp, Homo sapien
tgggccacaaagtgttagaggagga

SEQ ID NO: 763285 - DNA, 25 bp, Homo sapien
cacaaagtgttagaggaggaaggaa

SEQ ID NO: 763286 - DNA, 25 bp, Homo sapien
gatattgtggttgtgggccacaaag

SEQ ID NO: 763287 - DNA, 25 bp, Homo sapien
tcttctattaagtgtattatacaat

SEQ ID NO: 763288 - DNA, 25 bp, Homo sapien
attaagtgtattatacaatatggac

SEQ ID NO: 763289 - DNA, 25 bp, Homo sapien
taagtgtattatacaatatggactc

SEQ ID NO: 763290 - DNA, 25 bp, Homo sapien
ctctcaattcttctattaagtgtat

SEQ ID NO: 763291 - DNA, 25 bp, Homo sapien
attgcaccgaataactggttacgtc

SEQ ID NO: 763292 - DNA, 25 bp, Homo sapien
tgcaccgaataactggttacgtccc

SEQ ID NO: 763293 - DNA, 25 bp, Homo sapien
ttgcaccgaataactggttacgtcc

SEQ ID NO: 763294 - DNA, 25 bp, Homo sapien
tcaatagctgaatatttctccaggg

SEQ ID NO: 763295 - DNA, 25 bp, Homo sapien
tccattgacatctggttgacctaat

SEQ ID NO: 763296 - DNA, 25 bp, Homo sapien
tagattccgggacagagctgccttg

SEQ ID NO: 763297 - DNA, 25 bp, Homo sapien
gccttgtggctataatcagagtgat

SEQ ID NO: 763298 - DNA, 25 bp, Homo sapien
cttccagtggtctgcacgagtccct

SEQ ID NO: 763299 - DNA, 25 bp, Homo sapien
tgcacgagtccctgttttggagctg

SEQ ID NO: 763300 - DNA, 25 bp, Homo sapien
ggagctgtccactttacactgcagc

SEQ ID NO: 763301 - DNA, 25 bp, Homo sapien
gtttcaaagctccatggtccacgtt

SEQ ID NO: 763302 - DNA, 25 bp, Homo sapien
gaaaggagaaagtcacgacaaagaa

SEQ ID NO: 763303 - DNA, 25 bp, Homo sapien
aaggagaaagtcacgacaaagaaca

SEQ ID NO: 763304 - DNA, 25 bp, Homo sapien
ggagaaagtcacgacaaagaacaga

SEQ ID NO: 763305 - DNA, 25 bp, Homo sapien
agaaaggagaaagtcacgacaaaga

SEQ ID NO: 763306 - DNA, 25 bp, Homo sapien
ctgcagcgtggagtgctctccgtcc

SEQ ID NO: 763307 - DNA, 25 bp, Homo sapien
cgtggagtgctctccgtcctgggta

SEQ ID NO: 763308 - DNA, 25 bp, Homo sapien
agtgctctccgtcctgggtactctc

SEQ ID NO: 763309 - DNA, 25 bp, Homo sapien
cagcgtggagtgctctccgtcctgg

SEQ ID NO: 763310 - DNA, 25 bp, Homo sapien
gggtttctggtctcgctgatgatcc

SEQ ID NO: 763311 - DNA, 25 bp, Homo sapien
ctgccctgagcgcctgggggtttct

SEQ ID NO: 763312 - DNA, 25 bp, Homo sapien
aaccgcggatcccagctgccctgag

SEQ ID NO: 763313 - DNA, 25 bp, Homo sapien
ctgaaaccgcggatcccagctgccc

SEQ ID NO: 763314 - DNA, 25 bp, Homo sapien
ggaaagtgcggcattcccagtcccg

SEQ ID NO: 763315 - DNA, 25 bp, Homo sapien
gtcccctctggtggagccccaataa

SEQ ID NO: 763316 - DNA, 25 bp, Homo sapien
gtgaattccacccaccgggcatggg

SEQ ID NO: 763317 - DNA, 25 bp, Homo sapien
tcagccgcacacagcgcagagagaa

SEQ ID NO: 763318 - DNA, 25 bp, Homo sapien
cagggtgccagacttcaggatatag

SEQ ID NO: 763319 - DNA, 25 bp, Homo sapien
cacagggtgccagacttcaggatat

SEQ ID NO: 763320 - DNA, 25 bp, Homo sapien
gcttttgtttaacatgtggacaaat

SEQ ID NO: 763321 - DNA, 25 bp, Homo sapien
gacccacagggtgccagacttcagg

SEQ ID NO: 763322 - DNA, 25 bp, Homo sapien
taagtggtggtctgagaattatcca

SEQ ID NO: 763323 - DNA, 25 bp, Homo sapien
aacgctggctcttcaatgctgctca

SEQ ID NO: 763324 - DNA, 25 bp, Homo sapien
gagaagcatttgaacgctggctctt

SEQ ID NO: 763325 - DNA, 25 bp, Homo sapien
tctctgcagaatactgactcccatg

SEQ ID NO: 763326 - DNA, 25 bp, Homo sapien
tgaacactgttcagtattgtgcccc

SEQ ID NO: 763327 - DNA, 25 bp, Homo sapien
tgaactcggaagcacagctgctgat

SEQ ID NO: 763328 - DNA, 25 bp, Homo sapien
tgtgccccacaaatactgaactcgg

SEQ ID NO: 763329 - DNA, 25 bp, Homo sapien
agatcccagcaggccgtagctgcag

SEQ ID NO: 763330 - DNA, 25 bp, Homo sapien
gagtggcattttttccggagtaaca

SEQ ID NO: 763331 - DNA, 25 bp, Homo sapien
ggagagtggcattttttccggagta

SEQ ID NO: 763332 - DNA, 25 bp, Homo sapien
agtggcattttttccggagtaacag

SEQ ID NO: 763333 - DNA, 25 bp, Homo sapien
gagagtggcattttttccggagtaa

SEQ ID NO: 763334 - DNA, 25 bp, Homo sapien
tgttgactcacagcgagtttccttg

SEQ ID NO: 763335 - DNA, 25 bp, Homo sapien
tgttcattacaatcacactgtgttt

SEQ ID NO: 763336 - DNA, 25 bp, Homo sapien
gatgcagcctgcattcctcatcagg

SEQ ID NO: 763337 - DNA, 25 bp, Homo sapien
cctcatcaggataggtgttcattac

SEQ ID NO: 763338 - DNA, 25 bp, Homo sapien
tgtgtatggctgagagcatccataa

SEQ ID NO: 763339 - DNA, 25 bp, Homo sapien
gtatggctgagagcatccataaagg

SEQ ID NO: 763340 - DNA, 25 bp, Homo sapien
ccattgcataaccatggaggcatat

SEQ ID NO: 763341 - DNA, 25 bp, Homo sapien
ccatggaggcatatgcatgtgtatg

SEQ ID NO: 763342 - DNA, 25 bp, Homo sapien
aacgcagtcctaccaagaactgtgg

SEQ ID NO: 763343 - DNA, 25 bp, Homo sapien
agaactgtggggacttgcatctgca

SEQ ID NO: 763344 - DNA, 25 bp, Homo sapien
cagctgaggcaataggcatcacaac

SEQ ID NO: 763345 - DNA, 25 bp, Homo sapien
agaaggctattgctccagggtgacc

SEQ ID NO: 763346 - DNA, 25 bp, Homo sapien
tgttcccagctgaaccctgagaggt

SEQ ID NO: 763347 - DNA, 25 bp, Homo sapien
ggaatgtttccaacgcctcagggca

SEQ ID NO: 763348 - DNA, 25 bp, Homo sapien
gagtgtttagctcagggtttcccca

SEQ ID NO: 763349 - DNA, 25 bp, Homo sapien
gaatagctgccctgttactctgtgg

SEQ ID NO: 763350 - DNA, 25 bp, Homo sapien
caatatatcttgtgttttgcttatc

SEQ ID NO: 763351 - DNA, 25 bp, Homo sapien
aatatatcttgtgttttgcttatcc

SEQ ID NO: 763352 - DNA, 25 bp, Homo sapien
atatatcttgtgttttgcttatcca

SEQ ID NO: 763353 - DNA, 25 bp, Homo sapien
gcaatatatcttgtgttttgcttat

SEQ ID NO: 763354 - DNA, 25 bp, Homo sapien
gatgccttgttgtcaaagagagaaa

SEQ ID NO: 763355 - DNA, 25 bp, Homo sapien
gaggctagaacaagctgtggcccac

SEQ ID NO: 763356 - DNA, 25 bp, Homo sapien
gcataaactatgtcttagcacaacg

SEQ ID NO: 763357 - DNA, 25 bp, Homo sapien
tgtggcccaccagtgacaaaatggc

SEQ ID NO: 763358 - DNA, 25 bp, Homo sapien
gagaatagcccacttcttcccaaag

SEQ ID NO: 763359 - DNA, 25 bp, Homo sapien
actgccttcaagctggaggtcgtgg

SEQ ID NO: 763360 - DNA, 25 bp, Homo sapien
ttcttccctggtgaaagctgggact

SEQ ID NO: 763361 - DNA, 25 bp, Homo sapien
gacaaagcattaggtgtgctcctgg

SEQ ID NO: 763362 - DNA, 25 bp, Homo sapien
ttgccctcagcctttaactgcttgc

SEQ ID NO: 763363 - DNA, 25 bp, Homo sapien
tgccagaaataagagtctctctgtg

SEQ ID NO: 763364 - DNA, 25 bp, Homo sapien
ctgcttgccgatggtcaccagttgc

SEQ ID NO: 763365 - DNA, 25 bp, Homo sapien
cctttaactgcttgccgatggtcac

SEQ ID NO: 763366 - DNA, 25 bp, Homo sapien
cgaatgcagtgcctcactaccacaa

SEQ ID NO: 763367 - DNA, 25 bp, Homo sapien
attatgcagtcaagtctcccatatt

SEQ ID NO: 763368 - DNA, 25 bp, Homo sapien
tctcccatatttggggacatcgcag

SEQ ID NO: 763369 - DNA, 25 bp, Homo sapien
aagtctcccatatttggggacatcg

SEQ ID NO: 763370 - DNA, 25 bp, Homo sapien
tcaacatcagggcattccggacaaa

SEQ ID NO: 763371 - DNA, 25 bp, Homo sapien
cgaagacccatcaaactcatcaaca

SEQ ID NO: 763372 - DNA, 25 bp, Homo sapien
gagcacaactcgaagacccatcaaa

SEQ ID NO: 763373 - DNA, 25 bp, Homo sapien
caaactcatcaacatcagggcattc

SEQ ID NO: 763374 - DNA, 25 bp, Homo sapien
gtcagtgtgttgtcccgcagctcta

SEQ ID NO: 763375 - DNA, 25 bp, Homo sapien
tcagctctctgacgtcagtgtgttg

SEQ ID NO: 763376 - DNA, 25 bp, Homo sapien
tctctgacgtcagtgtgttgtcccg

SEQ ID NO: 763377 - DNA, 25 bp, Homo sapien
ccgcagctctaggcacctgctgagg

SEQ ID NO: 763378 - DNA, 25 bp, Homo sapien
ggaaatctccttcaataacgtctct

SEQ ID NO: 763379 - DNA, 25 bp, Homo sapien
cccagacccgcagaggagggtccaa

SEQ ID NO: 763380 - DNA, 25 bp, Homo sapien
cgctgggatttaacgtagagattcc

SEQ ID NO: 763381 - DNA, 25 bp, Homo sapien
tgagtatgaggcagccagagtcccc

SEQ ID NO: 763382 - DNA, 25 bp, Homo sapien
ggtttattgcccctcctatcacact

SEQ ID NO: 763383 - DNA, 25 bp, Homo sapien
aatcaaggtttattgcccctcctat

SEQ ID NO: 763384 - DNA, 25 bp, Homo sapien
agcagcaacactggttcctcgtgat

SEQ ID NO: 763385 - DNA, 25 bp, Homo sapien
ggttcctcgtgataatcaaggttta

SEQ ID NO: 763386 - DNA, 25 bp, Homo sapien
gtggcgaccagattctgcaacctcc

SEQ ID NO: 763387 - DNA, 25 bp, Homo sapien
ttagaggcatgagaatgagctgatg

SEQ ID NO: 763388 - DNA, 25 bp, Homo sapien
agtgcagtggcgaccagattctgca

SEQ ID NO: 763389 - DNA, 25 bp, Homo sapien
tagaggatatagtagaaaatcagtt

SEQ ID NO: 763390 - DNA, 25 bp, Homo sapien
tcgccaacatcgcagtcagtgccat

SEQ ID NO: 763391 - DNA, 25 bp, Homo sapien
tctcgccaacatcgcagtcagtgcc

SEQ ID NO: 763392 - DNA, 25 bp, Homo sapien
gctctcgccaacatcgcagtcagtg

SEQ ID NO: 763393 - DNA, 25 bp, Homo sapien
ctctcgccaacatcgcagtcagtgc

SEQ ID NO: 763394 - DNA, 25 bp, Homo sapien
tttagtatttggataagatgaagac

SEQ ID NO: 763395 - DNA, 25 bp, Homo sapien
ttttagtatttggataagatgaaga

SEQ ID NO: 763396 - DNA, 25 bp, Homo sapien
tcagattagtcaaaaccgcatagga

SEQ ID NO: 763397 - DNA, 25 bp, Homo sapien
tcagtcgttatcagtcatatcaatt

SEQ ID NO: 763398 - DNA, 25 bp, Homo sapien
ccgcataggactcatattcttgcct

SEQ ID NO: 763399 - DNA, 25 bp, Homo sapien
cgttatcagtcatatcaattacata

SEQ ID NO: 763400 - DNA, 25 bp, Homo sapien
gatgctgcagatgtaaagcacaaga

SEQ ID NO: 763401 - DNA, 25 bp, Homo sapien
ctgtactcagatcaccaggaaggaa

SEQ ID NO: 763402 - DNA, 25 bp, Homo sapien
aggaaaacaattcttatagcaacaa

SEQ ID NO: 763403 - DNA, 25 bp, Homo sapien
cagatcaccaggaaggaaaacaatt

SEQ ID NO: 763404 - DNA, 25 bp, Homo sapien
gaaaacaattcttatagcaacaaac

SEQ ID NO: 763405 - DNA, 25 bp, Homo sapien
cctatttgatcatgtgcaaaagcag

SEQ ID NO: 763406 - DNA, 25 bp, Homo sapien
cttagcgtgtgagcaaacccatcag

SEQ ID NO: 763407 - DNA, 25 bp, Homo sapien
ccatcagtgaggaacgcagaaggtg

SEQ ID NO: 763408 - DNA, 25 bp, Homo sapien
tcctatttgatcatgtgcaaaagca

SEQ ID NO: 763409 - DNA, 25 bp, Homo sapien
tgcatgccctgaatggacttctgat

SEQ ID NO: 763410 - DNA, 25 bp, Homo sapien
tgtctgctgaggctatcaccttggg

SEQ ID NO: 763411 - DNA, 25 bp, Homo sapien
gcaactctggtctcaaaagagagct

SEQ ID NO: 763412 - DNA, 25 bp, Homo sapien
tagtggatcacatgggtgggctccc

SEQ ID NO: 763413 - DNA, 25 bp, Homo sapien
tcacgagatgaatcaaaggaagtgc

SEQ ID NO: 763414 - DNA, 25 bp, Homo sapien
gactaccacttgtatgccagacact

SEQ ID NO: 763415 - DNA, 25 bp, Homo sapien
tagaagtgtataagccctaaagtgg

SEQ ID NO: 763416 - DNA, 25 bp, Homo sapien
catttgaacagatactgggatgagc

SEQ ID NO: 763417 - DNA, 25 bp, Homo sapien
tatattcacaaattatgcatccaac

SEQ ID NO: 763418 - DNA, 25 bp, Homo sapien
atatattcacaaattatgcatccaa

SEQ ID NO: 763419 - DNA, 25 bp, Homo sapien
agaaggcccacagaacgggagaaag

SEQ ID NO: 763420 - DNA, 25 bp, Homo sapien
ggtaagcatcgtacaatatatacat

SEQ ID NO: 763421 - DNA, 25 bp, Homo sapien
aatttaattgtggtaagcatcgtac

SEQ ID NO: 763422 - DNA, 25 bp, Homo sapien
gaacgggagaaagtaattgctaata

SEQ ID NO: 763423 - DNA, 25 bp, Homo sapien
cacactgtgtagttttctaaaggga

SEQ ID NO: 763424 - DNA, 25 bp, Homo sapien
gatagaggttacactacacactgtg

SEQ ID NO: 763425 - DNA, 25 bp, Homo sapien
gttaaaagaagctctctggaagtca

SEQ ID NO: 763426 - DNA, 25 bp, Homo sapien
gccaagtctaagagcattctcaaag

SEQ ID NO: 763427 - DNA, 25 bp, Homo sapien
tgagcaatacagtcttaatgcaatt

SEQ ID NO: 763428 - DNA, 25 bp, Homo sapien
atgagcaatacagtcttaatgcaat

SEQ ID NO: 763429 - DNA, 25 bp, Homo sapien
aatatgagcaatacagtcttaatgc

SEQ ID NO: 763430 - DNA, 25 bp, Homo sapien
taggcgaagaaaccactcttctaag

SEQ ID NO: 763431 - DNA, 25 bp, Homo sapien
ccattctcctcatttaggcgaagaa

SEQ ID NO: 763432 - DNA, 25 bp, Homo sapien
ccactcttctaagtggtcacttgga

SEQ ID NO: 763433 - DNA, 25 bp, Homo sapien
ctaagtggtcacttggatggctcat

SEQ ID NO: 763434 - DNA, 25 bp, Homo sapien
ttctgtggcgtaagtataggccaca

SEQ ID NO: 763435 - DNA, 25 bp, Homo sapien
ttccagttctgtggcgtaagtatag

SEQ ID NO: 763436 - DNA, 25 bp, Homo sapien
cagttctgtggcgtaagtataggcc

SEQ ID NO: 763437 - DNA, 25 bp, Homo sapien
gtggcgtaagtataggccacagttt

SEQ ID NO: 763438 - DNA, 25 bp, Homo sapien
cactaccaccctcacatgtgctggg

SEQ ID NO: 763439 - DNA, 25 bp, Homo sapien
tgtgctgggtggatacctgctaaca

SEQ ID NO: 763440 - DNA, 25 bp, Homo sapien
ccctcacatgtgctgggtggatacc

SEQ ID NO: 763441 - DNA, 25 bp, Homo sapien
tggaaggctggactgcccaacaccc

SEQ ID NO: 763442 - DNA, 25 bp, Homo sapien
cgtcccgccacttgcagtctagtga

SEQ ID NO: 763443 - DNA, 25 bp, Homo sapien
cactggcctggaggatagacttgct

SEQ ID NO: 763444 - DNA, 25 bp, Homo sapien
aggcgttttggtgcacggctgtacc

SEQ ID NO: 763445 - DNA, 25 bp, Homo sapien
gaagccttgctgattgaggtctctg

SEQ ID NO: 763446 - DNA, 25 bp, Homo sapien
tttcacagatatcagctatagcagt

SEQ ID NO: 763447 - DNA, 25 bp, Homo sapien
gaatagctgggcagtttcatttcac

SEQ ID NO: 763448 - DNA, 25 bp, Homo sapien
cagagaactaattgcagcattaact

SEQ ID NO: 763449 - DNA, 25 bp, Homo sapien
actgatacggggactgaatagctgg

SEQ ID NO: 763450 - DNA, 25 bp, Homo sapien
gataatcgagtaactgaagtaatgt

SEQ ID NO: 763451 - DNA, 25 bp, Homo sapien
gagataatcgagtaactgaagtaat

SEQ ID NO: 763452 - DNA, 25 bp, Homo sapien
ggatctcttgagagataatcgagta

SEQ ID NO: 763453 - DNA, 25 bp, Homo sapien
tcttgagagataatcgagtaactga

SEQ ID NO: 763454 - DNA, 25 bp, Homo sapien
gcttaacactcaatcttctgaatta

SEQ ID NO: 763455 - DNA, 25 bp, Homo sapien
gcctcacaactttgaagattatttc

SEQ ID NO: 763456 - DNA, 25 bp, Homo sapien
tattcccgtgaatatgttttccaaa

SEQ ID NO: 763457 - DNA, 25 bp, Homo sapien
tgacaacatacctaggcaatgatct

SEQ ID NO: 763458 - DNA, 25 bp, Homo sapien
ctaaacaggctggacaatactccca

SEQ ID NO: 763459 - DNA, 25 bp, Homo sapien
tatcactcatctctcttagaagcca

SEQ ID NO: 763460 - DNA, 25 bp, Homo sapien
actcccaatttaatgttatcactca

SEQ ID NO: 763461 - DNA, 25 bp, Homo sapien
gctcttcgcaccaagtttagaccac

SEQ ID NO: 763462 - DNA, 25 bp, Homo sapien
ctgtccgccctttttcctccttgag

SEQ ID NO: 763463 - DNA, 25 bp, Homo sapien
tcagtctgtccgccctttttcctcc

SEQ ID NO: 763464 - DNA, 25 bp, Homo sapien
cagtctgtccgccctttttcctcct

SEQ ID NO: 763465 - DNA, 25 bp, Homo sapien
tctgtccgccctttttcctccttga

SEQ ID NO: 763466 - DNA, 25 bp, Homo sapien
gtttctatactctcacacttgccca

SEQ ID NO: 763467 - DNA, 25 bp, Homo sapien
gcctcaattatttactcgaaattta

SEQ ID NO: 763468 - DNA, 25 bp, Homo sapien
ggtgctgagggtttctatactctca

SEQ ID NO: 763469 - DNA, 25 bp, Homo sapien
gaaaagggtgctgagggtttctata

SEQ ID NO: 763470 - DNA, 25 bp, Homo sapien
gccatagattttccatgggaagaac

SEQ ID NO: 763471 - DNA, 25 bp, Homo sapien
agcgataggagtgaaggactttagt

SEQ ID NO: 763472 - DNA, 25 bp, Homo sapien
ctttttgttttgtaccataggagcg

SEQ ID NO: 763473 - DNA, 25 bp, Homo sapien
gaagtttgcttctgcgtctcgctgt

SEQ ID NO: 763474 - DNA, 25 bp, Homo sapien
tcaaaaataatcatcctgacctata

SEQ ID NO: 763475 - DNA, 25 bp, Homo sapien
ggtgcagtacccttttctcagtagg

SEQ ID NO: 763476 - DNA, 25 bp, Homo sapien
tctcagtaggtctggccagaagaat

SEQ ID NO: 763477 - DNA, 25 bp, Homo sapien
tctaacaatctggatgcttcttgtc

SEQ ID NO: 763478 - DNA, 25 bp, Homo sapien
taggttctggatacatcccacagca

SEQ ID NO: 763479 - DNA, 25 bp, Homo sapien
taaactgccccttgtggaaggatat

SEQ ID NO: 763480 - DNA, 25 bp, Homo sapien
tcccacagcagatctgaataaactg

SEQ ID NO: 763481 - DNA, 25 bp, Homo sapien
acactgcttatgtttaggttctgga

SEQ ID NO: 763482 - DNA, 25 bp, Homo sapien
gtgtctggagaacaggtagtaaaaa

SEQ ID NO: 763483 - DNA, 25 bp, Homo sapien
cttgtgtctggagaacaggtagtaa

SEQ ID NO: 763484 - DNA, 25 bp, Homo sapien
cccttgtgtctggagaacaggtagt

SEQ ID NO: 763485 - DNA, 25 bp, Homo sapien
tgtgtctggagaacaggtagtaaaa

SEQ ID NO: 763486 - DNA, 25 bp, Homo sapien
gaccataacctgtttctaaagacat

SEQ ID NO: 763487 - DNA, 25 bp, Homo sapien
ccactgccatgaccataacctgttt

SEQ ID NO: 763488 - DNA, 25 bp, Homo sapien
tactgcacgtgttgccatgttcctc

SEQ ID NO: 763489 - DNA, 25 bp, Homo sapien
tttgttactgcacgtgttgccatgt

SEQ ID NO: 763490 - DNA, 25 bp, Homo sapien
tgttataatccattcctccacagtc

SEQ ID NO: 763491 - DNA, 25 bp, Homo sapien
tccacagtccgttctagaccccgca

SEQ ID NO: 763492 - DNA, 25 bp, Homo sapien
gcaccaactgttcagtatttatcaa

SEQ ID NO: 763493 - DNA, 25 bp, Homo sapien
ttctagaccccgcagcaccaactgt

SEQ ID NO: 763494 - DNA, 25 bp, Homo sapien
tgacactttctgagtcaaagtagtt

SEQ ID NO: 763495 - DNA, 25 bp, Homo sapien
cactttctgagtcaaagtagttatt

SEQ ID NO: 763496 - DNA, 25 bp, Homo sapien
gacactttctgagtcaaagtagtta

SEQ ID NO: 763497 - DNA, 25 bp, Homo sapien
caccaggctccatcaaccctgtgtc

SEQ ID NO: 763498 - DNA, 25 bp, Homo sapien
tgcactcgaaggcaacttcacggat

SEQ ID NO: 763499 - DNA, 25 bp, Homo sapien
gaaggcaacttcacggatatcacat

SEQ ID NO: 763500 - DNA, 25 bp, Homo sapien
cacattttgaggttgcactcgaagg

SEQ ID NO: 763501 - DNA, 25 bp, Homo sapien
cactgtagttatagccacattttga

SEQ ID NO: 763502 - DNA, 25 bp, Homo sapien
tgtggcctttcaagcaaacttccct

SEQ ID NO: 763503 - DNA, 25 bp, Homo sapien
tcttcctgacaagcaatacttcttc

SEQ ID NO: 763504 - DNA, 25 bp, Homo sapien
ccactttgtccttgacatttgcgaa

SEQ ID NO: 763505 - DNA, 25 bp, Homo sapien
tcacaaggtcccacacttagaagtt

SEQ ID NO: 763506 - DNA, 25 bp, Homo sapien
atggggcagatctgcccgaaacgct

SEQ ID NO: 763507 - DNA, 25 bp, Homo sapien
cctggtttctaggaatatctgcttg

SEQ ID NO: 763508 - DNA, 25 bp, Homo sapien
tcctggtttctaggaatatctgctt

SEQ ID NO: 763509 - DNA, 25 bp, Homo sapien
atctgcccgaaacgctctgccctct

SEQ ID NO: 763510 - DNA, 25 bp, Homo sapien
caatgtcagatataagaggctctct

SEQ ID NO: 763511 - DNA, 25 bp, Homo sapien
cctctgcaatgtcagatataagagg

SEQ ID NO: 763512 - DNA, 25 bp, Homo sapien
ctctcttgaggtgcaaccatcactg

SEQ ID NO: 763513 - DNA, 25 bp, Homo sapien
gaggctctcttgaggtgcaaccatc

SEQ ID NO: 763514 - DNA, 25 bp, Homo sapien
taattggagggactctggaaatggt

SEQ ID NO: 763515 - DNA, 25 bp, Homo sapien
tctttgcctaggaatggataggcat

SEQ ID NO: 763516 - DNA, 25 bp, Homo sapien
ggagaagttgtaaggtaatctttgc

SEQ ID NO: 763517 - DNA, 25 bp, Homo sapien
tggataggcattcatgtgaggtgta

SEQ ID NO: 763518 - DNA, 25 bp, Homo sapien
aatagtggaagcaacccagatagat

SEQ ID NO: 763519 - DNA, 25 bp, Homo sapien
ccctctacaatgcttgtgggaatgt

SEQ ID NO: 763520 - DNA, 25 bp, Homo sapien
ttattccatttgtgatgaacaggga

SEQ ID NO: 763521 - DNA, 25 bp, Homo sapien
cccagatagatgcccaccaatcaat

SEQ ID NO: 763522 - DNA, 25 bp, Homo sapien
tctttgagcagaatgtttgaaatca

SEQ ID NO: 763523 - DNA, 25 bp, Homo sapien
ttgagcagaatgtttgaaatcatgc

SEQ ID NO: 763524 - DNA, 25 bp, Homo sapien
ctttgagcagaatgtttgaaatcat

SEQ ID NO: 763525 - DNA, 25 bp, Homo sapien
tttgagcagaatgtttgaaatcatg

SEQ ID NO: 763526 - DNA, 25 bp, Homo sapien
gccacggagtgtcccttaggaatga

SEQ ID NO: 763527 - DNA, 25 bp, Homo sapien
aacttccggtgtagcacttgccacg

SEQ ID NO: 763528 - DNA, 25 bp, Homo sapien
tctctttcctggcaacttccggtgt

SEQ ID NO: 763529 - DNA, 25 bp, Homo sapien
tgtagcacttgccacggagtgtccc

SEQ ID NO: 763530 - DNA, 25 bp, Homo sapien
gggatagaggaagtaccagatatta

SEQ ID NO: 763531 - DNA, 25 bp, Homo sapien
tattgtcctgggatagaggaagtac

SEQ ID NO: 763532 - DNA, 25 bp, Homo sapien
cctgggatagaggaagtaccagata

SEQ ID NO: 763533 - DNA, 25 bp, Homo sapien
attgtcctgggatagaggaagtacc

SEQ ID NO: 763534 - DNA, 25 bp, Homo sapien
caaaggccatgaagcagccaataca

SEQ ID NO: 763535 - DNA, 25 bp, Homo sapien
ccatcatcaggtgtagattgctggg

SEQ ID NO: 763536 - DNA, 25 bp, Homo sapien
ctcctaagatcacacacttcgtggt

SEQ ID NO: 763537 - DNA, 25 bp, Homo sapien
tcgtggtctccatcatcaggtgtag

SEQ ID NO: 763538 - DNA, 25 bp, Homo sapien
tgagttaagggaaaatacagtcatc

SEQ ID NO: 763539 - DNA, 25 bp, Homo sapien
ctgagttaagggaaaatacagtcat

SEQ ID NO: 763540 - DNA, 25 bp, Homo sapien
gagttaagggaaaatacagtcatca

SEQ ID NO: 763541 - DNA, 25 bp, Homo sapien
agttaagggaaaatacagtcatcat

SEQ ID NO: 763542 - DNA, 25 bp, Homo sapien
ctgcgatggaaaccgaggtggatta

SEQ ID NO: 763543 - DNA, 25 bp, Homo sapien
aacttggttttatgacaattgctga

SEQ ID NO: 763544 - DNA, 25 bp, Homo sapien
taacttggttttatgacaattgctg

SEQ ID NO: 763545 - DNA, 25 bp, Homo sapien
tttaacttggttttatgacaattgc

SEQ ID NO: 763546 - DNA, 25 bp, Homo sapien
ttaacttggttttatgacaattgct

SEQ ID NO: 763547 - DNA, 25 bp, Homo sapien
tcttttcctgaccatcaggattatc

SEQ ID NO: 763548 - DNA, 25 bp, Homo sapien
taactcttctatgtgtgctccaaca

SEQ ID NO: 763549 - DNA, 25 bp, Homo sapien
catgtgccacggatacctgttttcc

SEQ ID NO: 763550 - DNA, 25 bp, Homo sapien
tgggaattttgttgtaactcttcta

SEQ ID NO: 763551 - DNA, 25 bp, Homo sapien
ccaactgactcactagatgtctggg

SEQ ID NO: 763552 - DNA, 25 bp, Homo sapien
tcgagtttccttagtgatatggagg

SEQ ID NO: 763553 - DNA, 25 bp, Homo sapien
tagtgatatggaggaatcttctgca

SEQ ID NO: 763554 - DNA, 25 bp, Homo sapien
ggaatcttctgcacagaccaactga

SEQ ID NO: 763555 - DNA, 25 bp, Homo sapien
tgtttctgttttatcaaatctttgt

SEQ ID NO: 763556 - DNA, 25 bp, Homo sapien
ctaccttctctctattctttcaact

SEQ ID NO: 763557 - DNA, 25 bp, Homo sapien
taccttctctctattctttcaactc

SEQ ID NO: 763558 - DNA, 25 bp, Homo sapien
accttctctctattctttcaactct

SEQ ID NO: 763559 - DNA, 25 bp, Homo sapien
gattaaagtcctatccaacagtttg

SEQ ID NO: 763560 - DNA, 25 bp, Homo sapien
tatccaacagtttggcatggtctga

SEQ ID NO: 763561 - DNA, 25 bp, Homo sapien
ccacaggcgttgctgtcagaattag

SEQ ID NO: 763562 - DNA, 25 bp, Homo sapien
gcgttgctgtcagaattagcacaca

SEQ ID NO: 763563 - DNA, 25 bp, Homo sapien
tccatcctcatgaggtcaactggga

SEQ ID NO: 763564 - DNA, 25 bp, Homo sapien
catcctcatgaggtcaactgggata

SEQ ID NO: 763565 - DNA, 25 bp, Homo sapien
ttccatcctcatgaggtcaactggg

SEQ ID NO: 763566 - DNA, 25 bp, Homo sapien
tcctcatgaggtcaactgggatacc

SEQ ID NO: 763567 - DNA, 25 bp, Homo sapien
ctgtatctgttgcattcgatttctg

SEQ ID NO: 763568 - DNA, 25 bp, Homo sapien
gattctggcaatacttctctatgtt

SEQ ID NO: 763569 - DNA, 25 bp, Homo sapien
taaattctctttgattgtgcaacac

SEQ ID NO: 763570 - DNA, 25 bp, Homo sapien
tatgttcagcatccatttgaattgg

SEQ ID NO: 763571 - DNA, 25 bp, Homo sapien
gcaacacaggtaatgattctggcaa

SEQ ID NO: 763572 - DNA, 25 bp, Homo sapien
gtctccattcggctagtttctgaaa

SEQ ID NO: 763573 - DNA, 25 bp, Homo sapien
atctatcctattgccgacagcaggg

SEQ ID NO: 763574 - DNA, 25 bp, Homo sapien
taaaattggcctctgaactactgga

SEQ ID NO: 763575 - DNA, 25 bp, Homo sapien
tgaggcacacactcgcaatctgaaa

SEQ ID NO: 763576 - DNA, 25 bp, Homo sapien
gagaccgttttctttcaccgatgga

SEQ ID NO: 763577 - DNA, 25 bp, Homo sapien
gactacatgctattgtggttctcaa

SEQ ID NO: 763578 - DNA, 25 bp, Homo sapien
ggtgtccaaaaagttaagcgtatca

SEQ ID NO: 763579 - DNA, 25 bp, Homo sapien
caagtcagacggtggttcttttgca

SEQ ID NO: 763580 - DNA, 25 bp, Homo sapien
ctacttatccttacattaattgact

SEQ ID NO: 763581 - DNA, 25 bp, Homo sapien
aaactacttatccttacattaattg

SEQ ID NO: 763582 - DNA, 25 bp, Homo sapien
catctcacggtactacttttctccg

SEQ ID NO: 763583 - DNA, 25 bp, Homo sapien
acatctcacggtactacttttctcc

SEQ ID NO: 763584 - DNA, 25 bp, Homo sapien
atctcacggtactacttttctccgt

SEQ ID NO: 763585 - DNA, 25 bp, Homo sapien
cagcaacttaggagaagattttttc

SEQ ID NO: 763586 - DNA, 25 bp, Homo sapien
gcccatcacaggtataactcaacaa

SEQ ID NO: 763587 - DNA, 25 bp, Homo sapien
ctctatttcctagcagcagttctca

SEQ ID NO: 763588 - DNA, 25 bp, Homo sapien
ttaagtgtctagcagtggctttggc

SEQ ID NO: 763589 - DNA, 25 bp, Homo sapien
tattttaaacttaggatgcagactg

SEQ ID NO: 763590 - DNA, 25 bp, Homo sapien
tctagagcaactatgtatctgcaac

SEQ ID NO: 763591 - DNA, 25 bp, Homo sapien
agataatagtctgcttttacacagg

SEQ ID NO: 763592 - DNA, 25 bp, Homo sapien
tatctcaggtttcaagctgatgtat

SEQ ID NO: 763593 - DNA, 25 bp, Homo sapien
ctgcagtgcagtgccgcggtctcgg

SEQ ID NO: 763594 - DNA, 25 bp, Homo sapien
gctgcagtgcagtgccgcggtctcg

SEQ ID NO: 763595 - DNA, 25 bp, Homo sapien
tacttctggcgtcagttctatgaac

SEQ ID NO: 763596 - DNA, 25 bp, Homo sapien
ctatttgcctagttccagatactaa

SEQ ID NO: 763597 - DNA, 25 bp, Homo sapien
taaaataagagttccaacttatcca

SEQ ID NO: 763598 - DNA, 25 bp, Homo sapien
ctttttatcattcatacttctggcg

SEQ ID NO: 763599 - DNA, 25 bp, Homo sapien
gctgtgggaaatttgcacgtggccc

SEQ ID NO: 763600 - DNA, 25 bp, Homo sapien
ctgtgggaaatttgcacgtggcccc

SEQ ID NO: 763601 - DNA, 25 bp, Homo sapien
agtaggaccgtttctcacaaccatc

SEQ ID NO: 763602 - DNA, 25 bp, Homo sapien
cacgtggccccaccagtaggaccgt

SEQ ID NO: 763603 - DNA, 25 bp, Homo sapien
aaataccaacagcacgattaatact

SEQ ID NO: 763604 - DNA, 25 bp, Homo sapien
taaataccaacagcacgattaatac

SEQ ID NO: 763605 - DNA, 25 bp, Homo sapien
ttaaataccaacagcacgattaata

SEQ ID NO: 763606 - DNA, 25 bp, Homo sapien
tcaggctctctaccgttcatgccca

SEQ ID NO: 763607 - DNA, 25 bp, Homo sapien
tttcaggctctctaccgttcatgcc

SEQ ID NO: 763608 - DNA, 25 bp, Homo sapien
ttttcagcacatgagtttcaggctc

SEQ ID NO: 763609 - DNA, 25 bp, Homo sapien
ggctctctaccgttcatgcccatga

SEQ ID NO: 763610 - DNA, 25 bp, Homo sapien
ggcccaaatttgacaggaagataga

SEQ ID NO: 763611 - DNA, 25 bp, Homo sapien
tagagccttccaatctatcctctgc

SEQ ID NO: 763612 - DNA, 25 bp, Homo sapien
tatcctctgctccagatgccttcat

SEQ ID NO: 763613 - DNA, 25 bp, Homo sapien
gaagatagagccttccaatctatcc

SEQ ID NO: 763614 - DNA, 25 bp, Homo sapien
tgagtactggacatttagctcccac

SEQ ID NO: 763615 - DNA, 25 bp, Homo sapien
cgaatggtcccgtcacctaagtagt

SEQ ID NO: 763616 - DNA, 25 bp, Homo sapien
tgttgccgtctctacgtacatgagt

SEQ ID NO: 763617 - DNA, 25 bp, Homo sapien
cactgaggttggagcacgaatggtc

SEQ ID NO: 763618 - DNA, 25 bp, Homo sapien
acaatagctatcaactgattattgc

SEQ ID NO: 763619 - DNA, 25 bp, Homo sapien
cacttgatcttcttgagtgaataca

SEQ ID NO: 763620 - DNA, 25 bp, Homo sapien
tacttgtacattattccatattaaa

SEQ ID NO: 763621 - DNA, 25 bp, Homo sapien
agctatcaactgattattgctgaca

SEQ ID NO: 763622 - DNA, 25 bp, Homo sapien
cataaagcatagaaaccagtgctct

SEQ ID NO: 763623 - DNA, 25 bp, Homo sapien
acattcaatcaaatcatgttcagta

SEQ ID NO: 763624 - DNA, 25 bp, Homo sapien
ggcagcagtgtggaagaaatcagca

SEQ ID NO: 763625 - DNA, 25 bp, Homo sapien
cagtgtggaagaaatcagcataaga

SEQ ID NO: 763626 - DNA, 25 bp, Homo sapien
gattcaatgagtttcccacagggtg

SEQ ID NO: 763627 - DNA, 25 bp, Homo sapien
tgatagtgaagatcgctgctgcccc

SEQ ID NO: 763628 - DNA, 25 bp, Homo sapien
aagatggcacactcagaagcgctgt

SEQ ID NO: 763629 - DNA, 25 bp, Homo sapien
cacagggtgcgctctttcaagaaaa

SEQ ID NO: 763630 - DNA, 25 bp, Homo sapien
tggtgagttctctctagttcttcct

SEQ ID NO: 763631 - DNA, 25 bp, Homo sapien
ggtgagttctctctagttcttcctt

SEQ ID NO: 763632 - DNA, 25 bp, Homo sapien
gcaggaacctgacgagggccacttg

SEQ ID NO: 763633 - DNA, 25 bp, Homo sapien
gaacctgacgagggccacttggatc

SEQ ID NO: 763634 - DNA, 25 bp, Homo sapien
ctgacgagggccacttggatcagag

SEQ ID NO: 763635 - DNA, 25 bp, Homo sapien
ggcaggaacctgacgagggccactt

SEQ ID NO: 763636 - DNA, 25 bp, Homo sapien
tgtaactgagtactccggttcttag

SEQ ID NO: 763637 - DNA, 25 bp, Homo sapien
caaaaatgtaactgagtactccggt

SEQ ID NO: 763638 - DNA, 25 bp, Homo sapien
aaatgtaactgagtactccggttct

SEQ ID NO: 763639 - DNA, 25 bp, Homo sapien
aacaaaaatgtaactgagtactccg

SEQ ID NO: 763640 - DNA, 25 bp, Homo sapien
agctagatggctggacagttccaca

SEQ ID NO: 763641 - DNA, 25 bp, Homo sapien
taagcattgcttttgggagctagat

SEQ ID NO: 763642 - DNA, 25 bp, Homo sapien
cttttgggagctagatggctggaca

SEQ ID NO: 763643 - DNA, 25 bp, Homo sapien
cattgcttttgggagctagatggct

SEQ ID NO: 763644 - DNA, 25 bp, Homo sapien
ggcaggtgatgttgtcccaaggctc

SEQ ID NO: 763645 - DNA, 25 bp, Homo sapien
ccaaggcaggtgatgttgtcccaag

SEQ ID NO: 763646 - DNA, 25 bp, Homo sapien
tctgtgtcctcgttccacaccagcc

SEQ ID NO: 763647 - DNA, 25 bp, Homo sapien
caattctctactgagggtagcttct

SEQ ID NO: 763648 - DNA, 25 bp, Homo sapien
ccactggaaaagtatgttcttgttc

SEQ ID NO: 763649 - DNA, 25 bp, Homo sapien
tatagcgtatcgaaagtgctgggcc

SEQ ID NO: 763650 - DNA, 25 bp, Homo sapien
cttgttctgcactcgttaatcttgg

SEQ ID NO: 763651 - DNA, 25 bp, Homo sapien
tcgttaatcttggtatagcgtatcg

SEQ ID NO: 763652 - DNA, 25 bp, Homo sapien
tctgcacttgtgttcactaccttcc

SEQ ID NO: 763653 - DNA, 25 bp, Homo sapien
tgcacttgtgttcactaccttccat

SEQ ID NO: 763654 - DNA, 25 bp, Homo sapien
ttgtctgcacttgtgttcactacct

SEQ ID NO: 763655 - DNA, 25 bp, Homo sapien
tgtctgcacttgtgttcactacctt

SEQ ID NO: 763656 - DNA, 25 bp, Homo sapien
tgtggaagtcgatgccctgaaggcc

SEQ ID NO: 763657 - DNA, 25 bp, Homo sapien
gcaatgcgagcctactgataacagc

SEQ ID NO: 763658 - DNA, 25 bp, Homo sapien
tatactcccagaatgcatggcccct

SEQ ID NO: 763659 - DNA, 25 bp, Homo sapien
gaatttcagaccagtgccagtccgg

SEQ ID NO: 763660 - DNA, 25 bp, Homo sapien
ccaagattgggcaagagtaatgttt

SEQ ID NO: 763661 - DNA, 25 bp, Homo sapien
ctgtgataatccaagattgggcaag

SEQ ID NO: 763662 - DNA, 25 bp, Homo sapien
gataatccaagattgggcaagagta

SEQ ID NO: 763663 - DNA, 25 bp, Homo sapien
taatccaagattgggcaagagtaat

SEQ ID NO: 763664 - DNA, 25 bp, Homo sapien
gccagttacatacagaaccttcttc

SEQ ID NO: 763665 - DNA, 25 bp, Homo sapien
accaaaaagccagttacatacagaa

SEQ ID NO: 763666 - DNA, 25 bp, Homo sapien
cacccaccaaaaagccagttacata

SEQ ID NO: 763667 - DNA, 25 bp, Homo sapien
cagagtaagaactccacccaccaaa

SEQ ID NO: 763668 - DNA, 25 bp, Homo sapien
tagcacccgtagtctgtgaagccaa

SEQ ID NO: 763669 - DNA, 25 bp, Homo sapien
ggtacttctgggcttatcatagcac

SEQ ID NO: 763670 - DNA, 25 bp, Homo sapien
tggggccgagcttcaattcctgata

SEQ ID NO: 763671 - DNA, 25 bp, Homo sapien
tgataggtttccaccgctcctctct

SEQ ID NO: 763672 - DNA, 25 bp, Homo sapien
aaactggccatgctcacaacagctt

SEQ ID NO: 763673 - DNA, 25 bp, Homo sapien
agaaactggccatgctcacaacagc

SEQ ID NO: 763674 - DNA, 25 bp, Homo sapien
ttcccttccaaagcggtgatccagg

SEQ ID NO: 763675 - DNA, 25 bp, Homo sapien
acttcccttccaaagcggtgatcca

SEQ ID NO: 763676 - DNA, 25 bp, Homo sapien
ccaactctgatcgagtgtaatgcag

SEQ ID NO: 763677 - DNA, 25 bp, Homo sapien
ggctcaagccggtgctcataaataa

SEQ ID NO: 763678 - DNA, 25 bp, Homo sapien
tctctcctgtctagcagactgggca

SEQ ID NO: 763679 - DNA, 25 bp, Homo sapien
tttctatactacaccacatggctca

SEQ ID NO: 763680 - DNA, 25 bp, Homo sapien
aacacagtggtatctcctcagaagg

SEQ ID NO: 763681 - DNA, 25 bp, Homo sapien
ttgccactgctcgaggagcttccag

SEQ ID NO: 763682 - DNA, 25 bp, Homo sapien
ggcagtagtgtcctccacatatcaa

SEQ ID NO: 763683 - DNA, 25 bp, Homo sapien
gacacaactgtgcaatgatggaaga

SEQ ID NO: 763684 - DNA, 25 bp, Homo sapien
tctccttcgtggtggctggtggcca

SEQ ID NO: 763685 - DNA, 25 bp, Homo sapien
gggcttcaggaacagcgagcatccc

SEQ ID NO: 763686 - DNA, 25 bp, Homo sapien
tggacaggaataacccagagccctc

SEQ ID NO: 763687 - DNA, 25 bp, Homo sapien
agagccctctccttcgtggtggctg

SEQ ID NO: 763688 - DNA, 25 bp, Homo sapien
gaccacacactctggactttacaat

SEQ ID NO: 763689 - DNA, 25 bp, Homo sapien
ccacacactctggactttacaatgg

SEQ ID NO: 763690 - DNA, 25 bp, Homo sapien
gagaccacacactctggactttaca

SEQ ID NO: 763691 - DNA, 25 bp, Homo sapien
agaccacacactctggactttacaa

SEQ ID NO: 763692 - DNA, 25 bp, Homo sapien
gaccttatgatgttccatgatctct

SEQ ID NO: 763693 - DNA, 25 bp, Homo sapien
agtgaccttatgatgttccatgatc

SEQ ID NO: 763694 - DNA, 25 bp, Homo sapien
tcaagtgaccttatgatgttccatg

SEQ ID NO: 763695 - DNA, 25 bp, Homo sapien
caagtgaccttatgatgttccatga

SEQ ID NO: 763696 - DNA, 25 bp, Homo sapien
gatgataaggcgaacagaactttcg

SEQ ID NO: 763697 - DNA, 25 bp, Homo sapien
tttgagatgataaggcgaacagaac

SEQ ID NO: 763698 - DNA, 25 bp, Homo sapien
gaacagaactttcggcaggcttatg

SEQ ID NO: 763699 - DNA, 25 bp, Homo sapien
taaggcgaacagaactttcggcagg

SEQ ID NO: 763700 - DNA, 25 bp, Homo sapien
ttggtaaaaagcaggacaaagtata

SEQ ID NO: 763701 - DNA, 25 bp, Homo sapien
cataataactttggccagagattgg

SEQ ID NO: 763702 - DNA, 25 bp, Homo sapien
caggacaaagtataaatatagctgc

SEQ ID NO: 763703 - DNA, 25 bp, Homo sapien
ggcagtgagaagttgtggaccaatc

SEQ ID NO: 763704 - DNA, 25 bp, Homo sapien
ggagcagtaggtgcgggctgcaggt

SEQ ID NO: 763705 - DNA, 25 bp, Homo sapien
cgcgggagcagtaggtgcgggctgc

SEQ ID NO: 763706 - DNA, 25 bp, Homo sapien
ttccgcgggagcagtaggtgcgggc

SEQ ID NO: 763707 - DNA, 25 bp, Homo sapien
tctttccgcgggagcagtaggtgcg

SEQ ID NO: 763708 - DNA, 25 bp, Homo sapien
gaagacacttgggaccacttatgtc

SEQ ID NO: 763709 - DNA, 25 bp, Homo sapien
cctaatgggagccttcttagcacca

SEQ ID NO: 763710 - DNA, 25 bp, Homo sapien
gagccttcttagcaccataggcaga

SEQ ID NO: 763711 - DNA, 25 bp, Homo sapien
cagaagacacttgggaccacttatg

SEQ ID NO: 763712 - DNA, 25 bp, Homo sapien
tcctataaatatgtcattacaccag

SEQ ID NO: 763713 - DNA, 25 bp, Homo sapien
tttgaattgcccatatgcaatttgg

SEQ ID NO: 763714 - DNA, 25 bp, Homo sapien
tgaattgcccatatgcaatttggac

SEQ ID NO: 763715 - DNA, 25 bp, Homo sapien
tacaccagatgttgtcaaatctgat

SEQ ID NO: 763716 - DNA, 25 bp, Homo sapien
taagtatgtcattacaccaaatgct

SEQ ID NO: 763717 - DNA, 25 bp, Homo sapien
ccctataagtatgtcattacaccaa

SEQ ID NO: 763718 - DNA, 25 bp, Homo sapien
caccaaatgctgtcagatccgattt

SEQ ID NO: 763719 - DNA, 25 bp, Homo sapien
gtcagatccgattttctcatttggc

SEQ ID NO: 763720 - DNA, 25 bp, Homo sapien
atagacaaagcagatatgcaaaagc

SEQ ID NO: 763721 - DNA, 25 bp, Homo sapien
gacaaagcagatatgcaaaagcctg

SEQ ID NO: 763722 - DNA, 25 bp, Homo sapien
caaagcagatatgcaaaagcctgtc

SEQ ID NO: 763723 - DNA, 25 bp, Homo sapien
ctaaaggacacatagacaaagcaga

SEQ ID NO: 763724 - DNA, 25 bp, Homo sapien
tttgattcccaagagcagaagaggg

SEQ ID NO: 763725 - DNA, 25 bp, Homo sapien
agcagaagtgtccttggactcagtt

SEQ ID NO: 763726 - DNA, 25 bp, Homo sapien
tccttggactcagtttgattcccaa

SEQ ID NO: 763727 - DNA, 25 bp, Homo sapien
agctggcagcagaagtgtccttgga

SEQ ID NO: 763728 - DNA, 25 bp, Homo sapien
tgtcctgacgtgatgccagtagaca

SEQ ID NO: 763729 - DNA, 25 bp, Homo sapien
gtcctgacgtgatgccagtagacat

SEQ ID NO: 763730 - DNA, 25 bp, Homo sapien
ctgtcctgacgtgatgccagtagac

SEQ ID NO: 763731 - DNA, 25 bp, Homo sapien
ggttggaaacaactggtgcatcttc

SEQ ID NO: 763732 - DNA, 25 bp, Homo sapien
ccatgacaggaaaaccgtgcatgct

SEQ ID NO: 763733 - DNA, 25 bp, Homo sapien
caggtgctcgagtggtggttggaaa

SEQ ID NO: 763734 - DNA, 25 bp, Homo sapien
atgctgccctctatagccacactgt

SEQ ID NO: 763735 - DNA, 25 bp, Homo sapien
gcttgtgcaccaggcaaaagcagac

SEQ ID NO: 763736 - DNA, 25 bp, Homo sapien
ctttgaggtagtacatgatgtggat

SEQ ID NO: 763737 - DNA, 25 bp, Homo sapien
gcagacatctaacagcagaacctcc

SEQ ID NO: 763738 - DNA, 25 bp, Homo sapien
gaacctccagaaggattgttagcac

SEQ ID NO: 763739 - DNA, 25 bp, Homo sapien
ttatagtactgttatagccacggta

SEQ ID NO: 763740 - DNA, 25 bp, Homo sapien
tatagtactgttatagccacggtac

SEQ ID NO: 763741 - DNA, 25 bp, Homo sapien
ccaggagcttgagaatttgggtaga

SEQ ID NO: 763742 - DNA, 25 bp, Homo sapien
gagctctctgatgccatcataacat

SEQ ID NO: 763743 - DNA, 25 bp, Homo sapien
cataacatctggaacctcatccagg

SEQ ID NO: 763744 - DNA, 25 bp, Homo sapien
gagaatttgggtagaggtaacagca

SEQ ID NO: 763745 - DNA, 25 bp, Homo sapien
acaggaccccctcatgctcatggag

SEQ ID NO: 763746 - DNA, 25 bp, Homo sapien
aggaccccctcatgctcatggaggg

SEQ ID NO: 763747 - DNA, 25 bp, Homo sapien
ctgcacacttctcttcgtggctgtt

SEQ ID NO: 763748 - DNA, 25 bp, Homo sapien
tctgcacacttctcttcgtggctgt

SEQ ID NO: 763749 - DNA, 25 bp, Homo sapien
atttccctgacagcatagtgttatc

SEQ ID NO: 763750 - DNA, 25 bp, Homo sapien
gtacaattacaaagtatcaattcaa

SEQ ID NO: 763751 - DNA, 25 bp, Homo sapien
ccttattagctcactccatgcttat

SEQ ID NO: 763752 - DNA, 25 bp, Homo sapien
taaagaaatgttgttaacagaggtc

SEQ ID NO: 763753 - DNA, 25 bp, Homo sapien
attgcacttggaaattgtactttct

SEQ ID NO: 763754 - DNA, 25 bp, Homo sapien
actttctaaagtatgtagatgatcc

SEQ ID NO: 763755 - DNA, 25 bp, Homo sapien
tttctaaagtatgtagatgatccat

SEQ ID NO: 763756 - DNA, 25 bp, Homo sapien
gtactttctaaagtatgtagatgat

SEQ ID NO: 763757 - DNA, 25 bp, Homo sapien
agaagcctgattattcaccttcaca

SEQ ID NO: 763758 - DNA, 25 bp, Homo sapien
gagaagcctgattattcaccttcac

SEQ ID NO: 763759 - DNA, 25 bp, Homo sapien
ggagaagcctgattattcaccttca

SEQ ID NO: 763760 - DNA, 25 bp, Homo sapien
cggagaagcctgattattcaccttc

SEQ ID NO: 763761 - DNA, 25 bp, Homo sapien
acaattttttctcgtacatactaga

SEQ ID NO: 763762 - DNA, 25 bp, Homo sapien
tacaattttttctcgtacatactag

SEQ ID NO: 763763 - DNA, 25 bp, Homo sapien
taaaatccttgcagtaggggtgctg

SEQ ID NO: 763764 - DNA, 25 bp, Homo sapien
tcttaaaatccttgcagtaggggtg

SEQ ID NO: 763765 - DNA, 25 bp, Homo sapien
gtaggggtgctggaggaataatttg

SEQ ID NO: 763766 - DNA, 25 bp, Homo sapien
ttatcctgagatagagttcttaaaa

SEQ ID NO: 763767 - DNA, 25 bp, Homo sapien
tacaaaagctggtaagcaaccagga

SEQ ID NO: 763768 - DNA, 25 bp, Homo sapien
ccaattggcattatgagaaagcagc

SEQ ID NO: 763769 - DNA, 25 bp, Homo sapien
ttcaactactgaaaagggcgtggct

SEQ ID NO: 763770 - DNA, 25 bp, Homo sapien
catgtgtagctttaagccagggcca

SEQ ID NO: 763771 - DNA, 25 bp, Homo sapien
tttgattaggtaggaatgggcacct

SEQ ID NO: 763772 - DNA, 25 bp, Homo sapien
ctttgattaggtaggaatgggcacc

SEQ ID NO: 763773 - DNA, 25 bp, Homo sapien
aggccagcaatgtacatcttgtgac

SEQ ID NO: 763774 - DNA, 25 bp, Homo sapien
tgaggccagcaatgtacatcttgtg

SEQ ID NO: 763775 - DNA, 25 bp, Homo sapien
cacagaaggccaacttcatccttac

SEQ ID NO: 763776 - DNA, 25 bp, Homo sapien
cacacagaaggccaacttcatcctt

SEQ ID NO: 763777 - DNA, 25 bp, Homo sapien
acacagaaggccaacttcatcctta

SEQ ID NO: 763778 - DNA, 25 bp, Homo sapien
tcacacagaaggccaacttcatcct

SEQ ID NO: 763779 - DNA, 25 bp, Homo sapien
ggcagtctggcaagggagatcattt

SEQ ID NO: 763780 - DNA, 25 bp, Homo sapien
aatttggcctcccataaaatcgcaa

SEQ ID NO: 763781 - DNA, 25 bp, Homo sapien
tcttgaaaacgtgtgaggactcatg

SEQ ID NO: 763782 - DNA, 25 bp, Homo sapien
tagaactccctttgaagattggcag

SEQ ID NO: 763783 - DNA, 25 bp, Homo sapien
tcatcagcacagaacagggtattct

SEQ ID NO: 763784 - DNA, 25 bp, Homo sapien
ctaggtgcaggtcagcagaagtgtc

SEQ ID NO: 763785 - DNA, 25 bp, Homo sapien
cagattcccgactgcagtacttggc

SEQ ID NO: 763786 - DNA, 25 bp, Homo sapien
catttactcacaggcagtggtcaga

SEQ ID NO: 763787 - DNA, 25 bp, Homo sapien
gattcagggaaaagccgtcaaagcc

SEQ ID NO: 763788 - DNA, 25 bp, Homo sapien
tctccctctggattcagggaaaagc

SEQ ID NO: 763789 - DNA, 25 bp, Homo sapien
tctggattcagggaaaagccgtcaa

SEQ ID NO: 763790 - DNA, 25 bp, Homo sapien
gaaaagccgtcaaagccttctagac

SEQ ID NO: 763791 - DNA, 25 bp, Homo sapien
acatgagtaatgcaccaacagcata

SEQ ID NO: 763792 - DNA, 25 bp, Homo sapien
tcacatgagtaatgcaccaacagca

SEQ ID NO: 763793 - DNA, 25 bp, Homo sapien
gcaccaacagcataacaaggtttga

SEQ ID NO: 763794 - DNA, 25 bp, Homo sapien
atcacatgagtaatgcaccaacagc

SEQ ID NO: 763795 - DNA, 25 bp, Homo sapien
tgtttggtcatcaaattcacgtagc

SEQ ID NO: 763796 - DNA, 25 bp, Homo sapien
tactgctaagccatgtgaatcacag

SEQ ID NO: 763797 - DNA, 25 bp, Homo sapien
gaattgctcgacttttctgccttgg

SEQ ID NO: 763798 - DNA, 25 bp, Homo sapien
tctgtatttgggaatgtccaggcaa

SEQ ID NO: 763799 - DNA, 25 bp, Homo sapien
ctggaaggtccgtgttctggaattt

SEQ ID NO: 763800 - DNA, 25 bp, Homo sapien
gtgctggcaggttcaatatctctcc

SEQ ID NO: 763801 - DNA, 25 bp, Homo sapien
ctctctggaaggtccgtgttctgga

SEQ ID NO: 763802 - DNA, 25 bp, Homo sapien
tggcaggttcaatatctctccaatg

SEQ ID NO: 763803 - DNA, 25 bp, Homo sapien
ctaaagagcaaaggattacattttc

SEQ ID NO: 763804 - DNA, 25 bp, Homo sapien
ttcccaccataacagatggatgctc

SEQ ID NO: 763805 - DNA, 25 bp, Homo sapien
taacagatggatgctcatttgcaga

SEQ ID NO: 763806 - DNA, 25 bp, Homo sapien
cttgtatggcctaatgggaacatag

SEQ ID NO: 763807 - DNA, 25 bp, Homo sapien
cttcatcccaagtgatagctttagt

SEQ ID NO: 763808 - DNA, 25 bp, Homo sapien
tcttcatcccaagtgatagctttag

SEQ ID NO: 763809 - DNA, 25 bp, Homo sapien
ctgtgctgctgaacattattagcat

SEQ ID NO: 763810 - DNA, 25 bp, Homo sapien
gctgaacattattagcatagttcat

SEQ ID NO: 763811 - DNA, 25 bp, Homo sapien
cttagtgtagatccagtgggtcctc

SEQ ID NO: 763812 - DNA, 25 bp, Homo sapien
agtgggtcctctgtgctgctgaaca

SEQ ID NO: 763813 - DNA, 25 bp, Homo sapien
gttgaaaggaaagaggaggcaggct

SEQ ID NO: 763814 - DNA, 25 bp, Homo sapien
gaaaggaaagaggaggcaggctgtt

SEQ ID NO: 763815 - DNA, 25 bp, Homo sapien
aaggaaagaggaggcaggctgttgc

SEQ ID NO: 763816 - DNA, 25 bp, Homo sapien
ttgaaaggaaagaggaggcaggctg

SEQ ID NO: 763817 - DNA, 25 bp, Homo sapien
gacctgctcgatgggcgctaccgct

SEQ ID NO: 763818 - DNA, 25 bp, Homo sapien
ctgtcttggagatggcttcggccac

SEQ ID NO: 763819 - DNA, 25 bp, Homo sapien
tgggcgctaccgctgtcttggagat

SEQ ID NO: 763820 - DNA, 25 bp, Homo sapien
cagcttgacctgctcgatgggcgct

SEQ ID NO: 763821 - DNA, 25 bp, Homo sapien
ttgggaatacgaccacgcagtctat

SEQ ID NO: 763822 - DNA, 25 bp, Homo sapien
cttgtattgcttagctgaggtgatc

SEQ ID NO: 763823 - DNA, 25 bp, Homo sapien
cttgggaatacgaccacgcagtcta

SEQ ID NO: 763824 - DNA, 25 bp, Homo sapien
atgcccttgtattgcttagctgagg

SEQ ID NO: 763825 - DNA, 25 bp, Homo sapien
cgcgccaggacaggactccctgctt

SEQ ID NO: 763826 - DNA, 25 bp, Homo sapien
gaagtatctgatggcattggccagg

SEQ ID NO: 763827 - DNA, 25 bp, Homo sapien
tatctgatggcattggccaggttac

SEQ ID NO: 763828 - DNA, 25 bp, Homo sapien
gggaagtatctgatggcattggcca

SEQ ID NO: 763829 - DNA, 25 bp, Homo sapien
ctgggtggggaagtatctgatggca

SEQ ID NO: 763830 - DNA, 25 bp, Homo sapien
gtatttatctttgaaggcgaagtta

SEQ ID NO: 763831 - DNA, 25 bp, Homo sapien
ctgcttgtatttatctttgaaggcg

SEQ ID NO: 763832 - DNA, 25 bp, Homo sapien
gcttgtatttatctttgaaggcgaa

SEQ ID NO: 763833 - DNA, 25 bp, Homo sapien
tatctttgaaggcgaagttaaaagc

SEQ ID NO: 763834 - DNA, 25 bp, Homo sapien
agctcggataataccctgcatagac

SEQ ID NO: 763835 - DNA, 25 bp, Homo sapien
tcggataataccctgcatagacacg

SEQ ID NO: 763836 - DNA, 25 bp, Homo sapien
gctcggataataccctgcatagaca

SEQ ID NO: 763837 - DNA, 25 bp, Homo sapien
aagtaggcagctcggataataccct

SEQ ID NO: 763838 - DNA, 25 bp, Homo sapien
gcagtcaagtgtgcctgtgtacatg

SEQ ID NO: 763839 - DNA, 25 bp, Homo sapien
tgatgtcagttactttgcgccctga

SEQ ID NO: 763840 - DNA, 25 bp, Homo sapien
catgatgtcagttactttgcgccct

SEQ ID NO: 763841 - DNA, 25 bp, Homo sapien
tccagcagtcaagtgtgcctgtgta

SEQ ID NO: 763842 - DNA, 25 bp, Homo sapien
aacactggaccatgaacccttgaaa

SEQ ID NO: 763843 - DNA, 25 bp, Homo sapien
catgaacccttgaaaaaagctttgc

SEQ ID NO: 763844 - DNA, 25 bp, Homo sapien
gagaacactggaccatgaacccttg

SEQ ID NO: 763845 - DNA, 25 bp, Homo sapien
ctgtacttcttgatttcatcaaaca

SEQ ID NO: 763846 - DNA, 25 bp, Homo sapien
gatatacccaaatcgaagttggcaa

SEQ ID NO: 763847 - DNA, 25 bp, Homo sapien
aatacttagtgctttgttcttaaga

SEQ ID NO: 763848 - DNA, 25 bp, Homo sapien
ttttctgcaaatgcattgatatacc

SEQ ID NO: 763849 - DNA, 25 bp, Homo sapien
aatgccactaatacttagtgctttg

SEQ ID NO: 763850 - DNA, 25 bp, Homo sapien
tagcaattaataggtcgtgttttcc

SEQ ID NO: 763851 - DNA, 25 bp, Homo sapien
taacttgggccctgattccagtgaa

SEQ ID NO: 763852 - DNA, 25 bp, Homo sapien
gcaaacccttatccctagcaattaa

SEQ ID NO: 763853 - DNA, 25 bp, Homo sapien
cttgatcaatgtccttccaatccag

SEQ ID NO: 763854 - DNA, 25 bp, Homo sapien
cttcccacactcaagcctgatcttc

SEQ ID NO: 763855 - DNA, 25 bp, Homo sapien
ccacactcaagcctgatcttcactg

SEQ ID NO: 763856 - DNA, 25 bp, Homo sapien
acactcaagcctgatcttcactgca

SEQ ID NO: 763857 - DNA, 25 bp, Homo sapien
caagcctgatcttcactgcacctgg

SEQ ID NO: 763858 - DNA, 25 bp, Homo sapien
tggggctcccaggtgacacccccac

SEQ ID NO: 763859 - DNA, 25 bp, Homo sapien
ctaccaagaggcatggggctcccag

SEQ ID NO: 763860 - DNA, 25 bp, Homo sapien
ctcccaggtgacacccccactgaca

SEQ ID NO: 763861 - DNA, 25 bp, Homo sapien
ggctcccaggtgacacccccactga

SEQ ID NO: 763862 - DNA, 25 bp, Homo sapien
atgcctgtgctagggatgtggaccc

SEQ ID NO: 763863 - DNA, 25 bp, Homo sapien
tgctagggatgtggaccccaatgct

SEQ ID NO: 763864 - DNA, 25 bp, Homo sapien
gtggaccccaatgctttgatttaca

SEQ ID NO: 763865 - DNA, 25 bp, Homo sapien
ggatgtggaccccaatgctttgatt

SEQ ID NO: 763866 - DNA, 25 bp, Homo sapien
tctttaggacctatacattcctggt

SEQ ID NO: 763867 - DNA, 25 bp, Homo sapien
caatttggatagagtagttttggga

SEQ ID NO: 763868 - DNA, 25 bp, Homo sapien
cttacattttgcgtcattatggtcc

SEQ ID NO: 763869 - DNA, 25 bp, Homo sapien
ttcctggtccactacctgcaatttg

SEQ ID NO: 763870 - DNA, 25 bp, Homo sapien
atccaactcaggaatggagatggcc

SEQ ID NO: 763871 - DNA, 25 bp, Homo sapien
aatagacgccttttgcaggattccc

SEQ ID NO: 763872 - DNA, 25 bp, Homo sapien
tccaactcaggaatggagatggcca

SEQ ID NO: 763873 - DNA, 25 bp, Homo sapien
tatgccccatccacaatagacgcct

SEQ ID NO: 763874 - DNA, 25 bp, Homo sapien
tgtggagacgccctgtacttagctg

SEQ ID NO: 763875 - DNA, 25 bp, Homo sapien
tgcctgacaccgctgtacccagagg

SEQ ID NO: 763876 - DNA, 25 bp, Homo sapien
aagcggtgtggagacgccctgtact

SEQ ID NO: 763877 - DNA, 25 bp, Homo sapien
cctgtacttagctgatggaacatag

SEQ ID NO: 763878 - DNA, 25 bp, Homo sapien
ttggatgagggaagaacccttcttg

SEQ ID NO: 763879 - DNA, 25 bp, Homo sapien
gaatactctcgtgctaagattctga

SEQ ID NO: 763880 - DNA, 25 bp, Homo sapien
agaagtacccactctgttattttgg

SEQ ID NO: 763881 - DNA, 25 bp, Homo sapien
gattatactgttgcctagagggagg

SEQ ID NO: 763882 - DNA, 25 bp, Homo sapien
taatgggcaattgccaagaacccct

SEQ ID NO: 763883 - DNA, 25 bp, Homo sapien
agtgccagcgcctctttagccaggg

SEQ ID NO: 763884 - DNA, 25 bp, Homo sapien
cttggagcggctttggagagacagc

SEQ ID NO: 763885 - DNA, 25 bp, Homo sapien
gagcaggcagtttccgagtgtccca

SEQ ID NO: 763886 - DNA, 25 bp, Homo sapien
taaactagaaaaccatatcccagat

SEQ ID NO: 763887 - DNA, 25 bp, Homo sapien
acacagacgctgaaacccttaacaa

SEQ ID NO: 763888 - DNA, 25 bp, Homo sapien
aattcaccataatcaaatgggtttt

SEQ ID NO: 763889 - DNA, 25 bp, Homo sapien
ccaacaacggatcaaaaagataatt

SEQ ID NO: 763890 - DNA, 25 bp, Homo sapien
cttatgggccgaatttaggctggtt

SEQ ID NO: 763891 - DNA, 25 bp, Homo sapien
atgggccgaatttaggctggttctc

SEQ ID NO: 763892 - DNA, 25 bp, Homo sapien
ttatgggccgaatttaggctggttc

SEQ ID NO: 763893 - DNA, 25 bp, Homo sapien
tatgggccgaatttaggctggttct

SEQ ID NO: 763894 - DNA, 25 bp, Homo sapien
ggtgtcgccttattccccagatggt

SEQ ID NO: 763895 - DNA, 25 bp, Homo sapien
tgagagaggctgaatgtggtcctca

SEQ ID NO: 763896 - DNA, 25 bp, Homo sapien
cacagactctgttggtgtcgcctta

SEQ ID NO: 763897 - DNA, 25 bp, Homo sapien
agagggcaaaggaccaacgtgacga

SEQ ID NO: 763898 - DNA, 25 bp, Homo sapien
gtctctccctgttgcaatttcaaag

SEQ ID NO: 763899 - DNA, 25 bp, Homo sapien
caaagatgagcttttcacatttgct

SEQ ID NO: 763900 - DNA, 25 bp, Homo sapien
tttggcctgctgaatgtaccagtct

SEQ ID NO: 763901 - DNA, 25 bp, Homo sapien
ttcaaagacacaggcgagtctgtca

SEQ ID NO: 763902 - DNA, 25 bp, Homo sapien
aaactttgagagcaattgatccacc

SEQ ID NO: 763903 - DNA, 25 bp, Homo sapien
actttgagagcaattgatccaccta

SEQ ID NO: 763904 - DNA, 25 bp, Homo sapien
taaactttgagagcaattgatccac

SEQ ID NO: 763905 - DNA, 25 bp, Homo sapien
acataaactttgagagcaattgatc

SEQ ID NO: 763906 - DNA, 25 bp, Homo sapien
tattaactgctccaaccaggagcat

SEQ ID NO: 763907 - DNA, 25 bp, Homo sapien
ttattaactgctccaaccaggagca

SEQ ID NO: 763908 - DNA, 25 bp, Homo sapien
acaatacagtgacgggattgcggcg

SEQ ID NO: 763909 - DNA, 25 bp, Homo sapien
catcgggtgtctttctggctcggcg

SEQ ID NO: 763910 - DNA, 25 bp, Homo sapien
cctttaactctgtgcgcgctggaca

SEQ ID NO: 763911 - DNA, 25 bp, Homo sapien
tcggtgccgaggaggacaatacagt

SEQ ID NO: 763912 - DNA, 25 bp, Homo sapien
attcagcgaggcttcctgcggagcc

SEQ ID NO: 763913 - DNA, 25 bp, Homo sapien
gccctgggcgcgacactgcaaacat

SEQ ID NO: 763914 - DNA, 25 bp, Homo sapien
aatcgctgggaagtgtctcggctgc

SEQ ID NO: 763915 - DNA, 25 bp, Homo sapien
tctggaaggttagaaccagctggct

SEQ ID NO: 763916 - DNA, 25 bp, Homo sapien
cagtgtagccaacagccgaaaagcc

SEQ ID NO: 763917 - DNA, 25 bp, Homo sapien
catcagtgtagccaacagccgaaaa

SEQ ID NO: 763918 - DNA, 25 bp, Homo sapien
atcagtgtagccaacagccgaaaag

SEQ ID NO: 763919 - DNA, 25 bp, Homo sapien
tcagtgtagccaacagccgaaaagc

SEQ ID NO: 763920 - DNA, 25 bp, Homo sapien
aacaaatccaacatacaccaaaaag

SEQ ID NO: 763921 - DNA, 25 bp, Homo sapien
tgagaagaaagcccttgttgtacat

SEQ ID NO: 763922 - DNA, 25 bp, Homo sapien
gaggcggagccgctctggaaggcgc

SEQ ID NO: 763923 - DNA, 25 bp, Homo sapien
acattctgcccctcggtcgccgtca

SEQ ID NO: 763924 - DNA, 25 bp, Homo sapien
ggaaggcgcaggacatctccacatt

SEQ ID NO: 763925 - DNA, 25 bp, Homo sapien
tcggtcgccgtcacgttccgcggaa

SEQ ID NO: 763926 - DNA, 25 bp, Homo sapien
ctgcgcgccggccccctcggccccg

SEQ ID NO: 763927 - DNA, 25 bp, Homo sapien
tccaggtcctccggcccccgcagga

SEQ ID NO: 763928 - DNA, 25 bp, Homo sapien
gatccaggtcctccggcccccgcag

SEQ ID NO: 763929 - DNA, 25 bp, Homo sapien
ggatccaggtcctccggcccccgca

SEQ ID NO: 763930 - DNA, 25 bp, Homo sapien
ctcccggatgtcccgggatgtggca

SEQ ID NO: 763931 - DNA, 25 bp, Homo sapien
tcctggaaaggggctcccggatgtc

SEQ ID NO: 763932 - DNA, 25 bp, Homo sapien
gtggcagcgtggtaggggcaaggcg

SEQ ID NO: 763933 - DNA, 25 bp, Homo sapien
tggtaggggcaaggcgggcatctgc

SEQ ID NO: 763934 - DNA, 25 bp, Homo sapien
tctcctcgcttcctctcttctctcc

SEQ ID NO: 763935 - DNA, 25 bp, Homo sapien
ctctcctcgcttcctctcttctctc

SEQ ID NO: 763936 - DNA, 25 bp, Homo sapien
cttctctcctcgcttcctctcttct

SEQ ID NO: 763937 - DNA, 25 bp, Homo sapien
ttccttctctcctcgcttcctctct

SEQ ID NO: 763938 - DNA, 25 bp, Homo sapien
ggcgctgtccctgccgcgcggatgc

SEQ ID NO: 763939 - DNA, 25 bp, Homo sapien
cggcgctgtccctgccgcgcggatg

SEQ ID NO: 763940 - DNA, 25 bp, Homo sapien
gcgctgtccctgccgcgcggatgct

SEQ ID NO: 763941 - DNA, 25 bp, Homo sapien
cgctgtccctgccgcgcggatgctg

SEQ ID NO: 763942 - DNA, 25 bp, Homo sapien
gctgtccctggcataccccacgctg

SEQ ID NO: 763943 - DNA, 25 bp, Homo sapien
ctgtccctggcataccccacgctgt

SEQ ID NO: 763944 - DNA, 25 bp, Homo sapien
cgctgtccctggcataccccacgct

SEQ ID NO: 763945 - DNA, 25 bp, Homo sapien
cgagcatagccttcgcggctccggg

SEQ ID NO: 763946 - DNA, 25 bp, Homo sapien
gcgagcatagccttcgcggctccgg

SEQ ID NO: 763947 - DNA, 25 bp, Homo sapien
tggtcccgtcgctgtccgggtctct

SEQ ID NO: 763948 - DNA, 25 bp, Homo sapien
gatcttggtcccgtcgctgtccggg

SEQ ID NO: 763949 - DNA, 25 bp, Homo sapien
tcttggtcccgtcgctgtccgggtc

SEQ ID NO: 763950 - DNA, 25 bp, Homo sapien
gctgatcttggtcccgtcgctgtcc

SEQ ID NO: 763951 - DNA, 25 bp, Homo sapien
gacagggaagggctgtgcgtcccga

SEQ ID NO: 763952 - DNA, 25 bp, Homo sapien
ggctgtcctgcagcgctggcaagcc

SEQ ID NO: 763953 - DNA, 25 bp, Homo sapien
gggaagggctgtgcgtcccgagcct

SEQ ID NO: 763954 - DNA, 25 bp, Homo sapien
cggctgtcctgcagcgctggcaagc

SEQ ID NO: 763955 - DNA, 25 bp, Homo sapien
tgtatgtatctaatgaggcaagcaa

SEQ ID NO: 763956 - DNA, 25 bp, Homo sapien
atgtatctaatgaggcaagcaaggg

SEQ ID NO: 763957 - DNA, 25 bp, Homo sapien
tatgtatctaatgaggcaagcaagg

SEQ ID NO: 763958 - DNA, 25 bp, Homo sapien
tttgtatgtatctaatgaggcaagc

SEQ ID NO: 763959 - DNA, 25 bp, Homo sapien
ttcatatcctgcagccacatgggcg

SEQ ID NO: 763960 - DNA, 25 bp, Homo sapien
gaagctccccgtagttggcatcagt

SEQ ID NO: 763961 - DNA, 25 bp, Homo sapien
tgcgttcgttggttggcagagccat

SEQ ID NO: 763962 - DNA, 25 bp, Homo sapien
cattgactttcagataggcctgggc

SEQ ID NO: 763963 - DNA, 25 bp, Homo sapien
tgattgtggactttgtttggggatt

SEQ ID NO: 763964 - DNA, 25 bp, Homo sapien
ctgtggagcgtttgtgagtggtaaa

SEQ ID NO: 763965 - DNA, 25 bp, Homo sapien
tctgtggagcgtttgtgagtggtaa

SEQ ID NO: 763966 - DNA, 25 bp, Homo sapien
gtggagcgtttgtgagtggtaaaat

SEQ ID NO: 763967 - DNA, 25 bp, Homo sapien
ttctgtggagcgtttgtgagtggta

SEQ ID NO: 763968 - DNA, 25 bp, Homo sapien
aaaaatcaccattcataaatctgtc

SEQ ID NO: 763969 - DNA, 25 bp, Homo sapien
taaaaatcaccattcataaatctgt

SEQ ID NO: 763970 - DNA, 25 bp, Homo sapien
ttaaaaatcaccattcataaatctg

SEQ ID NO: 763971 - DNA, 25 bp, Homo sapien
cttgcactgaactaggtctccgatt

SEQ ID NO: 763972 - DNA, 25 bp, Homo sapien
gctctgagtgaattggtgcaggctc

SEQ ID NO: 763973 - DNA, 25 bp, Homo sapien
gggtgcacccacatgctttgagctc

SEQ ID NO: 763974 - DNA, 25 bp, Homo sapien
ttggtgcaggctcggtgctcacctc

SEQ ID NO: 763975 - DNA, 25 bp, Homo sapien
taaccaacattacatgatttattgt

SEQ ID NO: 763976 - DNA, 25 bp, Homo sapien
atacagaaaggataaaaaccagagt

SEQ ID NO: 763977 - DNA, 25 bp, Homo sapien
tgttcttataatgtgtaaatacaga

SEQ ID NO: 763978 - DNA, 25 bp, Homo sapien
aaaaccagagtccagctctcagatg

SEQ ID NO: 763979 - DNA, 25 bp, Homo sapien
agagaaaatgaacatgcatttgtaa

SEQ ID NO: 763980 - DNA, 25 bp, Homo sapien
gtagagaaaatgaacatgcatttgt

SEQ ID NO: 763981 - DNA, 25 bp, Homo sapien
ctgtagagaaaatgaacatgcattt

SEQ ID NO: 763982 - DNA, 25 bp, Homo sapien
agaaaatgaacatgcatttgtaatg

SEQ ID NO: 763983 - DNA, 25 bp, Homo sapien
tgcttagagctatgggtcgctgaaa

SEQ ID NO: 763984 - DNA, 25 bp, Homo sapien
tatggcatgtctctctcatttacat

SEQ ID NO: 763985 - DNA, 25 bp, Homo sapien
agtgaaagcctcttaatttgggtca

SEQ ID NO: 763986 - DNA, 25 bp, Homo sapien
aaagcccttggagaatagtcctgct

SEQ ID NO: 763987 - DNA, 25 bp, Homo sapien
cacagaggagttgccttatctctgc

SEQ ID NO: 763988 - DNA, 25 bp, Homo sapien
tcacagaggagttgccttatctctg

SEQ ID NO: 763989 - DNA, 25 bp, Homo sapien
acagaggagttgccttatctctgca

SEQ ID NO: 763990 - DNA, 25 bp, Homo sapien
cagaggagttgccttatctctgcac

SEQ ID NO: 763991 - DNA, 25 bp, Homo sapien
tttgaatctgacagcaaggctggca

SEQ ID NO: 763992 - DNA, 25 bp, Homo sapien
taaagtgagtgactggactgcccca

SEQ ID NO: 763993 - DNA, 25 bp, Homo sapien
taaattgcaatgaccaaggcatgcc

SEQ ID NO: 763994 - DNA, 25 bp, Homo sapien
tcatctacattataaggcagggcaa

SEQ ID NO: 763995 - DNA, 25 bp, Homo sapien
tctgcgaagagggacctaaaccact

SEQ ID NO: 763996 - DNA, 25 bp, Homo sapien
tccatcctggtcaagatcctgggac

SEQ ID NO: 763997 - DNA, 25 bp, Homo sapien
cagtcagttgtgcttggtgccaccc

SEQ ID NO: 763998 - DNA, 25 bp, Homo sapien
gtagagaatgacttagtatattggg

SEQ ID NO: 763999 - DNA, 25 bp, Homo sapien
gtggtctgtggagatgtttgacttc

SEQ ID NO: 764000 - DNA, 25 bp, Homo sapien
tggaggagccagcacgcagctctgc

SEQ ID NO: 764001 - DNA, 25 bp, Homo sapien
aaggaaggactagtagaggtggtct

SEQ ID NO: 764002 - DNA, 25 bp, Homo sapien
gcaggaagccgcttcacagttctgt

SEQ ID NO: 764003 - DNA, 25 bp, Homo sapien
caaaaccatggaagtggatgagaag

SEQ ID NO: 764004 - DNA, 25 bp, Homo sapien
agaggagaatgctaggagccagtaa

SEQ ID NO: 764005 - DNA, 25 bp, Homo sapien
aagtggatgagaagatcaggcagtt

SEQ ID NO: 764006 - DNA, 25 bp, Homo sapien
ggagagaggagaatgctaggagcca

SEQ ID NO: 764007 - DNA, 25 bp, Homo sapien
tgtgaccaacagagtgaagcctttc

SEQ ID NO: 764008 - DNA, 25 bp, Homo sapien
cctatcagtggcagaagtggtcctt

SEQ ID NO: 764009 - DNA, 25 bp, Homo sapien
tctttaaccgctgtgcactagtgcc

SEQ ID NO: 764010 - DNA, 25 bp, Homo sapien
caaatgagtaggcagagccagaggc

SEQ ID NO: 764011 - DNA, 25 bp, Homo sapien
gggaagtactgattcaccatgccag

SEQ ID NO: 764012 - DNA, 25 bp, Homo sapien
ccagtggcaatgtagcagaatgtct

SEQ ID NO: 764013 - DNA, 25 bp, Homo sapien
tatgggctgcacaatctaaaggctt

SEQ ID NO: 764014 - DNA, 25 bp, Homo sapien
tgacccttggcagataagtattacc

SEQ ID NO: 764015 - DNA, 25 bp, Homo sapien
ccttgatactcccaatgacaatgca

SEQ ID NO: 764016 - DNA, 25 bp, Homo sapien
gacaatgcattgctcctcactttca

SEQ ID NO: 764017 - DNA, 25 bp, Homo sapien
caagcactgtttcacctatattagg

SEQ ID NO: 764018 - DNA, 25 bp, Homo sapien
tcctgtgtccgatttcccttgatac

SEQ ID NO: 764019 - DNA, 25 bp, Homo sapien
tagctatcagcattaagtaactaga

SEQ ID NO: 764020 - DNA, 25 bp, Homo sapien
caaacttcccagacataatttgtca

SEQ ID NO: 764021 - DNA, 25 bp, Homo sapien
gtaactagaaatatttgacgcaaga

SEQ ID NO: 764022 - DNA, 25 bp, Homo sapien
tagaagttatcttcttagctatcag

SEQ ID NO: 764023 - DNA, 25 bp, Homo sapien
gctctaagactatctcagggaagaa

SEQ ID NO: 764024 - DNA, 25 bp, Homo sapien
gaaactcctgaaagagctctaagac

SEQ ID NO: 764025 - DNA, 25 bp, Homo sapien
caaacttgttctagggtgggtgcat

SEQ ID NO: 764026 - DNA, 25 bp, Homo sapien
tgctatcaagaattggaaactcctg

SEQ ID NO: 764027 - DNA, 25 bp, Homo sapien
ttagctcgccagcttggctctggtg

SEQ ID NO: 764028 - DNA, 25 bp, Homo sapien
agcttggctctggtgctcatgaatg

SEQ ID NO: 764029 - DNA, 25 bp, Homo sapien
ccagcttggctctggtgctcatgaa

SEQ ID NO: 764030 - DNA, 25 bp, Homo sapien
tcgccagcttggctctggtgctcat

SEQ ID NO: 764031 - DNA, 25 bp, Homo sapien
aaaagtcagcactttagattaaagc

SEQ ID NO: 764032 - DNA, 25 bp, Homo sapien
gcaggacagaaagtccatggcttgt

SEQ ID NO: 764033 - DNA, 25 bp, Homo sapien
gtcagcactttagattaaagcaaag

SEQ ID NO: 764034 - DNA, 25 bp, Homo sapien
ccatggcttgtagctatcctcgcac

SEQ ID NO: 764035 - DNA, 25 bp, Homo sapien
caactttgctgtccgctccgtagat

SEQ ID NO: 764036 - DNA, 25 bp, Homo sapien
aaaatcagcttgcatgagggtcgca

SEQ ID NO: 764037 - DNA, 25 bp, Homo sapien
gacattcaggccaacccttgagcag

SEQ ID NO: 764038 - DNA, 25 bp, Homo sapien
cagtgagatgattttagtcgccgaa

SEQ ID NO: 764039 - DNA, 25 bp, Homo sapien
aaaattataattcacttaaccagtg

SEQ ID NO: 764040 - DNA, 25 bp, Homo sapien
gaaaacttaggtcatttatctctca

SEQ ID NO: 764041 - DNA, 25 bp, Homo sapien
tatctctcaagctttatctattcca

SEQ ID NO: 764042 - DNA, 25 bp, Homo sapien
tgccagagtagaaaacaggttcaaa

SEQ ID NO: 764043 - DNA, 25 bp, Homo sapien
tgattgccttcaagcttcgggttat

SEQ ID NO: 764044 - DNA, 25 bp, Homo sapien
actgattgccttcaagcttcgggtt

SEQ ID NO: 764045 - DNA, 25 bp, Homo sapien
ctgattgccttcaagcttcgggtta

SEQ ID NO: 764046 - DNA, 25 bp, Homo sapien
gattgccttcaagcttcgggttata

SEQ ID NO: 764047 - DNA, 25 bp, Homo sapien
aaatatatacttgcttataactgaa

SEQ ID NO: 764048 - DNA, 25 bp, Homo sapien
tgaaaatatatacttgcttataact

SEQ ID NO: 764049 - DNA, 25 bp, Homo sapien
atacttgcttataactgaatcaaag

SEQ ID NO: 764050 - DNA, 25 bp, Homo sapien
tatatacttgcttataactgaatca

SEQ ID NO: 764051 - DNA, 25 bp, Homo sapien
tacttatgctttaatgtatgcaatc

SEQ ID NO: 764052 - DNA, 25 bp, Homo sapien
tttaatagatggtgtttatcttacc

SEQ ID NO: 764053 - DNA, 25 bp, Homo sapien
taatagatggtgtttatcttaccat

SEQ ID NO: 764054 - DNA, 25 bp, Homo sapien
tgcaatctttaaggcccagataaat

SEQ ID NO: 764055 - DNA, 25 bp, Homo sapien
ttgattggccgtatgaaggaccacc

SEQ ID NO: 764056 - DNA, 25 bp, Homo sapien
gaaagttacagtctctcgtgcctcc

SEQ ID NO: 764057 - DNA, 25 bp, Homo sapien
tgccccaaggagttttgctaacaag

SEQ ID NO: 764058 - DNA, 25 bp, Homo sapien
tatttactaaccctgactagcggct

SEQ ID NO: 764059 - DNA, 25 bp, Homo sapien
ttaaacagatcacggcctctcaagt

SEQ ID NO: 764060 - DNA, 25 bp, Homo sapien
ctcctgtgtgctccttactctactg

SEQ ID NO: 764061 - DNA, 25 bp, Homo sapien
gggtacattaaacagatcacggcct

SEQ ID NO: 764062 - DNA, 25 bp, Homo sapien
tttccggggtacattaaacagatca

SEQ ID NO: 764063 - DNA, 25 bp, Homo sapien
taaaaagaacctgcactctatttgt

SEQ ID NO: 764064 - DNA, 25 bp, Homo sapien
aagaacctgcactctatttgtccat

SEQ ID NO: 764065 - DNA, 25 bp, Homo sapien
atagcttaaaaagaacctgcactct

SEQ ID NO: 764066 - DNA, 25 bp, Homo sapien
gcttaaaaagaacctgcactctatt

SEQ ID NO: 764067 - DNA, 25 bp, Homo sapien
ccatgaggtcaagagtgttctatct

SEQ ID NO: 764068 - DNA, 25 bp, Homo sapien
gagacgacccacatcttcacgtagc

SEQ ID NO: 764069 - DNA, 25 bp, Homo sapien
ttcacgtagctgtgccatgaggtca

SEQ ID NO: 764070 - DNA, 25 bp, Homo sapien
tatcttcaccaatggccgtagttct

SEQ ID NO: 764071 - DNA, 25 bp, Homo sapien
cctttctgtattctcgttatgctct

SEQ ID NO: 764072 - DNA, 25 bp, Homo sapien
tctcgttatgctctgctagtctgca

SEQ ID NO: 764073 - DNA, 25 bp, Homo sapien
tatgctctgctagtctgcatctagc

SEQ ID NO: 764074 - DNA, 25 bp, Homo sapien
agtctgcatctagcaggtcctttgc

SEQ ID NO: 764075 - DNA, 25 bp, Homo sapien
gaaaatccccgcagctagcatatca

SEQ ID NO: 764076 - DNA, 25 bp, Homo sapien
gagatgttgatatgacatactcctg

SEQ ID NO: 764077 - DNA, 25 bp, Homo sapien
catccaggtaagaagcccatgtcct

SEQ ID NO: 764078 - DNA, 25 bp, Homo sapien
tgtcctcaacatagggaacccagaa

SEQ ID NO: 764079 - DNA, 25 bp, Homo sapien
cagcaaacacaattgtcaccttttt

SEQ ID NO: 764080 - DNA, 25 bp, Homo sapien
ggtttggcaatttattactattcga

SEQ ID NO: 764081 - DNA, 25 bp, Homo sapien
tactattcgatattgttgaacagca

SEQ ID NO: 764082 - DNA, 25 bp, Homo sapien
gaagttgcactttctaattcgagga

SEQ ID NO: 764083 - DNA, 25 bp, Homo sapien
agagttactgatttccacctgcact

SEQ ID NO: 764084 - DNA, 25 bp, Homo sapien
gagagttactgatttccacctgcac

SEQ ID NO: 764085 - DNA, 25 bp, Homo sapien
gagttactgatttccacctgcactc

SEQ ID NO: 764086 - DNA, 25 bp, Homo sapien
gagacctagacattcaactggagac

SEQ ID NO: 764087 - DNA, 25 bp, Homo sapien
tctgtaacaactgggctttgtaagg

SEQ ID NO: 764088 - DNA, 25 bp, Homo sapien
agaaatgacccagctttgaggcctg

SEQ ID NO: 764089 - DNA, 25 bp, Homo sapien
gccaagcacaggttgctttgagaaa

SEQ ID NO: 764090 - DNA, 25 bp, Homo sapien
tcagtccacactcctgctagcttga

SEQ ID NO: 764091 - DNA, 25 bp, Homo sapien
gaagcttattgtccccatgtgcttg

SEQ ID NO: 764092 - DNA, 25 bp, Homo sapien
ctgctagcttgatcaccattgcaca

SEQ ID NO: 764093 - DNA, 25 bp, Homo sapien
catcttgagaagcttattgtcccca

SEQ ID NO: 764094 - DNA, 25 bp, Homo sapien
tagtatacatgttgctgaagcaaac

SEQ ID NO: 764095 - DNA, 25 bp, Homo sapien
ttagtatacatgttgctgaagcaaa

SEQ ID NO: 764096 - DNA, 25 bp, Homo sapien
gtatacatgttgctgaagcaaacac

SEQ ID NO: 764097 - DNA, 25 bp, Homo sapien
attttagtatacatgttgctgaagc

SEQ ID NO: 764098 - DNA, 25 bp, Homo sapien
ctgggtggattgattccattctgaa

SEQ ID NO: 764099 - DNA, 25 bp, Homo sapien
gattgattccattctgaacaccttc

SEQ ID NO: 764100 - DNA, 25 bp, Homo sapien
tggattgattccattctgaacacct

SEQ ID NO: 764101 - DNA, 25 bp, Homo sapien
ggtggattgattccattctgaacac

SEQ ID NO: 764102 - DNA, 25 bp, Homo sapien
tgagagcacgtggaggactgtgagc

SEQ ID NO: 764103 - DNA, 25 bp, Homo sapien
agcacgtggaggactgtgagcaccc

SEQ ID NO: 764104 - DNA, 25 bp, Homo sapien
acgtggaggactgtgagcacccctg

SEQ ID NO: 764105 - DNA, 25 bp, Homo sapien
cttgtgtgagagcacgtggaggact

SEQ ID NO: 764106 - DNA, 25 bp, Homo sapien
tcaaggactgcaaaatcccccgaac

SEQ ID NO: 764107 - DNA, 25 bp, Homo sapien
caaggactgcaaaatcccccgaaca

SEQ ID NO: 764108 - DNA, 25 bp, Homo sapien
aattcaaggactgcaaaatcccccg

SEQ ID NO: 764109 - DNA, 25 bp, Homo sapien
ttcaaggactgcaaaatcccccgaa

SEQ ID NO: 764110 - DNA, 25 bp, Homo sapien
ttgcctccactatcacacacctctg

SEQ ID NO: 764111 - DNA, 25 bp, Homo sapien
tgccaggttgcctccactatcacac

SEQ ID NO: 764112 - DNA, 25 bp, Homo sapien
caggttgcctccactatcacacacc

SEQ ID NO: 764113 - DNA, 25 bp, Homo sapien
ggttgcctccactatcacacacctc

SEQ ID NO: 764114 - DNA, 25 bp, Homo sapien
tgcccgtttcccaatcactgtgttc

SEQ ID NO: 764115 - DNA, 25 bp, Homo sapien
caggacattgtattgcagtgcacgg

SEQ ID NO: 764116 - DNA, 25 bp, Homo sapien
cactagtgtcagtcacaggcctgag

SEQ ID NO: 764117 - DNA, 25 bp, Homo sapien
cagtgcacggagctttgtgaggcca

SEQ ID NO: 764118 - DNA, 25 bp, Homo sapien
ccggagtcccgctggacgagccgca

SEQ ID NO: 764119 - DNA, 25 bp, Homo sapien
agtcccgctggacgagccgcaggct

SEQ ID NO: 764120 - DNA, 25 bp, Homo sapien
tcccgctggacgagccgcaggctgt

SEQ ID NO: 764121 - DNA, 25 bp, Homo sapien
ctgccggagtcccgctggacgagcc

SEQ ID NO: 764122 - DNA, 25 bp, Homo sapien
tagcataaacctgacctgttatttc

SEQ ID NO: 764123 - DNA, 25 bp, Homo sapien
tgaattcaggcgctgttgctactgt

SEQ ID NO: 764124 - DNA, 25 bp, Homo sapien
tcaatttcaattgtatgaggttttc

SEQ ID NO: 764125 - DNA, 25 bp, Homo sapien
tattttatggatagcataaacctga

SEQ ID NO: 764126 - DNA, 25 bp, Homo sapien
tccaatgacatgagaaattgttcta

SEQ ID NO: 764127 - DNA, 25 bp, Homo sapien
aagttccaatgacatgagaaattgt

SEQ ID NO: 764128 - DNA, 25 bp, Homo sapien
ttccaatgacatgagaaattgttct

SEQ ID NO: 764129 - DNA, 25 bp, Homo sapien
gttccaatgacatgagaaattgttc

SEQ ID NO: 764130 - DNA, 25 bp, Homo sapien
ctctgaccagcagcgctcaggtgct

SEQ ID NO: 764131 - DNA, 25 bp, Homo sapien
gaggctttgcttgttacccttgagg

SEQ ID NO: 764132 - DNA, 25 bp, Homo sapien
gctttgcttgttacccttgaggagg

SEQ ID NO: 764133 - DNA, 25 bp, Homo sapien
gaggcttctctgaccagcagcgctc

SEQ ID NO: 764134 - DNA, 25 bp, Homo sapien
gcatgcacttgtatatgttgatggt

SEQ ID NO: 764135 - DNA, 25 bp, Homo sapien
tccatgcatgcacttgtatatgttg

SEQ ID NO: 764136 - DNA, 25 bp, Homo sapien
cccactccatgcatgcacttgtata

SEQ ID NO: 764137 - DNA, 25 bp, Homo sapien
gaacggcccttatcttcttgccatc

SEQ ID NO: 764138 - DNA, 25 bp, Homo sapien
ctctttgagtgcccgagggcctcac

SEQ ID NO: 764139 - DNA, 25 bp, Homo sapien
aatctctttgagtgcccgagggcct

SEQ ID NO: 764140 - DNA, 25 bp, Homo sapien
cagaatctctttgagtgcccgaggg

SEQ ID NO: 764141 - DNA, 25 bp, Homo sapien
agaatctctttgagtgcccgagggc

SEQ ID NO: 764142 - DNA, 25 bp, Homo sapien
cacccgcattacgttttctgggcaa

SEQ ID NO: 764143 - DNA, 25 bp, Homo sapien
cttcacccgcattacgttttctggg

SEQ ID NO: 764144 - DNA, 25 bp, Homo sapien
ttcggtatgggacattctttattct

SEQ ID NO: 764145 - DNA, 25 bp, Homo sapien
tctgggcaaccgcacacggattcgg

SEQ ID NO: 764146 - DNA, 25 bp, Homo sapien
tatttgatgtatttgacgatcagtg

SEQ ID NO: 764147 - DNA, 25 bp, Homo sapien
actttatttgatgtatttgacgatc

SEQ ID NO: 764148 - DNA, 25 bp, Homo sapien
tttatttgatgtatttgacgatcag

SEQ ID NO: 764149 - DNA, 25 bp, Homo sapien
atttgatgtatttgacgatcagtga

SEQ ID NO: 764150 - DNA, 25 bp, Homo sapien
cagcatggttgcacattggaagcct

SEQ ID NO: 764151 - DNA, 25 bp, Homo sapien
tgcctggagccaaatcctcatccat

SEQ ID NO: 764152 - DNA, 25 bp, Homo sapien
actacgaagcactggccccagcgtg

SEQ ID NO: 764153 - DNA, 25 bp, Homo sapien
tgcacaccgtcgatcttccggacta

SEQ ID NO: 764154 - DNA, 25 bp, Homo sapien
tgcctgttggcctcagtttgctggt

SEQ ID NO: 764155 - DNA, 25 bp, Homo sapien
tggacaatgacatagacatgacagg

SEQ ID NO: 764156 - DNA, 25 bp, Homo sapien
tttgtccatgcaagcgcccacagct

SEQ ID NO: 764157 - DNA, 25 bp, Homo sapien
gtggccctctcaacatggacaatga

SEQ ID NO: 764158 - DNA, 25 bp, Homo sapien
aaggttggccattcggcaggctgta

SEQ ID NO: 764159 - DNA, 25 bp, Homo sapien
taaggttggccattcggcaggctgt

SEQ ID NO: 764160 - DNA, 25 bp, Homo sapien
aggttggccattcggcaggctgtac

SEQ ID NO: 764161 - DNA, 25 bp, Homo sapien
ttaaggttggccattcggcaggctg

SEQ ID NO: 764162 - DNA, 25 bp, Homo sapien
actgatttttgtaccatgcgaatcc

SEQ ID NO: 764163 - DNA, 25 bp, Homo sapien
cctctcagtgccttatttggagttc

SEQ ID NO: 764164 - DNA, 25 bp, Homo sapien
atttggagttctactgatttttgta

SEQ ID NO: 764165 - DNA, 25 bp, Homo sapien
gtctcctctcagtgccttatttgga

SEQ ID NO: 764166 - DNA, 25 bp, Homo sapien
gttaggcactggctgtttatcaaca

SEQ ID NO: 764167 - DNA, 25 bp, Homo sapien
cactggctgtttatcaacagtcttc

SEQ ID NO: 764168 - DNA, 25 bp, Homo sapien
tcttctctggaacgcgacggtggaa

SEQ ID NO: 764169 - DNA, 25 bp, Homo sapien
atccataactaacccctccctgaag

SEQ ID NO: 764170 - DNA, 25 bp, Homo sapien
acagagctgaatgtaagatcaggca

SEQ ID NO: 764171 - DNA, 25 bp, Homo sapien
gaatcctggttccttaggacggcca

SEQ ID NO: 764172 - DNA, 25 bp, Homo sapien
tcaggcattggataaaataggcaac

SEQ ID NO: 764173 - DNA, 25 bp, Homo sapien
ggccttgacttcttctactgggtgt

SEQ ID NO: 764174 - DNA, 25 bp, Homo sapien
gccactacgtgtggctaaagtttta

SEQ ID NO: 764175 - DNA, 25 bp, Homo sapien
taaatgaccttattcttgaccaggc

SEQ ID NO: 764176 - DNA, 25 bp, Homo sapien
tcttcaatctgtgactcgagtggag

SEQ ID NO: 764177 - DNA, 25 bp, Homo sapien
gatggtgtctcactacgggttgtgc

SEQ ID NO: 764178 - DNA, 25 bp, Homo sapien
ccctctgtgggactaaggacacggg

SEQ ID NO: 764179 - DNA, 25 bp, Homo sapien
gggtcctgacccgcgtaagtgccca

SEQ ID NO: 764180 - DNA, 25 bp, Homo sapien
tgccaggccgcggaggttgacgcgt

SEQ ID NO: 764181 - DNA, 25 bp, Homo sapien
tgacccgcgtaagtgcccagcagtg

SEQ ID NO: 764182 - DNA, 25 bp, Homo sapien
cagatttgatgtccagatgggagca

SEQ ID NO: 764183 - DNA, 25 bp, Homo sapien
ttctaaggtcaaggtccaggcccaa

SEQ ID NO: 764184 - DNA, 25 bp, Homo sapien
gatccactttgcagatccaggttca

SEQ ID NO: 764185 - DNA, 25 bp, Homo sapien
tcagctccaaggtccgaagtcaaat

SEQ ID NO: 764186 - DNA, 25 bp, Homo sapien
gaacttgtacttagaacttgatcct

SEQ ID NO: 764187 - DNA, 25 bp, Homo sapien
tacatagacctggacataaccttgg

SEQ ID NO: 764188 - DNA, 25 bp, Homo sapien
tatagacttgggactcggatctgga

SEQ ID NO: 764189 - DNA, 25 bp, Homo sapien
ttgatccttgatccatactgtggac

SEQ ID NO: 764190 - DNA, 25 bp, Homo sapien
cataccccgggtagtggcgtactgt

SEQ ID NO: 764191 - DNA, 25 bp, Homo sapien
tgccgggtcactcggacaacgaagt

SEQ ID NO: 764192 - DNA, 25 bp, Homo sapien
gatgccctttgagtgaccttggacg

SEQ ID NO: 764193 - DNA, 25 bp, Homo sapien
tctaacagaacaagccgtgaggctg

SEQ ID NO: 764194 - DNA, 25 bp, Homo sapien
ccagtttggatctcggggatatgcc

SEQ ID NO: 764195 - DNA, 25 bp, Homo sapien
attcttctgagtggtaactgtggtt

SEQ ID NO: 764196 - DNA, 25 bp, Homo sapien
ctgtggttggcagttgtgagggcat

SEQ ID NO: 764197 - DNA, 25 bp, Homo sapien
gggatatgccttctgaatcgcttat

SEQ ID NO: 764198 - DNA, 25 bp, Homo sapien
ccacggcagcgtcaactctcaggcc

SEQ ID NO: 764199 - DNA, 25 bp, Homo sapien
ttccccacggcagcgtcaactctca

SEQ ID NO: 764200 - DNA, 25 bp, Homo sapien
ccccacggcagcgtcaactctcagg

SEQ ID NO: 764201 - DNA, 25 bp, Homo sapien
ctttccccacggcagcgtcaactct

SEQ ID NO: 764202 - DNA, 25 bp, Homo sapien
tccttacaatagacgccttcacctg

SEQ ID NO: 764203 - DNA, 25 bp, Homo sapien
catgcagcttgatagtcttccttac

SEQ ID NO: 764204 - DNA, 25 bp, Homo sapien
ccttcacctgagctgggatgagtgg

SEQ ID NO: 764205 - DNA, 25 bp, Homo sapien
tgagtgggttgtccttctttgtaac

SEQ ID NO: 764206 - DNA, 25 bp, Homo sapien
cagttcccagttcctagttcctgtg

SEQ ID NO: 764207 - DNA, 25 bp, Homo sapien
tcagttcccagttcctagttcctgt

SEQ ID NO: 764208 - DNA, 25 bp, Homo sapien
cccagttcctagttcctgtggagcc

SEQ ID NO: 764209 - DNA, 25 bp, Homo sapien
agttcctagttcctgtggagcccac

SEQ ID NO: 764210 - DNA, 25 bp, Homo sapien
ccatagttattaaggcagaagtgcc

SEQ ID NO: 764211 - DNA, 25 bp, Homo sapien
caactgtagaactgtggaatcacgg

SEQ ID NO: 764212 - DNA, 25 bp, Homo sapien
tagttagaactagatgggcccaagt

SEQ ID NO: 764213 - DNA, 25 bp, Homo sapien
cctttcagaagaacacgtaagccca

SEQ ID NO: 764214 - DNA, 25 bp, Homo sapien
taggctttttatattgcgtgtgctg

SEQ ID NO: 764215 - DNA, 25 bp, Homo sapien
gctttttatattgcgtgtgctgttc

SEQ ID NO: 764216 - DNA, 25 bp, Homo sapien
aatagagataggctttttatattgc

SEQ ID NO: 764217 - DNA, 25 bp, Homo sapien
gagataggctttttatattgcgtgt

SEQ ID NO: 764218 - DNA, 25 bp, Homo sapien
cgcttgcgcactgaggtttcgcgta

SEQ ID NO: 764219 - DNA, 25 bp, Homo sapien
tagcgagctccgcaatgcatctctt

SEQ ID NO: 764220 - DNA, 25 bp, Homo sapien
caagctccagtgctacgtgtccctg

SEQ ID NO: 764221 - DNA, 25 bp, Homo sapien
tcgcgtaaggaaccaataggacgga

SEQ ID NO: 764222 - DNA, 25 bp, Homo sapien
agagagcaagcaccgcgcaaggccg

SEQ ID NO: 764223 - DNA, 25 bp, Homo sapien
ctgtggacgtgagtgggttgaggtc

SEQ ID NO: 764224 - DNA, 25 bp, Homo sapien
gccgctggggctcgtgctgtggacg

SEQ ID NO: 764225 - DNA, 25 bp, Homo sapien
ctagtcagccgctactagagagcaa

SEQ ID NO: 764226 - DNA, 25 bp, Homo sapien
gacaggattgccttagatggtcact

SEQ ID NO: 764227 - DNA, 25 bp, Homo sapien
gatggtcactataggcctctaagga

SEQ ID NO: 764228 - DNA, 25 bp, Homo sapien
ttacagtgtagggagacagaccgag

SEQ ID NO: 764229 - DNA, 25 bp, Homo sapien
tacaaatgctatgcagcaaatgaag

SEQ ID NO: 764230 - DNA, 25 bp, Homo sapien
tttgaaccagattttcttggataag

SEQ ID NO: 764231 - DNA, 25 bp, Homo sapien
gggaaccactgtatgtgttacttga

SEQ ID NO: 764232 - DNA, 25 bp, Homo sapien
tcaggtgagtagacaattataacaa

SEQ ID NO: 764233 - DNA, 25 bp, Homo sapien
tactgtcaactcagacatttggtgg

SEQ ID NO: 764234 - DNA, 25 bp, Homo sapien
ccactcccactccttctgaaggtca

SEQ ID NO: 764235 - DNA, 25 bp, Homo sapien
gaaggtcaggattcatatctttcac

SEQ ID NO: 764236 - DNA, 25 bp, Homo sapien
tgaaggtcaggattcatatctttca

SEQ ID NO: 764237 - DNA, 25 bp, Homo sapien
tcccactccttctgaaggtcaggat

SEQ ID NO: 764238 - DNA, 25 bp, Homo sapien
aggcagtggtggaaattcccattca

SEQ ID NO: 764239 - DNA, 25 bp, Homo sapien
ggccaggacccagtcagtagcacgc

SEQ ID NO: 764240 - DNA, 25 bp, Homo sapien
ggacccagtcagtagcacgcagaag

SEQ ID NO: 764241 - DNA, 25 bp, Homo sapien
cattcacgacgatgccatggaagga

SEQ ID NO: 764242 - DNA, 25 bp, Homo sapien
accacaggggatagtggtctgacaa

SEQ ID NO: 764243 - DNA, 25 bp, Homo sapien
aactcctggacattctcaaacccag

SEQ ID NO: 764244 - DNA, 25 bp, Homo sapien
gttaactcctggacattctcaaacc

SEQ ID NO: 764245 - DNA, 25 bp, Homo sapien
gtggtctgacaagagttaactcctg

SEQ ID NO: 764246 - DNA, 25 bp, Homo sapien
agcagcaggtagagaataagcagaa

SEQ ID NO: 764247 - DNA, 25 bp, Homo sapien
cccagagtctggatccagaagagaa

SEQ ID NO: 764248 - DNA, 25 bp, Homo sapien
ctcagatctagatttattccaggaa

SEQ ID NO: 764249 - DNA, 25 bp, Homo sapien
ttgaagggcccgtgtcagcatagca

SEQ ID NO: 764250 - DNA, 25 bp, Homo sapien
tgagggtaagtgagcagtgatgcaa

SEQ ID NO: 764251 - DNA, 25 bp, Homo sapien
ccacggtctgttcctgttgtgggca

SEQ ID NO: 764252 - DNA, 25 bp, Homo sapien
tgcaatagccaaagtaagatccacc

SEQ ID NO: 764253 - DNA, 25 bp, Homo sapien
accatcaccaaggaggccacggtct

SEQ ID NO: 764254 - DNA, 25 bp, Homo sapien
ccctctgctcgtgagtcacatcatg

SEQ ID NO: 764255 - DNA, 25 bp, Homo sapien
ttccctctgctcgtgagtcacatca

SEQ ID NO: 764256 - DNA, 25 bp, Homo sapien
tctttgcctttaccagctgagcgca

SEQ ID NO: 764257 - DNA, 25 bp, Homo sapien
tttaccagctgagcgcaattccctt

SEQ ID NO: 764258 - DNA, 25 bp, Homo sapien
ggcagcaaggccatgctgaatggct

SEQ ID NO: 764259 - DNA, 25 bp, Homo sapien
ttggttggaaggtcctctctgctgg

SEQ ID NO: 764260 - DNA, 25 bp, Homo sapien
tggctaagggcagtttggttggaag

SEQ ID NO: 764261 - DNA, 25 bp, Homo sapien
gaatcttcagcaaccgcgttgcagg

SEQ ID NO: 764262 - DNA, 25 bp, Homo sapien
acaacatcgtagattggagaatgca

SEQ ID NO: 764263 - DNA, 25 bp, Homo sapien
ttctaccaccctgacgcaaatcctg

SEQ ID NO: 764264 - DNA, 25 bp, Homo sapien
tataacaacatcgtagattggagaa

SEQ ID NO: 764265 - DNA, 25 bp, Homo sapien
aacatcgtagattggagaatgcagc

SEQ ID NO: 764266 - DNA, 25 bp, Homo sapien
ccagcttgagccacagggagattgc

SEQ ID NO: 764267 - DNA, 25 bp, Homo sapien
tctgacgtcctctggtgagaacagc

SEQ ID NO: 764268 - DNA, 25 bp, Homo sapien
cattggacaacaaaggacagggctc

SEQ ID NO: 764269 - DNA, 25 bp, Homo sapien
tgctcttgcctgtggaaaacgatct

SEQ ID NO: 764270 - DNA, 25 bp, Homo sapien
ttgtgtgtgatctttctgccctccc

SEQ ID NO: 764271 - DNA, 25 bp, Homo sapien
ggaagcaaccctccaagtgtgaagt

SEQ ID NO: 764272 - DNA, 25 bp, Homo sapien
cttctgggaagcaaccctccaagtg

SEQ ID NO: 764273 - DNA, 25 bp, Homo sapien
tgacagccttgtgtgtgatctttct

SEQ ID NO: 764274 - DNA, 25 bp, Homo sapien
ctggctgcccaccttctgggaagtg

SEQ ID NO: 764275 - DNA, 25 bp, Homo sapien
ctgcctggctgcccaccttctggga

SEQ ID NO: 764276 - DNA, 25 bp, Homo sapien
gcctggctgcccaccttctgggaag

SEQ ID NO: 764277 - DNA, 25 bp, Homo sapien
aagagaggagtgcctctgcctggct

SEQ ID NO: 764278 - DNA, 25 bp, Homo sapien
ctgttggggcacatgatttacccat

SEQ ID NO: 764279 - DNA, 25 bp, Homo sapien
ctgctgttggggcacatgatttacc

SEQ ID NO: 764280 - DNA, 25 bp, Homo sapien
tgggggcactgctgttggggcacat

SEQ ID NO: 764281 - DNA, 25 bp, Homo sapien
ggcactgctgttggggcacatgatt

SEQ ID NO: 764282 - DNA, 25 bp, Homo sapien
gtagcaatggcaagacttgggcatc

SEQ ID NO: 764283 - DNA, 25 bp, Homo sapien
caggacaccacgtagcaatggcaag

SEQ ID NO: 764284 - DNA, 25 bp, Homo sapien
ggcggtcaggacaccacgtagcaat

SEQ ID NO: 764285 - DNA, 25 bp, Homo sapien
ccacgtagcaatggcaagacttggg

SEQ ID NO: 764286 - DNA, 25 bp, Homo sapien
aaaaatgtttctgaagtcgttcatg

SEQ ID NO: 764287 - DNA, 25 bp, Homo sapien
aaatgtttctgaagtcgttcatgtg

SEQ ID NO: 764288 - DNA, 25 bp, Homo sapien
tgtttctgaagtcgttcatgtgttc

SEQ ID NO: 764289 - DNA, 25 bp, Homo sapien
tctgaagtcgttcatgtgttccacc

SEQ ID NO: 764290 - DNA, 25 bp, Homo sapien
atgcacaccgctggattccactggg

SEQ ID NO: 764291 - DNA, 25 bp, Homo sapien
tgagcatgcacaccgctggattcca

SEQ ID NO: 764292 - DNA, 25 bp, Homo sapien
ctgagcatgcacaccgctggattcc

SEQ ID NO: 764293 - DNA, 25 bp, Homo sapien
agcatgcacaccgctggattccact

SEQ ID NO: 764294 - DNA, 25 bp, Homo sapien
gagaacgtgcattttcagtggcgca

SEQ ID NO: 764295 - DNA, 25 bp, Homo sapien
catgaggccagctgaacgctgagaa

SEQ ID NO: 764296 - DNA, 25 bp, Homo sapien
tagtgatctttttcacgagctggtc

SEQ ID NO: 764297 - DNA, 25 bp, Homo sapien
gcaattctgccacgctgtgtagtga

SEQ ID NO: 764298 - DNA, 25 bp, Homo sapien
tgaacgaaaggactggagaagaccc

SEQ ID NO: 764299 - DNA, 25 bp, Homo sapien
cttgggtcggcgttgcactgcgtct

SEQ ID NO: 764300 - DNA, 25 bp, Homo sapien
cactgcgtctgatgaagaatctgac

SEQ ID NO: 764301 - DNA, 25 bp, Homo sapien
tgactttgactgcaagtgctgcctc

SEQ ID NO: 764302 - DNA, 25 bp, Homo sapien
aagtcccctggtaatgttcatgaag

SEQ ID NO: 764303 - DNA, 25 bp, Homo sapien
catacacaaggatgacgggctttct

SEQ ID NO: 764304 - DNA, 25 bp, Homo sapien
gaaaacagtgcgttttataggagca

SEQ ID NO: 764305 - DNA, 25 bp, Homo sapien
ggttgctcttcagtggatctttcag

SEQ ID NO: 764306 - DNA, 25 bp, Homo sapien
gagattaacatgttcactcccaccc

SEQ ID NO: 764307 - DNA, 25 bp, Homo sapien
ccatcagtgtgacagggaaggccca

SEQ ID NO: 764308 - DNA, 25 bp, Homo sapien
tgatcacagatagtccatcgcggtg

SEQ ID NO: 764309 - DNA, 25 bp, Homo sapien
tagtccatcgcggtgagagacccac

SEQ ID NO: 764310 - DNA, 25 bp, Homo sapien
tgactctcaggacatctaccctggg

SEQ ID NO: 764311 - DNA, 25 bp, Homo sapien
aagtctccccatgcggcttcactgt

SEQ ID NO: 764312 - DNA, 25 bp, Homo sapien
cactgttgactctcaggacatctac

SEQ ID NO: 764313 - DNA, 25 bp, Homo sapien
gcttcactgttgactctcaggacat

SEQ ID NO: 764314 - DNA, 25 bp, Homo sapien
gattccattccgtgagcggttcatt

SEQ ID NO: 764315 - DNA, 25 bp, Homo sapien
ccttggagctgccttggttcccctt

SEQ ID NO: 764316 - DNA, 25 bp, Homo sapien
agcggttcattgcaacatactccaa

SEQ ID NO: 764317 - DNA, 25 bp, Homo sapien
gtagaagcactctatggggacagcc

SEQ ID NO: 764318 - DNA, 25 bp, Homo sapien
gagtggcaccactgaaatcaagagc

SEQ ID NO: 764319 - DNA, 25 bp, Homo sapien
gaagtggtggccgtccttgtctgct

SEQ ID NO: 764320 - DNA, 25 bp, Homo sapien
gaaataggcacaagctcatgcggaa

SEQ ID NO: 764321 - DNA, 25 bp, Homo sapien
cactagccagccgttttgaattgaa

SEQ ID NO: 764322 - DNA, 25 bp, Homo sapien
ggaactactaatgaacaagccagga

SEQ ID NO: 764323 - DNA, 25 bp, Homo sapien
gaaggcctgtcgattaatggagcaa

SEQ ID NO: 764324 - DNA, 25 bp, Homo sapien
caagttttaattcacagcagggaga

SEQ ID NO: 764325 - DNA, 25 bp, Homo sapien
cctccaaaaaactgaactgcggtat

SEQ ID NO: 764326 - DNA, 25 bp, Homo sapien
ctttgccaggtaaagtgaactcttt

SEQ ID NO: 764327 - DNA, 25 bp, Homo sapien
gctgtatgtccagctttgccaggta

SEQ ID NO: 764328 - DNA, 25 bp, Homo sapien
gcctgtaaacacctaggctgcatat

SEQ ID NO: 764329 - DNA, 25 bp, Homo sapien
aaacacctaggctgcatattttaac

SEQ ID NO: 764330 - DNA, 25 bp, Homo sapien
tgtaaacacctaggctgcatatttt

SEQ ID NO: 764331 - DNA, 25 bp, Homo sapien
ctctgcctgtaaacacctaggctgc

SEQ ID NO: 764332 - DNA, 25 bp, Homo sapien
ctacatgtcatggaaagccagcgtg

SEQ ID NO: 764333 - DNA, 25 bp, Homo sapien
atgtcatggaaagccagcgtgaatc

SEQ ID NO: 764334 - DNA, 25 bp, Homo sapien
tacatgtcatggaaagccagcgtga

SEQ ID NO: 764335 - DNA, 25 bp, Homo sapien
tcatggaaagccagcgtgaatcaca

SEQ ID NO: 764336 - DNA, 25 bp, Homo sapien
aggacgcgaaaggacatgaggtaaa

SEQ ID NO: 764337 - DNA, 25 bp, Homo sapien
gacgcgaaaggacatgaggtaaatg

SEQ ID NO: 764338 - DNA, 25 bp, Homo sapien
gaggtaaatgcgtatagatattcat

SEQ ID NO: 764339 - DNA, 25 bp, Homo sapien
acatgaggtaaatgcgtatagatat

SEQ ID NO: 764340 - DNA, 25 bp, Homo sapien
catgtttgacggttcacttgaagca

SEQ ID NO: 764341 - DNA, 25 bp, Homo sapien
gaagcatgcatcacactcccgttca

SEQ ID NO: 764342 - DNA, 25 bp, Homo sapien
caggtcttgatttcatgtttgacgg

SEQ ID NO: 764343 - DNA, 25 bp, Homo sapien
gacggttcacttgaagcatgcatca

SEQ ID NO: 764344 - DNA, 25 bp, Homo sapien
tctgtcatctggagtagcctctttg

SEQ ID NO: 764345 - DNA, 25 bp, Homo sapien
tgtgtccacgctttggttctagcag

SEQ ID NO: 764346 - DNA, 25 bp, Homo sapien
gatatcctgtcttttccattacggc

SEQ ID NO: 764347 - DNA, 25 bp, Homo sapien
tatgttaacaatgcggctagccttg

SEQ ID NO: 764348 - DNA, 25 bp, Homo sapien
tctgtgccacttgaacagagccggg

SEQ ID NO: 764349 - DNA, 25 bp, Homo sapien
cctctgtgccacttgaacagagccg

SEQ ID NO: 764350 - DNA, 25 bp, Homo sapien
ccacttgaacagagccggggagagt

SEQ ID NO: 764351 - DNA, 25 bp, Homo sapien
cccctctgtgccacttgaacagagc

SEQ ID NO: 764352 - DNA, 25 bp, Homo sapien
tcagcaaatgcacaactagtattga

SEQ ID NO: 764353 - DNA, 25 bp, Homo sapien
tctgtggcacagctcatatgtatgt

SEQ ID NO: 764354 - DNA, 25 bp, Homo sapien
tatttgtcacatcttcttaggcttc

SEQ ID NO: 764355 - DNA, 25 bp, Homo sapien
tatgacttcacctggaatgagctga

SEQ ID NO: 764356 - DNA, 25 bp, Homo sapien
gctgataagtgatttgtgttgatgg

SEQ ID NO: 764357 - DNA, 25 bp, Homo sapien
taactcaaaatgaaatactcaatgg

SEQ ID NO: 764358 - DNA, 25 bp, Homo sapien
gaataataactcagcacggagttct

SEQ ID NO: 764359 - DNA, 25 bp, Homo sapien
ggtgctcccaaaatgggtagaataa

SEQ ID NO: 764360 - DNA, 25 bp, Homo sapien
tttctgcagcagaatagtccctgga

SEQ ID NO: 764361 - DNA, 25 bp, Homo sapien
cgatttggggcaaagagtcttggcc

SEQ ID NO: 764362 - DNA, 25 bp, Homo sapien
gagaggaggttgtgccagttcccaa

SEQ ID NO: 764363 - DNA, 25 bp, Homo sapien
caggagcctcagcttcgatttgggg

SEQ ID NO: 764364 - DNA, 25 bp, Homo sapien
ctgtctgcagctgctaatgatgtcg

SEQ ID NO: 764365 - DNA, 25 bp, Homo sapien
tgccagggaacccacagcgtgaaaa

SEQ ID NO: 764366 - DNA, 25 bp, Homo sapien
tgaagcgaggacaccatagtgatgg

SEQ ID NO: 764367 - DNA, 25 bp, Homo sapien
gatgtcgtgtcaaaactgaagcgag

SEQ ID NO: 764368 - DNA, 25 bp, Homo sapien
catgtgtagccactgcctgtccgtc

SEQ ID NO: 764369 - DNA, 25 bp, Homo sapien
gagccgagttcaaggcattcgtggc

SEQ ID NO: 764370 - DNA, 25 bp, Homo sapien
taagaaatcaggtccagagccgagt

SEQ ID NO: 764371 - DNA, 25 bp, Homo sapien
ggagcttggaaatcccgctgcagtg

SEQ ID NO: 764372 - DNA, 25 bp, Homo sapien
aataaataaatagcggcttggtgtg

SEQ ID NO: 764373 - DNA, 25 bp, Homo sapien
gaaattttacaagacctctatgtgg

SEQ ID NO: 764374 - DNA, 25 bp, Homo sapien
tatcaggctataaataatgtccaca

SEQ ID NO: 764375 - DNA, 25 bp, Homo sapien
aatattattcccctgcatagtgaca

SEQ ID NO: 764376 - DNA, 25 bp, Homo sapien
atggccgcagccctatatttccctg

SEQ ID NO: 764377 - DNA, 25 bp, Homo sapien
cagaacgaaagctctagatggccgc

SEQ ID NO: 764378 - DNA, 25 bp, Homo sapien
cacagctaattatcaaaactcgctg

SEQ ID NO: 764379 - DNA, 25 bp, Homo sapien
gctaattatcaaaactcgctgaccc

SEQ ID NO: 764380 - DNA, 25 bp, Homo sapien
gcatcatctaggaaggcccatccag

SEQ ID NO: 764381 - DNA, 25 bp, Homo sapien
gctcagactccacgcagggaaagtt

SEQ ID NO: 764382 - DNA, 25 bp, Homo sapien
gagtagataaaggtttaagggcatg

SEQ ID NO: 764383 - DNA, 25 bp, Homo sapien
catccagcaatcttttgagtagata

SEQ ID NO: 764384 - DNA, 25 bp, Homo sapien
tcatgctgacccaggcctttccatg

SEQ ID NO: 764385 - DNA, 25 bp, Homo sapien
aggtccagttgcttgtgagactggc

SEQ ID NO: 764386 - DNA, 25 bp, Homo sapien
aaaacctgtggatttgctgctcctc

SEQ ID NO: 764387 - DNA, 25 bp, Homo sapien
tgctcctcagagtttttcttgttct

SEQ ID NO: 764388 - DNA, 25 bp, Homo sapien
tcattattatcactttctacattga

SEQ ID NO: 764389 - DNA, 25 bp, Homo sapien
cattattatcactttctacattgag

SEQ ID NO: 764390 - DNA, 25 bp, Homo sapien
cttcacataaaggtttgcttcgatt

SEQ ID NO: 764391 - DNA, 25 bp, Homo sapien
tcacataaaggtttgcttcgatttg

SEQ ID NO: 764392 - DNA, 25 bp, Homo sapien
tcttcacataaaggtttgcttcgat

SEQ ID NO: 764393 - DNA, 25 bp, Homo sapien
cacataaaggtttgcttcgatttga

SEQ ID NO: 764394 - DNA, 25 bp, Homo sapien
aacattcctgggtagcgctcccgcc

SEQ ID NO: 764395 - DNA, 25 bp, Homo sapien
gcaacattcctgggtagcgctcccg

SEQ ID NO: 764396 - DNA, 25 bp, Homo sapien
gcagcaacattcctgggtagcgctc

SEQ ID NO: 764397 - DNA, 25 bp, Homo sapien
cagcaacattcctgggtagcgctcc

SEQ ID NO: 764398 - DNA, 25 bp, Homo sapien
caactacactgatagtataggatgg

SEQ ID NO: 764399 - DNA, 25 bp, Homo sapien
gtctttttcagtcccagagagtcca

SEQ ID NO: 764400 - DNA, 25 bp, Homo sapien
cagagagtccaactacactgatagt

SEQ ID NO: 764401 - DNA, 25 bp, Homo sapien
tataggatgggggacaaggctcttt

SEQ ID NO: 764402 - DNA, 25 bp, Homo sapien
gcacagaagtatgctctggataata

SEQ ID NO: 764403 - DNA, 25 bp, Homo sapien
agcacagaagtatgctctggataat

SEQ ID NO: 764404 - DNA, 25 bp, Homo sapien
cacagaagtatgctctggataatat

SEQ ID NO: 764405 - DNA, 25 bp, Homo sapien
tatgtcaccccagtagtacaaaaag

SEQ ID NO: 764406 - DNA, 25 bp, Homo sapien
gtagtacaaaaagtgatcactgttt

SEQ ID NO: 764407 - DNA, 25 bp, Homo sapien
tgtgttatgtcaccccagtagtaca

SEQ ID NO: 764408 - DNA, 25 bp, Homo sapien
attttgtgttatgtcaccccagtag

SEQ ID NO: 764409 - DNA, 25 bp, Homo sapien
caaatgtacattagtttttctgctg

SEQ ID NO: 764410 - DNA, 25 bp, Homo sapien
aaatgtacattagtttttctgctga

SEQ ID NO: 764411 - DNA, 25 bp, Homo sapien
gtgcaaatgtacattagtttttctg

SEQ ID NO: 764412 - DNA, 25 bp, Homo sapien
gcaaatgtacattagtttttctgct

SEQ ID NO: 764413 - DNA, 25 bp, Homo sapien
ttatccaacatttgtaccagtgcag

SEQ ID NO: 764414 - DNA, 25 bp, Homo sapien
taactggacaaaaaggttattcaca

SEQ ID NO: 764415 - DNA, 25 bp, Homo sapien
tttgaagcaaatgcctgaacttctc

SEQ ID NO: 764416 - DNA, 25 bp, Homo sapien
tccacgcattcatcacatttagttg

SEQ ID NO: 764417 - DNA, 25 bp, Homo sapien
ttataagcatccaaatagggaataa

SEQ ID NO: 764418 - DNA, 25 bp, Homo sapien
tataagcatccaaatagggaataat

SEQ ID NO: 764419 - DNA, 25 bp, Homo sapien
taagcatccaaatagggaataattt

SEQ ID NO: 764420 - DNA, 25 bp, Homo sapien
ataagcatccaaatagggaataatt

SEQ ID NO: 764421 - DNA, 25 bp, Homo sapien
cttggcaagagtgttaaaaactctt

SEQ ID NO: 764422 - DNA, 25 bp, Homo sapien
caaagcttctgaccaattcaaatgt

SEQ ID NO: 764423 - DNA, 25 bp, Homo sapien
ttcaaagcttctgaccaattcaaat

SEQ ID NO: 764424 - DNA, 25 bp, Homo sapien
aagcttctgaccaattcaaatgttc

SEQ ID NO: 764425 - DNA, 25 bp, Homo sapien
tcaaagcttctgaccaattcaaatg

SEQ ID NO: 764426 - DNA, 25 bp, Homo sapien
gatattggatgttgtacatggttct

SEQ ID NO: 764427 - DNA, 25 bp, Homo sapien
ctcggatattggatgttgtacatgg

SEQ ID NO: 764428 - DNA, 25 bp, Homo sapien
cggatattggatgttgtacatggtt

SEQ ID NO: 764429 - DNA, 25 bp, Homo sapien
tctcggatattggatgttgtacatg

SEQ ID NO: 764430 - DNA, 25 bp, Homo sapien
tggattttcaactatttatcactga

SEQ ID NO: 764431 - DNA, 25 bp, Homo sapien
attttcaactatttatcactgatgc

SEQ ID NO: 764432 - DNA, 25 bp, Homo sapien
tttggattttcaactatttatcact

SEQ ID NO: 764433 - DNA, 25 bp, Homo sapien
gattttcaactatttatcactgatg

SEQ ID NO: 764434 - DNA, 25 bp, Homo sapien
ggtaaggcgaactggccgaagatca

SEQ ID NO: 764435 - DNA, 25 bp, Homo sapien
tcaaaaggtaaggcgaactggccga

SEQ ID NO: 764436 - DNA, 25 bp, Homo sapien
aaggtaaggcgaactggccgaagat

SEQ ID NO: 764437 - DNA, 25 bp, Homo sapien
aaggcgaactggccgaagatcaagt

SEQ ID NO: 764438 - DNA, 25 bp, Homo sapien
ttaaaggcagcagtccataactgac

SEQ ID NO: 764439 - DNA, 25 bp, Homo sapien
attcccccaataaaactcaatgact

SEQ ID NO: 764440 - DNA, 25 bp, Homo sapien
aactcaatgacttaatggaattaaa

SEQ ID NO: 764441 - DNA, 25 bp, Homo sapien
tggaattaaatacacagaagcaccg

SEQ ID NO: 764442 - DNA, 25 bp, Homo sapien
gaagcttcagttcttattttcccaa

SEQ ID NO: 764443 - DNA, 25 bp, Homo sapien
gccagaattaatgtaaatggaagat

SEQ ID NO: 764444 - DNA, 25 bp, Homo sapien
tagccagaattaatgtaaatggaag

SEQ ID NO: 764445 - DNA, 25 bp, Homo sapien
attaatgtaaatggaagattagcca

SEQ ID NO: 764446 - DNA, 25 bp, Homo sapien
ctctgattagccagaattaatgtaa

SEQ ID NO: 764447 - DNA, 25 bp, Homo sapien
aggacattgtaacttgtctgccctt

SEQ ID NO: 764448 - DNA, 25 bp, Homo sapien
ggacattgtaacttgtctgcccttg

SEQ ID NO: 764449 - DNA, 25 bp, Homo sapien
gacattgtaacttgtctgcccttgg

SEQ ID NO: 764450 - DNA, 25 bp, Homo sapien
aaggacattgtaacttgtctgccct

SEQ ID NO: 764451 - DNA, 25 bp, Homo sapien
gaagggtgagggaataagattcaca

SEQ ID NO: 764452 - DNA, 25 bp, Homo sapien
ccaaattgggtttaacagattccag

SEQ ID NO: 764453 - DNA, 25 bp, Homo sapien
acagattccagtactcctcttagag

SEQ ID NO: 764454 - DNA, 25 bp, Homo sapien
ggtgagggaataagattcacactaa

SEQ ID NO: 764455 - DNA, 25 bp, Homo sapien
tgttttgcagagtaaattaatatat

SEQ ID NO: 764456 - DNA, 25 bp, Homo sapien
tacccatgaactagttcatcttttc

SEQ ID NO: 764457 - DNA, 25 bp, Homo sapien
tatatacccatgaactagttcatct

SEQ ID NO: 764458 - DNA, 25 bp, Homo sapien
aaattaatatatacccatgaactag

SEQ ID NO: 764459 - DNA, 25 bp, Homo sapien
gatagaaatgctcgaagcattccca

SEQ ID NO: 764460 - DNA, 25 bp, Homo sapien
tgatagaaatgctcgaagcattccc

SEQ ID NO: 764461 - DNA, 25 bp, Homo sapien
ctgatagaaatgctcgaagcattcc

SEQ ID NO: 764462 - DNA, 25 bp, Homo sapien
tctttgatagcctcgttttcaaaaa

SEQ ID NO: 764463 - DNA, 25 bp, Homo sapien
aaaaaatctgcttggctatcagtaa

SEQ ID NO: 764464 - DNA, 25 bp, Homo sapien
taattctttgatagcctcgttttca

SEQ ID NO: 764465 - DNA, 25 bp, Homo sapien
aaaaaaaatctgcttggctatcagt

SEQ ID NO: 764466 - DNA, 25 bp, Homo sapien
tttagcagtgatctcagttgcaatg

SEQ ID NO: 764467 - DNA, 25 bp, Homo sapien
taaatttagcagtgatctcagttgc

SEQ ID NO: 764468 - DNA, 25 bp, Homo sapien
tgctgtaaatttagcagtgatctca

SEQ ID NO: 764469 - DNA, 25 bp, Homo sapien
tgtaaatttagcagtgatctcagtt

SEQ ID NO: 764470 - DNA, 25 bp, Homo sapien
cactttgatgggttgattcccttgt

SEQ ID NO: 764471 - DNA, 25 bp, Homo sapien
cactttatggttgcgttcatggtca

SEQ ID NO: 764472 - DNA, 25 bp, Homo sapien
tggaagcaactgtacatcatcccca

SEQ ID NO: 764473 - DNA, 25 bp, Homo sapien
ggatttttaccaataccagcttcaa

SEQ ID NO: 764474 - DNA, 25 bp, Homo sapien
ggttccgcatagttatctgaaggat

SEQ ID NO: 764475 - DNA, 25 bp, Homo sapien
tatcaatgggttccgcatagttatc

SEQ ID NO: 764476 - DNA, 25 bp, Homo sapien
tatcttcaggatgtgccaaaggcac

SEQ ID NO: 764477 - DNA, 25 bp, Homo sapien
gaatagcccttctgtttgaaaattg

SEQ ID NO: 764478 - DNA, 25 bp, Homo sapien
tgagttttgaattttaatgtgattt

SEQ ID NO: 764479 - DNA, 25 bp, Homo sapien
ttttgaattttaatgtgattttgac

SEQ ID NO: 764480 - DNA, 25 bp, Homo sapien
aagtgagttttgaattttaatgtga

SEQ ID NO: 764481 - DNA, 25 bp, Homo sapien
gttttgaattttaatgtgattttga

SEQ ID NO: 764482 - DNA, 25 bp, Homo sapien
ttttgaggttctatcagaaaatcca

SEQ ID NO: 764483 - DNA, 25 bp, Homo sapien
tttgaaggcctccattccccgtgat

SEQ ID NO: 764484 - DNA, 25 bp, Homo sapien
ctccattccccgtgatttttttgag

SEQ ID NO: 764485 - DNA, 25 bp, Homo sapien
ttgaggttctatcagaaaatccatt

SEQ ID NO: 764486 - DNA, 25 bp, Homo sapien
agaagtggtgaaagcctcatcatca

SEQ ID NO: 764487 - DNA, 25 bp, Homo sapien
cacttccacgatgtcttccttttct

SEQ ID NO: 764488 - DNA, 25 bp, Homo sapien
tcacttccacgatgtcttccttttc

SEQ ID NO: 764489 - DNA, 25 bp, Homo sapien
ttcacttccacgatgtcttcctttt

SEQ ID NO: 764490 - DNA, 25 bp, Homo sapien
gtgattgcaggattaccaataccta

SEQ ID NO: 764491 - DNA, 25 bp, Homo sapien
tgattgcaggattaccaatacctaa

SEQ ID NO: 764492 - DNA, 25 bp, Homo sapien
gattgcaggattaccaatacctaac

SEQ ID NO: 764493 - DNA, 25 bp, Homo sapien
ttctgctttttatctcctttcactt

SEQ ID NO: 764494 - DNA, 25 bp, Homo sapien
ttcactttgcgggttttcttctcca

SEQ ID NO: 764495 - DNA, 25 bp, Homo sapien
tcactttgcgggttttcttctccat

SEQ ID NO: 764496 - DNA, 25 bp, Homo sapien
ctttttatctcctttcactttgcgg

SEQ ID NO: 764497 - DNA, 25 bp, Homo sapien
tagagtccttcagtacataaccctg

SEQ ID NO: 764498 - DNA, 25 bp, Homo sapien
gttcctgctaacacggtagagtcct

SEQ ID NO: 764499 - DNA, 25 bp, Homo sapien
gtcagtttcgttcctgctaacacgg

SEQ ID NO: 764500 - DNA, 25 bp, Homo sapien
gtcttggtcagtttcgttcctgcta

SEQ ID NO: 764501 - DNA, 25 bp, Homo sapien
gttgtctgctgtcattaggttgatt

SEQ ID NO: 764502 - DNA, 25 bp, Homo sapien
taagttgtctgctgtcattaggttg

SEQ ID NO: 764503 - DNA, 25 bp, Homo sapien
aagttgtctgctgtcattaggttga

SEQ ID NO: 764504 - DNA, 25 bp, Homo sapien
tgtctgctgtcattaggttgatttt

SEQ ID NO: 764505 - DNA, 25 bp, Homo sapien
gtagacagaaactcttgattttcaa

SEQ ID NO: 764506 - DNA, 25 bp, Homo sapien
tagtagacagaaactcttgattttc

SEQ ID NO: 764507 - DNA, 25 bp, Homo sapien
cttagtagtagacagaaactcttga

SEQ ID NO: 764508 - DNA, 25 bp, Homo sapien
tagtagtagacagaaactcttgatt

SEQ ID NO: 764509 - DNA, 25 bp, Homo sapien
gaatgtttcaacaacagattgatga

SEQ ID NO: 764510 - DNA, 25 bp, Homo sapien
tgaatgtttcaacaacagattgatg

SEQ ID NO: 764511 - DNA, 25 bp, Homo sapien
ttgaatgaatgtttcaacaacagat

SEQ ID NO: 764512 - DNA, 25 bp, Homo sapien
ctgttgaatgaatgtttcaacaaca

SEQ ID NO: 764513 - DNA, 25 bp, Homo sapien
cagtgtttgtcgtttctacaatttc

SEQ ID NO: 764514 - DNA, 25 bp, Homo sapien
ggagccacagtgtttgtcgtttcta

SEQ ID NO: 764515 - DNA, 25 bp, Homo sapien
ggaggagccacagtgtttgtcgttt

SEQ ID NO: 764516 - DNA, 25 bp, Homo sapien
gccacagtgtttgtcgtttctacaa

SEQ ID NO: 764517 - DNA, 25 bp, Homo sapien
cggcaactgaagtagtaccgttggt

SEQ ID NO: 764518 - DNA, 25 bp, Homo sapien
tgaagtagtaccgttggttccacca

SEQ ID NO: 764519 - DNA, 25 bp, Homo sapien
gcaactgaagtagtaccgttggttc

SEQ ID NO: 764520 - DNA, 25 bp, Homo sapien
gcaataaggttgcatgcagcagcag

SEQ ID NO: 764521 - DNA, 25 bp, Homo sapien
cacaggaatgatatactgattgcaa

SEQ ID NO: 764522 - DNA, 25 bp, Homo sapien
gatatactgattgcaataaggttgc

SEQ ID NO: 764523 - DNA, 25 bp, Homo sapien
aaaaattaaacctctccagtcatgc

SEQ ID NO: 764524 - DNA, 25 bp, Homo sapien
tatgcatcaacttccttgaattcca

SEQ ID NO: 764525 - DNA, 25 bp, Homo sapien
tgactcaatgtgttcacatttcctg

SEQ ID NO: 764526 - DNA, 25 bp, Homo sapien
catctcttcattcttgtatgcatca

SEQ ID NO: 764527 - DNA, 25 bp, Homo sapien
ttcattcttgtatgcatcaacttcc

SEQ ID NO: 764528 - DNA, 25 bp, Homo sapien
ggccctgattcgcaccttcttctga

SEQ ID NO: 764529 - DNA, 25 bp, Homo sapien
ttcttctgaagggttgtggtctctc

SEQ ID NO: 764530 - DNA, 25 bp, Homo sapien
catgcaggaccaggccctgattcgc

SEQ ID NO: 764531 - DNA, 25 bp, Homo sapien
gaagggttgtggtctctctgacaca

SEQ ID NO: 764532 - DNA, 25 bp, Homo sapien
cttgtttcatttctaattcaatcac

SEQ ID NO: 764533 - DNA, 25 bp, Homo sapien
cagtcttgtttcatttctaattcaa

SEQ ID NO: 764534 - DNA, 25 bp, Homo sapien
tcagtcttgtttcatttctaattca

SEQ ID NO: 764535 - DNA, 25 bp, Homo sapien
gtcttgtttcatttctaattcaatc

SEQ ID NO: 764536 - DNA, 25 bp, Homo sapien
ggcttccaggatgcagggggaggaa

SEQ ID NO: 764537 - DNA, 25 bp, Homo sapien
ggatgcagggggaggaacatggctt

SEQ ID NO: 764538 - DNA, 25 bp, Homo sapien
caggatgcagggggaggaacatggc

SEQ ID NO: 764539 - DNA, 25 bp, Homo sapien
ttccaggatgcagggggaggaacat

SEQ ID NO: 764540 - DNA, 25 bp, Homo sapien
gacctcatacacatgaggacccacc

SEQ ID NO: 764541 - DNA, 25 bp, Homo sapien
ttacaccaccaacaccttgtgtaga

SEQ ID NO: 764542 - DNA, 25 bp, Homo sapien
tacaccaccaacaccttgtgtagac

SEQ ID NO: 764543 - DNA, 25 bp, Homo sapien
catacacatgaggacccaccacata

SEQ ID NO: 764544 - DNA, 25 bp, Homo sapien
catcccgtcaggctgagttaggcga

SEQ ID NO: 764545 - DNA, 25 bp, Homo sapien
ctccagaagctctcctcatcccgtc

SEQ ID NO: 764546 - DNA, 25 bp, Homo sapien
tggcctgcatgcaacctcctccaga

SEQ ID NO: 764547 - DNA, 25 bp, Homo sapien
gagttaggcgagtgcattccatgcc

SEQ ID NO: 764548 - DNA, 25 bp, Homo sapien
catctcctagaagagccccattttc

SEQ ID NO: 764549 - DNA, 25 bp, Homo sapien
tctcctagaagagccccattttctg

SEQ ID NO: 764550 - DNA, 25 bp, Homo sapien
agagccccattttctgccacaaaac

SEQ ID NO: 764551 - DNA, 25 bp, Homo sapien
cccatctcctagaagagccccattt

SEQ ID NO: 764552 - DNA, 25 bp, Homo sapien
tttaagggagctttgctctgtgcct

SEQ ID NO: 764553 - DNA, 25 bp, Homo sapien
ctttaagggagctttgctctgtgcc

SEQ ID NO: 764554 - DNA, 25 bp, Homo sapien
tctgtgcctgtgtggcatcctgcat

SEQ ID NO: 764555 - DNA, 25 bp, Homo sapien
tttgctctgtgcctgtgtggcatcc

SEQ ID NO: 764556 - DNA, 25 bp, Homo sapien
gcctggcactgctgtttcgtgactt

SEQ ID NO: 764557 - DNA, 25 bp, Homo sapien
tcctggatgtcctcatcccggcctg

SEQ ID NO: 764558 - DNA, 25 bp, Homo sapien
tggatgtcctcatcccggcctggca

SEQ ID NO: 764559 - DNA, 25 bp, Homo sapien
gcactgctgtttcgtgacttctggt

SEQ ID NO: 764560 - DNA, 25 bp, Homo sapien
gtggccctccctgtcgcttatgacg

SEQ ID NO: 764561 - DNA, 25 bp, Homo sapien
cgcttatgacgctcctccaccttgg

SEQ ID NO: 764562 - DNA, 25 bp, Homo sapien
ctggcaggaccttcactttccaggc

SEQ ID NO: 764563 - DNA, 25 bp, Homo sapien
ctgtcgtttccatgtgattctcctg

SEQ ID NO: 764564 - DNA, 25 bp, Homo sapien
gtggtttgtatgtgttgtcggcccc

SEQ ID NO: 764565 - DNA, 25 bp, Homo sapien
caatggcggcatatatttgccaaga

SEQ ID NO: 764566 - DNA, 25 bp, Homo sapien
tttgtatgtgttgtcggccccagct

SEQ ID NO: 764567 - DNA, 25 bp, Homo sapien
gctggtggaaacgtgacaatggcgg

SEQ ID NO: 764568 - DNA, 25 bp, Homo sapien
agggcagtcccgcccatctcctttg

SEQ ID NO: 764569 - DNA, 25 bp, Homo sapien
gagtctccagaggagcagcgttgct

SEQ ID NO: 764570 - DNA, 25 bp, Homo sapien
agtgtggaccggagcatctggctct

SEQ ID NO: 764571 - DNA, 25 bp, Homo sapien
agtgtgagtgtggaccggagcatct

SEQ ID NO: 764572 - DNA, 25 bp, Homo sapien
tatcaggttcccatatacatcagag

SEQ ID NO: 764573 - DNA, 25 bp, Homo sapien
tatatgagttgcagctgaggcatga

SEQ ID NO: 764574 - DNA, 25 bp, Homo sapien
agagaagtaccggacaaaaagcaag

SEQ ID NO: 764575 - DNA, 25 bp, Homo sapien
gcatgtgtgggtgcctatcaggttc

SEQ ID NO: 764576 - DNA, 25 bp, Homo sapien
tttggaagccgctgctcttccgccc

SEQ ID NO: 764577 - DNA, 25 bp, Homo sapien
tcctgtctaagcacggggtcccagc

SEQ ID NO: 764578 - DNA, 25 bp, Homo sapien
tccctctgcccgtggatatcgcttg

SEQ ID NO: 764579 - DNA, 25 bp, Homo sapien
tagcatctccggttctcttccacgg

SEQ ID NO: 764580 - DNA, 25 bp, Homo sapien
cagtcttaggtgcattcgtgaacat

SEQ ID NO: 764581 - DNA, 25 bp, Homo sapien
gagatggcctttagctcgttccagt

SEQ ID NO: 764582 - DNA, 25 bp, Homo sapien
gaagccgtttcgtttgtgtaatgaa

SEQ ID NO: 764583 - DNA, 25 bp, Homo sapien
tgtaatgaacgcctcagtcttaggt

SEQ ID NO: 764584 - DNA, 25 bp, Homo sapien
tctcacaggagatgtggggtgtgga

SEQ ID NO: 764585 - DNA, 25 bp, Homo sapien
ctcacaggagatgtggggtgtggac

SEQ ID NO: 764586 - DNA, 25 bp, Homo sapien
ctctcacaggagatgtggggtgtgg

SEQ ID NO: 764587 - DNA, 25 bp, Homo sapien
ctccagcaggccgaatcccctgcgg

SEQ ID NO: 764588 - DNA, 25 bp, Homo sapien
agcaggccgaatcccctgcgggacc

SEQ ID NO: 764589 - DNA, 25 bp, Homo sapien
tctgctcgctggcgaactccagcag

SEQ ID NO: 764590 - DNA, 25 bp, Homo sapien
cctctgctcgctggcgaactccagc

SEQ ID NO: 764591 - DNA, 25 bp, Homo sapien
cctgagaagctcccatcttccagag

SEQ ID NO: 764592 - DNA, 25 bp, Homo sapien
ttccagaggaaacactcgcccctga

SEQ ID NO: 764593 - DNA, 25 bp, Homo sapien
ggaggctcgagtttccctgagaagc

SEQ ID NO: 764594 - DNA, 25 bp, Homo sapien
tgagaagctcccatcttccagagga

SEQ ID NO: 764595 - DNA, 25 bp, Homo sapien
ggtccttggaagtccgccataggct

SEQ ID NO: 764596 - DNA, 25 bp, Homo sapien
cataacctgctgatggtaggactcc

SEQ ID NO: 764597 - DNA, 25 bp, Homo sapien
gcctaaaggagaagcgtagactgct

SEQ ID NO: 764598 - DNA, 25 bp, Homo sapien
gccagttaattgtagcctaaaggag

SEQ ID NO: 764599 - DNA, 25 bp, Homo sapien
tgcctttccttcttagtaatctcac

SEQ ID NO: 764600 - DNA, 25 bp, Homo sapien
tcatttggcaggtgtgcgctgcctt

SEQ ID NO: 764601 - DNA, 25 bp, Homo sapien
tggcaggtgtgcgctgcctttcctt

SEQ ID NO: 764602 - DNA, 25 bp, Homo sapien
tttggcaggtgtgcgctgcctttcc

SEQ ID NO: 764603 - DNA, 25 bp, Homo sapien
tgcccggacgtctagctcgcgcggg

SEQ ID NO: 764604 - DNA, 25 bp, Homo sapien
cgatcaatactggacggagtcaggg

SEQ ID NO: 764605 - DNA, 25 bp, Homo sapien
tggttgtggcgttggcggcgaggcg

SEQ ID NO: 764606 - DNA, 25 bp, Homo sapien
acgccgacgaggtggcctgtcgtcc

SEQ ID NO: 764607 - DNA, 25 bp, Homo sapien
ccgactcgccgggcagagcgcagcc

SEQ ID NO: 764608 - DNA, 25 bp, Homo sapien
gcccgactcgccgggcagagcgcag

SEQ ID NO: 764609 - DNA, 25 bp, Homo sapien
agcccgactcgccgggcagagcgca

SEQ ID NO: 764610 - DNA, 25 bp, Homo sapien
cccgactcgccgggcagagcgcagc

SEQ ID NO: 764611 - DNA, 25 bp, Homo sapien
cagactctcccggccgaagaacgaa

SEQ ID NO: 764612 - DNA, 25 bp, Homo sapien
gggagccggcgagacacgcccttac

SEQ ID NO: 764613 - DNA, 25 bp, Homo sapien
cggtcggcggcgcagctgatctcaa

SEQ ID NO: 764614 - DNA, 25 bp, Homo sapien
ccggtgcgcggttgggcgggctgcg

SEQ ID NO: 764615 - DNA, 25 bp, Homo sapien
ttcgcccactgacgccgatcctgcg

SEQ ID NO: 764616 - DNA, 25 bp, Homo sapien
ctttcgcccactgacgccgatcctg

SEQ ID NO: 764617 - DNA, 25 bp, Homo sapien
cggctttcgcccactgacgccgatc

SEQ ID NO: 764618 - DNA, 25 bp, Homo sapien
ccggctttcgcccactgacgccgat

SEQ ID NO: 764619 - DNA, 25 bp, Homo sapien
cgggcgccggcttcagtttgagacc

SEQ ID NO: 764620 - DNA, 25 bp, Homo sapien
gaggtcctctcagaaagccgcctgt

SEQ ID NO: 764621 - DNA, 25 bp, Homo sapien
cctaaacagtgcagtctcggcgggt

SEQ ID NO: 764622 - DNA, 25 bp, Homo sapien
accccgtcgcgccctgggaagacag

SEQ ID NO: 764623 - DNA, 25 bp, Homo sapien
ggtcgaggctgcgactccacactgg

SEQ ID NO: 764624 - DNA, 25 bp, Homo sapien
tgccttttgccaacgaggaaactaa

SEQ ID NO: 764625 - DNA, 25 bp, Homo sapien
tccacactggggaacgaggatcgcg

SEQ ID NO: 764626 - DNA, 25 bp, Homo sapien
caggtggtggtagacgagttctccc

SEQ ID NO: 764627 - DNA, 25 bp, Homo sapien
agcagacccggacgtctccgcgagg

SEQ ID NO: 764628 - DNA, 25 bp, Homo sapien
ggcttccgctcaagagtcccgcgat

SEQ ID NO: 764629 - DNA, 25 bp, Homo sapien
gggcactcttggataggcaagacga

SEQ ID NO: 764630 - DNA, 25 bp, Homo sapien
cgaggcggccatcgaaggagagcct

SEQ ID NO: 764631 - DNA, 25 bp, Homo sapien
aaagagacatccaagaaagaaagtc

SEQ ID NO: 764632 - DNA, 25 bp, Homo sapien
tgtgtgtaagacaggtttaatattt

SEQ ID NO: 764633 - DNA, 25 bp, Homo sapien
taatattttggttggctcaaattct

SEQ ID NO: 764634 - DNA, 25 bp, Homo sapien
ccgggttttgaggagaagtttgctg

SEQ ID NO: 764635 - DNA, 25 bp, Homo sapien
caaggcatgtttcccctgtcaagtg

SEQ ID NO: 764636 - DNA, 25 bp, Homo sapien
tcggtagtcacgaagccagactcgc

SEQ ID NO: 764637 - DNA, 25 bp, Homo sapien
gaacccgcgcagctcaaggttggaa

SEQ ID NO: 764638 - DNA, 25 bp, Homo sapien
tagcattggcaagtaacatctccgg

SEQ ID NO: 764639 - DNA, 25 bp, Homo sapien
tgacacctgactaacaggaccggca

SEQ ID NO: 764640 - DNA, 25 bp, Homo sapien
gaagagtctcttcggcagagacagg

SEQ ID NO: 764641 - DNA, 25 bp, Homo sapien
aataaagagaagagtctcttcggca

SEQ ID NO: 764642 - DNA, 25 bp, Homo sapien
gcagtcagcagtctccggagcaggc

SEQ ID NO: 764643 - DNA, 25 bp, Homo sapien
gaaaccagaactcggacaaggcagt

SEQ ID NO: 764644 - DNA, 25 bp, Homo sapien
taagctgcctctatggaaggtgacc

SEQ ID NO: 764645 - DNA, 25 bp, Homo sapien
gacatttgcacacacctgatttgga

SEQ ID NO: 764646 - DNA, 25 bp, Homo sapien
gaagcttcagacaggctcatcgtca

SEQ ID NO: 764647 - DNA, 25 bp, Homo sapien
ctctttaagacagctcggacctact

SEQ ID NO: 764648 - DNA, 25 bp, Homo sapien
cactttggataccattaatatcccc

SEQ ID NO: 764649 - DNA, 25 bp, Homo sapien
gagtgagaagaaaggtcccaattgc

SEQ ID NO: 764650 - DNA, 25 bp, Homo sapien
gccgggcttgggctttcttgatctg

SEQ ID NO: 764651 - DNA, 25 bp, Homo sapien
cctgaagggtcaaagtgacttgtcc

SEQ ID NO: 764652 - DNA, 25 bp, Homo sapien
gaagggtcaaagtgacttgtccacc

SEQ ID NO: 764653 - DNA, 25 bp, Homo sapien
cagaagcctgaagggtcaaagtgac

SEQ ID NO: 764654 - DNA, 25 bp, Homo sapien
gaagcctgaagggtcaaagtgactt

SEQ ID NO: 764655 - DNA, 25 bp, Homo sapien
ttatgcagcacaatggactttcggc

SEQ ID NO: 764656 - DNA, 25 bp, Homo sapien
tcggcaatcggtgtcttcaaaccag

SEQ ID NO: 764657 - DNA, 25 bp, Homo sapien
catgttagtgctgtcacgtggacca

SEQ ID NO: 764658 - DNA, 25 bp, Homo sapien
aaagcctattggagctctcagccag

SEQ ID NO: 764659 - DNA, 25 bp, Homo sapien
ctatgggcccaatggaggacaatct

SEQ ID NO: 764660 - DNA, 25 bp, Homo sapien
caaagagccaactgctggaattttc

SEQ ID NO: 764661 - DNA, 25 bp, Homo sapien
tagagatgtcgtccaaagagccaac

SEQ ID NO: 764662 - DNA, 25 bp, Homo sapien
tcaaactggccagcttgtgcctatg

SEQ ID NO: 764663 - DNA, 25 bp, Homo sapien
gttgacttccagacacttaagggca

SEQ ID NO: 764664 - DNA, 25 bp, Homo sapien
tgctgccgcgctagtaatggtgtaa

SEQ ID NO: 764665 - DNA, 25 bp, Homo sapien
ttcacagatgctcagtccacaggac

SEQ ID NO: 764666 - DNA, 25 bp, Homo sapien
gaaaggacacttggactccgagtct

SEQ ID NO: 764667 - DNA, 25 bp, Homo sapien
taaaacctgggaggcactcctggtg

SEQ ID NO: 764668 - DNA, 25 bp, Homo sapien
ctttccggccagagagaggttatcc

SEQ ID NO: 764669 - DNA, 25 bp, Homo sapien
gaaatactgattgtcctggtctggg

SEQ ID NO: 764670 - DNA, 25 bp, Homo sapien
ggtgtatctagatcccagcatgcga

SEQ ID NO: 764671 - DNA, 25 bp, Homo sapien
tcttcatgttgtcccacttcatcaa

SEQ ID NO: 764672 - DNA, 25 bp, Homo sapien
gccttggccaggtagatttttgttg

SEQ ID NO: 764673 - DNA, 25 bp, Homo sapien
ccttggccaggtagatttttgttga

SEQ ID NO: 764674 - DNA, 25 bp, Homo sapien
ttcatcaaattgctgaactttctgt

SEQ ID NO: 764675 - DNA, 25 bp, Homo sapien
agatggttggcgcattttttacagt

SEQ ID NO: 764676 - DNA, 25 bp, Homo sapien
cacgcgcaggccttattacacacta

SEQ ID NO: 764677 - DNA, 25 bp, Homo sapien
agtctccagcatgcattaatttatg

SEQ ID NO: 764678 - DNA, 25 bp, Homo sapien
tacagttccatataacacgcgcagg

SEQ ID NO: 764679 - DNA, 25 bp, Homo sapien
gtctccctagtagatagggttacag

SEQ ID NO: 764680 - DNA, 25 bp, Homo sapien
agcagcagatatgggcgttaaaggt

SEQ ID NO: 764681 - DNA, 25 bp, Homo sapien
gatatgggcgttaaaggtcctggtc

SEQ ID NO: 764682 - DNA, 25 bp, Homo sapien
cttcccactgggtgtcttcaggtgt

SEQ ID NO: 764683 - DNA, 25 bp, Homo sapien
gtgtcttcaggtgttcagctctcct

SEQ ID NO: 764684 - DNA, 25 bp, Homo sapien
catgctctgtgcctccttgtgcctt

SEQ ID NO: 764685 - DNA, 25 bp, Homo sapien
ctgacatgctctgtgcctccttgtg

SEQ ID NO: 764686 - DNA, 25 bp, Homo sapien
gacatgctctgtgcctccttgtgcc

SEQ ID NO: 764687 - DNA, 25 bp, Homo sapien
gctctgtgcctccttgtgcctttca

SEQ ID NO: 764688 - DNA, 25 bp, Homo sapien
gtggctttcaaaccgggacacatgc

SEQ ID NO: 764689 - DNA, 25 bp, Homo sapien
tgaatttctgcgtcaccatcagtgt

SEQ ID NO: 764690 - DNA, 25 bp, Homo sapien
tgtctgatcctaatccacagcaaag

SEQ ID NO: 764691 - DNA, 25 bp, Homo sapien
tgatgcagaactcaaggctccctgc

SEQ ID NO: 764692 - DNA, 25 bp, Homo sapien
cagaggcataatccacttttcatat

SEQ ID NO: 764693 - DNA, 25 bp, Homo sapien
atatttttcttgaggctgcgggtgg

SEQ ID NO: 764694 - DNA, 25 bp, Homo sapien
tcatatttttcttgaggctgcgggt

SEQ ID NO: 764695 - DNA, 25 bp, Homo sapien
tgcgggtgggggatcctccttctga

SEQ ID NO: 764696 - DNA, 25 bp, Homo sapien
tatttaatgttaacctgagattttc

SEQ ID NO: 764697 - DNA, 25 bp, Homo sapien
agtgcctatttaatgttaacctgag

SEQ ID NO: 764698 - DNA, 25 bp, Homo sapien
gatcagataaacatccagtgcctat

SEQ ID NO: 764699 - DNA, 25 bp, Homo sapien
taaacatccagtgcctatttaatgt

SEQ ID NO: 764700 - DNA, 25 bp, Homo sapien
agtcctctactgctgtgatccagag

SEQ ID NO: 764701 - DNA, 25 bp, Homo sapien
atgcacttatttacaggagacacac

SEQ ID NO: 764702 - DNA, 25 bp, Homo sapien
gagacacacagattaaatttacaga

SEQ ID NO: 764703 - DNA, 25 bp, Homo sapien
tcactgactctgacaccacctgtgt

SEQ ID NO: 764704 - DNA, 25 bp, Homo sapien
cacttagaaagtccaggcaaaggat

SEQ ID NO: 764705 - DNA, 25 bp, Homo sapien
ggcacttagaaagtccaggcaaagg

SEQ ID NO: 764706 - DNA, 25 bp, Homo sapien
ttagaaagtccaggcaaaggatcat

SEQ ID NO: 764707 - DNA, 25 bp, Homo sapien
gggcacttagaaagtccaggcaaag

SEQ ID NO: 764708 - DNA, 25 bp, Homo sapien
caagtgtctgggtgggtgcatataa

SEQ ID NO: 764709 - DNA, 25 bp, Homo sapien
tggtaggttttcaggttgaacaagc

SEQ ID NO: 764710 - DNA, 25 bp, Homo sapien
taactaaggcgtcttcacgtggctc

SEQ ID NO: 764711 - DNA, 25 bp, Homo sapien
gttggaatgctaggccaagtgcaac

SEQ ID NO: 764712 - DNA, 25 bp, Homo sapien
tctgcatcaggactttcacggagcc

SEQ ID NO: 764713 - DNA, 25 bp, Homo sapien
tgtgcccctgttgtatgcccgctta

SEQ ID NO: 764714 - DNA, 25 bp, Homo sapien
tctgcatgcctttctagatggccgg

SEQ ID NO: 764715 - DNA, 25 bp, Homo sapien
tcacagggccacgtaaacaacaaag

SEQ ID NO: 764716 - DNA, 25 bp, Homo sapien
gtctcaacagctttaggtgccatca

SEQ ID NO: 764717 - DNA, 25 bp, Homo sapien
catcatgttgacactcgacaggtga

SEQ ID NO: 764718 - DNA, 25 bp, Homo sapien
gaacccaccgtgagtatagtctaga

SEQ ID NO: 764719 - DNA, 25 bp, Homo sapien
ggaaggaaccttagctgtcatgaag

SEQ ID NO: 764720 - DNA, 25 bp, Homo sapien
taatgactcccagagccatgaaggg

SEQ ID NO: 764721 - DNA, 25 bp, Homo sapien
agaaacactggcttaggacgcacca

SEQ ID NO: 764722 - DNA, 25 bp, Homo sapien
ggttctaaaagagcatgcgacatgt

SEQ ID NO: 764723 - DNA, 25 bp, Homo sapien
cataatatccccttgtagagagcag

SEQ ID NO: 764724 - DNA, 25 bp, Homo sapien
tgccgaccaggattcccagaatgaa

SEQ ID NO: 764725 - DNA, 25 bp, Homo sapien
ggtgccgaccaggattcccagaatg

SEQ ID NO: 764726 - DNA, 25 bp, Homo sapien
ccgaccaggattcccagaatgaatg

SEQ ID NO: 764727 - DNA, 25 bp, Homo sapien
gaccaggattcccagaatgaatgga

SEQ ID NO: 764728 - DNA, 25 bp, Homo sapien
cagcaccaaaggcactcacttgcag

SEQ ID NO: 764729 - DNA, 25 bp, Homo sapien
ggcactcacttgcagaagttctagc

SEQ ID NO: 764730 - DNA, 25 bp, Homo sapien
cactcacttgcagaagttctagcat

SEQ ID NO: 764731 - DNA, 25 bp, Homo sapien
ccaaaggcactcacttgcagaagtt

SEQ ID NO: 764732 - DNA, 25 bp, Homo sapien
cctgagcttcgcaagcttcctgagg

SEQ ID NO: 764733 - DNA, 25 bp, Homo sapien
gcatcccttcctcattccaccaggc

SEQ ID NO: 764734 - DNA, 25 bp, Homo sapien
accaggcatccatgcacctgagctt

SEQ ID NO: 764735 - DNA, 25 bp, Homo sapien
tccatgcacctgagcttcgcaagct

SEQ ID NO: 764736 - DNA, 25 bp, Homo sapien
gtggggccatggttcagagagagtg

SEQ ID NO: 764737 - DNA, 25 bp, Homo sapien
gggccatggttcagagagagtgtct

SEQ ID NO: 764738 - DNA, 25 bp, Homo sapien
gccatggttcagagagagtgtcttg

SEQ ID NO: 764739 - DNA, 25 bp, Homo sapien
ctgtggggccatggttcagagagag

SEQ ID NO: 764740 - DNA, 25 bp, Homo sapien
caaggggtccagaccttcccggcag

SEQ ID NO: 764741 - DNA, 25 bp, Homo sapien
tggtgtgaacggaggcacggtgctg

SEQ ID NO: 764742 - DNA, 25 bp, Homo sapien
cagccatgtgagtggtgtgaacgga

SEQ ID NO: 764743 - DNA, 25 bp, Homo sapien
gcaggtttcacacattctgcactct

SEQ ID NO: 764744 - DNA, 25 bp, Homo sapien
catctcgccacacggagcttggagt

SEQ ID NO: 764745 - DNA, 25 bp, Homo sapien
tgcaaacatgggtgcgcaacgaggc

SEQ ID NO: 764746 - DNA, 25 bp, Homo sapien
tccagatgtgtgactcaggtgccgc

SEQ ID NO: 764747 - DNA, 25 bp, Homo sapien
ccacaaacatgggaaagagcatctg

SEQ ID NO: 764748 - DNA, 25 bp, Homo sapien
aattggcctccctgtaagcttctga

SEQ ID NO: 764749 - DNA, 25 bp, Homo sapien
gagttccgtactctggagccaggag

SEQ ID NO: 764750 - DNA, 25 bp, Homo sapien
tccagggtgaggcattcgcaacttt

SEQ ID NO: 764751 - DNA, 25 bp, Homo sapien
gatggcagtcgcaccacctataagt

SEQ ID NO: 764752 - DNA, 25 bp, Homo sapien
agatgaacttagtgcttcagtgtca

SEQ ID NO: 764753 - DNA, 25 bp, Homo sapien
gcagctcttgtttcggctaataaca

SEQ ID NO: 764754 - DNA, 25 bp, Homo sapien
caaccatttaaaaagagcacgttgc

SEQ ID NO: 764755 - DNA, 25 bp, Homo sapien
gaggctatcttcaggcctgagaggc

SEQ ID NO: 764756 - DNA, 25 bp, Homo sapien
ccatactgaagaaggatactgatta

SEQ ID NO: 764757 - DNA, 25 bp, Homo sapien
gccatactgaagaaggatactgatt

SEQ ID NO: 764758 - DNA, 25 bp, Homo sapien
ggccatactgaagaaggatactgat

SEQ ID NO: 764759 - DNA, 25 bp, Homo sapien
catactgaagaaggatactgattat

SEQ ID NO: 764760 - DNA, 25 bp, Homo sapien
cacagtggcctatgacgcaagagag

SEQ ID NO: 764761 - DNA, 25 bp, Homo sapien
catttttccatgcagatgagcagca

SEQ ID NO: 764762 - DNA, 25 bp, Homo sapien
aaatccctgccatgtcattgaagac

SEQ ID NO: 764763 - DNA, 25 bp, Homo sapien
ggagttatattcagaaacccatgca

SEQ ID NO: 764764 - DNA, 25 bp, Homo sapien
gccagtttaatgaggtcggtcgttc

SEQ ID NO: 764765 - DNA, 25 bp, Homo sapien
ggtcgttcttgcttccgggcacata

SEQ ID NO: 764766 - DNA, 25 bp, Homo sapien
tcaccagggaagaggattcaaacga

SEQ ID NO: 764767 - DNA, 25 bp, Homo sapien
taagagcctgaacctaaatgacttc

SEQ ID NO: 764768 - DNA, 25 bp, Homo sapien
tgctccactcctctcgaggtgcaga

SEQ ID NO: 764769 - DNA, 25 bp, Homo sapien
gtgcagacctagtgttgacaccagt

SEQ ID NO: 764770 - DNA, 25 bp, Homo sapien
ccagtatttacgtccatgcccatga

SEQ ID NO: 764771 - DNA, 25 bp, Homo sapien
cctttgtgttagtctggctgatgct

SEQ ID NO: 764772 - DNA, 25 bp, Homo sapien
ctggcatttgccctccaggacggtc

SEQ ID NO: 764773 - DNA, 25 bp, Homo sapien
tgagtaatcctaagaatgactgtac

SEQ ID NO: 764774 - DNA, 25 bp, Homo sapien
tcctcaagctgtggagcgcactgat

SEQ ID NO: 764775 - DNA, 25 bp, Homo sapien
agagacatacacagtatcaagtgag

SEQ ID NO: 764776 - DNA, 25 bp, Homo sapien
gaggcttgacctgaggagcctcttg

SEQ ID NO: 764777 - DNA, 25 bp, Homo sapien
acctgaggagcctcttgcttacttg

SEQ ID NO: 764778 - DNA, 25 bp, Homo sapien
agccagaggcttgacctgaggagcc

SEQ ID NO: 764779 - DNA, 25 bp, Homo sapien
ttgacctgaggagcctcttgcttac

SEQ ID NO: 764780 - DNA, 25 bp, Homo sapien
caggtgcagcccaatggttttctga

SEQ ID NO: 764781 - DNA, 25 bp, Homo sapien
ttcctgcagacacaaccaccttgag

SEQ ID NO: 764782 - DNA, 25 bp, Homo sapien
cttgaaagcattgcaggagacgaca

SEQ ID NO: 764783 - DNA, 25 bp, Homo sapien
gttttctgaaactgcgccctacctc

SEQ ID NO: 764784 - DNA, 25 bp, Homo sapien
caacagatgccttccaacacgtgga

SEQ ID NO: 764785 - DNA, 25 bp, Homo sapien
aacactctggagtcatttccccatg

SEQ ID NO: 764786 - DNA, 25 bp, Homo sapien
gcttgaatgtccgttttccaacaga

SEQ ID NO: 764787 - DNA, 25 bp, Homo sapien
cattctgcgttgtctatgcaggcaa

SEQ ID NO: 764788 - DNA, 25 bp, Homo sapien
cattgcctaatctggagctgctact

SEQ ID NO: 764789 - DNA, 25 bp, Homo sapien
taacggcttcagtaagggctgcaga

SEQ ID NO: 764790 - DNA, 25 bp, Homo sapien
ggagcgttctcaatacttcagccat

SEQ ID NO: 764791 - DNA, 25 bp, Homo sapien
gatacagaacagaaacgaccaggag

SEQ ID NO: 764792 - DNA, 25 bp, Homo sapien
ttcacgacctaggaggtcaccaatc

SEQ ID NO: 764793 - DNA, 25 bp, Homo sapien
tcacagcttcacgacctaggaggtc

SEQ ID NO: 764794 - DNA, 25 bp, Homo sapien
ttgctcatcacagcttcacgaccta

SEQ ID NO: 764795 - DNA, 25 bp, Homo sapien
catcacagcttcacgacctaggagg

SEQ ID NO: 764796 - DNA, 25 bp, Homo sapien
taagtgtgtatgagaaagacagaga

SEQ ID NO: 764797 - DNA, 25 bp, Homo sapien
caagtgtgatgttcaaaaaacaatg

SEQ ID NO: 764798 - DNA, 25 bp, Homo sapien
tgtacatgatgtattcctgaaggct

SEQ ID NO: 764799 - DNA, 25 bp, Homo sapien
gtacttttcaagtgtgatgttcaaa

SEQ ID NO: 764800 - DNA, 25 bp, Homo sapien
tgatggtctgggctacctacacacc

SEQ ID NO: 764801 - DNA, 25 bp, Homo sapien
tgtctttgccacctaattgatttgc

SEQ ID NO: 764802 - DNA, 25 bp, Homo sapien
gagaacaccgtgcttggtaattaga

SEQ ID NO: 764803 - DNA, 25 bp, Homo sapien
tgccctttagaagaatgcaggctgc

SEQ ID NO: 764804 - DNA, 25 bp, Homo sapien
ccaaataccccaggacaggaacacg

SEQ ID NO: 764805 - DNA, 25 bp, Homo sapien
cacacccaaataccccaggacagga

SEQ ID NO: 764806 - DNA, 25 bp, Homo sapien
ccccaggacaggaacacggcacggt

SEQ ID NO: 764807 - DNA, 25 bp, Homo sapien
cctccctgccgccttgctccttctc

SEQ ID NO: 764808 - DNA, 25 bp, Homo sapien
ctcaagatacggctgcgtcgaggcg

SEQ ID NO: 764809 - DNA, 25 bp, Homo sapien
ggctggagcctcaagatacggctgc

SEQ ID NO: 764810 - DNA, 25 bp, Homo sapien
gagcctcaagatacggctgcgtcga

SEQ ID NO: 764811 - DNA, 25 bp, Homo sapien
tacggctgcgtcgaggcggcttcct

SEQ ID NO: 764812 - DNA, 25 bp, Homo sapien
caccctgacaagtgcacgtggacat

SEQ ID NO: 764813 - DNA, 25 bp, Homo sapien
ctgacaagtgcacgtggacattttc

SEQ ID NO: 764814 - DNA, 25 bp, Homo sapien
taactcgatcccacagatgatcagt

SEQ ID NO: 764815 - DNA, 25 bp, Homo sapien
gatctgcatgggcagtaactcgatc

SEQ ID NO: 764816 - DNA, 25 bp, Homo sapien
agtcaccacagcgtccactctctca

SEQ ID NO: 764817 - DNA, 25 bp, Homo sapien
gtcaccacagcgtccactctctcac

SEQ ID NO: 764818 - DNA, 25 bp, Homo sapien
atgcacaggatccgcgggctgccca

SEQ ID NO: 764819 - DNA, 25 bp, Homo sapien
aggatccgcgggctgcccaaaccat

SEQ ID NO: 764820 - DNA, 25 bp, Homo sapien
acatgcacaggatccgcgggctgcc

SEQ ID NO: 764821 - DNA, 25 bp, Homo sapien
gcacaggatccgcgggctgcccaaa

SEQ ID NO: 764822 - DNA, 25 bp, Homo sapien
gagtggagaacctgaactttctgtc

SEQ ID NO: 764823 - DNA, 25 bp, Homo sapien
tctcagcaacgccactccactgctc

SEQ ID NO: 764824 - DNA, 25 bp, Homo sapien
ccagacgcgtgcctggccggagaca

SEQ ID NO: 764825 - DNA, 25 bp, Homo sapien
caaacggaatagaagtacccgcctg

SEQ ID NO: 764826 - DNA, 25 bp, Homo sapien
tggcaagagcctacgtgtgttcagc

SEQ ID NO: 764827 - DNA, 25 bp, Homo sapien
tatgtataccacaagcagtgactgg

SEQ ID NO: 764828 - DNA, 25 bp, Homo sapien
ggattttcacggactactgggcttg

SEQ ID NO: 764829 - DNA, 25 bp, Homo sapien
caaatggtgccagagccactgaaca

SEQ ID NO: 764830 - DNA, 25 bp, Homo sapien
tgtaaaatacctagtgccagcagac

SEQ ID NO: 764831 - DNA, 25 bp, Homo sapien
tcatctcatggacaacggaacgggc

SEQ ID NO: 764832 - DNA, 25 bp, Homo sapien
cacaaaaattgcacggcacgggacc

SEQ ID NO: 764833 - DNA, 25 bp, Homo sapien
ctacaagagggcgtgcacagtggac

SEQ ID NO: 764834 - DNA, 25 bp, Homo sapien
ctgttctcccatgggtcgtcaaacc

SEQ ID NO: 764835 - DNA, 25 bp, Homo sapien
cagagaatttgaggttgactcacgg

SEQ ID NO: 764836 - DNA, 25 bp, Homo sapien
cttgcaatgagagatgcagagcgtg

SEQ ID NO: 764837 - DNA, 25 bp, Homo sapien
tcacggctttgaagggaaaacaaga

SEQ ID NO: 764838 - DNA, 25 bp, Homo sapien
tgggccattataactctggatgact

SEQ ID NO: 764839 - DNA, 25 bp, Homo sapien
taatgggccattataactctggatg

SEQ ID NO: 764840 - DNA, 25 bp, Homo sapien
tagataatgggccattataactctg

SEQ ID NO: 764841 - DNA, 25 bp, Homo sapien
ggccattataactctggatgacttc

SEQ ID NO: 764842 - DNA, 25 bp, Homo sapien
ggaaatgcagcatccgagccatcct

SEQ ID NO: 764843 - DNA, 25 bp, Homo sapien
tccctgtttcaagtgggcagtggaa

SEQ ID NO: 764844 - DNA, 25 bp, Homo sapien
gaacctaaaatggtgtgagcctgaa

SEQ ID NO: 764845 - DNA, 25 bp, Homo sapien
ccccgcttgtggtcagctctaaata

SEQ ID NO: 764846 - DNA, 25 bp, Homo sapien
ccacagattgatttccaaaggaata

SEQ ID NO: 764847 - DNA, 25 bp, Homo sapien
cacagattgatttccaaaggaataa

SEQ ID NO: 764848 - DNA, 25 bp, Homo sapien
ttccacagattgatttccaaaggaa

SEQ ID NO: 764849 - DNA, 25 bp, Homo sapien
tccacagattgatttccaaaggaat

SEQ ID NO: 764850 - DNA, 25 bp, Homo sapien
tgggttcagcacctatggagaggtt

SEQ ID NO: 764851 - DNA, 25 bp, Homo sapien
tatggagaggtttatggttgccgct

SEQ ID NO: 764852 - DNA, 25 bp, Homo sapien
tcagcacctatggagaggtttatgg

SEQ ID NO: 764853 - DNA, 25 bp, Homo sapien
cacctatggagaggtttatggttgc

SEQ ID NO: 764854 - DNA, 25 bp, Homo sapien
ttccagcttttgcacttagaccaga

SEQ ID NO: 764855 - DNA, 25 bp, Homo sapien
tgcacttagaccagagccctgcagg

SEQ ID NO: 764856 - DNA, 25 bp, Homo sapien
cttgcagggttgctctgtgtcttgc

SEQ ID NO: 764857 - DNA, 25 bp, Homo sapien
cttttgcacttagaccagagccctg

SEQ ID NO: 764858 - DNA, 25 bp, Homo sapien
ctcaaatcgaatcttcactttctct

SEQ ID NO: 764859 - DNA, 25 bp, Homo sapien
tacaaggcagccgaaaagatagcag

SEQ ID NO: 764860 - DNA, 25 bp, Homo sapien
cattgcatgtgcagaggtctagtcc

SEQ ID NO: 764861 - DNA, 25 bp, Homo sapien
acaggccgccacaaagttaactcag

SEQ ID NO: 764862 - DNA, 25 bp, Homo sapien
taaacagaacttatcacaggtgacc

SEQ ID NO: 764863 - DNA, 25 bp, Homo sapien
cagtgggaccaacacgtgtccactt

SEQ ID NO: 764864 - DNA, 25 bp, Homo sapien
tccacttcataaaagtggccgtgcg

SEQ ID NO: 764865 - DNA, 25 bp, Homo sapien
aaaagtggccgtgcggcagttccca

SEQ ID NO: 764866 - DNA, 25 bp, Homo sapien
ggaccaacacgtgtccacttcataa

SEQ ID NO: 764867 - DNA, 25 bp, Homo sapien
gcccttccctggctccagcaagggc

SEQ ID NO: 764868 - DNA, 25 bp, Homo sapien
tgtgcccttccctggctccagcaag

SEQ ID NO: 764869 - DNA, 25 bp, Homo sapien
gtgcccttccctggctccagcaagg

SEQ ID NO: 764870 - DNA, 25 bp, Homo sapien
ccttccctggctccagcaagggcac

SEQ ID NO: 764871 - DNA, 25 bp, Homo sapien
catgtgctagcctctgtattttaat

SEQ ID NO: 764872 - DNA, 25 bp, Homo sapien
gatatgcgtgtggaggacaggtgag

SEQ ID NO: 764873 - DNA, 25 bp, Homo sapien
cactactgtagctgcattccccaag

SEQ ID NO: 764874 - DNA, 25 bp, Homo sapien
aggaacggacagcactttcattcca

SEQ ID NO: 764875 - DNA, 25 bp, Homo sapien
ggtgacatcaataaagcccagttct

SEQ ID NO: 764876 - DNA, 25 bp, Homo sapien
gccagtgcactgttaggactcccag

SEQ ID NO: 764877 - DNA, 25 bp, Homo sapien
tagttgggcacaacatgctccatgg

SEQ ID NO: 764878 - DNA, 25 bp, Homo sapien
tatctgcgctgtccctagttgggca

SEQ ID NO: 764879 - DNA, 25 bp, Homo sapien
tcatgcgtgctgtcgggtcagacca

SEQ ID NO: 764880 - DNA, 25 bp, Homo sapien
gagttgccatcacgtctctgagcag

SEQ ID NO: 764881 - DNA, 25 bp, Homo sapien
cctggctgccgaaggctgcaaatta

SEQ ID NO: 764882 - DNA, 25 bp, Homo sapien
tatggtctgcaaccagatggaggct

SEQ ID NO: 764883 - DNA, 25 bp, Homo sapien
agctggacgcctctctgacaatggt

SEQ ID NO: 764884 - DNA, 25 bp, Homo sapien
tctggtggtgaacccctcggtgtct

SEQ ID NO: 764885 - DNA, 25 bp, Homo sapien
ggactgcatgtcctgcttagcgatt

SEQ ID NO: 764886 - DNA, 25 bp, Homo sapien
catcagggcttgcaccatcactctg

SEQ ID NO: 764887 - DNA, 25 bp, Homo sapien
gaagggggtgcccagagctgtcggc

SEQ ID NO: 764888 - DNA, 25 bp, Homo sapien
cagatcctagaagggggtgcccaga

SEQ ID NO: 764889 - DNA, 25 bp, Homo sapien
gggggtgcccagagctgtcggcaca

SEQ ID NO: 764890 - DNA, 25 bp, Homo sapien
tcagatcctagaagggggtgcccag

SEQ ID NO: 764891 - DNA, 25 bp, Homo sapien
caaaagacactggaagtgattgtga

SEQ ID NO: 764892 - DNA, 25 bp, Homo sapien
gtgaaatccacattgtgattcctca

SEQ ID NO: 764893 - DNA, 25 bp, Homo sapien
acatctgttcacagaggttggcaaa

SEQ ID NO: 764894 - DNA, 25 bp, Homo sapien
aatccacattgtgattcctcaggaa

SEQ ID NO: 764895 - DNA, 25 bp, Homo sapien
cagagatggcggttgtgtgcaagcc

SEQ ID NO: 764896 - DNA, 25 bp, Homo sapien
gaggctgcacccaaatcctgaggat

SEQ ID NO: 764897 - DNA, 25 bp, Homo sapien
agaggctgcacccaaatcctgagga

SEQ ID NO: 764898 - DNA, 25 bp, Homo sapien
tgcaagccacagctgtgattggagc

SEQ ID NO: 764899 - DNA, 25 bp, Homo sapien
tgcagaggttgtcagaaggagcaga

SEQ ID NO: 764900 - DNA, 25 bp, Homo sapien
gccccttgttcacatctggcagccc

SEQ ID NO: 764901 - DNA, 25 bp, Homo sapien
ggagcagagttgtcagagggttgct

SEQ ID NO: 764902 - DNA, 25 bp, Homo sapien
agcagagttgtcagagggttgctcg

SEQ ID NO: 764903 - DNA, 25 bp, Homo sapien
ggtcccaaagcccagtgacgcaagc

SEQ ID NO: 764904 - DNA, 25 bp, Homo sapien
caaatgacgaggacttaggtcccaa

SEQ ID NO: 764905 - DNA, 25 bp, Homo sapien
agcgtaaagtctggtggacaggaca

SEQ ID NO: 764906 - DNA, 25 bp, Homo sapien
gcaaaaggaacaaatgacgaggact

SEQ ID NO: 764907 - DNA, 25 bp, Homo sapien
gagaatgtcatgatctgagccgagc

SEQ ID NO: 764908 - DNA, 25 bp, Homo sapien
tcagagaggttttcagagccacaca

SEQ ID NO: 764909 - DNA, 25 bp, Homo sapien
tcaccacgtgatccaaggcttctgg

SEQ ID NO: 764910 - DNA, 25 bp, Homo sapien
gccgagcttcgatacagagtttccc

SEQ ID NO: 764911 - DNA, 25 bp, Homo sapien
cataagtgggcttctgtggagcaca

SEQ ID NO: 764912 - DNA, 25 bp, Homo sapien
acataagtgggcttctgtggagcac

SEQ ID NO: 764913 - DNA, 25 bp, Homo sapien
taagtgggcttctgtggagcacagg

SEQ ID NO: 764914 - DNA, 25 bp, Homo sapien
tcacataagtgggcttctgtggagc

SEQ ID NO: 764915 - DNA, 25 bp, Homo sapien
ctgaggctctgggtgagggaaggtg

SEQ ID NO: 764916 - DNA, 25 bp, Homo sapien
tgaggctctgggtgagggaaggtgg

SEQ ID NO: 764917 - DNA, 25 bp, Homo sapien
tgggtgagggaaggtggtgatgagt

SEQ ID NO: 764918 - DNA, 25 bp, Homo sapien
ctctgggtgagggaaggtggtgatg

SEQ ID NO: 764919 - DNA, 25 bp, Homo sapien
gaggagctgccctaaccagtaagca

SEQ ID NO: 764920 - DNA, 25 bp, Homo sapien
taagcagcaagcattgcagtcggct

SEQ ID NO: 764921 - DNA, 25 bp, Homo sapien
tgctttctgcttggtcgctggcaaa

SEQ ID NO: 764922 - DNA, 25 bp, Homo sapien
gcttcagaacctgtcttgtcttgct

SEQ ID NO: 764923 - DNA, 25 bp, Homo sapien
cctgtctactgtgagatcagcccct

SEQ ID NO: 764924 - DNA, 25 bp, Homo sapien
ctgtctactgtgagatcagcccctg

SEQ ID NO: 764925 - DNA, 25 bp, Homo sapien
ggccacacttcctgtctactgtgag

SEQ ID NO: 764926 - DNA, 25 bp, Homo sapien
ggctgctgaggctcggccagccact

SEQ ID NO: 764927 - DNA, 25 bp, Homo sapien
tgtgcattcccatactgatctccag

SEQ ID NO: 764928 - DNA, 25 bp, Homo sapien
ccatccagcgtttcctacttgtgca

SEQ ID NO: 764929 - DNA, 25 bp, Homo sapien
agggcagagggattcccatccagcg

SEQ ID NO: 764930 - DNA, 25 bp, Homo sapien
tcacacagtcaacacgaccatgagg

SEQ ID NO: 764931 - DNA, 25 bp, Homo sapien
gtcaacacgaccatgaggcagagct

SEQ ID NO: 764932 - DNA, 25 bp, Homo sapien
cagtcaacacgaccatgaggcagag

SEQ ID NO: 764933 - DNA, 25 bp, Homo sapien
cacagtcaacacgaccatgaggcag

SEQ ID NO: 764934 - DNA, 25 bp, Homo sapien
tgtttactgaaagcgtactgtgtag

SEQ ID NO: 764935 - DNA, 25 bp, Homo sapien
tttactgaaagcgtactgtgtagca

SEQ ID NO: 764936 - DNA, 25 bp, Homo sapien
tactgaaagcgtactgtgtagcagg

SEQ ID NO: 764937 - DNA, 25 bp, Homo sapien
tgaaagcgtactgtgtagcaggcac

SEQ ID NO: 764938 - DNA, 25 bp, Homo sapien
tgtctgtggggggaaaacatcacac

SEQ ID NO: 764939 - DNA, 25 bp, Homo sapien
ggggggaaaacatcacacttgtaca

SEQ ID NO: 764940 - DNA, 25 bp, Homo sapien
cacacttgtacacatcaaagatgga

SEQ ID NO: 764941 - DNA, 25 bp, Homo sapien
acatcaaagatggaggaaccaaaac

SEQ ID NO: 764942 - DNA, 25 bp, Homo sapien
gccaccatggccgtgcccatcagag

SEQ ID NO: 764943 - DNA, 25 bp, Homo sapien
atggccgtgcccatcagagtgtcgg

SEQ ID NO: 764944 - DNA, 25 bp, Homo sapien
ccgtgcccatcagagtgtcgggtga

SEQ ID NO: 764945 - DNA, 25 bp, Homo sapien
cccatcagagtgtcgggtgaggcct

SEQ ID NO: 764946 - DNA, 25 bp, Homo sapien
tctgttacacctcatgggaaaaggg

SEQ ID NO: 764947 - DNA, 25 bp, Homo sapien
tcaattcattaggagggcactctct

SEQ ID NO: 764948 - DNA, 25 bp, Homo sapien
gcactctctcaaaaggcctgtagtt

SEQ ID NO: 764949 - DNA, 25 bp, Homo sapien
tggtttcaggctctatgtcatggct

SEQ ID NO: 764950 - DNA, 25 bp, Homo sapien
tactcagctaatttctatgctgttg

SEQ ID NO: 764951 - DNA, 25 bp, Homo sapien
ggcagaaaggattggtcctaatggc

SEQ ID NO: 764952 - DNA, 25 bp, Homo sapien
cactgtcaagtctttataagggggg

SEQ ID NO: 764953 - DNA, 25 bp, Homo sapien
tcctaatggctatatgagtgccttc

SEQ ID NO: 764954 - DNA, 25 bp, Homo sapien
ccaggaggatgggaagcctttgttt

SEQ ID NO: 764955 - DNA, 25 bp, Homo sapien
gcctttgttttggttcctgtgccaa

SEQ ID NO: 764956 - DNA, 25 bp, Homo sapien
tggctgccccattcaatctgacaga

SEQ ID NO: 764957 - DNA, 25 bp, Homo sapien
tgttttggttcctgtgccaactctg

SEQ ID NO: 764958 - DNA, 25 bp, Homo sapien
gaccagcccgcctggacacagggat

SEQ ID NO: 764959 - DNA, 25 bp, Homo sapien
acacagggatgcgtctgcggcttga

SEQ ID NO: 764960 - DNA, 25 bp, Homo sapien
cgcagctgaccagcccgcctggaca

SEQ ID NO: 764961 - DNA, 25 bp, Homo sapien
tgcgtctgcggcttgaaaggaaggc

SEQ ID NO: 764962 - DNA, 25 bp, Homo sapien
tctgaatgctgacagcgcaaggggt

SEQ ID NO: 764963 - DNA, 25 bp, Homo sapien
gagggtcaaacatgcaactctcagt

SEQ ID NO: 764964 - DNA, 25 bp, Homo sapien
cacagaatggccacgtctagctgct

SEQ ID NO: 764965 - DNA, 25 bp, Homo sapien
cagggacctcagagcatgctggaca

SEQ ID NO: 764966 - DNA, 25 bp, Homo sapien
tgaaacagtcacaggacatctcaga

SEQ ID NO: 764967 - DNA, 25 bp, Homo sapien
tctcagagccatgcagtgtagaggt

SEQ ID NO: 764968 - DNA, 25 bp, Homo sapien
ggaggcaactttacacatgaaacag

SEQ ID NO: 764969 - DNA, 25 bp, Homo sapien
ctgaaggaatatgtgagtcctttgg

SEQ ID NO: 764970 - DNA, 25 bp, Homo sapien
ttcacgtccctctttgttactggag

SEQ ID NO: 764971 - DNA, 25 bp, Homo sapien
cacgtccctctttgttactggagag

SEQ ID NO: 764972 - DNA, 25 bp, Homo sapien
ccttcccctctgacttcacgtccct

SEQ ID NO: 764973 - DNA, 25 bp, Homo sapien
tcccctctgacttcacgtccctctt

SEQ ID NO: 764974 - DNA, 25 bp, Homo sapien
tgccagagaagggcagtgcagagcc

SEQ ID NO: 764975 - DNA, 25 bp, Homo sapien
gccagggcggcaggagccccagcag

SEQ ID NO: 764976 - DNA, 25 bp, Homo sapien
gccagagaagggcagtgcagagcca

SEQ ID NO: 764977 - DNA, 25 bp, Homo sapien
agcagagctggcctctcccttcctg

SEQ ID NO: 764978 - DNA, 25 bp, Homo sapien
catgttcaggggctctctctttaca

SEQ ID NO: 764979 - DNA, 25 bp, Homo sapien
ataccacttcccctccaaaagtctg

SEQ ID NO: 764980 - DNA, 25 bp, Homo sapien
gccaggccggtgcttgcactctgtg

SEQ ID NO: 764981 - DNA, 25 bp, Homo sapien
ttgaactgaataataccacttcccc

SEQ ID NO: 764982 - DNA, 25 bp, Homo sapien
tctctgcgctgagacttttgcttac

SEQ ID NO: 764983 - DNA, 25 bp, Homo sapien
atctctgcgctgagacttttgctta

SEQ ID NO: 764984 - DNA, 25 bp, Homo sapien
tggactaaacatgccaagctgcggc

SEQ ID NO: 764985 - DNA, 25 bp, Homo sapien
gaatacccaaactggtggacttcca

SEQ ID NO: 764986 - DNA, 25 bp, Homo sapien
taactgataggcatccaaagatacc

SEQ ID NO: 764987 - DNA, 25 bp, Homo sapien
tttgagttagggaacagaataccca

SEQ ID NO: 764988 - DNA, 25 bp, Homo sapien
tgttgtgaaagcaatggatggccat

SEQ ID NO: 764989 - DNA, 25 bp, Homo sapien
tcttggatgacttgtcctgggtttc

SEQ ID NO: 764990 - DNA, 25 bp, Homo sapien
gatggccatgtgaccaaagtcttgg

SEQ ID NO: 764991 - DNA, 25 bp, Homo sapien
gatgacttgtcctgggtttctctgc

SEQ ID NO: 764992 - DNA, 25 bp, Homo sapien
tctgcacataggtaatttccaaatt

SEQ ID NO: 764993 - DNA, 25 bp, Homo sapien
caaggaccacctcacagttattgaa

SEQ ID NO: 764994 - DNA, 25 bp, Homo sapien
aaaagtgcccaactgcgtgagcttg

SEQ ID NO: 764995 - DNA, 25 bp, Homo sapien
ggaaagatcataattcctctgcaca

SEQ ID NO: 764996 - DNA, 25 bp, Homo sapien
gttgaaccctaatgcacacgagtgc

SEQ ID NO: 764997 - DNA, 25 bp, Homo sapien
taagagcgagtatggcagcacatca

SEQ ID NO: 764998 - DNA, 25 bp, Homo sapien
tcaaggtctaaaatgggtccaggga

SEQ ID NO: 764999 - DNA, 25 bp, Homo sapien
taatggtcagggataaacgtcagtg

SEQ ID NO: 765000 - DNA, 25 bp, Homo sapien
tagataagactgctaaggcatagga

SEQ ID NO: 765001 - DNA, 25 bp, Homo sapien
cctctgatgatctgcaggttttcca

SEQ ID NO: 765002 - DNA, 25 bp, Homo sapien
ttccaaaggaattcgctccactgtg

SEQ ID NO: 765003 - DNA, 25 bp, Homo sapien
gcaatgaggacataaccagccacct

SEQ ID NO: 765004 - DNA, 25 bp, Homo sapien
tgacagcagaaccatccgtgaaaac

SEQ ID NO: 765005 - DNA, 25 bp, Homo sapien
caggcttcttcagtggatgcacaga

SEQ ID NO: 765006 - DNA, 25 bp, Homo sapien
catgcacaggtggatggaactcagg

SEQ ID NO: 765007 - DNA, 25 bp, Homo sapien
gaatcgtggtgctttgtttatcagg

SEQ ID NO: 765008 - DNA, 25 bp, Homo sapien
ctgctgactatgtcccgccactgga

SEQ ID NO: 765009 - DNA, 25 bp, Homo sapien
ggttgttgctgaaccgcacggcgcc

SEQ ID NO: 765010 - DNA, 25 bp, Homo sapien
ctgagaaagtcactgctgactatgt

SEQ ID NO: 765011 - DNA, 25 bp, Homo sapien
tccatcgacatgttgctgagaaagt

SEQ ID NO: 765012 - DNA, 25 bp, Homo sapien
gagatagtgtgtatgcgacacttac

SEQ ID NO: 765013 - DNA, 25 bp, Homo sapien
gtcccccataggagctggaggcaga

SEQ ID NO: 765014 - DNA, 25 bp, Homo sapien
tattcaaggaaacatggacagactt

SEQ ID NO: 765015 - DNA, 25 bp, Homo sapien
cactgcacagttgtggagaaacaaa

SEQ ID NO: 765016 - DNA, 25 bp, Homo sapien
gaaagtccaagcgatcaggaacggg

SEQ ID NO: 765017 - DNA, 25 bp, Homo sapien
ggaccaggccaccagtattcaagga

SEQ ID NO: 765018 - DNA, 25 bp, Homo sapien
tctgagcaggaacgtgtagccataa

SEQ ID NO: 765019 - DNA, 25 bp, Homo sapien
gccataaagcaccagtcaagagagg

SEQ ID NO: 765020 - DNA, 25 bp, Homo sapien
tatcaggtcgatggtgaatttgcac

SEQ ID NO: 765021 - DNA, 25 bp, Homo sapien
caagagaggagcttcctttaccaca

SEQ ID NO: 765022 - DNA, 25 bp, Homo sapien
gatgagaaactgatgacgccctttc

SEQ ID NO: 765023 - DNA, 25 bp, Homo sapien
aatgatgagaaactgatgacgccct

SEQ ID NO: 765024 - DNA, 25 bp, Homo sapien
ctgaaatgtaaaagtaatagatgca

SEQ ID NO: 765025 - DNA, 25 bp, Homo sapien
agaaactgatgacgccctttcccgg

SEQ ID NO: 765026 - DNA, 25 bp, Homo sapien
ccagcagctcccattgggacagctt

SEQ ID NO: 765027 - DNA, 25 bp, Homo sapien
gctcccattgggacagcttggatca

SEQ ID NO: 765028 - DNA, 25 bp, Homo sapien
cattgggacagcttggatcacactt

SEQ ID NO: 765029 - DNA, 25 bp, Homo sapien
ggacagcttggatcacacttttggc

SEQ ID NO: 765030 - DNA, 25 bp, Homo sapien
gagtgagggtaggatcatttcccag

SEQ ID NO: 765031 - DNA, 25 bp, Homo sapien
aaaccatgcccttttctgattgcct

SEQ ID NO: 765032 - DNA, 25 bp, Homo sapien
tgtcgcagagcacttgcagactttt

SEQ ID NO: 765033 - DNA, 25 bp, Homo sapien
cacatttgcttccaacgaaaccaca

SEQ ID NO: 765034 - DNA, 25 bp, Homo sapien
gaaaaagagcaaaggttccctgtga

SEQ ID NO: 765035 - DNA, 25 bp, Homo sapien
ctgaaaaagagcaaaggttccctgt

SEQ ID NO: 765036 - DNA, 25 bp, Homo sapien
tgaaaaagagcaaaggttccctgtg

SEQ ID NO: 765037 - DNA, 25 bp, Homo sapien
aaaaagagcaaaggttccctgtgag

SEQ ID NO: 765038 - DNA, 25 bp, Homo sapien
agcactgctgggcacagatgatttt

SEQ ID NO: 765039 - DNA, 25 bp, Homo sapien
agtcgctctcccgggggcctgtgca

SEQ ID NO: 765040 - DNA, 25 bp, Homo sapien
gcagcacactggttgtggcagcagt

SEQ ID NO: 765041 - DNA, 25 bp, Homo sapien
tcactgggggacttgccacggcagc

SEQ ID NO: 765042 - DNA, 25 bp, Homo sapien
gacaaatgctaattgacagctcccc

SEQ ID NO: 765043 - DNA, 25 bp, Homo sapien
caggatactaaagatactttgtcac

SEQ ID NO: 765044 - DNA, 25 bp, Homo sapien
gttatgacaaatgctaattgacagc

SEQ ID NO: 765045 - DNA, 25 bp, Homo sapien
ggcaatatcctgtctgttatgacaa

SEQ ID NO: 765046 - DNA, 25 bp, Homo sapien
tcacatccatctggtacgtggtggg

SEQ ID NO: 765047 - DNA, 25 bp, Homo sapien
tcttcacgcaggtggcaccaaagct

SEQ ID NO: 765048 - DNA, 25 bp, Homo sapien
gcaggtgtccttgcacgtggcttcg

SEQ ID NO: 765049 - DNA, 25 bp, Homo sapien
caccaaagctgtatttgccctcggg

SEQ ID NO: 765050 - DNA, 25 bp, Homo sapien
ttagagggcccacagaggaggactc

SEQ ID NO: 765051 - DNA, 25 bp, Homo sapien
cagttagagggcccacagaggagga

SEQ ID NO: 765052 - DNA, 25 bp, Homo sapien
gttagagggcccacagaggaggact

SEQ ID NO: 765053 - DNA, 25 bp, Homo sapien
agagggcccacagaggaggactcac

SEQ ID NO: 765054 - DNA, 25 bp, Homo sapien
caggcggtccaggtcctcttgaggg

SEQ ID NO: 765055 - DNA, 25 bp, Homo sapien
aggcggtccaggtcctcttgagggg

SEQ ID NO: 765056 - DNA, 25 bp, Homo sapien
acaggcggtccaggtcctcttgagg

SEQ ID NO: 765057 - DNA, 25 bp, Homo sapien
gaaaggaaggtgatgacggtggcac

SEQ ID NO: 765058 - DNA, 25 bp, Homo sapien
gggaagagagcatgaaaggaaggtg

SEQ ID NO: 765059 - DNA, 25 bp, Homo sapien
aagagagcatgaaaggaaggtgatg

SEQ ID NO: 765060 - DNA, 25 bp, Homo sapien
ctggggaagagagcatgaaaggaag

SEQ ID NO: 765061 - DNA, 25 bp, Homo sapien
gccgtgatctgtcaccacataatta

SEQ ID NO: 765062 - DNA, 25 bp, Homo sapien
ctcggacgcacgagccgtgatctgt

SEQ ID NO: 765063 - DNA, 25 bp, Homo sapien
tcttcctccatctcatagctgtcgg

SEQ ID NO: 765064 - DNA, 25 bp, Homo sapien
cacttcttacacttgcggacgccgt

SEQ ID NO: 765065 - DNA, 25 bp, Homo sapien
ccgttcacatttgttggattaagaa

SEQ ID NO: 765066 - DNA, 25 bp, Homo sapien
gagacgtgtattccgttcacatttg

SEQ ID NO: 765067 - DNA, 25 bp, Homo sapien
agataagagagacgtgtattccgtt

SEQ ID NO: 765068 - DNA, 25 bp, Homo sapien
cgtgtattccgttcacatttgttgg

SEQ ID NO: 765069 - DNA, 25 bp, Homo sapien
taatattcgtagcatttatggagag

SEQ ID NO: 765070 - DNA, 25 bp, Homo sapien
gagagtgagtctttaaattcaccaa

SEQ ID NO: 765071 - DNA, 25 bp, Homo sapien
cccctaaatgccaccggcaggatgt

SEQ ID NO: 765072 - DNA, 25 bp, Homo sapien
caggatgtggagatcgccactgatg

SEQ ID NO: 765073 - DNA, 25 bp, Homo sapien
tcctttacggttttcagaatatcca

SEQ ID NO: 765074 - DNA, 25 bp, Homo sapien
aggaaatatgtcgaaaagttctctc

SEQ ID NO: 765075 - DNA, 25 bp, Homo sapien
tattccaagggaacaggaaatatgt

SEQ ID NO: 765076 - DNA, 25 bp, Homo sapien
ttccaagggaacaggaaatatgtcg

SEQ ID NO: 765077 - DNA, 25 bp, Homo sapien
gtcgaaaagttctctctctaaaaca

SEQ ID NO: 765078 - DNA, 25 bp, Homo sapien
agaggctcctgctgcgattatctgc

SEQ ID NO: 765079 - DNA, 25 bp, Homo sapien
cgtatctgattaccccgaagaggct

SEQ ID NO: 765080 - DNA, 25 bp, Homo sapien
tctctgagtgtacatgcgcagggcg

SEQ ID NO: 765081 - DNA, 25 bp, Homo sapien
tactctagactctcagggactctgt

SEQ ID NO: 765082 - DNA, 25 bp, Homo sapien
cgtcctgttttcaggccaagcctga

SEQ ID NO: 765083 - DNA, 25 bp, Homo sapien
gtcctgccgcgtatgatttctaggt

SEQ ID NO: 765084 - DNA, 25 bp, Homo sapien
aggcatggaggtccgtcctgttttc

SEQ ID NO: 765085 - DNA, 25 bp, Homo sapien
tgttgcttggtcctgccgcgtatga

SEQ ID NO: 765086 - DNA, 25 bp, Homo sapien
gccagaccacgatgggtgtgagaac

SEQ ID NO: 765087 - DNA, 25 bp, Homo sapien
ccagaccacgatgggtgtgagaacc

SEQ ID NO: 765088 - DNA, 25 bp, Homo sapien
gatgggtataagaaccactaagccc

SEQ ID NO: 765089 - DNA, 25 bp, Homo sapien
gaaagcacgcggtggacatgagaac

SEQ ID NO: 765090 - DNA, 25 bp, Homo sapien
ccctcctgaaccacgatgggtataa

SEQ ID NO: 765091 - DNA, 25 bp, Homo sapien
ccacgatgggtgtgagaaccactag

SEQ ID NO: 765092 - DNA, 25 bp, Homo sapien
cattcagaccgaaggggggatgtcc

SEQ ID NO: 765093 - DNA, 25 bp, Homo sapien
tcattcagaccgaaggggggatgtc

SEQ ID NO: 765094 - DNA, 25 bp, Homo sapien
tgagggagcgtaatcccaaggatgt

SEQ ID NO: 765095 - DNA, 25 bp, Homo sapien
tcaggctgacgactgcaagagaaaa

SEQ ID NO: 765096 - DNA, 25 bp, Homo sapien
gcatagcacaaatttttgtttcctg

SEQ ID NO: 765097 - DNA, 25 bp, Homo sapien
ccaaggatgttatgttcaggctgac

SEQ ID NO: 765098 - DNA, 25 bp, Homo sapien
gctgaggctctagagccagaacagg

SEQ ID NO: 765099 - DNA, 25 bp, Homo sapien
gatgtaaagtgctcattccattcct

SEQ ID NO: 765100 - DNA, 25 bp, Homo sapien
caggaagtgttgatgtaaagtgctc

SEQ ID NO: 765101 - DNA, 25 bp, Homo sapien
ttcaaaagctgaggctctagagcca

SEQ ID NO: 765102 - DNA, 25 bp, Homo sapien
ccgaccgtgactggaaggacaaagt

SEQ ID NO: 765103 - DNA, 25 bp, Homo sapien
accttgggtgacacagacatgctgg

SEQ ID NO: 765104 - DNA, 25 bp, Homo sapien
gtgagtcctcccctttggcaatggc

SEQ ID NO: 765105 - DNA, 25 bp, Homo sapien
tgaaatgtgcctgacagtggaggac

SEQ ID NO: 765106 - DNA, 25 bp, Homo sapien
ctccagaaggttgcacttgtccacg

SEQ ID NO: 765107 - DNA, 25 bp, Homo sapien
gacattccggcaagagacgcagtcc

SEQ ID NO: 765108 - DNA, 25 bp, Homo sapien
cagccctcgggggagcacaaggcat

SEQ ID NO: 765109 - DNA, 25 bp, Homo sapien
caaggcatggcagacctggcctgtg

SEQ ID NO: 765110 - DNA, 25 bp, Homo sapien
ccgtcctgtgcaggtgatgttcatg

SEQ ID NO: 765111 - DNA, 25 bp, Homo sapien
tgtgcaggtgatgttcatggcctga

SEQ ID NO: 765112 - DNA, 25 bp, Homo sapien
tgggtggcactgtatgcactcagag

SEQ ID NO: 765113 - DNA, 25 bp, Homo sapien
tcctgtgcaggtgatgttcatggcc

SEQ ID NO: 765114 - DNA, 25 bp, Homo sapien
cacaggatgccctgggccatcatca

SEQ ID NO: 765115 - DNA, 25 bp, Homo sapien
catcatcactgttcggcttctgtga

SEQ ID NO: 765116 - DNA, 25 bp, Homo sapien
ggacagcgctgtcagcgcctgccgt

SEQ ID NO: 765117 - DNA, 25 bp, Homo sapien
tgaaatggacgtggatagcagcaag

SEQ ID NO: 765118 - DNA, 25 bp, Homo sapien
caatgtagtgggcacactggataca

SEQ ID NO: 765119 - DNA, 25 bp, Homo sapien
caggtggcacacatggccggcgtct

SEQ ID NO: 765120 - DNA, 25 bp, Homo sapien
tccagaccagggtgttgttttctcc

SEQ ID NO: 765121 - DNA, 25 bp, Homo sapien
cggcgtctgcgtacttccagaccag

SEQ ID NO: 765122 - DNA, 25 bp, Homo sapien
ttgttgccggaaaacttgggagaca

SEQ ID NO: 765123 - DNA, 25 bp, Homo sapien
aaaagtgtctttaagcaacattcca

SEQ ID NO: 765124 - DNA, 25 bp, Homo sapien
gcaacagcttaacaatcaactagct

SEQ ID NO: 765125 - DNA, 25 bp, Homo sapien
agcaacagcttaacaatcaactagc

SEQ ID NO: 765126 - DNA, 25 bp, Homo sapien
agtgtctttaagcaacattccaggc

SEQ ID NO: 765127 - DNA, 25 bp, Homo sapien
ccaaaggcgaaaatatgaagaatct

SEQ ID NO: 765128 - DNA, 25 bp, Homo sapien
acttggcccttataatatgatctga

SEQ ID NO: 765129 - DNA, 25 bp, Homo sapien
ttagatgccaagctctgatgtccac

SEQ ID NO: 765130 - DNA, 25 bp, Homo sapien
cacgctgagacattagagctattcc

SEQ ID NO: 765131 - DNA, 25 bp, Homo sapien
tagtgggagactaaagtcagacagt

SEQ ID NO: 765132 - DNA, 25 bp, Homo sapien
ggaaatgcagttttagtgggagact

SEQ ID NO: 765133 - DNA, 25 bp, Homo sapien
tcaaatgaatagtgtcaggacttta

SEQ ID NO: 765134 - DNA, 25 bp, Homo sapien
tgaatagtgtcaggactttatttga

SEQ ID NO: 765135 - DNA, 25 bp, Homo sapien
tcctcaccgtgtactatgaaaacac

SEQ ID NO: 765136 - DNA, 25 bp, Homo sapien
tatagcagtaactaaactttgttac

SEQ ID NO: 765137 - DNA, 25 bp, Homo sapien
tcaaagcaactttctcctcaccgtg

SEQ ID NO: 765138 - DNA, 25 bp, Homo sapien
acatatttgcaattatagcagtaac

SEQ ID NO: 765139 - DNA, 25 bp, Homo sapien
gaagagaagggatccatcctaagca

SEQ ID NO: 765140 - DNA, 25 bp, Homo sapien
tctggtgggacacgctgccatcatt

SEQ ID NO: 765141 - DNA, 25 bp, Homo sapien
ggctttgagactctcatttcctggc

SEQ ID NO: 765142 - DNA, 25 bp, Homo sapien
cagctgaaactctgacggcagaaga

SEQ ID NO: 765143 - DNA, 25 bp, Homo sapien
tttgaacaatcatctggcagcgagg

SEQ ID NO: 765144 - DNA, 25 bp, Homo sapien
tgctaattacggagaaggctggcag

SEQ ID NO: 765145 - DNA, 25 bp, Homo sapien
cacagctggctctagaatttcaaac

SEQ ID NO: 765146 - DNA, 25 bp, Homo sapien
gaacagacacgtgaaggcatgaggc

SEQ ID NO: 765147 - DNA, 25 bp, Homo sapien
cgttggacagccttcaagacctggc

SEQ ID NO: 765148 - DNA, 25 bp, Homo sapien
tgacgaggtccatgtgacacagagc

SEQ ID NO: 765149 - DNA, 25 bp, Homo sapien
tagacgccatcgagagtaacaccac

SEQ ID NO: 765150 - DNA, 25 bp, Homo sapien
tgtcatcgaacagaaaggccactca

SEQ ID NO: 765151 - DNA, 25 bp, Homo sapien
ccagagctgatgttgaaggaagccc

SEQ ID NO: 765152 - DNA, 25 bp, Homo sapien
ttgtaaatgttaccagagatggcag

SEQ ID NO: 765153 - DNA, 25 bp, Homo sapien
gagcatgccaaaatgaaggaagggc

SEQ ID NO: 765154 - DNA, 25 bp, Homo sapien
tgaggaagggactttgtaaatgtta

SEQ ID NO: 765155 - DNA, 25 bp, Homo sapien
ggctgtcaactcgggggcggaggag

SEQ ID NO: 765156 - DNA, 25 bp, Homo sapien
tggaaagtgagacactatgtagctt

SEQ ID NO: 765157 - DNA, 25 bp, Homo sapien
cagtggcgatggacgggatcttagg

SEQ ID NO: 765158 - DNA, 25 bp, Homo sapien
agtggcgatggacgggatcttaggc

SEQ ID NO: 765159 - DNA, 25 bp, Homo sapien
cccagtggcgatggacgggatctta

SEQ ID NO: 765160 - DNA, 25 bp, Homo sapien
ccagtggcgatggacgggatcttag

SEQ ID NO: 765161 - DNA, 25 bp, Homo sapien
tgaagaggccgatccccagggccac

SEQ ID NO: 765162 - DNA, 25 bp, Homo sapien
gccttcgcatgaagaggccgatccc

SEQ ID NO: 765163 - DNA, 25 bp, Homo sapien
ttccgaacgatgtggcgccttcgca

SEQ ID NO: 765164 - DNA, 25 bp, Homo sapien
cagcgtgcgcttccgaacgatgtgg

SEQ ID NO: 765165 - DNA, 25 bp, Homo sapien
gcttgggtgccaggacacggcactt

SEQ ID NO: 765166 - DNA, 25 bp, Homo sapien
caggacacggcacttgccagctcat

SEQ ID NO: 765167 - DNA, 25 bp, Homo sapien
accagcagccacggcatgggcttgg

SEQ ID NO: 765168 - DNA, 25 bp, Homo sapien
cagccacggcatgggcttgggtgcc

SEQ ID NO: 765169 - DNA, 25 bp, Homo sapien
gcttggttgggagcttctccactgg

SEQ ID NO: 765170 - DNA, 25 bp, Homo sapien
agcttctccactgggtgtaagaggc

SEQ ID NO: 765171 - DNA, 25 bp, Homo sapien
ttcaagatcctcaagagagcttggt

SEQ ID NO: 765172 - DNA, 25 bp, Homo sapien
atacaccgtgccgaacgcaccggag

SEQ ID NO: 765173 - DNA, 25 bp, Homo sapien
tccttgatagcgacgggaattttaa

SEQ ID NO: 765174 - DNA, 25 bp, Homo sapien
gatgttgcttctcttaattccttga

SEQ ID NO: 765175 - DNA, 25 bp, Homo sapien
tctcttaattccttgatagcgacgg

SEQ ID NO: 765176 - DNA, 25 bp, Homo sapien
cttgttggctttcggagatgttgct

SEQ ID NO: 765177 - DNA, 25 bp, Homo sapien
gacatagaaagtgaacatttaggat

SEQ ID NO: 765178 - DNA, 25 bp, Homo sapien
acatttaggatgtggagatgagcag

SEQ ID NO: 765179 - DNA, 25 bp, Homo sapien
gaaagtgaacatttaggatgtggag

SEQ ID NO: 765180 - DNA, 25 bp, Homo sapien
tgagcagggtctagagcagagcagc

SEQ ID NO: 765181 - DNA, 25 bp, Homo sapien
aggcagagcgcacagttggagcccc

SEQ ID NO: 765182 - DNA, 25 bp, Homo sapien
acaacaatcttcgtggagccccagc

SEQ ID NO: 765183 - DNA, 25 bp, Homo sapien
ttccacaacaatcttcgtggagccc

SEQ ID NO: 765184 - DNA, 25 bp, Homo sapien
ccacaacaatcttcgtggagcccca

SEQ ID NO: 765185 - DNA, 25 bp, Homo sapien
cacaacaatcttcgtggagccccag

SEQ ID NO: 765186 - DNA, 25 bp, Homo sapien
tacgcagaagctaaagcgagctttg

SEQ ID NO: 765187 - DNA, 25 bp, Homo sapien
gctgttcagtcgtgtgtcccgttcg

SEQ ID NO: 765188 - DNA, 25 bp, Homo sapien
caggcacaatgggaacgctgttcag

SEQ ID NO: 765189 - DNA, 25 bp, Homo sapien
cgagctttgttctcggctgtttgtc

SEQ ID NO: 765190 - DNA, 25 bp, Homo sapien
agaaggcatccggggagcaccgagc

SEQ ID NO: 765191 - DNA, 25 bp, Homo sapien
tggagaaggcatccggggagcaccg

SEQ ID NO: 765192 - DNA, 25 bp, Homo sapien
aaggcatccggggagcaccgagcca

SEQ ID NO: 765193 - DNA, 25 bp, Homo sapien
gcatccggggagcaccgagccagca

SEQ ID NO: 765194 - DNA, 25 bp, Homo sapien
acatcaggaacgctggctgtgggtg

SEQ ID NO: 765195 - DNA, 25 bp, Homo sapien
cctgcacatcaggaacgctggctgt

SEQ ID NO: 765196 - DNA, 25 bp, Homo sapien
tgcacatcaggaacgctggctgtgg

SEQ ID NO: 765197 - DNA, 25 bp, Homo sapien
cacatcaggaacgctggctgtgggt

SEQ ID NO: 765198 - DNA, 25 bp, Homo sapien
gttgtccacgctggccatcacgtag

SEQ ID NO: 765199 - DNA, 25 bp, Homo sapien
cagttgagcaggtactgggagccaa

SEQ ID NO: 765200 - DNA, 25 bp, Homo sapien
tcccggacatagtccaggaggcagc

SEQ ID NO: 765201 - DNA, 25 bp, Homo sapien
ccgaagggcatgagctgcgtgatga

SEQ ID NO: 765202 - DNA, 25 bp, Homo sapien
catggccttttagacacctggcctc

SEQ ID NO: 765203 - DNA, 25 bp, Homo sapien
tcagaaccattgtgggagcatggcc

SEQ ID NO: 765204 - DNA, 25 bp, Homo sapien
gagcatggccttttagacacctggc

SEQ ID NO: 765205 - DNA, 25 bp, Homo sapien
acggaggttgacatggggaggtgca

SEQ ID NO: 765206 - DNA, 25 bp, Homo sapien
taacttctgcttaaatgggacacgc

SEQ ID NO: 765207 - DNA, 25 bp, Homo sapien
cacttatctaggtcaggccaactgg

SEQ ID NO: 765208 - DNA, 25 bp, Homo sapien
gagacaaagcgttaactgcccgtaa

SEQ ID NO: 765209 - DNA, 25 bp, Homo sapien
catgtgatggtcatgctgcgccagg

SEQ ID NO: 765210 - DNA, 25 bp, Homo sapien
ctctcacctccactttgggctggtc

SEQ ID NO: 765211 - DNA, 25 bp, Homo sapien
gcttattctggcagggtaccccaga

SEQ ID NO: 765212 - DNA, 25 bp, Homo sapien
ctacagtaaagagccacacacaagt

SEQ ID NO: 765213 - DNA, 25 bp, Homo sapien
tctttctaccctgttcgttcttcac

SEQ ID NO: 765214 - DNA, 25 bp, Homo sapien
ctttctaccctgttcgttcttcaca

SEQ ID NO: 765215 - DNA, 25 bp, Homo sapien
ttctttctaccctgttcgttcttca

SEQ ID NO: 765216 - DNA, 25 bp, Homo sapien
tggtaccctgtctcttacagagcaa

SEQ ID NO: 765217 - DNA, 25 bp, Homo sapien
ttcccaaaagaggactggcccagac

SEQ ID NO: 765218 - DNA, 25 bp, Homo sapien
tgaactcctgcccattcgaaaggga

SEQ ID NO: 765219 - DNA, 25 bp, Homo sapien
tgtctgcctcgtttgactcctgcga

SEQ ID NO: 765220 - DNA, 25 bp, Homo sapien
agagcgctcctacgggtttccgatg

SEQ ID NO: 765221 - DNA, 25 bp, Homo sapien
ccgatgctgctggacgttagtgctt

SEQ ID NO: 765222 - DNA, 25 bp, Homo sapien
ggaaaagagacgcttgcctgacacc

SEQ ID NO: 765223 - DNA, 25 bp, Homo sapien
gaacctagggtctcgcaaagatgct

SEQ ID NO: 765224 - DNA, 25 bp, Homo sapien
ctgtcccaggctttggcctaagaat

SEQ ID NO: 765225 - DNA, 25 bp, Homo sapien
gtcccaggctttggcctaagaatgg

SEQ ID NO: 765226 - DNA, 25 bp, Homo sapien
tcccaggctttggcctaagaatggc

SEQ ID NO: 765227 - DNA, 25 bp, Homo sapien
tgtcccaggctttggcctaagaatg

SEQ ID NO: 765228 - DNA, 25 bp, Homo sapien
aatctcgctgcaattgaaatctctg

SEQ ID NO: 765229 - DNA, 25 bp, Homo sapien
tccacaatctcgctgcaattgaaat

SEQ ID NO: 765230 - DNA, 25 bp, Homo sapien
tctcgctgcaattgaaatctctgct

SEQ ID NO: 765231 - DNA, 25 bp, Homo sapien
tgcctccacaatctcgctgcaattg

SEQ ID NO: 765232 - DNA, 25 bp, Homo sapien
tttaagtccagaggtgctcgtatat

SEQ ID NO: 765233 - DNA, 25 bp, Homo sapien
cttgaacttactggacttgccaggc

SEQ ID NO: 765234 - DNA, 25 bp, Homo sapien
gctgcccagttgagacctgggcttg

SEQ ID NO: 765235 - DNA, 25 bp, Homo sapien
tatatgaggacaaagaagagcagga

SEQ ID NO: 765236 - DNA, 25 bp, Homo sapien
gacggtcctccaagtagttcatgcc

SEQ ID NO: 765237 - DNA, 25 bp, Homo sapien
gcagtttggccagcccaaaatctgt

SEQ ID NO: 765238 - DNA, 25 bp, Homo sapien
ggtattctttctcttccgcacccag

SEQ ID NO: 765239 - DNA, 25 bp, Homo sapien
gacatgctgcggtgttttcaccagt

SEQ ID NO: 765240 - DNA, 25 bp, Homo sapien
taattacgagtgacacacacagacg

SEQ ID NO: 765241 - DNA, 25 bp, Homo sapien
aaagttaactcactctggacctaat

SEQ ID NO: 765242 - DNA, 25 bp, Homo sapien
caactattagtttccctctgttgga

SEQ ID NO: 765243 - DNA, 25 bp, Homo sapien
acagacgagccagatcaccccagga

SEQ ID NO: 765244 - DNA, 25 bp, Homo sapien
tcactctggtgggtatagattctgt

SEQ ID NO: 765245 - DNA, 25 bp, Homo sapien
gtgtaaaattgattccaatgccatc

SEQ ID NO: 765246 - DNA, 25 bp, Homo sapien
ccaatgccatccacttgataggcac

SEQ ID NO: 765247 - DNA, 25 bp, Homo sapien
cactctggtgggtatagattctgtg

SEQ ID NO: 765248 - DNA, 25 bp, Homo sapien
ggcttggatccaaaggtcatcaact

SEQ ID NO: 765249 - DNA, 25 bp, Homo sapien
aggagatctcgctggcagggattcc

SEQ ID NO: 765250 - DNA, 25 bp, Homo sapien
cagggattccgtcatatggcttgga

SEQ ID NO: 765251 - DNA, 25 bp, Homo sapien
tgtagacatcgatggtacatatggg

SEQ ID NO: 765252 - DNA, 25 bp, Homo sapien
tctcgggccattttggagaattcga

SEQ ID NO: 765253 - DNA, 25 bp, Homo sapien
gagaattcgatgatcaactcacgga

SEQ ID NO: 765254 - DNA, 25 bp, Homo sapien
caactcacggaactttgggcgacta

SEQ ID NO: 765255 - DNA, 25 bp, Homo sapien
gcgactatctgcgtctatcatccag

SEQ ID NO: 765256 - DNA, 25 bp, Homo sapien
tagagggactcttcccaatggaagc

SEQ ID NO: 765257 - DNA, 25 bp, Homo sapien
ttaataatgcgatctgggacacagg

SEQ ID NO: 765258 - DNA, 25 bp, Homo sapien
tagttcacgatgtggcctgcgcctt

SEQ ID NO: 765259 - DNA, 25 bp, Homo sapien
ctagccggacagtgaggacgagcac

SEQ ID NO: 765260 - DNA, 25 bp, Homo sapien
gcctcccctcatgacatgatgtggg

SEQ ID NO: 765261 - DNA, 25 bp, Homo sapien
tgatgtgggtgccttaaaataaaac

SEQ ID NO: 765262 - DNA, 25 bp, Homo sapien
tcctttgatgcttgaaagcccctac

SEQ ID NO: 765263 - DNA, 25 bp, Homo sapien
cttggttctctaaattatagctgcc

SEQ ID NO: 765264 - DNA, 25 bp, Homo sapien
gattttgaggctattagaatggccc

SEQ ID NO: 765265 - DNA, 25 bp, Homo sapien
ggctattagaatggcccgtagagat

SEQ ID NO: 765266 - DNA, 25 bp, Homo sapien
ctggtgcagagattttgaggctatt

SEQ ID NO: 765267 - DNA, 25 bp, Homo sapien
gaatggcccgtagagatgctattcc

SEQ ID NO: 765268 - DNA, 25 bp, Homo sapien
ttggagtctgtaggacttggcaaat

SEQ ID NO: 765269 - DNA, 25 bp, Homo sapien
caccacgtcgtccatgtcttcttca

SEQ ID NO: 765270 - DNA, 25 bp, Homo sapien
ttggcaaatgcattctttcatcccc

SEQ ID NO: 765271 - DNA, 25 bp, Homo sapien
ggatgaggtactcgtcggcatccac

SEQ ID NO: 765272 - DNA, 25 bp, Homo sapien
ctatcaatgcaagccacggtggaat

SEQ ID NO: 765273 - DNA, 25 bp, Homo sapien
tttctatcaatgcaagccacggtgg

SEQ ID NO: 765274 - DNA, 25 bp, Homo sapien
cccatttctatcaatgcaagccacg

SEQ ID NO: 765275 - DNA, 25 bp, Homo sapien
catttctatcaatgcaagccacggt

SEQ ID NO: 765276 - DNA, 25 bp, Homo sapien
cctgtggggtctgagctgtatcgct

SEQ ID NO: 765277 - DNA, 25 bp, Homo sapien
gaggaaggtgtcgtctatgctgtcc

SEQ ID NO: 765278 - DNA, 25 bp, Homo sapien
ggaaggtgtcgtctatgctgtcctc

SEQ ID NO: 765279 - DNA, 25 bp, Homo sapien
agctgtatcgctgcaagaagctgtc

SEQ ID NO: 765280 - DNA, 25 bp, Homo sapien
tgggtcgaggaggttgaggagcagg

SEQ ID NO: 765281 - DNA, 25 bp, Homo sapien
gtgggtcgaggaggttgaggagcag

SEQ ID NO: 765282 - DNA, 25 bp, Homo sapien
gggtcgaggaggttgaggagcagga

SEQ ID NO: 765283 - DNA, 25 bp, Homo sapien
ctgctgagtgggtcgaggaggttga

SEQ ID NO: 765284 - DNA, 25 bp, Homo sapien
gtttccccctctggagatgctggag

SEQ ID NO: 765285 - DNA, 25 bp, Homo sapien
tttccccctctggagatgctggagg

SEQ ID NO: 765286 - DNA, 25 bp, Homo sapien
cactgtttccccctctggagatgct

SEQ ID NO: 765287 - DNA, 25 bp, Homo sapien
cagggctgtcgaatgtgctgttgac

SEQ ID NO: 765288 - DNA, 25 bp, Homo sapien
attcactgctttgtggcgcgaccct

SEQ ID NO: 765289 - DNA, 25 bp, Homo sapien
tgtccaggctaatttggtggctgcc

SEQ ID NO: 765290 - DNA, 25 bp, Homo sapien
gacccttaggtattctgcattttca

SEQ ID NO: 765291 - DNA, 25 bp, Homo sapien
gacttgatacagtaccgatccggcc

SEQ ID NO: 765292 - DNA, 25 bp, Homo sapien
taaacgttgcaaaaccagtctgtgg

SEQ ID NO: 765293 - DNA, 25 bp, Homo sapien
caaaatgtgcccgaggtggaagtac

SEQ ID NO: 765294 - DNA, 25 bp, Homo sapien
aaaggtgggctcctaactagctgaa

SEQ ID NO: 765295 - DNA, 25 bp, Homo sapien
gaacttgtgggatgctccaagctca

SEQ ID NO: 765296 - DNA, 25 bp, Homo sapien
tgactgacctcagccttatgtggac

SEQ ID NO: 765297 - DNA, 25 bp, Homo sapien
cagctgtttcctcggtcagggtgcc

SEQ ID NO: 765298 - DNA, 25 bp, Homo sapien
tatgtggactttagcagtggaggcc

SEQ ID NO: 765299 - DNA, 25 bp, Homo sapien
ttcccagttctgactgaaatatttc

SEQ ID NO: 765300 - DNA, 25 bp, Homo sapien
aatgtaggtccttctgtttcccagt

SEQ ID NO: 765301 - DNA, 25 bp, Homo sapien
tgcctcatcgatcatctgcttcttg

SEQ ID NO: 765302 - DNA, 25 bp, Homo sapien
tctgcttcttgacacataagtgaca

SEQ ID NO: 765303 - DNA, 25 bp, Homo sapien
tattaagttactgtttcaaactaca

SEQ ID NO: 765304 - DNA, 25 bp, Homo sapien
taatgctacaatgtgactcacttac

SEQ ID NO: 765305 - DNA, 25 bp, Homo sapien
aatttaatgctacaatgtgactcac

SEQ ID NO: 765306 - DNA, 25 bp, Homo sapien
acaatgtgactcacttacaactgac

SEQ ID NO: 765307 - DNA, 25 bp, Homo sapien
tccgtgaagaggctaagggctttgc

SEQ ID NO: 765308 - DNA, 25 bp, Homo sapien
agatccgtgaagaggctaagggctt

SEQ ID NO: 765309 - DNA, 25 bp, Homo sapien
gctttgcggcttctaccagacagaa

SEQ ID NO: 765310 - DNA, 25 bp, Homo sapien
gcggcttctaccagacagaactgtg

SEQ ID NO: 765311 - DNA, 25 bp, Homo sapien
ttccttcgacctctgtttccaaaga

SEQ ID NO: 765312 - DNA, 25 bp, Homo sapien
tgtagggtattaaggccaggctatc

SEQ ID NO: 765313 - DNA, 25 bp, Homo sapien
ggtaaggtcttccaggaactgactg

SEQ ID NO: 765314 - DNA, 25 bp, Homo sapien
gaaacagccaatggacaggctttct

SEQ ID NO: 765315 - DNA, 25 bp, Homo sapien
tacacaagtgcaatcagaggcctag

SEQ ID NO: 765316 - DNA, 25 bp, Homo sapien
ctttagggagggcaacaatgtcagc

SEQ ID NO: 765317 - DNA, 25 bp, Homo sapien
tcttgactctcagcgacagatgtgg

SEQ ID NO: 765318 - DNA, 25 bp, Homo sapien
aataacttctctagggtggctgggc

SEQ ID NO: 765319 - DNA, 25 bp, Homo sapien
ttttgtaatgtaactgataggccag

SEQ ID NO: 765320 - DNA, 25 bp, Homo sapien
atgtaactgataggccagcgttttc

SEQ ID NO: 765321 - DNA, 25 bp, Homo sapien
taatgtaactgataggccagcgttt

SEQ ID NO: 765322 - DNA, 25 bp, Homo sapien
tgtaatgtaactgataggccagcgt

SEQ ID NO: 765323 - DNA, 25 bp, Homo sapien
cctcagaggacacactgcaggtagt

SEQ ID NO: 765324 - DNA, 25 bp, Homo sapien
gtatgcacagatttaagttttcccc

SEQ ID NO: 765325 - DNA, 25 bp, Homo sapien
taaaacgtaccatatgttgaagcta

SEQ ID NO: 765326 - DNA, 25 bp, Homo sapien
gttacattgtcacctctaataccag

SEQ ID NO: 765327 - DNA, 25 bp, Homo sapien
cctacagttggttagatatgattaa

SEQ ID NO: 765328 - DNA, 25 bp, Homo sapien
gattaataactagtaccaacatggc

SEQ ID NO: 765329 - DNA, 25 bp, Homo sapien
tataaggtactcaggagtaaagaac

SEQ ID NO: 765330 - DNA, 25 bp, Homo sapien
gaaagaacacctacagttggttaga

SEQ ID NO: 765331 - DNA, 25 bp, Homo sapien
gaaacaaggcagggcactgtgcagc

SEQ ID NO: 765332 - DNA, 25 bp, Homo sapien
aaagaaacaaggcagggcactgtgc

SEQ ID NO: 765333 - DNA, 25 bp, Homo sapien
tgtgaaagaaacaaggcagggcact

SEQ ID NO: 765334 - DNA, 25 bp, Homo sapien
ctgtgtgaaagaaacaaggcagggc

SEQ ID NO: 765335 - DNA, 25 bp, Homo sapien
tggaaacaattagagtcagcgctgc

SEQ ID NO: 765336 - DNA, 25 bp, Homo sapien
tagagtcagcgctgcgagcattagg

SEQ ID NO: 765337 - DNA, 25 bp, Homo sapien
caattagagtcagcgctgcgagcat

SEQ ID NO: 765338 - DNA, 25 bp, Homo sapien
gcattaggggtggtgtgagctggca

SEQ ID NO: 765339 - DNA, 25 bp, Homo sapien
ttctcattgttcgtggacctggcta

SEQ ID NO: 765340 - DNA, 25 bp, Homo sapien
tgctgggaagctccggattttctca

SEQ ID NO: 765341 - DNA, 25 bp, Homo sapien
tgtttgtgcatagacaacggatggc

SEQ ID NO: 765342 - DNA, 25 bp, Homo sapien
gaaatgtggtttactctcagcccca

SEQ ID NO: 765343 - DNA, 25 bp, Homo sapien
atttgctgggtagtctgtcatgtcc

SEQ ID NO: 765344 - DNA, 25 bp, Homo sapien
gtgctatgcactaggatcacctcct

SEQ ID NO: 765345 - DNA, 25 bp, Homo sapien
gctgttatgtttagatcttcggtcc

SEQ ID NO: 765346 - DNA, 25 bp, Homo sapien
tgggtagagtgtgaaatagaaccat

SEQ ID NO: 765347 - DNA, 25 bp, Homo sapien
cacctgaagtggtcccaacaggaaa

SEQ ID NO: 765348 - DNA, 25 bp, Homo sapien
cagggaggtgtgcagcaaggatttt

SEQ ID NO: 765349 - DNA, 25 bp, Homo sapien
actaggcctgcatcgcttccactca

SEQ ID NO: 765350 - DNA, 25 bp, Homo sapien
aggagccagggcattccacctgaag

SEQ ID NO: 765351 - DNA, 25 bp, Homo sapien
ggtcatatagtgcacgagaggtcaa

SEQ ID NO: 765352 - DNA, 25 bp, Homo sapien
tcctggaggagaactcgacagcctg

SEQ ID NO: 765353 - DNA, 25 bp, Homo sapien
ttagcccaataagagcagcagctgg

SEQ ID NO: 765354 - DNA, 25 bp, Homo sapien
tgagggtcggctgaatcaccaaggc

SEQ ID NO: 765355 - DNA, 25 bp, Homo sapien
gaccctcagggacttagcaaaatgc

SEQ ID NO: 765356 - DNA, 25 bp, Homo sapien
gatggcttcgcatcttaatgatcgc

SEQ ID NO: 765357 - DNA, 25 bp, Homo sapien
catgccgctttgaggaccagtgacc

SEQ ID NO: 765358 - DNA, 25 bp, Homo sapien
tttacagtttaagcatgccaggtgg

SEQ ID NO: 765359 - DNA, 25 bp, Homo sapien
ttagatcaggttacgtgttttcttg

SEQ ID NO: 765360 - DNA, 25 bp, Homo sapien
gtcattgtccagactgatgtcaaga

SEQ ID NO: 765361 - DNA, 25 bp, Homo sapien
tagatcaggttacgtgttttcttgc

SEQ ID NO: 765362 - DNA, 25 bp, Homo sapien
aaaaaagtcattgtccagactgatg

SEQ ID NO: 765363 - DNA, 25 bp, Homo sapien
tgcttggcacacacgccctgggcca

SEQ ID NO: 765364 - DNA, 25 bp, Homo sapien
gcttggcacacacgccctgggccat

SEQ ID NO: 765365 - DNA, 25 bp, Homo sapien
ctgcttggcacacacgccctgggcc

SEQ ID NO: 765366 - DNA, 25 bp, Homo sapien
actttctggcaagtcgtccttgtct

SEQ ID NO: 765367 - DNA, 25 bp, Homo sapien
tctggcaagtcgtccttgtcttgcc

SEQ ID NO: 765368 - DNA, 25 bp, Homo sapien
gccttctgtcaacatgcttttgact

SEQ ID NO: 765369 - DNA, 25 bp, Homo sapien
ttgactttctggcaagtcgtccttg

SEQ ID NO: 765370 - DNA, 25 bp, Homo sapien
taaaatccaccttacaggtctgcag

SEQ ID NO: 765371 - DNA, 25 bp, Homo sapien
tgcaggtgtcacatagcagggacct

SEQ ID NO: 765372 - DNA, 25 bp, Homo sapien
catgccgatcctgtctgacgctggg

SEQ ID NO: 765373 - DNA, 25 bp, Homo sapien
cagttgtcaaagtgggtcctgaacc

SEQ ID NO: 765374 - DNA, 25 bp, Homo sapien
tggtggggtgggaatgacccacttc

SEQ ID NO: 765375 - DNA, 25 bp, Homo sapien
cttcccatctcagggaggtctgacc

SEQ ID NO: 765376 - DNA, 25 bp, Homo sapien
gggaatgacccacttcttcccatct

SEQ ID NO: 765377 - DNA, 25 bp, Homo sapien
tcccatctcagggaggtctgacctc

SEQ ID NO: 765378 - DNA, 25 bp, Homo sapien
agaagatgccccactcttccagagt

SEQ ID NO: 765379 - DNA, 25 bp, Homo sapien
cacctgagaagatgccccactcttc

SEQ ID NO: 765380 - DNA, 25 bp, Homo sapien
ctgagaagatgccccactcttccag

SEQ ID NO: 765381 - DNA, 25 bp, Homo sapien
gagaagatgccccactcttccagag

SEQ ID NO: 765382 - DNA, 25 bp, Homo sapien
tggccgtctgtgagtccttacatct

SEQ ID NO: 765383 - DNA, 25 bp, Homo sapien
cgtctgtgagtccttacatcttggc

SEQ ID NO: 765384 - DNA, 25 bp, Homo sapien
gagtccttacatcttggctgaggtg

SEQ ID NO: 765385 - DNA, 25 bp, Homo sapien
tgtgagtccttacatcttggctgag

SEQ ID NO: 765386 - DNA, 25 bp, Homo sapien
gggaccagaaactctcctgtatgag

SEQ ID NO: 765387 - DNA, 25 bp, Homo sapien
cacagcgaatgctccctgatcttgg

SEQ ID NO: 765388 - DNA, 25 bp, Homo sapien
taactgtggcggagccaaatgtcaa

SEQ ID NO: 765389 - DNA, 25 bp, Homo sapien
gctttgtaaatcaggtccagaggaa

SEQ ID NO: 765390 - DNA, 25 bp, Homo sapien
gattggattcaaatccgcttgtgca

SEQ ID NO: 765391 - DNA, 25 bp, Homo sapien
cagagataactgtggtggaaggcac

SEQ ID NO: 765392 - DNA, 25 bp, Homo sapien
ggtctctgtcactatcggtaggatt

SEQ ID NO: 765393 - DNA, 25 bp, Homo sapien
gcagcaagtagaggcgaggaaatcc

SEQ ID NO: 765394 - DNA, 25 bp, Homo sapien
caagtgttggacacaattccataaa

SEQ ID NO: 765395 - DNA, 25 bp, Homo sapien
tgaattgagcttgccatcaccctct

SEQ ID NO: 765396 - DNA, 25 bp, Homo sapien
gagtggattcactgttgccagagtg

SEQ ID NO: 765397 - DNA, 25 bp, Homo sapien
gaaaagcctagagattttggtgaca

SEQ ID NO: 765398 - DNA, 25 bp, Homo sapien
tcctgggcaccatctttgcggctgg

SEQ ID NO: 765399 - DNA, 25 bp, Homo sapien
tggccatcacctagatgccgctggg

SEQ ID NO: 765400 - DNA, 25 bp, Homo sapien
gctccttggcggcatcagtttttga

SEQ ID NO: 765401 - DNA, 25 bp, Homo sapien
ggcgctgcatggctatctccttggt

SEQ ID NO: 765402 - DNA, 25 bp, Homo sapien
gcagcaaatggacttcggtggccga

SEQ ID NO: 765403 - DNA, 25 bp, Homo sapien
aatggcttcttactggtcgcttccc

SEQ ID NO: 765404 - DNA, 25 bp, Homo sapien
tctggtctccgaagagatcagggtg

SEQ ID NO: 765405 - DNA, 25 bp, Homo sapien
tcagggtggctcaagacccgcttct

SEQ ID NO: 765406 - DNA, 25 bp, Homo sapien
atcctcggcgccacagattccgggg

SEQ ID NO: 765407 - DNA, 25 bp, Homo sapien
cacagattccggggcctcgtcctca

SEQ ID NO: 765408 - DNA, 25 bp, Homo sapien
gcttgggcgatttctgagcctcccc

SEQ ID NO: 765409 - DNA, 25 bp, Homo sapien
tgagccgcttgggcgatttctgagc

SEQ ID NO: 765410 - DNA, 25 bp, Homo sapien
gccgcttgggcgatttctgagcctc

SEQ ID NO: 765411 - DNA, 25 bp, Homo sapien
ggcgatttctgagcctccccgaagc

SEQ ID NO: 765412 - DNA, 25 bp, Homo sapien
tttctagggctgagtagtccacatc

SEQ ID NO: 765413 - DNA, 25 bp, Homo sapien
ttgtcctccgtgttgacgctagtgg

SEQ ID NO: 765414 - DNA, 25 bp, Homo sapien
tgaagtccacctctttttctagggc

SEQ ID NO: 765415 - DNA, 25 bp, Homo sapien
actcgtcgaagatccacaggcacgc

SEQ ID NO: 765416 - DNA, 25 bp, Homo sapien
gctgcagctggccacgagggttttc

SEQ ID NO: 765417 - DNA, 25 bp, Homo sapien
acctacttcctctgcgcgtgctggg

SEQ ID NO: 765418 - DNA, 25 bp, Homo sapien
tgggccggcaggtagccaactaact

SEQ ID NO: 765419 - DNA, 25 bp, Homo sapien
tcctcttggagcgaggacggctctc

SEQ ID NO: 765420 - DNA, 25 bp, Homo sapien
atagcctcctggtggcgcagaacgg

SEQ ID NO: 765421 - DNA, 25 bp, Homo sapien
ggcctgggttagcaggagctcctca

SEQ ID NO: 765422 - DNA, 25 bp, Homo sapien
tccttggccgtgaagaagacggagc

SEQ ID NO: 765423 - DNA, 25 bp, Homo sapien
tgcggacatagagctcgacgaggac

SEQ ID NO: 765424 - DNA, 25 bp, Homo sapien
ctgtgcaggaggcatccctgggagc

SEQ ID NO: 765425 - DNA, 25 bp, Homo sapien
aggatgtgtgtggtgctccctgtgc

SEQ ID NO: 765426 - DNA, 25 bp, Homo sapien
tgtgctaggccatggctagcagccc

SEQ ID NO: 765427 - DNA, 25 bp, Homo sapien
caactgcccgtgtggagcaacactg

SEQ ID NO: 765428 - DNA, 25 bp, Homo sapien
ggcgtctgagcgtgcactgcctcgt

SEQ ID NO: 765429 - DNA, 25 bp, Homo sapien
gctgcgccagcccaaaggaatagca

SEQ ID NO: 765430 - DNA, 25 bp, Homo sapien
ctttgccctgctcccgacggagagg

SEQ ID NO: 765431 - DNA, 25 bp, Homo sapien
tgtcactcaaggtgtgtgcgcgtcg

SEQ ID NO: 765432 - DNA, 25 bp, Homo sapien
ggaggccgggctcatccgtggtcgc

SEQ ID NO: 765433 - DNA, 25 bp, Homo sapien
gaacgcccgttcctccatttctgcc

SEQ ID NO: 765434 - DNA, 25 bp, Homo sapien
ttcccgtcctgatgaaaagggaggc

SEQ ID NO: 765435 - DNA, 25 bp, Homo sapien
gtctcttcggccgctccggaggcga

SEQ ID NO: 765436 - DNA, 25 bp, Homo sapien
tgaagcccacggaccctaagcgcgg

SEQ ID NO: 765437 - DNA, 25 bp, Homo sapien
ctggaacgtggttcatgcagctgaa

SEQ ID NO: 765438 - DNA, 25 bp, Homo sapien
taagcgcggctcatcgggaaggccc

SEQ ID NO: 765439 - DNA, 25 bp, Homo sapien
gttcatgcagctgaagcccacggac

SEQ ID NO: 765440 - DNA, 25 bp, Homo sapien
gaaggaaagcgcactgtccgcgtat

SEQ ID NO: 765441 - DNA, 25 bp, Homo sapien
ccagatatggccaaggaaatccagc

SEQ ID NO: 765442 - DNA, 25 bp, Homo sapien
tgcacaagcccgcattgcgaagcgc

SEQ ID NO: 765443 - DNA, 25 bp, Homo sapien
caatgcttctttgtcggcgagagcc

SEQ ID NO: 765444 - DNA, 25 bp, Homo sapien
ggcctccctacaccaggaacaaaga

SEQ ID NO: 765445 - DNA, 25 bp, Homo sapien
tacctagacgtggttcaagcagttc

SEQ ID NO: 765446 - DNA, 25 bp, Homo sapien
cgagcaaggcggagatttctaccta

SEQ ID NO: 765447 - DNA, 25 bp, Homo sapien
aacaaagaaacactcggcaccagag

SEQ ID NO: 765448 - DNA, 25 bp, Homo sapien
cagaagtcacttgccttagattcca

SEQ ID NO: 765449 - DNA, 25 bp, Homo sapien
taaggtaccacatcaggcagtttgc

SEQ ID NO: 765450 - DNA, 25 bp, Homo sapien
tattgaggcctttcttaaggtacca

SEQ ID NO: 765451 - DNA, 25 bp, Homo sapien
tcagttaggacttgttcccacaggt

SEQ ID NO: 765452 - DNA, 25 bp, Homo sapien
catcgatgaccactgtgagcccgtc

SEQ ID NO: 765453 - DNA, 25 bp, Homo sapien
gatgaccactgtgagcccgtcaggg

SEQ ID NO: 765454 - DNA, 25 bp, Homo sapien
cttcctggtggacctaggagaccct

SEQ ID NO: 765455 - DNA, 25 bp, Homo sapien
aaggcatcgatgaccactgtgagcc

SEQ ID NO: 765456 - DNA, 25 bp, Homo sapien
tttactgggattgttatcagatgcc

SEQ ID NO: 765457 - DNA, 25 bp, Homo sapien
caggagtttactgggattgttatca

SEQ ID NO: 765458 - DNA, 25 bp, Homo sapien
gaaggcattcaggagtttactggga

SEQ ID NO: 765459 - DNA, 25 bp, Homo sapien
ggattgttatcagatgcccactcac

SEQ ID NO: 765460 - DNA, 25 bp, Homo sapien
tctctcacactatgttcctggttct

SEQ ID NO: 765461 - DNA, 25 bp, Homo sapien
tctgtcccagctaaaaactccgagg

SEQ ID NO: 765462 - DNA, 25 bp, Homo sapien
gttcctggttctacagatagcaggt

SEQ ID NO: 765463 - DNA, 25 bp, Homo sapien
gcaggtaactttgccctgcatctgg

SEQ ID NO: 765464 - DNA, 25 bp, Homo sapien
tgctcctaccaagatgtgctcttta

SEQ ID NO: 765465 - DNA, 25 bp, Homo sapien
tagtttctttcaggacttacatgtt

SEQ ID NO: 765466 - DNA, 25 bp, Homo sapien
tcatgcccagtctgctgtaacaaat

SEQ ID NO: 765467 - DNA, 25 bp, Homo sapien
aatcagccgtcagtaaaattcccta

SEQ ID NO: 765468 - DNA, 25 bp, Homo sapien
ggtctggatccgtcttatgaaatta

SEQ ID NO: 765469 - DNA, 25 bp, Homo sapien
tggatccgtcttatgaaattatgaa

SEQ ID NO: 765470 - DNA, 25 bp, Homo sapien
agtcatggggatcagctgtcttcag

SEQ ID NO: 765471 - DNA, 25 bp, Homo sapien
ctttaattttggtctggatccgtct

SEQ ID NO: 765472 - DNA, 25 bp, Homo sapien
taattaagctacaagaattcagcaa

SEQ ID NO: 765473 - DNA, 25 bp, Homo sapien
ctgtttattaattaagctacaagaa

SEQ ID NO: 765474 - DNA, 25 bp, Homo sapien
tacaagaattcagcaagaaatcact

SEQ ID NO: 765475 - DNA, 25 bp, Homo sapien
gaaatcactctaaatctgtatataa

SEQ ID NO: 765476 - DNA, 25 bp, Homo sapien
ctctagagttcctaatgtaactctt

SEQ ID NO: 765477 - DNA, 25 bp, Homo sapien
tctagagttcctaatgtaactcttc

SEQ ID NO: 765478 - DNA, 25 bp, Homo sapien
tgcttctccgcaagccatgcctgtt

SEQ ID NO: 765479 - DNA, 25 bp, Homo sapien
ttccctgtgcactttccatgccttt

SEQ ID NO: 765480 - DNA, 25 bp, Homo sapien
tctgcactcagatgtgcccacagaa

SEQ ID NO: 765481 - DNA, 25 bp, Homo sapien
tccaccttgcaagctaaacctgctt

SEQ ID NO: 765482 - DNA, 25 bp, Homo sapien
cccggtgctctctgtgggatcagct

SEQ ID NO: 765483 - DNA, 25 bp, Homo sapien
gaatgtctttacctccgctttgtga

SEQ ID NO: 765484 - DNA, 25 bp, Homo sapien
tgctcttactgtctagccatctctg

SEQ ID NO: 765485 - DNA, 25 bp, Homo sapien
ctttggctccttgcgctttggtttc

SEQ ID NO: 765486 - DNA, 25 bp, Homo sapien
gatgttgagtcaaacggatatgaaa

SEQ ID NO: 765487 - DNA, 25 bp, Homo sapien
cagggtatataacttctctttcaaa

SEQ ID NO: 765488 - DNA, 25 bp, Homo sapien
gatatgaaagtagaatatttggaag

SEQ ID NO: 765489 - DNA, 25 bp, Homo sapien
ttcagcatgagttgcttatcatctc

SEQ ID NO: 765490 - DNA, 25 bp, Homo sapien
tctgggttcgagaagacaatatgac

SEQ ID NO: 765491 - DNA, 25 bp, Homo sapien
aagaagggcctatatggcttcttaa

SEQ ID NO: 765492 - DNA, 25 bp, Homo sapien
gagcagccacacagtacagagtaag

SEQ ID NO: 765493 - DNA, 25 bp, Homo sapien
caaagggcgtgtgtggttcaccacc

SEQ ID NO: 765494 - DNA, 25 bp, Homo sapien
atgaactggtgagtgaactcgccat

SEQ ID NO: 765495 - DNA, 25 bp, Homo sapien
caatgaactggtgagtgaactcgcc

SEQ ID NO: 765496 - DNA, 25 bp, Homo sapien
aatgaactggtgagtgaactcgcca

SEQ ID NO: 765497 - DNA, 25 bp, Homo sapien
tgaccctgcggccattcagattccg

SEQ ID NO: 765498 - DNA, 25 bp, Homo sapien
gtgacacattcctgggactcacagt

SEQ ID NO: 765499 - DNA, 25 bp, Homo sapien
cagattccgaagtgttctttttacg

SEQ ID NO: 765500 - DNA, 25 bp, Homo sapien
tcggagcaggtaggtttggtcacat

SEQ ID NO: 765501 - DNA, 25 bp, Homo sapien
tctctgtgttcaggtacagtaaggc

SEQ ID NO: 765502 - DNA, 25 bp, Homo sapien
gataacctgcccgtccataaagcag

SEQ ID NO: 765503 - DNA, 25 bp, Homo sapien
taatagctgactcacacacggtgcc

SEQ ID NO: 765504 - DNA, 25 bp, Homo sapien
tcttggcagacaaccgatctctgga

SEQ ID NO: 765505 - DNA, 25 bp, Homo sapien
tacccgattcaataatagcattgac

SEQ ID NO: 765506 - DNA, 25 bp, Homo sapien
gctgctccaacgtactgcttccggt

SEQ ID NO: 765507 - DNA, 25 bp, Homo sapien
gcttccggtgccactggtacaacag

SEQ ID NO: 765508 - DNA, 25 bp, Homo sapien
ccttgacaaagtcttacccgattca

SEQ ID NO: 765509 - DNA, 25 bp, Homo sapien
tacattgtatcatggctaacaaaac

SEQ ID NO: 765510 - DNA, 25 bp, Homo sapien
tttacattgtatcatggctaacaaa

SEQ ID NO: 765511 - DNA, 25 bp, Homo sapien
ttacattgtatcatggctaacaaaa

SEQ ID NO: 765512 - DNA, 25 bp, Homo sapien
cctgcatgagcatgtggatgacccc

SEQ ID NO: 765513 - DNA, 25 bp, Homo sapien
cagatcggaattttttgtggcgcac

SEQ ID NO: 765514 - DNA, 25 bp, Homo sapien
gatgatgggtaattcccagatcgga

SEQ ID NO: 765515 - DNA, 25 bp, Homo sapien
tgcaccagccggtctgtttcattgc

SEQ ID NO: 765516 - DNA, 25 bp, Homo sapien
caaaacctgacagggaaacctggct

SEQ ID NO: 765517 - DNA, 25 bp, Homo sapien
ggacggccgtgacggcggaagcact

SEQ ID NO: 765518 - DNA, 25 bp, Homo sapien
cccacacaggggacggccgtgacgg

SEQ ID NO: 765519 - DNA, 25 bp, Homo sapien
aagcaagacccaaaacctgacaggg

SEQ ID NO: 765520 - DNA, 25 bp, Homo sapien
cccatcccaaggaagctggcacaaa

SEQ ID NO: 765521 - DNA, 25 bp, Homo sapien
ttagcagggcaagagtatccaatac

SEQ ID NO: 765522 - DNA, 25 bp, Homo sapien
cagtacacatcaacaggacctgagg

SEQ ID NO: 765523 - DNA, 25 bp, Homo sapien
tctgctcttgtagaaggcaatcgag

SEQ ID NO: 765524 - DNA, 25 bp, Homo sapien
gagtatccaatacactgatcagtac

SEQ ID NO: 765525 - DNA, 25 bp, Homo sapien
tcctgcgtgagacggtaaagggaca

SEQ ID NO: 765526 - DNA, 25 bp, Homo sapien
ggacaggaaggaatagccgttgcca

SEQ ID NO: 765527 - DNA, 25 bp, Homo sapien
caaatcacatcgctacactccatgg

SEQ ID NO: 765528 - DNA, 25 bp, Homo sapien
cttgcaagctcggtagaggtacttc

SEQ ID NO: 765529 - DNA, 25 bp, Homo sapien
tcggggttgttcagaagcagttcca

SEQ ID NO: 765530 - DNA, 25 bp, Homo sapien
ggggttgttcagaagcagttccaac

SEQ ID NO: 765531 - DNA, 25 bp, Homo sapien
ggagttgtacttctggactctggat

SEQ ID NO: 765532 - DNA, 25 bp, Homo sapien
actcggggttgttcagaagcagttc

SEQ ID NO: 765533 - DNA, 25 bp, Homo sapien
tgattccagaagcaactcgaaacgc

SEQ ID NO: 765534 - DNA, 25 bp, Homo sapien
tgccgcttcagctgatgattccaga

SEQ ID NO: 765535 - DNA, 25 bp, Homo sapien
gggtctgccttacagctgctgggaa

SEQ ID NO: 765536 - DNA, 25 bp, Homo sapien
tccgaggtgaaaaccgaacggctca

SEQ ID NO: 765537 - DNA, 25 bp, Homo sapien
tcaaagagcgaatagggtctgtcag

SEQ ID NO: 765538 - DNA, 25 bp, Homo sapien
tagggtctgtcaggaatgcggcacc

SEQ ID NO: 765539 - DNA, 25 bp, Homo sapien
aggaatgcggcacccgtgtgctccg

SEQ ID NO: 765540 - DNA, 25 bp, Homo sapien
tgtgctccgtaatctagacaccact

SEQ ID NO: 765541 - DNA, 25 bp, Homo sapien
ggaaaccgtgatgtctctggtccca

SEQ ID NO: 765542 - DNA, 25 bp, Homo sapien
ccctcttcgaagagtcaagttcaaa

SEQ ID NO: 765543 - DNA, 25 bp, Homo sapien
tcaaatgctggaaaccgtgatgtct

SEQ ID NO: 765544 - DNA, 25 bp, Homo sapien
agaaagtgaatagcgccagccatgc

SEQ ID NO: 765545 - DNA, 25 bp, Homo sapien
tgtgtcaggcactaagcaatctggt

SEQ ID NO: 765546 - DNA, 25 bp, Homo sapien
cactcatgctagtctaaccagaggg

SEQ ID NO: 765547 - DNA, 25 bp, Homo sapien
ttaaaacagcttacacctggagaca

SEQ ID NO: 765548 - DNA, 25 bp, Homo sapien
tgatatacaagatagacaccacctg

SEQ ID NO: 765549 - DNA, 25 bp, Homo sapien
ggaagcgttcagctgtgcactccca

SEQ ID NO: 765550 - DNA, 25 bp, Homo sapien
gacagagctgcaatgcactctgagg

SEQ ID NO: 765551 - DNA, 25 bp, Homo sapien
cacgaaggtgagtgtaaaatccaaa

SEQ ID NO: 765552 - DNA, 25 bp, Homo sapien
tgtccgtccttggagtggtcgctcc

SEQ ID NO: 765553 - DNA, 25 bp, Homo sapien
acgagaagtacctagtcccagacca

SEQ ID NO: 765554 - DNA, 25 bp, Homo sapien
aatgtcacacatttcgggtgccagc

SEQ ID NO: 765555 - DNA, 25 bp, Homo sapien
gaattaatgaaggtaggctaaccca

SEQ ID NO: 765556 - DNA, 25 bp, Homo sapien
tctccaggcatcgtttagaagctga

SEQ ID NO: 765557 - DNA, 25 bp, Homo sapien
tcctttgcctggagggaccgagctg

SEQ ID NO: 765558 - DNA, 25 bp, Homo sapien
gttaatgcagaaccacggaacagca

SEQ ID NO: 765559 - DNA, 25 bp, Homo sapien
taggaaggtgtcaacccaggtggct

SEQ ID NO: 765560 - DNA, 25 bp, Homo sapien
tctgtcctgtgaagtaagtcccgtt

SEQ ID NO: 765561 - DNA, 25 bp, Homo sapien
cacggagaaatgaaaacgaatgacg

SEQ ID NO: 765562 - DNA, 25 bp, Homo sapien
caatgtcactctcaaacacggagaa

SEQ ID NO: 765563 - DNA, 25 bp, Homo sapien
aaccttcggaacagtcgccattgct

SEQ ID NO: 765564 - DNA, 25 bp, Homo sapien
cgcaactgccgcatttttaagtgaa

SEQ ID NO: 765565 - DNA, 25 bp, Homo sapien
tacaggagtttcaggcatcagcaga

SEQ ID NO: 765566 - DNA, 25 bp, Homo sapien
caaaggcaggccagatatcagtcag

SEQ ID NO: 765567 - DNA, 25 bp, Homo sapien
tgtcatctggaagtgtgggatcccc

SEQ ID NO: 765568 - DNA, 25 bp, Homo sapien
tgtcactatgtgtaccctcgagggt

SEQ ID NO: 765569 - DNA, 25 bp, Homo sapien
tgttcctaatctgacgccttgcctg

SEQ ID NO: 765570 - DNA, 25 bp, Homo sapien
cactgatgtgatatctagagctgca

SEQ ID NO: 765571 - DNA, 25 bp, Homo sapien
tctcataaatgggataagggttgct

SEQ ID NO: 765572 - DNA, 25 bp, Homo sapien
tctatagtacctggaaaagccacct

SEQ ID NO: 765573 - DNA, 25 bp, Homo sapien
tcttcagtgagcaaaccttacgcac

SEQ ID NO: 765574 - DNA, 25 bp, Homo sapien
tccttatttaggtggcggcatcact

SEQ ID NO: 765575 - DNA, 25 bp, Homo sapien
ccttacgcaccgtgaacttgggagt

SEQ ID NO: 765576 - DNA, 25 bp, Homo sapien
taagcgcagggaggtattgtgccac

SEQ ID NO: 765577 - DNA, 25 bp, Homo sapien
tgcagctgcagctgacgcggccccg

SEQ ID NO: 765578 - DNA, 25 bp, Homo sapien
ccgcccaggcacttccagaggggtt

SEQ ID NO: 765579 - DNA, 25 bp, Homo sapien
ccaggcacttccagaggggttccat

SEQ ID NO: 765580 - DNA, 25 bp, Homo sapien
gcccaggcacttccagaggggttcc

SEQ ID NO: 765581 - DNA, 25 bp, Homo sapien
catttggggatcacaactgtgtcca

SEQ ID NO: 765582 - DNA, 25 bp, Homo sapien
agcatttggggatcacaactgtgtc

SEQ ID NO: 765583 - DNA, 25 bp, Homo sapien
ttggggatcacaactgtgtccatcc

SEQ ID NO: 765584 - DNA, 25 bp, Homo sapien
ctaaaagtctgtagagcatttgggg

SEQ ID NO: 765585 - DNA, 25 bp, Homo sapien
taagctgcccctggaatcgggtgca

SEQ ID NO: 765586 - DNA, 25 bp, Homo sapien
tgtgctactgtgaacgctgatcctg

SEQ ID NO: 765587 - DNA, 25 bp, Homo sapien
gctgaataggcacccaaaagtccgt

SEQ ID NO: 765588 - DNA, 25 bp, Homo sapien
ggtgtgtagaattcccggagcgtcc

SEQ ID NO: 765589 - DNA, 25 bp, Homo sapien
tacggagtgatttggtgtccatgct

SEQ ID NO: 765590 - DNA, 25 bp, Homo sapien
aagacatctcatggaagtggatacg

SEQ ID NO: 765591 - DNA, 25 bp, Homo sapien
gaatgcagttgcaagcacagatgct

SEQ ID NO: 765592 - DNA, 25 bp, Homo sapien
gacatttaatcggagaacctcctgg

SEQ ID NO: 765593 - DNA, 25 bp, Homo sapien
cacatccctgtcagcaaatgaatca

SEQ ID NO: 765594 - DNA, 25 bp, Homo sapien
aatgaatcacctggacctgcttcgc

SEQ ID NO: 765595 - DNA, 25 bp, Homo sapien
ctggacctgcttcgcccggcagtgg

SEQ ID NO: 765596 - DNA, 25 bp, Homo sapien
tgctcccttcgtccttgaggctttt

SEQ ID NO: 765597 - DNA, 25 bp, Homo sapien
tgtgtctatgaacacgaagataccg

SEQ ID NO: 765598 - DNA, 25 bp, Homo sapien
aacctaagggttcatgttcttgaca

SEQ ID NO: 765599 - DNA, 25 bp, Homo sapien
caccagttcctggtaggatccatca

SEQ ID NO: 765600 - DNA, 25 bp, Homo sapien
gaagataccgattagactggatgca

SEQ ID NO: 765601 - DNA, 25 bp, Homo sapien
cctctgtgagaactgggtccacctt

SEQ ID NO: 765602 - DNA, 25 bp, Homo sapien
tccgcaggcttcatgcagagaatga

SEQ ID NO: 765603 - DNA, 25 bp, Homo sapien
tgaatggtaagcatggccagcgtcc

SEQ ID NO: 765604 - DNA, 25 bp, Homo sapien
tgtgggcacattccagaccgtgctg

SEQ ID NO: 765605 - DNA, 25 bp, Homo sapien
ggacacagaaatgccagtactgagc

SEQ ID NO: 765606 - DNA, 25 bp, Homo sapien
gaacagatacaacctcaaaccaaac

SEQ ID NO: 765607 - DNA, 25 bp, Homo sapien
caaaccaaactagaaagctcagagg

SEQ ID NO: 765608 - DNA, 25 bp, Homo sapien
gtactgagctggcaacacctctgtt

SEQ ID NO: 765609 - DNA, 25 bp, Homo sapien
tgaaataggtgatgcaggatgcccc

SEQ ID NO: 765610 - DNA, 25 bp, Homo sapien
gaagcgctacaggtttgatgaagac

SEQ ID NO: 765611 - DNA, 25 bp, Homo sapien
gcattaagaatagcgtgagcacctg

SEQ ID NO: 765612 - DNA, 25 bp, Homo sapien
tggccacagtcatacaagttcagca

SEQ ID NO: 765613 - DNA, 25 bp, Homo sapien
caaacagggctgcttcggttgtgag

SEQ ID NO: 765614 - DNA, 25 bp, Homo sapien
agtcatagcccaagcacaaacaggg

SEQ ID NO: 765615 - DNA, 25 bp, Homo sapien
ggtgatgggacagccttacaggcca

SEQ ID NO: 765616 - DNA, 25 bp, Homo sapien
cattcttttccaacgtgacggtgct

SEQ ID NO: 765617 - DNA, 25 bp, Homo sapien
ttctgctgcggagccggcttcttca

SEQ ID NO: 765618 - DNA, 25 bp, Homo sapien
caggttccttctgatgatgggcgtg

SEQ ID NO: 765619 - DNA, 25 bp, Homo sapien
ccggcttcttcatccggaggcgcat

SEQ ID NO: 765620 - DNA, 25 bp, Homo sapien
gatgatgggcgtgcttttctgctgc

SEQ ID NO: 765621 - DNA, 25 bp, Homo sapien
tcaccacactcctgaacggtttggg

SEQ ID NO: 765622 - DNA, 25 bp, Homo sapien
ccacactcctgaacggtttgggtct

SEQ ID NO: 765623 - DNA, 25 bp, Homo sapien
caccacactcctgaacggtttgggt

SEQ ID NO: 765624 - DNA, 25 bp, Homo sapien
cacactcctgaacggtttgggtctc

SEQ ID NO: 765625 - DNA, 25 bp, Homo sapien
gcgatcgagttttcattgtccagac

SEQ ID NO: 765626 - DNA, 25 bp, Homo sapien
ttcgctttcaagataggcagcctgc

SEQ ID NO: 765627 - DNA, 25 bp, Homo sapien
tctgctccttgagtaggaactggtt

SEQ ID NO: 765628 - DNA, 25 bp, Homo sapien
gcgcatacggagcagtccaaagtct

SEQ ID NO: 765629 - DNA, 25 bp, Homo sapien
aaatcgtggcccgtagactctcaga

SEQ ID NO: 765630 - DNA, 25 bp, Homo sapien
ttaggctccaaaaactcccacagcg

SEQ ID NO: 765631 - DNA, 25 bp, Homo sapien
tcctgtgcaggactaagcataacac

SEQ ID NO: 765632 - DNA, 25 bp, Homo sapien
tttacatgacgaatcccagggaccg

SEQ ID NO: 765633 - DNA, 25 bp, Homo sapien
gctgagatttttagaaggacctggg

SEQ ID NO: 765634 - DNA, 25 bp, Homo sapien
tgggagaatgtcctgatgatcacag

SEQ ID NO: 765635 - DNA, 25 bp, Homo sapien
gcttgtcaggacagtcgccagagca

SEQ ID NO: 765636 - DNA, 25 bp, Homo sapien
gggacctctcgaaggcgtcaggaaa

SEQ ID NO: 765637 - DNA, 25 bp, Homo sapien
gcagggagcattgaatcctcctcat

SEQ ID NO: 765638 - DNA, 25 bp, Homo sapien
tgcagggagcattgaatcctcctca

SEQ ID NO: 765639 - DNA, 25 bp, Homo sapien
ctgcagggagcattgaatcctcctc

SEQ ID NO: 765640 - DNA, 25 bp, Homo sapien
ccagaaagtgctgccgactaaggtg

SEQ ID NO: 765641 - DNA, 25 bp, Homo sapien
gcacacttccctgtcagtccagaaa

SEQ ID NO: 765642 - DNA, 25 bp, Homo sapien
gcaggtccacatgcgggaactcagt

SEQ ID NO: 765643 - DNA, 25 bp, Homo sapien
actaaggtggcgtttgtcagagaag

SEQ ID NO: 765644 - DNA, 25 bp, Homo sapien
tcattcttgaggagcccagtgtagg

SEQ ID NO: 765645 - DNA, 25 bp, Homo sapien
ctgtcattcttgaggagcccagtgt

SEQ ID NO: 765646 - DNA, 25 bp, Homo sapien
gagcccagtgtaggagggaagggct

SEQ ID NO: 765647 - DNA, 25 bp, Homo sapien
tgaggagcccagtgtaggagggaag

SEQ ID NO: 765648 - DNA, 25 bp, Homo sapien
tacgttgaggacagcctgaaattct

SEQ ID NO: 765649 - DNA, 25 bp, Homo sapien
tgtctggcccactcagaccagttac

SEQ ID NO: 765650 - DNA, 25 bp, Homo sapien
ggcccactcagaccagttacgttga

SEQ ID NO: 765651 - DNA, 25 bp, Homo sapien
tcagaccagttacgttgaggacagc

SEQ ID NO: 765652 - DNA, 25 bp, Homo sapien
tctctgggaattgtcttgctaaagt

SEQ ID NO: 765653 - DNA, 25 bp, Homo sapien
ctttctctgggaattgtcttgctaa

SEQ ID NO: 765654 - DNA, 25 bp, Homo sapien
ttctctgggaattgtcttgctaaag

SEQ ID NO: 765655 - DNA, 25 bp, Homo sapien
ctctgggaattgtcttgctaaagtt

SEQ ID NO: 765656 - DNA, 25 bp, Homo sapien
taaaatgctgacactcagtgtatat

SEQ ID NO: 765657 - DNA, 25 bp, Homo sapien
gacactcagtgtatatagagatatg

SEQ ID NO: 765658 - DNA, 25 bp, Homo sapien
tgctgacactcagtgtatatagaga

SEQ ID NO: 765659 - DNA, 25 bp, Homo sapien
cactcagtgtatatagagatatgaa

SEQ ID NO: 765660 - DNA, 25 bp, Homo sapien
agagggcaacgagtgaaccgtgact

SEQ ID NO: 765661 - DNA, 25 bp, Homo sapien
tcttgcagacgtaggtcggaatgcg

SEQ ID NO: 765662 - DNA, 25 bp, Homo sapien
aaccgtgactcgcagcatcttgcag

SEQ ID NO: 765663 - DNA, 25 bp, Homo sapien
gcggctttagcatattctgaaatat

SEQ ID NO: 765664 - DNA, 25 bp, Homo sapien
ctggaaagcccaggagaggctccca

SEQ ID NO: 765665 - DNA, 25 bp, Homo sapien
ccaggagaggctcccattgtctttc

SEQ ID NO: 765666 - DNA, 25 bp, Homo sapien
gaaagcccaggagaggctcccattg

SEQ ID NO: 765667 - DNA, 25 bp, Homo sapien
gcccaggagaggctcccattgtctt

SEQ ID NO: 765668 - DNA, 25 bp, Homo sapien
catggcatgccactgtagatgtggg

SEQ ID NO: 765669 - DNA, 25 bp, Homo sapien
ctctcccatggcatgccactgtaga

SEQ ID NO: 765670 - DNA, 25 bp, Homo sapien
agatgtggggcctgtctctaactcc

SEQ ID NO: 765671 - DNA, 25 bp, Homo sapien
gggcctgtctctaactccattccag

SEQ ID NO: 765672 - DNA, 25 bp, Homo sapien
caggaatgtttggctgtcggtggcg

SEQ ID NO: 765673 - DNA, 25 bp, Homo sapien
cggtggcggtgatggagaataaggg

SEQ ID NO: 765674 - DNA, 25 bp, Homo sapien
tgtcggtggcggtgatggagaataa

SEQ ID NO: 765675 - DNA, 25 bp, Homo sapien
ggaatgtttggctgtcggtggcggt

SEQ ID NO: 765676 - DNA, 25 bp, Homo sapien
ctgtggcctgtctctgcggagcagc

SEQ ID NO: 765677 - DNA, 25 bp, Homo sapien
tggctgtggcctgtctctgcggagc

SEQ ID NO: 765678 - DNA, 25 bp, Homo sapien
ctggctctcgctgcgtggctgtggc

SEQ ID NO: 765679 - DNA, 25 bp, Homo sapien
tgtggcctgtctctgcggagcagcc

SEQ ID NO: 765680 - DNA, 25 bp, Homo sapien
tacaggaaacttggagactaacaaa

SEQ ID NO: 765681 - DNA, 25 bp, Homo sapien
ttttttgggtactaagtggtctgca

SEQ ID NO: 765682 - DNA, 25 bp, Homo sapien
aatgtacaggttccatacaggaaac

SEQ ID NO: 765683 - DNA, 25 bp, Homo sapien
cagtatttcggtacatggctttcca

SEQ ID NO: 765684 - DNA, 25 bp, Homo sapien
ctggacacacttgtgtttgatttct

SEQ ID NO: 765685 - DNA, 25 bp, Homo sapien
tgctggacacacttgtgtttgattt

SEQ ID NO: 765686 - DNA, 25 bp, Homo sapien
ctgctggacacacttgtgtttgatt

SEQ ID NO: 765687 - DNA, 25 bp, Homo sapien
gctggacacacttgtgtttgatttc

SEQ ID NO: 765688 - DNA, 25 bp, Homo sapien
tcctttctcttgtggtttgttcctg

SEQ ID NO: 765689 - DNA, 25 bp, Homo sapien
ctggtgggctttgggctccttgact

SEQ ID NO: 765690 - DNA, 25 bp, Homo sapien
gtggtttgttcctggtgggctggcc

SEQ ID NO: 765691 - DNA, 25 bp, Homo sapien
cctggtgggctttgggctccttgac

SEQ ID NO: 765692 - DNA, 25 bp, Homo sapien
gatgccagcctcctttgtggtgtgg

SEQ ID NO: 765693 - DNA, 25 bp, Homo sapien
cccctggcttttgatgccagcctcc

SEQ ID NO: 765694 - DNA, 25 bp, Homo sapien
cagcctcctttgtggtgtggcagga

SEQ ID NO: 765695 - DNA, 25 bp, Homo sapien
tttgatgccagcctcctttgtggtg

SEQ ID NO: 765696 - DNA, 25 bp, Homo sapien
cctcttctcccatcagcaagctcac

SEQ ID NO: 765697 - DNA, 25 bp, Homo sapien
tcctcttctcccatcagcaagctca

SEQ ID NO: 765698 - DNA, 25 bp, Homo sapien
tcttcaactgtgtcttcctgttctc

SEQ ID NO: 765699 - DNA, 25 bp, Homo sapien
cactcttcaactgtgtcttcctgtt

SEQ ID NO: 765700 - DNA, 25 bp, Homo sapien
gctgaggctccgttggtggaaactc

SEQ ID NO: 765701 - DNA, 25 bp, Homo sapien
tccagatggaagtgaatagacctag

SEQ ID NO: 765702 - DNA, 25 bp, Homo sapien
tcatccaagtgacactgaggctgag

SEQ ID NO: 765703 - DNA, 25 bp, Homo sapien
tctggaagtctcgaaaattttcatc

SEQ ID NO: 765704 - DNA, 25 bp, Homo sapien
tgttcagctgaaggaagggtatgca

SEQ ID NO: 765705 - DNA, 25 bp, Homo sapien
gtgttcggggtacaaaatatgtgtg

SEQ ID NO: 765706 - DNA, 25 bp, Homo sapien
gtgtgagagacgtcagtgagattcc

SEQ ID NO: 765707 - DNA, 25 bp, Homo sapien
ccagatgttgctgcacgctgtgggt

SEQ ID NO: 765708 - DNA, 25 bp, Homo sapien
tccagaaggctggagcacgaaatca

SEQ ID NO: 765709 - DNA, 25 bp, Homo sapien
agtggtctgacttgttggcctctgc

SEQ ID NO: 765710 - DNA, 25 bp, Homo sapien
aaatcagtggtctgacttgttggcc

SEQ ID NO: 765711 - DNA, 25 bp, Homo sapien
tggagcacgaaatcagtggtctgac

SEQ ID NO: 765712 - DNA, 25 bp, Homo sapien
agtttgctgtgaagcctggcccaga

SEQ ID NO: 765713 - DNA, 25 bp, Homo sapien
accactcaacagaggaggatactgc

SEQ ID NO: 765714 - DNA, 25 bp, Homo sapien
ggcttcttgaatccttgtagcgtcc

SEQ ID NO: 765715 - DNA, 25 bp, Homo sapien
tagcgtcctccatggtagatgttct

SEQ ID NO: 765716 - DNA, 25 bp, Homo sapien
tctcaccactcaacagaggaggata

SEQ ID NO: 765717 - DNA, 25 bp, Homo sapien
agttcagctggtgaaagaggtgtct

SEQ ID NO: 765718 - DNA, 25 bp, Homo sapien
cagctggtgaaagaggtgtctcgaa

SEQ ID NO: 765719 - DNA, 25 bp, Homo sapien
ctggtgaaagaggtgtctcgaagcc

SEQ ID NO: 765720 - DNA, 25 bp, Homo sapien
ttcagctggtgaaagaggtgtctcg

SEQ ID NO: 765721 - DNA, 25 bp, Homo sapien
catcagtgaaatgaaggctgtcctt

SEQ ID NO: 765722 - DNA, 25 bp, Homo sapien
caaggcctgtagctcccatttgtgg

SEQ ID NO: 765723 - DNA, 25 bp, Homo sapien
gttttaggatgcagacctgatccca

SEQ ID NO: 765724 - DNA, 25 bp, Homo sapien
attacaaattgcatggccttctgcc

SEQ ID NO: 765725 - DNA, 25 bp, Homo sapien
gcttttgtccagactccagactggc

SEQ ID NO: 765726 - DNA, 25 bp, Homo sapien
agtctgtatgcctgatcgtgagggc

SEQ ID NO: 765727 - DNA, 25 bp, Homo sapien
taggagaaattaagccatgggcccg

SEQ ID NO: 765728 - DNA, 25 bp, Homo sapien
tgccatcagtctgcctagttcaagg

SEQ ID NO: 765729 - DNA, 25 bp, Homo sapien
tttctgttcccagggtaactgccca

SEQ ID NO: 765730 - DNA, 25 bp, Homo sapien
cacggctggtcgcactgcagagtgt

SEQ ID NO: 765731 - DNA, 25 bp, Homo sapien
ccagggcccaaggtacacggctggt

SEQ ID NO: 765732 - DNA, 25 bp, Homo sapien
cattgcaggtgcttcctccgcttgt

SEQ ID NO: 765733 - DNA, 25 bp, Homo sapien
ccaaaaggtgcttatatttgtccat

SEQ ID NO: 765734 - DNA, 25 bp, Homo sapien
tatttgggttgcactctcctgtgat

SEQ ID NO: 765735 - DNA, 25 bp, Homo sapien
gctgctgcacctttgtgaggtctgc

SEQ ID NO: 765736 - DNA, 25 bp, Homo sapien
cttattgaacaataggaagctctgt

SEQ ID NO: 765737 - DNA, 25 bp, Homo sapien
ttggatctgccagtgttaagtgggc

SEQ ID NO: 765738 - DNA, 25 bp, Homo sapien
tccgaggcgccccagaggaccttgc

SEQ ID NO: 765739 - DNA, 25 bp, Homo sapien
gcgcgcagttccgaggcgccccaga

SEQ ID NO: 765740 - DNA, 25 bp, Homo sapien
ggcgcgcagttccgaggcgccccag

SEQ ID NO: 765741 - DNA, 25 bp, Homo sapien
agttccgaggcgccccagaggacct

SEQ ID NO: 765742 - DNA, 25 bp, Homo sapien
cctccctctaggctacgggagcagt

SEQ ID NO: 765743 - DNA, 25 bp, Homo sapien
tcaggatctggtacatcttacaagt

SEQ ID NO: 765744 - DNA, 25 bp, Homo sapien
tctgcatcaggtggtttaagcgact

SEQ ID NO: 765745 - DNA, 25 bp, Homo sapien
cctgtactgcgcagctcatgtcctt

SEQ ID NO: 765746 - DNA, 25 bp, Homo sapien
catcgtggacacaagtcaaagttcc

SEQ ID NO: 765747 - DNA, 25 bp, Homo sapien
caaattacaggaagtcgagctcagc

SEQ ID NO: 765748 - DNA, 25 bp, Homo sapien
ggagaatgcaggcaagtgacctaca

SEQ ID NO: 765749 - DNA, 25 bp, Homo sapien
cagaagggaggttatgtcagacact

SEQ ID NO: 765750 - DNA, 25 bp, Homo sapien
cctgaaatctgattcctgtgaacac

SEQ ID NO: 765751 - DNA, 25 bp, Homo sapien
tttgggcaacatccttcaggtgcat

SEQ ID NO: 765752 - DNA, 25 bp, Homo sapien
tcctgaaatctgattcctgtgaaca

SEQ ID NO: 765753 - DNA, 25 bp, Homo sapien
tgtgaacactttgggcaacatcctt

SEQ ID NO: 765754 - DNA, 25 bp, Homo sapien
gaatagtgtcgtcatccatggccag

SEQ ID NO: 765755 - DNA, 25 bp, Homo sapien
aacgctgaagggtatgaatagtgtc

SEQ ID NO: 765756 - DNA, 25 bp, Homo sapien
gggctggtagatcccaggagctatt

SEQ ID NO: 765757 - DNA, 25 bp, Homo sapien
tattgcgggacagggaacgctgaag

SEQ ID NO: 765758 - DNA, 25 bp, Homo sapien
tcatggaggccatcaccacccgatg

SEQ ID NO: 765759 - DNA, 25 bp, Homo sapien
gatcatggaggccatcaccacccga

SEQ ID NO: 765760 - DNA, 25 bp, Homo sapien
atcatggaggccatcaccacccgat

SEQ ID NO: 765761 - DNA, 25 bp, Homo sapien
gtgtgtccctttggcaccctgggag

SEQ ID NO: 765762 - DNA, 25 bp, Homo sapien
cctttggcaccctgggagcactctg

SEQ ID NO: 765763 - DNA, 25 bp, Homo sapien
tctccagttggtccagtgtgtccct

SEQ ID NO: 765764 - DNA, 25 bp, Homo sapien
tgtccctttggcaccctgggagcac

SEQ ID NO: 765765 - DNA, 25 bp, Homo sapien
ctctttggggccaggaaatccattg

SEQ ID NO: 765766 - DNA, 25 bp, Homo sapien
tttggggccaggaaatccattggga

SEQ ID NO: 765767 - DNA, 25 bp, Homo sapien
caggggctctttggggccaggaaat

SEQ ID NO: 765768 - DNA, 25 bp, Homo sapien
tggggccaggaaatccattgggacc

SEQ ID NO: 765769 - DNA, 25 bp, Homo sapien
cctgagtgtcccggcagcttgtcat

SEQ ID NO: 765770 - DNA, 25 bp, Homo sapien
cccggcagcttgtcattcccagggt

SEQ ID NO: 765771 - DNA, 25 bp, Homo sapien
gtcccggcagcttgtcattcccagg

SEQ ID NO: 765772 - DNA, 25 bp, Homo sapien
gagtgtcccggcagcttgtcattcc

SEQ ID NO: 765773 - DNA, 25 bp, Homo sapien
tagctgaggtcccaccacatatggg

SEQ ID NO: 765774 - DNA, 25 bp, Homo sapien
aggtcccaccacatatggggggcca

SEQ ID NO: 765775 - DNA, 25 bp, Homo sapien
ctagctgaggtcccaccacatatgg

SEQ ID NO: 765776 - DNA, 25 bp, Homo sapien
cccaccacatatggggggccacggg

SEQ ID NO: 765777 - DNA, 25 bp, Homo sapien
agcccctcagaccaggaacatcctt

SEQ ID NO: 765778 - DNA, 25 bp, Homo sapien
caggcagacaaatggggcccttttc

SEQ ID NO: 765779 - DNA, 25 bp, Homo sapien
acaggactctgcaccctatcacagc

SEQ ID NO: 765780 - DNA, 25 bp, Homo sapien
gtcacacaggactctgcaccctatc

SEQ ID NO: 765781 - DNA, 25 bp, Homo sapien
agccaggcagacaaatggggccctt

SEQ ID NO: 765782 - DNA, 25 bp, Homo sapien
cactgctacaggctgttccatggac

SEQ ID NO: 765783 - DNA, 25 bp, Homo sapien
ctgttccatggaccagtgagtccag

SEQ ID NO: 765784 - DNA, 25 bp, Homo sapien
catggaccagtgagtccagggggtc

SEQ ID NO: 765785 - DNA, 25 bp, Homo sapien
actgctacaggctgttccatggacc

SEQ ID NO: 765786 - DNA, 25 bp, Homo sapien
tccaaagtgtccctggggtccctga

SEQ ID NO: 765787 - DNA, 25 bp, Homo sapien
gctccccacactctggctccaaagt

SEQ ID NO: 765788 - DNA, 25 bp, Homo sapien
tgagctctgggctcccaatctgctc

SEQ ID NO: 765789 - DNA, 25 bp, Homo sapien
tttattgcctttggctccccacact

SEQ ID NO: 765790 - DNA, 25 bp, Homo sapien
ctcctgtttctcccttctccccaga

SEQ ID NO: 765791 - DNA, 25 bp, Homo sapien
ccacatctcctgtttctcccttctc

SEQ ID NO: 765792 - DNA, 25 bp, Homo sapien
tgtttctcccttctccccagaggga

SEQ ID NO: 765793 - DNA, 25 bp, Homo sapien
ctgtttctcccttctccccagaggg

SEQ ID NO: 765794 - DNA, 25 bp, Homo sapien
cagtgccactgggtccaggtagtcc

SEQ ID NO: 765795 - DNA, 25 bp, Homo sapien
aacacctcccaggggatcttgtgga

SEQ ID NO: 765796 - DNA, 25 bp, Homo sapien
acacctcccaggggatcttgtggac

SEQ ID NO: 765797 - DNA, 25 bp, Homo sapien
cacctcccaggggatcttgtggacc

SEQ ID NO: 765798 - DNA, 25 bp, Homo sapien
tcctcatccacaagactggtcccct

SEQ ID NO: 765799 - DNA, 25 bp, Homo sapien
ctcatccacaagactggtccccttc

SEQ ID NO: 765800 - DNA, 25 bp, Homo sapien
attcctcatccacaagactggtccc

SEQ ID NO: 765801 - DNA, 25 bp, Homo sapien
tcattcctcatccacaagactggtc

SEQ ID NO: 765802 - DNA, 25 bp, Homo sapien
agaaacttggctgccctgactctcc

SEQ ID NO: 765803 - DNA, 25 bp, Homo sapien
tgagccaccttctcctggggggcca

SEQ ID NO: 765804 - DNA, 25 bp, Homo sapien
gccagggtctccaggaaaaccaaga

SEQ ID NO: 765805 - DNA, 25 bp, Homo sapien
tctcctggggggccagggtctccag

SEQ ID NO: 765806 - DNA, 25 bp, Homo sapien
atgagccaccttctcctggggggcc

SEQ ID NO: 765807 - DNA, 25 bp, Homo sapien
ttgccatagtcaccgttaacactgt

SEQ ID NO: 765808 - DNA, 25 bp, Homo sapien
tccttgccatagtcaccgttaacac

SEQ ID NO: 765809 - DNA, 25 bp, Homo sapien
tagtcaccgttaacactgtcctggt

SEQ ID NO: 765810 - DNA, 25 bp, Homo sapien
catagtcaccgttaacactgtcctg

SEQ ID NO: 765811 - DNA, 25 bp, Homo sapien
ggggtggcagggacattggtcactc

SEQ ID NO: 765812 - DNA, 25 bp, Homo sapien
tgggggtggcagggacattggtcac

SEQ ID NO: 765813 - DNA, 25 bp, Homo sapien
agtgggggtggcagggacattggtc

SEQ ID NO: 765814 - DNA, 25 bp, Homo sapien
ggtggcagggacattggtcactcac

SEQ ID NO: 765815 - DNA, 25 bp, Homo sapien
ttagctgacccttgagtcatggcta

SEQ ID NO: 765816 - DNA, 25 bp, Homo sapien
gctgacccttgagtcatggctattc

SEQ ID NO: 765817 - DNA, 25 bp, Homo sapien
tagctgacccttgagtcatggctat

SEQ ID NO: 765818 - DNA, 25 bp, Homo sapien
agctgacccttgagtcatggctatt

SEQ ID NO: 765819 - DNA, 25 bp, Homo sapien
taaatgacccttgagtcatgactat

SEQ ID NO: 765820 - DNA, 25 bp, Homo sapien
aatgacccttgagtcatgactattc

SEQ ID NO: 765821 - DNA, 25 bp, Homo sapien
aaatgacccttgagtcatgactatt

SEQ ID NO: 765822 - DNA, 25 bp, Homo sapien
ctaaatgacccttgagtcatgacta

SEQ ID NO: 765823 - DNA, 25 bp, Homo sapien
cattggtcaagggtacagcatctca

SEQ ID NO: 765824 - DNA, 25 bp, Homo sapien
cagctcctaagggtcaaaaatttga

SEQ ID NO: 765825 - DNA, 25 bp, Homo sapien
cagcatctcagttacgcaaggtgaa

SEQ ID NO: 765826 - DNA, 25 bp, Homo sapien
atggcccactcatacgacttgtaag

SEQ ID NO: 765827 - DNA, 25 bp, Homo sapien
agtaaccataccccatagtaaccag

SEQ ID NO: 765828 - DNA, 25 bp, Homo sapien
taaccataccccatagtaaccagtc

SEQ ID NO: 765829 - DNA, 25 bp, Homo sapien
catagtaaccataccccatagtaac

SEQ ID NO: 765830 - DNA, 25 bp, Homo sapien
ctcatagtaaccataccccatagta

SEQ ID NO: 765831 - DNA, 25 bp, Homo sapien
acagcatctttgccgctgtaccaca

SEQ ID NO: 765832 - DNA, 25 bp, Homo sapien
cacagcatctttgccgctgtaccac

SEQ ID NO: 765833 - DNA, 25 bp, Homo sapien
agcacagcatctttgccgctgtacc

SEQ ID NO: 765834 - DNA, 25 bp, Homo sapien
gcacagcatctttgccgctgtacca

SEQ ID NO: 765835 - DNA, 25 bp, Homo sapien
cgtaaagtccagtgtatagccgcat

SEQ ID NO: 765836 - DNA, 25 bp, Homo sapien
acgtaaagtccagtgtatagccgca

SEQ ID NO: 765837 - DNA, 25 bp, Homo sapien
gttccgtagacatttggttccttca

SEQ ID NO: 765838 - DNA, 25 bp, Homo sapien
caggttccgtagacatttggttcct

SEQ ID NO: 765839 - DNA, 25 bp, Homo sapien
tggttgccacagtgactggcttgga

SEQ ID NO: 765840 - DNA, 25 bp, Homo sapien
tggcttggatgtgcacaatttcctt

SEQ ID NO: 765841 - DNA, 25 bp, Homo sapien
cactgatctggttgccacagtgact

SEQ ID NO: 765842 - DNA, 25 bp, Homo sapien
cagtgactggcttggatgtgcacaa

SEQ ID NO: 765843 - DNA, 25 bp, Homo sapien
tggtaggtgccggtgggttgatgcc

SEQ ID NO: 765844 - DNA, 25 bp, Homo sapien
ccggtgggttgatgccatgttcatc

SEQ ID NO: 765845 - DNA, 25 bp, Homo sapien
tgccggtgggttgatgccatgttca

SEQ ID NO: 765846 - DNA, 25 bp, Homo sapien
tgatgccatgttcatcactgatcac

SEQ ID NO: 765847 - DNA, 25 bp, Homo sapien
tctagatccaccaggatcgcatgag

SEQ ID NO: 765848 - DNA, 25 bp, Homo sapien
tagtagtacacggagatgcggtcca

SEQ ID NO: 765849 - DNA, 25 bp, Homo sapien
aggatcgcatgaggaacatatttgc

SEQ ID NO: 765850 - DNA, 25 bp, Homo sapien
cctgtggcttcatagtagtacacgg

SEQ ID NO: 765851 - DNA, 25 bp, Homo sapien
tgccccagactgatcagaagcaaag

SEQ ID NO: 765852 - DNA, 25 bp, Homo sapien
ctgccccagactgatcagaagcaaa

SEQ ID NO: 765853 - DNA, 25 bp, Homo sapien
cttccataccaaatccaggaccgaa

SEQ ID NO: 765854 - DNA, 25 bp, Homo sapien
cttgtgtgaaggtaccacactgaag

SEQ ID NO: 765855 - DNA, 25 bp, Homo sapien
aaatccaggaccgaataaaccagct

SEQ ID NO: 765856 - DNA, 25 bp, Homo sapien
tgtgtcccagtcaagtgagtgggtc

SEQ ID NO: 765857 - DNA, 25 bp, Homo sapien
attgtagggctcaaccacggtgtca

SEQ ID NO: 765858 - DNA, 25 bp, Homo sapien
aactgatggacggagagggtggcat

SEQ ID NO: 765859 - DNA, 25 bp, Homo sapien
agggctcaaccacggtgtcagatac

SEQ ID NO: 765860 - DNA, 25 bp, Homo sapien
actgatggacggagagggtggcatt

SEQ ID NO: 765861 - DNA, 25 bp, Homo sapien
cactcatggtggctaagacgaggta

SEQ ID NO: 765862 - DNA, 25 bp, Homo sapien
catggtggctaagacgaggtagttc

SEQ ID NO: 765863 - DNA, 25 bp, Homo sapien
gaggtagttcagatcccagtaggtt

SEQ ID NO: 765864 - DNA, 25 bp, Homo sapien
gctaagacgaggtagttcagatccc

SEQ ID NO: 765865 - DNA, 25 bp, Homo sapien
ctgggtaagttggggcacggtgaga

SEQ ID NO: 765866 - DNA, 25 bp, Homo sapien
tgggtaagttggggcacggtgagag

SEQ ID NO: 765867 - DNA, 25 bp, Homo sapien
gggtaagttggggcacggtgagagc

SEQ ID NO: 765868 - DNA, 25 bp, Homo sapien
tcatggacattcgaccactggagac

SEQ ID NO: 765869 - DNA, 25 bp, Homo sapien
cattgaccgctttcatggacattcg

SEQ ID NO: 765870 - DNA, 25 bp, Homo sapien
gaccgctttcatggacattcgacca

SEQ ID NO: 765871 - DNA, 25 bp, Homo sapien
tctgctcattgaccgctttcatgga

SEQ ID NO: 765872 - DNA, 25 bp, Homo sapien
ctgtttccgatgaaggtgacagcca

SEQ ID NO: 765873 - DNA, 25 bp, Homo sapien
gctgtttccgatgaaggtgacagcc

SEQ ID NO: 765874 - DNA, 25 bp, Homo sapien
tgctgtttccgatgaaggtgacagc

SEQ ID NO: 765875 - DNA, 25 bp, Homo sapien
ggccttctggtagaacatggcagtg

SEQ ID NO: 765876 - DNA, 25 bp, Homo sapien
gccttctggtagaacatggcagtga

SEQ ID NO: 765877 - DNA, 25 bp, Homo sapien
ccttctggtagaacatggcagtgaa

SEQ ID NO: 765878 - DNA, 25 bp, Homo sapien
gtactgctgatcctcagagatgaag

SEQ ID NO: 765879 - DNA, 25 bp, Homo sapien
tcttcagcctccttactgaaatcct

SEQ ID NO: 765880 - DNA, 25 bp, Homo sapien
ctcttcctcttctgtggtagcatcc

SEQ ID NO: 765881 - DNA, 25 bp, Homo sapien
ttcctcttctgtggtagcatcctgg

SEQ ID NO: 765882 - DNA, 25 bp, Homo sapien
ggccgagatggaagttttgtcccaa

SEQ ID NO: 765883 - DNA, 25 bp, Homo sapien
ccatattgatgagataaatagggct

SEQ ID NO: 765884 - DNA, 25 bp, Homo sapien
gccccgctggtcactcaacagagta

SEQ ID NO: 765885 - DNA, 25 bp, Homo sapien
cagagtatttcccttggccgagatg

SEQ ID NO: 765886 - DNA, 25 bp, Homo sapien
ttagtatgtgttgctaaagtgagca

SEQ ID NO: 765887 - DNA, 25 bp, Homo sapien
tgggagactgactcacgttaacttc

SEQ ID NO: 765888 - DNA, 25 bp, Homo sapien
ctgggagactgactcacgttaactt

SEQ ID NO: 765889 - DNA, 25 bp, Homo sapien
tgaccagttctgggcttgatgctgc

SEQ ID NO: 765890 - DNA, 25 bp, Homo sapien
gtttgtgccagttgtgctgatcaga

SEQ ID NO: 765891 - DNA, 25 bp, Homo sapien
gagtttgtgccagttgtgctgatca

SEQ ID NO: 765892 - DNA, 25 bp, Homo sapien
tgagtttgtgccagttgtgctgatc

SEQ ID NO: 765893 - DNA, 25 bp, Homo sapien
tcccatctgggtagtttgccggttc

SEQ ID NO: 765894 - DNA, 25 bp, Homo sapien
tctgggtagtttgccggttcattaa

SEQ ID NO: 765895 - DNA, 25 bp, Homo sapien
tagtttgccggttcattaactgctt

SEQ ID NO: 765896 - DNA, 25 bp, Homo sapien
tcctctgcagcgttctcacactttc

SEQ ID NO: 765897 - DNA, 25 bp, Homo sapien
accctattgggtgttaagtcacatg

SEQ ID NO: 765898 - DNA, 25 bp, Homo sapien
ccaggaaataatctgatgggtcctg

SEQ ID NO: 765899 - DNA, 25 bp, Homo sapien
ggcaggtgtccaccctattgggtgt

SEQ ID NO: 765900 - DNA, 25 bp, Homo sapien
gttaagtcacatggtcctaagtggg

SEQ ID NO: 765901 - DNA, 25 bp, Homo sapien
gccggtctcctcagctgccacttca

SEQ ID NO: 765902 - DNA, 25 bp, Homo sapien
agaggtaccaggtccgcaccaaacg

SEQ ID NO: 765903 - DNA, 25 bp, Homo sapien
gcgccggtctcctcagctgccactt

SEQ ID NO: 765904 - DNA, 25 bp, Homo sapien
aggcggcagtggtgggcgaggatag

SEQ ID NO: 765905 - DNA, 25 bp, Homo sapien
cgttgttctccgacttgactccttg

SEQ ID NO: 765906 - DNA, 25 bp, Homo sapien
tgacaatccctgttgcttacaatag

SEQ ID NO: 765907 - DNA, 25 bp, Homo sapien
cgacttgactccttggttgggcttt

SEQ ID NO: 765908 - DNA, 25 bp, Homo sapien
ccctgttgcttacaataggctttca

SEQ ID NO: 765909 - DNA, 25 bp, Homo sapien
attgtccttggttttacaatgataa

SEQ ID NO: 765910 - DNA, 25 bp, Homo sapien
ccacagaacaaggttccacattcct

SEQ ID NO: 765911 - DNA, 25 bp, Homo sapien
caggagaacacagccacagaacaag

SEQ ID NO: 765912 - DNA, 25 bp, Homo sapien
cggacgcctcgctggacgcagacat

SEQ ID NO: 765913 - DNA, 25 bp, Homo sapien
catgctgacgccaccggacgcctcg

SEQ ID NO: 765914 - DNA, 25 bp, Homo sapien
tggacactcgtgagcaacagctgcc

SEQ ID NO: 765915 - DNA, 25 bp, Homo sapien
ctggtggacactcgtgagcaacagc

SEQ ID NO: 765916 - DNA, 25 bp, Homo sapien
aggttgctgggcctcacgcggctgc

SEQ ID NO: 765917 - DNA, 25 bp, Homo sapien
tgctgggcctcacgcggctgcaggg

SEQ ID NO: 765918 - DNA, 25 bp, Homo sapien
gacagagaggaaagcaacattgtgg

SEQ ID NO: 765919 - DNA, 25 bp, Homo sapien
atgacagagaggaaagcaacattgt

SEQ ID NO: 765920 - DNA, 25 bp, Homo sapien
cagagaggaaagcaacattgtggtc

SEQ ID NO: 765921 - DNA, 25 bp, Homo sapien
agagaggaaagcaacattgtggtca

SEQ ID NO: 765922 - DNA, 25 bp, Homo sapien
ccaggtctggtacttctgcatctca

SEQ ID NO: 765923 - DNA, 25 bp, Homo sapien
aaggccaggtctggtacttctgcat

SEQ ID NO: 765924 - DNA, 25 bp, Homo sapien
ggccaggtctggtacttctgcatct

SEQ ID NO: 765925 - DNA, 25 bp, Homo sapien
aggtctggtacttctgcatctcatt

SEQ ID NO: 765926 - DNA, 25 bp, Homo sapien
cgagctctggaatgtctgggccaca

SEQ ID NO: 765927 - DNA, 25 bp, Homo sapien
tctgggccacaactgacaggcgttc

SEQ ID NO: 765928 - DNA, 25 bp, Homo sapien
ccacaactgacaggcgttcagagga

SEQ ID NO: 765929 - DNA, 25 bp, Homo sapien
gctctggaatgtctgggccacaact

SEQ ID NO: 765930 - DNA, 25 bp, Homo sapien
cctgccgtccaggctgagtaccccg

SEQ ID NO: 765931 - DNA, 25 bp, Homo sapien
ttccctgccgtccaggctgagtacc

SEQ ID NO: 765932 - DNA, 25 bp, Homo sapien
tgtagtgcctgacggtctatttccc

SEQ ID NO: 765933 - DNA, 25 bp, Homo sapien
atttccctgccgtccaggctgagta

SEQ ID NO: 765934 - DNA, 25 bp, Homo sapien
catgctgagtagaaggctttgggcc

SEQ ID NO: 765935 - DNA, 25 bp, Homo sapien
agggctgcccactggtcacctccct

SEQ ID NO: 765936 - DNA, 25 bp, Homo sapien
ctgggaatgagcagctcaggtgggc

SEQ ID NO: 765937 - DNA, 25 bp, Homo sapien
gcccactggtcacctccctcaccag

SEQ ID NO: 765938 - DNA, 25 bp, Homo sapien
tcgctgtgtcctcactggccatgtg

SEQ ID NO: 765939 - DNA, 25 bp, Homo sapien
tgggctcctcgtcactcgctgtgtc

SEQ ID NO: 765940 - DNA, 25 bp, Homo sapien
catgggctcctcgtcactcgctgtg

SEQ ID NO: 765941 - DNA, 25 bp, Homo sapien
accatgggctcctcgtcactcgctg

SEQ ID NO: 765942 - DNA, 25 bp, Homo sapien
cactctcagtcggtcacccactcct

SEQ ID NO: 765943 - DNA, 25 bp, Homo sapien
ccactctcagtcggtcacccactcc

SEQ ID NO: 765944 - DNA, 25 bp, Homo sapien
actctcagtcggtcacccactcctt

SEQ ID NO: 765945 - DNA, 25 bp, Homo sapien
tgcatttgagcgtggtggggtcctc

SEQ ID NO: 765946 - DNA, 25 bp, Homo sapien
tcatcttgcatttgagcgtggtggg

SEQ ID NO: 765947 - DNA, 25 bp, Homo sapien
catttgagcgtggtggggtcctcca

SEQ ID NO: 765948 - DNA, 25 bp, Homo sapien
cttgcatttgagcgtggtggggtcc

SEQ ID NO: 765949 - DNA, 25 bp, Homo sapien
tgagcccgtcctcggcttctcccac

SEQ ID NO: 765950 - DNA, 25 bp, Homo sapien
ctgagcccgtcctcggcttctccca

SEQ ID NO: 765951 - DNA, 25 bp, Homo sapien
ggatgtgtgcatagtgggcctggag

SEQ ID NO: 765952 - DNA, 25 bp, Homo sapien
gaggatgtgtgcatagtgggcctgg

SEQ ID NO: 765953 - DNA, 25 bp, Homo sapien
gggaggatgtgtgcatagtgggcct

SEQ ID NO: 765954 - DNA, 25 bp, Homo sapien
cttggaggggaggatgtgtgcatag

SEQ ID NO: 765955 - DNA, 25 bp, Homo sapien
tagttatggagggacccaggtgttg

SEQ ID NO: 765956 - DNA, 25 bp, Homo sapien
tccagccaggctgtcaaggtcccac

SEQ ID NO: 765957 - DNA, 25 bp, Homo sapien
gagggacccaggtgttgaagcaggg

SEQ ID NO: 765958 - DNA, 25 bp, Homo sapien
tatggagggacccaggtgttgaagc

SEQ ID NO: 765959 - DNA, 25 bp, Homo sapien
gaattgtctccccagaagtaagatt

SEQ ID NO: 765960 - DNA, 25 bp, Homo sapien
ttgtctccccagaagtaagattact

SEQ ID NO: 765961 - DNA, 25 bp, Homo sapien
tgtctccccagaagtaagattactg

SEQ ID NO: 765962 - DNA, 25 bp, Homo sapien
tacttttattgtcagaaactccaga

SEQ ID NO: 765963 - DNA, 25 bp, Homo sapien
cagtgtcttcctattaaacatgtag

SEQ ID NO: 765964 - DNA, 25 bp, Homo sapien
tcctattaaacatgtagaatgcttt

SEQ ID NO: 765965 - DNA, 25 bp, Homo sapien
gtagaatgctttcctaatttctctt

SEQ ID NO: 765966 - DNA, 25 bp, Homo sapien
cttctcttcaaggtatgtcatatca

SEQ ID NO: 765967 - DNA, 25 bp, Homo sapien
acttctcttcaaggtatgtcatatc

SEQ ID NO: 765968 - DNA, 25 bp, Homo sapien
taacttctcttcaaggtatgtcata

SEQ ID NO: 765969 - DNA, 25 bp, Homo sapien
tctcttcaaggtatgtcatatcatg

SEQ ID NO: 765970 - DNA, 25 bp, Homo sapien
tgggaagctcttttggaggctgaaa

SEQ ID NO: 765971 - DNA, 25 bp, Homo sapien
tagtgcatgcatcaaatgcaatggg

SEQ ID NO: 765972 - DNA, 25 bp, Homo sapien
gaggctgaaagaagtttccagttaa

SEQ ID NO: 765973 - DNA, 25 bp, Homo sapien
caatgggaagctcttttggaggctg

SEQ ID NO: 765974 - DNA, 25 bp, Homo sapien
agacaagaccacgtgtaagtgccag

SEQ ID NO: 765975 - DNA, 25 bp, Homo sapien
caagaagattcttaaaggctgggta

SEQ ID NO: 765976 - DNA, 25 bp, Homo sapien
gtacttagaaatcaatgggtagggc

SEQ ID NO: 765977 - DNA, 25 bp, Homo sapien
tagaactctactctgcccatggacc

SEQ ID NO: 765978 - DNA, 25 bp, Homo sapien
acctgaacatttcgctcctgtaggc

SEQ ID NO: 765979 - DNA, 25 bp, Homo sapien
cctgaacatttcgctcctgtaggcg

SEQ ID NO: 765980 - DNA, 25 bp, Homo sapien
tgaacatttcgctcctgtaggcgac

SEQ ID NO: 765981 - DNA, 25 bp, Homo sapien
ctgaacatttcgctcctgtaggcga

SEQ ID NO: 765982 - DNA, 25 bp, Homo sapien
ggacctgggatctggtccagaacag

SEQ ID NO: 765983 - DNA, 25 bp, Homo sapien
gaagatcaaagagaagtctgcggtg

SEQ ID NO: 765984 - DNA, 25 bp, Homo sapien
gatggaaatcgcatccctgccctgt

SEQ ID NO: 765985 - DNA, 25 bp, Homo sapien
tctgcggtgtagaggaaatcccctt

SEQ ID NO: 765986 - DNA, 25 bp, Homo sapien
ctaagaagtaagaaaagagagataa

SEQ ID NO: 765987 - DNA, 25 bp, Homo sapien
agaagtaagaaaagagagataaatg

SEQ ID NO: 765988 - DNA, 25 bp, Homo sapien
gtaagaaaagagagataaatgattt

SEQ ID NO: 765989 - DNA, 25 bp, Homo sapien
ttatttttttggaggctctgttgcc

SEQ ID NO: 765990 - DNA, 25 bp, Homo sapien
catttcctccaaatccaatgaaagc

SEQ ID NO: 765991 - DNA, 25 bp, Homo sapien
catttggcgttatccttgacttgtt

SEQ ID NO: 765992 - DNA, 25 bp, Homo sapien
gacttgttgcctgatcacatttcct

SEQ ID NO: 765993 - DNA, 25 bp, Homo sapien
tttcctccaaatccaatgaaagcat

SEQ ID NO: 765994 - DNA, 25 bp, Homo sapien
cagcagctctacaaaatcagtgata

SEQ ID NO: 765995 - DNA, 25 bp, Homo sapien
cctaactgtagtttacttgacagtg

SEQ ID NO: 765996 - DNA, 25 bp, Homo sapien
aaccaatctttgaggattcctaact

SEQ ID NO: 765997 - DNA, 25 bp, Homo sapien
gacagtgcagatcatctgtaccaac

SEQ ID NO: 765998 - DNA, 25 bp, Homo sapien
ccaatctttgaggattcctaactgt

SEQ ID NO: 765999 - DNA, 25 bp, Homo sapien
tcactgaaggctgccgaatctatat

SEQ ID NO: 766000 - DNA, 25 bp, Homo sapien
gacacatggataaacttttattgac

SEQ ID NO: 766001 - DNA, 25 bp, Homo sapien
accaatattcactgaaggctgccga

SEQ ID NO: 766002 - DNA, 25 bp, Homo sapien
aaaaaaccaatattcactgaaggct

SEQ ID NO: 766003 - DNA, 25 bp, Homo sapien
tggcaggtgggacagggtatcctgg

SEQ ID NO: 766004 - DNA, 25 bp, Homo sapien
ctgaacagggaggtggttgagggga

SEQ ID NO: 766005 - DNA, 25 bp, Homo sapien
tgggacagggtatcctggcagggca

SEQ ID NO: 766006 - DNA, 25 bp, Homo sapien
gtcctggcaggtgggacagggtatc

SEQ ID NO: 766007 - DNA, 25 bp, Homo sapien
tccttctcaccagggttcacaggca

SEQ ID NO: 766008 - DNA, 25 bp, Homo sapien
gatgttcatgccacgctccttctca

SEQ ID NO: 766009 - DNA, 25 bp, Homo sapien
ggttcctgatgttcatgccacgctc

SEQ ID NO: 766010 - DNA, 25 bp, Homo sapien
tgccacgctccttctcaccagggtt

SEQ ID NO: 766011 - DNA, 25 bp, Homo sapien
cagtttactctttagctttcatcaa

SEQ ID NO: 766012 - DNA, 25 bp, Homo sapien
agtttactctttagctttcatcaaa

SEQ ID NO: 766013 - DNA, 25 bp, Homo sapien
acagtttactctttagctttcatca

SEQ ID NO: 766014 - DNA, 25 bp, Homo sapien
gtttactctttagctttcatcaaag

SEQ ID NO: 766015 - DNA, 25 bp, Homo sapien
tggtgttttagacgtcaaaatatgt

SEQ ID NO: 766016 - DNA, 25 bp, Homo sapien
gttttagacgtcaaaatatgtgagg

SEQ ID NO: 766017 - DNA, 25 bp, Homo sapien
gtgaggctttagtgacccatgatca

SEQ ID NO: 766018 - DNA, 25 bp, Homo sapien
cccaagagggtgaggctttagtgac

SEQ ID NO: 766019 - DNA, 25 bp, Homo sapien
atttgtgtgtcatactttcccaggt

SEQ ID NO: 766020 - DNA, 25 bp, Homo sapien
tttcccaggtaccatgctcatcttc

SEQ ID NO: 766021 - DNA, 25 bp, Homo sapien
gtgtcatactttcccaggtaccatg

SEQ ID NO: 766022 - DNA, 25 bp, Homo sapien
gtgtgtcatactttcccaggtacca

SEQ ID NO: 766023 - DNA, 25 bp, Homo sapien
cctggcaggggctcacacttcctca

SEQ ID NO: 766024 - DNA, 25 bp, Homo sapien
gtctgggcaggggttcctggcaggg

SEQ ID NO: 766025 - DNA, 25 bp, Homo sapien
gcaggggctcacacttcctcagccc

SEQ ID NO: 766026 - DNA, 25 bp, Homo sapien
tggcaggggctcacacttcctcagc

SEQ ID NO: 766027 - DNA, 25 bp, Homo sapien
gaggccttgctgaatgcaagcatca

SEQ ID NO: 766028 - DNA, 25 bp, Homo sapien
gccttgctgaatgcaagcatcaggg

SEQ ID NO: 766029 - DNA, 25 bp, Homo sapien
gccacgggaggccttgctgaatgca

SEQ ID NO: 766030 - DNA, 25 bp, Homo sapien
cgggaggccttgctgaatgcaagca

SEQ ID NO: 766031 - DNA, 25 bp, Homo sapien
caggggaacacagccaaagagcgag

SEQ ID NO: 766032 - DNA, 25 bp, Homo sapien
aagagcgaggttccacgttcctcta

SEQ ID NO: 766033 - DNA, 25 bp, Homo sapien
aaagagcgaggttccacgttcctct

SEQ ID NO: 766034 - DNA, 25 bp, Homo sapien
ggaacacagccaaagagcgaggttc

SEQ ID NO: 766035 - DNA, 25 bp, Homo sapien
cttttgtctagttggaggccactga

SEQ ID NO: 766036 - DNA, 25 bp, Homo sapien
agtgtctggcaggttgctgggcttt

SEQ ID NO: 766037 - DNA, 25 bp, Homo sapien
tctggcaggttgctgggctttgcgt

SEQ ID NO: 766038 - DNA, 25 bp, Homo sapien
tggcaggttgctgggctttgcgtgg

SEQ ID NO: 766039 - DNA, 25 bp, Homo sapien
atgagcaacagctgccaactcagca

SEQ ID NO: 766040 - DNA, 25 bp, Homo sapien
gctcatgagcaacagctgccaactc

SEQ ID NO: 766041 - DNA, 25 bp, Homo sapien
ctggtggacgctcatgagcaacagc

SEQ ID NO: 766042 - DNA, 25 bp, Homo sapien
ggacgctcatgagcaacagctgcca

SEQ ID NO: 766043 - DNA, 25 bp, Homo sapien
aggtggcttcagggggccgcccagg

SEQ ID NO: 766044 - DNA, 25 bp, Homo sapien
aaagtgtgtggggttctgggccctg

SEQ ID NO: 766045 - DNA, 25 bp, Homo sapien
gcttcagggggccgcccagggtcag

SEQ ID NO: 766046 - DNA, 25 bp, Homo sapien
tcagggggccgcccagggtcagcac

SEQ ID NO: 766047 - DNA, 25 bp, Homo sapien
atcatttgggtggtagaggcaactg

SEQ ID NO: 766048 - DNA, 25 bp, Homo sapien
tccatggtggaaggtgggcccttac

SEQ ID NO: 766049 - DNA, 25 bp, Homo sapien
gacatcatttgggtggtagaggcaa

SEQ ID NO: 766050 - DNA, 25 bp, Homo sapien
catgacggagaggaaagcatcattg

SEQ ID NO: 766051 - DNA, 25 bp, Homo sapien
ttgggcagggcactgagagactggg

SEQ ID NO: 766052 - DNA, 25 bp, Homo sapien
tgggcagggcactgagagactgggc

SEQ ID NO: 766053 - DNA, 25 bp, Homo sapien
cttgggcagggcactgagagactgg

SEQ ID NO: 766054 - DNA, 25 bp, Homo sapien
gatcatgagtgccactcacgggctg

SEQ ID NO: 766055 - DNA, 25 bp, Homo sapien
tcatgagtgccactcacgggctgcc

SEQ ID NO: 766056 - DNA, 25 bp, Homo sapien
atcatgagtgccactcacgggctgc

SEQ ID NO: 766057 - DNA, 25 bp, Homo sapien
agatcatgagtgccactcacgggct

SEQ ID NO: 766058 - DNA, 25 bp, Homo sapien
gccccagagtgtaccaccactcgcc

SEQ ID NO: 766059 - DNA, 25 bp, Homo sapien
gtcaggtcatggtacttctgcctct

SEQ ID NO: 766060 - DNA, 25 bp, Homo sapien
ccccagagtgtaccaccactcgccc

SEQ ID NO: 766061 - DNA, 25 bp, Homo sapien
ctgggaggtcaggtcatggtacttc

SEQ ID NO: 766062 - DNA, 25 bp, Homo sapien
ttcggtccttgttgcaagtgggcca

SEQ ID NO: 766063 - DNA, 25 bp, Homo sapien
ttctttcggtccttgttgcaagtgg

SEQ ID NO: 766064 - DNA, 25 bp, Homo sapien
tcggtccttgttgcaagtgggccac

SEQ ID NO: 766065 - DNA, 25 bp, Homo sapien
ctttcggtccttgttgcaagtgggc

SEQ ID NO: 766066 - DNA, 25 bp, Homo sapien
gttatgaaccttattcctgtacgtc

SEQ ID NO: 766067 - DNA, 25 bp, Homo sapien
ttattcctgtacgtctgcttctttt

SEQ ID NO: 766068 - DNA, 25 bp, Homo sapien
gaaccttattcctgtacgtctgctt

SEQ ID NO: 766069 - DNA, 25 bp, Homo sapien
tatgaaccttattcctgtacgtctg

SEQ ID NO: 766070 - DNA, 25 bp, Homo sapien
aggtatgtcaatctctccagcaatt

SEQ ID NO: 766071 - DNA, 25 bp, Homo sapien
attctttctgtgtggtaattatcca

SEQ ID NO: 766072 - DNA, 25 bp, Homo sapien
cccagacatctcaggtatgtcaatc

SEQ ID NO: 766073 - DNA, 25 bp, Homo sapien
atccccagacatctcaggtatgtca

SEQ ID NO: 766074 - DNA, 25 bp, Homo sapien
cttgagatcagtttgggtcccagca

SEQ ID NO: 766075 - DNA, 25 bp, Homo sapien
ttgagatcagtttgggtcccagcaa

SEQ ID NO: 766076 - DNA, 25 bp, Homo sapien
catacttgacaatcttcaggtcatg

SEQ ID NO: 766077 - DNA, 25 bp, Homo sapien
ttgacaatcttcaggtcatgggcca

SEQ ID NO: 766078 - DNA, 25 bp, Homo sapien
gacaatcttcaggtcatgggccagc

SEQ ID NO: 766079 - DNA, 25 bp, Homo sapien
aatcttcaggtcatgggccagcttt

SEQ ID NO: 766080 - DNA, 25 bp, Homo sapien
gttgcttcgtcaaatacattcttta

SEQ ID NO: 766081 - DNA, 25 bp, Homo sapien
tggctcttcttcgattctggaggct

SEQ ID NO: 766082 - DNA, 25 bp, Homo sapien
ctgtggctcttcttcgattctggag

SEQ ID NO: 766083 - DNA, 25 bp, Homo sapien
ctccagcgcagccaatgttgcttcg

SEQ ID NO: 766084 - DNA, 25 bp, Homo sapien
gcaactttcaaaaaggagtatgtta

SEQ ID NO: 766085 - DNA, 25 bp, Homo sapien
aggcaactttcaaaaaggagtatgt

SEQ ID NO: 766086 - DNA, 25 bp, Homo sapien
tcaaaaaggagtatgttattaaatg

SEQ ID NO: 766087 - DNA, 25 bp, Homo sapien
ggagtatgttattaaatgaggcatt

SEQ ID NO: 766088 - DNA, 25 bp, Homo sapien
catgagtttcatcaaatactggatc

SEQ ID NO: 766089 - DNA, 25 bp, Homo sapien
tcatgagtttcatcaaatactggat

SEQ ID NO: 766090 - DNA, 25 bp, Homo sapien
gaggggcaagacaggctccacccac

SEQ ID NO: 766091 - DNA, 25 bp, Homo sapien
aggaggggcaagacaggctccaccc

SEQ ID NO: 766092 - DNA, 25 bp, Homo sapien
ctagaaaagaggaggggcaagacag

SEQ ID NO: 766093 - DNA, 25 bp, Homo sapien
agaggaggggcaagacaggctccac

SEQ ID NO: 766094 - DNA, 25 bp, Homo sapien
cttaatgaagcaggcctccatcctc

SEQ ID NO: 766095 - DNA, 25 bp, Homo sapien
tatgctaagcatataagacaatgac

SEQ ID NO: 766096 - DNA, 25 bp, Homo sapien
agcttcttaatgaagcaggcctcca

SEQ ID NO: 766097 - DNA, 25 bp, Homo sapien
tctaggaacaccatatactactgag

SEQ ID NO: 766098 - DNA, 25 bp, Homo sapien
aattgagacatgagaaagcattggt

SEQ ID NO: 766099 - DNA, 25 bp, Homo sapien
ttgagacatgagaaagcattggttc

SEQ ID NO: 766100 - DNA, 25 bp, Homo sapien
attgagacatgagaaagcattggtt

SEQ ID NO: 766101 - DNA, 25 bp, Homo sapien
gtcccttcgtccctgccaattagaa

SEQ ID NO: 766102 - DNA, 25 bp, Homo sapien
caattagaagcgttggactgtccat

SEQ ID NO: 766103 - DNA, 25 bp, Homo sapien
tcgtccctgccaattagaagcgttg

SEQ ID NO: 766104 - DNA, 25 bp, Homo sapien
gaagcgttggactgtccatctccat

SEQ ID NO: 766105 - DNA, 25 bp, Homo sapien
tctgaggacagcctccccgcaatgg

SEQ ID NO: 766106 - DNA, 25 bp, Homo sapien
cagatccccaatacgcatgcgctgg

SEQ ID NO: 766107 - DNA, 25 bp, Homo sapien
caatggcggcgcaagacgctggcct

SEQ ID NO: 766108 - DNA, 25 bp, Homo sapien
ttttcatcgggactatgcggacccc

SEQ ID NO: 766109 - DNA, 25 bp, Homo sapien
acaaagggcgcttcggcaggctccg

SEQ ID NO: 766110 - DNA, 25 bp, Homo sapien
ctccgcagacaaagggcgcttcggc

SEQ ID NO: 766111 - DNA, 25 bp, Homo sapien
gcagcctgagccaatgacgcccggt

SEQ ID NO: 766112 - DNA, 25 bp, Homo sapien
aatgacgcccggtgactgggctcct

SEQ ID NO: 766113 - DNA, 25 bp, Homo sapien
gcacttcttagatatatgggacaga

SEQ ID NO: 766114 - DNA, 25 bp, Homo sapien
tgagaccattaaccaatgtcaggct

SEQ ID NO: 766115 - DNA, 25 bp, Homo sapien
tatcctgccagttaagagtgtcttt

SEQ ID NO: 766116 - DNA, 25 bp, Homo sapien
taaagggattaactcagcagaactg

SEQ ID NO: 766117 - DNA, 25 bp, Homo sapien
cagtgagccgagatcatgccattgc

SEQ ID NO: 766118 - DNA, 25 bp, Homo sapien
actccagcctgggcaataagagtga

SEQ ID NO: 766119 - DNA, 25 bp, Homo sapien
gcttgaaaccaggagatggaggtta

SEQ ID NO: 766120 - DNA, 25 bp, Homo sapien
tgagccgagatcatgccattgcact

SEQ ID NO: 766121 - DNA, 25 bp, Homo sapien
tagatgtccctcatatttctgaagc

SEQ ID NO: 766122 - DNA, 25 bp, Homo sapien
ggtttcactgctcgtcctttctgag

SEQ ID NO: 766123 - DNA, 25 bp, Homo sapien
tttagaatataacagcacaagccag

SEQ ID NO: 766124 - DNA, 25 bp, Homo sapien
taggtcagaatggtgactccacagc

SEQ ID NO: 766125 - DNA, 25 bp, Homo sapien
caccatatccggctactggtacaat

SEQ ID NO: 766126 - DNA, 25 bp, Homo sapien
ctctgatctaggatacacactgcat

SEQ ID NO: 766127 - DNA, 25 bp, Homo sapien
tggagagatataggcctgagcatca

SEQ ID NO: 766128 - DNA, 25 bp, Homo sapien
ccggctactggtacaatattattag

SEQ ID NO: 766129 - DNA, 25 bp, Homo sapien
tttcaaagagcaacaccagtggtga

SEQ ID NO: 766130 - DNA, 25 bp, Homo sapien
ctcaatcctgcctccttaggccagg

SEQ ID NO: 766131 - DNA, 25 bp, Homo sapien
caaaacacctgatgggattgctgag

SEQ ID NO: 766132 - DNA, 25 bp, Homo sapien
ggtgccaagcgccactttcaaagag

SEQ ID NO: 766133 - DNA, 25 bp, Homo sapien
tcaggagccaatggatagccacaag

SEQ ID NO: 766134 - DNA, 25 bp, Homo sapien
tgtaatgtcgccaaagctctgctat

SEQ ID NO: 766135 - DNA, 25 bp, Homo sapien
agtcactcccctggtactaaaggtg

SEQ ID NO: 766136 - DNA, 25 bp, Homo sapien
gatgtccagtaccttatgggcaaca

SEQ ID NO: 766137 - DNA, 25 bp, Homo sapien
aaaaacagcattctgagaaggcata

SEQ ID NO: 766138 - DNA, 25 bp, Homo sapien
gagaaaaaacagcattctgagaagg

SEQ ID NO: 766139 - DNA, 25 bp, Homo sapien
gaaaaaacagcattctgagaaggca

SEQ ID NO: 766140 - DNA, 25 bp, Homo sapien
ctgagaaaaaacagcattctgagaa

SEQ ID NO: 766141 - DNA, 25 bp, Homo sapien
tgagatctcaccatctgtgagccat

SEQ ID NO: 766142 - DNA, 25 bp, Homo sapien
ctgagatctcaccatctgtgagcca

SEQ ID NO: 766143 - DNA, 25 bp, Homo sapien
tcaccatctgtgagccatcattcat

SEQ ID NO: 766144 - DNA, 25 bp, Homo sapien
catctgtgagccatcattcatttct

SEQ ID NO: 766145 - DNA, 25 bp, Homo sapien
tgctggtatcaacacaaattcaaac

SEQ ID NO: 766146 - DNA, 25 bp, Homo sapien
ctgctggtatcaacacaaattcaaa

SEQ ID NO: 766147 - DNA, 25 bp, Homo sapien
cacagccttgccgagatccaatgga

SEQ ID NO: 766148 - DNA, 25 bp, Homo sapien
tcctgacaaggtggtcgggtttaga

SEQ ID NO: 766149 - DNA, 25 bp, Homo sapien
taagcatcccaacagaatgaggtag

SEQ ID NO: 766150 - DNA, 25 bp, Homo sapien
ggctggcaaattggtactggctttc

SEQ ID NO: 766151 - DNA, 25 bp, Homo sapien
cagtgcaactagattcctgtagttc

SEQ ID NO: 766152 - DNA, 25 bp, Homo sapien
ccagcatcacgtctcgatagaggtt

SEQ ID NO: 766153 - DNA, 25 bp, Homo sapien
agggtacagctggtcccactcctct

SEQ ID NO: 766154 - DNA, 25 bp, Homo sapien
ctcgatagaggttcttttgggcagg

SEQ ID NO: 766155 - DNA, 25 bp, Homo sapien
tgaacggcttccggtttcacaggga

SEQ ID NO: 766156 - DNA, 25 bp, Homo sapien
gcttccggtttcacagggatgccat

SEQ ID NO: 766157 - DNA, 25 bp, Homo sapien
aacggcttccggtttcacagggatg

SEQ ID NO: 766158 - DNA, 25 bp, Homo sapien
ggcttccggtttcacagggatgcca

SEQ ID NO: 766159 - DNA, 25 bp, Homo sapien
catcttaggagtttgtactgggaac

SEQ ID NO: 766160 - DNA, 25 bp, Homo sapien
tttcaatctttagagcctctggagg

SEQ ID NO: 766161 - DNA, 25 bp, Homo sapien
tgcaggcttctactagttcaggaaa

SEQ ID NO: 766162 - DNA, 25 bp, Homo sapien
gattagcattcttctatcccagccc

SEQ ID NO: 766163 - DNA, 25 bp, Homo sapien
tggatgagtatccagcaggctgtct

SEQ ID NO: 766164 - DNA, 25 bp, Homo sapien
tttctatcacccattcttcctctag

SEQ ID NO: 766165 - DNA, 25 bp, Homo sapien
actgcgcgattacctctggcttaca

SEQ ID NO: 766166 - DNA, 25 bp, Homo sapien
tctagctccaactgcgcgattacct

SEQ ID NO: 766167 - DNA, 25 bp, Homo sapien
ggcttagtattccttatatcccaga

SEQ ID NO: 766168 - DNA, 25 bp, Homo sapien
ccctcattaagtagcagtgcccaag

SEQ ID NO: 766169 - DNA, 25 bp, Homo sapien
tctcggatcacctctcatggaaaag

SEQ ID NO: 766170 - DNA, 25 bp, Homo sapien
cagaagtggctgttttccctcatta

SEQ ID NO: 766171 - DNA, 25 bp, Homo sapien
gagtataaagccaacagatccaggt

SEQ ID NO: 766172 - DNA, 25 bp, Homo sapien
tagccactggatttgactggaagga

SEQ ID NO: 766173 - DNA, 25 bp, Homo sapien
gaaatactgggactagaaatggaga

SEQ ID NO: 766174 - DNA, 25 bp, Homo sapien
agaatcgtgtgcatcacaagccagg

SEQ ID NO: 766175 - DNA, 25 bp, Homo sapien
ggcctgcaggcactttttatggaat

SEQ ID NO: 766176 - DNA, 25 bp, Homo sapien
tgcctgctccacgttaagaaatctc

SEQ ID NO: 766177 - DNA, 25 bp, Homo sapien
tagttttaagtcctcgtcaggcctc

SEQ ID NO: 766178 - DNA, 25 bp, Homo sapien
tagaaatgggctctcaacctgttgc

SEQ ID NO: 766179 - DNA, 25 bp, Homo sapien
gttatggaaaatagatcaatagatg

SEQ ID NO: 766180 - DNA, 25 bp, Homo sapien
ctatggtctaagattaaattacaca

SEQ ID NO: 766181 - DNA, 25 bp, Homo sapien
aatagatcaatagatgtacaaaata

SEQ ID NO: 766182 - DNA, 25 bp, Homo sapien
tatatacaaatgactatggtctaag

SEQ ID NO: 766183 - DNA, 25 bp, Homo sapien
ccaatgacttgattgtaatgccagc

SEQ ID NO: 766184 - DNA, 25 bp, Homo sapien
gctcatccaggagtatccatgcttg

SEQ ID NO: 766185 - DNA, 25 bp, Homo sapien
agaaggctggtctaaggccaggcct

SEQ ID NO: 766186 - DNA, 25 bp, Homo sapien
ccatgcttgaaagcagatggacagg

SEQ ID NO: 766187 - DNA, 25 bp, Homo sapien
tattctggcttgtggttgacttttt

SEQ ID NO: 766188 - DNA, 25 bp, Homo sapien
aatattctggcttgtggttgacttt

SEQ ID NO: 766189 - DNA, 25 bp, Homo sapien
tctggcttgtggttgactttttgat

SEQ ID NO: 766190 - DNA, 25 bp, Homo sapien
aaatattctggcttgtggttgactt

SEQ ID NO: 766191 - DNA, 25 bp, Homo sapien
tcctaggatggagtaccagaagctg

SEQ ID NO: 766192 - DNA, 25 bp, Homo sapien
gaagctgtctcctgcgagtctctcc

SEQ ID NO: 766193 - DNA, 25 bp, Homo sapien
tcttggttaaactctggatggtaat

SEQ ID NO: 766194 - DNA, 25 bp, Homo sapien
gcaaatttattacactcaaggcttc

SEQ ID NO: 766195 - DNA, 25 bp, Homo sapien
tcctgtaagcaacatctgaggctgg

SEQ ID NO: 766196 - DNA, 25 bp, Homo sapien
gatgaatgctgacggaaggctttcc

SEQ ID NO: 766197 - DNA, 25 bp, Homo sapien
cagtaagggatgtgatgcggctaaa

SEQ ID NO: 766198 - DNA, 25 bp, Homo sapien
tcagatgtgtcctctgactgaaggc

SEQ ID NO: 766199 - DNA, 25 bp, Homo sapien
atgtgctgctaaatgaaggactgtg

SEQ ID NO: 766200 - DNA, 25 bp, Homo sapien
tgtgctgctaaatgaaggactgtgg

SEQ ID NO: 766201 - DNA, 25 bp, Homo sapien
ggactgtggcgaacagtttgctcac

SEQ ID NO: 766202 - DNA, 25 bp, Homo sapien
atgaaggactgtggcgaacagtttg

SEQ ID NO: 766203 - DNA, 25 bp, Homo sapien
ctcctgggaatgtaatatgctgcta

SEQ ID NO: 766204 - DNA, 25 bp, Homo sapien
tctacgcattgaaagtttatggcca

SEQ ID NO: 766205 - DNA, 25 bp, Homo sapien
gctgctagtttaaggtctaaattaa

SEQ ID NO: 766206 - DNA, 25 bp, Homo sapien
accatgcctggataaggacttctga

SEQ ID NO: 766207 - DNA, 25 bp, Homo sapien
tgtttctcaaacaacggcacacaag

SEQ ID NO: 766208 - DNA, 25 bp, Homo sapien
ggctcttctcaaagtgatcctagga

SEQ ID NO: 766209 - DNA, 25 bp, Homo sapien
catgggaattcttagtctctggtca

SEQ ID NO: 766210 - DNA, 25 bp, Homo sapien
taggaccctcaagtcttcttcaagg

SEQ ID NO: 766211 - DNA, 25 bp, Homo sapien
tgaaatctgagtgccctatatcctg

SEQ ID NO: 766212 - DNA, 25 bp, Homo sapien
tgcatcgccactgcacacgtttgga

SEQ ID NO: 766213 - DNA, 25 bp, Homo sapien
catacctactgttgcatgggacaaa

SEQ ID NO: 766214 - DNA, 25 bp, Homo sapien
gatttgccctgaaaatgcatcgcca

SEQ ID NO: 766215 - DNA, 25 bp, Homo sapien
tgtgctgtgatacagatacactgcc

SEQ ID NO: 766216 - DNA, 25 bp, Homo sapien
tcacctgtgctgtgatacagataca

SEQ ID NO: 766217 - DNA, 25 bp, Homo sapien
gtgatacagatacactgccttgtgc

SEQ ID NO: 766218 - DNA, 25 bp, Homo sapien
ttttcacctgtgctgtgatacagat

SEQ ID NO: 766219 - DNA, 25 bp, Homo sapien
tctgggatgtccaagttctgctcat

SEQ ID NO: 766220 - DNA, 25 bp, Homo sapien
tttctgggatgtccaagttctgctc

SEQ ID NO: 766221 - DNA, 25 bp, Homo sapien
cttttttctgggatgtccaagttct

SEQ ID NO: 766222 - DNA, 25 bp, Homo sapien
gggatgtccaagttctgctcatcct

SEQ ID NO: 766223 - DNA, 25 bp, Homo sapien
aatgtgtacacctctggctcccgta

SEQ ID NO: 766224 - DNA, 25 bp, Homo sapien
tatagaaggacaacaacacctggtt

SEQ ID NO: 766225 - DNA, 25 bp, Homo sapien
aactgtggtcgggttcagtccagac

SEQ ID NO: 766226 - DNA, 25 bp, Homo sapien
gacaacatgagaatgaatccgcacc

SEQ ID NO: 766227 - DNA, 25 bp, Homo sapien
tacccctctcgtaggccgtgcatct

SEQ ID NO: 766228 - DNA, 25 bp, Homo sapien
gagcgccggtcgcagcgggatggcg

SEQ ID NO: 766229 - DNA, 25 bp, Homo sapien
tacgcattggctcagtcccacacta

SEQ ID NO: 766230 - DNA, 25 bp, Homo sapien
gggatggcgtcacgccgtacgcatt

SEQ ID NO: 766231 - DNA, 25 bp, Homo sapien
gagatcagttcacaagccattccac

SEQ ID NO: 766232 - DNA, 25 bp, Homo sapien
gaagcgattcgctctcagggctctc

SEQ ID NO: 766233 - DNA, 25 bp, Homo sapien
cattccaccaggcttcggaaaggtt

SEQ ID NO: 766234 - DNA, 25 bp, Homo sapien
ccagcgacggatgacttgggctgct

SEQ ID NO: 766235 - DNA, 25 bp, Homo sapien
atcaccttccccacaatccatctgg

SEQ ID NO: 766236 - DNA, 25 bp, Homo sapien
tccatctggcatggacggatgagcg

SEQ ID NO: 766237 - DNA, 25 bp, Homo sapien
catctggcatggacggatgagcgaa

SEQ ID NO: 766238 - DNA, 25 bp, Homo sapien
caatccatctggcatggacggatga

SEQ ID NO: 766239 - DNA, 25 bp, Homo sapien
caaagccacccggaaacaagaatgt

SEQ ID NO: 766240 - DNA, 25 bp, Homo sapien
cgtgttatacctacagaccagcaaa

SEQ ID NO: 766241 - DNA, 25 bp, Homo sapien
actacagcagttagagtggattgac

SEQ ID NO: 766242 - DNA, 25 bp, Homo sapien
agcaaaatgcctggctcaaagcaga

SEQ ID NO: 766243 - DNA, 25 bp, Homo sapien
caaaggtcaaggatcatgcagtcac

SEQ ID NO: 766244 - DNA, 25 bp, Homo sapien
gaaaccatccttggcacctatccgt

SEQ ID NO: 766245 - DNA, 25 bp, Homo sapien
tgtgctgaactttggatgtgaaacc

SEQ ID NO: 766246 - DNA, 25 bp, Homo sapien
gcattggtacccacctgtgtgctga

SEQ ID NO: 766247 - DNA, 25 bp, Homo sapien
gagagaagcaaatcagtagttccca

SEQ ID NO: 766248 - DNA, 25 bp, Homo sapien
agagaagcaaatcagtagttcccat

SEQ ID NO: 766249 - DNA, 25 bp, Homo sapien
ggagagaagcaaatcagtagttccc

SEQ ID NO: 766250 - DNA, 25 bp, Homo sapien
agggagagaagcaaatcagtagttc

SEQ ID NO: 766251 - DNA, 25 bp, Homo sapien
tcgtgagcaaagtaggttttccgct

SEQ ID NO: 766252 - DNA, 25 bp, Homo sapien
catcgtgagcaaagtaggttttccg

SEQ ID NO: 766253 - DNA, 25 bp, Homo sapien
tgagcaaagtaggttttccgcttat

SEQ ID NO: 766254 - DNA, 25 bp, Homo sapien
ggcatcgtgagcaaagtaggttttc

SEQ ID NO: 766255 - DNA, 25 bp, Homo sapien
cggactctccaggtaggtagttcca

SEQ ID NO: 766256 - DNA, 25 bp, Homo sapien
tgtagtggtacgctcctgtgttccc

SEQ ID NO: 766257 - DNA, 25 bp, Homo sapien
gctggtcattacatgcagtggctca

SEQ ID NO: 766258 - DNA, 25 bp, Homo sapien
tgaaagaattctgaccagtggctgg

SEQ ID NO: 766259 - DNA, 25 bp, Homo sapien
gctaggcacacttaatgtaacgtgg

SEQ ID NO: 766260 - DNA, 25 bp, Homo sapien
tcggcgcctcggctcccaccgcccg

SEQ ID NO: 766261 - DNA, 25 bp, Homo sapien
ttgctcggcgcctcggctcccaccg

SEQ ID NO: 766262 - DNA, 25 bp, Homo sapien
cttgctcggcgcctcggctcccacc

SEQ ID NO: 766263 - DNA, 25 bp, Homo sapien
gctcggcgcctcggctcccaccgcc

SEQ ID NO: 766264 - DNA, 25 bp, Homo sapien
gccgctccgcgggcgcgcagcactc

SEQ ID NO: 766265 - DNA, 25 bp, Homo sapien
gggcgcgcagcactcgcgccgccat

SEQ ID NO: 766266 - DNA, 25 bp, Homo sapien
cccgctgcaggaggccgccggccca

SEQ ID NO: 766267 - DNA, 25 bp, Homo sapien
gccgcccgctgcaggaggccgccgg

SEQ ID NO: 766268 - DNA, 25 bp, Homo sapien
gaggacccagcagacggcgtccggg

SEQ ID NO: 766269 - DNA, 25 bp, Homo sapien
tcagagaccagggtcaccaacgtcc

SEQ ID NO: 766270 - DNA, 25 bp, Homo sapien
ctggccacgggtcgcgccggtcagg

SEQ ID NO: 766271 - DNA, 25 bp, Homo sapien
gtcctcggcagacgcagccactcag

SEQ ID NO: 766272 - DNA, 25 bp, Homo sapien
gagctggcccgggacaatgctttac

SEQ ID NO: 766273 - DNA, 25 bp, Homo sapien
cgcggagagctggcccgggacaatg

SEQ ID NO: 766274 - DNA, 25 bp, Homo sapien
tggcccgggacaatgctttactctt

SEQ ID NO: 766275 - DNA, 25 bp, Homo sapien
cggagagctggcccgggacaatgct

SEQ ID NO: 766276 - DNA, 25 bp, Homo sapien
ttctaaatcccagctctctgggagg

SEQ ID NO: 766277 - DNA, 25 bp, Homo sapien
gcttctaaatcccagctctctggga

SEQ ID NO: 766278 - DNA, 25 bp, Homo sapien
ggctcacgcttctaaatcccagctc

SEQ ID NO: 766279 - DNA, 25 bp, Homo sapien
cacgcttctaaatcccagctctctg

SEQ ID NO: 766280 - DNA, 25 bp, Homo sapien
aattcctattcttatgcagcaacgg

SEQ ID NO: 766281 - DNA, 25 bp, Homo sapien
gcgcccagccttctacaatagtatt

SEQ ID NO: 766282 - DNA, 25 bp, Homo sapien
ggtagacttgcttaagcacccagat

SEQ ID NO: 766283 - DNA, 25 bp, Homo sapien
taccaccaggtaaacattaagagga

SEQ ID NO: 766284 - DNA, 25 bp, Homo sapien
tgtcttctcgagatctgttgctgga

SEQ ID NO: 766285 - DNA, 25 bp, Homo sapien
tggatcaactttccggacaaataag

SEQ ID NO: 766286 - DNA, 25 bp, Homo sapien
cctttttggctaggagattggagtg

SEQ ID NO: 766287 - DNA, 25 bp, Homo sapien
caaataaggattttagccagctgtc

SEQ ID NO: 766288 - DNA, 25 bp, Homo sapien
aggcattccggtttaacattgtgaa

SEQ ID NO: 766289 - DNA, 25 bp, Homo sapien
tatgcttctaggcattccggtttaa

SEQ ID NO: 766290 - DNA, 25 bp, Homo sapien
gcttctaggcattccggtttaacat

SEQ ID NO: 766291 - DNA, 25 bp, Homo sapien
ttgtatgcttctaggcattccggtt

SEQ ID NO: 766292 - DNA, 25 bp, Homo sapien
aatccaggacaacatcggcataggg

SEQ ID NO: 766293 - DNA, 25 bp, Homo sapien
gagacacaggtatagcttggagccc

SEQ ID NO: 766294 - DNA, 25 bp, Homo sapien
tgacatgagcaggaatagacaaccc

SEQ ID NO: 766295 - DNA, 25 bp, Homo sapien
taagtaccatgtgctaaccgactgc

SEQ ID NO: 766296 - DNA, 25 bp, Homo sapien
agcttggtcctgctcgccataccac

SEQ ID NO: 766297 - DNA, 25 bp, Homo sapien
tttatcttcgtgaatctttggcaac

SEQ ID NO: 766298 - DNA, 25 bp, Homo sapien
caaagtacaagggtagtgtttatct

SEQ ID NO: 766299 - DNA, 25 bp, Homo sapien
caagggtagtgtttatcttcgtgaa

SEQ ID NO: 766300 - DNA, 25 bp, Homo sapien
tattcatgacttctgtgagggctgg

SEQ ID NO: 766301 - DNA, 25 bp, Homo sapien
tgacttctgtgagggctggatagcc

SEQ ID NO: 766302 - DNA, 25 bp, Homo sapien
gagggctggatagcctccttcatac

SEQ ID NO: 766303 - DNA, 25 bp, Homo sapien
ctctgagtttattcatgacttctgt

SEQ ID NO: 766304 - DNA, 25 bp, Homo sapien
ggatcttggcacaggctcattccag

SEQ ID NO: 766305 - DNA, 25 bp, Homo sapien
tcggagttggtaagacctgagttca

SEQ ID NO: 766306 - DNA, 25 bp, Homo sapien
catatatattaggtccggatcttgg

SEQ ID NO: 766307 - DNA, 25 bp, Homo sapien
tccagaaactgaactccaacaggag

SEQ ID NO: 766308 - DNA, 25 bp, Homo sapien
ttgccccattcaatcatggttcctg

SEQ ID NO: 766309 - DNA, 25 bp, Homo sapien
cagtaattgccccattcaatcatgg

SEQ ID NO: 766310 - DNA, 25 bp, Homo sapien
tgccccattcaatcatggttcctgg

SEQ ID NO: 766311 - DNA, 25 bp, Homo sapien
taattgccccattcaatcatggttc

SEQ ID NO: 766312 - DNA, 25 bp, Homo sapien
cctggctagtcttttgcacttctaa

SEQ ID NO: 766313 - DNA, 25 bp, Homo sapien
agtttgatagggattctgctgaatc

SEQ ID NO: 766314 - DNA, 25 bp, Homo sapien
ggagtttgatagggattctgctgaa

SEQ ID NO: 766315 - DNA, 25 bp, Homo sapien
gctgggagtttgatagggattctgc

SEQ ID NO: 766316 - DNA, 25 bp, Homo sapien
aattaaggtacagaaatatgttaag

SEQ ID NO: 766317 - DNA, 25 bp, Homo sapien
caaaaattaaggtacagaaatatgt

SEQ ID NO: 766318 - DNA, 25 bp, Homo sapien
aggtacagaaatatgttaagtttca

SEQ ID NO: 766319 - DNA, 25 bp, Homo sapien
acaaaaattaaggtacagaaatatg

SEQ ID NO: 766320 - DNA, 25 bp, Homo sapien
cagcaggaaatttcataaccgaaaa

SEQ ID NO: 766321 - DNA, 25 bp, Homo sapien
aagcctgtacagacgaggtggtcac

SEQ ID NO: 766322 - DNA, 25 bp, Homo sapien
gcctggtaacaatcagaagcctgta

SEQ ID NO: 766323 - DNA, 25 bp, Homo sapien
ggtaacaatcagaagcctgtacaga

SEQ ID NO: 766324 - DNA, 25 bp, Homo sapien
cttagcctggtaacaatcagaagcc

SEQ ID NO: 766325 - DNA, 25 bp, Homo sapien
ctgctctaatccaccatgggctcag

SEQ ID NO: 766326 - DNA, 25 bp, Homo sapien
gatgggaaccttacccaagcgcttg

SEQ ID NO: 766327 - DNA, 25 bp, Homo sapien
aaaaacctggctttcattgatagtg

SEQ ID NO: 766328 - DNA, 25 bp, Homo sapien
caagcgcttgggttcctttatggtg

SEQ ID NO: 766329 - DNA, 25 bp, Homo sapien
ggagatgacacaccatgcattaccc

SEQ ID NO: 766330 - DNA, 25 bp, Homo sapien
tgacatagggaggtcaccagaagac

SEQ ID NO: 766331 - DNA, 25 bp, Homo sapien
ggttaaggtctatcaggagatgaca

SEQ ID NO: 766332 - DNA, 25 bp, Homo sapien
caaaagcagtcttctagaatcaaag

SEQ ID NO: 766333 - DNA, 25 bp, Homo sapien
tgaactacacaagggactctgcaac

SEQ ID NO: 766334 - DNA, 25 bp, Homo sapien
ttatgggcacatgacatcacgctcg

SEQ ID NO: 766335 - DNA, 25 bp, Homo sapien
aagctttctggtggtacagcctcag

SEQ ID NO: 766336 - DNA, 25 bp, Homo sapien
gaggcaaacctggaactagagcacc

SEQ ID NO: 766337 - DNA, 25 bp, Homo sapien
ctgtctgaagcggattgcacgagcc

SEQ ID NO: 766338 - DNA, 25 bp, Homo sapien
caaagatggtgcaccatgtacagct

SEQ ID NO: 766339 - DNA, 25 bp, Homo sapien
ttcgttaccatcctgtctgaagcgg

SEQ ID NO: 766340 - DNA, 25 bp, Homo sapien
agagaagaatcctccgacggcttcg

SEQ ID NO: 766341 - DNA, 25 bp, Homo sapien
ctagcacctgtgcttattcacatgc

SEQ ID NO: 766342 - DNA, 25 bp, Homo sapien
ctgcccaacagccaaagggatggaa

SEQ ID NO: 766343 - DNA, 25 bp, Homo sapien
cagcctctatgagagctccgccatt

SEQ ID NO: 766344 - DNA, 25 bp, Homo sapien
ttgagtcctcccgacagggcagaga

SEQ ID NO: 766345 - DNA, 25 bp, Homo sapien
tctgcctcagcatcttgtgtacctg

SEQ ID NO: 766346 - DNA, 25 bp, Homo sapien
agcatcttgtgtacctgggattaca

SEQ ID NO: 766347 - DNA, 25 bp, Homo sapien
cctcagcatcttgtgtacctgggat

SEQ ID NO: 766348 - DNA, 25 bp, Homo sapien
atgcgcctccatgcctaattttctg

SEQ ID NO: 766349 - DNA, 25 bp, Homo sapien
tgtgtaatataccaattcctcccag

SEQ ID NO: 766350 - DNA, 25 bp, Homo sapien
tgtgccatgctgcattccgtatgtc

SEQ ID NO: 766351 - DNA, 25 bp, Homo sapien
attccgtatgtcttccctggtctga

SEQ ID NO: 766352 - DNA, 25 bp, Homo sapien
tccctggtctgaagatccctgtaag

SEQ ID NO: 766353 - DNA, 25 bp, Homo sapien
gcgaggtcttcagtgggatcatgat

SEQ ID NO: 766354 - DNA, 25 bp, Homo sapien
tcttcagtgggatcatgattctgga

SEQ ID NO: 766355 - DNA, 25 bp, Homo sapien
ggtcttcagtgggatcatgattctg

SEQ ID NO: 766356 - DNA, 25 bp, Homo sapien
gaggtcttcagtgggatcatgattc

SEQ ID NO: 766357 - DNA, 25 bp, Homo sapien
tttcaaagaggacgacaaggcactg

SEQ ID NO: 766358 - DNA, 25 bp, Homo sapien
tataaggtatactggacaacacggg

SEQ ID NO: 766359 - DNA, 25 bp, Homo sapien
gaattcaacgtggaccccttctgga

SEQ ID NO: 766360 - DNA, 25 bp, Homo sapien
caacaggactttcacatggtaacag

SEQ ID NO: 766361 - DNA, 25 bp, Homo sapien
atgttctttgagaaaatcattcaca

SEQ ID NO: 766362 - DNA, 25 bp, Homo sapien
ttctatgttctttgagaaaatcatt

SEQ ID NO: 766363 - DNA, 25 bp, Homo sapien
tatgttctttgagaaaatcattcac

SEQ ID NO: 766364 - DNA, 25 bp, Homo sapien
tctatgttctttgagaaaatcattc

SEQ ID NO: 766365 - DNA, 25 bp, Homo sapien
cactgtgggaggacaagttaagagg

SEQ ID NO: 766366 - DNA, 25 bp, Homo sapien
ataacaatagagtcttaaacaaaag

SEQ ID NO: 766367 - DNA, 25 bp, Homo sapien
aaaatggatatttgggctcaggcct

SEQ ID NO: 766368 - DNA, 25 bp, Homo sapien
tgtgggaggacaagttaagaggatc

SEQ ID NO: 766369 - DNA, 25 bp, Homo sapien
gatgactattgatttcctggagagg

SEQ ID NO: 766370 - DNA, 25 bp, Homo sapien
gaaatacggattcggcagccttcag

SEQ ID NO: 766371 - DNA, 25 bp, Homo sapien
tcctagagagttttgtgatctgaat

SEQ ID NO: 766372 - DNA, 25 bp, Homo sapien
tgtggagagtcaattaaacaccttt

SEQ ID NO: 766373 - DNA, 25 bp, Homo sapien
agcaccagtgttggggggcacatcc

SEQ ID NO: 766374 - DNA, 25 bp, Homo sapien
aaccccggctccaggtgtatttcag

SEQ ID NO: 766375 - DNA, 25 bp, Homo sapien
caagagcatctaactattcctttag

SEQ ID NO: 766376 - DNA, 25 bp, Homo sapien
ttcctttagagtgccctctgggtgg

SEQ ID NO: 766377 - DNA, 25 bp, Homo sapien
tatagccctgtcactttcatgtcgg

SEQ ID NO: 766378 - DNA, 25 bp, Homo sapien
taatatatgcctgatacctaccctc

SEQ ID NO: 766379 - DNA, 25 bp, Homo sapien
aagatttctgtattaccgtgccggg

SEQ ID NO: 766380 - DNA, 25 bp, Homo sapien
tcatgtcggtgaaacaaagtagtca

SEQ ID NO: 766381 - DNA, 25 bp, Homo sapien
cgttgaatatgggatttctgcctca

SEQ ID NO: 766382 - DNA, 25 bp, Homo sapien
catatctccctatcactttgcataa

SEQ ID NO: 766383 - DNA, 25 bp, Homo sapien
catgtaactttggtaggccttgtgc

SEQ ID NO: 766384 - DNA, 25 bp, Homo sapien
gttttccgggatctgcatgtgcctc

SEQ ID NO: 766385 - DNA, 25 bp, Homo sapien
tgtattgtcagagtaggtaacgttt

SEQ ID NO: 766386 - DNA, 25 bp, Homo sapien
caccatgattgacctattatctgat

SEQ ID NO: 766387 - DNA, 25 bp, Homo sapien
ttaactctcggttattatagatgaa

SEQ ID NO: 766388 - DNA, 25 bp, Homo sapien
tatctgatttcagccagcaatattg

SEQ ID NO: 766389 - DNA, 25 bp, Homo sapien
gctgctccagcggaggaaaaggaaa

SEQ ID NO: 766390 - DNA, 25 bp, Homo sapien
ttctggaaaagtcggcccgtctggc

SEQ ID NO: 766391 - DNA, 25 bp, Homo sapien
aaaggaaacgatgctgagtgcccag

SEQ ID NO: 766392 - DNA, 25 bp, Homo sapien
tcttctggaaaagtcggcccgtctg

SEQ ID NO: 766393 - DNA, 25 bp, Homo sapien
gcgctgatgttgaccgccagcgccg

SEQ ID NO: 766394 - DNA, 25 bp, Homo sapien
gctgcgctgatgttgaccgccagcg

SEQ ID NO: 766395 - DNA, 25 bp, Homo sapien
gcgctgcgctgatgttgaccgccag

SEQ ID NO: 766396 - DNA, 25 bp, Homo sapien
cgcgctgcgctgatgttgaccgcca

SEQ ID NO: 766397 - DNA, 25 bp, Homo sapien
ccgcgctctagagccgctttgttct

SEQ ID NO: 766398 - DNA, 25 bp, Homo sapien
cgatgcgggaagaaatggccgggac

SEQ ID NO: 766399 - DNA, 25 bp, Homo sapien
ttgttctccgcggagactgcatcga

SEQ ID NO: 766400 - DNA, 25 bp, Homo sapien
acgccgcgctctagagccgctttgt

SEQ ID NO: 766401 - DNA, 25 bp, Homo sapien
cacattgccgtctttagtaagtttg

SEQ ID NO: 766402 - DNA, 25 bp, Homo sapien
agcacattgccgtctttagtaagtt

SEQ ID NO: 766403 - DNA, 25 bp, Homo sapien
aagcagcacattgccgtctttagta

SEQ ID NO: 766404 - DNA, 25 bp, Homo sapien
tgaagcagcacattgccgtctttag

SEQ ID NO: 766405 - DNA, 25 bp, Homo sapien
cattagaagtcgtaccatcaccagt

SEQ ID NO: 766406 - DNA, 25 bp, Homo sapien
agcagctctccaatgattaggacat

SEQ ID NO: 766407 - DNA, 25 bp, Homo sapien
tgattaggacattagaagtcgtacc

SEQ ID NO: 766408 - DNA, 25 bp, Homo sapien
tcagaaatgtagagatccgcctgtt

SEQ ID NO: 766409 - DNA, 25 bp, Homo sapien
agagcagatgaacaggtaatgaatg

SEQ ID NO: 766410 - DNA, 25 bp, Homo sapien
cttgcatcttcaattaggtgcaacc

SEQ ID NO: 766411 - DNA, 25 bp, Homo sapien
taaacacacattaacacttgcatct

SEQ ID NO: 766412 - DNA, 25 bp, Homo sapien
cttcaattaggtgcaaccatagttc

SEQ ID NO: 766413 - DNA, 25 bp, Homo sapien
cacacattaacacttgcatcttcaa

SEQ ID NO: 766414 - DNA, 25 bp, Homo sapien
cagtgattattctaggatgaaggcc

SEQ ID NO: 766415 - DNA, 25 bp, Homo sapien
aactgaagggccttttcctttgcag

SEQ ID NO: 766416 - DNA, 25 bp, Homo sapien
tccttcagtgattattctaggatga

SEQ ID NO: 766417 - DNA, 25 bp, Homo sapien
tctctgcttactttgacttcttcca

SEQ ID NO: 766418 - DNA, 25 bp, Homo sapien
aactttagtacgaagagatgttctg

SEQ ID NO: 766419 - DNA, 25 bp, Homo sapien
gatgttctggccacatctataagtg

SEQ ID NO: 766420 - DNA, 25 bp, Homo sapien
tacgaagagatgttctggccacatc

SEQ ID NO: 766421 - DNA, 25 bp, Homo sapien
agtacgaagagatgttctggccaca

SEQ ID NO: 766422 - DNA, 25 bp, Homo sapien
catctccatgatctcaatcatgaag

SEQ ID NO: 766423 - DNA, 25 bp, Homo sapien
tatgtttcatctccatgatctcaat

SEQ ID NO: 766424 - DNA, 25 bp, Homo sapien
ccatgatctcaatcatgaagagatc

SEQ ID NO: 766425 - DNA, 25 bp, Homo sapien
gatttatgtttcatctccatgatct

SEQ ID NO: 766426 - DNA, 25 bp, Homo sapien
ggtccaaaacaagccctctgattaa

SEQ ID NO: 766427 - DNA, 25 bp, Homo sapien
tggtccaaaacaagccctctgatta

SEQ ID NO: 766428 - DNA, 25 bp, Homo sapien
agctttcacgagtttttctctctct

SEQ ID NO: 766429 - DNA, 25 bp, Homo sapien
cagctttcacgagtttttctctctc

SEQ ID NO: 766430 - DNA, 25 bp, Homo sapien
tccttttagctctgcgcagagcaac

SEQ ID NO: 766431 - DNA, 25 bp, Homo sapien
cagagcaactatgccttcttttgaa

SEQ ID NO: 766432 - DNA, 25 bp, Homo sapien
tgcgcagagcaactatgccttcttt

SEQ ID NO: 766433 - DNA, 25 bp, Homo sapien
ttagctctgcgcagagcaactatgc

SEQ ID NO: 766434 - DNA, 25 bp, Homo sapien
tgctgacggggtgcacaatgtgaat

SEQ ID NO: 766435 - DNA, 25 bp, Homo sapien
acagtgctgacggggtgcacaatgt

SEQ ID NO: 766436 - DNA, 25 bp, Homo sapien
gacggggtgcacaatgtgaatatag

SEQ ID NO: 766437 - DNA, 25 bp, Homo sapien
ctgacggggtgcacaatgtgaatat

SEQ ID NO: 766438 - DNA, 25 bp, Homo sapien
gatggataagcaacgttaccagtga

SEQ ID NO: 766439 - DNA, 25 bp, Homo sapien
ccaggaagtggtagtcgcaatgaac

SEQ ID NO: 766440 - DNA, 25 bp, Homo sapien
tgccactgcacgaaagagcaagact

SEQ ID NO: 766441 - DNA, 25 bp, Homo sapien
atctaaaaggtggacaagagctctt

SEQ ID NO: 766442 - DNA, 25 bp, Homo sapien
tcaggacttaggtcgtcaaaagaat

SEQ ID NO: 766443 - DNA, 25 bp, Homo sapien
acttaggtcgtcaaaagaattcagg

SEQ ID NO: 766444 - DNA, 25 bp, Homo sapien
cccaagcagtcaggacttaggtcgt

SEQ ID NO: 766445 - DNA, 25 bp, Homo sapien
agaattcagggctaccccaccacaa

SEQ ID NO: 766446 - DNA, 25 bp, Homo sapien
gacaagtagcatattaataaggaac

SEQ ID NO: 766447 - DNA, 25 bp, Homo sapien
aaagacttcatgaaccaggcacggt

SEQ ID NO: 766448 - DNA, 25 bp, Homo sapien
aacaggatttgtgcagagtgaagag

SEQ ID NO: 766449 - DNA, 25 bp, Homo sapien
cctgggcaacacaattatgaacctg

SEQ ID NO: 766450 - DNA, 25 bp, Homo sapien
gacagaacgagggttgttacatttc

SEQ ID NO: 766451 - DNA, 25 bp, Homo sapien
gcatctttgatctgagtgagtgtgt

SEQ ID NO: 766452 - DNA, 25 bp, Homo sapien
ctttgatctgagtgagtgtgtgctt

SEQ ID NO: 766453 - DNA, 25 bp, Homo sapien
ctgcatctttgatctgagtgagtgt

SEQ ID NO: 766454 - DNA, 25 bp, Homo sapien
taaaaacacagtattcggccatgcc

SEQ ID NO: 766455 - DNA, 25 bp, Homo sapien
cactgggcttatgtttaatcagggc

SEQ ID NO: 766456 - DNA, 25 bp, Homo sapien
tttacactgggcttatgtttaatca

SEQ ID NO: 766457 - DNA, 25 bp, Homo sapien
tgggaataatgagcaatgcatcagc

SEQ ID NO: 766458 - DNA, 25 bp, Homo sapien
ggcttatgtttaatcagggcttctg

SEQ ID NO: 766459 - DNA, 25 bp, Homo sapien
gttactgatcaactctctcaactac

SEQ ID NO: 766460 - DNA, 25 bp, Homo sapien
aaaaaaactcattgcataaagacag

SEQ ID NO: 766461 - DNA, 25 bp, Homo sapien
aacccagcagcaatacaccagtcat

SEQ ID NO: 766462 - DNA, 25 bp, Homo sapien
aagaaaatctcggcctggtgcagtg

SEQ ID NO: 766463 - DNA, 25 bp, Homo sapien
gagaaaacaggaactaataactgat

SEQ ID NO: 766464 - DNA, 25 bp, Homo sapien
gaaggtcaaaaccagagttctgagc

SEQ ID NO: 766465 - DNA, 25 bp, Homo sapien
ctgaaggtcaaaaccagagttctga

SEQ ID NO: 766466 - DNA, 25 bp, Homo sapien
caaaaccagagttctgagcaagaac

SEQ ID NO: 766467 - DNA, 25 bp, Homo sapien
gtcaaaaccagagttctgagcaaga

SEQ ID NO: 766468 - DNA, 25 bp, Homo sapien
gttctgcttgaattttaactaatgt

SEQ ID NO: 766469 - DNA, 25 bp, Homo sapien
tctgcttgaattttaactaatgttt

SEQ ID NO: 766470 - DNA, 25 bp, Homo sapien
ctgcttgaattttaactaatgtttc

SEQ ID NO: 766471 - DNA, 25 bp, Homo sapien
ttctgcttgaattttaactaatgtt

SEQ ID NO: 766472 - DNA, 25 bp, Homo sapien
gtgttcaggtccacacccacaagct

SEQ ID NO: 766473 - DNA, 25 bp, Homo sapien
ctgtgttcaggtccacacccacaag

SEQ ID NO: 766474 - DNA, 25 bp, Homo sapien
cccacaagctgacctgattctgaat

SEQ ID NO: 766475 - DNA, 25 bp, Homo sapien
cacacccacaagctgacctgattct

SEQ ID NO: 766476 - DNA, 25 bp, Homo sapien
caaattactcatgtctactcgtccc

SEQ ID NO: 766477 - DNA, 25 bp, Homo sapien
catggaggtacctgttatctcctac

SEQ ID NO: 766478 - DNA, 25 bp, Homo sapien
tgcagctttgcttatcactgatgac

SEQ ID NO: 766479 - DNA, 25 bp, Homo sapien
tgaatgtctgacttatacttagaag

SEQ ID NO: 766480 - DNA, 25 bp, Homo sapien
tacacaatagttatcccatacgcct

SEQ ID NO: 766481 - DNA, 25 bp, Homo sapien
agttatcccatacgcctacttctgc

SEQ ID NO: 766482 - DNA, 25 bp, Homo sapien
acgcctacttctgctgccaccattg

SEQ ID NO: 766483 - DNA, 25 bp, Homo sapien
tttacacaatagttatcccatacgc

SEQ ID NO: 766484 - DNA, 25 bp, Homo sapien
ggctagttcagtttccatacttcca

SEQ ID NO: 766485 - DNA, 25 bp, Homo sapien
agggctagttcagtttccatacttc

SEQ ID NO: 766486 - DNA, 25 bp, Homo sapien
gggctagttcagtttccatacttcc

SEQ ID NO: 766487 - DNA, 25 bp, Homo sapien
ctcgcatgatctcatcaaccaagag

SEQ ID NO: 766488 - DNA, 25 bp, Homo sapien
gaagacattccagctcgcatgatct

SEQ ID NO: 766489 - DNA, 25 bp, Homo sapien
cagagaagacattccagctcgcatg

SEQ ID NO: 766490 - DNA, 25 bp, Homo sapien
cagctcgcatgatctcatcaaccaa

SEQ ID NO: 766491 - DNA, 25 bp, Homo sapien
agtaacatatgcttatctaacatgg

SEQ ID NO: 766492 - DNA, 25 bp, Homo sapien
aaaagacctgctttatgtgtataca

SEQ ID NO: 766493 - DNA, 25 bp, Homo sapien
tccaaatttcaacagatgccagtgt

SEQ ID NO: 766494 - DNA, 25 bp, Homo sapien
tcactttgcagtcttcaagattcag

SEQ ID NO: 766495 - DNA, 25 bp, Homo sapien
accaacagggatgctttcaatattt

SEQ ID NO: 766496 - DNA, 25 bp, Homo sapien
tgatccaatgcatttactcagaaat

SEQ ID NO: 766497 - DNA, 25 bp, Homo sapien
tgccctttacagttgcagctctctc

SEQ ID NO: 766498 - DNA, 25 bp, Homo sapien
ggcgttcaaagtccaactgatccaa

SEQ ID NO: 766499 - DNA, 25 bp, Homo sapien
ataaccgtggcccttagtcaccaca

SEQ ID NO: 766500 - DNA, 25 bp, Homo sapien
aaatatgacgctagagactttgcga

SEQ ID NO: 766501 - DNA, 25 bp, Homo sapien
gactttgcgatgaatattttgccta

SEQ ID NO: 766502 - DNA, 25 bp, Homo sapien
aatacagttggcctacaatctcaaa

SEQ ID NO: 766503 - DNA, 25 bp, Homo sapien
tagtaacacacaacttcaccttcaa

SEQ ID NO: 766504 - DNA, 25 bp, Homo sapien
cctagtaacacacaacttcaccttc

SEQ ID NO: 766505 - DNA, 25 bp, Homo sapien
acaacttcaccttcaaggactgcag

SEQ ID NO: 766506 - DNA, 25 bp, Homo sapien
ttcaaggactgcagagatagaccaa

SEQ ID NO: 766507 - DNA, 25 bp, Homo sapien
ggccactgctgacatcccaaaacac

SEQ ID NO: 766508 - DNA, 25 bp, Homo sapien
aggccactgctgacatcccaaaaca

SEQ ID NO: 766509 - DNA, 25 bp, Homo sapien
gccactgctgacatcccaaaacaca

SEQ ID NO: 766510 - DNA, 25 bp, Homo sapien
gccccgcacccaatagttcagcagg

SEQ ID NO: 766511 - DNA, 25 bp, Homo sapien
agcggcagtcgacccctatgcacat

SEQ ID NO: 766512 - DNA, 25 bp, Homo sapien
agtcgacccctatgcacatgcgcag

SEQ ID NO: 766513 - DNA, 25 bp, Homo sapien
tatgcacatgcgcaggctgcgccac

SEQ ID NO: 766514 - DNA, 25 bp, Homo sapien
aggactgccgcgctgcgccgcgtac

SEQ ID NO: 766515 - DNA, 25 bp, Homo sapien
cacccacggccccgctgcgcatgcg

SEQ ID NO: 766516 - DNA, 25 bp, Homo sapien
tgcgccgcgtacacccacggccccg

SEQ ID NO: 766517 - DNA, 25 bp, Homo sapien
gcgctgcgccgcgtacacccacggc

SEQ ID NO: 766518 - DNA, 25 bp, Homo sapien
ctagcttgagccacgcgccgaccag

SEQ ID NO: 766519 - DNA, 25 bp, Homo sapien
gggcagcagcggtaacccatgccgg

SEQ ID NO: 766520 - DNA, 25 bp, Homo sapien
gcagcggtaacccatgccgggccat

SEQ ID NO: 766521 - DNA, 25 bp, Homo sapien
tagcttgagccacgcgccgaccagg

SEQ ID NO: 766522 - DNA, 25 bp, Homo sapien
ccccaggatggacggccggttcact

SEQ ID NO: 766523 - DNA, 25 bp, Homo sapien
gaggcgccacgcgcaccgagagcta

SEQ ID NO: 766524 - DNA, 25 bp, Homo sapien
ttgaaaagtataaggcggtgaggcg

SEQ ID NO: 766525 - DNA, 25 bp, Homo sapien
ctaaggctctctcccgtcagggcgg

SEQ ID NO: 766526 - DNA, 25 bp, Homo sapien
caggaaatatgtcgatggcaaaggg

SEQ ID NO: 766527 - DNA, 25 bp, Homo sapien
atctctgctgtctggagaatttgtt

SEQ ID NO: 766528 - DNA, 25 bp, Homo sapien
caggaatctcccaccctgcagttgg

SEQ ID NO: 766529 - DNA, 25 bp, Homo sapien
aagggtttcactgtcgcctcccgca

SEQ ID NO: 766530 - DNA, 25 bp, Homo sapien
atcacatatctcatctcacaacaac

SEQ ID NO: 766531 - DNA, 25 bp, Homo sapien
aacactgaaccaaatagaagtgaaa

SEQ ID NO: 766532 - DNA, 25 bp, Homo sapien
gcatccagcccttcatcacatatct

SEQ ID NO: 766533 - DNA, 25 bp, Homo sapien
cactgaaccaaatagaagtgaaaaa

SEQ ID NO: 766534 - DNA, 25 bp, Homo sapien
aggttggtcttgaactcctgacctt

SEQ ID NO: 766535 - DNA, 25 bp, Homo sapien
ttacaggtgtatgccagcacacccg

SEQ ID NO: 766536 - DNA, 25 bp, Homo sapien
attacaggtgtatgccagcacaccc

SEQ ID NO: 766537 - DNA, 25 bp, Homo sapien
ttggtcttgaactcctgaccttgtg

SEQ ID NO: 766538 - DNA, 25 bp, Homo sapien
aagtctcactctgttgcccaggctg

SEQ ID NO: 766539 - DNA, 25 bp, Homo sapien
ttttttgagacaaagtctcactctg

SEQ ID NO: 766540 - DNA, 25 bp, Homo sapien
caccacacctgtcctatttatttat

SEQ ID NO: 766541 - DNA, 25 bp, Homo sapien
gagtgcagtgacacaatctcagctc

SEQ ID NO: 766542 - DNA, 25 bp, Homo sapien
aagacatagttcagctggttcagct

SEQ ID NO: 766543 - DNA, 25 bp, Homo sapien
caggaaacttcagatatccctgtcc

SEQ ID NO: 766544 - DNA, 25 bp, Homo sapien
tccctgtcctgtaagttatacacca

SEQ ID NO: 766545 - DNA, 25 bp, Homo sapien
cacagagtgttcatgattgccaagg

SEQ ID NO: 766546 - DNA, 25 bp, Homo sapien
aaagctccatccaaacatctcagct

SEQ ID NO: 766547 - DNA, 25 bp, Homo sapien
cagcttctgtccgatactttttctc

SEQ ID NO: 766548 - DNA, 25 bp, Homo sapien
tctgtccgatactttttctccctga

SEQ ID NO: 766549 - DNA, 25 bp, Homo sapien
cctcaaagacaaagctccatccaaa

SEQ ID NO: 766550 - DNA, 25 bp, Homo sapien
tcccactcctatcccctcagctgca

SEQ ID NO: 766551 - DNA, 25 bp, Homo sapien
gtccaggtcccactcctatcccctc

SEQ ID NO: 766552 - DNA, 25 bp, Homo sapien
aggtcccactcctatcccctcagct

SEQ ID NO: 766553 - DNA, 25 bp, Homo sapien
cactcctatcccctcagctgcaaga

SEQ ID NO: 766554 - DNA, 25 bp, Homo sapien
tttctcttgcttcccctctgcctcc

SEQ ID NO: 766555 - DNA, 25 bp, Homo sapien
gacgctccatggtgagtttctcttg

SEQ ID NO: 766556 - DNA, 25 bp, Homo sapien
tctcttgcttcccctctgcctccac

SEQ ID NO: 766557 - DNA, 25 bp, Homo sapien
agtttctcttgcttcccctctgcct

SEQ ID NO: 766558 - DNA, 25 bp, Homo sapien
tggcttgccaaggtgatctctcttt

SEQ ID NO: 766559 - DNA, 25 bp, Homo sapien
tagaggttggcttgccaaggtgatc

SEQ ID NO: 766560 - DNA, 25 bp, Homo sapien
cacccttattagaggttggcttgcc

SEQ ID NO: 766561 - DNA, 25 bp, Homo sapien
catcttaccacccttattagaggtt

SEQ ID NO: 766562 - DNA, 25 bp, Homo sapien
gaaggagaccgactgcaagatgctc

SEQ ID NO: 766563 - DNA, 25 bp, Homo sapien
gaaaaagaaggagaccgactgcaag

SEQ ID NO: 766564 - DNA, 25 bp, Homo sapien
actgcaagatgctccggcccagcaa

SEQ ID NO: 766565 - DNA, 25 bp, Homo sapien
ctgcgaaaaagaaggagaccgactg

SEQ ID NO: 766566 - DNA, 25 bp, Homo sapien
tccactggaagccaccagagtacag

SEQ ID NO: 766567 - DNA, 25 bp, Homo sapien
aatgccttttccactggaagccacc

SEQ ID NO: 766568 - DNA, 25 bp, Homo sapien
tgcctccaaaatgccttttccactg

SEQ ID NO: 766569 - DNA, 25 bp, Homo sapien
cttttccactggaagccaccagagt

SEQ ID NO: 766570 - DNA, 25 bp, Homo sapien
gggcgtcattccagctcacgtgtaa

SEQ ID NO: 766571 - DNA, 25 bp, Homo sapien
aagcacagtaggcacgggcgtcatt

SEQ ID NO: 766572 - DNA, 25 bp, Homo sapien
tgggcagtcgttttccccgccaagc

SEQ ID NO: 766573 - DNA, 25 bp, Homo sapien
tcacgtgtaacactgggtgctccag

SEQ ID NO: 766574 - DNA, 25 bp, Homo sapien
tcaagccccctcgggcggcaaactc

SEQ ID NO: 766575 - DNA, 25 bp, Homo sapien
gaggcaacctcacaggtcatattaa

SEQ ID NO: 766576 - DNA, 25 bp, Homo sapien
tctccactcgctgaactgcattaga

SEQ ID NO: 766577 - DNA, 25 bp, Homo sapien
cagggcaatgtaatcctaagcatgg

SEQ ID NO: 766578 - DNA, 25 bp, Homo sapien
taaaaacttcgatcactggctggtc

SEQ ID NO: 766579 - DNA, 25 bp, Homo sapien
ctgccacaggttggtgcggtttggc

SEQ ID NO: 766580 - DNA, 25 bp, Homo sapien
caggttggtgcggtttggctggaac

SEQ ID NO: 766581 - DNA, 25 bp, Homo sapien
ttggtgcggtttggctggaaccagt

SEQ ID NO: 766582 - DNA, 25 bp, Homo sapien
tgcggtttggctggaaccagttccc

SEQ ID NO: 766583 - DNA, 25 bp, Homo sapien
gccatcctcagctttgtctcccttg

SEQ ID NO: 766584 - DNA, 25 bp, Homo sapien
tggggagactccatggaagccatcc

SEQ ID NO: 766585 - DNA, 25 bp, Homo sapien
ctcagctttgtctcccttggggaac

SEQ ID NO: 766586 - DNA, 25 bp, Homo sapien
ccatggaagccatcctcagctttgt

SEQ ID NO: 766587 - DNA, 25 bp, Homo sapien
gtagttgttctgggcggggaaagca

SEQ ID NO: 766588 - DNA, 25 bp, Homo sapien
tagttgttctgggcggggaaagcat

SEQ ID NO: 766589 - DNA, 25 bp, Homo sapien
tcctgggggccaaatggcagaaggg

SEQ ID NO: 766590 - DNA, 25 bp, Homo sapien
cccaacagccagttcatgggcacag

SEQ ID NO: 766591 - DNA, 25 bp, Homo sapien
ctcagacatgatggtcccaacagcc

SEQ ID NO: 766592 - DNA, 25 bp, Homo sapien
ttcatgggcacagccgcaagcccaa

SEQ ID NO: 766593 - DNA, 25 bp, Homo sapien
ctgcagccccaccggcgggtcaggc

SEQ ID NO: 766594 - DNA, 25 bp, Homo sapien
gccaggctgggacccgccgaccacc

SEQ ID NO: 766595 - DNA, 25 bp, Homo sapien
tgcagccccaccggcgggtcaggcc

SEQ ID NO: 766596 - DNA, 25 bp, Homo sapien
gcagccccaccggcgggtcaggcca

SEQ ID NO: 766597 - DNA, 25 bp, Homo sapien
tcagcagcctggtacggtgatgctg

SEQ ID NO: 766598 - DNA, 25 bp, Homo sapien
tgctcagcagcctggtacggtgatg

SEQ ID NO: 766599 - DNA, 25 bp, Homo sapien
agcagcctggtacggtgatgctgtc

SEQ ID NO: 766600 - DNA, 25 bp, Homo sapien
tgtccactcccacacgttccccagg

SEQ ID NO: 766601 - DNA, 25 bp, Homo sapien
gagccatcagctgtgtcgatccagg

SEQ ID NO: 766602 - DNA, 25 bp, Homo sapien
cagagccatcagctgtgtcgatcca

SEQ ID NO: 766603 - DNA, 25 bp, Homo sapien
gccatcagctgtgtcgatccaggat

SEQ ID NO: 766604 - DNA, 25 bp, Homo sapien
tcagctgtgtcgatccaggatgccc

SEQ ID NO: 766605 - DNA, 25 bp, Homo sapien
gtggaagaatcgctagagcctggca

SEQ ID NO: 766606 - DNA, 25 bp, Homo sapien
acagcggaaaccgaggttgtctgag

SEQ ID NO: 766607 - DNA, 25 bp, Homo sapien
tggcggccggcctgcgtctgcagca

SEQ ID NO: 766608 - DNA, 25 bp, Homo sapien
gcacagcggaaaccgaggttgtctg

SEQ ID NO: 766609 - DNA, 25 bp, Homo sapien
gccggcctgcgtctgcagcacagcg

SEQ ID NO: 766610 - DNA, 25 bp, Homo sapien
gggaatgacagtgaccctagaaggc

SEQ ID NO: 766611 - DNA, 25 bp, Homo sapien
cgagcttggaattgcgctgtttgca

SEQ ID NO: 766612 - DNA, 25 bp, Homo sapien
tgagaggcgcctgccacagagggat

SEQ ID NO: 766613 - DNA, 25 bp, Homo sapien
tcctgaggctgaagctctcgagctt

SEQ ID NO: 766614 - DNA, 25 bp, Homo sapien
ccagccatcgtcaacacacattggg

SEQ ID NO: 766615 - DNA, 25 bp, Homo sapien
ccccagccatcgtcaacacacattg

SEQ ID NO: 766616 - DNA, 25 bp, Homo sapien
ctaacagaaacacctggcccccagc

SEQ ID NO: 766617 - DNA, 25 bp, Homo sapien
cagccatcgtcaacacacattgggc

SEQ ID NO: 766618 - DNA, 25 bp, Homo sapien
gacccttttaggactgaactgtgct

SEQ ID NO: 766619 - DNA, 25 bp, Homo sapien
tctgccttgaggaaacaatgtcagc

SEQ ID NO: 766620 - DNA, 25 bp, Homo sapien
agttacatgtctgcctgttacacag

SEQ ID NO: 766621 - DNA, 25 bp, Homo sapien
tgtgattcccacaatgcaatgcttc

SEQ ID NO: 766622 - DNA, 25 bp, Homo sapien
ccagggacatgtttttggaggcata

SEQ ID NO: 766623 - DNA, 25 bp, Homo sapien
tgacatccagtgacagtgtgggagc

SEQ ID NO: 766624 - DNA, 25 bp, Homo sapien
ggagattttattggccccatgacat

SEQ ID NO: 766625 - DNA, 25 bp, Homo sapien
gggagcaggctactctccagggaca

SEQ ID NO: 766626 - DNA, 25 bp, Homo sapien
tctactaccagtaccgccgggtgaa

SEQ ID NO: 766627 - DNA, 25 bp, Homo sapien
tgtgacccgggagatcgtcatccga

SEQ ID NO: 766628 - DNA, 25 bp, Homo sapien
ttcgtggcaaacgagcccagagcgt

SEQ ID NO: 766629 - DNA, 25 bp, Homo sapien
tgctggcttcagtgcggatctacta

SEQ ID NO: 766630 - DNA, 25 bp, Homo sapien
gaaggacacttatgagaccaacact

SEQ ID NO: 766631 - DNA, 25 bp, Homo sapien
ctgggctcccctgctacttgagaca

SEQ ID NO: 766632 - DNA, 25 bp, Homo sapien
ttccatttcagtacagctgaaggac

SEQ ID NO: 766633 - DNA, 25 bp, Homo sapien
ggtgtttgacctgtaagtacccagc

SEQ ID NO: 766634 - DNA, 25 bp, Homo sapien
gcaccccaacatcagtgagtgatgg

SEQ ID NO: 766635 - DNA, 25 bp, Homo sapien
aggtggacatcctgcgcaaggtctc

SEQ ID NO: 766636 - DNA, 25 bp, Homo sapien
tccaccctcactgctctgatagaag

SEQ ID NO: 766637 - DNA, 25 bp, Homo sapien
tgatggccccaagccacacggcagg

SEQ ID NO: 766638 - DNA, 25 bp, Homo sapien
gcagtgtggtcaggcgatgcatcca

SEQ ID NO: 766639 - DNA, 25 bp, Homo sapien
caggagtacgccgtgaaggtcatcg

SEQ ID NO: 766640 - DNA, 25 bp, Homo sapien
gacgtcaccggtggaggcagcttca

SEQ ID NO: 766641 - DNA, 25 bp, Homo sapien
tcatccaccatttccaaaagctcag

SEQ ID NO: 766642 - DNA, 25 bp, Homo sapien
ctgtagaatctgggactgggcaaat

SEQ ID NO: 766643 - DNA, 25 bp, Homo sapien
gaagtgggggtgtccctactctgta

SEQ ID NO: 766644 - DNA, 25 bp, Homo sapien
ccttaaactagctgttatgttatga

SEQ ID NO: 766645 - DNA, 25 bp, Homo sapien
ttgtgtggcctccttaaactagctg

SEQ ID NO: 766646 - DNA, 25 bp, Homo sapien
agcctgggcaactgggtgtctccag

SEQ ID NO: 766647 - DNA, 25 bp, Homo sapien
ccagcctgggcaactgggtgtctcc

SEQ ID NO: 766648 - DNA, 25 bp, Homo sapien
cagcctgggcaactgggtgtctcca

SEQ ID NO: 766649 - DNA, 25 bp, Homo sapien
ggaagccgaagccgcacctcccgca

SEQ ID NO: 766650 - DNA, 25 bp, Homo sapien
tggaagccgaagccgcacctcccgc

SEQ ID NO: 766651 - DNA, 25 bp, Homo sapien
gaagccgaagccgcacctcccgcat

SEQ ID NO: 766652 - DNA, 25 bp, Homo sapien
gagacgacggagaacggaagttctc

SEQ ID NO: 766653 - DNA, 25 bp, Homo sapien
cctcagaagtcgcttagctcttcgg

SEQ ID NO: 766654 - DNA, 25 bp, Homo sapien
agctcttcggtggttgtcccacgtc

SEQ ID NO: 766655 - DNA, 25 bp, Homo sapien
ttggttgcgcgttgaggccagcccc

SEQ ID NO: 766656 - DNA, 25 bp, Homo sapien
gaggacaaggttcgcggatgaacca

SEQ ID NO: 766657 - DNA, 25 bp, Homo sapien
taagtgctctgatgcgaggaccgga

SEQ ID NO: 766658 - DNA, 25 bp, Homo sapien
tttaaagatcctggcgccaagttca

SEQ ID NO: 766659 - DNA, 25 bp, Homo sapien
caagttcagggcgttgaccgcgaag

SEQ ID NO: 766660 - DNA, 25 bp, Homo sapien
cagctaaatatagagtagccatggc

SEQ ID NO: 766661 - DNA, 25 bp, Homo sapien
taaatatagagtagccatggcatgc

SEQ ID NO: 766662 - DNA, 25 bp, Homo sapien
tcagaccagctaaatatagagtagc

SEQ ID NO: 766663 - DNA, 25 bp, Homo sapien
ttgttcagaccagctaaatatagag

SEQ ID NO: 766664 - DNA, 25 bp, Homo sapien
tgtacttctaggtgcttttttactc

SEQ ID NO: 766665 - DNA, 25 bp, Homo sapien
ggttggccacccaagattcaggcat

SEQ ID NO: 766666 - DNA, 25 bp, Homo sapien
taggttggccacccaagattcaggc

SEQ ID NO: 766667 - DNA, 25 bp, Homo sapien
gggtaggttggccacccaagattca

SEQ ID NO: 766668 - DNA, 25 bp, Homo sapien
ggtaggttggccacccaagattcag

SEQ ID NO: 766669 - DNA, 25 bp, Homo sapien
gggatgatctttccaaatccagcca

SEQ ID NO: 766670 - DNA, 25 bp, Homo sapien
tctttccaaatccagccagcagttt

SEQ ID NO: 766671 - DNA, 25 bp, Homo sapien
tgtggggatgatctttccaaatcca

SEQ ID NO: 766672 - DNA, 25 bp, Homo sapien
ccagcagtttttctgtggtagtgac

SEQ ID NO: 766673 - DNA, 25 bp, Homo sapien
agcggtggtcgggttcgattatatc

SEQ ID NO: 766674 - DNA, 25 bp, Homo sapien
gggaccagacaacatggttgggcat

SEQ ID NO: 766675 - DNA, 25 bp, Homo sapien
tggagtaggtgaacgctatgaagcc

SEQ ID NO: 766676 - DNA, 25 bp, Homo sapien
ccagacaacatggttgggcatggag

SEQ ID NO: 766677 - DNA, 25 bp, Homo sapien
cctagacttcatggagtaggtgaac

SEQ ID NO: 766678 - DNA, 25 bp, Homo sapien
caatgggcttggatgatcaacactg

SEQ ID NO: 766679 - DNA, 25 bp, Homo sapien
cagcaccagaaacatatacacttta

SEQ ID NO: 766680 - DNA, 25 bp, Homo sapien
tctatcaatgggcttggatgatcaa

SEQ ID NO: 766681 - DNA, 25 bp, Homo sapien
gcctcctgatctatcaatgggcttg

SEQ ID NO: 766682 - DNA, 25 bp, Homo sapien
aaggacgggccaccccggacagatg

SEQ ID NO: 766683 - DNA, 25 bp, Homo sapien
cctcggagcgcgacctgggaagtca

SEQ ID NO: 766684 - DNA, 25 bp, Homo sapien
ctgtggggtccgcaaagagccgcct

SEQ ID NO: 766685 - DNA, 25 bp, Homo sapien
ggaagtcatcttgtgagggatcctc

SEQ ID NO: 766686 - DNA, 25 bp, Homo sapien
ttttcaactgtctcgcatactgtct

SEQ ID NO: 766687 - DNA, 25 bp, Homo sapien
tgctggaccatagttttttccactc

SEQ ID NO: 766688 - DNA, 25 bp, Homo sapien
ggccagtgctggaccatagtttttt

SEQ ID NO: 766689 - DNA, 25 bp, Homo sapien
tctacagtcgttttcaactgtctcg

SEQ ID NO: 766690 - DNA, 25 bp, Homo sapien
aaattaaagtgccacgatccattac

SEQ ID NO: 766691 - DNA, 25 bp, Homo sapien
taaagtgccacgatccattacatcc

SEQ ID NO: 766692 - DNA, 25 bp, Homo sapien
ttctaaattaaagtgccacgatcca

SEQ ID NO: 766693 - DNA, 25 bp, Homo sapien
cttcatttccggcaaaagatcctta

SEQ ID NO: 766694 - DNA, 25 bp, Homo sapien
tagccgcagttttaggagcacactg

SEQ ID NO: 766695 - DNA, 25 bp, Homo sapien
tacttctgggagttgagtgcgtcca

SEQ ID NO: 766696 - DNA, 25 bp, Homo sapien
cggcttctgctaaagtacttctggg

SEQ ID NO: 766697 - DNA, 25 bp, Homo sapien
taattgacggatggttttagccgca

SEQ ID NO: 766698 - DNA, 25 bp, Homo sapien
gctcagtgaggcaaagttctgtctg

SEQ ID NO: 766699 - DNA, 25 bp, Homo sapien
ctcagtgaggcaaagttctgtctga

SEQ ID NO: 766700 - DNA, 25 bp, Homo sapien
tcagtgaggcaaagttctgtctgac

SEQ ID NO: 766701 - DNA, 25 bp, Homo sapien
tgggggacggctgctttcccgccac

SEQ ID NO: 766702 - DNA, 25 bp, Homo sapien
gaccccggctcttggcagccccatc

SEQ ID NO: 766703 - DNA, 25 bp, Homo sapien
ttggcagccccatccgccagccaaa

SEQ ID NO: 766704 - DNA, 25 bp, Homo sapien
ccaaacctgcactgctcggtgcagt

SEQ ID NO: 766705 - DNA, 25 bp, Homo sapien
gaagggagattaccaccagagcaag

SEQ ID NO: 766706 - DNA, 25 bp, Homo sapien
tgctggctggacctagaaccatggg

SEQ ID NO: 766707 - DNA, 25 bp, Homo sapien
caacaatgtcggtggctttcctaac

SEQ ID NO: 766708 - DNA, 25 bp, Homo sapien
accatgggaaaccagggtcttgaat

SEQ ID NO: 766709 - DNA, 25 bp, Homo sapien
cagtttccgaatgcagtaagagtca

SEQ ID NO: 766710 - DNA, 25 bp, Homo sapien
agtttccgaatgcagtaagagtcag

SEQ ID NO: 766711 - DNA, 25 bp, Homo sapien
ttcagtttccgaatgcagtaagagt

SEQ ID NO: 766712 - DNA, 25 bp, Homo sapien
cattcagtttccgaatgcagtaaga

SEQ ID NO: 766713 - DNA, 25 bp, Homo sapien
tatgatttacggcaccatcggtggc

SEQ ID NO: 766714 - DNA, 25 bp, Homo sapien
gattcctccacttggtaattcatct

SEQ ID NO: 766715 - DNA, 25 bp, Homo sapien
tcttctccaacaagctatggttctt

SEQ ID NO: 766716 - DNA, 25 bp, Homo sapien
catcggtggccctgatttgattcct

SEQ ID NO: 766717 - DNA, 25 bp, Homo sapien
aacaccagctggttctcctcggctg

SEQ ID NO: 766718 - DNA, 25 bp, Homo sapien
tcaaaacaccagctggttctcctcg

SEQ ID NO: 766719 - DNA, 25 bp, Homo sapien
agctggttctcctcggctgctaagt

SEQ ID NO: 766720 - DNA, 25 bp, Homo sapien
accagctggttctcctcggctgcta

SEQ ID NO: 766721 - DNA, 25 bp, Homo sapien
cgtcatctagcacagccatgggctc

SEQ ID NO: 766722 - DNA, 25 bp, Homo sapien
gcccctggtcccgtcatctagcaca

SEQ ID NO: 766723 - DNA, 25 bp, Homo sapien
tcatctagcacagccatgggctcct

SEQ ID NO: 766724 - DNA, 25 bp, Homo sapien
cagcccctggtcccgtcatctagca

SEQ ID NO: 766725 - DNA, 25 bp, Homo sapien
gagaaaattccagggaaatgtagaa

SEQ ID NO: 766726 - DNA, 25 bp, Homo sapien
cagttgagaaaattccagggaaatg

SEQ ID NO: 766727 - DNA, 25 bp, Homo sapien
ccagttgagaaaattccagggaaat

SEQ ID NO: 766728 - DNA, 25 bp, Homo sapien
gttgagaaaattccagggaaatgta

SEQ ID NO: 766729 - DNA, 25 bp, Homo sapien
ttcctagaagcaaccaatacacttt

SEQ ID NO: 766730 - DNA, 25 bp, Homo sapien
ctcttagtaaactcatcattaccca

SEQ ID NO: 766731 - DNA, 25 bp, Homo sapien
cttcctagaagcaaccaatacactt

SEQ ID NO: 766732 - DNA, 25 bp, Homo sapien
tcttagtaaactcatcattacccat

SEQ ID NO: 766733 - DNA, 25 bp, Homo sapien
gacaccaggttgcaagagtcagcca

SEQ ID NO: 766734 - DNA, 25 bp, Homo sapien
caccttggtttggtggatcttagcc

SEQ ID NO: 766735 - DNA, 25 bp, Homo sapien
gacttggcccctgaagagtagaacc

SEQ ID NO: 766736 - DNA, 25 bp, Homo sapien
tagccagcttgtaagagtcagcctc

SEQ ID NO: 766737 - DNA, 25 bp, Homo sapien
ttttaataaaccacgagacatgagt

SEQ ID NO: 766738 - DNA, 25 bp, Homo sapien
caagtgatctaattaccttcgagtc

SEQ ID NO: 766739 - DNA, 25 bp, Homo sapien
gcctgggctggatatgagtttttct

SEQ ID NO: 766740 - DNA, 25 bp, Homo sapien
aaacacgagaggttattatattgcc

SEQ ID NO: 766741 - DNA, 25 bp, Homo sapien
gtgactgttgaagccagtattgcac

SEQ ID NO: 766742 - DNA, 25 bp, Homo sapien
tgactgttgaagccagtattgcact

SEQ ID NO: 766743 - DNA, 25 bp, Homo sapien
ggtgactgttgaagccagtattgca

SEQ ID NO: 766744 - DNA, 25 bp, Homo sapien
aatccactggaaacttgaagtgtgg

SEQ ID NO: 766745 - DNA, 25 bp, Homo sapien
ccatgcccaatccactggaaacttg

SEQ ID NO: 766746 - DNA, 25 bp, Homo sapien
aacttgaagtgtggcttgtagatga

SEQ ID NO: 766747 - DNA, 25 bp, Homo sapien
aatgcaattaaacttccatgcccaa

SEQ ID NO: 766748 - DNA, 25 bp, Homo sapien
ttaatgtctcccagggcgctgatgg

SEQ ID NO: 766749 - DNA, 25 bp, Homo sapien
aagctgcttgctttttgcctcggaa

SEQ ID NO: 766750 - DNA, 25 bp, Homo sapien
ctcattcccctcaaaaagctgcttg

SEQ ID NO: 766751 - DNA, 25 bp, Homo sapien
ggaaccctcgattcccacctcattc

SEQ ID NO: 766752 - DNA, 25 bp, Homo sapien
gcggttccggactcaagttacagcg

SEQ ID NO: 766753 - DNA, 25 bp, Homo sapien
gactcaagttacagcgtcgggctgg

SEQ ID NO: 766754 - DNA, 25 bp, Homo sapien
gccgcggttccggactcaagttaca

SEQ ID NO: 766755 - DNA, 25 bp, Homo sapien
tccggactcaagttacagcgtcggg

SEQ ID NO: 766756 - DNA, 25 bp, Homo sapien
tcctttaacaaccggcagcgcgagc

SEQ ID NO: 766757 - DNA, 25 bp, Homo sapien
ggtcctttaacaaccggcagcgcga

SEQ ID NO: 766758 - DNA, 25 bp, Homo sapien
cggtcctttaacaaccggcagcgcg

SEQ ID NO: 766759 - DNA, 25 bp, Homo sapien
gtcctttaacaaccggcagcgcgag

SEQ ID NO: 766760 - DNA, 25 bp, Homo sapien
ggaagggaaacagctcgagcgccgg

SEQ ID NO: 766761 - DNA, 25 bp, Homo sapien
gaagggaaacagctcgagcgccggc

SEQ ID NO: 766762 - DNA, 25 bp, Homo sapien
aagggaaacagctcgagcgccggct

SEQ ID NO: 766763 - DNA, 25 bp, Homo sapien
tctggttacaattggcgtgccctct

SEQ ID NO: 766764 - DNA, 25 bp, Homo sapien
agagcggccctagtcgtcgccgtag

SEQ ID NO: 766765 - DNA, 25 bp, Homo sapien
aatacagcctgttcacccatccttg

SEQ ID NO: 766766 - DNA, 25 bp, Homo sapien
cagcatttgattttggccctaatac

SEQ ID NO: 766767 - DNA, 25 bp, Homo sapien
tcctctgggctacagcctctgtgca

SEQ ID NO: 766768 - DNA, 25 bp, Homo sapien
tacatgttcatcactatatgtcctc

SEQ ID NO: 766769 - DNA, 25 bp, Homo sapien
cttaatgttccagcacttgaaagca

SEQ ID NO: 766770 - DNA, 25 bp, Homo sapien
tgggctacagcctctgtgcacacac

SEQ ID NO: 766771 - DNA, 25 bp, Homo sapien
tgtaacaaaaagcaaggcgaagact

SEQ ID NO: 766772 - DNA, 25 bp, Homo sapien
tgagcttgcagccatgatatgcgcg

SEQ ID NO: 766773 - DNA, 25 bp, Homo sapien
gatatgcgcgtctccctaattagtt

SEQ ID NO: 766774 - DNA, 25 bp, Homo sapien
gacttgggcggctttatttcgtata

SEQ ID NO: 766775 - DNA, 25 bp, Homo sapien
tgagagaatgtaaacaaaaatactt

SEQ ID NO: 766776 - DNA, 25 bp, Homo sapien
ctgagagaatgtaaacaaaaatact

SEQ ID NO: 766777 - DNA, 25 bp, Homo sapien
agagaatgtaaacaaaaatacttgg

SEQ ID NO: 766778 - DNA, 25 bp, Homo sapien
gagagaatgtaaacaaaaatacttg

SEQ ID NO: 766779 - DNA, 25 bp, Homo sapien
cagatttggaatgcactgttccctc

SEQ ID NO: 766780 - DNA, 25 bp, Homo sapien
agatttggaatgcactgttccctca

SEQ ID NO: 766781 - DNA, 25 bp, Homo sapien
ggtcacttcagaattagtatactga

SEQ ID NO: 766782 - DNA, 25 bp, Homo sapien
ctgacggtcacttcagaattagtat

SEQ ID NO: 766783 - DNA, 25 bp, Homo sapien
cggtcacttcagaattagtatactg

SEQ ID NO: 766784 - DNA, 25 bp, Homo sapien
gacggtcacttcagaattagtatac

SEQ ID NO: 766785 - DNA, 25 bp, Homo sapien
aaaatctggccaggaagtcaacatc

SEQ ID NO: 766786 - DNA, 25 bp, Homo sapien
aaatctggccaggaagtcaacatct

SEQ ID NO: 766787 - DNA, 25 bp, Homo sapien
gaaaatctggccaggaagtcaacat

SEQ ID NO: 766788 - DNA, 25 bp, Homo sapien
aatctggccaggaagtcaacatctt

SEQ ID NO: 766789 - DNA, 25 bp, Homo sapien
tttactccaactatcaatcaattac

SEQ ID NO: 766790 - DNA, 25 bp, Homo sapien
tcaatcaattactgtcccattccat

SEQ ID NO: 766791 - DNA, 25 bp, Homo sapien
caactatcaatcaattactgtccca

SEQ ID NO: 766792 - DNA, 25 bp, Homo sapien
actccaactatcaatcaattactgt

SEQ ID NO: 766793 - DNA, 25 bp, Homo sapien
tcctcatgaattagtagctgcaaca

SEQ ID NO: 766794 - DNA, 25 bp, Homo sapien
tgtttcaatagcttgtagtgcctct

SEQ ID NO: 766795 - DNA, 25 bp, Homo sapien
tagtgcctcttgagcattcttaata

SEQ ID NO: 766796 - DNA, 25 bp, Homo sapien
gctgcaacatcagtgccacttttgt

SEQ ID NO: 766797 - DNA, 25 bp, Homo sapien
gattgcctctacattagctttttgc

SEQ ID NO: 766798 - DNA, 25 bp, Homo sapien
gcctctacattagctttttgctgat

SEQ ID NO: 766799 - DNA, 25 bp, Homo sapien
tttgctgatccaagagcactgtaag

SEQ ID NO: 766800 - DNA, 25 bp, Homo sapien
tttttgctgatccaagagcactgta

SEQ ID NO: 766801 - DNA, 25 bp, Homo sapien
taagtcaattttttcataacggcca

SEQ ID NO: 766802 - DNA, 25 bp, Homo sapien
gaagttatattcttcatcgtaagtc

SEQ ID NO: 766803 - DNA, 25 bp, Homo sapien
gtcaattttttcataacggccaaca

SEQ ID NO: 766804 - DNA, 25 bp, Homo sapien
cctcattttcgaagttatattcttc

SEQ ID NO: 766805 - DNA, 25 bp, Homo sapien
aaaacgctgtgaacagaggccacca

SEQ ID NO: 766806 - DNA, 25 bp, Homo sapien
aaaaacgctgtgaacagaggccacc

SEQ ID NO: 766807 - DNA, 25 bp, Homo sapien
taaaaacgctgtgaacagaggccac

SEQ ID NO: 766808 - DNA, 25 bp, Homo sapien
gcgcccggccatatacagcaatctt

SEQ ID NO: 766809 - DNA, 25 bp, Homo sapien
cgcgcccggccatatacagcaatct

SEQ ID NO: 766810 - DNA, 25 bp, Homo sapien
gcccggccatatacagcaatcttat

SEQ ID NO: 766811 - DNA, 25 bp, Homo sapien
cggccatatacagcaatcttattgc

SEQ ID NO: 766812 - DNA, 25 bp, Homo sapien
ctgcaaatggaacaccgtgagatac

SEQ ID NO: 766813 - DNA, 25 bp, Homo sapien
aatggaacaccgtgagatactagaa

SEQ ID NO: 766814 - DNA, 25 bp, Homo sapien
gcaaatggaacaccgtgagatacta

SEQ ID NO: 766815 - DNA, 25 bp, Homo sapien
gaacaccgtgagatactagaagagc

SEQ ID NO: 766816 - DNA, 25 bp, Homo sapien
tgactcttgatgttaccagaattct

SEQ ID NO: 766817 - DNA, 25 bp, Homo sapien
gactcttgatgttaccagaattctc

SEQ ID NO: 766818 - DNA, 25 bp, Homo sapien
taagaaagccattagtacacgtgga

SEQ ID NO: 766819 - DNA, 25 bp, Homo sapien
catttttgaagaactccaacgtcac

SEQ ID NO: 766820 - DNA, 25 bp, Homo sapien
gaatgtgctgaggttcaactgtgaa

SEQ ID NO: 766821 - DNA, 25 bp, Homo sapien
tgaagaactccaacgtcacagatgt

SEQ ID NO: 766822 - DNA, 25 bp, Homo sapien
aggtattcactattaacagtcagca

SEQ ID NO: 766823 - DNA, 25 bp, Homo sapien
tctgccaggtattcactattaacag

SEQ ID NO: 766824 - DNA, 25 bp, Homo sapien
tgccaggtattcactattaacagtc

SEQ ID NO: 766825 - DNA, 25 bp, Homo sapien
ccaggtattcactattaacagtcag

SEQ ID NO: 766826 - DNA, 25 bp, Homo sapien
ttctccattagtggagtcaacagat

SEQ ID NO: 766827 - DNA, 25 bp, Homo sapien
taaacttctccattagtggagtcaa

SEQ ID NO: 766828 - DNA, 25 bp, Homo sapien
tccattagtggagtcaacagattcc

SEQ ID NO: 766829 - DNA, 25 bp, Homo sapien
acttctccattagtggagtcaacag

SEQ ID NO: 766830 - DNA, 25 bp, Homo sapien
gacagtctgctagagaggcttgcct

SEQ ID NO: 766831 - DNA, 25 bp, Homo sapien
agacagtctgctagagaggcttgcc

SEQ ID NO: 766832 - DNA, 25 bp, Homo sapien
aagggacaactgagggctggcagga

SEQ ID NO: 766833 - DNA, 25 bp, Homo sapien
gacaactgagggctggcaggaatgt

SEQ ID NO: 766834 - DNA, 25 bp, Homo sapien
agggacaactgagggctggcaggaa

SEQ ID NO: 766835 - DNA, 25 bp, Homo sapien
cttttgtaagggacaactgagggct

SEQ ID NO: 766836 - DNA, 25 bp, Homo sapien
ctttgagcatacgttctgaagcagc

SEQ ID NO: 766837 - DNA, 25 bp, Homo sapien
agcatacgttctgaagcagctggga

SEQ ID NO: 766838 - DNA, 25 bp, Homo sapien
cagctgggatgaacggaaaaacttc

SEQ ID NO: 766839 - DNA, 25 bp, Homo sapien
ccattcgatgaaggaaagtacggac

SEQ ID NO: 766840 - DNA, 25 bp, Homo sapien
gggcatgaacatctgttgtaaaaac

SEQ ID NO: 766841 - DNA, 25 bp, Homo sapien
ggcatgaacatctgttgtaaaaacg

SEQ ID NO: 766842 - DNA, 25 bp, Homo sapien
gcatgaacatctgttgtaaaaacgg

SEQ ID NO: 766843 - DNA, 25 bp, Homo sapien
gatttgctataacttcactcatccc

SEQ ID NO: 766844 - DNA, 25 bp, Homo sapien
gaaagcaaagtaactcctccacaac

SEQ ID NO: 766845 - DNA, 25 bp, Homo sapien
gcctgtgactgtttgcaggaaagca

SEQ ID NO: 766846 - DNA, 25 bp, Homo sapien
attttgtgcagcttgatttgctata

SEQ ID NO: 766847 - DNA, 25 bp, Homo sapien
ttgggtaacagtaaccagcactcta

SEQ ID NO: 766848 - DNA, 25 bp, Homo sapien
cttgggtaacagtaaccagcactct

SEQ ID NO: 766849 - DNA, 25 bp, Homo sapien
tgggtaacagtaaccagcactctac

SEQ ID NO: 766850 - DNA, 25 bp, Homo sapien
attggatctggatattcaactgctc

SEQ ID NO: 766851 - DNA, 25 bp, Homo sapien
atgttttctgtgcaattggatctgg

SEQ ID NO: 766852 - DNA, 25 bp, Homo sapien
ctttgagaggatgataaaacatgtt

SEQ ID NO: 766853 - DNA, 25 bp, Homo sapien
tctgtgcaattggatctggatattc

SEQ ID NO: 766854 - DNA, 25 bp, Homo sapien
aaatcagcaaatcccactggtccat

SEQ ID NO: 766855 - DNA, 25 bp, Homo sapien
acaaaatcagcaaatcccactggtc

SEQ ID NO: 766856 - DNA, 25 bp, Homo sapien
cagcaaatcccactggtccatcttt

SEQ ID NO: 766857 - DNA, 25 bp, Homo sapien
aaatcccactggtccatctttacct

SEQ ID NO: 766858 - DNA, 25 bp, Homo sapien
caggtattcttgttgaagatactga

SEQ ID NO: 766859 - DNA, 25 bp, Homo sapien
gagggcaggtattcttgttgaagat

SEQ ID NO: 766860 - DNA, 25 bp, Homo sapien
tatttctggagctacttgcaaggag

SEQ ID NO: 766861 - DNA, 25 bp, Homo sapien
tttgagatgaattgttttcagtgtc

SEQ ID NO: 766862 - DNA, 25 bp, Homo sapien
tgtactgttttctactgctatagtc

SEQ ID NO: 766863 - DNA, 25 bp, Homo sapien
aagtgtactgttttctactgctata

SEQ ID NO: 766864 - DNA, 25 bp, Homo sapien
gaaatccagtcaatagggctttgct

SEQ ID NO: 766865 - DNA, 25 bp, Homo sapien
ttttgattgttgtattccccccata

SEQ ID NO: 766866 - DNA, 25 bp, Homo sapien
acgccctcagggagtagcctggcat

SEQ ID NO: 766867 - DNA, 25 bp, Homo sapien
gtccacgtgggtgatgacgccctca

SEQ ID NO: 766868 - DNA, 25 bp, Homo sapien
gacgccctcagggagtagcctggca

SEQ ID NO: 766869 - DNA, 25 bp, Homo sapien
atttacccagttctctacaggccac

SEQ ID NO: 766870 - DNA, 25 bp, Homo sapien
ctacaggccacaggagacagccggt

SEQ ID NO: 766871 - DNA, 25 bp, Homo sapien
cagaggctcgtgtatttacccagtt

SEQ ID NO: 766872 - DNA, 25 bp, Homo sapien
ccacaggagacagccggttgctggc

SEQ ID NO: 766873 - DNA, 25 bp, Homo sapien
cttttgttggtggtgaaatgtcaat

SEQ ID NO: 766874 - DNA, 25 bp, Homo sapien
ttgttggtggtgaaatgtcaatctc

SEQ ID NO: 766875 - DNA, 25 bp, Homo sapien
gttggtggtgaaatgtcaatctccc

SEQ ID NO: 766876 - DNA, 25 bp, Homo sapien
ttttgttggtggtgaaatgtcaatc

SEQ ID NO: 766877 - DNA, 25 bp, Homo sapien
gccagccgcattagccaaggtggtt

SEQ ID NO: 766878 - DNA, 25 bp, Homo sapien
tgctagttgccctgcattacactag

SEQ ID NO: 766879 - DNA, 25 bp, Homo sapien
agctctgcctgagaggtgttgctag

SEQ ID NO: 766880 - DNA, 25 bp, Homo sapien
gaaggtgatcttatacttactgcca

SEQ ID NO: 766881 - DNA, 25 bp, Homo sapien
cttccactgaagatgtagcccgcct

SEQ ID NO: 766882 - DNA, 25 bp, Homo sapien
tccactgaagatgtagcccgccttc

SEQ ID NO: 766883 - DNA, 25 bp, Homo sapien
cactgaagatgtagcccgccttctt

SEQ ID NO: 766884 - DNA, 25 bp, Homo sapien
agatgtagcccgccttcttcagggt

SEQ ID NO: 766885 - DNA, 25 bp, Homo sapien
gctgatgagtaagggctgatttctt

SEQ ID NO: 766886 - DNA, 25 bp, Homo sapien
tccagttggaaccattggctgatga

SEQ ID NO: 766887 - DNA, 25 bp, Homo sapien
tatgtgattggagcatcccgagagc

SEQ ID NO: 766888 - DNA, 25 bp, Homo sapien
atcatccatgacgagcacctgcctt

SEQ ID NO: 766889 - DNA, 25 bp, Homo sapien
ctcagccaccggcagaacttcctgc

SEQ ID NO: 766890 - DNA, 25 bp, Homo sapien
tcagccaccggcagaacttcctgca

SEQ ID NO: 766891 - DNA, 25 bp, Homo sapien
cagccaccggcagaacttcctgcat

SEQ ID NO: 766892 - DNA, 25 bp, Homo sapien
tgtctaccctcatgttgcagccttg

SEQ ID NO: 766893 - DNA, 25 bp, Homo sapien
tgcccaaatttgtctaccctcatgt

SEQ ID NO: 766894 - DNA, 25 bp, Homo sapien
tcacacccttcaccaatgtcccatc

SEQ ID NO: 766895 - DNA, 25 bp, Homo sapien
tcttgcaccattctgcccaaatttg

SEQ ID NO: 766896 - DNA, 25 bp, Homo sapien
gggaacacagccacagagcgaggtt

SEQ ID NO: 766897 - DNA, 25 bp, Homo sapien
cagagcgaggttccacattcctcca

SEQ ID NO: 766898 - DNA, 25 bp, Homo sapien
cagccacagagcgaggttccacatt

SEQ ID NO: 766899 - DNA, 25 bp, Homo sapien
gaacacagccacagagcgaggttcc

SEQ ID NO: 766900 - DNA, 25 bp, Homo sapien
gactggcaggttgccgggcctcgtg

SEQ ID NO: 766901 - DNA, 25 bp, Homo sapien
agctgccaacttggcaggttgtttg

SEQ ID NO: 766902 - DNA, 25 bp, Homo sapien
tggcaggttgccgggcctcgtgtgg

SEQ ID NO: 766903 - DNA, 25 bp, Homo sapien
tgactggcaggttgccgggcctcgt

SEQ ID NO: 766904 - DNA, 25 bp, Homo sapien
atggtgggaggtgggcttttaccag

SEQ ID NO: 766905 - DNA, 25 bp, Homo sapien
tcctccatggtgggaggtgggcttt

SEQ ID NO: 766906 - DNA, 25 bp, Homo sapien
tgtccagcagggactccccttaggg

SEQ ID NO: 766907 - DNA, 25 bp, Homo sapien
ctccatggtgggaggtgggctttta

SEQ ID NO: 766908 - DNA, 25 bp, Homo sapien
tgccgcttgctgaagctcatgacca

SEQ ID NO: 766909 - DNA, 25 bp, Homo sapien
tgaagctcatgaccaccactcatgg

SEQ ID NO: 766910 - DNA, 25 bp, Homo sapien
gcttgctgaagctcatgaccaccac

SEQ ID NO: 766911 - DNA, 25 bp, Homo sapien
aagctcatgaccaccactcatgggc

SEQ ID NO: 766912 - DNA, 25 bp, Homo sapien
gtggtacttctgtgtctcattgggc

SEQ ID NO: 766913 - DNA, 25 bp, Homo sapien
aaggccaggtcgtggtacttctgtg

SEQ ID NO: 766914 - DNA, 25 bp, Homo sapien
gtcgtggtacttctgtgtctcattg

SEQ ID NO: 766915 - DNA, 25 bp, Homo sapien
caggtcgtggtacttctgtgtctca

SEQ ID NO: 766916 - DNA, 25 bp, Homo sapien
tcggtccttgttgcaagtgggccac

SEQ ID NO: 766917 - DNA, 25 bp, Homo sapien
gagcccttgtacagtcctgctagcc

SEQ ID NO: 766918 - DNA, 25 bp, Homo sapien
ctagcccctggcttgtgggcttggc

SEQ ID NO: 766919 - DNA, 25 bp, Homo sapien
gcctctgagctggacttctttcggt

SEQ ID NO: 766920 - DNA, 25 bp, Homo sapien
tgggctcctcgtcactcgctgtgtc

SEQ ID NO: 766921 - DNA, 25 bp, Homo sapien
tcgctgtgtcctcactggccatgtg

SEQ ID NO: 766922 - DNA, 25 bp, Homo sapien
accatgggctcctcgtcactcgctg

SEQ ID NO: 766923 - DNA, 25 bp, Homo sapien
catgggctcctcgtcactcgctgtg

SEQ ID NO: 766924 - DNA, 25 bp, Homo sapien
cctgagcccgtcctcagcttctccc

SEQ ID NO: 766925 - DNA, 25 bp, Homo sapien
ctccagttccctgagcccgtcctca

SEQ ID NO: 766926 - DNA, 25 bp, Homo sapien
agttccctgagcccgtcctcagctt

SEQ ID NO: 766927 - DNA, 25 bp, Homo sapien
ctgagcccgtcctcagcttctccca

SEQ ID NO: 766928 - DNA, 25 bp, Homo sapien
ggatgtgtgcatagtgggcctggag

SEQ ID NO: 766929 - DNA, 25 bp, Homo sapien
cttggaggggaggatgtgtgcatag

SEQ ID NO: 766930 - DNA, 25 bp, Homo sapien
gaggatgtgtgcatagtgggcctgg

SEQ ID NO: 766931 - DNA, 25 bp, Homo sapien
gggaggatgtgtgcatagtgggcct

SEQ ID NO: 766932 - DNA, 25 bp, Homo sapien
agctctggcggtagaacagcctctg

SEQ ID NO: 766933 - DNA, 25 bp, Homo sapien
gtgagtccctgcctcacactggctc

SEQ ID NO: 766934 - DNA, 25 bp, Homo sapien
ccgctggcaccctgcgcagaggcgt

SEQ ID NO: 766935 - DNA, 25 bp, Homo sapien
gttgatgcccaactcatgccgctgg

SEQ ID NO: 766936 - DNA, 25 bp, Homo sapien
ggcggccttggtcggcccacagctt

SEQ ID NO: 766937 - DNA, 25 bp, Homo sapien
tgaagtcggcgtctcccggccctgc

SEQ ID NO: 766938 - DNA, 25 bp, Homo sapien
cctgaagtcggcgtctcccggccct

SEQ ID NO: 766939 - DNA, 25 bp, Homo sapien
gcctgcccatctcctggcggccttg

SEQ ID NO: 766940 - DNA, 25 bp, Homo sapien
agcggggcctgctgacgctcttctg

SEQ ID NO: 766941 - DNA, 25 bp, Homo sapien
gcggggcctgctgacgctcttctgc

SEQ ID NO: 766942 - DNA, 25 bp, Homo sapien
cggggcctgctgacgctcttctgct

SEQ ID NO: 766943 - DNA, 25 bp, Homo sapien
ggcggccttggtcggcccacagctt

SEQ ID NO: 766944 - DNA, 25 bp, Homo sapien
gcctgcccatctcctggcggccttg

SEQ ID NO: 766945 - DNA, 25 bp, Homo sapien
tgaagtcggcgtctcccggccctgc

SEQ ID NO: 766946 - DNA, 25 bp, Homo sapien
cctgaagtcggcgtctcccggccct

SEQ ID NO: 766947 - DNA, 25 bp, Homo sapien
gcggggcctgctgacgctcttctgc

SEQ ID NO: 766948 - DNA, 25 bp, Homo sapien
agcggggcctgctgacgctcttctg

SEQ ID NO: 766949 - DNA, 25 bp, Homo sapien
cggggcctgctgacgctcttctgct

SEQ ID NO: 766950 - DNA, 25 bp, Homo sapien
gcctgcccatctcctggcggccttg

SEQ ID NO: 766951 - DNA, 25 bp, Homo sapien
ggcggccttggtcggcccacagctt

SEQ ID NO: 766952 - DNA, 25 bp, Homo sapien
ctggcggccttggtcggcccacagc

SEQ ID NO: 766953 - DNA, 25 bp, Homo sapien
tcctggcggccttggtcggcccaca

SEQ ID NO: 766954 - DNA, 25 bp, Homo sapien
gtgagtccctgcctcacactggctc

SEQ ID NO: 766955 - DNA, 25 bp, Homo sapien
gttgatgcccaactcatgccgctgg

SEQ ID NO: 766956 - DNA, 25 bp, Homo sapien
agctctggcggtagaacagcctctg

SEQ ID NO: 766957 - DNA, 25 bp, Homo sapien
ccgctggcaccctgcgcagaggcgt

SEQ ID NO: 766958 - DNA, 25 bp, Homo sapien
gaattgtctccccagaagtaagatt

SEQ ID NO: 766959 - DNA, 25 bp, Homo sapien
ttgtctccccagaagtaagattact

SEQ ID NO: 766960 - DNA, 25 bp, Homo sapien
tgtctccccagaagtaagattactg

SEQ ID NO: 766961 - DNA, 25 bp, Homo sapien
ctattaaacatgtagaatgctttcc

SEQ ID NO: 766962 - DNA, 25 bp, Homo sapien
gcattttccttacttttattgtcag

SEQ ID NO: 766963 - DNA, 25 bp, Homo sapien
gtagaatgctttcctaatttctctt

SEQ ID NO: 766964 - DNA, 25 bp, Homo sapien
cttttattgtcagaaactccagaaa

SEQ ID NO: 766965 - DNA, 25 bp, Homo sapien
tatgtcatatcatgacatactgccg

SEQ ID NO: 766966 - DNA, 25 bp, Homo sapien
tgtcatatcatgacatactgccgct

SEQ ID NO: 766967 - DNA, 25 bp, Homo sapien
tccaaggtatgtcatatcatgacat

SEQ ID NO: 766968 - DNA, 25 bp, Homo sapien
tcatatcatgacatactgccgctgc

SEQ ID NO: 766969 - DNA, 25 bp, Homo sapien
caaataatagtgcatgcatcaaatg

SEQ ID NO: 766970 - DNA, 25 bp, Homo sapien
caatgggaagctcttttggaggctg

SEQ ID NO: 766971 - DNA, 25 bp, Homo sapien
tagtgcatgcatcaaatgcaatggg

SEQ ID NO: 766972 - DNA, 25 bp, Homo sapien
ggaggctgagagaagtttccagtta

SEQ ID NO: 766973 - DNA, 25 bp, Homo sapien
gctgcttcactctgtgaggagttgg

SEQ ID NO: 766974 - DNA, 25 bp, Homo sapien
gagagagatgccttgtagccacctt

SEQ ID NO: 766975 - DNA, 25 bp, Homo sapien
cttgtagccaccttaggatggaggg

SEQ ID NO: 766976 - DNA, 25 bp, Homo sapien
aggtgagggagttttcctgctgctt

SEQ ID NO: 766977 - DNA, 25 bp, Homo sapien
cgctttatccaagattggtgtcata

SEQ ID NO: 766978 - DNA, 25 bp, Homo sapien
tgtttgcgctttatccaagattggt

SEQ ID NO: 766979 - DNA, 25 bp, Homo sapien
tgcgctttatccaagattggtgtca

SEQ ID NO: 766980 - DNA, 25 bp, Homo sapien
tagactacctaatcagtttttagtg

SEQ ID NO: 766981 - DNA, 25 bp, Homo sapien
tcagtcctcaatgcaacagttggga

SEQ ID NO: 766982 - DNA, 25 bp, Homo sapien
gcttttgatgaagtagcctgcacta

SEQ ID NO: 766983 - DNA, 25 bp, Homo sapien
caacagtctgttgaggagaatgctg

SEQ ID NO: 766984 - DNA, 25 bp, Homo sapien
tattggaccccaagaggtctgcttt

SEQ ID NO: 766985 - DNA, 25 bp, Homo sapien
caaaagatctggagtgaaatgagag

SEQ ID NO: 766986 - DNA, 25 bp, Homo sapien
taaggattaagcaccggtcaaaagc

SEQ ID NO: 766987 - DNA, 25 bp, Homo sapien
tgtgtccagtgagatgtaagccctg

SEQ ID NO: 766988 - DNA, 25 bp, Homo sapien
tgtgagcactggttcaaggctttgt

SEQ ID NO: 766989 - DNA, 25 bp, Homo sapien
gagaaaagtatgacaaccagttaaa

SEQ ID NO: 766990 - DNA, 25 bp, Homo sapien
tcttatgttgagaaaagtatgacaa

SEQ ID NO: 766991 - DNA, 25 bp, Homo sapien
tatttttagtaagaattcagccatg

SEQ ID NO: 766992 - DNA, 25 bp, Homo sapien
cattttttataattgtagtgtttct

SEQ ID NO: 766993 - DNA, 25 bp, Homo sapien
tttcacaattgtaggatttccttcc

SEQ ID NO: 766994 - DNA, 25 bp, Homo sapien
acaattgtaggatttccttcccata

SEQ ID NO: 766995 - DNA, 25 bp, Homo sapien
gatttccttcccatatgaattctct

SEQ ID NO: 766996 - DNA, 25 bp, Homo sapien
aggatttccttcccatatgaattct

SEQ ID NO: 766997 - DNA, 25 bp, Homo sapien
ctatttttagtcaggattgagccat

SEQ ID NO: 766998 - DNA, 25 bp, Homo sapien
tcttcacgtgtagggtttcctttca

SEQ ID NO: 766999 - DNA, 25 bp, Homo sapien
tctcctatttttagtcaggattgag

SEQ ID NO: 767000 - DNA, 25 bp, Homo sapien
tgaattctcctatttttagtcagga

SEQ ID NO: 767001 - DNA, 25 bp, Homo sapien
tgaccattgatcaaatacttaccac

SEQ ID NO: 767002 - DNA, 25 bp, Homo sapien
tgccacattctttactttggtaaaa

SEQ ID NO: 767003 - DNA, 25 bp, Homo sapien
aattataggggctctctatcatgtg

SEQ ID NO: 767004 - DNA, 25 bp, Homo sapien
taaaacctttgctatgttccttaca

SEQ ID NO: 767005 - DNA, 25 bp, Homo sapien
tctgggcattccacgtaggacgctt

SEQ ID NO: 767006 - DNA, 25 bp, Homo sapien
tgtagcccctgcgtaggaatgtggt

SEQ ID NO: 767007 - DNA, 25 bp, Homo sapien
gccccttcggacatgcgcagtgtag

SEQ ID NO: 767008 - DNA, 25 bp, Homo sapien
tggttaacggccagatgtctgacag

SEQ ID NO: 767009 - DNA, 25 bp, Homo sapien
caccaacgggctgagaaccgttaag

SEQ ID NO: 767010 - DNA, 25 bp, Homo sapien
gagctaccgtttccagcgtgcctgg

SEQ ID NO: 767011 - DNA, 25 bp, Homo sapien
gctgagaaccgttaagagctaccgt

SEQ ID NO: 767012 - DNA, 25 bp, Homo sapien
agagctaccgtttccagcgtgcctg

SEQ ID NO: 767013 - DNA, 25 bp, Homo sapien
aaggaggtgcctgcgatcagtagcc

SEQ ID NO: 767014 - DNA, 25 bp, Homo sapien
gcaaggaggtgcctgcgatcagtag

SEQ ID NO: 767015 - DNA, 25 bp, Homo sapien
catggcaaggaggtgcctgcgatca

SEQ ID NO: 767016 - DNA, 25 bp, Homo sapien
tcccatggcaaggaggtgcctgcga

SEQ ID NO: 767017 - DNA, 25 bp, Homo sapien
caacatccgtgaaaaaggtgctggt

SEQ ID NO: 767018 - DNA, 25 bp, Homo sapien
gattttagcatctcctgcgtaaacc

SEQ ID NO: 767019 - DNA, 25 bp, Homo sapien
gccgcctcaacatccgtgaaaaagg

SEQ ID NO: 767020 - DNA, 25 bp, Homo sapien
caccccctgcgaagctttgaacttg

SEQ ID NO: 767021 - DNA, 25 bp, Homo sapien
agctggagcactatctgttcttgaa

SEQ ID NO: 767022 - DNA, 25 bp, Homo sapien
gcccagtcaggcctcagttgagatg

SEQ ID NO: 767023 - DNA, 25 bp, Homo sapien
tcttgaatatcaggttgccatctgt

SEQ ID NO: 767024 - DNA, 25 bp, Homo sapien
caatgacgtgccaatgaaaatgcct

SEQ ID NO: 767025 - DNA, 25 bp, Homo sapien
caaagactccccaagtggtccacac

SEQ ID NO: 767026 - DNA, 25 bp, Homo sapien
atacttcatcttgccacgtccatag

SEQ ID NO: 767027 - DNA, 25 bp, Homo sapien
tagatgccgcaaggttcttgttcct

SEQ ID NO: 767028 - DNA, 25 bp, Homo sapien
ctgatgagcccatgtgtaattgatc

SEQ ID NO: 767029 - DNA, 25 bp, Homo sapien
tcttgccacgtccatagatgccgca

SEQ ID NO: 767030 - DNA, 25 bp, Homo sapien
cctcgaatttatccagtcataacat

SEQ ID NO: 767031 - DNA, 25 bp, Homo sapien
ggagcgagcaatgcttctgaactcc

SEQ ID NO: 767032 - DNA, 25 bp, Homo sapien
cgagcaatgcttctgaactccacgc

SEQ ID NO: 767033 - DNA, 25 bp, Homo sapien
cagaaaacggagatagacaacctcg

SEQ ID NO: 767034 - DNA, 25 bp, Homo sapien
tgaaataggctctggcaggatccca

SEQ ID NO: 767035 - DNA, 25 bp, Homo sapien
tccggatctcgccaacaggtagaga

SEQ ID NO: 767036 - DNA, 25 bp, Homo sapien
ccatttgacggtgagtctgcagcca

SEQ ID NO: 767037 - DNA, 25 bp, Homo sapien
catcaacatagatggcgggcacact

SEQ ID NO: 767038 - DNA, 25 bp, Homo sapien
gggccaagccagtgatgttaccagg

SEQ ID NO: 767039 - DNA, 25 bp, Homo sapien
tcaactcaaggaagcagcgatggct

SEQ ID NO: 767040 - DNA, 25 bp, Homo sapien
gggcaagccccttaaagcagtgtgt

SEQ ID NO: 767041 - DNA, 25 bp, Homo sapien
tcctcggcaggtccaaaggacagaa

SEQ ID NO: 767042 - DNA, 25 bp, Homo sapien
cccagcggctcaagatgtggcaagc

SEQ ID NO: 767043 - DNA, 25 bp, Homo sapien
gaaaacccagcagtagggccgtaga

SEQ ID NO: 767044 - DNA, 25 bp, Homo sapien
taaaggagtcaagacagcacccaga

SEQ ID NO: 767045 - DNA, 25 bp, Homo sapien
tgtcaatgcggaagctggactcaga

SEQ ID NO: 767046 - DNA, 25 bp, Homo sapien
gatcagcagcctgtaggtgtttcct

SEQ ID NO: 767047 - DNA, 25 bp, Homo sapien
atagctgcgagcaccaacagggaca

SEQ ID NO: 767048 - DNA, 25 bp, Homo sapien
aggtgctggactcaccccagtaaca

SEQ ID NO: 767049 - DNA, 25 bp, Homo sapien
tttcctcagtgtcagaccaggtggg

SEQ ID NO: 767050 - DNA, 25 bp, Homo sapien
ctgagctcagaaagatgcactatga

SEQ ID NO: 767051 - DNA, 25 bp, Homo sapien
caaggtggtctctagcaccaggtcc

SEQ ID NO: 767052 - DNA, 25 bp, Homo sapien
ctgggctatggacgatgatgtgatt

SEQ ID NO: 767053 - DNA, 25 bp, Homo sapien
aagatgcactatgaccactgacccc

SEQ ID NO: 767054 - DNA, 25 bp, Homo sapien
cattgaaagtgcacagaaccctgtc

SEQ ID NO: 767055 - DNA, 25 bp, Homo sapien
tgctttaacccagagggacggccaa

SEQ ID NO: 767056 - DNA, 25 bp, Homo sapien
gacaagtgtgcacaggagacccagt

SEQ ID NO: 767057 - DNA, 25 bp, Homo sapien
caagtgcatgctcatagccagggca

SEQ ID NO: 767058 - DNA, 25 bp, Homo sapien
cacaacctgagctcttgcccactct

SEQ ID NO: 767059 - DNA, 25 bp, Homo sapien
tgagctcttgcccactcttcgtgaa

SEQ ID NO: 767060 - DNA, 25 bp, Homo sapien
aacctgagctcttgcccactcttcg

SEQ ID NO: 767061 - DNA, 25 bp, Homo sapien
ctgagctcttgcccactcttcgtga

SEQ ID NO: 767062 - DNA, 25 bp, Homo sapien
tacagcaaaaacgtcagggcatcag

SEQ ID NO: 767063 - DNA, 25 bp, Homo sapien
gacatactgtcactaggagaggcca

SEQ ID NO: 767064 - DNA, 25 bp, Homo sapien
ggaacaccttctggacatcccatag

SEQ ID NO: 767065 - DNA, 25 bp, Homo sapien
tcttcagggtttaggacaggagccc

SEQ ID NO: 767066 - DNA, 25 bp, Homo sapien
cttccctgaggcctgctcgggaaag

SEQ ID NO: 767067 - DNA, 25 bp, Homo sapien
ggatggcccctagcctggtctgggc

SEQ ID NO: 767068 - DNA, 25 bp, Homo sapien
taagacctaggtcagatgggaatgg

SEQ ID NO: 767069 - DNA, 25 bp, Homo sapien
actgtacgttagtactccagtttca

SEQ ID NO: 767070 - DNA, 25 bp, Homo sapien
gattcaacatatagagatgggcatt

SEQ ID NO: 767071 - DNA, 25 bp, Homo sapien
cccatgtgtgggcttatcagggaag

SEQ ID NO: 767072 - DNA, 25 bp, Homo sapien
tcaagacttacaagcatgaccctca

SEQ ID NO: 767073 - DNA, 25 bp, Homo sapien
tctgccccagaggtccttgattcaa

SEQ ID NO: 767074 - DNA, 25 bp, Homo sapien
tcattggcagcaaaccctgatattt

SEQ ID NO: 767075 - DNA, 25 bp, Homo sapien
tccgttcattggcagcaaaccctga

SEQ ID NO: 767076 - DNA, 25 bp, Homo sapien
ggaaagtccctggtgaagtccgctc

SEQ ID NO: 767077 - DNA, 25 bp, Homo sapien
caggcccagcagtaatgagttgttc

SEQ ID NO: 767078 - DNA, 25 bp, Homo sapien
agggtataggagcttctatcactgc

SEQ ID NO: 767079 - DNA, 25 bp, Homo sapien
gcttagggtataggagcttctatca

SEQ ID NO: 767080 - DNA, 25 bp, Homo sapien
tagggtataggagcttctatcactg

SEQ ID NO: 767081 - DNA, 25 bp, Homo sapien
cttagggtataggagcttctatcac

SEQ ID NO: 767082 - DNA, 25 bp, Homo sapien
caccaaatggctgaactgctttttc

SEQ ID NO: 767083 - DNA, 25 bp, Homo sapien
gagggctgactctatctatgtttgg

SEQ ID NO: 767084 - DNA, 25 bp, Homo sapien
tgaatccaggattgcagaaaccgtg

SEQ ID NO: 767085 - DNA, 25 bp, Homo sapien
gaactcttcctatgttggtaaatgg

SEQ ID NO: 767086 - DNA, 25 bp, Homo sapien
acagaatcttgccccgtgtgcctga

SEQ ID NO: 767087 - DNA, 25 bp, Homo sapien
agaatcttgccccgtgtgcctgagg

SEQ ID NO: 767088 - DNA, 25 bp, Homo sapien
cacagaatcttgccccgtgtgcctg

SEQ ID NO: 767089 - DNA, 25 bp, Homo sapien
cagaatcttgccccgtgtgcctgag

SEQ ID NO: 767090 - DNA, 25 bp, Homo sapien
tcagcagagaggcttcggtcggtcc

SEQ ID NO: 767091 - DNA, 25 bp, Homo sapien
gcacagagagtaacatggtcaccac

SEQ ID NO: 767092 - DNA, 25 bp, Homo sapien
tggatgctatatggtcagaccctgc

SEQ ID NO: 767093 - DNA, 25 bp, Homo sapien
gagatgagtccaaccctatgaggag

SEQ ID NO: 767094 - DNA, 25 bp, Homo sapien
gagtcttgagctttcactgttaata

SEQ ID NO: 767095 - DNA, 25 bp, Homo sapien
cactgttaataatgctgacaaacag

SEQ ID NO: 767096 - DNA, 25 bp, Homo sapien
ccagctgagtctttggagtgagtcc

SEQ ID NO: 767097 - DNA, 25 bp, Homo sapien
gacaaacagtcagtcacccagctga

SEQ ID NO: 767098 - DNA, 25 bp, Homo sapien
ttcatcagcataatagcaattttca

SEQ ID NO: 767099 - DNA, 25 bp, Homo sapien
gataaatacatgatatttcatcagc

SEQ ID NO: 767100 - DNA, 25 bp, Homo sapien
gatatttcatcagcataatagcaat

SEQ ID NO: 767101 - DNA, 25 bp, Homo sapien
tatttcatcagcataatagcaattt

SEQ ID NO: 767102 - DNA, 25 bp, Homo sapien
gaagaaagatgttggctgagattcc

SEQ ID NO: 767103 - DNA, 25 bp, Homo sapien
tgccagcttgaaaataaaaggcctt

SEQ ID NO: 767104 - DNA, 25 bp, Homo sapien
agaatgtgaaaatgtgccagagagg

SEQ ID NO: 767105 - DNA, 25 bp, Homo sapien
gtgaaaatgtgccagagaggaagaa

SEQ ID NO: 767106 - DNA, 25 bp, Homo sapien
acagatgatcaggtcatggttttta

SEQ ID NO: 767107 - DNA, 25 bp, Homo sapien
tcaggtcatggtttttaggcttgtg

SEQ ID NO: 767108 - DNA, 25 bp, Homo sapien
gatgatcaggtcatggtttttaggc

SEQ ID NO: 767109 - DNA, 25 bp, Homo sapien
gcaaaggccaagtgacagatgatca

SEQ ID NO: 767110 - DNA, 25 bp, Homo sapien
aacacgtctggagacaataactctg

SEQ ID NO: 767111 - DNA, 25 bp, Homo sapien
gaaatttcagtgattcaaacacgtc

SEQ ID NO: 767112 - DNA, 25 bp, Homo sapien
agtgattcaaacacgtctggagaca

SEQ ID NO: 767113 - DNA, 25 bp, Homo sapien
gtctggagacaataactctgctgca

SEQ ID NO: 767114 - DNA, 25 bp, Homo sapien
taattgtatgtgtagaacacagcct

SEQ ID NO: 767115 - DNA, 25 bp, Homo sapien
aattgtatgtgtagaacacagcctt

SEQ ID NO: 767116 - DNA, 25 bp, Homo sapien
ttgtatgtgtagaacacagccttac

SEQ ID NO: 767117 - DNA, 25 bp, Homo sapien
ctaattgtatgtgtagaacacagcc

SEQ ID NO: 767118 - DNA, 25 bp, Homo sapien
agagtaaacccaggatattgtgttt

SEQ ID NO: 767119 - DNA, 25 bp, Homo sapien
gacattcagtattatctgggtcaca

SEQ ID NO: 767120 - DNA, 25 bp, Homo sapien
cctacaatgtaacttatcatgtcac

SEQ ID NO: 767121 - DNA, 25 bp, Homo sapien
aacaaacagccttctgatgatgaca

SEQ ID NO: 767122 - DNA, 25 bp, Homo sapien
catgtaggcacttgagagcagcatg

SEQ ID NO: 767123 - DNA, 25 bp, Homo sapien
tgtaggcacttgagagcagcatgat

SEQ ID NO: 767124 - DNA, 25 bp, Homo sapien
agcatgattcctacaaggaagacat

SEQ ID NO: 767125 - DNA, 25 bp, Homo sapien
gcagcatgattcctacaaggaagac

SEQ ID NO: 767126 - DNA, 25 bp, Homo sapien
taaaaagctagtgctgtgaaggtgc

SEQ ID NO: 767127 - DNA, 25 bp, Homo sapien
tgctgggagcgcctctgatgcctgg

SEQ ID NO: 767128 - DNA, 25 bp, Homo sapien
ggtgctgggagcgcctctgatgcct

SEQ ID NO: 767129 - DNA, 25 bp, Homo sapien
cttaataaaaagctagtgctgtgaa

SEQ ID NO: 767130 - DNA, 25 bp, Homo sapien
cagcagcaagatggttttggtggcc

SEQ ID NO: 767131 - DNA, 25 bp, Homo sapien
atggttttggtggcccttttctctg

SEQ ID NO: 767132 - DNA, 25 bp, Homo sapien
gcagcaagatggttttggtggccct

SEQ ID NO: 767133 - DNA, 25 bp, Homo sapien
agcaagatggttttggtggcccttt

SEQ ID NO: 767134 - DNA, 25 bp, Homo sapien
accataaacttgtggacactgtaga

SEQ ID NO: 767135 - DNA, 25 bp, Homo sapien
cattgtggaggatgagacaagtcca

SEQ ID NO: 767136 - DNA, 25 bp, Homo sapien
ctgtagatgacaggactgaataccc

SEQ ID NO: 767137 - DNA, 25 bp, Homo sapien
aaaatggatggcacttccaatgaac

SEQ ID NO: 767138 - DNA, 25 bp, Homo sapien
tgcaattgcagaactggatacgctg

SEQ ID NO: 767139 - DNA, 25 bp, Homo sapien
tttgatgatgcaattgcagaactgg

SEQ ID NO: 767140 - DNA, 25 bp, Homo sapien
tgatgcaattgcagaactggatacg

SEQ ID NO: 767141 - DNA, 25 bp, Homo sapien
caattgcagaactggatacgctgag

SEQ ID NO: 767142 - DNA, 25 bp, Homo sapien
cccagattgagatgccaccattttt

SEQ ID NO: 767143 - DNA, 25 bp, Homo sapien
tttgctgcccggacatggaaccaga

SEQ ID NO: 767144 - DNA, 25 bp, Homo sapien
agagagtcagagacactatctgctt

SEQ ID NO: 767145 - DNA, 25 bp, Homo sapien
agacactatctgcttccgtccgtcg

SEQ ID NO: 767146 - DNA, 25 bp, Homo sapien
gataattctatggccgcatccttca

SEQ ID NO: 767147 - DNA, 25 bp, Homo sapien
tatggccgcatccttcaatgttcgc

SEQ ID NO: 767148 - DNA, 25 bp, Homo sapien
gccgcatccttcaatgttcgcagtt

SEQ ID NO: 767149 - DNA, 25 bp, Homo sapien
ttctatggccgcatccttcaatgtt

SEQ ID NO: 767150 - DNA, 25 bp, Homo sapien
cactgagcaggattcagacattccc

SEQ ID NO: 767151 - DNA, 25 bp, Homo sapien
ccctatacaaattccactgagcagg

SEQ ID NO: 767152 - DNA, 25 bp, Homo sapien
caggattcagacattcccactcctt

SEQ ID NO: 767153 - DNA, 25 bp, Homo sapien
atacaaattccactgagcaggattc

SEQ ID NO: 767154 - DNA, 25 bp, Homo sapien
gatgagggttagagacagcaagacc

SEQ ID NO: 767155 - DNA, 25 bp, Homo sapien
gacagcaagaccggttttgttagaa

SEQ ID NO: 767156 - DNA, 25 bp, Homo sapien
ttgactactgtctcacgtctcctca

SEQ ID NO: 767157 - DNA, 25 bp, Homo sapien
taaggcagcagatcagatgagggtt

SEQ ID NO: 767158 - DNA, 25 bp, Homo sapien
caggaaggatcccaacactgggatc

SEQ ID NO: 767159 - DNA, 25 bp, Homo sapien
tgaagatactttctaggtccaaggg

SEQ ID NO: 767160 - DNA, 25 bp, Homo sapien
caaggggacggcgttctcgtggagg

SEQ ID NO: 767161 - DNA, 25 bp, Homo sapien
tggaggtttccgatatacagtttgt

SEQ ID NO: 767162 - DNA, 25 bp, Homo sapien
agtccatgaacgcatagccagtctt

SEQ ID NO: 767163 - DNA, 25 bp, Homo sapien
ccatgaacgcatagccagtcttcac

SEQ ID NO: 767164 - DNA, 25 bp, Homo sapien
ctgggcagtccatgaacgcatagcc

SEQ ID NO: 767165 - DNA, 25 bp, Homo sapien
gcagtccatgaacgcatagccagtc

SEQ ID NO: 767166 - DNA, 25 bp, Homo sapien
ctggattatacagcgtcaattcctg

SEQ ID NO: 767167 - DNA, 25 bp, Homo sapien
cgttctggattatacagcgtcaatt

SEQ ID NO: 767168 - DNA, 25 bp, Homo sapien
ttctggattatacagcgtcaattcc

SEQ ID NO: 767169 - DNA, 25 bp, Homo sapien
gtgcgttctggattatacagcgtca

SEQ ID NO: 767170 - DNA, 25 bp, Homo sapien
ctgattgctcaaactgcgggtaggt

SEQ ID NO: 767171 - DNA, 25 bp, Homo sapien
ctcaaactgcgggtaggtaggagtc

SEQ ID NO: 767172 - DNA, 25 bp, Homo sapien
caaactgcgggtaggtaggagtcat

SEQ ID NO: 767173 - DNA, 25 bp, Homo sapien
attgctcaaactgcgggtaggtagg

SEQ ID NO: 767174 - DNA, 25 bp, Homo sapien
gcctggataaacagatgaacagtct

SEQ ID NO: 767175 - DNA, 25 bp, Homo sapien
gatagagcctggataaacagatgaa

SEQ ID NO: 767176 - DNA, 25 bp, Homo sapien
tagagcctggataaacagatgaaca

SEQ ID NO: 767177 - DNA, 25 bp, Homo sapien
ctgatagagcctggataaacagatg

SEQ ID NO: 767178 - DNA, 25 bp, Homo sapien
ccctgcttgccgatgatgacaccga

SEQ ID NO: 767179 - DNA, 25 bp, Homo sapien
ttggccctgcttgccgatgatgaca

SEQ ID NO: 767180 - DNA, 25 bp, Homo sapien
tccggcaaagcgagaaagctgcttg

SEQ ID NO: 767181 - DNA, 25 bp, Homo sapien
tgtgcttggccctgcttgccgatga

SEQ ID NO: 767182 - DNA, 25 bp, Homo sapien
tgacactgtgatataagcttcaagt

SEQ ID NO: 767183 - DNA, 25 bp, Homo sapien
ccagcaacaaaggatgacactgtga

SEQ ID NO: 767184 - DNA, 25 bp, Homo sapien
caaaggatgacactgtgatataagc

SEQ ID NO: 767185 - DNA, 25 bp, Homo sapien
tgtgatataagcttcaagtttaacc

SEQ ID NO: 767186 - DNA, 25 bp, Homo sapien
tgaggtggtccactttgcagagcct

SEQ ID NO: 767187 - DNA, 25 bp, Homo sapien
gtggtccactttgcagagccttctg

SEQ ID NO: 767188 - DNA, 25 bp, Homo sapien
gactgaggtggtccactttgcagag

SEQ ID NO: 767189 - DNA, 25 bp, Homo sapien
ggtggtccactttgcagagccttct

SEQ ID NO: 767190 - DNA, 25 bp, Homo sapien
cccaatgtaaatccaagcaggaact

SEQ ID NO: 767191 - DNA, 25 bp, Homo sapien
gatatattccaaccacattgcccaa

SEQ ID NO: 767192 - DNA, 25 bp, Homo sapien
aactagggagtttcttcttggcatc

SEQ ID NO: 767193 - DNA, 25 bp, Homo sapien
cacattgcccaatgtaaatccaagc

SEQ ID NO: 767194 - DNA, 25 bp, Homo sapien
cttttagttcagatggtaaaggagg

SEQ ID NO: 767195 - DNA, 25 bp, Homo sapien
taatctaacaccataattccagtct

SEQ ID NO: 767196 - DNA, 25 bp, Homo sapien
tctagcaaagaagaggagcactgag

SEQ ID NO: 767197 - DNA, 25 bp, Homo sapien
tagaatcagcatatcccgaaggcag

SEQ ID NO: 767198 - DNA, 25 bp, Homo sapien
gaaacacatcgtagtcagaagcaag

SEQ ID NO: 767199 - DNA, 25 bp, Homo sapien
gactaagaaacacatcgtagtcaga

SEQ ID NO: 767200 - DNA, 25 bp, Homo sapien
gaagcaagattaatgccagaataag

SEQ ID NO: 767201 - DNA, 25 bp, Homo sapien
ccagaataagcagtgaccacttgga

SEQ ID NO: 767202 - DNA, 25 bp, Homo sapien
gcacaatcagtggaacaccaaaaaa

SEQ ID NO: 767203 - DNA, 25 bp, Homo sapien
gtcgtcttaggtgcacaatcagtgg

SEQ ID NO: 767204 - DNA, 25 bp, Homo sapien
tgtctttaccgctctcatccagtcg

SEQ ID NO: 767205 - DNA, 25 bp, Homo sapien
aggatgcagttgttgtctttaccgc

SEQ ID NO: 767206 - DNA, 25 bp, Homo sapien
tatcctgggctctcagaagtgtagt

SEQ ID NO: 767207 - DNA, 25 bp, Homo sapien
tcctgggctctcagaagtgtagttc

SEQ ID NO: 767208 - DNA, 25 bp, Homo sapien
ctatcctgggctctcagaagtgtag

SEQ ID NO: 767209 - DNA, 25 bp, Homo sapien
cctgggctctcagaagtgtagttct

SEQ ID NO: 767210 - DNA, 25 bp, Homo sapien
gtcctggcaggaaagtcgtatcacc

SEQ ID NO: 767211 - DNA, 25 bp, Homo sapien
tgaatactgagcctgagtaggtcaa

SEQ ID NO: 767212 - DNA, 25 bp, Homo sapien
cctgagtaggtcaatgtcccttctg

SEQ ID NO: 767213 - DNA, 25 bp, Homo sapien
gaaagtcgtatcacctagctgctga

SEQ ID NO: 767214 - DNA, 25 bp, Homo sapien
tgggcagaaccaggcaggagagtca

SEQ ID NO: 767215 - DNA, 25 bp, Homo sapien
ctgtgggcagaaccaggcaggagag

SEQ ID NO: 767216 - DNA, 25 bp, Homo sapien
cagaaccaggcaggagagtcacatc

SEQ ID NO: 767217 - DNA, 25 bp, Homo sapien
ggcagaaccaggcaggagagtcaca

SEQ ID NO: 767218 - DNA, 25 bp, Homo sapien
tgaggtgataactcacatacctgga

SEQ ID NO: 767219 - DNA, 25 bp, Homo sapien
gtgaggtgataactcacatacctgg

SEQ ID NO: 767220 - DNA, 25 bp, Homo sapien
ggtgaggtgataactcacatacctg

SEQ ID NO: 767221 - DNA, 25 bp, Homo sapien
caggtgaggtgataactcacatacc

SEQ ID NO: 767222 - DNA, 25 bp, Homo sapien
aaatgtaggatcatgcccattgccc

SEQ ID NO: 767223 - DNA, 25 bp, Homo sapien
gagtctaataacagggcccagaaca

SEQ ID NO: 767224 - DNA, 25 bp, Homo sapien
cacatgcccaagtgtacacaggtca

SEQ ID NO: 767225 - DNA, 25 bp, Homo sapien
aagcccaggcatgagagtcgacatc

SEQ ID NO: 767226 - DNA, 25 bp, Homo sapien
tgatgggaagtgatgagtgaataaa

SEQ ID NO: 767227 - DNA, 25 bp, Homo sapien
gaacagcctttaagcatgcagcaaa

SEQ ID NO: 767228 - DNA, 25 bp, Homo sapien
gggacagaatgtagtcaccagacag

SEQ ID NO: 767229 - DNA, 25 bp, Homo sapien
cctggacctaattgctattctggga

SEQ ID NO: 767230 - DNA, 25 bp, Homo sapien
ccagattggcgggaacgtatgagca

SEQ ID NO: 767231 - DNA, 25 bp, Homo sapien
gtggagtaaaacctggcctgctgag

SEQ ID NO: 767232 - DNA, 25 bp, Homo sapien
gttgattgtgtcaagtcagccagaa

SEQ ID NO: 767233 - DNA, 25 bp, Homo sapien
aagaggtggagtaaaacctggcctg

SEQ ID NO: 767234 - DNA, 25 bp, Homo sapien
gttttctgttgggttgttgattgtg

SEQ ID NO: 767235 - DNA, 25 bp, Homo sapien
gatttcttggattccccctcgtata

SEQ ID NO: 767236 - DNA, 25 bp, Homo sapien
taggacggtgacatttgcgggcaaa

SEQ ID NO: 767237 - DNA, 25 bp, Homo sapien
ccggcacttaacatatctgatttct

SEQ ID NO: 767238 - DNA, 25 bp, Homo sapien
caaacacgaatttgaccctactttg

SEQ ID NO: 767239 - DNA, 25 bp, Homo sapien
tcctcatatgtctgatcaagacagt

SEQ ID NO: 767240 - DNA, 25 bp, Homo sapien
gttaaaaacacagtggaatgtctct

SEQ ID NO: 767241 - DNA, 25 bp, Homo sapien
aacacagtggaatgtctctttgtcc

SEQ ID NO: 767242 - DNA, 25 bp, Homo sapien
gacaatgacttgtctctcctcatat

SEQ ID NO: 767243 - DNA, 25 bp, Homo sapien
atctttggcctcatagtggccactg

SEQ ID NO: 767244 - DNA, 25 bp, Homo sapien
tcatagtggccagtcgaacccatga

SEQ ID NO: 767245 - DNA, 25 bp, Homo sapien
ccagtcgaacccatgatggcctctt

SEQ ID NO: 767246 - DNA, 25 bp, Homo sapien
ttggcctcatagtggccactggaac

SEQ ID NO: 767247 - DNA, 25 bp, Homo sapien
gggccctcattgaggacgcgttgca

SEQ ID NO: 767248 - DNA, 25 bp, Homo sapien
gagaggctgaatggagtaaattcag

SEQ ID NO: 767249 - DNA, 25 bp, Homo sapien
cctcattgaggacgcgttgcacctg

SEQ ID NO: 767250 - DNA, 25 bp, Homo sapien
attgaggacgcgttgcacctggaga

SEQ ID NO: 767251 - DNA, 25 bp, Homo sapien
gaggcctcgctggacacagtcctgt

SEQ ID NO: 767252 - DNA, 25 bp, Homo sapien
ggacacagtcctgtgggccgagtac

SEQ ID NO: 767253 - DNA, 25 bp, Homo sapien
ctggacacagtcctgtgggccgagt

SEQ ID NO: 767254 - DNA, 25 bp, Homo sapien
acacagtcctgtgggccgagtactt

SEQ ID NO: 767255 - DNA, 25 bp, Homo sapien
cggagaggaaagcatcatcgtggtc

SEQ ID NO: 767256 - DNA, 25 bp, Homo sapien
catggtgggaggtgggcccttacca

SEQ ID NO: 767257 - DNA, 25 bp, Homo sapien
ggtgtcaggagacatgacggagagg

SEQ ID NO: 767258 - DNA, 25 bp, Homo sapien
gacatcatctgagtggtagaggcaa

SEQ ID NO: 767259 - DNA, 25 bp, Homo sapien
ccttgtcccatttgttggggctgca

SEQ ID NO: 767260 - DNA, 25 bp, Homo sapien
tgctgaagatcatgaccgccactca

SEQ ID NO: 767261 - DNA, 25 bp, Homo sapien
gagtcctgttccttgtgcagggcac

SEQ ID NO: 767262 - DNA, 25 bp, Homo sapien
accgccactcatgggccaccggatg

SEQ ID NO: 767263 - DNA, 25 bp, Homo sapien
aggtcatggtacttctgcgtctcat

SEQ ID NO: 767264 - DNA, 25 bp, Homo sapien
aaggccaggtcatggtacttctgcg

SEQ ID NO: 767265 - DNA, 25 bp, Homo sapien
ccaggtcatggtacttctgcgtctc

SEQ ID NO: 767266 - DNA, 25 bp, Homo sapien
ggccaggtcatggtacttctgcgtc

SEQ ID NO: 767267 - DNA, 25 bp, Homo sapien
ccgtcaaggctgtgtacacccctgt

SEQ ID NO: 767268 - DNA, 25 bp, Homo sapien
ctgccgtcaaggctgtgtacacccc

SEQ ID NO: 767269 - DNA, 25 bp, Homo sapien
ggcagtgctcatctctgatatactc

SEQ ID NO: 767270 - DNA, 25 bp, Homo sapien
gtgctcatctctgatatactctgct

SEQ ID NO: 767271 - DNA, 25 bp, Homo sapien
tcatcactcactatgtcatcactgg

SEQ ID NO: 767272 - DNA, 25 bp, Homo sapien
tgctcctcatcactcactatgtcat

SEQ ID NO: 767273 - DNA, 25 bp, Homo sapien
atcactcactatgtcatcactggcc

SEQ ID NO: 767274 - DNA, 25 bp, Homo sapien
atgtgctcctcatcactcactatgt

SEQ ID NO: 767275 - DNA, 25 bp, Homo sapien
ttgggagggactgcgatgactgagg

SEQ ID NO: 767276 - DNA, 25 bp, Homo sapien
ggactttgccaaaaactgcagatgg

SEQ ID NO: 767277 - DNA, 25 bp, Homo sapien
aaagcccttgttgccctctgtctcc

SEQ ID NO: 767278 - DNA, 25 bp, Homo sapien
catggactttgccaaaaactgcaga

SEQ ID NO: 767279 - DNA, 25 bp, Homo sapien
tgcatttgggtgtggtggggtcgtc

SEQ ID NO: 767280 - DNA, 25 bp, Homo sapien
atttgggtgtggtggggtcgtccag

SEQ ID NO: 767281 - DNA, 25 bp, Homo sapien
tgggtgtggtggggtcgtccagtgc

SEQ ID NO: 767282 - DNA, 25 bp, Homo sapien
ggtgtggtggggtcgtccagtgcgg

SEQ ID NO: 767283 - DNA, 25 bp, Homo sapien
aaaggggaagctgtccccatcacac

SEQ ID NO: 767284 - DNA, 25 bp, Homo sapien
ggcaaaggggaagctgtccccatca

SEQ ID NO: 767285 - DNA, 25 bp, Homo sapien
ctgtgcaggcaaaggggaagctgtc

SEQ ID NO: 767286 - DNA, 25 bp, Homo sapien
tgtgcaggcaaaggggaagctgtcc

SEQ ID NO: 767287 - DNA, 25 bp, Homo sapien
gaaaagctgcacgatcagggccggc

SEQ ID NO: 767288 - DNA, 25 bp, Homo sapien
gggccggcactggtccagggcacgt

SEQ ID NO: 767289 - DNA, 25 bp, Homo sapien
cctggaaaagctgcacgatcagggc

SEQ ID NO: 767290 - DNA, 25 bp, Homo sapien
tccctgagcccgtccttggcttctc

SEQ ID NO: 767291 - DNA, 25 bp, Homo sapien
agatgtgtgcatagtgggcctggag

SEQ ID NO: 767292 - DNA, 25 bp, Homo sapien
gaagatgtgtgcatagtgggcctgg

SEQ ID NO: 767293 - DNA, 25 bp, Homo sapien
gggaagatgtgtgcatagtgggcct

SEQ ID NO: 767294 - DNA, 25 bp, Homo sapien
atgtgtgcatagtgggcctggagag

SEQ ID NO: 767295 - DNA, 25 bp, Homo sapien
tggagtgagtttctgcaccaagccc

SEQ ID NO: 767296 - DNA, 25 bp, Homo sapien
gagtttctgcaccaagcccgaattt

SEQ ID NO: 767297 - DNA, 25 bp, Homo sapien
gagtgagtttctgcaccaagcccga

SEQ ID NO: 767298 - DNA, 25 bp, Homo sapien
tgagtttctgcaccaagcccgaatt

SEQ ID NO: 767299 - DNA, 25 bp, Homo sapien
aagctcatgcgtcgtggcggcctct

SEQ ID NO: 767300 - DNA, 25 bp, Homo sapien
acagctcctgcttcccggcggcctc

SEQ ID NO: 767301 - DNA, 25 bp, Homo sapien
tggcgtttgctcctttgcatgggct

SEQ ID NO: 767302 - DNA, 25 bp, Homo sapien
caggaccagactgtcgtcaagtagg

SEQ ID NO: 767303 - DNA, 25 bp, Homo sapien
cccacctcttgcctcgccgtggcct

SEQ ID NO: 767304 - DNA, 25 bp, Homo sapien
tcccacctcgggacggcctccgcag

SEQ ID NO: 767305 - DNA, 25 bp, Homo sapien
cctgttgacagccactagaggccca

SEQ ID NO: 767306 - DNA, 25 bp, Homo sapien
ttgacagccactagaggcccagcct

SEQ ID NO: 767307 - DNA, 25 bp, Homo sapien
tcggttaactgctctccaaggtata

SEQ ID NO: 767308 - DNA, 25 bp, Homo sapien
cggttaactgctctccaaggtatat

SEQ ID NO: 767309 - DNA, 25 bp, Homo sapien
ccaacctgaacaacgtagtgaaact

SEQ ID NO: 767310 - DNA, 25 bp, Homo sapien
tagcgggcacctgtatgtagtccca

SEQ ID NO: 767311 - DNA, 25 bp, Homo sapien
ctgaacaacgtagtgaaactccgtc

SEQ ID NO: 767312 - DNA, 25 bp, Homo sapien
agaccaacctgaacaacgtagtgaa

SEQ ID NO: 767313 - DNA, 25 bp, Homo sapien
tttttctagctagaggtgacaagtg

SEQ ID NO: 767314 - DNA, 25 bp, Homo sapien
cataagtccttcatggaaaagcctg

SEQ ID NO: 767315 - DNA, 25 bp, Homo sapien
gcctccatggtgtttagaggcacca

SEQ ID NO: 767316 - DNA, 25 bp, Homo sapien
ctggcactttccattgcccctgaag

SEQ ID NO: 767317 - DNA, 25 bp, Homo sapien
cccagcagcagccctaagccaaaag

SEQ ID NO: 767318 - DNA, 25 bp, Homo sapien
cagcagcagccctaagccaaaagtg

SEQ ID NO: 767319 - DNA, 25 bp, Homo sapien
agcagcagccctaagccaaaagtgg

SEQ ID NO: 767320 - DNA, 25 bp, Homo sapien
gcagcagccctaagccaaaagtggg

SEQ ID NO: 767321 - DNA, 25 bp, Homo sapien
cctgcaatctgcactgcacacaccc

SEQ ID NO: 767322 - DNA, 25 bp, Homo sapien
cacccagcaaatgtgcgcctgcagc

SEQ ID NO: 767323 - DNA, 25 bp, Homo sapien
cagcaaatgtgcgcctgcagcccag

SEQ ID NO: 767324 - DNA, 25 bp, Homo sapien
cccagcaaatgtgcgcctgcagccc

SEQ ID NO: 767325 - DNA, 25 bp, Homo sapien
tgcacagacctggtaaatgtgtacc

SEQ ID NO: 767326 - DNA, 25 bp, Homo sapien
cagacctggtaaatgtgtacctgca

SEQ ID NO: 767327 - DNA, 25 bp, Homo sapien
cactgcacagacctggtaaatgtgt

SEQ ID NO: 767328 - DNA, 25 bp, Homo sapien
cacagacctggtaaatgtgtacctg

SEQ ID NO: 767329 - DNA, 25 bp, Homo sapien
actgtgcacacccagtacatgtgca

SEQ ID NO: 767330 - DNA, 25 bp, Homo sapien
cagtacatgtgcagctgcggcccat

SEQ ID NO: 767331 - DNA, 25 bp, Homo sapien
cacacccagtacatgtgcagctgcg

SEQ ID NO: 767332 - DNA, 25 bp, Homo sapien
ctggtaaatgtgtaccggcagccca

SEQ ID NO: 767333 - DNA, 25 bp, Homo sapien
gccagaaggaacatcctcaccacct

SEQ ID NO: 767334 - DNA, 25 bp, Homo sapien
cacacacttatcaagtgcctgttgt

SEQ ID NO: 767335 - DNA, 25 bp, Homo sapien
ggccagaaggaacatcctcaccacc

SEQ ID NO: 767336 - DNA, 25 bp, Homo sapien
acacttatcaagtgcctgttgtgtg

SEQ ID NO: 767337 - DNA, 25 bp, Homo sapien
tgatctgtaactcccaagtgggacc

SEQ ID NO: 767338 - DNA, 25 bp, Homo sapien
tggcctagaattccgctgtgatgct

SEQ ID NO: 767339 - DNA, 25 bp, Homo sapien
cgctagtaagttccatatgggacct

SEQ ID NO: 767340 - DNA, 25 bp, Homo sapien
aaggcagccttgtaccaatgccggg

SEQ ID NO: 767341 - DNA, 25 bp, Homo sapien
gccatgagtgatcaagaacctgaga

SEQ ID NO: 767342 - DNA, 25 bp, Homo sapien
tgccatgagtgatcaagaacctgag

SEQ ID NO: 767343 - DNA, 25 bp, Homo sapien
tgctccacgcacatctgtgccaacc

SEQ ID NO: 767344 - DNA, 25 bp, Homo sapien
atttgccatgagtgatcaagaacct

SEQ ID NO: 767345 - DNA, 25 bp, Homo sapien
tcatctgaagatgtaccatatagcc

SEQ ID NO: 767346 - DNA, 25 bp, Homo sapien
gatgtaccatatagccatcagtgcg

SEQ ID NO: 767347 - DNA, 25 bp, Homo sapien
tatagccatcagtgcggcgtcgttc

SEQ ID NO: 767348 - DNA, 25 bp, Homo sapien
tgcggcgtcgttcctctggttactt

SEQ ID NO: 767349 - DNA, 25 bp, Homo sapien
tcttcagcagtggtgctacctgctt

SEQ ID NO: 767350 - DNA, 25 bp, Homo sapien
gtggtgctacctgcttgcgcaaatc

SEQ ID NO: 767351 - DNA, 25 bp, Homo sapien
cagtggtgctacctgcttgcgcaaa

SEQ ID NO: 767352 - DNA, 25 bp, Homo sapien
cagcagtggtgctacctgcttgcgc

SEQ ID NO: 767353 - DNA, 25 bp, Homo sapien
aagcccgactgcttgccctggagct

SEQ ID NO: 767354 - DNA, 25 bp, Homo sapien
tcccacatggaagcccgactgcttg

SEQ ID NO: 767355 - DNA, 25 bp, Homo sapien
acatggaagcccgactgcttgccct

SEQ ID NO: 767356 - DNA, 25 bp, Homo sapien
tttcccacatggaagcccgactgct

SEQ ID NO: 767357 - DNA, 25 bp, Homo sapien
cagacccgggcatagtgatgagcgt

SEQ ID NO: 767358 - DNA, 25 bp, Homo sapien
gctctgtcgggagccagtgccttga

SEQ ID NO: 767359 - DNA, 25 bp, Homo sapien
ccttcgacagtcaccagctggagga

SEQ ID NO: 767360 - DNA, 25 bp, Homo sapien
gctttcacggataccagtaagtagg

SEQ ID NO: 767361 - DNA, 25 bp, Homo sapien
tcacagggaggtgcttggtaactga

SEQ ID NO: 767362 - DNA, 25 bp, Homo sapien
ggaggtgcttggtaactgatcatca

SEQ ID NO: 767363 - DNA, 25 bp, Homo sapien
tgcttggtaactgatcatcaaaacc

SEQ ID NO: 767364 - DNA, 25 bp, Homo sapien
ggacatcgggtcacagggaggtgct

SEQ ID NO: 767365 - DNA, 25 bp, Homo sapien
gctctggcttcaaagccccagtgag

SEQ ID NO: 767366 - DNA, 25 bp, Homo sapien
ccagctgtcagggactgaatcttcc

SEQ ID NO: 767367 - DNA, 25 bp, Homo sapien
ccagcccccaagacctggaaatggg

SEQ ID NO: 767368 - DNA, 25 bp, Homo sapien
tgtcagggactgaatcttcccagcc

SEQ ID NO: 767369 - DNA, 25 bp, Homo sapien
atctcgggggctcttgctgaacaca

SEQ ID NO: 767370 - DNA, 25 bp, Homo sapien
gctggatgccgagcacgtccacctt

SEQ ID NO: 767371 - DNA, 25 bp, Homo sapien
cgggcaaggcagaaacctcggcttt

SEQ ID NO: 767372 - DNA, 25 bp, Homo sapien
acagtagctggccaagtcgggcagt

SEQ ID NO: 767373 - DNA, 25 bp, Homo sapien
tcccaggcgagtggacctgtttagg

SEQ ID NO: 767374 - DNA, 25 bp, Homo sapien
cgagtggacctgtttagggggagcg

SEQ ID NO: 767375 - DNA, 25 bp, Homo sapien
actggcggcattgctggcctcccag

SEQ ID NO: 767376 - DNA, 25 bp, Homo sapien
gcctcccaggcgagtggacctgttt

SEQ ID NO: 767377 - DNA, 25 bp, Homo sapien
gctggctgatgttctatgcctgggc

SEQ ID NO: 767378 - DNA, 25 bp, Homo sapien
ttctcccagccagtaacactcgcag

SEQ ID NO: 767379 - DNA, 25 bp, Homo sapien
ggctgatgttctatgcctgggcccc

SEQ ID NO: 767380 - DNA, 25 bp, Homo sapien
ctggttcctgatttcaccttgaggc

SEQ ID NO: 767381 - DNA, 25 bp, Homo sapien
gtctctcctgatccccatagacagg

SEQ ID NO: 767382 - DNA, 25 bp, Homo sapien
gggtctctcctgatccccatagaca

SEQ ID NO: 767383 - DNA, 25 bp, Homo sapien
tggctcggacctggagggtctctcc

SEQ ID NO: 767384 - DNA, 25 bp, Homo sapien
ctggtggctcggacctggagggtct

SEQ ID NO: 767385 - DNA, 25 bp, Homo sapien
tgtgcgaatgagaggagctgacttc

SEQ ID NO: 767386 - DNA, 25 bp, Homo sapien
ccaggtccctgtgcgaatgagagga

SEQ ID NO: 767387 - DNA, 25 bp, Homo sapien
tgagaggagctgacttctatgaaag

SEQ ID NO: 767388 - DNA, 25 bp, Homo sapien
agctgacttctatgaaagccactcc

SEQ ID NO: 767389 - DNA, 25 bp, Homo sapien
ttgggcccaccataaggtggcccag

SEQ ID NO: 767390 - DNA, 25 bp, Homo sapien
tgggcccaccataaggtggcccagt

SEQ ID NO: 767391 - DNA, 25 bp, Homo sapien
gggcccaccataaggtggcccagtc

SEQ ID NO: 767392 - DNA, 25 bp, Homo sapien
cttgggcccaccataaggtggccca

SEQ ID NO: 767393 - DNA, 25 bp, Homo sapien
aaagggcattatcaacgggacgtgc

SEQ ID NO: 767394 - DNA, 25 bp, Homo sapien
caacgggacgtgcattgagtttcct

SEQ ID NO: 767395 - DNA, 25 bp, Homo sapien
cattatcaacgggacgtgcattgag

SEQ ID NO: 767396 - DNA, 25 bp, Homo sapien
gggcattatcaacgggacgtgcatt

SEQ ID NO: 767397 - DNA, 25 bp, Homo sapien
gagcactctctcttctgtgcaaggc

SEQ ID NO: 767398 - DNA, 25 bp, Homo sapien
ggaccaagcagatggtcacagagca

SEQ ID NO: 767399 - DNA, 25 bp, Homo sapien
cagaccctaggaccaagcagatggt

SEQ ID NO: 767400 - DNA, 25 bp, Homo sapien
agagcccagaccctaggaccaagca

SEQ ID NO: 767401 - DNA, 25 bp, Homo sapien
caggaaccccgagtttatccaccag

SEQ ID NO: 767402 - DNA, 25 bp, Homo sapien
gtttatccaccagtcgccacccatc

SEQ ID NO: 767403 - DNA, 25 bp, Homo sapien
ttatccaccagtcgccacccatcat

SEQ ID NO: 767404 - DNA, 25 bp, Homo sapien
agtttatccaccagtcgccacccat

SEQ ID NO: 767405 - DNA, 25 bp, Homo sapien
aactccacagagtcagctactagta

SEQ ID NO: 767406 - DNA, 25 bp, Homo sapien
tagtaacagcatggtatatccttct

SEQ ID NO: 767407 - DNA, 25 bp, Homo sapien
atatgttgcaagttcctctccagtg

SEQ ID NO: 767408 - DNA, 25 bp, Homo sapien
gaggactgtggcaccatcaccacta

SEQ ID NO: 767409 - DNA, 25 bp, Homo sapien
gggagatgccgtgaggagccctggc

SEQ ID NO: 767410 - DNA, 25 bp, Homo sapien
tcctggcatggcctctttccctttc

SEQ ID NO: 767411 - DNA, 25 bp, Homo sapien
tccttctggcagcagtcagggagat

SEQ ID NO: 767412 - DNA, 25 bp, Homo sapien
ctcagagggcaaggcgggagcttgg

SEQ ID NO: 767413 - DNA, 25 bp, Homo sapien
gtgaaatgggcccaaaacccagctg

SEQ ID NO: 767414 - DNA, 25 bp, Homo sapien
cagttaggggcaccccagaggccag

SEQ ID NO: 767415 - DNA, 25 bp, Homo sapien
ggtgctcaatactcagtactctgtg

SEQ ID NO: 767416 - DNA, 25 bp, Homo sapien
tcagcactcagtactcactaccata

SEQ ID NO: 767417 - DNA, 25 bp, Homo sapien
gccgacaaatgacttaggacctgaa

SEQ ID NO: 767418 - DNA, 25 bp, Homo sapien
tggccgacaaatgacttaggacctg

SEQ ID NO: 767419 - DNA, 25 bp, Homo sapien
ccgacaaatgacttaggacctgaac

SEQ ID NO: 767420 - DNA, 25 bp, Homo sapien
catggccgacaaatgacttaggacc

SEQ ID NO: 767421 - DNA, 25 bp, Homo sapien
ggcaggtgctcgtcctcagagaagc

SEQ ID NO: 767422 - DNA, 25 bp, Homo sapien
gctcgagtcttggttgggttcaaag

SEQ ID NO: 767423 - DNA, 25 bp, Homo sapien
ttgggttcaaagtcctcctcggctg

SEQ ID NO: 767424 - DNA, 25 bp, Homo sapien
cctcggctgccatgctctccatcag

SEQ ID NO: 767425 - DNA, 25 bp, Homo sapien
cctggtctgtccccgacattcccat

SEQ ID NO: 767426 - DNA, 25 bp, Homo sapien
cccgacattcccattacccagatga

SEQ ID NO: 767427 - DNA, 25 bp, Homo sapien
acattcccattacccagatgactcg

SEQ ID NO: 767428 - DNA, 25 bp, Homo sapien
tggtctgtccccgacattcccatta

SEQ ID NO: 767429 - DNA, 25 bp, Homo sapien
tgggttccagccatcaccggacact

SEQ ID NO: 767430 - DNA, 25 bp, Homo sapien
acagcgaccatcctccatcatgacg

SEQ ID NO: 767431 - DNA, 25 bp, Homo sapien
actcacagcgaccatcctccatcat

SEQ ID NO: 767432 - DNA, 25 bp, Homo sapien
accggacactcacagcgaccatcct

SEQ ID NO: 767433 - DNA, 25 bp, Homo sapien
tgtggggctgagacatgtgcactcc

SEQ ID NO: 767434 - DNA, 25 bp, Homo sapien
tgcctgtatgtgtacccgtgcagac

SEQ ID NO: 767435 - DNA, 25 bp, Homo sapien
ccttcgtctgcctgtatgtgtaccc

SEQ ID NO: 767436 - DNA, 25 bp, Homo sapien
catgtgcactccttcgtctgcctgt

SEQ ID NO: 767437 - DNA, 25 bp, Homo sapien
gggtgtctgcgacacctctccctcc

SEQ ID NO: 767438 - DNA, 25 bp, Homo sapien
agccaggggtgtctgcgacacctct

SEQ ID NO: 767439 - DNA, 25 bp, Homo sapien
tgcaggggttggatcgtgaggcaag

SEQ ID NO: 767440 - DNA, 25 bp, Homo sapien
caggggttggatcgtgaggcaagac

SEQ ID NO: 767441 - DNA, 25 bp, Homo sapien
tccttgtcgatgatgcaggagcgag

SEQ ID NO: 767442 - DNA, 25 bp, Homo sapien
agcttgtcgtccaaggggatgagca

SEQ ID NO: 767443 - DNA, 25 bp, Homo sapien
cagcttgtcgtccaaggggatgagc

SEQ ID NO: 767444 - DNA, 25 bp, Homo sapien
gcttgtcgtccaaggggatgagcac

SEQ ID NO: 767445 - DNA, 25 bp, Homo sapien
agcagcttgtcgtccaaggggatga

SEQ ID NO: 767446 - DNA, 25 bp, Homo sapien
agtgcacggtctgcacgtgcccagc

SEQ ID NO: 767447 - DNA, 25 bp, Homo sapien
tctggcgagtgcacggtctgcacgt

SEQ ID NO: 767448 - DNA, 25 bp, Homo sapien
atgtctggcgagtgcacggtctgca

SEQ ID NO: 767449 - DNA, 25 bp, Homo sapien
gcgagtgcacggtctgcacgtgccc

SEQ ID NO: 767450 - DNA, 25 bp, Homo sapien
tgccatggagcagccgtgcccagcc

SEQ ID NO: 767451 - DNA, 25 bp, Homo sapien
agtactccctcaaagtgcccagggc

SEQ ID NO: 767452 - DNA, 25 bp, Homo sapien
cagcccctgggagggttcacccagt

SEQ ID NO: 767453 - DNA, 25 bp, Homo sapien
ttcacccagtactccctcaaagtgc

SEQ ID NO: 767454 - DNA, 25 bp, Homo sapien
gatgtggggctggttcccacgctca

SEQ ID NO: 767455 - DNA, 25 bp, Homo sapien
aactcctccagacagtagatgtggg

SEQ ID NO: 767456 - DNA, 25 bp, Homo sapien
cagtagatgtggggctggttcccac

SEQ ID NO: 767457 - DNA, 25 bp, Homo sapien
tcctccagacagtagatgtggggct

SEQ ID NO: 767458 - DNA, 25 bp, Homo sapien
ctggtcccttgtggcaagaagcgag

SEQ ID NO: 767459 - DNA, 25 bp, Homo sapien
gctgcaatcctggtcccttgtggca

SEQ ID NO: 767460 - DNA, 25 bp, Homo sapien
caatcctggtcccttgtggcaagaa

SEQ ID NO: 767461 - DNA, 25 bp, Homo sapien
gtaggctgcaatcctggtcccttgt

SEQ ID NO: 767462 - DNA, 25 bp, Homo sapien
tggcatttccggagagatgccggga

SEQ ID NO: 767463 - DNA, 25 bp, Homo sapien
gtggcatttccggagagatgccggg

SEQ ID NO: 767464 - DNA, 25 bp, Homo sapien
cacagcaaaggagggacacaggtgt

SEQ ID NO: 767465 - DNA, 25 bp, Homo sapien
ggagggacacaggtgtcaaccctga

SEQ ID NO: 767466 - DNA, 25 bp, Homo sapien
gaccctcctgcaaccacagcaaagg

SEQ ID NO: 767467 - DNA, 25 bp, Homo sapien
gacacaggtgtcaaccctgaaggac

SEQ ID NO: 767468 - DNA, 25 bp, Homo sapien
tgtcagactccacggtggtcaagtc

SEQ ID NO: 767469 - DNA, 25 bp, Homo sapien
tcctgcccgtgtctccgttgtcaga

SEQ ID NO: 767470 - DNA, 25 bp, Homo sapien
gggatcctgcccgtgtctccgttgt

SEQ ID NO: 767471 - DNA, 25 bp, Homo sapien
gtgtctccgttgtcagactccacgg

SEQ ID NO: 767472 - DNA, 25 bp, Homo sapien
tttgctggtcttccggctgcggcgc

SEQ ID NO: 767473 - DNA, 25 bp, Homo sapien
tgcggcgcttggcacttggcaccag

SEQ ID NO: 767474 - DNA, 25 bp, Homo sapien
cgacccagccgtgccaccgtctttg

SEQ ID NO: 767475 - DNA, 25 bp, Homo sapien
cagtgtctttgctggtcttccggct

SEQ ID NO: 767476 - DNA, 25 bp, Homo sapien
ccctggccttggcgctgggtttcca

SEQ ID NO: 767477 - DNA, 25 bp, Homo sapien
ggccttggcgctgggtttccaccca

SEQ ID NO: 767478 - DNA, 25 bp, Homo sapien
cacccctggccttggcgctgggttt

SEQ ID NO: 767479 - DNA, 25 bp, Homo sapien
ctggccttggcgctgggtttccacc

SEQ ID NO: 767480 - DNA, 25 bp, Homo sapien
cttgggggccttggctcgcttgtcc

SEQ ID NO: 767481 - DNA, 25 bp, Homo sapien
ttggctcgcttgtccacaggctctg

SEQ ID NO: 767482 - DNA, 25 bp, Homo sapien
gggggccttggctcgcttgtccaca

SEQ ID NO: 767483 - DNA, 25 bp, Homo sapien
cttggctcgcttgtccacaggctct

SEQ ID NO: 767484 - DNA, 25 bp, Homo sapien
tggcagctccacaaatggctcgggt

SEQ ID NO: 767485 - DNA, 25 bp, Homo sapien
agctccacaaatggctcgggtgctg

SEQ ID NO: 767486 - DNA, 25 bp, Homo sapien
tgaaggcgggtggtgcgggactggg

SEQ ID NO: 767487 - DNA, 25 bp, Homo sapien
gtggcaggagctggcagctccacaa

SEQ ID NO: 767488 - DNA, 25 bp, Homo sapien
ggccagggtgccttgggctcgctgc

SEQ ID NO: 767489 - DNA, 25 bp, Homo sapien
ccaggctcaggaggctcttgggctc

SEQ ID NO: 767490 - DNA, 25 bp, Homo sapien
gtgccttgggctcgctgctgccggc

SEQ ID NO: 767491 - DNA, 25 bp, Homo sapien
ccagggtgccttgggctcgctgctg

SEQ ID NO: 767492 - DNA, 25 bp, Homo sapien
tcttcggccccgtcctgctcagcct

SEQ ID NO: 767493 - DNA, 25 bp, Homo sapien
tgtccgggctcttggggttcccaga

SEQ ID NO: 767494 - DNA, 25 bp, Homo sapien
gctcagcctgggccttgtccgggct

SEQ ID NO: 767495 - DNA, 25 bp, Homo sapien
tcttggggttcccagagtcctcgaa

SEQ ID NO: 767496 - DNA, 25 bp, Homo sapien
ggcgggggctgcctcatcgtccgag

SEQ ID NO: 767497 - DNA, 25 bp, Homo sapien
cgcagaagggccagccgtgggggcg

SEQ ID NO: 767498 - DNA, 25 bp, Homo sapien
cagaagggccagccgtgggggcggg

SEQ ID NO: 767499 - DNA, 25 bp, Homo sapien
ctgcgcagaagggccagccgtgggg

SEQ ID NO: 767500 - DNA, 25 bp, Homo sapien
cgagggccgcgccttgccggcctgc

SEQ ID NO: 767501 - DNA, 25 bp, Homo sapien
ggagtgggccgagggccgcgccttg

SEQ ID NO: 767502 - DNA, 25 bp, Homo sapien
ccttgccggcctgcttggtggcctt

SEQ ID NO: 767503 - DNA, 25 bp, Homo sapien
cttgccggcctgcttggtggccttg

SEQ ID NO: 767504 - DNA, 25 bp, Homo sapien
tgcggaggaggcgcctggggctggg

SEQ ID NO: 767505 - DNA, 25 bp, Homo sapien
cctggggctggggcgcgggcgtctt

SEQ ID NO: 767506 - DNA, 25 bp, Homo sapien
ctgcggaggaggcgcctggggctgg

SEQ ID NO: 767507 - DNA, 25 bp, Homo sapien
gggctggggcgcgggcgtcttcttg

SEQ ID NO: 767508 - DNA, 25 bp, Homo sapien
gggaggtggacgccctctctcttct

SEQ ID NO: 767509 - DNA, 25 bp, Homo sapien
gggcttgccgaaccacttccagagc

SEQ ID NO: 767510 - DNA, 25 bp, Homo sapien
atcttgggccggttctccacggacg

SEQ ID NO: 767511 - DNA, 25 bp, Homo sapien
tctcttcttgggtcggctcttggcc

SEQ ID NO: 767512 - DNA, 25 bp, Homo sapien
gacgcggaccaccatgttgttgccc

SEQ ID NO: 767513 - DNA, 25 bp, Homo sapien
ttgacgcggaccaccatgttgttgc

SEQ ID NO: 767514 - DNA, 25 bp, Homo sapien
acttgacgcggaccaccatgttgtt

SEQ ID NO: 767515 - DNA, 25 bp, Homo sapien
gtagaaccacttgacgcggaccacc

SEQ ID NO: 767516 - DNA, 25 bp, Homo sapien
tgcggctggacttctggtcccagtg

SEQ ID NO: 767517 - DNA, 25 bp, Homo sapien
ctgcggctggacttctggtcccagt

SEQ ID NO: 767518 - DNA, 25 bp, Homo sapien
ggctgcggctggacttctggtccca

SEQ ID NO: 767519 - DNA, 25 bp, Homo sapien
gctgcggctggacttctggtcccag

SEQ ID NO: 767520 - DNA, 25 bp, Homo sapien
gtccacatgcgaggactggtatagc

SEQ ID NO: 767521 - DNA, 25 bp, Homo sapien
tcctggtacttcttggtcttcagca

SEQ ID NO: 767522 - DNA, 25 bp, Homo sapien
cattttcgtccacatgcgaggactg

SEQ ID NO: 767523 - DNA, 25 bp, Homo sapien
acaccgtctgcacgtcattttcgtc

SEQ ID NO: 767524 - DNA, 25 bp, Homo sapien
aagatcacacagaatttgccaacaa

SEQ ID NO: 767525 - DNA, 25 bp, Homo sapien
aaagatcacacagaatttgccaaca

SEQ ID NO: 767526 - DNA, 25 bp, Homo sapien
tgcaccacgacgtcgtcgccgggga

SEQ ID NO: 767527 - DNA, 25 bp, Homo sapien
cgcgtgcaccacgacgtcgtcgccg

SEQ ID NO: 767528 - DNA, 25 bp, Homo sapien
ctaccgcgtgcaccacgacgtcgtc

SEQ ID NO: 767529 - DNA, 25 bp, Homo sapien
taccgcgtgcaccacgacgtcgtcg

SEQ ID NO: 767530 - DNA, 25 bp, Homo sapien
ggataatagtaatttgtgcactggg

SEQ ID NO: 767531 - DNA, 25 bp, Homo sapien
tgtgctgcacaacagggtacctggc

SEQ ID NO: 767532 - DNA, 25 bp, Homo sapien
tgtccagtgggtgcctccccatgtg

SEQ ID NO: 767533 - DNA, 25 bp, Homo sapien
caccaggagactagctgtccagtgg

SEQ ID NO: 767534 - DNA, 25 bp, Homo sapien
ctccaggtgtccacacggctactgg

SEQ ID NO: 767535 - DNA, 25 bp, Homo sapien
tccaggtgtccacacggctactggc

SEQ ID NO: 767536 - DNA, 25 bp, Homo sapien
ccagacctcgagctgggttcctggg

SEQ ID NO: 767537 - DNA, 25 bp, Homo sapien
tcccccagacctcgagctgggttcc

SEQ ID NO: 767538 - DNA, 25 bp, Homo sapien
caggcctttgaatgccagccccacc

SEQ ID NO: 767539 - DNA, 25 bp, Homo sapien
aggcctttgaatgccagccccacct

SEQ ID NO: 767540 - DNA, 25 bp, Homo sapien
ctgtgccggacgcacatgcaaagag

SEQ ID NO: 767541 - DNA, 25 bp, Homo sapien
tgtgccggacgcacatgcaaagagc

SEQ ID NO: 767542 - DNA, 25 bp, Homo sapien
cagtttcctccagcgtagacgtcta

SEQ ID NO: 767543 - DNA, 25 bp, Homo sapien
gacgatgcccaggattccagattag

SEQ ID NO: 767544 - DNA, 25 bp, Homo sapien
ccagaagaacaaggcgaatcgagga

SEQ ID NO: 767545 - DNA, 25 bp, Homo sapien
taactggtgaggttttgcgatcgtg

SEQ ID NO: 767546 - DNA, 25 bp, Homo sapien
aagagatcactctggagtcattgct

SEQ ID NO: 767547 - DNA, 25 bp, Homo sapien
cacagggggcggcaaggaggaagag

SEQ ID NO: 767548 - DNA, 25 bp, Homo sapien
cagcagtcggggagaaaagagcaca

SEQ ID NO: 767549 - DNA, 25 bp, Homo sapien
aggaagagatcactctggagtcatt

SEQ ID NO: 767550 - DNA, 25 bp, Homo sapien
gataggggacccacgagagtctgcc

SEQ ID NO: 767551 - DNA, 25 bp, Homo sapien
cacaagagcaagtggtgcagggtga

SEQ ID NO: 767552 - DNA, 25 bp, Homo sapien
tgggtgacgcagttgggcaagcaaa

SEQ ID NO: 767553 - DNA, 25 bp, Homo sapien
ggtgggaacgtggatacatatgcag

SEQ ID NO: 767554 - DNA, 25 bp, Homo sapien
ttttgtagacattcaagaaagctgc

SEQ ID NO: 767555 - DNA, 25 bp, Homo sapien
ggatgtcaatcaatcttttgtagac

SEQ ID NO: 767556 - DNA, 25 bp, Homo sapien
ctgggatgtcaatcaatcttttgta

SEQ ID NO: 767557 - DNA, 25 bp, Homo sapien
agacattcaagaaagctgcttcagc

SEQ ID NO: 767558 - DNA, 25 bp, Homo sapien
tgcctggcatctggtctgatcctgt

SEQ ID NO: 767559 - DNA, 25 bp, Homo sapien
agtagaactgggcaagaaagtgcaa

SEQ ID NO: 767560 - DNA, 25 bp, Homo sapien
gacagtatcagagatccaggactct

SEQ ID NO: 767561 - DNA, 25 bp, Homo sapien
tgatcctgttgtagtactagtgagg

SEQ ID NO: 767562 - DNA, 25 bp, Homo sapien
tcttggcgaggtctgcagctgctcg

SEQ ID NO: 767563 - DNA, 25 bp, Homo sapien
gaggtctgcagctgctcggaaatct

SEQ ID NO: 767564 - DNA, 25 bp, Homo sapien
tgtcttggcgaggtctgcagctgct

SEQ ID NO: 767565 - DNA, 25 bp, Homo sapien
ggcgaggtctgcagctgctcggaaa

SEQ ID NO: 767566 - DNA, 25 bp, Homo sapien
catccatcggggcaaagccaaggct

SEQ ID NO: 767567 - DNA, 25 bp, Homo sapien
gcatccatcggggcaaagccaaggc

SEQ ID NO: 767568 - DNA, 25 bp, Homo sapien
atccatcggggcaaagccaaggctg

SEQ ID NO: 767569 - DNA, 25 bp, Homo sapien
cagcatgctgtggaggtaacgttcc

SEQ ID NO: 767570 - DNA, 25 bp, Homo sapien
agcatgctgtggaggtaacgttccc

SEQ ID NO: 767571 - DNA, 25 bp, Homo sapien
ccagcatgctgtggaggtaacgttc

SEQ ID NO: 767572 - DNA, 25 bp, Homo sapien
ctggccatgtccagattggtggttc

SEQ ID NO: 767573 - DNA, 25 bp, Homo sapien
ggccatgtccagattggtggttctg

SEQ ID NO: 767574 - DNA, 25 bp, Homo sapien
tggccatgtccagattggtggttct

SEQ ID NO: 767575 - DNA, 25 bp, Homo sapien
cttctctgaaaaatatcagggaaga

SEQ ID NO: 767576 - DNA, 25 bp, Homo sapien
ttcttctctgaaaaatatcagggaa

SEQ ID NO: 767577 - DNA, 25 bp, Homo sapien
tctctgaaaaatatcagggaagaac

SEQ ID NO: 767578 - DNA, 25 bp, Homo sapien
ccctttcttctctgaaaaatatcag

SEQ ID NO: 767579 - DNA, 25 bp, Homo sapien
tcttttgtctctcaagacgtacaaa

SEQ ID NO: 767580 - DNA, 25 bp, Homo sapien
caactattccatggtttcccagctg

SEQ ID NO: 767581 - DNA, 25 bp, Homo sapien
ctcaagacgtacaaagcagctgcca

SEQ ID NO: 767582 - DNA, 25 bp, Homo sapien
gcagctgccaactattccatggttt

SEQ ID NO: 767583 - DNA, 25 bp, Homo sapien
catgccccttctcaccagggtgcat

SEQ ID NO: 767584 - DNA, 25 bp, Homo sapien
cccttctcaccagggtgcatgggca

SEQ ID NO: 767585 - DNA, 25 bp, Homo sapien
ctgatgttcatgccatgccccttct

SEQ ID NO: 767586 - DNA, 25 bp, Homo sapien
tgatgttcatgccatgccccttctc

SEQ ID NO: 767587 - DNA, 25 bp, Homo sapien
tggcctctccttctccagggtgaag

SEQ ID NO: 767588 - DNA, 25 bp, Homo sapien
ctgtggcctctccttctccagggtg

SEQ ID NO: 767589 - DNA, 25 bp, Homo sapien
tctccttctccagggtgaagtctgg

SEQ ID NO: 767590 - DNA, 25 bp, Homo sapien
ccttctccagggtgaagtctggttc

SEQ ID NO: 767591 - DNA, 25 bp, Homo sapien
gtggctctcccctggattccttgat

SEQ ID NO: 767592 - DNA, 25 bp, Homo sapien
tccttgatgcttttaataccctgag

SEQ ID NO: 767593 - DNA, 25 bp, Homo sapien
caggatcacttgtgagaactgctcc

SEQ ID NO: 767594 - DNA, 25 bp, Homo sapien
cattgacacttgtgcaccaaggtgt

SEQ ID NO: 767595 - DNA, 25 bp, Homo sapien
cattgaggtcgttgtggagtaacat

SEQ ID NO: 767596 - DNA, 25 bp, Homo sapien
tcattgaggtcgttgtggagtaaca

SEQ ID NO: 767597 - DNA, 25 bp, Homo sapien
ggcttggcagcccccattttgtggc

SEQ ID NO: 767598 - DNA, 25 bp, Homo sapien
ccccattttgtggcaagggcctggc

SEQ ID NO: 767599 - DNA, 25 bp, Homo sapien
cttggcagcccccattttgtggcaa

SEQ ID NO: 767600 - DNA, 25 bp, Homo sapien
tggcagcccccattttgtggcaagg

SEQ ID NO: 767601 - DNA, 25 bp, Homo sapien
acagttttagctgggctctattttg

SEQ ID NO: 767602 - DNA, 25 bp, Homo sapien
tttaccacagttttagctgggctct

SEQ ID NO: 767603 - DNA, 25 bp, Homo sapien
tttagctgggctctattttggcact

SEQ ID NO: 767604 - DNA, 25 bp, Homo sapien
taccacagttttagctgggctctat

SEQ ID NO: 767605 - DNA, 25 bp, Homo sapien
cccagaacgaaggtgagattgtgac

SEQ ID NO: 767606 - DNA, 25 bp, Homo sapien
tataaagccctcaaatgatacagtg

SEQ ID NO: 767607 - DNA, 25 bp, Homo sapien
caacagataaggtcctgggtctcct

SEQ ID NO: 767608 - DNA, 25 bp, Homo sapien
atatcaaggcatattgtataaagcc

SEQ ID NO: 767609 - DNA, 25 bp, Homo sapien
ctgatgacaggtgaaattgcgacat

SEQ ID NO: 767610 - DNA, 25 bp, Homo sapien
gatgacaggtgaaattgcgacatat

SEQ ID NO: 767611 - DNA, 25 bp, Homo sapien
tgatgacaggtgaaattgcgacata

SEQ ID NO: 767612 - DNA, 25 bp, Homo sapien
atcacaccattgtgctccggcctgg

SEQ ID NO: 767613 - DNA, 25 bp, Homo sapien
acaccattgtgctccggcctgggaa

SEQ ID NO: 767614 - DNA, 25 bp, Homo sapien
agatcacaccattgtgctccggcct

SEQ ID NO: 767615 - DNA, 25 bp, Homo sapien
accattgtgctccggcctgggaaac

SEQ ID NO: 767616 - DNA, 25 bp, Homo sapien
tacagcatacagacaatgggaccag

SEQ ID NO: 767617 - DNA, 25 bp, Homo sapien
ggatgatagggtatctcccactgta

SEQ ID NO: 767618 - DNA, 25 bp, Homo sapien
gatcgttggacagagtacagcatac

SEQ ID NO: 767619 - DNA, 25 bp, Homo sapien
aatatgtgacaatgagttccagtgc

SEQ ID NO: 767620 - DNA, 25 bp, Homo sapien
gctctgctcacattgactttgctca

SEQ ID NO: 767621 - DNA, 25 bp, Homo sapien
ttgctcagcatagtgattggaaatg

SEQ ID NO: 767622 - DNA, 25 bp, Homo sapien
agctctgctcacattgactttgctc

SEQ ID NO: 767623 - DNA, 25 bp, Homo sapien
gcatagtgattggaaatgatgtgtg

SEQ ID NO: 767624 - DNA, 25 bp, Homo sapien
gaggtgtgatttctctcagccttta

SEQ ID NO: 767625 - DNA, 25 bp, Homo sapien
ctctcagcctttaactgaaaaggtt

SEQ ID NO: 767626 - DNA, 25 bp, Homo sapien
gtgatttctctcagcctttaactga

SEQ ID NO: 767627 - DNA, 25 bp, Homo sapien
tcactgtagagaggtgtgatttctc

SEQ ID NO: 767628 - DNA, 25 bp, Homo sapien
gataagggccacagcgaattcgaga

SEQ ID NO: 767629 - DNA, 25 bp, Homo sapien
taagtgtatgagtaagtgaccggct

SEQ ID NO: 767630 - DNA, 25 bp, Homo sapien
gataatactagcgtggctcctccaa

SEQ ID NO: 767631 - DNA, 25 bp, Homo sapien
tactaatagcgtaaaggcataagct

SEQ ID NO: 767632 - DNA, 25 bp, Homo sapien
aatagtactattccatatcagatgc

SEQ ID NO: 767633 - DNA, 25 bp, Homo sapien
agtgaaatcatatagctaagctgga

SEQ ID NO: 767634 - DNA, 25 bp, Homo sapien
taagctggatgtaactaggagagag

SEQ ID NO: 767635 - DNA, 25 bp, Homo sapien
agcctgtaggtgtaaagaatgttgg

SEQ ID NO: 767636 - DNA, 25 bp, Homo sapien
cggatgttgtccaaactaaatgatt

SEQ ID NO: 767637 - DNA, 25 bp, Homo sapien
gatgttgtccaaactaaatgattgg

SEQ ID NO: 767638 - DNA, 25 bp, Homo sapien
gttgtccaaactaaatgattggaag

SEQ ID NO: 767639 - DNA, 25 bp, Homo sapien
tttcggatgttgtccaaactaaatg

SEQ ID NO: 767640 - DNA, 25 bp, Homo sapien
tattttggcttaaactatctaccaa

SEQ ID NO: 767641 - DNA, 25 bp, Homo sapien
tgagtcaaaatcatttattttggct

SEQ ID NO: 767642 - DNA, 25 bp, Homo sapien
ttggtaaatatgttgtatcataatc

SEQ ID NO: 767643 - DNA, 25 bp, Homo sapien
tggtaaatatgttgtatcataatct

SEQ ID NO: 767644 - DNA, 25 bp, Homo sapien
tatcataagtagagggaagagatcc

SEQ ID NO: 767645 - DNA, 25 bp, Homo sapien
tctgctaggcagagtagtaaggacg

SEQ ID NO: 767646 - DNA, 25 bp, Homo sapien
catattatgccgtagctgcctggtt

SEQ ID NO: 767647 - DNA, 25 bp, Homo sapien
tttaggaagtcatacgtgaagtccg

SEQ ID NO: 767648 - DNA, 25 bp, Homo sapien
taaataagaagttgcagacttttat

SEQ ID NO: 767649 - DNA, 25 bp, Homo sapien
gtaaataagaagttgcagactttta

SEQ ID NO: 767650 - DNA, 25 bp, Homo sapien
agttgcagacttttattattagacc

SEQ ID NO: 767651 - DNA, 25 bp, Homo sapien
tgcagacttttattattagacccac

SEQ ID NO: 767652 - DNA, 25 bp, Homo sapien
gccatgttgttaggcacaggggcat

SEQ ID NO: 767653 - DNA, 25 bp, Homo sapien
agccatgttgttaggcacaggggca

SEQ ID NO: 767654 - DNA, 25 bp, Homo sapien
catgttgttaggcacaggggcatga

SEQ ID NO: 767655 - DNA, 25 bp, Homo sapien
aaagccatgttgttaggcacagggg

SEQ ID NO: 767656 - DNA, 25 bp, Homo sapien
atatgtttggtttctaagaccaacg

SEQ ID NO: 767657 - DNA, 25 bp, Homo sapien
gatggcttcttggtctatatacaca

SEQ ID NO: 767658 - DNA, 25 bp, Homo sapien
taagagatcaggtgacaaatagtgc

SEQ ID NO: 767659 - DNA, 25 bp, Homo sapien
ccaagttcttgtgagggttgattaa

SEQ ID NO: 767660 - DNA, 25 bp, Homo sapien
cacaaacgttgtgggaatgaggcta

SEQ ID NO: 767661 - DNA, 25 bp, Homo sapien
cttgcccattgtggctattataagg

SEQ ID NO: 767662 - DNA, 25 bp, Homo sapien
gctacgattttgttgatcacatttt

SEQ ID NO: 767663 - DNA, 25 bp, Homo sapien
ggagaatgctacgattttgttgatc

SEQ ID NO: 767664 - DNA, 25 bp, Homo sapien
gtgtggttgattcttgcccattgtg

SEQ ID NO: 767665 - DNA, 25 bp, Homo sapien
ccatttctgctttacaagactggtg

SEQ ID NO: 767666 - DNA, 25 bp, Homo sapien
tgccctagggaggggactctccatt

SEQ ID NO: 767667 - DNA, 25 bp, Homo sapien
gctttacaagactggtgtattggat

SEQ ID NO: 767668 - DNA, 25 bp, Homo sapien
actggtgtattggattatactacaa

SEQ ID NO: 767669 - DNA, 25 bp, Homo sapien
cctagcccggggttccagccacagg

SEQ ID NO: 767670 - DNA, 25 bp, Homo sapien
gcctagcccggggttccagccacag

SEQ ID NO: 767671 - DNA, 25 bp, Homo sapien
ggcctagcccggggttccagccaca

SEQ ID NO: 767672 - DNA, 25 bp, Homo sapien
tagcccggggttccagccacaggcc

SEQ ID NO: 767673 - DNA, 25 bp, Homo sapien
tgtgagttgattgtagccgaaacgg

SEQ ID NO: 767674 - DNA, 25 bp, Homo sapien
ggtatatttgacgttgaaacctgag

SEQ ID NO: 767675 - DNA, 25 bp, Homo sapien
ctgttaggtcaaaaggggctccatt

SEQ ID NO: 767676 - DNA, 25 bp, Homo sapien
gaatgctagtgtaagtagtagaaaa

SEQ ID NO: 767677 - DNA, 25 bp, Homo sapien
gaggttgaaatcctctgttgtttac

SEQ ID NO: 767678 - DNA, 25 bp, Homo sapien
aggttgaaatcctctgttgtttact

SEQ ID NO: 767679 - DNA, 25 bp, Homo sapien
agaggttgaaatcctctgttgttta

SEQ ID NO: 767680 - DNA, 25 bp, Homo sapien
cattttcggggtatgggcctgatag

SEQ ID NO: 767681 - DNA, 25 bp, Homo sapien
ccaacattttcggggtatgggcctg

SEQ ID NO: 767682 - DNA, 25 bp, Homo sapien
cctgatagcttatttagctgacctt

SEQ ID NO: 767683 - DNA, 25 bp, Homo sapien
gatagcttatttagctgaccttacc

SEQ ID NO: 767684 - DNA, 25 bp, Homo sapien
gtataattcacttgttaagagcttt

SEQ ID NO: 767685 - DNA, 25 bp, Homo sapien
actaagtataattcacttgttaaga

SEQ ID NO: 767686 - DNA, 25 bp, Homo sapien
cagaaactaagtataattcacttgt

SEQ ID NO: 767687 - DNA, 25 bp, Homo sapien
ataattcacttgttaagagctttga

SEQ ID NO: 767688 - DNA, 25 bp, Homo sapien
gatgagaacaatccacggttggtga

SEQ ID NO: 767689 - DNA, 25 bp, Homo sapien
ggttggatgagaacaatccacggtt

SEQ ID NO: 767690 - DNA, 25 bp, Homo sapien
tttatggttggatgagaacaatcca

SEQ ID NO: 767691 - DNA, 25 bp, Homo sapien
gagaacaatccacggttggtgaaca

SEQ ID NO: 767692 - DNA, 25 bp, Homo sapien
aggcttaaggctgtacccactatcc

SEQ ID NO: 767693 - DNA, 25 bp, Homo sapien
gcccagttccactcgaataaggagg

SEQ ID NO: 767694 - DNA, 25 bp, Homo sapien
gaataaggaggcttaaggctgtacc

SEQ ID NO: 767695 - DNA, 25 bp, Homo sapien
taaggctgtacccactatccctgct

SEQ ID NO: 767696 - DNA, 25 bp, Homo sapien
gggttagactgttcagccggttcca

SEQ ID NO: 767697 - DNA, 25 bp, Homo sapien
gattaaccagttgccgaaacctcca

SEQ ID NO: 767698 - DNA, 25 bp, Homo sapien
cattggcacgtagctggaagtttta

SEQ ID NO: 767699 - DNA, 25 bp, Homo sapien
gcatgaccggtaacaatgacattgt

SEQ ID NO: 767700 - DNA, 25 bp, Homo sapien
cagtattataatgccggcagctagg

SEQ ID NO: 767701 - DNA, 25 bp, Homo sapien
ggtcagttaacagtattataatgcc

SEQ ID NO: 767702 - DNA, 25 bp, Homo sapien
tattaagattgtggtcagttaacag

SEQ ID NO: 767703 - DNA, 25 bp, Homo sapien
gtagtattaagattgtggtcagtta

SEQ ID NO: 767704 - DNA, 25 bp, Homo sapien
tgccttgtagtgtagccgatcagct

SEQ ID NO: 767705 - DNA, 25 bp, Homo sapien
tcagctagactttgacaccagtagg

SEQ ID NO: 767706 - DNA, 25 bp, Homo sapien
cctggtaggatgaagatacagactt

SEQ ID NO: 767707 - DNA, 25 bp, Homo sapien
ttggagtaacatcgaggcataccgg

SEQ ID NO: 767708 - DNA, 25 bp, Homo sapien
taagatatatagggcttaacctata

SEQ ID NO: 767709 - DNA, 25 bp, Homo sapien
agatatatagggcttaacctataac

SEQ ID NO: 767710 - DNA, 25 bp, Homo sapien
tatatagggcttaacctataactta

SEQ ID NO: 767711 - DNA, 25 bp, Homo sapien
gatatatagggcttaacctataact

SEQ ID NO: 767712 - DNA, 25 bp, Homo sapien
gtgatttctctcagtctttaactga

SEQ ID NO: 767713 - DNA, 25 bp, Homo sapien
ctgtagagaggtgtgatttctctca

SEQ ID NO: 767714 - DNA, 25 bp, Homo sapien
ttaacgctggggtagctttacagtg

SEQ ID NO: 767715 - DNA, 25 bp, Homo sapien
taacgctggggtagctttacagtga

SEQ ID NO: 767716 - DNA, 25 bp, Homo sapien
ctatagaattagaataataagggtg

SEQ ID NO: 767717 - DNA, 25 bp, Homo sapien
tatagaattagaataataagggtga

SEQ ID NO: 767718 - DNA, 25 bp, Homo sapien
attagaataataagggtgattgaag

SEQ ID NO: 767719 - DNA, 25 bp, Homo sapien
agaattagaataataagggtgattg

SEQ ID NO: 767720 - DNA, 25 bp, Homo sapien
aagggccacagcgaatttgagagtg

SEQ ID NO: 767721 - DNA, 25 bp, Homo sapien
gaagacacaagtttggataagggcc

SEQ ID NO: 767722 - DNA, 25 bp, Homo sapien
taatagcatgaagacacaagtttgg

SEQ ID NO: 767723 - DNA, 25 bp, Homo sapien
gataagggccacagcgaatttgaga

SEQ ID NO: 767724 - DNA, 25 bp, Homo sapien
cagatagtgaggaatgttgatccca

SEQ ID NO: 767725 - DNA, 25 bp, Homo sapien
caagggctggtttgactaaatgata

SEQ ID NO: 767726 - DNA, 25 bp, Homo sapien
ggtagaatgccaagaagaacccagc

SEQ ID NO: 767727 - DNA, 25 bp, Homo sapien
aaagtgaagtcataatagctaggcc

SEQ ID NO: 767728 - DNA, 25 bp, Homo sapien
tttttcggatgttgtcgaaactgat

SEQ ID NO: 767729 - DNA, 25 bp, Homo sapien
ttcggatgttgtcgaaactgattgg

SEQ ID NO: 767730 - DNA, 25 bp, Homo sapien
cggatgttgtcgaaactgattggaa

SEQ ID NO: 767731 - DNA, 25 bp, Homo sapien
gatgttgtcgaaactgattggaagt

SEQ ID NO: 767732 - DNA, 25 bp, Homo sapien
tattttgacttaaactatctaccaa

SEQ ID NO: 767733 - DNA, 25 bp, Homo sapien
ttggttaatatgttctatcataatc

SEQ ID NO: 767734 - DNA, 25 bp, Homo sapien
catttattttgacttaaactatcta

SEQ ID NO: 767735 - DNA, 25 bp, Homo sapien
ggttaatatgttctatcataatcta

SEQ ID NO: 767736 - DNA, 25 bp, Homo sapien
tctattactaaacccacaatctaat

SEQ ID NO: 767737 - DNA, 25 bp, Homo sapien
acttctattactaaacccacaatct

SEQ ID NO: 767738 - DNA, 25 bp, Homo sapien
ctattactaaacccacaatctaatg

SEQ ID NO: 767739 - DNA, 25 bp, Homo sapien
cagacttctattactaaacccacaa

SEQ ID NO: 767740 - DNA, 25 bp, Homo sapien
ttagcagttcttgcatactttctca

SEQ ID NO: 767741 - DNA, 25 bp, Homo sapien
gttagcagttcttgcatactttctc

SEQ ID NO: 767742 - DNA, 25 bp, Homo sapien
agaaagccatgttgttaggcatggg

SEQ ID NO: 767743 - DNA, 25 bp, Homo sapien
gccatgttgttaggcatgggggcat

SEQ ID NO: 767744 - DNA, 25 bp, Homo sapien
cctgagaccaatggatagctcttat

SEQ ID NO: 767745 - DNA, 25 bp, Homo sapien
tggatagctcttatcctctacaact

SEQ ID NO: 767746 - DNA, 25 bp, Homo sapien
caatggatagctcttatcctctaca

SEQ ID NO: 767747 - DNA, 25 bp, Homo sapien
ttcctgagaccaatggatagctctt

SEQ ID NO: 767748 - DNA, 25 bp, Homo sapien
tatatagaattgcttggagggctgc

SEQ ID NO: 767749 - DNA, 25 bp, Homo sapien
tggaggccaaattgagctgactttc

SEQ ID NO: 767750 - DNA, 25 bp, Homo sapien
ctgctgctgctaagagaaggccaat

SEQ ID NO: 767751 - DNA, 25 bp, Homo sapien
tattgcaggatgagaggaatcatgc

SEQ ID NO: 767752 - DNA, 25 bp, Homo sapien
aggaaaagcatagccgtaagtgcta

SEQ ID NO: 767753 - DNA, 25 bp, Homo sapien
gcatagccgtaagtgctaggctgcc

SEQ ID NO: 767754 - DNA, 25 bp, Homo sapien
aaaagcatagccgtaagtgctaggc

SEQ ID NO: 767755 - DNA, 25 bp, Homo sapien
gtgaggaaaagcatagccgtaagtg

SEQ ID NO: 767756 - DNA, 25 bp, Homo sapien
tatagactcttgttagggaggtggc

SEQ ID NO: 767757 - DNA, 25 bp, Homo sapien
agttagatctagcagaagtgatgcc

SEQ ID NO: 767758 - DNA, 25 bp, Homo sapien
taggacggttacacccaaggctgta

SEQ ID NO: 767759 - DNA, 25 bp, Homo sapien
gttccattgccagtaagagtcctag

SEQ ID NO: 767760 - DNA, 25 bp, Homo sapien
taatataagcttccgccgacgtgta

SEQ ID NO: 767761 - DNA, 25 bp, Homo sapien
tgtggttacggtagcgcctcagaat

SEQ ID NO: 767762 - DNA, 25 bp, Homo sapien
cacatctcggttaatataggcgact

SEQ ID NO: 767763 - DNA, 25 bp, Homo sapien
tggataatcgaagggccagtacgcc

SEQ ID NO: 767764 - DNA, 25 bp, Homo sapien
actggtgtattggattatactacaa

SEQ ID NO: 767765 - DNA, 25 bp, Homo sapien
cctagggaggggactctccatttct

SEQ ID NO: 767766 - DNA, 25 bp, Homo sapien
ccatttctgctttacaagactggtg

SEQ ID NO: 767767 - DNA, 25 bp, Homo sapien
gctttacaagactggtgtattggat

SEQ ID NO: 767768 - DNA, 25 bp, Homo sapien
caacaccaaagataagcagcattcg

SEQ ID NO: 767769 - DNA, 25 bp, Homo sapien
aaatcacaagtgattccaacaccaa

SEQ ID NO: 767770 - DNA, 25 bp, Homo sapien
taataatcaaagtcacaactcattt

SEQ ID NO: 767771 - DNA, 25 bp, Homo sapien
tcgcattttgctatgtagtgctcct

SEQ ID NO: 767772 - DNA, 25 bp, Homo sapien
gcacatctggcttgtaggacagtcc

SEQ ID NO: 767773 - DNA, 25 bp, Homo sapien
ccacttttctggtagggaggtgaca

SEQ ID NO: 767774 - DNA, 25 bp, Homo sapien
tgtgacctcacaccaggtacaggga

SEQ ID NO: 767775 - DNA, 25 bp, Homo sapien
gggaccaagggaaagaggcacatct

SEQ ID NO: 767776 - DNA, 25 bp, Homo sapien
catttgcatgccacaatggtgacag

SEQ ID NO: 767777 - DNA, 25 bp, Homo sapien
tcctggccatgcttgtgatagggcc

SEQ ID NO: 767778 - DNA, 25 bp, Homo sapien
ttggtagacgttgtcccacacatct

SEQ ID NO: 767779 - DNA, 25 bp, Homo sapien
gggccttttagtttctgactgacac

SEQ ID NO: 767780 - DNA, 25 bp, Homo sapien
cagggcctccttggaacgcatccat

SEQ ID NO: 767781 - DNA, 25 bp, Homo sapien
ggcctcgagccacccactaggcaca

SEQ ID NO: 767782 - DNA, 25 bp, Homo sapien
ctcgagccacccactaggcacagca

SEQ ID NO: 767783 - DNA, 25 bp, Homo sapien
agcacagggcctccttggaacgcat

SEQ ID NO: 767784 - DNA, 25 bp, Homo sapien
tggaagtattgggcattcccctggc

SEQ ID NO: 767785 - DNA, 25 bp, Homo sapien
gctggaagtattgggcattcccctg

SEQ ID NO: 767786 - DNA, 25 bp, Homo sapien
ctggaagtattgggcattcccctgg

SEQ ID NO: 767787 - DNA, 25 bp, Homo sapien
agctggaagtattgggcattcccct

SEQ ID NO: 767788 - DNA, 25 bp, Homo sapien
gccatgagttggagggattctgcca

SEQ ID NO: 767789 - DNA, 25 bp, Homo sapien
agccatgagttggagggattctgcc

SEQ ID NO: 767790 - DNA, 25 bp, Homo sapien
gagccatgagttggagggattctgc

SEQ ID NO: 767791 - DNA, 25 bp, Homo sapien
ccatgagttggagggattctgccag

SEQ ID NO: 767792 - DNA, 25 bp, Homo sapien
aatcggtcagcggaggcaggcactc

SEQ ID NO: 767793 - DNA, 25 bp, Homo sapien
ccacccagggaatcggtcagcggag

SEQ ID NO: 767794 - DNA, 25 bp, Homo sapien
aaatccacccagggaatcggtcagc

SEQ ID NO: 767795 - DNA, 25 bp, Homo sapien
atcggtcagcggaggcaggcactca

SEQ ID NO: 767796 - DNA, 25 bp, Homo sapien
catctctgccacatcaagcactggt

SEQ ID NO: 767797 - DNA, 25 bp, Homo sapien
agtcagtgaaagttggtggagcatc

SEQ ID NO: 767798 - DNA, 25 bp, Homo sapien
ctgtagtcagtgaaagttggtggag

SEQ ID NO: 767799 - DNA, 25 bp, Homo sapien
tctgccacatcaagcactggtctag

SEQ ID NO: 767800 - DNA, 25 bp, Homo sapien
atttctaaggcgtctccagccccga

SEQ ID NO: 767801 - DNA, 25 bp, Homo sapien
cctgattggatttctaaggcgtctc

SEQ ID NO: 767802 - DNA, 25 bp, Homo sapien
tgcagcaacggtcagcggtgatgtc

SEQ ID NO: 767803 - DNA, 25 bp, Homo sapien
gggtaagaatgcagcaacggtcagc

SEQ ID NO: 767804 - DNA, 25 bp, Homo sapien
catttcttgccattgccccgtggag

SEQ ID NO: 767805 - DNA, 25 bp, Homo sapien
gggcagttctacactaccttgagtg

SEQ ID NO: 767806 - DNA, 25 bp, Homo sapien
tccgggttctgactgagaccaggta

SEQ ID NO: 767807 - DNA, 25 bp, Homo sapien
tggcattagccttttctccgggttc

SEQ ID NO: 767808 - DNA, 25 bp, Homo sapien
agcccatggtctgcgctgagccagt

SEQ ID NO: 767809 - DNA, 25 bp, Homo sapien
ctcagaagagcccatggtctgcgct

SEQ ID NO: 767810 - DNA, 25 bp, Homo sapien
ccagtgttttgtgggaacagagtcc

SEQ ID NO: 767811 - DNA, 25 bp, Homo sapien
tctgcgctgagccagtgcaagagca

SEQ ID NO: 767812 - DNA, 25 bp, Homo sapien
gactgttgacaggtgggtcccccac

SEQ ID NO: 767813 - DNA, 25 bp, Homo sapien
ctattgactgttgacaggtgggtcc

SEQ ID NO: 767814 - DNA, 25 bp, Homo sapien
tattgactgttgacaggtgggtccc

SEQ ID NO: 767815 - DNA, 25 bp, Homo sapien
ttgactgttgacaggtgggtccccc

SEQ ID NO: 767816 - DNA, 25 bp, Homo sapien
tgcatgggcacttgactggttcttg

SEQ ID NO: 767817 - DNA, 25 bp, Homo sapien
catatgcatgggcacttgactggtt

SEQ ID NO: 767818 - DNA, 25 bp, Homo sapien
gccagtgagatgtcaggcagtattt

SEQ ID NO: 767819 - DNA, 25 bp, Homo sapien
cctgcaccagtcatatgcatgggca

SEQ ID NO: 767820 - DNA, 25 bp, Homo sapien
ccctttgattggtttgggtggtcat

SEQ ID NO: 767821 - DNA, 25 bp, Homo sapien
tccctttgattggtttgggtggtca

SEQ ID NO: 767822 - DNA, 25 bp, Homo sapien
cattcgctcagggtcataaggcatc

SEQ ID NO: 767823 - DNA, 25 bp, Homo sapien
cgccgggctataggagttctcagct

SEQ ID NO: 767824 - DNA, 25 bp, Homo sapien
tgcagctgcattcgctcagggtcat

SEQ ID NO: 767825 - DNA, 25 bp, Homo sapien
gtcataaggcatcacacgccgggct

SEQ ID NO: 767826 - DNA, 25 bp, Homo sapien
tattccatgctagcaactttccaga

SEQ ID NO: 767827 - DNA, 25 bp, Homo sapien
tggctaaggaatatgtaacaggtac

SEQ ID NO: 767828 - DNA, 25 bp, Homo sapien
cccctgtggctaaggaatatgtaac

SEQ ID NO: 767829 - DNA, 25 bp, Homo sapien
agtttcccctgtggctaaggaatat

SEQ ID NO: 767830 - DNA, 25 bp, Homo sapien
acttggcacccaggtctgtcctcac

SEQ ID NO: 767831 - DNA, 25 bp, Homo sapien
tgtcctcaccctgcgatggctcttg

SEQ ID NO: 767832 - DNA, 25 bp, Homo sapien
caatttgtgcttgtatccggtcgtc

SEQ ID NO: 767833 - DNA, 25 bp, Homo sapien
tcttgggtgactcatcaatttgtgc

SEQ ID NO: 767834 - DNA, 25 bp, Homo sapien
aacatgccagtaggcatccacagaa

SEQ ID NO: 767835 - DNA, 25 bp, Homo sapien
tgtgtaggtaacttcaaaacatgcc

SEQ ID NO: 767836 - DNA, 25 bp, Homo sapien
tccccagtgcacacatcgtgtctgc

SEQ ID NO: 767837 - DNA, 25 bp, Homo sapien
aggtggatgaaagcccatccgggct

SEQ ID NO: 767838 - DNA, 25 bp, Homo sapien
aagcatagtgccccaggagaacttc

SEQ ID NO: 767839 - DNA, 25 bp, Homo sapien
gccctgtgtgagaccagctaggtca

SEQ ID NO: 767840 - DNA, 25 bp, Homo sapien
aactgtctccaagcatagtgcccca

SEQ ID NO: 767841 - DNA, 25 bp, Homo sapien
tgccctgtgtgagaccagctaggtc

SEQ ID NO: 767842 - DNA, 25 bp, Homo sapien
ggtgagtggtatggtgtgcattttg

SEQ ID NO: 767843 - DNA, 25 bp, Homo sapien
tgcatttggtgagtggtatggtgtg

SEQ ID NO: 767844 - DNA, 25 bp, Homo sapien
catttggtgagtggtatggtgtgca

SEQ ID NO: 767845 - DNA, 25 bp, Homo sapien
tttccatttttgcctgcatttggtg

SEQ ID NO: 767846 - DNA, 25 bp, Homo sapien
tggagtactcatttgtaaccttttc

SEQ ID NO: 767847 - DNA, 25 bp, Homo sapien
gagtactcatttgtaaccttttcta

SEQ ID NO: 767848 - DNA, 25 bp, Homo sapien
tgaatgattttgctaagagtagttg

SEQ ID NO: 767849 - DNA, 25 bp, Homo sapien
ctcctgcatgaattcccctatgttg

SEQ ID NO: 767850 - DNA, 25 bp, Homo sapien
ttttcagtgccaaactttcatatct

SEQ ID NO: 767851 - DNA, 25 bp, Homo sapien
gttgagtaaggattaagcaccagtt

SEQ ID NO: 767852 - DNA, 25 bp, Homo sapien
aaaagctattccacactcttcacca

SEQ ID NO: 767853 - DNA, 25 bp, Homo sapien
aaagctattccacactcttcaccat

SEQ ID NO: 767854 - DNA, 25 bp, Homo sapien
cattctttaacttggtaggatttct

SEQ ID NO: 767855 - DNA, 25 bp, Homo sapien
gaaccgggtttgctgcacttgccat

SEQ ID NO: 767856 - DNA, 25 bp, Homo sapien
caagatctttttgtgcaaggggtct

SEQ ID NO: 767857 - DNA, 25 bp, Homo sapien
ctttgctcttcctgaaccgggtttg

SEQ ID NO: 767858 - DNA, 25 bp, Homo sapien
gcaaggggtctgaaaccttctttgc

SEQ ID NO: 767859 - DNA, 25 bp, Homo sapien
tagcctgatgaagaacaagaaacca

SEQ ID NO: 767860 - DNA, 25 bp, Homo sapien
ctgcaacctacaatgtgaagaagcc

SEQ ID NO: 767861 - DNA, 25 bp, Homo sapien
cagtttcagcctagacatcaacagg

SEQ ID NO: 767862 - DNA, 25 bp, Homo sapien
tagcctatcctgtacccatctgact

SEQ ID NO: 767863 - DNA, 25 bp, Homo sapien
agcagccccgagggccatgggttgc

SEQ ID NO: 767864 - DNA, 25 bp, Homo sapien
gatgaggccctgctgttacaggaaa

SEQ ID NO: 767865 - DNA, 25 bp, Homo sapien
gcagccccgagggccatgggttgcc

SEQ ID NO: 767866 - DNA, 25 bp, Homo sapien
catgtaaaaattgtccctagtggag

SEQ ID NO: 767867 - DNA, 25 bp, Homo sapien
tggttgcaaataggctactgctgac

SEQ ID NO: 767868 - DNA, 25 bp, Homo sapien
tctgatccacttggacaattggcag

SEQ ID NO: 767869 - DNA, 25 bp, Homo sapien
cctagtggagacattatctgagtgg

SEQ ID NO: 767870 - DNA, 25 bp, Homo sapien
aagcgaagctttgctaccagcctgg

SEQ ID NO: 767871 - DNA, 25 bp, Homo sapien
cagccaccaagcgctgtccactctc

SEQ ID NO: 767872 - DNA, 25 bp, Homo sapien
ttgaagactgctggcctagacactg

SEQ ID NO: 767873 - DNA, 25 bp, Homo sapien
ttttacaaggagactcagagaggct

SEQ ID NO: 767874 - DNA, 25 bp, Homo sapien
catgctatactgtctaccctctggg

SEQ ID NO: 767875 - DNA, 25 bp, Homo sapien
ttgtcattgtgacatccagatcccc

SEQ ID NO: 767876 - DNA, 25 bp, Homo sapien
tgaggccagcaagtcaacgtggatg

SEQ ID NO: 767877 - DNA, 25 bp, Homo sapien
caacgtggatgtcgctatctgatgg

SEQ ID NO: 767878 - DNA, 25 bp, Homo sapien
ggatgtgtgtctcctggacccctga

SEQ ID NO: 767879 - DNA, 25 bp, Homo sapien
tcgctatctgatggatgtgtgtctc

SEQ ID NO: 767880 - DNA, 25 bp, Homo sapien
tccagaaaggcttctagcatcacct

SEQ ID NO: 767881 - DNA, 25 bp, Homo sapien
gaaagtagggcaaaagtcagctcct

SEQ ID NO: 767882 - DNA, 25 bp, Homo sapien
taaagggtgaccacagggtgtgggc

SEQ ID NO: 767883 - DNA, 25 bp, Homo sapien
gaccacagggtgtgggccagaaagt

SEQ ID NO: 767884 - DNA, 25 bp, Homo sapien
ccctctaaagggctgactgtctcgg

SEQ ID NO: 767885 - DNA, 25 bp, Homo sapien
tctaaagggctgactgtctcggtgg

SEQ ID NO: 767886 - DNA, 25 bp, Homo sapien
cgaccctctaaagggctgactgtct

SEQ ID NO: 767887 - DNA, 25 bp, Homo sapien
ccgaccctctaaagggctgactgtc

SEQ ID NO: 767888 - DNA, 25 bp, Homo sapien
actgacccggggcttttcctcatat

SEQ ID NO: 767889 - DNA, 25 bp, Homo sapien
gcccagctgtccttgtgccccgaac

SEQ ID NO: 767890 - DNA, 25 bp, Homo sapien
ccccgaactttctttctgcccactg

SEQ ID NO: 767891 - DNA, 25 bp, Homo sapien
tgacccggggcttttcctcatattc

SEQ ID NO: 767892 - DNA, 25 bp, Homo sapien
gcttgttgaaggcattctggggacc

SEQ ID NO: 767893 - DNA, 25 bp, Homo sapien
tgtcttccaggacagaaagagcaca

SEQ ID NO: 767894 - DNA, 25 bp, Homo sapien
cttgttgaaggcattctggggacct

SEQ ID NO: 767895 - DNA, 25 bp, Homo sapien
gtcttccaggacagaaagagcacag

SEQ ID NO: 767896 - DNA, 25 bp, Homo sapien
ttgtctggcacaatcaacatgtctg

SEQ ID NO: 767897 - DNA, 25 bp, Homo sapien
gcacggattcctgctctaagggcat

SEQ ID NO: 767898 - DNA, 25 bp, Homo sapien
taagggcatgtagattttgtctggc

SEQ ID NO: 767899 - DNA, 25 bp, Homo sapien
catatggaggacaggagaagtgaca

SEQ ID NO: 767900 - DNA, 25 bp, Homo sapien
ttgtaaattgtgcaggaaccaccag

SEQ ID NO: 767901 - DNA, 25 bp, Homo sapien
tcccttgtaaattgtgcaggaacca

SEQ ID NO: 767902 - DNA, 25 bp, Homo sapien
tgagtcccttgtaaattgtgcagga

SEQ ID NO: 767903 - DNA, 25 bp, Homo sapien
tgctgattcatggcaggattcttct

SEQ ID NO: 767904 - DNA, 25 bp, Homo sapien
tagttcacagatatcaaaagtggaa

SEQ ID NO: 767905 - DNA, 25 bp, Homo sapien
tgtgattagttcacagatatcaaaa

SEQ ID NO: 767906 - DNA, 25 bp, Homo sapien
gatatcaaaagtggaaatagaccct

SEQ ID NO: 767907 - DNA, 25 bp, Homo sapien
gattagttcacagatatcaaaagtg

SEQ ID NO: 767908 - DNA, 25 bp, Homo sapien
ttatccagaaatttcagctatctgg

SEQ ID NO: 767909 - DNA, 25 bp, Homo sapien
ccaggcgggactgtcccagaaggca

SEQ ID NO: 767910 - DNA, 25 bp, Homo sapien
gcagaatttccccatgaggcccggt

SEQ ID NO: 767911 - DNA, 25 bp, Homo sapien
gaggcccggtagtgacagagaaaca

SEQ ID NO: 767912 - DNA, 25 bp, Homo sapien
gagtccgaagatgataattccctct

SEQ ID NO: 767913 - DNA, 25 bp, Homo sapien
gcatttcttggaggactttaatctc

SEQ ID NO: 767914 - DNA, 25 bp, Homo sapien
aattccctcttgtcacggaagcagc

SEQ ID NO: 767915 - DNA, 25 bp, Homo sapien
ctcctgagtccgaagatgataattc

SEQ ID NO: 767916 - DNA, 25 bp, Homo sapien
gagctacagtttccagcctgcgtgg

SEQ ID NO: 767917 - DNA, 25 bp, Homo sapien
tgggattgcagtcccgaagcgcttg

SEQ ID NO: 767918 - DNA, 25 bp, Homo sapien
ggtgtccgaaatcagtagccagcat

SEQ ID NO: 767919 - DNA, 25 bp, Homo sapien
gcatatcgcctgctaggattctagt

SEQ ID NO: 767920 - DNA, 25 bp, Homo sapien
ccggacctgcccctcctgtccctct

SEQ ID NO: 767921 - DNA, 25 bp, Homo sapien
ccctcctgtccctctccggactcac

SEQ ID NO: 767922 - DNA, 25 bp, Homo sapien
tgcccctcctgtccctctccggact

SEQ ID NO: 767923 - DNA, 25 bp, Homo sapien
ctgcccctcctgtccctctccggac

SEQ ID NO: 767924 - DNA, 25 bp, Homo sapien
catgttgccccacgcaaagctctga

SEQ ID NO: 767925 - DNA, 25 bp, Homo sapien
atgttgccccacgcaaagctctgaa

SEQ ID NO: 767926 - DNA, 25 bp, Homo sapien
gagcatgttgccccacgcaaagctc

SEQ ID NO: 767927 - DNA, 25 bp, Homo sapien
gcatgttgccccacgcaaagctctg

SEQ ID NO: 767928 - DNA, 25 bp, Homo sapien
aggtgacggatgatggatgaactca

SEQ ID NO: 767929 - DNA, 25 bp, Homo sapien
aaggtgacggatgatggatgaactc

SEQ ID NO: 767930 - DNA, 25 bp, Homo sapien
gagatcacgtgtttttgcagccacc

SEQ ID NO: 767931 - DNA, 25 bp, Homo sapien
aatctcagcagaatacaccaaactg

SEQ ID NO: 767932 - DNA, 25 bp, Homo sapien
tgactggtgtagtgagggtggaatc

SEQ ID NO: 767933 - DNA, 25 bp, Homo sapien
ctaagtgcatggccagtgtagagtg

SEQ ID NO: 767934 - DNA, 25 bp, Homo sapien
cacaaatggcagtatcttcaacttc

SEQ ID NO: 767935 - DNA, 25 bp, Homo sapien
tatataactgaaacgttgacttgtg

SEQ ID NO: 767936 - DNA, 25 bp, Homo sapien
gatgactgcggtcaaacaatttaac

SEQ ID NO: 767937 - DNA, 25 bp, Homo sapien
taaattgtactttagtcctctagat

SEQ ID NO: 767938 - DNA, 25 bp, Homo sapien
gcaaaacatgcctgtttagtgtgtg

SEQ ID NO: 767939 - DNA, 25 bp, Homo sapien
tatgtaagctagtgaaaccaatgta

SEQ ID NO: 767940 - DNA, 25 bp, Homo sapien
tattggtaggccactattaatcaca

SEQ ID NO: 767941 - DNA, 25 bp, Homo sapien
tcaagggttcccatctgatattcag

SEQ ID NO: 767942 - DNA, 25 bp, Homo sapien
gtttaaacataaattcacaaatcat

SEQ ID NO: 767943 - DNA, 25 bp, Homo sapien
ggtttaaacataaattcacaaatca

SEQ ID NO: 767944 - DNA, 25 bp, Homo sapien
tgcctcctgagcacgctctaggcca

SEQ ID NO: 767945 - DNA, 25 bp, Homo sapien
gatgctccttctggatcctaagccc

SEQ ID NO: 767946 - DNA, 25 bp, Homo sapien
taagacgcttttctacctgagcagg

SEQ ID NO: 767947 - DNA, 25 bp, Homo sapien
agctgttactggagtcttggccaac

SEQ ID NO: 767948 - DNA, 25 bp, Homo sapien
tacaggatgtggaacagcgtgcgca

SEQ ID NO: 767949 - DNA, 25 bp, Homo sapien
gaggcatgcggctccgctgggccgt

SEQ ID NO: 767950 - DNA, 25 bp, Homo sapien
gctgggccgtcgtgtcccgggccat

SEQ ID NO: 767951 - DNA, 25 bp, Homo sapien
aaggcgagcgacagcccgtctgtgc

SEQ ID NO: 767952 - DNA, 25 bp, Homo sapien
tcagcagcgcggtgcgcaggccgac

SEQ ID NO: 767953 - DNA, 25 bp, Homo sapien
cgtcggcgctcagcagcgcggtgcg

SEQ ID NO: 767954 - DNA, 25 bp, Homo sapien
cggcgctcagcagcgcggtgcgcag

SEQ ID NO: 767955 - DNA, 25 bp, Homo sapien
gccgtcggcgctcagcagcgcggtg

SEQ ID NO: 767956 - DNA, 25 bp, Homo sapien
aggcgctgcgtcggctggttcccgg

SEQ ID NO: 767957 - DNA, 25 bp, Homo sapien
gagaagcgcgctcgcccaggggcag

SEQ ID NO: 767958 - DNA, 25 bp, Homo sapien
ggcgctgcgtcggctggttcccggg

SEQ ID NO: 767959 - DNA, 25 bp, Homo sapien
ccagagaagcgcgctcgcccagggg

SEQ ID NO: 767960 - DNA, 25 bp, Homo sapien
cgctgggccccgcggggcatcccct

SEQ ID NO: 767961 - DNA, 25 bp, Homo sapien
ggcgctgggccccgcggggcatccc

SEQ ID NO: 767962 - DNA, 25 bp, Homo sapien
tctgttccaggaccgcgctctggga

SEQ ID NO: 767963 - DNA, 25 bp, Homo sapien
gctctgttccaggaccgcgctctgg

SEQ ID NO: 767964 - DNA, 25 bp, Homo sapien
gtgatggtgtgcctctgacgttctc

SEQ ID NO: 767965 - DNA, 25 bp, Homo sapien
tgctgctggtaccaatcacggcccc

SEQ ID NO: 767966 - DNA, 25 bp, Homo sapien
gctgctgctggtaccaatcacggcc

SEQ ID NO: 767967 - DNA, 25 bp, Homo sapien
gctggtaccaatcacggccccgcgc

SEQ ID NO: 767968 - DNA, 25 bp, Homo sapien
ccgcgccatcatctccaaaccctgc

SEQ ID NO: 767969 - DNA, 25 bp, Homo sapien
ccccgtggccccaaagtcggcgctg

SEQ ID NO: 767970 - DNA, 25 bp, Homo sapien
ccaggcggcactggcgctcctgcac

SEQ ID NO: 767971 - DNA, 25 bp, Homo sapien
ttggacagtagccgccccagtgggc

SEQ ID NO: 767972 - DNA, 25 bp, Homo sapien
tggccccaaagtcggcgctggctct

SEQ ID NO: 767973 - DNA, 25 bp, Homo sapien
ctgggtaaggagtcagttctgctcc

SEQ ID NO: 767974 - DNA, 25 bp, Homo sapien
gctgacagcccggggacgaggttga

SEQ ID NO: 767975 - DNA, 25 bp, Homo sapien
catgaggatggtctgctgctgacag

SEQ ID NO: 767976 - DNA, 25 bp, Homo sapien
taaggagtcagttctgctccttcag

SEQ ID NO: 767977 - DNA, 25 bp, Homo sapien
gcttaatgagcgctgacttctcttg

SEQ ID NO: 767978 - DNA, 25 bp, Homo sapien
cagcaagatgaaggtggggtccaga

SEQ ID NO: 767979 - DNA, 25 bp, Homo sapien
tcttgctccagctgcgtgatgcact

SEQ ID NO: 767980 - DNA, 25 bp, Homo sapien
aatgagcgctgacttctcttgctcc

SEQ ID NO: 767981 - DNA, 25 bp, Homo sapien
agcgccgcatctgtgccgtctagcg

SEQ ID NO: 767982 - DNA, 25 bp, Homo sapien
atctgctcccgtccgagagacagcc

SEQ ID NO: 767983 - DNA, 25 bp, Homo sapien
gaaaccgggcgaccagagatctggt

SEQ ID NO: 767984 - DNA, 25 bp, Homo sapien
cctctgctggccgttatcggaagtg

SEQ ID NO: 767985 - DNA, 25 bp, Homo sapien
aggatgaggaagaccatcaccgcgg

SEQ ID NO: 767986 - DNA, 25 bp, Homo sapien
acacaacgtggggcagcgtcctggc

SEQ ID NO: 767987 - DNA, 25 bp, Homo sapien
ccaggatgaggaagaccatcaccgc

SEQ ID NO: 767988 - DNA, 25 bp, Homo sapien
gtccacccggctccgggatctgctg

SEQ ID NO: 767989 - DNA, 25 bp, Homo sapien
gttcctcctggatgaaacctgggat

SEQ ID NO: 767990 - DNA, 25 bp, Homo sapien
cttggctgggttctccttttccttg

SEQ ID NO: 767991 - DNA, 25 bp, Homo sapien
cctcctggatgaaacctgggatcag

SEQ ID NO: 767992 - DNA, 25 bp, Homo sapien
agtggttcctcctggatgaaacctg

SEQ ID NO: 767993 - DNA, 25 bp, Homo sapien
tgcatcgggggcactgcatcccaca

SEQ ID NO: 767994 - DNA, 25 bp, Homo sapien
gaagccatccgtgatattgccgtgc

SEQ ID NO: 767995 - DNA, 25 bp, Homo sapien
atccgtgatattgccgtgcccctgg

SEQ ID NO: 767996 - DNA, 25 bp, Homo sapien
tgcagaagccatccgtgatattgcc

SEQ ID NO: 767997 - DNA, 25 bp, Homo sapien
cacctctgcagcccgggtacagcag

SEQ ID NO: 767998 - DNA, 25 bp, Homo sapien
agaagggagttgccgtgctggctgc

SEQ ID NO: 767999 - DNA, 25 bp, Homo sapien
ccagaagggagttgccgtgctggct

SEQ ID NO: 768000 - DNA, 25 bp, Homo sapien
caggttatcgtggagctgggttcca

SEQ ID NO: 768001 - DNA, 25 bp, Homo sapien
gagggttgaggcctggcgttcttat

SEQ ID NO: 768002 - DNA, 25 bp, Homo sapien
ggcctggcgttcttatgtcctctgg

SEQ ID NO: 768003 - DNA, 25 bp, Homo sapien
gttgaggcctggcgttcttatgtcc

SEQ ID NO: 768004 - DNA, 25 bp, Homo sapien
tggcgttcttatgtcctctggaagc

SEQ ID NO: 768005 - DNA, 25 bp, Homo sapien
cagcctgctgatgtcggggggcttc

SEQ ID NO: 768006 - DNA, 25 bp, Homo sapien
ctgctgatgtcggggggcttctccc

SEQ ID NO: 768007 - DNA, 25 bp, Homo sapien
gctggcccatccactgcactgcagt

SEQ ID NO: 768008 - DNA, 25 bp, Homo sapien
cccggctgccgctggcccatccact

SEQ ID NO: 768009 - DNA, 25 bp, Homo sapien
cagtcctgtaaagatgcccggatcc

SEQ ID NO: 768010 - DNA, 25 bp, Homo sapien
gtcctgtaaagatgcccggatcccc

SEQ ID NO: 768011 - DNA, 25 bp, Homo sapien
gcttccagtcctgtaaagatgcccg

SEQ ID NO: 768012 - DNA, 25 bp, Homo sapien
tctgcttccagtcctgtaaagatgc

SEQ ID NO: 768013 - DNA, 25 bp, Homo sapien
cacgtgtatgtacccgcgcatgcta

SEQ ID NO: 768014 - DNA, 25 bp, Homo sapien
caccgcggccgactgagatattcat

SEQ ID NO: 768015 - DNA, 25 bp, Homo sapien
cacatcttgcaaggagactgaccca

SEQ ID NO: 768016 - DNA, 25 bp, Homo sapien
cctgaggcctagtgtggttgtttcc

SEQ ID NO: 768017 - DNA, 25 bp, Homo sapien
attctatagctatgtctctgaatgt

SEQ ID NO: 768018 - DNA, 25 bp, Homo sapien
aattctatagctatgtctctgaatg

SEQ ID NO: 768019 - DNA, 25 bp, Homo sapien
tattctggggctctttattttgctc

SEQ ID NO: 768020 - DNA, 25 bp, Homo sapien
atttctctttatattctggggctct

SEQ ID NO: 768021 - DNA, 25 bp, Homo sapien
tatattctggggctctttattttgc

SEQ ID NO: 768022 - DNA, 25 bp, Homo sapien
tctttatattctggggctctttatt

SEQ ID NO: 768023 - DNA, 25 bp, Homo sapien
cattggttaacataattataacctc

SEQ ID NO: 768024 - DNA, 25 bp, Homo sapien
gatgcagaccagctaaaagctttgc

SEQ ID NO: 768025 - DNA, 25 bp, Homo sapien
gggatgcagaccagctaaaagcttt

SEQ ID NO: 768026 - DNA, 25 bp, Homo sapien
taagtgaaggttgagggtaagctaa

SEQ ID NO: 768027 - DNA, 25 bp, Homo sapien
ggatgcagaccagctaaaagctttg

SEQ ID NO: 768028 - DNA, 25 bp, Homo sapien
ccagtatgcatattcttatgattag

SEQ ID NO: 768029 - DNA, 25 bp, Homo sapien
cagtatgcatattcttatgattagc

SEQ ID NO: 768030 - DNA, 25 bp, Homo sapien
tctccagtatgcatattcttatgat

SEQ ID NO: 768031 - DNA, 25 bp, Homo sapien
gtatgcatattcttatgattagcaa

SEQ ID NO: 768032 - DNA, 25 bp, Homo sapien
tatggacagcagtggtttggaactg

SEQ ID NO: 768033 - DNA, 25 bp, Homo sapien
tttataagacttttgtccaatatga

SEQ ID NO: 768034 - DNA, 25 bp, Homo sapien
ccacacttgtagtgattttttccag

SEQ ID NO: 768035 - DNA, 25 bp, Homo sapien
gaattatcttatggacagcagtggt

SEQ ID NO: 768036 - DNA, 25 bp, Homo sapien
taaatggtttccaacaaccctgctc

SEQ ID NO: 768037 - DNA, 25 bp, Homo sapien
ggtacaaagtactcataacaagcct

SEQ ID NO: 768038 - DNA, 25 bp, Homo sapien
agctacaatgaaaccgggtgcagtg

SEQ ID NO: 768039 - DNA, 25 bp, Homo sapien
cccctaaatagtatggagaacttca

SEQ ID NO: 768040 - DNA, 25 bp, Homo sapien
ctgtctcccccggactcgacctggg

SEQ ID NO: 768041 - DNA, 25 bp, Homo sapien
gtgctgtctcccccggactcgacct

SEQ ID NO: 768042 - DNA, 25 bp, Homo sapien
cgtgctgtctcccccggactcgacc

SEQ ID NO: 768043 - DNA, 25 bp, Homo sapien
tgctgtctcccccggactcgacctg

SEQ ID NO: 768044 - DNA, 25 bp, Homo sapien
gggccgccatgccagaaaccgcttt

SEQ ID NO: 768045 - DNA, 25 bp, Homo sapien
aagacgggccgccatgccagaaacc

SEQ ID NO: 768046 - DNA, 25 bp, Homo sapien
caaagacgggccgccatgccagaaa

SEQ ID NO: 768047 - DNA, 25 bp, Homo sapien
cagaaaccgctttgtggcgcacagg

SEQ ID NO: 768048 - DNA, 25 bp, Homo sapien
ggcttcctcttccagaccgtatcgt

SEQ ID NO: 768049 - DNA, 25 bp, Homo sapien
cttccagaccgtatcgtggtgtggc

SEQ ID NO: 768050 - DNA, 25 bp, Homo sapien
tcgtgggtccactgctctcctgcgg

SEQ ID NO: 768051 - DNA, 25 bp, Homo sapien
tgtcgtgggtccactgctctcctgc

SEQ ID NO: 768052 - DNA, 25 bp, Homo sapien
cccactccactcctctccattccat

SEQ ID NO: 768053 - DNA, 25 bp, Homo sapien
ttccatttttttcgagtccattcca

SEQ ID NO: 768054 - DNA, 25 bp, Homo sapien
tccattccatttttttcgagtccat

SEQ ID NO: 768055 - DNA, 25 bp, Homo sapien
ccattccactcaactccactgcact

SEQ ID NO: 768056 - DNA, 25 bp, Homo sapien
ccattccactcaactccactgcact

SEQ ID NO: 768057 - DNA, 25 bp, Homo sapien
tccagtccactccactcctctccat

SEQ ID NO: 768058 - DNA, 25 bp, Homo sapien
cattccattccactcaactccactg

SEQ ID NO: 768059 - DNA, 25 bp, Homo sapien
ttttttcaagtccattccattccat

SEQ ID NO: 768060 - DNA, 25 bp, Homo sapien
gattgcatctgctcctgaggcttcc

SEQ ID NO: 768061 - DNA, 25 bp, Homo sapien
attgcatctgctcctgaggcttccg

SEQ ID NO: 768062 - DNA, 25 bp, Homo sapien
tcttcacgtagttctggagccttgg

SEQ ID NO: 768063 - DNA, 25 bp, Homo sapien
cattcttcacgtagttctggagcct

SEQ ID NO: 768064 - DNA, 25 bp, Homo sapien
atccaaatcaccagacaggagatca

SEQ ID NO: 768065 - DNA, 25 bp, Homo sapien
cagacaggagatcatagctagtccc

SEQ ID NO: 768066 - DNA, 25 bp, Homo sapien
caggagatcatagctagtcccaggc

SEQ ID NO: 768067 - DNA, 25 bp, Homo sapien
tcaccagacaggagatcatagctag

SEQ ID NO: 768068 - DNA, 25 bp, Homo sapien
aatagttaactgactctcataaggg

SEQ ID NO: 768069 - DNA, 25 bp, Homo sapien
tattggcaaattccaaaggtgtgga

SEQ ID NO: 768070 - DNA, 25 bp, Homo sapien
acagaggatccaagatgataggtct

SEQ ID NO: 768071 - DNA, 25 bp, Homo sapien
caaaattatgccactacagaggatc

SEQ ID NO: 768072 - DNA, 25 bp, Homo sapien
cactctacagcaaattgggtctcag

SEQ ID NO: 768073 - DNA, 25 bp, Homo sapien
gcacatgatattttggtattcccca

SEQ ID NO: 768074 - DNA, 25 bp, Homo sapien
tccctagacagataagcacatgata

SEQ ID NO: 768075 - DNA, 25 bp, Homo sapien
tctccatgagaagtctgctaggtac

SEQ ID NO: 768076 - DNA, 25 bp, Homo sapien
gggctggttcccattcctgacacct

SEQ ID NO: 768077 - DNA, 25 bp, Homo sapien
ctgacacctccacccacagtgtcct

SEQ ID NO: 768078 - DNA, 25 bp, Homo sapien
cacccacagtgtcctgtctcccact

SEQ ID NO: 768079 - DNA, 25 bp, Homo sapien
cctccacccacagtgtcctgtctcc

SEQ ID NO: 768080 - DNA, 25 bp, Homo sapien
tctggcaaaagctggccaggacctg

SEQ ID NO: 768081 - DNA, 25 bp, Homo sapien
ccagcctctccttctggcaaaagct

SEQ ID NO: 768082 - DNA, 25 bp, Homo sapien
gcctctccttctggcaaaagctggc

SEQ ID NO: 768083 - DNA, 25 bp, Homo sapien
ttctggcaaaagctggccaggacct

SEQ ID NO: 768084 - DNA, 25 bp, Homo sapien
cctgaacttgacattatcagtaaag

SEQ ID NO: 768085 - DNA, 25 bp, Homo sapien
aagcacaatagttcttaaattcact

SEQ ID NO: 768086 - DNA, 25 bp, Homo sapien
tcaatgctcgaatcttcactaacac

SEQ ID NO: 768087 - DNA, 25 bp, Homo sapien
aatcttcatgtgttgtgaaaccttt

SEQ ID NO: 768088 - DNA, 25 bp, Homo sapien
cactaaaccagttactacttgcact

SEQ ID NO: 768089 - DNA, 25 bp, Homo sapien
aaattggagaggatggagtttcatg

SEQ ID NO: 768090 - DNA, 25 bp, Homo sapien
ggatggagtttcatgtatgcctcca

SEQ ID NO: 768091 - DNA, 25 bp, Homo sapien
gagtttcatgtatgcctccaaatgc

SEQ ID NO: 768092 - DNA, 25 bp, Homo sapien
gtttcatgtatgcctccaaatgctg

SEQ ID NO: 768093 - DNA, 25 bp, Homo sapien
ggtgaagcattttgatcatctccac

SEQ ID NO: 768094 - DNA, 25 bp, Homo sapien
cctggccctgtttgttcttttacat

SEQ ID NO: 768095 - DNA, 25 bp, Homo sapien
catgatttagtccaagatgaacaca

SEQ ID NO: 768096 - DNA, 25 bp, Homo sapien
tataatggattgcatgtacatttac

SEQ ID NO: 768097 - DNA, 25 bp, Homo sapien
gtggctctggtacatttcctaataa

SEQ ID NO: 768098 - DNA, 25 bp, Homo sapien
ggtcctgggtccagccaatctggca

SEQ ID NO: 768099 - DNA, 25 bp, Homo sapien
gctcatgggtaaaggctgtggccag

SEQ ID NO: 768100 - DNA, 25 bp, Homo sapien
tctgtcccatctttgctaatacgct

SEQ ID NO: 768101 - DNA, 25 bp, Homo sapien
tctttgctaatacgctcagcatctc

SEQ ID NO: 768102 - DNA, 25 bp, Homo sapien
cactacatgagtttacaaggccagc

SEQ ID NO: 768103 - DNA, 25 bp, Homo sapien
ggttcaacaatgttaggcccagcat

SEQ ID NO: 768104 - DNA, 25 bp, Homo sapien
cctggctatggttcactggttcaac

SEQ ID NO: 768105 - DNA, 25 bp, Homo sapien
tatggctgtaagacggctaccgaag

SEQ ID NO: 768106 - DNA, 25 bp, Homo sapien
aaaccaaaacagagacagcttccat

SEQ ID NO: 768107 - DNA, 25 bp, Homo sapien
gtcactcttgtgcacaccaagactg

SEQ ID NO: 768108 - DNA, 25 bp, Homo sapien
tgtctaggtctccttgtcactcttg

SEQ ID NO: 768109 - DNA, 25 bp, Homo sapien
ctgagtccactcagatatcttctgc

SEQ ID NO: 768110 - DNA, 25 bp, Homo sapien
taaacatggtgcctttctgatagcc

SEQ ID NO: 768111 - DNA, 25 bp, Homo sapien
tcctctcaagtacaataagggctgc

SEQ ID NO: 768112 - DNA, 25 bp, Homo sapien
taaacttggtataagcagggacctg

SEQ ID NO: 768113 - DNA, 25 bp, Homo sapien
gaattggactcccttactagctgtt

SEQ ID NO: 768114 - DNA, 25 bp, Homo sapien
gtacacctggggcctttagactcca

SEQ ID NO: 768115 - DNA, 25 bp, Homo sapien
tacacctggggcctttagactccaa

SEQ ID NO: 768116 - DNA, 25 bp, Homo sapien
cacctggggcctttagactccaaat

SEQ ID NO: 768117 - DNA, 25 bp, Homo sapien
ctggggcctttagactccaaatgtc

SEQ ID NO: 768118 - DNA, 25 bp, Homo sapien
tcttcaggccctaggtgaaaactcc

SEQ ID NO: 768119 - DNA, 25 bp, Homo sapien
caggtgatcttcaggccctaggtga

SEQ ID NO: 768120 - DNA, 25 bp, Homo sapien
gtgaaaactccaggctctaagtgga

SEQ ID NO: 768121 - DNA, 25 bp, Homo sapien
ctgatgtttactggggccagatgtc

SEQ ID NO: 768122 - DNA, 25 bp, Homo sapien
tggtgtacccatggggcctgggcat

SEQ ID NO: 768123 - DNA, 25 bp, Homo sapien
ctggtgtacccatggggcctgggca

SEQ ID NO: 768124 - DNA, 25 bp, Homo sapien
ctgatatccacctgtagtatgggtg

SEQ ID NO: 768125 - DNA, 25 bp, Homo sapien
cctgtagtatgggtgtcaaccttgg

SEQ ID NO: 768126 - DNA, 25 bp, Homo sapien
ggcggatgttcagctggcgtccact

SEQ ID NO: 768127 - DNA, 25 bp, Homo sapien
tgtcaaccttggggcggatgttcag

SEQ ID NO: 768128 - DNA, 25 bp, Homo sapien
tccactgggacatgatacccactgg

SEQ ID NO: 768129 - DNA, 25 bp, Homo sapien
cactgggacatgatacccactggga

SEQ ID NO: 768130 - DNA, 25 bp, Homo sapien
ccactgggacatgatacccactggg

SEQ ID NO: 768131 - DNA, 25 bp, Homo sapien
tcgctcccatggcgtgacttcaggg

SEQ ID NO: 768132 - DNA, 25 bp, Homo sapien
ctcgctcccatggcgtgacttcagg

SEQ ID NO: 768133 - DNA, 25 bp, Homo sapien
cctcgctcccatggcgtgacttcag

SEQ ID NO: 768134 - DNA, 25 bp, Homo sapien
agagggtccgcaggcagggccgaga

SEQ ID NO: 768135 - DNA, 25 bp, Homo sapien
acaaaaggcagagggtccgcaggca

SEQ ID NO: 768136 - DNA, 25 bp, Homo sapien
gcagggccgagagcaggcagcccag

SEQ ID NO: 768137 - DNA, 25 bp, Homo sapien
cagggccgagagcaggcagcccagg

SEQ ID NO: 768138 - DNA, 25 bp, Homo sapien
gctaacttcaggaatcccgggccag

SEQ ID NO: 768139 - DNA, 25 bp, Homo sapien
tcagctaacttcaggaatcccgggc

SEQ ID NO: 768140 - DNA, 25 bp, Homo sapien
atcagctaacttcaggaatcccggg

SEQ ID NO: 768141 - DNA, 25 bp, Homo sapien
aacttcaggaatcccgggccagctg

SEQ ID NO: 768142 - DNA, 25 bp, Homo sapien
tcgcaagcggctgtgagtgatgcct

SEQ ID NO: 768143 - DNA, 25 bp, Homo sapien
cccggtgtcgcaagcggctgtgagt

SEQ ID NO: 768144 - DNA, 25 bp, Homo sapien
gcaagcggctgtgagtgatgcctcc

SEQ ID NO: 768145 - DNA, 25 bp, Homo sapien
tgtcgcaagcggctgtgagtgatgc

SEQ ID NO: 768146 - DNA, 25 bp, Homo sapien
gatgagaaattccacccaggaaatt

SEQ ID NO: 768147 - DNA, 25 bp, Homo sapien
gctggacaagttgggactcagttct

SEQ ID NO: 768148 - DNA, 25 bp, Homo sapien
gtgatcacccaaaagcttccaggct

SEQ ID NO: 768149 - DNA, 25 bp, Homo sapien
gggacatggttatttatgaagctcc

SEQ ID NO: 768150 - DNA, 25 bp, Homo sapien
gtccaggtcatcttggaggtggcca

SEQ ID NO: 768151 - DNA, 25 bp, Homo sapien
ttggaggtggccaagggtacagggc

SEQ ID NO: 768152 - DNA, 25 bp, Homo sapien
ccaggtcatcttggaggtggccaag

SEQ ID NO: 768153 - DNA, 25 bp, Homo sapien
aggtggccaagggtacagggccctg

SEQ ID NO: 768154 - DNA, 25 bp, Homo sapien
gttttggggttgctacctttgctga

SEQ ID NO: 768155 - DNA, 25 bp, Homo sapien
cccaggtctcctgtggtgggcctga

SEQ ID NO: 768156 - DNA, 25 bp, Homo sapien
gagcttcctccctatcaaatggagg

SEQ ID NO: 768157 - DNA, 25 bp, Homo sapien
ccctatcaaatggaggtgttttggg

SEQ ID NO: 768158 - DNA, 25 bp, Homo sapien
catcctagggtgcatcctccaacat

SEQ ID NO: 768159 - DNA, 25 bp, Homo sapien
tagggtgcatcctccaacatgggtg

SEQ ID NO: 768160 - DNA, 25 bp, Homo sapien
gctgctgcccatcctagggtgcatc

SEQ ID NO: 768161 - DNA, 25 bp, Homo sapien
tgctgcccatcctagggtgcatcct

SEQ ID NO: 768162 - DNA, 25 bp, Homo sapien
ggcttctccacacctgtgtccaaag

SEQ ID NO: 768163 - DNA, 25 bp, Homo sapien
catagtctgagtcttcttcttcctc

SEQ ID NO: 768164 - DNA, 25 bp, Homo sapien
cagcagcccatagtctgagtcttct

SEQ ID NO: 768165 - DNA, 25 bp, Homo sapien
agcccatagtctgagtcttcttctt

SEQ ID NO: 768166 - DNA, 25 bp, Homo sapien
aatgtctatcttactatcttatatg

SEQ ID NO: 768167 - DNA, 25 bp, Homo sapien
ctggaccttgagcttttaaaggtgc

SEQ ID NO: 768168 - DNA, 25 bp, Homo sapien
taagaggacctgcttgagacacagc

SEQ ID NO: 768169 - DNA, 25 bp, Homo sapien
gtgctataactttacaccggtttca

SEQ ID NO: 768170 - DNA, 25 bp, Homo sapien
ttctttgctcccattaaccaaaaga

SEQ ID NO: 768171 - DNA, 25 bp, Homo sapien
cagaacattactccgacttcaccat

SEQ ID NO: 768172 - DNA, 25 bp, Homo sapien
aacattactccgacttcaccattca

SEQ ID NO: 768173 - DNA, 25 bp, Homo sapien
acattactccgacttcaccattcat

SEQ ID NO: 768174 - DNA, 25 bp, Homo sapien
gaacattactccgacttcaccattc

SEQ ID NO: 768175 - DNA, 25 bp, Homo sapien
ttgatggtgactggtaatttacctg

SEQ ID NO: 768176 - DNA, 25 bp, Homo sapien
caaatgagtctgtgatgaatgttga

SEQ ID NO: 768177 - DNA, 25 bp, Homo sapien
tgatggtgactggtaatttacctga

SEQ ID NO: 768178 - DNA, 25 bp, Homo sapien
tctgtgatgaatgttgatggtgact

SEQ ID NO: 768179 - DNA, 25 bp, Homo sapien
ccttgggttggccacaggacaatga

SEQ ID NO: 768180 - DNA, 25 bp, Homo sapien
tcctgagagcggtgtgctcctcttc

SEQ ID NO: 768181 - DNA, 25 bp, Homo sapien
actgctagggtaccgccttgggttg

SEQ ID NO: 768182 - DNA, 25 bp, Homo sapien
tttgtacacctgtgagtctcaacca

SEQ ID NO: 768183 - DNA, 25 bp, Homo sapien
tgtgaagcacatgctcggctgcaaa

SEQ ID NO: 768184 - DNA, 25 bp, Homo sapien
gatgttggaggagtgctcccttcat

SEQ ID NO: 768185 - DNA, 25 bp, Homo sapien
tgatgtgaagcacatgctcggctgc

SEQ ID NO: 768186 - DNA, 25 bp, Homo sapien
aagatgttggaggagtgctcccttc

SEQ ID NO: 768187 - DNA, 25 bp, Homo sapien
caatgcgatcaagcgtggcactggc

SEQ ID NO: 768188 - DNA, 25 bp, Homo sapien
tgcctgccggaggactaaagaggtt

SEQ ID NO: 768189 - DNA, 25 bp, Homo sapien
gattccgaggtgaggccaatgcgat

SEQ ID NO: 768190 - DNA, 25 bp, Homo sapien
aacaaagacagaggcgattccgagg

SEQ ID NO: 768191 - DNA, 25 bp, Homo sapien
aggccgggactcactgcaacacaga

SEQ ID NO: 768192 - DNA, 25 bp, Homo sapien
cacatctgctaaggcaggccgggac

SEQ ID NO: 768193 - DNA, 25 bp, Homo sapien
tgaaaattcactgacccatgagctg

SEQ ID NO: 768194 - DNA, 25 bp, Homo sapien
aggagcctcaaagcatagtgtcagc

SEQ ID NO: 768195 - DNA, 25 bp, Homo sapien
gggtgctgaaccggtggcttgtcca

SEQ ID NO: 768196 - DNA, 25 bp, Homo sapien
aggggtgctgaaccggtggcttgtc

SEQ ID NO: 768197 - DNA, 25 bp, Homo sapien
ggaggggtgctgaaccggtggcttg

SEQ ID NO: 768198 - DNA, 25 bp, Homo sapien
gtgctgaaccggtggcttgtccaga

SEQ ID NO: 768199 - DNA, 25 bp, Homo sapien
ttttctgtcgccgtgtcgaactgtt

SEQ ID NO: 768200 - DNA, 25 bp, Homo sapien
tgtcgccgtgtcgaactgttcctgg

SEQ ID NO: 768201 - DNA, 25 bp, Homo sapien
ccgtgtcgaactgttcctggatttc

SEQ ID NO: 768202 - DNA, 25 bp, Homo sapien
tctgtcgccgtgtcgaactgttcct

SEQ ID NO: 768203 - DNA, 25 bp, Homo sapien
atgggcatccgggaaaaagtgtcaa

SEQ ID NO: 768204 - DNA, 25 bp, Homo sapien
tcatgggcatccgggaaaaagtgtc

SEQ ID NO: 768205 - DNA, 25 bp, Homo sapien
catccgggaaaaagtgtcaagcggg

SEQ ID NO: 768206 - DNA, 25 bp, Homo sapien
ggcatccgggaaaaagtgtcaagcg

SEQ ID NO: 768207 - DNA, 25 bp, Homo sapien
gaattgattccatggatctcatcac

SEQ ID NO: 768208 - DNA, 25 bp, Homo sapien
ccacgagaattgattccatggatct

SEQ ID NO: 768209 - DNA, 25 bp, Homo sapien
cgagaattgattccatggatctcat

SEQ ID NO: 768210 - DNA, 25 bp, Homo sapien
ttgattccatggatctcatcactgt

SEQ ID NO: 768211 - DNA, 25 bp, Homo sapien
ggatcaggtaagggaatctgtgccc

SEQ ID NO: 768212 - DNA, 25 bp, Homo sapien
aggatcaggtaagggaatctgtgcc

SEQ ID NO: 768213 - DNA, 25 bp, Homo sapien
gatcaggtaagggaatctgtgccct

SEQ ID NO: 768214 - DNA, 25 bp, Homo sapien
atcaggtaagggaatctgtgccctt

SEQ ID NO: 768215 - DNA, 25 bp, Homo sapien
gtcacctcccattggcggctgatgg

SEQ ID NO: 768216 - DNA, 25 bp, Homo sapien
gcttctgtgcccagactttctgggt

SEQ ID NO: 768217 - DNA, 25 bp, Homo sapien
cattggcggctgatgggttgaggag

SEQ ID NO: 768218 - DNA, 25 bp, Homo sapien
ttcccacggcaactcctcagcgtct

SEQ ID NO: 768219 - DNA, 25 bp, Homo sapien
ggacaggagcttgccagttacccaa

SEQ ID NO: 768220 - DNA, 25 bp, Homo sapien
ggagcttgccagttacccaaagaat

SEQ ID NO: 768221 - DNA, 25 bp, Homo sapien
gcgtgcgctggacaggagcttgcca

SEQ ID NO: 768222 - DNA, 25 bp, Homo sapien
tgcgctggacaggagcttgccagtt

SEQ ID NO: 768223 - DNA, 25 bp, Homo sapien
cacactctgaccccatagaatttcc

SEQ ID NO: 768224 - DNA, 25 bp, Homo sapien
acactctgaccccatagaatttcca

SEQ ID NO: 768225 - DNA, 25 bp, Homo sapien
tcacactctgaccccatagaatttc

SEQ ID NO: 768226 - DNA, 25 bp, Homo sapien
tcaggaaagagaggaccagcatgtg

SEQ ID NO: 768227 - DNA, 25 bp, Homo sapien
gagaggaccagcatgtggcaaatgc

SEQ ID NO: 768228 - DNA, 25 bp, Homo sapien
ctgtcaggaaagagaggaccagcat

SEQ ID NO: 768229 - DNA, 25 bp, Homo sapien
agagaggaccagcatgtggcaaatg

SEQ ID NO: 768230 - DNA, 25 bp, Homo sapien
aagacaccgatactcaaagtcacag

SEQ ID NO: 768231 - DNA, 25 bp, Homo sapien
aacattgcaaggaagacaccgatac

SEQ ID NO: 768232 - DNA, 25 bp, Homo sapien
gcaaggaagacaccgatactcaaag

SEQ ID NO: 768233 - DNA, 25 bp, Homo sapien
ttccatcgggctccaattctgcact

SEQ ID NO: 768234 - DNA, 25 bp, Homo sapien
tgttgagcattttactggagtttgg

SEQ ID NO: 768235 - DNA, 25 bp, Homo sapien
cagagatatgtgacgaaaagtacag

SEQ ID NO: 768236 - DNA, 25 bp, Homo sapien
gaagctgttatactcatagtttatt

SEQ ID NO: 768237 - DNA, 25 bp, Homo sapien
aagatatagactaaaatcagcagca

SEQ ID NO: 768238 - DNA, 25 bp, Homo sapien
ctgaaagagggacaggagagcacca

SEQ ID NO: 768239 - DNA, 25 bp, Homo sapien
tcagtgctggctgaaagagggacag

SEQ ID NO: 768240 - DNA, 25 bp, Homo sapien
agtgctggctgaaagagggacagga

SEQ ID NO: 768241 - DNA, 25 bp, Homo sapien
tgctggctgaaagagggacaggaga

SEQ ID NO: 768242 - DNA, 25 bp, Homo sapien
gccgtgcaggggtacaaccatcttc

SEQ ID NO: 768243 - DNA, 25 bp, Homo sapien
agaagagccgtgcaggggtacaacc

SEQ ID NO: 768244 - DNA, 25 bp, Homo sapien
aagagccgtgcaggggtacaaccat

SEQ ID NO: 768245 - DNA, 25 bp, Homo sapien
cagagaagagccgtgcaggggtaca

SEQ ID NO: 768246 - DNA, 25 bp, Homo sapien
taaggggaggagtgcgaaacatgtg

SEQ ID NO: 768247 - DNA, 25 bp, Homo sapien
aggggaggagtgcgaaacatgtgac

SEQ ID NO: 768248 - DNA, 25 bp, Homo sapien
ataaggggaggagtgcgaaacatgt

SEQ ID NO: 768249 - DNA, 25 bp, Homo sapien
aaggggaggagtgcgaaacatgtga

SEQ ID NO: 768250 - DNA, 25 bp, Homo sapien
agcactgccacagtaggctcccact

SEQ ID NO: 768251 - DNA, 25 bp, Homo sapien
ctccggactccgcctggtgtttcct

SEQ ID NO: 768252 - DNA, 25 bp, Homo sapien
gatgcggtgctgcttcctccggact

SEQ ID NO: 768253 - DNA, 25 bp, Homo sapien
agtaggctcccactttgccaagcct

SEQ ID NO: 768254 - DNA, 25 bp, Homo sapien
caacgagaacgacccctgggtgtga

SEQ ID NO: 768255 - DNA, 25 bp, Homo sapien
gcagaagcattgaaacacacaccgc

SEQ ID NO: 768256 - DNA, 25 bp, Homo sapien
tgtcctcgagatcacggcggcacga

SEQ ID NO: 768257 - DNA, 25 bp, Homo sapien
gacagaagagcgaatgggtgacaca

SEQ ID NO: 768258 - DNA, 25 bp, Homo sapien
tcacacacacaaagcggatccgggg

SEQ ID NO: 768259 - DNA, 25 bp, Homo sapien
acacacaaagcggatccggggcggt

SEQ ID NO: 768260 - DNA, 25 bp, Homo sapien
aacgattgacaaccggccctcatga

SEQ ID NO: 768261 - DNA, 25 bp, Homo sapien
tccggggcggtgaaaacgattgaca

SEQ ID NO: 768262 - DNA, 25 bp, Homo sapien
atgggtccactgctctcctgccgga

SEQ ID NO: 768263 - DNA, 25 bp, Homo sapien
tgacatgggtccactgctctcctgc

SEQ ID NO: 768264 - DNA, 25 bp, Homo sapien
acatgggtccactgctctcctgccg

SEQ ID NO: 768265 - DNA, 25 bp, Homo sapien
ctgccggacaaagagcccctgtggg

SEQ ID NO: 768266 - DNA, 25 bp, Homo sapien
ggactgtgaagtcgtctttcttgaa

SEQ ID NO: 768267 - DNA, 25 bp, Homo sapien
agtcgtctttcttgaagacatttgg

SEQ ID NO: 768268 - DNA, 25 bp, Homo sapien
tgtgaagtcgtctttcttgaagaca

SEQ ID NO: 768269 - DNA, 25 bp, Homo sapien
gtctttcttgaagacatttggccag

SEQ ID NO: 768270 - DNA, 25 bp, Homo sapien
agagaaacaatcgtgtgacacggat

SEQ ID NO: 768271 - DNA, 25 bp, Homo sapien
aacaatcgtgtgacacggatctcca

SEQ ID NO: 768272 - DNA, 25 bp, Homo sapien
gagaaacaatcgtgtgacacggatc

SEQ ID NO: 768273 - DNA, 25 bp, Homo sapien
tgccgtgctgcctcccccagactct

SEQ ID NO: 768274 - DNA, 25 bp, Homo sapien
ctgcctcccccagactctgcctggg

SEQ ID NO: 768275 - DNA, 25 bp, Homo sapien
ctgggatgccgtgctgcctccccca

SEQ ID NO: 768276 - DNA, 25 bp, Homo sapien
aaccaacaccgtctgggcaggcctg

SEQ ID NO: 768277 - DNA, 25 bp, Homo sapien
ggtccgctcctctcttgcgggacaa

SEQ ID NO: 768278 - DNA, 25 bp, Homo sapien
aaaatcatcttctctgatgtgggtc

SEQ ID NO: 768279 - DNA, 25 bp, Homo sapien
cgctcctctcttgcgggacaaagag

SEQ ID NO: 768280 - DNA, 25 bp, Homo sapien
gatgtgggtccgctcctctcttgcg

SEQ ID NO: 768281 - DNA, 25 bp, Homo sapien
aggaacccctccatccagcatttcc

SEQ ID NO: 768282 - DNA, 25 bp, Homo sapien
caggaacccctccatccagcatttc

SEQ ID NO: 768283 - DNA, 25 bp, Homo sapien
gaacccctccatccagcatttcctt

SEQ ID NO: 768284 - DNA, 25 bp, Homo sapien
ggaacccctccatccagcatttcct

SEQ ID NO: 768285 - DNA, 25 bp, Homo sapien
agtgcagacccgcacttcgtgtaac

SEQ ID NO: 768286 - DNA, 25 bp, Homo sapien
tgtaactcctactgcacgttccaca

SEQ ID NO: 768287 - DNA, 25 bp, Homo sapien
gggcgtagagaccactccgggatgt

SEQ ID NO: 768288 - DNA, 25 bp, Homo sapien
gccgactggggcgtagagaccactc

SEQ ID NO: 768289 - DNA, 25 bp, Homo sapien
acggctatggaggaggcagcggata

SEQ ID NO: 768290 - DNA, 25 bp, Homo sapien
cggctatggaggaggcagcggatac

SEQ ID NO: 768291 - DNA, 25 bp, Homo sapien
tcctcgagatgatcaccctcggcag

SEQ ID NO: 768292 - DNA, 25 bp, Homo sapien
gagatgatcaccctcggcagggata

SEQ ID NO: 768293 - DNA, 25 bp, Homo sapien
tcgagatgatcaccctcggcaggga

SEQ ID NO: 768294 - DNA, 25 bp, Homo sapien
gactttccgctcctcgagatgatca

SEQ ID NO: 768295 - DNA, 25 bp, Homo sapien
gagatgcgggatgcccgggctcggg

SEQ ID NO: 768296 - DNA, 25 bp, Homo sapien
tgctgctggagatgcgggatgcccg

SEQ ID NO: 768297 - DNA, 25 bp, Homo sapien
gctgctggagatgcgggatgcccgg

SEQ ID NO: 768298 - DNA, 25 bp, Homo sapien
ctggagatgcgggatgcccgggctc

SEQ ID NO: 768299 - DNA, 25 bp, Homo sapien
aattgtgccgtaacttttcttgtga

SEQ ID NO: 768300 - DNA, 25 bp, Homo sapien
ttgtgccgtaacttttcttgtgaaa

SEQ ID NO: 768301 - DNA, 25 bp, Homo sapien
tgtgccgtaacttttcttgtgaaag

SEQ ID NO: 768302 - DNA, 25 bp, Homo sapien
taattgtgccgtaacttttcttgtg

SEQ ID NO: 768303 - DNA, 25 bp, Homo sapien
catgctccttgctcacaaaaggatg

SEQ ID NO: 768304 - DNA, 25 bp, Homo sapien
atgctccttgctcacaaaaggatgc

SEQ ID NO: 768305 - DNA, 25 bp, Homo sapien
tcatgctccttgctcacaaaaggat

SEQ ID NO: 768306 - DNA, 25 bp, Homo sapien
catcatgctccttgctcacaaaagg

SEQ ID NO: 768307 - DNA, 25 bp, Homo sapien
ggtagacagcaggttcaaggtgaat

SEQ ID NO: 768308 - DNA, 25 bp, Homo sapien
ggacatcaggccctaggtagacagc

SEQ ID NO: 768309 - DNA, 25 bp, Homo sapien
cagggagacccttgtccccaggtga

SEQ ID NO: 768310 - DNA, 25 bp, Homo sapien
tatgagactcccgataaacaccggt

SEQ ID NO: 768311 - DNA, 25 bp, Homo sapien
agtcggatatcaggccccaggagaa

SEQ ID NO: 768312 - DNA, 25 bp, Homo sapien
tggacttgaggtgtacatcaggcct

SEQ ID NO: 768313 - DNA, 25 bp, Homo sapien
ggtgaacatctgatcccagtcggat

SEQ ID NO: 768314 - DNA, 25 bp, Homo sapien
taactccaggccttaggtgaacatc

SEQ ID NO: 768315 - DNA, 25 bp, Homo sapien
tgtttcactctactagcatgagggc

SEQ ID NO: 768316 - DNA, 25 bp, Homo sapien
agagatgtcagaggacagttcctgg

SEQ ID NO: 768317 - DNA, 25 bp, Homo sapien
cagtcttggtgtgcacaagagtgac

SEQ ID NO: 768318 - DNA, 25 bp, Homo sapien
tatctgagtggactcagtggctgac

SEQ ID NO: 768319 - DNA, 25 bp, Homo sapien
ttctgatggagttggtccctggatc

SEQ ID NO: 768320 - DNA, 25 bp, Homo sapien
tgatggagttggtccctggatcact

SEQ ID NO: 768321 - DNA, 25 bp, Homo sapien
cccactgttctgatggagttggtcc

SEQ ID NO: 768322 - DNA, 25 bp, Homo sapien
cactgttctgatggagttggtccct

SEQ ID NO: 768323 - DNA, 25 bp, Homo sapien
gactgacacaaattgcactacaggg

SEQ ID NO: 768324 - DNA, 25 bp, Homo sapien
agactgacacaaattgcactacagg

SEQ ID NO: 768325 - DNA, 25 bp, Homo sapien
agaccccatccttcctctctccctg

SEQ ID NO: 768326 - DNA, 25 bp, Homo sapien
tccttcctctctccctgtgcttgtc

SEQ ID NO: 768327 - DNA, 25 bp, Homo sapien
tcctctctccctgtgcttgtcgcat

SEQ ID NO: 768328 - DNA, 25 bp, Homo sapien
cttcctctctccctgtgcttgtcgc

SEQ ID NO: 768329 - DNA, 25 bp, Homo sapien
tgtagtgactccagtttgctgctct

SEQ ID NO: 768330 - DNA, 25 bp, Homo sapien
ctgtagtgactccagtttgctgctc

SEQ ID NO: 768331 - DNA, 25 bp, Homo sapien
gtgactccagtttgctgctctcttc

SEQ ID NO: 768332 - DNA, 25 bp, Homo sapien
tagtgactccagtttgctgctctct

SEQ ID NO: 768333 - DNA, 25 bp, Homo sapien
tcccctccagaacagtatgtggttc

SEQ ID NO: 768334 - DNA, 25 bp, Homo sapien
cctccagaacagtatgtggttccaa

SEQ ID NO: 768335 - DNA, 25 bp, Homo sapien
ccagaacagtatgtggttccaaact

SEQ ID NO: 768336 - DNA, 25 bp, Homo sapien
gaggtcccctccagaacagtatgtg

SEQ ID NO: 768337 - DNA, 25 bp, Homo sapien
tgcctgtgccattgtagccttcagt

SEQ ID NO: 768338 - DNA, 25 bp, Homo sapien
gcctgtgccattgtagccttcagtg

SEQ ID NO: 768339 - DNA, 25 bp, Homo sapien
catcgggtggaacggagcatctgtc

SEQ ID NO: 768340 - DNA, 25 bp, Homo sapien
ttcatcatatgagggggctgcaccc

SEQ ID NO: 768341 - DNA, 25 bp, Homo sapien
ccatctcaccactagccatatgatg

SEQ ID NO: 768342 - DNA, 25 bp, Homo sapien
gggactcttgtggtcctggactccc

SEQ ID NO: 768343 - DNA, 25 bp, Homo sapien
tatgaatgctttgtgttctgacaaa

SEQ ID NO: 768344 - DNA, 25 bp, Homo sapien
agctctccctgctcgggagtgtatg

SEQ ID NO: 768345 - DNA, 25 bp, Homo sapien
tctgacaaagagactgtagctccca

SEQ ID NO: 768346 - DNA, 25 bp, Homo sapien
cctgctcgggagtgtatgaatgctt

SEQ ID NO: 768347 - DNA, 25 bp, Homo sapien
ggtttttgctccctgccgccgtggc

SEQ ID NO: 768348 - DNA, 25 bp, Homo sapien
tttgcggctttttgacctcgccacc

SEQ ID NO: 768349 - DNA, 25 bp, Homo sapien
gccgccgcgggttttgctgacgcgg

SEQ ID NO: 768350 - DNA, 25 bp, Homo sapien
cgccgcgggttttgctgacgcggct

SEQ ID NO: 768351 - DNA, 25 bp, Homo sapien
ccgccgccgcgggttttgctgacgc

SEQ ID NO: 768352 - DNA, 25 bp, Homo sapien
ccgcgggttttgctgacgcggcttt

SEQ ID NO: 768353 - DNA, 25 bp, Homo sapien
gcttttttccgttgtggcattttgc

SEQ ID NO: 768354 - DNA, 25 bp, Homo sapien
accatgggttttgccgacgcggctt

SEQ ID NO: 768355 - DNA, 25 bp, Homo sapien
ccgctgctttttgccgctagggctt

SEQ ID NO: 768356 - DNA, 25 bp, Homo sapien
gccgaggcttttttccgttgtggca

SEQ ID NO: 768357 - DNA, 25 bp, Homo sapien
ggctttttccctccgctgccgcagg

SEQ ID NO: 768358 - DNA, 25 bp, Homo sapien
ttgcccctgctcccttttgctcccg

SEQ ID NO: 768359 - DNA, 25 bp, Homo sapien
gcggctttttccctccgctgccgca

SEQ ID NO: 768360 - DNA, 25 bp, Homo sapien
ctccgctgccgcaggtttttttggt

SEQ ID NO: 768361 - DNA, 25 bp, Homo sapien
ctcacagagttaaacctttcttttg

SEQ ID NO: 768362 - DNA, 25 bp, Homo sapien
taaacctttcttttgattcagcagt

SEQ ID NO: 768363 - DNA, 25 bp, Homo sapien
tgattcagcagttttgaaactctct

SEQ ID NO: 768364 - DNA, 25 bp, Homo sapien
ttttgattcagcagttttgaaactc

SEQ ID NO: 768365 - DNA, 25 bp, Homo sapien
agaaacttctttgcgatgtgtgcat

SEQ ID NO: 768366 - DNA, 25 bp, Homo sapien
aagagagaagcaatctgagaaactt

SEQ ID NO: 768367 - DNA, 25 bp, Homo sapien
aaacttctttgcgatgtgtgcattc

SEQ ID NO: 768368 - DNA, 25 bp, Homo sapien
tgagaaacttctttgcgatgtgtgc

SEQ ID NO: 768369 - DNA, 25 bp, Homo sapien
gagatttggagcactttgatgccta

SEQ ID NO: 768370 - DNA, 25 bp, Homo sapien
aagtggagatttggagcactttgat

SEQ ID NO: 768371 - DNA, 25 bp, Homo sapien
tggagatttggagcactttgatgcc

SEQ ID NO: 768372 - DNA, 25 bp, Homo sapien
agatttggagcactttgatgcctat

SEQ ID NO: 768373 - DNA, 25 bp, Homo sapien
aaacctttcctttgattgagcagtt

SEQ ID NO: 768374 - DNA, 25 bp, Homo sapien
cagagttaaacctttcctttgattg

SEQ ID NO: 768375 - DNA, 25 bp, Homo sapien
tagcaatctgagaaacttctgtgtg

SEQ ID NO: 768376 - DNA, 25 bp, Homo sapien
agtagcaatctgagaaacttctgtg

SEQ ID NO: 768377 - DNA, 25 bp, Homo sapien
ctttggagtgctttgaggcctaagg

SEQ ID NO: 768378 - DNA, 25 bp, Homo sapien
ctgcaagtggacctttggagtgctt

SEQ ID NO: 768379 - DNA, 25 bp, Homo sapien
aatctgcaagtggacctttggagtg

SEQ ID NO: 768380 - DNA, 25 bp, Homo sapien
acctttggagtgctttgaggcctaa

SEQ ID NO: 768381 - DNA, 25 bp, Homo sapien
gcactttgaggcctctggtggaaaa

SEQ ID NO: 768382 - DNA, 25 bp, Homo sapien
tttggagcactttgaggcctctggt

SEQ ID NO: 768383 - DNA, 25 bp, Homo sapien
gacatttggagcactttgaggcctc

SEQ ID NO: 768384 - DNA, 25 bp, Homo sapien
agcactttgaggcctctggtggaaa

SEQ ID NO: 768385 - DNA, 25 bp, Homo sapien
ggagcactttgctgcctatggtagg

SEQ ID NO: 768386 - DNA, 25 bp, Homo sapien
gagcactttgctgcctatggtagga

SEQ ID NO: 768387 - DNA, 25 bp, Homo sapien
agcactttgctgcctatggtaggaa

SEQ ID NO: 768388 - DNA, 25 bp, Homo sapien
gcgctttgcggcctacggtagaaag

SEQ ID NO: 768389 - DNA, 25 bp, Homo sapien
cgctttgcggcctacggtagaaagg

SEQ ID NO: 768390 - DNA, 25 bp, Homo sapien
tcttttgattgagcagtttgaaaat

SEQ ID NO: 768391 - DNA, 25 bp, Homo sapien
cagtttgaaaatagtctttttgtag

SEQ ID NO: 768392 - DNA, 25 bp, Homo sapien
gcagtttgaaaatagtctttttgta

SEQ ID NO: 768393 - DNA, 25 bp, Homo sapien
gattgagcagtttgaaaatagtctt

SEQ ID NO: 768394 - DNA, 25 bp, Homo sapien
tgattgagcagttttgaagctctct

SEQ ID NO: 768395 - DNA, 25 bp, Homo sapien
ctagacagaagcaatctgagaaacc

SEQ ID NO: 768396 - DNA, 25 bp, Homo sapien
ctcacagagttaaatctttcttttg

SEQ ID NO: 768397 - DNA, 25 bp, Homo sapien
gacagaagcaatctgagaaacctct

SEQ ID NO: 768398 - DNA, 25 bp, Homo sapien
gagtgctttgaagcctatggtggaa

SEQ ID NO: 768399 - DNA, 25 bp, Homo sapien
ttggagtgctttgaagcctatggtg

SEQ ID NO: 768400 - DNA, 25 bp, Homo sapien
tttttgtagaatctaaaagtggaca

SEQ ID NO: 768401 - DNA, 25 bp, Homo sapien
acatttggagtgctttgaagcctat

SEQ ID NO: 768402 - DNA, 25 bp, Homo sapien
tagttttcaggtgacgatattcccg

SEQ ID NO: 768403 - DNA, 25 bp, Homo sapien
gtttccaatgtagcactcaaagagc

SEQ ID NO: 768404 - DNA, 25 bp, Homo sapien
cctgcagattgtgcaaaaagggtgt

SEQ ID NO: 768405 - DNA, 25 bp, Homo sapien
caaagaaggcttcaatttgctccaa

SEQ ID NO: 768406 - DNA, 25 bp, Homo sapien
aagaaattttcaactatgggagtag

SEQ ID NO: 768407 - DNA, 25 bp, Homo sapien
ggcataaatgtgctccaaatatcca

SEQ ID NO: 768408 - DNA, 25 bp, Homo sapien
accacaggcataaatgtgctccaaa

SEQ ID NO: 768409 - DNA, 25 bp, Homo sapien
cacaggcataaatgtgctccaaata

SEQ ID NO: 768410 - DNA, 25 bp, Homo sapien
gtttccaatgtagcactcaaagagc

SEQ ID NO: 768411 - DNA, 25 bp, Homo sapien
caaagaaggcttcaatttgctccaa

SEQ ID NO: 768412 - DNA, 25 bp, Homo sapien
cctgcagattgtgcaaaaagggtgt

SEQ ID NO: 768413 - DNA, 25 bp, Homo sapien
tagttttcaggtgacgatattcccg

SEQ ID NO: 768414 - DNA, 25 bp, Homo sapien
tagttttcaggtgacgatattcccg

SEQ ID NO: 768415 - DNA, 25 bp, Homo sapien
caaagaaggcttcaatttgctccaa

SEQ ID NO: 768416 - DNA, 25 bp, Homo sapien
gtttccaatgtagcactcaaagagc

SEQ ID NO: 768417 - DNA, 25 bp, Homo sapien
cctgcagattgtgcaaaaagggtgt

SEQ ID NO: 768418 - DNA, 25 bp, Homo sapien
tagttttcaggtgacgatattcccg

SEQ ID NO: 768419 - DNA, 25 bp, Homo sapien
gtttccaatgtagcactcaaagagc

SEQ ID NO: 768420 - DNA, 25 bp, Homo sapien
cctgcagattgtgcaaaaagggtgt

SEQ ID NO: 768421 - DNA, 25 bp, Homo sapien
caaagaaggcttcaatttgctccaa

SEQ ID NO: 768422 - DNA, 25 bp, Homo sapien
accacaggcataaatgtgctccaaa

SEQ ID NO: 768423 - DNA, 25 bp, Homo sapien
caggcataaatgtgctccaaatatc

SEQ ID NO: 768424 - DNA, 25 bp, Homo sapien
cacaggcataaatgtgctccaaata

SEQ ID NO: 768425 - DNA, 25 bp, Homo sapien
ggcataaatgtgctccaaatatcca

SEQ ID NO: 768426 - DNA, 25 bp, Homo sapien
aagaaattttcaactatgggagtag

SEQ ID NO: 768427 - DNA, 25 bp, Homo sapien
ggcataaatgtgctccaaatatcca

SEQ ID NO: 768428 - DNA, 25 bp, Homo sapien
cacaggcataaatgtgctccaaata

SEQ ID NO: 768429 - DNA, 25 bp, Homo sapien
aagaaattttcaactatgggagtag

SEQ ID NO: 768430 - DNA, 25 bp, Homo sapien
accacaggcataaatgtgctccaaa

SEQ ID NO: 768431 - DNA, 25 bp, Homo sapien
ggtcagctggcacaagttgttttac

SEQ ID NO: 768432 - DNA, 25 bp, Homo sapien
tcataggtctatagaataagcccct

SEQ ID NO: 768433 - DNA, 25 bp, Homo sapien
tttctgccacagtggtccttggtca

SEQ ID NO: 768434 - DNA, 25 bp, Homo sapien
tgaggcagcgacatcttatgcaagt

SEQ ID NO: 768435 - DNA, 25 bp, Homo sapien
ttcgaaacactaatgtcatgttgat

SEQ ID NO: 768436 - DNA, 25 bp, Homo sapien
ttctttctctactaactcgttcctc

SEQ ID NO: 768437 - DNA, 25 bp, Homo sapien
ctttctctactaactcgttcctcat

SEQ ID NO: 768438 - DNA, 25 bp, Homo sapien
catagcttcgaaacactaatgtcat

SEQ ID NO: 768439 - DNA, 25 bp, Homo sapien
tggacaggtggcacggtgtctgact

SEQ ID NO: 768440 - DNA, 25 bp, Homo sapien
gtggacaggtggcacggtgtctgac

SEQ ID NO: 768441 - DNA, 25 bp, Homo sapien
gtgtggacaggtggcacggtgtctg

SEQ ID NO: 768442 - DNA, 25 bp, Homo sapien
tgtggacaggtggcacggtgtctga

SEQ ID NO: 768443 - DNA, 25 bp, Homo sapien
ttgtgctcttttaattttgcgggga

SEQ ID NO: 768444 - DNA, 25 bp, Homo sapien
cagtttctcagtttgtgctctttta

SEQ ID NO: 768445 - DNA, 25 bp, Homo sapien
taattttgcggggagggaagccaga

SEQ ID NO: 768446 - DNA, 25 bp, Homo sapien
tcagtttgtgctcttttaattttgc

SEQ ID NO: 768447 - DNA, 25 bp, Homo sapien
tctttctttgttcctgggcagcggt

SEQ ID NO: 768448 - DNA, 25 bp, Homo sapien
ttggaaattgatctgagagcgcgga

SEQ ID NO: 768449 - DNA, 25 bp, Homo sapien
attgatctgagagcgcggaaggaca

SEQ ID NO: 768450 - DNA, 25 bp, Homo sapien
gagcgcggaaggacagaattctttc

SEQ ID NO: 768451 - DNA, 25 bp, Homo sapien
ctggtccttagccaggactccggta

SEQ ID NO: 768452 - DNA, 25 bp, Homo sapien
ggtccttagccaggactccggtaga

SEQ ID NO: 768453 - DNA, 25 bp, Homo sapien
ctccggtagatctggcagccgagtc

SEQ ID NO: 768454 - DNA, 25 bp, Homo sapien
aggactccggtagatctggcagccg

SEQ ID NO: 768455 - DNA, 25 bp, Homo sapien
agcccatgcaggctgccaacggaga

SEQ ID NO: 768456 - DNA, 25 bp, Homo sapien
gcgcctccctctgcaatagctgtgt

SEQ ID NO: 768457 - DNA, 25 bp, Homo sapien
cccatgcaggctgccaacggagatg

SEQ ID NO: 768458 - DNA, 25 bp, Homo sapien
ccctgcgcctccctctgcaatagct

SEQ ID NO: 768459 - DNA, 25 bp, Homo sapien
gtcctgggtcctccggctccaacat

SEQ ID NO: 768460 - DNA, 25 bp, Homo sapien
tggtcctgggtcctccggctccaac

SEQ ID NO: 768461 - DNA, 25 bp, Homo sapien
gtcctccggctccaacatcagcgag

SEQ ID NO: 768462 - DNA, 25 bp, Homo sapien
tccggctccaacatcagcgagtgca

SEQ ID NO: 768463 - DNA, 25 bp, Homo sapien
atggctggctaagtctacagggata

SEQ ID NO: 768464 - DNA, 25 bp, Homo sapien
ataccagcctctcttcaaccaccca

SEQ ID NO: 768465 - DNA, 25 bp, Homo sapien
cagcctctcttcaaccacccaattt

SEQ ID NO: 768466 - DNA, 25 bp, Homo sapien
tcatggctggctaagtctacaggga

SEQ ID NO: 768467 - DNA, 25 bp, Homo sapien
cttttcaaatatcgcatttttttca

SEQ ID NO: 768468 - DNA, 25 bp, Homo sapien
caaatatcgcatttttttcacagac

SEQ ID NO: 768469 - DNA, 25 bp, Homo sapien
ttcaaatatcgcatttttttcacag

SEQ ID NO: 768470 - DNA, 25 bp, Homo sapien
ctacttttcaaatatcgcatttttt

SEQ ID NO: 768471 - DNA, 25 bp, Homo sapien
acaaaagacaagggtagaagacatt

SEQ ID NO: 768472 - DNA, 25 bp, Homo sapien
gaagacatttgtaaccctataaaca

SEQ ID NO: 768473 - DNA, 25 bp, Homo sapien
aattttttgcaccatcagacaaaag

SEQ ID NO: 768474 - DNA, 25 bp, Homo sapien
aaattttttgcaccatcagacaaaa

SEQ ID NO: 768475 - DNA, 25 bp, Homo sapien
agcaaacacaaatccagtggtgaaa

SEQ ID NO: 768476 - DNA, 25 bp, Homo sapien
tggagcaaacacaaatccagtggtg

SEQ ID NO: 768477 - DNA, 25 bp, Homo sapien
ggagcaaacacaaatccagtggtga

SEQ ID NO: 768478 - DNA, 25 bp, Homo sapien
gagcaaacacaaatccagtggtgaa

SEQ ID NO: 768479 - DNA, 25 bp, Homo sapien
taacaagcagagtgtttctaaactg

SEQ ID NO: 768480 - DNA, 25 bp, Homo sapien
tgctctctctaaagcaaggttcaac

SEQ ID NO: 768481 - DNA, 25 bp, Homo sapien
gcaattgtcctcaaatcgcttgaaa

SEQ ID NO: 768482 - DNA, 25 bp, Homo sapien
caaaaaagttcctgagaactcttct

SEQ ID NO: 768483 - DNA, 25 bp, Homo sapien
gagaattcttccgtctagcattcaa

SEQ ID NO: 768484 - DNA, 25 bp, Homo sapien
caaacaggtccatatatccaattgc

SEQ ID NO: 768485 - DNA, 25 bp, Homo sapien
tctactgttggcatcaaatggctag

SEQ ID NO: 768486 - DNA, 25 bp, Homo sapien
tgctctgtctaaagggacgttccac

SEQ ID NO: 768487 - DNA, 25 bp, Homo sapien
ctgttacacgtatttggatgtgaca

SEQ ID NO: 768488 - DNA, 25 bp, Homo sapien
ttttactgttacacgtatttggatg

SEQ ID NO: 768489 - DNA, 25 bp, Homo sapien
gtcaacatcataccacctcacaatt

SEQ ID NO: 768490 - DNA, 25 bp, Homo sapien
accacctcacaattttactgttaca

SEQ ID NO: 768491 - DNA, 25 bp, Homo sapien
gtcatcacatgtctctccaagacag

SEQ ID NO: 768492 - DNA, 25 bp, Homo sapien
cacatgtctctccaagacaggtttt

SEQ ID NO: 768493 - DNA, 25 bp, Homo sapien
catcacatgtctctccaagacaggt

SEQ ID NO: 768494 - DNA, 25 bp, Homo sapien
tcacatgtctctccaagacaggttt

SEQ ID NO: 768495 - DNA, 25 bp, Homo sapien
gaaaattgtcccacatagatactct

SEQ ID NO: 768496 - DNA, 25 bp, Homo sapien
atagatactcttaactggtcgtgaa

SEQ ID NO: 768497 - DNA, 25 bp, Homo sapien
aactggtcgtgaaaggaccttcctg

SEQ ID NO: 768498 - DNA, 25 bp, Homo sapien
aattgtcccacatagatactcttaa

SEQ ID NO: 768499 - DNA, 25 bp, Homo sapien
ctctgccaccggcagaccttcctgc

SEQ ID NO: 768500 - DNA, 25 bp, Homo sapien
ctgccaccggcagaccttcctgcat

SEQ ID NO: 768501 - DNA, 25 bp, Homo sapien
tctgccaccggcagaccttcctgca

SEQ ID NO: 768502 - DNA, 25 bp, Homo sapien
acacttcaccaatttcccattattg

SEQ ID NO: 768503 - DNA, 25 bp, Homo sapien
gcctctagattcacaagtcatcgcc

SEQ ID NO: 768504 - DNA, 25 bp, Homo sapien
tcccctcgtgctggagcctctagat

SEQ ID NO: 768505 - DNA, 25 bp, Homo sapien
caggacccataagacctgttgggcc

SEQ ID NO: 768506 - DNA, 25 bp, Homo sapien
tgaggctgaaaatcagttccagctg

SEQ ID NO: 768507 - DNA, 25 bp, Homo sapien
cagttccagctgctgttctacagcc

SEQ ID NO: 768508 - DNA, 25 bp, Homo sapien
atcagttccagctgctgttctacag

SEQ ID NO: 768509 - DNA, 25 bp, Homo sapien
cgtgaggctgaaaatcagttccagc

SEQ ID NO: 768510 - DNA, 25 bp, Homo sapien
tctactgagcttgcccacagcaagt

SEQ ID NO: 768511 - DNA, 25 bp, Homo sapien
ctgagcttgcccacagcaagttacc

SEQ ID NO: 768512 - DNA, 25 bp, Homo sapien
tgctctactgagcttgcccacagca

SEQ ID NO: 768513 - DNA, 25 bp, Homo sapien
actgagcttgcccacagcaagttac

SEQ ID NO: 768514 - DNA, 25 bp, Homo sapien
cacagcagcaagccaggagaccaga

SEQ ID NO: 768515 - DNA, 25 bp, Homo sapien
aatccagcaggggagacagcgcgta

SEQ ID NO: 768516 - DNA, 25 bp, Homo sapien
ccagcaggggagacagcgcgtagag

SEQ ID NO: 768517 - DNA, 25 bp, Homo sapien
gcaggggagacagcgcgtagagctc

SEQ ID NO: 768518 - DNA, 25 bp, Homo sapien
aggtgttgagccgtaggtcagaaca

SEQ ID NO: 768519 - DNA, 25 bp, Homo sapien
gttgagccgtaggtcagaacagcct

SEQ ID NO: 768520 - DNA, 25 bp, Homo sapien
cagcatcctcttgccattcaaggag

SEQ ID NO: 768521 - DNA, 25 bp, Homo sapien
tcttgccattcaaggaggtgttgag

SEQ ID NO: 768522 - DNA, 25 bp, Homo sapien
ctgccctttcctccgttgcagcaaa

SEQ ID NO: 768523 - DNA, 25 bp, Homo sapien
gcagcaaaacctggactgtatgtgt

SEQ ID NO: 768524 - DNA, 25 bp, Homo sapien
gactgtatgtgtcaggctctccagc

SEQ ID NO: 768525 - DNA, 25 bp, Homo sapien
ctttcctccgttgcagcaaaacctg

SEQ ID NO: 768526 - DNA, 25 bp, Homo sapien
gctttagtttccttcgctggcaaat

SEQ ID NO: 768527 - DNA, 25 bp, Homo sapien
cttcacttcatagtcctggatccca

SEQ ID NO: 768528 - DNA, 25 bp, Homo sapien
cagctgtaagtttgcctctctgagc

SEQ ID NO: 768529 - DNA, 25 bp, Homo sapien
tggcaaatctgaaaacgttttgtgt

SEQ ID NO: 768530 - DNA, 25 bp, Homo sapien
ctcaaagccacgtgaaaagagtgga

SEQ ID NO: 768531 - DNA, 25 bp, Homo sapien
tcaaagccacgtgaaaagagtggaa

SEQ ID NO: 768532 - DNA, 25 bp, Homo sapien
atgagtcttggaaaatctgtcatca

SEQ ID NO: 768533 - DNA, 25 bp, Homo sapien
tgagtcttggaaaatctgtcatcat

SEQ ID NO: 768534 - DNA, 25 bp, Homo sapien
tcttgaagggaatgccaacagaggg

SEQ ID NO: 768535 - DNA, 25 bp, Homo sapien
cattgggatgacatgacctccacag

SEQ ID NO: 768536 - DNA, 25 bp, Homo sapien
caacagagggcgttccattgggatg

SEQ ID NO: 768537 - DNA, 25 bp, Homo sapien
ccaggactttcagggtcagctcaac

SEQ ID NO: 768538 - DNA, 25 bp, Homo sapien
tcccatatgcagaatggcactgctg

SEQ ID NO: 768539 - DNA, 25 bp, Homo sapien
gggatgcctcgctcttctagcttcc

SEQ ID NO: 768540 - DNA, 25 bp, Homo sapien
ccgtgggatgcctcgctcttctagc

SEQ ID NO: 768541 - DNA, 25 bp, Homo sapien
gcttcccatatgcagaatggcactg

SEQ ID NO: 768542 - DNA, 25 bp, Homo sapien
ttcacactttgcagcgtgtccttca

SEQ ID NO: 768543 - DNA, 25 bp, Homo sapien
ttttcacactttgcagcgtgtcctt

SEQ ID NO: 768544 - DNA, 25 bp, Homo sapien
tcacactttgcagcgtgtccttcaa

SEQ ID NO: 768545 - DNA, 25 bp, Homo sapien
acactttgcagcgtgtccttcaact

SEQ ID NO: 768546 - DNA, 25 bp, Homo sapien
gaggaggcacagggcacttcagcct

SEQ ID NO: 768547 - DNA, 25 bp, Homo sapien
tacacaatctgaaaacgaaaactgg

SEQ ID NO: 768548 - DNA, 25 bp, Homo sapien
gtccggggaagtgagcctgcctaag

SEQ ID NO: 768549 - DNA, 25 bp, Homo sapien
aatctgaaaacgaaaactgggcatg

SEQ ID NO: 768550 - DNA, 25 bp, Homo sapien
gattagggctaagtgctccatgaga

SEQ ID NO: 768551 - DNA, 25 bp, Homo sapien
tagggctaagtgctccatgagagca

SEQ ID NO: 768552 - DNA, 25 bp, Homo sapien
tgtagggggtgctctgccatgagtc

SEQ ID NO: 768553 - DNA, 25 bp, Homo sapien
gctggattagggctaagtgctccat

SEQ ID NO: 768554 - DNA, 25 bp, Homo sapien
agcaaccaggtgttaggaaaaccag

SEQ ID NO: 768555 - DNA, 25 bp, Homo sapien
caggtgttaggaaaaccagaacatt

SEQ ID NO: 768556 - DNA, 25 bp, Homo sapien
tcctaaagcaaccaggtgttaggaa

SEQ ID NO: 768557 - DNA, 25 bp, Homo sapien
gcaaccaggtgttaggaaaaccaga

SEQ ID NO: 768558 - DNA, 25 bp, Homo sapien
ccagcgcctttttcttggatgtgga

SEQ ID NO: 768559 - DNA, 25 bp, Homo sapien
tgcagccgctatggggagaaatccg

SEQ ID NO: 768560 - DNA, 25 bp, Homo sapien
actcggatgggtgttgtcctcaccc

SEQ ID NO: 768561 - DNA, 25 bp, Homo sapien
atgtggatgttgaggcggcagagag

SEQ ID NO: 768562 - DNA, 25 bp, Homo sapien
tattcaaggtgttgtaattcaagat

SEQ ID NO: 768563 - DNA, 25 bp, Homo sapien
taacaagaagatagtagaagtgatc

SEQ ID NO: 768564 - DNA, 25 bp, Homo sapien
catgaaaatgggatccatacataat

SEQ ID NO: 768565 - DNA, 25 bp, Homo sapien
aattcaagatgtttaaaggcagcta

SEQ ID NO: 768566 - DNA, 25 bp, Homo sapien
ccctttcccaggagtggaacaagca

SEQ ID NO: 768567 - DNA, 25 bp, Homo sapien
ctggcagatactgggacccatgcag

SEQ ID NO: 768568 - DNA, 25 bp, Homo sapien
gggccacagcaatggctgttttggt

SEQ ID NO: 768569 - DNA, 25 bp, Homo sapien
ctcaagctcactggggctctaggtg

SEQ ID NO: 768570 - DNA, 25 bp, Homo sapien
tgggcctgccctgaacgttttggat

SEQ ID NO: 768571 - DNA, 25 bp, Homo sapien
caatggagtctccatatttgagtcg

SEQ ID NO: 768572 - DNA, 25 bp, Homo sapien
tttctactatcaccccagaccaggg

SEQ ID NO: 768573 - DNA, 25 bp, Homo sapien
ttggatttctgtctgaggtgacccc

SEQ ID NO: 768574 - DNA, 25 bp, Homo sapien
tgtgaatcaacagcactcatcttta

SEQ ID NO: 768575 - DNA, 25 bp, Homo sapien
gtgaatcaacagcactcatctttat

SEQ ID NO: 768576 - DNA, 25 bp, Homo sapien
ccttcatgatactttgccatctgtg

SEQ ID NO: 768577 - DNA, 25 bp, Homo sapien
gaatcaacagcactcatctttatta

SEQ ID NO: 768578 - DNA, 25 bp, Homo sapien
tggttctccaaccttactaaacata

SEQ ID NO: 768579 - DNA, 25 bp, Homo sapien
ggtaagtctttgatcagtgctcaat

SEQ ID NO: 768580 - DNA, 25 bp, Homo sapien
tcttattggacacaacgtaattaat

SEQ ID NO: 768581 - DNA, 25 bp, Homo sapien
ttaatactggagaataaccctacaa

SEQ ID NO: 768582 - DNA, 25 bp, Homo sapien
aacacaagaggttctggtcggccag

SEQ ID NO: 768583 - DNA, 25 bp, Homo sapien
tgacagtgtacttggagccagagga

SEQ ID NO: 768584 - DNA, 25 bp, Homo sapien
tgacctaacgaaaaaagctacggca

SEQ ID NO: 768585 - DNA, 25 bp, Homo sapien
gacagctgcttgagagactcagact

SEQ ID NO: 768586 - DNA, 25 bp, Homo sapien
tccaagccttgtcagtttggaggtc

SEQ ID NO: 768587 - DNA, 25 bp, Homo sapien
ctccaagccttgtcagtttggaggt

SEQ ID NO: 768588 - DNA, 25 bp, Homo sapien
aggatggacagcaataggagacctt

SEQ ID NO: 768589 - DNA, 25 bp, Homo sapien
ggatggacagcaataggagaccttg

SEQ ID NO: 768590 - DNA, 25 bp, Homo sapien
gaggatggacagcaataggagacct

SEQ ID NO: 768591 - DNA, 25 bp, Homo sapien
gtgttagcgcccgctgaagagccgc

SEQ ID NO: 768592 - DNA, 25 bp, Homo sapien
gcggcagcgcctggtgttagcgccc

SEQ ID NO: 768593 - DNA, 25 bp, Homo sapien
tagcgcccgctgaagagccgcggac

SEQ ID NO: 768594 - DNA, 25 bp, Homo sapien
cggcagcgcctggtgttagcgcccg

SEQ ID NO: 768595 - DNA, 25 bp, Homo sapien
atatttgaaatgcctcagatccttt

SEQ ID NO: 768596 - DNA, 25 bp, Homo sapien
gatcggtggctgctaagctccttag

SEQ ID NO: 768597 - DNA, 25 bp, Homo sapien
ttcatgatcggtggctgctaagctc

SEQ ID NO: 768598 - DNA, 25 bp, Homo sapien
catgatcggtggctgctaagctcct

SEQ ID NO: 768599 - DNA, 25 bp, Homo sapien
gatgaccaaagtcagtgcctcggtc

SEQ ID NO: 768600 - DNA, 25 bp, Homo sapien
aagactaaaggtatgatgaccaaag

SEQ ID NO: 768601 - DNA, 25 bp, Homo sapien
tgatgaccaaagtcagtgcctcggt

SEQ ID NO: 768602 - DNA, 25 bp, Homo sapien
atgagactcacaggttttccaatat

SEQ ID NO: 768603 - DNA, 25 bp, Homo sapien
acctttgttgattgagttgcgcttc

SEQ ID NO: 768604 - DNA, 25 bp, Homo sapien
ttctcgaacagtctgtcgctggcag

SEQ ID NO: 768605 - DNA, 25 bp, Homo sapien
tgagttgcgcttctgtaaaccccgg

SEQ ID NO: 768606 - DNA, 25 bp, Homo sapien
tgtcgctggcagaaccatgtgctcc

SEQ ID NO: 768607 - DNA, 25 bp, Homo sapien
gaaagcaagctatggaacaatggca

SEQ ID NO: 768608 - DNA, 25 bp, Homo sapien
aactgtcctcgtgagctgagtcagc

SEQ ID NO: 768609 - DNA, 25 bp, Homo sapien
gtactgagtcatgggtccaaatgga

SEQ ID NO: 768610 - DNA, 25 bp, Homo sapien
cccctttgggtatctatatgagcaa

SEQ ID NO: 768611 - DNA, 25 bp, Homo sapien
tggctgtcactgtcattattttcca

SEQ ID NO: 768612 - DNA, 25 bp, Homo sapien
ggctgtcactgtcattattttccat

SEQ ID NO: 768613 - DNA, 25 bp, Homo sapien
tttgaaagccacttcttagaaccac

SEQ ID NO: 768614 - DNA, 25 bp, Homo sapien
gaaagccacttcttagaaccactct

SEQ ID NO: 768615 - DNA, 25 bp, Homo sapien
ctttgaaagccacttcttagaacca

SEQ ID NO: 768616 - DNA, 25 bp, Homo sapien
agccacttcttagaaccactctata

SEQ ID NO: 768617 - DNA, 25 bp, Homo sapien
catccatcggggcaaagccaaggct

SEQ ID NO: 768618 - DNA, 25 bp, Homo sapien
gagcacgggcacaggaatagtcagt

SEQ ID NO: 768619 - DNA, 25 bp, Homo sapien
atgggacactcttggatttcaggag

SEQ ID NO: 768620 - DNA, 25 bp, Homo sapien
tctgcattgtcttggcgaggtccgc

SEQ ID NO: 768621 - DNA, 25 bp, Homo sapien
agcatgctgtggaggtaacgttccc

SEQ ID NO: 768622 - DNA, 25 bp, Homo sapien
ccagcatgctgtggaggtaacgttc

SEQ ID NO: 768623 - DNA, 25 bp, Homo sapien
cagcatgctgtggaggtaacgttcc

SEQ ID NO: 768624 - DNA, 25 bp, Homo sapien
ctggccatgtccagattggtggttc

SEQ ID NO: 768625 - DNA, 25 bp, Homo sapien
ggccatgtccagattggtggttctg

SEQ ID NO: 768626 - DNA, 25 bp, Homo sapien
tggccatgtccagattggtggttct

SEQ ID NO: 768627 - DNA, 25 bp, Homo sapien
agacaccccagggagcaaccgctgg

SEQ ID NO: 768628 - DNA, 25 bp, Homo sapien
gaagcagacaccccagggagcaacc

SEQ ID NO: 768629 - DNA, 25 bp, Homo sapien
gcagacaccccagggagcaaccgct

SEQ ID NO: 768630 - DNA, 25 bp, Homo sapien
gacaccccagggagcaaccgctggg

SEQ ID NO: 768631 - DNA, 25 bp, Homo sapien
tcttttgtctctcaagacgtacaaa

SEQ ID NO: 768632 - DNA, 25 bp, Homo sapien
gcagctgccaactattccatggttt

SEQ ID NO: 768633 - DNA, 25 bp, Homo sapien
ctcaagacgtacaaagcagctgcca

SEQ ID NO: 768634 - DNA, 25 bp, Homo sapien
caactattccatggtttcccagctg

SEQ ID NO: 768635 - DNA, 25 bp, Homo sapien
gatcatttgtgagaactgctccttc

SEQ ID NO: 768636 - DNA, 25 bp, Homo sapien
gtgcccacaggatcatttgtgagaa

SEQ ID NO: 768637 - DNA, 25 bp, Homo sapien
tccttgatgcttttaataccctgag

SEQ ID NO: 768638 - DNA, 25 bp, Homo sapien
gtggctctcccctggattccttgat

SEQ ID NO: 768639 - DNA, 25 bp, Homo sapien
tctgtgtgtagaattgaggtccttg

SEQ ID NO: 768640 - DNA, 25 bp, Homo sapien
tctcaggtattctaacaaggcttgg

SEQ ID NO: 768641 - DNA, 25 bp, Homo sapien
cctggcgaacaggttctgtgtgtag

SEQ ID NO: 768642 - DNA, 25 bp, Homo sapien
aattgaggtccttgtggcgtaacat

SEQ ID NO: 768643 - DNA, 25 bp, Homo sapien
taaaccccatccccactccctctca

SEQ ID NO: 768644 - DNA, 25 bp, Homo sapien
aaaccccatccccactccctctcat

SEQ ID NO: 768645 - DNA, 25 bp, Homo sapien
gagcctcagacactacaggtgctgg

SEQ ID NO: 768646 - DNA, 25 bp, Homo sapien
gcctcagacactacaggtgctggat

SEQ ID NO: 768647 - DNA, 25 bp, Homo sapien
cctcagacactacaggtgctggatg

SEQ ID NO: 768648 - DNA, 25 bp, Homo sapien
tcagacactacaggtgctggatgag

SEQ ID NO: 768649 - DNA, 25 bp, Homo sapien
gactgctgtgtggagcgtccatata

SEQ ID NO: 768650 - DNA, 25 bp, Homo sapien
tgtgtggagcgtccatataagtgca

SEQ ID NO: 768651 - DNA, 25 bp, Homo sapien
ttctgtaatgactgctgtgtggagc

SEQ ID NO: 768652 - DNA, 25 bp, Homo sapien
aatgactgctgtgtggagcgtccat

SEQ ID NO: 768653 - DNA, 25 bp, Homo sapien
agctcagctccttttgggtctcctg

SEQ ID NO: 768654 - DNA, 25 bp, Homo sapien
ccaggccatgtgctcttagtgccga

SEQ ID NO: 768655 - DNA, 25 bp, Homo sapien
gctcagctccttttgggtctcctga

SEQ ID NO: 768656 - DNA, 25 bp, Homo sapien
tgtgctcttagtgccgactcacgcc

SEQ ID NO: 768657 - DNA, 25 bp, Homo sapien
tgggctccatccatgggctgttctt

SEQ ID NO: 768658 - DNA, 25 bp, Homo sapien
tgttctttccatggggcgctttggt

SEQ ID NO: 768659 - DNA, 25 bp, Homo sapien
ttcaggacatagcgcctcttgggct

SEQ ID NO: 768660 - DNA, 25 bp, Homo sapien
ccatggggcgctttggttgcagtca

SEQ ID NO: 768661 - DNA, 25 bp, Homo sapien
acagccaattcctagggggaccgag

SEQ ID NO: 768662 - DNA, 25 bp, Homo sapien
cagccaattcctagggggaccgagg

SEQ ID NO: 768663 - DNA, 25 bp, Homo sapien
cctagggggaccgaggcatcctcat

SEQ ID NO: 768664 - DNA, 25 bp, Homo sapien
caattcctagggggaccgaggcatc

SEQ ID NO: 768665 - DNA, 25 bp, Homo sapien
aaggaggagggtagcgggccaatgt

SEQ ID NO: 768666 - DNA, 25 bp, Homo sapien
aggaggagggtagcgggccaatgtc

SEQ ID NO: 768667 - DNA, 25 bp, Homo sapien
cgagctaatgggtctcccccccagg

SEQ ID NO: 768668 - DNA, 25 bp, Homo sapien
gcgagctaatgggtctcccccccag

SEQ ID NO: 768669 - DNA, 25 bp, Homo sapien
tggcgagctaatgggtctccccccc

SEQ ID NO: 768670 - DNA, 25 bp, Homo sapien
ctggcgagctaatgggtctcccccc

SEQ ID NO: 768671 - DNA, 25 bp, Homo sapien
gcgcctgggtggaaagtggttgcca

SEQ ID NO: 768672 - DNA, 25 bp, Homo sapien
cgggcgcctgggtggaaagtggttg

SEQ ID NO: 768673 - DNA, 25 bp, Homo sapien
cgcctgggtggaaagtggttgccag

SEQ ID NO: 768674 - DNA, 25 bp, Homo sapien
ggcgcctgggtggaaagtggttgcc

SEQ ID NO: 768675 - DNA, 25 bp, Homo sapien
aattccgctggatagtctccttggc

SEQ ID NO: 768676 - DNA, 25 bp, Homo sapien
tggctttccgctttaattccgctgg

SEQ ID NO: 768677 - DNA, 25 bp, Homo sapien
catctttgtgcacatggctttccgc

SEQ ID NO: 768678 - DNA, 25 bp, Homo sapien
tccgctttaattccgctggatagtc

SEQ ID NO: 768679 - DNA, 25 bp, Homo sapien
gggccatgtcaattagctggactat

SEQ ID NO: 768680 - DNA, 25 bp, Homo sapien
tgggcagtctgctgggccatgtcaa

SEQ ID NO: 768681 - DNA, 25 bp, Homo sapien
catggaggtagttcatgccctgggc

SEQ ID NO: 768682 - DNA, 25 bp, Homo sapien
cttggatgatattcttggcatggag

SEQ ID NO: 768683 - DNA, 25 bp, Homo sapien
acactggcatagacgtccgactgga

SEQ ID NO: 768684 - DNA, 25 bp, Homo sapien
tgtggccagacgagagtcactcatc

SEQ ID NO: 768685 - DNA, 25 bp, Homo sapien
gggttcaggtcagctgcgatccaca

SEQ ID NO: 768686 - DNA, 25 bp, Homo sapien
ggtcagctgcgatccacaaaacaga

SEQ ID NO: 768687 - DNA, 25 bp, Homo sapien
tgaagagtcacagcccaccataaag

SEQ ID NO: 768688 - DNA, 25 bp, Homo sapien
gacgatttagaggtattcccctcca

SEQ ID NO: 768689 - DNA, 25 bp, Homo sapien
ggagtaaggtcaggctcaagacagc

SEQ ID NO: 768690 - DNA, 25 bp, Homo sapien
aagacagcctgtgttgagtagtcag

SEQ ID NO: 768691 - DNA, 25 bp, Homo sapien
aaaacattgattcgttggtgggcag

SEQ ID NO: 768692 - DNA, 25 bp, Homo sapien
gatatgagatcctgatgcaacttca

SEQ ID NO: 768693 - DNA, 25 bp, Homo sapien
gaactgggaaagcacatcaggaccc

SEQ ID NO: 768694 - DNA, 25 bp, Homo sapien
tagaggtatcttctaagccaaaaaa

SEQ ID NO: 768695 - DNA, 25 bp, Homo sapien
ttttaatagtgtcataagtggacta

SEQ ID NO: 768696 - DNA, 25 bp, Homo sapien
agtgtcataagtggactatggtcgt

SEQ ID NO: 768697 - DNA, 25 bp, Homo sapien
atagtgtcataagtggactatggtc

SEQ ID NO: 768698 - DNA, 25 bp, Homo sapien
taatagtgtcataagtggactatgg

SEQ ID NO: 768699 - DNA, 25 bp, Homo sapien
ggcacattgctgtcggtcacattag

SEQ ID NO: 768700 - DNA, 25 bp, Homo sapien
gaagtgaaagatgcaatgtgtgaat

SEQ ID NO: 768701 - DNA, 25 bp, Homo sapien
tttactgatacttggcacattgctg

SEQ ID NO: 768702 - DNA, 25 bp, Homo sapien
tgtcggtcacattagaagaggccac

SEQ ID NO: 768703 - DNA, 25 bp, Homo sapien
gacatctgcaagtagtggcagcatg

SEQ ID NO: 768704 - DNA, 25 bp, Homo sapien
atctgcaagtagtggcagcatgaaa

SEQ ID NO: 768705 - DNA, 25 bp, Homo sapien
agcaacatgactgctacaaagaaga

SEQ ID NO: 768706 - DNA, 25 bp, Homo sapien
tggtgctgggaaggtactggggttg

SEQ ID NO: 768707 - DNA, 25 bp, Homo sapien
ccagcatcggaatggtctaggtggc

SEQ ID NO: 768708 - DNA, 25 bp, Homo sapien
gatgatgaggcccacccaatacatg

SEQ ID NO: 768709 - DNA, 25 bp, Homo sapien
cccaatacatgagcacaaagcaact

SEQ ID NO: 768710 - DNA, 25 bp, Homo sapien
catcggaatggtctaggtggccctt

SEQ ID NO: 768711 - DNA, 25 bp, Homo sapien
tggtctgtacgtgacactgcgcctg

SEQ ID NO: 768712 - DNA, 25 bp, Homo sapien
gcgcagaaatgccaaaaggcccctg

SEQ ID NO: 768713 - DNA, 25 bp, Homo sapien
ctggaccgcgtctccctggatgtga

SEQ ID NO: 768714 - DNA, 25 bp, Homo sapien
tcaaggacctctagaacggcactgt

SEQ ID NO: 768715 - DNA, 25 bp, Homo sapien
caggatgggcaggaaactcttcaac

SEQ ID NO: 768716 - DNA, 25 bp, Homo sapien
gaaggcacagcaaactcgggagata

SEQ ID NO: 768717 - DNA, 25 bp, Homo sapien
caaaacagtggaatatagctgggcc

SEQ ID NO: 768718 - DNA, 25 bp, Homo sapien
tgggccaagtgcaagaaaccacgtg

SEQ ID NO: 768719 - DNA, 25 bp, Homo sapien
caattagcataggtagaggagcact

SEQ ID NO: 768720 - DNA, 25 bp, Homo sapien
gagacctgacaaagagttgctccta

SEQ ID NO: 768721 - DNA, 25 bp, Homo sapien
taggaaccctacaaggcctgtcagg

SEQ ID NO: 768722 - DNA, 25 bp, Homo sapien
ggcagactacaaacccaacatcagg

SEQ ID NO: 768723 - DNA, 25 bp, Homo sapien
gtaatatgacctcctccacttgaaa

SEQ ID NO: 768724 - DNA, 25 bp, Homo sapien
ttcaagtataactgcaatcagggct

SEQ ID NO: 768725 - DNA, 25 bp, Homo sapien
tatgtccagtagtcaaggacaaatg

SEQ ID NO: 768726 - DNA, 25 bp, Homo sapien
aatatacgttaagggtagatctggc

SEQ ID NO: 768727 - DNA, 25 bp, Homo sapien
agctcggtttccctccagagcatca

SEQ ID NO: 768728 - DNA, 25 bp, Homo sapien
ctccgcacggcggaactgcactgga

SEQ ID NO: 768729 - DNA, 25 bp, Homo sapien
ccgtgtcacaatgacaaggtgagat

SEQ ID NO: 768730 - DNA, 25 bp, Homo sapien
tctgtggaaaatcaaactctgggca

SEQ ID NO: 768731 - DNA, 25 bp, Homo sapien
gctcttggcctctacctggtctgtg

SEQ ID NO: 768732 - DNA, 25 bp, Homo sapien
gctaaaacgagtggcccttcagagg

SEQ ID NO: 768733 - DNA, 25 bp, Homo sapien
gggagcactacgcatgtctgaaggg

SEQ ID NO: 768734 - DNA, 25 bp, Homo sapien
agggacaataagaggacgtggctaa

SEQ ID NO: 768735 - DNA, 25 bp, Homo sapien
ggaaagggcggtgtcgagccggctg

SEQ ID NO: 768736 - DNA, 25 bp, Homo sapien
cttgaaactgtccttggcctgtatg

SEQ ID NO: 768737 - DNA, 25 bp, Homo sapien
ttgcatgccccttctagcaagatgc

SEQ ID NO: 768738 - DNA, 25 bp, Homo sapien
ttaaggccactatgtgcagctgagg

SEQ ID NO: 768739 - DNA, 25 bp, Homo sapien
acaacagttcgatgaaataaaaggc

SEQ ID NO: 768740 - DNA, 25 bp, Homo sapien
ggagaaaggactcatgactcctggg

SEQ ID NO: 768741 - DNA, 25 bp, Homo sapien
aatgacttattggagaaaggactca

SEQ ID NO: 768742 - DNA, 25 bp, Homo sapien
aaaggactcatgactcctgggcctg

SEQ ID NO: 768743 - DNA, 25 bp, Homo sapien
gagaaaggactcatgactcctgggc

SEQ ID NO: 768744 - DNA, 25 bp, Homo sapien
aagtgcagggtgctctgagtttctg

SEQ ID NO: 768745 - DNA, 25 bp, Homo sapien
ctagtgccgatccccaagtgcaggg

SEQ ID NO: 768746 - DNA, 25 bp, Homo sapien
tgagtttctgtcctccttgacaaac

SEQ ID NO: 768747 - DNA, 25 bp, Homo sapien
ctctgagtttctgtcctccttgaca

SEQ ID NO: 768748 - DNA, 25 bp, Homo sapien
gtgaccccattgtgagctgctagct

SEQ ID NO: 768749 - DNA, 25 bp, Homo sapien
cttgtgaccccattgtgagctgcta

SEQ ID NO: 768750 - DNA, 25 bp, Homo sapien
tgtgaccccattgtgagctgctagc

SEQ ID NO: 768751 - DNA, 25 bp, Homo sapien
ttgtgaccccattgtgagctgctag

SEQ ID NO: 768752 - DNA, 25 bp, Homo sapien
atgctccctttctttgcgatctgct

SEQ ID NO: 768753 - DNA, 25 bp, Homo sapien
gctccctttctttgcgatctgctga

SEQ ID NO: 768754 - DNA, 25 bp, Homo sapien
tctttgcgatctgctgacgctctct

SEQ ID NO: 768755 - DNA, 25 bp, Homo sapien
tctgctgacgctctctgtgacagag

SEQ ID NO: 768756 - DNA, 25 bp, Homo sapien
tctgaggcctgaataagagagtcac

SEQ ID NO: 768757 - DNA, 25 bp, Homo sapien
agaacagcagtattcctaccaggaa

SEQ ID NO: 768758 - DNA, 25 bp, Homo sapien
gatcctgttactactgaaagacaag

SEQ ID NO: 768759 - DNA, 25 bp, Homo sapien
tgtcagaataagaaacgtggccctg

SEQ ID NO: 768760 - DNA, 25 bp, Homo sapien
cagaggactgatcacggcatagaca

SEQ ID NO: 768761 - DNA, 25 bp, Homo sapien
tcttttatctgaagtgaggagcacc

SEQ ID NO: 768762 - DNA, 25 bp, Homo sapien
ggccatatgcccacaacattgctga

SEQ ID NO: 768763 - DNA, 25 bp, Homo sapien
gaacttgctggttgattgggccata

SEQ ID NO: 768764 - DNA, 25 bp, Homo sapien
tctctctctgggctgccacgaatcc

SEQ ID NO: 768765 - DNA, 25 bp, Homo sapien
tctctctgggctgccacgaatcccc

SEQ ID NO: 768766 - DNA, 25 bp, Homo sapien
gggctgccacgaatccccctgtact

SEQ ID NO: 768767 - DNA, 25 bp, Homo sapien
ctgggctgccacgaatccccctgta

SEQ ID NO: 768768 - DNA, 25 bp, Homo sapien
gtctctggtaacctggcacttccct

SEQ ID NO: 768769 - DNA, 25 bp, Homo sapien
ctggtaacctggcacttcccttttg

SEQ ID NO: 768770 - DNA, 25 bp, Homo sapien
cagtctctggtaacctggcacttcc

SEQ ID NO: 768771 - DNA, 25 bp, Homo sapien
ctctggtaacctggcacttcccttt

SEQ ID NO: 768772 - DNA, 25 bp, Homo sapien
ttgtcattgtgacacggtgtctccc

SEQ ID NO: 768773 - DNA, 25 bp, Homo sapien
tgtgacacggtgtctccccaacgtg

SEQ ID NO: 768774 - DNA, 25 bp, Homo sapien
cattgtgacacggtgtctccccaac

SEQ ID NO: 768775 - DNA, 25 bp, Homo sapien
tgacacggtgtctccccaacgtgct

SEQ ID NO: 768776 - DNA, 25 bp, Homo sapien
ttccgccgtgcggagggaagcttgg

SEQ ID NO: 768777 - DNA, 25 bp, Homo sapien
caggcttccagtgcagttccgccgt

SEQ ID NO: 768778 - DNA, 25 bp, Homo sapien
gcaaaggtccctcctccaccgagct

SEQ ID NO: 768779 - DNA, 25 bp, Homo sapien
tccagtgcagttccgccgtgcggag

SEQ ID NO: 768780 - DNA, 25 bp, Homo sapien
gctgggattgtagttgatcgcctgc

SEQ ID NO: 768781 - DNA, 25 bp, Homo sapien
gatcaacggccggaagcggctaaaa

SEQ ID NO: 768782 - DNA, 25 bp, Homo sapien
cgcaggagcaaaccgcgccatgtct

SEQ ID NO: 768783 - DNA, 25 bp, Homo sapien
ccactcccgttgcatgctgggattg

SEQ ID NO: 768784 - DNA, 25 bp, Homo sapien
cagggatggcacagaatcagtggcc

SEQ ID NO: 768785 - DNA, 25 bp, Homo sapien
gactcactccccttagccagggatg

SEQ ID NO: 768786 - DNA, 25 bp, Homo sapien
acccgcccgatttaggcaaagatga

SEQ ID NO: 768787 - DNA, 25 bp, Homo sapien
ggtgcacttcgcagcgtcacactct

SEQ ID NO: 768788 - DNA, 25 bp, Homo sapien
acaatggacagcgtctgggacctca

SEQ ID NO: 768789 - DNA, 25 bp, Homo sapien
caatggacagcgtctgggacctcag

SEQ ID NO: 768790 - DNA, 25 bp, Homo sapien
aatggacagcgtctgggacctcagg

SEQ ID NO: 768791 - DNA, 25 bp, Homo sapien
atggacagcgtctgggacctcaggc

SEQ ID NO: 768792 - DNA, 25 bp, Homo sapien
aagccacagcccatgtcaaccccct

SEQ ID NO: 768793 - DNA, 25 bp, Homo sapien
tcacatccatgtaaaaggctctggt

SEQ ID NO: 768794 - DNA, 25 bp, Homo sapien
acatccatgtaaaaggctctggtga

SEQ ID NO: 768795 - DNA, 25 bp, Homo sapien
ccatgtaaaaggctctggtgagggt

SEQ ID NO: 768796 - DNA, 25 bp, Homo sapien
tgcaaggtggaaaagctgaccaagt

SEQ ID NO: 768797 - DNA, 25 bp, Homo sapien
gtctggctagcctgtccctggctca

SEQ ID NO: 768798 - DNA, 25 bp, Homo sapien
tgagctgtccctgaggctaaggccc

SEQ ID NO: 768799 - DNA, 25 bp, Homo sapien
gaaaccagggcaataggctgctctc

SEQ ID NO: 768800 - DNA, 25 bp, Homo sapien
cgaccacacaaagccgtcaaagact

SEQ ID NO: 768801 - DNA, 25 bp, Homo sapien
caggaacccaggtccatggggtgca

SEQ ID NO: 768802 - DNA, 25 bp, Homo sapien
gcctcatatcccttgccctgaaatt

SEQ ID NO: 768803 - DNA, 25 bp, Homo sapien
tcctcagtatcaaaacaagtcgacc

SEQ ID NO: 768804 - DNA, 25 bp, Homo sapien
tttgatggctaagagcatcgggctc

SEQ ID NO: 768805 - DNA, 25 bp, Homo sapien
gacccagtctacatggatctttgtc

SEQ ID NO: 768806 - DNA, 25 bp, Homo sapien
tcagaaatatcgtttatgccaaggt

SEQ ID NO: 768807 - DNA, 25 bp, Homo sapien
caactttgagtgattgccttgaaaa

SEQ ID NO: 768808 - DNA, 25 bp, Homo sapien
agcgctgccgtcaggccgtccctgg

SEQ ID NO: 768809 - DNA, 25 bp, Homo sapien
tcccgcgtctggctgctgtggaact

SEQ ID NO: 768810 - DNA, 25 bp, Homo sapien
cctggagacaagagccgcagagcag

SEQ ID NO: 768811 - DNA, 25 bp, Homo sapien
cgggacgccatgaccgcgacagtgc

SEQ ID NO: 768812 - DNA, 25 bp, Homo sapien
tgtccatggaacatacgaccaccat

SEQ ID NO: 768813 - DNA, 25 bp, Homo sapien
gatggtgtccatggaacatacgacc

SEQ ID NO: 768814 - DNA, 25 bp, Homo sapien
ccttgatggtgtccatggaacatac

SEQ ID NO: 768815 - DNA, 25 bp, Homo sapien
tggaacatacgaccaccatggcctc

SEQ ID NO: 768816 - DNA, 25 bp, Homo sapien
gagaagcagacggcctggttccagc

SEQ ID NO: 768817 - DNA, 25 bp, Homo sapien
tttagcgtgggtgccatgaggcccc

SEQ ID NO: 768818 - DNA, 25 bp, Homo sapien
cagccctgctttagcgtgggtgcca

SEQ ID NO: 768819 - DNA, 25 bp, Homo sapien
cctgctttagcgtgggtgccatgag

SEQ ID NO: 768820 - DNA, 25 bp, Homo sapien
cagcgaccagcgggtccatgggctt

SEQ ID NO: 768821 - DNA, 25 bp, Homo sapien
tggctgcgcccacaatggctccgaa

SEQ ID NO: 768822 - DNA, 25 bp, Homo sapien
tgcgcccacaatggctccgaagacc

SEQ ID NO: 768823 - DNA, 25 bp, Homo sapien
cgaccagcgggtccatgggcttgct

SEQ ID NO: 768824 - DNA, 25 bp, Homo sapien
atccggtctcgatcccatccagagg

SEQ ID NO: 768825 - DNA, 25 bp, Homo sapien
cccatccagaggagcgtttcccaag

SEQ ID NO: 768826 - DNA, 25 bp, Homo sapien
gtgttccgcgtttgtgctgctccag

SEQ ID NO: 768827 - DNA, 25 bp, Homo sapien
tcaggatctgcagccataggccggt

SEQ ID NO: 768828 - DNA, 25 bp, Homo sapien
tactgttacccttatccctggtcac

SEQ ID NO: 768829 - DNA, 25 bp, Homo sapien
tggtagaggataaatactgttaccc

SEQ ID NO: 768830 - DNA, 25 bp, Homo sapien
gggagacgcgtccagcggccaggcg

SEQ ID NO: 768831 - DNA, 25 bp, Homo sapien
ccctggtcacatccagggagacgcg

SEQ ID NO: 768832 - DNA, 25 bp, Homo sapien
agtccatcctccacactgttgtgca

SEQ ID NO: 768833 - DNA, 25 bp, Homo sapien
ccctctgggcttagtccatcctcca

SEQ ID NO: 768834 - DNA, 25 bp, Homo sapien
acactgttgtgcagcttctccacct

SEQ ID NO: 768835 - DNA, 25 bp, Homo sapien
tcctccacactgttgtgcagcttct

SEQ ID NO: 768836 - DNA, 25 bp, Homo sapien
gtggtggccgctctggaggtgcctg

SEQ ID NO: 768837 - DNA, 25 bp, Homo sapien
catgtgagacaagggtggtggccgc

SEQ ID NO: 768838 - DNA, 25 bp, Homo sapien
tcatgtgagacaagggtggtggccg

SEQ ID NO: 768839 - DNA, 25 bp, Homo sapien
gtgagacaagggtggtggccgctct

SEQ ID NO: 768840 - DNA, 25 bp, Homo sapien
gccacggccgggccagactcgtgga

SEQ ID NO: 768841 - DNA, 25 bp, Homo sapien
agatggacctccagccacggccggg

SEQ ID NO: 768842 - DNA, 25 bp, Homo sapien
cacggccgggccagactcgtggaca

SEQ ID NO: 768843 - DNA, 25 bp, Homo sapien
cagatggacctccagccacggccgg

SEQ ID NO: 768844 - DNA, 25 bp, Homo sapien
agaatgcagtgaaaccaggccgagg

SEQ ID NO: 768845 - DNA, 25 bp, Homo sapien
gacgtagaaaatgaatcacaggccc

SEQ ID NO: 768846 - DNA, 25 bp, Homo sapien
tcaagccaatggtaggagaagcgct

SEQ ID NO: 768847 - DNA, 25 bp, Homo sapien
ggcgcagtgtcgcatgacgtagaaa

SEQ ID NO: 768848 - DNA, 25 bp, Homo sapien
tacatgcatagagggatgagggctc

SEQ ID NO: 768849 - DNA, 25 bp, Homo sapien
catagagggatgagggctctccatc

SEQ ID NO: 768850 - DNA, 25 bp, Homo sapien
catgcatagagggatgagggctctc

SEQ ID NO: 768851 - DNA, 25 bp, Homo sapien
ttctacatgcatagagggatgaggg

SEQ ID NO: 768852 - DNA, 25 bp, Homo sapien
ctctggacctctttgagtcacagta

SEQ ID NO: 768853 - DNA, 25 bp, Homo sapien
tcacctggcccttgtccacttagtg

SEQ ID NO: 768854 - DNA, 25 bp, Homo sapien
tcactgtgagcttcttggcatctct

SEQ ID NO: 768855 - DNA, 25 bp, Homo sapien
gcccttgtccacttagtgatgctcc

SEQ ID NO: 768856 - DNA, 25 bp, Homo sapien
cgaccatagtccacttatgacacta

SEQ ID NO: 768857 - DNA, 25 bp, Homo sapien
tcttcaccattaagacgaccatagt

SEQ ID NO: 768858 - DNA, 25 bp, Homo sapien
tgagatagtccaggttaatcaggat

SEQ ID NO: 768859 - DNA, 25 bp, Homo sapien
tggactgcaggcctaagcccactga

SEQ ID NO: 768860 - DNA, 25 bp, Homo sapien
ttgaaaagattgtccaaatggaagc

SEQ ID NO: 768861 - DNA, 25 bp, Homo sapien
tataaaaattggctcccaacagagt

SEQ ID NO: 768862 - DNA, 25 bp, Homo sapien
cacacaaggctgttagttatttaaa

SEQ ID NO: 768863 - DNA, 25 bp, Homo sapien
gacctctgctctaaaaagagacact

SEQ ID NO: 768864 - DNA, 25 bp, Homo sapien
caaatccaagaagtcatgcatggct

SEQ ID NO: 768865 - DNA, 25 bp, Homo sapien
caatggtcggtaaaacagaagaaca

SEQ ID NO: 768866 - DNA, 25 bp, Homo sapien
aaaggcgtacctgaactagtgactc

SEQ ID NO: 768867 - DNA, 25 bp, Homo sapien
taaacatgtgtgagaccaaatccaa

SEQ ID NO: 768868 - DNA, 25 bp, Homo sapien
ccacctcggcctcatttaagttaat

SEQ ID NO: 768869 - DNA, 25 bp, Homo sapien
ccgtctcccggattatatatataaa

SEQ ID NO: 768870 - DNA, 25 bp, Homo sapien
gataatatacaaacacgtagataga

SEQ ID NO: 768871 - DNA, 25 bp, Homo sapien
taatctcaatcaactttgaccatac

SEQ ID NO: 768872 - DNA, 25 bp, Homo sapien
agcacaggtagtggccaagaaaacc

SEQ ID NO: 768873 - DNA, 25 bp, Homo sapien
cttccaacaggtttgcagggtatct

SEQ ID NO: 768874 - DNA, 25 bp, Homo sapien
cttcggagctgtgtataaatagagg

SEQ ID NO: 768875 - DNA, 25 bp, Homo sapien
ccaggcagataattagcagatttcc

SEQ ID NO: 768876 - DNA, 25 bp, Homo sapien
gatttcagacagagtcgcaggactt

SEQ ID NO: 768877 - DNA, 25 bp, Homo sapien
tctgttttagcatgatttcagacag

SEQ ID NO: 768878 - DNA, 25 bp, Homo sapien
tattttgcagagtgagcgtagtaag

SEQ ID NO: 768879 - DNA, 25 bp, Homo sapien
caggacttggttttgggaatgctac

SEQ ID NO: 768880 - DNA, 25 bp, Homo sapien
gtaaatatcagtccttctgtcagct

SEQ ID NO: 768881 - DNA, 25 bp, Homo sapien
caagatacccacaagagccatgtct

SEQ ID NO: 768882 - DNA, 25 bp, Homo sapien
tccagaggagagtctgagatattgg

SEQ ID NO: 768883 - DNA, 25 bp, Homo sapien
gttctgaatactacaaccgtctggg

SEQ ID NO: 768884 - DNA, 25 bp, Homo sapien
tgccacatcaactgctgcacccagg

SEQ ID NO: 768885 - DNA, 25 bp, Homo sapien
ctgcaggtgccacatcaactgctgc

SEQ ID NO: 768886 - DNA, 25 bp, Homo sapien
ggttgggtgtcggttctgcccctgc

SEQ ID NO: 768887 - DNA, 25 bp, Homo sapien
gttgggtgtcggttctgcccctgca

SEQ ID NO: 768888 - DNA, 25 bp, Homo sapien
gctaccctcctccttgcgttcagca

SEQ ID NO: 768889 - DNA, 25 bp, Homo sapien
ttccacctgaccttgacagccaggg

SEQ ID NO: 768890 - DNA, 25 bp, Homo sapien
agccctgggacattggcccgctacc

SEQ ID NO: 768891 - DNA, 25 bp, Homo sapien
aacccttctcgaagacccaccacat

SEQ ID NO: 768892 - DNA, 25 bp, Homo sapien
ctcgatgtgggtggcaacttagctc

SEQ ID NO: 768893 - DNA, 25 bp, Homo sapien
gctggttgggattagatcccaggac

SEQ ID NO: 768894 - DNA, 25 bp, Homo sapien
tgtctctgttaccaaagaccaattg

SEQ ID NO: 768895 - DNA, 25 bp, Homo sapien
ccatggtgtctctgttaccaaagac

SEQ ID NO: 768896 - DNA, 25 bp, Homo sapien
caaaattacggaagtagcctgttct

SEQ ID NO: 768897 - DNA, 25 bp, Homo sapien
cagctctggacgcagaaaaacacaa

SEQ ID NO: 768898 - DNA, 25 bp, Homo sapien
tgaagagaagaactgcagctctgga

SEQ ID NO: 768899 - DNA, 25 bp, Homo sapien
gacacaaggacacataggcttggcc

SEQ ID NO: 768900 - DNA, 25 bp, Homo sapien
ccacgggcggaagaccgagacttgc

SEQ ID NO: 768901 - DNA, 25 bp, Homo sapien
attctatagctatgtctctgaatgt

SEQ ID NO: 768902 - DNA, 25 bp, Homo sapien
aattctatagctatgtctctgaatg

SEQ ID NO: 768903 - DNA, 25 bp, Homo sapien
tctctttatattctgggactcttta

SEQ ID NO: 768904 - DNA, 25 bp, Homo sapien
tattctgggactctttattttgctc

SEQ ID NO: 768905 - DNA, 25 bp, Homo sapien
attctgggactctttattttgctcc

SEQ ID NO: 768906 - DNA, 25 bp, Homo sapien
atttctctttatattctgggactct

SEQ ID NO: 768907 - DNA, 25 bp, Homo sapien
cagtgtctcccaagaaatcggtgac

SEQ ID NO: 768908 - DNA, 25 bp, Homo sapien
tagatatgccatcaaatgcatgcgc

SEQ ID NO: 768909 - DNA, 25 bp, Homo sapien
tgcatgcgcaacaaagaggagaaca

SEQ ID NO: 768910 - DNA, 25 bp, Homo sapien
catttaatagagtgacagtgtctcc

SEQ ID NO: 768911 - DNA, 25 bp, Homo sapien
agacatgatagaacaaaatagaaag

SEQ ID NO: 768912 - DNA, 25 bp, Homo sapien
ggagaaaatataatcccttcaacag

SEQ ID NO: 768913 - DNA, 25 bp, Homo sapien
gtatgaccaaataatctgcctcaag

SEQ ID NO: 768914 - DNA, 25 bp, Homo sapien
taaaaagctgcaataacaataacta

SEQ ID NO: 768915 - DNA, 25 bp, Homo sapien
tttgatactagccttgggaacacag

SEQ ID NO: 768916 - DNA, 25 bp, Homo sapien
tgagcacgatgtccagagccatata

SEQ ID NO: 768917 - DNA, 25 bp, Homo sapien
tgttacaaccgcagaaagactgcag

SEQ ID NO: 768918 - DNA, 25 bp, Homo sapien
tgcccagtagaagaacatagtgcct

SEQ ID NO: 768919 - DNA, 25 bp, Homo sapien
tcttgggtgaaatgggaacgcgtaa

SEQ ID NO: 768920 - DNA, 25 bp, Homo sapien
ggagtgaatctttgatgccctgctc

SEQ ID NO: 768921 - DNA, 25 bp, Homo sapien
gtcttgggtgaaatgggaacgcgta

SEQ ID NO: 768922 - DNA, 25 bp, Homo sapien
cttggtattactttttggagtgaat

SEQ ID NO: 768923 - DNA, 25 bp, Homo sapien
gcattttttaaattgtaatttctca

SEQ ID NO: 768924 - DNA, 25 bp, Homo sapien
aaattgtaatttctcatgtccacat

SEQ ID NO: 768925 - DNA, 25 bp, Homo sapien
ttaaattgtaatttctcatgtccac

SEQ ID NO: 768926 - DNA, 25 bp, Homo sapien
tttttaaattgtaatttctcatgtc

SEQ ID NO: 768927 - DNA, 25 bp, Homo sapien
ttgggtagttgacaaacattggtta

SEQ ID NO: 768928 - DNA, 25 bp, Homo sapien
tgttttgggtagttgacaaacattg

SEQ ID NO: 768929 - DNA, 25 bp, Homo sapien
tgggtagttgacaaacattggttaa

SEQ ID NO: 768930 - DNA, 25 bp, Homo sapien
caaagactttgacatatttatgagt

SEQ ID NO: 768931 - DNA, 25 bp, Homo sapien
ctgatgttgatttaggtgtgaaagc

SEQ ID NO: 768932 - DNA, 25 bp, Homo sapien
aaatgatttgccatatttgttacat

SEQ ID NO: 768933 - DNA, 25 bp, Homo sapien
tgatgttgatttaggtgtgaaagca

SEQ ID NO: 768934 - DNA, 25 bp, Homo sapien
tgccatatttgttacatttgaaatg

SEQ ID NO: 768935 - DNA, 25 bp, Homo sapien
agtaagtgctgaggagcgcctaaag

SEQ ID NO: 768936 - DNA, 25 bp, Homo sapien
ttataagcttggtcacattcttcac

SEQ ID NO: 768937 - DNA, 25 bp, Homo sapien
tgaattatcttatgtttagcaagac

SEQ ID NO: 768938 - DNA, 25 bp, Homo sapien
gtgtgaattatcttatgtttagcaa

SEQ ID NO: 768939 - DNA, 25 bp, Homo sapien
tgtgaattatcttatgtttagcaag

SEQ ID NO: 768940 - DNA, 25 bp, Homo sapien
cagtgtgaattatcttatgtttagc

SEQ ID NO: 768941 - DNA, 25 bp, Homo sapien
tgaattctcttacgttcaattaagg

SEQ ID NO: 768942 - DNA, 25 bp, Homo sapien
attctctacatttgcagtgtttttt

SEQ ID NO: 768943 - DNA, 25 bp, Homo sapien
tatgtattataaggcctgagggtgg

SEQ ID NO: 768944 - DNA, 25 bp, Homo sapien
aggcctgagggtggactttgccaca

SEQ ID NO: 768945 - DNA, 25 bp, Homo sapien
taccatattgcttattgcagggttt

SEQ ID NO: 768946 - DNA, 25 bp, Homo sapien
ttaccatattgcttattgcagggtt

SEQ ID NO: 768947 - DNA, 25 bp, Homo sapien
attaccatattgcttattgcagggt

SEQ ID NO: 768948 - DNA, 25 bp, Homo sapien
cctgtaccgtaaggtgtgagaattt

SEQ ID NO: 768949 - DNA, 25 bp, Homo sapien
tgctttcctgtaccgtaaggtgtga

SEQ ID NO: 768950 - DNA, 25 bp, Homo sapien
gtaggagtcttcttcagtataaact

SEQ ID NO: 768951 - DNA, 25 bp, Homo sapien
tcatatttgtaggagtcttcttcag

SEQ ID NO: 768952 - DNA, 25 bp, Homo sapien
tgtacagtctttttaattctatgag

SEQ ID NO: 768953 - DNA, 25 bp, Homo sapien
tgtcgactttcccaatccagattcc

SEQ ID NO: 768954 - DNA, 25 bp, Homo sapien
aattctatgagaaggacctgggtac

SEQ ID NO: 768955 - DNA, 25 bp, Homo sapien
atgagaaggacctgggtactctgga

SEQ ID NO: 768956 - DNA, 25 bp, Homo sapien
taaacagcaagagtttgcttctatt

SEQ ID NO: 768957 - DNA, 25 bp, Homo sapien
tcataaataaacagcaagagtttgc

SEQ ID NO: 768958 - DNA, 25 bp, Homo sapien
ctgtcataaataaacagcaagagtt

SEQ ID NO: 768959 - DNA, 25 bp, Homo sapien
cataaataaacagcaagagtttgct

SEQ ID NO: 768960 - DNA, 25 bp, Homo sapien
ttttctgcttccatagttctcgtag

SEQ ID NO: 768961 - DNA, 25 bp, Homo sapien
catagttctcgtagtggacattgtt

SEQ ID NO: 768962 - DNA, 25 bp, Homo sapien
gcttccatagttctcgtagtggaca

SEQ ID NO: 768963 - DNA, 25 bp, Homo sapien
ctgcttccatagttctcgtagtgga

SEQ ID NO: 768964 - DNA, 25 bp, Homo sapien
ttgatttcagaggttaccgtttctg

SEQ ID NO: 768965 - DNA, 25 bp, Homo sapien
tgatttcagaggttaccgtttctgt

SEQ ID NO: 768966 - DNA, 25 bp, Homo sapien
gatttcagaggttaccgtttctgtg

SEQ ID NO: 768967 - DNA, 25 bp, Homo sapien
tttcagaggttaccgtttctgtggc

SEQ ID NO: 768968 - DNA, 25 bp, Homo sapien
tcagcaatctggatatgaccaactc

SEQ ID NO: 768969 - DNA, 25 bp, Homo sapien
ggatatgaccaactcttctgccctt

SEQ ID NO: 768970 - DNA, 25 bp, Homo sapien
ttaagagatcagcaatctggatatg

SEQ ID NO: 768971 - DNA, 25 bp, Homo sapien
aatctggatatgaccaactcttctg

SEQ ID NO: 768972 - DNA, 25 bp, Homo sapien
aacgcatagctttcacaattaaatt

SEQ ID NO: 768973 - DNA, 25 bp, Homo sapien
aaagcttcaattaaaggcaaacgca

SEQ ID NO: 768974 - DNA, 25 bp, Homo sapien
tttcaactgtatcatatctaaagga

SEQ ID NO: 768975 - DNA, 25 bp, Homo sapien
caaaaattagtgatttagcacattt

SEQ ID NO: 768976 - DNA, 25 bp, Homo sapien
gtttgtgtttgccagtattcttctg

SEQ ID NO: 768977 - DNA, 25 bp, Homo sapien
gagtctataattcccactgtcccct

SEQ ID NO: 768978 - DNA, 25 bp, Homo sapien
gattttcaaggagtctataattccc

SEQ ID NO: 768979 - DNA, 25 bp, Homo sapien
tgtgtttgccagtattcttctggtg

SEQ ID NO: 768980 - DNA, 25 bp, Homo sapien
cagtcatcatcaggacatgtcagca

SEQ ID NO: 768981 - DNA, 25 bp, Homo sapien
tctgcaggaacagtcatcatcagga

SEQ ID NO: 768982 - DNA, 25 bp, Homo sapien
gcaggaacagtcatcatcaggacat

SEQ ID NO: 768983 - DNA, 25 bp, Homo sapien
atcatcaggacatgtcagcagggcg

SEQ ID NO: 768984 - DNA, 25 bp, Homo sapien
cagctctggggttgcaccaacagga

SEQ ID NO: 768985 - DNA, 25 bp, Homo sapien
agctctggggttgcaccaacaggaa

SEQ ID NO: 768986 - DNA, 25 bp, Homo sapien
gggtctgggtcaggaggcttcgtac

SEQ ID NO: 768987 - DNA, 25 bp, Homo sapien
ctcagggtctgggtcaggaggcttc

SEQ ID NO: 768988 - DNA, 25 bp, Homo sapien
cagggtctgggtcaggaggcttcgt

SEQ ID NO: 768989 - DNA, 25 bp, Homo sapien
tcagggtctgggtcaggaggcttcg

SEQ ID NO: 768990 - DNA, 25 bp, Homo sapien
aagccagcacagtcagagcgatcac

SEQ ID NO: 768991 - DNA, 25 bp, Homo sapien
ttcacccggtggtactggtagtaga

SEQ ID NO: 768992 - DNA, 25 bp, Homo sapien
gtggtactggtagtagatcagcact

SEQ ID NO: 768993 - DNA, 25 bp, Homo sapien
ccggtggtactggtagtagatcagc

SEQ ID NO: 768994 - DNA, 25 bp, Homo sapien
taggcgtcgatgagccggcgcagag

SEQ ID NO: 768995 - DNA, 25 bp, Homo sapien
aggcgtcgatgagccggcgcagagg

SEQ ID NO: 768996 - DNA, 25 bp, Homo sapien
tcttgaaaagggctgcccagttctg

SEQ ID NO: 768997 - DNA, 25 bp, Homo sapien
cacggccttgggtgtgttcttgaaa

SEQ ID NO: 768998 - DNA, 25 bp, Homo sapien
cggccagggagaggagcacggcctt

SEQ ID NO: 768999 - DNA, 25 bp, Homo sapien
gtgtgttcttgaaaagggctgccca

SEQ ID NO: 769000 - DNA, 25 bp, Homo sapien
ccctttgacttgtatttccgtggct

SEQ ID NO: 769001 - DNA, 25 bp, Homo sapien
ctttgacttgtatttccgtggcttc

SEQ ID NO: 769002 - DNA, 25 bp, Homo sapien
tgacttgtatttccgtggcttcccc

SEQ ID NO: 769003 - DNA, 25 bp, Homo sapien
ttgacttgtatttccgtggcttccc

SEQ ID NO: 769004 - DNA, 25 bp, Homo sapien
ttcgtggaagaccacaggatgtgcc

SEQ ID NO: 769005 - DNA, 25 bp, Homo sapien
tcgtggaagaccacaggatgtgcca

SEQ ID NO: 769006 - DNA, 25 bp, Homo sapien
cttcgtggaagaccacaggatgtgc

SEQ ID NO: 769007 - DNA, 25 bp, Homo sapien
cgtggaagaccacaggatgtgccat

SEQ ID NO: 769008 - DNA, 25 bp, Homo sapien
gcagcccttagctaccctttgctgg

SEQ ID NO: 769009 - DNA, 25 bp, Homo sapien
tgcagcccttagctaccctttgctg

SEQ ID NO: 769010 - DNA, 25 bp, Homo sapien
agcccttagctaccctttgctggaa

SEQ ID NO: 769011 - DNA, 25 bp, Homo sapien
ccttagctaccctttgctggaatgc

SEQ ID NO: 769012 - DNA, 25 bp, Homo sapien
cagagtaataagcatgagaccaggc

SEQ ID NO: 769013 - DNA, 25 bp, Homo sapien
ctgatgtatgacatgttgacatggc

SEQ ID NO: 769014 - DNA, 25 bp, Homo sapien
acatttctgatgtatgacatgttga

SEQ ID NO: 769015 - DNA, 25 bp, Homo sapien
gtctcttaatctggttcggagacag

SEQ ID NO: 769016 - DNA, 25 bp, Homo sapien
catgttaagggcaaaccagcaaagc

SEQ ID NO: 769017 - DNA, 25 bp, Homo sapien
tgagtcaggatcagcatatcaccta

SEQ ID NO: 769018 - DNA, 25 bp, Homo sapien
atgagtcaggatcagcatatcacct

SEQ ID NO: 769019 - DNA, 25 bp, Homo sapien
gagtcaggatcagcatatcacctac

SEQ ID NO: 769020 - DNA, 25 bp, Homo sapien
cacacatagacaaagacgttcttct

SEQ ID NO: 769021 - DNA, 25 bp, Homo sapien
ttttcaccaacttgagggatgccac

SEQ ID NO: 769022 - DNA, 25 bp, Homo sapien
tgagggatgccacgcagatcccatg

SEQ ID NO: 769023 - DNA, 25 bp, Homo sapien
cgcagatcccatggggttgacacac

SEQ ID NO: 769024 - DNA, 25 bp, Homo sapien
ttggttgcacttgttgaagtactca

SEQ ID NO: 769025 - DNA, 25 bp, Homo sapien
ggaaaccagggagtgctgcacacgt

SEQ ID NO: 769026 - DNA, 25 bp, Homo sapien
gagtgctgcacacgtgaattctcca

SEQ ID NO: 769027 - DNA, 25 bp, Homo sapien
tgaagtactcacataatctccaggg

SEQ ID NO: 769028 - DNA, 25 bp, Homo sapien
gcaatgactccagagtgatctcttc

SEQ ID NO: 769029 - DNA, 25 bp, Homo sapien
caatgactccagagtgatctcttcc

SEQ ID NO: 769030 - DNA, 25 bp, Homo sapien
agcaatgactccagagtgatctctt

SEQ ID NO: 769031 - DNA, 25 bp, Homo sapien
tgggcatcgtcctcgattcgccttg

SEQ ID NO: 769032 - DNA, 25 bp, Homo sapien
atctggaatcctgggcatcgtcctc

SEQ ID NO: 769033 - DNA, 25 bp, Homo sapien
aatcctgggcatcgtcctcgattcg

SEQ ID NO: 769034 - DNA, 25 bp, Homo sapien
tcgtcctcgattcgccttgttcttc

SEQ ID NO: 769035 - DNA, 25 bp, Homo sapien
tgaaaggccctgtaattaaaccaca

SEQ ID NO: 769036 - DNA, 25 bp, Homo sapien
aaggccctgtaattaaaccacatct

SEQ ID NO: 769037 - DNA, 25 bp, Homo sapien
tcaagtcctcctcccacctcagttt

SEQ ID NO: 769038 - DNA, 25 bp, Homo sapien
agctggtcttcaattcctgggctca

SEQ ID NO: 769039 - DNA, 25 bp, Homo sapien
gatagggtctcgctatgctgcccaa

SEQ ID NO: 769040 - DNA, 25 bp, Homo sapien
tcctcctcccacctcagtttcccaa

SEQ ID NO: 769041 - DNA, 25 bp, Homo sapien
gggagctgtgttaccaagccttggc

SEQ ID NO: 769042 - DNA, 25 bp, Homo sapien
gagggagctgtgttaccaagccttg

SEQ ID NO: 769043 - DNA, 25 bp, Homo sapien
tcagagggagctgtgttaccaagcc

SEQ ID NO: 769044 - DNA, 25 bp, Homo sapien
gagctgtgttaccaagccttggctt

SEQ ID NO: 769045 - DNA, 25 bp, Homo sapien
ggctcagagagatcatcacgcccgc

SEQ ID NO: 769046 - DNA, 25 bp, Homo sapien
tgctggcgcgctcgtcgggcagcag

SEQ ID NO: 769047 - DNA, 25 bp, Homo sapien
gatgcggctcagagagatcatcacg

SEQ ID NO: 769048 - DNA, 25 bp, Homo sapien
gaggatgcggctcagagagatcatc

SEQ ID NO: 769049 - DNA, 25 bp, Homo sapien
cgcggccgtgtggtatagaagagca

SEQ ID NO: 769050 - DNA, 25 bp, Homo sapien
gcggccgtgtggtatagaagagcac

SEQ ID NO: 769051 - DNA, 25 bp, Homo sapien
gccgtgtggtatagaagagcacgaa

SEQ ID NO: 769052 - DNA, 25 bp, Homo sapien
ggccgtgtggtatagaagagcacga

SEQ ID NO: 769053 - DNA, 25 bp, Homo sapien
tgctggggaccccgtaggggcagtg

SEQ ID NO: 769054 - DNA, 25 bp, Homo sapien
tcaagaccgttctggttctggaccc

SEQ ID NO: 769055 - DNA, 25 bp, Homo sapien
accaatggctccctcgacccgcctc

SEQ ID NO: 769056 - DNA, 25 bp, Homo sapien
ccctcgacccgcctctgcatggcct

SEQ ID NO: 769057 - DNA, 25 bp, Homo sapien
ggcctgtacagctgccggccctgac

SEQ ID NO: 769058 - DNA, 25 bp, Homo sapien
tacgtcaaagcacatgtaggccccg

SEQ ID NO: 769059 - DNA, 25 bp, Homo sapien
cacagtacgtcaaagcacatgtagg

SEQ ID NO: 769060 - DNA, 25 bp, Homo sapien
ggacccttggccacagtacgtcaaa

SEQ ID NO: 769061 - DNA, 25 bp, Homo sapien
tggccacagtacgtcaaagcacatg

SEQ ID NO: 769062 - DNA, 25 bp, Homo sapien
ctgggcggtggcgggtgggggtcag

SEQ ID NO: 769063 - DNA, 25 bp, Homo sapien
gccaccacgtagcggtgcagtaaca

SEQ ID NO: 769064 - DNA, 25 bp, Homo sapien
caccacgtagcggtgcagtaacacg

SEQ ID NO: 769065 - DNA, 25 bp, Homo sapien
ctgccaccacgtagcggtgcagtaa

SEQ ID NO: 769066 - DNA, 25 bp, Homo sapien
accacgtagcggtgcagtaacacgg

SEQ ID NO: 769067 - DNA, 25 bp, Homo sapien
aagtctgacaggttgaacacagcca

SEQ ID NO: 769068 - DNA, 25 bp, Homo sapien
tggagagcatgtcggcccagatcac

SEQ ID NO: 769069 - DNA, 25 bp, Homo sapien
ggcacagcgtgatgaagtaggtcac

SEQ ID NO: 769070 - DNA, 25 bp, Homo sapien
taggtcacggcgatggagagcatgt

SEQ ID NO: 769071 - DNA, 25 bp, Homo sapien
tccccgggggatctgtgaccatgag

SEQ ID NO: 769072 - DNA, 25 bp, Homo sapien
agatcaggccggagctgtcctccag

SEQ ID NO: 769073 - DNA, 25 bp, Homo sapien
tggtgccactgcatggctcttgccc

SEQ ID NO: 769074 - DNA, 25 bp, Homo sapien
tgacactccggagcgccccagtgag

SEQ ID NO: 769075 - DNA, 25 bp, Homo sapien
gccaggcacgtggccgccctgtcct

SEQ ID NO: 769076 - DNA, 25 bp, Homo sapien
gcacgtggccgccctgtcctggcca

SEQ ID NO: 769077 - DNA, 25 bp, Homo sapien
aggcacgtggccgccctgtcctggc

SEQ ID NO: 769078 - DNA, 25 bp, Homo sapien
ccactcccctcatacccccgacagc

SEQ ID NO: 769079 - DNA, 25 bp, Homo sapien
cgccagtacacgggcagggctacca

SEQ ID NO: 769080 - DNA, 25 bp, Homo sapien
ccccgccagtacacgggcagggcta

SEQ ID NO: 769081 - DNA, 25 bp, Homo sapien
agtacacgggcagggctaccaggat

SEQ ID NO: 769082 - DNA, 25 bp, Homo sapien
tgggtgccccgccagtacacgggca

SEQ ID NO: 769083 - DNA, 25 bp, Homo sapien
atcatgggcacgctgccgaaggagc

SEQ ID NO: 769084 - DNA, 25 bp, Homo sapien
gcccatgagcagtgagaaaatgcag

SEQ ID NO: 769085 - DNA, 25 bp, Homo sapien
gaaggagccgttgctgatgcccatg

SEQ ID NO: 769086 - DNA, 25 bp, Homo sapien
tgctgccaggatcatgggcacgctg

SEQ ID NO: 769087 - DNA, 25 bp, Homo sapien
ccattggcggtggaggcgtgcaggc

SEQ ID NO: 769088 - DNA, 25 bp, Homo sapien
tgcagtaggccacggcggaccccag

SEQ ID NO: 769089 - DNA, 25 bp, Homo sapien
cattggcggtggaggcgtgcaggca

SEQ ID NO: 769090 - DNA, 25 bp, Homo sapien
gcaggcgggtccattcggacccagg

SEQ ID NO: 769091 - DNA, 25 bp, Homo sapien
cagggctccgactccttcatggcta

SEQ ID NO: 769092 - DNA, 25 bp, Homo sapien
ccgactccttcatggctaacgcgtt

SEQ ID NO: 769093 - DNA, 25 bp, Homo sapien
aggtcctgacgtgcccagctggcat

SEQ ID NO: 769094 - DNA, 25 bp, Homo sapien
tgggaagactgaggaccggcttatc

SEQ ID NO: 769095 - DNA, 25 bp, Homo sapien
ggatcccgagatggcagtcccagct

SEQ ID NO: 769096 - DNA, 25 bp, Homo sapien
agctcccgtccatgcacaaactctg

SEQ ID NO: 769097 - DNA, 25 bp, Homo sapien
gggcagcccaagttccaccgggatc

SEQ ID NO: 769098 - DNA, 25 bp, Homo sapien
ctgctccctgatccacccggcctac

SEQ ID NO: 769099 - DNA, 25 bp, Homo sapien
tgcactggggcctagggaagctata

SEQ ID NO: 769100 - DNA, 25 bp, Homo sapien
cagtgactgacctggttagtgtggg

SEQ ID NO: 769101 - DNA, 25 bp, Homo sapien
gactgacctggttagtgtgggtggc

SEQ ID NO: 769102 - DNA, 25 bp, Homo sapien
ctgcactggggcctagggaagctat

SEQ ID NO: 769103 - DNA, 25 bp, Homo sapien
gccggggctcacgttcgaggactct

SEQ ID NO: 769104 - DNA, 25 bp, Homo sapien
tcacgttcgaggactctgggaaccc

SEQ ID NO: 769105 - DNA, 25 bp, Homo sapien
gggctcacgttcgaggactctggga

SEQ ID NO: 769106 - DNA, 25 bp, Homo sapien
ggctcacgttcgaggactctgggaa

SEQ ID NO: 769107 - DNA, 25 bp, Homo sapien
cattctcagtattggtgctttcgct

SEQ ID NO: 769108 - DNA, 25 bp, Homo sapien
tactgcttgatgtccagaaatggcc

SEQ ID NO: 769109 - DNA, 25 bp, Homo sapien
tttgaactgtttactgcttgatgtc

SEQ ID NO: 769110 - DNA, 25 bp, Homo sapien
tgctttcgctattgtcactttgcca

SEQ ID NO: 769111 - DNA, 25 bp, Homo sapien
acttcctcgacggtgacaaggcagc

SEQ ID NO: 769112 - DNA, 25 bp, Homo sapien
ctcgacggtgacaaggcagccgcgt

SEQ ID NO: 769113 - DNA, 25 bp, Homo sapien
ctgggcacacttcctcgacggtgac

SEQ ID NO: 769114 - DNA, 25 bp, Homo sapien
ccctggccgctccttctgggcacac

SEQ ID NO: 769115 - DNA, 25 bp, Homo sapien
tgcttttgtgatccttcgttcgttc

SEQ ID NO: 769116 - DNA, 25 bp, Homo sapien
tcgttcgtggctcttttgcagccaa

SEQ ID NO: 769117 - DNA, 25 bp, Homo sapien
cctcccctggcttatgcaaatatga

SEQ ID NO: 769118 - DNA, 25 bp, Homo sapien
tgcaaatatgagtcccccagaaggc

SEQ ID NO: 769119 - DNA, 25 bp, Homo sapien
gctgggaccgtaggctggtgcgtcg

SEQ ID NO: 769120 - DNA, 25 bp, Homo sapien
ctggtgcgtcgcttctgaaaagtga

SEQ ID NO: 769121 - DNA, 25 bp, Homo sapien
aataccgaatgtattccaggtccag

SEQ ID NO: 769122 - DNA, 25 bp, Homo sapien
tctgaaaagtgaataccgaatgtat

SEQ ID NO: 769123 - DNA, 25 bp, Homo sapien
tttacagcgcagaaataatggtgcc

SEQ ID NO: 769124 - DNA, 25 bp, Homo sapien
aaattcaaggtcaagtcgcaactgg

SEQ ID NO: 769125 - DNA, 25 bp, Homo sapien
ggtgccataagacagccttcctgct

SEQ ID NO: 769126 - DNA, 25 bp, Homo sapien
tcgcaactggtgtggatattatact

SEQ ID NO: 769127 - DNA, 25 bp, Homo sapien
agagggttgagttcctcttgcccac

SEQ ID NO: 769128 - DNA, 25 bp, Homo sapien
gctcccaagagggttgagttcctct

SEQ ID NO: 769129 - DNA, 25 bp, Homo sapien
ggctcccaagagggttgagttcctc

SEQ ID NO: 769130 - DNA, 25 bp, Homo sapien
cccaagagggttgagttcctcttgc

SEQ ID NO: 769131 - DNA, 25 bp, Homo sapien
ctggtggataaactcggggttcctg

SEQ ID NO: 769132 - DNA, 25 bp, Homo sapien
ctaggagcggccctcgcccatgatg

SEQ ID NO: 769133 - DNA, 25 bp, Homo sapien
taggagcggccctcgcccatgatgg

SEQ ID NO: 769134 - DNA, 25 bp, Homo sapien
tggataaactcggggttcctggtgc

SEQ ID NO: 769135 - DNA, 25 bp, Homo sapien
agggcattcccggtgcaggtgcaca

SEQ ID NO: 769136 - DNA, 25 bp, Homo sapien
cctgagggcattcccggtgcaggtg

SEQ ID NO: 769137 - DNA, 25 bp, Homo sapien
tcctcctgagggcattcccggtgca

SEQ ID NO: 769138 - DNA, 25 bp, Homo sapien
ggcattcccggtgcaggtgcacagc

SEQ ID NO: 769139 - DNA, 25 bp, Homo sapien
tggttcccggaaggatgtcacccag

SEQ ID NO: 769140 - DNA, 25 bp, Homo sapien
ctggttcccggaaggatgtcaccca

SEQ ID NO: 769141 - DNA, 25 bp, Homo sapien
agtgggaaccctgtgactgatccat

SEQ ID NO: 769142 - DNA, 25 bp, Homo sapien
gaaccctgtgactgatccatttgtc

SEQ ID NO: 769143 - DNA, 25 bp, Homo sapien
gattagaatgagtggggtcgtttca

SEQ ID NO: 769144 - DNA, 25 bp, Homo sapien
gggaaccctgtgactgatccatttg

SEQ ID NO: 769145 - DNA, 25 bp, Homo sapien
ccatcaggagcggagggcgctttgg

SEQ ID NO: 769146 - DNA, 25 bp, Homo sapien
gccatcaggagcggagggcgctttg

SEQ ID NO: 769147 - DNA, 25 bp, Homo sapien
agccatcaggagcggagggcgcttt

SEQ ID NO: 769148 - DNA, 25 bp, Homo sapien
taaagctgtatgagtggcatttctg

SEQ ID NO: 769149 - DNA, 25 bp, Homo sapien
agcataaagctgtatgagtggcatt

SEQ ID NO: 769150 - DNA, 25 bp, Homo sapien
cataaagctgtatgagtggcatttc

SEQ ID NO: 769151 - DNA, 25 bp, Homo sapien
agctgtatgagtggcatttctgcca

SEQ ID NO: 769152 - DNA, 25 bp, Homo sapien
ggtgaccttgatctgtggctccgtt

SEQ ID NO: 769153 - DNA, 25 bp, Homo sapien
gggtgaccttgatctgtggctccgt

SEQ ID NO: 769154 - DNA, 25 bp, Homo sapien
ccccgatttacgttgctcgccatgg

SEQ ID NO: 769155 - DNA, 25 bp, Homo sapien
aacactgcaaatggtccccttggcc

SEQ ID NO: 769156 - DNA, 25 bp, Homo sapien
cgttcgtcataagagccaaacactg

SEQ ID NO: 769157 - DNA, 25 bp, Homo sapien
cttggccaagacgagtccccgattt

SEQ ID NO: 769158 - DNA, 25 bp, Homo sapien
caggtgaatggaatcacctggtggc

SEQ ID NO: 769159 - DNA, 25 bp, Homo sapien
tcccaggtgaatggaatcacctggt

SEQ ID NO: 769160 - DNA, 25 bp, Homo sapien
tctcccaggtgaatggaatcacctg

SEQ ID NO: 769161 - DNA, 25 bp, Homo sapien
ttctcccaggtgaatggaatcacct

SEQ ID NO: 769162 - DNA, 25 bp, Homo sapien
gggcccaggcatagaacatcagcca

SEQ ID NO: 769163 - DNA, 25 bp, Homo sapien
gcccaggcatagaacatcagccagc

SEQ ID NO: 769164 - DNA, 25 bp, Homo sapien
agggggcccaggcatagaacatcag

SEQ ID NO: 769165 - DNA, 25 bp, Homo sapien
ccctggggggctgcgagtgttactg

SEQ ID NO: 769166 - DNA, 25 bp, Homo sapien
ccttggtgcccaggcagcgccccct

SEQ ID NO: 769167 - DNA, 25 bp, Homo sapien
gacctgcggctgacccagcccacca

SEQ ID NO: 769168 - DNA, 25 bp, Homo sapien
agcgccccctaaacaggtccactcg

SEQ ID NO: 769169 - DNA, 25 bp, Homo sapien
tgacctgcggctgacccagcccacc

SEQ ID NO: 769170 - DNA, 25 bp, Homo sapien
cccagcctcgggccgggcgcgcccg

SEQ ID NO: 769171 - DNA, 25 bp, Homo sapien
gcgcgcccggcgtcctccgccggtc

SEQ ID NO: 769172 - DNA, 25 bp, Homo sapien
gccgggcgcgcccggcgtcctccgc

SEQ ID NO: 769173 - DNA, 25 bp, Homo sapien
cgctcccccagcctcgggccgggcg

SEQ ID NO: 769174 - DNA, 25 bp, Homo sapien
gcccggcctggggtcctcggcgcgc

SEQ ID NO: 769175 - DNA, 25 bp, Homo sapien
ggcctggggtcctcggcgcgcccgc

SEQ ID NO: 769176 - DNA, 25 bp, Homo sapien
cggcctggggtcctcggcgcgcccg

SEQ ID NO: 769177 - DNA, 25 bp, Homo sapien
gagagtcagcaaaggcttagagaac

SEQ ID NO: 769178 - DNA, 25 bp, Homo sapien
tcagcaaaggcttagagaacccggg

SEQ ID NO: 769179 - DNA, 25 bp, Homo sapien
ttgagagtcgttgggaggtgccaga

SEQ ID NO: 769180 - DNA, 25 bp, Homo sapien
agtcagcaaaggcttagagaacccg

SEQ ID NO: 769181 - DNA, 25 bp, Homo sapien
tttgaagccagagccttcccatttc

SEQ ID NO: 769182 - DNA, 25 bp, Homo sapien
tcccatttccaggtcttgggggctg

SEQ ID NO: 769183 - DNA, 25 bp, Homo sapien
cagctgggggccaacccaggtaatt

SEQ ID NO: 769184 - DNA, 25 bp, Homo sapien
ggctggggagattcagtccctgaca

SEQ ID NO: 769185 - DNA, 25 bp, Homo sapien
ctcaaggcactggctcccgacagag

SEQ ID NO: 769186 - DNA, 25 bp, Homo sapien
tcctcaaggcactggctcccgacag

SEQ ID NO: 769187 - DNA, 25 bp, Homo sapien
ctcctcaaggcactggctcccgaca

SEQ ID NO: 769188 - DNA, 25 bp, Homo sapien
tcaaggcactggctcccgacagagc

SEQ ID NO: 769189 - DNA, 25 bp, Homo sapien
aagcaagagacgccaggtgagacag

SEQ ID NO: 769190 - DNA, 25 bp, Homo sapien
agcaagagacgccaggtgagacagg

SEQ ID NO: 769191 - DNA, 25 bp, Homo sapien
aaagcaagagacgccaggtgagaca

SEQ ID NO: 769192 - DNA, 25 bp, Homo sapien
tgatgaagctgttgtatggcagcag

SEQ ID NO: 769193 - DNA, 25 bp, Homo sapien
ggtacttgtgatgcaggtagtccac

SEQ ID NO: 769194 - DNA, 25 bp, Homo sapien
tccacgtccgtgatgaagctgttgt

SEQ ID NO: 769195 - DNA, 25 bp, Homo sapien
gcatcgcaaagtagatggcgtgata

SEQ ID NO: 769196 - DNA, 25 bp, Homo sapien
gccaccaagatgtaggtgaggctca

SEQ ID NO: 769197 - DNA, 25 bp, Homo sapien
tgtaggtgaggctcatgtcaaacac

SEQ ID NO: 769198 - DNA, 25 bp, Homo sapien
ccaagatgtaggtgaggctcatgtc

SEQ ID NO: 769199 - DNA, 25 bp, Homo sapien
agatgtaggtgaggctcatgtcaaa

SEQ ID NO: 769200 - DNA, 25 bp, Homo sapien
tgtgcagccgaaggccacggtgccc

SEQ ID NO: 769201 - DNA, 25 bp, Homo sapien
ggcctggtcccgagagaagagctgc

SEQ ID NO: 769202 - DNA, 25 bp, Homo sapien
atggcgtaggcctggtcccgagaga

SEQ ID NO: 769203 - DNA, 25 bp, Homo sapien
caggttgatggcgtaggcctggtcc

SEQ ID NO: 769204 - DNA, 25 bp, Homo sapien
agcctgccgcacacccccaccagga

SEQ ID NO: 769205 - DNA, 25 bp, Homo sapien
ggaagcctgccgcacacccccacca

SEQ ID NO: 769206 - DNA, 25 bp, Homo sapien
ctaggaagcctgccgcacaccccca

SEQ ID NO: 769207 - DNA, 25 bp, Homo sapien
aagcctgccgcacacccccaccagg

SEQ ID NO: 769208 - DNA, 25 bp, Homo sapien
taagggccatcgctctaagaacaca

SEQ ID NO: 769209 - DNA, 25 bp, Homo sapien
gaacacagtcttgtcccagtgcagg

SEQ ID NO: 769210 - DNA, 25 bp, Homo sapien
ggagcagactcccagagtatagaca

SEQ ID NO: 769211 - DNA, 25 bp, Homo sapien
caccccatgggtataggagcagact

SEQ ID NO: 769212 - DNA, 25 bp, Homo sapien
ctgctgttctttggccttgtcccct

SEQ ID NO: 769213 - DNA, 25 bp, Homo sapien
gggacggaataggcctctccctgct

SEQ ID NO: 769214 - DNA, 25 bp, Homo sapien
ggggacggaataggcctctccctgc

SEQ ID NO: 769215 - DNA, 25 bp, Homo sapien
tttgctgctgttctttggccttgtc

SEQ ID NO: 769216 - DNA, 25 bp, Homo sapien
tagagaaagggatctaaccttgtat

SEQ ID NO: 769217 - DNA, 25 bp, Homo sapien
gagaaagggatctaaccttgtataa

SEQ ID NO: 769218 - DNA, 25 bp, Homo sapien
agaaagggatctaaccttgtataat

SEQ ID NO: 769219 - DNA, 25 bp, Homo sapien
catagagaaagggatctaaccttgt

SEQ ID NO: 769220 - DNA, 25 bp, Homo sapien
caggtgcataattgaaagcacattt

SEQ ID NO: 769221 - DNA, 25 bp, Homo sapien
tctcctccgaagctgcagatggttt

SEQ ID NO: 769222 - DNA, 25 bp, Homo sapien
gctcaattagggacccatcgagctg

SEQ ID NO: 769223 - DNA, 25 bp, Homo sapien
atcgagctgcggctcaacattcagg

SEQ ID NO: 769224 - DNA, 25 bp, Homo sapien
ctgaatgtctcccttacatgcagtg

SEQ ID NO: 769225 - DNA, 25 bp, Homo sapien
ttacatgcagtgtgctgggccacat

SEQ ID NO: 769226 - DNA, 25 bp, Homo sapien
cattgtctcatgtggacatccataa

SEQ ID NO: 769227 - DNA, 25 bp, Homo sapien
ggagggaccaaggaatgatctgaaa

SEQ ID NO: 769228 - DNA, 25 bp, Homo sapien
ccactgccatgagtgtgtgctgtaa

SEQ ID NO: 769229 - DNA, 25 bp, Homo sapien
cactgccatgagtgtgtgctgtaag

SEQ ID NO: 769230 - DNA, 25 bp, Homo sapien
gccacgctgtttttaggaggtctta

SEQ ID NO: 769231 - DNA, 25 bp, Homo sapien
cactgactgccacgctgtttttagg

SEQ ID NO: 769232 - DNA, 25 bp, Homo sapien
tcctgctccaggatttgcgcaagca

SEQ ID NO: 769233 - DNA, 25 bp, Homo sapien
aagcaggtagcaccgctgctgaaga

SEQ ID NO: 769234 - DNA, 25 bp, Homo sapien
cagatttcctatttacacgacaggg

SEQ ID NO: 769235 - DNA, 25 bp, Homo sapien
ccaaatggcatcaggtgcaatgtac

SEQ ID NO: 769236 - DNA, 25 bp, Homo sapien
ccagccatggcggttccagatgaaa

SEQ ID NO: 769237 - DNA, 25 bp, Homo sapien
caatgtacaacctctgggagttcca

SEQ ID NO: 769238 - DNA, 25 bp, Homo sapien
cactgcccggtacacagttgggcca

SEQ ID NO: 769239 - DNA, 25 bp, Homo sapien
aaagcggtctgcactgcccggtaca

SEQ ID NO: 769240 - DNA, 25 bp, Homo sapien
taaacctttccaaagcggtctgcac

SEQ ID NO: 769241 - DNA, 25 bp, Homo sapien
tttccaaagcggtctgcactgcccg

SEQ ID NO: 769242 - DNA, 25 bp, Homo sapien
gaaatctcgcatcccttccagtatt

SEQ ID NO: 769243 - DNA, 25 bp, Homo sapien
cctgtgtctgcccatagaaatctcg

SEQ ID NO: 769244 - DNA, 25 bp, Homo sapien
ttccagtattcctgcgcaccgtggc

SEQ ID NO: 769245 - DNA, 25 bp, Homo sapien
ccgtggcctctgttaggagattcct

SEQ ID NO: 769246 - DNA, 25 bp, Homo sapien
catggcttgactccggagagactcc

SEQ ID NO: 769247 - DNA, 25 bp, Homo sapien
agacatggcttgactccggagagac

SEQ ID NO: 769248 - DNA, 25 bp, Homo sapien
gacatggcttgactccggagagact

SEQ ID NO: 769249 - DNA, 25 bp, Homo sapien
acatggcttgactccggagagactc

SEQ ID NO: 769250 - DNA, 25 bp, Homo sapien
aagacacctgaagtctgtccataca

SEQ ID NO: 769251 - DNA, 25 bp, Homo sapien
gtctgtccatacacactcagtgtgg

SEQ ID NO: 769252 - DNA, 25 bp, Homo sapien
tctgtccatacacactcagtgtggg

SEQ ID NO: 769253 - DNA, 25 bp, Homo sapien
agacacctgaagtctgtccatacac

SEQ ID NO: 769254 - DNA, 25 bp, Homo sapien
ctgaccccaagaccgtctcctccag

SEQ ID NO: 769255 - DNA, 25 bp, Homo sapien
tacagatgttctgaccccaagaccg

SEQ ID NO: 769256 - DNA, 25 bp, Homo sapien
agggagttggggagaattctgaagg

SEQ ID NO: 769257 - DNA, 25 bp, Homo sapien
gctcctacacctgtccatcccaccc

SEQ ID NO: 769258 - DNA, 25 bp, Homo sapien
gctccaggtactatatcgcccctgt

SEQ ID NO: 769259 - DNA, 25 bp, Homo sapien
cagctccaggtactatatcgcccct

SEQ ID NO: 769260 - DNA, 25 bp, Homo sapien
agctccaggtactatatcgcccctg

SEQ ID NO: 769261 - DNA, 25 bp, Homo sapien
ccagctccaggtactatatcgcccc

SEQ ID NO: 769262 - DNA, 25 bp, Homo sapien
cgccgccaccggacacagtttccta

SEQ ID NO: 769263 - DNA, 25 bp, Homo sapien
cgaaaggatcctctcgcgtccgccg

SEQ ID NO: 769264 - DNA, 25 bp, Homo sapien
tggggtcgcgccaggttaacaggct

SEQ ID NO: 769265 - DNA, 25 bp, Homo sapien
tttttgacggacatacacactgtgc

SEQ ID NO: 769266 - DNA, 25 bp, Homo sapien
ccagattcaaggctgcagcagacat

SEQ ID NO: 769267 - DNA, 25 bp, Homo sapien
cccacggggagtcccagattcaagg

SEQ ID NO: 769268 - DNA, 25 bp, Homo sapien
cacggggagtcccagattcaaggct

SEQ ID NO: 769269 - DNA, 25 bp, Homo sapien
tcccagattcaaggctgcagcagac

SEQ ID NO: 769270 - DNA, 25 bp, Homo sapien
agcacctgaccatactgctaatgcc

SEQ ID NO: 769271 - DNA, 25 bp, Homo sapien
ttgtggatgcagcacctgaccatac

SEQ ID NO: 769272 - DNA, 25 bp, Homo sapien
gatgcagcacctgaccatactgcta

SEQ ID NO: 769273 - DNA, 25 bp, Homo sapien
tggatgcagcacctgaccatactgc

SEQ ID NO: 769274 - DNA, 25 bp, Homo sapien
taataattgtcatggaagtcctgtg

SEQ ID NO: 769275 - DNA, 25 bp, Homo sapien
ctaataattgtcatggaagtcctgt

SEQ ID NO: 769276 - DNA, 25 bp, Homo sapien
tgagctgttgcacctacccctggga

SEQ ID NO: 769277 - DNA, 25 bp, Homo sapien
ataccaatgcatgtcaacctggatg

SEQ ID NO: 769278 - DNA, 25 bp, Homo sapien
gtggtttctcttatctgtcctggct

SEQ ID NO: 769279 - DNA, 25 bp, Homo sapien
gtcaagatcataccaatgcatgtca

SEQ ID NO: 769280 - DNA, 25 bp, Homo sapien
gctgctggggcctgtactcaaacgc

SEQ ID NO: 769281 - DNA, 25 bp, Homo sapien
tggggcctgtactcaaacgcagccc

SEQ ID NO: 769282 - DNA, 25 bp, Homo sapien
catggctccatgagtggggcagagc

SEQ ID NO: 769283 - DNA, 25 bp, Homo sapien
cccccccatggccatggctccatga

SEQ ID NO: 769284 - DNA, 25 bp, Homo sapien
ataggcacctgacaccatgcctacc

SEQ ID NO: 769285 - DNA, 25 bp, Homo sapien
cctgacaccatgcctacctaattta

SEQ ID NO: 769286 - DNA, 25 bp, Homo sapien
gacaccatgcctacctaatttatgt

SEQ ID NO: 769287 - DNA, 25 bp, Homo sapien
taggcacctgacaccatgcctacct

SEQ ID NO: 769288 - DNA, 25 bp, Homo sapien
gtcttcacatgttgaattcgcaagt

SEQ ID NO: 769289 - DNA, 25 bp, Homo sapien
taagtcttcacatgttgaattcgca

SEQ ID NO: 769290 - DNA, 25 bp, Homo sapien
aagtcttcacatgttgaattcgcaa

SEQ ID NO: 769291 - DNA, 25 bp, Homo sapien
gtaagtcttcacatgttgaattcgc

SEQ ID NO: 769292 - DNA, 25 bp, Homo sapien
aaaaaagctgatccatcattttcca

SEQ ID NO: 769293 - DNA, 25 bp, Homo sapien
ttttccacaattcagtgattctggc

SEQ ID NO: 769294 - DNA, 25 bp, Homo sapien
tgcaaaaaagctgatccatcatttt

SEQ ID NO: 769295 - DNA, 25 bp, Homo sapien
aaagctgatccatcattttccacaa

SEQ ID NO: 769296 - DNA, 25 bp, Homo sapien
cagtgctgtgatctcagttcatagc

SEQ ID NO: 769297 - DNA, 25 bp, Homo sapien
tgttgttgttgcagagtttcactct

SEQ ID NO: 769298 - DNA, 25 bp, Homo sapien
tgctgtgatctcagttcatagcagc

SEQ ID NO: 769299 - DNA, 25 bp, Homo sapien
ttgttgttgttgcagagtttcactc

SEQ ID NO: 769300 - DNA, 25 bp, Homo sapien
cattcaagtacttaggtgtactgtg

SEQ ID NO: 769301 - DNA, 25 bp, Homo sapien
agacttcattcaagtacttaggtgt

SEQ ID NO: 769302 - DNA, 25 bp, Homo sapien
ttcattcaagtacttaggtgtactg

SEQ ID NO: 769303 - DNA, 25 bp, Homo sapien
acttcattcaagtacttaggtgtac

SEQ ID NO: 769304 - DNA, 25 bp, Homo sapien
caggccttcatggtctttttgggga

SEQ ID NO: 769305 - DNA, 25 bp, Homo sapien
gattttcattactctcaggccttca

SEQ ID NO: 769306 - DNA, 25 bp, Homo sapien
tttcaggaagattttcattactctc

SEQ ID NO: 769307 - DNA, 25 bp, Homo sapien
ctcaggccttcatggtctttttggg

SEQ ID NO: 769308 - DNA, 25 bp, Homo sapien
aatgacaggagtatagagagggact

SEQ ID NO: 769309 - DNA, 25 bp, Homo sapien
tgagcacaatgacaggagtatagag

SEQ ID NO: 769310 - DNA, 25 bp, Homo sapien
gtgatgagcacaatgacaggagtat

SEQ ID NO: 769311 - DNA, 25 bp, Homo sapien
cacaatgacaggagtatagagaggg

SEQ ID NO: 769312 - DNA, 25 bp, Homo sapien
gcctgagtgacacagcaaggtcctg

SEQ ID NO: 769313 - DNA, 25 bp, Homo sapien
aaggttgaagtggtaggatcgcttg

SEQ ID NO: 769314 - DNA, 25 bp, Homo sapien
caatgagccgtgataggaccactga

SEQ ID NO: 769315 - DNA, 25 bp, Homo sapien
aggctacaatgagccgtgataggac

SEQ ID NO: 769316 - DNA, 25 bp, Homo sapien
taacatgttgcccagtcagtctctc

SEQ ID NO: 769317 - DNA, 25 bp, Homo sapien
cttcctggactctgaagtctttcat

SEQ ID NO: 769318 - DNA, 25 bp, Homo sapien
tgaataacatgttgcccagtcagtc

SEQ ID NO: 769319 - DNA, 25 bp, Homo sapien
gtctctcttcctggactctgaagtc

SEQ ID NO: 769320 - DNA, 25 bp, Homo sapien
tagagatgccaacgaaaggcaggag

SEQ ID NO: 769321 - DNA, 25 bp, Homo sapien
ttggacctccagacacagtcagaag

SEQ ID NO: 769322 - DNA, 25 bp, Homo sapien
agcacagcctgtagaggccacctgg

SEQ ID NO: 769323 - DNA, 25 bp, Homo sapien
agcagctgggcctagagatgccaac

SEQ ID NO: 769324 - DNA, 25 bp, Homo sapien
ggacagcctgtcggggggcaggagc

SEQ ID NO: 769325 - DNA, 25 bp, Homo sapien
cagcctgtcggggggcaggagctgg

SEQ ID NO: 769326 - DNA, 25 bp, Homo sapien
gcctgtcggggggcaggagctgggc

SEQ ID NO: 769327 - DNA, 25 bp, Homo sapien
gacagcctgtcggggggcaggagct

SEQ ID NO: 769328 - DNA, 25 bp, Homo sapien
aggctgacggaaggcacaagttggg

SEQ ID NO: 769329 - DNA, 25 bp, Homo sapien
ctgacggaaggcacaagttgggcct

SEQ ID NO: 769330 - DNA, 25 bp, Homo sapien
acttgagaaagttctcggtctagag

SEQ ID NO: 769331 - DNA, 25 bp, Homo sapien
ttctcggtctagagaagctgctggg

SEQ ID NO: 769332 - DNA, 25 bp, Homo sapien
ctgggtctggagatgctgccaaaag

SEQ ID NO: 769333 - DNA, 25 bp, Homo sapien
agctgggccagaatggccactgtga

SEQ ID NO: 769334 - DNA, 25 bp, Homo sapien
aggcccacttgaggaagttctgggt

SEQ ID NO: 769335 - DNA, 25 bp, Homo sapien
ggccactgtgaggcataagcttgcc

SEQ ID NO: 769336 - DNA, 25 bp, Homo sapien
cgtgaggcatgagttggatgtagag

SEQ ID NO: 769337 - DNA, 25 bp, Homo sapien
tgaggcatgagttggatgtagagag

SEQ ID NO: 769338 - DNA, 25 bp, Homo sapien
aggcatgagttggatgtagagaggc

SEQ ID NO: 769339 - DNA, 25 bp, Homo sapien
catgagttggatgtagagaggccag

SEQ ID NO: 769340 - DNA, 25 bp, Homo sapien
ggcctggagatgacgtcctgggaca

SEQ ID NO: 769341 - DNA, 25 bp, Homo sapien
tgggcctggagatgacgtcctggga

SEQ ID NO: 769342 - DNA, 25 bp, Homo sapien
tggagatgacgtcctgggacaggag

SEQ ID NO: 769343 - DNA, 25 bp, Homo sapien
gagatgacgtcctgggacaggagct

SEQ ID NO: 769344 - DNA, 25 bp, Homo sapien
actgggccaaaaaaggctgttgtga

SEQ ID NO: 769345 - DNA, 25 bp, Homo sapien
aactgggccaaaaaaggctgttgtg

SEQ ID NO: 769346 - DNA, 25 bp, Homo sapien
cccgtagaggctgccgaaaggcagg

SEQ ID NO: 769347 - DNA, 25 bp, Homo sapien
taaagaggccattgcaaggcaggag

SEQ ID NO: 769348 - DNA, 25 bp, Homo sapien
aaagaggccattgcaaggcaggagc

SEQ ID NO: 769349 - DNA, 25 bp, Homo sapien
ggcaggagctgggcccgtagaggct

SEQ ID NO: 769350 - DNA, 25 bp, Homo sapien
ctgtgcctggaaaagtcgccatggg

SEQ ID NO: 769351 - DNA, 25 bp, Homo sapien
gaaaagtcgccatggggcatgagct

SEQ ID NO: 769352 - DNA, 25 bp, Homo sapien
agctgtgcctggaaaagtcgccatg

SEQ ID NO: 769353 - DNA, 25 bp, Homo sapien
tgcaaaaggcaaaagctgtgcctgg

SEQ ID NO: 769354 - DNA, 25 bp, Homo sapien
ttgtcctggcgatgccgagttaagc

SEQ ID NO: 769355 - DNA, 25 bp, Homo sapien
tgtcctggcgatgccgagttaagca

SEQ ID NO: 769356 - DNA, 25 bp, Homo sapien
caggaggccacagttaggaagagat

SEQ ID NO: 769357 - DNA, 25 bp, Homo sapien
cccgcagaggctcccgagagggagg

SEQ ID NO: 769358 - DNA, 25 bp, Homo sapien
gagagcccactgtgaggtagagtcc

SEQ ID NO: 769359 - DNA, 25 bp, Homo sapien
gccacagttaggaagagatgggcct

SEQ ID NO: 769360 - DNA, 25 bp, Homo sapien
gaggctgccggtaggaagagttcgg

SEQ ID NO: 769361 - DNA, 25 bp, Homo sapien
cagtgaggcgagacctagctgttcg

SEQ ID NO: 769362 - DNA, 25 bp, Homo sapien
gagacctagctgttcgtggagagtc

SEQ ID NO: 769363 - DNA, 25 bp, Homo sapien
ctgccggtaggaagagttcggcccg

SEQ ID NO: 769364 - DNA, 25 bp, Homo sapien
aggccactggtaggcggaagttggg

SEQ ID NO: 769365 - DNA, 25 bp, Homo sapien
ggccactggtaggcggaagttgggc

SEQ ID NO: 769366 - DNA, 25 bp, Homo sapien
gaggccactggtaggcggaagttgg

SEQ ID NO: 769367 - DNA, 25 bp, Homo sapien
ttgtgaggaatgagccccctgggcc

SEQ ID NO: 769368 - DNA, 25 bp, Homo sapien
tgaggaatgagccccctgggcctga

SEQ ID NO: 769369 - DNA, 25 bp, Homo sapien
ctgggccgggaaaggccgttgtgag

SEQ ID NO: 769370 - DNA, 25 bp, Homo sapien
ggaatgagccccctgggcctgagga

SEQ ID NO: 769371 - DNA, 25 bp, Homo sapien
gaccaaggccaccacgagctgggca

SEQ ID NO: 769372 - DNA, 25 bp, Homo sapien
aaggccaccacgagctgggcaggca

SEQ ID NO: 769373 - DNA, 25 bp, Homo sapien
ggccaccacgagctgggcaggcact

SEQ ID NO: 769374 - DNA, 25 bp, Homo sapien
gggccgaccaaggccaccacgagct

SEQ ID NO: 769375 - DNA, 25 bp, Homo sapien
agaggccgccctgacgcatgagctt

SEQ ID NO: 769376 - DNA, 25 bp, Homo sapien
ggagaggccgccctgacgcatgagc

SEQ ID NO: 769377 - DNA, 25 bp, Homo sapien
gaggccgccctgacgcatgagcttg

SEQ ID NO: 769378 - DNA, 25 bp, Homo sapien
aggccgccctgacgcatgagcttgg

SEQ ID NO: 769379 - DNA, 25 bp, Homo sapien
aaagaggttgttgggaggcaggagc

SEQ ID NO: 769380 - DNA, 25 bp, Homo sapien
agaggttgttgggaggcaggagccg

SEQ ID NO: 769381 - DNA, 25 bp, Homo sapien
gagtccaaagaggttgttgggaggc

SEQ ID NO: 769382 - DNA, 25 bp, Homo sapien
tccaaagaggttgttgggaggcagg

SEQ ID NO: 769383 - DNA, 25 bp, Homo sapien
gacgccgtcggagggcaggagctga

SEQ ID NO: 769384 - DNA, 25 bp, Homo sapien
cgaccaaggccaccaggagctgggc

SEQ ID NO: 769385 - DNA, 25 bp, Homo sapien
gctgtgggccgaccaaggccaccag

SEQ ID NO: 769386 - DNA, 25 bp, Homo sapien
cgtttggggcctggagacgccgtcg

SEQ ID NO: 769387 - DNA, 25 bp, Homo sapien
ctgaagaggccactggcaggcggga

SEQ ID NO: 769388 - DNA, 25 bp, Homo sapien
gaagaggccactggcaggcgggagc

SEQ ID NO: 769389 - DNA, 25 bp, Homo sapien
aggccactggcaggcgggagctggg

SEQ ID NO: 769390 - DNA, 25 bp, Homo sapien
agaggccactggcaggcgggagctg

SEQ ID NO: 769391 - DNA, 25 bp, Homo sapien
aaggccaccacgagctgggcaggca

SEQ ID NO: 769392 - DNA, 25 bp, Homo sapien
gaccaaggccaccacgagctgggca

SEQ ID NO: 769393 - DNA, 25 bp, Homo sapien
ggccaccacgagctgggcaggcact

SEQ ID NO: 769394 - DNA, 25 bp, Homo sapien
gggccgaccaaggccaccacgagct

SEQ ID NO: 769395 - DNA, 25 bp, Homo sapien
gagctgagccaaaagagcttgcttg

SEQ ID NO: 769396 - DNA, 25 bp, Homo sapien
ctggagaggctgacttcaggaccac

SEQ ID NO: 769397 - DNA, 25 bp, Homo sapien
tggagaggctgacttcaggaccact

SEQ ID NO: 769398 - DNA, 25 bp, Homo sapien
cttgcttgctgggaggccggagctg

SEQ ID NO: 769399 - DNA, 25 bp, Homo sapien
tccaaagaggttgttgggaggcagg

SEQ ID NO: 769400 - DNA, 25 bp, Homo sapien
aaagaggttgttgggaggcaggagc

SEQ ID NO: 769401 - DNA, 25 bp, Homo sapien
agaggttgttgggaggcaggagccg

SEQ ID NO: 769402 - DNA, 25 bp, Homo sapien
gagtccaaagaggttgttgggaggc

SEQ ID NO: 769403 - DNA, 25 bp, Homo sapien
aaggccaccacgagctgggcaggca

SEQ ID NO: 769404 - DNA, 25 bp, Homo sapien
caaggccaccacgagctgggcaggc

SEQ ID NO: 769405 - DNA, 25 bp, Homo sapien
gggccgaccaaggccaccacgagct

SEQ ID NO: 769406 - DNA, 25 bp, Homo sapien
cgaccaaggccaccacgagctgggc

SEQ ID NO: 769407 - DNA, 25 bp, Homo sapien
gagcccatgcaaaggagcaaacgcc

SEQ ID NO: 769408 - DNA, 25 bp, Homo sapien
atgcaaaggagcaaacgccaggccg

SEQ ID NO: 769409 - DNA, 25 bp, Homo sapien
gagaggccgccctgacgcatgagct

SEQ ID NO: 769410 - DNA, 25 bp, Homo sapien
tgacgcatgagcttggcctccggag

SEQ ID NO: 769411 - DNA, 25 bp, Homo sapien
ctgggccgggaaaggccgttgtgag

SEQ ID NO: 769412 - DNA, 25 bp, Homo sapien
tgtgaggaatgagccccatgggcct

SEQ ID NO: 769413 - DNA, 25 bp, Homo sapien
ctgaggaggccactggcaggtggga

SEQ ID NO: 769414 - DNA, 25 bp, Homo sapien
gccccatgggcctgaggaggccact

SEQ ID NO: 769415 - DNA, 25 bp, Homo sapien
aaggccaccacgagctgggcaggca

SEQ ID NO: 769416 - DNA, 25 bp, Homo sapien
ggccaccacgagctgggcaggcact

SEQ ID NO: 769417 - DNA, 25 bp, Homo sapien
gaccaaggccaccacgagctgggca

SEQ ID NO: 769418 - DNA, 25 bp, Homo sapien
gggccgaccaaggccaccacgagct

SEQ ID NO: 769419 - DNA, 25 bp, Homo sapien
aggagcttcgctggagaaagttcag

SEQ ID NO: 769420 - DNA, 25 bp, Homo sapien
cgctggagaaagttcagggtctaca

SEQ ID NO: 769421 - DNA, 25 bp, Homo sapien
gggactgaggagcttcgctggagaa

SEQ ID NO: 769422 - DNA, 25 bp, Homo sapien
agttcagggtctacaaaagccggcg

SEQ ID NO: 769423 - DNA, 25 bp, Homo sapien
ggagaggccggagctttcgactcgg

SEQ ID NO: 769424 - DNA, 25 bp, Homo sapien
gaggccgcaggcgagagcgagctgg

SEQ ID NO: 769425 - DNA, 25 bp, Homo sapien
ccgcaggcgagagcgagctgggcgt

SEQ ID NO: 769426 - DNA, 25 bp, Homo sapien
aagcggcggagaggccggagctttc

SEQ ID NO: 769427 - DNA, 25 bp, Homo sapien
ctgaagaggccactggcaggcggga

SEQ ID NO: 769428 - DNA, 25 bp, Homo sapien
gaagaggccactggcaggcgggagc

SEQ ID NO: 769429 - DNA, 25 bp, Homo sapien
aggccactggcaggcgggagctggg

SEQ ID NO: 769430 - DNA, 25 bp, Homo sapien
agaggccactggcaggcgggagctg

SEQ ID NO: 769431 - DNA, 25 bp, Homo sapien
ttgaggagcttctgggcccggagag

SEQ ID NO: 769432 - DNA, 25 bp, Homo sapien
gggaaaggccgttgtgaggaatgag

SEQ ID NO: 769433 - DNA, 25 bp, Homo sapien
ccgttgtgaggaatgagccccatgg

SEQ ID NO: 769434 - DNA, 25 bp, Homo sapien
ctgggccgggaaaggccgttgtgag

SEQ ID NO: 769435 - DNA, 25 bp, Homo sapien
gggccgaccaaggccaccacgagct

SEQ ID NO: 769436 - DNA, 25 bp, Homo sapien
gaccaaggccaccacgagctgggca

SEQ ID NO: 769437 - DNA, 25 bp, Homo sapien
ggccaccacgagctgggcaggcact

SEQ ID NO: 769438 - DNA, 25 bp, Homo sapien
aaggccaccacgagctgggcaggca

SEQ ID NO: 769439 - DNA, 25 bp, Homo sapien
gaggccactggcaggcgggagctgg

SEQ ID NO: 769440 - DNA, 25 bp, Homo sapien
ctgaggaggccactggcaggcggga

SEQ ID NO: 769441 - DNA, 25 bp, Homo sapien
gaggaggccactggcaggcgggagc

SEQ ID NO: 769442 - DNA, 25 bp, Homo sapien
ggccactggcaggcgggagctgggc

SEQ ID NO: 769443 - DNA, 25 bp, Homo sapien
gaccaaggccaccacgagctgggca

SEQ ID NO: 769444 - DNA, 25 bp, Homo sapien
aaggccaccacgagctgggcaggca

SEQ ID NO: 769445 - DNA, 25 bp, Homo sapien
ggccaccacgagctgggcaggcact

SEQ ID NO: 769446 - DNA, 25 bp, Homo sapien
gggccgaccaaggccaccacgagct

SEQ ID NO: 769447 - DNA, 25 bp, Homo sapien
tgcagagtctgccgggaggcaggag

SEQ ID NO: 769448 - DNA, 25 bp, Homo sapien
tccctggacaggcctacttgacgac

SEQ ID NO: 769449 - DNA, 25 bp, Homo sapien
gcctgcagagtctgccgggaggcag

SEQ ID NO: 769450 - DNA, 25 bp, Homo sapien
ctgtccctggacaggcctacttgac

SEQ ID NO: 769451 - DNA, 25 bp, Homo sapien
gaagcggcgaagaggccggagcttt

SEQ ID NO: 769452 - DNA, 25 bp, Homo sapien
ccgcaggcgagagcgagctgggcgt

SEQ ID NO: 769453 - DNA, 25 bp, Homo sapien
cgaagaggccggagctttggactcg

SEQ ID NO: 769454 - DNA, 25 bp, Homo sapien
ggaggccgcaggcgagagcgagctg

SEQ ID NO: 769455 - DNA, 25 bp, Homo sapien
ctgaggaggccactggcaggtggga

SEQ ID NO: 769456 - DNA, 25 bp, Homo sapien
tgtgaggaatgagccccatgggcct

SEQ ID NO: 769457 - DNA, 25 bp, Homo sapien
ctgggccgggaaaggccgttgtgag

SEQ ID NO: 769458 - DNA, 25 bp, Homo sapien
gccccatgggcctgaggaggccact

SEQ ID NO: 769459 - DNA, 25 bp, Homo sapien
ggcaggagtcgggcctgcagacgca

SEQ ID NO: 769460 - DNA, 25 bp, Homo sapien
caggagtcgggcctgcagacgcagc

SEQ ID NO: 769461 - DNA, 25 bp, Homo sapien
ggaggcaggagtcgggcctgcagac

SEQ ID NO: 769462 - DNA, 25 bp, Homo sapien
ggagtcgggcctgcagacgcagccg

SEQ ID NO: 769463 - DNA, 25 bp, Homo sapien
gacgccgtcggagggcaggagctga

SEQ ID NO: 769464 - DNA, 25 bp, Homo sapien
cgtttggggcctggagacgccgtcg

SEQ ID NO: 769465 - DNA, 25 bp, Homo sapien
gcttgaagaagctgtgggccgacca

SEQ ID NO: 769466 - DNA, 25 bp, Homo sapien
gctgtgggccgaccaaggccaccac

SEQ ID NO: 769467 - DNA, 25 bp, Homo sapien
cgccgggaggcccaagctgggcctg

SEQ ID NO: 769468 - DNA, 25 bp, Homo sapien
agctgggcctggagaagcccaccga

SEQ ID NO: 769469 - DNA, 25 bp, Homo sapien
ccacttgggcctgcagaggccgccg

SEQ ID NO: 769470 - DNA, 25 bp, Homo sapien
tcaggaccacttgggcctgcagagg

SEQ ID NO: 769471 - DNA, 25 bp, Homo sapien
aggagctgggccgcacacaggctgc

SEQ ID NO: 769472 - DNA, 25 bp, Homo sapien
tgacgcatgagcttggcctccggag

SEQ ID NO: 769473 - DNA, 25 bp, Homo sapien
gagcccatgcaaaggagcaaacgcc

SEQ ID NO: 769474 - DNA, 25 bp, Homo sapien
gagaggccgccctgacgcatgagct

SEQ ID NO: 769475 - DNA, 25 bp, Homo sapien
atgcaaaggagcaaacgccaggccg

SEQ ID NO: 769476 - DNA, 25 bp, Homo sapien
ctgggtcctgagaggcagtcggacg

SEQ ID NO: 769477 - DNA, 25 bp, Homo sapien
ggtcctgagaggcagtcggacggga

SEQ ID NO: 769478 - DNA, 25 bp, Homo sapien
agaggcagtcggacgggaaaaaatg

SEQ ID NO: 769479 - DNA, 25 bp, Homo sapien
ctgagaggcagtcggacgggaaaaa

SEQ ID NO: 769480 - DNA, 25 bp, Homo sapien
ggaatccaccgactggaggccgttc

SEQ ID NO: 769481 - DNA, 25 bp, Homo sapien
aatccaccgactggaggccgttcgg

SEQ ID NO: 769482 - DNA, 25 bp, Homo sapien
atccaccgactggaggccgttcggg

SEQ ID NO: 769483 - DNA, 25 bp, Homo sapien
gaatccaccgactggaggccgttcg

SEQ ID NO: 769484 - DNA, 25 bp, Homo sapien
ctgggtctctagaggctgacgagag

SEQ ID NO: 769485 - DNA, 25 bp, Homo sapien
gggtctctagaggctgacgagaggc

SEQ ID NO: 769486 - DNA, 25 bp, Homo sapien
tgggtctctagaggctgacgagagg

SEQ ID NO: 769487 - DNA, 25 bp, Homo sapien
agagcctgactcaagggcagtctgg

SEQ ID NO: 769488 - DNA, 25 bp, Homo sapien
ggagagcctgactcaagggcagtct

SEQ ID NO: 769489 - DNA, 25 bp, Homo sapien
gagagcctgactcaagggcagtctg

SEQ ID NO: 769490 - DNA, 25 bp, Homo sapien
tggagagcctgactcaagggcagtc

SEQ ID NO: 769491 - DNA, 25 bp, Homo sapien
ccaggccgacttgaggatgacttgg

SEQ ID NO: 769492 - DNA, 25 bp, Homo sapien
aggccgacttgaggatgacttgggc

SEQ ID NO: 769493 - DNA, 25 bp, Homo sapien
tccaggccgacttgaggatgacttg

SEQ ID NO: 769494 - DNA, 25 bp, Homo sapien
ttccaggccgacttgaggatgactt

SEQ ID NO: 769495 - DNA, 25 bp, Homo sapien
gtctgctgtgattccgaggccgggc

SEQ ID NO: 769496 - DNA, 25 bp, Homo sapien
catgggcaggatgctctgcacacaa

SEQ ID NO: 769497 - DNA, 25 bp, Homo sapien
cgctgcatgggtcccagaggctgga

SEQ ID NO: 769498 - DNA, 25 bp, Homo sapien
gcagcatgggcaggatgctctgcac

SEQ ID NO: 769499 - DNA, 25 bp, Homo sapien
caactgcaggtgaaacggatgctgg

SEQ ID NO: 769500 - DNA, 25 bp, Homo sapien
gtccactaggccacagccgctctcc

SEQ ID NO: 769501 - DNA, 25 bp, Homo sapien
gccggccctgatcgtgcagcttttc

SEQ ID NO: 769502 - DNA, 25 bp, Homo sapien
cagtgccggccctgatcgtgcagct

SEQ ID NO: 769503 - DNA, 25 bp, Homo sapien
tcttcccctccaaggtttgttctgc

SEQ ID NO: 769504 - DNA, 25 bp, Homo sapien
ctactcagtatggagctccaggcca

SEQ ID NO: 769505 - DNA, 25 bp, Homo sapien
ccaaagccttctactcagtatggag

SEQ ID NO: 769506 - DNA, 25 bp, Homo sapien
ctggcccaaagccttctactcagta

SEQ ID NO: 769507 - DNA, 25 bp, Homo sapien
aagccttctactcagtatggagctc

SEQ ID NO: 769508 - DNA, 25 bp, Homo sapien
cctgggagcagagtatatcagagac

SEQ ID NO: 769509 - DNA, 25 bp, Homo sapien
gcagagtatatcagagacgagcact

SEQ ID NO: 769510 - DNA, 25 bp, Homo sapien
aacggctgcatacagggaacctggc

SEQ ID NO: 769511 - DNA, 25 bp, Homo sapien
ggcagaacggctgcatacagggaac

SEQ ID NO: 769512 - DNA, 25 bp, Homo sapien
gagcttgactggagaaagttttggc

SEQ ID NO: 769513 - DNA, 25 bp, Homo sapien
gctagagctgggtctgtgcagcccc

SEQ ID NO: 769514 - DNA, 25 bp, Homo sapien
tgcagccccccgctaggcaggaggt

SEQ ID NO: 769515 - DNA, 25 bp, Homo sapien
ggaggtgggcctaaagagcttgact

SEQ ID NO: 769516 - DNA, 25 bp, Homo sapien
gtgtaggatctcaccctgtataatc

SEQ ID NO: 769517 - DNA, 25 bp, Homo sapien
aaagctctaggcaagtttaggcaag

SEQ ID NO: 769518 - DNA, 25 bp, Homo sapien
ttcttgaatcctgaaagctctaggc

SEQ ID NO: 769519 - DNA, 25 bp, Homo sapien
ctgtataatctcaacaagtcccaca

SEQ ID NO: 769520 - DNA, 25 bp, Homo sapien
gcgtcagtataagagctctgcactg

SEQ ID NO: 769521 - DNA, 25 bp, Homo sapien
ccggtgctgccactgttcgcctttt

SEQ ID NO: 769522 - DNA, 25 bp, Homo sapien
tctgtgtgcgtcagtataagagctc

SEQ ID NO: 769523 - DNA, 25 bp, Homo sapien
actgttcgccttttagaaccattca

SEQ ID NO: 769524 - DNA, 25 bp, Homo sapien
cacacaaagaattcaggacgagtcc

SEQ ID NO: 769525 - DNA, 25 bp, Homo sapien
taagccctaggcaaagttccagaac

SEQ ID NO: 769526 - DNA, 25 bp, Homo sapien
tgaaatcctatttaactctaagccc

SEQ ID NO: 769527 - DNA, 25 bp, Homo sapien
taattgggtcatgtttagaaggcaa

SEQ ID NO: 769528 - DNA, 25 bp, Homo sapien
ggcacacaattggtggcactcagga

SEQ ID NO: 769529 - DNA, 25 bp, Homo sapien
ttacatacgatgataaaaacttcag

SEQ ID NO: 769530 - DNA, 25 bp, Homo sapien
aactatgggccaacatttgaggagg

SEQ ID NO: 769531 - DNA, 25 bp, Homo sapien
ttcaagatcacccttagcaacatag

SEQ ID NO: 769532 - DNA, 25 bp, Homo sapien
aagccttatcttcctcgtccttctc

SEQ ID NO: 769533 - DNA, 25 bp, Homo sapien
ttcttgggctgtttcagggccttct

SEQ ID NO: 769534 - DNA, 25 bp, Homo sapien
tcttcttgccacctttgctgccaga

SEQ ID NO: 769535 - DNA, 25 bp, Homo sapien
ttcttgccacctttgctgccagaca

SEQ ID NO: 769536 - DNA, 25 bp, Homo sapien
gggccacttccccacggccttcatg

SEQ ID NO: 769537 - DNA, 25 bp, Homo sapien
gccacttccccacggccttcatgtt

SEQ ID NO: 769538 - DNA, 25 bp, Homo sapien
ttccccacggccttcatgtttagct

SEQ ID NO: 769539 - DNA, 25 bp, Homo sapien
acttccccacggccttcatgtttag

SEQ ID NO: 769540 - DNA, 25 bp, Homo sapien
gtggcaaaaggtgttatggcagtta

SEQ ID NO: 769541 - DNA, 25 bp, Homo sapien
taccatttcctcaggcacaagcaac

SEQ ID NO: 769542 - DNA, 25 bp, Homo sapien
ggttaccatttcctcaggcacaagc

SEQ ID NO: 769543 - DNA, 25 bp, Homo sapien
aaggtgttatggcagttaatacaga

SEQ ID NO: 769544 - DNA, 25 bp, Homo sapien
aatcccaatgtctccactactccca

SEQ ID NO: 769545 - DNA, 25 bp, Homo sapien
tgaacaaaatcccaatgtctccact

SEQ ID NO: 769546 - DNA, 25 bp, Homo sapien
ctggtatgtctggaatttctgaaca

SEQ ID NO: 769547 - DNA, 25 bp, Homo sapien
ggaatttctgaacaaaatcccaatg

SEQ ID NO: 769548 - DNA, 25 bp, Homo sapien
caggcaaaaggtctggagtaaaatg

SEQ ID NO: 769549 - DNA, 25 bp, Homo sapien
tcaggcaaaaggtctggagtaaaat

SEQ ID NO: 769550 - DNA, 25 bp, Homo sapien
ctcaggcaaaaggtctggagtaaaa

SEQ ID NO: 769551 - DNA, 25 bp, Homo sapien
ccttacagtcacctacacattccca

SEQ ID NO: 769552 - DNA, 25 bp, Homo sapien
agtcacctacacattcccagtcttt

SEQ ID NO: 769553 - DNA, 25 bp, Homo sapien
ttacagtcacctacacattcccagt

SEQ ID NO: 769554 - DNA, 25 bp, Homo sapien
gtcccttacagtcacctacacattc

SEQ ID NO: 769555 - DNA, 25 bp, Homo sapien
aaggattgagcactggttaaaagcg

SEQ ID NO: 769556 - DNA, 25 bp, Homo sapien
gttgagtaaggattgagcactggtt

SEQ ID NO: 769557 - DNA, 25 bp, Homo sapien
tgttgagtaaggattgagcactggt

SEQ ID NO: 769558 - DNA, 25 bp, Homo sapien
gattgagcactggttaaaagcgttg

SEQ ID NO: 769559 - DNA, 25 bp, Homo sapien
ttatgtccaataaggtgtgagcact

SEQ ID NO: 769560 - DNA, 25 bp, Homo sapien
atgtccaataaggtgtgagcactgg

SEQ ID NO: 769561 - DNA, 25 bp, Homo sapien
ctcttatgtccaataaggtgtgagc

SEQ ID NO: 769562 - DNA, 25 bp, Homo sapien
ttctcttatgtccaataaggtgtga

SEQ ID NO: 769563 - DNA, 25 bp, Homo sapien
gggtttccttcagtatgagttctct

SEQ ID NO: 769564 - DNA, 25 bp, Homo sapien
tgtagggtttccttcagtatgagtt

SEQ ID NO: 769565 - DNA, 25 bp, Homo sapien
agggtttccttcagtatgagttctc

SEQ ID NO: 769566 - DNA, 25 bp, Homo sapien
atgtgtagggtttccttcagtatga

SEQ ID NO: 769567 - DNA, 25 bp, Homo sapien
ttatgttgagaaaagtatgagaacc

SEQ ID NO: 769568 - DNA, 25 bp, Homo sapien
cttatgttgagaaaagtatgagaac

SEQ ID NO: 769569 - DNA, 25 bp, Homo sapien
tatgagaaccagttaaaagttttgc

SEQ ID NO: 769570 - DNA, 25 bp, Homo sapien
ttaaaagttttgccacattcttcac

SEQ ID NO: 769571 - DNA, 25 bp, Homo sapien
cttcactattgtaggggtttctctc

SEQ ID NO: 769572 - DNA, 25 bp, Homo sapien
ttcttcactattgtaggggtttctc

SEQ ID NO: 769573 - DNA, 25 bp, Homo sapien
tcttcactattgtaggggtttctct

SEQ ID NO: 769574 - DNA, 25 bp, Homo sapien
tgtaggtgttctcgatcacatgaat

SEQ ID NO: 769575 - DNA, 25 bp, Homo sapien
caattgtaggtgttctcgatcacat

SEQ ID NO: 769576 - DNA, 25 bp, Homo sapien
ggtgttctcgatcacatgaattatc

SEQ ID NO: 769577 - DNA, 25 bp, Homo sapien
ttccctacaattgtaggtgttctcg

SEQ ID NO: 769578 - DNA, 25 bp, Homo sapien
caagtgtccttagtgttccatggaa

SEQ ID NO: 769579 - DNA, 25 bp, Homo sapien
tacaacattgttataaggggcctct

SEQ ID NO: 769580 - DNA, 25 bp, Homo sapien
atggaaaagtgtattaatggtgccc

SEQ ID NO: 769581 - DNA, 25 bp, Homo sapien
ccttagtgttccatggaaaagtgta

SEQ ID NO: 769582 - DNA, 25 bp, Homo sapien
agtgggcaggccttcctctaggtgc

SEQ ID NO: 769583 - DNA, 25 bp, Homo sapien
cacaggggcaactaacagagtgggc

SEQ ID NO: 769584 - DNA, 25 bp, Homo sapien
cccagcagagcctttgttcccaggg

SEQ ID NO: 769585 - DNA, 25 bp, Homo sapien
tgactcggggaccttgctctcgacc

SEQ ID NO: 769586 - DNA, 25 bp, Homo sapien
aagcggtagcagaggtctggcttcc

SEQ ID NO: 769587 - DNA, 25 bp, Homo sapien
agcggtagcagaggtctggcttcct

SEQ ID NO: 769588 - DNA, 25 bp, Homo sapien
gcggtagcagaggtctggcttcctg

SEQ ID NO: 769589 - DNA, 25 bp, Homo sapien
cttggtgcagacaggaagactctcc

SEQ ID NO: 769590 - DNA, 25 bp, Homo sapien
tccttggtgcagacaggaagactct

SEQ ID NO: 769591 - DNA, 25 bp, Homo sapien
ccatccttggtgcagacaggaagac

SEQ ID NO: 769592 - DNA, 25 bp, Homo sapien
catccttggtgcagacaggaagact

SEQ ID NO: 769593 - DNA, 25 bp, Homo sapien
ctgtctggggattcatctccagcat

SEQ ID NO: 769594 - DNA, 25 bp, Homo sapien
cacagcctcatctgggctgtctggg

SEQ ID NO: 769595 - DNA, 25 bp, Homo sapien
ccacagcctcatctgggctgtctgg

SEQ ID NO: 769596 - DNA, 25 bp, Homo sapien
gggctgtctggggattcatctccag

SEQ ID NO: 769597 - DNA, 25 bp, Homo sapien
gtgtccagcttcaccaggtcagtga

SEQ ID NO: 769598 - DNA, 25 bp, Homo sapien
cacagtccttcatggcagtgtccag

SEQ ID NO: 769599 - DNA, 25 bp, Homo sapien
cagcttcaccaggtcagtgaggaac

SEQ ID NO: 769600 - DNA, 25 bp, Homo sapien
tcccattcacacagtccttcatggc

SEQ ID NO: 769601 - DNA, 25 bp, Homo sapien
cctggtacccgacttgcctgcccca

SEQ ID NO: 769602 - DNA, 25 bp, Homo sapien
ctcaggatcctggtacccgacttgc

SEQ ID NO: 769603 - DNA, 25 bp, Homo sapien
aagcctcaggatcctggtacccgac

SEQ ID NO: 769604 - DNA, 25 bp, Homo sapien
aggatcctggtacccgacttgcctg

SEQ ID NO: 769605 - DNA, 25 bp, Homo sapien
gggacaggaatcatggacaaattcc

SEQ ID NO: 769606 - DNA, 25 bp, Homo sapien
ctgcatcctggatttattgggaggg

SEQ ID NO: 769607 - DNA, 25 bp, Homo sapien
ggatttattgggagggtttgataca

SEQ ID NO: 769608 - DNA, 25 bp, Homo sapien
gaggaggagacccatcccaattgga

SEQ ID NO: 769609 - DNA, 25 bp, Homo sapien
aggcactcagtggacctgagattct

SEQ ID NO: 769610 - DNA, 25 bp, Homo sapien
caggcactcagtggacctgagattc

SEQ ID NO: 769611 - DNA, 25 bp, Homo sapien
ccaggcactcagtggacctgagatt

SEQ ID NO: 769612 - DNA, 25 bp, Homo sapien
gagcccatgctcagcccaaacttca

SEQ ID NO: 769613 - DNA, 25 bp, Homo sapien
cccatgctcagcccaaacttcactg

SEQ ID NO: 769614 - DNA, 25 bp, Homo sapien
atgctcagcccaaacttcactgaac

SEQ ID NO: 769615 - DNA, 25 bp, Homo sapien
cagagcccatgctcagcccaaactt

SEQ ID NO: 769616 - DNA, 25 bp, Homo sapien
cccgggactaagtgtgaggccccag

SEQ ID NO: 769617 - DNA, 25 bp, Homo sapien
agtcccactccagaatcggccctgt

SEQ ID NO: 769618 - DNA, 25 bp, Homo sapien
ggagtatttcaaaggctcagtccca

SEQ ID NO: 769619 - DNA, 25 bp, Homo sapien
tgcagctcccgggactaagtgtgag

SEQ ID NO: 769620 - DNA, 25 bp, Homo sapien
cattgatgtctatggcctggcttac

SEQ ID NO: 769621 - DNA, 25 bp, Homo sapien
ccttggtcaaataaacttcgttctg

SEQ ID NO: 769622 - DNA, 25 bp, Homo sapien
gctggcgcgtaggtttgttctacaa

SEQ ID NO: 769623 - DNA, 25 bp, Homo sapien
tggcttacacattcagctggcgcgt

SEQ ID NO: 769624 - DNA, 25 bp, Homo sapien
tggttcaattccttgataagaaatt

SEQ ID NO: 769625 - DNA, 25 bp, Homo sapien
gttcaattccttgataagaaattac

SEQ ID NO: 769626 - DNA, 25 bp, Homo sapien
tttggttcaattccttgataagaaa

SEQ ID NO: 769627 - DNA, 25 bp, Homo sapien
ctttggttcaattccttgataagaa

SEQ ID NO: 769628 - DNA, 25 bp, Homo sapien
ggatcaataacaacctcaacagtgt

SEQ ID NO: 769629 - DNA, 25 bp, Homo sapien
caacagtgtccgcaggtttaacaat

SEQ ID NO: 769630 - DNA, 25 bp, Homo sapien
ttcctatagccttccagtgcagcag

SEQ ID NO: 769631 - DNA, 25 bp, Homo sapien
tctctccccgaaatgttgagtgtgg

SEQ ID NO: 769632 - DNA, 25 bp, Homo sapien
ctgaaatcctcggcgctctttgtac

SEQ ID NO: 769633 - DNA, 25 bp, Homo sapien
gttcccaggtgagcttctatcttct

SEQ ID NO: 769634 - DNA, 25 bp, Homo sapien
tctgttcccaggtgagcttctatct

SEQ ID NO: 769635 - DNA, 25 bp, Homo sapien
tgttctgttcccaggtgagcttcta

SEQ ID NO: 769636 - DNA, 25 bp, Homo sapien
cttatcagtaagaagttctagcaaa

SEQ ID NO: 769637 - DNA, 25 bp, Homo sapien
ttatcagtaagaagttctagcaaaa

SEQ ID NO: 769638 - DNA, 25 bp, Homo sapien
tatcagtaagaagttctagcaaaaa

SEQ ID NO: 769639 - DNA, 25 bp, Homo sapien
tgtgaccaaacggttcaactccgct

SEQ ID NO: 769640 - DNA, 25 bp, Homo sapien
tggctgggcaattccatggagctgc

SEQ ID NO: 769641 - DNA, 25 bp, Homo sapien
gagtttctcatagttcatcgtaggc

SEQ ID NO: 769642 - DNA, 25 bp, Homo sapien
tgcagagaagcagtagccagagcta

SEQ ID NO: 769643 - DNA, 25 bp, Homo sapien
gaatatggaaaacagcagacctcac

SEQ ID NO: 769644 - DNA, 25 bp, Homo sapien
aagttagtcacagatttgttttgca

SEQ ID NO: 769645 - DNA, 25 bp, Homo sapien
tatttttacaccctttagatctgaa

SEQ ID NO: 769646 - DNA, 25 bp, Homo sapien
atctgaagacattaagttagtcaca

SEQ ID NO: 769647 - DNA, 25 bp, Homo sapien
tcctcccacgagaactgcgccccgt

SEQ ID NO: 769648 - DNA, 25 bp, Homo sapien
tcccacgagaactgcgccccgtccc

SEQ ID NO: 769649 - DNA, 25 bp, Homo sapien
ctcccacgagaactgcgccccgtcc

SEQ ID NO: 769650 - DNA, 25 bp, Homo sapien
cctcccacgagaactgcgccccgtc

SEQ ID NO: 769651 - DNA, 25 bp, Homo sapien
ccagcctgcctagccaggctctcac

SEQ ID NO: 769652 - DNA, 25 bp, Homo sapien
agagctactgtttccagcctgccta

SEQ ID NO: 769653 - DNA, 25 bp, Homo sapien
ggaccgttaagagctactgtttcca

SEQ ID NO: 769654 - DNA, 25 bp, Homo sapien
ctgggattccagtccagccgccttg

SEQ ID NO: 769655 - DNA, 25 bp, Homo sapien
attgccgtgtccaaccctcctgggc

SEQ ID NO: 769656 - DNA, 25 bp, Homo sapien
acattgccgtgtccaaccctcctgg

SEQ ID NO: 769657 - DNA, 25 bp, Homo sapien
cattgccgtgtccaaccctcctggg

SEQ ID NO: 769658 - DNA, 25 bp, Homo sapien
gcggcgaggtccacattgccgtgtc

SEQ ID NO: 769659 - DNA, 25 bp, Homo sapien
gttcccacagcagcttaggaaagcc

SEQ ID NO: 769660 - DNA, 25 bp, Homo sapien
aggaggcgcgatggccaggaaagac

SEQ ID NO: 769661 - DNA, 25 bp, Homo sapien
cagcttaggaaagccggtggctccc

SEQ ID NO: 769662 - DNA, 25 bp, Homo sapien
tcccacagcagcttaggaaagccgg

SEQ ID NO: 769663 - DNA, 25 bp, Homo sapien
ccacagcggcggaactgcgctctgg

SEQ ID NO: 769664 - DNA, 25 bp, Homo sapien
ggtaagccaataatggccctccctg

SEQ ID NO: 769665 - DNA, 25 bp, Homo sapien
tcctgggtaagccaataatggccct

SEQ ID NO: 769666 - DNA, 25 bp, Homo sapien
cggatttctccccacagcggcggaa

SEQ ID NO: 769667 - DNA, 25 bp, Homo sapien
ccaaatgggttggtgaaaaatggcg

SEQ ID NO: 769668 - DNA, 25 bp, Homo sapien
ctaccaaatgggttggtgaaaaatg

SEQ ID NO: 769669 - DNA, 25 bp, Homo sapien
gactttctaccaaatgggttggtga

SEQ ID NO: 769670 - DNA, 25 bp, Homo sapien
aatgggttggtgaaaaatggcgcac

SEQ ID NO: 769671 - DNA, 25 bp, Homo sapien
gatcacgtgttttggcagcaacaca

SEQ ID NO: 769672 - DNA, 25 bp, Homo sapien
gatgatggatgccctcacgttacaa

SEQ ID NO: 769673 - DNA, 25 bp, Homo sapien
gagatcacgtgttttggcagcaaca

SEQ ID NO: 769674 - DNA, 25 bp, Homo sapien
gatggatgccctcacgttacaacat

SEQ ID NO: 769675 - DNA, 25 bp, Homo sapien
aaggagtgagcagtgcttctaaact

SEQ ID NO: 769676 - DNA, 25 bp, Homo sapien
tacagagatagacaacctcaaagtg

SEQ ID NO: 769677 - DNA, 25 bp, Homo sapien
cagaatacagagatagacaacctca

SEQ ID NO: 769678 - DNA, 25 bp, Homo sapien
tgagcagtgcttctaaactccacgc

SEQ ID NO: 769679 - DNA, 25 bp, Homo sapien
acagatatactgtctataatatggc

SEQ ID NO: 769680 - DNA, 25 bp, Homo sapien
caatatattggtggtattcttacac

SEQ ID NO: 769681 - DNA, 25 bp, Homo sapien
gagaagacattgtgaatcattgcta

SEQ ID NO: 769682 - DNA, 25 bp, Homo sapien
gctgaatacaacatagatatactat

SEQ ID NO: 769683 - DNA, 25 bp, Homo sapien
ggatgggccctttctgcgtctcccc

SEQ ID NO: 769684 - DNA, 25 bp, Homo sapien
tcaccacctaaccatagtctcaaac

SEQ ID NO: 769685 - DNA, 25 bp, Homo sapien
ctcaccacctaaccatagtctcaaa

SEQ ID NO: 769686 - DNA, 25 bp, Homo sapien
gggatgggccctttctgcgtctccc

SEQ ID NO: 769687 - DNA, 25 bp, Homo sapien
gcttactaccaagctaatggaacag

SEQ ID NO: 769688 - DNA, 25 bp, Homo sapien
caaaaagttacacgatatgtaggta

SEQ ID NO: 769689 - DNA, 25 bp, Homo sapien
tcaatgtacatgcatgacagagcac

SEQ ID NO: 769690 - DNA, 25 bp, Homo sapien
cacacgtcgcaataggtagcaacaa

SEQ ID NO: 769691 - DNA, 25 bp, Homo sapien
acaactaaacctaacaaacatatgc

SEQ ID NO: 769692 - DNA, 25 bp, Homo sapien
gcacagcactgcatccaacatgaga

SEQ ID NO: 769693 - DNA, 25 bp, Homo sapien
gaacgttctctaggacagaccacct

SEQ ID NO: 769694 - DNA, 25 bp, Homo sapien
tggagactttaatgcttcacttata

SEQ ID NO: 769695 - DNA, 25 bp, Homo sapien
gatgagtatcgagtttacataaaca

SEQ ID NO: 769696 - DNA, 25 bp, Homo sapien
ctacttttgatagtcatcactggga

SEQ ID NO: 769697 - DNA, 25 bp, Homo sapien
tctaaagtttgcattcgaattcatg

SEQ ID NO: 769698 - DNA, 25 bp, Homo sapien
cataaacattgagcggaacatacag

SEQ ID NO: 769699 - DNA, 25 bp, Homo sapien
taggcacagcgtcagttctgtacag

SEQ ID NO: 769700 - DNA, 25 bp, Homo sapien
aagtcatctgcacctgacgtaacag

SEQ ID NO: 769701 - DNA, 25 bp, Homo sapien
cacgcttctgaaacgggcgtaggca

SEQ ID NO: 769702 - DNA, 25 bp, Homo sapien
cacaggtctccaaggcgcttttcat

SEQ ID NO: 769703 - DNA, 25 bp, Homo sapien
taagaaactactcctcccaagcttg

SEQ ID NO: 769704 - DNA, 25 bp, Homo sapien
caaaggcgagatgcacttcgcagca

SEQ ID NO: 769705 - DNA, 25 bp, Homo sapien
ttgggcaaaggcgagatgcacttcg

SEQ ID NO: 769706 - DNA, 25 bp, Homo sapien
ggactcaatccccttagccagggtg

SEQ ID NO: 769707 - DNA, 25 bp, Homo sapien
ttatccgcggacaggtcaggcggca

SEQ ID NO: 769708 - DNA, 25 bp, Homo sapien
cgacgcttttgagggaaaccgagct

SEQ ID NO: 769709 - DNA, 25 bp, Homo sapien
tggaggaggcgcgacgcttttgagg

SEQ ID NO: 769710 - DNA, 25 bp, Homo sapien
gcaaagttgtgaccttatccgcgga

SEQ ID NO: 769711 - DNA, 25 bp, Homo sapien
tactcgcggaatccatgcgccgtgt

SEQ ID NO: 769712 - DNA, 25 bp, Homo sapien
catgggaaatatgaccaccacggcc

SEQ ID NO: 769713 - DNA, 25 bp, Homo sapien
tgcgttgttgtaaggccgtccctgg

SEQ ID NO: 769714 - DNA, 25 bp, Homo sapien
ccgatttcgatgtcgcgggcctggc

SEQ ID NO: 769715 - DNA, 25 bp, Homo sapien
ctggggaggtctggcggtggatgaa

SEQ ID NO: 769716 - DNA, 25 bp, Homo sapien
gaggtctggcggtggatgaacttca

SEQ ID NO: 769717 - DNA, 25 bp, Homo sapien
tggggaggtctggcggtggatgaac

SEQ ID NO: 769718 - DNA, 25 bp, Homo sapien
gggaggtctggcggtggatgaactt

SEQ ID NO: 769719 - DNA, 25 bp, Homo sapien
cctgcttcagcgcgggggccgtgag

SEQ ID NO: 769720 - DNA, 25 bp, Homo sapien
gcttcagcgcgggggccgtgaggcc

SEQ ID NO: 769721 - DNA, 25 bp, Homo sapien
cgcgggggccgtgaggccccgctgg

SEQ ID NO: 769722 - DNA, 25 bp, Homo sapien
cagccctgcttcagcgcgggggccg

SEQ ID NO: 769723 - DNA, 25 bp, Homo sapien
tgcgcctgcaatggctccgaaggcc

SEQ ID NO: 769724 - DNA, 25 bp, Homo sapien
tggctgcgcctgcaatggctccgaa

SEQ ID NO: 769725 - DNA, 25 bp, Homo sapien
gccccagcgaccagcgggttcatgg

SEQ ID NO: 769726 - DNA, 25 bp, Homo sapien
ctgcaatggctccgaaggccccagc

SEQ ID NO: 769727 - DNA, 25 bp, Homo sapien
ttgcagccgcagtcccgtgtgttct

SEQ ID NO: 769728 - DNA, 25 bp, Homo sapien
cccgtgcagtggagcgtttcccaag

SEQ ID NO: 769729 - DNA, 25 bp, Homo sapien
catccgggtctcgatcccgtgcagt

SEQ ID NO: 769730 - DNA, 25 bp, Homo sapien
ttgtgcttttcaggccccgcatccg

SEQ ID NO: 769731 - DNA, 25 bp, Homo sapien
tccgtcttccacactgttgagcagc

SEQ ID NO: 769732 - DNA, 25 bp, Homo sapien
tcttccacactgttgagcagctttc

SEQ ID NO: 769733 - DNA, 25 bp, Homo sapien
tccacactgttgagcagctttccta

SEQ ID NO: 769734 - DNA, 25 bp, Homo sapien
ccacactgttgagcagctttcctac

SEQ ID NO: 769735 - DNA, 25 bp, Homo sapien
gccagacaagtggacacagggccgc

SEQ ID NO: 769736 - DNA, 25 bp, Homo sapien
gatggacatccagccaacaccgggc

SEQ ID NO: 769737 - DNA, 25 bp, Homo sapien
acacagggccgctgtcacatacaga

SEQ ID NO: 769738 - DNA, 25 bp, Homo sapien
gccgctgtcacatacagaccacggg

SEQ ID NO: 769739 - DNA, 25 bp, Homo sapien
tacatgcatagagggatgagggctc

SEQ ID NO: 769740 - DNA, 25 bp, Homo sapien
catagagggatgagggctctccatc

SEQ ID NO: 769741 - DNA, 25 bp, Homo sapien
ttctacatgcatagagggatgaggg

SEQ ID NO: 769742 - DNA, 25 bp, Homo sapien
catgcatagagggatgagggctctc

SEQ ID NO: 769743 - DNA, 25 bp, Homo sapien
gccaatttgggatctactttattcc

SEQ ID NO: 769744 - DNA, 25 bp, Homo sapien
tgtagctctgtattacactttgaag

SEQ ID NO: 769745 - DNA, 25 bp, Homo sapien
cacttggtctatgtgttcttatact

SEQ ID NO: 769746 - DNA, 25 bp, Homo sapien
tatactagtaacatgcccttttggt

SEQ ID NO: 769747 - DNA, 25 bp, Homo sapien
cagcccaactaaagccaaaagcctc

SEQ ID NO: 769748 - DNA, 25 bp, Homo sapien
taagaaaaatgagatagagcatgca

SEQ ID NO: 769749 - DNA, 25 bp, Homo sapien
caactaaagccaaaagcctcaaagt

SEQ ID NO: 769750 - DNA, 25 bp, Homo sapien
agaaaaatgagatagagcatgcagc

SEQ ID NO: 769751 - DNA, 25 bp, Homo sapien
tgtgcaccgtatatgccactgtcag

SEQ ID NO: 769752 - DNA, 25 bp, Homo sapien
gtcgtgtactcggtcgatttcatca

SEQ ID NO: 769753 - DNA, 25 bp, Homo sapien
agtttctttgtggtcgtgtactcgg

SEQ ID NO: 769754 - DNA, 25 bp, Homo sapien
tgtcagtcctttggtgttcctcaga

SEQ ID NO: 769755 - DNA, 25 bp, Homo sapien
ttgctattggagcatatttagtatc

SEQ ID NO: 769756 - DNA, 25 bp, Homo sapien
ttttgctattggagcatatttagta

SEQ ID NO: 769757 - DNA, 25 bp, Homo sapien
tttttgctattggagcatatttagt

SEQ ID NO: 769758 - DNA, 25 bp, Homo sapien
tttgctattggagcatatttagtat

SEQ ID NO: 769759 - DNA, 25 bp, Homo sapien
tgccccaagcagttgatcaagtctg

SEQ ID NO: 769760 - DNA, 25 bp, Homo sapien
gccccaagcagttgatcaagtctgg

SEQ ID NO: 769761 - DNA, 25 bp, Homo sapien
ccccaagcagttgatcaagtctggc

SEQ ID NO: 769762 - DNA, 25 bp, Homo sapien
cccaagcagttgatcaagtctggct

SEQ ID NO: 769763 - DNA, 25 bp, Homo sapien
cacacccacggcagaaagaccgaga

SEQ ID NO: 769764 - DNA, 25 bp, Homo sapien
taccgccacacacacccacggcaga

SEQ ID NO: 769765 - DNA, 25 bp, Homo sapien
ccacggcagaaagaccgagacttgc

SEQ ID NO: 769766 - DNA, 25 bp, Homo sapien
cacacacacccacggcagaaagacc

SEQ ID NO: 769767 - DNA, 25 bp, Homo sapien
attctatagctatgtctctgaatgt

SEQ ID NO: 769768 - DNA, 25 bp, Homo sapien
aattctatagctatgtctctgaatg

SEQ ID NO: 769769 - DNA, 25 bp, Homo sapien
tttctctttatattccaagcctctt

SEQ ID NO: 769770 - DNA, 25 bp, Homo sapien
tattccaagcctctttattttgctc

SEQ ID NO: 769771 - DNA, 25 bp, Homo sapien
tatattccaagcctctttattttgc

SEQ ID NO: 769772 - DNA, 25 bp, Homo sapien
tctctttatattccaagcctcttta

SEQ ID NO: 769773 - DNA, 25 bp, Homo sapien
aatttaccaaagactatgacacact

SEQ ID NO: 769774 - DNA, 25 bp, Homo sapien
taccaaagactatgacacacttatg

SEQ ID NO: 769775 - DNA, 25 bp, Homo sapien
caaagactatgacacacttatgagt

SEQ ID NO: 769776 - DNA, 25 bp, Homo sapien
tttaccaaagactatgacacactta

SEQ ID NO: 769777 - DNA, 25 bp, Homo sapien
atttgaaatgtttctttccagtata

SEQ ID NO: 769778 - DNA, 25 bp, Homo sapien
tttgaaatgtttctttccagtatat

SEQ ID NO: 769779 - DNA, 25 bp, Homo sapien
gaggagcgtttaaaggatttgccgc

SEQ ID NO: 769780 - DNA, 25 bp, Homo sapien
tacagtttgaggagcgtttaaagga

SEQ ID NO: 769781 - DNA, 25 bp, Homo sapien
agtacagtttgaggagcgtttaaag

SEQ ID NO: 769782 - DNA, 25 bp, Homo sapien
gagcgtttaaaggatttgccgcatt

SEQ ID NO: 769783 - DNA, 25 bp, Homo sapien
ttgaatgcctcttaaaagctttgtc

SEQ ID NO: 769784 - DNA, 25 bp, Homo sapien
ttgaggagcgcctaaaagcttggcc

SEQ ID NO: 769785 - DNA, 25 bp, Homo sapien
gaattctcttgtggtcattgagggt

SEQ ID NO: 769786 - DNA, 25 bp, Homo sapien
cattgagggttgaggatacgctaaa

SEQ ID NO: 769787 - DNA, 25 bp, Homo sapien
tgaattatcttatgtttagcaagac

SEQ ID NO: 769788 - DNA, 25 bp, Homo sapien
ggaaactggcctgatgtctgtctga

SEQ ID NO: 769789 - DNA, 25 bp, Homo sapien
taaagtactacggaaactggcctga

SEQ ID NO: 769790 - DNA, 25 bp, Homo sapien
ctggtctttccatgacatcgcgccg

SEQ ID NO: 769791 - DNA, 25 bp, Homo sapien
tggtctttccatgacatcgcgccgc

SEQ ID NO: 769792 - DNA, 25 bp, Homo sapien
tgactcttctaagtacacctcgctt

SEQ ID NO: 769793 - DNA, 25 bp, Homo sapien
ttgcctaaatctggcaggtcccacc

SEQ ID NO: 769794 - DNA, 25 bp, Homo sapien
tggacagtgagaaaggtgtgactct

SEQ ID NO: 769795 - DNA, 25 bp, Homo sapien
cacctccgactgagcagctcggttt

SEQ ID NO: 769796 - DNA, 25 bp, Homo sapien
tggagaaagtctcacatatcaggca

SEQ ID NO: 769797 - DNA, 25 bp, Homo sapien
gatgactaagggttattaaaggcag

SEQ ID NO: 769798 - DNA, 25 bp, Homo sapien
accaacctgtgtgggagtcacaaaa

SEQ ID NO: 769799 - DNA, 25 bp, Homo sapien
gaaaaacatgggatgaattaagata

SEQ ID NO: 769800 - DNA, 25 bp, Homo sapien
tagtaggaagtttactctccttcca

SEQ ID NO: 769801 - DNA, 25 bp, Homo sapien
taggaagtttactctccttccattg

SEQ ID NO: 769802 - DNA, 25 bp, Homo sapien
ggaagtttactctccttccattggc

SEQ ID NO: 769803 - DNA, 25 bp, Homo sapien
aagtttactctccttccattggcac

SEQ ID NO: 769804 - DNA, 25 bp, Homo sapien
aacatgggggttcatgtttttggag

SEQ ID NO: 769805 - DNA, 25 bp, Homo sapien
acatgggaacatgggggttcatgtt

SEQ ID NO: 769806 - DNA, 25 bp, Homo sapien
atgggaacatgggggttcatgtttt

SEQ ID NO: 769807 - DNA, 25 bp, Homo sapien
gaacatgggggttcatgtttttgga

SEQ ID NO: 769808 - DNA, 25 bp, Homo sapien
ggagacgaaaccacagagaggccag

SEQ ID NO: 769809 - DNA, 25 bp, Homo sapien
tggagacgaaaccacagagaggcca

SEQ ID NO: 769810 - DNA, 25 bp, Homo sapien
ctggagacgaaaccacagagaggcc

SEQ ID NO: 769811 - DNA, 25 bp, Homo sapien
cagatgaagacatccacgttggcca

SEQ ID NO: 769812 - DNA, 25 bp, Homo sapien
agatgaagacatccacgttggccac

SEQ ID NO: 769813 - DNA, 25 bp, Homo sapien
gcagatgaagacatccacgttggcc

SEQ ID NO: 769814 - DNA, 25 bp, Homo sapien
gatgaagacatccacgttggccacc

SEQ ID NO: 769815 - DNA, 25 bp, Homo sapien
gcaagatgcatttgtgcctttttcc

SEQ ID NO: 769816 - DNA, 25 bp, Homo sapien
aaccagagggcaagatgcatttgtg

SEQ ID NO: 769817 - DNA, 25 bp, Homo sapien
cagcacctgattggttgagcaccaa

SEQ ID NO: 769818 - DNA, 25 bp, Homo sapien
caataccagcacctgattggttgag

SEQ ID NO: 769819 - DNA, 25 bp, Homo sapien
tagcctcacatgtggcacttaattc

SEQ ID NO: 769820 - DNA, 25 bp, Homo sapien
catgtggcacttaattcaaacaaca

SEQ ID NO: 769821 - DNA, 25 bp, Homo sapien
cttagcctcacatgtggcacttaat

SEQ ID NO: 769822 - DNA, 25 bp, Homo sapien
ctcacatgtggcacttaattcaaac

SEQ ID NO: 769823 - DNA, 25 bp, Homo sapien
atccctatacaaacgctgctgagca

SEQ ID NO: 769824 - DNA, 25 bp, Homo sapien
gagaacaggtttccgtagttctcta

SEQ ID NO: 769825 - DNA, 25 bp, Homo sapien
acatccctatacaaacgctgctgag

SEQ ID NO: 769826 - DNA, 25 bp, Homo sapien
cactcttctggggagaattctacag

SEQ ID NO: 769827 - DNA, 25 bp, Homo sapien
tgtctcctcgcattccaaggctctt

SEQ ID NO: 769828 - DNA, 25 bp, Homo sapien
tctgtctcctcgcattccaaggctc

SEQ ID NO: 769829 - DNA, 25 bp, Homo sapien
ctgtctcctcgcattccaaggctct

SEQ ID NO: 769830 - DNA, 25 bp, Homo sapien
ttctgtctcctcgcattccaaggct

SEQ ID NO: 769831 - DNA, 25 bp, Homo sapien
cctttgtgagaagtgtaagaaccag

SEQ ID NO: 769832 - DNA, 25 bp, Homo sapien
tatagcaagtgactacaggcagaag

SEQ ID NO: 769833 - DNA, 25 bp, Homo sapien
taagcatttgtagcacctcgtgaga

SEQ ID NO: 769834 - DNA, 25 bp, Homo sapien
tactttgacagtttcagacagcaga

SEQ ID NO: 769835 - DNA, 25 bp, Homo sapien
aaatgaatcgtttatgtcgtgctcc

SEQ ID NO: 769836 - DNA, 25 bp, Homo sapien
aatcgtttatgtcgtgctccagcaa

SEQ ID NO: 769837 - DNA, 25 bp, Homo sapien
tgaatcgtttatgtcgtgctccagc

SEQ ID NO: 769838 - DNA, 25 bp, Homo sapien
tcgtttatgtcgtgctccagcaata

SEQ ID NO: 769839 - DNA, 25 bp, Homo sapien
atgaattctcttctgtatggtaaaa

SEQ ID NO: 769840 - DNA, 25 bp, Homo sapien
tgaattctcttctgtatggtaaaat

SEQ ID NO: 769841 - DNA, 25 bp, Homo sapien
tatgaattctcttctgtatggtaaa

SEQ ID NO: 769842 - DNA, 25 bp, Homo sapien
agtatgaattctcttctgtatggta

SEQ ID NO: 769843 - DNA, 25 bp, Homo sapien
ctgagcaacacctaaaggctttgtg

SEQ ID NO: 769844 - DNA, 25 bp, Homo sapien
gagcaacacctaaaggctttgtgac

SEQ ID NO: 769845 - DNA, 25 bp, Homo sapien
tgagcaacacctaaaggctttgtga

SEQ ID NO: 769846 - DNA, 25 bp, Homo sapien
cagtatgaattctcttatgtttagt

SEQ ID NO: 769847 - DNA, 25 bp, Homo sapien
ctaaaggctttgtgacattctttac

SEQ ID NO: 769848 - DNA, 25 bp, Homo sapien
tgaattctcttatgtttagtaaggt

SEQ ID NO: 769849 - DNA, 25 bp, Homo sapien
atttgtagggtttctctccagtatg

SEQ ID NO: 769850 - DNA, 25 bp, Homo sapien
ttctttgcacttgtaggtctgtctc

SEQ ID NO: 769851 - DNA, 25 bp, Homo sapien
tctttgcacttgtaggtctgtctcc

SEQ ID NO: 769852 - DNA, 25 bp, Homo sapien
caagatccacgtaaaagcttttcca

SEQ ID NO: 769853 - DNA, 25 bp, Homo sapien
gccaagatccacgtaaaagcttttc

SEQ ID NO: 769854 - DNA, 25 bp, Homo sapien
ctaagggccaagatccacgtaaaag

SEQ ID NO: 769855 - DNA, 25 bp, Homo sapien
agggccaagatccacgtaaaagctt

SEQ ID NO: 769856 - DNA, 25 bp, Homo sapien
gaattctcttgtggcttgtaagggt

SEQ ID NO: 769857 - DNA, 25 bp, Homo sapien
tgaattctcttgtggcttgtaaggg

SEQ ID NO: 769858 - DNA, 25 bp, Homo sapien
ttgtggcttgtaagggttgaggagc

SEQ ID NO: 769859 - DNA, 25 bp, Homo sapien
tctcttgtggcttgtaagggttgag

SEQ ID NO: 769860 - DNA, 25 bp, Homo sapien
cagaaccacctatagcctttgttac

SEQ ID NO: 769861 - DNA, 25 bp, Homo sapien
tacattcttcagatttgtagggatt

SEQ ID NO: 769862 - DNA, 25 bp, Homo sapien
ctcagaaccacctatagcctttgtt

SEQ ID NO: 769863 - DNA, 25 bp, Homo sapien
gaaccacctatagcctttgttacat

SEQ ID NO: 769864 - DNA, 25 bp, Homo sapien
atgattagtaaagtctgagagccac

SEQ ID NO: 769865 - DNA, 25 bp, Homo sapien
gaattgtcttatgtctaatgacgtg

SEQ ID NO: 769866 - DNA, 25 bp, Homo sapien
gacgtgtgagaacgagctcaatact

SEQ ID NO: 769867 - DNA, 25 bp, Homo sapien
cgtgtgagaacgagctcaatacttt

SEQ ID NO: 769868 - DNA, 25 bp, Homo sapien
atgacgtgtgagaacgagctcaata

SEQ ID NO: 769869 - DNA, 25 bp, Homo sapien
ttaacacttgtggagcttctctcta

SEQ ID NO: 769870 - DNA, 25 bp, Homo sapien
taacacttgtggagcttctctctac

SEQ ID NO: 769871 - DNA, 25 bp, Homo sapien
gatgttgaacacaatatgacgaatt

SEQ ID NO: 769872 - DNA, 25 bp, Homo sapien
tgaacacaatatgacgaattgttaa

SEQ ID NO: 769873 - DNA, 25 bp, Homo sapien
tgttgaacacaatatgacgaattgt

SEQ ID NO: 769874 - DNA, 25 bp, Homo sapien
tgatgttgaacacaatatgacgaat

SEQ ID NO: 769875 - DNA, 25 bp, Homo sapien
ggaaatctgttaccacaagacctgc

SEQ ID NO: 769876 - DNA, 25 bp, Homo sapien
gctgagatccctcaagtcaaaagag

SEQ ID NO: 769877 - DNA, 25 bp, Homo sapien
cagaagttcacatccggccaaagta

SEQ ID NO: 769878 - DNA, 25 bp, Homo sapien
caggtcacctctaaaaagaagctca

SEQ ID NO: 769879 - DNA, 25 bp, Homo sapien
tacccagagggtttagtgcaagagc

SEQ ID NO: 769880 - DNA, 25 bp, Homo sapien
taggagcccataccatagcatctgc

SEQ ID NO: 769881 - DNA, 25 bp, Homo sapien
tgctggcctacacgtctctgagatg

SEQ ID NO: 769882 - DNA, 25 bp, Homo sapien
tagtttacccaaggagagagggcca

SEQ ID NO: 769883 - DNA, 25 bp, Homo sapien
tcatctgatacggaagaacttctcc

SEQ ID NO: 769884 - DNA, 25 bp, Homo sapien
gagatgttattccacagtcacacaa

SEQ ID NO: 769885 - DNA, 25 bp, Homo sapien
gaacttctcctaactctggtgcagc

SEQ ID NO: 769886 - DNA, 25 bp, Homo sapien
ggtgcagcaaccattgaccatgttc

SEQ ID NO: 769887 - DNA, 25 bp, Homo sapien
aacatatagctccattatactcatc

SEQ ID NO: 769888 - DNA, 25 bp, Homo sapien
tatactcatcttcattacaaacatc

SEQ ID NO: 769889 - DNA, 25 bp, Homo sapien
catatagctccattatactcatctt

SEQ ID NO: 769890 - DNA, 25 bp, Homo sapien
tatagctccattatactcatcttca

SEQ ID NO: 769891 - DNA, 25 bp, Homo sapien
tgctggcaagatatcaacacatgta

SEQ ID NO: 769892 - DNA, 25 bp, Homo sapien
ccataaacaaatacgaatattttct

SEQ ID NO: 769893 - DNA, 25 bp, Homo sapien
gatatattatgcctatggtgaacaa

SEQ ID NO: 769894 - DNA, 25 bp, Homo sapien
cactcagtgtgaaattacatgtgaa

SEQ ID NO: 769895 - DNA, 25 bp, Homo sapien
ccttgagctataacaaatgtttggt

SEQ ID NO: 769896 - DNA, 25 bp, Homo sapien
ctccttgagctataacaaatgtttg

SEQ ID NO: 769897 - DNA, 25 bp, Homo sapien
aaatctccttgagctataacaaatg

SEQ ID NO: 769898 - DNA, 25 bp, Homo sapien
ataaaatctccttgagctataacaa

SEQ ID NO: 769899 - DNA, 25 bp, Homo sapien
gggctcaatggagctccaggcccct

SEQ ID NO: 769900 - DNA, 25 bp, Homo sapien
ggctcaatggagctccaggcccctt

SEQ ID NO: 769901 - DNA, 25 bp, Homo sapien
accgtccgcgccatctttgctgagg

SEQ ID NO: 769902 - DNA, 25 bp, Homo sapien
gtgggtcgcgtgaggcgcctgagac

SEQ ID NO: 769903 - DNA, 25 bp, Homo sapien
gagcccggcgggtgggtcgcgtgag

SEQ ID NO: 769904 - DNA, 25 bp, Homo sapien
gtgaggcgcctgagaccgtccgcgc

SEQ ID NO: 769905 - DNA, 25 bp, Homo sapien
ccaccgctcggcagccgtctgcggg

SEQ ID NO: 769906 - DNA, 25 bp, Homo sapien
ctttcctctccaccgctcggcagcc

SEQ ID NO: 769907 - DNA, 25 bp, Homo sapien
gcgcagccaccgccgtgcctcggat

SEQ ID NO: 769908 - DNA, 25 bp, Homo sapien
cgtgcctcggatcacactttcctct

SEQ ID NO: 769909 - DNA, 25 bp, Homo sapien
aagccctggcgtcgactgtccaagt

SEQ ID NO: 769910 - DNA, 25 bp, Homo sapien
tcgactgtccaagtcggcgcggaag

SEQ ID NO: 769911 - DNA, 25 bp, Homo sapien
gctctcccggggatacagcgtccag

SEQ ID NO: 769912 - DNA, 25 bp, Homo sapien
tcctcgaagccctggcgtcgactgt

SEQ ID NO: 769913 - DNA, 25 bp, Homo sapien
ctgccccgcagctcccgcagcggcc

SEQ ID NO: 769914 - DNA, 25 bp, Homo sapien
cagctcccgcagcggccgcgggtac

SEQ ID NO: 769915 - DNA, 25 bp, Homo sapien
cgcagctcccgcagcggccgcgggt

SEQ ID NO: 769916 - DNA, 25 bp, Homo sapien
gcttccgggcgcctcccgcccctgc

SEQ ID NO: 769917 - DNA, 25 bp, Homo sapien
ccattgacctttaacttcctgtagg

SEQ ID NO: 769918 - DNA, 25 bp, Homo sapien
ttaacttcctgtagggcgccagctc

SEQ ID NO: 769919 - DNA, 25 bp, Homo sapien
tgacctttaacttcctgtagggcgc

SEQ ID NO: 769920 - DNA, 25 bp, Homo sapien
ccttcgtctcgtgagagggttcggc

SEQ ID NO: 769921 - DNA, 25 bp, Homo sapien
caccagtcctgacagatgtcgttga

SEQ ID NO: 769922 - DNA, 25 bp, Homo sapien
acccagccaacaaactgccgcagcc

SEQ ID NO: 769923 - DNA, 25 bp, Homo sapien
accagtcctgacagatgtcgttgaa

SEQ ID NO: 769924 - DNA, 25 bp, Homo sapien
gggtcacctcctgttcgtacaacac

SEQ ID NO: 769925 - DNA, 25 bp, Homo sapien
ctaccctgcctgctcctggctgcac

SEQ ID NO: 769926 - DNA, 25 bp, Homo sapien
taccctgcctgctcctggctgcact

SEQ ID NO: 769927 - DNA, 25 bp, Homo sapien
cctgcctgctcctggctgcactgac

SEQ ID NO: 769928 - DNA, 25 bp, Homo sapien
accctgcctgctcctggctgcactg

SEQ ID NO: 769929 - DNA, 25 bp, Homo sapien
caggaagaatggcatcccaagggtg

SEQ ID NO: 769930 - DNA, 25 bp, Homo sapien
gggtgtagatcaggccacctatccc

SEQ ID NO: 769931 - DNA, 25 bp, Homo sapien
aatggcatcccaagggtgtagatca

SEQ ID NO: 769932 - DNA, 25 bp, Homo sapien
catcccaagggtgtagatcaggcca

SEQ ID NO: 769933 - DNA, 25 bp, Homo sapien
tcacataacccgcagcatggggctc

SEQ ID NO: 769934 - DNA, 25 bp, Homo sapien
ggaggggccctgctatcaggcactc

SEQ ID NO: 769935 - DNA, 25 bp, Homo sapien
ctgcagacacaggagatatgaggag

SEQ ID NO: 769936 - DNA, 25 bp, Homo sapien
gggccctgctatcaggcactccctc

SEQ ID NO: 769937 - DNA, 25 bp, Homo sapien
ctggaccagactgctgctgtcggcc

SEQ ID NO: 769938 - DNA, 25 bp, Homo sapien
gggtgagcgtattattgatggtgat

SEQ ID NO: 769939 - DNA, 25 bp, Homo sapien
ggggtgagcgtattattgatggtga

SEQ ID NO: 769940 - DNA, 25 bp, Homo sapien
gagggggtgagcgtattattgatgg

SEQ ID NO: 769941 - DNA, 25 bp, Homo sapien
gtggagggggtgagcgtattattga

SEQ ID NO: 769942 - DNA, 25 bp, Homo sapien
ggtgttgatcatgtagcagatggtc

SEQ ID NO: 769943 - DNA, 25 bp, Homo sapien
ttggaggtgttgatcatgtagcaga

SEQ ID NO: 769944 - DNA, 25 bp, Homo sapien
gtgttgatcatgtagcagatggtcc

SEQ ID NO: 769945 - DNA, 25 bp, Homo sapien
gaggtgttgatcatgtagcagatgg

SEQ ID NO: 769946 - DNA, 25 bp, Homo sapien
gaaggtaggtgcatgcggtggagac

SEQ ID NO: 769947 - DNA, 25 bp, Homo sapien
tcggaggacagtggttcgctgggcc

SEQ ID NO: 769948 - DNA, 25 bp, Homo sapien
acaggtctcctcagatccaggtcct

SEQ ID NO: 769949 - DNA, 25 bp, Homo sapien
tgcggtggagacaagatggtatcca

SEQ ID NO: 769950 - DNA, 25 bp, Homo sapien
gatgtaggtggtaggtgtcgtgtac

SEQ ID NO: 769951 - DNA, 25 bp, Homo sapien
tgcagtcccgcgtagttgaagaagt

SEQ ID NO: 769952 - DNA, 25 bp, Homo sapien
cgtgtacagaagcacagaccgctgc

SEQ ID NO: 769953 - DNA, 25 bp, Homo sapien
aagaagtcaaagtctgtgttctgga

SEQ ID NO: 769954 - DNA, 25 bp, Homo sapien
tgctgggagaaccttttccctggga

SEQ ID NO: 769955 - DNA, 25 bp, Homo sapien
tcagagatgctgggagaaccttttc

SEQ ID NO: 769956 - DNA, 25 bp, Homo sapien
gggccccactgagggaggatcctac

SEQ ID NO: 769957 - DNA, 25 bp, Homo sapien
caggaaacaaacagagccaccctgg

SEQ ID NO: 769958 - DNA, 25 bp, Homo sapien
tgatttcgggagcctgtgccccagt

SEQ ID NO: 769959 - DNA, 25 bp, Homo sapien
gtgatttcgggagcctgtgccccag

SEQ ID NO: 769960 - DNA, 25 bp, Homo sapien
gatttcgggagcctgtgccccagtc

SEQ ID NO: 769961 - DNA, 25 bp, Homo sapien
ctcaatagtacttgcagcggttctc

SEQ ID NO: 769962 - DNA, 25 bp, Homo sapien
ctggctcaatagtacttgcagcggt

SEQ ID NO: 769963 - DNA, 25 bp, Homo sapien
ggctcaatagtacttgcagcggttc

SEQ ID NO: 769964 - DNA, 25 bp, Homo sapien
gctcaatagtacttgcagcggttct

SEQ ID NO: 769965 - DNA, 25 bp, Homo sapien
cccacctgatagcatccctaatatg

SEQ ID NO: 769966 - DNA, 25 bp, Homo sapien
gggatattaacctatcgatcccacc

SEQ ID NO: 769967 - DNA, 25 bp, Homo sapien
taacctatcgatcccacctgatagc

SEQ ID NO: 769968 - DNA, 25 bp, Homo sapien
catatcacttctggggatattaacc

SEQ ID NO: 769969 - DNA, 25 bp, Homo sapien
ggcctactaaccaatacactgacta

SEQ ID NO: 769970 - DNA, 25 bp, Homo sapien
caatggtgacgtgatattatccgag

SEQ ID NO: 769971 - DNA, 25 bp, Homo sapien
caacaattgtccgaaaggcctctga

SEQ ID NO: 769972 - DNA, 25 bp, Homo sapien
cgagaaagtacatttcaaggccacc

SEQ ID NO: 769973 - DNA, 25 bp, Homo sapien
cctccagagactgtttcaagtcaat

SEQ ID NO: 769974 - DNA, 25 bp, Homo sapien
aggaatcgaacctccagagactgtt

SEQ ID NO: 769975 - DNA, 25 bp, Homo sapien
ggaatcgaacctccagagactgttt

SEQ ID NO: 769976 - DNA, 25 bp, Homo sapien
cagagactgtttcaagtcaatccca

SEQ ID NO: 769977 - DNA, 25 bp, Homo sapien
cctatcacacattcgaagaaccaac

SEQ ID NO: 769978 - DNA, 25 bp, Homo sapien
atttcattcgtaggctcatttattt

SEQ ID NO: 769979 - DNA, 25 bp, Homo sapien
actatttcattcgtaggctcattta

SEQ ID NO: 769980 - DNA, 25 bp, Homo sapien
gatactatttcattcgtaggctcat

SEQ ID NO: 769981 - DNA, 25 bp, Homo sapien
tttcattcgtaggctcatttatttc

SEQ ID NO: 769982 - DNA, 25 bp, Homo sapien
gcctatccagtatgcctcgccatta

SEQ ID NO: 769983 - DNA, 25 bp, Homo sapien
catatttataggtgtcaatttaact

SEQ ID NO: 769984 - DNA, 25 bp, Homo sapien
cagcatttccgcagcctatccagta

SEQ ID NO: 769985 - DNA, 25 bp, Homo sapien
cattactccaattatcccggtgcat

SEQ ID NO: 769986 - DNA, 25 bp, Homo sapien
tatacttgctattcggtgcctgagc

SEQ ID NO: 769987 - DNA, 25 bp, Homo sapien
gatcgttctcaaccaaccataaaga

SEQ ID NO: 769988 - DNA, 25 bp, Homo sapien
ttatttgagcggaactgggccaacc

SEQ ID NO: 769989 - DNA, 25 bp, Homo sapien
gcagggatagcaggtacagccttaa

SEQ ID NO: 769990 - DNA, 25 bp, Homo sapien
gaaaaaagaggccttgacctctgtc

SEQ ID NO: 769991 - DNA, 25 bp, Homo sapien
taatgcttactcagccattttacct

SEQ ID NO: 769992 - DNA, 25 bp, Homo sapien
aaaaaagaggccttgacctctgtct

SEQ ID NO: 769993 - DNA, 25 bp, Homo sapien
tttagatttacagtctaatgcttac

SEQ ID NO: 769994 - DNA, 25 bp, Homo sapien
tgcaattcaacatgaaaatcacctc

SEQ ID NO: 769995 - DNA, 25 bp, Homo sapien
caagctgctcctttgagtttgcaat

SEQ ID NO: 769996 - DNA, 25 bp, Homo sapien
aattcaacatgaaaatcacctcggg

SEQ ID NO: 769997 - DNA, 25 bp, Homo sapien
aagccccagcaggattcaagctgct

SEQ ID NO: 769998 - DNA, 25 bp, Homo sapien
tagattggtgggacttaaaccacga

SEQ ID NO: 769999 - DNA, 25 bp, Homo sapien
ctgaaaaactctattctgtatcaat

SEQ ID NO: 770000 - DNA, 25 bp, Homo sapien
gaattgaactcaccccgagaatcca

SEQ ID NO: 770001 - DNA, 25 bp, Homo sapien
tgaactcaccccgagaatccaaaat

SEQ ID NO: 770002 - DNA, 25 bp, Homo sapien
aggaattgaactcaccccgagaatc

SEQ ID NO: 770003 - DNA, 25 bp, Homo sapien
attgaactcaccccgagaatccaaa

SEQ ID NO: 770004 - DNA, 25 bp, Homo sapien
gaagcggctcattcaatttatatac

SEQ ID NO: 770005 - DNA, 25 bp, Homo sapien
caacatcgaatatactgcaggtcca

SEQ ID NO: 770006 - DNA, 25 bp, Homo sapien
ttcaacatcgaatatactgcaggtc

SEQ ID NO: 770007 - DNA, 25 bp, Homo sapien
tgagaagcggctcattcaatttata

SEQ ID NO: 770008 - DNA, 25 bp, Homo sapien
ctgcaggaggcaagagagaccaggg

SEQ ID NO: 770009 - DNA, 25 bp, Homo sapien
caaaagatgcacttccaactggatc

SEQ ID NO: 770010 - DNA, 25 bp, Homo sapien
caactggatctggttgctgcacttg

SEQ ID NO: 770011 - DNA, 25 bp, Homo sapien
gctggccctgagtaaaggccccagt

SEQ ID NO: 770012 - DNA, 25 bp, Homo sapien
cttcagctggccctgagtaaaggcc

SEQ ID NO: 770013 - DNA, 25 bp, Homo sapien
tcaggtaaggccaccagaggctcct

SEQ ID NO: 770014 - DNA, 25 bp, Homo sapien
ccagaggctcctgcctgtacccggt

SEQ ID NO: 770015 - DNA, 25 bp, Homo sapien
gggtgttcgtgcatcaggtaaggcc

SEQ ID NO: 770016 - DNA, 25 bp, Homo sapien
agaggctcctgcctgtacccggtac

SEQ ID NO: 770017 - DNA, 25 bp, Homo sapien
accattatctccaatgagtacagac

SEQ ID NO: 770018 - DNA, 25 bp, Homo sapien
cctcgtgcttgttgatgctgtggaa

SEQ ID NO: 770019 - DNA, 25 bp, Homo sapien
gtgcttgttgatgctgtggaaataa

SEQ ID NO: 770020 - DNA, 25 bp, Homo sapien
ctcgtgcttgttgatgctgtggaaa

SEQ ID NO: 770021 - DNA, 25 bp, Homo sapien
tcgtgcttgttgatgctgtggaaat

SEQ ID NO: 770022 - DNA, 25 bp, Homo sapien
caaaagtggaaggtgaccagaagca

SEQ ID NO: 770023 - DNA, 25 bp, Homo sapien
aagtggaaggtgaccagaagcagcc

SEQ ID NO: 770024 - DNA, 25 bp, Homo sapien
gtggaaggtgaccagaagcagcccc

SEQ ID NO: 770025 - DNA, 25 bp, Homo sapien
aaggcaaaagtggaaggtgaccaga

SEQ ID NO: 770026 - DNA, 25 bp, Homo sapien
catggggcagtttggagccatttgc

SEQ ID NO: 770027 - DNA, 25 bp, Homo sapien
atttgccttattgccctgagctgcc

SEQ ID NO: 770028 - DNA, 25 bp, Homo sapien
caccatggggcagtttggagccatt

SEQ ID NO: 770029 - DNA, 25 bp, Homo sapien
gcaccggctccaccatggggcagtt

SEQ ID NO: 770030 - DNA, 25 bp, Homo sapien
gaccacaatcccatagcggtcacac

SEQ ID NO: 770031 - DNA, 25 bp, Homo sapien
acaatcccatagcggtcacacatct

SEQ ID NO: 770032 - DNA, 25 bp, Homo sapien
ccacaatcccatagcggtcacacat

SEQ ID NO: 770033 - DNA, 25 bp, Homo sapien
atcccatagcggtcacacatctgca

SEQ ID NO: 770034 - DNA, 25 bp, Homo sapien
cacccacatgtgttgatgcacagac

SEQ ID NO: 770035 - DNA, 25 bp, Homo sapien
cccacatgtgttgatgcacagacac

SEQ ID NO: 770036 - DNA, 25 bp, Homo sapien
tgcacagacacattgttgaaaagct

SEQ ID NO: 770037 - DNA, 25 bp, Homo sapien
tgatgcacagacacattgttgaaaa

SEQ ID NO: 770038 - DNA, 25 bp, Homo sapien
cggcaggttccaggtaggatgcagg

SEQ ID NO: 770039 - DNA, 25 bp, Homo sapien
aggtaggatgcaggcttgttggcca

SEQ ID NO: 770040 - DNA, 25 bp, Homo sapien
ttccaggtaggatgcaggcttgttg

SEQ ID NO: 770041 - DNA, 25 bp, Homo sapien
ctgaagtagtagccggcaggttcca

SEQ ID NO: 770042 - DNA, 25 bp, Homo sapien
caaaaatgcaagttagttgggtgtg

SEQ ID NO: 770043 - DNA, 25 bp, Homo sapien
aacaaaaatgcaagttagttgggtg

SEQ ID NO: 770044 - DNA, 25 bp, Homo sapien
aaaatgcaagttagttgggtgtggt

SEQ ID NO: 770045 - DNA, 25 bp, Homo sapien
caaacaaaaatgcaagttagttggg

SEQ ID NO: 770046 - DNA, 25 bp, Homo sapien
gttcgaggccagcttggtcaacatg

SEQ ID NO: 770047 - DNA, 25 bp, Homo sapien
cgaggccagcttggtcaacatggtg

SEQ ID NO: 770048 - DNA, 25 bp, Homo sapien
gagttcgaggccagcttggtcaaca

SEQ ID NO: 770049 - DNA, 25 bp, Homo sapien
ggagttcgaggccagcttggtcaac

SEQ ID NO: 770050 - DNA, 25 bp, Homo sapien
ttgactagtttgcagaagtggcatt

SEQ ID NO: 770051 - DNA, 25 bp, Homo sapien
ataaagatccacttgatggtgacca

SEQ ID NO: 770052 - DNA, 25 bp, Homo sapien
ttgatggtgaccaaaatatctgtcc

SEQ ID NO: 770053 - DNA, 25 bp, Homo sapien
aataaagatccacttgatggtgacc

SEQ ID NO: 770054 - DNA, 25 bp, Homo sapien
gaattcccgataagctctccaacca

SEQ ID NO: 770055 - DNA, 25 bp, Homo sapien
tagtcgtgaaatcggcagaattccc

SEQ ID NO: 770056 - DNA, 25 bp, Homo sapien
gaaatcggcagaattcccgataagc

SEQ ID NO: 770057 - DNA, 25 bp, Homo sapien
actgcatagtcgtgaaatcggcaga

SEQ ID NO: 770058 - DNA, 25 bp, Homo sapien
ctacatggagtaagccagcttccct

SEQ ID NO: 770059 - DNA, 25 bp, Homo sapien
aaagccatgtccaggtggaatctgg

SEQ ID NO: 770060 - DNA, 25 bp, Homo sapien
ccaggtggaatctggtttagatgta

SEQ ID NO: 770061 - DNA, 25 bp, Homo sapien
ttgaaagccatgtccaggtggaatc

SEQ ID NO: 770062 - DNA, 25 bp, Homo sapien
catgtccaggtggaatctggtttag

SEQ ID NO: 770063 - DNA, 25 bp, Homo sapien
gaatcatgccgctctcaagtgcctt

SEQ ID NO: 770064 - DNA, 25 bp, Homo sapien
gctgtttgttactctgtcgttatcc

SEQ ID NO: 770065 - DNA, 25 bp, Homo sapien
gtcttccttgtaggaatcatgccgc

SEQ ID NO: 770066 - DNA, 25 bp, Homo sapien
gaaggctgtttgttactctgtcgtt

SEQ ID NO: 770067 - DNA, 25 bp, Homo sapien
ttctacatatacaaggtaatgaggg

SEQ ID NO: 770068 - DNA, 25 bp, Homo sapien
cagatgtaaggctgtgttctacata

SEQ ID NO: 770069 - DNA, 25 bp, Homo sapien
aataacttcagatgtaaggctgtgt

SEQ ID NO: 770070 - DNA, 25 bp, Homo sapien
taaggctgtgttctacatatacaag

SEQ ID NO: 770071 - DNA, 25 bp, Homo sapien
gacaaaaggacattgatgacacaga

SEQ ID NO: 770072 - DNA, 25 bp, Homo sapien
tgaaggccaaggtacataaggaata

SEQ ID NO: 770073 - DNA, 25 bp, Homo sapien
gatatgattactgagatgaaggcca

SEQ ID NO: 770074 - DNA, 25 bp, Homo sapien
aatatagatagtatgcaccttaggc

SEQ ID NO: 770075 - DNA, 25 bp, Homo sapien
tccagatgcatcctcggtgtactgg

SEQ ID NO: 770076 - DNA, 25 bp, Homo sapien
agtgtcagccgcatggaggccctgt

SEQ ID NO: 770077 - DNA, 25 bp, Homo sapien
cagatgcatcctcggtgtactgggc

SEQ ID NO: 770078 - DNA, 25 bp, Homo sapien
tcctgagtgtcagccgcatggaggc

SEQ ID NO: 770079 - DNA, 25 bp, Homo sapien
aagatgatttcaagtgtaagatgca

SEQ ID NO: 770080 - DNA, 25 bp, Homo sapien
tttcaagatgatttcaagtgtaaga

SEQ ID NO: 770081 - DNA, 25 bp, Homo sapien
tcaagatgatttcaagtgtaagatg

SEQ ID NO: 770082 - DNA, 25 bp, Homo sapien
gatgatttcaagtgtaagatgcatt

SEQ ID NO: 770083 - DNA, 25 bp, Homo sapien
tctttttctcttgtatcatgacgct

SEQ ID NO: 770084 - DNA, 25 bp, Homo sapien
tccttctggatctcaagctcactga

SEQ ID NO: 770085 - DNA, 25 bp, Homo sapien
ccaagctgatgttggagtctccacc

SEQ ID NO: 770086 - DNA, 25 bp, Homo sapien
cttgtatcatgacgctccttctgga

SEQ ID NO: 770087 - DNA, 25 bp, Homo sapien
cccgcttggcagctcccgcgcttcg

SEQ ID NO: 770088 - DNA, 25 bp, Homo sapien
gcgcttcgacccagagggactggat

SEQ ID NO: 770089 - DNA, 25 bp, Homo sapien
tcccgcgcttcgacccagagggact

SEQ ID NO: 770090 - DNA, 25 bp, Homo sapien
cgcttggcagctcccgcgcttcgac

SEQ ID NO: 770091 - DNA, 25 bp, Homo sapien
ctggaaggttaggtagccgctggct

SEQ ID NO: 770092 - DNA, 25 bp, Homo sapien
tggaaggttaggtagccgctggctg

SEQ ID NO: 770093 - DNA, 25 bp, Homo sapien
ggaaggttaggtagccgctggctgg

SEQ ID NO: 770094 - DNA, 25 bp, Homo sapien
tgccgtcggctgtcagcagcgaggt

SEQ ID NO: 770095 - DNA, 25 bp, Homo sapien
gtcagcagcgaggtgcgtaggccgg

SEQ ID NO: 770096 - DNA, 25 bp, Homo sapien
tcggctgtcagcagcgaggtgcgta

SEQ ID NO: 770097 - DNA, 25 bp, Homo sapien
gctgtcagcagcgaggtgcgtaggc

SEQ ID NO: 770098 - DNA, 25 bp, Homo sapien
ctgcgggggcggaggcggaggcgga

SEQ ID NO: 770099 - DNA, 25 bp, Homo sapien
gcgggggcggaggcggaggcggaga

SEQ ID NO: 770100 - DNA, 25 bp, Homo sapien
gggcggaggcggaggcggagacggc

SEQ ID NO: 770101 - DNA, 25 bp, Homo sapien
cggaggcggaggcggagacggcggc

SEQ ID NO: 770102 - DNA, 25 bp, Homo sapien
ttcctctccagaaccgtcagcagat

SEQ ID NO: 770103 - DNA, 25 bp, Homo sapien
agaaccgtcagcagatcgtccgccg

SEQ ID NO: 770104 - DNA, 25 bp, Homo sapien
tcagcagatcgtccgccggtgcaaa

SEQ ID NO: 770105 - DNA, 25 bp, Homo sapien
gatcgtccgccggtgcaaacaccag

SEQ ID NO: 770106 - DNA, 25 bp, Homo sapien
tccgttccagcgcagcgctctggaa

SEQ ID NO: 770107 - DNA, 25 bp, Homo sapien
gcagcgctctggaaccgctcgggcc

SEQ ID NO: 770108 - DNA, 25 bp, Homo sapien
cgtccgcgccgggtctccgttccag

SEQ ID NO: 770109 - DNA, 25 bp, Homo sapien
cgggtctccgttccagcgcagcgct

SEQ ID NO: 770110 - DNA, 25 bp, Homo sapien
gaatccgcctccaaggcgctgcagg

SEQ ID NO: 770111 - DNA, 25 bp, Homo sapien
aatccgcctccaaggcgctgcaggc

SEQ ID NO: 770112 - DNA, 25 bp, Homo sapien
tccgcctccaaggcgctgcaggccg

SEQ ID NO: 770113 - DNA, 25 bp, Homo sapien
cgcctccaaggcgctgcaggccgct

SEQ ID NO: 770114 - DNA, 25 bp, Homo sapien
gtgatggtgtgcctccggtgttccc

SEQ ID NO: 770115 - DNA, 25 bp, Homo sapien
tgtgggcagggcccgaccggcacag

SEQ ID NO: 770116 - DNA, 25 bp, Homo sapien
gggcccgaccggcacaggcctcagc

SEQ ID NO: 770117 - DNA, 25 bp, Homo sapien
cggctcagcccacacgggaaagata

SEQ ID NO: 770118 - DNA, 25 bp, Homo sapien
gtggagtccagaggacccccatcct

SEQ ID NO: 770119 - DNA, 25 bp, Homo sapien
gagaggctgggtgcgacgaagcgcc

SEQ ID NO: 770120 - DNA, 25 bp, Homo sapien
cccggatggcaaggcgggcaggaag

SEQ ID NO: 770121 - DNA, 25 bp, Homo sapien
aaaccaggtatctggtaactcgtgg

SEQ ID NO: 770122 - DNA, 25 bp, Homo sapien
aaccaggtatctggtaactcgtgga

SEQ ID NO: 770123 - DNA, 25 bp, Homo sapien
accaggtatctggtaactcgtggag

SEQ ID NO: 770124 - DNA, 25 bp, Homo sapien
gaaaccaggtatctggtaactcgtg

SEQ ID NO: 770125 - DNA, 25 bp, Homo sapien
aattctatagctatgtctctgaatg

SEQ ID NO: 770126 - DNA, 25 bp, Homo sapien
attctatagctatgtctctgaatgt

SEQ ID NO: 770127 - DNA, 25 bp, Homo sapien
tttattttgctccagacaggcgatc

SEQ ID NO: 770128 - DNA, 25 bp, Homo sapien
tatattctggggctctttattttgc

SEQ ID NO: 770129 - DNA, 25 bp, Homo sapien
tttgctccagacaggcgatcaagtc

SEQ ID NO: 770130 - DNA, 25 bp, Homo sapien
gggtgtttggctgccatctcatttc

SEQ ID NO: 770131 - DNA, 25 bp, Homo sapien
gtagtaccgcttgaggagtggttaa

SEQ ID NO: 770132 - DNA, 25 bp, Homo sapien
tgtagtaccgcttgaggagtggtta

SEQ ID NO: 770133 - DNA, 25 bp, Homo sapien
atcttatgtgtcttaagagtcgagg

SEQ ID NO: 770134 - DNA, 25 bp, Homo sapien
tatcttatgtgtcttaagagtcgag

SEQ ID NO: 770135 - DNA, 25 bp, Homo sapien
aattctcttatgtgcctttacagtt

SEQ ID NO: 770136 - DNA, 25 bp, Homo sapien
ttatcttatgtgtcttaagagtcga

SEQ ID NO: 770137 - DNA, 25 bp, Homo sapien
ccgcaggtgtgattgtggcgtatac

SEQ ID NO: 770138 - DNA, 25 bp, Homo sapien
tattcctggtccttcccgcaggtgt

SEQ ID NO: 770139 - DNA, 25 bp, Homo sapien
cagacctaaagctgggaaatacgta

SEQ ID NO: 770140 - DNA, 25 bp, Homo sapien
gaatgtgacatatacctggatcaag

SEQ ID NO: 770141 - DNA, 25 bp, Homo sapien
ccccatctccagagtagaccttttg

SEQ ID NO: 770142 - DNA, 25 bp, Homo sapien
ttctgatgatttggctaaggctttg

SEQ ID NO: 770143 - DNA, 25 bp, Homo sapien
ctccagagtagaccttttgcacttc

SEQ ID NO: 770144 - DNA, 25 bp, Homo sapien
ctttttcttatgtacacggattcca

SEQ ID NO: 770145 - DNA, 25 bp, Homo sapien
tctgaattgggtcagtcagtgaacc

SEQ ID NO: 770146 - DNA, 25 bp, Homo sapien
catgaagggtccctgttaggtctca

SEQ ID NO: 770147 - DNA, 25 bp, Homo sapien
agcccggatctggaacagccctgtt

SEQ ID NO: 770148 - DNA, 25 bp, Homo sapien
taaggcattctgatggtcatagtga

SEQ ID NO: 770149 - DNA, 25 bp, Homo sapien
tgcggatacctgcagaacacaaggc

SEQ ID NO: 770150 - DNA, 25 bp, Homo sapien
cagtggcttggcctctaggaacaga

SEQ ID NO: 770151 - DNA, 25 bp, Homo sapien
aaatctgcggatacctgcagaacac

SEQ ID NO: 770152 - DNA, 25 bp, Homo sapien
gacgcagagcagtgaagagaagaac

SEQ ID NO: 770153 - DNA, 25 bp, Homo sapien
atttctcggcttccaggggatcccg

SEQ ID NO: 770154 - DNA, 25 bp, Homo sapien
catttctcggcttccaggggatccc

SEQ ID NO: 770155 - DNA, 25 bp, Homo sapien
ctcggcttccaggggatcccggtct

SEQ ID NO: 770156 - DNA, 25 bp, Homo sapien
caggggatcccggtcttttagccat

SEQ ID NO: 770157 - DNA, 25 bp, Homo sapien
caacaaaaaaacactcatgaacaca

SEQ ID NO: 770158 - DNA, 25 bp, Homo sapien
aaaaacactcatgaacacacaaaca

SEQ ID NO: 770159 - DNA, 25 bp, Homo sapien
caaaaaaacactcatgaacacacaa

SEQ ID NO: 770160 - DNA, 25 bp, Homo sapien
aaaaaacactcatgaacacacaaac

SEQ ID NO: 770161 - DNA, 25 bp, Homo sapien
gctgagcgtgatccaggcattgcca

SEQ ID NO: 770162 - DNA, 25 bp, Homo sapien
tataaattctgctgagcgtgatcca

SEQ ID NO: 770163 - DNA, 25 bp, Homo sapien
ttctgctgagcgtgatccaggcatt

SEQ ID NO: 770164 - DNA, 25 bp, Homo sapien
ttctatgactacatctctgaatgtc

SEQ ID NO: 770165 - DNA, 25 bp, Homo sapien
aaagaaatatattaggaattgtgta

SEQ ID NO: 770166 - DNA, 25 bp, Homo sapien
aatatattaggaattgtgtattgaa

SEQ ID NO: 770167 - DNA, 25 bp, Homo sapien
gaaatatattaggaattgtgtattg

SEQ ID NO: 770168 - DNA, 25 bp, Homo sapien
gagaaaagaaatatattaggaattg

SEQ ID NO: 770169 - DNA, 25 bp, Homo sapien
gggtgtttggttaccatctcatttc

SEQ ID NO: 770170 - DNA, 25 bp, Homo sapien
ctgggtgtttggttaccatctcatt

SEQ ID NO: 770171 - DNA, 25 bp, Homo sapien
tatattccaaggctctttattttgc

SEQ ID NO: 770172 - DNA, 25 bp, Homo sapien
tttctctttatattccaaggctctt

SEQ ID NO: 770173 - DNA, 25 bp, Homo sapien
ttttatgcctagctctggcggaagg

SEQ ID NO: 770174 - DNA, 25 bp, Homo sapien
cttttatgcctagctctggcggaag

SEQ ID NO: 770175 - DNA, 25 bp, Homo sapien
tttatgcctagctctggcggaaggt

SEQ ID NO: 770176 - DNA, 25 bp, Homo sapien
gatgtagttgtgaaaccatgcaaaa

SEQ ID NO: 770177 - DNA, 25 bp, Homo sapien
ttatgattagcaagacttgaggacc

SEQ ID NO: 770178 - DNA, 25 bp, Homo sapien
gaaagggttgaagagcagttgaagg

SEQ ID NO: 770179 - DNA, 25 bp, Homo sapien
agagcagttgaagggtttgccgcat

SEQ ID NO: 770180 - DNA, 25 bp, Homo sapien
tattaagagttgaggagaaggcaaa

SEQ ID NO: 770181 - DNA, 25 bp, Homo sapien
ggtctgaaggctggactttatcaca

SEQ ID NO: 770182 - DNA, 25 bp, Homo sapien
tatgtattataaggtctgaaggctg

SEQ ID NO: 770183 - DNA, 25 bp, Homo sapien
attttatgtattataaggtctgaag

SEQ ID NO: 770184 - DNA, 25 bp, Homo sapien
aggtctgaaggctggactttatcac

SEQ ID NO: 770185 - DNA, 25 bp, Homo sapien
caccgacccaattcagaggaaggaa

SEQ ID NO: 770186 - DNA, 25 bp, Homo sapien
tcatggaacataacagggacccttc

SEQ ID NO: 770187 - DNA, 25 bp, Homo sapien
gagcctggccttcaaaattactatg

SEQ ID NO: 770188 - DNA, 25 bp, Homo sapien
gggacagcaagaaggttcaccgacc

SEQ ID NO: 770189 - DNA, 25 bp, Homo sapien
tccttatccgctggtttttccatgg

SEQ ID NO: 770190 - DNA, 25 bp, Homo sapien
tcctctctttatccttatccgctgg

SEQ ID NO: 770191 - DNA, 25 bp, Homo sapien
ttcctctctttatccttatccgctg

SEQ ID NO: 770192 - DNA, 25 bp, Homo sapien
ttatccgctggtttttccatggcat

SEQ ID NO: 770193 - DNA, 25 bp, Homo sapien
ctccgcacgggagaacagctctaga

SEQ ID NO: 770194 - DNA, 25 bp, Homo sapien
taactacggcaaccttgagcaggct

SEQ ID NO: 770195 - DNA, 25 bp, Homo sapien
tcccaaaaggcctgacaactgctag

SEQ ID NO: 770196 - DNA, 25 bp, Homo sapien
gggccattagctgcacctttactga

SEQ ID NO: 770197 - DNA, 25 bp, Homo sapien
aagaggcaagtgcaaagataccaga

SEQ ID NO: 770198 - DNA, 25 bp, Homo sapien
taggcagttaattgacggtttcact

SEQ ID NO: 770199 - DNA, 25 bp, Homo sapien
gcagttaattgacggtttcacttac

SEQ ID NO: 770200 - DNA, 25 bp, Homo sapien
caagtgcaaagataccagagacggg

SEQ ID NO: 770201 - DNA, 25 bp, Homo sapien
tttggcccgtgttaacactaggaca

SEQ ID NO: 770202 - DNA, 25 bp, Homo sapien
tgtacgaaggagtcaggcctttccc

SEQ ID NO: 770203 - DNA, 25 bp, Homo sapien
gacccaggtgtgtaggccaagcagc

SEQ ID NO: 770204 - DNA, 25 bp, Homo sapien
accagcctgtgtgggagtcacagag

SEQ ID NO: 770205 - DNA, 25 bp, Homo sapien
agcaaattactaaaagtggttccag

SEQ ID NO: 770206 - DNA, 25 bp, Homo sapien
caaattactaaaagtggttccagag

SEQ ID NO: 770207 - DNA, 25 bp, Homo sapien
gcaaattactaaaagtggttccaga

SEQ ID NO: 770208 - DNA, 25 bp, Homo sapien
cagaattgaagctgtgcgtacttca

SEQ ID NO: 770209 - DNA, 25 bp, Homo sapien
tgaagctgtgcgtacttcaatttca

SEQ ID NO: 770210 - DNA, 25 bp, Homo sapien
tgcacagaattgaagctgtgcgtac

SEQ ID NO: 770211 - DNA, 25 bp, Homo sapien
gaagctgtgcgtacttcaatttcag

SEQ ID NO: 770212 - DNA, 25 bp, Homo sapien
ggtagcaaaataatgagtgtactta

SEQ ID NO: 770213 - DNA, 25 bp, Homo sapien
taatgagtgtacttaattcatctca

SEQ ID NO: 770214 - DNA, 25 bp, Homo sapien
caaaataatgagtgtacttaattca

SEQ ID NO: 770215 - DNA, 25 bp, Homo sapien
agtgtacttaattcatctcaatgga

SEQ ID NO: 770216 - DNA, 25 bp, Homo sapien
caggtactactgatctctgttggtg

SEQ ID NO: 770217 - DNA, 25 bp, Homo sapien
ctcatatgtggtacttaagagtagt

SEQ ID NO: 770218 - DNA, 25 bp, Homo sapien
tcctcatgatttctttactatatga

SEQ ID NO: 770219 - DNA, 25 bp, Homo sapien
gaaaattaataagcatgtgatacat

SEQ ID NO: 770220 - DNA, 25 bp, Homo sapien
cacagagttaataagggagtgcttc

SEQ ID NO: 770221 - DNA, 25 bp, Homo sapien
cagagttaataagggagtgcttcat

SEQ ID NO: 770222 - DNA, 25 bp, Homo sapien
gttaataagggagtgcttcatgttt

SEQ ID NO: 770223 - DNA, 25 bp, Homo sapien
gagttaataagggagtgcttcatgt

SEQ ID NO: 770224 - DNA, 25 bp, Homo sapien
ccacagaaagcccagatgaggctaa

SEQ ID NO: 770225 - DNA, 25 bp, Homo sapien
ccaccctagagaagaaaccacagaa

SEQ ID NO: 770226 - DNA, 25 bp, Homo sapien
gaagacacccaagttggccacccta

SEQ ID NO: 770227 - DNA, 25 bp, Homo sapien
gctaaagcagcaaaaaggcaggtac

SEQ ID NO: 770228 - DNA, 25 bp, Homo sapien
cagagcccggaagctaggagacaaa

SEQ ID NO: 770229 - DNA, 25 bp, Homo sapien
tgcaggtcacaggataacagaagct

SEQ ID NO: 770230 - DNA, 25 bp, Homo sapien
tggagacgcgaactaggatcagagc

SEQ ID NO: 770231 - DNA, 25 bp, Homo sapien
tagagtcaccgaggaactccaggaa

SEQ ID NO: 770232 - DNA, 25 bp, Homo sapien
ccagtactggacaaattctctctaa

SEQ ID NO: 770233 - DNA, 25 bp, Homo sapien
tctacatagctctgaaaaaacccag

SEQ ID NO: 770234 - DNA, 25 bp, Homo sapien
cctgtgccactaaattgaagggtaa

SEQ ID NO: 770235 - DNA, 25 bp, Homo sapien
ttttcttggccagtacctgtgccac

SEQ ID NO: 770236 - DNA, 25 bp, Homo sapien
gatacccatcataggcaatctgctg

SEQ ID NO: 770237 - DNA, 25 bp, Homo sapien
catttcaatgcaatggtttccaggt

SEQ ID NO: 770238 - DNA, 25 bp, Homo sapien
gtctttaagtagaagacttaacagc

SEQ ID NO: 770239 - DNA, 25 bp, Homo sapien
tgtaggacagaaaggtaatccattt

SEQ ID NO: 770240 - DNA, 25 bp, Homo sapien
tcatatgtggcacttaattcaaaca

SEQ ID NO: 770241 - DNA, 25 bp, Homo sapien
cttagcctcatatgtggcacttaat

SEQ ID NO: 770242 - DNA, 25 bp, Homo sapien
catatgtggcacttaattcaaacaa

SEQ ID NO: 770243 - DNA, 25 bp, Homo sapien
agcctcatatgtggcacttaattca

SEQ ID NO: 770244 - DNA, 25 bp, Homo sapien
tatctgaaagcgctcgtgattgacc

SEQ ID NO: 770245 - DNA, 25 bp, Homo sapien
tgaatgtatctgaaagcgctcgtga

SEQ ID NO: 770246 - DNA, 25 bp, Homo sapien
gcgctcgtgattgaccccgggctca

SEQ ID NO: 770247 - DNA, 25 bp, Homo sapien
tgaaagcgctcgtgattgaccccgg

SEQ ID NO: 770248 - DNA, 25 bp, Homo sapien
tcccaggtgtgattatctgcacaaa

SEQ ID NO: 770249 - DNA, 25 bp, Homo sapien
tgagaatatgcctttgaagcatgag

SEQ ID NO: 770250 - DNA, 25 bp, Homo sapien
gacacattcacctcagaataagcca

SEQ ID NO: 770251 - DNA, 25 bp, Homo sapien
gcacaaattacacctgtttcttgag

SEQ ID NO: 770252 - DNA, 25 bp, Homo sapien
ttgccctttgtcggatgcatatatt

SEQ ID NO: 770253 - DNA, 25 bp, Homo sapien
ggtatttgccctttgtcggatgcat

SEQ ID NO: 770254 - DNA, 25 bp, Homo sapien
atttgccctttgtcggatgcatata

SEQ ID NO: 770255 - DNA, 25 bp, Homo sapien
gtatttgccctttgtcggatgcata

SEQ ID NO: 770256 - DNA, 25 bp, Homo sapien
acatccctatacaaacgctgctgag

SEQ ID NO: 770257 - DNA, 25 bp, Homo sapien
atccctatacaaacgctgctgagca

SEQ ID NO: 770258 - DNA, 25 bp, Homo sapien
cactcttctggggagaattctacag

SEQ ID NO: 770259 - DNA, 25 bp, Homo sapien
caaggagaccaggtttccatagttc

SEQ ID NO: 770260 - DNA, 25 bp, Homo sapien
atgtagaatatgagttgtatattga

SEQ ID NO: 770261 - DNA, 25 bp, Homo sapien
tagaatatgagttgtatattgaagt

SEQ ID NO: 770262 - DNA, 25 bp, Homo sapien
tttaatgtagaatatgagttgtata

SEQ ID NO: 770263 - DNA, 25 bp, Homo sapien
atttaatgtagaatatgagttgtat

SEQ ID NO: 770264 - DNA, 25 bp, Homo sapien
cctgtctcttcactttccaaggctc

SEQ ID NO: 770265 - DNA, 25 bp, Homo sapien
tcctgtctcttcactttccaaggct

SEQ ID NO: 770266 - DNA, 25 bp, Homo sapien
tgtttggctactgcctcctgtctct

SEQ ID NO: 770267 - DNA, 25 bp, Homo sapien
tgggtgtttggctactgcctcctgt

SEQ ID NO: 770268 - DNA, 25 bp, Homo sapien
aaaaatacagatattgctgtttccc

SEQ ID NO: 770269 - DNA, 25 bp, Homo sapien
cattgggatccgtcatttgtgtcat

SEQ ID NO: 770270 - DNA, 25 bp, Homo sapien
tggaaaagcagtcaaatcacacatt

SEQ ID NO: 770271 - DNA, 25 bp, Homo sapien
aatgtccctatgttaaagcaagaga

SEQ ID NO: 770272 - DNA, 25 bp, Homo sapien
gagaaatctaaaacaacaggtctgt

SEQ ID NO: 770273 - DNA, 25 bp, Homo sapien
tataatactagaggaactgccatgc

SEQ ID NO: 770274 - DNA, 25 bp, Homo sapien
ccacagtcatctaaggaagcaaaag

SEQ ID NO: 770275 - DNA, 25 bp, Homo sapien
gacagaaaacataccccacttgaag

SEQ ID NO: 770276 - DNA, 25 bp, Homo sapien
ggtatacagtgaaagcaataacatt

SEQ ID NO: 770277 - DNA, 25 bp, Homo sapien
agtttgaatcactggtatacagtga

SEQ ID NO: 770278 - DNA, 25 bp, Homo sapien
gaatcactggtatacagtgaaagca

SEQ ID NO: 770279 - DNA, 25 bp, Homo sapien
gaagacaataaagtttgaatcactg

SEQ ID NO: 770280 - DNA, 25 bp, Homo sapien
tcctataggttcagaggccacatgt

SEQ ID NO: 770281 - DNA, 25 bp, Homo sapien
ggtttgggataactgctactactac

SEQ ID NO: 770282 - DNA, 25 bp, Homo sapien
tactactactcagatagatagcaca

SEQ ID NO: 770283 - DNA, 25 bp, Homo sapien
tctagatagccatgcattttaactg

SEQ ID NO: 770284 - DNA, 25 bp, Homo sapien
aaaaaagtctaagcaagaatactat

SEQ ID NO: 770285 - DNA, 25 bp, Homo sapien
gcaagaatactatatccagcaaaag

SEQ ID NO: 770286 - DNA, 25 bp, Homo sapien
gagacgtgttatttatatgcatgct

SEQ ID NO: 770287 - DNA, 25 bp, Homo sapien
catgcttctgcaagattacgagtaa

SEQ ID NO: 770288 - DNA, 25 bp, Homo sapien
tacaaattgcaacattacaacataa

SEQ ID NO: 770289 - DNA, 25 bp, Homo sapien
catctcaatgatgctcaatgagtaa

SEQ ID NO: 770290 - DNA, 25 bp, Homo sapien
tgacatgtggctttttattatacaa

SEQ ID NO: 770291 - DNA, 25 bp, Homo sapien
aattatgtgagacaatttgaattaa

SEQ ID NO: 770292 - DNA, 25 bp, Homo sapien
acagtttcggacagctgagaccaaa

SEQ ID NO: 770293 - DNA, 25 bp, Homo sapien
ggtatgcactgacagtttcggacag

SEQ ID NO: 770294 - DNA, 25 bp, Homo sapien
atattccatgacagtgttgaaagga

SEQ ID NO: 770295 - DNA, 25 bp, Homo sapien
tgcactgacagtttcggacagctga

SEQ ID NO: 770296 - DNA, 25 bp, Homo sapien
tttatgtcatgatccggcaatatct

SEQ ID NO: 770297 - DNA, 25 bp, Homo sapien
agcacaactgaaaacctctgccaca

SEQ ID NO: 770298 - DNA, 25 bp, Homo sapien
gcacaactgaaaacctctgccacat

SEQ ID NO: 770299 - DNA, 25 bp, Homo sapien
gagcacaactgaaaacctctgccac

SEQ ID NO: 770300 - DNA, 25 bp, Homo sapien
tgttgaacacagtatgaggacttgg

SEQ ID NO: 770301 - DNA, 25 bp, Homo sapien
tccactgtcattacatttatactgc

SEQ ID NO: 770302 - DNA, 25 bp, Homo sapien
ccactgtcattacatttatactgca

SEQ ID NO: 770303 - DNA, 25 bp, Homo sapien
gaacacagtatgaggacttggtaaa

SEQ ID NO: 770304 - DNA, 25 bp, Homo sapien
tatattctcacgaggcaggttctcc

SEQ ID NO: 770305 - DNA, 25 bp, Homo sapien
caatgcctcacgtggtaagacctac

SEQ ID NO: 770306 - DNA, 25 bp, Homo sapien
gataagccacttaggcctgcgcaga

SEQ ID NO: 770307 - DNA, 25 bp, Homo sapien
cagtttacccaaggagaggaagcca

SEQ ID NO: 770308 - DNA, 25 bp, Homo sapien
catatagctccaattatactcataa

SEQ ID NO: 770309 - DNA, 25 bp, Homo sapien
tgtaagttgtagaaaccatattctc

SEQ ID NO: 770310 - DNA, 25 bp, Homo sapien
agtatattgttacctacaaccttgg

SEQ ID NO: 770311 - DNA, 25 bp, Homo sapien
tctggtttgctggtaagtgatcaac

SEQ ID NO: 770312 - DNA, 25 bp, Homo sapien
tgtatatgccaaaaagacctcatga

SEQ ID NO: 770313 - DNA, 25 bp, Homo sapien
gcatactcttaacctgtgtcagcaa

SEQ ID NO: 770314 - DNA, 25 bp, Homo sapien
caggtttgactgcatagaattggcc

SEQ ID NO: 770315 - DNA, 25 bp, Homo sapien
gagaccacaggccaatttcaaaaag

SEQ ID NO: 770316 - DNA, 25 bp, Homo sapien
agtctcagctatttgggagggtgag

SEQ ID NO: 770317 - DNA, 25 bp, Homo sapien
ctaaaatcaaggacaggcgcggtgg

SEQ ID NO: 770318 - DNA, 25 bp, Homo sapien
gcgcggtggctcacatgtgcattcc

SEQ ID NO: 770319 - DNA, 25 bp, Homo sapien
gcactttggaaggctgaggtgggtg

SEQ ID NO: 770320 - DNA, 25 bp, Homo sapien
tattctggccttcagtagtaaaact

SEQ ID NO: 770321 - DNA, 25 bp, Homo sapien
ggttttcttaggacctgatgcagca

SEQ ID NO: 770322 - DNA, 25 bp, Homo sapien
tgatgcagcataaccactctatata

SEQ ID NO: 770323 - DNA, 25 bp, Homo sapien
tctgcttcagcatagaaataaggcc

SEQ ID NO: 770324 - DNA, 25 bp, Homo sapien
aacctgtacctactggtctctggaa

SEQ ID NO: 770325 - DNA, 25 bp, Homo sapien
taagaaatgcctagggaatcctggg

SEQ ID NO: 770326 - DNA, 25 bp, Homo sapien
taagtgccaaagtcagtaagagtct

SEQ ID NO: 770327 - DNA, 25 bp, Homo sapien
gaagggcctactctttctgcaacct

SEQ ID NO: 770328 - DNA, 25 bp, Homo sapien
tagcaggtgaggcaggactcaaggg

SEQ ID NO: 770329 - DNA, 25 bp, Homo sapien
ctagcaggtgaggcaggactcaagg

SEQ ID NO: 770330 - DNA, 25 bp, Homo sapien
tagtggggctgcattggcggttgcc

SEQ ID NO: 770331 - DNA, 25 bp, Homo sapien
gtgggccttgacactcttgatctcc

SEQ ID NO: 770332 - DNA, 25 bp, Homo sapien
ttcctctagtggggctgcattggcg

SEQ ID NO: 770333 - DNA, 25 bp, Homo sapien
ggtgtgggccttgacactcttgatc

SEQ ID NO: 770334 - DNA, 25 bp, Homo sapien
ttccacgccacaggatgggacagac

SEQ ID NO: 770335 - DNA, 25 bp, Homo sapien
tgggacagtacacacactgcctggg

SEQ ID NO: 770336 - DNA, 25 bp, Homo sapien
cattacaggctggttcaggcactag

SEQ ID NO: 770337 - DNA, 25 bp, Homo sapien
tgggtaggcttaccacacgactggt

SEQ ID NO: 770338 - DNA, 25 bp, Homo sapien
ggccgctatgtgcaaaaccaagata

SEQ ID NO: 770339 - DNA, 25 bp, Homo sapien
gcaattggcctagatctgtgtcaca

SEQ ID NO: 770340 - DNA, 25 bp, Homo sapien
gaaggtcacatcatctgcgcgggtg

SEQ ID NO: 770341 - DNA, 25 bp, Homo sapien
cctctgtggtcagggcaaggcaaga

SEQ ID NO: 770342 - DNA, 25 bp, Homo sapien
gatgctcagctgaggtaattttcca

SEQ ID NO: 770343 - DNA, 25 bp, Homo sapien
caatccctagtgcaagcagggtcca

SEQ ID NO: 770344 - DNA, 25 bp, Homo sapien
acctagatggttaagtccagagaca

SEQ ID NO: 770345 - DNA, 25 bp, Homo sapien
tcaggattagttctcttatctggcc

SEQ ID NO: 770346 - DNA, 25 bp, Homo sapien
gatatgtgacggtcccttctgagga

SEQ ID NO: 770347 - DNA, 25 bp, Homo sapien
acaaaacttgggtgctaggctcagc

SEQ ID NO: 770348 - DNA, 25 bp, Homo sapien
tcacctaagtgatgggcctagagat

SEQ ID NO: 770349 - DNA, 25 bp, Homo sapien
cacaactcctgttaaaagggcccag

SEQ ID NO: 770350 - DNA, 25 bp, Homo sapien
tatggtccaatgtcaccagtaggca

SEQ ID NO: 770351 - DNA, 25 bp, Homo sapien
aagagagttccatcacctaggtgca

SEQ ID NO: 770352 - DNA, 25 bp, Homo sapien
caatttaatatgtgggcagaaccca

SEQ ID NO: 770353 - DNA, 25 bp, Homo sapien
tacggcaaaagtcctgttcacgggc

SEQ ID NO: 770354 - DNA, 25 bp, Homo sapien
gccacaataactgggtgctggaccc

SEQ ID NO: 770355 - DNA, 25 bp, Homo sapien
cacatcataagaatgctgggccaag

SEQ ID NO: 770356 - DNA, 25 bp, Homo sapien
gatgctgggccctgcaataggtcca

SEQ ID NO: 770357 - DNA, 25 bp, Homo sapien
gcaatatgacaccatctcacgtgga

SEQ ID NO: 770358 - DNA, 25 bp, Homo sapien
tgtaacaatgcacccatggaaagga

SEQ ID NO: 770359 - DNA, 25 bp, Homo sapien
catcatctagctcataggcccagag

SEQ ID NO: 770360 - DNA, 25 bp, Homo sapien
tactaggcccagtgatatgacacaa

SEQ ID NO: 770361 - DNA, 25 bp, Homo sapien
gataatatcccctgttgacagggcc

SEQ ID NO: 770362 - DNA, 25 bp, Homo sapien
aagtgctggactcagcaatatgtca

SEQ ID NO: 770363 - DNA, 25 bp, Homo sapien
cccattgtaaaggcccaggcagaag

SEQ ID NO: 770364 - DNA, 25 bp, Homo sapien
catcacttaggtcatgggctcagag

SEQ ID NO: 770365 - DNA, 25 bp, Homo sapien
gcagaagaagaaagtcacatcactt

SEQ ID NO: 770366 - DNA, 25 bp, Homo sapien
tgtgtcataattccctctttatgca

SEQ ID NO: 770367 - DNA, 25 bp, Homo sapien
gtgtgtcataattccctctttatgc

SEQ ID NO: 770368 - DNA, 25 bp, Homo sapien
attttgtcatacattttgtgtaata

SEQ ID NO: 770369 - DNA, 25 bp, Homo sapien
attacagaactttacacagaaattt

SEQ ID NO: 770370 - DNA, 25 bp, Homo sapien
aaaatacaaatttacactggtcagg

SEQ ID NO: 770371 - DNA, 25 bp, Homo sapien
tatccaaaaatatgccagcactgtt

SEQ ID NO: 770372 - DNA, 25 bp, Homo sapien
tctttgtatgcatacaggtggacct

SEQ ID NO: 770373 - DNA, 25 bp, Homo sapien
aaccccttttctttgtatgcataca

SEQ ID NO: 770374 - DNA, 25 bp, Homo sapien
ccccttttctttgtatgcatacagg

SEQ ID NO: 770375 - DNA, 25 bp, Homo sapien
cttttctttgtatgcatacaggtgg

SEQ ID NO: 770376 - DNA, 25 bp, Homo sapien
ttggcagtctttctttatctataga

SEQ ID NO: 770377 - DNA, 25 bp, Homo sapien
gaagtaaagacgtcttgcaggtcaa

SEQ ID NO: 770378 - DNA, 25 bp, Homo sapien
ttttggacttcagcttctacagatc

SEQ ID NO: 770379 - DNA, 25 bp, Homo sapien
cgagcttcatcgtcacattttggac

SEQ ID NO: 770380 - DNA, 25 bp, Homo sapien
ttctatgtctctccgctaccacgat

SEQ ID NO: 770381 - DNA, 25 bp, Homo sapien
ttattcacccttctatgtctctccg

SEQ ID NO: 770382 - DNA, 25 bp, Homo sapien
acccttctatgtctctccgctacca

SEQ ID NO: 770383 - DNA, 25 bp, Homo sapien
tatgtctctccgctaccacgatcat

SEQ ID NO: 770384 - DNA, 25 bp, Homo sapien
taaaagatcccttcatcaaaaggtc

SEQ ID NO: 770385 - DNA, 25 bp, Homo sapien
tgtcagatgcaaataagacctcagg

SEQ ID NO: 770386 - DNA, 25 bp, Homo sapien
caagttaggaatgggtgcaccacct

SEQ ID NO: 770387 - DNA, 25 bp, Homo sapien
tcacataacaaacacgtgtctgccc

SEQ ID NO: 770388 - DNA, 25 bp, Homo sapien
aggtgcctgccgccgtgctcagctg

SEQ ID NO: 770389 - DNA, 25 bp, Homo sapien
gtgcctgccgccgtgctcagctgat

SEQ ID NO: 770390 - DNA, 25 bp, Homo sapien
cctgccgccgtgctcagctgatttt

SEQ ID NO: 770391 - DNA, 25 bp, Homo sapien
gcctgccgccgtgctcagctgattt

SEQ ID NO: 770392 - DNA, 25 bp, Homo sapien
tttccacttgaatgttctccacttg

SEQ ID NO: 770393 - DNA, 25 bp, Homo sapien
gcacatttgagagcattactttctc

SEQ ID NO: 770394 - DNA, 25 bp, Homo sapien
ctctttccacttgaatgttctccac

SEQ ID NO: 770395 - DNA, 25 bp, Homo sapien
acatggcaaaccctgcacatttgag

SEQ ID NO: 770396 - DNA, 25 bp, Homo sapien
ggcgacaccacaatccgggactttc

SEQ ID NO: 770397 - DNA, 25 bp, Homo sapien
tcccacagggtctgcgcgaccgatg

SEQ ID NO: 770398 - DNA, 25 bp, Homo sapien
tctgcctctcgctccgcttctgggc

SEQ ID NO: 770399 - DNA, 25 bp, Homo sapien
aatggcgacaccacaatccgggact

SEQ ID NO: 770400 - DNA, 25 bp, Homo sapien
tccagagcacattgtattgctcagc

SEQ ID NO: 770401 - DNA, 25 bp, Homo sapien
gagcacattgtattgctcagcctgc

SEQ ID NO: 770402 - DNA, 25 bp, Homo sapien
cagagcacattgtattgctcagcct

SEQ ID NO: 770403 - DNA, 25 bp, Homo sapien
gttccagagcacattgtattgctca

SEQ ID NO: 770404 - DNA, 25 bp, Homo sapien
tatatgcaacagatgggaagtttat

SEQ ID NO: 770405 - DNA, 25 bp, Homo sapien
ttatatgcaacagatgggaagttta

SEQ ID NO: 770406 - DNA, 25 bp, Homo sapien
tgtggtagtcccctttcattttata

SEQ ID NO: 770407 - DNA, 25 bp, Homo sapien
gtacatccagaatgtcacaacagag

SEQ ID NO: 770408 - DNA, 25 bp, Homo sapien
tagctcagtctcaatcatttgctga

SEQ ID NO: 770409 - DNA, 25 bp, Homo sapien
cacaacagagtaactttagctcagt

SEQ ID NO: 770410 - DNA, 25 bp, Homo sapien
taagccactaggctgttctccacag

SEQ ID NO: 770411 - DNA, 25 bp, Homo sapien
cgagtaggatgcattggtggaagtt

SEQ ID NO: 770412 - DNA, 25 bp, Homo sapien
ctaagcgagtaggatgcattggtgg

SEQ ID NO: 770413 - DNA, 25 bp, Homo sapien
aagcgagtaggatgcattggtggaa

SEQ ID NO: 770414 - DNA, 25 bp, Homo sapien
aagaatttcgtagtagaatacagaa

SEQ ID NO: 770415 - DNA, 25 bp, Homo sapien
ttaagaatttcgtagtagaatacag

SEQ ID NO: 770416 - DNA, 25 bp, Homo sapien
tagtagaatacagaaaaatttgaga

SEQ ID NO: 770417 - DNA, 25 bp, Homo sapien
gaatttcgtagtagaatacagaaaa

SEQ ID NO: 770418 - DNA, 25 bp, Homo sapien
agcgtatccagttctgcaattgtat

SEQ ID NO: 770419 - DNA, 25 bp, Homo sapien
ccagttctgcaattgtatcatcaaa

SEQ ID NO: 770420 - DNA, 25 bp, Homo sapien
gaagtccatagtgtccttatagctt

SEQ ID NO: 770421 - DNA, 25 bp, Homo sapien
caattgtatcatcaaaagctgcttt

SEQ ID NO: 770422 - DNA, 25 bp, Homo sapien
tcactgattttcatcttccacctcc

SEQ ID NO: 770423 - DNA, 25 bp, Homo sapien
ctcctgcagcgcttctttattctgt

SEQ ID NO: 770424 - DNA, 25 bp, Homo sapien
ccacctcctgcagcgcttctttatt

SEQ ID NO: 770425 - DNA, 25 bp, Homo sapien
actgattttcatcttccacctcctg

SEQ ID NO: 770426 - DNA, 25 bp, Homo sapien
ggctgatggcgttgcttccttataa

SEQ ID NO: 770427 - DNA, 25 bp, Homo sapien
taacagtgagagctcaagactcagg

SEQ ID NO: 770428 - DNA, 25 bp, Homo sapien
gacgtgaaaattataggccttgagg

SEQ ID NO: 770429 - DNA, 25 bp, Homo sapien
tccttataaccacatattgtgagcc

SEQ ID NO: 770430 - DNA, 25 bp, Homo sapien
taatatttttctggttactcccata

SEQ ID NO: 770431 - DNA, 25 bp, Homo sapien
agtcaggattctcccgactaccttc

SEQ ID NO: 770432 - DNA, 25 bp, Homo sapien
cattcataaaccccgcaccccgagt

SEQ ID NO: 770433 - DNA, 25 bp, Homo sapien
taccttctcgcggtccctgcacaat

SEQ ID NO: 770434 - DNA, 25 bp, Homo sapien
ctcaggagacattgcactatgcccc

SEQ ID NO: 770435 - DNA, 25 bp, Homo sapien
ggagacattgcactatgccccagtg

SEQ ID NO: 770436 - DNA, 25 bp, Homo sapien
aagtgctcaataacctgtctctcag

SEQ ID NO: 770437 - DNA, 25 bp, Homo sapien
ttaagtgctcaataacctgtctctc

SEQ ID NO: 770438 - DNA, 25 bp, Homo sapien
ttatgtcatgttaggtgtgaaaaca

SEQ ID NO: 770439 - DNA, 25 bp, Homo sapien
ctagtatgaatgcttttatgtcatg

SEQ ID NO: 770440 - DNA, 25 bp, Homo sapien
tcttttacgtttaataagctgtgat

SEQ ID NO: 770441 - DNA, 25 bp, Homo sapien
tatgccttgttctagccaaagatct

SEQ ID NO: 770442 - DNA, 25 bp, Homo sapien
taaggattgagaatacactaaaacc

SEQ ID NO: 770443 - DNA, 25 bp, Homo sapien
ctaaggattgagaatacactaaaac

SEQ ID NO: 770444 - DNA, 25 bp, Homo sapien
taaaacctttgccacataataacat

SEQ ID NO: 770445 - DNA, 25 bp, Homo sapien
tacactaaaacctttgccacataat

SEQ ID NO: 770446 - DNA, 25 bp, Homo sapien
ggactgggtaaaagcttttcatcat

SEQ ID NO: 770447 - DNA, 25 bp, Homo sapien
gactgggtaaaagcttttcatcatt

SEQ ID NO: 770448 - DNA, 25 bp, Homo sapien
taggagggcccattaaaacatttgc

SEQ ID NO: 770449 - DNA, 25 bp, Homo sapien
tatcttatgtcaggtaaggtaggag

SEQ ID NO: 770450 - DNA, 25 bp, Homo sapien
cagcaagagttgcagcctagttaaa

SEQ ID NO: 770451 - DNA, 25 bp, Homo sapien
gctttatgattagtaaaggttgaga

SEQ ID NO: 770452 - DNA, 25 bp, Homo sapien
gctagttctatagttgattataagc

SEQ ID NO: 770453 - DNA, 25 bp, Homo sapien
tagttctatagttgattataagcca

SEQ ID NO: 770454 - DNA, 25 bp, Homo sapien
acacctgctagttctatagttgatt

SEQ ID NO: 770455 - DNA, 25 bp, Homo sapien
cctgctagttctatagttgattata

SEQ ID NO: 770456 - DNA, 25 bp, Homo sapien
ggttttggtgaattatggctggctc

SEQ ID NO: 770457 - DNA, 25 bp, Homo sapien
tttaccagcaaggtatgtatgaccc

SEQ ID NO: 770458 - DNA, 25 bp, Homo sapien
caaggtatgtatgacccgtattttg

SEQ ID NO: 770459 - DNA, 25 bp, Homo sapien
ttggtgaattatggctggctccttt

SEQ ID NO: 770460 - DNA, 25 bp, Homo sapien
gccgatgtcaagtggagcatttccc

SEQ ID NO: 770461 - DNA, 25 bp, Homo sapien
tctaaccctgggtcgaggcccagat

SEQ ID NO: 770462 - DNA, 25 bp, Homo sapien
tgcacgtctagtgggcgctagtccc

SEQ ID NO: 770463 - DNA, 25 bp, Homo sapien
caactctgtttctatcgtggcgtga

SEQ ID NO: 770464 - DNA, 25 bp, Homo sapien
acaattttgctgcacatcgaaaaga

SEQ ID NO: 770465 - DNA, 25 bp, Homo sapien
ttgctgcacatcgaaaagattgcct

SEQ ID NO: 770466 - DNA, 25 bp, Homo sapien
caattttgctgcacatcgaaaagat

SEQ ID NO: 770467 - DNA, 25 bp, Homo sapien
attttgctgcacatcgaaaagattg

SEQ ID NO: 770468 - DNA, 25 bp, Homo sapien
cagccggggcatttctctcattcac

SEQ ID NO: 770469 - DNA, 25 bp, Homo sapien
agcagccggggcatttctctcattc

SEQ ID NO: 770470 - DNA, 25 bp, Homo sapien
gcagccggggcatttctctcattca

SEQ ID NO: 770471 - DNA, 25 bp, Homo sapien
gggcaactgtacatcctttcacaat

SEQ ID NO: 770472 - DNA, 25 bp, Homo sapien
ttctgttactgacccatacatcgct

SEQ ID NO: 770473 - DNA, 25 bp, Homo sapien
tacatcgctgcagatcatttcacac

SEQ ID NO: 770474 - DNA, 25 bp, Homo sapien
tctgaaacatgctgacgtttcgagg

SEQ ID NO: 770475 - DNA, 25 bp, Homo sapien
tttttcatccttggtcaactccagc

SEQ ID NO: 770476 - DNA, 25 bp, Homo sapien
ctttttcatccttggtcaactccag

SEQ ID NO: 770477 - DNA, 25 bp, Homo sapien
gaagaagatctggtaaaaaatttga

SEQ ID NO: 770478 - DNA, 25 bp, Homo sapien
agagaagaagatctggtaaaaaatt

SEQ ID NO: 770479 - DNA, 25 bp, Homo sapien
agaagaagatctggtaaaaaatttg

SEQ ID NO: 770480 - DNA, 25 bp, Homo sapien
ctagagaagaagatctggtaaaaaa

SEQ ID NO: 770481 - DNA, 25 bp, Homo sapien
tgcaacatggatacaagcgtgacct

SEQ ID NO: 770482 - DNA, 25 bp, Homo sapien
ccagggtaccccagatgttggaaga

SEQ ID NO: 770483 - DNA, 25 bp, Homo sapien
tctcctttgggttcaggctaccatg

SEQ ID NO: 770484 - DNA, 25 bp, Homo sapien
aaattctagccttttgccctgctgg

SEQ ID NO: 770485 - DNA, 25 bp, Homo sapien
ggtgtttggagtaatattctgcatc

SEQ ID NO: 770486 - DNA, 25 bp, Homo sapien
gctgtcctccagattaactgatgtg

SEQ ID NO: 770487 - DNA, 25 bp, Homo sapien
taaagctttagtcatcgaaacagca

SEQ ID NO: 770488 - DNA, 25 bp, Homo sapien
catgttaagactattgtgcattcaa

SEQ ID NO: 770489 - DNA, 25 bp, Homo sapien
tagaaataactaaggcactgacact

SEQ ID NO: 770490 - DNA, 25 bp, Homo sapien
actacggcgtagaaaacatgaattt

SEQ ID NO: 770491 - DNA, 25 bp, Homo sapien
tttgttcaacatcagggaatttata

SEQ ID NO: 770492 - DNA, 25 bp, Homo sapien
ttgaaatgtgtttttgcagatgcag

SEQ ID NO: 770493 - DNA, 25 bp, Homo sapien
gggatttacaatacagggccagact

SEQ ID NO: 770494 - DNA, 25 bp, Homo sapien
taacacccaagaatgcagagctagg

SEQ ID NO: 770495 - DNA, 25 bp, Homo sapien
tagaatctgcacataaggtttggcc

SEQ ID NO: 770496 - DNA, 25 bp, Homo sapien
tacagttatgtgagaggcaccaggt

SEQ ID NO: 770497 - DNA, 25 bp, Homo sapien
catcacggacgtgaccagcgcccgc

SEQ ID NO: 770498 - DNA, 25 bp, Homo sapien
cggacgtgaccagcgcccgcaccgc

SEQ ID NO: 770499 - DNA, 25 bp, Homo sapien
tcacggacgtgaccagcgcccgcac

SEQ ID NO: 770500 - DNA, 25 bp, Homo sapien
acggacgtgaccagcgcccgcaccg

SEQ ID NO: 770501 - DNA, 25 bp, Homo sapien
tttttggcatcctatctgcactggg

SEQ ID NO: 770502 - DNA, 25 bp, Homo sapien
tgcccactgttagaacgtaattagt

SEQ ID NO: 770503 - DNA, 25 bp, Homo sapien
actgggtgcacgtattagttagctc

SEQ ID NO: 770504 - DNA, 25 bp, Homo sapien
aagtcagcacttttagggtgcccac

SEQ ID NO: 770505 - DNA, 25 bp, Homo sapien
gagaagaaaagacctggagctacga

SEQ ID NO: 770506 - DNA, 25 bp, Homo sapien
gcagaagacacagaacagagaagaa

SEQ ID NO: 770507 - DNA, 25 bp, Homo sapien
aagaaaagacctggagctacgactg

SEQ ID NO: 770508 - DNA, 25 bp, Homo sapien
acctacaggtcacagggacacagaa

SEQ ID NO: 770509 - DNA, 25 bp, Homo sapien
ggcacccacctgctcccttgagagg

SEQ ID NO: 770510 - DNA, 25 bp, Homo sapien
caccaggagattcctctcagcccca

SEQ ID NO: 770511 - DNA, 25 bp, Homo sapien
cccagggcacccacctgctcccttg

SEQ ID NO: 770512 - DNA, 25 bp, Homo sapien
agggcacccacctgctcccttgaga

SEQ ID NO: 770513 - DNA, 25 bp, Homo sapien
gactcacgtgtcaaatcaggccatc

SEQ ID NO: 770514 - DNA, 25 bp, Homo sapien
cacctctttgataccctttgtgaac

SEQ ID NO: 770515 - DNA, 25 bp, Homo sapien
cctaaagagtggcagtactgatgag

SEQ ID NO: 770516 - DNA, 25 bp, Homo sapien
actgccctatgcctcagtgagtgcc

SEQ ID NO: 770517 - DNA, 25 bp, Homo sapien
cgcgcagcgtccgaacagcgcccac

SEQ ID NO: 770518 - DNA, 25 bp, Homo sapien
cgcgtgaagggtgcgcccgcacaca

SEQ ID NO: 770519 - DNA, 25 bp, Homo sapien
tgacagggccgcgtgaagggtgcgc

SEQ ID NO: 770520 - DNA, 25 bp, Homo sapien
agcagaggtggtcccgcgcgcagcg

SEQ ID NO: 770521 - DNA, 25 bp, Homo sapien
agattttctctatctctcatatact

SEQ ID NO: 770522 - DNA, 25 bp, Homo sapien
ggcaaaaagtaacatcaccgtggtg

SEQ ID NO: 770523 - DNA, 25 bp, Homo sapien
tggtgttgcaaccagcaatatgtca

SEQ ID NO: 770524 - DNA, 25 bp, Homo sapien
aaagtaacatcaccgtggtgttgca

SEQ ID NO: 770525 - DNA, 25 bp, Homo sapien
ccgtggtgttgcaaccagcaatatg

SEQ ID NO: 770526 - DNA, 25 bp, Homo sapien
ggtccaggcatgagaaaagggtcac

SEQ ID NO: 770527 - DNA, 25 bp, Homo sapien
caccatttaggtgcttgatcaggca

SEQ ID NO: 770528 - DNA, 25 bp, Homo sapien
tacaatgccctttgtgggaagggtc

SEQ ID NO: 770529 - DNA, 25 bp, Homo sapien
aatccccatcatggacagggcctag

SEQ ID NO: 770530 - DNA, 25 bp, Homo sapien
agaccttcatgctggtatggaccca

SEQ ID NO: 770531 - DNA, 25 bp, Homo sapien
gaacattctctgtcctacttgaggg

SEQ ID NO: 770532 - DNA, 25 bp, Homo sapien
gaaagaagatgccttacctgcctag

SEQ ID NO: 770533 - DNA, 25 bp, Homo sapien
cccatgattgtacttgtggccctaa

SEQ ID NO: 770534 - DNA, 25 bp, Homo sapien
catcacataggagctgggccaagca

SEQ ID NO: 770535 - DNA, 25 bp, Homo sapien
tccaagctgtagagagagtcatatc

SEQ ID NO: 770536 - DNA, 25 bp, Homo sapien
caatatgtagcaatctgcgctgcag

SEQ ID NO: 770537 - DNA, 25 bp, Homo sapien
gccagagcccagctatatgtcacaa

SEQ ID NO: 770538 - DNA, 25 bp, Homo sapien
gatacatcatagtcgcttcttgggc

SEQ ID NO: 770539 - DNA, 25 bp, Homo sapien
tctgtgtctagataggagagccctc

SEQ ID NO: 770540 - DNA, 25 bp, Homo sapien
tatactatgtgaacagggcccaagc

SEQ ID NO: 770541 - DNA, 25 bp, Homo sapien
tgaaagtgttagacccagccatatg

SEQ ID NO: 770542 - DNA, 25 bp, Homo sapien
gaaccttggaaatcctggacattgc

SEQ ID NO: 770543 - DNA, 25 bp, Homo sapien
cttgggatcctaggctataatggca

SEQ ID NO: 770544 - DNA, 25 bp, Homo sapien
tattcctgccaaacgatctgtgaga

SEQ ID NO: 770545 - DNA, 25 bp, Homo sapien
gatgcttgggcactgcttcttaaag

SEQ ID NO: 770546 - DNA, 25 bp, Homo sapien
gctgctgacttaattgcctgattag

SEQ ID NO: 770547 - DNA, 25 bp, Homo sapien
gattagctaacgtatttccttcggc

SEQ ID NO: 770548 - DNA, 25 bp, Homo sapien
taaaagagatccattagcggtaaga

SEQ ID NO: 770549 - DNA, 25 bp, Homo sapien
gaaggagccacctgttcagtggatt

SEQ ID NO: 770550 - DNA, 25 bp, Homo sapien
gaagagcactccaccaaatagttga

SEQ ID NO: 770551 - DNA, 25 bp, Homo sapien
tcttcactgtggataggtcccagga

SEQ ID NO: 770552 - DNA, 25 bp, Homo sapien
gggcatgaccccagtatgagaagaa

SEQ ID NO: 770553 - DNA, 25 bp, Homo sapien
tgtaatctaggcgatgggcccagag

SEQ ID NO: 770554 - DNA, 25 bp, Homo sapien
gcacccttcaaagccgtcaggcagg

SEQ ID NO: 770555 - DNA, 25 bp, Homo sapien
ctgctgaagctgcgctaaaattttt

SEQ ID NO: 770556 - DNA, 25 bp, Homo sapien
tgtgtatcactagaggaggctacag

SEQ ID NO: 770557 - DNA, 25 bp, Homo sapien
tatgccatttgaataaactctgcgg

SEQ ID NO: 770558 - DNA, 25 bp, Homo sapien
cagaggacactgagcagtgaggagg

SEQ ID NO: 770559 - DNA, 25 bp, Homo sapien
cactgagcagtgaggaggagagcag

SEQ ID NO: 770560 - DNA, 25 bp, Homo sapien
gacactgagcagtgaggaggagagc

SEQ ID NO: 770561 - DNA, 25 bp, Homo sapien
gaggagagcaggagctccggctgca

SEQ ID NO: 770562 - DNA, 25 bp, Homo sapien
cattcccagatacccagagttccat

SEQ ID NO: 770563 - DNA, 25 bp, Homo sapien
tccaaaggaagggtataccaggaga

SEQ ID NO: 770564 - DNA, 25 bp, Homo sapien
tcttaatgcctcaaagggttagctt

SEQ ID NO: 770565 - DNA, 25 bp, Homo sapien
ctgataagatctctgcgcctaggga

SEQ ID NO: 770566 - DNA, 25 bp, Homo sapien
cgcaccactgcccttcagcctgagc

SEQ ID NO: 770567 - DNA, 25 bp, Homo sapien
agcctgagcaacagagcgagactcc

SEQ ID NO: 770568 - DNA, 25 bp, Homo sapien
ttgagcccggaaggcggaggtttca

SEQ ID NO: 770569 - DNA, 25 bp, Homo sapien
gtgagccgagatcgcaccactgccc

SEQ ID NO: 770570 - DNA, 25 bp, Homo sapien
ggcttttacagagctggtccgaggt

SEQ ID NO: 770571 - DNA, 25 bp, Homo sapien
ttacagagctggtccgaggtaccga

SEQ ID NO: 770572 - DNA, 25 bp, Homo sapien
tcgcgggtgggtctcttcaagaagt

SEQ ID NO: 770573 - DNA, 25 bp, Homo sapien
gttcccctatcccggatttcagcat

SEQ ID NO: 770574 - DNA, 25 bp, Homo sapien
gtgttcgggcagtgtcattcctcag

SEQ ID NO: 770575 - DNA, 25 bp, Homo sapien
ccttaagagttacccgaggtccatg

SEQ ID NO: 770576 - DNA, 25 bp, Homo sapien
gaggtgttcgggcagtgtcattcct

SEQ ID NO: 770577 - DNA, 25 bp, Homo sapien
agagttacccgaggtccatgatggt

SEQ ID NO: 770578 - DNA, 25 bp, Homo sapien
ccagcctaggactgtgaggtcaagt

SEQ ID NO: 770579 - DNA, 25 bp, Homo sapien
ttctaggagtattagggcagtggcc

SEQ ID NO: 770580 - DNA, 25 bp, Homo sapien
tcaagtttagataagtaggccactg

SEQ ID NO: 770581 - DNA, 25 bp, Homo sapien
cagtggccgctgcagcatgtaaaca

SEQ ID NO: 770582 - DNA, 25 bp, Homo sapien
tcagattggatggaagtagggaggc

SEQ ID NO: 770583 - DNA, 25 bp, Homo sapien
cactgtcagattggatggaagtagg

SEQ ID NO: 770584 - DNA, 25 bp, Homo sapien
ggaccactgtcagattggatggaag

SEQ ID NO: 770585 - DNA, 25 bp, Homo sapien
accactgtcagattggatggaagta

SEQ ID NO: 770586 - DNA, 25 bp, Homo sapien
tggtaggttcatgggcggtggctca

SEQ ID NO: 770587 - DNA, 25 bp, Homo sapien
aagtggtaggagaacagtccagtcc

SEQ ID NO: 770588 - DNA, 25 bp, Homo sapien
tcctgagaagcacaagtggtaggag

SEQ ID NO: 770589 - DNA, 25 bp, Homo sapien
agcacaagtggtaggagaacagtcc

SEQ ID NO: 770590 - DNA, 25 bp, Homo sapien
aaaagtactaccatataagagttcg

SEQ ID NO: 770591 - DNA, 25 bp, Homo sapien
catataagagttcgaatgggctata

SEQ ID NO: 770592 - DNA, 25 bp, Homo sapien
taccatataagagttcgaatgggct

SEQ ID NO: 770593 - DNA, 25 bp, Homo sapien
gtactaccatataagagttcgaatg

SEQ ID NO: 770594 - DNA, 25 bp, Homo sapien
tcacagagttcttaatggcccaccg

SEQ ID NO: 770595 - DNA, 25 bp, Homo sapien
caccgtcaataatggcctgctggca

SEQ ID NO: 770596 - DNA, 25 bp, Homo sapien
agttgaactgcacgacctgtcaggg

SEQ ID NO: 770597 - DNA, 25 bp, Homo sapien
tatgcctgccattacaaaacccgga

SEQ ID NO: 770598 - DNA, 25 bp, Homo sapien
aattacaacatggttttgggacttg

SEQ ID NO: 770599 - DNA, 25 bp, Homo sapien
gcaaagtggcgggtggaaaattaca

SEQ ID NO: 770600 - DNA, 25 bp, Homo sapien
cacttgggtgttagtgggctgaatc

SEQ ID NO: 770601 - DNA, 25 bp, Homo sapien
cttgttgactcaagaagttgatcaa

SEQ ID NO: 770602 - DNA, 25 bp, Homo sapien
tcacctggtaatttgggaggtcatc

SEQ ID NO: 770603 - DNA, 25 bp, Homo sapien
ggcaccctatatataaccccaactg

SEQ ID NO: 770604 - DNA, 25 bp, Homo sapien
tcctgcttgccgtctcctggtagct

SEQ ID NO: 770605 - DNA, 25 bp, Homo sapien
gcagcacttcaatgccacatcagag

SEQ ID NO: 770606 - DNA, 25 bp, Homo sapien
taacagttcctagatggtagggacc

SEQ ID NO: 770607 - DNA, 25 bp, Homo sapien
ggaaactgggaaactctcaactgga

SEQ ID NO: 770608 - DNA, 25 bp, Homo sapien
cagtggagctccagattacgggtcc

SEQ ID NO: 770609 - DNA, 25 bp, Homo sapien
tcatgactctcgatactttgtggcc

SEQ ID NO: 770610 - DNA, 25 bp, Homo sapien
gaattgttagcaaccactccggaaa

SEQ ID NO: 770611 - DNA, 25 bp, Homo sapien
ccttgtggaattcgggaattgttag

SEQ ID NO: 770612 - DNA, 25 bp, Homo sapien
tgttagcaaccactccggaaaggca

SEQ ID NO: 770613 - DNA, 25 bp, Homo sapien
ggaattcgggaattgttagcaacca

SEQ ID NO: 770614 - DNA, 25 bp, Homo sapien
ctgtcattgaatttttaaaaaaatg

SEQ ID NO: 770615 - DNA, 25 bp, Homo sapien
cacacacatttaccaagcagccata

SEQ ID NO: 770616 - DNA, 25 bp, Homo sapien
acacacatttaccaagcagccataa

SEQ ID NO: 770617 - DNA, 25 bp, Homo sapien
atggcgacatctttaaatgtcagtg

SEQ ID NO: 770618 - DNA, 25 bp, Homo sapien
ctatggcgacatctttaaatgtcag

SEQ ID NO: 770619 - DNA, 25 bp, Homo sapien
ggcgacatctttaaatgtcagtggt

SEQ ID NO: 770620 - DNA, 25 bp, Homo sapien
cgacatctttaaatgtcagtggttc

SEQ ID NO: 770621 - DNA, 25 bp, Homo sapien
cccgctgtgcagtatccaggcattg

SEQ ID NO: 770622 - DNA, 25 bp, Homo sapien
atataaatcccgctgtgcagtatcc

SEQ ID NO: 770623 - DNA, 25 bp, Homo sapien
cctatataaatcccgctgtgcagta

SEQ ID NO: 770624 - DNA, 25 bp, Homo sapien
aaatcccgctgtgcagtatccaggc

SEQ ID NO: 770625 - DNA, 25 bp, Homo sapien
atgtctttttatattccagggctct

SEQ ID NO: 770626 - DNA, 25 bp, Homo sapien
ccagacaggtgatcagatatggctt

SEQ ID NO: 770627 - DNA, 25 bp, Homo sapien
ctcatgtctttttatattccagggc

SEQ ID NO: 770628 - DNA, 25 bp, Homo sapien
cagacaggtgatcagatatggctta

SEQ ID NO: 770629 - DNA, 25 bp, Homo sapien
aaatgaaacccatattgacttctgg

SEQ ID NO: 770630 - DNA, 25 bp, Homo sapien
cattcaatagagtgacaacacctct

SEQ ID NO: 770631 - DNA, 25 bp, Homo sapien
caacacctcttaggaaatgagtgaa

SEQ ID NO: 770632 - DNA, 25 bp, Homo sapien
tagaaaacgcaactgaaagaacaca

SEQ ID NO: 770633 - DNA, 25 bp, Homo sapien
cactccatgagtgaataggaacaca

SEQ ID NO: 770634 - DNA, 25 bp, Homo sapien
tgcagtactacagacaggtaacagt

SEQ ID NO: 770635 - DNA, 25 bp, Homo sapien
ttgcagatattggtttcggtctccc

SEQ ID NO: 770636 - DNA, 25 bp, Homo sapien
tcggtctcccatgacatagagggct

SEQ ID NO: 770637 - DNA, 25 bp, Homo sapien
gaatattttgcttggggtagctgtc

SEQ ID NO: 770638 - DNA, 25 bp, Homo sapien
aaacattggttaactgtattatgac

SEQ ID NO: 770639 - DNA, 25 bp, Homo sapien
ttatgacctcctttgtgccccgtac

SEQ ID NO: 770640 - DNA, 25 bp, Homo sapien
cgtacactcatccacatgtttacag

SEQ ID NO: 770641 - DNA, 25 bp, Homo sapien
atgtcttctcttatatctatttgaa

SEQ ID NO: 770642 - DNA, 25 bp, Homo sapien
ctatttgaatttgaaaatttatcaa

SEQ ID NO: 770643 - DNA, 25 bp, Homo sapien
tctatttgaatttgaaaatttatca

SEQ ID NO: 770644 - DNA, 25 bp, Homo sapien
gtatgtcttctcttatatctatttg

SEQ ID NO: 770645 - DNA, 25 bp, Homo sapien
tgaattcttctatgctgagttagtt

SEQ ID NO: 770646 - DNA, 25 bp, Homo sapien
aggtgtgaggcctgtttaaaggcct

SEQ ID NO: 770647 - DNA, 25 bp, Homo sapien
gtgaggcctgtttaaaggccttgcc

SEQ ID NO: 770648 - DNA, 25 bp, Homo sapien
tgcctagtaagttgtgaggactggt

SEQ ID NO: 770649 - DNA, 25 bp, Homo sapien
tgtatattaagagatgagaactggt

SEQ ID NO: 770650 - DNA, 25 bp, Homo sapien
tatgtctagtaagttgataggattg

SEQ ID NO: 770651 - DNA, 25 bp, Homo sapien
tatgtatagttaggtttgagaatcg

SEQ ID NO: 770652 - DNA, 25 bp, Homo sapien
gatttgaggataggttgaaagctct

SEQ ID NO: 770653 - DNA, 25 bp, Homo sapien
atgtgtagtaagcttgtaggatcaa

SEQ ID NO: 770654 - DNA, 25 bp, Homo sapien
tcttcacaactatagagttcctctc

SEQ ID NO: 770655 - DNA, 25 bp, Homo sapien
taaaagttgaggatcagttaaagga

SEQ ID NO: 770656 - DNA, 25 bp, Homo sapien
taaaatacctcgtgtgtgcagaaaa

SEQ ID NO: 770657 - DNA, 25 bp, Homo sapien
aggaaggttaaaagctttgccacat

SEQ ID NO: 770658 - DNA, 25 bp, Homo sapien
ttcttcacaattgtaggctttctct

SEQ ID NO: 770659 - DNA, 25 bp, Homo sapien
cacattcttcacaattgtaggcttt

SEQ ID NO: 770660 - DNA, 25 bp, Homo sapien
tgccacattcttcacaattgtaggc

SEQ ID NO: 770661 - DNA, 25 bp, Homo sapien
taagttaaacacaaacagcctcttc

SEQ ID NO: 770662 - DNA, 25 bp, Homo sapien
ttcctctagtgcaaaatgggtacaa

SEQ ID NO: 770663 - DNA, 25 bp, Homo sapien
tagaaagttcgaggtgttgtcaaaa

SEQ ID NO: 770664 - DNA, 25 bp, Homo sapien
gaaaacctacttcatggatcactca

SEQ ID NO: 770665 - DNA, 25 bp, Homo sapien
taaaaaactaagttcacgcataatc

SEQ ID NO: 770666 - DNA, 25 bp, Homo sapien
aaactaagttcacgcataatccaaa

SEQ ID NO: 770667 - DNA, 25 bp, Homo sapien
aaaaactaagttcacgcataatcca

SEQ ID NO: 770668 - DNA, 25 bp, Homo sapien
actaagttcacgcataatccaaaaa

SEQ ID NO: 770669 - DNA, 25 bp, Homo sapien
aaagtcagtggcatgaaaacacttc

SEQ ID NO: 770670 - DNA, 25 bp, Homo sapien
aagtcagtggcatgaaaacacttca

SEQ ID NO: 770671 - DNA, 25 bp, Homo sapien
agtcagtggcatgaaaacacttcat

SEQ ID NO: 770672 - DNA, 25 bp, Homo sapien
tgttagcccattatgttatcaagta

SEQ ID NO: 770673 - DNA, 25 bp, Homo sapien
gttgatggatacatcttttgccctg

SEQ ID NO: 770674 - DNA, 25 bp, Homo sapien
aaatgaccctgtagtaacgactgta

SEQ ID NO: 770675 - DNA, 25 bp, Homo sapien
cattctaaagtatctaaaagtgcag

SEQ ID NO: 770676 - DNA, 25 bp, Homo sapien
aacagaggtcatattactttgcaac

SEQ ID NO: 770677 - DNA, 25 bp, Homo sapien
tatggtctcatgactaactactctg

SEQ ID NO: 770678 - DNA, 25 bp, Homo sapien
aaaagtatgctgtgctatatcatgg

SEQ ID NO: 770679 - DNA, 25 bp, Homo sapien
tgcagacagtaatggaatgaaagac

SEQ ID NO: 770680 - DNA, 25 bp, Homo sapien
aagacaaaggactcaccctgtcgcc

SEQ ID NO: 770681 - DNA, 25 bp, Homo sapien
catactgtaggttgtccatttactt

SEQ ID NO: 770682 - DNA, 25 bp, Homo sapien
cagaagctctagattagatgtcaat

SEQ ID NO: 770683 - DNA, 25 bp, Homo sapien
tattccatactgtaggttgtccatt

SEQ ID NO: 770684 - DNA, 25 bp, Homo sapien
gcaacgtggctacagcaggccttta

SEQ ID NO: 770685 - DNA, 25 bp, Homo sapien
tccaggttcacccaaggtttagcac

SEQ ID NO: 770686 - DNA, 25 bp, Homo sapien
tctcgttgcccaagtagagtacatc

SEQ ID NO: 770687 - DNA, 25 bp, Homo sapien
tctaagcaaatgaacgtgaaacatc

SEQ ID NO: 770688 - DNA, 25 bp, Homo sapien
gacttgggtatttggctactgtctc

SEQ ID NO: 770689 - DNA, 25 bp, Homo sapien
tgacttgggtatttggctactgtct

SEQ ID NO: 770690 - DNA, 25 bp, Homo sapien
caggtctggcttggagataatgaca

SEQ ID NO: 770691 - DNA, 25 bp, Homo sapien
gatcaggtctggcttggagataatg

SEQ ID NO: 770692 - DNA, 25 bp, Homo sapien
ataaccagatcacagcgccacagag

SEQ ID NO: 770693 - DNA, 25 bp, Homo sapien
caataaccagatcacagcgccacag

SEQ ID NO: 770694 - DNA, 25 bp, Homo sapien
tctaggagtaagaggacgcagaaaa

SEQ ID NO: 770695 - DNA, 25 bp, Homo sapien
agaggacgcagaaaagtgaaggcca

SEQ ID NO: 770696 - DNA, 25 bp, Homo sapien
gaaaattcctaaactcagtctggga

SEQ ID NO: 770697 - DNA, 25 bp, Homo sapien
aaatgagaatacttaacaaatagaa

SEQ ID NO: 770698 - DNA, 25 bp, Homo sapien
cataaaaaaacagacctgagaaaat

SEQ ID NO: 770699 - DNA, 25 bp, Homo sapien
aggtaaatgagaatacttaacaaat

SEQ ID NO: 770700 - DNA, 25 bp, Homo sapien
ctcagctcactgcaacctctgccta

SEQ ID NO: 770701 - DNA, 25 bp, Homo sapien
tctgcctatggggttcaaatgattc

SEQ ID NO: 770702 - DNA, 25 bp, Homo sapien
ccaaggtggagtgcagccgcacgat

SEQ ID NO: 770703 - DNA, 25 bp, Homo sapien
tcgcccaaggtggagtgcagccgca

SEQ ID NO: 770704 - DNA, 25 bp, Homo sapien
tccagaggcagaggttgcggtgagc

SEQ ID NO: 770705 - DNA, 25 bp, Homo sapien
tccagcctgggcaacaagagcaaaa

SEQ ID NO: 770706 - DNA, 25 bp, Homo sapien
cgagatcgtgccattgcactccagc

SEQ ID NO: 770707 - DNA, 25 bp, Homo sapien
gctgcggcaggagaaatcacttgaa

SEQ ID NO: 770708 - DNA, 25 bp, Homo sapien
tatcagaatctctgcaacacagcta

SEQ ID NO: 770709 - DNA, 25 bp, Homo sapien
catactcagaccacagattgattaa

SEQ ID NO: 770710 - DNA, 25 bp, Homo sapien
acacagctaatgcagtgctaacaga

SEQ ID NO: 770711 - DNA, 25 bp, Homo sapien
gaacaaagtacagcatatcagaatc

SEQ ID NO: 770712 - DNA, 25 bp, Homo sapien
tcttgcggctcactagaaattttct

SEQ ID NO: 770713 - DNA, 25 bp, Homo sapien
agggtaaagatcttgcggctcacta

SEQ ID NO: 770714 - DNA, 25 bp, Homo sapien
gtttgtaaggggtcatgccctacaa

SEQ ID NO: 770715 - DNA, 25 bp, Homo sapien
tgcccaaatttctatctaattgttt

SEQ ID NO: 770716 - DNA, 25 bp, Homo sapien
tcagaataccgtgagcactggctct

SEQ ID NO: 770717 - DNA, 25 bp, Homo sapien
cactggctctagaaaggctgcagga

SEQ ID NO: 770718 - DNA, 25 bp, Homo sapien
aacagtaaatttgaacaaggctggg

SEQ ID NO: 770719 - DNA, 25 bp, Homo sapien
ggcagggagtgtaccctatgtagaa

SEQ ID NO: 770720 - DNA, 25 bp, Homo sapien
gacttgcagagcaacaacatctcca

SEQ ID NO: 770721 - DNA, 25 bp, Homo sapien
tcctcatagcaccttgggagctggt

SEQ ID NO: 770722 - DNA, 25 bp, Homo sapien
gaaaaactttaatgcagcttagaga

SEQ ID NO: 770723 - DNA, 25 bp, Homo sapien
tactatgtgctgaagggactgttac

SEQ ID NO: 770724 - DNA, 25 bp, Homo sapien
gaaaactgattatgtcttacaggag

SEQ ID NO: 770725 - DNA, 25 bp, Homo sapien
gtaaggaaaactgattatgtcttac

SEQ ID NO: 770726 - DNA, 25 bp, Homo sapien
aaggaaaactgattatgtcttacag

SEQ ID NO: 770727 - DNA, 25 bp, Homo sapien
ttaaccaagtagccatgggcagaat

SEQ ID NO: 770728 - DNA, 25 bp, Homo sapien
catgcctatatacattccgctgtgc

SEQ ID NO: 770729 - DNA, 25 bp, Homo sapien
tgcctatatacattccgctgtgcag

SEQ ID NO: 770730 - DNA, 25 bp, Homo sapien
aagagaactctatggccacatccat

SEQ ID NO: 770731 - DNA, 25 bp, Homo sapien
cacatgcctatatacattccgctgt

SEQ ID NO: 770732 - DNA, 25 bp, Homo sapien
cctttaggatatattaggaaatgtg

SEQ ID NO: 770733 - DNA, 25 bp, Homo sapien
gatatattaggaaatgtgtactgaa

SEQ ID NO: 770734 - DNA, 25 bp, Homo sapien
aacctttaggatatattaggaaatg

SEQ ID NO: 770735 - DNA, 25 bp, Homo sapien
aggatatattaggaaatgtgtactg

SEQ ID NO: 770736 - DNA, 25 bp, Homo sapien
taggtgtgggcaacaacactttacg

SEQ ID NO: 770737 - DNA, 25 bp, Homo sapien
cgccaataaatttctggaattacca

SEQ ID NO: 770738 - DNA, 25 bp, Homo sapien
gagtgaaggatacatatcagctcag

SEQ ID NO: 770739 - DNA, 25 bp, Homo sapien
ggaattaccactaatctagagtgaa

SEQ ID NO: 770740 - DNA, 25 bp, Homo sapien
cttagagatagcaatacttgtttta

SEQ ID NO: 770741 - DNA, 25 bp, Homo sapien
tagagatagcaatacttgttttatt

SEQ ID NO: 770742 - DNA, 25 bp, Homo sapien
gagatagcaatacttgttttattaa

SEQ ID NO: 770743 - DNA, 25 bp, Homo sapien
gatagcaatacttgttttattaaaa

SEQ ID NO: 770744 - DNA, 25 bp, Homo sapien
cagggctcttttccttgttccagac

SEQ ID NO: 770745 - DNA, 25 bp, Homo sapien
ctcttttccttgttccagacaggta

SEQ ID NO: 770746 - DNA, 25 bp, Homo sapien
ccttgttccagacaggtaatcaggt

SEQ ID NO: 770747 - DNA, 25 bp, Homo sapien
ttccttgttccagacaggtaatcag

SEQ ID NO: 770748 - DNA, 25 bp, Homo sapien
aatgtttggctaccaccatctcatg

SEQ ID NO: 770749 - DNA, 25 bp, Homo sapien
agtagagggacatcatatttcataa

SEQ ID NO: 770750 - DNA, 25 bp, Homo sapien
acaaagtagagggacatcatatttc

SEQ ID NO: 770751 - DNA, 25 bp, Homo sapien
caaagtagagggacatcatatttca

SEQ ID NO: 770752 - DNA, 25 bp, Homo sapien
gaacaaagtagagggacatcatatt

SEQ ID NO: 770753 - DNA, 25 bp, Homo sapien
cagccttgggtgcaatgaaactctg

SEQ ID NO: 770754 - DNA, 25 bp, Homo sapien
ctccagccttgggtgcaatgaaact

SEQ ID NO: 770755 - DNA, 25 bp, Homo sapien
ttgggtgcaatgaaactctgtgaag

SEQ ID NO: 770756 - DNA, 25 bp, Homo sapien
gggtgcaatgaaactctgtgaagac

SEQ ID NO: 770757 - DNA, 25 bp, Homo sapien
agcagttacactcttagaatcagga

SEQ ID NO: 770758 - DNA, 25 bp, Homo sapien
gtaaaagcaatgcaaatttcggtca

SEQ ID NO: 770759 - DNA, 25 bp, Homo sapien
tgtagtgagatgtagctttgcaagg

SEQ ID NO: 770760 - DNA, 25 bp, Homo sapien
gccatggaaaagattgtattaagat

SEQ ID NO: 770761 - DNA, 25 bp, Homo sapien
aatgaaaaggctcaacaaactagaa

SEQ ID NO: 770762 - DNA, 25 bp, Homo sapien
ctgtgtgacataatcaaagtcctga

SEQ ID NO: 770763 - DNA, 25 bp, Homo sapien
ctccactagtgtaacaggaacacag

SEQ ID NO: 770764 - DNA, 25 bp, Homo sapien
ggcaacatagccctatcaattatta

SEQ ID NO: 770765 - DNA, 25 bp, Homo sapien
tttggaatgacaaaatgttgagtcc

SEQ ID NO: 770766 - DNA, 25 bp, Homo sapien
ctttggaatgacaaaatgttgagtc

SEQ ID NO: 770767 - DNA, 25 bp, Homo sapien
tactttggaatgacaaaatgttgag

SEQ ID NO: 770768 - DNA, 25 bp, Homo sapien
tggaatgacaaaatgttgagtccac

SEQ ID NO: 770769 - DNA, 25 bp, Homo sapien
ggtcttgggcaaaacgagaacacag

SEQ ID NO: 770770 - DNA, 25 bp, Homo sapien
tcttgggcaaaacgagaacacagag

SEQ ID NO: 770771 - DNA, 25 bp, Homo sapien
gtcttgggcaaaacgagaacacaga

SEQ ID NO: 770772 - DNA, 25 bp, Homo sapien
aggtcttgggcaaaacgagaacaca

SEQ ID NO: 770773 - DNA, 25 bp, Homo sapien
cctccttggtgtcccttacactcat

SEQ ID NO: 770774 - DNA, 25 bp, Homo sapien
tccttggtgtcccttacactcatcc

SEQ ID NO: 770775 - DNA, 25 bp, Homo sapien
ccttggtgtcccttacactcatcca

SEQ ID NO: 770776 - DNA, 25 bp, Homo sapien
acctccttggtgtcccttacactca

SEQ ID NO: 770777 - DNA, 25 bp, Homo sapien
agtaaggattgaggattggtgaaag

SEQ ID NO: 770778 - DNA, 25 bp, Homo sapien
attgaggattggtgaaaggcttttc

SEQ ID NO: 770779 - DNA, 25 bp, Homo sapien
aggattgaggattggtgaaaggctt

SEQ ID NO: 770780 - DNA, 25 bp, Homo sapien
gtaaggattgaggattggtgaaagg

SEQ ID NO: 770781 - DNA, 25 bp, Homo sapien
tgccacagtgtgcacatttataggg

SEQ ID NO: 770782 - DNA, 25 bp, Homo sapien
gctttgccacagtgtgcacatttat

SEQ ID NO: 770783 - DNA, 25 bp, Homo sapien
aaaggctttgccacagtgtgcacat

SEQ ID NO: 770784 - DNA, 25 bp, Homo sapien
gccacagtgtgcacatttatagggt

SEQ ID NO: 770785 - DNA, 25 bp, Homo sapien
tttgtatggttcctctccagtataa

SEQ ID NO: 770786 - DNA, 25 bp, Homo sapien
ccagtataaattatctgatgtttag

SEQ ID NO: 770787 - DNA, 25 bp, Homo sapien
atttgtatggttcctctccagtata

SEQ ID NO: 770788 - DNA, 25 bp, Homo sapien
tatctgatgtttagtaagggttggg

SEQ ID NO: 770789 - DNA, 25 bp, Homo sapien
tatcttatgtgtaataagggttgaa

SEQ ID NO: 770790 - DNA, 25 bp, Homo sapien
gaattatcttatgtgtaataagggt

SEQ ID NO: 770791 - DNA, 25 bp, Homo sapien
tatgtgtaataagggttgaaaactg

SEQ ID NO: 770792 - DNA, 25 bp, Homo sapien
tcttatgtgtaataagggttgaaaa

SEQ ID NO: 770793 - DNA, 25 bp, Homo sapien
taaggattgagtatcggtgaaaagc

SEQ ID NO: 770794 - DNA, 25 bp, Homo sapien
tgagctttgcggactggttaaaagc

SEQ ID NO: 770795 - DNA, 25 bp, Homo sapien
gttcagtgagctttgcggactggtt

SEQ ID NO: 770796 - DNA, 25 bp, Homo sapien
gtactaaggattgagtatcggtgaa

SEQ ID NO: 770797 - DNA, 25 bp, Homo sapien
tctagtatgaatcttcttgtgttta

SEQ ID NO: 770798 - DNA, 25 bp, Homo sapien
tagtaaggtttgagagttggctaaa

SEQ ID NO: 770799 - DNA, 25 bp, Homo sapien
tctctagtatgaatcttcttgtgtt

SEQ ID NO: 770800 - DNA, 25 bp, Homo sapien
tagtatgaatcttcttgtgtttagt

SEQ ID NO: 770801 - DNA, 25 bp, Homo sapien
gtgaatcatcttatgtatagcaagt

SEQ ID NO: 770802 - DNA, 25 bp, Homo sapien
ttcgagaactagttaaaacaactgc

SEQ ID NO: 770803 - DNA, 25 bp, Homo sapien
catagtaaagttcgagaactagtta

SEQ ID NO: 770804 - DNA, 25 bp, Homo sapien
cgagaactagttaaaacaactgcca

SEQ ID NO: 770805 - DNA, 25 bp, Homo sapien
atgcatagtaaagttcgagaactag

SEQ ID NO: 770806 - DNA, 25 bp, Homo sapien
tttgaatttccaaggttttgctcca

SEQ ID NO: 770807 - DNA, 25 bp, Homo sapien
ttgaatttccaaggttttgctccag

SEQ ID NO: 770808 - DNA, 25 bp, Homo sapien
tttgaggattgtaagttttaccaca

SEQ ID NO: 770809 - DNA, 25 bp, Homo sapien
ttgaggattgtaagttttaccacat

SEQ ID NO: 770810 - DNA, 25 bp, Homo sapien
tatagtttagtatgcatcccctggt

SEQ ID NO: 770811 - DNA, 25 bp, Homo sapien
tgagcaactgcttcggatacaaaat

SEQ ID NO: 770812 - DNA, 25 bp, Homo sapien
tgtatggatcatttcaagtcaggag

SEQ ID NO: 770813 - DNA, 25 bp, Homo sapien
gtaaggcaggcactacaaccctctt

SEQ ID NO: 770814 - DNA, 25 bp, Homo sapien
catgaagttcgctttgacaagcccc

SEQ ID NO: 770815 - DNA, 25 bp, Homo sapien
tttgctaacacctttcgctggcctg

SEQ ID NO: 770816 - DNA, 25 bp, Homo sapien
gaattggagttccacacaggcagtc

SEQ ID NO: 770817 - DNA, 25 bp, Homo sapien
tatagacgaactggtgtggcaaggc

SEQ ID NO: 770818 - DNA, 25 bp, Homo sapien
taattcttacaacaccgacggcagc

SEQ ID NO: 770819 - DNA, 25 bp, Homo sapien
ggtactagtaaaagacctccaggca

SEQ ID NO: 770820 - DNA, 25 bp, Homo sapien
taatcaaattggctctcgagacgcg

SEQ ID NO: 770821 - DNA, 25 bp, Homo sapien
tttgaactcctatacaggcgcccct

SEQ ID NO: 770822 - DNA, 25 bp, Homo sapien
tcaggtagcgggtaagtccatttcc

SEQ ID NO: 770823 - DNA, 25 bp, Homo sapien
tagacacaagggctacctactctgt

SEQ ID NO: 770824 - DNA, 25 bp, Homo sapien
caactggatgacgactgaagaggcc

SEQ ID NO: 770825 - DNA, 25 bp, Homo sapien
gagcccagggtaatgcttcaggtag

SEQ ID NO: 770826 - DNA, 25 bp, Homo sapien
tgaggtacaacgacaggcaagactg

SEQ ID NO: 770827 - DNA, 25 bp, Homo sapien
caggacttagtaaagctggcgttca

SEQ ID NO: 770828 - DNA, 25 bp, Homo sapien
tttaattcccgagaggaggcggctg

SEQ ID NO: 770829 - DNA, 25 bp, Homo sapien
gaggtagaggtacgatctcccaggc

SEQ ID NO: 770830 - DNA, 25 bp, Homo sapien
cagtccactacatctacaactccta

SEQ ID NO: 770831 - DNA, 25 bp, Homo sapien
ccactacatctacaactcctaacac

SEQ ID NO: 770832 - DNA, 25 bp, Homo sapien
agtccactacatctacaactcctaa

SEQ ID NO: 770833 - DNA, 25 bp, Homo sapien
tccactacatctacaactcctaaca

SEQ ID NO: 770834 - DNA, 25 bp, Homo sapien
tttagttcttctgccgccatttggc

SEQ ID NO: 770835 - DNA, 25 bp, Homo sapien
cattttaattcctgttagttcccat

SEQ ID NO: 770836 - DNA, 25 bp, Homo sapien
ggcttccatcttacccccattctta

SEQ ID NO: 770837 - DNA, 25 bp, Homo sapien
ccatttggccgccattttaattcct

SEQ ID NO: 770838 - DNA, 25 bp, Homo sapien
accactgccatcttactacctgctt

SEQ ID NO: 770839 - DNA, 25 bp, Homo sapien
gccatcttactacctgcttcctcac

SEQ ID NO: 770840 - DNA, 25 bp, Homo sapien
tgccatcttactacctgcttcctca

SEQ ID NO: 770841 - DNA, 25 bp, Homo sapien
actgccatcttactacctgcttcct

SEQ ID NO: 770842 - DNA, 25 bp, Homo sapien
agcctctcttgccattaatcttgtc

SEQ ID NO: 770843 - DNA, 25 bp, Homo sapien
tctcttgccattaatcttgtccacg

SEQ ID NO: 770844 - DNA, 25 bp, Homo sapien
cattaatcttgtccacggcccccat

SEQ ID NO: 770845 - DNA, 25 bp, Homo sapien
ttgccattaatcttgtccacggccc

SEQ ID NO: 770846 - DNA, 25 bp, Homo sapien
gggacctccgctctcgtcagaccgc

SEQ ID NO: 770847 - DNA, 25 bp, Homo sapien
tgggacctccgctctcgtcagaccg

SEQ ID NO: 770848 - DNA, 25 bp, Homo sapien
ttcaaaggttctgggacctccgctc

SEQ ID NO: 770849 - DNA, 25 bp, Homo sapien
ggacctccgctctcgtcagaccgct

SEQ ID NO: 770850 - DNA, 25 bp, Homo sapien
agttgcctggccgcaatatacctta

SEQ ID NO: 770851 - DNA, 25 bp, Homo sapien
ttgcctggccgcaatataccttaga

SEQ ID NO: 770852 - DNA, 25 bp, Homo sapien
ctgcacagttgcctggccgcaatat

SEQ ID NO: 770853 - DNA, 25 bp, Homo sapien
gcacagttgcctggccgcaatatac

SEQ ID NO: 770854 - DNA, 25 bp, Homo sapien
tggccgagagtcatgcgcacaccca

SEQ ID NO: 770855 - DNA, 25 bp, Homo sapien
agagtcatgcgcacacccagggaga

SEQ ID NO: 770856 - DNA, 25 bp, Homo sapien
gccgagagtcatgcgcacacccagg

SEQ ID NO: 770857 - DNA, 25 bp, Homo sapien
ccctggccgagagtcatgcgcacac

SEQ ID NO: 770858 - DNA, 25 bp, Homo sapien
gaaaacaattgttatctccacggga

SEQ ID NO: 770859 - DNA, 25 bp, Homo sapien
tatttaatcctctgatctatggaca

SEQ ID NO: 770860 - DNA, 25 bp, Homo sapien
gagaaaactgtagcaatcacgtaga

SEQ ID NO: 770861 - DNA, 25 bp, Homo sapien
ggcttatcatggagcatctgctaca

SEQ ID NO: 770862 - DNA, 25 bp, Homo sapien
tatatttgtcgaaatgagccaggca

SEQ ID NO: 770863 - DNA, 25 bp, Homo sapien
gacaatgtcacatgctcttgccaca

SEQ ID NO: 770864 - DNA, 25 bp, Homo sapien
ttattgaagtaaagtggtggccacc

SEQ ID NO: 770865 - DNA, 25 bp, Homo sapien
gcttacagacttatgactggccact

SEQ ID NO: 770866 - DNA, 25 bp, Homo sapien
tattattggttatacatccaaaaca

SEQ ID NO: 770867 - DNA, 25 bp, Homo sapien
attattggttatacatccaaaacaa

SEQ ID NO: 770868 - DNA, 25 bp, Homo sapien
ttattattggttatacatccaaaac

SEQ ID NO: 770869 - DNA, 25 bp, Homo sapien
tttctgacgagaaagagaagtctaa

SEQ ID NO: 770870 - DNA, 25 bp, Homo sapien
ttgaaacacgtcaaaacagaacttc

SEQ ID NO: 770871 - DNA, 25 bp, Homo sapien
cctacaagctagaaaagattgggac

SEQ ID NO: 770872 - DNA, 25 bp, Homo sapien
aaacagtatacaggccacaaataac

SEQ ID NO: 770873 - DNA, 25 bp, Homo sapien
ggttctgtgcagagataaagtcccc

SEQ ID NO: 770874 - DNA, 25 bp, Homo sapien
tacgaattggacaaaagcttccggc

SEQ ID NO: 770875 - DNA, 25 bp, Homo sapien
gactcttacgtgacaggcaggatag

SEQ ID NO: 770876 - DNA, 25 bp, Homo sapien
cagaaacgtctgtaatgggcggcca

SEQ ID NO: 770877 - DNA, 25 bp, Homo sapien
tactaaggagtgttatctctggaga

SEQ ID NO: 770878 - DNA, 25 bp, Homo sapien
ctaaggagtgttatctctggagaca

SEQ ID NO: 770879 - DNA, 25 bp, Homo sapien
ttatactaaggagtgttatctctgg

SEQ ID NO: 770880 - DNA, 25 bp, Homo sapien
ttgttatactaaggagtgttatctc

SEQ ID NO: 770881 - DNA, 25 bp, Homo sapien
aagatctcatttctatgcagagtgt

SEQ ID NO: 770882 - DNA, 25 bp, Homo sapien
agaataatgattgcctgcgacaggg

SEQ ID NO: 770883 - DNA, 25 bp, Homo sapien
tcatttctatgcagagtgtaaaaga

SEQ ID NO: 770884 - DNA, 25 bp, Homo sapien
aagccttgttatttgcaaaaagctt

SEQ ID NO: 770885 - DNA, 25 bp, Homo sapien
catgaacttcaactggccacaggaa

SEQ ID NO: 770886 - DNA, 25 bp, Homo sapien
gattggaactaaatgctatcagaag

SEQ ID NO: 770887 - DNA, 25 bp, Homo sapien
tgtaccacgtttcacttaggagaaa

SEQ ID NO: 770888 - DNA, 25 bp, Homo sapien
tatgacagtgtacccaacaaataca

SEQ ID NO: 770889 - DNA, 25 bp, Homo sapien
aagtttttggctttgatcaccatgc

SEQ ID NO: 770890 - DNA, 25 bp, Homo sapien
gactaatacctacatatggccagaa

SEQ ID NO: 770891 - DNA, 25 bp, Homo sapien
tctgtatcagtaagacaatggcaaa

SEQ ID NO: 770892 - DNA, 25 bp, Homo sapien
gcacgcctggccagtataccttaat

SEQ ID NO: 770893 - DNA, 25 bp, Homo sapien
tgacttgtcacccttgtagcttctt

SEQ ID NO: 770894 - DNA, 25 bp, Homo sapien
aaatatgacttgtcacccttgtagc

SEQ ID NO: 770895 - DNA, 25 bp, Homo sapien
tatgacttgtcacccttgtagcttc

SEQ ID NO: 770896 - DNA, 25 bp, Homo sapien
gacttgtcacccttgtagcttcttg

SEQ ID NO: 770897 - DNA, 25 bp, Homo sapien
ccaaggacgcagtgaccaggaagga

SEQ ID NO: 770898 - DNA, 25 bp, Homo sapien
gtcacattttaacttgttgaaccag

SEQ ID NO: 770899 - DNA, 25 bp, Homo sapien
tctcctttctgcattgtcacatttt

SEQ ID NO: 770900 - DNA, 25 bp, Homo sapien
atgccagccaaggacgcagtgacca

SEQ ID NO: 770901 - DNA, 25 bp, Homo sapien
aggtgctggccacagccttgttcat

SEQ ID NO: 770902 - DNA, 25 bp, Homo sapien
tcctggcgggaggtgctggccacag

SEQ ID NO: 770903 - DNA, 25 bp, Homo sapien
cgccgttctcctggcgggaggtgct

SEQ ID NO: 770904 - DNA, 25 bp, Homo sapien
tggcgccgttctcctggcgggaggt

SEQ ID NO: 770905 - DNA, 25 bp, Homo sapien
tgagctcagccttgtctccgctggg

SEQ ID NO: 770906 - DNA, 25 bp, Homo sapien
gactggtgatctgaaagatgagctc

SEQ ID NO: 770907 - DNA, 25 bp, Homo sapien
tcctgcacaaccctgcgcaggctct

SEQ ID NO: 770908 - DNA, 25 bp, Homo sapien
acttccagactggtgatctgaaaga

SEQ ID NO: 770909 - DNA, 25 bp, Homo sapien
cctctgctggtttggctggcttctt

SEQ ID NO: 770910 - DNA, 25 bp, Homo sapien
tcatcctctgctggtttggctggct

SEQ ID NO: 770911 - DNA, 25 bp, Homo sapien
tgctggtttggctggcttcttggcc

SEQ ID NO: 770912 - DNA, 25 bp, Homo sapien
gctggtttggctggcttcttggcca

SEQ ID NO: 770913 - DNA, 25 bp, Homo sapien
agttcaggaacacctttaagtggat

SEQ ID NO: 770914 - DNA, 25 bp, Homo sapien
tagttcaggaacacctttaagtgga

SEQ ID NO: 770915 - DNA, 25 bp, Homo sapien
tgtagttcaggaacacctttaagtg

SEQ ID NO: 770916 - DNA, 25 bp, Homo sapien
tctctgtgtactgccgcagccgctc

SEQ ID NO: 770917 - DNA, 25 bp, Homo sapien
ggatggacgactcggccaccagcat

SEQ ID NO: 770918 - DNA, 25 bp, Homo sapien
ccaaggcttaatgtccagcaggatg

SEQ ID NO: 770919 - DNA, 25 bp, Homo sapien
aggatggacgactcggccaccagca

SEQ ID NO: 770920 - DNA, 25 bp, Homo sapien
ggcttaatgtccagcaggatggacg

SEQ ID NO: 770921 - DNA, 25 bp, Homo sapien
cagctgggccatgttagtctcatca

SEQ ID NO: 770922 - DNA, 25 bp, Homo sapien
ctccagctgggccatgttagtctca

SEQ ID NO: 770923 - DNA, 25 bp, Homo sapien
ccagctgggccatgttagtctcatc

SEQ ID NO: 770924 - DNA, 25 bp, Homo sapien
gcctccagctgggccatgttagtct

SEQ ID NO: 770925 - DNA, 25 bp, Homo sapien
ctgtccagctggatggagcacatac

SEQ ID NO: 770926 - DNA, 25 bp, Homo sapien
tgcacgtgttcttcaaacttgatga

SEQ ID NO: 770927 - DNA, 25 bp, Homo sapien
ttctggatactatagcccacgggca

SEQ ID NO: 770928 - DNA, 25 bp, Homo sapien
gctgcaatgtcaacattctgcacgt

SEQ ID NO: 770929 - DNA, 25 bp, Homo sapien
tgtcatcctccactacacactgaac

SEQ ID NO: 770930 - DNA, 25 bp, Homo sapien
ggtgaccagggatgtcatatacagc

SEQ ID NO: 770931 - DNA, 25 bp, Homo sapien
ctgcagcagcgtcatggtgaccagg

SEQ ID NO: 770932 - DNA, 25 bp, Homo sapien
gccactgttacccaaggcaggtggt

SEQ ID NO: 770933 - DNA, 25 bp, Homo sapien
tgtgccgtattccatcaatcctgat

SEQ ID NO: 770934 - DNA, 25 bp, Homo sapien
gctatgattagcctcagatctacag

SEQ ID NO: 770935 - DNA, 25 bp, Homo sapien
tatgattagcctcagatctacagca

SEQ ID NO: 770936 - DNA, 25 bp, Homo sapien
gagctatgattagcctcagatctac

SEQ ID NO: 770937 - DNA, 25 bp, Homo sapien
atgattagcctcagatctacagcac

SEQ ID NO: 770938 - DNA, 25 bp, Homo sapien
tccttagggatttcgatctgcagcc

SEQ ID NO: 770939 - DNA, 25 bp, Homo sapien
gggactatcccgtggatctctcaga

SEQ ID NO: 770940 - DNA, 25 bp, Homo sapien
tcggccctgcccaattctaggatca

SEQ ID NO: 770941 - DNA, 25 bp, Homo sapien
agcggcgatgcacgtccacagaagt

SEQ ID NO: 770942 - DNA, 25 bp, Homo sapien
gaattttgcgctgtatcccttgggc

SEQ ID NO: 770943 - DNA, 25 bp, Homo sapien
aagcatcctgcggatccttaggaat

SEQ ID NO: 770944 - DNA, 25 bp, Homo sapien
ccagcacacttctaggatcgcggga

SEQ ID NO: 770945 - DNA, 25 bp, Homo sapien
ggcaagtttcaaggagactcacacc

SEQ ID NO: 770946 - DNA, 25 bp, Homo sapien
gctggcaacggatttcgaagtgaat

SEQ ID NO: 770947 - DNA, 25 bp, Homo sapien
aagacgatggaggagtgctcgcctc

SEQ ID NO: 770948 - DNA, 25 bp, Homo sapien
tctccgaccagaatgaaataccaag

SEQ ID NO: 770949 - DNA, 25 bp, Homo sapien
cgtatcggacctctccgaccagaat

SEQ ID NO: 770950 - DNA, 25 bp, Homo sapien
tatcctggatcgtgggagtatccca

SEQ ID NO: 770951 - DNA, 25 bp, Homo sapien
gattccattcccgaaaaaggctgtg

SEQ ID NO: 770952 - DNA, 25 bp, Homo sapien
tcagcacggtcgtctgggaaaggca

SEQ ID NO: 770953 - DNA, 25 bp, Homo sapien
cagaggctgtctaagggcgatttca

SEQ ID NO: 770954 - DNA, 25 bp, Homo sapien
caacgaaggcgttcactgtgaagca

SEQ ID NO: 770955 - DNA, 25 bp, Homo sapien
gatttcgcggtgtatccctgggcct

SEQ ID NO: 770956 - DNA, 25 bp, Homo sapien
tgtcctagatcgtgggagtatcccg

SEQ ID NO: 770957 - DNA, 25 bp, Homo sapien
ggactagtcgccaggcaacgaaggc

SEQ ID NO: 770958 - DNA, 25 bp, Homo sapien
caagagactcctgtaaagtgcaaaa

SEQ ID NO: 770959 - DNA, 25 bp, Homo sapien
gctggagtcaaacccatgttcatgg

SEQ ID NO: 770960 - DNA, 25 bp, Homo sapien
aacctggagtgcagccaaactactg

SEQ ID NO: 770961 - DNA, 25 bp, Homo sapien
tactgaaaaacccttgagatcccta

SEQ ID NO: 770962 - DNA, 25 bp, Homo sapien
cgccccgctcctgctgggtggtgga

SEQ ID NO: 770963 - DNA, 25 bp, Homo sapien
cccgaagactttgccgaagacgcgg

SEQ ID NO: 770964 - DNA, 25 bp, Homo sapien
ccgaagactttgccgaagacgcggc

SEQ ID NO: 770965 - DNA, 25 bp, Homo sapien
gaagactttgccgaagacgcggccc

SEQ ID NO: 770966 - DNA, 25 bp, Homo sapien
cgaagactttgccgaagacgcggcc

SEQ ID NO: 770967 - DNA, 25 bp, Homo sapien
ggactgtgccttccgcaaaacggct

SEQ ID NO: 770968 - DNA, 25 bp, Homo sapien
ttattaaccttgaccacggcggctg

SEQ ID NO: 770969 - DNA, 25 bp, Homo sapien
gcagtggcagcgtttctatccggct

SEQ ID NO: 770970 - DNA, 25 bp, Homo sapien
aaacggctgcgctctaggtaggaga

SEQ ID NO: 770971 - DNA, 25 bp, Homo sapien
ggaatgggcaatatgatgcagctca

SEQ ID NO: 770972 - DNA, 25 bp, Homo sapien
tgaccattaggcaacaaatctcggg

SEQ ID NO: 770973 - DNA, 25 bp, Homo sapien
ggtgggagtggacacaaatttgcca

SEQ ID NO: 770974 - DNA, 25 bp, Homo sapien
gctcaggaagaagacccacttaaga

SEQ ID NO: 770975 - DNA, 25 bp, Homo sapien
aacagaacatgatggactgttctgg

SEQ ID NO: 770976 - DNA, 25 bp, Homo sapien
catgcagcttcttttaagttatgga

SEQ ID NO: 770977 - DNA, 25 bp, Homo sapien
agaacatgatggactgttctggcat

SEQ ID NO: 770978 - DNA, 25 bp, Homo sapien
gaaaacagaacatgatggactgttc

SEQ ID NO: 770979 - DNA, 25 bp, Homo sapien
ggaaaatgatccatctctaaagatt

SEQ ID NO: 770980 - DNA, 25 bp, Homo sapien
ttcttgtaaggaaaatgatccatct

SEQ ID NO: 770981 - DNA, 25 bp, Homo sapien
taaggaaaatgatccatctctaaag

SEQ ID NO: 770982 - DNA, 25 bp, Homo sapien
cttgtaaggaaaatgatccatctct

SEQ ID NO: 770983 - DNA, 25 bp, Homo sapien
aagcaaataattagcatgcatgagc

SEQ ID NO: 770984 - DNA, 25 bp, Homo sapien
tcgctgctttaaaggctgcttctct

SEQ ID NO: 770985 - DNA, 25 bp, Homo sapien
tctgtttatggtgggcctactgtgg

SEQ ID NO: 770986 - DNA, 25 bp, Homo sapien
actgcatgacatgttcataccggcc

SEQ ID NO: 770987 - DNA, 25 bp, Homo sapien
tcaccatgtacgctgctgtcctctc

SEQ ID NO: 770988 - DNA, 25 bp, Homo sapien
ctaggacggtatttactgtcctagg

SEQ ID NO: 770989 - DNA, 25 bp, Homo sapien
gtaacttgctgggtagtgactagga

SEQ ID NO: 770990 - DNA, 25 bp, Homo sapien
agcacctcaccatgtacgctgctgt

SEQ ID NO: 770991 - DNA, 25 bp, Homo sapien
tttatttgcacttatgcttaattac

SEQ ID NO: 770992 - DNA, 25 bp, Homo sapien
cattttactattgatgcgtatgctt

SEQ ID NO: 770993 - DNA, 25 bp, Homo sapien
tttactattgatgcgtatgcttatt

SEQ ID NO: 770994 - DNA, 25 bp, Homo sapien
attttgcttaaaacacatcagcttt

SEQ ID NO: 770995 - DNA, 25 bp, Homo sapien
aagcattttactattgatgcgtatg

SEQ ID NO: 770996 - DNA, 25 bp, Homo sapien
tgaagacgagacctggagctgcgac

SEQ ID NO: 770997 - DNA, 25 bp, Homo sapien
acgagacctggagctgcgactgcag

SEQ ID NO: 770998 - DNA, 25 bp, Homo sapien
acctggagctgcgactgcagcgaga

SEQ ID NO: 770999 - DNA, 25 bp, Homo sapien
aagacgagacctggagctgcgactg

SEQ ID NO: 771000 - DNA, 25 bp, Homo sapien
ccatgtcagaggtattaacttggtt

SEQ ID NO: 771001 - DNA, 25 bp, Homo sapien
cacagtgatcatataaggggaagac

SEQ ID NO: 771002 - DNA, 25 bp, Homo sapien
agagtcactgggctgaagctttaat

SEQ ID NO: 771003 - DNA, 25 bp, Homo sapien
tcttcatggctggtgtgagcaggct

SEQ ID NO: 771004 - DNA, 25 bp, Homo sapien
tccataggcccatctatacactggg

SEQ ID NO: 771005 - DNA, 25 bp, Homo sapien
caataatttgatagagctactcaca

SEQ ID NO: 771006 - DNA, 25 bp, Homo sapien
tgggactcccataacctccctcaag

SEQ ID NO: 771007 - DNA, 25 bp, Homo sapien
acaaattccataggcccatctatac

SEQ ID NO: 771008 - DNA, 25 bp, Homo sapien
tcagcactcttgtcataacacaagt

SEQ ID NO: 771009 - DNA, 25 bp, Homo sapien
cagcactcttgtcataacacaagtg

SEQ ID NO: 771010 - DNA, 25 bp, Homo sapien
cactcttgtcataacacaagtgaag

SEQ ID NO: 771011 - DNA, 25 bp, Homo sapien
tcttgtcataacacaagtgaagaca

SEQ ID NO: 771012 - DNA, 25 bp, Homo sapien
ttgtcaaacatccagtaagtggaag

SEQ ID NO: 771013 - DNA, 25 bp, Homo sapien
tttgtcaaacatccagtaagtggaa

SEQ ID NO: 771014 - DNA, 25 bp, Homo sapien
tgtcaaacatccagtaagtggaaga

SEQ ID NO: 771015 - DNA, 25 bp, Homo sapien
ttttgtcaaacatccagtaagtgga

SEQ ID NO: 771016 - DNA, 25 bp, Homo sapien
attctgctgtgaagtgtccaggcat

SEQ ID NO: 771017 - DNA, 25 bp, Homo sapien
gccacatccctaaatgtcagtggtc

SEQ ID NO: 771018 - DNA, 25 bp, Homo sapien
tctgctgtgaagtgtccaggcattg

SEQ ID NO: 771019 - DNA, 25 bp, Homo sapien
atacaaattctgctgtgaagtgtcc

SEQ ID NO: 771020 - DNA, 25 bp, Homo sapien
gaccaggtttctgtagttatctaac

SEQ ID NO: 771021 - DNA, 25 bp, Homo sapien
ccaggtttctgtagttatctaacat

SEQ ID NO: 771022 - DNA, 25 bp, Homo sapien
ggaagaccaggtttctgtagttatc

SEQ ID NO: 771023 - DNA, 25 bp, Homo sapien
ccaggaagaccaggtttctgtagtt

SEQ ID NO: 771024 - DNA, 25 bp, Homo sapien
ctgggggtttggctaccatcgcatg

SEQ ID NO: 771025 - DNA, 25 bp, Homo sapien
tttccttgctccagacaagtgatca

SEQ ID NO: 771026 - DNA, 25 bp, Homo sapien
taccatcgcatgtctcttcatattg

SEQ ID NO: 771027 - DNA, 25 bp, Homo sapien
cttcatattgcagggctcttttcct

SEQ ID NO: 771028 - DNA, 25 bp, Homo sapien
gactagtaaaatagaatgcagcaca

SEQ ID NO: 771029 - DNA, 25 bp, Homo sapien
tcctaacataggtatacaaaactca

SEQ ID NO: 771030 - DNA, 25 bp, Homo sapien
gggaagatgtctatactgctcaatg

SEQ ID NO: 771031 - DNA, 25 bp, Homo sapien
cagcaacccctaaagtatatggaat

SEQ ID NO: 771032 - DNA, 25 bp, Homo sapien
aattaccccacttactagactcaga

SEQ ID NO: 771033 - DNA, 25 bp, Homo sapien
accccacttactagactcagatgaa

SEQ ID NO: 771034 - DNA, 25 bp, Homo sapien
ttaccccacttactagactcagatg

SEQ ID NO: 771035 - DNA, 25 bp, Homo sapien
caattaccccacttactagactcag

SEQ ID NO: 771036 - DNA, 25 bp, Homo sapien
tatgctcatccgcacttttacagcc

SEQ ID NO: 771037 - DNA, 25 bp, Homo sapien
gcaccttatgctcatccgcactttt

SEQ ID NO: 771038 - DNA, 25 bp, Homo sapien
tttgtgcaccttatgctcatccgca

SEQ ID NO: 771039 - DNA, 25 bp, Homo sapien
acctcttttgtgcaccttatgctca

SEQ ID NO: 771040 - DNA, 25 bp, Homo sapien
gaaattcactctagtagcagttttc

SEQ ID NO: 771041 - DNA, 25 bp, Homo sapien
ttcactctagtagcagttttcttat

SEQ ID NO: 771042 - DNA, 25 bp, Homo sapien
tttgtagggattcacttcaggatga

SEQ ID NO: 771043 - DNA, 25 bp, Homo sapien
catttgtagggattcacttcaggat

SEQ ID NO: 771044 - DNA, 25 bp, Homo sapien
gagaatgccctaaaggcactgccac

SEQ ID NO: 771045 - DNA, 25 bp, Homo sapien
gaatgccctaaaggcactgccacat

SEQ ID NO: 771046 - DNA, 25 bp, Homo sapien
ttgagaatgccctaaaggcactgcc

SEQ ID NO: 771047 - DNA, 25 bp, Homo sapien
gggttgagaatgccctaaaggcact

SEQ ID NO: 771048 - DNA, 25 bp, Homo sapien
taccaactcgctgatgttaagatat

SEQ ID NO: 771049 - DNA, 25 bp, Homo sapien
caactcgctgatgttaagatatgag

SEQ ID NO: 771050 - DNA, 25 bp, Homo sapien
taaataccaactcgctgatgttaag

SEQ ID NO: 771051 - DNA, 25 bp, Homo sapien
tattaaataccaactcgctgatgtt

SEQ ID NO: 771052 - DNA, 25 bp, Homo sapien
tgtatggctctaccatgagtaccag

SEQ ID NO: 771053 - DNA, 25 bp, Homo sapien
aagtcggcttacatagggttctcca

SEQ ID NO: 771054 - DNA, 25 bp, Homo sapien
caaagaggccacatgttagaagaaa

SEQ ID NO: 771055 - DNA, 25 bp, Homo sapien
tattatcagttaaccacaagagcct

SEQ ID NO: 771056 - DNA, 25 bp, Homo sapien
gaaaaatcaatgttactgtttcacc

SEQ ID NO: 771057 - DNA, 25 bp, Homo sapien
gagctgtgatgcacacattgttgga

SEQ ID NO: 771058 - DNA, 25 bp, Homo sapien
taaattcggcagaattcagcttcgc

SEQ ID NO: 771059 - DNA, 25 bp, Homo sapien
tattggtaagcaaactcaccaatta

SEQ ID NO: 771060 - DNA, 25 bp, Homo sapien
cagataggtgactaagaataaaagc

SEQ ID NO: 771061 - DNA, 25 bp, Homo sapien
tgacaccattctgtgaaggcagaac

SEQ ID NO: 771062 - DNA, 25 bp, Homo sapien
aagaataaaagctgtagactgaact

SEQ ID NO: 771063 - DNA, 25 bp, Homo sapien
tatggtcccatgacaccattctgtg

SEQ ID NO: 771064 - DNA, 25 bp, Homo sapien
gcattttatgtcacatcaaaaaatt

SEQ ID NO: 771065 - DNA, 25 bp, Homo sapien
ccatacatgtgacaagactttaata

SEQ ID NO: 771066 - DNA, 25 bp, Homo sapien
tacagcacggtgactatggttcata

SEQ ID NO: 771067 - DNA, 25 bp, Homo sapien
tatgtgaggtaaagcattaacttgg

SEQ ID NO: 771068 - DNA, 25 bp, Homo sapien
aaatagtactaattcatgaattggc

SEQ ID NO: 771069 - DNA, 25 bp, Homo sapien
taatctgcagatataacacaacctt

SEQ ID NO: 771070 - DNA, 25 bp, Homo sapien
aaaatcaacacacgagtcagtagca

SEQ ID NO: 771071 - DNA, 25 bp, Homo sapien
tatgataccccacaaaagatcctgt

SEQ ID NO: 771072 - DNA, 25 bp, Homo sapien
aagccacaatgcagaatcccttagg

SEQ ID NO: 771073 - DNA, 25 bp, Homo sapien
tctcctgggcacatagctcatgtcc

SEQ ID NO: 771074 - DNA, 25 bp, Homo sapien
tgaagctccaaggatgtaaactaat

SEQ ID NO: 771075 - DNA, 25 bp, Homo sapien
gctcaaatgaagatatgtaacagtc

SEQ ID NO: 771076 - DNA, 25 bp, Homo sapien
tccaaactgatctaaggatcagatt

SEQ ID NO: 771077 - DNA, 25 bp, Homo sapien
tttccaaactgatctaaggatcaga

SEQ ID NO: 771078 - DNA, 25 bp, Homo sapien
cttttccaaactgatctaaggatca

SEQ ID NO: 771079 - DNA, 25 bp, Homo sapien
ttttccaaactgatctaaggatcag

SEQ ID NO: 771080 - DNA, 25 bp, Homo sapien
tgcctgagccggctagaggcccagc

SEQ ID NO: 771081 - DNA, 25 bp, Homo sapien
ctgcctgagccggctagaggcccag

SEQ ID NO: 771082 - DNA, 25 bp, Homo sapien
ctgagccggctagaggcccagcagg

SEQ ID NO: 771083 - DNA, 25 bp, Homo sapien
tgagccggctagaggcccagcaggg

SEQ ID NO: 771084 - DNA, 25 bp, Homo sapien
gctgactcagtgtttgcctcctgct

SEQ ID NO: 771085 - DNA, 25 bp, Homo sapien
cctgactggtgaggccatcctctgc

SEQ ID NO: 771086 - DNA, 25 bp, Homo sapien
gcctcctgctgcctagatgtgacca

SEQ ID NO: 771087 - DNA, 25 bp, Homo sapien
tgtgaccagcgtcttttgctggcag

SEQ ID NO: 771088 - DNA, 25 bp, Homo sapien
tcagccccacgtgggtccaggagtc

SEQ ID NO: 771089 - DNA, 25 bp, Homo sapien
cacgtgggtccaggagtcccgagcc

SEQ ID NO: 771090 - DNA, 25 bp, Homo sapien
cccacgtgggtccaggagtcccgag

SEQ ID NO: 771091 - DNA, 25 bp, Homo sapien
cacgctcagccccacgtgggtccag

SEQ ID NO: 771092 - DNA, 25 bp, Homo sapien
tgagagggacagagcgatgcggctg

SEQ ID NO: 771093 - DNA, 25 bp, Homo sapien
gtgccacgcggtccggaactggctt

SEQ ID NO: 771094 - DNA, 25 bp, Homo sapien
cggacgccaggtcgctggagacctc

SEQ ID NO: 771095 - DNA, 25 bp, Homo sapien
ctggcttgcctgacatgagagggac

SEQ ID NO: 771096 - DNA, 25 bp, Homo sapien
gagaccactctaaactggctcggcg

SEQ ID NO: 771097 - DNA, 25 bp, Homo sapien
gaccactctaaactggctcggcggc

SEQ ID NO: 771098 - DNA, 25 bp, Homo sapien
gagccccttcccactagggcctgga

SEQ ID NO: 771099 - DNA, 25 bp, Homo sapien
ctgtggacgcccagaagcgcggagc

SEQ ID NO: 771100 - DNA, 25 bp, Homo sapien
acacagggtgtggagcgtcccgacc

SEQ ID NO: 771101 - DNA, 25 bp, Homo sapien
tcgtagggtccctggcttgtggaga

SEQ ID NO: 771102 - DNA, 25 bp, Homo sapien
cttgtggagagaggttggcgctgtt

SEQ ID NO: 771103 - DNA, 25 bp, Homo sapien
gcgccaggaagtcgggctcccggcg

SEQ ID NO: 771104 - DNA, 25 bp, Homo sapien
gagcacagccctgttgcagaaggca

SEQ ID NO: 771105 - DNA, 25 bp, Homo sapien
agcacagccctgttgcagaaggcac

SEQ ID NO: 771106 - DNA, 25 bp, Homo sapien
gtatctaaatcagctgctggttctg

SEQ ID NO: 771107 - DNA, 25 bp, Homo sapien
tggtatctaaatcagctgctggttc

SEQ ID NO: 771108 - DNA, 25 bp, Homo sapien
ggtatctaaatcagctgctggttct

SEQ ID NO: 771109 - DNA, 25 bp, Homo sapien
gatctttccccaagtaggtggctgt

SEQ ID NO: 771110 - DNA, 25 bp, Homo sapien
agcaatggtgatcaccgctctcata

SEQ ID NO: 771111 - DNA, 25 bp, Homo sapien
gggtcctcaggattctcccagaatc

SEQ ID NO: 771112 - DNA, 25 bp, Homo sapien
ttccccaagtaggtggctgtgttcg

SEQ ID NO: 771113 - DNA, 25 bp, Homo sapien
aaaccagtttgtatagtgtccttct

SEQ ID NO: 771114 - DNA, 25 bp, Homo sapien
aactttgcaatatccaaaaaccagt

SEQ ID NO: 771115 - DNA, 25 bp, Homo sapien
ctttgcaatatccaaaaaccagttt

SEQ ID NO: 771116 - DNA, 25 bp, Homo sapien
ttaactttgcaatatccaaaaacca

SEQ ID NO: 771117 - DNA, 25 bp, Homo sapien
ccagcatatcccccttcttgttttt

SEQ ID NO: 771118 - DNA, 25 bp, Homo sapien
aaggcataggttgtttgtggtttag

SEQ ID NO: 771119 - DNA, 25 bp, Homo sapien
agcatatcccccttcttgtttttgc

SEQ ID NO: 771120 - DNA, 25 bp, Homo sapien
tgtggtttaggaatacctataagtg

SEQ ID NO: 771121 - DNA, 25 bp, Homo sapien
gaagagctgagggagcaacctctga

SEQ ID NO: 771122 - DNA, 25 bp, Homo sapien
caaaggagaatgttatagcttggca

SEQ ID NO: 771123 - DNA, 25 bp, Homo sapien
gagtgagagctactcatcttactca

SEQ ID NO: 771124 - DNA, 25 bp, Homo sapien
tgggaagagccctacactgattttc

SEQ ID NO: 771125 - DNA, 25 bp, Homo sapien
ttctgtgctatgttgtgcaccttca

SEQ ID NO: 771126 - DNA, 25 bp, Homo sapien
tgctatgttgtgcaccttcactctg

SEQ ID NO: 771127 - DNA, 25 bp, Homo sapien
cctgagtaactcagggtgaataccg

SEQ ID NO: 771128 - DNA, 25 bp, Homo sapien
tcagggtgaataccgggaattgaga

SEQ ID NO: 771129 - DNA, 25 bp, Homo sapien
agtgtggccttattgtgttgtttga

SEQ ID NO: 771130 - DNA, 25 bp, Homo sapien
gacagagtaatactgggaggcaaaa

SEQ ID NO: 771131 - DNA, 25 bp, Homo sapien
gaagttggcactgtctccaaccttt

SEQ ID NO: 771132 - DNA, 25 bp, Homo sapien
gttgatctcttaaaggctatgtgaa

SEQ ID NO: 771133 - DNA, 25 bp, Homo sapien
aagagacagagtaatactgggaggc

SEQ ID NO: 771134 - DNA, 25 bp, Homo sapien
cacccaagaatgatcaataaaaaaa

SEQ ID NO: 771135 - DNA, 25 bp, Homo sapien
aacacccaagaatgatcaataaaaa

SEQ ID NO: 771136 - DNA, 25 bp, Homo sapien
agaaacacccaagaatgatcaataa

SEQ ID NO: 771137 - DNA, 25 bp, Homo sapien
gaaacacccaagaatgatcaataaa

SEQ ID NO: 771138 - DNA, 25 bp, Homo sapien
atctgtgaccttacccccaaccctg

SEQ ID NO: 771139 - DNA, 25 bp, Homo sapien
cactcagggttgaatggattaaggg

SEQ ID NO: 771140 - DNA, 25 bp, Homo sapien
tgctctctgaaacatgtgctgtgtc

SEQ ID NO: 771141 - DNA, 25 bp, Homo sapien
attcttctgccttgggatcctgttg

SEQ ID NO: 771142 - DNA, 25 bp, Homo sapien
gtagagactggctatcaccatgttg

SEQ ID NO: 771143 - DNA, 25 bp, Homo sapien
gggattataggtgtgagtcactgtg

SEQ ID NO: 771144 - DNA, 25 bp, Homo sapien
agactggctatcaccatgttggcca

SEQ ID NO: 771145 - DNA, 25 bp, Homo sapien
tttagtagagactggctatcaccat

SEQ ID NO: 771146 - DNA, 25 bp, Homo sapien
gatgttaatccgctgggccagtggc

SEQ ID NO: 771147 - DNA, 25 bp, Homo sapien
catgtataaaagtcaagccctgtct

SEQ ID NO: 771148 - DNA, 25 bp, Homo sapien
cacctcgcaggttttgcgccaaaaa

SEQ ID NO: 771149 - DNA, 25 bp, Homo sapien
taaggtaggctcatgttgcaaatcc

SEQ ID NO: 771150 - DNA, 25 bp, Homo sapien
atgataattatctgcaaggccaggc

SEQ ID NO: 771151 - DNA, 25 bp, Homo sapien
tagaggctcttgtggacagacggac

SEQ ID NO: 771152 - DNA, 25 bp, Homo sapien
gacggactaccacacgactaatggc

SEQ ID NO: 771153 - DNA, 25 bp, Homo sapien
gactaatggccctaactaagtatta

SEQ ID NO: 771154 - DNA, 25 bp, Homo sapien
caggacagcctgaagttggagtgta

SEQ ID NO: 771155 - DNA, 25 bp, Homo sapien
ccgggttccatttctcgaagacaca

SEQ ID NO: 771156 - DNA, 25 bp, Homo sapien
gaaacttcgcatatctgggaatggg

SEQ ID NO: 771157 - DNA, 25 bp, Homo sapien
aaacaaataattactgccacctgga

SEQ ID NO: 771158 - DNA, 25 bp, Homo sapien
gacacgctcagcaggacggccgtcg

SEQ ID NO: 771159 - DNA, 25 bp, Homo sapien
ccgacacgctcagcaggacggccgt

SEQ ID NO: 771160 - DNA, 25 bp, Homo sapien
gcaccgacacgctcagcaggacggc

SEQ ID NO: 771161 - DNA, 25 bp, Homo sapien
accgacacgctcagcaggacggccg

SEQ ID NO: 771162 - DNA, 25 bp, Homo sapien
ctgcctctccacatggtaggcgtag

SEQ ID NO: 771163 - DNA, 25 bp, Homo sapien
gcctctccacatggtaggcgtagat

SEQ ID NO: 771164 - DNA, 25 bp, Homo sapien
tgcctctccacatggtaggcgtaga

SEQ ID NO: 771165 - DNA, 25 bp, Homo sapien
aggcaagggcgacggagcacttcac

SEQ ID NO: 771166 - DNA, 25 bp, Homo sapien
ctggaggcaagggcgacggagcact

SEQ ID NO: 771167 - DNA, 25 bp, Homo sapien
ggaggcaagggcgacggagcacttc

SEQ ID NO: 771168 - DNA, 25 bp, Homo sapien
gaggcaagggcgacggagcacttca

SEQ ID NO: 771169 - DNA, 25 bp, Homo sapien
actgaggcaccatgaagataaggcc

SEQ ID NO: 771170 - DNA, 25 bp, Homo sapien
tcatcataacactaatctggcaaag

SEQ ID NO: 771171 - DNA, 25 bp, Homo sapien
gaggacaggctttatttcaggaaca

SEQ ID NO: 771172 - DNA, 25 bp, Homo sapien
tccaatcaatggtaacagctataac

SEQ ID NO: 771173 - DNA, 25 bp, Homo sapien
tgctctaaacaggtaaaagctataa

SEQ ID NO: 771174 - DNA, 25 bp, Homo sapien
ctgcctttccaaagagtgctctaaa

SEQ ID NO: 771175 - DNA, 25 bp, Homo sapien
ttctggaataccaataccttcacag

SEQ ID NO: 771176 - DNA, 25 bp, Homo sapien
taccttcacagtaatttccctgcct

SEQ ID NO: 771177 - DNA, 25 bp, Homo sapien
aatgatagcatttgtgcaacaccta

SEQ ID NO: 771178 - DNA, 25 bp, Homo sapien
tgcttgtgtgagaactaactttgaa

SEQ ID NO: 771179 - DNA, 25 bp, Homo sapien
tatgtactagggctgtgctgactgc

SEQ ID NO: 771180 - DNA, 25 bp, Homo sapien
gaaggaggcgcaaggtatttacaaa

SEQ ID NO: 771181 - DNA, 25 bp, Homo sapien
ggccaaacctgcagcttgggtagaa

SEQ ID NO: 771182 - DNA, 25 bp, Homo sapien
tcaccaccgcagtaagggagagaca

SEQ ID NO: 771183 - DNA, 25 bp, Homo sapien
tgtccaaggccagatcagcagtcag

SEQ ID NO: 771184 - DNA, 25 bp, Homo sapien
taaaaggtcagtacacagatgcgag

SEQ ID NO: 771185 - DNA, 25 bp, Homo sapien
ggtgggagcctgtcgtcccagttac

SEQ ID NO: 771186 - DNA, 25 bp, Homo sapien
gtggtgggagcctgtcgtcccagtt

SEQ ID NO: 771187 - DNA, 25 bp, Homo sapien
tgggagcctgtcgtcccagttactc

SEQ ID NO: 771188 - DNA, 25 bp, Homo sapien
agacaataattaggggccgggcgtg

SEQ ID NO: 771189 - DNA, 25 bp, Homo sapien
caacaagtcccacaaattcattcat

SEQ ID NO: 771190 - DNA, 25 bp, Homo sapien
atttcaacaagtcccacaaattcat

SEQ ID NO: 771191 - DNA, 25 bp, Homo sapien
ttcaacaagtcccacaaattcattc

SEQ ID NO: 771192 - DNA, 25 bp, Homo sapien
cagtgaaatttcaacaagtcccaca

SEQ ID NO: 771193 - DNA, 25 bp, Homo sapien
tcagaaatgtagagatccgcctgtt

SEQ ID NO: 771194 - DNA, 25 bp, Homo sapien
gttggaagtcgtaccatcaccagtt

SEQ ID NO: 771195 - DNA, 25 bp, Homo sapien
ttaggacgttggaagtcgtaccatc

SEQ ID NO: 771196 - DNA, 25 bp, Homo sapien
gcagctctccaatgattaggacgtt

SEQ ID NO: 771197 - DNA, 25 bp, Homo sapien
gagaagagcaggcaatgctctagca

SEQ ID NO: 771198 - DNA, 25 bp, Homo sapien
ggagaagagcaggcaatgctctagc

SEQ ID NO: 771199 - DNA, 25 bp, Homo sapien
gatgccctggccacatctttaagtg

SEQ ID NO: 771200 - DNA, 25 bp, Homo sapien
tctctgcttactttgacttcttcca

SEQ ID NO: 771201 - DNA, 25 bp, Homo sapien
actttagtacaaagagatgccctgg

SEQ ID NO: 771202 - DNA, 25 bp, Homo sapien
ctttaagtgtttccttgtccatctc

SEQ ID NO: 771203 - DNA, 25 bp, Homo sapien
aatggccaaaatggagcccactaca

SEQ ID NO: 771204 - DNA, 25 bp, Homo sapien
tttaatggccaaaatggagcccact

SEQ ID NO: 771205 - DNA, 25 bp, Homo sapien
tcttttaatggccaaaatggagccc

SEQ ID NO: 771206 - DNA, 25 bp, Homo sapien
gaagagatcaataggttcatctttt

SEQ ID NO: 771207 - DNA, 25 bp, Homo sapien
cagtttcagatttatgtttcttgtc

SEQ ID NO: 771208 - DNA, 25 bp, Homo sapien
ctcgtatcagtttcagatttatgtt

SEQ ID NO: 771209 - DNA, 25 bp, Homo sapien
tcagatttatgtttcttgtcaatga

SEQ ID NO: 771210 - DNA, 25 bp, Homo sapien
tttcagatttatgtttcttgtcaat

SEQ ID NO: 771211 - DNA, 25 bp, Homo sapien
tgttgttcacctttcggaataattc

SEQ ID NO: 771212 - DNA, 25 bp, Homo sapien
ctacccataaatacaacataacatt

SEQ ID NO: 771213 - DNA, 25 bp, Homo sapien
gactgatgttgttcacctttcggaa

SEQ ID NO: 771214 - DNA, 25 bp, Homo sapien
ttcaataaacgccaaatgactgatg

SEQ ID NO: 771215 - DNA, 25 bp, Homo sapien
ccgaactgagaaggcactgataatt

SEQ ID NO: 771216 - DNA, 25 bp, Homo sapien
cagtcagcgttgtttcttgaattac

SEQ ID NO: 771217 - DNA, 25 bp, Homo sapien
gttaaacaccgaactgagaaggcac

SEQ ID NO: 771218 - DNA, 25 bp, Homo sapien
cttgaagatcctatgctgtacagaa

SEQ ID NO: 771219 - DNA, 25 bp, Homo sapien
ttcttcctatcaagatgctatgctc

SEQ ID NO: 771220 - DNA, 25 bp, Homo sapien
tcttcctatcaagatgctatgctcc

SEQ ID NO: 771221 - DNA, 25 bp, Homo sapien
tatttgttttaactctatcttcaat

SEQ ID NO: 771222 - DNA, 25 bp, Homo sapien
cagcttttatgagtttttctctttc

SEQ ID NO: 771223 - DNA, 25 bp, Homo sapien
atttgttttaactctatcttcaatg

SEQ ID NO: 771224 - DNA, 25 bp, Homo sapien
tttctgcactcttgtaaaaaaagcc

SEQ ID NO: 771225 - DNA, 25 bp, Homo sapien
gattaataacaaatcctttatctga

SEQ ID NO: 771226 - DNA, 25 bp, Homo sapien
taataacaaatcctttatctgaatc

SEQ ID NO: 771227 - DNA, 25 bp, Homo sapien
tttgattaataacaaatcctttatc

SEQ ID NO: 771228 - DNA, 25 bp, Homo sapien
ataacaaatcctttatctgaatcac

SEQ ID NO: 771229 - DNA, 25 bp, Homo sapien
ttgaaagagcatctaaggaaaaggg

SEQ ID NO: 771230 - DNA, 25 bp, Homo sapien
aagagcatctaaggaaaaggggtca

SEQ ID NO: 771231 - DNA, 25 bp, Homo sapien
ctttgaaagagcatctaaggaaaag

SEQ ID NO: 771232 - DNA, 25 bp, Homo sapien
gagcatctaaggaaaaggggtcaat

SEQ ID NO: 771233 - DNA, 25 bp, Homo sapien
gctctgtgaagagcgactatgcctt

SEQ ID NO: 771234 - DNA, 25 bp, Homo sapien
tagctctgtgaagagcgactatgcc

SEQ ID NO: 771235 - DNA, 25 bp, Homo sapien
agctctgtgaagagcgactatgcct

SEQ ID NO: 771236 - DNA, 25 bp, Homo sapien
aattacttggataaatctgctactc

SEQ ID NO: 771237 - DNA, 25 bp, Homo sapien
tgggtgcaaaataacgcgaatatag

SEQ ID NO: 771238 - DNA, 25 bp, Homo sapien
gctctttgggagaaagtatactgaa

SEQ ID NO: 771239 - DNA, 25 bp, Homo sapien
cgaaaacgaaacattcaacgggcat

SEQ ID NO: 771240 - DNA, 25 bp, Homo sapien
aatgaataagcaatgttaccagtga

SEQ ID NO: 771241 - DNA, 25 bp, Homo sapien
tcaggacttaggtcctcaaaagaat

SEQ ID NO: 771242 - DNA, 25 bp, Homo sapien
acttaggtcctcaaaagaattcagg

SEQ ID NO: 771243 - DNA, 25 bp, Homo sapien
cctgcatgtcccaagcagtcaggac

SEQ ID NO: 771244 - DNA, 25 bp, Homo sapien
cccaagcagtcaggacttaggtcct

SEQ ID NO: 771245 - DNA, 25 bp, Homo sapien
catgagctaaaaagttctattaccc

SEQ ID NO: 771246 - DNA, 25 bp, Homo sapien
cagcccgggcaggagtgagaaccca

SEQ ID NO: 771247 - DNA, 25 bp, Homo sapien
agctaaaaagttctattaccctcag

SEQ ID NO: 771248 - DNA, 25 bp, Homo sapien
aaataattcatgagctaaaaagttc

SEQ ID NO: 771249 - DNA, 25 bp, Homo sapien
ttcaaaaacacgatgtgtgcaaaga

SEQ ID NO: 771250 - DNA, 25 bp, Homo sapien
ttggtcctttgatcaataatgtgat

SEQ ID NO: 771251 - DNA, 25 bp, Homo sapien
ctaagtgtgggcttatttggtcctt

SEQ ID NO: 771252 - DNA, 25 bp, Homo sapien
tgtgatagaacgagggttgttacac

SEQ ID NO: 771253 - DNA, 25 bp, Homo sapien
tcaataatgtgatagaacgagggtt

SEQ ID NO: 771254 - DNA, 25 bp, Homo sapien
atcaacagcatttttgacagccctc

SEQ ID NO: 771255 - DNA, 25 bp, Homo sapien
catcatcaacagcatttttgacagc

SEQ ID NO: 771256 - DNA, 25 bp, Homo sapien
gcatttttgacagccctcaagccat

SEQ ID NO: 771257 - DNA, 25 bp, Homo sapien
acagcatttttgacagccctcaagc

SEQ ID NO: 771258 - DNA, 25 bp, Homo sapien
aaagaacacagtattcagccatgct

SEQ ID NO: 771259 - DNA, 25 bp, Homo sapien
aaaagaacacagtattcagccatgc

SEQ ID NO: 771260 - DNA, 25 bp, Homo sapien
gcgactaacatatcaaataggagaa

SEQ ID NO: 771261 - DNA, 25 bp, Homo sapien
gcatgtgaaagccacaatacaagcg

SEQ ID NO: 771262 - DNA, 25 bp, Homo sapien
ttacaaattcactatgaccacatca

SEQ ID NO: 771263 - DNA, 25 bp, Homo sapien
atttcttacaaattcactatgacca

SEQ ID NO: 771264 - DNA, 25 bp, Homo sapien
gaaaaatgctaagaaaactgtagaa

SEQ ID NO: 771265 - DNA, 25 bp, Homo sapien
agaaaaatgctaagaaaactgtaga

SEQ ID NO: 771266 - DNA, 25 bp, Homo sapien
aagaaaaatgctaagaaaactgtag

SEQ ID NO: 771267 - DNA, 25 bp, Homo sapien
gccacttccacagcaccagcacccg

SEQ ID NO: 771268 - DNA, 25 bp, Homo sapien
cacagcaccagcacccggaaccaca

SEQ ID NO: 771269 - DNA, 25 bp, Homo sapien
gcaccagcacccggaaccacacagc

SEQ ID NO: 771270 - DNA, 25 bp, Homo sapien
ttccacagcaccagcacccggaacc

SEQ ID NO: 771271 - DNA, 25 bp, Homo sapien
gggaataacgagcaacgcatcagca

SEQ ID NO: 771272 - DNA, 25 bp, Homo sapien
cactgagcttatatttattcagggc

SEQ ID NO: 771273 - DNA, 25 bp, Homo sapien
cttgggaataacgagcaacgcatca

SEQ ID NO: 771274 - DNA, 25 bp, Homo sapien
ccttgccctttacactgagcttata

SEQ ID NO: 771275 - DNA, 25 bp, Homo sapien
taactaatgtttcctgaaggtcaaa

SEQ ID NO: 771276 - DNA, 25 bp, Homo sapien
ttaactaatgtttcctgaaggtcaa

SEQ ID NO: 771277 - DNA, 25 bp, Homo sapien
tttaactaatgtttcctgaaggtca

SEQ ID NO: 771278 - DNA, 25 bp, Homo sapien
cgagctgacctgattctgaatgttc

SEQ ID NO: 771279 - DNA, 25 bp, Homo sapien
gttcaggtccacacccacgagctga

SEQ ID NO: 771280 - DNA, 25 bp, Homo sapien
cacgagctgacctgattctgaatgt

SEQ ID NO: 771281 - DNA, 25 bp, Homo sapien
ctgtgttcaggtccacacccacgag

SEQ ID NO: 771282 - DNA, 25 bp, Homo sapien
tactaaagtacagcactgcaactct

SEQ ID NO: 771283 - DNA, 25 bp, Homo sapien
tgtggctttgcttatcaccgatgac

SEQ ID NO: 771284 - DNA, 25 bp, Homo sapien
gcaactctaatctggctaaaatgga

SEQ ID NO: 771285 - DNA, 25 bp, Homo sapien
gcatggatgtacctgttatctgtct

SEQ ID NO: 771286 - DNA, 25 bp, Homo sapien
tacacaatcgttatcccataatgcc

SEQ ID NO: 771287 - DNA, 25 bp, Homo sapien
atcgttatcccataatgcctgcttc

SEQ ID NO: 771288 - DNA, 25 bp, Homo sapien
tttacacaatcgttatcccataatg

SEQ ID NO: 771289 - DNA, 25 bp, Homo sapien
caatcgttatcccataatgcctgct

SEQ ID NO: 771290 - DNA, 25 bp, Homo sapien
gcgagttcggtttccatacttttca

SEQ ID NO: 771291 - DNA, 25 bp, Homo sapien
taagctgcacacgttaacatccaat

SEQ ID NO: 771292 - DNA, 25 bp, Homo sapien
tgaaaagagtatgatgattctctaa

SEQ ID NO: 771293 - DNA, 25 bp, Homo sapien
cttttcagctgattacattattcat

SEQ ID NO: 771294 - DNA, 25 bp, Homo sapien
gctcgcatgatctcatcaaccaaga

SEQ ID NO: 771295 - DNA, 25 bp, Homo sapien
caagagaatgttggtggcaatcagt

SEQ ID NO: 771296 - DNA, 25 bp, Homo sapien
cattccagctcgcatgatctcatca

SEQ ID NO: 771297 - DNA, 25 bp, Homo sapien
cagagaagacattccagctcgcatg

SEQ ID NO: 771298 - DNA, 25 bp, Homo sapien
tgaggaaactatgacgctagaggct

SEQ ID NO: 771299 - DNA, 25 bp, Homo sapien
caaaagcgtgaaaagtccaactgat

SEQ ID NO: 771300 - DNA, 25 bp, Homo sapien
ttcacctgataaccgtagcccttag

SEQ ID NO: 771301 - DNA, 25 bp, Homo sapien
aatttacactaacgggatgcttcca

SEQ ID NO: 771302 - DNA, 25 bp, Homo sapien
acacatgcgcatgctgctccaccac

SEQ ID NO: 771303 - DNA, 25 bp, Homo sapien
cgaggtgtaggactggccataccac

SEQ ID NO: 771304 - DNA, 25 bp, Homo sapien
gtggcagtcgcctcctccacacatg

SEQ ID NO: 771305 - DNA, 25 bp, Homo sapien
ttcagcgggggaaactgacggacac

SEQ ID NO: 771306 - DNA, 25 bp, Homo sapien
agcagggacagcagcggtgatgaac

SEQ ID NO: 771307 - DNA, 25 bp, Homo sapien
cgagagcgacctccccagccggcgg

SEQ ID NO: 771308 - DNA, 25 bp, Homo sapien
gagagcgacctccccagccggcggc

SEQ ID NO: 771309 - DNA, 25 bp, Homo sapien
gagcgacctccccagccggcggctg

SEQ ID NO: 771310 - DNA, 25 bp, Homo sapien
agagcgacctccccagccggcggct

SEQ ID NO: 771311 - DNA, 25 bp, Homo sapien
tatgtcgatagcatagggtttcact

SEQ ID NO: 771312 - DNA, 25 bp, Homo sapien
tgaaatctttgttggtgacaggaaa

SEQ ID NO: 771313 - DNA, 25 bp, Homo sapien
ggtttcactgttgcctcccacacag

SEQ ID NO: 771314 - DNA, 25 bp, Homo sapien
cagtgggaccatgctagtagcctgt

SEQ ID NO: 771315 - DNA, 25 bp, Homo sapien
cattcctcctggaagaacacctgat

SEQ ID NO: 771316 - DNA, 25 bp, Homo sapien
ttcattcctcctggaagaacacctg

SEQ ID NO: 771317 - DNA, 25 bp, Homo sapien
cctcctggaagaacacctgatgtac

SEQ ID NO: 771318 - DNA, 25 bp, Homo sapien
ttcctcctggaagaacacctgatgt

SEQ ID NO: 771319 - DNA, 25 bp, Homo sapien
agctcctcaatggccggcgcaagtg

SEQ ID NO: 771320 - DNA, 25 bp, Homo sapien
cctcaatggccggcgcaagtgccag

SEQ ID NO: 771321 - DNA, 25 bp, Homo sapien
ggcgcaagtgccagccagcgccagc

SEQ ID NO: 771322 - DNA, 25 bp, Homo sapien
tcctcaatggccggcgcaagtgcca

SEQ ID NO: 771323 - DNA, 25 bp, Homo sapien
tgacttcccggcctgaggggtccgc

SEQ ID NO: 771324 - DNA, 25 bp, Homo sapien
gggtccgcgcagcaaaggcctgacg

SEQ ID NO: 771325 - DNA, 25 bp, Homo sapien
gctggagcaggcgctgcgcacctac

SEQ ID NO: 771326 - DNA, 25 bp, Homo sapien
gcaaaggcctgacgctgctggagca

SEQ ID NO: 771327 - DNA, 25 bp, Homo sapien
agggtgaccacaggcggccgggcgg

SEQ ID NO: 771328 - DNA, 25 bp, Homo sapien
gggatgtcctgtccgccgtcttcag

SEQ ID NO: 771329 - DNA, 25 bp, Homo sapien
gagtttacgaccacctggactacta

SEQ ID NO: 771330 - DNA, 25 bp, Homo sapien
cccataagctatgaggaggagttta

SEQ ID NO: 771331 - DNA, 25 bp, Homo sapien
agaaaatggtcattaatgaaggaac

SEQ ID NO: 771332 - DNA, 25 bp, Homo sapien
aaaatggtcattaatgaaggaacaa

SEQ ID NO: 771333 - DNA, 25 bp, Homo sapien
aatggtcattaatgaaggaacaatc

SEQ ID NO: 771334 - DNA, 25 bp, Homo sapien
aggtggagaatcatcatcatgttga

SEQ ID NO: 771335 - DNA, 25 bp, Homo sapien
cctgccagctgtggtagttcgttgg

SEQ ID NO: 771336 - DNA, 25 bp, Homo sapien
tgccagctgtggtagttcgttggtc

SEQ ID NO: 771337 - DNA, 25 bp, Homo sapien
tgtggtagttcgttggtctttggtc

SEQ ID NO: 771338 - DNA, 25 bp, Homo sapien
tgcctgccagctgtggtagttcgtt

SEQ ID NO: 771339 - DNA, 25 bp, Homo sapien
ggctccggaacaggctgtgtgtcac

SEQ ID NO: 771340 - DNA, 25 bp, Homo sapien
tcattggcaggctccggaacaggct

SEQ ID NO: 771341 - DNA, 25 bp, Homo sapien
ccatcattggcaggctccggaacag

SEQ ID NO: 771342 - DNA, 25 bp, Homo sapien
ctgcccatcattggcaggctccgga

SEQ ID NO: 771343 - DNA, 25 bp, Homo sapien
tccattgcccatcattggcaggttc

SEQ ID NO: 771344 - DNA, 25 bp, Homo sapien
tgcccatcattggcaggttccggaa

SEQ ID NO: 771345 - DNA, 25 bp, Homo sapien
tttccattgcccatcattggcaggt

SEQ ID NO: 771346 - DNA, 25 bp, Homo sapien
cattgcccatcattggcaggttccg

SEQ ID NO: 771347 - DNA, 25 bp, Homo sapien
caatttaaacataccgtattttctg

SEQ ID NO: 771348 - DNA, 25 bp, Homo sapien
gtgtaaggatggcaagattcaccag

SEQ ID NO: 771349 - DNA, 25 bp, Homo sapien
taaggatggcaagattcaccagcag

SEQ ID NO: 771350 - DNA, 25 bp, Homo sapien
aacataccgtattttctgtcagaca

SEQ ID NO: 771351 - DNA, 25 bp, Homo sapien
tccagccagaacaacaaaagcgaaa

SEQ ID NO: 771352 - DNA, 25 bp, Homo sapien
gcggcaggatcgcttaaacctgaga

SEQ ID NO: 771353 - DNA, 25 bp, Homo sapien
tgaggcggcaggatcgcttaaacct

SEQ ID NO: 771354 - DNA, 25 bp, Homo sapien
gctgaggcggcaggatcgcttaaac

SEQ ID NO: 771355 - DNA, 25 bp, Homo sapien
aggcggcaggatcgcttaaacctga

SEQ ID NO: 771356 - DNA, 25 bp, Homo sapien
ctgcagctggtttatcaagttgtaa

SEQ ID NO: 771357 - DNA, 25 bp, Homo sapien
taaatcttcacttgttgaattcaca

SEQ ID NO: 771358 - DNA, 25 bp, Homo sapien
aaatcttcacttgttgaattcacaa

SEQ ID NO: 771359 - DNA, 25 bp, Homo sapien
ctcctgcagctggtttatcaagttg

SEQ ID NO: 771360 - DNA, 25 bp, Homo sapien
gcagaaaagctgatccaccatcttt

SEQ ID NO: 771361 - DNA, 25 bp, Homo sapien
catctttcttcatttagtgattctg

SEQ ID NO: 771362 - DNA, 25 bp, Homo sapien
tttgcagaaaagctgatccaccatc

SEQ ID NO: 771363 - DNA, 25 bp, Homo sapien
catttagtgattctggcataccatt

SEQ ID NO: 771364 - DNA, 25 bp, Homo sapien
cttcagtgctccccaaggcctcagc

SEQ ID NO: 771365 - DNA, 25 bp, Homo sapien
ttcagtgctccccaaggcctcagcg

SEQ ID NO: 771366 - DNA, 25 bp, Homo sapien
acagatcattcgcatggccttcaaa

SEQ ID NO: 771367 - DNA, 25 bp, Homo sapien
gatcattcgcatggccttcaaattt

SEQ ID NO: 771368 - DNA, 25 bp, Homo sapien
tcgcatggccttcaaatttttggta

SEQ ID NO: 771369 - DNA, 25 bp, Homo sapien
catacagatcattcgcatggccttc

SEQ ID NO: 771370 - DNA, 25 bp, Homo sapien
gagtaactacagttgtattgtgagt

SEQ ID NO: 771371 - DNA, 25 bp, Homo sapien
gctgagtaactacagttgtattgtg

SEQ ID NO: 771372 - DNA, 25 bp, Homo sapien
ctacagttgtattgtgagtaagaag

SEQ ID NO: 771373 - DNA, 25 bp, Homo sapien
cttggctgagtaactacagttgtat

SEQ ID NO: 771374 - DNA, 25 bp, Homo sapien
tctcgcgtgtgacatctacctttca

SEQ ID NO: 771375 - DNA, 25 bp, Homo sapien
accttctcgcgtgtgacatctacct

SEQ ID NO: 771376 - DNA, 25 bp, Homo sapien
tcgaggctccatcacgtgcctggct

SEQ ID NO: 771377 - DNA, 25 bp, Homo sapien
tccaccaccttctcgcgtgtgacat

SEQ ID NO: 771378 - DNA, 25 bp, Homo sapien
tcacttgctgctcagcctcctcttc

SEQ ID NO: 771379 - DNA, 25 bp, Homo sapien
ctgctcagcctcctcttctgcccac

SEQ ID NO: 771380 - DNA, 25 bp, Homo sapien
cttgctgctcagcctcctcttctgc

SEQ ID NO: 771381 - DNA, 25 bp, Homo sapien
tgctgctcagcctcctcttctgccc

SEQ ID NO: 771382 - DNA, 25 bp, Homo sapien
gacgaaagtcgacttggagacaatg

SEQ ID NO: 771383 - DNA, 25 bp, Homo sapien
gacacatgttcagggcttgtgtgga

SEQ ID NO: 771384 - DNA, 25 bp, Homo sapien
agacaatggagtttgactggagtta

SEQ ID NO: 771385 - DNA, 25 bp, Homo sapien
ttgtgggtgaggacgaaagtcgact

SEQ ID NO: 771386 - DNA, 25 bp, Homo sapien
tgctcttatatggtggccttgagtc

SEQ ID NO: 771387 - DNA, 25 bp, Homo sapien
tgcccgtggtttggtaatgccttct

SEQ ID NO: 771388 - DNA, 25 bp, Homo sapien
ctctggcttttcaaacctagtaaga

SEQ ID NO: 771389 - DNA, 25 bp, Homo sapien
catcctaagctctggtgcatacagg

SEQ ID NO: 771390 - DNA, 25 bp, Homo sapien
acattcaatgtgaatgccatggcaa

SEQ ID NO: 771391 - DNA, 25 bp, Homo sapien
ggtaagaattcactccatacgtgct

SEQ ID NO: 771392 - DNA, 25 bp, Homo sapien
tgagtcatgcagattgtatccaacg

SEQ ID NO: 771393 - DNA, 25 bp, Homo sapien
catacgtgcttgaggtaaataggag

SEQ ID NO: 771394 - DNA, 25 bp, Homo sapien
ggtttgtctctggagagtgactgtc

SEQ ID NO: 771395 - DNA, 25 bp, Homo sapien
tccagttagggcttgaggtttgtct

SEQ ID NO: 771396 - DNA, 25 bp, Homo sapien
agtgactgtcaattggagccctgcc

SEQ ID NO: 771397 - DNA, 25 bp, Homo sapien
tgtctttactggatcattgaaatag

SEQ ID NO: 771398 - DNA, 25 bp, Homo sapien
gattgggagaccgctgacagctgca

SEQ ID NO: 771399 - DNA, 25 bp, Homo sapien
attgggagaccgctgacagctgcag

SEQ ID NO: 771400 - DNA, 25 bp, Homo sapien
ttgggagaccgctgacagctgcaga

SEQ ID NO: 771401 - DNA, 25 bp, Homo sapien
actcataaatggacacccaattttt

SEQ ID NO: 771402 - DNA, 25 bp, Homo sapien
atggacacccaatttttagctataa

SEQ ID NO: 771403 - DNA, 25 bp, Homo sapien
aagtacttatacatggtataatgtg

SEQ ID NO: 771404 - DNA, 25 bp, Homo sapien
catggtataatgtgggtgaaatttg

SEQ ID NO: 771405 - DNA, 25 bp, Homo sapien
cacctcctttttgatgttactggga

SEQ ID NO: 771406 - DNA, 25 bp, Homo sapien
tctacatgtcaaatactcagcaata

SEQ ID NO: 771407 - DNA, 25 bp, Homo sapien
taaagttacaaagccaacaatacat

SEQ ID NO: 771408 - DNA, 25 bp, Homo sapien
gtaattatcactttaccatctagag

SEQ ID NO: 771409 - DNA, 25 bp, Homo sapien
cagaaagccgcagcgggagaaagcc

SEQ ID NO: 771410 - DNA, 25 bp, Homo sapien
gaaaatgcaaaaagccgcagcgggc

SEQ ID NO: 771411 - DNA, 25 bp, Homo sapien
gccaaaagccgcgacgggcagaaag

SEQ ID NO: 771412 - DNA, 25 bp, Homo sapien
aaagctgcaaaagccgcggtgtggg

SEQ ID NO: 771413 - DNA, 25 bp, Homo sapien
gaaagacaggcatagaggtagcaac

SEQ ID NO: 771414 - DNA, 25 bp, Homo sapien
ttgtgaaagacaggcatagaggtag

SEQ ID NO: 771415 - DNA, 25 bp, Homo sapien
ctttgtgaaagacaggcatagaggt

SEQ ID NO: 771416 - DNA, 25 bp, Homo sapien
gtgaaagacaggcatagaggtagca

SEQ ID NO: 771417 - DNA, 25 bp, Homo sapien
aaaatatcggacacgatgacctcca

SEQ ID NO: 771418 - DNA, 25 bp, Homo sapien
cgctcagcaaaatatcggacacgat

SEQ ID NO: 771419 - DNA, 25 bp, Homo sapien
tcattttacatcagccagagaggtg

SEQ ID NO: 771420 - DNA, 25 bp, Homo sapien
cagccagagaggtgacgctcagcaa

SEQ ID NO: 771421 - DNA, 25 bp, Homo sapien
acaaatgacactcctcagggtgctg

SEQ ID NO: 771422 - DNA, 25 bp, Homo sapien
tgtgccctcagcctgccagtacttt

SEQ ID NO: 771423 - DNA, 25 bp, Homo sapien
cactggcagccagcccgttctgtgc

SEQ ID NO: 771424 - DNA, 25 bp, Homo sapien
cataaaagtggctccgacaaatgac

SEQ ID NO: 771425 - DNA, 25 bp, Homo sapien
tgcatccaaagcagactcagctttc

SEQ ID NO: 771426 - DNA, 25 bp, Homo sapien
tctgcatccaaagcagactcagctt

SEQ ID NO: 771427 - DNA, 25 bp, Homo sapien
ctctgcatccaaagcagactcagct

SEQ ID NO: 771428 - DNA, 25 bp, Homo sapien
atccaaagcagactcagctttcagc

SEQ ID NO: 771429 - DNA, 25 bp, Homo sapien
gactgcatcacctaccttgaagtat

SEQ ID NO: 771430 - DNA, 25 bp, Homo sapien
ggattatccagtgccttctatgtga

SEQ ID NO: 771431 - DNA, 25 bp, Homo sapien
tatgcacatattgcgtcatagccca

SEQ ID NO: 771432 - DNA, 25 bp, Homo sapien
ttctatgtgacaggcgcagtggcca

SEQ ID NO: 771433 - DNA, 25 bp, Homo sapien
tatgtgccactttgagcaactttgc

SEQ ID NO: 771434 - DNA, 25 bp, Homo sapien
ggagaacaatttgcacagtctgagc

SEQ ID NO: 771435 - DNA, 25 bp, Homo sapien
catttggagtaagagaacagccgca

SEQ ID NO: 771436 - DNA, 25 bp, Homo sapien
cagagcacacggaagacatggaata

SEQ ID NO: 771437 - DNA, 25 bp, Homo sapien
gccacagcggccgaggcagggagcc

SEQ ID NO: 771438 - DNA, 25 bp, Homo sapien
tatgcaggccacagcggccgaggca

SEQ ID NO: 771439 - DNA, 25 bp, Homo sapien
caggccacagcggccgaggcaggga

SEQ ID NO: 771440 - DNA, 25 bp, Homo sapien
atgcaggccacagcggccgaggcag

SEQ ID NO: 771441 - DNA, 25 bp, Homo sapien
tcttctctcccatcgcctccgcgcg

SEQ ID NO: 771442 - DNA, 25 bp, Homo sapien
tcccatcgcctccgcgcgcagtgcc

SEQ ID NO: 771443 - DNA, 25 bp, Homo sapien
catcgcctccgcgcgcagtgccgct

SEQ ID NO: 771444 - DNA, 25 bp, Homo sapien
tctcccatcgcctccgcgcgcagtg

SEQ ID NO: 771445 - DNA, 25 bp, Homo sapien
ggagctgtctgcactgctgcagccc

SEQ ID NO: 771446 - DNA, 25 bp, Homo sapien
gggcccctgcgccaccctcagcggc

SEQ ID NO: 771447 - DNA, 25 bp, Homo sapien
cctgcgccaccctcagcggccgctg

SEQ ID NO: 771448 - DNA, 25 bp, Homo sapien
gcccctgcgccaccctcagcggccg

SEQ ID NO: 771449 - DNA, 25 bp, Homo sapien
ccaatggatagtgggacagaatgca

SEQ ID NO: 771450 - DNA, 25 bp, Homo sapien
ggacacctgtgcactaaatcaaaag

SEQ ID NO: 771451 - DNA, 25 bp, Homo sapien
ggctcaggagcattcttcttccaat

SEQ ID NO: 771452 - DNA, 25 bp, Homo sapien
tggtcatgtgcacgaacttttaaga

SEQ ID NO: 771453 - DNA, 25 bp, Homo sapien
cttggtctgaaatcaatggcctctg

SEQ ID NO: 771454 - DNA, 25 bp, Homo sapien
tagtcatcagagagtaatttacagg

SEQ ID NO: 771455 - DNA, 25 bp, Homo sapien
agtcatcagagagtaatttacaggc

SEQ ID NO: 771456 - DNA, 25 bp, Homo sapien
ctgcgcacttgttcatagtcatcag

SEQ ID NO: 771457 - DNA, 25 bp, Homo sapien
tgcagcactgcgcacttgttcatag

SEQ ID NO: 771458 - DNA, 25 bp, Homo sapien
ccaaacgcatcatcaactaagcgta

SEQ ID NO: 771459 - DNA, 25 bp, Homo sapien
catcatcaactaagcgtatttcttc

SEQ ID NO: 771460 - DNA, 25 bp, Homo sapien
cgcatcatcaactaagcgtatttct

SEQ ID NO: 771461 - DNA, 25 bp, Homo sapien
tcaactaagcgtatttcttcattag

SEQ ID NO: 771462 - DNA, 25 bp, Homo sapien
cagtagccccatctccctacgtagc

SEQ ID NO: 771463 - DNA, 25 bp, Homo sapien
cacaaaagcatttgagcctagccca

SEQ ID NO: 771464 - DNA, 25 bp, Homo sapien
ttgagcctagcccaaagcaacagcc

SEQ ID NO: 771465 - DNA, 25 bp, Homo sapien
atctccctacgtagccacagagctg

SEQ ID NO: 771466 - DNA, 25 bp, Homo sapien
ttgtcaagggtctgctccaagaaat

SEQ ID NO: 771467 - DNA, 25 bp, Homo sapien
tcttgtcaagggtctgctccaagaa

SEQ ID NO: 771468 - DNA, 25 bp, Homo sapien
cttgtcaagggtctgctccaagaaa

SEQ ID NO: 771469 - DNA, 25 bp, Homo sapien
aattaccaattgtaggaggttcatg

SEQ ID NO: 771470 - DNA, 25 bp, Homo sapien
acaattaccaattgtaggaggttca

SEQ ID NO: 771471 - DNA, 25 bp, Homo sapien
ttaccaattgtaggaggttcatgaa

SEQ ID NO: 771472 - DNA, 25 bp, Homo sapien
taccaattgtaggaggttcatgaag

SEQ ID NO: 771473 - DNA, 25 bp, Homo sapien
tccacaagctcctgactcaatcaag

SEQ ID NO: 771474 - DNA, 25 bp, Homo sapien
cacgctcatgtgcagtacgtttcct

SEQ ID NO: 771475 - DNA, 25 bp, Homo sapien
tcaatcaagttcacagccccggtat

SEQ ID NO: 771476 - DNA, 25 bp, Homo sapien
tgtaaagttccttggcacgctcatg

SEQ ID NO: 771477 - DNA, 25 bp, Homo sapien
catcgttgaacatgtcaactaggaa

SEQ ID NO: 771478 - DNA, 25 bp, Homo sapien
gaaatcaaggcacttctcagcaaaa

SEQ ID NO: 771479 - DNA, 25 bp, Homo sapien
gccaggacagtgtcaagctgatctt

SEQ ID NO: 771480 - DNA, 25 bp, Homo sapien
tcttctcggagggtgatgttgttag

SEQ ID NO: 771481 - DNA, 25 bp, Homo sapien
ccctttcatcctaccaccggtgtca

SEQ ID NO: 771482 - DNA, 25 bp, Homo sapien
cctctgtctggtaccctttcatcct

SEQ ID NO: 771483 - DNA, 25 bp, Homo sapien
tttcatcctaccaccggtgtcactt

SEQ ID NO: 771484 - DNA, 25 bp, Homo sapien
tgtctggtaccctttcatcctacca

SEQ ID NO: 771485 - DNA, 25 bp, Homo sapien
tagtacagcataagagttcatgaag

SEQ ID NO: 771486 - DNA, 25 bp, Homo sapien
tccaccaatgcaagatgaatccctt

SEQ ID NO: 771487 - DNA, 25 bp, Homo sapien
atcccttctttggttgaaacattag

SEQ ID NO: 771488 - DNA, 25 bp, Homo sapien
catgaagagcctctcgaatatctct

SEQ ID NO: 771489 - DNA, 25 bp, Homo sapien
ttccatatggagtccctatcagtag

SEQ ID NO: 771490 - DNA, 25 bp, Homo sapien
catatggagtccctatcagtagggt

SEQ ID NO: 771491 - DNA, 25 bp, Homo sapien
tccatatggagtccctatcagtagg

SEQ ID NO: 771492 - DNA, 25 bp, Homo sapien
tatggagtccctatcagtagggtac

SEQ ID NO: 771493 - DNA, 25 bp, Homo sapien
ggatgccgacttcccagaaacttca

SEQ ID NO: 771494 - DNA, 25 bp, Homo sapien
gctctggcaccaagggaagcaccag

SEQ ID NO: 771495 - DNA, 25 bp, Homo sapien
accagggttggatgccgacttccca

SEQ ID NO: 771496 - DNA, 25 bp, Homo sapien
aagcaccagggttggatgccgactt

SEQ ID NO: 771497 - DNA, 25 bp, Homo sapien
actgtctcggaggtaggcatagtgc

SEQ ID NO: 771498 - DNA, 25 bp, Homo sapien
cattgttggacaggttttagcagca

SEQ ID NO: 771499 - DNA, 25 bp, Homo sapien
gaaagactgtctcggaggtaggcat

SEQ ID NO: 771500 - DNA, 25 bp, Homo sapien
aaaataagtaccaaaactgcaatat

SEQ ID NO: 771501 - DNA, 25 bp, Homo sapien
ctgagggtccaagtgctgaagacta

SEQ ID NO: 771502 - DNA, 25 bp, Homo sapien
tgggagaaacagctgatgacaccag

SEQ ID NO: 771503 - DNA, 25 bp, Homo sapien
cctgagggtccaagtgctgaagact

SEQ ID NO: 771504 - DNA, 25 bp, Homo sapien
gactttgtgaatcatccctgtttgg

SEQ ID NO: 771505 - DNA, 25 bp, Homo sapien
catgagagttgctatgggcctctgt

SEQ ID NO: 771506 - DNA, 25 bp, Homo sapien
aaggcctgtgctcggtagggacttt

SEQ ID NO: 771507 - DNA, 25 bp, Homo sapien
taggattttcttgttgaactgtgaa

SEQ ID NO: 771508 - DNA, 25 bp, Homo sapien
acattccacgacttttcctgcaagg

SEQ ID NO: 771509 - DNA, 25 bp, Homo sapien
ctacattccacgacttttcctgcaa

SEQ ID NO: 771510 - DNA, 25 bp, Homo sapien
cattccacgacttttcctgcaaggc

SEQ ID NO: 771511 - DNA, 25 bp, Homo sapien
tacattccacgacttttcctgcaag

SEQ ID NO: 771512 - DNA, 25 bp, Homo sapien
ctgctgaggccaaatcactctgctt

SEQ ID NO: 771513 - DNA, 25 bp, Homo sapien
tgctgctgaggccaaatcactctgc

SEQ ID NO: 771514 - DNA, 25 bp, Homo sapien
gctgctgaggccaaatcactctgct

SEQ ID NO: 771515 - DNA, 25 bp, Homo sapien
agttgcaaagctttggcctgcagcc

SEQ ID NO: 771516 - DNA, 25 bp, Homo sapien
aagttgcaaagctttggcctgcagc

SEQ ID NO: 771517 - DNA, 25 bp, Homo sapien
taagttgcaaagctttggcctgcag

SEQ ID NO: 771518 - DNA, 25 bp, Homo sapien
tataagttgcaaagctttggcctgc

SEQ ID NO: 771519 - DNA, 25 bp, Homo sapien
tgaagtgtttagaattacggtgcat

SEQ ID NO: 771520 - DNA, 25 bp, Homo sapien
tttagaattacggtgcataactttc

SEQ ID NO: 771521 - DNA, 25 bp, Homo sapien
gtgtttagaattacggtgcataact

SEQ ID NO: 771522 - DNA, 25 bp, Homo sapien
gaattacggtgcataactttcaaac

SEQ ID NO: 771523 - DNA, 25 bp, Homo sapien
cacacatcccaaataaggggtaaag

SEQ ID NO: 771524 - DNA, 25 bp, Homo sapien
tgtaaaaatttttcacacatcccaa

SEQ ID NO: 771525 - DNA, 25 bp, Homo sapien
ctctgaaaaaagtctacttcctgta

SEQ ID NO: 771526 - DNA, 25 bp, Homo sapien
tctgaaaaaagtctacttcctgtaa

SEQ ID NO: 771527 - DNA, 25 bp, Homo sapien
gtggggcaaatcagcgatgaaatac

SEQ ID NO: 771528 - DNA, 25 bp, Homo sapien
caaagctgtcctgcaagtggggcaa

SEQ ID NO: 771529 - DNA, 25 bp, Homo sapien
cactctgtcgcagcatggtctgtag

SEQ ID NO: 771530 - DNA, 25 bp, Homo sapien
gtctgtagaattttgaccacttctg

SEQ ID NO: 771531 - DNA, 25 bp, Homo sapien
gggttgtctgactcgcctgctggct

SEQ ID NO: 771532 - DNA, 25 bp, Homo sapien
gcaaagggttgtctgactcgcctgc

SEQ ID NO: 771533 - DNA, 25 bp, Homo sapien
cgcctgctggctcaatgatggtggc

SEQ ID NO: 771534 - DNA, 25 bp, Homo sapien
aaagggttgtctgactcgcctgctg

SEQ ID NO: 771535 - DNA, 25 bp, Homo sapien
ctccacgaggacccaaacccgacag

SEQ ID NO: 771536 - DNA, 25 bp, Homo sapien
gctccacgaggacccaaacccgaca

SEQ ID NO: 771537 - DNA, 25 bp, Homo sapien
tccacgaggacccaaacccgacaga

SEQ ID NO: 771538 - DNA, 25 bp, Homo sapien
cattttagggtgctctaaggtagcc

SEQ ID NO: 771539 - DNA, 25 bp, Homo sapien
cagctcctgaatgctaacaatggct

SEQ ID NO: 771540 - DNA, 25 bp, Homo sapien
gcagcactgtgcttttaggtgacgt

SEQ ID NO: 771541 - DNA, 25 bp, Homo sapien
tgacgtgggatgttccaagcaccaa

SEQ ID NO: 771542 - DNA, 25 bp, Homo sapien
gctccttctctctaatgtccaatca

SEQ ID NO: 771543 - DNA, 25 bp, Homo sapien
tccaatcatagtctccaatgtccag

SEQ ID NO: 771544 - DNA, 25 bp, Homo sapien
tctaatgtccaatcatagtctccaa

SEQ ID NO: 771545 - DNA, 25 bp, Homo sapien
ccttctctctaatgtccaatcatag

SEQ ID NO: 771546 - DNA, 25 bp, Homo sapien
ggttgcaagaacaaattgaagatgg

SEQ ID NO: 771547 - DNA, 25 bp, Homo sapien
caatcaaagtgactctcagcaggaa

SEQ ID NO: 771548 - DNA, 25 bp, Homo sapien
gagggacagtgtgatagccttttgc

SEQ ID NO: 771549 - DNA, 25 bp, Homo sapien
aaaaggatattgagcaagattatct

SEQ ID NO: 771550 - DNA, 25 bp, Homo sapien
gcactggtggtagagtctttttgca

SEQ ID NO: 771551 - DNA, 25 bp, Homo sapien
taatgagcagtgagaatgagcatca

SEQ ID NO: 771552 - DNA, 25 bp, Homo sapien
cagcagagtcttcgtgacctatatc

SEQ ID NO: 771553 - DNA, 25 bp, Homo sapien
gattggctgctcgattgactatact

SEQ ID NO: 771554 - DNA, 25 bp, Homo sapien
tggctgctgctcaaccagatggtgg

SEQ ID NO: 771555 - DNA, 25 bp, Homo sapien
tggcccatcctacatacatggctgc

SEQ ID NO: 771556 - DNA, 25 bp, Homo sapien
gctgctgctcaaccagatggtggtg

SEQ ID NO: 771557 - DNA, 25 bp, Homo sapien
atcctacatacatggctgctgctca

SEQ ID NO: 771558 - DNA, 25 bp, Homo sapien
ccacagtagtggcaccagctgtgga

SEQ ID NO: 771559 - DNA, 25 bp, Homo sapien
tgtgatccagtcctctcacctgagg

SEQ ID NO: 771560 - DNA, 25 bp, Homo sapien
gccagctgttgaacccattcacttt

SEQ ID NO: 771561 - DNA, 25 bp, Homo sapien
ctctgttgtggccttcatgtgccag

SEQ ID NO: 771562 - DNA, 25 bp, Homo sapien
gatggacaaaaagctgctggccacg

SEQ ID NO: 771563 - DNA, 25 bp, Homo sapien
catgtgccagggttcccctactgga

SEQ ID NO: 771564 - DNA, 25 bp, Homo sapien
ctgcccacattgctcccacccgtgc

SEQ ID NO: 771565 - DNA, 25 bp, Homo sapien
ttgctcccacccgtgcctcagtgtc

SEQ ID NO: 771566 - DNA, 25 bp, Homo sapien
gctcccacccgtgcctcagtgtcct

SEQ ID NO: 771567 - DNA, 25 bp, Homo sapien
ccacattgctcccacccgtgcctca

SEQ ID NO: 771568 - DNA, 25 bp, Homo sapien
tcccaggcaggtgattgggtttctg

SEQ ID NO: 771569 - DNA, 25 bp, Homo sapien
ctatcccaggcaggtgattgggttt

SEQ ID NO: 771570 - DNA, 25 bp, Homo sapien
agccctcggccactaccctggaaca

SEQ ID NO: 771571 - DNA, 25 bp, Homo sapien
acactttggttttctcgccctgagt

SEQ ID NO: 771572 - DNA, 25 bp, Homo sapien
ggggacgctggggaactggacacag

SEQ ID NO: 771573 - DNA, 25 bp, Homo sapien
ctgagcaagggcagcgcggtgtgtg

SEQ ID NO: 771574 - DNA, 25 bp, Homo sapien
agggcagcgcggtgtgtggtgagca

SEQ ID NO: 771575 - DNA, 25 bp, Homo sapien
ccgaggagggttcggggccctgcag

SEQ ID NO: 771576 - DNA, 25 bp, Homo sapien
gctcagcctggcggtgaccgtggtg

SEQ ID NO: 771577 - DNA, 25 bp, Homo sapien
tcttcccgccggtgccggagcggga

SEQ ID NO: 771578 - DNA, 25 bp, Homo sapien
ggagactgaggacgccaggacaccc

SEQ ID NO: 771579 - DNA, 25 bp, Homo sapien
ccgccggtgccggagcgggacgcgg

SEQ ID NO: 771580 - DNA, 25 bp, Homo sapien
cgcgggggtcgccaccctctgggag

SEQ ID NO: 771581 - DNA, 25 bp, Homo sapien
cctacgtaaggagccgccctctttg

SEQ ID NO: 771582 - DNA, 25 bp, Homo sapien
ttctgtctctgcccgcctacgtaag

SEQ ID NO: 771583 - DNA, 25 bp, Homo sapien
aggccccgagccagacgatccagga

SEQ ID NO: 771584 - DNA, 25 bp, Homo sapien
aggagcccggccacgccagcttctg

SEQ ID NO: 771585 - DNA, 25 bp, Homo sapien
cagggtcgcgattggtctcatgcca

SEQ ID NO: 771586 - DNA, 25 bp, Homo sapien
ccatgtcaaggctcctaagagagga

SEQ ID NO: 771587 - DNA, 25 bp, Homo sapien
ggaagtttgtttccgctgcccagga

SEQ ID NO: 771588 - DNA, 25 bp, Homo sapien
tgttccgcgggctggtccttgccga

SEQ ID NO: 771589 - DNA, 25 bp, Homo sapien
aggctctgcccactactgctgtcct

SEQ ID NO: 771590 - DNA, 25 bp, Homo sapien
ggaaggctctgcccactactgctgt

SEQ ID NO: 771591 - DNA, 25 bp, Homo sapien
ctctgcccactactgctgtcctcat

SEQ ID NO: 771592 - DNA, 25 bp, Homo sapien
gaaggctctgcccactactgctgtc

SEQ ID NO: 771593 - DNA, 25 bp, Homo sapien
tcgcagggagctgattttagccaag

SEQ ID NO: 771594 - DNA, 25 bp, Homo sapien
gcatcccagagtggactggaccaag

SEQ ID NO: 771595 - DNA, 25 bp, Homo sapien
tgcctctggtgcatgaggctcgcag

SEQ ID NO: 771596 - DNA, 25 bp, Homo sapien
gagctgattttagccaagggcatcc

SEQ ID NO: 771597 - DNA, 25 bp, Homo sapien
cccgatgggcattctagaggtggac

SEQ ID NO: 771598 - DNA, 25 bp, Homo sapien
aacatcataatcaacccgatgggca

SEQ ID NO: 771599 - DNA, 25 bp, Homo sapien
aagtacaagaagatgtccagaaaca

SEQ ID NO: 771600 - DNA, 25 bp, Homo sapien
ttctagaggtggacgccaacaaacg

SEQ ID NO: 771601 - DNA, 25 bp, Homo sapien
gccggtcacagtcttagccccagtg

SEQ ID NO: 771602 - DNA, 25 bp, Homo sapien
tatgagggatgagacctcggatctg

SEQ ID NO: 771603 - DNA, 25 bp, Homo sapien
gtctcgaagcgctttgcctgctgcc

SEQ ID NO: 771604 - DNA, 25 bp, Homo sapien
ggaaggcagagtctcgaagcgcttt

SEQ ID NO: 771605 - DNA, 25 bp, Homo sapien
ctgaacatggatggggagagccgct

SEQ ID NO: 771606 - DNA, 25 bp, Homo sapien
tgaacatggatggggagagccgctt

SEQ ID NO: 771607 - DNA, 25 bp, Homo sapien
tgtattctgtgagctccgcttcggg

SEQ ID NO: 771608 - DNA, 25 bp, Homo sapien
tggcatcaggttgcagagagcttct

SEQ ID NO: 771609 - DNA, 25 bp, Homo sapien
caggtgcagttgttccatgtcccag

SEQ ID NO: 771610 - DNA, 25 bp, Homo sapien
tggagcctattctgcgtccagggct

SEQ ID NO: 771611 - DNA, 25 bp, Homo sapien
acgggaacacgggtgacagggacag

SEQ ID NO: 771612 - DNA, 25 bp, Homo sapien
cgccgggtggtgtggaagcgcagca

SEQ ID NO: 771613 - DNA, 25 bp, Homo sapien
atctaccaacgcctgtgcgccgggt

SEQ ID NO: 771614 - DNA, 25 bp, Homo sapien
gcagcatcgccggtgggacagccag

SEQ ID NO: 771615 - DNA, 25 bp, Homo sapien
aagtggtccagcatgttgctgtcca

SEQ ID NO: 771616 - DNA, 25 bp, Homo sapien
gacagcctgagatgcagacctgggc

SEQ ID NO: 771617 - DNA, 25 bp, Homo sapien
tttttagaatcacaactctgttctt

SEQ ID NO: 771618 - DNA, 25 bp, Homo sapien
ctgttctttaagtcatgggccatga

SEQ ID NO: 771619 - DNA, 25 bp, Homo sapien
ggctccagacccaccttcatgtgct

SEQ ID NO: 771620 - DNA, 25 bp, Homo sapien
aaagattgtattggtaggtggtagg

SEQ ID NO: 771621 - DNA, 25 bp, Homo sapien
aggttggcatgattggaacctccag

SEQ ID NO: 771622 - DNA, 25 bp, Homo sapien
gatatggatttggaccgggcagctg

SEQ ID NO: 771623 - DNA, 25 bp, Homo sapien
aacctccagggtacctgatgttggg

SEQ ID NO: 771624 - DNA, 25 bp, Homo sapien
ctctggctatagcacaggatgaggg

SEQ ID NO: 771625 - DNA, 25 bp, Homo sapien
tgtcctaacatgtcaggagccaagg

SEQ ID NO: 771626 - DNA, 25 bp, Homo sapien
agggaccttagggttggcatcctga

SEQ ID NO: 771627 - DNA, 25 bp, Homo sapien
cactatcactccttgtcctaacatg

SEQ ID NO: 771628 - DNA, 25 bp, Homo sapien
aggaatgctggccatgctgctggtg

SEQ ID NO: 771629 - DNA, 25 bp, Homo sapien
ctggccatgctgctggtgcttgtgc

SEQ ID NO: 771630 - DNA, 25 bp, Homo sapien
aatgctggccatgctgctggtgctt

SEQ ID NO: 771631 - DNA, 25 bp, Homo sapien
gccatgctgctggtgcttgtgcatc

SEQ ID NO: 771632 - DNA, 25 bp, Homo sapien
cccagggcacccaacttcagcactg

SEQ ID NO: 771633 - DNA, 25 bp, Homo sapien
ctccacaaccttgcgctgctctcct

SEQ ID NO: 771634 - DNA, 25 bp, Homo sapien
cagggcacccaacttcagcactgtc

SEQ ID NO: 771635 - DNA, 25 bp, Homo sapien
gggcacccaacttcagcactgtcat

SEQ ID NO: 771636 - DNA, 25 bp, Homo sapien
gtgacccacagttgacagggcccat

SEQ ID NO: 771637 - DNA, 25 bp, Homo sapien
tgtttgaatatctatgataactgta

SEQ ID NO: 771638 - DNA, 25 bp, Homo sapien
tcttccaattcccactgtttgaata

SEQ ID NO: 771639 - DNA, 25 bp, Homo sapien
ccaccttccagtcatggttctagag

SEQ ID NO: 771640 - DNA, 25 bp, Homo sapien
gctgctctctcccacattgactgac

SEQ ID NO: 771641 - DNA, 25 bp, Homo sapien
tgctctctcccacattgactgacag

SEQ ID NO: 771642 - DNA, 25 bp, Homo sapien
tcttggcactgaagtcagaagcaga

SEQ ID NO: 771643 - DNA, 25 bp, Homo sapien
ctgctctaggttcttcttggcactg

SEQ ID NO: 771644 - DNA, 25 bp, Homo sapien
accttgattatggctctttcttgaa

SEQ ID NO: 771645 - DNA, 25 bp, Homo sapien
ccaggggatataagcaccttgatta

SEQ ID NO: 771646 - DNA, 25 bp, Homo sapien
gggatataagcaccttgattatggc

SEQ ID NO: 771647 - DNA, 25 bp, Homo sapien
cagtcaccaggggatataagcacct

SEQ ID NO: 771648 - DNA, 25 bp, Homo sapien
tgagccagtgcaaacgcatttcggg

SEQ ID NO: 771649 - DNA, 25 bp, Homo sapien
gcattgtgtattcactgagccagtg

SEQ ID NO: 771650 - DNA, 25 bp, Homo sapien
ggaaggatctggtcagttcctgatc

SEQ ID NO: 771651 - DNA, 25 bp, Homo sapien
gatctccacataatacgattcatgt

SEQ ID NO: 771652 - DNA, 25 bp, Homo sapien
catgggcatggacacattccacact

SEQ ID NO: 771653 - DNA, 25 bp, Homo sapien
caaagtcacctagtgctcccgaggg

SEQ ID NO: 771654 - DNA, 25 bp, Homo sapien
caacacgcgggacagtagagatgga

SEQ ID NO: 771655 - DNA, 25 bp, Homo sapien
acagtagagatggatctcaggctcc

SEQ ID NO: 771656 - DNA, 25 bp, Homo sapien
ctcccgaggggcaacacgcgggaca

SEQ ID NO: 771657 - DNA, 25 bp, Homo sapien
ttcagtgactcttggctagcttgcc

SEQ ID NO: 771658 - DNA, 25 bp, Homo sapien
gagtccccaggacaatcttatccag

SEQ ID NO: 771659 - DNA, 25 bp, Homo sapien
ttttgcacatggaatagcccctggg

SEQ ID NO: 771660 - DNA, 25 bp, Homo sapien
tcctggaccaaactgggtctggctg

SEQ ID NO: 771661 - DNA, 25 bp, Homo sapien
ctgtcgaatttacccaaggctcctg

SEQ ID NO: 771662 - DNA, 25 bp, Homo sapien
ttaattgacgagtaagcagcaccca

SEQ ID NO: 771663 - DNA, 25 bp, Homo sapien
gagggaaaatcttaacgtcagacag

SEQ ID NO: 771664 - DNA, 25 bp, Homo sapien
tcctgacagtaagtgcattgatcct

SEQ ID NO: 771665 - DNA, 25 bp, Homo sapien
cttgaacctgggagatggaggatgc

SEQ ID NO: 771666 - DNA, 25 bp, Homo sapien
cttcagcctgggtgacagagcaaga

SEQ ID NO: 771667 - DNA, 25 bp, Homo sapien
agtgagccaagatcgcaccactgca

SEQ ID NO: 771668 - DNA, 25 bp, Homo sapien
tactcgggaggctcaggcagagaat

SEQ ID NO: 771669 - DNA, 25 bp, Homo sapien
caagctgtgcgatagggctctaact

SEQ ID NO: 771670 - DNA, 25 bp, Homo sapien
gctgtttacacttccgagcaatcat

SEQ ID NO: 771671 - DNA, 25 bp, Homo sapien
aattttgaaacttggagcaagctgt

SEQ ID NO: 771672 - DNA, 25 bp, Homo sapien
cgatagggctctaacttttttgctg

SEQ ID NO: 771673 - DNA, 25 bp, Homo sapien
tccctgcgtctaggagttcaacctt

SEQ ID NO: 771674 - DNA, 25 bp, Homo sapien
aagtcccctgttaatgctcatgctg

SEQ ID NO: 771675 - DNA, 25 bp, Homo sapien
agacccatcatcagtagcactcagg

SEQ ID NO: 771676 - DNA, 25 bp, Homo sapien
aacactcttaccacaatacggatgc

SEQ ID NO: 771677 - DNA, 25 bp, Homo sapien
aagtgatgtggctaccttggccccc

SEQ ID NO: 771678 - DNA, 25 bp, Homo sapien
taatcccctaagctcaattgatcct

SEQ ID NO: 771679 - DNA, 25 bp, Homo sapien
ataaaaaatggataactattgtaca

SEQ ID NO: 771680 - DNA, 25 bp, Homo sapien
tggaatacactggtgtgattatgcc

SEQ ID NO: 771681 - DNA, 25 bp, Homo sapien
ccattattcccattgctgcagcaga

SEQ ID NO: 771682 - DNA, 25 bp, Homo sapien
caaatgttgatctttatgtaggagc

SEQ ID NO: 771683 - DNA, 25 bp, Homo sapien
aaagggaagttgcagaccctgctct

SEQ ID NO: 771684 - DNA, 25 bp, Homo sapien
ggtttgatagaagcaggccagtgca

SEQ ID NO: 771685 - DNA, 25 bp, Homo sapien
taacagctatatcatagtctaaatc

SEQ ID NO: 771686 - DNA, 25 bp, Homo sapien
catgcccggtcaagaaacaacttta

SEQ ID NO: 771687 - DNA, 25 bp, Homo sapien
cacaggaaatgacaacagcacttaa

SEQ ID NO: 771688 - DNA, 25 bp, Homo sapien
ttttgagcacaggaaatgacaacag

SEQ ID NO: 771689 - DNA, 25 bp, Homo sapien
gctacaggagaatagcagacaggta

SEQ ID NO: 771690 - DNA, 25 bp, Homo sapien
atgatgttcatccgcaatgattgca

SEQ ID NO: 771691 - DNA, 25 bp, Homo sapien
ttaaaaagaagtgcaatcctcgcaa

SEQ ID NO: 771692 - DNA, 25 bp, Homo sapien
ctcgcaaaattaggtggaccaaagc

SEQ ID NO: 771693 - DNA, 25 bp, Homo sapien
tcgagatatgttatttctgtttggg

SEQ ID NO: 771694 - DNA, 25 bp, Homo sapien
tcctctcaagcttggcattcggtcg

SEQ ID NO: 771695 - DNA, 25 bp, Homo sapien
tctcaagcttggcattcggtcggta

SEQ ID NO: 771696 - DNA, 25 bp, Homo sapien
agggacccgcgggttcgacatgcat

SEQ ID NO: 771697 - DNA, 25 bp, Homo sapien
tcaagcttggcattcggtcggtagg

SEQ ID NO: 771698 - DNA, 25 bp, Homo sapien
actcgtagttcagcatggccgggaa

SEQ ID NO: 771699 - DNA, 25 bp, Homo sapien
ctgacatatctctgaggccaatatc

SEQ ID NO: 771700 - DNA, 25 bp, Homo sapien
tccttaagagaatactagaaaacca

SEQ ID NO: 771701 - DNA, 25 bp, Homo sapien
gacatatctctgaggccaatatctc

SEQ ID NO: 771702 - DNA, 25 bp, Homo sapien
caaccattgatcagcaaccgaaaat

SEQ ID NO: 771703 - DNA, 25 bp, Homo sapien
cattgatcagcaaccgaaaataata

SEQ ID NO: 771704 - DNA, 25 bp, Homo sapien
ggatgaacaaccattgatcagcaac

SEQ ID NO: 771705 - DNA, 25 bp, Homo sapien
agacaggatgaacaaccattgatca

SEQ ID NO: 771706 - DNA, 25 bp, Homo sapien
ggattgtccaataaacagatgtgga

SEQ ID NO: 771707 - DNA, 25 bp, Homo sapien
gatgtggaaactaagacaactttca

SEQ ID NO: 771708 - DNA, 25 bp, Homo sapien
aaataatatggattgtccaataaac

SEQ ID NO: 771709 - DNA, 25 bp, Homo sapien
ttctcttctacaaaaataatatgga

SEQ ID NO: 771710 - DNA, 25 bp, Homo sapien
ttaaccacttggctacattcattac

SEQ ID NO: 771711 - DNA, 25 bp, Homo sapien
aagggtagagcaagatttaaccact

SEQ ID NO: 771712 - DNA, 25 bp, Homo sapien
aagactctgccacatctttcacatt

SEQ ID NO: 771713 - DNA, 25 bp, Homo sapien
taaagactctgccacatctttcaca

SEQ ID NO: 771714 - DNA, 25 bp, Homo sapien
atgttgagtaagggatgaggaccac

SEQ ID NO: 771715 - DNA, 25 bp, Homo sapien
cttatgttgagtaagggatgaggac

SEQ ID NO: 771716 - DNA, 25 bp, Homo sapien
tatgttgagtaagggatgaggacca

SEQ ID NO: 771717 - DNA, 25 bp, Homo sapien
ctcttatgttgagtaagggatgagg

SEQ ID NO: 771718 - DNA, 25 bp, Homo sapien
tccttacgttgagtaaagtatagca

SEQ ID NO: 771719 - DNA, 25 bp, Homo sapien
gaatgtccttacgttgagtaaagta

SEQ ID NO: 771720 - DNA, 25 bp, Homo sapien
gcaacaatttaaaggccacactctt

SEQ ID NO: 771721 - DNA, 25 bp, Homo sapien
actgcagtatgaatgtccttacgtt

SEQ ID NO: 771722 - DNA, 25 bp, Homo sapien
gaatttctctccaggatgagttatc

SEQ ID NO: 771723 - DNA, 25 bp, Homo sapien
ctctccaggatgagttatctgatgt

SEQ ID NO: 771724 - DNA, 25 bp, Homo sapien
tgtagaatttctctccaggatgagt

SEQ ID NO: 771725 - DNA, 25 bp, Homo sapien
atttctctccaggatgagttatctg

SEQ ID NO: 771726 - DNA, 25 bp, Homo sapien
atgttcttatgttcattaaggtgtg

SEQ ID NO: 771727 - DNA, 25 bp, Homo sapien
agtatgaatgttcttatgttcatta

SEQ ID NO: 771728 - DNA, 25 bp, Homo sapien
gtatgaatgttcttatgttcattaa

SEQ ID NO: 771729 - DNA, 25 bp, Homo sapien
tgaatgttcttatgttcattaaggt

SEQ ID NO: 771730 - DNA, 25 bp, Homo sapien
taacactactagtcggtatgaactc

SEQ ID NO: 771731 - DNA, 25 bp, Homo sapien
aaatttcctcatgtacagtaaggtg

SEQ ID NO: 771732 - DNA, 25 bp, Homo sapien
aacaggtattacagacattgccaca

SEQ ID NO: 771733 - DNA, 25 bp, Homo sapien
tgtgagttgccttatgattagcaag

SEQ ID NO: 771734 - DNA, 25 bp, Homo sapien
gcagtgaagactagacgtggagcgc

SEQ ID NO: 771735 - DNA, 25 bp, Homo sapien
agactagacgtggagcgccggctgc

SEQ ID NO: 771736 - DNA, 25 bp, Homo sapien
cagtgaagactagacgtggagcgcc

SEQ ID NO: 771737 - DNA, 25 bp, Homo sapien
tgaagactagacgtggagcgccggc

SEQ ID NO: 771738 - DNA, 25 bp, Homo sapien
gaacctccaagttcttgcaggtaac

SEQ ID NO: 771739 - DNA, 25 bp, Homo sapien
tcttgcaggtaacagggtcacagcg

SEQ ID NO: 771740 - DNA, 25 bp, Homo sapien
gtaacagggtcacagcggcgagcct

SEQ ID NO: 771741 - DNA, 25 bp, Homo sapien
cttagctgtgaacctccaagttctt

SEQ ID NO: 771742 - DNA, 25 bp, Homo sapien
tcacatgaggcccttaaagcaatat

SEQ ID NO: 771743 - DNA, 25 bp, Homo sapien
agagtcacatgaggcccttaaagca

SEQ ID NO: 771744 - DNA, 25 bp, Homo sapien
ggcccttaaagcaatatggatgttt

SEQ ID NO: 771745 - DNA, 25 bp, Homo sapien
tgaggcccttaaagcaatatggatg

SEQ ID NO: 771746 - DNA, 25 bp, Homo sapien
aggcagaaggtccaagacctgcaga

SEQ ID NO: 771747 - DNA, 25 bp, Homo sapien
cccacaggcagaaggtccaagacct

SEQ ID NO: 771748 - DNA, 25 bp, Homo sapien
cacaggcagaaggtccaagacctgc

SEQ ID NO: 771749 - DNA, 25 bp, Homo sapien
caggcagaaggtccaagacctgcag

SEQ ID NO: 771750 - DNA, 25 bp, Homo sapien
ttcctctagagagaattctattttc

SEQ ID NO: 771751 - DNA, 25 bp, Homo sapien
ctagagagaattctattttcacatc

SEQ ID NO: 771752 - DNA, 25 bp, Homo sapien
cctctagagagaattctattttcac

SEQ ID NO: 771753 - DNA, 25 bp, Homo sapien
attctattttcacatccctaaatgt

SEQ ID NO: 771754 - DNA, 25 bp, Homo sapien
ttttagagcattgtgtattgtgtat

SEQ ID NO: 771755 - DNA, 25 bp, Homo sapien
ctcatgtctcttcagattccagggc

SEQ ID NO: 771756 - DNA, 25 bp, Homo sapien
cttttccttgctccagccaggtgat

SEQ ID NO: 771757 - DNA, 25 bp, Homo sapien
ttccttgctccagccaggtgatcag

SEQ ID NO: 771758 - DNA, 25 bp, Homo sapien
ctcttcagattccagggctcttttc

SEQ ID NO: 771759 - DNA, 25 bp, Homo sapien
actgaaatatcttgctgtcagtagt

SEQ ID NO: 771760 - DNA, 25 bp, Homo sapien
tgtacaccttacatgcatccacact

SEQ ID NO: 771761 - DNA, 25 bp, Homo sapien
tatcttgctgtcagtagttgtcaaa

SEQ ID NO: 771762 - DNA, 25 bp, Homo sapien
cctttgtacaccttacatgcatcca

SEQ ID NO: 771763 - DNA, 25 bp, Homo sapien
ttgtaagaatactctctagtatgaa

SEQ ID NO: 771764 - DNA, 25 bp, Homo sapien
ttcttatgttgagttaattgtgaaa

SEQ ID NO: 771765 - DNA, 25 bp, Homo sapien
acatttgtaagaatactctctagta

SEQ ID NO: 771766 - DNA, 25 bp, Homo sapien
attttcttatgttgagttaattgtg

SEQ ID NO: 771767 - DNA, 25 bp, Homo sapien
cacattcatgtttgcagggtttctc

SEQ ID NO: 771768 - DNA, 25 bp, Homo sapien
gaatactcttcctcgtattaaaggc

SEQ ID NO: 771769 - DNA, 25 bp, Homo sapien
taaagtccttgtcatattcctcaca

SEQ ID NO: 771770 - DNA, 25 bp, Homo sapien
tgaagtatcagtgccttatgcctta

SEQ ID NO: 771771 - DNA, 25 bp, Homo sapien
ggatctcctatactcaacactctaa

SEQ ID NO: 771772 - DNA, 25 bp, Homo sapien
tacaaaattaagttcacacacaatc

SEQ ID NO: 771773 - DNA, 25 bp, Homo sapien
ttaattacaaaattaagttcacaca

SEQ ID NO: 771774 - DNA, 25 bp, Homo sapien
taattacaaaattaagttcacacac

SEQ ID NO: 771775 - DNA, 25 bp, Homo sapien
attacaaaattaagttcacacacaa

SEQ ID NO: 771776 - DNA, 25 bp, Homo sapien
tgaaaaaaccagggctctcactatg

SEQ ID NO: 771777 - DNA, 25 bp, Homo sapien
gaaaaaaccagggctctcactatgt

SEQ ID NO: 771778 - DNA, 25 bp, Homo sapien
gtagccagcagctattatcttgctg

SEQ ID NO: 771779 - DNA, 25 bp, Homo sapien
tagccagcagctattatcttgctgt

SEQ ID NO: 771780 - DNA, 25 bp, Homo sapien
tgtagccagcagctattatcttgct

SEQ ID NO: 771781 - DNA, 25 bp, Homo sapien
ctgtagccagcagctattatcttgc

SEQ ID NO: 771782 - DNA, 25 bp, Homo sapien
tccttgtgttagaagtaaggccagt

SEQ ID NO: 771783 - DNA, 25 bp, Homo sapien
aaggccagtgattcatccttactcg

SEQ ID NO: 771784 - DNA, 25 bp, Homo sapien
ccagtgattcatccttactcgtcag

SEQ ID NO: 771785 - DNA, 25 bp, Homo sapien
tagaagtaaggccagtgattcatcc

SEQ ID NO: 771786 - DNA, 25 bp, Homo sapien
gatgtatgagatccttgggtctcta

SEQ ID NO: 771787 - DNA, 25 bp, Homo sapien
tgtgttcgccagcaatggaaaagat

SEQ ID NO: 771788 - DNA, 25 bp, Homo sapien
aaggtataattggaaggacagccga

SEQ ID NO: 771789 - DNA, 25 bp, Homo sapien
tcccggtttcggcaccaagacataa

SEQ ID NO: 771790 - DNA, 25 bp, Homo sapien
gacaaatagctgctgctaggagctg

SEQ ID NO: 771791 - DNA, 25 bp, Homo sapien
tgcttaagaggacaatcggacttcc

SEQ ID NO: 771792 - DNA, 25 bp, Homo sapien
cagaacaatggttccttcccgggag

SEQ ID NO: 771793 - DNA, 25 bp, Homo sapien
tcgttggcatgcgactgagctgcaa

SEQ ID NO: 771794 - DNA, 25 bp, Homo sapien
caaggccaagactaaaggttctaca

SEQ ID NO: 771795 - DNA, 25 bp, Homo sapien
tattgttcttagctgcagaggtcac

SEQ ID NO: 771796 - DNA, 25 bp, Homo sapien
tctacacatctaaggcagcaaaggc

SEQ ID NO: 771797 - DNA, 25 bp, Homo sapien
gagccaaatgatctcagatctcaga

SEQ ID NO: 771798 - DNA, 25 bp, Homo sapien
attcagccatcttggctccactctg

SEQ ID NO: 771799 - DNA, 25 bp, Homo sapien
ccatcttggctccactctgccagca

SEQ ID NO: 771800 - DNA, 25 bp, Homo sapien
atcttctgcatcgttcatgctggga

SEQ ID NO: 771801 - DNA, 25 bp, Homo sapien
acccatcttctgcatcgttcatgct

SEQ ID NO: 771802 - DNA, 25 bp, Homo sapien
cccctagtctcactgccaccttgtg

SEQ ID NO: 771803 - DNA, 25 bp, Homo sapien
tactcaaaccttgtcaatggtgggc

SEQ ID NO: 771804 - DNA, 25 bp, Homo sapien
atggtgggcactcctcccctagtct

SEQ ID NO: 771805 - DNA, 25 bp, Homo sapien
ccttgtcaatggtgggcactcctcc

SEQ ID NO: 771806 - DNA, 25 bp, Homo sapien
gctcttgtcggacaattaaggggtc

SEQ ID NO: 771807 - DNA, 25 bp, Homo sapien
ctcttgtcggacaattaaggggtct

SEQ ID NO: 771808 - DNA, 25 bp, Homo sapien
tacttcagccctaataatttgcttc

SEQ ID NO: 771809 - DNA, 25 bp, Homo sapien
cttcagccctaataatttgcttcct

SEQ ID NO: 771810 - DNA, 25 bp, Homo sapien
tggaggcgctagggtcccgtggggc

SEQ ID NO: 771811 - DNA, 25 bp, Homo sapien
ccgctgtggcctgcatagggcggca

SEQ ID NO: 771812 - DNA, 25 bp, Homo sapien
caaatttcacccacattataccatg

SEQ ID NO: 771813 - DNA, 25 bp, Homo sapien
atcctgtcccttctgaaaacccatt

SEQ ID NO: 771814 - DNA, 25 bp, Homo sapien
ttatagctaaaaattgggtgtccat

SEQ ID NO: 771815 - DNA, 25 bp, Homo sapien
acccattatccataaagttgttaca

SEQ ID NO: 771816 - DNA, 25 bp, Homo sapien
gctgcaaaattcttctaagttaact

SEQ ID NO: 771817 - DNA, 25 bp, Homo sapien
ttttaggatgacagacataagccac

SEQ ID NO: 771818 - DNA, 25 bp, Homo sapien
gcaaaattcttctaagttaactgtg

SEQ ID NO: 771819 - DNA, 25 bp, Homo sapien
agagttttaggatgacagacataag

SEQ ID NO: 771820 - DNA, 25 bp, Homo sapien
gagtcccacacccttggttaagtca

SEQ ID NO: 771821 - DNA, 25 bp, Homo sapien
ggagtcagacctggagtcccacacc

SEQ ID NO: 771822 - DNA, 25 bp, Homo sapien
cattataccaccttgagtctggcct

SEQ ID NO: 771823 - DNA, 25 bp, Homo sapien
ttaaaggagaactgagttgggagtc

SEQ ID NO: 771824 - DNA, 25 bp, Homo sapien
gaatttggagtgagactttctcccg

SEQ ID NO: 771825 - DNA, 25 bp, Homo sapien
tatatgacatccaattaccgacaga

SEQ ID NO: 771826 - DNA, 25 bp, Homo sapien
taatgccgaaggaacattggcctag

SEQ ID NO: 771827 - DNA, 25 bp, Homo sapien
ggaacaccttaaggattcatggcat

SEQ ID NO: 771828 - DNA, 25 bp, Homo sapien
ctttgggatgtacaggaggatatat

SEQ ID NO: 771829 - DNA, 25 bp, Homo sapien
caggaggatatattatccttacaaa

SEQ ID NO: 771830 - DNA, 25 bp, Homo sapien
cacctgtttgccgatgagcaagact

SEQ ID NO: 771831 - DNA, 25 bp, Homo sapien
acctgtttgccgatgagcaagactc

SEQ ID NO: 771832 - DNA, 25 bp, Homo sapien
cccccacagccgcggctttctcccg

SEQ ID NO: 771833 - DNA, 25 bp, Homo sapien
cccacagccgcggctttctcccgct

SEQ ID NO: 771834 - DNA, 25 bp, Homo sapien
cacagccgcggctttctcccgctgc

SEQ ID NO: 771835 - DNA, 25 bp, Homo sapien
acagccgcggctttctcccgctgcg

SEQ ID NO: 771836 - DNA, 25 bp, Homo sapien
aatgcttgtagagaacctgttccac

SEQ ID NO: 771837 - DNA, 25 bp, Homo sapien
ggcactggactattaagctgaacaa

SEQ ID NO: 771838 - DNA, 25 bp, Homo sapien
tctttcaacctggtcagtttgaatt

SEQ ID NO: 771839 - DNA, 25 bp, Homo sapien
ggcactggaaagaggcactggacta

SEQ ID NO: 771840 - DNA, 25 bp, Homo sapien
tcctcattggcaaacataatcactg

SEQ ID NO: 771841 - DNA, 25 bp, Homo sapien
cgagcattaggtgtttctagcaggc

SEQ ID NO: 771842 - DNA, 25 bp, Homo sapien
tctccaggtcttggttcacgtggga

SEQ ID NO: 771843 - DNA, 25 bp, Homo sapien
tggcaaacataatcactgctcgagc

SEQ ID NO: 771844 - DNA, 25 bp, Homo sapien
aggtgctattttggatccccaacta

SEQ ID NO: 771845 - DNA, 25 bp, Homo sapien
gggcaaaattgtcacagccccttct

SEQ ID NO: 771846 - DNA, 25 bp, Homo sapien
tttggatccccaactatctgagcca

SEQ ID NO: 771847 - DNA, 25 bp, Homo sapien
catcaattgatgctcgtttgggcaa

SEQ ID NO: 771848 - DNA, 25 bp, Homo sapien
catttcttcgattattggcaagagt

SEQ ID NO: 771849 - DNA, 25 bp, Homo sapien
gtgcatttctttatatgactgttcc

SEQ ID NO: 771850 - DNA, 25 bp, Homo sapien
accacacatttcttcgattattggc

SEQ ID NO: 771851 - DNA, 25 bp, Homo sapien
ttttcccatgtgatcctaacttgca

SEQ ID NO: 771852 - DNA, 25 bp, Homo sapien
cttggaatttggccagcaaatcaaa

SEQ ID NO: 771853 - DNA, 25 bp, Homo sapien
ctcacttggaatttggccagcaaat

SEQ ID NO: 771854 - DNA, 25 bp, Homo sapien
agttagcagtaatatcacatctttt

SEQ ID NO: 771855 - DNA, 25 bp, Homo sapien
cacttggaatttggccagcaaatca

SEQ ID NO: 771856 - DNA, 25 bp, Homo sapien
tcagtcaagggatgtcgtttcgata

SEQ ID NO: 771857 - DNA, 25 bp, Homo sapien
tgtcgtttcgataagcgcagagcta

SEQ ID NO: 771858 - DNA, 25 bp, Homo sapien
taagcgcagagctatttacaattcg

SEQ ID NO: 771859 - DNA, 25 bp, Homo sapien
tttacaattcgtgatggagacagga

SEQ ID NO: 771860 - DNA, 25 bp, Homo sapien
ttgtgggaagaaacatatttgtgca

SEQ ID NO: 771861 - DNA, 25 bp, Homo sapien
taaactgacaggtctttcagggagc

SEQ ID NO: 771862 - DNA, 25 bp, Homo sapien
ctttcagggagctaattattgagcc

SEQ ID NO: 771863 - DNA, 25 bp, Homo sapien
tgagcctgctatttggttcactgac

SEQ ID NO: 771864 - DNA, 25 bp, Homo sapien
cgctcagcaaaatatcggacacgat

SEQ ID NO: 771865 - DNA, 25 bp, Homo sapien
cagccagagaggtgacgctcagcaa

SEQ ID NO: 771866 - DNA, 25 bp, Homo sapien
aaaatatcggacacgatgacctcca

SEQ ID NO: 771867 - DNA, 25 bp, Homo sapien
tcattttacatcagccagagaggtg

SEQ ID NO: 771868 - DNA, 25 bp, Homo sapien
tgtgccctcagcctgccagtacttt

SEQ ID NO: 771869 - DNA, 25 bp, Homo sapien
cataaaagtggctccgacaaatgac

SEQ ID NO: 771870 - DNA, 25 bp, Homo sapien
cactggcagccagcccgttctgtgc

SEQ ID NO: 771871 - DNA, 25 bp, Homo sapien
acaaatgacactcctcagggtgctg

SEQ ID NO: 771872 - DNA, 25 bp, Homo sapien
tgtgtcagtcttaggaatgatgcag

SEQ ID NO: 771873 - DNA, 25 bp, Homo sapien
gatgcagactggtcccacaaagaaa

SEQ ID NO: 771874 - DNA, 25 bp, Homo sapien
gggctttgtgtcagtcttaggaatg

SEQ ID NO: 771875 - DNA, 25 bp, Homo sapien
taggaatgatgcagactggtcccac

SEQ ID NO: 771876 - DNA, 25 bp, Homo sapien
tatgcacatattgcgtcatagccca

SEQ ID NO: 771877 - DNA, 25 bp, Homo sapien
ttctatgtgacaggcgcagtggcca

SEQ ID NO: 771878 - DNA, 25 bp, Homo sapien
gactgcatcacctaccttgaagtat

SEQ ID NO: 771879 - DNA, 25 bp, Homo sapien
ggattatccagtgccttctatgtga

SEQ ID NO: 771880 - DNA, 25 bp, Homo sapien
tatgtgccactttgagcaactttgc

SEQ ID NO: 771881 - DNA, 25 bp, Homo sapien
ggagaacaatttgcacagtctgagc

SEQ ID NO: 771882 - DNA, 25 bp, Homo sapien
catttggagtaagagaacagccgca

SEQ ID NO: 771883 - DNA, 25 bp, Homo sapien
cagagcacacggaagacatggaata

SEQ ID NO: 771884 - DNA, 25 bp, Homo sapien
agctggcagcggagtctgccgctcc

SEQ ID NO: 771885 - DNA, 25 bp, Homo sapien
cgggagagctggaccgggagcgccc

SEQ ID NO: 771886 - DNA, 25 bp, Homo sapien
atgcaggccacagcggccgaggcag

SEQ ID NO: 771887 - DNA, 25 bp, Homo sapien
gctcgggcgcctaggcaaggaaccc

SEQ ID NO: 771888 - DNA, 25 bp, Homo sapien
caccgccctccttcttctctcccat

SEQ ID NO: 771889 - DNA, 25 bp, Homo sapien
cgccaccgccctccttcttctctcc

SEQ ID NO: 771890 - DNA, 25 bp, Homo sapien
cccgccaccgccctccttcttctct

SEQ ID NO: 771891 - DNA, 25 bp, Homo sapien
gccaccgccctccttcttctctccc

SEQ ID NO: 771892 - DNA, 25 bp, Homo sapien
gggcccctgcgccaccctcagcggc

SEQ ID NO: 771893 - DNA, 25 bp, Homo sapien
gctgtccgcactgctgcagccccgg

SEQ ID NO: 771894 - DNA, 25 bp, Homo sapien
agctgtccgcactgctgcagccccg

SEQ ID NO: 771895 - DNA, 25 bp, Homo sapien
cctgcgccaccctcagcggccgctg

SEQ ID NO: 771896 - DNA, 25 bp, Homo sapien
ctgtcctgagagcacgtctctacat

SEQ ID NO: 771897 - DNA, 25 bp, Homo sapien
aacagctgtcctgagagcacgtctc

SEQ ID NO: 771898 - DNA, 25 bp, Homo sapien
ctgagagcacgtctctacatctcta

SEQ ID NO: 771899 - DNA, 25 bp, Homo sapien
acgtctctacatctctacctgcatt

SEQ ID NO: 771900 - DNA, 25 bp, Homo sapien
tcttacaactatcctgaggttagaa

SEQ ID NO: 771901 - DNA, 25 bp, Homo sapien
tcaagtgatacatccgtctccgcct

SEQ ID NO: 771902 - DNA, 25 bp, Homo sapien
gacagtttgcttggttaaaacacac

SEQ ID NO: 771903 - DNA, 25 bp, Homo sapien
aggcaggctgacttcggcttcatta

SEQ ID NO: 771904 - DNA, 25 bp, Homo sapien
aatgtgaaggatacaaaacgtcagc

SEQ ID NO: 771905 - DNA, 25 bp, Homo sapien
tgtgaaggatacaaaacgtcagcag

SEQ ID NO: 771906 - DNA, 25 bp, Homo sapien
tggaatgtgaaggatacaaaacgtc

SEQ ID NO: 771907 - DNA, 25 bp, Homo sapien
gaatgtgaaggatacaaaacgtcag

SEQ ID NO: 771908 - DNA, 25 bp, Homo sapien
atcacagactgacggcataaaaaca

SEQ ID NO: 771909 - DNA, 25 bp, Homo sapien
ggagaatcacagactgacggcataa

SEQ ID NO: 771910 - DNA, 25 bp, Homo sapien
gaaggagaatcacagactgacggca

SEQ ID NO: 771911 - DNA, 25 bp, Homo sapien
tggaaggagaatcacagactgacgg

SEQ ID NO: 771912 - DNA, 25 bp, Homo sapien
ctgcgcacttgttcatagtcatcag

SEQ ID NO: 771913 - DNA, 25 bp, Homo sapien
tagtcatcagagagtaatttacagg

SEQ ID NO: 771914 - DNA, 25 bp, Homo sapien
agtcatcagagagtaatttacaggc

SEQ ID NO: 771915 - DNA, 25 bp, Homo sapien
tgcagcactgcgcacttgttcatag

SEQ ID NO: 771916 - DNA, 25 bp, Homo sapien
cgcatcatcaactaagcgtatttct

SEQ ID NO: 771917 - DNA, 25 bp, Homo sapien
tcaactaagcgtatttcttcattag

SEQ ID NO: 771918 - DNA, 25 bp, Homo sapien
ccaaacgcatcatcaactaagcgta

SEQ ID NO: 771919 - DNA, 25 bp, Homo sapien
catcatcaactaagcgtatttcttc

SEQ ID NO: 771920 - DNA, 25 bp, Homo sapien
cagtagccccatctccctacgtagc

SEQ ID NO: 771921 - DNA, 25 bp, Homo sapien
cacaaaagcatttgagcctagccca

SEQ ID NO: 771922 - DNA, 25 bp, Homo sapien
atctccctacgtagccacagagctg

SEQ ID NO: 771923 - DNA, 25 bp, Homo sapien
ttgagcctagcccaaagcaacagcc

SEQ ID NO: 771924 - DNA, 25 bp, Homo sapien
ttgtcaagggtctgctccaagaaat

SEQ ID NO: 771925 - DNA, 25 bp, Homo sapien
tcttgtcaagggtctgctccaagaa

SEQ ID NO: 771926 - DNA, 25 bp, Homo sapien
cttgtcaagggtctgctccaagaaa

SEQ ID NO: 771927 - DNA, 25 bp, Homo sapien
acaattaccaattgtaggaggttca

SEQ ID NO: 771928 - DNA, 25 bp, Homo sapien
ttaccaattgtaggaggttcatgaa

SEQ ID NO: 771929 - DNA, 25 bp, Homo sapien
taccaattgtaggaggttcatgaag

SEQ ID NO: 771930 - DNA, 25 bp, Homo sapien
aattaccaattgtaggaggttcatg

SEQ ID NO: 771931 - DNA, 25 bp, Homo sapien
tccacaagctcctgactcaatcaag

SEQ ID NO: 771932 - DNA, 25 bp, Homo sapien
cacgctcatgtgcagtacgtttcct

SEQ ID NO: 771933 - DNA, 25 bp, Homo sapien
tgtaaagttccttggcacgctcatg

SEQ ID NO: 771934 - DNA, 25 bp, Homo sapien
tcaatcaagttcacagccccggtat

SEQ ID NO: 771935 - DNA, 25 bp, Homo sapien
catcgttgaacatgtcaactaggaa

SEQ ID NO: 771936 - DNA, 25 bp, Homo sapien
gccaggacagtgtcaagctgatctt

SEQ ID NO: 771937 - DNA, 25 bp, Homo sapien
gaaatcaaggcacttctcagcaaaa

SEQ ID NO: 771938 - DNA, 25 bp, Homo sapien
tcttctcggagggtgatgttgttag

SEQ ID NO: 771939 - DNA, 25 bp, Homo sapien
gagaaaacagaactgtgctgcccga

SEQ ID NO: 771940 - DNA, 25 bp, Homo sapien
gcccgatatactgttctgtcaccaa

SEQ ID NO: 771941 - DNA, 25 bp, Homo sapien
cagaactgtgctgcccgatatactg

SEQ ID NO: 771942 - DNA, 25 bp, Homo sapien
tgtgctgcccgatatactgttctgt

SEQ ID NO: 771943 - DNA, 25 bp, Homo sapien
tccaccaatgcaagatgaatccctt

SEQ ID NO: 771944 - DNA, 25 bp, Homo sapien
tagtacagcataagagttcatgaag

SEQ ID NO: 771945 - DNA, 25 bp, Homo sapien
atcccttctttggttgaaacattag

SEQ ID NO: 771946 - DNA, 25 bp, Homo sapien
catgaagagcctctcgaatatctct

SEQ ID NO: 771947 - DNA, 25 bp, Homo sapien
ttccatatggagtccctatcagtag

SEQ ID NO: 771948 - DNA, 25 bp, Homo sapien
catatggagtccctatcagtagggt

SEQ ID NO: 771949 - DNA, 25 bp, Homo sapien
tccatatggagtccctatcagtagg

SEQ ID NO: 771950 - DNA, 25 bp, Homo sapien
tatggagtccctatcagtagggtac

SEQ ID NO: 771951 - DNA, 25 bp, Homo sapien
gctctggcaccaagggaagcaccag

SEQ ID NO: 771952 - DNA, 25 bp, Homo sapien
aagcaccagggttggatgccgactt

SEQ ID NO: 771953 - DNA, 25 bp, Homo sapien
accagggttggatgccgacttccca

SEQ ID NO: 771954 - DNA, 25 bp, Homo sapien
ggatgccgacttcccagaaacttca

SEQ ID NO: 771955 - DNA, 25 bp, Homo sapien
tggacaggttttagcagcattgaaa

SEQ ID NO: 771956 - DNA, 25 bp, Homo sapien
tgttggacaggttttagcagcattg

SEQ ID NO: 771957 - DNA, 25 bp, Homo sapien
tttagcagcattgaaaataagtacc

SEQ ID NO: 771958 - DNA, 25 bp, Homo sapien
ttagcagcattgaaaataagtacca

SEQ ID NO: 771959 - DNA, 25 bp, Homo sapien
actgtctcggaggtaggcatagtgc

SEQ ID NO: 771960 - DNA, 25 bp, Homo sapien
aagactgtctcggaggtaggcatag

SEQ ID NO: 771961 - DNA, 25 bp, Homo sapien
gaaagactgtctcggaggtaggcat

SEQ ID NO: 771962 - DNA, 25 bp, Homo sapien
agactgtctcggaggtaggcatagt

SEQ ID NO: 771963 - DNA, 25 bp, Homo sapien
tgagggtccaagtgctgaagactat

SEQ ID NO: 771964 - DNA, 25 bp, Homo sapien
gggtccaagtgctgaagactataca

SEQ ID NO: 771965 - DNA, 25 bp, Homo sapien
tccaagtgctgaagactatacactc

SEQ ID NO: 771966 - DNA, 25 bp, Homo sapien
gagggtccaagtgctgaagactata

SEQ ID NO: 771967 - DNA, 25 bp, Homo sapien
ccctcaccactactactgtgatggg

SEQ ID NO: 771968 - DNA, 25 bp, Homo sapien
atgggtcggggcctttcatctgttt

SEQ ID NO: 771969 - DNA, 25 bp, Homo sapien
accactactactgtgatgggtcggg

SEQ ID NO: 771970 - DNA, 25 bp, Homo sapien
tttccacagcatctatgcttctctt

SEQ ID NO: 771971 - DNA, 25 bp, Homo sapien
gttccaatactacacaataggcagt

SEQ ID NO: 771972 - DNA, 25 bp, Homo sapien
tccaatactacacaataggcagtct

SEQ ID NO: 771973 - DNA, 25 bp, Homo sapien
caatactacacaataggcagtctcc

SEQ ID NO: 771974 - DNA, 25 bp, Homo sapien
cagttccaatactacacaataggca

SEQ ID NO: 771975 - DNA, 25 bp, Homo sapien
ctgctgaggccaaatcactctgctt

SEQ ID NO: 771976 - DNA, 25 bp, Homo sapien
tgctgctgaggccaaatcactctgc

SEQ ID NO: 771977 - DNA, 25 bp, Homo sapien
gctgctgaggccaaatcactctgct

SEQ ID NO: 771978 - DNA, 25 bp, Homo sapien
ctgctgaggccaaatcactctgctt

SEQ ID NO: 771979 - DNA, 25 bp, Homo sapien
gctgctgaggccaaatcactctgct

SEQ ID NO: 771980 - DNA, 25 bp, Homo sapien
tgctgctgaggccaaatcactctgc

SEQ ID NO: 771981 - DNA, 25 bp, Homo sapien
cagcctcatgtgatgtataatcacc

SEQ ID NO: 771982 - DNA, 25 bp, Homo sapien
agttgcaaagctttggcctgcagcc

SEQ ID NO: 771983 - DNA, 25 bp, Homo sapien
tataagttgcaaagctttggcctgc

SEQ ID NO: 771984 - DNA, 25 bp, Homo sapien
gcctgcagcctcatgtgatgtataa

SEQ ID NO: 771985 - DNA, 25 bp, Homo sapien
tattgccagataaagtccagtgttg

SEQ ID NO: 771986 - DNA, 25 bp, Homo sapien
gcttattagtcccttcagaacagaa

SEQ ID NO: 771987 - DNA, 25 bp, Homo sapien
gagacgcacagttggatttccaagg

SEQ ID NO: 771988 - DNA, 25 bp, Homo sapien
tggtccctggcactaaactcttgag

SEQ ID NO: 771989 - DNA, 25 bp, Homo sapien
tttagaattacggtgcataactttc

SEQ ID NO: 771990 - DNA, 25 bp, Homo sapien
gaattacggtgcataactttcaaac

SEQ ID NO: 771991 - DNA, 25 bp, Homo sapien
gtgtttagaattacggtgcataact

SEQ ID NO: 771992 - DNA, 25 bp, Homo sapien
tgaagtgtttagaattacggtgcat

SEQ ID NO: 771993 - DNA, 25 bp, Homo sapien
gcaaactgaggtggaccaaagtccc

SEQ ID NO: 771994 - DNA, 25 bp, Homo sapien
cacacatcccaaataaggggtaaag

SEQ ID NO: 771995 - DNA, 25 bp, Homo sapien
ctctgaaaaaagtctacttcctgta

SEQ ID NO: 771996 - DNA, 25 bp, Homo sapien
tgtaaaaatttttcacacatcccaa

SEQ ID NO: 771997 - DNA, 25 bp, Homo sapien
tctgaaaaaagtctacttcctgtaa

SEQ ID NO: 771998 - DNA, 25 bp, Homo sapien
cagaagcaactgactcattcaactg

SEQ ID NO: 771999 - DNA, 25 bp, Homo sapien
agacacctaccaaaccctgaagtag

SEQ ID NO: 772000 - DNA, 25 bp, Homo sapien
aacagaagcaactgactcattcaac

SEQ ID NO: 772001 - DNA, 25 bp, Homo sapien
gccccagacacctaccaaaccctga

SEQ ID NO: 772002 - DNA, 25 bp, Homo sapien
caaagctgtcctgcaagtggggcaa

SEQ ID NO: 772003 - DNA, 25 bp, Homo sapien
cactctgtcgcagcatggtctgtag

SEQ ID NO: 772004 - DNA, 25 bp, Homo sapien
gtctgtagaattttgaccacttctg

SEQ ID NO: 772005 - DNA, 25 bp, Homo sapien
gtggggcaaatcagcgatgaaatac

SEQ ID NO: 772006 - DNA, 25 bp, Homo sapien
taaagatttttgaccgtctggacag

SEQ ID NO: 772007 - DNA, 25 bp, Homo sapien
ggagccactcagaggaagagcctag

SEQ ID NO: 772008 - DNA, 25 bp, Homo sapien
gaaaatcctatgattctaaagccag

SEQ ID NO: 772009 - DNA, 25 bp, Homo sapien
cagctgctccattggtcaaagaaga

SEQ ID NO: 772010 - DNA, 25 bp, Homo sapien
gcaaagggttgtctgactcgcccgc

SEQ ID NO: 772011 - DNA, 25 bp, Homo sapien
caaagggttgtctgactcgcccgct

SEQ ID NO: 772012 - DNA, 25 bp, Homo sapien
aagggttgtctgactcgcccgctgg

SEQ ID NO: 772013 - DNA, 25 bp, Homo sapien
gggttgtctgactcgcccgctggct

SEQ ID NO: 772014 - DNA, 25 bp, Homo sapien
ctccacgaggacccaaacccgacag

SEQ ID NO: 772015 - DNA, 25 bp, Homo sapien
gctccacgaggacccaaacccgaca

SEQ ID NO: 772016 - DNA, 25 bp, Homo sapien
tccacgaggacccaaacccgacaga

SEQ ID NO: 772017 - DNA, 25 bp, Homo sapien
cctgaagtaagtagtgcctggaaca

SEQ ID NO: 772018 - DNA, 25 bp, Homo sapien
gaaactgtgtacaccccgagaggaa

SEQ ID NO: 772019 - DNA, 25 bp, Homo sapien
tgccatcgcctgaaagcaaccgtaa

SEQ ID NO: 772020 - DNA, 25 bp, Homo sapien
cgtaaccacgacaacaaggccaggt

SEQ ID NO: 772021 - DNA, 25 bp, Homo sapien
cactgttgcaaacctgctgggggaa

SEQ ID NO: 772022 - DNA, 25 bp, Homo sapien
agtctaagtgcccagagagatgcgg

SEQ ID NO: 772023 - DNA, 25 bp, Homo sapien
ttgcaaacctgctgggggaatgtag

SEQ ID NO: 772024 - DNA, 25 bp, Homo sapien
gagagatgcggagtaggctggcctg

SEQ ID NO: 772025 - DNA, 25 bp, Homo sapien
accatgccttgctaacttttatttt

SEQ ID NO: 772026 - DNA, 25 bp, Homo sapien
ccatgccttgctaacttttattttt

SEQ ID NO: 772027 - DNA, 25 bp, Homo sapien
ggtgtgcagtgacccaatcatggct

SEQ ID NO: 772028 - DNA, 25 bp, Homo sapien
ggctggtgtgcagtgacccaatcat

SEQ ID NO: 772029 - DNA, 25 bp, Homo sapien
taccaaaggatgtttgcttctgagg

SEQ ID NO: 772030 - DNA, 25 bp, Homo sapien
gcctgagagccacaggtaaggacaa

SEQ ID NO: 772031 - DNA, 25 bp, Homo sapien
gcagccacaatgtgcctttgcaggg

SEQ ID NO: 772032 - DNA, 25 bp, Homo sapien
gaagctgcagccacaatgtgccttt

SEQ ID NO: 772033 - DNA, 25 bp, Homo sapien
agaaagcgtactccgcacggtgcac

SEQ ID NO: 772034 - DNA, 25 bp, Homo sapien
acagggcgcggctttccgagaaagc

SEQ ID NO: 772035 - DNA, 25 bp, Homo sapien
acctctccgtctgcaggcgctgagc

SEQ ID NO: 772036 - DNA, 25 bp, Homo sapien
aaaggtgccacagggcgcggctttc

SEQ ID NO: 772037 - DNA, 25 bp, Homo sapien
accatattgttttccggagtgttcg

SEQ ID NO: 772038 - DNA, 25 bp, Homo sapien
tagaaggccattatcagtgaataac

SEQ ID NO: 772039 - DNA, 25 bp, Homo sapien
caccacgtcccactaatgttgttta

SEQ ID NO: 772040 - DNA, 25 bp, Homo sapien
cagcctactcatgaaagtttctcct

SEQ ID NO: 772041 - DNA, 25 bp, Homo sapien
acatgcccagcatgatagttatgtt

SEQ ID NO: 772042 - DNA, 25 bp, Homo sapien
gggaccacaagcactcgccatcaca

SEQ ID NO: 772043 - DNA, 25 bp, Homo sapien
gcccagcatgatagttatgtttttc

SEQ ID NO: 772044 - DNA, 25 bp, Homo sapien
ccagcatgatagttatgtttttccc

SEQ ID NO: 772045 - DNA, 25 bp, Homo sapien
agagcccagagcaggcgcgccgtgg

SEQ ID NO: 772046 - DNA, 25 bp, Homo sapien
aaagcgacgcggcacgcggagagcc

SEQ ID NO: 772047 - DNA, 25 bp, Homo sapien
ccgtggccgggatgcactatccgga

SEQ ID NO: 772048 - DNA, 25 bp, Homo sapien
gcgccgtggccgggatgcactatcc

SEQ ID NO: 772049 - DNA, 25 bp, Homo sapien
gccccgctaatgttgaacgccagcg

SEQ ID NO: 772050 - DNA, 25 bp, Homo sapien
cgcgccccgctaatgttgaacgcca

SEQ ID NO: 772051 - DNA, 25 bp, Homo sapien
ccccgcgccccgctaatgttgaacg

SEQ ID NO: 772052 - DNA, 25 bp, Homo sapien
ccgctaatgttgaacgccagcgccg

SEQ ID NO: 772053 - DNA, 25 bp, Homo sapien
caggtgcgcagcggcgcgcggtgcc

SEQ ID NO: 772054 - DNA, 25 bp, Homo sapien
caggaccggcccgggaggacgcgag

SEQ ID NO: 772055 - DNA, 25 bp, Homo sapien
atctgcggtcttgggcccgccaggt

SEQ ID NO: 772056 - DNA, 25 bp, Homo sapien
gagccccgaggcagcgggctcccat

SEQ ID NO: 772057 - DNA, 25 bp, Homo sapien
cgcaggaagaaatggacgcaacggt

SEQ ID NO: 772058 - DNA, 25 bp, Homo sapien
aagaaggcggggaacgccgcacact

SEQ ID NO: 772059 - DNA, 25 bp, Homo sapien
ccatggagacggcatcgacgcagga

SEQ ID NO: 772060 - DNA, 25 bp, Homo sapien
gccgcacactagagccgcttttttc

SEQ ID NO: 772061 - DNA, 25 bp, Homo sapien
tcttagggagccgagaatatggagc

SEQ ID NO: 772062 - DNA, 25 bp, Homo sapien
gctggaggacaagtgtagtgcccac

SEQ ID NO: 772063 - DNA, 25 bp, Homo sapien
tatggagctagttatctcccgcagg

SEQ ID NO: 772064 - DNA, 25 bp, Homo sapien
tatggagctagttatcaacgaaaac

SEQ ID NO: 772065 - DNA, 25 bp, Homo sapien
cagggctgatcgtcaactcctgtgt

SEQ ID NO: 772066 - DNA, 25 bp, Homo sapien
gggctgatcgtcaactcctgtgtct

SEQ ID NO: 772067 - DNA, 25 bp, Homo sapien
agggctgatcgtcaactcctgtgtc

SEQ ID NO: 772068 - DNA, 25 bp, Homo sapien
ggctgatcgtcaactcctgtgtctt

SEQ ID NO: 772069 - DNA, 25 bp, Homo sapien
gcagcgcactgtgcaggaccgtgcc

SEQ ID NO: 772070 - DNA, 25 bp, Homo sapien
gcactgtgcaggaccgtgcccggct

SEQ ID NO: 772071 - DNA, 25 bp, Homo sapien
cactgtgcaggaccgtgcccggcta

SEQ ID NO: 772072 - DNA, 25 bp, Homo sapien
agcgcactgtgcaggaccgtgcccg

SEQ ID NO: 772073 - DNA, 25 bp, Homo sapien
ctgaaagtagaaaaagaacgaatca

SEQ ID NO: 772074 - DNA, 25 bp, Homo sapien
tttcagcagctctccaatgattagg

SEQ ID NO: 772075 - DNA, 25 bp, Homo sapien
tcagaaatgtagagatctgcctgtt

SEQ ID NO: 772076 - DNA, 25 bp, Homo sapien
cattggaagtcgtaccatcaccagt

SEQ ID NO: 772077 - DNA, 25 bp, Homo sapien
gattaggacattggaagtcgtacca

SEQ ID NO: 772078 - DNA, 25 bp, Homo sapien
ggagaagagcaggcaatgctctagc

SEQ ID NO: 772079 - DNA, 25 bp, Homo sapien
gagaagagcaggcaatgctctagca

SEQ ID NO: 772080 - DNA, 25 bp, Homo sapien
cagtgattattctgggatgaaggcc

SEQ ID NO: 772081 - DNA, 25 bp, Homo sapien
ttcaaatccttcagtgattattctg

SEQ ID NO: 772082 - DNA, 25 bp, Homo sapien
tgacttcttccaaaaaatgaagggc

SEQ ID NO: 772083 - DNA, 25 bp, Homo sapien
aatgaagggcttttccttcacagct

SEQ ID NO: 772084 - DNA, 25 bp, Homo sapien
gatgccctggccacatctttaagtg

SEQ ID NO: 772085 - DNA, 25 bp, Homo sapien
tgaactttagtacaaagagatgccc

SEQ ID NO: 772086 - DNA, 25 bp, Homo sapien
agatgccctggccacatctttaagt

SEQ ID NO: 772087 - DNA, 25 bp, Homo sapien
actttagtacaaagagatgccctgg

SEQ ID NO: 772088 - DNA, 25 bp, Homo sapien
gaagagatcaataggttcatctttt

SEQ ID NO: 772089 - DNA, 25 bp, Homo sapien
aatggccaaaatggagcccactaca

SEQ ID NO: 772090 - DNA, 25 bp, Homo sapien
tttaatggccaaaatggagcccact

SEQ ID NO: 772091 - DNA, 25 bp, Homo sapien
tcttttaatggccaaaatggagccc

SEQ ID NO: 772092 - DNA, 25 bp, Homo sapien
cagatttatgtttcttgtcaatgat

SEQ ID NO: 772093 - DNA, 25 bp, Homo sapien
atttatgtttcttgtcaatgatcac

SEQ ID NO: 772094 - DNA, 25 bp, Homo sapien
cttgtatcagtttcagatttatgtt

SEQ ID NO: 772095 - DNA, 25 bp, Homo sapien
agtttcagatttatgtttcttgtca

SEQ ID NO: 772096 - DNA, 25 bp, Homo sapien
gagccaccaggcccgaccattagta

SEQ ID NO: 772097 - DNA, 25 bp, Homo sapien
ttcttcctatcaagatgctatgctc

SEQ ID NO: 772098 - DNA, 25 bp, Homo sapien
tcttcctatcaagatgctatgctcc

SEQ ID NO: 772099 - DNA, 25 bp, Homo sapien
cgaagctcctccatttaagttaagg

SEQ ID NO: 772100 - DNA, 25 bp, Homo sapien
tattgtccttacagtgggaaacgaa

SEQ ID NO: 772101 - DNA, 25 bp, Homo sapien
gccccttgcacatcttcagaggctg

SEQ ID NO: 772102 - DNA, 25 bp, Homo sapien
gaggctgtttcctataactctccca

SEQ ID NO: 772103 - DNA, 25 bp, Homo sapien
tgtaaaaaacgccagaattcacttc

SEQ ID NO: 772104 - DNA, 25 bp, Homo sapien
atttgttttaactctatcttcaatg

SEQ ID NO: 772105 - DNA, 25 bp, Homo sapien
tctttctgcactcttgtaaaaaacg

SEQ ID NO: 772106 - DNA, 25 bp, Homo sapien
tgcactcttgtaaaaaacgccagaa

SEQ ID NO: 772107 - DNA, 25 bp, Homo sapien
atcctttatctgaattactacagac

SEQ ID NO: 772108 - DNA, 25 bp, Homo sapien
taacaaatcctttatctgaattact

SEQ ID NO: 772109 - DNA, 25 bp, Homo sapien
caaatcctttatctgaattactaca

SEQ ID NO: 772110 - DNA, 25 bp, Homo sapien
gattaataacaaatcctttatctga

SEQ ID NO: 772111 - DNA, 25 bp, Homo sapien
aagagcatctaaggaaaaggggtca

SEQ ID NO: 772112 - DNA, 25 bp, Homo sapien
ttgaaagagcatctaaggaaaaggg

SEQ ID NO: 772113 - DNA, 25 bp, Homo sapien
gagcatctaaggaaaaggggtcaat

SEQ ID NO: 772114 - DNA, 25 bp, Homo sapien
ctttgaaagagcatctaaggaaaag

SEQ ID NO: 772115 - DNA, 25 bp, Homo sapien
tagctctgtgaagagcgactatgcc

SEQ ID NO: 772116 - DNA, 25 bp, Homo sapien
gctctgtgaagagcgactatgcctt

SEQ ID NO: 772117 - DNA, 25 bp, Homo sapien
agctctgtgaagagcgactatgcct

SEQ ID NO: 772118 - DNA, 25 bp, Homo sapien
aatgaataagcaatgttaccagtga

SEQ ID NO: 772119 - DNA, 25 bp, Homo sapien
tctcaagcagtcaggacttaggtcc

SEQ ID NO: 772120 - DNA, 25 bp, Homo sapien
acttaggtcctcaaaagaattcagg

SEQ ID NO: 772121 - DNA, 25 bp, Homo sapien
agcagtcaggacttaggtcctcaaa

SEQ ID NO: 772122 - DNA, 25 bp, Homo sapien
tatacaagtcctgcatgtctcaagc

SEQ ID NO: 772123 - DNA, 25 bp, Homo sapien
agcatattaataaggaacaaacttg

SEQ ID NO: 772124 - DNA, 25 bp, Homo sapien
ccattactacacataaaccttcaaa

SEQ ID NO: 772125 - DNA, 25 bp, Homo sapien
cattactacacataaaccttcaaaa

SEQ ID NO: 772126 - DNA, 25 bp, Homo sapien
ttactacacataaaccttcaaaatg

SEQ ID NO: 772127 - DNA, 25 bp, Homo sapien
ttcaaaaacacgatgtgtgcaaaga

SEQ ID NO: 772128 - DNA, 25 bp, Homo sapien
catctttgatctaagtgtgggctta

SEQ ID NO: 772129 - DNA, 25 bp, Homo sapien
tgcatctttgatctaagtgtgggct

SEQ ID NO: 772130 - DNA, 25 bp, Homo sapien
ttgatctaagtgtgggcttatttgg

SEQ ID NO: 772131 - DNA, 25 bp, Homo sapien
tctttgatctaagtgtgggcttatt

SEQ ID NO: 772132 - DNA, 25 bp, Homo sapien
catcaatagcatttttgacagccct

SEQ ID NO: 772133 - DNA, 25 bp, Homo sapien
catcatcaatagcatttttgacagc

SEQ ID NO: 772134 - DNA, 25 bp, Homo sapien
gcatttttgacagccctcaagccat

SEQ ID NO: 772135 - DNA, 25 bp, Homo sapien
aatagcatttttgacagccctcaag

SEQ ID NO: 772136 - DNA, 25 bp, Homo sapien
aaaagaacacagtattcagccatgc

SEQ ID NO: 772137 - DNA, 25 bp, Homo sapien
aaagaacacagtattcagccatgct

SEQ ID NO: 772138 - DNA, 25 bp, Homo sapien
gaatggtccaaccagaatggcttca

SEQ ID NO: 772139 - DNA, 25 bp, Homo sapien
taggagaatggtccaaccagaatgg

SEQ ID NO: 772140 - DNA, 25 bp, Homo sapien
gagaatggtccaaccagaatggctt

SEQ ID NO: 772141 - DNA, 25 bp, Homo sapien
aataggagaatggtccaaccagaat

SEQ ID NO: 772142 - DNA, 25 bp, Homo sapien
taacgagcaacacatcagcaaatgc

SEQ ID NO: 772143 - DNA, 25 bp, Homo sapien
ccttgccctttacactgagcttata

SEQ ID NO: 772144 - DNA, 25 bp, Homo sapien
cttgggaataacgagcaacacatca

SEQ ID NO: 772145 - DNA, 25 bp, Homo sapien
acttccacggcaccagcaccggaac

SEQ ID NO: 772146 - DNA, 25 bp, Homo sapien
aacaagaatctcattgcatgaagac

SEQ ID NO: 772147 - DNA, 25 bp, Homo sapien
atacaaaagaaacctagctgagtgt

SEQ ID NO: 772148 - DNA, 25 bp, Homo sapien
aagaatctcattgcatgaagacaga

SEQ ID NO: 772149 - DNA, 25 bp, Homo sapien
caagaatctcattgcatgaagacag

SEQ ID NO: 772150 - DNA, 25 bp, Homo sapien
aaggtcaaaaccagaattctgcgca

SEQ ID NO: 772151 - DNA, 25 bp, Homo sapien
ggtcaaaaccagaattctgcgcaag

SEQ ID NO: 772152 - DNA, 25 bp, Homo sapien
gtcaaaaccagaattctgcgcaaga

SEQ ID NO: 772153 - DNA, 25 bp, Homo sapien
caaaaccagaattctgcgcaagaac

SEQ ID NO: 772154 - DNA, 25 bp, Homo sapien
gttcaggtccacacccacgagctga

SEQ ID NO: 772155 - DNA, 25 bp, Homo sapien
cacgagctgacctgattctgaatgt

SEQ ID NO: 772156 - DNA, 25 bp, Homo sapien
ctgtgttcaggtccacacccacgag

SEQ ID NO: 772157 - DNA, 25 bp, Homo sapien
cgagctgacctgattctgaatgttc

SEQ ID NO: 772158 - DNA, 25 bp, Homo sapien
gaaacaaagaactgagtttaaggca

SEQ ID NO: 772159 - DNA, 25 bp, Homo sapien
caaagaactgagtttaaggcaaatg

SEQ ID NO: 772160 - DNA, 25 bp, Homo sapien
acaaagaactgagtttaaggcaaat

SEQ ID NO: 772161 - DNA, 25 bp, Homo sapien
gcttctgctgctaccacgggctcac

SEQ ID NO: 772162 - DNA, 25 bp, Homo sapien
ctgcttctgctgctaccacgggctc

SEQ ID NO: 772163 - DNA, 25 bp, Homo sapien
tgcttctgctgctaccacgggctca

SEQ ID NO: 772164 - DNA, 25 bp, Homo sapien
tttacacaatcgttatcccataatg

SEQ ID NO: 772165 - DNA, 25 bp, Homo sapien
ttacacaatcgttatcccataatgc

SEQ ID NO: 772166 - DNA, 25 bp, Homo sapien
ctcagatgattaggagccctaattc

SEQ ID NO: 772167 - DNA, 25 bp, Homo sapien
ggagccctaattcgactcaacttcc

SEQ ID NO: 772168 - DNA, 25 bp, Homo sapien
tgattaggagccctaattcgactca

SEQ ID NO: 772169 - DNA, 25 bp, Homo sapien
taggagccctaattcgactcaactt

SEQ ID NO: 772170 - DNA, 25 bp, Homo sapien
gctcgcatgatctcatcaaccaaga

SEQ ID NO: 772171 - DNA, 25 bp, Homo sapien
tcagagaagattccagctcgcatga

SEQ ID NO: 772172 - DNA, 25 bp, Homo sapien
caagagaatgttggtggcaaccagt

SEQ ID NO: 772173 - DNA, 25 bp, Homo sapien
gaagattccagctcgcatgatctca

SEQ ID NO: 772174 - DNA, 25 bp, Homo sapien
ttaataaggtaggtaatatatgctt

SEQ ID NO: 772175 - DNA, 25 bp, Homo sapien
taataaggtaggtaatatatgctta

SEQ ID NO: 772176 - DNA, 25 bp, Homo sapien
catgggaaaattcccttgaaactca

SEQ ID NO: 772177 - DNA, 25 bp, Homo sapien
attcccttgaaactcatttgaagct

SEQ ID NO: 772178 - DNA, 25 bp, Homo sapien
caaaagcgtgaaaagtccaactgat

SEQ ID NO: 772179 - DNA, 25 bp, Homo sapien
aatttacactaacgggatgcttcca

SEQ ID NO: 772180 - DNA, 25 bp, Homo sapien
tgaggaaactatgacgctagaggct

SEQ ID NO: 772181 - DNA, 25 bp, Homo sapien
ttcacctgataaccgtagcccttag

SEQ ID NO: 772182 - DNA, 25 bp, Homo sapien
aaactgacggacacgaggtgtagga

SEQ ID NO: 772183 - DNA, 25 bp, Homo sapien
cgaggtgtaggactggccataccac

SEQ ID NO: 772184 - DNA, 25 bp, Homo sapien
ttcagcgggggaaactgacggacac

SEQ ID NO: 772185 - DNA, 25 bp, Homo sapien
gacacgaggtgtaggactggccata

SEQ ID NO: 772186 - DNA, 25 bp, Homo sapien
atgcgcatgctgctccaccaccgcc

SEQ ID NO: 772187 - DNA, 25 bp, Homo sapien
cacggtggcagtcgcctcctccaca

SEQ ID NO: 772188 - DNA, 25 bp, Homo sapien
gtggcagtcgcctcctccacacatg

SEQ ID NO: 772189 - DNA, 25 bp, Homo sapien
acacatgcgcatgctgctccaccac

SEQ ID NO: 772190 - DNA, 25 bp, Homo sapien
agcagggacagcagcggtgatgaac

SEQ ID NO: 772191 - DNA, 25 bp, Homo sapien
gagcgacctccccagccggcggctg

SEQ ID NO: 772192 - DNA, 25 bp, Homo sapien
gagagcgacctccccagccggcggc

SEQ ID NO: 772193 - DNA, 25 bp, Homo sapien
agagcgacctccccagccggcggct

SEQ ID NO: 772194 - DNA, 25 bp, Homo sapien
cgagagcgacctccccagccggcgg

SEQ ID NO: 772195 - DNA, 25 bp, Homo sapien
tgtgtcgatagcatagggtttcact

SEQ ID NO: 772196 - DNA, 25 bp, Homo sapien
tagggtttcactgtcgcctcccaca

SEQ ID NO: 772197 - DNA, 25 bp, Homo sapien
gacaggaaatgtgtcgatagcatag

SEQ ID NO: 772198 - DNA, 25 bp, Homo sapien
gaaatgtgtcgatagcatagggttt

SEQ ID NO: 772199 - DNA, 25 bp, Homo sapien
tggcctgagcaagtaccagccagcg

SEQ ID NO: 772200 - DNA, 25 bp, Homo sapien
ctcctcaatggcctgagcaagtacc

SEQ ID NO: 772201 - DNA, 25 bp, Homo sapien
tcaatggcctgagcaagtaccagcc

SEQ ID NO: 772202 - DNA, 25 bp, Homo sapien
ctgagcaagtaccagccagcgccag

SEQ ID NO: 772203 - DNA, 25 bp, Homo sapien
ctggagcaggcgctgcgcacctact

SEQ ID NO: 772204 - DNA, 25 bp, Homo sapien
cagcaaaggcttgacgctgctggag

SEQ ID NO: 772205 - DNA, 25 bp, Homo sapien
ggtccgcgcagcaaaggcttgacgc

SEQ ID NO: 772206 - DNA, 25 bp, Homo sapien
tggagcaggcgctgcgcacctactg

SEQ ID NO: 772207 - DNA, 25 bp, Homo sapien
gaaggcccgcccctgtgacgtcacc

SEQ ID NO: 772208 - DNA, 25 bp, Homo sapien
ccaatcggaactccaggtgctgggt

SEQ ID NO: 772209 - DNA, 25 bp, Homo sapien
cccaagatgtcgcaaaggcccgccc

SEQ ID NO: 772210 - DNA, 25 bp, Homo sapien
aagatgtcgcaaaggcccgcccctc

SEQ ID NO: 772211 - DNA, 25 bp, Homo sapien
catttttgaccgacataaatactgt

SEQ ID NO: 772212 - DNA, 25 bp, Homo sapien
gaggctgaggttggactacagaggt

SEQ ID NO: 772213 - DNA, 25 bp, Homo sapien
tttccatttttgaccgacataaata

SEQ ID NO: 772214 - DNA, 25 bp, Homo sapien
ccatttttgaccgacataaatactg

SEQ ID NO: 772215 - DNA, 25 bp, Homo sapien
tagaaggtggagaatcatcatcatg

SEQ ID NO: 772216 - DNA, 25 bp, Homo sapien
tcatcatgttgaaaaagaaaatggt

SEQ ID NO: 772217 - DNA, 25 bp, Homo sapien
gaaggtggagaatcatcatcatgtt

SEQ ID NO: 772218 - DNA, 25 bp, Homo sapien
aggtggagaatcatcatcatgttga

SEQ ID NO: 772219 - DNA, 25 bp, Homo sapien
ccatcattggcaggttccggaactg

SEQ ID NO: 772220 - DNA, 25 bp, Homo sapien
cccatcattggcaggttccggaact

SEQ ID NO: 772221 - DNA, 25 bp, Homo sapien
gcccatcattggcaggttccggaac

SEQ ID NO: 772222 - DNA, 25 bp, Homo sapien
tgaggaaagcgaaaggactatccaa

SEQ ID NO: 772223 - DNA, 25 bp, Homo sapien
tggtccttgtgggtcatggtgagtg

SEQ ID NO: 772224 - DNA, 25 bp, Homo sapien
aggaaagcgaaaggactatccaagg

SEQ ID NO: 772225 - DNA, 25 bp, Homo sapien
ccttgtgggtcatggtgagtgggag

SEQ ID NO: 772226 - DNA, 25 bp, Homo sapien
tccagaggccttttcgcaaacttcc

SEQ ID NO: 772227 - DNA, 25 bp, Homo sapien
taaaacatgtctcagctgtgtggaa

SEQ ID NO: 772228 - DNA, 25 bp, Homo sapien
gattatcacttcgagctccgggcaa

SEQ ID NO: 772229 - DNA, 25 bp, Homo sapien
caaattaaacacgacaacagggagg

SEQ ID NO: 772230 - DNA, 25 bp, Homo sapien
tgtgtaaatgcttatgaacaaagta

SEQ ID NO: 772231 - DNA, 25 bp, Homo sapien
cagtactcccatgatgaacaataac

SEQ ID NO: 772232 - DNA, 25 bp, Homo sapien
tagatcagcgatatgattattccac

SEQ ID NO: 772233 - DNA, 25 bp, Homo sapien
gtgtaaggatggcaggattcaccag

SEQ ID NO: 772234 - DNA, 25 bp, Homo sapien
aatacttaatattcactaggcaata

SEQ ID NO: 772235 - DNA, 25 bp, Homo sapien
gcaatattcagcaaagtaatatcca

SEQ ID NO: 772236 - DNA, 25 bp, Homo sapien
aataaatacttaatattcactaggc

SEQ ID NO: 772237 - DNA, 25 bp, Homo sapien
taatattcactaggcaatattcagc

SEQ ID NO: 772238 - DNA, 25 bp, Homo sapien
ctcctgaagctggtttatcaagttg

SEQ ID NO: 772239 - DNA, 25 bp, Homo sapien
ctgaagctggtttatcaagttgtaa

SEQ ID NO: 772240 - DNA, 25 bp, Homo sapien
tcacgtgttgaattcacaagttcat

SEQ ID NO: 772241 - DNA, 25 bp, Homo sapien
taaatcttcacgtgttgaattcaca

SEQ ID NO: 772242 - DNA, 25 bp, Homo sapien
ttttttgcagaaaagctgatccacc

SEQ ID NO: 772243 - DNA, 25 bp, Homo sapien
catctttcttcatttagtgattctg

SEQ ID NO: 772244 - DNA, 25 bp, Homo sapien
catttagtgattctggcataccatt

SEQ ID NO: 772245 - DNA, 25 bp, Homo sapien
tgcagaaaagctgatccaccatctt

SEQ ID NO: 772246 - DNA, 25 bp, Homo sapien
gatcattcgcatggccttcaaattt

SEQ ID NO: 772247 - DNA, 25 bp, Homo sapien
tcgcatggccttcaaatttttggta

SEQ ID NO: 772248 - DNA, 25 bp, Homo sapien
catacagatcattcgcatggccttc

SEQ ID NO: 772249 - DNA, 25 bp, Homo sapien
acagatcattcgcatggccttcaaa

SEQ ID NO: 772250 - DNA, 25 bp, Homo sapien
gagtaactacagttgtattgtgagt

SEQ ID NO: 772251 - DNA, 25 bp, Homo sapien
ctacagttgtattgtgagtaagaag

SEQ ID NO: 772252 - DNA, 25 bp, Homo sapien
gctgagtaactacagttgtattgtg

SEQ ID NO: 772253 - DNA, 25 bp, Homo sapien
cttggctgagtaactacagttgtat

SEQ ID NO: 772254 - DNA, 25 bp, Homo sapien
gagacagttctgatggccacaaaat

SEQ ID NO: 772255 - DNA, 25 bp, Homo sapien
caatccttgcagtgtcttctatggc

SEQ ID NO: 772256 - DNA, 25 bp, Homo sapien
catggttcatggtcaggccaagtaa

SEQ ID NO: 772257 - DNA, 25 bp, Homo sapien
tataatacgggctttgcagtctcag

SEQ ID NO: 772258 - DNA, 25 bp, Homo sapien
tccaccaccttctcgtgtgtgacat

SEQ ID NO: 772259 - DNA, 25 bp, Homo sapien
ccaccttctcgtgtgtgacatctac

SEQ ID NO: 772260 - DNA, 25 bp, Homo sapien
tctcgtgtgtgacatctacctttca

SEQ ID NO: 772261 - DNA, 25 bp, Homo sapien
tcgaggctccatcacatgcctggct

SEQ ID NO: 772262 - DNA, 25 bp, Homo sapien
gtcagacccatcaacaatgttgcgc

SEQ ID NO: 772263 - DNA, 25 bp, Homo sapien
caatgttgcgcttgtgagtatgact

SEQ ID NO: 772264 - DNA, 25 bp, Homo sapien
gacccatcaacaatgttgcgcttgt

SEQ ID NO: 772265 - DNA, 25 bp, Homo sapien
catcaacaatgttgcgcttgtgagt

SEQ ID NO: 772266 - DNA, 25 bp, Homo sapien
ataaccacatcctcacttttctccc

SEQ ID NO: 772267 - DNA, 25 bp, Homo sapien
ccatataaccacatcctcacttttc

SEQ ID NO: 772268 - DNA, 25 bp, Homo sapien
atataaccacatcctcacttttctc

SEQ ID NO: 772269 - DNA, 25 bp, Homo sapien
catataaccacatcctcacttttct

SEQ ID NO: 772270 - DNA, 25 bp, Homo sapien
attctcaagtacattatgaacaagt

SEQ ID NO: 772271 - DNA, 25 bp, Homo sapien
ctgcattctcaagtacattatgaac

SEQ ID NO: 772272 - DNA, 25 bp, Homo sapien
gcattctcaagtacattatgaacaa

SEQ ID NO: 772273 - DNA, 25 bp, Homo sapien
ctcaagtacattatgaacaagttcc

SEQ ID NO: 772274 - DNA, 25 bp, Homo sapien
aacataatttgtagaagataaaatt

SEQ ID NO: 772275 - DNA, 25 bp, Homo sapien
ctgaaagtgcaggagaacataattt

SEQ ID NO: 772276 - DNA, 25 bp, Homo sapien
taatttgtagaagataaaatttgac

SEQ ID NO: 772277 - DNA, 25 bp, Homo sapien
tgtagaagataaaatttgacacaca

SEQ ID NO: 772278 - DNA, 25 bp, Homo sapien
aaaggaaattctgtctggcaagcct

SEQ ID NO: 772279 - DNA, 25 bp, Homo sapien
ggaaaggaaattctgtctggcaagc

SEQ ID NO: 772280 - DNA, 25 bp, Homo sapien
gaaaggaaattctgtctggcaagcc

SEQ ID NO: 772281 - DNA, 25 bp, Homo sapien
ttggaaaggaaattctgtctggcaa

SEQ ID NO: 772282 - DNA, 25 bp, Homo sapien
tttattactccacagacgatccttt

SEQ ID NO: 772283 - DNA, 25 bp, Homo sapien
ttactccacagacgatcctttcaag

SEQ ID NO: 772284 - DNA, 25 bp, Homo sapien
tggttttattactccacagacgatc

SEQ ID NO: 772285 - DNA, 25 bp, Homo sapien
caaacttggttttattactccacag

SEQ ID NO: 772286 - DNA, 25 bp, Homo sapien
tattagccattccaggaggcgagta

SEQ ID NO: 772287 - DNA, 25 bp, Homo sapien
ttagccattccaggaggcgagtagg

SEQ ID NO: 772288 - DNA, 25 bp, Homo sapien
tttattagccattccaggaggcgag

SEQ ID NO: 772289 - DNA, 25 bp, Homo sapien
attttattagccattccaggaggcg

SEQ ID NO: 772290 - DNA, 25 bp, Homo sapien
cttcatggtctttttggggactgca

SEQ ID NO: 772291 - DNA, 25 bp, Homo sapien
catggtctttttggggactgcaaag

SEQ ID NO: 772292 - DNA, 25 bp, Homo sapien
ttcatggtctttttggggactgcaa

SEQ ID NO: 772293 - DNA, 25 bp, Homo sapien
tcatggtctttttggggactgcaaa

SEQ ID NO: 772294 - DNA, 25 bp, Homo sapien
atttcaggaacctttccattactct

SEQ ID NO: 772295 - DNA, 25 bp, Homo sapien
caggaacctttccattactctcagg

SEQ ID NO: 772296 - DNA, 25 bp, Homo sapien
aggaacctttccattactctcaggg

SEQ ID NO: 772297 - DNA, 25 bp, Homo sapien
ttcaggaacctttccattactctca

SEQ ID NO: 772298 - DNA, 25 bp, Homo sapien
ctgtgatgagcatgtgacagaagta

SEQ ID NO: 772299 - DNA, 25 bp, Homo sapien
gacagaagtacagagtgggactgaa

SEQ ID NO: 772300 - DNA, 25 bp, Homo sapien
agactgtgatgagcatgtgacagaa

SEQ ID NO: 772301 - DNA, 25 bp, Homo sapien
agagtgggactgaaacgttccccag

SEQ ID NO: 772302 - DNA, 25 bp, Homo sapien
ccatctgcagggatagcaaacacag

SEQ ID NO: 772303 - DNA, 25 bp, Homo sapien
acacaggtatcagcgggtcaggcaa

SEQ ID NO: 772304 - DNA, 25 bp, Homo sapien
ctgcagggatagcaaacacaggtat

SEQ ID NO: 772305 - DNA, 25 bp, Homo sapien
ggatagcaaacacaggtatcagcgg

SEQ ID NO: 772306 - DNA, 25 bp, Homo sapien
ccacaaagcactgccaaacaccagc

SEQ ID NO: 772307 - DNA, 25 bp, Homo sapien
aagtacggcctttccacaaagcact

SEQ ID NO: 772308 - DNA, 25 bp, Homo sapien
ggcctttccacaaagcactgccaaa

SEQ ID NO: 772309 - DNA, 25 bp, Homo sapien
ttccacaaagcactgccaaacacca

SEQ ID NO: 772310 - DNA, 25 bp, Homo sapien
ccaatctctctattgttccaacttt

SEQ ID NO: 772311 - DNA, 25 bp, Homo sapien
gtatatgtgctaccgaagcaagcat

SEQ ID NO: 772312 - DNA, 25 bp, Homo sapien
gcacagaggccatgccaatctctct

SEQ ID NO: 772313 - DNA, 25 bp, Homo sapien
aggccatgccaatctctctattgtt

SEQ ID NO: 772314 - DNA, 25 bp, Homo sapien
ttcagctgaaagtgacataaagaca

SEQ ID NO: 772315 - DNA, 25 bp, Homo sapien
tagattcagctgaaagtgacataaa

SEQ ID NO: 772316 - DNA, 25 bp, Homo sapien
tggtagattcagctgaaagtgacat

SEQ ID NO: 772317 - DNA, 25 bp, Homo sapien
cagctgaaagtgacataaagacatt

SEQ ID NO: 772318 - DNA, 25 bp, Homo sapien
ttgaccatttttgtgttatagttca

SEQ ID NO: 772319 - DNA, 25 bp, Homo sapien
tgaccatttttgtgttatagttcaa

SEQ ID NO: 772320 - DNA, 25 bp, Homo sapien
gtgttatagttcaagtctttttgta

SEQ ID NO: 772321 - DNA, 25 bp, Homo sapien
ttgtgttatagttcaagtctttttg

SEQ ID NO: 772322 - DNA, 25 bp, Homo sapien
cctgggtggctggaagttcctagac

SEQ ID NO: 772323 - DNA, 25 bp, Homo sapien
gaagggctggttgccagagaaacca

SEQ ID NO: 772324 - DNA, 25 bp, Homo sapien
aataggagcaccttctgttttaata

SEQ ID NO: 772325 - DNA, 25 bp, Homo sapien
aatacatatttggtatttgcccctg

SEQ ID NO: 772326 - DNA, 25 bp, Homo sapien
cagctgcttgctgatgaagcaatag

SEQ ID NO: 772327 - DNA, 25 bp, Homo sapien
gctgcttgctgatgaagcaataggg

SEQ ID NO: 772328 - DNA, 25 bp, Homo sapien
tgcttgctgatgaagcaatagggaa

SEQ ID NO: 772329 - DNA, 25 bp, Homo sapien
cttgctgatgaagcaatagggaaat

SEQ ID NO: 772330 - DNA, 25 bp, Homo sapien
ctctggaacccacatataggaaaag

SEQ ID NO: 772331 - DNA, 25 bp, Homo sapien
atattagttgggcacagtaccaagc

SEQ ID NO: 772332 - DNA, 25 bp, Homo sapien
tagttgggcacagtaccaagcacct

SEQ ID NO: 772333 - DNA, 25 bp, Homo sapien
gggcacagtaccaagcacctatagt

SEQ ID NO: 772334 - DNA, 25 bp, Homo sapien
accagcattccgtttcccattggca

SEQ ID NO: 772335 - DNA, 25 bp, Homo sapien
atcaccagcattccgtttcccattg

SEQ ID NO: 772336 - DNA, 25 bp, Homo sapien
cagcattccgtttcccattggcaag

SEQ ID NO: 772337 - DNA, 25 bp, Homo sapien
aaatcaccagcattccgtttcccat

SEQ ID NO: 772338 - DNA, 25 bp, Homo sapien
ggacatgttaagcttattttcctgc

SEQ ID NO: 772339 - DNA, 25 bp, Homo sapien
tatttccattattacattgtagtat

SEQ ID NO: 772340 - DNA, 25 bp, Homo sapien
atttattaggcactttatttccatt

SEQ ID NO: 772341 - DNA, 25 bp, Homo sapien
agaatcagtggacatgttaagctta

SEQ ID NO: 772342 - DNA, 25 bp, Homo sapien
agttgggcctggaaaaatcatcgtg

SEQ ID NO: 772343 - DNA, 25 bp, Homo sapien
catcgtgaggtatgagcttggccta

SEQ ID NO: 772344 - DNA, 25 bp, Homo sapien
gaaaggcaggcgcttggcttgtggg

SEQ ID NO: 772345 - DNA, 25 bp, Homo sapien
cctggaaaaatcatcgtgaggtatg

SEQ ID NO: 772346 - DNA, 25 bp, Homo sapien
tgtccaggctgccaggaaataggtg

SEQ ID NO: 772347 - DNA, 25 bp, Homo sapien
cttgtagatacagccaggaggaaga

SEQ ID NO: 772348 - DNA, 25 bp, Homo sapien
aggcaggagttggtcttgtagatac

SEQ ID NO: 772349 - DNA, 25 bp, Homo sapien
caggctgccaggaaataggtggaaa

SEQ ID NO: 772350 - DNA, 25 bp, Homo sapien
tatgagaaaggacctcggcctagag

SEQ ID NO: 772351 - DNA, 25 bp, Homo sapien
cctggacaggttgccagaggcatca

SEQ ID NO: 772352 - DNA, 25 bp, Homo sapien
cctggagtggccaaaaagcgaaagc

SEQ ID NO: 772353 - DNA, 25 bp, Homo sapien
cacggaagccactgtgaggcaagag

SEQ ID NO: 772354 - DNA, 25 bp, Homo sapien
aagaggccaatttgaggatgatttg

SEQ ID NO: 772355 - DNA, 25 bp, Homo sapien
aagaagaggccaatttgaggatgat

SEQ ID NO: 772356 - DNA, 25 bp, Homo sapien
aaagaagaggccaatttgaggatga

SEQ ID NO: 772357 - DNA, 25 bp, Homo sapien
gaagaggccaatttgaggatgattt

SEQ ID NO: 772358 - DNA, 25 bp, Homo sapien
actggaggacgatttgggtcttcag

SEQ ID NO: 772359 - DNA, 25 bp, Homo sapien
caactggaggacgatttgggtcttc

SEQ ID NO: 772360 - DNA, 25 bp, Homo sapien
accaactggaggacgatttgggtct

SEQ ID NO: 772361 - DNA, 25 bp, Homo sapien
ccaactggaggacgatttgggtctt

SEQ ID NO: 772362 - DNA, 25 bp, Homo sapien
gaggctgacttgagttcaagttctg

SEQ ID NO: 772363 - DNA, 25 bp, Homo sapien
cagggcctgagaaggccaccaagag

SEQ ID NO: 772364 - DNA, 25 bp, Homo sapien
gagaaggccaccaagaggcatgagc

SEQ ID NO: 772365 - DNA, 25 bp, Homo sapien
agcagggcctgagaaggccaccaag

SEQ ID NO: 772366 - DNA, 25 bp, Homo sapien
gaggctgccagaagtcagataggaa

SEQ ID NO: 772367 - DNA, 25 bp, Homo sapien
gagctgggcttgtcgaagctgccaa

SEQ ID NO: 772368 - DNA, 25 bp, Homo sapien
aaaaccagaagaggctaccatgagg

SEQ ID NO: 772369 - DNA, 25 bp, Homo sapien
tgtttaggctgccacgaggctgaca

SEQ ID NO: 772370 - DNA, 25 bp, Homo sapien
ggcactctgctgtaaagtgaacaaa

SEQ ID NO: 772371 - DNA, 25 bp, Homo sapien
taggctccttgatgctgttgaccat

SEQ ID NO: 772372 - DNA, 25 bp, Homo sapien
ttgaccatcaaaggcttaaagctgg

SEQ ID NO: 772373 - DNA, 25 bp, Homo sapien
ggaagctttaggctccttgatgctg

SEQ ID NO: 772374 - DNA, 25 bp, Homo sapien
ttactatcgatttgtcagaaatcca

SEQ ID NO: 772375 - DNA, 25 bp, Homo sapien
caggcagaatttactatcgatttgt

SEQ ID NO: 772376 - DNA, 25 bp, Homo sapien
cagaatttactatcgatttgtcaga

SEQ ID NO: 772377 - DNA, 25 bp, Homo sapien
ctatcgatttgtcagaaatccactc

SEQ ID NO: 772378 - DNA, 25 bp, Homo sapien
acaggtgtatcagacgaggtcggga

SEQ ID NO: 772379 - DNA, 25 bp, Homo sapien
cgctggtctgaaactgctaccctca

SEQ ID NO: 772380 - DNA, 25 bp, Homo sapien
ggtgtatcagacgaggtcgggagtt

SEQ ID NO: 772381 - DNA, 25 bp, Homo sapien
aagacaggtgtatcagacgaggtcg

SEQ ID NO: 772382 - DNA, 25 bp, Homo sapien
tgccttggcctcctgagtagctggg

SEQ ID NO: 772383 - DNA, 25 bp, Homo sapien
gtgcccgccaccatgcccgtctaat

SEQ ID NO: 772384 - DNA, 25 bp, Homo sapien
ttacaggggcccgccatcacaccca

SEQ ID NO: 772385 - DNA, 25 bp, Homo sapien
acctcctgatttcaagcgattctcc

SEQ ID NO: 772386 - DNA, 25 bp, Homo sapien
ctccgcctccacctcagccgccgcc

SEQ ID NO: 772387 - DNA, 25 bp, Homo sapien
ggcccgacccagccgccaccgccgc

SEQ ID NO: 772388 - DNA, 25 bp, Homo sapien
ctccctccgcctccacctcagccgc

SEQ ID NO: 772389 - DNA, 25 bp, Homo sapien
cgcctccctccgcctccacctcagc

SEQ ID NO: 772390 - DNA, 25 bp, Homo sapien
ctcttagcaggacgggagccgccat

SEQ ID NO: 772391 - DNA, 25 bp, Homo sapien
ccttctcccgctccacgtggtaggc

SEQ ID NO: 772392 - DNA, 25 bp, Homo sapien
tcccgctccacgtggtaggcgtaga

SEQ ID NO: 772393 - DNA, 25 bp, Homo sapien
tctcccgctccacgtggtaggcgta

SEQ ID NO: 772394 - DNA, 25 bp, Homo sapien
cccgctccacgtggtaggcgtagat

SEQ ID NO: 772395 - DNA, 25 bp, Homo sapien
gacacagggcttgcgaaatgagaat

SEQ ID NO: 772396 - DNA, 25 bp, Homo sapien
tctttgtctgttaactttcctctgg

SEQ ID NO: 772397 - DNA, 25 bp, Homo sapien
cgtgtttggattaagacacagggct

SEQ ID NO: 772398 - DNA, 25 bp, Homo sapien
gcttgcgaaatgagaataaagtgag

SEQ ID NO: 772399 - DNA, 25 bp, Homo sapien
ttactggctgtacatggtagaattg

SEQ ID NO: 772400 - DNA, 25 bp, Homo sapien
caggagatagtggtgtgttattgtt

SEQ ID NO: 772401 - DNA, 25 bp, Homo sapien
tttccatcattatgcctccccaaaa

SEQ ID NO: 772402 - DNA, 25 bp, Homo sapien
tgtagcctactaatttcggtgaaat

SEQ ID NO: 772403 - DNA, 25 bp, Homo sapien
cagccctaggttctattctaattct

SEQ ID NO: 772404 - DNA, 25 bp, Homo sapien
tacctggatcaagtgttagtctgcg

SEQ ID NO: 772405 - DNA, 25 bp, Homo sapien
taaggatgcatacgtgatacttcca

SEQ ID NO: 772406 - DNA, 25 bp, Homo sapien
tgggttagaatcaggcctctgccac

SEQ ID NO: 772407 - DNA, 25 bp, Homo sapien
gataaaagctacctgcctcatggga

SEQ ID NO: 772408 - DNA, 25 bp, Homo sapien
gtttgctctgtcgctcaggctggag

SEQ ID NO: 772409 - DNA, 25 bp, Homo sapien
ttattttcttgagacagagtttgct

SEQ ID NO: 772410 - DNA, 25 bp, Homo sapien
attttcttgagacagagtttgctct

SEQ ID NO: 772411 - DNA, 25 bp, Homo sapien
gccactacacccagtctattttatt

SEQ ID NO: 772412 - DNA, 25 bp, Homo sapien
tcaataacatttttatcctttctaa

SEQ ID NO: 772413 - DNA, 25 bp, Homo sapien
aatcaataacatttttatcctttct

SEQ ID NO: 772414 - DNA, 25 bp, Homo sapien
taatcaataacatttttatcctttc

SEQ ID NO: 772415 - DNA, 25 bp, Homo sapien
ctaatcaataacatttttatccttt

SEQ ID NO: 772416 - DNA, 25 bp, Homo sapien
acaattgcgtattacctcaaagagg

SEQ ID NO: 772417 - DNA, 25 bp, Homo sapien
tactgccgattattacaagaaccag

SEQ ID NO: 772418 - DNA, 25 bp, Homo sapien
taatgtgtaccctcagaaactggaa

SEQ ID NO: 772419 - DNA, 25 bp, Homo sapien
ttatatgctgcaatattgtacgaca

SEQ ID NO: 772420 - DNA, 25 bp, Homo sapien
gatgtcatcagctttaaggcgtatc

SEQ ID NO: 772421 - DNA, 25 bp, Homo sapien
cagaagtacctggaagatgtcatca

SEQ ID NO: 772422 - DNA, 25 bp, Homo sapien
taaggtaagttggttaagatgctcc

SEQ ID NO: 772423 - DNA, 25 bp, Homo sapien
taagatgcacagttattttatgcca

SEQ ID NO: 772424 - DNA, 25 bp, Homo sapien
tactgagcagtacccttaaaaatgt

SEQ ID NO: 772425 - DNA, 25 bp, Homo sapien
tcagctctgaataaggtcatgtctt

SEQ ID NO: 772426 - DNA, 25 bp, Homo sapien
ggagactggttgtacaacaatatga

SEQ ID NO: 772427 - DNA, 25 bp, Homo sapien
actttttaccatgtaattaatcagc

SEQ ID NO: 772428 - DNA, 25 bp, Homo sapien
ctcctatctctttgattatcatttc

SEQ ID NO: 772429 - DNA, 25 bp, Homo sapien
cttttgcagaagtactacgtgactg

SEQ ID NO: 772430 - DNA, 25 bp, Homo sapien
cattcataacctcttttgcagaagt

SEQ ID NO: 772431 - DNA, 25 bp, Homo sapien
tactacgtgactggccttggacttc

SEQ ID NO: 772432 - DNA, 25 bp, Homo sapien
gaaacacgggatgttacacgcactg

SEQ ID NO: 772433 - DNA, 25 bp, Homo sapien
tagtcatggtgtcagtaaagcttcc

SEQ ID NO: 772434 - DNA, 25 bp, Homo sapien
tgacatgcgattgagccagctgaga

SEQ ID NO: 772435 - DNA, 25 bp, Homo sapien
tcagctgttgaggaacatactgcct

SEQ ID NO: 772436 - DNA, 25 bp, Homo sapien
agtggtccccaaaggtcaatatctg

SEQ ID NO: 772437 - DNA, 25 bp, Homo sapien
tgagtgtggctttgtcaacacccaa

SEQ ID NO: 772438 - DNA, 25 bp, Homo sapien
gaatgaagacgcttggctgccagtg

SEQ ID NO: 772439 - DNA, 25 bp, Homo sapien
gccagtgttcttggactctgcctat

SEQ ID NO: 772440 - DNA, 25 bp, Homo sapien
ggtaccgtgcttgtattaataccag

SEQ ID NO: 772441 - DNA, 25 bp, Homo sapien
tacgaaaggctatgtgtgcatactg

SEQ ID NO: 772442 - DNA, 25 bp, Homo sapien
taatctctagagctaccacataaga

SEQ ID NO: 772443 - DNA, 25 bp, Homo sapien
ggacaagggaacttaccagagaaga

SEQ ID NO: 772444 - DNA, 25 bp, Homo sapien
gcttcgctgtttcaaggcttccaca

SEQ ID NO: 772445 - DNA, 25 bp, Homo sapien
ggactcggctgtttcaaggcttcgc

SEQ ID NO: 772446 - DNA, 25 bp, Homo sapien
tattctgagcttcgaatgtgacctg

SEQ ID NO: 772447 - DNA, 25 bp, Homo sapien
tggtttagacatgcccacagtggga

SEQ ID NO: 772448 - DNA, 25 bp, Homo sapien
agtggcagatgaccaacccaaagcc

SEQ ID NO: 772449 - DNA, 25 bp, Homo sapien
ttccaaccacctggtgtggccctga

SEQ ID NO: 772450 - DNA, 25 bp, Homo sapien
ccccggagtgcttggagtctgggtc

SEQ ID NO: 772451 - DNA, 25 bp, Homo sapien
ccacagtggcagatgaccaacccaa

SEQ ID NO: 772452 - DNA, 25 bp, Homo sapien
agccatgtcttgctgcaacctggac

SEQ ID NO: 772453 - DNA, 25 bp, Homo sapien
accatcatggttggcatgaaagcca

SEQ ID NO: 772454 - DNA, 25 bp, Homo sapien
cagccgtggccatttacaggatagt

SEQ ID NO: 772455 - DNA, 25 bp, Homo sapien
cagtcacatgggcacccagtctttg

SEQ ID NO: 772456 - DNA, 25 bp, Homo sapien
ttcagggtttggcaaaatattggct

SEQ ID NO: 772457 - DNA, 25 bp, Homo sapien
cacagccaccttggtttcagggttt

SEQ ID NO: 772458 - DNA, 25 bp, Homo sapien
gggtttggcaaaatattggcttcca

SEQ ID NO: 772459 - DNA, 25 bp, Homo sapien
tactgctgctactgcaaccaccaca

SEQ ID NO: 772460 - DNA, 25 bp, Homo sapien
cctgctaagccttgtttccggcaga

SEQ ID NO: 772461 - DNA, 25 bp, Homo sapien
ccttgtttccggcagaaatgaatgc

SEQ ID NO: 772462 - DNA, 25 bp, Homo sapien
gccttgtttctcctgctaagccttg

SEQ ID NO: 772463 - DNA, 25 bp, Homo sapien
tgtcgctgctctggctaagccttgt

SEQ ID NO: 772464 - DNA, 25 bp, Homo sapien
tatacaattacagcccccgagtctt

SEQ ID NO: 772465 - DNA, 25 bp, Homo sapien
gtgcctggttgagttcgcaaatctg

SEQ ID NO: 772466 - DNA, 25 bp, Homo sapien
taaaatgccctgttatacaattaca

SEQ ID NO: 772467 - DNA, 25 bp, Homo sapien
cctggttgagttcgcaaatctgttg

SEQ ID NO: 772468 - DNA, 25 bp, Homo sapien
tatttttagggctcaattccgtaga

SEQ ID NO: 772469 - DNA, 25 bp, Homo sapien
gaagacatctctcttggagcccttg

SEQ ID NO: 772470 - DNA, 25 bp, Homo sapien
gagcactctggatgacatgtcaggc

SEQ ID NO: 772471 - DNA, 25 bp, Homo sapien
gcagctgtcgtcctaagacttccaa

SEQ ID NO: 772472 - DNA, 25 bp, Homo sapien
ctgtcaataatgttagagtgcagtg

SEQ ID NO: 772473 - DNA, 25 bp, Homo sapien
actctgtcaataatgttagagtgca

SEQ ID NO: 772474 - DNA, 25 bp, Homo sapien
tctcactctgtcaataatgttagag

SEQ ID NO: 772475 - DNA, 25 bp, Homo sapien
tcactctgtcaataatgttagagtg

SEQ ID NO: 772476 - DNA, 25 bp, Homo sapien
tataaaatataagtccaaagacact

SEQ ID NO: 772477 - DNA, 25 bp, Homo sapien
aatataagtccaaagacactgtttg

SEQ ID NO: 772478 - DNA, 25 bp, Homo sapien
caaaagaccaaatcctcgaccccat

SEQ ID NO: 772479 - DNA, 25 bp, Homo sapien
taagtccaaagacactgtttggctg

SEQ ID NO: 772480 - DNA, 25 bp, Homo sapien
tgcagaactccttcagcacaaagta

SEQ ID NO: 772481 - DNA, 25 bp, Homo sapien
gaccccacgaccgacatgatggagg

SEQ ID NO: 772482 - DNA, 25 bp, Homo sapien
gaatgtaggccaggtacagggaccc

SEQ ID NO: 772483 - DNA, 25 bp, Homo sapien
gacgtcatgaggatcaaagccgcca

SEQ ID NO: 772484 - DNA, 25 bp, Homo sapien
aggcctcgttcaagtaaactagtcg

SEQ ID NO: 772485 - DNA, 25 bp, Homo sapien
aaggaagttcagcacgtacgtgacg

SEQ ID NO: 772486 - DNA, 25 bp, Homo sapien
aactagtcgtttgtagttgataatg

SEQ ID NO: 772487 - DNA, 25 bp, Homo sapien
cgtttgtagttgataatgagaagaa

SEQ ID NO: 772488 - DNA, 25 bp, Homo sapien
ataaactgaatggaaaggggcttga

SEQ ID NO: 772489 - DNA, 25 bp, Homo sapien
aataaactgaatggaaaggggcttg

SEQ ID NO: 772490 - DNA, 25 bp, Homo sapien
ttgagactgttagggtggagtctgt

SEQ ID NO: 772491 - DNA, 25 bp, Homo sapien
gcttgagactgttagggtggagtct

SEQ ID NO: 772492 - DNA, 25 bp, Homo sapien
gaatctacatgtttaaatccatcgg

SEQ ID NO: 772493 - DNA, 25 bp, Homo sapien
gtctttgattggctcggcgtatcct

SEQ ID NO: 772494 - DNA, 25 bp, Homo sapien
gaattactagcaatggttgctcact

SEQ ID NO: 772495 - DNA, 25 bp, Homo sapien
gacacagaaaatagcgagggcccct

SEQ ID NO: 772496 - DNA, 25 bp, Homo sapien
cacaaactggacttgaacgttccaa

SEQ ID NO: 772497 - DNA, 25 bp, Homo sapien
tattatttgctgcaaccacggctgc

SEQ ID NO: 772498 - DNA, 25 bp, Homo sapien
tctgtaaggttaacaactggcccag

SEQ ID NO: 772499 - DNA, 25 bp, Homo sapien
tcagtcaacgctgagctgacagttc

SEQ ID NO: 772500 - DNA, 25 bp, Homo sapien
tattctcccgatgaagcaaactggg

SEQ ID NO: 772501 - DNA, 25 bp, Homo sapien
gatgcgctgctacaagatggcctca

SEQ ID NO: 772502 - DNA, 25 bp, Homo sapien
catttgagtttacagagcagagccc

SEQ ID NO: 772503 - DNA, 25 bp, Homo sapien
taacactggtggctagtaatgctgc

SEQ ID NO: 772504 - DNA, 25 bp, Homo sapien
gggaaacctgcccagtgaactccat

SEQ ID NO: 772505 - DNA, 25 bp, Homo sapien
cacagtgggtctccttgttggcatc

SEQ ID NO: 772506 - DNA, 25 bp, Homo sapien
taggttaccagaaatcacagtgggt

SEQ ID NO: 772507 - DNA, 25 bp, Homo sapien
tagaaaccataagtgctgcctgagg

SEQ ID NO: 772508 - DNA, 25 bp, Homo sapien
tattccgtgaagtatggctcagctg

SEQ ID NO: 772509 - DNA, 25 bp, Homo sapien
caaccctgtataccttagaaatgag

SEQ ID NO: 772510 - DNA, 25 bp, Homo sapien
cctttccacaggtcttgagctccag

SEQ ID NO: 772511 - DNA, 25 bp, Homo sapien
tcttttggaatgcaaccctgcagtt

SEQ ID NO: 772512 - DNA, 25 bp, Homo sapien
gacaaccaaaaagtgcagcgttcct

SEQ ID NO: 772513 - DNA, 25 bp, Homo sapien
tgagcaagactgataccacctgcgt

SEQ ID NO: 772514 - DNA, 25 bp, Homo sapien
cagcgttccttttgcgagagagata

SEQ ID NO: 772515 - DNA, 25 bp, Homo sapien
aacagcctgtttacttgagcaagac

SEQ ID NO: 772516 - DNA, 25 bp, Homo sapien
gagagctcatttggaattttgccga

SEQ ID NO: 772517 - DNA, 25 bp, Homo sapien
catctgggtctggatcaaaaacgca

SEQ ID NO: 772518 - DNA, 25 bp, Homo sapien
cagaaaatacgtggttggagagctc

SEQ ID NO: 772519 - DNA, 25 bp, Homo sapien
tttggctcatgggataacgtacccg

SEQ ID NO: 772520 - DNA, 25 bp, Homo sapien
aagggttactttgtccagaacacat

SEQ ID NO: 772521 - DNA, 25 bp, Homo sapien
ctttgtccagaacacatattttgac

SEQ ID NO: 772522 - DNA, 25 bp, Homo sapien
ggttactttgtccagaacacatatt

SEQ ID NO: 772523 - DNA, 25 bp, Homo sapien
tactttgtccagaacacatattttg

SEQ ID NO: 772524 - DNA, 25 bp, Homo sapien
gggaccatccaatacctgactgaca

SEQ ID NO: 772525 - DNA, 25 bp, Homo sapien
cttcgaggccgacatcagcaacctg

SEQ ID NO: 772526 - DNA, 25 bp, Homo sapien
ggctccgaatcactatcgccatcaa

SEQ ID NO: 772527 - DNA, 25 bp, Homo sapien
tgaatggggtcgacacgctagagca

SEQ ID NO: 772528 - DNA, 25 bp, Homo sapien
ggattggcagtgcccattcctatgc

SEQ ID NO: 772529 - DNA, 25 bp, Homo sapien
ctgaggattggcagtgcccattcct

SEQ ID NO: 772530 - DNA, 25 bp, Homo sapien
gaggattggcagtgcccattcctat

SEQ ID NO: 772531 - DNA, 25 bp, Homo sapien
tgaggattggcagtgcccattccta

SEQ ID NO: 772532 - DNA, 25 bp, Homo sapien
ccagggtcaaattgagagagaaatg

SEQ ID NO: 772533 - DNA, 25 bp, Homo sapien
ttgagagagaaatgtagaagttgtc

SEQ ID NO: 772534 - DNA, 25 bp, Homo sapien
tgtagaagttgtcgcctgcacaggg

SEQ ID NO: 772535 - DNA, 25 bp, Homo sapien
gcagctccagggtcaaattgagaga

SEQ ID NO: 772536 - DNA, 25 bp, Homo sapien
ctctgtggagtctcctttcttgagt

SEQ ID NO: 772537 - DNA, 25 bp, Homo sapien
ttcctctgggcatgtctttgtgttg

SEQ ID NO: 772538 - DNA, 25 bp, Homo sapien
agcctcttgatagtcagggcccttt

SEQ ID NO: 772539 - DNA, 25 bp, Homo sapien
gatgactttttcaccccatgtccta

SEQ ID NO: 772540 - DNA, 25 bp, Homo sapien
tgtcccagatgactttttcacccca

SEQ ID NO: 772541 - DNA, 25 bp, Homo sapien
gggccctttcgatcttgtcccagat

SEQ ID NO: 772542 - DNA, 25 bp, Homo sapien
ccgacacaatctacacaggtcctgt

SEQ ID NO: 772543 - DNA, 25 bp, Homo sapien
caatctacacaggtcctgttgactt

SEQ ID NO: 772544 - DNA, 25 bp, Homo sapien
ccccgacacaatctacacaggtcct

SEQ ID NO: 772545 - DNA, 25 bp, Homo sapien
gacacaatctacacaggtcctgttg

SEQ ID NO: 772546 - DNA, 25 bp, Homo sapien
tcagggagaggagattcaagataac

SEQ ID NO: 772547 - DNA, 25 bp, Homo sapien
taaatacctccactaccagagagac

SEQ ID NO: 772548 - DNA, 25 bp, Homo sapien
tacaacaggaactcctgaagcgtct

SEQ ID NO: 772549 - DNA, 25 bp, Homo sapien
tctgattctgttagtacaagctggg

SEQ ID NO: 772550 - DNA, 25 bp, Homo sapien
cagaggtgatctccccttctcgtgt

SEQ ID NO: 772551 - DNA, 25 bp, Homo sapien
tatctcagggtacatgatatcgatg

SEQ ID NO: 772552 - DNA, 25 bp, Homo sapien
tgtagaacgtcccttgatttgtgat

SEQ ID NO: 772553 - DNA, 25 bp, Homo sapien
cttttgaggaagagtaccacagagg

SEQ ID NO: 772554 - DNA, 25 bp, Homo sapien
cctgggtgtttcatttactaactga

SEQ ID NO: 772555 - DNA, 25 bp, Homo sapien
aagagcagcgtaaagaaagtggaaa

SEQ ID NO: 772556 - DNA, 25 bp, Homo sapien
cttctcctgggtgtttcatttacta

SEQ ID NO: 772557 - DNA, 25 bp, Homo sapien
ctaactgatctgaaagagcagcgta

SEQ ID NO: 772558 - DNA, 25 bp, Homo sapien
cctggcgacggccgcgccaatagga

SEQ ID NO: 772559 - DNA, 25 bp, Homo sapien
gcagccgccggtcctgtccccaccc

SEQ ID NO: 772560 - DNA, 25 bp, Homo sapien
cgacggccgcgccaataggaggccg

SEQ ID NO: 772561 - DNA, 25 bp, Homo sapien
ttttctggccgggatggcgtcagca

SEQ ID NO: 772562 - DNA, 25 bp, Homo sapien
tggccgcacggatagtgtcgcgccc

SEQ ID NO: 772563 - DNA, 25 bp, Homo sapien
cgcctggccgcacggatagtgtcgc

SEQ ID NO: 772564 - DNA, 25 bp, Homo sapien
cctggccgcacggatagtgtcgcgc

SEQ ID NO: 772565 - DNA, 25 bp, Homo sapien
tccgcctggccgcacggatagtgtc

SEQ ID NO: 772566 - DNA, 25 bp, Homo sapien
cttggggacgcggacgtgagcgcgc

SEQ ID NO: 772567 - DNA, 25 bp, Homo sapien
gtgagcgcgcgccacggtgctcggc

SEQ ID NO: 772568 - DNA, 25 bp, Homo sapien
tcctccacgcccgtcccgcccatcc

SEQ ID NO: 772569 - DNA, 25 bp, Homo sapien
acgcggacgtgagcgcgcgccacgg

SEQ ID NO: 772570 - DNA, 25 bp, Homo sapien
ctggaagacaagaccggactgacga

SEQ ID NO: 772571 - DNA, 25 bp, Homo sapien
gggctggctccgagttctgggcact

SEQ ID NO: 772572 - DNA, 25 bp, Homo sapien
tgggcactgcgcttgagggagcgca

SEQ ID NO: 772573 - DNA, 25 bp, Homo sapien
agaccggactgacgacctccttggc

SEQ ID NO: 772574 - DNA, 25 bp, Homo sapien
ctcgtcgtccggaagcttcggtcct

SEQ ID NO: 772575 - DNA, 25 bp, Homo sapien
tcctcgtcgtccggaagcttcggtc

SEQ ID NO: 772576 - DNA, 25 bp, Homo sapien
tcgtcgtccggaagcttcggtcctc

SEQ ID NO: 772577 - DNA, 25 bp, Homo sapien
tggagccacgaggcgacgtcccctt

SEQ ID NO: 772578 - DNA, 25 bp, Homo sapien
ctaagaggcagggtccagtgagaca

SEQ ID NO: 772579 - DNA, 25 bp, Homo sapien
acagtcaaggacaagaacacttagg

SEQ ID NO: 772580 - DNA, 25 bp, Homo sapien
caagaacacttaggggctgagcttt

SEQ ID NO: 772581 - DNA, 25 bp, Homo sapien
tgcttcccggagttcccttcatcaa

SEQ ID NO: 772582 - DNA, 25 bp, Homo sapien
tcctgcttcccggagttcccttcat

SEQ ID NO: 772583 - DNA, 25 bp, Homo sapien
catcaagcatcaggcgaacagcccc

SEQ ID NO: 772584 - DNA, 25 bp, Homo sapien
cctgcttcccggagttcccttcatc

SEQ ID NO: 772585 - DNA, 25 bp, Homo sapien
tcaggaaggactcgagaaatgccag

SEQ ID NO: 772586 - DNA, 25 bp, Homo sapien
tacttaataagtggagctgcagcca

SEQ ID NO: 772587 - DNA, 25 bp, Homo sapien
ctgaggtcacctagaacactgggct

SEQ ID NO: 772588 - DNA, 25 bp, Homo sapien
ttactggcaggcataagaggacccc

SEQ ID NO: 772589 - DNA, 25 bp, Homo sapien
aatacaattccactatgaagatggg

SEQ ID NO: 772590 - DNA, 25 bp, Homo sapien
gctaggtgccatcctaattgttgac

SEQ ID NO: 772591 - DNA, 25 bp, Homo sapien
ttcccaccactgaccaaggtgctag

SEQ ID NO: 772592 - DNA, 25 bp, Homo sapien
tctgggtaggcaccaatacaattcc

SEQ ID NO: 772593 - DNA, 25 bp, Homo sapien
gaacagtgcttcttgcaaagagtct

SEQ ID NO: 772594 - DNA, 25 bp, Homo sapien
aggggcatcagatcattctaactgg

SEQ ID NO: 772595 - DNA, 25 bp, Homo sapien
gggcatcagatcattctaactgggc

SEQ ID NO: 772596 - DNA, 25 bp, Homo sapien
gcttcttgcaaagagtctttgggaa

SEQ ID NO: 772597 - DNA, 25 bp, Homo sapien
tccactgcacccacaaaccggccac

SEQ ID NO: 772598 - DNA, 25 bp, Homo sapien
tgcacccacaaaccggccaccccaa

SEQ ID NO: 772599 - DNA, 25 bp, Homo sapien
cactgcacccacaaaccggccaccc

SEQ ID NO: 772600 - DNA, 25 bp, Homo sapien
gtccactgcacccacaaaccggcca

SEQ ID NO: 772601 - DNA, 25 bp, Homo sapien
cttgtctaggccatggagtatctgg

SEQ ID NO: 772602 - DNA, 25 bp, Homo sapien
ccaaaggtgccggtcgtaggcaatg

SEQ ID NO: 772603 - DNA, 25 bp, Homo sapien
gagtatctggtccatctcggccttg

SEQ ID NO: 772604 - DNA, 25 bp, Homo sapien
gcaatggacgcgttgaacttctcca

SEQ ID NO: 772605 - DNA, 25 bp, Homo sapien
tcatcattggagttcagtttgaagg

SEQ ID NO: 772606 - DNA, 25 bp, Homo sapien
cttcaggcggcgctcattggctgtg

SEQ ID NO: 772607 - DNA, 25 bp, Homo sapien
atgtcctcatcattggagttcagtt

SEQ ID NO: 772608 - DNA, 25 bp, Homo sapien
cattggagttcagtttgaaggtgcc

SEQ ID NO: 772609 - DNA, 25 bp, Homo sapien
gtgctaatgctcaaagtggccctgg

SEQ ID NO: 772610 - DNA, 25 bp, Homo sapien
tggtgctaatgctcaaagtggccct

SEQ ID NO: 772611 - DNA, 25 bp, Homo sapien
ggtgctaatgctcaaagtggccctg

SEQ ID NO: 772612 - DNA, 25 bp, Homo sapien
ctccgtcccgtgtgcagcttccctg

SEQ ID NO: 772613 - DNA, 25 bp, Homo sapien
agcttccctgccgttgcaccaatga

SEQ ID NO: 772614 - DNA, 25 bp, Homo sapien
tggtcattccggctccgtcccgtgt

SEQ ID NO: 772615 - DNA, 25 bp, Homo sapien
ttccctgccgttgcaccaatgagct

SEQ ID NO: 772616 - DNA, 25 bp, Homo sapien
tgcagaactctaactgccccctggg

SEQ ID NO: 772617 - DNA, 25 bp, Homo sapien
tcaaggttgggacaacacggagcag

SEQ ID NO: 772618 - DNA, 25 bp, Homo sapien
ctcaaggttgggacaacacggagca

SEQ ID NO: 772619 - DNA, 25 bp, Homo sapien
gaggagccaggaccgctgcagaact

SEQ ID NO: 772620 - DNA, 25 bp, Homo sapien
tgcccgatccaccatggtcctaatg

SEQ ID NO: 772621 - DNA, 25 bp, Homo sapien
ctctgcccgatccaccatggtccta

SEQ ID NO: 772622 - DNA, 25 bp, Homo sapien
gatccaccatggtcctaatgagctc

SEQ ID NO: 772623 - DNA, 25 bp, Homo sapien
ccgatccaccatggtcctaatgagc

SEQ ID NO: 772624 - DNA, 25 bp, Homo sapien
tggctgctctgcctcgatcctggag

SEQ ID NO: 772625 - DNA, 25 bp, Homo sapien
tgagctagactggcatgggagtatt

SEQ ID NO: 772626 - DNA, 25 bp, Homo sapien
cagccccacgaagggttagtcttct

SEQ ID NO: 772627 - DNA, 25 bp, Homo sapien
cctaggtctcctgttcaggcttcca

SEQ ID NO: 772628 - DNA, 25 bp, Homo sapien
gggaggcgaagcttaggatggggga

SEQ ID NO: 772629 - DNA, 25 bp, Homo sapien
ggatggggaggcgaagcttaggatg

SEQ ID NO: 772630 - DNA, 25 bp, Homo sapien
ctggatggggaggcgaagcttagga

SEQ ID NO: 772631 - DNA, 25 bp, Homo sapien
atggggaggcgaagcttaggatggg

SEQ ID NO: 772632 - DNA, 25 bp, Homo sapien
tctcagcagctcttcgtccaggtct

SEQ ID NO: 772633 - DNA, 25 bp, Homo sapien
cccaagtctgcacaacaggggtcac

SEQ ID NO: 772634 - DNA, 25 bp, Homo sapien
gctgggtgacaattcttgtgccctt

SEQ ID NO: 772635 - DNA, 25 bp, Homo sapien
ggtcacagggagttgaggaagagga

SEQ ID NO: 772636 - DNA, 25 bp, Homo sapien
tgctctgagcaggtgagatgccctg

SEQ ID NO: 772637 - DNA, 25 bp, Homo sapien
tttgccagaaacaccccaagtccag

SEQ ID NO: 772638 - DNA, 25 bp, Homo sapien
gatgccctgcacctcattcaagtag

SEQ ID NO: 772639 - DNA, 25 bp, Homo sapien
tttgaggaccctagaaatagctggg

SEQ ID NO: 772640 - DNA, 25 bp, Homo sapien
tgtaccccgggaagagaacatcacg

SEQ ID NO: 772641 - DNA, 25 bp, Homo sapien
tgcaaatgggtgtaccccgggaaga

SEQ ID NO: 772642 - DNA, 25 bp, Homo sapien
ctctgcaaatgggtgtaccccggga

SEQ ID NO: 772643 - DNA, 25 bp, Homo sapien
ggtgtaccccgggaagagaacatca

SEQ ID NO: 772644 - DNA, 25 bp, Homo sapien
cggggtcctcccctctagcacagcc

SEQ ID NO: 772645 - DNA, 25 bp, Homo sapien
cacagcccctgcacctcacctggct

SEQ ID NO: 772646 - DNA, 25 bp, Homo sapien
gagggtcagggcagccggggtcctc

SEQ ID NO: 772647 - DNA, 25 bp, Homo sapien
ggcagccggggtcctcccctctagc

SEQ ID NO: 772648 - DNA, 25 bp, Homo sapien
ccagcagccgctcagagtctcgggt

SEQ ID NO: 772649 - DNA, 25 bp, Homo sapien
gggcaggacattgatccgcttccgc

SEQ ID NO: 772650 - DNA, 25 bp, Homo sapien
tcagagtctcgggtcagtgccacgg

SEQ ID NO: 772651 - DNA, 25 bp, Homo sapien
gcaggacattgatccgcttccgcac

SEQ ID NO: 772652 - DNA, 25 bp, Homo sapien
gataaggcggttttctgtcccactc

SEQ ID NO: 772653 - DNA, 25 bp, Homo sapien
catgttcccacatgtcaggctgagg

SEQ ID NO: 772654 - DNA, 25 bp, Homo sapien
tggtcgtcaccttagcgagagctgg

SEQ ID NO: 772655 - DNA, 25 bp, Homo sapien
tcaccctgggtgcaggacacttgtc

SEQ ID NO: 772656 - DNA, 25 bp, Homo sapien
tcggagcagctctcggtccacaccc

SEQ ID NO: 772657 - DNA, 25 bp, Homo sapien
tcggtccacacccaggggattgcct

SEQ ID NO: 772658 - DNA, 25 bp, Homo sapien
ctcggagcagctctcggtccacacc

SEQ ID NO: 772659 - DNA, 25 bp, Homo sapien
cggagcagctctcggtccacaccca

SEQ ID NO: 772660 - DNA, 25 bp, Homo sapien
atccctgccatgagtgacccctgaa

SEQ ID NO: 772661 - DNA, 25 bp, Homo sapien
tcagtgcccataggcaatgaatgaa

SEQ ID NO: 772662 - DNA, 25 bp, Homo sapien
cctgaacttgatgacctcagtgccc

SEQ ID NO: 772663 - DNA, 25 bp, Homo sapien
tcttggcgggtgctgagggtgattc

SEQ ID NO: 772664 - DNA, 25 bp, Homo sapien
gttgagagtgatggccccaaagttg

SEQ ID NO: 772665 - DNA, 25 bp, Homo sapien
gtcccgctcactagtggcatccatg

SEQ ID NO: 772666 - DNA, 25 bp, Homo sapien
gctcactagtggcatccatgctgtt

SEQ ID NO: 772667 - DNA, 25 bp, Homo sapien
cacaaagtcccgctcactagtggca

SEQ ID NO: 772668 - DNA, 25 bp, Homo sapien
caaccagcctgtccgtggaggtgtg

SEQ ID NO: 772669 - DNA, 25 bp, Homo sapien
cagtgtacaatatcaccacaaccag

SEQ ID NO: 772670 - DNA, 25 bp, Homo sapien
cccatttaaggtttatacttcagtg

SEQ ID NO: 772671 - DNA, 25 bp, Homo sapien
acaaccagcctgtccgtggaggtgt

SEQ ID NO: 772672 - DNA, 25 bp, Homo sapien
gcatctgagagctgcacgaagctga

SEQ ID NO: 772673 - DNA, 25 bp, Homo sapien
tcatgcacagcgaagcccagaacag

SEQ ID NO: 772674 - DNA, 25 bp, Homo sapien
tgctgagatgggtcatgcacagcga

SEQ ID NO: 772675 - DNA, 25 bp, Homo sapien
gcacgaagctgaattccttggtgca

SEQ ID NO: 772676 - DNA, 25 bp, Homo sapien
ctggtccagcgccgcaatggccagg

SEQ ID NO: 772677 - DNA, 25 bp, Homo sapien
tggtccagcgccgcaatggccaggt

SEQ ID NO: 772678 - DNA, 25 bp, Homo sapien
ggacagaggtgctggcgctgaaggg

SEQ ID NO: 772679 - DNA, 25 bp, Homo sapien
gctggcgctgaaggggctggaccct

SEQ ID NO: 772680 - DNA, 25 bp, Homo sapien
gaggtgctggcgctgaaggggctgg

SEQ ID NO: 772681 - DNA, 25 bp, Homo sapien
gtgctggcgctgaaggggctggacc

SEQ ID NO: 772682 - DNA, 25 bp, Homo sapien
tccggatcagctccaaactgtcggg

SEQ ID NO: 772683 - DNA, 25 bp, Homo sapien
cttgctccggatcagctccaaactg

SEQ ID NO: 772684 - DNA, 25 bp, Homo sapien
aaacacacgcccagccttgctccgg

SEQ ID NO: 772685 - DNA, 25 bp, Homo sapien
agccttgctccggatcagctccaaa

SEQ ID NO: 772686 - DNA, 25 bp, Homo sapien
tcagcccagaggccccgcccctccc

SEQ ID NO: 772687 - DNA, 25 bp, Homo sapien
accatcagcccagaggccccgcccc

SEQ ID NO: 772688 - DNA, 25 bp, Homo sapien
ccgcccctccccctgccttgctcac

SEQ ID NO: 772689 - DNA, 25 bp, Homo sapien
catcagcccagaggccccgcccctc

SEQ ID NO: 772690 - DNA, 25 bp, Homo sapien
gcacaggggctggacccgggatcct

SEQ ID NO: 772691 - DNA, 25 bp, Homo sapien
gaggcacaggggctggacccgggat

SEQ ID NO: 772692 - DNA, 25 bp, Homo sapien
aggcacaggggctggacccgggatc

SEQ ID NO: 772693 - DNA, 25 bp, Homo sapien
acaggggctggacccgggatcctgc

SEQ ID NO: 772694 - DNA, 25 bp, Homo sapien
tgggaagtcccttgagggtcatcag

SEQ ID NO: 772695 - DNA, 25 bp, Homo sapien
gtgctgggaagtcccttgagggtca

SEQ ID NO: 772696 - DNA, 25 bp, Homo sapien
gctgggaagtcccttgagggtcatc

SEQ ID NO: 772697 - DNA, 25 bp, Homo sapien
gaagtcccttgagggtcatcaggag

SEQ ID NO: 772698 - DNA, 25 bp, Homo sapien
tagccaggcctcccccggcctcgca

SEQ ID NO: 772699 - DNA, 25 bp, Homo sapien
tgtctgacacttcaaacacagcttc

SEQ ID NO: 772700 - DNA, 25 bp, Homo sapien
ctggagcacggcactcatagtgtct

SEQ ID NO: 772701 - DNA, 25 bp, Homo sapien
tagtgtctgacacttcaaacacagc

SEQ ID NO: 772702 - DNA, 25 bp, Homo sapien
cacggcactcatagtgtctgacact

SEQ ID NO: 772703 - DNA, 25 bp, Homo sapien
accctccccgcatgcccaccccagt

SEQ ID NO: 772704 - DNA, 25 bp, Homo sapien
cccagtgcctgggacctaggggagg

SEQ ID NO: 772705 - DNA, 25 bp, Homo sapien
ggccaccctccccgcatgcccaccc

SEQ ID NO: 772706 - DNA, 25 bp, Homo sapien
ccagtgcctgggacctaggggagga

SEQ ID NO: 772707 - DNA, 25 bp, Homo sapien
gcctgtatgttttactggcctttat

SEQ ID NO: 772708 - DNA, 25 bp, Homo sapien
cagatgttcctggaggatttgtttt

SEQ ID NO: 772709 - DNA, 25 bp, Homo sapien
catcagatgttcctggaggatttgt

SEQ ID NO: 772710 - DNA, 25 bp, Homo sapien
tgttttactggcctttatgttttca

SEQ ID NO: 772711 - DNA, 25 bp, Homo sapien
gggggcacaggtgggcgagtggtga

SEQ ID NO: 772712 - DNA, 25 bp, Homo sapien
gggcacaggtgggcgagtggtgagc

SEQ ID NO: 772713 - DNA, 25 bp, Homo sapien
ctgggggcacaggtgggcgagtggt

SEQ ID NO: 772714 - DNA, 25 bp, Homo sapien
ggcacaggtgggcgagtggtgagcc

SEQ ID NO: 772715 - DNA, 25 bp, Homo sapien
cctttgcggaccaggtaataggcaa

SEQ ID NO: 772716 - DNA, 25 bp, Homo sapien
gcggaccaggtaataggcaaggtca

SEQ ID NO: 772717 - DNA, 25 bp, Homo sapien
agtggccagcatgtcggggctgaga

SEQ ID NO: 772718 - DNA, 25 bp, Homo sapien
tttgcggaccaggtaataggcaagg

SEQ ID NO: 772719 - DNA, 25 bp, Homo sapien
agggaggaagatggcgctgaggcag

SEQ ID NO: 772720 - DNA, 25 bp, Homo sapien
ccctgatctgcctccattgcctgca

SEQ ID NO: 772721 - DNA, 25 bp, Homo sapien
tgatctgcctccattgcctgcaccc

SEQ ID NO: 772722 - DNA, 25 bp, Homo sapien
aggaagatggcgctgaggcaggttt

SEQ ID NO: 772723 - DNA, 25 bp, Homo sapien
cttggtctcggccatgaacacagct

SEQ ID NO: 772724 - DNA, 25 bp, Homo sapien
tctcggccatgaacacagctttccc

SEQ ID NO: 772725 - DNA, 25 bp, Homo sapien
ccatgaacacagctttcccggaggc

SEQ ID NO: 772726 - DNA, 25 bp, Homo sapien
cagctttcccggaggcctcgtgggc

SEQ ID NO: 772727 - DNA, 25 bp, Homo sapien
tgcccgtagtcccacacgcagatca

SEQ ID NO: 772728 - DNA, 25 bp, Homo sapien
acgcagatcacgtcgcccgagaaca

SEQ ID NO: 772729 - DNA, 25 bp, Homo sapien
gtagtcccacacgcagatcacgtcg

SEQ ID NO: 772730 - DNA, 25 bp, Homo sapien
cacacgcagatcacgtcgcccgaga

SEQ ID NO: 772731 - DNA, 25 bp, Homo sapien
cgcccagggcaccatactgctccac

SEQ ID NO: 772732 - DNA, 25 bp, Homo sapien
gcccagggcaccatactgctccaca

SEQ ID NO: 772733 - DNA, 25 bp, Homo sapien
gtcgacgctggagcgcgcagtgccg

SEQ ID NO: 772734 - DNA, 25 bp, Homo sapien
ccgcccagggcaccatactgctcca

SEQ ID NO: 772735 - DNA, 25 bp, Homo sapien
tcgcgcccactttattagggggcag

SEQ ID NO: 772736 - DNA, 25 bp, Homo sapien
cgcccactttattagggggcaggtg

SEQ ID NO: 772737 - DNA, 25 bp, Homo sapien
tctcgcgcccactttattagggggc

SEQ ID NO: 772738 - DNA, 25 bp, Homo sapien
cccactttattagggggcaggtgtg

SEQ ID NO: 772739 - DNA, 25 bp, Homo sapien
gccccgaaagcccagcaacgaggga

SEQ ID NO: 772740 - DNA, 25 bp, Homo sapien
cagccccgaaagcccagcaacgagg

SEQ ID NO: 772741 - DNA, 25 bp, Homo sapien
cccgaaagcccagcaacgagggagc

SEQ ID NO: 772742 - DNA, 25 bp, Homo sapien
ccccgaaagcccagcaacgagggag

SEQ ID NO: 772743 - DNA, 25 bp, Homo sapien
gggactatatgcatgggccaccacg

SEQ ID NO: 772744 - DNA, 25 bp, Homo sapien
tcctgggcacaagtgtcctctcacc

SEQ ID NO: 772745 - DNA, 25 bp, Homo sapien
agcctccactcctgggcacaagtgt

SEQ ID NO: 772746 - DNA, 25 bp, Homo sapien
tccactcctgggcacaagtgtcctc

SEQ ID NO: 772747 - DNA, 25 bp, Homo sapien
tcagcctgagcaatacccgtgatgg

SEQ ID NO: 772748 - DNA, 25 bp, Homo sapien
gtccaggaaagggtaggttcagcaa

SEQ ID NO: 772749 - DNA, 25 bp, Homo sapien
tcacccttgcggtgctggtacaggc

SEQ ID NO: 772750 - DNA, 25 bp, Homo sapien
cttgcggtgctggtacaggcctcag

SEQ ID NO: 772751 - DNA, 25 bp, Homo sapien
tagaagaggtctctgtgtcaccacg

SEQ ID NO: 772752 - DNA, 25 bp, Homo sapien
catgcataaaccaccgtacttggcc

SEQ ID NO: 772753 - DNA, 25 bp, Homo sapien
gactgcagcaaggtgcaggtcccct

SEQ ID NO: 772754 - DNA, 25 bp, Homo sapien
tactgaacacttgccgtgtgcctgg

SEQ ID NO: 772755 - DNA, 25 bp, Homo sapien
ttctcctcctttaccggcatgagcc

SEQ ID NO: 772756 - DNA, 25 bp, Homo sapien
cctctttctcctttacaggcgtgag

SEQ ID NO: 772757 - DNA, 25 bp, Homo sapien
tccttctcctcctttaccggcatga

SEQ ID NO: 772758 - DNA, 25 bp, Homo sapien
ctcctcctcctctacaggcgtgagc

SEQ ID NO: 772759 - DNA, 25 bp, Homo sapien
tgcctcttttagtgagaccctcctt

SEQ ID NO: 772760 - DNA, 25 bp, Homo sapien
atgtttacactcttctgtagtcttt

SEQ ID NO: 772761 - DNA, 25 bp, Homo sapien
tcttgcctcttttagtgagaccctc

SEQ ID NO: 772762 - DNA, 25 bp, Homo sapien
tggcagcacacacctaaagtctcag

SEQ ID NO: 772763 - DNA, 25 bp, Homo sapien
ggccgatttaagactgctaagcgtt

SEQ ID NO: 772764 - DNA, 25 bp, Homo sapien
tgcatccttccaccaggccgattta

SEQ ID NO: 772765 - DNA, 25 bp, Homo sapien
cgtttgcggacaggattatcttgtg

SEQ ID NO: 772766 - DNA, 25 bp, Homo sapien
ttggcggacccggaacctcgcgctg

SEQ ID NO: 772767 - DNA, 25 bp, Homo sapien
ggcacattgaaaggcagccggacac

SEQ ID NO: 772768 - DNA, 25 bp, Homo sapien
ttcggaagggcaaagcgagagtccc

SEQ ID NO: 772769 - DNA, 25 bp, Homo sapien
tctcagcggtcaaaccgttgggctc

SEQ ID NO: 772770 - DNA, 25 bp, Homo sapien
agccggacacggaagtgctcggccc

SEQ ID NO: 772771 - DNA, 25 bp, Homo sapien
cacctactttcagggcggacagact

SEQ ID NO: 772772 - DNA, 25 bp, Homo sapien
cagggcggacagactcaggccttta

SEQ ID NO: 772773 - DNA, 25 bp, Homo sapien
ctttcagggcggacagactcaggcc

SEQ ID NO: 772774 - DNA, 25 bp, Homo sapien
ctccacctactttcagggcggacag

SEQ ID NO: 772775 - DNA, 25 bp, Homo sapien
cagctcttccgagggctctccaggg

SEQ ID NO: 772776 - DNA, 25 bp, Homo sapien
agctcttccgagggctctccagggg

SEQ ID NO: 772777 - DNA, 25 bp, Homo sapien
gctcccatcaaattccgagggcagc

SEQ ID NO: 772778 - DNA, 25 bp, Homo sapien
ctggtcccagtcctggttcacgtcc

SEQ ID NO: 772779 - DNA, 25 bp, Homo sapien
cctcgccttgcacacacacccacac

SEQ ID NO: 772780 - DNA, 25 bp, Homo sapien
tcaaccgtataaagcccacattcag

SEQ ID NO: 772781 - DNA, 25 bp, Homo sapien
gaacacaagatagtaatacctacaa

SEQ ID NO: 772782 - DNA, 25 bp, Homo sapien
gaccacgtggagttaaactgtcaga

SEQ ID NO: 772783 - DNA, 25 bp, Homo sapien
caggcgcaacgagcaagcatggaaa

SEQ ID NO: 772784 - DNA, 25 bp, Homo sapien
ctctggcaggagtgtagtggctcta

SEQ ID NO: 772785 - DNA, 25 bp, Homo sapien
tctggcaggagtgtagtggctctat

SEQ ID NO: 772786 - DNA, 25 bp, Homo sapien
cactctggcaggagtgtagtggctc

SEQ ID NO: 772787 - DNA, 25 bp, Homo sapien
tggcaggagtgtagtggctctatct

SEQ ID NO: 772788 - DNA, 25 bp, Homo sapien
ccagtgaggatgaaagcccaacaga

SEQ ID NO: 772789 - DNA, 25 bp, Homo sapien
cagtcattcccgtagaccagtgagg

SEQ ID NO: 772790 - DNA, 25 bp, Homo sapien
ctttcaagaagttttgttgggatgg

SEQ ID NO: 772791 - DNA, 25 bp, Homo sapien
cacgccccgctggttcaggtaatct

SEQ ID NO: 772792 - DNA, 25 bp, Homo sapien
tttactgctctgaagctgtcccaag

SEQ ID NO: 772793 - DNA, 25 bp, Homo sapien
tgattgaagcatggccaacctcaca

SEQ ID NO: 772794 - DNA, 25 bp, Homo sapien
tacaaccagctctaagacagaaagg

SEQ ID NO: 772795 - DNA, 25 bp, Homo sapien
tctaatactaagactgagtgcagac

SEQ ID NO: 772796 - DNA, 25 bp, Homo sapien
tgtagttaggcctaggatggctgcc

SEQ ID NO: 772797 - DNA, 25 bp, Homo sapien
caggcatgagcaccgggctgcaaaa

SEQ ID NO: 772798 - DNA, 25 bp, Homo sapien
tgcctctacactgaacatggataga

SEQ ID NO: 772799 - DNA, 25 bp, Homo sapien
gtactatgtagttaggcctaggatg

SEQ ID NO: 772800 - DNA, 25 bp, Homo sapien
ggtcaactgtatctgcaactcaagg

SEQ ID NO: 772801 - DNA, 25 bp, Homo sapien
ggtacaatatacaggcatcccctgg

SEQ ID NO: 772802 - DNA, 25 bp, Homo sapien
ttgcagaaccagcagctaggaagcc

SEQ ID NO: 772803 - DNA, 25 bp, Homo sapien
caaacatgcttgtgtcccagagagc

SEQ ID NO: 772804 - DNA, 25 bp, Homo sapien
aattagccaggcagctacccagtag

SEQ ID NO: 772805 - DNA, 25 bp, Homo sapien
ggcagctacccagtaggctcaggca

SEQ ID NO: 772806 - DNA, 25 bp, Homo sapien
aggcagctacccagtaggctcaggc

SEQ ID NO: 772807 - DNA, 25 bp, Homo sapien
agccaggcagctacccagtaggctc

SEQ ID NO: 772808 - DNA, 25 bp, Homo sapien
ctcgtagttactgagaagcgcagaa

SEQ ID NO: 772809 - DNA, 25 bp, Homo sapien
tactgagaagcgcagaattggcatc

SEQ ID NO: 772810 - DNA, 25 bp, Homo sapien
agttactgagaagcgcagaattggc

SEQ ID NO: 772811 - DNA, 25 bp, Homo sapien
gtagttactgagaagcgcagaattg

SEQ ID NO: 772812 - DNA, 25 bp, Homo sapien
gtgagcctggatggtgccactgtac

SEQ ID NO: 772813 - DNA, 25 bp, Homo sapien
tgagcctggatggtgccactgtact

SEQ ID NO: 772814 - DNA, 25 bp, Homo sapien
cctgggtgacagagcgagactccat

SEQ ID NO: 772815 - DNA, 25 bp, Homo sapien
ccagcctgggtgacagagcgagact

SEQ ID NO: 772816 - DNA, 25 bp, Homo sapien
ataggtgatagtgttcaagttctgt

SEQ ID NO: 772817 - DNA, 25 bp, Homo sapien
gcctgcatggtgtttttgatatgta

SEQ ID NO: 772818 - DNA, 25 bp, Homo sapien
tgacaatttcaggactctggtgcct

SEQ ID NO: 772819 - DNA, 25 bp, Homo sapien
caggactctggtgcctgcatggtgt

SEQ ID NO: 772820 - DNA, 25 bp, Homo sapien
ttctctgacaatttcaggactctgg

SEQ ID NO: 772821 - DNA, 25 bp, Homo sapien
ttggtcaacttgtggcttttcaatg

SEQ ID NO: 772822 - DNA, 25 bp, Homo sapien
aaacccagccgaatatcaatacacg

SEQ ID NO: 772823 - DNA, 25 bp, Homo sapien
aatacacggttgctacgaatgtagc

SEQ ID NO: 772824 - DNA, 25 bp, Homo sapien
tgtgtcacgctcttcctacttaaga

SEQ ID NO: 772825 - DNA, 25 bp, Homo sapien
actatcatttcaccatgtgtcacgc

SEQ ID NO: 772826 - DNA, 25 bp, Homo sapien
aggaacaacacaaggacgtgcccag

SEQ ID NO: 772827 - DNA, 25 bp, Homo sapien
aacaacacaaggacgtgcccagagg

SEQ ID NO: 772828 - DNA, 25 bp, Homo sapien
acacaaggacgtgcccagaggaaag

SEQ ID NO: 772829 - DNA, 25 bp, Homo sapien
aacacaaggacgtgcccagaggaaa

SEQ ID NO: 772830 - DNA, 25 bp, Homo sapien
agggaaagtacagcgttgacaactc

SEQ ID NO: 772831 - DNA, 25 bp, Homo sapien
gcgttgacaactcgcatagccctaa

SEQ ID NO: 772832 - DNA, 25 bp, Homo sapien
tggagggaaagtacagcgttgacaa

SEQ ID NO: 772833 - DNA, 25 bp, Homo sapien
actcgcatagccctaagtcctgagt

SEQ ID NO: 772834 - DNA, 25 bp, Homo sapien
gcagtcacaggccggtggttcagca

SEQ ID NO: 772835 - DNA, 25 bp, Homo sapien
cagctggatctccacagcagtcaca

SEQ ID NO: 772836 - DNA, 25 bp, Homo sapien
agctggatctccacagcagtcacag

SEQ ID NO: 772837 - DNA, 25 bp, Homo sapien
tcacaggccggtggttcagcagctg

SEQ ID NO: 772838 - DNA, 25 bp, Homo sapien
taacacttgtcaggtaccgatgctc

SEQ ID NO: 772839 - DNA, 25 bp, Homo sapien
cctgtaataagaaggcagcggccac

SEQ ID NO: 772840 - DNA, 25 bp, Homo sapien
agaggataaccgcaagagccgcgtg

SEQ ID NO: 772841 - DNA, 25 bp, Homo sapien
gctctcagtacaaagcggacttcac

SEQ ID NO: 772842 - DNA, 25 bp, Homo sapien
cgggcattcgaagtgacagacaatc

SEQ ID NO: 772843 - DNA, 25 bp, Homo sapien
aatggtccaactactgagaaacagc

SEQ ID NO: 772844 - DNA, 25 bp, Homo sapien
gaatcagaaggtcccaatcagccac

SEQ ID NO: 772845 - DNA, 25 bp, Homo sapien
ttgtagaaacgagaaggaaaccatc

SEQ ID NO: 772846 - DNA, 25 bp, Homo sapien
gcaggcaggcagtcaagttgcttaa

SEQ ID NO: 772847 - DNA, 25 bp, Homo sapien
taaacagaattaggtcgtcagctgc

SEQ ID NO: 772848 - DNA, 25 bp, Homo sapien
gctcaaggtggccagattctattcc

SEQ ID NO: 772849 - DNA, 25 bp, Homo sapien
caatctctgaaatccggcaactggg

SEQ ID NO: 772850 - DNA, 25 bp, Homo sapien
tgccacattgctgtttgtattcttc

SEQ ID NO: 772851 - DNA, 25 bp, Homo sapien
gagcttcaatctgctcctccgtgag

SEQ ID NO: 772852 - DNA, 25 bp, Homo sapien
gctgggtcctcttcgtccattgcca

SEQ ID NO: 772853 - DNA, 25 bp, Homo sapien
gtcctcttcgtccattgccacattg

SEQ ID NO: 772854 - DNA, 25 bp, Homo sapien
ccttctgacttcatgaaacgccggg

SEQ ID NO: 772855 - DNA, 25 bp, Homo sapien
tcctctaaggtgagccaaggtcagt

SEQ ID NO: 772856 - DNA, 25 bp, Homo sapien
taagcctggagtgcccgttttcaac

SEQ ID NO: 772857 - DNA, 25 bp, Homo sapien
cagtgagctggtaaacaaagcccct

SEQ ID NO: 772858 - DNA, 25 bp, Homo sapien
tataaacagatttcagctgaagctc

SEQ ID NO: 772859 - DNA, 25 bp, Homo sapien
ctaaggcaacaaccacatgcctggg

SEQ ID NO: 772860 - DNA, 25 bp, Homo sapien
cagcaatattcgcaggacctaaggc

SEQ ID NO: 772861 - DNA, 25 bp, Homo sapien
gcgccaatttggaaaatcgaatgtc

SEQ ID NO: 772862 - DNA, 25 bp, Homo sapien
gattggcacatgtatgccctgagaa

SEQ ID NO: 772863 - DNA, 25 bp, Homo sapien
cctggccccaatctggtactttcaa

SEQ ID NO: 772864 - DNA, 25 bp, Homo sapien
tgagaaataaatcaacagctcccac

SEQ ID NO: 772865 - DNA, 25 bp, Homo sapien
gacaacaatgagacagattggcaca

SEQ ID NO: 772866 - DNA, 25 bp, Homo sapien
aatcgcttgaatctgggaggcagag

SEQ ID NO: 772867 - DNA, 25 bp, Homo sapien
gctaaggcaccagaatcgcttgaat

SEQ ID NO: 772868 - DNA, 25 bp, Homo sapien
ctaaggcaccagaatcgcttgaatc

SEQ ID NO: 772869 - DNA, 25 bp, Homo sapien
cagaatcgcttgaatctgggaggca

SEQ ID NO: 772870 - DNA, 25 bp, Homo sapien
caaattttagcagggtatagtggta

SEQ ID NO: 772871 - DNA, 25 bp, Homo sapien
tttagcagggtatagtggtacgtgc

SEQ ID NO: 772872 - DNA, 25 bp, Homo sapien
aattttagcagggtatagtggtacg

SEQ ID NO: 772873 - DNA, 25 bp, Homo sapien
tacaaattttagcagggtatagtgg

SEQ ID NO: 772874 - DNA, 25 bp, Homo sapien
ccacctaacatattcagtgttaaaa

SEQ ID NO: 772875 - DNA, 25 bp, Homo sapien
gttaaaaagagacattacgactagc

SEQ ID NO: 772876 - DNA, 25 bp, Homo sapien
accacctaacatattcagtgttaaa

SEQ ID NO: 772877 - DNA, 25 bp, Homo sapien
aaaccacctaacatattcagtgtta

SEQ ID NO: 772878 - DNA, 25 bp, Homo sapien
cactttatttgtatcgatgacaata

SEQ ID NO: 772879 - DNA, 25 bp, Homo sapien
atttcactttatttgtatcgatgac

SEQ ID NO: 772880 - DNA, 25 bp, Homo sapien
tatttgtatcgatgacaatattaac

SEQ ID NO: 772881 - DNA, 25 bp, Homo sapien
ttcactttatttgtatcgatgacaa

SEQ ID NO: 772882 - DNA, 25 bp, Homo sapien
ggtggctaaggcaagcgtattgctt

SEQ ID NO: 772883 - DNA, 25 bp, Homo sapien
ttgggcaatgagataaaaccccgtc

SEQ ID NO: 772884 - DNA, 25 bp, Homo sapien
gacacggtagctcacccatgtaatt

SEQ ID NO: 772885 - DNA, 25 bp, Homo sapien
tttaaattgaggctggacacggtag

SEQ ID NO: 772886 - DNA, 25 bp, Homo sapien
atatatttatgggatactttgatac

SEQ ID NO: 772887 - DNA, 25 bp, Homo sapien
atatttatgggatactttgatacag

SEQ ID NO: 772888 - DNA, 25 bp, Homo sapien
gtatatatttatgggatactttgat

SEQ ID NO: 772889 - DNA, 25 bp, Homo sapien
tatatttatgggatactttgataca

SEQ ID NO: 772890 - DNA, 25 bp, Homo sapien
tggacaatttagtggtctggccggt

SEQ ID NO: 772891 - DNA, 25 bp, Homo sapien
tagacaaagtgtgggaattgacatc

SEQ ID NO: 772892 - DNA, 25 bp, Homo sapien
tataagcaatctaggatgggtgcag

SEQ ID NO: 772893 - DNA, 25 bp, Homo sapien
tgggcaaggcatgcaagtcggcata

SEQ ID NO: 772894 - DNA, 25 bp, Homo sapien
cacgcctgtaactttgggagcactt

SEQ ID NO: 772895 - DNA, 25 bp, Homo sapien
ggaaatctgctggtccccttattaa

SEQ ID NO: 772896 - DNA, 25 bp, Homo sapien
catctggtgtgataagggctttctt

SEQ ID NO: 772897 - DNA, 25 bp, Homo sapien
gaaagtccaagcagaaggtgcccac

SEQ ID NO: 772898 - DNA, 25 bp, Homo sapien
ttctttaactattcaagcatattta

SEQ ID NO: 772899 - DNA, 25 bp, Homo sapien
tgtctagtaagtctgatacctgtgt

SEQ ID NO: 772900 - DNA, 25 bp, Homo sapien
gcttttctttaactattcaagcata

SEQ ID NO: 772901 - DNA, 25 bp, Homo sapien
ttgtctagtaagtctgatacctgtg

SEQ ID NO: 772902 - DNA, 25 bp, Homo sapien
tcatctagcataatatccctaaggg

SEQ ID NO: 772903 - DNA, 25 bp, Homo sapien
tgcgaacacagctgaccgcagtctt

SEQ ID NO: 772904 - DNA, 25 bp, Homo sapien
tccctaagggtcatccatattgtaa

SEQ ID NO: 772905 - DNA, 25 bp, Homo sapien
cgtgcgtgccctgccttaacagttt

SEQ ID NO: 772906 - DNA, 25 bp, Homo sapien
caggccaggagccaaatcttgagtt

SEQ ID NO: 772907 - DNA, 25 bp, Homo sapien
aggtcaggttcttagcgcactctcc

SEQ ID NO: 772908 - DNA, 25 bp, Homo sapien
tttacgtgcgaacccattcagctgg

SEQ ID NO: 772909 - DNA, 25 bp, Homo sapien
ttcagctggaatagaaggttctgca

SEQ ID NO: 772910 - DNA, 25 bp, Homo sapien
gggcttgttcttggctccaatcctg

SEQ ID NO: 772911 - DNA, 25 bp, Homo sapien
gcctgcatcggtgacttccgcatct

SEQ ID NO: 772912 - DNA, 25 bp, Homo sapien
ctgtgacctcgcctgcatcggtgac

SEQ ID NO: 772913 - DNA, 25 bp, Homo sapien
gcttgttcttggctccaatcctgac

SEQ ID NO: 772914 - DNA, 25 bp, Homo sapien
tgcccagggctccgcttctattcct

SEQ ID NO: 772915 - DNA, 25 bp, Homo sapien
gtgcccagggctccgcttctattcc

SEQ ID NO: 772916 - DNA, 25 bp, Homo sapien
cccagggctccgcttctattccttt

SEQ ID NO: 772917 - DNA, 25 bp, Homo sapien
cagggctccgcttctattcctttcc

SEQ ID NO: 772918 - DNA, 25 bp, Homo sapien
ggcctgcgggaagcacctcacagtt

SEQ ID NO: 772919 - DNA, 25 bp, Homo sapien
tacagcatcagagagtcaatggcct

SEQ ID NO: 772920 - DNA, 25 bp, Homo sapien
cctgcgggaagcacctcacagttct

SEQ ID NO: 772921 - DNA, 25 bp, Homo sapien
tgcgggaagcacctcacagttctct

SEQ ID NO: 772922 - DNA, 25 bp, Homo sapien
agataacctcggtcgggcgcggtgg

SEQ ID NO: 772923 - DNA, 25 bp, Homo sapien
aagataacctcggtcgggcgcggtg

SEQ ID NO: 772924 - DNA, 25 bp, Homo sapien
ggtgagcggagactgtgcaactgca

SEQ ID NO: 772925 - DNA, 25 bp, Homo sapien
tgcggtgagcggagactgtgcaact

SEQ ID NO: 772926 - DNA, 25 bp, Homo sapien
tacggaagccaccaccggtgcacag

SEQ ID NO: 772927 - DNA, 25 bp, Homo sapien
gagatctgagataacctcccacact

SEQ ID NO: 772928 - DNA, 25 bp, Homo sapien
ggcctcagtaatacggaagccacca

SEQ ID NO: 772929 - DNA, 25 bp, Homo sapien
gatggagatctgagataacctccca

SEQ ID NO: 772930 - DNA, 25 bp, Homo sapien
tcctcggggagataacgcgcaaatg

SEQ ID NO: 772931 - DNA, 25 bp, Homo sapien
ctatttcatccccacgagagtgtag

SEQ ID NO: 772932 - DNA, 25 bp, Homo sapien
gtagacgtgcaatagtccctcccaa

SEQ ID NO: 772933 - DNA, 25 bp, Homo sapien
tgcaaataacgaactcaaacactat

SEQ ID NO: 772934 - DNA, 25 bp, Homo sapien
gtctgacgtcgcagccggccagcgc

SEQ ID NO: 772935 - DNA, 25 bp, Homo sapien
aatggagctgggtccggcaggcgcc

SEQ ID NO: 772936 - DNA, 25 bp, Homo sapien
aaggaggcgcggctgggaatggagc

SEQ ID NO: 772937 - DNA, 25 bp, Homo sapien
tggttgccctagcaacagcgcgcgt

SEQ ID NO: 772938 - DNA, 25 bp, Homo sapien
gctctgattcgtgagttccggccgg

SEQ ID NO: 772939 - DNA, 25 bp, Homo sapien
gggaggtggcgggatcacacatctg

SEQ ID NO: 772940 - DNA, 25 bp, Homo sapien
cggacgatgtgtcggctgctctgat

SEQ ID NO: 772941 - DNA, 25 bp, Homo sapien
tctgctacgattggctgagcggacg

SEQ ID NO: 772942 - DNA, 25 bp, Homo sapien
gccgcgccgcctggacggcatcctg

SEQ ID NO: 772943 - DNA, 25 bp, Homo sapien
gcgccgcctggacggcatcctggcc

SEQ ID NO: 772944 - DNA, 25 bp, Homo sapien
ctggacggcatcctggcctcagccg

SEQ ID NO: 772945 - DNA, 25 bp, Homo sapien
ccgcctggacggcatcctggcctca

SEQ ID NO: 772946 - DNA, 25 bp, Homo sapien
cgatgagctcaagaagcgcagccgg

SEQ ID NO: 772947 - DNA, 25 bp, Homo sapien
gacgtgggggcaaatgtccgatccc

SEQ ID NO: 772948 - DNA, 25 bp, Homo sapien
cgatcccggcgagacgagggtctca

SEQ ID NO: 772949 - DNA, 25 bp, Homo sapien
ggcgatgagctcaagaagcgcagcc

SEQ ID NO: 772950 - DNA, 25 bp, Homo sapien
gactgccatgcagacaggactacgt

SEQ ID NO: 772951 - DNA, 25 bp, Homo sapien
ctgccatgcagacaggactacgtac

SEQ ID NO: 772952 - DNA, 25 bp, Homo sapien
cgggcgactgccatgcagacaggac

SEQ ID NO: 772953 - DNA, 25 bp, Homo sapien
ggcgactgccatgcagacaggacta

SEQ ID NO: 772954 - DNA, 25 bp, Homo sapien
agagtcaaatccctgtggacactgg

SEQ ID NO: 772955 - DNA, 25 bp, Homo sapien
tggacactggacttcttgctaccat

SEQ ID NO: 772956 - DNA, 25 bp, Homo sapien
cttgctaccatcatctggaaagtac

SEQ ID NO: 772957 - DNA, 25 bp, Homo sapien
cattcttcaggcagagtcaaatccc

SEQ ID NO: 772958 - DNA, 25 bp, Homo sapien
tttacggtagtgaatggtctgtttc

SEQ ID NO: 772959 - DNA, 25 bp, Homo sapien
gagcaccctgtagtcatctctgtca

SEQ ID NO: 772960 - DNA, 25 bp, Homo sapien
gggatgcgcccatgctacagaaggc

SEQ ID NO: 772961 - DNA, 25 bp, Homo sapien
ctctggatcacaaagggcccaggaa

SEQ ID NO: 772962 - DNA, 25 bp, Homo sapien
tgcagacatgaatcaaaacccatcc

SEQ ID NO: 772963 - DNA, 25 bp, Homo sapien
ctgccagagtaggggatgcagacat

SEQ ID NO: 772964 - DNA, 25 bp, Homo sapien
cagacatgaatcaaaacccatcctg

SEQ ID NO: 772965 - DNA, 25 bp, Homo sapien
gacatgaatcaaaacccatcctgat

SEQ ID NO: 772966 - DNA, 25 bp, Homo sapien
gcatgcactgcagcttttgcgtgtc

SEQ ID NO: 772967 - DNA, 25 bp, Homo sapien
tgcagcttttgcgtgtctctctgcc

SEQ ID NO: 772968 - DNA, 25 bp, Homo sapien
ttgtttgagcctccgcatgcactgc

SEQ ID NO: 772969 - DNA, 25 bp, Homo sapien
agcatcccttccttgtttgagcctc

SEQ ID NO: 772970 - DNA, 25 bp, Homo sapien
gaaagaaagtaatctggaactgatg

SEQ ID NO: 772971 - DNA, 25 bp, Homo sapien
ggcctaagcaaggaatttatagacg

SEQ ID NO: 772972 - DNA, 25 bp, Homo sapien
tttatagacgaataggtaactagtg

SEQ ID NO: 772973 - DNA, 25 bp, Homo sapien
tttggaaagaaagagtcctacagat

SEQ ID NO: 772974 - DNA, 25 bp, Homo sapien
ggacacctgcaagttctctctcaca

SEQ ID NO: 772975 - DNA, 25 bp, Homo sapien
gaagcctggtgtattagagtcagaa

SEQ ID NO: 772976 - DNA, 25 bp, Homo sapien
gaatcattccccattgacatcagac

SEQ ID NO: 772977 - DNA, 25 bp, Homo sapien
gacaaggcctccttatgatgcccag

SEQ ID NO: 772978 - DNA, 25 bp, Homo sapien
tacttaaaggagcagtgaacttcaa

SEQ ID NO: 772979 - DNA, 25 bp, Homo sapien
taaaggagcagtgaacttcaaaaaa

SEQ ID NO: 772980 - DNA, 25 bp, Homo sapien
cttaaaggagcagtgaacttcaaaa

SEQ ID NO: 772981 - DNA, 25 bp, Homo sapien
gcagtgaacttcaaaaaaacccata

SEQ ID NO: 772982 - DNA, 25 bp, Homo sapien
actgtgcctgctgactaaagtccag

SEQ ID NO: 772983 - DNA, 25 bp, Homo sapien
cattcatgatgccaaccaacgtggc

SEQ ID NO: 772984 - DNA, 25 bp, Homo sapien
gcaacagccaataccactgtgcctg

SEQ ID NO: 772985 - DNA, 25 bp, Homo sapien
aatcactagttccttgcctctcata

SEQ ID NO: 772986 - DNA, 25 bp, Homo sapien
cataagaatttgtacacctatgttc

SEQ ID NO: 772987 - DNA, 25 bp, Homo sapien
accatgtgatcaagcagttctaccc

SEQ ID NO: 772988 - DNA, 25 bp, Homo sapien
acccaagaggactgaaacacatctc

SEQ ID NO: 772989 - DNA, 25 bp, Homo sapien
gcagttctacccaagaggactgaaa

SEQ ID NO: 772990 - DNA, 25 bp, Homo sapien
aggccatggacagtctacttcagaa

SEQ ID NO: 772991 - DNA, 25 bp, Homo sapien
tgctcaaaatgattttcggaaaatg

SEQ ID NO: 772992 - DNA, 25 bp, Homo sapien
gccatggacagtctacttcagaaag

SEQ ID NO: 772993 - DNA, 25 bp, Homo sapien
tcggaaaatgttcaggccatggaca

SEQ ID NO: 772994 - DNA, 25 bp, Homo sapien
acagaactaatcaccagacatgcca

SEQ ID NO: 772995 - DNA, 25 bp, Homo sapien
tgactggctggctacgttcctctat

SEQ ID NO: 772996 - DNA, 25 bp, Homo sapien
tacgttcctctatccggtgatggca

SEQ ID NO: 772997 - DNA, 25 bp, Homo sapien
tggtccttgtgctctccaatttgac

SEQ ID NO: 772998 - DNA, 25 bp, Homo sapien
gaccgtgaccacatctgcttcaggg

SEQ ID NO: 772999 - DNA, 25 bp, Homo sapien
cgaatgtcaggatgtgcgtccagca

SEQ ID NO: 773000 - DNA, 25 bp, Homo sapien
ggtttcctctccacagcgaatgtca

SEQ ID NO: 773001 - DNA, 25 bp, Homo sapien
gctggctccccatgcttaacgataa

SEQ ID NO: 773002 - DNA, 25 bp, Homo sapien
tacatggtctctatagcacgattcc

SEQ ID NO: 773003 - DNA, 25 bp, Homo sapien
tcatggtgcaatactgagtggttcc

SEQ ID NO: 773004 - DNA, 25 bp, Homo sapien
cagtccctatagctgttcagatcaa

SEQ ID NO: 773005 - DNA, 25 bp, Homo sapien
tgaatgtactgatgcccggccatct

SEQ ID NO: 773006 - DNA, 25 bp, Homo sapien
cacacatttccttatcagcaagcag

SEQ ID NO: 773007 - DNA, 25 bp, Homo sapien
gccatcatgcccaaaggaaagtgga

SEQ ID NO: 773008 - DNA, 25 bp, Homo sapien
cctctctccaggatagagttccaaa

SEQ ID NO: 773009 - DNA, 25 bp, Homo sapien
gcagcagtgacacaagtctgttctc

SEQ ID NO: 773010 - DNA, 25 bp, Homo sapien
taatggccagctaacaactgaacag

SEQ ID NO: 773011 - DNA, 25 bp, Homo sapien
gaacagactgccttaaatgcttgga

SEQ ID NO: 773012 - DNA, 25 bp, Homo sapien
tgtcctccccgatctcagaagtagg

SEQ ID NO: 773013 - DNA, 25 bp, Homo sapien
gatcagcgagaggtagaagtcttcc

SEQ ID NO: 773014 - DNA, 25 bp, Homo sapien
gagtaagacacatcaaccttgagtc

SEQ ID NO: 773015 - DNA, 25 bp, Homo sapien
tagttgaaggctaaactatggcata

SEQ ID NO: 773016 - DNA, 25 bp, Homo sapien
accttgagtcatatagtagatttca

SEQ ID NO: 773017 - DNA, 25 bp, Homo sapien
taaactggaggttccataaggcata

SEQ ID NO: 773018 - DNA, 25 bp, Homo sapien
caaagcgcttattaccatctgacaa

SEQ ID NO: 773019 - DNA, 25 bp, Homo sapien
gctttgttgacttgctctcctacag

SEQ ID NO: 773020 - DNA, 25 bp, Homo sapien
gaccgtaggatacatgatggctgga

SEQ ID NO: 773021 - DNA, 25 bp, Homo sapien
gagtccttccctgacaattcctaca

SEQ ID NO: 773022 - DNA, 25 bp, Homo sapien
acactgcaacgtccacctcatgggc

SEQ ID NO: 773023 - DNA, 25 bp, Homo sapien
aattctccagcctcagcctcctgag

SEQ ID NO: 773024 - DNA, 25 bp, Homo sapien
tcagcacactgcaacgtccacctca

SEQ ID NO: 773025 - DNA, 25 bp, Homo sapien
ctcaagcaattctccagcctcagcc

SEQ ID NO: 773026 - DNA, 25 bp, Homo sapien
tccactgtgcgagtgctctaggtgc

SEQ ID NO: 773027 - DNA, 25 bp, Homo sapien
ccactgtgcgagtgctctaggtgct

SEQ ID NO: 773028 - DNA, 25 bp, Homo sapien
gtccactgtgcgagtgctctaggtg

SEQ ID NO: 773029 - DNA, 25 bp, Homo sapien
agatggcccaagatctggcccagga

SEQ ID NO: 773030 - DNA, 25 bp, Homo sapien
ggaattggagaaagacgcttccaat

SEQ ID NO: 773031 - DNA, 25 bp, Homo sapien
aagaagatggcccaagatctggccc

SEQ ID NO: 773032 - DNA, 25 bp, Homo sapien
tccaatgcttagaggaaggtcctct

SEQ ID NO: 773033 - DNA, 25 bp, Homo sapien
tgtaaaacatctggcggtatcttcc

SEQ ID NO: 773034 - DNA, 25 bp, Homo sapien
tatgggtcatatccaagcttggcaa

SEQ ID NO: 773035 - DNA, 25 bp, Homo sapien
ttggcaagcataggagcaatcactg

SEQ ID NO: 773036 - DNA, 25 bp, Homo sapien
tgatagagctcctacattgactggc

SEQ ID NO: 773037 - DNA, 25 bp, Homo sapien
caggccactaggcccaaatttttct

SEQ ID NO: 773038 - DNA, 25 bp, Homo sapien
tatgtgatggtttacaagaaggcag

SEQ ID NO: 773039 - DNA, 25 bp, Homo sapien
ttaatttgccctcatatgtgatggt

SEQ ID NO: 773040 - DNA, 25 bp, Homo sapien
gatggtttacaagaaggcagctctt

SEQ ID NO: 773041 - DNA, 25 bp, Homo sapien
ctgctaataatgaattgaaaagggg

SEQ ID NO: 773042 - DNA, 25 bp, Homo sapien
tccaggctttacctttaatgtaaga

SEQ ID NO: 773043 - DNA, 25 bp, Homo sapien
tctaagaagtctagactctatcctg

SEQ ID NO: 773044 - DNA, 25 bp, Homo sapien
tctatcctgtagtaacagtggagtc

SEQ ID NO: 773045 - DNA, 25 bp, Homo sapien
cagtttttgctgagtataggaacca

SEQ ID NO: 773046 - DNA, 25 bp, Homo sapien
gtgcagcccatgtcttacagtaacc

SEQ ID NO: 773047 - DNA, 25 bp, Homo sapien
tacagtaaccactataagcaaaaac

SEQ ID NO: 773048 - DNA, 25 bp, Homo sapien
tacaatataaaaaatgtgcagccca

SEQ ID NO: 773049 - DNA, 25 bp, Homo sapien
gaagaggtatagctaaaaagaggag

SEQ ID NO: 773050 - DNA, 25 bp, Homo sapien
cactgagtcctactttggcagcgag

SEQ ID NO: 773051 - DNA, 25 bp, Homo sapien
taaagctccactttatccccgtggc

SEQ ID NO: 773052 - DNA, 25 bp, Homo sapien
ttgggatcccacactgagtcctact

SEQ ID NO: 773053 - DNA, 25 bp, Homo sapien
cgagaggcagtttcctagcacttct

SEQ ID NO: 773054 - DNA, 25 bp, Homo sapien
taatagctaggctgattgatcccga

SEQ ID NO: 773055 - DNA, 25 bp, Homo sapien
tcccgattatcaaggaagaaccaag

SEQ ID NO: 773056 - DNA, 25 bp, Homo sapien
agccaaagacaagtaaggcaggtac

SEQ ID NO: 773057 - DNA, 25 bp, Homo sapien
aggaaagaaattgcctggaacctag

SEQ ID NO: 773058 - DNA, 25 bp, Homo sapien
tatgtatgcacctacacgggtctca

SEQ ID NO: 773059 - DNA, 25 bp, Homo sapien
tcactaagcagcacacgtaggtggc

SEQ ID NO: 773060 - DNA, 25 bp, Homo sapien
cagggagtcagagcaaactcctgga

SEQ ID NO: 773061 - DNA, 25 bp, Homo sapien
cagcctacctgagttgattgcctgc

SEQ ID NO: 773062 - DNA, 25 bp, Homo sapien
ttattcccttacacactgaggaaca

SEQ ID NO: 773063 - DNA, 25 bp, Homo sapien
tggaatattcctactacagcccaga

SEQ ID NO: 773064 - DNA, 25 bp, Homo sapien
ggaacacgaccccatttgcagtgaa

SEQ ID NO: 773065 - DNA, 25 bp, Homo sapien
tctgcttctctcgatgggttggctt

SEQ ID NO: 773066 - DNA, 25 bp, Homo sapien
ggtaatatggtgacatcttgtctct

SEQ ID NO: 773067 - DNA, 25 bp, Homo sapien
ggcaacagagcgaagagtgaaaccc

SEQ ID NO: 773068 - DNA, 25 bp, Homo sapien
gggtaatatggtgacatcttgtctc

SEQ ID NO: 773069 - DNA, 25 bp, Homo sapien
gcaacagagcgaagagtgaaaccct

SEQ ID NO: 773070 - DNA, 25 bp, Homo sapien
gaagcactagaaggtagtattccaa

SEQ ID NO: 773071 - DNA, 25 bp, Homo sapien
tagaaggtagtattccaaaaagcaa

SEQ ID NO: 773072 - DNA, 25 bp, Homo sapien
tcctgaagcactagaaggtagtatt

SEQ ID NO: 773073 - DNA, 25 bp, Homo sapien
gcactagaaggtagtattccaaaaa

SEQ ID NO: 773074 - DNA, 25 bp, Homo sapien
ggcatgtcttctctctccaatccaa

SEQ ID NO: 773075 - DNA, 25 bp, Homo sapien
ctatggcatgtcttctctctccaat

SEQ ID NO: 773076 - DNA, 25 bp, Homo sapien
tgtcttctctctccaatccaattac

SEQ ID NO: 773077 - DNA, 25 bp, Homo sapien
catgtcttctctctccaatccaatt

SEQ ID NO: 773078 - DNA, 25 bp, Homo sapien
ggaaaagccacaatacaatcaatga

SEQ ID NO: 773079 - DNA, 25 bp, Homo sapien
taggtacagacacgttttcataatg

SEQ ID NO: 773080 - DNA, 25 bp, Homo sapien
tctggaagagcatctaatgtatact

SEQ ID NO: 773081 - DNA, 25 bp, Homo sapien
tgatcgacttagtggaaaatttccc

SEQ ID NO: 773082 - DNA, 25 bp, Homo sapien
tattgctccactactgtagttctta

SEQ ID NO: 773083 - DNA, 25 bp, Homo sapien
gaatattgctccactactgtagttc

SEQ ID NO: 773084 - DNA, 25 bp, Homo sapien
catgaatattgctccactactgtag

SEQ ID NO: 773085 - DNA, 25 bp, Homo sapien
ttgctccactactgtagttcttaac

SEQ ID NO: 773086 - DNA, 25 bp, Homo sapien
tctagttgcatttttgtgggaagag

SEQ ID NO: 773087 - DNA, 25 bp, Homo sapien
tttattccactatcttgctgacatc

SEQ ID NO: 773088 - DNA, 25 bp, Homo sapien
ccctaagggaatctatctcttctgc

SEQ ID NO: 773089 - DNA, 25 bp, Homo sapien
gggaagagtgatgccaggtatcttt

SEQ ID NO: 773090 - DNA, 25 bp, Homo sapien
cgggaaggttccatgtgagcactaa

SEQ ID NO: 773091 - DNA, 25 bp, Homo sapien
gaaaatccgaccagggattcaggcc

SEQ ID NO: 773092 - DNA, 25 bp, Homo sapien
gattacaccccagtggcactaagac

SEQ ID NO: 773093 - DNA, 25 bp, Homo sapien
catccttgtcaatagggtgtctcgg

SEQ ID NO: 773094 - DNA, 25 bp, Homo sapien
tagcagtgaagcaacaggtcctggg

SEQ ID NO: 773095 - DNA, 25 bp, Homo sapien
ctgtgtgtcacagaggcttggtgta

SEQ ID NO: 773096 - DNA, 25 bp, Homo sapien
caccctcaagtaagtctgttcttcc

SEQ ID NO: 773097 - DNA, 25 bp, Homo sapien
ttcccctcttcgtatcccaggatga

SEQ ID NO: 773098 - DNA, 25 bp, Homo sapien
tcttatgttagagatgttctgccaa

SEQ ID NO: 773099 - DNA, 25 bp, Homo sapien
aattttgtaggtctaggctgagtgc

SEQ ID NO: 773100 - DNA, 25 bp, Homo sapien
caagtcttggctatgaagcactaca

SEQ ID NO: 773101 - DNA, 25 bp, Homo sapien
ataattatgggtgtgctttctcagc

SEQ ID NO: 773102 - DNA, 25 bp, Homo sapien
tccctacctaaagcttgaggagatt

SEQ ID NO: 773103 - DNA, 25 bp, Homo sapien
gagtgctacggcttatttcaagatg

SEQ ID NO: 773104 - DNA, 25 bp, Homo sapien
caaaccattgctaaggagtgctacg

SEQ ID NO: 773105 - DNA, 25 bp, Homo sapien
gattctcagtatgcaccattccctc

SEQ ID NO: 773106 - DNA, 25 bp, Homo sapien
gcctccagctgtacccacgttgtta

SEQ ID NO: 773107 - DNA, 25 bp, Homo sapien
tccaaaaatcgctgccataaatgag

SEQ ID NO: 773108 - DNA, 25 bp, Homo sapien
tctatcaataagtccaagggcattc

SEQ ID NO: 773109 - DNA, 25 bp, Homo sapien
tgtctcttgcagtacccagtgtcta

SEQ ID NO: 773110 - DNA, 25 bp, Homo sapien
cacagggccatgttgtgcaatcttc

SEQ ID NO: 773111 - DNA, 25 bp, Homo sapien
ttttagtgttaggttcagccaaagc

SEQ ID NO: 773112 - DNA, 25 bp, Homo sapien
catgaccttacatatcatccttgca

SEQ ID NO: 773113 - DNA, 25 bp, Homo sapien
agtgttaggttcagccaaagcaagg

SEQ ID NO: 773114 - DNA, 25 bp, Homo sapien
ttctaccagatatcgatacattact

SEQ ID NO: 773115 - DNA, 25 bp, Homo sapien
tagccataagtaagacagtagggtt

SEQ ID NO: 773116 - DNA, 25 bp, Homo sapien
agggccaagaatagtcaaggtagtt

SEQ ID NO: 773117 - DNA, 25 bp, Homo sapien
cattagctaagttaatgatatagcc

SEQ ID NO: 773118 - DNA, 25 bp, Homo sapien
gaaagtcaggtagttggaattctcc

SEQ ID NO: 773119 - DNA, 25 bp, Homo sapien
agaaagtcaggtagttggaattctc

SEQ ID NO: 773120 - DNA, 25 bp, Homo sapien
taagaaagtcaggtagttggaattc

SEQ ID NO: 773121 - DNA, 25 bp, Homo sapien
aagaaagtcaggtagttggaattct

SEQ ID NO: 773122 - DNA, 25 bp, Homo sapien
tacacagagtaggaacagagagggt

SEQ ID NO: 773123 - DNA, 25 bp, Homo sapien
tcaaattaggcactggaacgctgga

SEQ ID NO: 773124 - DNA, 25 bp, Homo sapien
gagccaatctagtatacatcaggag

SEQ ID NO: 773125 - DNA, 25 bp, Homo sapien
gctggagcagctttacccactgggc

SEQ ID NO: 773126 - DNA, 25 bp, Homo sapien
cccttgtctgcacgaggtggtcgga

SEQ ID NO: 773127 - DNA, 25 bp, Homo sapien
gcacctgggcgcttttggattttat

SEQ ID NO: 773128 - DNA, 25 bp, Homo sapien
tccacagccggtgtcagtctgttca

SEQ ID NO: 773129 - DNA, 25 bp, Homo sapien
tgtcactgtgttggctaaacagatc

SEQ ID NO: 773130 - DNA, 25 bp, Homo sapien
gagggagtctcgcaatctttcccag

SEQ ID NO: 773131 - DNA, 25 bp, Homo sapien
agggagtctcgcaatctttcccagg

SEQ ID NO: 773132 - DNA, 25 bp, Homo sapien
atgatctatattccacagatgagtt

SEQ ID NO: 773133 - DNA, 25 bp, Homo sapien
gagagggagtctcgcaatctttccc

SEQ ID NO: 773134 - DNA, 25 bp, Homo sapien
agaagtgaccgtccccactgaaaca

SEQ ID NO: 773135 - DNA, 25 bp, Homo sapien
gttggtcagcatgagaagtgaccgt

SEQ ID NO: 773136 - DNA, 25 bp, Homo sapien
gtcagcatgagaagtgaccgtcccc

SEQ ID NO: 773137 - DNA, 25 bp, Homo sapien
gcatgagaagtgaccgtccccactg

SEQ ID NO: 773138 - DNA, 25 bp, Homo sapien
tcatgtatggaagaggctcctggtt

SEQ ID NO: 773139 - DNA, 25 bp, Homo sapien
ctcatgtatggaagaggctcctggt

SEQ ID NO: 773140 - DNA, 25 bp, Homo sapien
catgtatggaagaggctcctggttc

SEQ ID NO: 773141 - DNA, 25 bp, Homo sapien
tgtatggaagaggctcctggttctg

SEQ ID NO: 773142 - DNA, 25 bp, Homo sapien
caaaactgatcttaagaaagtttgg

SEQ ID NO: 773143 - DNA, 25 bp, Homo sapien
aactgatcttaagaaagtttgggtg

SEQ ID NO: 773144 - DNA, 25 bp, Homo sapien
gcaaaactgatcttaagaaagtttg

SEQ ID NO: 773145 - DNA, 25 bp, Homo sapien
gacccacagggcataagactaacat

SEQ ID NO: 773146 - DNA, 25 bp, Homo sapien
aaacctgaatcctagaacctgtcaa

SEQ ID NO: 773147 - DNA, 25 bp, Homo sapien
tagccaaggcctgataactgctgtt

SEQ ID NO: 773148 - DNA, 25 bp, Homo sapien
cagcatttgctcctcagcaaaaagg

SEQ ID NO: 773149 - DNA, 25 bp, Homo sapien
cacaagccagggtgaaatgctgcag

SEQ ID NO: 773150 - DNA, 25 bp, Homo sapien
tgcggtccatcctacaacacgctgg

SEQ ID NO: 773151 - DNA, 25 bp, Homo sapien
cagaggcaactgctgatgcggtcca

SEQ ID NO: 773152 - DNA, 25 bp, Homo sapien
tatccatcctaagggctttgctgtg

SEQ ID NO: 773153 - DNA, 25 bp, Homo sapien
cagatgcatgcaagtagctgctggg

SEQ ID NO: 773154 - DNA, 25 bp, Homo sapien
ttgttgctactgtgggggcactgtc

SEQ ID NO: 773155 - DNA, 25 bp, Homo sapien
tggtgctttcagatgcatgcaagta

SEQ ID NO: 773156 - DNA, 25 bp, Homo sapien
gactgtcatctgctattgttgctac

SEQ ID NO: 773157 - DNA, 25 bp, Homo sapien
aggcggttggggaggttcctgcaga

SEQ ID NO: 773158 - DNA, 25 bp, Homo sapien
ctagacaagccaggcggttggggag

SEQ ID NO: 773159 - DNA, 25 bp, Homo sapien
aggatggatgttgagaacagctgcc

SEQ ID NO: 773160 - DNA, 25 bp, Homo sapien
agctgcctcaggaagactgcctggg

SEQ ID NO: 773161 - DNA, 25 bp, Homo sapien
agggcgaacaaacagaatgtggtta

SEQ ID NO: 773162 - DNA, 25 bp, Homo sapien
ctagggcgaacaaacagaatgtggt

SEQ ID NO: 773163 - DNA, 25 bp, Homo sapien
tctccctgtgtcttcgtctcttcct

SEQ ID NO: 773164 - DNA, 25 bp, Homo sapien
ggagtcccggtgtgttctccctgtg

SEQ ID NO: 773165 - DNA, 25 bp, Homo sapien
acagccaatcctaggaatttccctt

SEQ ID NO: 773166 - DNA, 25 bp, Homo sapien
ggacagccaatcctaggaatttccc

SEQ ID NO: 773167 - DNA, 25 bp, Homo sapien
gggacagccaatcctaggaatttcc

SEQ ID NO: 773168 - DNA, 25 bp, Homo sapien
gacagccaatcctaggaatttccct

SEQ ID NO: 773169 - DNA, 25 bp, Homo sapien
gcccaagtctgcttacaggatccca

SEQ ID NO: 773170 - DNA, 25 bp, Homo sapien
tcaatacacttaaacaggcacacgt

SEQ ID NO: 773171 - DNA, 25 bp, Homo sapien
cagggctgtgcatgaaatcgggatc

SEQ ID NO: 773172 - DNA, 25 bp, Homo sapien
gaaacacatgttccttctgggctcc

SEQ ID NO: 773173 - DNA, 25 bp, Homo sapien
attcattttaaatggaaagggacag

SEQ ID NO: 773174 - DNA, 25 bp, Homo sapien
gcccaggctggacatattcatttta

SEQ ID NO: 773175 - DNA, 25 bp, Homo sapien
atggaaagggacagggctagggaag

SEQ ID NO: 773176 - DNA, 25 bp, Homo sapien
gggacagggctagggaagtggactg

SEQ ID NO: 773177 - DNA, 25 bp, Homo sapien
tagagtgttatatgaccttgtcccc

SEQ ID NO: 773178 - DNA, 25 bp, Homo sapien
actgggtgtacgagcatctggaaga

SEQ ID NO: 773179 - DNA, 25 bp, Homo sapien
caatgtccgggaagattgtgacccc

SEQ ID NO: 773180 - DNA, 25 bp, Homo sapien
agaaaggcaccgtatatcagggagc

SEQ ID NO: 773181 - DNA, 25 bp, Homo sapien
cacaggcatgtgccactacgcccgg

SEQ ID NO: 773182 - DNA, 25 bp, Homo sapien
tcacaggcatgtgccactacgcccg

SEQ ID NO: 773183 - DNA, 25 bp, Homo sapien
gctcaccgcaagttcctgcctcagc

SEQ ID NO: 773184 - DNA, 25 bp, Homo sapien
ctcggctcaccgcaagttcctgcct

SEQ ID NO: 773185 - DNA, 25 bp, Homo sapien
caggcttgcctggataaacactaca

SEQ ID NO: 773186 - DNA, 25 bp, Homo sapien
gttaccaggtggcatatccagaaga

SEQ ID NO: 773187 - DNA, 25 bp, Homo sapien
caagttgctacttggcatgtgaaac

SEQ ID NO: 773188 - DNA, 25 bp, Homo sapien
cattctcggcttcatggaatccact

SEQ ID NO: 773189 - DNA, 25 bp, Homo sapien
tgttcccagtcatttgtgggtgcta

SEQ ID NO: 773190 - DNA, 25 bp, Homo sapien
gagagggtgcacaggaatgattaat

SEQ ID NO: 773191 - DNA, 25 bp, Homo sapien
tattcagccgtgagaaagaatagaa

SEQ ID NO: 773192 - DNA, 25 bp, Homo sapien
gtgcacaggaatgattaatgggtac

SEQ ID NO: 773193 - DNA, 25 bp, Homo sapien
gcagtactgcctacgtgagtctcgt

SEQ ID NO: 773194 - DNA, 25 bp, Homo sapien
ggatgcacttagaacccattcacca

SEQ ID NO: 773195 - DNA, 25 bp, Homo sapien
gaaagcccaggccacgtatggaggt

SEQ ID NO: 773196 - DNA, 25 bp, Homo sapien
taaccaggagatatttgagcaagga

SEQ ID NO: 773197 - DNA, 25 bp, Homo sapien
ctagaacgcagtggtgtcttcatgc

SEQ ID NO: 773198 - DNA, 25 bp, Homo sapien
ccaggctctagaacgcagtggtgtc

SEQ ID NO: 773199 - DNA, 25 bp, Homo sapien
caggctctagaacgcagtggtgtct

SEQ ID NO: 773200 - DNA, 25 bp, Homo sapien
gctctagaacgcagtggtgtcttca

SEQ ID NO: 773201 - DNA, 25 bp, Homo sapien
tgttctagacaggaagtctcaccat

SEQ ID NO: 773202 - DNA, 25 bp, Homo sapien
aaatgggaccccaggtatgagccgc

SEQ ID NO: 773203 - DNA, 25 bp, Homo sapien
aagaatttactttatgccgggcacg

SEQ ID NO: 773204 - DNA, 25 bp, Homo sapien
ggtactgcttcgtcattcaggatgg

SEQ ID NO: 773205 - DNA, 25 bp, Homo sapien
ggctggagtgtagtcatgtcattat

SEQ ID NO: 773206 - DNA, 25 bp, Homo sapien
ggagtgtagtcatgtcattatggct

SEQ ID NO: 773207 - DNA, 25 bp, Homo sapien
gtcccaaacttttggacacaagcat

SEQ ID NO: 773208 - DNA, 25 bp, Homo sapien
catccttggccttttggcctcaagt

SEQ ID NO: 773209 - DNA, 25 bp, Homo sapien
tcatggcaggatccgataggcccag

SEQ ID NO: 773210 - DNA, 25 bp, Homo sapien
gcctctaatggcctggttaggctca

SEQ ID NO: 773211 - DNA, 25 bp, Homo sapien
ctcccagcggctttgacaggaccag

SEQ ID NO: 773212 - DNA, 25 bp, Homo sapien
tgtggcatccttgatggacccaact

SEQ ID NO: 773213 - DNA, 25 bp, Homo sapien
gagcatgcaccccattgtgaaccat

SEQ ID NO: 773214 - DNA, 25 bp, Homo sapien
ccatggaactgtaaggagccacaca

SEQ ID NO: 773215 - DNA, 25 bp, Homo sapien
ctggatgtacttgggcagggtcccc

SEQ ID NO: 773216 - DNA, 25 bp, Homo sapien
tgtgctagccaatctctcatgctgt

SEQ ID NO: 773217 - DNA, 25 bp, Homo sapien
tataatataaaagcagctgaccagg

SEQ ID NO: 773218 - DNA, 25 bp, Homo sapien
tactgacggacgaccatatatgttt

SEQ ID NO: 773219 - DNA, 25 bp, Homo sapien
tccaaagggctgactgcgaaacgtg

SEQ ID NO: 773220 - DNA, 25 bp, Homo sapien
gctgagactgtacgtgcttgccaca

SEQ ID NO: 773221 - DNA, 25 bp, Homo sapien
catgtagaatccttccctaatttgt

SEQ ID NO: 773222 - DNA, 25 bp, Homo sapien
atgtagaatccttccctaatttgtt

SEQ ID NO: 773223 - DNA, 25 bp, Homo sapien
acatgtagaatccttccctaatttg

SEQ ID NO: 773224 - DNA, 25 bp, Homo sapien
tgactatcgctatcagtattttgca

SEQ ID NO: 773225 - DNA, 25 bp, Homo sapien
catattgtgacatactgctgctgca

SEQ ID NO: 773226 - DNA, 25 bp, Homo sapien
ttttgcatctctcatcatttttgtc

SEQ ID NO: 773227 - DNA, 25 bp, Homo sapien
gcatctctcatcatttttgtcaact

SEQ ID NO: 773228 - DNA, 25 bp, Homo sapien
tgttagagcctagagccttcaaaag

SEQ ID NO: 773229 - DNA, 25 bp, Homo sapien
cttgaccttaggtgaatcacaatga

SEQ ID NO: 773230 - DNA, 25 bp, Homo sapien
gatttgaagatgcttcacttctgac

SEQ ID NO: 773231 - DNA, 25 bp, Homo sapien
tagctttaatagacctagtttgggc

SEQ ID NO: 773232 - DNA, 25 bp, Homo sapien
ggtgctacacttgaccgctgcggta

SEQ ID NO: 773233 - DNA, 25 bp, Homo sapien
cagaattgatgctaggaagggtacc

SEQ ID NO: 773234 - DNA, 25 bp, Homo sapien
tactttcgaatgcactggagtaggg

SEQ ID NO: 773235 - DNA, 25 bp, Homo sapien
tgccagccaaggcatatgccattca

SEQ ID NO: 773236 - DNA, 25 bp, Homo sapien
cacagaggccatgccaatctatcgt

SEQ ID NO: 773237 - DNA, 25 bp, Homo sapien
cagaggccatgccaatctatcgttc

SEQ ID NO: 773238 - DNA, 25 bp, Homo sapien
aggccatgccaatctatcgttccaa

SEQ ID NO: 773239 - DNA, 25 bp, Homo sapien
catgccaatctatcgttccaacttt

SEQ ID NO: 773240 - DNA, 25 bp, Homo sapien
cagaactccctggtttttaaggcag

SEQ ID NO: 773241 - DNA, 25 bp, Homo sapien
tagcagcctgctatgttgtaagtcc

SEQ ID NO: 773242 - DNA, 25 bp, Homo sapien
tttctcaaacacaaagcgccctgct

SEQ ID NO: 773243 - DNA, 25 bp, Homo sapien
tattctagcaggctgggtccattct

SEQ ID NO: 773244 - DNA, 25 bp, Homo sapien
ctgggaaacatgataagatcttgtc

SEQ ID NO: 773245 - DNA, 25 bp, Homo sapien
gggaaacatgataagatcttgtctc

SEQ ID NO: 773246 - DNA, 25 bp, Homo sapien
cctgggaaacatgataagatcttgt

SEQ ID NO: 773247 - DNA, 25 bp, Homo sapien
tgggaaacatgataagatcttgtct

SEQ ID NO: 773248 - DNA, 25 bp, Homo sapien
tccaaactaatttggccacagggcc

SEQ ID NO: 773249 - DNA, 25 bp, Homo sapien
cggccctattctcttttacactggt

SEQ ID NO: 773250 - DNA, 25 bp, Homo sapien
tcctattaggcttgctcacttcggc

SEQ ID NO: 773251 - DNA, 25 bp, Homo sapien
cacttcggcctgttcactgaagcca

SEQ ID NO: 773252 - DNA, 25 bp, Homo sapien
gacgtacaccaccatgcaaagctaa

SEQ ID NO: 773253 - DNA, 25 bp, Homo sapien
tggctcgctgtagattcaaactcct

SEQ ID NO: 773254 - DNA, 25 bp, Homo sapien
gcaatttgtttatcaaagtatgcaa

SEQ ID NO: 773255 - DNA, 25 bp, Homo sapien
tcatggagctgtgatctatcaccac

SEQ ID NO: 773256 - DNA, 25 bp, Homo sapien
aataggatttaaatctgtgctctgc

SEQ ID NO: 773257 - DNA, 25 bp, Homo sapien
tgagaacacttgctatttaggcagt

SEQ ID NO: 773258 - DNA, 25 bp, Homo sapien
tgtgctctgccacttagaaaaatta

SEQ ID NO: 773259 - DNA, 25 bp, Homo sapien
gatgtaaagaaagacgatgggcatt

SEQ ID NO: 773260 - DNA, 25 bp, Homo sapien
tagtagtcagttggcacatttggca

SEQ ID NO: 773261 - DNA, 25 bp, Homo sapien
aaaaagacacactgtgcgaccacag

SEQ ID NO: 773262 - DNA, 25 bp, Homo sapien
taatcatctggcatacgcagagagt

SEQ ID NO: 773263 - DNA, 25 bp, Homo sapien
tgagcctgaacccatgaagatgtga

SEQ ID NO: 773264 - DNA, 25 bp, Homo sapien
caccgcgcttggctacatccggcta

SEQ ID NO: 773265 - DNA, 25 bp, Homo sapien
accgcgcttggctacatccggctaa

SEQ ID NO: 773266 - DNA, 25 bp, Homo sapien
ccgcgcttggctacatccggctaat

SEQ ID NO: 773267 - DNA, 25 bp, Homo sapien
tgaatcaaaccccgagttcctgtat

SEQ ID NO: 773268 - DNA, 25 bp, Homo sapien
tgacttaaaaggatcgtccgtggga

SEQ ID NO: 773269 - DNA, 25 bp, Homo sapien
atcaaaccccgagttcctgtatgtt

SEQ ID NO: 773270 - DNA, 25 bp, Homo sapien
cctgtatgtttagaaggtttgccag

SEQ ID NO: 773271 - DNA, 25 bp, Homo sapien
aggctgccgagggccactggtgtgt

SEQ ID NO: 773272 - DNA, 25 bp, Homo sapien
tggtgtgtggaatggccttcggtca

SEQ ID NO: 773273 - DNA, 25 bp, Homo sapien
ggtgtgtggaatggccttcggtcat

SEQ ID NO: 773274 - DNA, 25 bp, Homo sapien
cgtgtcttcggcgatgtcacagcac

SEQ ID NO: 773275 - DNA, 25 bp, Homo sapien
gtcacagtgacggtacagtgcctgg

SEQ ID NO: 773276 - DNA, 25 bp, Homo sapien
ggtagttgacaaactccgacccagc

SEQ ID NO: 773277 - DNA, 25 bp, Homo sapien
tagagtggagcttggtaaccgcgac

SEQ ID NO: 773278 - DNA, 25 bp, Homo sapien
ttattgttgcctgccgccgggtccg

SEQ ID NO: 773279 - DNA, 25 bp, Homo sapien
gccgccgggtccgagcctgcagaag

SEQ ID NO: 773280 - DNA, 25 bp, Homo sapien
tagcttattgttgcctgccgccggg

SEQ ID NO: 773281 - DNA, 25 bp, Homo sapien
cttgtagcttattgttgcctgccgc

SEQ ID NO: 773282 - DNA, 25 bp, Homo sapien
cgtgctccagtagcgtcaagccctt

SEQ ID NO: 773283 - DNA, 25 bp, Homo sapien
tgctgcgcccaacgcgcaggtagta

SEQ ID NO: 773284 - DNA, 25 bp, Homo sapien
ttgtgcttgtgcccgctgggcgcca

SEQ ID NO: 773285 - DNA, 25 bp, Homo sapien
tcaagcccttgctgcgcccaacgcg

SEQ ID NO: 773286 - DNA, 25 bp, Homo sapien
ggcttgtgctgtccattgaggagct

SEQ ID NO: 773287 - DNA, 25 bp, Homo sapien
gcgggcttgtgctgtccattgagga

SEQ ID NO: 773288 - DNA, 25 bp, Homo sapien
cttgtgctgtccattgaggagcttc

SEQ ID NO: 773289 - DNA, 25 bp, Homo sapien
ctagcgggcttgtgctgtccattga

SEQ ID NO: 773290 - DNA, 25 bp, Homo sapien
aggcgagtgcgtggcaaggactgca

SEQ ID NO: 773291 - DNA, 25 bp, Homo sapien
tgaggcgagtgcgtggcaaggactg

SEQ ID NO: 773292 - DNA, 25 bp, Homo sapien
gcgagtgcgtggcaaggactgcagc

SEQ ID NO: 773293 - DNA, 25 bp, Homo sapien
ggtgaggcgagtgcgtggcaaggac

SEQ ID NO: 773294 - DNA, 25 bp, Homo sapien
tgtgctaagaccctgcgaagtaagg

SEQ ID NO: 773295 - DNA, 25 bp, Homo sapien
tcagcctgctgtgtagttggtacca

SEQ ID NO: 773296 - DNA, 25 bp, Homo sapien
acctctctaagagctggaattgcag

SEQ ID NO: 773297 - DNA, 25 bp, Homo sapien
ttagcttagcattgtagcaggtgcc

SEQ ID NO: 773298 - DNA, 25 bp, Homo sapien
tcctgaggagattcgcaagacattc

SEQ ID NO: 773299 - DNA, 25 bp, Homo sapien
taaaaaaggtcattcagtggtgcac

SEQ ID NO: 773300 - DNA, 25 bp, Homo sapien
gacgatatccctgtttgggaccaag

SEQ ID NO: 773301 - DNA, 25 bp, Homo sapien
ggaagcccaggtacgcaaagagaac

SEQ ID NO: 773302 - DNA, 25 bp, Homo sapien
ttaaagataagcctggacacctgga

SEQ ID NO: 773303 - DNA, 25 bp, Homo sapien
tgttgagaagccatgacctggagga

SEQ ID NO: 773304 - DNA, 25 bp, Homo sapien
cattctacaggcacaagatggttcc

SEQ ID NO: 773305 - DNA, 25 bp, Homo sapien
gatcccgttctttggtatggctgaa

SEQ ID NO: 773306 - DNA, 25 bp, Homo sapien
gaaagcactctagcagggactctgg

SEQ ID NO: 773307 - DNA, 25 bp, Homo sapien
ccatagggaaataagcgcatacacg

SEQ ID NO: 773308 - DNA, 25 bp, Homo sapien
ccactgttgtaagggccatagggaa

SEQ ID NO: 773309 - DNA, 25 bp, Homo sapien
ttgtgagagtcccaataaaaccctg

SEQ ID NO: 773310 - DNA, 25 bp, Homo sapien
ggtggccaagtcctatgcatgtatc

SEQ ID NO: 773311 - DNA, 25 bp, Homo sapien
ttcttgagcccacctgaaatgttga

SEQ ID NO: 773312 - DNA, 25 bp, Homo sapien
tacgtgtttcatggttaggtggcca

SEQ ID NO: 773313 - DNA, 25 bp, Homo sapien
ggatatggcctcagatttctcctgt

SEQ ID NO: 773314 - DNA, 25 bp, Homo sapien
taaaacatagcacagtgtacatacc

SEQ ID NO: 773315 - DNA, 25 bp, Homo sapien
aaaacatagcacagtgtacatacct

SEQ ID NO: 773316 - DNA, 25 bp, Homo sapien
tgcgccaccgcgtcccgcctattgt

SEQ ID NO: 773317 - DNA, 25 bp, Homo sapien
cgtgcgccaccgcgtcccgcctatt

SEQ ID NO: 773318 - DNA, 25 bp, Homo sapien
tgtactacctgatagacttgtgaag

SEQ ID NO: 773319 - DNA, 25 bp, Homo sapien
tagtcaacagctcagggtttggatt

SEQ ID NO: 773320 - DNA, 25 bp, Homo sapien
ggtgtacagacctccaaagtcagag

SEQ ID NO: 773321 - DNA, 25 bp, Homo sapien
gaggtgtagttatagcatagtcaac

SEQ ID NO: 773322 - DNA, 25 bp, Homo sapien
gttgagtctcatgcagtcgatcccc

SEQ ID NO: 773323 - DNA, 25 bp, Homo sapien
ggaaagagttgagtctcatgcagtc

SEQ ID NO: 773324 - DNA, 25 bp, Homo sapien
aaagagttgagtctcatgcagtcga

SEQ ID NO: 773325 - DNA, 25 bp, Homo sapien
agagttgagtctcatgcagtcgatc

SEQ ID NO: 773326 - DNA, 25 bp, Homo sapien
ctgagcaagtttaaaacggagtggg

SEQ ID NO: 773327 - DNA, 25 bp, Homo sapien
gcaagtttaaaacggagtgggctgc

SEQ ID NO: 773328 - DNA, 25 bp, Homo sapien
gtgggctgctttgggctgcacagcc

SEQ ID NO: 773329 - DNA, 25 bp, Homo sapien
tgggctgctttgggctgcacagcca

SEQ ID NO: 773330 - DNA, 25 bp, Homo sapien
ggacagttgtactccatttcccgtg

SEQ ID NO: 773331 - DNA, 25 bp, Homo sapien
gttgtactccatttcccgtgtgcca

SEQ ID NO: 773332 - DNA, 25 bp, Homo sapien
gaggggacagttgtactccatttcc

SEQ ID NO: 773333 - DNA, 25 bp, Homo sapien
tgcatgctctggtgaggggacagtt

SEQ ID NO: 773334 - DNA, 25 bp, Homo sapien
actgcactgagcatggtgtcgagac

SEQ ID NO: 773335 - DNA, 25 bp, Homo sapien
gccgtggcatgaagggtgccccagg

SEQ ID NO: 773336 - DNA, 25 bp, Homo sapien
ggccgtggcatgaagggtgccccag

SEQ ID NO: 773337 - DNA, 25 bp, Homo sapien
gcactgagcatggtgtcgagaccac

SEQ ID NO: 773338 - DNA, 25 bp, Homo sapien
tctgcgagatgtccggcagtccgct

SEQ ID NO: 773339 - DNA, 25 bp, Homo sapien
gtgtgcatcgatgccgcctgtcggt

SEQ ID NO: 773340 - DNA, 25 bp, Homo sapien
ccttttgcagactcggtgcccggtg

SEQ ID NO: 773341 - DNA, 25 bp, Homo sapien
gatcgctgcccgaagtctgcgagat

SEQ ID NO: 773342 - DNA, 25 bp, Homo sapien
gtggcggtttcctgcgccgtgtctg

SEQ ID NO: 773343 - DNA, 25 bp, Homo sapien
tgcgccgtgtctggcttggccagcc

SEQ ID NO: 773344 - DNA, 25 bp, Homo sapien
gtttcctgcgccgtgtctggcttgg

SEQ ID NO: 773345 - DNA, 25 bp, Homo sapien
gtctggcttggccagccggagcacc

SEQ ID NO: 773346 - DNA, 25 bp, Homo sapien
tacccagccacagcaaatgattatg

SEQ ID NO: 773347 - DNA, 25 bp, Homo sapien
ccagtgtgcgcatgtatttctctaa

SEQ ID NO: 773348 - DNA, 25 bp, Homo sapien
tttaaaggaaacagctactgagcac

SEQ ID NO: 773349 - DNA, 25 bp, Homo sapien
catactttagaacctttcagcgctg

SEQ ID NO: 773350 - DNA, 25 bp, Homo sapien
actaatatcaactatgtttttacag

SEQ ID NO: 773351 - DNA, 25 bp, Homo sapien
ctgtgtgagaaaggcctatagattt

SEQ ID NO: 773352 - DNA, 25 bp, Homo sapien
ttacagatcagaacttcttataata

SEQ ID NO: 773353 - DNA, 25 bp, Homo sapien
ttattattagcagtgcacagctgtg

SEQ ID NO: 773354 - DNA, 25 bp, Homo sapien
tgggtccaacattgagtcagtcatg

SEQ ID NO: 773355 - DNA, 25 bp, Homo sapien
tacctttcgaaacatgaacactgcc

SEQ ID NO: 773356 - DNA, 25 bp, Homo sapien
cacctgactggcgtgcaactgacat

SEQ ID NO: 773357 - DNA, 25 bp, Homo sapien
tgagtcagtcatgccagtgttacct

SEQ ID NO: 773358 - DNA, 25 bp, Homo sapien
agaaacccaagggaaggcactgcct

SEQ ID NO: 773359 - DNA, 25 bp, Homo sapien
caggagaaacccaagggaaggcact

SEQ ID NO: 773360 - DNA, 25 bp, Homo sapien
aacccaagggaaggcactgcctggc

SEQ ID NO: 773361 - DNA, 25 bp, Homo sapien
ggagaaacccaagggaaggcactgc

SEQ ID NO: 773362 - DNA, 25 bp, Homo sapien
agaaggaagcgcctcctcatggcag

SEQ ID NO: 773363 - DNA, 25 bp, Homo sapien
caggcagaaggaagcgcctcctcat

SEQ ID NO: 773364 - DNA, 25 bp, Homo sapien
agaagcagacattcctttgctgtgg

SEQ ID NO: 773365 - DNA, 25 bp, Homo sapien
aggaagcgcctcctcatggcagagg

SEQ ID NO: 773366 - DNA, 25 bp, Homo sapien
gcgagactctttttttctccaggac

SEQ ID NO: 773367 - DNA, 25 bp, Homo sapien
agcgagactctttttttctccagga

SEQ ID NO: 773368 - DNA, 25 bp, Homo sapien
gcagcgagactctttttttctccag

SEQ ID NO: 773369 - DNA, 25 bp, Homo sapien
ctgcagcgagactctttttttctcc

SEQ ID NO: 773370 - DNA, 25 bp, Homo sapien
tgcgcatgcgctctcctggaatacc

SEQ ID NO: 773371 - DNA, 25 bp, Homo sapien
cgtctgcgcatgcgctctcctggaa

SEQ ID NO: 773372 - DNA, 25 bp, Homo sapien
gcatgcgctctcctggaatacccag

SEQ ID NO: 773373 - DNA, 25 bp, Homo sapien
tctgcgcatgcgctctcctggaata

SEQ ID NO: 773374 - DNA, 25 bp, Homo sapien
tccttgtagcttattggtgtcggcg

SEQ ID NO: 773375 - DNA, 25 bp, Homo sapien
cttgtagcttattggtgtcggcggc

SEQ ID NO: 773376 - DNA, 25 bp, Homo sapien
ccttgtagcttattggtgtcggcgg

SEQ ID NO: 773377 - DNA, 25 bp, Homo sapien
aggctgggaagtagcgcaggcagta

SEQ ID NO: 773378 - DNA, 25 bp, Homo sapien
caggctgggaagtagcgcaggcagt

SEQ ID NO: 773379 - DNA, 25 bp, Homo sapien
ctagcggacttgtggccactgagga

SEQ ID NO: 773380 - DNA, 25 bp, Homo sapien
ctccaggcgacagccgcttggtgcg

SEQ ID NO: 773381 - DNA, 25 bp, Homo sapien
aggagcttctgcctgaacgtgccct

SEQ ID NO: 773382 - DNA, 25 bp, Homo sapien
tcgctaagcgtcaggcccttgctgc

SEQ ID NO: 773383 - DNA, 25 bp, Homo sapien
acgcgagtgtgcggcaagggctgta

SEQ ID NO: 773384 - DNA, 25 bp, Homo sapien
cgcgagtgtgcggcaagggctgtag

SEQ ID NO: 773385 - DNA, 25 bp, Homo sapien
gacgcgagtgtgcggcaagggctgt

SEQ ID NO: 773386 - DNA, 25 bp, Homo sapien
acaggctcaggtgacgcgagtgtgc

SEQ ID NO: 773387 - DNA, 25 bp, Homo sapien
cgcccggcccgatcgcttatatttt

SEQ ID NO: 773388 - DNA, 25 bp, Homo sapien
agacggggccgatcctgcccaggat

SEQ ID NO: 773389 - DNA, 25 bp, Homo sapien
gtgcagcctcagacggggccgatcc

SEQ ID NO: 773390 - DNA, 25 bp, Homo sapien
atgttgttgcaacggccatcagagg

SEQ ID NO: 773391 - DNA, 25 bp, Homo sapien
ctcacttggacactacttaattaac

SEQ ID NO: 773392 - DNA, 25 bp, Homo sapien
aaaaaggctaactcacttggacact

SEQ ID NO: 773393 - DNA, 25 bp, Homo sapien
gctaactcacttggacactacttaa

SEQ ID NO: 773394 - DNA, 25 bp, Homo sapien
ctaaaaaggctaactcacttggaca

SEQ ID NO: 773395 - DNA, 25 bp, Homo sapien
ctcaacaaggtagtgcagaggtcaa

SEQ ID NO: 773396 - DNA, 25 bp, Homo sapien
agcacttccggaagctgaaatggat

SEQ ID NO: 773397 - DNA, 25 bp, Homo sapien
aaattctggataaagctatgtatga

SEQ ID NO: 773398 - DNA, 25 bp, Homo sapien
tgtatgaaatatttactgctctgct

SEQ ID NO: 773399 - DNA, 25 bp, Homo sapien
tgaggagtgactcattgtcaattcc

SEQ ID NO: 773400 - DNA, 25 bp, Homo sapien
ggctgaggagtgactcattgtcaat

SEQ ID NO: 773401 - DNA, 25 bp, Homo sapien
ggagtgactcattgtcaattcccat

SEQ ID NO: 773402 - DNA, 25 bp, Homo sapien
aggggctgaggagtgactcattgtc

SEQ ID NO: 773403 - DNA, 25 bp, Homo sapien
catttgaaatgcatgtgtcgtgcat

SEQ ID NO: 773404 - DNA, 25 bp, Homo sapien
agagcattcctgtgccaatgtcccc

SEQ ID NO: 773405 - DNA, 25 bp, Homo sapien
gagcattcctgtgccaatgtccccc

SEQ ID NO: 773406 - DNA, 25 bp, Homo sapien
aagagcattcctgtgccaatgtccc

SEQ ID NO: 773407 - DNA, 25 bp, Homo sapien
tgccaatgctttctcgttaccgccg

SEQ ID NO: 773408 - DNA, 25 bp, Homo sapien
aatgctttctcgttaccgccgacca

SEQ ID NO: 773409 - DNA, 25 bp, Homo sapien
gttaccgccgaccaccttctctgac

SEQ ID NO: 773410 - DNA, 25 bp, Homo sapien
gcccctggccatcgcaagagccaca

SEQ ID NO: 773411 - DNA, 25 bp, Homo sapien
tgctgttgactgaacactgtggcgc

SEQ ID NO: 773412 - DNA, 25 bp, Homo sapien
gacatggcaggcagctccgtgcatg

SEQ ID NO: 773413 - DNA, 25 bp, Homo sapien
cccctttaggcactgaggtacccag

SEQ ID NO: 773414 - DNA, 25 bp, Homo sapien
cgggaagccagcacttgcacttggg

SEQ ID NO: 773415 - DNA, 25 bp, Homo sapien
ttacagaatattctcaggtgtgtac

SEQ ID NO: 773416 - DNA, 25 bp, Homo sapien
cttggggctgccggggggctccaga

SEQ ID NO: 773417 - DNA, 25 bp, Homo sapien
gcttggggctgccggggggctccag

SEQ ID NO: 773418 - DNA, 25 bp, Homo sapien
agaacaaggccaatgcgctccagat

SEQ ID NO: 773419 - DNA, 25 bp, Homo sapien
cagaacattttcaccgccatgcagg

SEQ ID NO: 773420 - DNA, 25 bp, Homo sapien
catgatccgggccatggagacgctg

SEQ ID NO: 773421 - DNA, 25 bp, Homo sapien
tttgagcatcggtacgtcagcgcca

SEQ ID NO: 773422 - DNA, 25 bp, Homo sapien
gcgggaagagcaccttcatcaagca

SEQ ID NO: 773423 - DNA, 25 bp, Homo sapien
ggaagagcaccttcatcaagcagat

SEQ ID NO: 773424 - DNA, 25 bp, Homo sapien
cgggaagagcaccttcatcaagcag

SEQ ID NO: 773425 - DNA, 25 bp, Homo sapien
tgagcgataaggtgaaggagtccaa

SEQ ID NO: 773426 - DNA, 25 bp, Homo sapien
ggagtccaagcggatcaacgccgag

SEQ ID NO: 773427 - DNA, 25 bp, Homo sapien
caagcggatcaacgccgagatccag

SEQ ID NO: 773428 - DNA, 25 bp, Homo sapien
catgatggcgtgttgcctgagcgat

SEQ ID NO: 773429 - DNA, 25 bp, Homo sapien
cttgtctgtgtgaatgtagatgaat

SEQ ID NO: 773430 - DNA, 25 bp, Homo sapien
gtctgtgtgaatgtagatgaatcca

SEQ ID NO: 773431 - DNA, 25 bp, Homo sapien
tgtctgtgtgaatgtagatgaatcc

SEQ ID NO: 773432 - DNA, 25 bp, Homo sapien
tctgtgtgaatgtagatgaatccat

SEQ ID NO: 773433 - DNA, 25 bp, Homo sapien
cagccctgttatcccaaccctttgg

SEQ ID NO: 773434 - DNA, 25 bp, Homo sapien
tcacatactggttttgttagattta

SEQ ID NO: 773435 - DNA, 25 bp, Homo sapien
ttaatgagaacctcagccaggcgca

SEQ ID NO: 773436 - DNA, 25 bp, Homo sapien
gggacctcattaaaggtatacagca

SEQ ID NO: 773437 - DNA, 25 bp, Homo sapien
agaatcctccgatggcaggtgccca

SEQ ID NO: 773438 - DNA, 25 bp, Homo sapien
gaatcctccgatggcaggtgcccag

SEQ ID NO: 773439 - DNA, 25 bp, Homo sapien
tggggagatgagtcccaagcaccac

SEQ ID NO: 773440 - DNA, 25 bp, Homo sapien
ctggggagatgagtcccaagcacca

SEQ ID NO: 773441 - DNA, 25 bp, Homo sapien
cctggggagatgagtcccaagcacc

SEQ ID NO: 773442 - DNA, 25 bp, Homo sapien
ccctggggagatgagtcccaagcac

SEQ ID NO: 773443 - DNA, 25 bp, Homo sapien
tcctccgggtgcatcagaaacttgg

SEQ ID NO: 773444 - DNA, 25 bp, Homo sapien
cagctcctccgggtgcatcagaaac

SEQ ID NO: 773445 - DNA, 25 bp, Homo sapien
acaaacagctcctccgggtgcatca

SEQ ID NO: 773446 - DNA, 25 bp, Homo sapien
gagcttggcgatcccgaagcagttg

SEQ ID NO: 773447 - DNA, 25 bp, Homo sapien
gcatttcatcctggcctgctgaagc

SEQ ID NO: 773448 - DNA, 25 bp, Homo sapien
tctactgcaggatcacaactcttgc

SEQ ID NO: 773449 - DNA, 25 bp, Homo sapien
ctgctgaagcctttgattctactgc

SEQ ID NO: 773450 - DNA, 25 bp, Homo sapien
tgtgtagctttttgctatctgcagc

SEQ ID NO: 773451 - DNA, 25 bp, Homo sapien
cacaacttgtcctgttagagcaagc

SEQ ID NO: 773452 - DNA, 25 bp, Homo sapien
acaacttgtcctgttagagcaagcc

SEQ ID NO: 773453 - DNA, 25 bp, Homo sapien
ctcctggctccgcacagttaggcct

SEQ ID NO: 773454 - DNA, 25 bp, Homo sapien
tcctggctccgcacagttaggcctg

SEQ ID NO: 773455 - DNA, 25 bp, Homo sapien
caagcggggctatcacagaggtccc

SEQ ID NO: 773456 - DNA, 25 bp, Homo sapien
tccaagcatctctgagactgcccag

SEQ ID NO: 773457 - DNA, 25 bp, Homo sapien
ggtccctccaagcatctctgagact

SEQ ID NO: 773458 - DNA, 25 bp, Homo sapien
ctggacaacacaagcggggctatca

SEQ ID NO: 773459 - DNA, 25 bp, Homo sapien
ctctttgactccctcagtgagcagc

SEQ ID NO: 773460 - DNA, 25 bp, Homo sapien
ggctctttgactccctcagtgagca

SEQ ID NO: 773461 - DNA, 25 bp, Homo sapien
tctttgactccctcagtgagcagct

SEQ ID NO: 773462 - DNA, 25 bp, Homo sapien
gggctctttgactccctcagtgagc

SEQ ID NO: 773463 - DNA, 25 bp, Homo sapien
catggcccgcgaccccgtgctgggt

SEQ ID NO: 773464 - DNA, 25 bp, Homo sapien
atggcccgcgaccccgtgctgggta

SEQ ID NO: 773465 - DNA, 25 bp, Homo sapien
tggcccgcgaccccgtgctgggtac

SEQ ID NO: 773466 - DNA, 25 bp, Homo sapien
gagagaagccaagtgatgaggcagt

SEQ ID NO: 773467 - DNA, 25 bp, Homo sapien
gcagggggagagaagccaagtgatg

SEQ ID NO: 773468 - DNA, 25 bp, Homo sapien
gagaagccaagtgatgaggcagttc

SEQ ID NO: 773469 - DNA, 25 bp, Homo sapien
ggggagagaagccaagtgatgaggc

SEQ ID NO: 773470 - DNA, 25 bp, Homo sapien
tctcgcccaccagagggtccctgga

SEQ ID NO: 773471 - DNA, 25 bp, Homo sapien
accagagggtccctggaatccctct

SEQ ID NO: 773472 - DNA, 25 bp, Homo sapien
tcttcaggctctcgcccaccagagg

SEQ ID NO: 773473 - DNA, 25 bp, Homo sapien
gtctcttcaggctctcgcccaccag

SEQ ID NO: 773474 - DNA, 25 bp, Homo sapien
aagatgattttctaattatggggaa

SEQ ID NO: 773475 - DNA, 25 bp, Homo sapien
agatgattttctaattatggggaac

SEQ ID NO: 773476 - DNA, 25 bp, Homo sapien
tgattttctaattatggggaactcc

SEQ ID NO: 773477 - DNA, 25 bp, Homo sapien
gatgattttctaattatggggaact

SEQ ID NO: 773478 - DNA, 25 bp, Homo sapien
aatgattatgggtttgggctgttca

SEQ ID NO: 773479 - DNA, 25 bp, Homo sapien
tgttcagtgaaaaggcacttggtga

SEQ ID NO: 773480 - DNA, 25 bp, Homo sapien
tttgggctgttcagtgaaaaggcac

SEQ ID NO: 773481 - DNA, 25 bp, Homo sapien
ctgcaaagcgcaaaatgattatggg

SEQ ID NO: 773482 - DNA, 25 bp, Homo sapien
caatccgtaagagcctcgcgtcgta

SEQ ID NO: 773483 - DNA, 25 bp, Homo sapien
ctcccttagcgtgttggcaatgtca

SEQ ID NO: 773484 - DNA, 25 bp, Homo sapien
catatgtcttattgaaaagctcctg

SEQ ID NO: 773485 - DNA, 25 bp, Homo sapien
gcgtgttggcaatgtcaatccgtaa

SEQ ID NO: 773486 - DNA, 25 bp, Homo sapien
tgtgaacgtgatcttgttggccatg

SEQ ID NO: 773487 - DNA, 25 bp, Homo sapien
aacgtgatcttgttggccatggcaa

SEQ ID NO: 773488 - DNA, 25 bp, Homo sapien
agccgaagggctttcggaacaggat

SEQ ID NO: 773489 - DNA, 25 bp, Homo sapien
tgactgtgaacgtgatcttgttggc

SEQ ID NO: 773490 - DNA, 25 bp, Homo sapien
aggctttcggatgagtccttggaaa

SEQ ID NO: 773491 - DNA, 25 bp, Homo sapien
ctttcggatgagtccttggaaaggc

SEQ ID NO: 773492 - DNA, 25 bp, Homo sapien
gctttcggatgagtccttggaaagg

SEQ ID NO: 773493 - DNA, 25 bp, Homo sapien
caggctttcggatgagtccttggaa

SEQ ID NO: 773494 - DNA, 25 bp, Homo sapien
tgtggggccacattcaagcttagcc

SEQ ID NO: 773495 - DNA, 25 bp, Homo sapien
gccacattcaagcttagccttcctc

SEQ ID NO: 773496 - DNA, 25 bp, Homo sapien
ggatgtggggccacattcaagctta

SEQ ID NO: 773497 - DNA, 25 bp, Homo sapien
acattcaagcttagccttcctccat

SEQ ID NO: 773498 - DNA, 25 bp, Homo sapien
gtccactggaggcacactgactgca

SEQ ID NO: 773499 - DNA, 25 bp, Homo sapien
tttccaacatcatctgaccactctg

SEQ ID NO: 773500 - DNA, 25 bp, Homo sapien
ttatggcatccagtgacccctcaac

SEQ ID NO: 773501 - DNA, 25 bp, Homo sapien
tcaaagtcccatcttcccctgaggc

SEQ ID NO: 773502 - DNA, 25 bp, Homo sapien
accgagatcccactgttaggccttt

SEQ ID NO: 773503 - DNA, 25 bp, Homo sapien
atccttgcaccgagatcccactgtt

SEQ ID NO: 773504 - DNA, 25 bp, Homo sapien
cttgcaccgagatcccactgttagg

SEQ ID NO: 773505 - DNA, 25 bp, Homo sapien
gcaccgagatcccactgttaggcct

SEQ ID NO: 773506 - DNA, 25 bp, Homo sapien
taccatggtaacttgaagacaacgc

SEQ ID NO: 773507 - DNA, 25 bp, Homo sapien
cttttctctgatgccccgggcaggt

SEQ ID NO: 773508 - DNA, 25 bp, Homo sapien
tcattacaatgactgggaaaacctc

SEQ ID NO: 773509 - DNA, 25 bp, Homo sapien
caagtcactagctttgcagtccagg

SEQ ID NO: 773510 - DNA, 25 bp, Homo sapien
agacgagccttgagcaacatataga

SEQ ID NO: 773511 - DNA, 25 bp, Homo sapien
ctggacatggtagcacgtgtgcttg

SEQ ID NO: 773512 - DNA, 25 bp, Homo sapien
ttggagacgagccttgagcaacata

SEQ ID NO: 773513 - DNA, 25 bp, Homo sapien
tggagacgagccttgagcaacatat

SEQ ID NO: 773514 - DNA, 25 bp, Homo sapien
tctagggcctagacatgccagagcc

SEQ ID NO: 773515 - DNA, 25 bp, Homo sapien
gggcctagacatgccagagccatca

SEQ ID NO: 773516 - DNA, 25 bp, Homo sapien
ctgctggaatgggggaatctccact

SEQ ID NO: 773517 - DNA, 25 bp, Homo sapien
ccctctagggcctagacatgccaga

SEQ ID NO: 773518 - DNA, 25 bp, Homo sapien
ctgagcctggacactgcgtgcagga

SEQ ID NO: 773519 - DNA, 25 bp, Homo sapien
gcaggaggggcccttaagccttgac

SEQ ID NO: 773520 - DNA, 25 bp, Homo sapien
tgcaggaggggcccttaagccttga

SEQ ID NO: 773521 - DNA, 25 bp, Homo sapien
tgcagacaacggtgttggagtcttg

SEQ ID NO: 773522 - DNA, 25 bp, Homo sapien
gaagcaacggcacgttccatctctc

SEQ ID NO: 773523 - DNA, 25 bp, Homo sapien
caaatcccatgcagacaacggtgtt

SEQ ID NO: 773524 - DNA, 25 bp, Homo sapien
gggaagcaacggcacgttccatctc

SEQ ID NO: 773525 - DNA, 25 bp, Homo sapien
ctctgagttgctgcatctgtcttca

SEQ ID NO: 773526 - DNA, 25 bp, Homo sapien
aggaatctctacacatctctgagtt

SEQ ID NO: 773527 - DNA, 25 bp, Homo sapien
gtccctggcctggtccgtccacacc

SEQ ID NO: 773528 - DNA, 25 bp, Homo sapien
ggtccgtccacacctacactcagga

SEQ ID NO: 773529 - DNA, 25 bp, Homo sapien
tgagagttggcactggcttggccac

SEQ ID NO: 773530 - DNA, 25 bp, Homo sapien
acaagggggcctgagagttggcact

SEQ ID NO: 773531 - DNA, 25 bp, Homo sapien
actggcttggccaccagacctgctg

SEQ ID NO: 773532 - DNA, 25 bp, Homo sapien
agagttggcactggcttggccacca

SEQ ID NO: 773533 - DNA, 25 bp, Homo sapien
ccaagtctgttggtatcatcttcat

SEQ ID NO: 773534 - DNA, 25 bp, Homo sapien
ccccaagtctgttggtatcatcttc

SEQ ID NO: 773535 - DNA, 25 bp, Homo sapien
cccaagtctgttggtatcatcttca

SEQ ID NO: 773536 - DNA, 25 bp, Homo sapien
tccccaagtctgttggtatcatctt

SEQ ID NO: 773537 - DNA, 25 bp, Homo sapien
tcccagctacttgagaggctggggc

SEQ ID NO: 773538 - DNA, 25 bp, Homo sapien
gtgagcagacattgcaccactgtac

SEQ ID NO: 773539 - DNA, 25 bp, Homo sapien
gaggattgcctaagcccatgaggtg

SEQ ID NO: 773540 - DNA, 25 bp, Homo sapien
cgggagtggtggcgcacgcttgtag

SEQ ID NO: 773541 - DNA, 25 bp, Homo sapien
ttccggaaagggatgtcaggtggtg

SEQ ID NO: 773542 - DNA, 25 bp, Homo sapien
cagccagtggatgtcgtacgtgttg

SEQ ID NO: 773543 - DNA, 25 bp, Homo sapien
tctccagccagtggatgtcgtacgt

SEQ ID NO: 773544 - DNA, 25 bp, Homo sapien
gaaagggatgtcaggtggtggctca

SEQ ID NO: 773545 - DNA, 25 bp, Homo sapien
cagctggctaatgatgaccatgtgg

SEQ ID NO: 773546 - DNA, 25 bp, Homo sapien
cgacagagcattccccatataggcc

SEQ ID NO: 773547 - DNA, 25 bp, Homo sapien
aatggggaacacaccgtcccgacag

SEQ ID NO: 773548 - DNA, 25 bp, Homo sapien
gtcccgacagagcattccccatata

SEQ ID NO: 773549 - DNA, 25 bp, Homo sapien
ggaacacaccgtcccgacagagcat

SEQ ID NO: 773550 - DNA, 25 bp, Homo sapien
atgtggtgctgctgctgctgcagga

SEQ ID NO: 773551 - DNA, 25 bp, Homo sapien
agatgtggtgctgctgctgctgcag

SEQ ID NO: 773552 - DNA, 25 bp, Homo sapien
ctgccctctgagatgtggtgctgct

SEQ ID NO: 773553 - DNA, 25 bp, Homo sapien
gtggtgctgctgctgctgcaggagc

SEQ ID NO: 773554 - DNA, 25 bp, Homo sapien
catcattgcagatttctgcaaaggg

SEQ ID NO: 773555 - DNA, 25 bp, Homo sapien
ggcatcattgcagatttctgcaaag

SEQ ID NO: 773556 - DNA, 25 bp, Homo sapien
gcatcattgcagatttctgcaaagg

SEQ ID NO: 773557 - DNA, 25 bp, Homo sapien
aaggaacagtctagtccccacaggg

SEQ ID NO: 773558 - DNA, 25 bp, Homo sapien
gtctagtccccacagggcagaaggg

SEQ ID NO: 773559 - DNA, 25 bp, Homo sapien
ttcaaaaggaacagtctagtcccca

SEQ ID NO: 773560 - DNA, 25 bp, Homo sapien
gaacagtctagtccccacagggcag

SEQ ID NO: 773561 - DNA, 25 bp, Homo sapien
cttgttcatggagacctcaggctcc

SEQ ID NO: 773562 - DNA, 25 bp, Homo sapien
cctcttggggatacctgtccttgtt

SEQ ID NO: 773563 - DNA, 25 bp, Homo sapien
gggccttccctctgtagggcacctg

SEQ ID NO: 773564 - DNA, 25 bp, Homo sapien
gggatacctgtccttgttcatggag

SEQ ID NO: 773565 - DNA, 25 bp, Homo sapien
caggtgcctggtgaaaggttctgta

SEQ ID NO: 773566 - DNA, 25 bp, Homo sapien
ttaatcggaaccatcatgccaggtg

SEQ ID NO: 773567 - DNA, 25 bp, Homo sapien
tcggaaccatcatgccaggtggccc

SEQ ID NO: 773568 - DNA, 25 bp, Homo sapien
ccccaggtgcctggtgaaaggttct

SEQ ID NO: 773569 - DNA, 25 bp, Homo sapien
ttttctttttgagacagagtcctgc

SEQ ID NO: 773570 - DNA, 25 bp, Homo sapien
ctggccaatcagtgtttctttttct

SEQ ID NO: 773571 - DNA, 25 bp, Homo sapien
ccacacctggccaatcagtgtttct

SEQ ID NO: 773572 - DNA, 25 bp, Homo sapien
tttctttttgagacagagtcctgct

SEQ ID NO: 773573 - DNA, 25 bp, Homo sapien
aattagagaattctaagtgctcaga

SEQ ID NO: 773574 - DNA, 25 bp, Homo sapien
caattagagaattctaagtgctcag

SEQ ID NO: 773575 - DNA, 25 bp, Homo sapien
ccactagtgttccagatgcttttga

SEQ ID NO: 773576 - DNA, 25 bp, Homo sapien
caaacggaattgctgtgtgtggaca

SEQ ID NO: 773577 - DNA, 25 bp, Homo sapien
gggcgtagaccatctgacaaacgga

SEQ ID NO: 773578 - DNA, 25 bp, Homo sapien
tacctgaccttaaagatgctgaagc

SEQ ID NO: 773579 - DNA, 25 bp, Homo sapien
gatggctactatttcaccaatctgg

SEQ ID NO: 773580 - DNA, 25 bp, Homo sapien
tgcttctgcaatccaagccgactga

SEQ ID NO: 773581 - DNA, 25 bp, Homo sapien
ctgatgactggagaggatggctact

SEQ ID NO: 773582 - DNA, 25 bp, Homo sapien
ccaatctggtgagtaagtgagttct

SEQ ID NO: 773583 - DNA, 25 bp, Homo sapien
gcagcaagcacatcttcgatgccat

SEQ ID NO: 773584 - DNA, 25 bp, Homo sapien
tagatattgaaatggattccaggcg

SEQ ID NO: 773585 - DNA, 25 bp, Homo sapien
ccaggcgtgtgcctcgagacaagct

SEQ ID NO: 773586 - DNA, 25 bp, Homo sapien
agacaagctggcctgcatcaccaag

SEQ ID NO: 773587 - DNA, 25 bp, Homo sapien
cacgtggccccgctcagccatggca

SEQ ID NO: 773588 - DNA, 25 bp, Homo sapien
gcgcgagggggaggcacgtggcccc

SEQ ID NO: 773589 - DNA, 25 bp, Homo sapien
gtggccccgctcagccatggcagcc

SEQ ID NO: 773590 - DNA, 25 bp, Homo sapien
gggcgcgagggggaggcacgtggcc

SEQ ID NO: 773591 - DNA, 25 bp, Homo sapien
cagctcccgcgtgtcggccccccgc

SEQ ID NO: 773592 - DNA, 25 bp, Homo sapien
ggggcagctcccgcgtgtcggcccc

SEQ ID NO: 773593 - DNA, 25 bp, Homo sapien
ctcccgcgtgtcggccccccgccag

SEQ ID NO: 773594 - DNA, 25 bp, Homo sapien
gctcccgcgtgtcggccccccgcca

SEQ ID NO: 773595 - DNA, 25 bp, Homo sapien
gtcaggcagccactggccgaggcca

SEQ ID NO: 773596 - DNA, 25 bp, Homo sapien
cgaaggtcaggcagccactggccga

SEQ ID NO: 773597 - DNA, 25 bp, Homo sapien
agcgctcgaaggtcaggcagccact

SEQ ID NO: 773598 - DNA, 25 bp, Homo sapien
aggtcaggcagccactggccgaggc

SEQ ID NO: 773599 - DNA, 25 bp, Homo sapien
ctcagcagctaggtgggcaggtcgg

SEQ ID NO: 773600 - DNA, 25 bp, Homo sapien
cagcagctaggtgggcaggtcggcc

SEQ ID NO: 773601 - DNA, 25 bp, Homo sapien
gtcccgggggcagccgatggcgctc

SEQ ID NO: 773602 - DNA, 25 bp, Homo sapien
agccgatggcgctcagcagctaggt

SEQ ID NO: 773603 - DNA, 25 bp, Homo sapien
gtgatggtgagcctccgacttccct

SEQ ID NO: 773604 - DNA, 25 bp, Homo sapien
ttggccagcgtaaacgccaggcgct

SEQ ID NO: 773605 - DNA, 25 bp, Homo sapien
gcaggccaatgaacctgcgtccgcg

SEQ ID NO: 773606 - DNA, 25 bp, Homo sapien
cttgcgctctgggtccgctctggct

SEQ ID NO: 773607 - DNA, 25 bp, Homo sapien
cataaggatagtctgctgctgccac

SEQ ID NO: 773608 - DNA, 25 bp, Homo sapien
ccagccagagacgttgggtgagaca

SEQ ID NO: 773609 - DNA, 25 bp, Homo sapien
tcaaacagctgcttcattatgagcg

SEQ ID NO: 773610 - DNA, 25 bp, Homo sapien
gcccagcccaaacgggctagatgaa

SEQ ID NO: 773611 - DNA, 25 bp, Homo sapien
tagcaattgcggaccatgcagactc

SEQ ID NO: 773612 - DNA, 25 bp, Homo sapien
gcagtagcaattgcggaccatgcag

SEQ ID NO: 773613 - DNA, 25 bp, Homo sapien
gacagcggcagtagcaattgcggac

SEQ ID NO: 773614 - DNA, 25 bp, Homo sapien
ttgcggaccatgcagactcaagaga

SEQ ID NO: 773615 - DNA, 25 bp, Homo sapien
agagcagcaccgctggaaacaggga

SEQ ID NO: 773616 - DNA, 25 bp, Homo sapien
agcaccgctggaaacagggagtccc

SEQ ID NO: 773617 - DNA, 25 bp, Homo sapien
gcagcaccgctggaaacagggagtc

SEQ ID NO: 773618 - DNA, 25 bp, Homo sapien
gcaccgctggaaacagggagtcccc

SEQ ID NO: 773619 - DNA, 25 bp, Homo sapien
tactggccattgtcggaagtgcagc

SEQ ID NO: 773620 - DNA, 25 bp, Homo sapien
tctactggccattgtcggaagtgca

SEQ ID NO: 773621 - DNA, 25 bp, Homo sapien
ccctctactggccattgtcggaagt

SEQ ID NO: 773622 - DNA, 25 bp, Homo sapien
tggccattgtcggaagtgcagcccg

SEQ ID NO: 773623 - DNA, 25 bp, Homo sapien
gcagttgcacgctgggctggtttgg

SEQ ID NO: 773624 - DNA, 25 bp, Homo sapien
gggccctggaccatccttgatgttg

SEQ ID NO: 773625 - DNA, 25 bp, Homo sapien
gttgccatgcccctagctctggtgg

SEQ ID NO: 773626 - DNA, 25 bp, Homo sapien
ctggaaaggagttgccgtgctgtct

SEQ ID NO: 773627 - DNA, 25 bp, Homo sapien
ctgtgagctttgtaagtatgctttg

SEQ ID NO: 773628 - DNA, 25 bp, Homo sapien
aactggtttgcatccagagccttaa

SEQ ID NO: 773629 - DNA, 25 bp, Homo sapien
tctgcaaagtgttttcgttttgctt

SEQ ID NO: 773630 - DNA, 25 bp, Homo sapien
acctgtctgtcctttttagagtaca

SEQ ID NO: 773631 - DNA, 25 bp, Homo sapien
ttcagtacattggtcagtccagctc

SEQ ID NO: 773632 - DNA, 25 bp, Homo sapien
ttttcagtacattggtcagtccagc

SEQ ID NO: 773633 - DNA, 25 bp, Homo sapien
agtccagctcagttggatgtcattt

SEQ ID NO: 773634 - DNA, 25 bp, Homo sapien
tcagtccagctcagttggatgtcat

SEQ ID NO: 773635 - DNA, 25 bp, Homo sapien
cgctttggaggctaggtcataggca

SEQ ID NO: 773636 - DNA, 25 bp, Homo sapien
gggactctgccgctttggaggctag

SEQ ID NO: 773637 - DNA, 25 bp, Homo sapien
ctctgccgctttggaggctaggtca

SEQ ID NO: 773638 - DNA, 25 bp, Homo sapien
tgccgctttggaggctaggtcatag

SEQ ID NO: 773639 - DNA, 25 bp, Homo sapien
gggttaggagcagaagtccctgctt

SEQ ID NO: 773640 - DNA, 25 bp, Homo sapien
ttccgaaccgtctgggaggagagcc

SEQ ID NO: 773641 - DNA, 25 bp, Homo sapien
aacgctccgggatgggactctcgga

SEQ ID NO: 773642 - DNA, 25 bp, Homo sapien
ggacttgatcccgcgttgccctggg

SEQ ID NO: 773643 - DNA, 25 bp, Homo sapien
ccactgagcagacacactagcttca

SEQ ID NO: 773644 - DNA, 25 bp, Homo sapien
ctgagcagacacactagcttcacct

SEQ ID NO: 773645 - DNA, 25 bp, Homo sapien
gagcagacacactagcttcaccttc

SEQ ID NO: 773646 - DNA, 25 bp, Homo sapien
ggaagctctgtatctacctccacaa

SEQ ID NO: 773647 - DNA, 25 bp, Homo sapien
gggtccccacagtcagactctttgc

SEQ ID NO: 773648 - DNA, 25 bp, Homo sapien
gtccccacagtcagactctttgccg

SEQ ID NO: 773649 - DNA, 25 bp, Homo sapien
agggtccccacagtcagactctttg

SEQ ID NO: 773650 - DNA, 25 bp, Homo sapien
cagggtccccacagtcagactcttt

SEQ ID NO: 773651 - DNA, 25 bp, Homo sapien
cgtgatccttacgagctcctctgca

SEQ ID NO: 773652 - DNA, 25 bp, Homo sapien
tgagaagccgtgatccttacgagct

SEQ ID NO: 773653 - DNA, 25 bp, Homo sapien
ggccaggttgagaagccgtgatcct

SEQ ID NO: 773654 - DNA, 25 bp, Homo sapien
agctgtctgtccagttggccttgca

SEQ ID NO: 773655 - DNA, 25 bp, Homo sapien
cctcctaagctcaacaaatcatcct

SEQ ID NO: 773656 - DNA, 25 bp, Homo sapien
tcctaagctcaacaaatcatcctgc

SEQ ID NO: 773657 - DNA, 25 bp, Homo sapien
ctcctaagctcaacaaatcatcctg

SEQ ID NO: 773658 - DNA, 25 bp, Homo sapien
ctaagctcaacaaatcatcctgcct

SEQ ID NO: 773659 - DNA, 25 bp, Homo sapien
acctgctgcggcagtgagcggtcaa

SEQ ID NO: 773660 - DNA, 25 bp, Homo sapien
tacctgctgcggcagtgagcggtca

SEQ ID NO: 773661 - DNA, 25 bp, Homo sapien
ggctgtacctgctgcggcagtgagc

SEQ ID NO: 773662 - DNA, 25 bp, Homo sapien
ctgcggcagtgagcggtcaaggcct

SEQ ID NO: 773663 - DNA, 25 bp, Homo sapien
gctactggccgacgccgcgctggtt

SEQ ID NO: 773664 - DNA, 25 bp, Homo sapien
attggcaggaagctcgcccagtcga

SEQ ID NO: 773665 - DNA, 25 bp, Homo sapien
agggcggtggctccctcaacgccga

SEQ ID NO: 773666 - DNA, 25 bp, Homo sapien
gctggttccgccctgattggcagga

SEQ ID NO: 773667 - DNA, 25 bp, Homo sapien
gcggaggcggcggccccgggcactc

SEQ ID NO: 773668 - DNA, 25 bp, Homo sapien
catggcaccgtcctgacgacggctg

SEQ ID NO: 773669 - DNA, 25 bp, Homo sapien
ggctgtctggctcccgccccgtgac

SEQ ID NO: 773670 - DNA, 25 bp, Homo sapien
ggctccagaaagtcgtcttcggcgt

SEQ ID NO: 773671 - DNA, 25 bp, Homo sapien
gcctgcgtggccgtcggcgtggccg

SEQ ID NO: 773672 - DNA, 25 bp, Homo sapien
ggctctcaggcaggcaacggggaat

SEQ ID NO: 773673 - DNA, 25 bp, Homo sapien
ggctgctccatcttcaatccctggg

SEQ ID NO: 773674 - DNA, 25 bp, Homo sapien
gaaagaaatcaccagggctctcagg

SEQ ID NO: 773675 - DNA, 25 bp, Homo sapien
caggcaacggggaatgagagctggg

SEQ ID NO: 773676 - DNA, 25 bp, Homo sapien
tcgtagcaccgcagtgtggacaggc

SEQ ID NO: 773677 - DNA, 25 bp, Homo sapien
gaagtgagcccctccgatgttaagg

SEQ ID NO: 773678 - DNA, 25 bp, Homo sapien
tctcggtcgatgaagtaccggccct

SEQ ID NO: 773679 - DNA, 25 bp, Homo sapien
tggctgccaacatggtgtcttcgta

SEQ ID NO: 773680 - DNA, 25 bp, Homo sapien
tctcctcttctaggtactatggaag

SEQ ID NO: 773681 - DNA, 25 bp, Homo sapien
cacctgctaggactacaaagttgat

SEQ ID NO: 773682 - DNA, 25 bp, Homo sapien
ggtcccatactcaagcctacgctaa

SEQ ID NO: 773683 - DNA, 25 bp, Homo sapien
tactatggaagatatcaaggtccca

SEQ ID NO: 773684 - DNA, 25 bp, Homo sapien
ccagactgccagctgtgttacactg

SEQ ID NO: 773685 - DNA, 25 bp, Homo sapien
caataaaacctcataatgtgttagg

SEQ ID NO: 773686 - DNA, 25 bp, Homo sapien
gtgcattggacaaaatctaaaacca

SEQ ID NO: 773687 - DNA, 25 bp, Homo sapien
ggtaaatgaacttaactactccatg

SEQ ID NO: 773688 - DNA, 25 bp, Homo sapien
tttgtaatagggcatgagtcccaga

SEQ ID NO: 773689 - DNA, 25 bp, Homo sapien
gcccgatggcatagtactgggcctc

SEQ ID NO: 773690 - DNA, 25 bp, Homo sapien
tgagtcccagaaacgcttggcgcac

SEQ ID NO: 773691 - DNA, 25 bp, Homo sapien
tctttgtacacagctcgaacacgct

SEQ ID NO: 773692 - DNA, 25 bp, Homo sapien
caccatcctgggcagctgaccctca

SEQ ID NO: 773693 - DNA, 25 bp, Homo sapien
ccaccatcctgggcagctgaccctc

SEQ ID NO: 773694 - DNA, 25 bp, Homo sapien
accatcctgggcagctgaccctcac

SEQ ID NO: 773695 - DNA, 25 bp, Homo sapien
ctataaggatgaacacaacacctat

SEQ ID NO: 773696 - DNA, 25 bp, Homo sapien
tataaggatgaacacaacacctatc

SEQ ID NO: 773697 - DNA, 25 bp, Homo sapien
ataaggatgaacacaacacctatca

SEQ ID NO: 773698 - DNA, 25 bp, Homo sapien
aaagcgggccttccgctggaccgca

SEQ ID NO: 773699 - DNA, 25 bp, Homo sapien
gagcttggcaaagcgggccttccgc

SEQ ID NO: 773700 - DNA, 25 bp, Homo sapien
cgatctccacaatccgctccaagtg

SEQ ID NO: 773701 - DNA, 25 bp, Homo sapien
acgcagccgggcgatctccacaatc

SEQ ID NO: 773702 - DNA, 25 bp, Homo sapien
tctcactccgctcaaatcgcaggga

SEQ ID NO: 773703 - DNA, 25 bp, Homo sapien
ggtgctcaaaaagctgcccgtcact

SEQ ID NO: 773704 - DNA, 25 bp, Homo sapien
tagtggttcacgaggtgcttgtcac

SEQ ID NO: 773705 - DNA, 25 bp, Homo sapien
ggcagtgcagcaggtcataaacatc

SEQ ID NO: 773706 - DNA, 25 bp, Homo sapien
caagcaaggtggacatcctccctga

SEQ ID NO: 773707 - DNA, 25 bp, Homo sapien
caaccctgaggtgcagtcagggaga

SEQ ID NO: 773708 - DNA, 25 bp, Homo sapien
tcaagccctagctatcagcctcaag

SEQ ID NO: 773709 - DNA, 25 bp, Homo sapien
gaaagactaccatgccttgaggaaa

SEQ ID NO: 773710 - DNA, 25 bp, Homo sapien
cagggagattggagctacacctctg

SEQ ID NO: 773711 - DNA, 25 bp, Homo sapien
actctcttgcaaggtcaagaaggtg

SEQ ID NO: 773712 - DNA, 25 bp, Homo sapien
gaaactctcttgcaaggtcaagaag

SEQ ID NO: 773713 - DNA, 25 bp, Homo sapien
aaactctcttgcaaggtcaagaagg

SEQ ID NO: 773714 - DNA, 25 bp, Homo sapien
aactctcttgcaaggtcaagaaggt

SEQ ID NO: 773715 - DNA, 25 bp, Homo sapien
accaatatactgagcacaagggagg

SEQ ID NO: 773716 - DNA, 25 bp, Homo sapien
ccatcatgttccgtgttcacaccaa

SEQ ID NO: 773717 - DNA, 25 bp, Homo sapien
cacaagggagggacgcttgaacagg

SEQ ID NO: 773718 - DNA, 25 bp, Homo sapien
cctacatcgatttggtaacgtggct

SEQ ID NO: 773719 - DNA, 25 bp, Homo sapien
cacatgagatagcagccaaggaggt

SEQ ID NO: 773720 - DNA, 25 bp, Homo sapien
gaaatttgcattccagccctgtgag

SEQ ID NO: 773721 - DNA, 25 bp, Homo sapien
caactgggtgcatagctttggcagc

SEQ ID NO: 773722 - DNA, 25 bp, Homo sapien
tcctaggatagctgtgtgtctcacc

SEQ ID NO: 773723 - DNA, 25 bp, Homo sapien
cagtagtaacagatccttggggatc

SEQ ID NO: 773724 - DNA, 25 bp, Homo sapien
gcagtagtaacagatccttggggat

SEQ ID NO: 773725 - DNA, 25 bp, Homo sapien
tgcagtagtaacagatccttgggga

SEQ ID NO: 773726 - DNA, 25 bp, Homo sapien
gagactatccctttgtgtacgagaa

SEQ ID NO: 773727 - DNA, 25 bp, Homo sapien
taaggatcatgagacaggtaccacc

SEQ ID NO: 773728 - DNA, 25 bp, Homo sapien
caatcatgattagagagagacaccc

SEQ ID NO: 773729 - DNA, 25 bp, Homo sapien
tattactaggatcaaaacgctcagc

SEQ ID NO: 773730 - DNA, 25 bp, Homo sapien
agacaggtacatgaactcacacagg

SEQ ID NO: 773731 - DNA, 25 bp, Homo sapien
gttcttgactttaatgcccttggag

SEQ ID NO: 773732 - DNA, 25 bp, Homo sapien
cacaggaagtgttatagtgtgtaca

SEQ ID NO: 773733 - DNA, 25 bp, Homo sapien
ccatacagaaggaagacgacggacc

SEQ ID NO: 773734 - DNA, 25 bp, Homo sapien
gagatgagagcacatctctaaaaaa

SEQ ID NO: 773735 - DNA, 25 bp, Homo sapien
agggaaaagcctgtcttgttgtgtg

SEQ ID NO: 773736 - DNA, 25 bp, Homo sapien
tcagggaaaagcctgtcttgttgtg

SEQ ID NO: 773737 - DNA, 25 bp, Homo sapien
acacaccacattttaagcagaaata

SEQ ID NO: 773738 - DNA, 25 bp, Homo sapien
aggacactcattagccaggaaggtg

SEQ ID NO: 773739 - DNA, 25 bp, Homo sapien
tcattagccaggaaggtgtcaagct

SEQ ID NO: 773740 - DNA, 25 bp, Homo sapien
cactcattagccaggaaggtgtcaa

SEQ ID NO: 773741 - DNA, 25 bp, Homo sapien
cttgatgaggacactcattagccag

SEQ ID NO: 773742 - DNA, 25 bp, Homo sapien
ctgcgttaatccatgatgtgactcc

SEQ ID NO: 773743 - DNA, 25 bp, Homo sapien
tctgcgttaatccatgatgtgactc

SEQ ID NO: 773744 - DNA, 25 bp, Homo sapien
tttctgcgttaatccatgatgtgac

SEQ ID NO: 773745 - DNA, 25 bp, Homo sapien
ctttctgcgttaatccatgatgtga

SEQ ID NO: 773746 - DNA, 25 bp, Homo sapien
gctttcaaatcttcacaggtcaggt

SEQ ID NO: 773747 - DNA, 25 bp, Homo sapien
gactgtactcagtaattagtcaggg

SEQ ID NO: 773748 - DNA, 25 bp, Homo sapien
cctcaggaggaggatacgagctgtc

SEQ ID NO: 773749 - DNA, 25 bp, Homo sapien
caggtcaggtagagtgaagccctaa

SEQ ID NO: 773750 - DNA, 25 bp, Homo sapien
caggtaccagataaggcatggccag

SEQ ID NO: 773751 - DNA, 25 bp, Homo sapien
atggccagaagtggccaactagctt

SEQ ID NO: 773752 - DNA, 25 bp, Homo sapien
gaagtggccaactagcttttaaata

SEQ ID NO: 773753 - DNA, 25 bp, Homo sapien
ggttggctaacaggtaccagataag

SEQ ID NO: 773754 - DNA, 25 bp, Homo sapien
aagaagcagacagtcctgggtatgg

SEQ ID NO: 773755 - DNA, 25 bp, Homo sapien
gcagacagtcctgggtatggcatca

SEQ ID NO: 773756 - DNA, 25 bp, Homo sapien
agtcctgggtatggcatcactgtca

SEQ ID NO: 773757 - DNA, 25 bp, Homo sapien
gacagtcctgggtatggcatcactg

SEQ ID NO: 773758 - DNA, 25 bp, Homo sapien
gagacatcagtgctgagagcaccta

SEQ ID NO: 773759 - DNA, 25 bp, Homo sapien
agacatcagtgctgagagcacctac

SEQ ID NO: 773760 - DNA, 25 bp, Homo sapien
tgcctggccaggcaaaatagattct

SEQ ID NO: 773761 - DNA, 25 bp, Homo sapien
cagaagatgaaactagtgtgatgaa

SEQ ID NO: 773762 - DNA, 25 bp, Homo sapien
tgtgatgaaactagtgtgtctgctc

SEQ ID NO: 773763 - DNA, 25 bp, Homo sapien
ctagtgtgatgaaactagtgtgtct

SEQ ID NO: 773764 - DNA, 25 bp, Homo sapien
tctctctggaccaatgggagtttcc

SEQ ID NO: 773765 - DNA, 25 bp, Homo sapien
aatactcctgcaggcaactggacag

SEQ ID NO: 773766 - DNA, 25 bp, Homo sapien
gataccttggttggactgtctggaa

SEQ ID NO: 773767 - DNA, 25 bp, Homo sapien
tcctctagcccatgaagtgttggaa

SEQ ID NO: 773768 - DNA, 25 bp, Homo sapien
ttgccagggatcgggtaaaaccatg

SEQ ID NO: 773769 - DNA, 25 bp, Homo sapien
gatcctttgccagggatcgggtaaa

SEQ ID NO: 773770 - DNA, 25 bp, Homo sapien
gccagggatcgggtaaaaccatgtc

SEQ ID NO: 773771 - DNA, 25 bp, Homo sapien
tgccagggatcgggtaaaaccatgt

SEQ ID NO: 773772 - DNA, 25 bp, Homo sapien
gaagctctgggattcagctggcctc

SEQ ID NO: 773773 - DNA, 25 bp, Homo sapien
tcatcatggagctgtagaaacaagg

SEQ ID NO: 773774 - DNA, 25 bp, Homo sapien
tattgcaactgtcacacctacaagg

SEQ ID NO: 773775 - DNA, 25 bp, Homo sapien
gacatcaggaatagtccccgctggt

SEQ ID NO: 773776 - DNA, 25 bp, Homo sapien
ctgcagtaggtctggtctccgttgt

SEQ ID NO: 773777 - DNA, 25 bp, Homo sapien
tcgcccgcggcttcgccgacatcca

SEQ ID NO: 773778 - DNA, 25 bp, Homo sapien
tggctgcagtaggtctggtctccgt

SEQ ID NO: 773779 - DNA, 25 bp, Homo sapien
ggcttcgccgacatccacacagccg

SEQ ID NO: 773780 - DNA, 25 bp, Homo sapien
tcaggccttcaagggcttgtccggg

SEQ ID NO: 773781 - DNA, 25 bp, Homo sapien
taaagctgcgcgatagctgacgcct

SEQ ID NO: 773782 - DNA, 25 bp, Homo sapien
ctgtcgcggccaagagctgtggtct

SEQ ID NO: 773783 - DNA, 25 bp, Homo sapien
gatgccggcaacgagcacgttagac

SEQ ID NO: 773784 - DNA, 25 bp, Homo sapien
tgattcccctcattccaccctgtta

SEQ ID NO: 773785 - DNA, 25 bp, Homo sapien
ccctgttagtctgaatgttactcat

SEQ ID NO: 773786 - DNA, 25 bp, Homo sapien
tcggtgctccatcttagctcacact

SEQ ID NO: 773787 - DNA, 25 bp, Homo sapien
gacagcacggcctaaatgcccgact

SEQ ID NO: 773788 - DNA, 25 bp, Homo sapien
gattaaagcctaagcttctagatct

SEQ ID NO: 773789 - DNA, 25 bp, Homo sapien
gagagacccattttaaccacacagg

SEQ ID NO: 773790 - DNA, 25 bp, Homo sapien
ttctgtcaccatcagattaaagcct

SEQ ID NO: 773791 - DNA, 25 bp, Homo sapien
agagagacccattttaaccacacag

SEQ ID NO: 773792 - DNA, 25 bp, Homo sapien
cctttagagggtatagtgaggtgac

SEQ ID NO: 773793 - DNA, 25 bp, Homo sapien
actgcacctggttggtttacccata

SEQ ID NO: 773794 - DNA, 25 bp, Homo sapien
gtttctggtattctgctaggttggg

SEQ ID NO: 773795 - DNA, 25 bp, Homo sapien
aaccttaattgttgtaaagtcacag

SEQ ID NO: 773796 - DNA, 25 bp, Homo sapien
aggcagtgtcttcttgagaattttt

SEQ ID NO: 773797 - DNA, 25 bp, Homo sapien
caggcagtgtcttcttgagaatttt

SEQ ID NO: 773798 - DNA, 25 bp, Homo sapien
ttagtgtttccttctcggccgggca

SEQ ID NO: 773799 - DNA, 25 bp, Homo sapien
gcaggcagtgtcttcttgagaattt

SEQ ID NO: 773800 - DNA, 25 bp, Homo sapien
aatttgtcaattttgctgacctgta

SEQ ID NO: 773801 - DNA, 25 bp, Homo sapien
ctaaaaatttgtcaattttgctgac

SEQ ID NO: 773802 - DNA, 25 bp, Homo sapien
gtcaattttgctgacctgtaaaaaa

SEQ ID NO: 773803 - DNA, 25 bp, Homo sapien
tttgtcaattttgctgacctgtaaa

SEQ ID NO: 773804 - DNA, 25 bp, Homo sapien
aaatcacagtaatgtgctcattttc

SEQ ID NO: 773805 - DNA, 25 bp, Homo sapien
taaaatcacagtaatgtgctcattt

SEQ ID NO: 773806 - DNA, 25 bp, Homo sapien
aatcacagtaatgtgctcattttct

SEQ ID NO: 773807 - DNA, 25 bp, Homo sapien
aaaatcacagtaatgtgctcatttt

SEQ ID NO: 773808 - DNA, 25 bp, Homo sapien
tgtgcccagtcagtttggcagtgtt

SEQ ID NO: 773809 - DNA, 25 bp, Homo sapien
gtaaagtcacagtaacgccctcatt

SEQ ID NO: 773810 - DNA, 25 bp, Homo sapien
ctgtgcccagtcagtttggcagtgt

SEQ ID NO: 773811 - DNA, 25 bp, Homo sapien
gagaggattatccagcctgatcacc

SEQ ID NO: 773812 - DNA, 25 bp, Homo sapien
gttctcctgacccattgggaagcct

SEQ ID NO: 773813 - DNA, 25 bp, Homo sapien
caaggagcagggttctctagaatga

SEQ ID NO: 773814 - DNA, 25 bp, Homo sapien
agacaccctcagctggcatgggaca

SEQ ID NO: 773815 - DNA, 25 bp, Homo sapien
ggccattatgaacatacacacctgc

SEQ ID NO: 773816 - DNA, 25 bp, Homo sapien
cacacatgcctgtacacacgtctgt

SEQ ID NO: 773817 - DNA, 25 bp, Homo sapien
acacacatgcctgtacacacgtctg

SEQ ID NO: 773818 - DNA, 25 bp, Homo sapien
gacacagagcgctcatgttattatt

SEQ ID NO: 773819 - DNA, 25 bp, Homo sapien
cacctcccaggttcaagtgattctc

SEQ ID NO: 773820 - DNA, 25 bp, Homo sapien
acctcccaggttcaagtgattctcc

SEQ ID NO: 773821 - DNA, 25 bp, Homo sapien
cacactagttttatttttttgtgag

SEQ ID NO: 773822 - DNA, 25 bp, Homo sapien
ttttgtgagaaggagttttgctctg

SEQ ID NO: 773823 - DNA, 25 bp, Homo sapien
tgaactcttttcactccttatttta

SEQ ID NO: 773824 - DNA, 25 bp, Homo sapien
caccaaaactcttcaggttcaccga

SEQ ID NO: 773825 - DNA, 25 bp, Homo sapien
aattttaagagttgcctgtgttcac

SEQ ID NO: 773826 - DNA, 25 bp, Homo sapien
caccgatgacctttctgtggatcaa

SEQ ID NO: 773827 - DNA, 25 bp, Homo sapien
ggcaccccgaagaggtcagtactgt

SEQ ID NO: 773828 - DNA, 25 bp, Homo sapien
tccctgacaggaagctacttaagcg

SEQ ID NO: 773829 - DNA, 25 bp, Homo sapien
catgctcgtgcagtagacaggcgtg

SEQ ID NO: 773830 - DNA, 25 bp, Homo sapien
gatcgcagagttgacactaaacaca

SEQ ID NO: 773831 - DNA, 25 bp, Homo sapien
cggtccccactttgccggctgacat

SEQ ID NO: 773832 - DNA, 25 bp, Homo sapien
actccggtccccactttgccggctg

SEQ ID NO: 773833 - DNA, 25 bp, Homo sapien
tccggtccccactttgccggctgac

SEQ ID NO: 773834 - DNA, 25 bp, Homo sapien
cggctgacattctgccccccacgcc

SEQ ID NO: 773835 - DNA, 25 bp, Homo sapien
gctggacactaacctgggtaccttc

SEQ ID NO: 773836 - DNA, 25 bp, Homo sapien
ctgccaaagcctggacgcccaccca

SEQ ID NO: 773837 - DNA, 25 bp, Homo sapien
acccagctggacactaacctgggta

SEQ ID NO: 773838 - DNA, 25 bp, Homo sapien
agcctggacgcccacccagctggac

SEQ ID NO: 773839 - DNA, 25 bp, Homo sapien
ggttagttgtcagtcgtcgtcacac

SEQ ID NO: 773840 - DNA, 25 bp, Homo sapien
agagggttagttgtcagtcgtcgtc

SEQ ID NO: 773841 - DNA, 25 bp, Homo sapien
cagagagggttagttgtcagtcgtc

SEQ ID NO: 773842 - DNA, 25 bp, Homo sapien
gagggttagttgtcagtcgtcgtca

SEQ ID NO: 773843 - DNA, 25 bp, Homo sapien
cagtctcatgtctaaaataggatag

SEQ ID NO: 773844 - DNA, 25 bp, Homo sapien
ttctctcagtctcatgtctaaaata

SEQ ID NO: 773845 - DNA, 25 bp, Homo sapien
cggcccacaatagccctcacttcct

SEQ ID NO: 773846 - DNA, 25 bp, Homo sapien
ctcatgtctaaaataggatagtggg

SEQ ID NO: 773847 - DNA, 25 bp, Homo sapien
ctgcttcccgccatggcatctgcgc

SEQ ID NO: 773848 - DNA, 25 bp, Homo sapien
caaggttagagtgcccctggagatc

SEQ ID NO: 773849 - DNA, 25 bp, Homo sapien
tttcttgcaaggttagagtgcccct

SEQ ID NO: 773850 - DNA, 25 bp, Homo sapien
ttctgcatctgatgcaagactggca

SEQ ID NO: 773851 - DNA, 25 bp, Homo sapien
acctcattcgtcctccaggctccag

SEQ ID NO: 773852 - DNA, 25 bp, Homo sapien
aaacatgacctcattcgtcctccag

SEQ ID NO: 773853 - DNA, 25 bp, Homo sapien
ctagaaaaacatgacctcattcgtc

SEQ ID NO: 773854 - DNA, 25 bp, Homo sapien
tgacctcattcgtcctccaggctcc

SEQ ID NO: 773855 - DNA, 25 bp, Homo sapien
gagggggcgctgagttaccccatat

SEQ ID NO: 773856 - DNA, 25 bp, Homo sapien
taaaggtctgattatgaaatccaca

SEQ ID NO: 773857 - DNA, 25 bp, Homo sapien
ccatattggcgcctggcagcctctg

SEQ ID NO: 773858 - DNA, 25 bp, Homo sapien
tacccaagcccaccataaaggtctg

SEQ ID NO: 773859 - DNA, 25 bp, Homo sapien
tgccatttcccgagacggggaagtc

SEQ ID NO: 773860 - DNA, 25 bp, Homo sapien
tctggccggagccaccaggtagatg

SEQ ID NO: 773861 - DNA, 25 bp, Homo sapien
atgcctccctgttttctggccggag

SEQ ID NO: 773862 - DNA, 25 bp, Homo sapien
catttcccgagacggggaagtcaca

SEQ ID NO: 773863 - DNA, 25 bp, Homo sapien
tctccatgttgttttagactacccc

SEQ ID NO: 773864 - DNA, 25 bp, Homo sapien
ttcccatggcaaggctgagccccga

SEQ ID NO: 773865 - DNA, 25 bp, Homo sapien
cgaaatccaggtctaaaggtactct

SEQ ID NO: 773866 - DNA, 25 bp, Homo sapien
tgtgggattacacttattcctctcc

SEQ ID NO: 773867 - DNA, 25 bp, Homo sapien
cagcctgtagatttctataaacaga

SEQ ID NO: 773868 - DNA, 25 bp, Homo sapien
aagtaccatcaggttggtacttgtc

SEQ ID NO: 773869 - DNA, 25 bp, Homo sapien
cccagcctgtagatttctataaaca

SEQ ID NO: 773870 - DNA, 25 bp, Homo sapien
taccatcaggttggtacttgtcttg

SEQ ID NO: 773871 - DNA, 25 bp, Homo sapien
gcgtctgcgccgtggtccaggtcac

SEQ ID NO: 773872 - DNA, 25 bp, Homo sapien
gcccacgtcgctcggcaggtctggg

SEQ ID NO: 773873 - DNA, 25 bp, Homo sapien
acgcccgtaacgcacggcgcgcaaa

SEQ ID NO: 773874 - DNA, 25 bp, Homo sapien
gtgtccgctggcgtccgagccgcag

SEQ ID NO: 773875 - DNA, 25 bp, Homo sapien
ctaaactgccgtgatgggcatcccc

SEQ ID NO: 773876 - DNA, 25 bp, Homo sapien
gctctcctcccagacggttcggaaa

SEQ ID NO: 773877 - DNA, 25 bp, Homo sapien
acagcagttaaagccgcgcaatggc

SEQ ID NO: 773878 - DNA, 25 bp, Homo sapien
ctagcctccaaagcggcagagtcct

SEQ ID NO: 773879 - DNA, 25 bp, Homo sapien
aaaatacaagacagaagtaattagc

SEQ ID NO: 773880 - DNA, 25 bp, Homo sapien
tacaagacagaagtaattagctggg

SEQ ID NO: 773881 - DNA, 25 bp, Homo sapien
ctaaagagcagagaagattaaaata

SEQ ID NO: 773882 - DNA, 25 bp, Homo sapien
ggttgtagtggccaagatcaaacca

SEQ ID NO: 773883 - DNA, 25 bp, Homo sapien
aattagctgggtcagacatccttac

SEQ ID NO: 773884 - DNA, 25 bp, Homo sapien
gaaatgagtatacattcacttcaag

SEQ ID NO: 773885 - DNA, 25 bp, Homo sapien
tactcattaaacacttgtgtgccca

SEQ ID NO: 773886 - DNA, 25 bp, Homo sapien
tgcccaactggggttgagaatgcaa

SEQ ID NO: 773887 - DNA, 25 bp, Homo sapien
tttaatacattctaccaatctctcc

SEQ ID NO: 773888 - DNA, 25 bp, Homo sapien
caaggctctgtcatccacctattca

SEQ ID NO: 773889 - DNA, 25 bp, Homo sapien
atctaaagtaagtctgtatttatag

SEQ ID NO: 773890 - DNA, 25 bp, Homo sapien
cagtatatagatggatcatgtttta

SEQ ID NO: 773891 - DNA, 25 bp, Homo sapien
cactgtaatctttgtttcccgtatt

SEQ ID NO: 773892 - DNA, 25 bp, Homo sapien
aaatctagctaaaaacttgtcgatt

SEQ ID NO: 773893 - DNA, 25 bp, Homo sapien
tatagttaggtgactgatttgagag

SEQ ID NO: 773894 - DNA, 25 bp, Homo sapien
tagttaggtgactgatttgagagct

SEQ ID NO: 773895 - DNA, 25 bp, Homo sapien
taataacattctaagttcaatttgg

SEQ ID NO: 773896 - DNA, 25 bp, Homo sapien
attctaagttcaatttggcagtgtt

SEQ ID NO: 773897 - DNA, 25 bp, Homo sapien
gccacggtgccaagccttagcttag

SEQ ID NO: 773898 - DNA, 25 bp, Homo sapien
cagtttggcaaaattattgaacaca

SEQ ID NO: 773899 - DNA, 25 bp, Homo sapien
agtcacagaccatgtgtatatgttt

SEQ ID NO: 773900 - DNA, 25 bp, Homo sapien
tggatacgctactgaaattgaaaaa

SEQ ID NO: 773901 - DNA, 25 bp, Homo sapien
acggcaggaacacagtccctcagct

SEQ ID NO: 773902 - DNA, 25 bp, Homo sapien
tgtcacttttggagaggtgacggca

SEQ ID NO: 773903 - DNA, 25 bp, Homo sapien
ctgtcacttttggagaggtgacggc

SEQ ID NO: 773904 - DNA, 25 bp, Homo sapien
agaggtgacggcaggaacacagtcc

SEQ ID NO: 773905 - DNA, 25 bp, Homo sapien
tcctgtgcaatctctgcccatccct

SEQ ID NO: 773906 - DNA, 25 bp, Homo sapien
gtgcaatctctgcccatccctttac

SEQ ID NO: 773907 - DNA, 25 bp, Homo sapien
cttcctgtgcaatctctgcccatcc

SEQ ID NO: 773908 - DNA, 25 bp, Homo sapien
ctgtgcaatctctgcccatcccttt

SEQ ID NO: 773909 - DNA, 25 bp, Homo sapien
actgctcggccccagatctcaggat

SEQ ID NO: 773910 - DNA, 25 bp, Homo sapien
gctcggccccagatctcaggattgt

SEQ ID NO: 773911 - DNA, 25 bp, Homo sapien
gggctggactgctcggccccagatc

SEQ ID NO: 773912 - DNA, 25 bp, Homo sapien
ggccccagatctcaggattgttgac

SEQ ID NO: 773913 - DNA, 25 bp, Homo sapien
ctaggctcagggggatgtaggacat

SEQ ID NO: 773914 - DNA, 25 bp, Homo sapien
ctggggggtagggtccagccaggat

SEQ ID NO: 773915 - DNA, 25 bp, Homo sapien
aatgtggaggttccttaggagggag

SEQ ID NO: 773916 - DNA, 25 bp, Homo sapien
gattcttaactccatgggagagggc

SEQ ID NO: 773917 - DNA, 25 bp, Homo sapien
gagtagtcaggggaccagacacttg

SEQ ID NO: 773918 - DNA, 25 bp, Homo sapien
ttctgagcactggtaagtgtggaaa

SEQ ID NO: 773919 - DNA, 25 bp, Homo sapien
ctggtaagtgtggaaaacttttgct

SEQ ID NO: 773920 - DNA, 25 bp, Homo sapien
ttggctgcaccatggagactcccat

SEQ ID NO: 773921 - DNA, 25 bp, Homo sapien
ggagactcccatgtatcttgctccc

SEQ ID NO: 773922 - DNA, 25 bp, Homo sapien
catggagactcccatgtatcttgct

SEQ ID NO: 773923 - DNA, 25 bp, Homo sapien
tccacgcacattggctgcaccatgg

SEQ ID NO: 773924 - DNA, 25 bp, Homo sapien
ttgcgcctgacctagaaataacgga

SEQ ID NO: 773925 - DNA, 25 bp, Homo sapien
tctgactctctttcgtgggctgccc

SEQ ID NO: 773926 - DNA, 25 bp, Homo sapien
tcaggacacttggttttagggagac

SEQ ID NO: 773927 - DNA, 25 bp, Homo sapien
aatgatggtctaatgcgggaggcac

SEQ ID NO: 773928 - DNA, 25 bp, Homo sapien
gtctggggtgatgactgcttgggga

SEQ ID NO: 773929 - DNA, 25 bp, Homo sapien
ggggtgatgactgcttggggacagc

SEQ ID NO: 773930 - DNA, 25 bp, Homo sapien
ctggggtgatgactgcttggggaca

SEQ ID NO: 773931 - DNA, 25 bp, Homo sapien
gggtgatgactgcttggggacagca

SEQ ID NO: 773932 - DNA, 25 bp, Homo sapien
tccagtcctttgtctcccggtctag

SEQ ID NO: 773933 - DNA, 25 bp, Homo sapien
ggagttacttgtgaccagccaaggg

SEQ ID NO: 773934 - DNA, 25 bp, Homo sapien
tgaaactcccgtgggtctgacacaa

SEQ ID NO: 773935 - DNA, 25 bp, Homo sapien
ggccctgcagtcaccggagttactt

SEQ ID NO: 773936 - DNA, 25 bp, Homo sapien
cttggatccagaatgaaccagggct

SEQ ID NO: 773937 - DNA, 25 bp, Homo sapien
tcagggctgaggactcttgtccctc

SEQ ID NO: 773938 - DNA, 25 bp, Homo sapien
ctggtagggagagatctcagtgctt

SEQ ID NO: 773939 - DNA, 25 bp, Homo sapien
tcccatctgacagggacaggctctt

SEQ ID NO: 773940 - DNA, 25 bp, Homo sapien
cccagtagggctgtcctctggatct

SEQ ID NO: 773941 - DNA, 25 bp, Homo sapien
ggagctcaggccgatggacttttaa

SEQ ID NO: 773942 - DNA, 25 bp, Homo sapien
agagagcaagctccggcccagtagg

SEQ ID NO: 773943 - DNA, 25 bp, Homo sapien
ccttcaaggcgaaagaggagctcag

SEQ ID NO: 773944 - DNA, 25 bp, Homo sapien
cctccggggcccgcttggccctcag

SEQ ID NO: 773945 - DNA, 25 bp, Homo sapien
ggcccgcttggccctcagtcccttg

SEQ ID NO: 773946 - DNA, 25 bp, Homo sapien
cccgcttggccctcagtcccttggc

SEQ ID NO: 773947 - DNA, 25 bp, Homo sapien
tccggggcccgcttggccctcagtc

SEQ ID NO: 773948 - DNA, 25 bp, Homo sapien
gaggtcagagggcacggcttagggt

SEQ ID NO: 773949 - DNA, 25 bp, Homo sapien
ggatggaaagagacaaggcagagtg

SEQ ID NO: 773950 - DNA, 25 bp, Homo sapien
tgctacgcacgaaccccttttctcc

SEQ ID NO: 773951 - DNA, 25 bp, Homo sapien
agagagctgagtggcagaagtgtga

SEQ ID NO: 773952 - DNA, 25 bp, Homo sapien
aggcctcgggccattctgtcttgga

SEQ ID NO: 773953 - DNA, 25 bp, Homo sapien
cgctggggcctttgcagagatgtcc

SEQ ID NO: 773954 - DNA, 25 bp, Homo sapien
gtccaggcctcgggccattctgtct

SEQ ID NO: 773955 - DNA, 25 bp, Homo sapien
ggccattctgtcttggagttcccaa

SEQ ID NO: 773956 - DNA, 25 bp, Homo sapien
tgttggtgacactttccaggctatg

SEQ ID NO: 773957 - DNA, 25 bp, Homo sapien
tccttgggctgcaagacagcgctgc

SEQ ID NO: 773958 - DNA, 25 bp, Homo sapien
caaccctgccccacagtatgagagt

SEQ ID NO: 773959 - DNA, 25 bp, Homo sapien
ggatgaaatcctgccctgttggtga

SEQ ID NO: 773960 - DNA, 25 bp, Homo sapien
ccacttgggaaaatagataggcagt

SEQ ID NO: 773961 - DNA, 25 bp, Homo sapien
cacctggccgactatttaaacattt

SEQ ID NO: 773962 - DNA, 25 bp, Homo sapien
aattgtaacccctcatatgtagctg

SEQ ID NO: 773963 - DNA, 25 bp, Homo sapien
cgcacctggccgactatttaaacat

SEQ ID NO: 773964 - DNA, 25 bp, Homo sapien
gatgttaattgttatcccagggcaa

SEQ ID NO: 773965 - DNA, 25 bp, Homo sapien
ggcaaatggcatatagactgggaga

SEQ ID NO: 773966 - DNA, 25 bp, Homo sapien
ctatatgcaccgaaaaacagagcct

SEQ ID NO: 773967 - DNA, 25 bp, Homo sapien
tgtatgccaaccagacctaacgaac

SEQ ID NO: 773968 - DNA, 25 bp, Homo sapien
gatgcctatagcatctttactggta

SEQ ID NO: 773969 - DNA, 25 bp, Homo sapien
caaacactattatctggatgcctat

SEQ ID NO: 773970 - DNA, 25 bp, Homo sapien
ctcatacaatgctagagggagcgca

SEQ ID NO: 773971 - DNA, 25 bp, Homo sapien
actgctgggttatttactgaagaaa

SEQ ID NO: 773972 - DNA, 25 bp, Homo sapien
taaagaacatatacccaacaaaaga

SEQ ID NO: 773973 - DNA, 25 bp, Homo sapien
atctttaaagaacatatacccaaca

SEQ ID NO: 773974 - DNA, 25 bp, Homo sapien
gaacatatacccaacaaaagacttg

SEQ ID NO: 773975 - DNA, 25 bp, Homo sapien
catatacccaacaaaagacttgtat

SEQ ID NO: 773976 - DNA, 25 bp, Homo sapien
tggcctcccaaaatggtgcgattac

SEQ ID NO: 773977 - DNA, 25 bp, Homo sapien
gggattacaggtgatcctcctgtct

SEQ ID NO: 773978 - DNA, 25 bp, Homo sapien
tgggattacaggtgatcctcctgtc

SEQ ID NO: 773979 - DNA, 25 bp, Homo sapien
aaaatggtgcgattacaggtatgaa

SEQ ID NO: 773980 - DNA, 25 bp, Homo sapien
cacagattagaagacttgatacagg

SEQ ID NO: 773981 - DNA, 25 bp, Homo sapien
gacttgatacaggttggatgtcact

SEQ ID NO: 773982 - DNA, 25 bp, Homo sapien
tagaagacttgatacaggttggatg

SEQ ID NO: 773983 - DNA, 25 bp, Homo sapien
tgttcacagattagaagacttgata

SEQ ID NO: 773984 - DNA, 25 bp, Homo sapien
agtgggctgtgatcacgacactgca

SEQ ID NO: 773985 - DNA, 25 bp, Homo sapien
gcgaggatcccttcagcccgggagg

SEQ ID NO: 773986 - DNA, 25 bp, Homo sapien
gaggtgcgaggatcccttcagcccg

SEQ ID NO: 773987 - DNA, 25 bp, Homo sapien
cagtgggctgtgatcacgacactgc

SEQ ID NO: 773988 - DNA, 25 bp, Homo sapien
ggtaagagcagcaaccaatgaaact

SEQ ID NO: 773989 - DNA, 25 bp, Homo sapien
tgtaaaattcccaaacctctagcca

SEQ ID NO: 773990 - DNA, 25 bp, Homo sapien
gagtaaaatcaacccaaggtaagca

SEQ ID NO: 773991 - DNA, 25 bp, Homo sapien
acaaatgttagaaggataataaggg

SEQ ID NO: 773992 - DNA, 25 bp, Homo sapien
taggatcctgtcatggtactccagc

SEQ ID NO: 773993 - DNA, 25 bp, Homo sapien
gcttaggtaacacagccgagaccca

SEQ ID NO: 773994 - DNA, 25 bp, Homo sapien
ctttttgaaggcacatagccaggca

SEQ ID NO: 773995 - DNA, 25 bp, Homo sapien
tatgattgtgctgggaatagccact

SEQ ID NO: 773996 - DNA, 25 bp, Homo sapien
gactcttcaagaatggacagaacag

SEQ ID NO: 773997 - DNA, 25 bp, Homo sapien
agtcaaataacccaaaagaaggcag

SEQ ID NO: 773998 - DNA, 25 bp, Homo sapien
gccaggttcctacattttacaagtg

SEQ ID NO: 773999 - DNA, 25 bp, Homo sapien
gaaaggaacctacatgatagccagg

SEQ ID NO: 774000 - DNA, 25 bp, Homo sapien
caggaaaggaaacagtgaggcataa

SEQ ID NO: 774001 - DNA, 25 bp, Homo sapien
tgtcccacggacaagaaccagggcc

SEQ ID NO: 774002 - DNA, 25 bp, Homo sapien
cctgtcccacggacaagaaccaggg

SEQ ID NO: 774003 - DNA, 25 bp, Homo sapien
ctgtcccacggacaagaaccagggc

SEQ ID NO: 774004 - DNA, 25 bp, Homo sapien
gtcccacggacaagaaccagggcca

SEQ ID NO: 774005 - DNA, 25 bp, Homo sapien
ttttccattatccacgggcagcctg

SEQ ID NO: 774006 - DNA, 25 bp, Homo sapien
cctccataatcgatgcctggacttt

SEQ ID NO: 774007 - DNA, 25 bp, Homo sapien
tgccactcacggttccccaggtgtg

SEQ ID NO: 774008 - DNA, 25 bp, Homo sapien
tcaggccctccataatcgatgcctg

SEQ ID NO: 774009 - DNA, 25 bp, Homo sapien
agtgcttagggataggccctcccaa

SEQ ID NO: 774010 - DNA, 25 bp, Homo sapien
cacagccaggaaggattgtaagggc

SEQ ID NO: 774011 - DNA, 25 bp, Homo sapien
gatgggataggagtttccaagccag

SEQ ID NO: 774012 - DNA, 25 bp, Homo sapien
ggaaggattgtaagggccttcctga

SEQ ID NO: 774013 - DNA, 25 bp, Homo sapien
caccgaggcccactggtgtgggagt

SEQ ID NO: 774014 - DNA, 25 bp, Homo sapien
acccagggctcgcttatggacggtg

SEQ ID NO: 774015 - DNA, 25 bp, Homo sapien
cgcttatggacggtgctccaggcac

SEQ ID NO: 774016 - DNA, 25 bp, Homo sapien
ggctcgcttatggacggtgctccag

SEQ ID NO: 774017 - DNA, 25 bp, Homo sapien
atgatctgcccgtctcagcctccca

SEQ ID NO: 774018 - DNA, 25 bp, Homo sapien
tcaaatgatctgcccgtctcagcct

SEQ ID NO: 774019 - DNA, 25 bp, Homo sapien
ctgggctggtctcaaactcctgacc

SEQ ID NO: 774020 - DNA, 25 bp, Homo sapien
ggtttcactatgttcactgggctgg

SEQ ID NO: 774021 - DNA, 25 bp, Homo sapien
caaaaaaaacataaccgacatccag

SEQ ID NO: 774022 - DNA, 25 bp, Homo sapien
aacataaccgacatccagaagtgaa

SEQ ID NO: 774023 - DNA, 25 bp, Homo sapien
aaaaaacataaccgacatccagaag

SEQ ID NO: 774024 - DNA, 25 bp, Homo sapien
aaaacataaccgacatccagaagtg

SEQ ID NO: 774025 - DNA, 25 bp, Homo sapien
gcagctgaatctttaggaggcccag

SEQ ID NO: 774026 - DNA, 25 bp, Homo sapien
tgcgccgagggacgcttcagaaact

SEQ ID NO: 774027 - DNA, 25 bp, Homo sapien
gaagttgacggtgcagagatccctc

SEQ ID NO: 774028 - DNA, 25 bp, Homo sapien
cgatcggttgatccaaaagcagctg

SEQ ID NO: 774029 - DNA, 25 bp, Homo sapien
aggccgcactctgaggattaaggga

SEQ ID NO: 774030 - DNA, 25 bp, Homo sapien
tcccggcaactagcgtctgggacgg

SEQ ID NO: 774031 - DNA, 25 bp, Homo sapien
cagacgctgcttcggagccagcggc

SEQ ID NO: 774032 - DNA, 25 bp, Homo sapien
cggcgctgacggagacggaatgtgg

SEQ ID NO: 774033 - DNA, 25 bp, Homo sapien
cgacacatttcccaaccgcaaggat

SEQ ID NO: 774034 - DNA, 25 bp, Homo sapien
tccaccctgttagtctgaatgttag

SEQ ID NO: 774035 - DNA, 25 bp, Homo sapien
ccctgttagtctgaatgttagtcat

SEQ ID NO: 774036 - DNA, 25 bp, Homo sapien
gaatcagtgactcttaaaagcaaaa

SEQ ID NO: 774037 - DNA, 25 bp, Homo sapien
acatttcttaatcctgcggatatga

SEQ ID NO: 774038 - DNA, 25 bp, Homo sapien
tagcattacggcaggcgccatcaca

SEQ ID NO: 774039 - DNA, 25 bp, Homo sapien
caccacaacctcctagaattgctag

SEQ ID NO: 774040 - DNA, 25 bp, Homo sapien
tctgtcctgcactttttcactttag

SEQ ID NO: 774041 - DNA, 25 bp, Homo sapien
agagagacccattttaaccacacaa

SEQ ID NO: 774042 - DNA, 25 bp, Homo sapien
tatccttatcagctacatagcagcc

SEQ ID NO: 774043 - DNA, 25 bp, Homo sapien
gcaaataatcaagcactacactgaa

SEQ ID NO: 774044 - DNA, 25 bp, Homo sapien
tcaagcactacactgaaaacattta

SEQ ID NO: 774045 - DNA, 25 bp, Homo sapien
taatcaagcactacactgaaaacat

SEQ ID NO: 774046 - DNA, 25 bp, Homo sapien
gaaatgagtatacattcacgtcaag

SEQ ID NO: 774047 - DNA, 25 bp, Homo sapien
caggtcagacatccttatagaaaga

SEQ ID NO: 774048 - DNA, 25 bp, Homo sapien
tactcattaaacacttgtgtgctca

SEQ ID NO: 774049 - DNA, 25 bp, Homo sapien
caccgtgtgcggctgataacatttt

SEQ ID NO: 774050 - DNA, 25 bp, Homo sapien
gccaaagactcacataagtaaacag

SEQ ID NO: 774051 - DNA, 25 bp, Homo sapien
gctcacacagtcaagactgaaattc

SEQ ID NO: 774052 - DNA, 25 bp, Homo sapien
tgtctctagccaaagactcacataa

SEQ ID NO: 774053 - DNA, 25 bp, Homo sapien
agaaattaagctcacacagtcaaga

SEQ ID NO: 774054 - DNA, 25 bp, Homo sapien
catttgagggataggtcatctctgc

SEQ ID NO: 774055 - DNA, 25 bp, Homo sapien
cacaggtgttaggtttacacaggta

SEQ ID NO: 774056 - DNA, 25 bp, Homo sapien
ctgagtcacaggtgttaggtttaca

SEQ ID NO: 774057 - DNA, 25 bp, Homo sapien
tacacaggtatttcctacatttgag

SEQ ID NO: 774058 - DNA, 25 bp, Homo sapien
tgataactttactgatgggctaaga

SEQ ID NO: 774059 - DNA, 25 bp, Homo sapien
gtgtgataactttactgatgggcta

SEQ ID NO: 774060 - DNA, 25 bp, Homo sapien
tactgatgggctaagaagccactca

SEQ ID NO: 774061 - DNA, 25 bp, Homo sapien
aactttactgatgggctaagaagcc

SEQ ID NO: 774062 - DNA, 25 bp, Homo sapien
ttgcaatttccgcctcccgggatca

SEQ ID NO: 774063 - DNA, 25 bp, Homo sapien
caatttccgcctcccgggatcaaga

SEQ ID NO: 774064 - DNA, 25 bp, Homo sapien
attgcaatttccgcctcccgggatc

SEQ ID NO: 774065 - DNA, 25 bp, Homo sapien
gattcttgtgcctcagactcccgag

SEQ ID NO: 774066 - DNA, 25 bp, Homo sapien
gtgcctagcatagaggatgctgcca

SEQ ID NO: 774067 - DNA, 25 bp, Homo sapien
tgggaactgaacagactagcttcaa

SEQ ID NO: 774068 - DNA, 25 bp, Homo sapien
caaaccattccttagggtgaaacag

SEQ ID NO: 774069 - DNA, 25 bp, Homo sapien
gcttcaaatgtggttcataaggtct

SEQ ID NO: 774070 - DNA, 25 bp, Homo sapien
ttcttttatgtgctccaaagtacct

SEQ ID NO: 774071 - DNA, 25 bp, Homo sapien
tcttttatgtgctccaaagtacctt

SEQ ID NO: 774072 - DNA, 25 bp, Homo sapien
tttcttttatgtgctccaaagtacc

SEQ ID NO: 774073 - DNA, 25 bp, Homo sapien
acatgtagctacaaggtctcaccct

SEQ ID NO: 774074 - DNA, 25 bp, Homo sapien
tggactggccaatgtactgaaaaag

SEQ ID NO: 774075 - DNA, 25 bp, Homo sapien
cagatttgttagatggcgcaatcaa

SEQ ID NO: 774076 - DNA, 25 bp, Homo sapien
tagaagccagaagataacctgacag

SEQ ID NO: 774077 - DNA, 25 bp, Homo sapien
ttgtactagatcacgctctccttgg

SEQ ID NO: 774078 - DNA, 25 bp, Homo sapien
tccataatcacttgctgtggctggg

SEQ ID NO: 774079 - DNA, 25 bp, Homo sapien
cagggaagcagcacaaatggtcaat

SEQ ID NO: 774080 - DNA, 25 bp, Homo sapien
taatctgagcatgccattctccgga

SEQ ID NO: 774081 - DNA, 25 bp, Homo sapien
gagcagaccgcaaaatgtgagcagt

SEQ ID NO: 774082 - DNA, 25 bp, Homo sapien
ggtctgacaaaaaggctataccatt

SEQ ID NO: 774083 - DNA, 25 bp, Homo sapien
cagtgtatgagggaatctggtctcc

SEQ ID NO: 774084 - DNA, 25 bp, Homo sapien
tatgagcagaccatgaccttgagca

SEQ ID NO: 774085 - DNA, 25 bp, Homo sapien
cacaagactttttggaactcaacaa

SEQ ID NO: 774086 - DNA, 25 bp, Homo sapien
tcatctaaggttacaaactgcaggg

SEQ ID NO: 774087 - DNA, 25 bp, Homo sapien
tgcaataactggtcagcaatctgac

SEQ ID NO: 774088 - DNA, 25 bp, Homo sapien
gaacagacctgtcaaaccactacag

SEQ ID NO: 774089 - DNA, 25 bp, Homo sapien
tcaattctagtaaaacgataaggta

SEQ ID NO: 774090 - DNA, 25 bp, Homo sapien
ggttcaatgtcatgccctcagaggt

SEQ ID NO: 774091 - DNA, 25 bp, Homo sapien
ggcaactcatctgggacttacagga

SEQ ID NO: 774092 - DNA, 25 bp, Homo sapien
ggtatcctttgacctcagttaagaa

SEQ ID NO: 774093 - DNA, 25 bp, Homo sapien
ataaatagaagcttggttgagcaac

SEQ ID NO: 774094 - DNA, 25 bp, Homo sapien
gcactgcattccaataaatagaagc

SEQ ID NO: 774095 - DNA, 25 bp, Homo sapien
cgctcctgttggagcactgcattcc

SEQ ID NO: 774096 - DNA, 25 bp, Homo sapien
tgttggagcactgcattccaataaa

SEQ ID NO: 774097 - DNA, 25 bp, Homo sapien
gcactgcttccaggagggagctccg

SEQ ID NO: 774098 - DNA, 25 bp, Homo sapien
caccagcactgcttccaggagggag

SEQ ID NO: 774099 - DNA, 25 bp, Homo sapien
tgtccctagacagtaaccaccacca

SEQ ID NO: 774100 - DNA, 25 bp, Homo sapien
cagcactgcttccaggagggagctc

SEQ ID NO: 774101 - DNA, 25 bp, Homo sapien
acagctgttacggtagaaggcagga

SEQ ID NO: 774102 - DNA, 25 bp, Homo sapien
ggcacacccagattggacatcacag

SEQ ID NO: 774103 - DNA, 25 bp, Homo sapien
agaaggcaggagagtcggcacaccc

SEQ ID NO: 774104 - DNA, 25 bp, Homo sapien
aggagagtcggcacacccagattgg

SEQ ID NO: 774105 - DNA, 25 bp, Homo sapien
tctagatgggcccaatgaaagcaca

SEQ ID NO: 774106 - DNA, 25 bp, Homo sapien
ggtaattactacagcgcggtactgg

SEQ ID NO: 774107 - DNA, 25 bp, Homo sapien
taagcctcataggacctgtgcaccc

SEQ ID NO: 774108 - DNA, 25 bp, Homo sapien
aatgcagaagataacaagggcccag

SEQ ID NO: 774109 - DNA, 25 bp, Homo sapien
ggcttacccctaggctgcatatgca

SEQ ID NO: 774110 - DNA, 25 bp, Homo sapien
tatgcatggatctgacgctattccg

SEQ ID NO: 774111 - DNA, 25 bp, Homo sapien
tggaaacagcactacaaaactctga

SEQ ID NO: 774112 - DNA, 25 bp, Homo sapien
gctattccgtaccaaaggcttccaa

SEQ ID NO: 774113 - DNA, 25 bp, Homo sapien
gaggcaggagaactatcaatttttc

SEQ ID NO: 774114 - DNA, 25 bp, Homo sapien
aatttttcccaatctctatccttgg

SEQ ID NO: 774115 - DNA, 25 bp, Homo sapien
acagtgcccagcaatcgtgtgcttt

SEQ ID NO: 774116 - DNA, 25 bp, Homo sapien
cgtgtgctttgtctgcagctatggc

SEQ ID NO: 774117 - DNA, 25 bp, Homo sapien
tctggacagtatgcactgtgcacta

SEQ ID NO: 774118 - DNA, 25 bp, Homo sapien
gaaagggaactcctaacagccagag

SEQ ID NO: 774119 - DNA, 25 bp, Homo sapien
gaagtatcacccagctgtctaagag

SEQ ID NO: 774120 - DNA, 25 bp, Homo sapien
gagattaccactttcttccaaccaa

SEQ ID NO: 774121 - DNA, 25 bp, Homo sapien
atttccgttcaaactgaaaccacat

SEQ ID NO: 774122 - DNA, 25 bp, Homo sapien
taaatcgctatgcaacaatttccgt

SEQ ID NO: 774123 - DNA, 25 bp, Homo sapien
gtctcacagctgtatggtaaatcgc

SEQ ID NO: 774124 - DNA, 25 bp, Homo sapien
ttaaactcatttgttcagtctcaca

SEQ ID NO: 774125 - DNA, 25 bp, Homo sapien
aatcttaccaattatgaacaaaaag

SEQ ID NO: 774126 - DNA, 25 bp, Homo sapien
ttatgaacaaaaagtgagtgattcc

SEQ ID NO: 774127 - DNA, 25 bp, Homo sapien
agtaaattcctgacacagccatatt

SEQ ID NO: 774128 - DNA, 25 bp, Homo sapien
tatcttcaagctgttaagagaggga

SEQ ID NO: 774129 - DNA, 25 bp, Homo sapien
ggagatccgattgatccacatgaat

SEQ ID NO: 774130 - DNA, 25 bp, Homo sapien
tcttgcacaggagatccgattgatc

SEQ ID NO: 774131 - DNA, 25 bp, Homo sapien
cacaggagatccgattgatccacat

SEQ ID NO: 774132 - DNA, 25 bp, Homo sapien
tgcacaggagatccgattgatccac

SEQ ID NO: 774133 - DNA, 25 bp, Homo sapien
ccagccagggtaacagagcaagacc

SEQ ID NO: 774134 - DNA, 25 bp, Homo sapien
tgcagtaagttgaaattgcaccatt

SEQ ID NO: 774135 - DNA, 25 bp, Homo sapien
gcactccagccagggtaacagagca

SEQ ID NO: 774136 - DNA, 25 bp, Homo sapien
gaggttgcagtaagttgaaattgca

SEQ ID NO: 774137 - DNA, 25 bp, Homo sapien
tgtggtaaccttgcgggtcttctcg

SEQ ID NO: 774138 - DNA, 25 bp, Homo sapien
cttctttgatccgaccctggaagat

SEQ ID NO: 774139 - DNA, 25 bp, Homo sapien
ccctggaagatgcactgaagaattt

SEQ ID NO: 774140 - DNA, 25 bp, Homo sapien
ttcactgtggtaaccttgcgggtct

SEQ ID NO: 774141 - DNA, 25 bp, Homo sapien
aattctatgaactccttagacactc

SEQ ID NO: 774142 - DNA, 25 bp, Homo sapien
gagaaattctatgaactccttagac

SEQ ID NO: 774143 - DNA, 25 bp, Homo sapien
tatgaactccttagacactctatcc

SEQ ID NO: 774144 - DNA, 25 bp, Homo sapien
tctatgaactccttagacactctat

SEQ ID NO: 774145 - DNA, 25 bp, Homo sapien
aaatacctagagaaagacagctact

SEQ ID NO: 774146 - DNA, 25 bp, Homo sapien
gacacaagtccactgcttattagcc

SEQ ID NO: 774147 - DNA, 25 bp, Homo sapien
tattagcctagtgattgctgacccc

SEQ ID NO: 774148 - DNA, 25 bp, Homo sapien
ctgaagggcgagaaagcaagctttt

SEQ ID NO: 774149 - DNA, 25 bp, Homo sapien
gatacatgcataggacttggccacc

SEQ ID NO: 774150 - DNA, 25 bp, Homo sapien
caaaagggcttctctagggacattc

SEQ ID NO: 774151 - DNA, 25 bp, Homo sapien
gaaaggacattaacttgcagacaaa

SEQ ID NO: 774152 - DNA, 25 bp, Homo sapien
aaataggtggcttagtggctcttaa

SEQ ID NO: 774153 - DNA, 25 bp, Homo sapien
gattagtgatctgaagctagttatg

SEQ ID NO: 774154 - DNA, 25 bp, Homo sapien
agtgatctgaagctagttatgttag

SEQ ID NO: 774155 - DNA, 25 bp, Homo sapien
tttatatgattagtgatctgaagct

SEQ ID NO: 774156 - DNA, 25 bp, Homo sapien
gaaatttatatgattagtgatctga

SEQ ID NO: 774157 - DNA, 25 bp, Homo sapien
tcaagtgattcttctccctcagcct

SEQ ID NO: 774158 - DNA, 25 bp, Homo sapien
gctcactgcaaccccaccttttggg

SEQ ID NO: 774159 - DNA, 25 bp, Homo sapien
ctcactgcaaccccaccttttgggt

SEQ ID NO: 774160 - DNA, 25 bp, Homo sapien
ccaacaccaggagactgcatggcac

SEQ ID NO: 774161 - DNA, 25 bp, Homo sapien
acaccaggagactgcatggcaccag

SEQ ID NO: 774162 - DNA, 25 bp, Homo sapien
caccaggagactgcatggcaccagc

SEQ ID NO: 774163 - DNA, 25 bp, Homo sapien
aacaccaggagactgcatggcacca

SEQ ID NO: 774164 - DNA, 25 bp, Homo sapien
caacctctaacgagtccttgcagaa

SEQ ID NO: 774165 - DNA, 25 bp, Homo sapien
caaaacatctgcaacctctaacgag

SEQ ID NO: 774166 - DNA, 25 bp, Homo sapien
taacgagtccttgcagaagccctga

SEQ ID NO: 774167 - DNA, 25 bp, Homo sapien
ttctccaaaacatctgcaacctcta

SEQ ID NO: 774168 - DNA, 25 bp, Homo sapien
aaaagacctcatgcgcataagggtg

SEQ ID NO: 774169 - DNA, 25 bp, Homo sapien
atctggactccactcattgttgaga

SEQ ID NO: 774170 - DNA, 25 bp, Homo sapien
tggactccactcattgttgagagtt

SEQ ID NO: 774171 - DNA, 25 bp, Homo sapien
aaaaagacctcatgcgcataagggt

SEQ ID NO: 774172 - DNA, 25 bp, Homo sapien
gaggcactctatacactttcttaac

SEQ ID NO: 774173 - DNA, 25 bp, Homo sapien
ttactctgtgattaagacattgaca

SEQ ID NO: 774174 - DNA, 25 bp, Homo sapien
tgacaagtggatgtctatctttgaa

SEQ ID NO: 774175 - DNA, 25 bp, Homo sapien
atctttgaacattatgctgagaggc

SEQ ID NO: 774176 - DNA, 25 bp, Homo sapien
gaagcccacagcagtctgaccatct

SEQ ID NO: 774177 - DNA, 25 bp, Homo sapien
aagcccacagcagtctgaccatctg

SEQ ID NO: 774178 - DNA, 25 bp, Homo sapien
ggaagcccacagcagtctgaccatc

SEQ ID NO: 774179 - DNA, 25 bp, Homo sapien
gcccacagcagtctgaccatctggc

SEQ ID NO: 774180 - DNA, 25 bp, Homo sapien
gagtttgcatcctttcggccacatt

SEQ ID NO: 774181 - DNA, 25 bp, Homo sapien
cggccacattgtggtagaaatcctg

SEQ ID NO: 774182 - DNA, 25 bp, Homo sapien
ctttcccacgagtttgcatcctttc

SEQ ID NO: 774183 - DNA, 25 bp, Homo sapien
cctgagcacactctgactgttcttc

SEQ ID NO: 774184 - DNA, 25 bp, Homo sapien
tggctctactcctgtattcccagca

SEQ ID NO: 774185 - DNA, 25 bp, Homo sapien
gggtgcggtggctctactcctgtat

SEQ ID NO: 774186 - DNA, 25 bp, Homo sapien
gcggtggctctactcctgtattccc

SEQ ID NO: 774187 - DNA, 25 bp, Homo sapien
tgggtgcggtggctctactcctgta

SEQ ID NO: 774188 - DNA, 25 bp, Homo sapien
tttatagagacgagtcatgatgtac

SEQ ID NO: 774189 - DNA, 25 bp, Homo sapien
cattatcttctcgactctttctgga

SEQ ID NO: 774190 - DNA, 25 bp, Homo sapien
tctgatccattatcttctcgactct

SEQ ID NO: 774191 - DNA, 25 bp, Homo sapien
ctcatcatcagtagtttctggacag

SEQ ID NO: 774192 - DNA, 25 bp, Homo sapien
tctgaggcgtaacccagcgcagggc

SEQ ID NO: 774193 - DNA, 25 bp, Homo sapien
tgtgatcgccttcaccaccatatca

SEQ ID NO: 774194 - DNA, 25 bp, Homo sapien
tgatcgccttcaccaccatatcaga

SEQ ID NO: 774195 - DNA, 25 bp, Homo sapien
agcatctgaggcgtaacccagcgca

SEQ ID NO: 774196 - DNA, 25 bp, Homo sapien
gctgctattgccataaggcagggct

SEQ ID NO: 774197 - DNA, 25 bp, Homo sapien
gagacatgtgaggagaaagcaacac

SEQ ID NO: 774198 - DNA, 25 bp, Homo sapien
ggaattcttcgtggaactctttgga

SEQ ID NO: 774199 - DNA, 25 bp, Homo sapien
gagacccgttcctagcatcctctgg

SEQ ID NO: 774200 - DNA, 25 bp, Homo sapien
tttcagcttttagatcatccctgag

SEQ ID NO: 774201 - DNA, 25 bp, Homo sapien
aggaataaacgtttcagactctggc

SEQ ID NO: 774202 - DNA, 25 bp, Homo sapien
gaaaagagccaaggcagcttaattt

SEQ ID NO: 774203 - DNA, 25 bp, Homo sapien
ttgccactagcaggaataaacgttt

SEQ ID NO: 774204 - DNA, 25 bp, Homo sapien
cgctggagaggcagcgtacctctgg

SEQ ID NO: 774205 - DNA, 25 bp, Homo sapien
cttttccaacaagcctgggggacag

SEQ ID NO: 774206 - DNA, 25 bp, Homo sapien
tacctctggggttgcacatcggcca

SEQ ID NO: 774207 - DNA, 25 bp, Homo sapien
gacagcgaagggtgctgaagcacgt

SEQ ID NO: 774208 - DNA, 25 bp, Homo sapien
gaagtcatccgctgacgccggctca

SEQ ID NO: 774209 - DNA, 25 bp, Homo sapien
agtcatccgctgacgccggctcatt

SEQ ID NO: 774210 - DNA, 25 bp, Homo sapien
cgctgacgccggctcattcttggtg

SEQ ID NO: 774211 - DNA, 25 bp, Homo sapien
cgccggctcattcttggtgatcttg

SEQ ID NO: 774212 - DNA, 25 bp, Homo sapien
cattctgatcaagagcaccaagtcc

SEQ ID NO: 774213 - DNA, 25 bp, Homo sapien
gaaatactcgcaatgcatcctggct

SEQ ID NO: 774214 - DNA, 25 bp, Homo sapien
catgtgcctgggaggatggaaaaca

SEQ ID NO: 774215 - DNA, 25 bp, Homo sapien
tgagagattcacgtacctgtgagac

SEQ ID NO: 774216 - DNA, 25 bp, Homo sapien
tgcagcgagcaatgaatacacggta

SEQ ID NO: 774217 - DNA, 25 bp, Homo sapien
caacagacatctgagccaggcgtgt

SEQ ID NO: 774218 - DNA, 25 bp, Homo sapien
taacatgtcacgtgcttccgagagg

SEQ ID NO: 774219 - DNA, 25 bp, Homo sapien
taacaacaacagtgagtgaccgtgg

SEQ ID NO: 774220 - DNA, 25 bp, Homo sapien
gcatactcgagtcgatttgtaaaaa

SEQ ID NO: 774221 - DNA, 25 bp, Homo sapien
aagaagaggacgttaatacagtcat

SEQ ID NO: 774222 - DNA, 25 bp, Homo sapien
aggaaagctatgcatactcgagtcg

SEQ ID NO: 774223 - DNA, 25 bp, Homo sapien
tacagtcatattaggaaagctatgc

SEQ ID NO: 774224 - DNA, 25 bp, Homo sapien
ttctcaatgaaagccacagcacagc

SEQ ID NO: 774225 - DNA, 25 bp, Homo sapien
tctggccagacatgtagcgatcaaa

SEQ ID NO: 774226 - DNA, 25 bp, Homo sapien
gacttagattcaaagactgggcgtc

SEQ ID NO: 774227 - DNA, 25 bp, Homo sapien
taagcaagcatcaggagaccaactc

SEQ ID NO: 774228 - DNA, 25 bp, Homo sapien
cattctagatcccaatcagttgagt

SEQ ID NO: 774229 - DNA, 25 bp, Homo sapien
gggctacctacaatttaggctcaaa

SEQ ID NO: 774230 - DNA, 25 bp, Homo sapien
tcagttgagtgtagtaagggctacc

SEQ ID NO: 774231 - DNA, 25 bp, Homo sapien
gaaacaatccccatatactgtacct

SEQ ID NO: 774232 - DNA, 25 bp, Homo sapien
gggcctcatgcacgatttcacaagt

SEQ ID NO: 774233 - DNA, 25 bp, Homo sapien
gctactggcacctaatggatatgga

SEQ ID NO: 774234 - DNA, 25 bp, Homo sapien
gaatagtcccgaggttgaaatgtcc

SEQ ID NO: 774235 - DNA, 25 bp, Homo sapien
accttctgtgcgagcttgggaacca

SEQ ID NO: 774236 - DNA, 25 bp, Homo sapien
ccgttccaaaggtgtattccagtca

SEQ ID NO: 774237 - DNA, 25 bp, Homo sapien
actccggccgttgtattgatgctga

SEQ ID NO: 774238 - DNA, 25 bp, Homo sapien
taaggcaagagtccataccagaaga

SEQ ID NO: 774239 - DNA, 25 bp, Homo sapien
cctactttatatgtaagagacccaa

SEQ ID NO: 774240 - DNA, 25 bp, Homo sapien
gactgagtaccttggtagaactgca

SEQ ID NO: 774241 - DNA, 25 bp, Homo sapien
taactgacaaatgtctctaatgttt

SEQ ID NO: 774242 - DNA, 25 bp, Homo sapien
aactgcaagaacaaggttgattgat

SEQ ID NO: 774243 - DNA, 25 bp, Homo sapien
catttttaggtatagcttaaccaga

SEQ ID NO: 774244 - DNA, 25 bp, Homo sapien
gagacgaagcagtgaagcaagcaga

SEQ ID NO: 774245 - DNA, 25 bp, Homo sapien
ttgtgtacctggtcccatgtaaggg

SEQ ID NO: 774246 - DNA, 25 bp, Homo sapien
ccaggagccacctattgggattaat

SEQ ID NO: 774247 - DNA, 25 bp, Homo sapien
gtaaaataggcaggctaaggtggct

SEQ ID NO: 774248 - DNA, 25 bp, Homo sapien
gcagcaagggcctgacgctgagcga

SEQ ID NO: 774249 - DNA, 25 bp, Homo sapien
cagcaagggcctgacgctgagcgag

SEQ ID NO: 774250 - DNA, 25 bp, Homo sapien
aggcaccactctgaagacaaaacag

SEQ ID NO: 774251 - DNA, 25 bp, Homo sapien
accactctgaagacaaaacagccca

SEQ ID NO: 774252 - DNA, 25 bp, Homo sapien
ccagcaacacacagaacatggcggg

SEQ ID NO: 774253 - DNA, 25 bp, Homo sapien
gggaagtcgcggttaccaggcacca

SEQ ID NO: 774254 - DNA, 25 bp, Homo sapien
tcacctcggcgcccggatatagttt

SEQ ID NO: 774255 - DNA, 25 bp, Homo sapien
ctttcacctcggcgcccggatatag

SEQ ID NO: 774256 - DNA, 25 bp, Homo sapien
cctcggcgcccggatatagttttct

SEQ ID NO: 774257 - DNA, 25 bp, Homo sapien
cggcgcccggatatagttttctagt

SEQ ID NO: 774258 - DNA, 25 bp, Homo sapien
aggaaacgcgagtcattcgagaagg

SEQ ID NO: 774259 - DNA, 25 bp, Homo sapien
gaaagcaggaaacgcgagtcattcg

SEQ ID NO: 774260 - DNA, 25 bp, Homo sapien
atgaaagcaggaaacgcgagtcatt

SEQ ID NO: 774261 - DNA, 25 bp, Homo sapien
acgcgagtcattcgagaagggcagc

SEQ ID NO: 774262 - DNA, 25 bp, Homo sapien
atcagtgatacgactattccatttt

SEQ ID NO: 774263 - DNA, 25 bp, Homo sapien
tcagtgatacgactattccattttt

SEQ ID NO: 774264 - DNA, 25 bp, Homo sapien
atgaaacagcaactccattgtgtaa

SEQ ID NO: 774265 - DNA, 25 bp, Homo sapien
catgatgaaacagcaactccattgt

SEQ ID NO: 774266 - DNA, 25 bp, Homo sapien
tacccccatgatgaaacagcaactc

SEQ ID NO: 774267 - DNA, 25 bp, Homo sapien
aatgctcatgaacaaactattacag

SEQ ID NO: 774268 - DNA, 25 bp, Homo sapien
actttctaatatttagacagacact

SEQ ID NO: 774269 - DNA, 25 bp, Homo sapien
ttccttagctttcaagtaatctaga

SEQ ID NO: 774270 - DNA, 25 bp, Homo sapien
tttagacagacactacaaagtacct

SEQ ID NO: 774271 - DNA, 25 bp, Homo sapien
cttttccttagctttcaagtaatct

SEQ ID NO: 774272 - DNA, 25 bp, Homo sapien
ttttaatcacaaaatgaatcctttc

SEQ ID NO: 774273 - DNA, 25 bp, Homo sapien
ttcatgtcttaaatccataagttca

SEQ ID NO: 774274 - DNA, 25 bp, Homo sapien
aatcttcatgtcttaaatccataag

SEQ ID NO: 774275 - DNA, 25 bp, Homo sapien
tcttcatgtcttaaatccataagtt

SEQ ID NO: 774276 - DNA, 25 bp, Homo sapien
tcatgtcttaaatccataagttcat

SEQ ID NO: 774277 - DNA, 25 bp, Homo sapien
tatcctctcaaagccaggaattctg

SEQ ID NO: 774278 - DNA, 25 bp, Homo sapien
tcaaagccaggaattctgtaagtgg

SEQ ID NO: 774279 - DNA, 25 bp, Homo sapien
gccaggaattctgtaagtggatagc

SEQ ID NO: 774280 - DNA, 25 bp, Homo sapien
tcctctcaaagccaggaattctgta

SEQ ID NO: 774281 - DNA, 25 bp, Homo sapien
gtttgtcaagctgtaaatcttcatg

SEQ ID NO: 774282 - DNA, 25 bp, Homo sapien
tgaagctggtttgtcaagctgtaaa

SEQ ID NO: 774283 - DNA, 25 bp, Homo sapien
aagctggtttgtcaagctgtaaatc

SEQ ID NO: 774284 - DNA, 25 bp, Homo sapien
ctcctgaagctggtttgtcaagctg

SEQ ID NO: 774285 - DNA, 25 bp, Homo sapien
tgtggcatgactcccactgagagct

SEQ ID NO: 774286 - DNA, 25 bp, Homo sapien
tactccaagtatagtgaaagccact

SEQ ID NO: 774287 - DNA, 25 bp, Homo sapien
tcaatgaactgacctggctgcgctg

SEQ ID NO: 774288 - DNA, 25 bp, Homo sapien
agctttctgttcagggcggagtcag

SEQ ID NO: 774289 - DNA, 25 bp, Homo sapien
tacacgctttttaggagagcccaca

SEQ ID NO: 774290 - DNA, 25 bp, Homo sapien
cactagctgatgactctggaattct

SEQ ID NO: 774291 - DNA, 25 bp, Homo sapien
ggagagcccacactagctgatgact

SEQ ID NO: 774292 - DNA, 25 bp, Homo sapien
catacacgctttttaggagagccca

SEQ ID NO: 774293 - DNA, 25 bp, Homo sapien
tgtgagccccagtgatacatacacc

SEQ ID NO: 774294 - DNA, 25 bp, Homo sapien
cagcaacataatctcggcaagtgac

SEQ ID NO: 774295 - DNA, 25 bp, Homo sapien
cagcaaagggaccattccctgtgtc

SEQ ID NO: 774296 - DNA, 25 bp, Homo sapien
tcctgttcctgtccctccaacgaat

SEQ ID NO: 774297 - DNA, 25 bp, Homo sapien
tgtatctgcattctcaagtacatta

SEQ ID NO: 774298 - DNA, 25 bp, Homo sapien
tttgtatctgcattctcaagtacat

SEQ ID NO: 774299 - DNA, 25 bp, Homo sapien
tttatttgtatctgcattctcaagt

SEQ ID NO: 774300 - DNA, 25 bp, Homo sapien
atttgtatctgcattctcaagtaca

SEQ ID NO: 774301 - DNA, 25 bp, Homo sapien
atacaggaaattggagtttgattca

SEQ ID NO: 774302 - DNA, 25 bp, Homo sapien
caagccttctatatacaggaaattg

SEQ ID NO: 774303 - DNA, 25 bp, Homo sapien
caggaaattggagtttgattcaaac

SEQ ID NO: 774304 - DNA, 25 bp, Homo sapien
ggaaattggagtttgattcaaacac

SEQ ID NO: 774305 - DNA, 25 bp, Homo sapien
tcccacgaaggatcctttcaagtca

SEQ ID NO: 774306 - DNA, 25 bp, Homo sapien
ttactcccacgaaggatcctttcaa

SEQ ID NO: 774307 - DNA, 25 bp, Homo sapien
actcccacgaaggatcctttcaagt

SEQ ID NO: 774308 - DNA, 25 bp, Homo sapien
ctcccacgaaggatcctttcaagtc

SEQ ID NO: 774309 - DNA, 25 bp, Homo sapien
tagtgtttattttgttagccattcc

SEQ ID NO: 774310 - DNA, 25 bp, Homo sapien
caggaggcaagtagaaaataactac

SEQ ID NO: 774311 - DNA, 25 bp, Homo sapien
gtttattttgttagccattccagga

SEQ ID NO: 774312 - DNA, 25 bp, Homo sapien
gtgtttattttgttagccattccag

SEQ ID NO: 774313 - DNA, 25 bp, Homo sapien
cttcatggtttttttggggactgca

SEQ ID NO: 774314 - DNA, 25 bp, Homo sapien
ttcatggtttttttggggactgcaa

SEQ ID NO: 774315 - DNA, 25 bp, Homo sapien
tcatggtttttttggggactgcaaa

SEQ ID NO: 774316 - DNA, 25 bp, Homo sapien
catggtttttttggggactgcaaag

SEQ ID NO: 774317 - DNA, 25 bp, Homo sapien
atgtcaggaagcttttcattactct

SEQ ID NO: 774318 - DNA, 25 bp, Homo sapien
tccacagtgacctcaatgtcaggaa

SEQ ID NO: 774319 - DNA, 25 bp, Homo sapien
gtcaggaagcttttcattactctca

SEQ ID NO: 774320 - DNA, 25 bp, Homo sapien
cacagtgacctcaatgtcaggaagc

SEQ ID NO: 774321 - DNA, 25 bp, Homo sapien
gagcacatgacaatagtacagactg

SEQ ID NO: 774322 - DNA, 25 bp, Homo sapien
gcacatgacaatagtacagactggg

SEQ ID NO: 774323 - DNA, 25 bp, Homo sapien
catgacaatagtacagactgggact

SEQ ID NO: 774324 - DNA, 25 bp, Homo sapien
gatgagcacatgacaatagtacaga

SEQ ID NO: 774325 - DNA, 25 bp, Homo sapien
cagcaaacacaggtctcagagggtc

SEQ ID NO: 774326 - DNA, 25 bp, Homo sapien
acagcaaacacaggtctcagagggt

SEQ ID NO: 774327 - DNA, 25 bp, Homo sapien
caggagatgctctattccagccttc

SEQ ID NO: 774328 - DNA, 25 bp, Homo sapien
tccccaggagatgctctattccagc

SEQ ID NO: 774329 - DNA, 25 bp, Homo sapien
tctcttacattttgtatcccgcaca

SEQ ID NO: 774330 - DNA, 25 bp, Homo sapien
ttacattttgtatcccgcacagttc

SEQ ID NO: 774331 - DNA, 25 bp, Homo sapien
gggcaccgctgtatctctggctctc

SEQ ID NO: 774332 - DNA, 25 bp, Homo sapien
cagcctttccacaaggaactaccaa

SEQ ID NO: 774333 - DNA, 25 bp, Homo sapien
gtctccatggggcaccgctgtatct

SEQ ID NO: 774334 - DNA, 25 bp, Homo sapien
aagtacagcctttccacaaggaact

SEQ ID NO: 774335 - DNA, 25 bp, Homo sapien
cactgggaaacttgggtttatccat

SEQ ID NO: 774336 - DNA, 25 bp, Homo sapien
ccattttctgtattccagcactggg

SEQ ID NO: 774337 - DNA, 25 bp, Homo sapien
cagcactgggaaacttgggtttatc

SEQ ID NO: 774338 - DNA, 25 bp, Homo sapien
tgtccatccattttctgtattccag

SEQ ID NO: 774339 - DNA, 25 bp, Homo sapien
aatttgcatgacattcttgcaaaga

SEQ ID NO: 774340 - DNA, 25 bp, Homo sapien
atgacattcttgcaaagaggccatg

SEQ ID NO: 774341 - DNA, 25 bp, Homo sapien
ttgcatgacattcttgcaaagaggc

SEQ ID NO: 774342 - DNA, 25 bp, Homo sapien
gcatgacattcttgcaaagaggcca

SEQ ID NO: 774343 - DNA, 25 bp, Homo sapien
cttcctggactctgacgtctttcat

SEQ ID NO: 774344 - DNA, 25 bp, Homo sapien
ctggactctgacgtctttcatggta

SEQ ID NO: 774345 - DNA, 25 bp, Homo sapien
tcctggactctgacgtctttcatgg

SEQ ID NO: 774346 - DNA, 25 bp, Homo sapien
ggactctgacgtctttcatggtaga

SEQ ID NO: 774347 - DNA, 25 bp, Homo sapien
gaggtgaaggctgcaggcagctgag

SEQ ID NO: 774348 - DNA, 25 bp, Homo sapien
cctgggaggtgaaggctgcaggcag

SEQ ID NO: 774349 - DNA, 25 bp, Homo sapien
ggtgaaggctgcaggcagctgagat

SEQ ID NO: 774350 - DNA, 25 bp, Homo sapien
cagctgagatcacaccactgcactc

SEQ ID NO: 774351 - DNA, 25 bp, Homo sapien
catgattggactactgaactccatc

SEQ ID NO: 774352 - DNA, 25 bp, Homo sapien
agccatgattggactactgaactcc

SEQ ID NO: 774353 - DNA, 25 bp, Homo sapien
aaatctgaggttacaatgagccatg

SEQ ID NO: 774354 - DNA, 25 bp, Homo sapien
tgattggactactgaactccatcct

SEQ ID NO: 774355 - DNA, 25 bp, Homo sapien
accagagacattgggcataatggct

SEQ ID NO: 774356 - DNA, 25 bp, Homo sapien
caaagtatcacagtggtggccaaag

SEQ ID NO: 774357 - DNA, 25 bp, Homo sapien
gtggccaaagtatcacagtggtggc

SEQ ID NO: 774358 - DNA, 25 bp, Homo sapien
tgcagtatctgggtgagcccatgta

SEQ ID NO: 774359 - DNA, 25 bp, Homo sapien
gcctgtagacacagctgcgagagag

SEQ ID NO: 774360 - DNA, 25 bp, Homo sapien
aagctgggcctaaggtggccgttgt

SEQ ID NO: 774361 - DNA, 25 bp, Homo sapien
gtagacacagctgcgagagaggact

SEQ ID NO: 774362 - DNA, 25 bp, Homo sapien
taggagccgagtcaaaagaggctct

SEQ ID NO: 774363 - DNA, 25 bp, Homo sapien
tgaggcatgagatgagcctaaagag

SEQ ID NO: 774364 - DNA, 25 bp, Homo sapien
tgcagtgaggcatgagatgagccta

SEQ ID NO: 774365 - DNA, 25 bp, Homo sapien
tgagatgagcctaaagaggccatca

SEQ ID NO: 774366 - DNA, 25 bp, Homo sapien
gagctgggtctttcggggctgccgc

SEQ ID NO: 774367 - DNA, 25 bp, Homo sapien
ggaagccgccgaaaggcaggagcct

SEQ ID NO: 774368 - DNA, 25 bp, Homo sapien
ctgcggaagccgccgaaaggcagga

SEQ ID NO: 774369 - DNA, 25 bp, Homo sapien
agccgccgaaaggcaggagcctggc

SEQ ID NO: 774370 - DNA, 25 bp, Homo sapien
tgcggaagccgccgaaaggcaggag

SEQ ID NO: 774371 - DNA, 25 bp, Homo sapien
attgtgagggacgagccgggcctaa

SEQ ID NO: 774372 - DNA, 25 bp, Homo sapien
tacagccgcgagagtgtgctgggcc

SEQ ID NO: 774373 - DNA, 25 bp, Homo sapien
gcctggagagtaggccgggagacag

SEQ ID NO: 774374 - DNA, 25 bp, Homo sapien
agaggccgccacgaaggaaaagctg

SEQ ID NO: 774375 - DNA, 25 bp, Homo sapien
gccctggatgggccaacttgagaaa

SEQ ID NO: 774376 - DNA, 25 bp, Homo sapien
agaggctggcaggaatacagccggg

SEQ ID NO: 774377 - DNA, 25 bp, Homo sapien
cttgagagaccaccgtcaggcgtga

SEQ ID NO: 774378 - DNA, 25 bp, Homo sapien
gctggaggaggtttcgggcctacaa

SEQ ID NO: 774379 - DNA, 25 bp, Homo sapien
gatcctggggtttacaaaggctgcc

SEQ ID NO: 774380 - DNA, 25 bp, Homo sapien
cgagatgagcctaaagatgccatcg

SEQ ID NO: 774381 - DNA, 25 bp, Homo sapien
ccgcggaggccaccgaaaggcagga

SEQ ID NO: 774382 - DNA, 25 bp, Homo sapien
ccattgggacgcaggagtcaggccc

SEQ ID NO: 774383 - DNA, 25 bp, Homo sapien
tgggcctgaagggacaatgcaaacg

SEQ ID NO: 774384 - DNA, 25 bp, Homo sapien
caacgaggcaggcacaaaaatggtc

SEQ ID NO: 774385 - DNA, 25 bp, Homo sapien
tgaccagatgcagaagctaggcctg

SEQ ID NO: 774386 - DNA, 25 bp, Homo sapien
tgggaggccgccattaaacaggagc

SEQ ID NO: 774387 - DNA, 25 bp, Homo sapien
caggatttgggctcatagaggcagc

SEQ ID NO: 774388 - DNA, 25 bp, Homo sapien
ctcttgaaaggacgcaaagctgggc

SEQ ID NO: 774389 - DNA, 25 bp, Homo sapien
aacttgtagacgctactggaaggca

SEQ ID NO: 774390 - DNA, 25 bp, Homo sapien
aatttttggcctaaggaggctgcca

SEQ ID NO: 774391 - DNA, 25 bp, Homo sapien
atcaatgtgcatgtctagagttccc

SEQ ID NO: 774392 - DNA, 25 bp, Homo sapien
tgcatgtctagagttcccatctcct

SEQ ID NO: 774393 - DNA, 25 bp, Homo sapien
tggtatcaatgtgcatgtctagagt

SEQ ID NO: 774394 - DNA, 25 bp, Homo sapien
ccttcatggcatatttctgaatttc

SEQ ID NO: 774395 - DNA, 25 bp, Homo sapien
agacatggtatgggatattcctttg

SEQ ID NO: 774396 - DNA, 25 bp, Homo sapien
acatggtatgggatattcctttggc

SEQ ID NO: 774397 - DNA, 25 bp, Homo sapien
gacatggtatgggatattcctttgg

SEQ ID NO: 774398 - DNA, 25 bp, Homo sapien
tctcatccacattgtagatttttga

SEQ ID NO: 774399 - DNA, 25 bp, Homo sapien
ttcagcctcattctattttctggac

SEQ ID NO: 774400 - DNA, 25 bp, Homo sapien
tggtgaatcttcagcctcattctat

SEQ ID NO: 774401 - DNA, 25 bp, Homo sapien
ttctattttctggacaaccacacac

SEQ ID NO: 774402 - DNA, 25 bp, Homo sapien
gggccgacgcgaagaccagacgcca

SEQ ID NO: 774403 - DNA, 25 bp, Homo sapien
gacgcgaagaccagacgccaaccgg

SEQ ID NO: 774404 - DNA, 25 bp, Homo sapien
tccgcggggccgacgcgaagaccag

SEQ ID NO: 774405 - DNA, 25 bp, Homo sapien
gcgaagaccagacgccaaccgggct

SEQ ID NO: 774406 - DNA, 25 bp, Homo sapien
tcgtggcggcgcgtggcgggcccga

SEQ ID NO: 774407 - DNA, 25 bp, Homo sapien
ctgctcggcggacgcccgcggtcgc

SEQ ID NO: 774408 - DNA, 25 bp, Homo sapien
gctgctcggcggacgcccgcggtcg

SEQ ID NO: 774409 - DNA, 25 bp, Homo sapien
atcagattcttccacaaaggcctcc

SEQ ID NO: 774410 - DNA, 25 bp, Homo sapien
catcagattcttccacaaaggcctc

SEQ ID NO: 774411 - DNA, 25 bp, Homo sapien
ctgctagttgagaactaaactcaga

SEQ ID NO: 774412 - DNA, 25 bp, Homo sapien
gaactaaactcagacatcagattct

SEQ ID NO: 774413 - DNA, 25 bp, Homo sapien
cagttcaggcggaagccacaatctt

SEQ ID NO: 774414 - DNA, 25 bp, Homo sapien
aggcttcagagaagctcaccattca

SEQ ID NO: 774415 - DNA, 25 bp, Homo sapien
gaaagaagcagttcaggcggaagcc

SEQ ID NO: 774416 - DNA, 25 bp, Homo sapien
gcaggcttcagagaagctcaccatt

SEQ ID NO: 774417 - DNA, 25 bp, Homo sapien
gatggacacccttatcggtcaagcg

SEQ ID NO: 774418 - DNA, 25 bp, Homo sapien
gattcaggccacaggaattctccca

SEQ ID NO: 774419 - DNA, 25 bp, Homo sapien
gatgcagctagagcctaaacggaga

SEQ ID NO: 774420 - DNA, 25 bp, Homo sapien
cacatattcatcagcagtctcggag

SEQ ID NO: 774421 - DNA, 25 bp, Homo sapien
ataattgccaaccatcttaaacacc

SEQ ID NO: 774422 - DNA, 25 bp, Homo sapien
taaataattgccaaccatcttaaac

SEQ ID NO: 774423 - DNA, 25 bp, Homo sapien
aataattgccaaccatcttaaacac

SEQ ID NO: 774424 - DNA, 25 bp, Homo sapien
ttaaataattgccaaccatcttaaa

SEQ ID NO: 774425 - DNA, 25 bp, Homo sapien
tctccttagatgacccaaaggccat

SEQ ID NO: 774426 - DNA, 25 bp, Homo sapien
tactggagctatctccttagatgac

SEQ ID NO: 774427 - DNA, 25 bp, Homo sapien
agtcacctactggagctatctcctt

SEQ ID NO: 774428 - DNA, 25 bp, Homo sapien
ggagctatctccttagatgacccaa

SEQ ID NO: 774429 - DNA, 25 bp, Homo sapien
tactggtatcaaagaaaccctgtgc

SEQ ID NO: 774430 - DNA, 25 bp, Homo sapien
tagtaaacaacagtcatcgatgcga

SEQ ID NO: 774431 - DNA, 25 bp, Homo sapien
tctgggctgctaagtccaaagctgg

SEQ ID NO: 774432 - DNA, 25 bp, Homo sapien
tcgatgcgatgccagattatccaac

SEQ ID NO: 774433 - DNA, 25 bp, Homo sapien
tagcagaaagtagcatttctcaaat

SEQ ID NO: 774434 - DNA, 25 bp, Homo sapien
tgtagcagaaagtagcatttctcaa

SEQ ID NO: 774435 - DNA, 25 bp, Homo sapien
cttcatgtagcagaaagtagcattt

SEQ ID NO: 774436 - DNA, 25 bp, Homo sapien
catgtagcagaaagtagcatttctc

SEQ ID NO: 774437 - DNA, 25 bp, Homo sapien
gacttgtgctaagacagaatgacag

SEQ ID NO: 774438 - DNA, 25 bp, Homo sapien
gctctctacgccaaccaaaggaaat

SEQ ID NO: 774439 - DNA, 25 bp, Homo sapien
caaaggaaatacatcggacttgtgc

SEQ ID NO: 774440 - DNA, 25 bp, Homo sapien
gagaagcaagcctgctctctacgcc

SEQ ID NO: 774441 - DNA, 25 bp, Homo sapien
tggcgcttacgctgatcatgaagac

SEQ ID NO: 774442 - DNA, 25 bp, Homo sapien
ggccgactgctgatgtacaccttca

SEQ ID NO: 774443 - DNA, 25 bp, Homo sapien
tcaggttctccagggggttgatgct

SEQ ID NO: 774444 - DNA, 25 bp, Homo sapien
tagcccagggtcaggaaagctatgg

SEQ ID NO: 774445 - DNA, 25 bp, Homo sapien
ccaaatcattgaaccgtagcagaaa

SEQ ID NO: 774446 - DNA, 25 bp, Homo sapien
ccctaagatggttgagtacagatgg

SEQ ID NO: 774447 - DNA, 25 bp, Homo sapien
tgtactttccggagttgtggtgtcg

SEQ ID NO: 774448 - DNA, 25 bp, Homo sapien
tgacgttgcgggaataccctccgaa

SEQ ID NO: 774449 - DNA, 25 bp, Homo sapien
accaccatgcctgcatgcccagctg

SEQ ID NO: 774450 - DNA, 25 bp, Homo sapien
accatgcctgcatgcccagctgact

SEQ ID NO: 774451 - DNA, 25 bp, Homo sapien
caccatgcctgcatgcccagctgac

SEQ ID NO: 774452 - DNA, 25 bp, Homo sapien
gcaccaccatgcctgcatgcccagc

SEQ ID NO: 774453 - DNA, 25 bp, Homo sapien
cattctctgggatacaaataaatcc

SEQ ID NO: 774454 - DNA, 25 bp, Homo sapien
aacccacacaggaatcatctatcag

SEQ ID NO: 774455 - DNA, 25 bp, Homo sapien
aatcatctatcagcccaggcacctg

SEQ ID NO: 774456 - DNA, 25 bp, Homo sapien
gaaccacgtacttgtcattctctgg

SEQ ID NO: 774457 - DNA, 25 bp, Homo sapien
tgatgtttatctcctcgtgggcttc

SEQ ID NO: 774458 - DNA, 25 bp, Homo sapien
gatgtttatctcctcgtgggcttcc

SEQ ID NO: 774459 - DNA, 25 bp, Homo sapien
tgtttatctcctcgtgggcttccct

SEQ ID NO: 774460 - DNA, 25 bp, Homo sapien
tttatctcctcgtgggcttccctgc

SEQ ID NO: 774461 - DNA, 25 bp, Homo sapien
agggcgcagtcatctgagctccacg

SEQ ID NO: 774462 - DNA, 25 bp, Homo sapien
cagggctggccgtgagggtcatgca

SEQ ID NO: 774463 - DNA, 25 bp, Homo sapien
cctgctcacagtgaccgtggagggc

SEQ ID NO: 774464 - DNA, 25 bp, Homo sapien
gaataccacctgctcacagtgaccg

SEQ ID NO: 774465 - DNA, 25 bp, Homo sapien
cttgctgcttctactcctgcgggaa

SEQ ID NO: 774466 - DNA, 25 bp, Homo sapien
cacggcaagtggagcttgttacgca

SEQ ID NO: 774467 - DNA, 25 bp, Homo sapien
cacgttcatcaggtgccgggtacac

SEQ ID NO: 774468 - DNA, 25 bp, Homo sapien
ccaggtgcttttactgcctcgaggg

SEQ ID NO: 774469 - DNA, 25 bp, Homo sapien
gcatctctggcagttgtgaagatct

SEQ ID NO: 774470 - DNA, 25 bp, Homo sapien
tgaagatcttgtaccagagcgtggc

SEQ ID NO: 774471 - DNA, 25 bp, Homo sapien
tctggaacaatcactgtaagcttgg

SEQ ID NO: 774472 - DNA, 25 bp, Homo sapien
ccagaaaggattgtaatcttgggcg

SEQ ID NO: 774473 - DNA, 25 bp, Homo sapien
agtcagcagggcctacaccaacggt

SEQ ID NO: 774474 - DNA, 25 bp, Homo sapien
aagcatccaccactccgcctagtgt

SEQ ID NO: 774475 - DNA, 25 bp, Homo sapien
gcctagtgtcctaactcacctggaa

SEQ ID NO: 774476 - DNA, 25 bp, Homo sapien
cctggaaatctaaagtggcagagga

SEQ ID NO: 774477 - DNA, 25 bp, Homo sapien
tgcctcctaaatgaccaaagctggg

SEQ ID NO: 774478 - DNA, 25 bp, Homo sapien
tgcaagttactaaagggaccccaga

SEQ ID NO: 774479 - DNA, 25 bp, Homo sapien
gggccaggccaaaagaagagagatc

SEQ ID NO: 774480 - DNA, 25 bp, Homo sapien
ttgagagacaggattgacagcctcc

SEQ ID NO: 774481 - DNA, 25 bp, Homo sapien
ttctcgggacaaaattcaggattgc

SEQ ID NO: 774482 - DNA, 25 bp, Homo sapien
aagtaactggtgtgcatgagatgca

SEQ ID NO: 774483 - DNA, 25 bp, Homo sapien
gctaggtctgcccttgataacagca

SEQ ID NO: 774484 - DNA, 25 bp, Homo sapien
tcaggattgctctgacgcaatttgc

SEQ ID NO: 774485 - DNA, 25 bp, Homo sapien
gaaacgtcccatcaggtaggtcctc

SEQ ID NO: 774486 - DNA, 25 bp, Homo sapien
tcgtcgtgaccagctagatccagga

SEQ ID NO: 774487 - DNA, 25 bp, Homo sapien
tgtacccagggcaaagcacgtgcat

SEQ ID NO: 774488 - DNA, 25 bp, Homo sapien
tctctagagacacgtggaaacgtcc

SEQ ID NO: 774489 - DNA, 25 bp, Homo sapien
taatgacgtttctagagccaagcca

SEQ ID NO: 774490 - DNA, 25 bp, Homo sapien
tggcaggtgcctcacgacaagaaac

SEQ ID NO: 774491 - DNA, 25 bp, Homo sapien
tgttgcacacttcgaatcctgaggt

SEQ ID NO: 774492 - DNA, 25 bp, Homo sapien
gacgacaagacagtagaacctccta

SEQ ID NO: 774493 - DNA, 25 bp, Homo sapien
atgcttctctacaaggatacagata

SEQ ID NO: 774494 - DNA, 25 bp, Homo sapien
gatggctgaacctgtcttctgtgat

SEQ ID NO: 774495 - DNA, 25 bp, Homo sapien
gcttctctacaaggatacagatacc

SEQ ID NO: 774496 - DNA, 25 bp, Homo sapien
ttctctacaaggatacagataccaa

SEQ ID NO: 774497 - DNA, 25 bp, Homo sapien
cagtctccgacctgaactggttaac

SEQ ID NO: 774498 - DNA, 25 bp, Homo sapien
tgctcagtctccgacctgaactggt

SEQ ID NO: 774499 - DNA, 25 bp, Homo sapien
cactcccaggaagttgatgctaaac

SEQ ID NO: 774500 - DNA, 25 bp, Homo sapien
gtagctgggaataccagcacactcc

SEQ ID NO: 774501 - DNA, 25 bp, Homo sapien
ggtggtctgttaggccattatgaca

SEQ ID NO: 774502 - DNA, 25 bp, Homo sapien
ttccttgataccatctgggaggctt

SEQ ID NO: 774503 - DNA, 25 bp, Homo sapien
gttaggccattatgacagatgaggg

SEQ ID NO: 774504 - DNA, 25 bp, Homo sapien
atctgggaggcttgatggttgattt

SEQ ID NO: 774505 - DNA, 25 bp, Homo sapien
caatgacatttcagacttaggcctc

SEQ ID NO: 774506 - DNA, 25 bp, Homo sapien
cagttgctggaagccagtactctac

SEQ ID NO: 774507 - DNA, 25 bp, Homo sapien
gcttaattatctgccttcaggctag

SEQ ID NO: 774508 - DNA, 25 bp, Homo sapien
cacaagtatttgctccagttgctgg

SEQ ID NO: 774509 - DNA, 25 bp, Homo sapien
ccctgctacctggttcgagaacatt

SEQ ID NO: 774510 - DNA, 25 bp, Homo sapien
tgccggaataatagcccactgtacg

SEQ ID NO: 774511 - DNA, 25 bp, Homo sapien
gttatggacttctcaattctggaca

SEQ ID NO: 774512 - DNA, 25 bp, Homo sapien
cactaatctcctctcgttatggact

SEQ ID NO: 774513 - DNA, 25 bp, Homo sapien
gttagcggcgtaccgagtgcctgca

SEQ ID NO: 774514 - DNA, 25 bp, Homo sapien
agcggcgtaccgagtgcctgcagac

SEQ ID NO: 774515 - DNA, 25 bp, Homo sapien
cgcgttagcggcgtaccgagtgcct

SEQ ID NO: 774516 - DNA, 25 bp, Homo sapien
ggcgtaccgagtgcctgcagacctg

SEQ ID NO: 774517 - DNA, 25 bp, Homo sapien
agcccgatgattcgcactggtaccg

SEQ ID NO: 774518 - DNA, 25 bp, Homo sapien
gatgattcgcactggtaccgcgaga

SEQ ID NO: 774519 - DNA, 25 bp, Homo sapien
gatctcggacctggatagcccgatg

SEQ ID NO: 774520 - DNA, 25 bp, Homo sapien
cctggatagcccgatgattcgcact

SEQ ID NO: 774521 - DNA, 25 bp, Homo sapien
tttaaagctacatatacaaagatat

SEQ ID NO: 774522 - DNA, 25 bp, Homo sapien
ggacacaaatccaaaggctaatgct

SEQ ID NO: 774523 - DNA, 25 bp, Homo sapien
atccaaaggctaatgctaacagcaa

SEQ ID NO: 774524 - DNA, 25 bp, Homo sapien
gtaaaacctgtttatccataatgat

SEQ ID NO: 774525 - DNA, 25 bp, Homo sapien
aggtcccatgtatccgcagaaggat

SEQ ID NO: 774526 - DNA, 25 bp, Homo sapien
cctgagctgcttttggaacagattt

SEQ ID NO: 774527 - DNA, 25 bp, Homo sapien
cttgaagggagacataaccatttgt

SEQ ID NO: 774528 - DNA, 25 bp, Homo sapien
tttgtcatcaaatcctgagctgctt

SEQ ID NO: 774529 - DNA, 25 bp, Homo sapien
cagatttttcctgtaagttcttgcc

SEQ ID NO: 774530 - DNA, 25 bp, Homo sapien
gctgttccagtctgagaaccataaa

SEQ ID NO: 774531 - DNA, 25 bp, Homo sapien
atcagatgatcatctggatcatatt

SEQ ID NO: 774532 - DNA, 25 bp, Homo sapien
ttagattaataatggccacaggcag

SEQ ID NO: 774533 - DNA, 25 bp, Homo sapien
ccagggatgtaactgcttcagcaag

SEQ ID NO: 774534 - DNA, 25 bp, Homo sapien
cttcagcaagaactgttgcgaatcc

SEQ ID NO: 774535 - DNA, 25 bp, Homo sapien
gaaccactgctgtagggtgaaatcc

SEQ ID NO: 774536 - DNA, 25 bp, Homo sapien
gatgcagctaggctaagacctgaga

SEQ ID NO: 774537 - DNA, 25 bp, Homo sapien
gatattaagtaatgcgcctgggcgc

SEQ ID NO: 774538 - DNA, 25 bp, Homo sapien
ggtgaaatcccctaactgggcatga

SEQ ID NO: 774539 - DNA, 25 bp, Homo sapien
tgccaaatcgaaaatcaatggatgc

SEQ ID NO: 774540 - DNA, 25 bp, Homo sapien
cagtgtatgtcgcaaccaggaagac

SEQ ID NO: 774541 - DNA, 25 bp, Homo sapien
gtggctagcataggcagaatttccc

SEQ ID NO: 774542 - DNA, 25 bp, Homo sapien
ccttcaggtaagttttgccaaatcg

SEQ ID NO: 774543 - DNA, 25 bp, Homo sapien
ttgcctttcttgcagtggccgccac

SEQ ID NO: 774544 - DNA, 25 bp, Homo sapien
cttgcttttaaccacgtcgcagtcg

SEQ ID NO: 774545 - DNA, 25 bp, Homo sapien
tggtgagattcacatttgcctttct

SEQ ID NO: 774546 - DNA, 25 bp, Homo sapien
gcatccagagccacttgtcaacatt

SEQ ID NO: 774547 - DNA, 25 bp, Homo sapien
tttgcccaaatcttcaacatcaaca

SEQ ID NO: 774548 - DNA, 25 bp, Homo sapien
gaatttaggctctgatggtcctcac

SEQ ID NO: 774549 - DNA, 25 bp, Homo sapien
gatggtcctcaccaccaaactcttc

SEQ ID NO: 774550 - DNA, 25 bp, Homo sapien
tgcccaaatcttcaacatcaacaat

SEQ ID NO: 774551 - DNA, 25 bp, Homo sapien
tcctggattcctaggggccccagtc

SEQ ID NO: 774552 - DNA, 25 bp, Homo sapien
cagtcacatcccagattggtatttc

SEQ ID NO: 774553 - DNA, 25 bp, Homo sapien
cctggattcctaggggccccagtca

SEQ ID NO: 774554 - DNA, 25 bp, Homo sapien
ctagtcactgaaacagtcacatccc

SEQ ID NO: 774555 - DNA, 25 bp, Homo sapien
tctactatggtcatgtaaaacactt

SEQ ID NO: 774556 - DNA, 25 bp, Homo sapien
atatacaagctaacagacgtttcac

SEQ ID NO: 774557 - DNA, 25 bp, Homo sapien
caacattcagcatttagctcgctca

SEQ ID NO: 774558 - DNA, 25 bp, Homo sapien
gtctcacaatgtcatgcaggccggg

SEQ ID NO: 774559 - DNA, 25 bp, Homo sapien
tagggccataataggattccgaaga

SEQ ID NO: 774560 - DNA, 25 bp, Homo sapien
gtatagggccataataggattccga

SEQ ID NO: 774561 - DNA, 25 bp, Homo sapien
ggccataataggattccgaagaaac

SEQ ID NO: 774562 - DNA, 25 bp, Homo sapien
tatagggccataataggattccgaa

SEQ ID NO: 774563 - DNA, 25 bp, Homo sapien
tcctgaacaaaccagacttctcttc

SEQ ID NO: 774564 - DNA, 25 bp, Homo sapien
gaacaaaccagacttctcttcctgc

SEQ ID NO: 774565 - DNA, 25 bp, Homo sapien
gttcctgaacaaaccagacttctct

SEQ ID NO: 774566 - DNA, 25 bp, Homo sapien
ctgaacaaaccagacttctcttcct

SEQ ID NO: 774567 - DNA, 25 bp, Homo sapien
tcttctttcaccatcttcattcctc

SEQ ID NO: 774568 - DNA, 25 bp, Homo sapien
agctcttctttcaccatcttcattc

SEQ ID NO: 774569 - DNA, 25 bp, Homo sapien
ttctttcaccatcttcattcctccc

SEQ ID NO: 774570 - DNA, 25 bp, Homo sapien
tttcaccatcttcattcctccccat

SEQ ID NO: 774571 - DNA, 25 bp, Homo sapien
tttagtaagggcttctcggagagca

SEQ ID NO: 774572 - DNA, 25 bp, Homo sapien
ttagtaagggcttctcggagagcag

SEQ ID NO: 774573 - DNA, 25 bp, Homo sapien
gacttcattccaggtatcaaatgag

SEQ ID NO: 774574 - DNA, 25 bp, Homo sapien
ttccaggtatcaaatgagaatgcct

SEQ ID NO: 774575 - DNA, 25 bp, Homo sapien
aatgagaatgcctaagactacagtc

SEQ ID NO: 774576 - DNA, 25 bp, Homo sapien
gagagagacttcattccaggtatca

SEQ ID NO: 774577 - DNA, 25 bp, Homo sapien
tctctgcattgccagaacggtcaca

SEQ ID NO: 774578 - DNA, 25 bp, Homo sapien
ttgccagaacggtcacataaaaggc

SEQ ID NO: 774579 - DNA, 25 bp, Homo sapien
gcaccagaccgacggttccttgaag

SEQ ID NO: 774580 - DNA, 25 bp, Homo sapien
ctagtgcaccagaccgacggttcct

SEQ ID NO: 774581 - DNA, 25 bp, Homo sapien
aaaaagccaggccaaagtaatctca

SEQ ID NO: 774582 - DNA, 25 bp, Homo sapien
taaaaatgaacggtatgctgggcca

SEQ ID NO: 774583 - DNA, 25 bp, Homo sapien
gaattctcagtagcactataacctg

SEQ ID NO: 774584 - DNA, 25 bp, Homo sapien
tctaggaactacatcttaaacgtga

SEQ ID NO: 774585 - DNA, 25 bp, Homo sapien
gagtggctcccaatcaactgataac

SEQ ID NO: 774586 - DNA, 25 bp, Homo sapien
cactacactatagactggatgacag

SEQ ID NO: 774587 - DNA, 25 bp, Homo sapien
acactatagactggatgacagggca

SEQ ID NO: 774588 - DNA, 25 bp, Homo sapien
gcaccactacactatagactggatg

SEQ ID NO: 774589 - DNA, 25 bp, Homo sapien
ttgcaccactacactatagactgga

SEQ ID NO: 774590 - DNA, 25 bp, Homo sapien
tgcccaatgtcatgaccaaagatat

SEQ ID NO: 774591 - DNA, 25 bp, Homo sapien
tgaacaactggtgcccggctgaaac

SEQ ID NO: 774592 - DNA, 25 bp, Homo sapien
tacgtgtagactggactagattctg

SEQ ID NO: 774593 - DNA, 25 bp, Homo sapien
tctccagctggcttaaaaagcttta

SEQ ID NO: 774594 - DNA, 25 bp, Homo sapien
gaatactcctactggtaactgcatg

SEQ ID NO: 774595 - DNA, 25 bp, Homo sapien
taagagaaaccatgtgtttcgtaac

SEQ ID NO: 774596 - DNA, 25 bp, Homo sapien
tgtgtttcgtaaccatgaatactcc

SEQ ID NO: 774597 - DNA, 25 bp, Homo sapien
gcacagaaacaaaccaccaaggcat

SEQ ID NO: 774598 - DNA, 25 bp, Homo sapien
aacctcctctccctcggagcatgga

SEQ ID NO: 774599 - DNA, 25 bp, Homo sapien
tcaattccatagaatgtgtgtttgt

SEQ ID NO: 774600 - DNA, 25 bp, Homo sapien
aatgtgtgtttgtaacaacctcctc

SEQ ID NO: 774601 - DNA, 25 bp, Homo sapien
tgtgtttgtaacaacctcctctccc

SEQ ID NO: 774602 - DNA, 25 bp, Homo sapien
acatttattagcacacgccaagctc

SEQ ID NO: 774603 - DNA, 25 bp, Homo sapien
tttattagcacacgccaagctcggg

SEQ ID NO: 774604 - DNA, 25 bp, Homo sapien
caagctcggggtggtttccatgcag

SEQ ID NO: 774605 - DNA, 25 bp, Homo sapien
ggtggtttccatgcagcgatggctc

SEQ ID NO: 774606 - DNA, 25 bp, Homo sapien
caaatggatgtttacaaatccagca

SEQ ID NO: 774607 - DNA, 25 bp, Homo sapien
ggcaaagtttttgactgctattgag

SEQ ID NO: 774608 - DNA, 25 bp, Homo sapien
taaatctatgttaatgggcatacag

SEQ ID NO: 774609 - DNA, 25 bp, Homo sapien
gaaatgtccagtctgggccattaga

SEQ ID NO: 774610 - DNA, 25 bp, Homo sapien
aatagtgccattacccaaaacagaa

SEQ ID NO: 774611 - DNA, 25 bp, Homo sapien
agatgcaaagttctaaaagaccctt

SEQ ID NO: 774612 - DNA, 25 bp, Homo sapien
gccactcagtgcccacggggttggt

SEQ ID NO: 774613 - DNA, 25 bp, Homo sapien
cactcagtgcccacggggttggtgt

SEQ ID NO: 774614 - DNA, 25 bp, Homo sapien
cttccaccgccactcagtgcccacg

SEQ ID NO: 774615 - DNA, 25 bp, Homo sapien
tccaccgccactcagtgcccacggg

SEQ ID NO: 774616 - DNA, 25 bp, Homo sapien
aatggcttccttcaagatcatttca

SEQ ID NO: 774617 - DNA, 25 bp, Homo sapien
ttaaactgcttaatcatgttctgat

SEQ ID NO: 774618 - DNA, 25 bp, Homo sapien
tgcttaatcatgttctgatggtttt

SEQ ID NO: 774619 - DNA, 25 bp, Homo sapien
actgcttaatcatgttctgatggtt

SEQ ID NO: 774620 - DNA, 25 bp, Homo sapien
gcaaggcacctccttcacaaggcag

SEQ ID NO: 774621 - DNA, 25 bp, Homo sapien
agagcaaagggggaagagcccctca

SEQ ID NO: 774622 - DNA, 25 bp, Homo sapien
ggggaagcaaggcacctccttcaca

SEQ ID NO: 774623 - DNA, 25 bp, Homo sapien
agcaggaaggagaagtgcagagcaa

SEQ ID NO: 774624 - DNA, 25 bp, Homo sapien
tgaaccattatttgcatgacttttc

SEQ ID NO: 774625 - DNA, 25 bp, Homo sapien
gcaccgtgctaagcctactgaataa

SEQ ID NO: 774626 - DNA, 25 bp, Homo sapien
gagtccagtggagtgtgaactcagc

SEQ ID NO: 774627 - DNA, 25 bp, Homo sapien
ctgatcttgaaccattatttgcatg

SEQ ID NO: 774628 - DNA, 25 bp, Homo sapien
ttaccgtcattccttcttcaaagcg

SEQ ID NO: 774629 - DNA, 25 bp, Homo sapien
agggacaatgcacagtgctttaccg

SEQ ID NO: 774630 - DNA, 25 bp, Homo sapien
aaagcgttctgctttgacgcccggt

SEQ ID NO: 774631 - DNA, 25 bp, Homo sapien
ggtacattattggttctcccacgag

SEQ ID NO: 774632 - DNA, 25 bp, Homo sapien
gagcacctttagtgcgccaggcaaa

SEQ ID NO: 774633 - DNA, 25 bp, Homo sapien
gtgcctagtcccagtatgacacaaa

SEQ ID NO: 774634 - DNA, 25 bp, Homo sapien
tgatcatccctataaggagagccct

SEQ ID NO: 774635 - DNA, 25 bp, Homo sapien
tacttttggtgttacagcgtgtgcc

SEQ ID NO: 774636 - DNA, 25 bp, Homo sapien
gcaatcaaggctagtacgaacatct

SEQ ID NO: 774637 - DNA, 25 bp, Homo sapien
taattttcctcaatccatgatggca

SEQ ID NO: 774638 - DNA, 25 bp, Homo sapien
aatgtggccggcattttgttggacg

SEQ ID NO: 774639 - DNA, 25 bp, Homo sapien
ctcatttcccagtcaggtttagtaa

SEQ ID NO: 774640 - DNA, 25 bp, Homo sapien
caaataaagacaacccctgtgagag

SEQ ID NO: 774641 - DNA, 25 bp, Homo sapien
gaggcggctttgtgaagctaaacaa

SEQ ID NO: 774642 - DNA, 25 bp, Homo sapien
gctttttgcaccagacaaacttgag

SEQ ID NO: 774643 - DNA, 25 bp, Homo sapien
gctgttaatgccacatgaggcggct

SEQ ID NO: 774644 - DNA, 25 bp, Homo sapien
gtgggcggtcgattttcttcaggct

SEQ ID NO: 774645 - DNA, 25 bp, Homo sapien
caggctgtctttggtactggcatcc

SEQ ID NO: 774646 - DNA, 25 bp, Homo sapien
ccacactgacatacagctgagtaac

SEQ ID NO: 774647 - DNA, 25 bp, Homo sapien
gactgccaaggcttttaaactgtca

SEQ ID NO: 774648 - DNA, 25 bp, Homo sapien
atatttgcacaaatcaagcacagca

SEQ ID NO: 774649 - DNA, 25 bp, Homo sapien
accagtttactaaggagttagccag

SEQ ID NO: 774650 - DNA, 25 bp, Homo sapien
ccagtttactaaggagttagccagc

SEQ ID NO: 774651 - DNA, 25 bp, Homo sapien
acatatttgcacaaatcaagcacag

SEQ ID NO: 774652 - DNA, 25 bp, Homo sapien
gcacatctgtatcccaattactagg

SEQ ID NO: 774653 - DNA, 25 bp, Homo sapien
gttcaataacaggcaaaattaatct

SEQ ID NO: 774654 - DNA, 25 bp, Homo sapien
tggagcacatctgtatcccaattac

SEQ ID NO: 774655 - DNA, 25 bp, Homo sapien
tctacgatgatcaaagttggcatag

SEQ ID NO: 774656 - DNA, 25 bp, Homo sapien
cacatagtgttgaatcattccactc

SEQ ID NO: 774657 - DNA, 25 bp, Homo sapien
ttccactccaactaaggttgattcc

SEQ ID NO: 774658 - DNA, 25 bp, Homo sapien
gtgttgaatcattccactccaacta

SEQ ID NO: 774659 - DNA, 25 bp, Homo sapien
tccaactaaggttgattcctgtgct

SEQ ID NO: 774660 - DNA, 25 bp, Homo sapien
tgatggcttcaaaaagtggggttcc

SEQ ID NO: 774661 - DNA, 25 bp, Homo sapien
ttataaagtctaaaggcaaagaaca

SEQ ID NO: 774662 - DNA, 25 bp, Homo sapien
agaataggaggctggataaatattt

SEQ ID NO: 774663 - DNA, 25 bp, Homo sapien
gaatcatggggcaagtgtttcccat

SEQ ID NO: 774664 - DNA, 25 bp, Homo sapien
cctgcttccgcaaacaggaaggctc

SEQ ID NO: 774665 - DNA, 25 bp, Homo sapien
acacgtgctttcccaaatcgccaaa

SEQ ID NO: 774666 - DNA, 25 bp, Homo sapien
ggctctttagtaatcagtggtggct

SEQ ID NO: 774667 - DNA, 25 bp, Homo sapien
catgctcttggactctggtggaact

SEQ ID NO: 774668 - DNA, 25 bp, Homo sapien
gaatctgcaaggacacagcctgtgg

SEQ ID NO: 774669 - DNA, 25 bp, Homo sapien
aacccgggcagatagcttcagctca

SEQ ID NO: 774670 - DNA, 25 bp, Homo sapien
tacttgaaatacagtgggcagcagg

SEQ ID NO: 774671 - DNA, 25 bp, Homo sapien
gccttggagtcctagaaatgtctac

SEQ ID NO: 774672 - DNA, 25 bp, Homo sapien
cacacccagaaaatggcaaccagga

SEQ ID NO: 774673 - DNA, 25 bp, Homo sapien
ggagtccaaaaagaatcactgcctt

SEQ ID NO: 774674 - DNA, 25 bp, Homo sapien
ccaggagtccaaaaagaatcactgc

SEQ ID NO: 774675 - DNA, 25 bp, Homo sapien
cagaaaatggcaaccaggagtccaa

SEQ ID NO: 774676 - DNA, 25 bp, Homo sapien
gaattggacctagctgcccgttaga

SEQ ID NO: 774677 - DNA, 25 bp, Homo sapien
cccgttagagcacacaggcatgcaa

SEQ ID NO: 774678 - DNA, 25 bp, Homo sapien
aatgaaacaatctcctggccaggaa

SEQ ID NO: 774679 - DNA, 25 bp, Homo sapien
tgagacatccacactgcaacacaga

SEQ ID NO: 774680 - DNA, 25 bp, Homo sapien
tactgttgctctacactaagacttg

SEQ ID NO: 774681 - DNA, 25 bp, Homo sapien
ccaaaactgacttttgcgtgtggtg

SEQ ID NO: 774682 - DNA, 25 bp, Homo sapien
gaatcattgtctatgcatgtgagga

SEQ ID NO: 774683 - DNA, 25 bp, Homo sapien
cggatcattccatgctatcaagagc

SEQ ID NO: 774684 - DNA, 25 bp, Homo sapien
ggaatctggaaccaagcttggcagc

SEQ ID NO: 774685 - DNA, 25 bp, Homo sapien
gaatctggaaccaagcttggcagca

SEQ ID NO: 774686 - DNA, 25 bp, Homo sapien
taggcctggagctcgtccacgttcc

SEQ ID NO: 774687 - DNA, 25 bp, Homo sapien
tcagtctgtagacagttcgttgttg

SEQ ID NO: 774688 - DNA, 25 bp, Homo sapien
cccagggacacgagctgcgcgtagg

SEQ ID NO: 774689 - DNA, 25 bp, Homo sapien
gtccacgttccatgctttcacgagc

SEQ ID NO: 774690 - DNA, 25 bp, Homo sapien
taaagaagcgtcaaaactctgagcc

SEQ ID NO: 774691 - DNA, 25 bp, Homo sapien
gaagcgtcaaaactctgagcccttt

SEQ ID NO: 774692 - DNA, 25 bp, Homo sapien
tctgttaccaggtaactggtataaa

SEQ ID NO: 774693 - DNA, 25 bp, Homo sapien
taccaggtaactggtataaagaagc

SEQ ID NO: 774694 - DNA, 25 bp, Homo sapien
gttcacatgcaatttcatattcggg

SEQ ID NO: 774695 - DNA, 25 bp, Homo sapien
actgtaccacttcctcatgccaggg

SEQ ID NO: 774696 - DNA, 25 bp, Homo sapien
gaggcaattagagtgttcgtgttca

SEQ ID NO: 774697 - DNA, 25 bp, Homo sapien
tctgtgtgctatcaggaggcaatta

SEQ ID NO: 774698 - DNA, 25 bp, Homo sapien
aaagttggctgactcctatagagta

SEQ ID NO: 774699 - DNA, 25 bp, Homo sapien
tatagagtagatcctgaactggagg

SEQ ID NO: 774700 - DNA, 25 bp, Homo sapien
gacattacaagctgatctgacaaaa

SEQ ID NO: 774701 - DNA, 25 bp, Homo sapien
taaaggacattacaagctgatctga

SEQ ID NO: 774702 - DNA, 25 bp, Homo sapien
ccatcacgcctaggaaatttttcta

SEQ ID NO: 774703 - DNA, 25 bp, Homo sapien
tatttttaaatagtgatggagtctc

SEQ ID NO: 774704 - DNA, 25 bp, Homo sapien
acaggttcatgccatcacgcctagg

SEQ ID NO: 774705 - DNA, 25 bp, Homo sapien
ggttcatgccatcacgcctaggaaa

SEQ ID NO: 774706 - DNA, 25 bp, Homo sapien
ttctaaggacaacttctcataatct

SEQ ID NO: 774707 - DNA, 25 bp, Homo sapien
taaattgagcaatctcctgagaaag

SEQ ID NO: 774708 - DNA, 25 bp, Homo sapien
tatttgatgattcggacctctctgg

SEQ ID NO: 774709 - DNA, 25 bp, Homo sapien
cagaggccatgactggaaaatgaca

SEQ ID NO: 774710 - DNA, 25 bp, Homo sapien
aatgacaagatctgcatactccgag

SEQ ID NO: 774711 - DNA, 25 bp, Homo sapien
gttcttgctggttgtagctacaact

SEQ ID NO: 774712 - DNA, 25 bp, Homo sapien
tcttgctggttgtagctacaactgt

SEQ ID NO: 774713 - DNA, 25 bp, Homo sapien
ttgttcttgctggttgtagctacaa

SEQ ID NO: 774714 - DNA, 25 bp, Homo sapien
atttgttcttgctggttgtagctac

SEQ ID NO: 774715 - DNA, 25 bp, Homo sapien
gaaagcttctgcactaaaagatctg

SEQ ID NO: 774716 - DNA, 25 bp, Homo sapien
caggcaatgcacttcataagagaac

SEQ ID NO: 774717 - DNA, 25 bp, Homo sapien
caagctgggaatacaactttcacaa

SEQ ID NO: 774718 - DNA, 25 bp, Homo sapien
gagaactgctggctgcaactcacaa

SEQ ID NO: 774719 - DNA, 25 bp, Homo sapien
catgatgggattttgctgctactgg

SEQ ID NO: 774720 - DNA, 25 bp, Homo sapien
tactgacatcttgagacatgatggg

SEQ ID NO: 774721 - DNA, 25 bp, Homo sapien
ctgctactggctccatggaataaaa

SEQ ID NO: 774722 - DNA, 25 bp, Homo sapien
gaataaaagggactgcttcactgtg

SEQ ID NO: 774723 - DNA, 25 bp, Homo sapien
tgtcttgaacttccgcagacactat

SEQ ID NO: 774724 - DNA, 25 bp, Homo sapien
gacactataatggtccctgcagttt

SEQ ID NO: 774725 - DNA, 25 bp, Homo sapien
gaacttccgcagacactataatggt

SEQ ID NO: 774726 - DNA, 25 bp, Homo sapien
tccgcagacactataatggtccctg

SEQ ID NO: 774727 - DNA, 25 bp, Homo sapien
tactgttgtggaggcaatcactgtc

SEQ ID NO: 774728 - DNA, 25 bp, Homo sapien
tcccaggcactgagcctcgaaactg

SEQ ID NO: 774729 - DNA, 25 bp, Homo sapien
tgaagtgttgtctactgttgtggag

SEQ ID NO: 774730 - DNA, 25 bp, Homo sapien
ggcactgagcctcgaaactgcagag

SEQ ID NO: 774731 - DNA, 25 bp, Homo sapien
gattttttacccactagctaagagc

SEQ ID NO: 774732 - DNA, 25 bp, Homo sapien
tcagtgacgtgagtgaaattccatc

SEQ ID NO: 774733 - DNA, 25 bp, Homo sapien
caatttcctgttctagccacaaaaa

SEQ ID NO: 774734 - DNA, 25 bp, Homo sapien
tgtgaactctacaacccaagatgta

SEQ ID NO: 774735 - DNA, 25 bp, Homo sapien
ccaagatgcgctacaatcacaggag

SEQ ID NO: 774736 - DNA, 25 bp, Homo sapien
ttgctgggcccggaagacaagtcaa

SEQ ID NO: 774737 - DNA, 25 bp, Homo sapien
cagacatgacttcctatcaaaccaa

SEQ ID NO: 774738 - DNA, 25 bp, Homo sapien
gtttatctcaagcagtcccgctgac

SEQ ID NO: 774739 - DNA, 25 bp, Homo sapien
catataatcctttgcgctgaacgtt

SEQ ID NO: 774740 - DNA, 25 bp, Homo sapien
gcggttataatcgatccatgtccac

SEQ ID NO: 774741 - DNA, 25 bp, Homo sapien
gctgaacgtttttgatccaccacta

SEQ ID NO: 774742 - DNA, 25 bp, Homo sapien
gcaccaaataatgcccagtgaggag

SEQ ID NO: 774743 - DNA, 25 bp, Homo sapien
agtagttttagatccaacgcaattc

SEQ ID NO: 774744 - DNA, 25 bp, Homo sapien
catgaaatctaagggccgggtaagg

SEQ ID NO: 774745 - DNA, 25 bp, Homo sapien
tagatccaacgcaattctgggaagg

SEQ ID NO: 774746 - DNA, 25 bp, Homo sapien
ctccatgaaatctaagggccgggta

SEQ ID NO: 774747 - DNA, 25 bp, Homo sapien
tgtgagactaatgactccatgccct

SEQ ID NO: 774748 - DNA, 25 bp, Homo sapien
tatagaacagattgtgtaaagcagc

SEQ ID NO: 774749 - DNA, 25 bp, Homo sapien
tggccactcctcttacagcagacag

SEQ ID NO: 774750 - DNA, 25 bp, Homo sapien
ggacagtgacctcacgaacaaaaag

SEQ ID NO: 774751 - DNA, 25 bp, Homo sapien
gctagatggagtgttctgtcatgtc

SEQ ID NO: 774752 - DNA, 25 bp, Homo sapien
tgtgcccttgagaataatgtattgc

SEQ ID NO: 774753 - DNA, 25 bp, Homo sapien
tcctcccattggttgcagaacataa

SEQ ID NO: 774754 - DNA, 25 bp, Homo sapien
ggtctttctcgtatacattctgtca

SEQ ID NO: 774755 - DNA, 25 bp, Homo sapien
actggatttctgtgactccacggcc

SEQ ID NO: 774756 - DNA, 25 bp, Homo sapien
tacgacagtgaaagattgggtctca

SEQ ID NO: 774757 - DNA, 25 bp, Homo sapien
tttaatcatatctgggcttgggcca

SEQ ID NO: 774758 - DNA, 25 bp, Homo sapien
cacggcctggtgtctctcctaaaac

SEQ ID NO: 774759 - DNA, 25 bp, Homo sapien
ctcaaagatcggacctcctggttgg

SEQ ID NO: 774760 - DNA, 25 bp, Homo sapien
gttctgtggcttgagcataaactca

SEQ ID NO: 774761 - DNA, 25 bp, Homo sapien
tcacctgagtgcatgtctaagtcac

SEQ ID NO: 774762 - DNA, 25 bp, Homo sapien
tcctggttggtcacctgagtgcatg

SEQ ID NO: 774763 - DNA, 25 bp, Homo sapien
cagtgagtgagtgtatcccacaaaa

SEQ ID NO: 774764 - DNA, 25 bp, Homo sapien
tcatccttacgttgtgtgtccaaag

SEQ ID NO: 774765 - DNA, 25 bp, Homo sapien
gacccaagtcacagtgatgtggcca

SEQ ID NO: 774766 - DNA, 25 bp, Homo sapien
ctccagttggtgcagcgtgggtcct

SEQ ID NO: 774767 - DNA, 25 bp, Homo sapien
aagcagaattcgcaaggaattattt

SEQ ID NO: 774768 - DNA, 25 bp, Homo sapien
aaagcagaattcgcaaggaattatt

SEQ ID NO: 774769 - DNA, 25 bp, Homo sapien
agcagaattcgcaaggaattatttt

SEQ ID NO: 774770 - DNA, 25 bp, Homo sapien
taaagcagaattcgcaaggaattat

SEQ ID NO: 774771 - DNA, 25 bp, Homo sapien
cccatgtagctgtgggcaggaaact

SEQ ID NO: 774772 - DNA, 25 bp, Homo sapien
ccaggctgctgggacgagaagagcc

SEQ ID NO: 774773 - DNA, 25 bp, Homo sapien
ccatgtgacggcttgaagtgaaagg

SEQ ID NO: 774774 - DNA, 25 bp, Homo sapien
ggtaatggcctgggcggcattcaca

SEQ ID NO: 774775 - DNA, 25 bp, Homo sapien
gtgggtatccgggaggtgacatccc

SEQ ID NO: 774776 - DNA, 25 bp, Homo sapien
ctggatgccatcagggaggtctgca

SEQ ID NO: 774777 - DNA, 25 bp, Homo sapien
gctttcatgagtgaggtgggtatcc

SEQ ID NO: 774778 - DNA, 25 bp, Homo sapien
tccccaatgatcaacactgtctgca

SEQ ID NO: 774779 - DNA, 25 bp, Homo sapien
cattgacacatcagcgcttaggagc

SEQ ID NO: 774780 - DNA, 25 bp, Homo sapien
tctcagcattgtagaaccccagtat

SEQ ID NO: 774781 - DNA, 25 bp, Homo sapien
cagtatttaggtccgtgtacccgat

SEQ ID NO: 774782 - DNA, 25 bp, Homo sapien
ccaaagcaagaaggcgggagacctg

SEQ ID NO: 774783 - DNA, 25 bp, Homo sapien
gggaatgaaattactgaagacaact

SEQ ID NO: 774784 - DNA, 25 bp, Homo sapien
agggaatgaaattactgaagacaac

SEQ ID NO: 774785 - DNA, 25 bp, Homo sapien
aaagggaatgaaattactgaagaca

SEQ ID NO: 774786 - DNA, 25 bp, Homo sapien
aagggaatgaaattactgaagacaa

SEQ ID NO: 774787 - DNA, 25 bp, Homo sapien
tcagagcactcagtttggcagagct

SEQ ID NO: 774788 - DNA, 25 bp, Homo sapien
tccaagagacattttgaggcctaaa

SEQ ID NO: 774789 - DNA, 25 bp, Homo sapien
gatcccaggaatactgacttgatga

SEQ ID NO: 774790 - DNA, 25 bp, Homo sapien
gcttttctgccgaatgtttactcac

SEQ ID NO: 774791 - DNA, 25 bp, Homo sapien
gaaaccttataagagtgagattatc

SEQ ID NO: 774792 - DNA, 25 bp, Homo sapien
tatcatgtacaagagtgagattatc

SEQ ID NO: 774793 - DNA, 25 bp, Homo sapien
gatgaaaccttataagagtgagatt

SEQ ID NO: 774794 - DNA, 25 bp, Homo sapien
tgaaaccttataagagtgagattat

SEQ ID NO: 774795 - DNA, 25 bp, Homo sapien
caggaaggtcggaatctctgatgtc

SEQ ID NO: 774796 - DNA, 25 bp, Homo sapien
tcaggaaggtcggaatctctgatgt

SEQ ID NO: 774797 - DNA, 25 bp, Homo sapien
atcaggaaggtcggaatctctgatg

SEQ ID NO: 774798 - DNA, 25 bp, Homo sapien
tccaatcaggaaggtcggaatctct

SEQ ID NO: 774799 - DNA, 25 bp, Homo sapien
aagagtatgttatcaattctcaagc

SEQ ID NO: 774800 - DNA, 25 bp, Homo sapien
agtatgttatcaattctcaagccta

SEQ ID NO: 774801 - DNA, 25 bp, Homo sapien
tgttgtccaactgatctccaggcac

SEQ ID NO: 774802 - DNA, 25 bp, Homo sapien
attctcaagcctaggagaagtcagg

SEQ ID NO: 774803 - DNA, 25 bp, Homo sapien
atctgtcccctcttacggaacctag

SEQ ID NO: 774804 - DNA, 25 bp, Homo sapien
cttacggaacctagtctccgttctg

SEQ ID NO: 774805 - DNA, 25 bp, Homo sapien
tacggaacctagtctccgttctgtc

SEQ ID NO: 774806 - DNA, 25 bp, Homo sapien
ctgagtaaagaaaccaggccactgt

SEQ ID NO: 774807 - DNA, 25 bp, Homo sapien
aagaaaccaggccactgtgtaatgc

SEQ ID NO: 774808 - DNA, 25 bp, Homo sapien
gtaaagaaaccaggccactgtgtaa

SEQ ID NO: 774809 - DNA, 25 bp, Homo sapien
gagtaaagaaaccaggccactgtgt

SEQ ID NO: 774810 - DNA, 25 bp, Homo sapien
atggggggctgggatctaccccagg

SEQ ID NO: 774811 - DNA, 25 bp, Homo sapien
acatggggggctgggatctacccca

SEQ ID NO: 774812 - DNA, 25 bp, Homo sapien
tacatggggggctgggatctacccc

SEQ ID NO: 774813 - DNA, 25 bp, Homo sapien
ctacatggggggctgggatctaccc

SEQ ID NO: 774814 - DNA, 25 bp, Homo sapien
tcctcctcagattcatctgaccact

SEQ ID NO: 774815 - DNA, 25 bp, Homo sapien
tcagattcatctgaccactccttct

SEQ ID NO: 774816 - DNA, 25 bp, Homo sapien
cctcagattcatctgaccactcctt

SEQ ID NO: 774817 - DNA, 25 bp, Homo sapien
agattcatctgaccactccttcttc

SEQ ID NO: 774818 - DNA, 25 bp, Homo sapien
gctgactgttgaagtccttgtggtg

SEQ ID NO: 774819 - DNA, 25 bp, Homo sapien
cagggaggatgggtgacactcgctg

SEQ ID NO: 774820 - DNA, 25 bp, Homo sapien
tgactgttgaagtccttgtggtgct

SEQ ID NO: 774821 - DNA, 25 bp, Homo sapien
aagctgactgttgaagtccttgtgg

SEQ ID NO: 774822 - DNA, 25 bp, Homo sapien
gtttcgctatattggtctggttggt

SEQ ID NO: 774823 - DNA, 25 bp, Homo sapien
tcaaagcaacctcttccacctgggt

SEQ ID NO: 774824 - DNA, 25 bp, Homo sapien
cgctatattggtctggttggtctcg

SEQ ID NO: 774825 - DNA, 25 bp, Homo sapien
tgttagtataaatgaggtttcgcta

SEQ ID NO: 774826 - DNA, 25 bp, Homo sapien
gcaaaaggacctatgcggggggctg

SEQ ID NO: 774827 - DNA, 25 bp, Homo sapien
ggctcaggggcgagcaccttccgtg

SEQ ID NO: 774828 - DNA, 25 bp, Homo sapien
ctcaggggcgagcaccttccgtggc

SEQ ID NO: 774829 - DNA, 25 bp, Homo sapien
caaaaggacctatgcggggggctgg

SEQ ID NO: 774830 - DNA, 25 bp, Homo sapien
tttatcaagttgacctaatccttta

SEQ ID NO: 774831 - DNA, 25 bp, Homo sapien
atcaagttgacctaatcctttatca

SEQ ID NO: 774832 - DNA, 25 bp, Homo sapien
cctttatcaagttgacctaatcctt

SEQ ID NO: 774833 - DNA, 25 bp, Homo sapien
tatcaagttgacctaatcctttatc

SEQ ID NO: 774834 - DNA, 25 bp, Homo sapien
gacagggtttccgtgggagcagcag

SEQ ID NO: 774835 - DNA, 25 bp, Homo sapien
agcagcagggcagcgagaagtgtgc

SEQ ID NO: 774836 - DNA, 25 bp, Homo sapien
gagaagcaggacagggtttccgtgg

SEQ ID NO: 774837 - DNA, 25 bp, Homo sapien
gattagagagcagatgtcagtgtga

SEQ ID NO: 774838 - DNA, 25 bp, Homo sapien
tcccaggccaggaatcttttaatga

SEQ ID NO: 774839 - DNA, 25 bp, Homo sapien
caggccaggaatcttttaatgacag

SEQ ID NO: 774840 - DNA, 25 bp, Homo sapien
gccaggaatcttttaatgacaggat

SEQ ID NO: 774841 - DNA, 25 bp, Homo sapien
ttgtccgacaccctcagatctttgt

SEQ ID NO: 774842 - DNA, 25 bp, Homo sapien
cttttgtgtgccaggcagagaactg

SEQ ID NO: 774843 - DNA, 25 bp, Homo sapien
ttttgtgtgccaggcagagaactgt

SEQ ID NO: 774844 - DNA, 25 bp, Homo sapien
tttgtgtgccaggcagagaactgtc

SEQ ID NO: 774845 - DNA, 25 bp, Homo sapien
gggtgtgtctgggtcggctggtgtc

SEQ ID NO: 774846 - DNA, 25 bp, Homo sapien
tctgggtcggctggtgtcaggaggg

SEQ ID NO: 774847 - DNA, 25 bp, Homo sapien
tgtctgggtcggctggtgtcaggag

SEQ ID NO: 774848 - DNA, 25 bp, Homo sapien
gagggggtgtgtctgggtcggctgg

SEQ ID NO: 774849 - DNA, 25 bp, Homo sapien
gaaggtcggatgcaaatccgagaag

SEQ ID NO: 774850 - DNA, 25 bp, Homo sapien
aaggtcggatgcaaatccgagaagc

SEQ ID NO: 774851 - DNA, 25 bp, Homo sapien
gaggccggcccggctgaaatacact

SEQ ID NO: 774852 - DNA, 25 bp, Homo sapien
gggaggccggcccggctgaaataca

SEQ ID NO: 774853 - DNA, 25 bp, Homo sapien
tacactatgaccatagccaggagat

SEQ ID NO: 774854 - DNA, 25 bp, Homo sapien
ggccggcccggctgaaatacactat

SEQ ID NO: 774855 - DNA, 25 bp, Homo sapien
atctttagtttaaaatcgaaatcac

SEQ ID NO: 774856 - DNA, 25 bp, Homo sapien
gtgatttcgattttaaactaaagat

SEQ ID NO: 774857 - DNA, 25 bp, Homo sapien
gagccacgccttcctcaggagggct

SEQ ID NO: 774858 - DNA, 25 bp, Homo sapien
tgcagagagccacgccttcctcagg

SEQ ID NO: 774859 - DNA, 25 bp, Homo sapien
ctgcagagagccacgccttcctcag

SEQ ID NO: 774860 - DNA, 25 bp, Homo sapien
agagagccacgccttcctcaggagg

SEQ ID NO: 774861 - DNA, 25 bp, Homo sapien
aagggaccgtccctagctcaggact

SEQ ID NO: 774862 - DNA, 25 bp, Homo sapien
gaccgtccctagctcaggactggca

SEQ ID NO: 774863 - DNA, 25 bp, Homo sapien
aggtaagggaccgtccctagctcag

SEQ ID NO: 774864 - DNA, 25 bp, Homo sapien
gggaccgtccctagctcaggactgg

SEQ ID NO: 774865 - DNA, 25 bp, Homo sapien
caggagaggcctccggctgaggtca

SEQ ID NO: 774866 - DNA, 25 bp, Homo sapien
accaccaggagaggcctccggctga

SEQ ID NO: 774867 - DNA, 25 bp, Homo sapien
ctgaggatagaaatcaggttgctgc

SEQ ID NO: 774868 - DNA, 25 bp, Homo sapien
aggatagaaatcaggttgctgctca

SEQ ID NO: 774869 - DNA, 25 bp, Homo sapien
cgagagcgggtcttcccatacagga

SEQ ID NO: 774870 - DNA, 25 bp, Homo sapien
atgcgagagcgggtcttcccataca

SEQ ID NO: 774871 - DNA, 25 bp, Homo sapien
gggtatgcgagagcgggtcttccca

SEQ ID NO: 774872 - DNA, 25 bp, Homo sapien
agcgggtcttcccatacaggaagtg

SEQ ID NO: 774873 - DNA, 25 bp, Homo sapien
tcatgcaacggcgtaactggaaccg

SEQ ID NO: 774874 - DNA, 25 bp, Homo sapien
tatgcgagagcggtacttcctggcc

SEQ ID NO: 774875 - DNA, 25 bp, Homo sapien
tgcaacggcgtaactggaaccgacg

SEQ ID NO: 774876 - DNA, 25 bp, Homo sapien
agggtatgcgagagcggtacttcct

SEQ ID NO: 774877 - DNA, 25 bp, Homo sapien
caagccctgccgctcatggaacaga

SEQ ID NO: 774878 - DNA, 25 bp, Homo sapien
ccctgccgctcatggaacagaagaa

SEQ ID NO: 774879 - DNA, 25 bp, Homo sapien
tggaaccgaagtttctggaacagga

SEQ ID NO: 774880 - DNA, 25 bp, Homo sapien
cagaagaactggaaccgaagtttct

SEQ ID NO: 774881 - DNA, 25 bp, Homo sapien
agtgctctgggtcataagcctggat

SEQ ID NO: 774882 - DNA, 25 bp, Homo sapien
cagtgctctgggtcataagcctgga

SEQ ID NO: 774883 - DNA, 25 bp, Homo sapien
ccagtgctctgggtcataagcctgg

SEQ ID NO: 774884 - DNA, 25 bp, Homo sapien
aaggtgagcgcgatctcgtgcccac

SEQ ID NO: 774885 - DNA, 25 bp, Homo sapien
ggtgagcgcgatctcgtgcccacac

SEQ ID NO: 774886 - DNA, 25 bp, Homo sapien
ctaggaaaggtgagcgcgatctcgt

SEQ ID NO: 774887 - DNA, 25 bp, Homo sapien
gaaaggtgagcgcgatctcgtgccc

SEQ ID NO: 774888 - DNA, 25 bp, Homo sapien
gttcctgctgaaaatccacatctcc

SEQ ID NO: 774889 - DNA, 25 bp, Homo sapien
tagatgatctgcacaaatggttcct

SEQ ID NO: 774890 - DNA, 25 bp, Homo sapien
ctggtgtctgccattagcattggaa

SEQ ID NO: 774891 - DNA, 25 bp, Homo sapien
ccacatctcccctgggtccggtgtt

SEQ ID NO: 774892 - DNA, 25 bp, Homo sapien
taaagatatcagtaagcaccaggag

SEQ ID NO: 774893 - DNA, 25 bp, Homo sapien
caattcaggtggatcattagaggtc

SEQ ID NO: 774894 - DNA, 25 bp, Homo sapien
gaggtatctaaatccaccaggagcc

SEQ ID NO: 774895 - DNA, 25 bp, Homo sapien
gaattgtgctgccttgaccaaaaga

SEQ ID NO: 774896 - DNA, 25 bp, Homo sapien
cgctcagaaaccgtccgaggctacg

SEQ ID NO: 774897 - DNA, 25 bp, Homo sapien
agaaaccgtccgaggctacgactgg

SEQ ID NO: 774898 - DNA, 25 bp, Homo sapien
gggcggacatctcccttgtgaccct

SEQ ID NO: 774899 - DNA, 25 bp, Homo sapien
actgggggcggacatctcccttgtg

SEQ ID NO: 774900 - DNA, 25 bp, Homo sapien
ccttgcacgttagagagccggtaca

SEQ ID NO: 774901 - DNA, 25 bp, Homo sapien
tcctgccttgcacgttagagagccg

SEQ ID NO: 774902 - DNA, 25 bp, Homo sapien
ctgtaggtggccaacgccgggcgct

SEQ ID NO: 774903 - DNA, 25 bp, Homo sapien
gcgccgcgcccgtgataaggtttta

SEQ ID NO: 774904 - DNA, 25 bp, Homo sapien
ggtcttgcttgtagctatccagcca

SEQ ID NO: 774905 - DNA, 25 bp, Homo sapien
cctggtcttgcttgtagctatccag

SEQ ID NO: 774906 - DNA, 25 bp, Homo sapien
tggtcttgcttgtagctatccagcc

SEQ ID NO: 774907 - DNA, 25 bp, Homo sapien
cttgcttgtagctatccagccactc

SEQ ID NO: 774908 - DNA, 25 bp, Homo sapien
ttaacaagctccagaaatcctgcat

SEQ ID NO: 774909 - DNA, 25 bp, Homo sapien
tgaaaaagttaacaagctccagaaa

SEQ ID NO: 774910 - DNA, 25 bp, Homo sapien
aagttaacaagctccagaaatcctg

SEQ ID NO: 774911 - DNA, 25 bp, Homo sapien
cacaagatcagatgaaaaagttaac

SEQ ID NO: 774912 - DNA, 25 bp, Homo sapien
tgcaaagagcttaggtggggaatca

SEQ ID NO: 774913 - DNA, 25 bp, Homo sapien
caactgtgtatctgctataaggcaa

SEQ ID NO: 774914 - DNA, 25 bp, Homo sapien
tggtcaacggtctgccaacatccaa

SEQ ID NO: 774915 - DNA, 25 bp, Homo sapien
tatgagcaaggaaacactgtgcaaa

SEQ ID NO: 774916 - DNA, 25 bp, Homo sapien
ggtgcttacgaggaaaataacagga

SEQ ID NO: 774917 - DNA, 25 bp, Homo sapien
ctaaagaatgaaggatatgaggtgc

SEQ ID NO: 774918 - DNA, 25 bp, Homo sapien
agggctcacagtgcctaaagaatga

SEQ ID NO: 774919 - DNA, 25 bp, Homo sapien
ggatatgaggtgcttacgaggaaaa

SEQ ID NO: 774920 - DNA, 25 bp, Homo sapien
gagctgtcagaggatagtcccccga

SEQ ID NO: 774921 - DNA, 25 bp, Homo sapien
ggttgtccatagggaagtcatcatg

SEQ ID NO: 774922 - DNA, 25 bp, Homo sapien
agctgtcagaggatagtcccccgag

SEQ ID NO: 774923 - DNA, 25 bp, Homo sapien
tgtccatagggaagtcatcatggag

SEQ ID NO: 774924 - DNA, 25 bp, Homo sapien
gattgatatcttcgtgcagactcag

SEQ ID NO: 774925 - DNA, 25 bp, Homo sapien
ctgattgatatcttcgtgcagactc

SEQ ID NO: 774926 - DNA, 25 bp, Homo sapien
tgattgatatcttcgtgcagactca

SEQ ID NO: 774927 - DNA, 25 bp, Homo sapien
ctatgaaactattgccagactccgt

SEQ ID NO: 774928 - DNA, 25 bp, Homo sapien
gcattgcaatgagcccttacaggat

SEQ ID NO: 774929 - DNA, 25 bp, Homo sapien
tgatcttgaaagactgcccagggcc

SEQ ID NO: 774930 - DNA, 25 bp, Homo sapien
gcatgacaggcaggtacagcactta

SEQ ID NO: 774931 - DNA, 25 bp, Homo sapien
caatgaattttcagtgtggactaaa

SEQ ID NO: 774932 - DNA, 25 bp, Homo sapien
ctaaactgccttatattggaaaatg

SEQ ID NO: 774933 - DNA, 25 bp, Homo sapien
gaattttcagtgtggactaaactgc

SEQ ID NO: 774934 - DNA, 25 bp, Homo sapien
aagctagaagttagttcatgaggtt

SEQ ID NO: 774935 - DNA, 25 bp, Homo sapien
tgattaagcttagaggccaggcgtg

SEQ ID NO: 774936 - DNA, 25 bp, Homo sapien
tccctattcattccttgagacataa

SEQ ID NO: 774937 - DNA, 25 bp, Homo sapien
gtctgtgttctgactaccctaccaa

SEQ ID NO: 774938 - DNA, 25 bp, Homo sapien
aataaccctcttaagtatccaaatg

SEQ ID NO: 774939 - DNA, 25 bp, Homo sapien
agaacccgtagagcacacatccatt

SEQ ID NO: 774940 - DNA, 25 bp, Homo sapien
cattgctattctaagaacccgtaga

SEQ ID NO: 774941 - DNA, 25 bp, Homo sapien
gaatgagtctgattatgaaggttca

SEQ ID NO: 774942 - DNA, 25 bp, Homo sapien
ggcagcttgacccaggaaagtaacc

SEQ ID NO: 774943 - DNA, 25 bp, Homo sapien
tgagcatgtaaacgtaccacctgat

SEQ ID NO: 774944 - DNA, 25 bp, Homo sapien
tatgatcttccatgacgaggtctga

SEQ ID NO: 774945 - DNA, 25 bp, Homo sapien
tgaaaacttagagcactcaccaggg

SEQ ID NO: 774946 - DNA, 25 bp, Homo sapien
catcagctgctatgagcctacgtga

SEQ ID NO: 774947 - DNA, 25 bp, Homo sapien
tgtgcacttatttcagtcagcttgt

SEQ ID NO: 774948 - DNA, 25 bp, Homo sapien
tagtgatgtgccttgaaagttcaaa

SEQ ID NO: 774949 - DNA, 25 bp, Homo sapien
ttagtgatgtgccttgaaagttcaa

SEQ ID NO: 774950 - DNA, 25 bp, Homo sapien
caaattcaaggtgtgcacttatttc

SEQ ID NO: 774951 - DNA, 25 bp, Homo sapien
gattttgacgtatgattaagcagca

SEQ ID NO: 774952 - DNA, 25 bp, Homo sapien
tccaactcctgtgttagggagaggc

SEQ ID NO: 774953 - DNA, 25 bp, Homo sapien
gattattatagaagagtgtcctgac

SEQ ID NO: 774954 - DNA, 25 bp, Homo sapien
ccttagcatgcaagagcagatttta

SEQ ID NO: 774955 - DNA, 25 bp, Homo sapien
aaagtcagatcatgccaaagaattc

SEQ ID NO: 774956 - DNA, 25 bp, Homo sapien
taagtttagagcaagctactaatgg

SEQ ID NO: 774957 - DNA, 25 bp, Homo sapien
caagttgctcacattttagttggaa

SEQ ID NO: 774958 - DNA, 25 bp, Homo sapien
tttccttatatggtgtcagctaata

SEQ ID NO: 774959 - DNA, 25 bp, Homo sapien
tgatggttctatgaaacctaactga

SEQ ID NO: 774960 - DNA, 25 bp, Homo sapien
cttgatggttctatgaaacctaact

SEQ ID NO: 774961 - DNA, 25 bp, Homo sapien
atggttctatgaaacctaactgact

SEQ ID NO: 774962 - DNA, 25 bp, Homo sapien
gatggttctatgaaacctaactgac

SEQ ID NO: 774963 - DNA, 25 bp, Homo sapien
atcctgcagttgaataacttgaatt

SEQ ID NO: 774964 - DNA, 25 bp, Homo sapien
gttgaataacttgaattttaggctc

SEQ ID NO: 774965 - DNA, 25 bp, Homo sapien
gaataacttgaattttaggctcacc

SEQ ID NO: 774966 - DNA, 25 bp, Homo sapien
tgcagttgaataacttgaattttag

SEQ ID NO: 774967 - DNA, 25 bp, Homo sapien
ttggccaggctcagaagaagtattt

SEQ ID NO: 774968 - DNA, 25 bp, Homo sapien
tgcaccagtgctaaaatggatatac

SEQ ID NO: 774969 - DNA, 25 bp, Homo sapien
ttctcaaagttacacaacgttccac

SEQ ID NO: 774970 - DNA, 25 bp, Homo sapien
taggaattaacaggaagcagtacgc

SEQ ID NO: 774971 - DNA, 25 bp, Homo sapien
gcctttgtacgtgaagatgaacgca

SEQ ID NO: 774972 - DNA, 25 bp, Homo sapien
tactctgacccatttagaaatagcc

SEQ ID NO: 774973 - DNA, 25 bp, Homo sapien
gccatcagcatgtatcagccaaagc

SEQ ID NO: 774974 - DNA, 25 bp, Homo sapien
acaggaggctcatgttctcacaaca

SEQ ID NO: 774975 - DNA, 25 bp, Homo sapien
actggatgaagggtgcacatgacct

SEQ ID NO: 774976 - DNA, 25 bp, Homo sapien
caggtcatgcttctatttgcaggac

SEQ ID NO: 774977 - DNA, 25 bp, Homo sapien
tctgtctctatagcggagaaaacca

SEQ ID NO: 774978 - DNA, 25 bp, Homo sapien
tggttactcgaagctacacatgtga

SEQ ID NO: 774979 - DNA, 25 bp, Homo sapien
cagactgtgatataagcatgctata

SEQ ID NO: 774980 - DNA, 25 bp, Homo sapien
tacagcaataaagactaacaaactg

SEQ ID NO: 774981 - DNA, 25 bp, Homo sapien
tgggtgaatggttggacagactgtg

SEQ ID NO: 774982 - DNA, 25 bp, Homo sapien
tattatgggtaacaacctggatgaa

SEQ ID NO: 774983 - DNA, 25 bp, Homo sapien
agacctcttcttggcctatttcctc

SEQ ID NO: 774984 - DNA, 25 bp, Homo sapien
cacttagaggcaatttttgggttca

SEQ ID NO: 774985 - DNA, 25 bp, Homo sapien
cgtgtgtcggaaatctttctgaaac

SEQ ID NO: 774986 - DNA, 25 bp, Homo sapien
taccagttccacttcaagacctctt

SEQ ID NO: 774987 - DNA, 25 bp, Homo sapien
tgtccttaatctaggccctttcaaa

SEQ ID NO: 774988 - DNA, 25 bp, Homo sapien
taagactaaatacatcaggagctca

SEQ ID NO: 774989 - DNA, 25 bp, Homo sapien
ccaacaggattttaatttagtcaca

SEQ ID NO: 774990 - DNA, 25 bp, Homo sapien
ccagctgaccatcctacaatcttaa

SEQ ID NO: 774991 - DNA, 25 bp, Homo sapien
cagaaagagggcctacttttgctca

SEQ ID NO: 774992 - DNA, 25 bp, Homo sapien
gggtctccattgaaggaatcctaca

SEQ ID NO: 774993 - DNA, 25 bp, Homo sapien
gatatctgcatgtttgagaaagtac

SEQ ID NO: 774994 - DNA, 25 bp, Homo sapien
aaccactttcatattgtcagatctg

SEQ ID NO: 774995 - DNA, 25 bp, Homo sapien
tttttatgtaactcgcaaacttcac

SEQ ID NO: 774996 - DNA, 25 bp, Homo sapien
gagaccggaagtgctaccaaactcc

SEQ ID NO: 774997 - DNA, 25 bp, Homo sapien
acttcacaagtgtggagtctgagac

SEQ ID NO: 774998 - DNA, 25 bp, Homo sapien
agtctgagaccggaagtgctaccaa

SEQ ID NO: 774999 - DNA, 25 bp, Homo sapien
tccttgctaagcataaatggtagag

SEQ ID NO: 775000 - DNA, 25 bp, Homo sapien
tatactcatgtaattatagacctcg

SEQ ID NO: 775001 - DNA, 25 bp, Homo sapien
aattagagaggtccttcatgttcaa

SEQ ID NO: 775002 - DNA, 25 bp, Homo sapien
tgttcaataactaactgcaggagca

SEQ ID NO: 775003 - DNA, 25 bp, Homo sapien
cttgatcgtcaagccgtgagatgcg

SEQ ID NO: 775004 - DNA, 25 bp, Homo sapien
gtgagatgcgtgatctctctgcaca

SEQ ID NO: 775005 - DNA, 25 bp, Homo sapien
ccttttctatgaagaccgaggcttt

SEQ ID NO: 775006 - DNA, 25 bp, Homo sapien
aggctttgcccccttgatcgtcaag

SEQ ID NO: 775007 - DNA, 25 bp, Homo sapien
tgacaggtaaaaaaattcctgtaga

SEQ ID NO: 775008 - DNA, 25 bp, Homo sapien
aaattcctgtagaataaagccagac

SEQ ID NO: 775009 - DNA, 25 bp, Homo sapien
aaaaattcctgtagaataaagccag

SEQ ID NO: 775010 - DNA, 25 bp, Homo sapien
ctgacaggtaaaaaaattcctgtag

SEQ ID NO: 775011 - DNA, 25 bp, Homo sapien
agttgtacccgtcagcacctgctga

SEQ ID NO: 775012 - DNA, 25 bp, Homo sapien
gaagttgtacccgtcagcacctgct

SEQ ID NO: 775013 - DNA, 25 bp, Homo sapien
ttgtacccgtcagcacctgctgagg

SEQ ID NO: 775014 - DNA, 25 bp, Homo sapien
caggaagttgtacccgtcagcacct

SEQ ID NO: 775015 - DNA, 25 bp, Homo sapien
aaaacatgctttaataccgtcttgg

SEQ ID NO: 775016 - DNA, 25 bp, Homo sapien
catgttcttgtagcatgcacacatt

SEQ ID NO: 775017 - DNA, 25 bp, Homo sapien
taaagttaattgcatgttctctcta

SEQ ID NO: 775018 - DNA, 25 bp, Homo sapien
gaaaatagtatgtaccattacacct

SEQ ID NO: 775019 - DNA, 25 bp, Homo sapien
gtaagctacgatggcaccattgcgc

SEQ ID NO: 775020 - DNA, 25 bp, Homo sapien
aagctacgatggcaccattgcgctc

SEQ ID NO: 775021 - DNA, 25 bp, Homo sapien
taagctacgatggcaccattgcgct

SEQ ID NO: 775022 - DNA, 25 bp, Homo sapien
tactgacgtttggcattgcctttat

SEQ ID NO: 775023 - DNA, 25 bp, Homo sapien
cttctctctccgaagagtaagcatg

SEQ ID NO: 775024 - DNA, 25 bp, Homo sapien
ggctgaggcgttcagatacttcact

SEQ ID NO: 775025 - DNA, 25 bp, Homo sapien
aagagtaagcatgacggcccagtgc

SEQ ID NO: 775026 - DNA, 25 bp, Homo sapien
tcaaggcagttaaggccagcatgcc

SEQ ID NO: 775027 - DNA, 25 bp, Homo sapien
taaaggcacaaacttctggtagctc

SEQ ID NO: 775028 - DNA, 25 bp, Homo sapien
ggagctgtgcgcatgtctcaggcaa

SEQ ID NO: 775029 - DNA, 25 bp, Homo sapien
catgtgttacctccaggtcaaggca

SEQ ID NO: 775030 - DNA, 25 bp, Homo sapien
gcctcttctcccttcgctcagcact

SEQ ID NO: 775031 - DNA, 25 bp, Homo sapien
caagggatctgtagccccgttgttt

SEQ ID NO: 775032 - DNA, 25 bp, Homo sapien
gatttcagacttgcaagggatctgt

SEQ ID NO: 775033 - DNA, 25 bp, Homo sapien
gacttgcaagggatctgtagccccg

SEQ ID NO: 775034 - DNA, 25 bp, Homo sapien
gggtatactgacaaggcacgttttc

SEQ ID NO: 775035 - DNA, 25 bp, Homo sapien
caaggcacgttttccgatttgtaga

SEQ ID NO: 775036 - DNA, 25 bp, Homo sapien
tactgacaaggcacgttttccgatt

SEQ ID NO: 775037 - DNA, 25 bp, Homo sapien
gcacgttttccgatttgtagagtta

SEQ ID NO: 775038 - DNA, 25 bp, Homo sapien
aatttctttgtagagatgaggtctt

SEQ ID NO: 775039 - DNA, 25 bp, Homo sapien
cacctggccctgacaaattattttt

SEQ ID NO: 775040 - DNA, 25 bp, Homo sapien
gctatgttgtccagtctggtctcaa

SEQ ID NO: 775041 - DNA, 25 bp, Homo sapien
ctgcacctggccctgacaaattatt

SEQ ID NO: 775042 - DNA, 25 bp, Homo sapien
tggctcaactcacccaccaagtagt

SEQ ID NO: 775043 - DNA, 25 bp, Homo sapien
tgcatttgatagagcagctggcccc

SEQ ID NO: 775044 - DNA, 25 bp, Homo sapien
gaagacagcatgtacccactacgat

SEQ ID NO: 775045 - DNA, 25 bp, Homo sapien
tctgacaaatcagcactcccgggtc

SEQ ID NO: 775046 - DNA, 25 bp, Homo sapien
aataccagaggtttgttgccccaca

SEQ ID NO: 775047 - DNA, 25 bp, Homo sapien
gagaaattgaggatgcagacacaca

SEQ ID NO: 775048 - DNA, 25 bp, Homo sapien
gacttctgtaaaacgtcatggcact

SEQ ID NO: 775049 - DNA, 25 bp, Homo sapien
catacgcatagcagcagcttgggat

SEQ ID NO: 775050 - DNA, 25 bp, Homo sapien
caaggtgctagcaagccctgtgtct

SEQ ID NO: 775051 - DNA, 25 bp, Homo sapien
actttgcccaaccaaagcactgaga

SEQ ID NO: 775052 - DNA, 25 bp, Homo sapien
taacggcactaatcctatttgtagg

SEQ ID NO: 775053 - DNA, 25 bp, Homo sapien
tgagagcccattccctgagttgtag

SEQ ID NO: 775054 - DNA, 25 bp, Homo sapien
taagggctatgcaatagcagccacc

SEQ ID NO: 775055 - DNA, 25 bp, Homo sapien
aatgccccggtgtcatttctatgtc

SEQ ID NO: 775056 - DNA, 25 bp, Homo sapien
ttctatgtctcccatggttggtgcc

SEQ ID NO: 775057 - DNA, 25 bp, Homo sapien
ccaggtttaatgccccggtgtcatt

SEQ ID NO: 775058 - DNA, 25 bp, Homo sapien
ccctcagtgagcttgtacggataag

SEQ ID NO: 775059 - DNA, 25 bp, Homo sapien
agtgagcttgtacggataaggctcc

SEQ ID NO: 775060 - DNA, 25 bp, Homo sapien
ctcagtgagcttgtacggataaggc

SEQ ID NO: 775061 - DNA, 25 bp, Homo sapien
gccctcagtgagcttgtacggataa

SEQ ID NO: 775062 - DNA, 25 bp, Homo sapien
tcatttcgcaccctggcagcattct

SEQ ID NO: 775063 - DNA, 25 bp, Homo sapien
ttctgggaaatctcatttcgcaccc

SEQ ID NO: 775064 - DNA, 25 bp, Homo sapien
cagaggcccctttagcccactgaat

SEQ ID NO: 775065 - DNA, 25 bp, Homo sapien
cccctttagcccactgaatggcttt

SEQ ID NO: 775066 - DNA, 25 bp, Homo sapien
gtatgggctccaagggatgcagcat

SEQ ID NO: 775067 - DNA, 25 bp, Homo sapien
gggctccaagggatgcagcatgcat

SEQ ID NO: 775068 - DNA, 25 bp, Homo sapien
tccaggtatgggctccaagggatgc

SEQ ID NO: 775069 - DNA, 25 bp, Homo sapien
ccaggtatgggctccaagggatgca

SEQ ID NO: 775070 - DNA, 25 bp, Homo sapien
gctgtgacccatcatgaccctctgg

SEQ ID NO: 775071 - DNA, 25 bp, Homo sapien
tcctcttctggttgctctaaagcca

SEQ ID NO: 775072 - DNA, 25 bp, Homo sapien
ctaaagccacgtggccttgctgtga

SEQ ID NO: 775073 - DNA, 25 bp, Homo sapien
tgtgacccatcatgaccctctggca

SEQ ID NO: 775074 - DNA, 25 bp, Homo sapien
agacagattaataaagccatggcca

SEQ ID NO: 775075 - DNA, 25 bp, Homo sapien
acataaagggactgctccagtgcaa

SEQ ID NO: 775076 - DNA, 25 bp, Homo sapien
catggccacataaagggactgctcc

SEQ ID NO: 775077 - DNA, 25 bp, Homo sapien
taataaagccatggccacataaagg

SEQ ID NO: 775078 - DNA, 25 bp, Homo sapien
tggcaatctctcgaaagcgcaatct

SEQ ID NO: 775079 - DNA, 25 bp, Homo sapien
caatctgaagtgcattcggatgttt

SEQ ID NO: 775080 - DNA, 25 bp, Homo sapien
tctcgaaagcgcaatctgaagtgca

SEQ ID NO: 775081 - DNA, 25 bp, Homo sapien
cattcggatgtttaagggactgtga

SEQ ID NO: 775082 - DNA, 25 bp, Homo sapien
tgcattctgaattctctccaggagc

SEQ ID NO: 775083 - DNA, 25 bp, Homo sapien
cctctctctgttgcattctgaattc

SEQ ID NO: 775084 - DNA, 25 bp, Homo sapien
tagcctctctctgttgcattctgaa

SEQ ID NO: 775085 - DNA, 25 bp, Homo sapien
ctagcctctctctgttgcattctga

SEQ ID NO: 775086 - DNA, 25 bp, Homo sapien
ctgtgggtgtccaatgacagagacg

SEQ ID NO: 775087 - DNA, 25 bp, Homo sapien
tgtgggtgtccaatgacagagacgc

SEQ ID NO: 775088 - DNA, 25 bp, Homo sapien
cacagatgtgcaccgaagacaagca

SEQ ID NO: 775089 - DNA, 25 bp, Homo sapien
cactggacccggctttcttgaacaa

SEQ ID NO: 775090 - DNA, 25 bp, Homo sapien
cgctggcacggaaaacaggagcatc

SEQ ID NO: 775091 - DNA, 25 bp, Homo sapien
gagcatctgccggaatccatgggca

SEQ ID NO: 775092 - DNA, 25 bp, Homo sapien
atgggccaacagcacggtagggttc

SEQ ID NO: 775093 - DNA, 25 bp, Homo sapien
caacagcacggtagggttctgcagg

SEQ ID NO: 775094 - DNA, 25 bp, Homo sapien
gccaacagcacggtagggttctgca

SEQ ID NO: 775095 - DNA, 25 bp, Homo sapien
accctgatgggccaacagcacggta

SEQ ID NO: 775096 - DNA, 25 bp, Homo sapien
ttcatggaggccattgaggcttgga

SEQ ID NO: 775097 - DNA, 25 bp, Homo sapien
tgagtttcatggaggccattgaggc

SEQ ID NO: 775098 - DNA, 25 bp, Homo sapien
tcctgaatcttcatgggtgaggaca

SEQ ID NO: 775099 - DNA, 25 bp, Homo sapien
ttactgagtttcatggaggccattg

SEQ ID NO: 775100 - DNA, 25 bp, Homo sapien
tcctttcctgctattgcactcggct

SEQ ID NO: 775101 - DNA, 25 bp, Homo sapien
tacactgctgaacatggagttgttc

SEQ ID NO: 775102 - DNA, 25 bp, Homo sapien
tattgcactcggctttgggactctg

SEQ ID NO: 775103 - DNA, 25 bp, Homo sapien
ttctgccttttcacgtctgtgcaca

SEQ ID NO: 775104 - DNA, 25 bp, Homo sapien
tccagaaaccaggttgggctcccca

SEQ ID NO: 775105 - DNA, 25 bp, Homo sapien
cttaaggcaattaagtctccagaaa

SEQ ID NO: 775106 - DNA, 25 bp, Homo sapien
ttcttaaggcaattaagtctccaga

SEQ ID NO: 775107 - DNA, 25 bp, Homo sapien
cagaaaccaggttgggctccccaga

SEQ ID NO: 775108 - DNA, 25 bp, Homo sapien
ctacctcatggcagatatagcccca

SEQ ID NO: 775109 - DNA, 25 bp, Homo sapien
cctcatggcagatatagccccagga

SEQ ID NO: 775110 - DNA, 25 bp, Homo sapien
tcatggcagatatagccccaggaag

SEQ ID NO: 775111 - DNA, 25 bp, Homo sapien
tacctcatggcagatatagccccag

SEQ ID NO: 775112 - DNA, 25 bp, Homo sapien
actctgcaacactcatgtccagacc

SEQ ID NO: 775113 - DNA, 25 bp, Homo sapien
tcactctgcaacactcatgtccaga

SEQ ID NO: 775114 - DNA, 25 bp, Homo sapien
tctgcaacactcatgtccagacccc

SEQ ID NO: 775115 - DNA, 25 bp, Homo sapien
ctgcaacactcatgtccagacccca

SEQ ID NO: 775116 - DNA, 25 bp, Homo sapien
tggcctccatcaatgacaaccaggt

SEQ ID NO: 775117 - DNA, 25 bp, Homo sapien
gcctccatcaatgacaaccaggtcg

SEQ ID NO: 775118 - DNA, 25 bp, Homo sapien
cgtggcctccatcaatgacaaccag

SEQ ID NO: 775119 - DNA, 25 bp, Homo sapien
gtggcctccatcaatgacaaccagg

SEQ ID NO: 775120 - DNA, 25 bp, Homo sapien
ccagcatctcagcattacaatcaac

SEQ ID NO: 775121 - DNA, 25 bp, Homo sapien
gacattgcaatgacggcacactcaa

SEQ ID NO: 775122 - DNA, 25 bp, Homo sapien
tcacagcctctataaaacccgacat

SEQ ID NO: 775123 - DNA, 25 bp, Homo sapien
tgttaggacacaacatcacagcctc

SEQ ID NO: 775124 - DNA, 25 bp, Homo sapien
ttcctattgagaccaccaaattggg

SEQ ID NO: 775125 - DNA, 25 bp, Homo sapien
ttcctggtcgagtcttcacttcttt

SEQ ID NO: 775126 - DNA, 25 bp, Homo sapien
tttcttcctattgagaccaccaaat

SEQ ID NO: 775127 - DNA, 25 bp, Homo sapien
tgtttcctggtcgagtcttcacttc

SEQ ID NO: 775128 - DNA, 25 bp, Homo sapien
tgagcactcacggactcactgagaa

SEQ ID NO: 775129 - DNA, 25 bp, Homo sapien
tgggatcatcacacaaaggcttgct

SEQ ID NO: 775130 - DNA, 25 bp, Homo sapien
gctggcaggatccatccagctggtg

SEQ ID NO: 775131 - DNA, 25 bp, Homo sapien
cagccggctgtgatgatgatgtcca

SEQ ID NO: 775132 - DNA, 25 bp, Homo sapien
ctccaagacacaggggagcagggag

SEQ ID NO: 775133 - DNA, 25 bp, Homo sapien
acacaggggagcagggagcctttca

SEQ ID NO: 775134 - DNA, 25 bp, Homo sapien
caagacacaggggagcagggagcct

SEQ ID NO: 775135 - DNA, 25 bp, Homo sapien
acaggggagcagggagcctttcacc

SEQ ID NO: 775136 - DNA, 25 bp, Homo sapien
gccttttccttccaaagcagaactg

SEQ ID NO: 775137 - DNA, 25 bp, Homo sapien
catggcagaaagaagcataggtggc

SEQ ID NO: 775138 - DNA, 25 bp, Homo sapien
tggcatcagggtgggtgtaacacca

SEQ ID NO: 775139 - DNA, 25 bp, Homo sapien
ctgacagtaaaagccagaacatggc

SEQ ID NO: 775140 - DNA, 25 bp, Homo sapien
gatactagaggttagggcgtcaacc

SEQ ID NO: 775141 - DNA, 25 bp, Homo sapien
ggcgtcaacctatcttttccgggca

SEQ ID NO: 775142 - DNA, 25 bp, Homo sapien
tagagaccacatcatgacatgttcc

SEQ ID NO: 775143 - DNA, 25 bp, Homo sapien
ccacaacagttaccaaatcttggaa

SEQ ID NO: 775144 - DNA, 25 bp, Homo sapien
cttcatctttagactgaatttccat

SEQ ID NO: 775145 - DNA, 25 bp, Homo sapien
ggtgggctggattagtgagtatccc

SEQ ID NO: 775146 - DNA, 25 bp, Homo sapien
aaggtgggctggattagtgagtatc

SEQ ID NO: 775147 - DNA, 25 bp, Homo sapien
tgggctggattagtgagtatcccat

SEQ ID NO: 775148 - DNA, 25 bp, Homo sapien
agaaggtgggctggattagtgagta

SEQ ID NO: 775149 - DNA, 25 bp, Homo sapien
tactcctgttgatatcggaatttct

SEQ ID NO: 775150 - DNA, 25 bp, Homo sapien
actcctgttgatatcggaatttctt

SEQ ID NO: 775151 - DNA, 25 bp, Homo sapien
gaaataaggttagcgaatgatgaga

SEQ ID NO: 775152 - DNA, 25 bp, Homo sapien
agaaatgcagcccacaacaactcag

SEQ ID NO: 775153 - DNA, 25 bp, Homo sapien
tgactttgggtagaacataaacttg

SEQ ID NO: 775154 - DNA, 25 bp, Homo sapien
cacaacaactcagtggaaatgaatg

SEQ ID NO: 775155 - DNA, 25 bp, Homo sapien
gcaacagggatgtgggctgttccaa

SEQ ID NO: 775156 - DNA, 25 bp, Homo sapien
aacgggcactggtctgttcatcctc

SEQ ID NO: 775157 - DNA, 25 bp, Homo sapien
aggtcagcgccttcccttggtcaac

SEQ ID NO: 775158 - DNA, 25 bp, Homo sapien
caacgactgtctttggtccagagca

SEQ ID NO: 775159 - DNA, 25 bp, Homo sapien
tccctagtggtagtaggagtatccc

SEQ ID NO: 775160 - DNA, 25 bp, Homo sapien
gaagtgcccagaaatgggccagagg

SEQ ID NO: 775161 - DNA, 25 bp, Homo sapien
agtagtgtccctagtggtagtagga

SEQ ID NO: 775162 - DNA, 25 bp, Homo sapien
tcaatacaggaaccgagtgtgaggg

SEQ ID NO: 775163 - DNA, 25 bp, Homo sapien
gatatttcttgcctcgctctgtgca

SEQ ID NO: 775164 - DNA, 25 bp, Homo sapien
caaaaagcggtatccatcagaatca

SEQ ID NO: 775165 - DNA, 25 bp, Homo sapien
tgggacagaagcagtcacctctttg

SEQ ID NO: 775166 - DNA, 25 bp, Homo sapien
tgtgcataccacttacttccaggtc

SEQ ID NO: 775167 - DNA, 25 bp, Homo sapien
tcttctatgaggaccagatgctact

SEQ ID NO: 775168 - DNA, 25 bp, Homo sapien
tggctgccacccaaagaagggaacg

SEQ ID NO: 775169 - DNA, 25 bp, Homo sapien
tggcgaggaatcctgtggctgccac

SEQ ID NO: 775170 - DNA, 25 bp, Homo sapien
gaacgaattctttgtcaccacatgg

SEQ ID NO: 775171 - DNA, 25 bp, Homo sapien
tccaatctagccggaggtccttggg

SEQ ID NO: 775172 - DNA, 25 bp, Homo sapien
tgaagtcccacacataacagtcact

SEQ ID NO: 775173 - DNA, 25 bp, Homo sapien
gctttgaagtcccacacataacagt

SEQ ID NO: 775174 - DNA, 25 bp, Homo sapien
cacataacagtcactcaagaaaggt

SEQ ID NO: 775175 - DNA, 25 bp, Homo sapien
gaaaaccacatcacatcagagggca

SEQ ID NO: 775176 - DNA, 25 bp, Homo sapien
gacgatgagtgttccccttaatcaa

SEQ ID NO: 775177 - DNA, 25 bp, Homo sapien
cggagatgccatcaaccagggctgg

SEQ ID NO: 775178 - DNA, 25 bp, Homo sapien
ccaaattgtccttcacagcaagagt

SEQ ID NO: 775179 - DNA, 25 bp, Homo sapien
cattgcagctgtactcagtccttcc

SEQ ID NO: 775180 - DNA, 25 bp, Homo sapien
aaagtacaggtataagttgctggca

SEQ ID NO: 775181 - DNA, 25 bp, Homo sapien
catgacctccagatttgacaaccac

SEQ ID NO: 775182 - DNA, 25 bp, Homo sapien
gaaattcaatgcctgaaagtacagg

SEQ ID NO: 775183 - DNA, 25 bp, Homo sapien
gggtgtcataagcagattaccacca

SEQ ID NO: 775184 - DNA, 25 bp, Homo sapien
catccaaatgcatgatactgccaca

SEQ ID NO: 775185 - DNA, 25 bp, Homo sapien
ataagtctgaagtttcccacgggat

SEQ ID NO: 775186 - DNA, 25 bp, Homo sapien
agtctgaagtttcccacgggattgg

SEQ ID NO: 775187 - DNA, 25 bp, Homo sapien
tcccaatttgagctgtttgccctag

SEQ ID NO: 775188 - DNA, 25 bp, Homo sapien
aaaatggcattgtcactcccaattt

SEQ ID NO: 775189 - DNA, 25 bp, Homo sapien
gagctgtttgccctagttcagcata

SEQ ID NO: 775190 - DNA, 25 bp, Homo sapien
tgtcactcccaatttgagctgtttg

SEQ ID NO: 775191 - DNA, 25 bp, Homo sapien
gcgttaataatgttcgtgcatctca

SEQ ID NO: 775192 - DNA, 25 bp, Homo sapien
tttcagcaaagtggcgttaataatg

SEQ ID NO: 775193 - DNA, 25 bp, Homo sapien
aaggcattagtctgagtgtgctgca

SEQ ID NO: 775194 - DNA, 25 bp, Homo sapien
gaaagcagcaaatgccataaggcat

SEQ ID NO: 775195 - DNA, 25 bp, Homo sapien
ggtacaagttgtttttctggatgga

SEQ ID NO: 775196 - DNA, 25 bp, Homo sapien
gtggtacaagttgtttttctggatg

SEQ ID NO: 775197 - DNA, 25 bp, Homo sapien
tagtggtacaagttgtttttctgga

SEQ ID NO: 775198 - DNA, 25 bp, Homo sapien
tacaagttgtttttctggatggagc

SEQ ID NO: 775199 - DNA, 25 bp, Homo sapien
ctcggtgtgtaaattctaaaaatgc

SEQ ID NO: 775200 - DNA, 25 bp, Homo sapien
ccttaaccttcagggtccactccat

SEQ ID NO: 775201 - DNA, 25 bp, Homo sapien
ttgctctctcggtgtgtaaattcta

SEQ ID NO: 775202 - DNA, 25 bp, Homo sapien
tgattctgatttaggaccttaacct

SEQ ID NO: 775203 - DNA, 25 bp, Homo sapien
ccagtcgatttccagggtgagctgg

SEQ ID NO: 775204 - DNA, 25 bp, Homo sapien
cagccagtcgatttccagggtgagc

SEQ ID NO: 775205 - DNA, 25 bp, Homo sapien
gccagtcgatttccagggtgagctg

SEQ ID NO: 775206 - DNA, 25 bp, Homo sapien
cccagccagtcgatttccagggtga

SEQ ID NO: 775207 - DNA, 25 bp, Homo sapien
tgtcatggaagtagaggcttactag

SEQ ID NO: 775208 - DNA, 25 bp, Homo sapien
gcttactagtagtgtaaagatgtag

SEQ ID NO: 775209 - DNA, 25 bp, Homo sapien
gcattagtaagtggccagctgtaac

SEQ ID NO: 775210 - DNA, 25 bp, Homo sapien
aagatgtaggcctgaaaaagggcta

SEQ ID NO: 775211 - DNA, 25 bp, Homo sapien
taagatcattccatatggaagaact

SEQ ID NO: 775212 - DNA, 25 bp, Homo sapien
ggaagaactttttggatgattgatg

SEQ ID NO: 775213 - DNA, 25 bp, Homo sapien
agaactttttggatgattgatgtat

SEQ ID NO: 775214 - DNA, 25 bp, Homo sapien
ataagatcattccatatggaagaac

SEQ ID NO: 775215 - DNA, 25 bp, Homo sapien
tgcttttcggtccagtatttcccaa

SEQ ID NO: 775216 - DNA, 25 bp, Homo sapien
cttttgatgtctttgttggaggaaa

SEQ ID NO: 775217 - DNA, 25 bp, Homo sapien
tgtcagatgaggctttccaagttcc

SEQ ID NO: 775218 - DNA, 25 bp, Homo sapien
gaaccaagtcaatccagcaaatgcc

SEQ ID NO: 775219 - DNA, 25 bp, Homo sapien
tgaaggtgaaattctgctcacagaa

SEQ ID NO: 775220 - DNA, 25 bp, Homo sapien
tcaagcttgtacagacatgaccaag

SEQ ID NO: 775221 - DNA, 25 bp, Homo sapien
ccatttgacagttagtgcaggtgat

SEQ ID NO: 775222 - DNA, 25 bp, Homo sapien
gctcacagaagctggttttaatcat

SEQ ID NO: 775223 - DNA, 25 bp, Homo sapien
ggcagccatcttgagcatgtgcaag

SEQ ID NO: 775224 - DNA, 25 bp, Homo sapien
gcctactgccttcagatgacacaga

SEQ ID NO: 775225 - DNA, 25 bp, Homo sapien
agcatgtgcaagtagcagccatctt

SEQ ID NO: 775226 - DNA, 25 bp, Homo sapien
agatctgttctctcaacacgcaatg

SEQ ID NO: 775227 - DNA, 25 bp, Homo sapien
ccacccatgtccagtagcttggctg

SEQ ID NO: 775228 - DNA, 25 bp, Homo sapien
ttttcccccacccatgtccagtagc

SEQ ID NO: 775229 - DNA, 25 bp, Homo sapien
acccatgtccagtagcttggctgca

SEQ ID NO: 775230 - DNA, 25 bp, Homo sapien
ccccacccatgtccagtagcttggc

SEQ ID NO: 775231 - DNA, 25 bp, Homo sapien
gctgagctgatgtcatcaattcaca

SEQ ID NO: 775232 - DNA, 25 bp, Homo sapien
gggctgagctgatgtcatcaattca

SEQ ID NO: 775233 - DNA, 25 bp, Homo sapien
ggggctgagctgatgtcatcaattc

SEQ ID NO: 775234 - DNA, 25 bp, Homo sapien
ctgagctgatgtcatcaattcacat

SEQ ID NO: 775235 - DNA, 25 bp, Homo sapien
agagtgaagcatatcccggacttct

SEQ ID NO: 775236 - DNA, 25 bp, Homo sapien
gagtgaagcatatcccggacttctc

SEQ ID NO: 775237 - DNA, 25 bp, Homo sapien
cagagtgaagcatatcccggacttc

SEQ ID NO: 775238 - DNA, 25 bp, Homo sapien
tcagagtgaagcatatcccggactt

SEQ ID NO: 775239 - DNA, 25 bp, Homo sapien
ctggtgagaagtccgggatatgctt

SEQ ID NO: 775240 - DNA, 25 bp, Homo sapien
gctggtgagaagtccgggatatgct

SEQ ID NO: 775241 - DNA, 25 bp, Homo sapien
ggtgagaagtccgggatatgcttca

SEQ ID NO: 775242 - DNA, 25 bp, Homo sapien
tgagaagtccgggatatgcttcact

SEQ ID NO: 775243 - DNA, 25 bp, Homo sapien
cctgctcttttgagctcgtctacat

SEQ ID NO: 775244 - DNA, 25 bp, Homo sapien
ataattcccgaatctgagcaccaca

SEQ ID NO: 775245 - DNA, 25 bp, Homo sapien
gctcttttgagctcgtctacatcca

SEQ ID NO: 775246 - DNA, 25 bp, Homo sapien
tacatccaaggcacttccccataat

SEQ ID NO: 775247 - DNA, 25 bp, Homo sapien
gacccaacgaggactctgtgtggct

SEQ ID NO: 775248 - DNA, 25 bp, Homo sapien
ttcagcgatcgctgtggcaaagacc

SEQ ID NO: 775249 - DNA, 25 bp, Homo sapien
ggcaaagacccaacgaggactctgt

SEQ ID NO: 775250 - DNA, 25 bp, Homo sapien
ctgtggcaaagacccaacgaggact

SEQ ID NO: 775251 - DNA, 25 bp, Homo sapien
ctacagtggccatcacggtgaacat

SEQ ID NO: 775252 - DNA, 25 bp, Homo sapien
gtggtctcagatactgaacagctac

SEQ ID NO: 775253 - DNA, 25 bp, Homo sapien
ggtctcagatactgaacagctacag

SEQ ID NO: 775254 - DNA, 25 bp, Homo sapien
catcacggtgaacatctgacaggga

SEQ ID NO: 775255 - DNA, 25 bp, Homo sapien
caagtctcaccaggagttctctcca

SEQ ID NO: 775256 - DNA, 25 bp, Homo sapien
accttctacctcgaacagcttgatc

SEQ ID NO: 775257 - DNA, 25 bp, Homo sapien
tctacctcgaacagcttgatccagc

SEQ ID NO: 775258 - DNA, 25 bp, Homo sapien
cagttgcctcccttgcaaggacaga

SEQ ID NO: 775259 - DNA, 25 bp, Homo sapien
tcttccttgtttaccccagtctgtc

SEQ ID NO: 775260 - DNA, 25 bp, Homo sapien
cttccttgtttaccccagtctgtct

SEQ ID NO: 775261 - DNA, 25 bp, Homo sapien
tccagtgggatttcacacgcctcat

SEQ ID NO: 775262 - DNA, 25 bp, Homo sapien
ccttgtttaccccagtctgtctgct

SEQ ID NO: 775263 - DNA, 25 bp, Homo sapien
ccccagtgtagatgttaccctttga

SEQ ID NO: 775264 - DNA, 25 bp, Homo sapien
acgatcaagttatccccagtgtaga

SEQ ID NO: 775265 - DNA, 25 bp, Homo sapien
taagataaacgatcaagttatcccc

SEQ ID NO: 775266 - DNA, 25 bp, Homo sapien
aacatgacatttattagccgttata

SEQ ID NO: 775267 - DNA, 25 bp, Homo sapien
tcttcagtgacgtcaaggatgtggg

SEQ ID NO: 775268 - DNA, 25 bp, Homo sapien
gagcttaggagcttccttttcacca

SEQ ID NO: 775269 - DNA, 25 bp, Homo sapien
gtacagcgaccactaagactgagac

SEQ ID NO: 775270 - DNA, 25 bp, Homo sapien
tgggagtgaacagtacagcgaccac

SEQ ID NO: 775271 - DNA, 25 bp, Homo sapien
tggaatgagaaccaggcactgatgc

SEQ ID NO: 775272 - DNA, 25 bp, Homo sapien
ggaatgagaaccaggcactgatgca

SEQ ID NO: 775273 - DNA, 25 bp, Homo sapien
ctggaatgagaaccaggcactgatg

SEQ ID NO: 775274 - DNA, 25 bp, Homo sapien
gtcgctcctcccacctcgttttcat

SEQ ID NO: 775275 - DNA, 25 bp, Homo sapien
cagcagagtgccgaaaagatggctc

SEQ ID NO: 775276 - DNA, 25 bp, Homo sapien
tctgtccagcagagtgccgaaaaga

SEQ ID NO: 775277 - DNA, 25 bp, Homo sapien
agggcctctttggtccacaagcaac

SEQ ID NO: 775278 - DNA, 25 bp, Homo sapien
agagtgccgaaaagatggctccatg

SEQ ID NO: 775279 - DNA, 25 bp, Homo sapien
tatctgctcatagggcacttgtaga

SEQ ID NO: 775280 - DNA, 25 bp, Homo sapien
cacttgtagaaatcttttgaagggt

SEQ ID NO: 775281 - DNA, 25 bp, Homo sapien
tgaagggtcctcaggaacctttcca

SEQ ID NO: 775282 - DNA, 25 bp, Homo sapien
ttatctgctcatagggcacttgtag

SEQ ID NO: 775283 - DNA, 25 bp, Homo sapien
ggtgagctatctcagacacctcttg

SEQ ID NO: 775284 - DNA, 25 bp, Homo sapien
tcttgtacaccattgcctaactcag

SEQ ID NO: 775285 - DNA, 25 bp, Homo sapien
gagcagcggacttccaccagttctg

SEQ ID NO: 775286 - DNA, 25 bp, Homo sapien
tgtagccaccaattctgagcagcgg

SEQ ID NO: 775287 - DNA, 25 bp, Homo sapien
gcagccctctccaatagtttgtcca

SEQ ID NO: 775288 - DNA, 25 bp, Homo sapien
ggcaaaatcctgagcacctagttgt

SEQ ID NO: 775289 - DNA, 25 bp, Homo sapien
gtaagcatgagacctcttggctgtg

SEQ ID NO: 775290 - DNA, 25 bp, Homo sapien
tcagactggcagttttaggagtgcc

SEQ ID NO: 775291 - DNA, 25 bp, Homo sapien
tagttggtcaaggattgccccatgg

SEQ ID NO: 775292 - DNA, 25 bp, Homo sapien
tgttttcatacctccagaatatgcg

SEQ ID NO: 775293 - DNA, 25 bp, Homo sapien
gatccacttcttagttggtcaagga

SEQ ID NO: 775294 - DNA, 25 bp, Homo sapien
aggaagtgtccgtgggattcctgta

SEQ ID NO: 775295 - DNA, 25 bp, Homo sapien
ctggccagcaggcaacacgctattt

SEQ ID NO: 775296 - DNA, 25 bp, Homo sapien
caggcaacacgctatttgtcagagg

SEQ ID NO: 775297 - DNA, 25 bp, Homo sapien
aacacgctatttgtcagaggtcgca

SEQ ID NO: 775298 - DNA, 25 bp, Homo sapien
cagcaggcaacacgctatttgtcag

SEQ ID NO: 775299 - DNA, 25 bp, Homo sapien
aaccctcaatctcaccttctttctt

SEQ ID NO: 775300 - DNA, 25 bp, Homo sapien
tcctctgcgtgtgtcagtacaagag

SEQ ID NO: 775301 - DNA, 25 bp, Homo sapien
ttcctctgcgtgtgtcagtacaaga

SEQ ID NO: 775302 - DNA, 25 bp, Homo sapien
cagaccacgagagatgcaaggtgat

SEQ ID NO: 775303 - DNA, 25 bp, Homo sapien
cctctcagtagacaaggtgtttttc

SEQ ID NO: 775304 - DNA, 25 bp, Homo sapien
ttttccttaaccatagtatctgcag

SEQ ID NO: 775305 - DNA, 25 bp, Homo sapien
gcagcaatccctgccctctcagtag

SEQ ID NO: 775306 - DNA, 25 bp, Homo sapien
cattatcctggtgtgcaagaatcca

SEQ ID NO: 775307 - DNA, 25 bp, Homo sapien
cacttgagtgccatattttcagtgc

SEQ ID NO: 775308 - DNA, 25 bp, Homo sapien
aagggagaggtatcccacatccact

SEQ ID NO: 775309 - DNA, 25 bp, Homo sapien
catccactccattatcctggtgtgc

SEQ ID NO: 775310 - DNA, 25 bp, Homo sapien
taaatgggattagttgggctctcct

SEQ ID NO: 775311 - DNA, 25 bp, Homo sapien
aaatgggattagttgggctctcctg

SEQ ID NO: 775312 - DNA, 25 bp, Homo sapien
atgggattagttgggctctcctggg

SEQ ID NO: 775313 - DNA, 25 bp, Homo sapien
aatgggattagttgggctctcctgg

SEQ ID NO: 775314 - DNA, 25 bp, Homo sapien
ttttgaccacagaggaagttagttc

SEQ ID NO: 775315 - DNA, 25 bp, Homo sapien
tgttccagtccttaaatgaatttgg

SEQ ID NO: 775316 - DNA, 25 bp, Homo sapien
gaccacagaggaagttagttctatc

SEQ ID NO: 775317 - DNA, 25 bp, Homo sapien
tatctgaatggatgttccagtcctt

SEQ ID NO: 775318 - DNA, 25 bp, Homo sapien
aatattggatcaccacagagggaga

SEQ ID NO: 775319 - DNA, 25 bp, Homo sapien
acatatggtagaatattggatcacc

SEQ ID NO: 775320 - DNA, 25 bp, Homo sapien
agttttgctgacatatggtagaata

SEQ ID NO: 775321 - DNA, 25 bp, Homo sapien
ggtagaatattggatcaccacagag

SEQ ID NO: 775322 - DNA, 25 bp, Homo sapien
cactcgggtgtaagagctggcaaga

SEQ ID NO: 775323 - DNA, 25 bp, Homo sapien
caagagctgcaacatgatccaacca

SEQ ID NO: 775324 - DNA, 25 bp, Homo sapien
gagctgcaacatgatccaaccactg

SEQ ID NO: 775325 - DNA, 25 bp, Homo sapien
aggcttcccactcgggtgtaagagc

SEQ ID NO: 775326 - DNA, 25 bp, Homo sapien
cgggagagttgaaagggccgggctg

SEQ ID NO: 775327 - DNA, 25 bp, Homo sapien
cttgactgttggcttagattcggga

SEQ ID NO: 775328 - DNA, 25 bp, Homo sapien
ttggcttagattcgggagagttgaa

SEQ ID NO: 775329 - DNA, 25 bp, Homo sapien
tagattcgggagagttgaaagggcc

SEQ ID NO: 775330 - DNA, 25 bp, Homo sapien
catacgcctgacgtcttcatagtac

SEQ ID NO: 775331 - DNA, 25 bp, Homo sapien
taatgatctctgctcgcctttccca

SEQ ID NO: 775332 - DNA, 25 bp, Homo sapien
atctgttatttccatacgcctgacg

SEQ ID NO: 775333 - DNA, 25 bp, Homo sapien
agttcagagtaatgatctctgctcg

SEQ ID NO: 775334 - DNA, 25 bp, Homo sapien
tcccaaagcatgttccatagagcac

SEQ ID NO: 775335 - DNA, 25 bp, Homo sapien
ccatagagcacaagaggcacaggtg

SEQ ID NO: 775336 - DNA, 25 bp, Homo sapien
tgcagtcttataggcagcattccca

SEQ ID NO: 775337 - DNA, 25 bp, Homo sapien
ctaaactgcagtcttataggcagca

SEQ ID NO: 775338 - DNA, 25 bp, Homo sapien
gttagcttagcattgcccagggaca

SEQ ID NO: 775339 - DNA, 25 bp, Homo sapien
gctgaatgttagcttagcattgccc

SEQ ID NO: 775340 - DNA, 25 bp, Homo sapien
acactgctgaatgttagcttagcat

SEQ ID NO: 775341 - DNA, 25 bp, Homo sapien
gaatgttagcttagcattgcccagg

SEQ ID NO: 775342 - DNA, 25 bp, Homo sapien
catccaagtgtttcaatgggaaaga

SEQ ID NO: 775343 - DNA, 25 bp, Homo sapien
tcaatgggaaagagctctgatatca

SEQ ID NO: 775344 - DNA, 25 bp, Homo sapien
gagctctgatatcacctcgagattg

SEQ ID NO: 775345 - DNA, 25 bp, Homo sapien
tcacctcgagattggaaagcttttc

SEQ ID NO: 775346 - DNA, 25 bp, Homo sapien
gcttgcagtatctgtgggaacctgc

SEQ ID NO: 775347 - DNA, 25 bp, Homo sapien
gggcttgcagtatctgtgggaacct

SEQ ID NO: 775348 - DNA, 25 bp, Homo sapien
gaagagagatctaagttagggccac

SEQ ID NO: 775349 - DNA, 25 bp, Homo sapien
tagggccactgcctaagcttgaggg

SEQ ID NO: 775350 - DNA, 25 bp, Homo sapien
ctctctccaaccaggcaggtgccgt

SEQ ID NO: 775351 - DNA, 25 bp, Homo sapien
gggacaacctgggccattcctgagg

SEQ ID NO: 775352 - DNA, 25 bp, Homo sapien
tgaggccttatcctgcaccaggcac

SEQ ID NO: 775353 - DNA, 25 bp, Homo sapien
aggtgccgttatgaaccctccattg

SEQ ID NO: 775354 - DNA, 25 bp, Homo sapien
tgaagtatgacttgagaatcatgca

SEQ ID NO: 775355 - DNA, 25 bp, Homo sapien
tgttgaagtatgacttgagaatcat

SEQ ID NO: 775356 - DNA, 25 bp, Homo sapien
gtttgttgaagtatgacttgagaat

SEQ ID NO: 775357 - DNA, 25 bp, Homo sapien
ttgaagtatgacttgagaatcatgc

SEQ ID NO: 775358 - DNA, 25 bp, Homo sapien
acaagagaacgtgtgcagagaaact

SEQ ID NO: 775359 - DNA, 25 bp, Homo sapien
ggtggcagacaagacaagagaacgt

SEQ ID NO: 775360 - DNA, 25 bp, Homo sapien
acaagacaagagaacgtgtgcagag

SEQ ID NO: 775361 - DNA, 25 bp, Homo sapien
aagacaagagaacgtgtgcagagaa

SEQ ID NO: 775362 - DNA, 25 bp, Homo sapien
tcccttcaccatcgattgcagttgt

SEQ ID NO: 775363 - DNA, 25 bp, Homo sapien
tgtctgctctgtctccccgatctgt

SEQ ID NO: 775364 - DNA, 25 bp, Homo sapien
tgtttcttcatcattcgtgccgtcg

SEQ ID NO: 775365 - DNA, 25 bp, Homo sapien
tgccgtcgcctgattcaggattctg

SEQ ID NO: 775366 - DNA, 25 bp, Homo sapien
agcagctcagggcttagagcaaata

SEQ ID NO: 775367 - DNA, 25 bp, Homo sapien
gcagctcagggcttagagcaaatat

SEQ ID NO: 775368 - DNA, 25 bp, Homo sapien
acagcagctcagggcttagagcaaa

SEQ ID NO: 775369 - DNA, 25 bp, Homo sapien
ccacagcagctcagggcttagagca

SEQ ID NO: 775370 - DNA, 25 bp, Homo sapien
ttcatgctataccagggatgttaca

SEQ ID NO: 775371 - DNA, 25 bp, Homo sapien
ccagggatgttacagggtggtacag

SEQ ID NO: 775372 - DNA, 25 bp, Homo sapien
aaatctgtctcccaaccaccatgct

SEQ ID NO: 775373 - DNA, 25 bp, Homo sapien
gaaggcttcatgctataccagggat

SEQ ID NO: 775374 - DNA, 25 bp, Homo sapien
tcctcttctcttgggccctcactac

SEQ ID NO: 775375 - DNA, 25 bp, Homo sapien
ttcctcttctcttgggccctcacta

SEQ ID NO: 775376 - DNA, 25 bp, Homo sapien
ttctcttgggccctcactaccctgt

SEQ ID NO: 775377 - DNA, 25 bp, Homo sapien
tcttctcttgggccctcactaccct

SEQ ID NO: 775378 - DNA, 25 bp, Homo sapien
tggttgttgggtctgcagtggacag

SEQ ID NO: 775379 - DNA, 25 bp, Homo sapien
tgcggagtctgttacttggctcaca

SEQ ID NO: 775380 - DNA, 25 bp, Homo sapien
cattccactgatcacactatcctgg

SEQ ID NO: 775381 - DNA, 25 bp, Homo sapien
tgtgtgtccatacacattgcacatc

SEQ ID NO: 775382 - DNA, 25 bp, Homo sapien
gctgtgttcctgtgcgcctgcatcc

SEQ ID NO: 775383 - DNA, 25 bp, Homo sapien
tcctgcagaacccgactgatttctg

SEQ ID NO: 775384 - DNA, 25 bp, Homo sapien
gttcctgtgcgcctgcatcctggtt

SEQ ID NO: 775385 - DNA, 25 bp, Homo sapien
ccgactgatttctgacacttatttc

SEQ ID NO: 775386 - DNA, 25 bp, Homo sapien
gcctggcccttgtgatagatttctc

SEQ ID NO: 775387 - DNA, 25 bp, Homo sapien
tccagacagatagggcgtgccagtt

SEQ ID NO: 775388 - DNA, 25 bp, Homo sapien
ctcaggcatggtggatatattactc

SEQ ID NO: 775389 - DNA, 25 bp, Homo sapien
tgggtacaatcaactcaagaaactc

SEQ ID NO: 775390 - DNA, 25 bp, Homo sapien
cattttagtgttaaccaagagtatc

SEQ ID NO: 775391 - DNA, 25 bp, Homo sapien
caagagtatcgtgatcctgcatgtc

SEQ ID NO: 775392 - DNA, 25 bp, Homo sapien
tcgtagttttatctggcagcctgca

SEQ ID NO: 775393 - DNA, 25 bp, Homo sapien
aattcatcctattagtacctcgtag

SEQ ID NO: 775394 - DNA, 25 bp, Homo sapien
cagatgggcttctactccctttgtt

SEQ ID NO: 775395 - DNA, 25 bp, Homo sapien
agatgggcttctactccctttgttt

SEQ ID NO: 775396 - DNA, 25 bp, Homo sapien
gatgggcttctactccctttgtttg

SEQ ID NO: 775397 - DNA, 25 bp, Homo sapien
actggacagtcccaggacccttctt

SEQ ID NO: 775398 - DNA, 25 bp, Homo sapien
ctcgttttaccactcgattcctcat

SEQ ID NO: 775399 - DNA, 25 bp, Homo sapien
gcagaaaccacggtactgcccactg

SEQ ID NO: 775400 - DNA, 25 bp, Homo sapien
gtgctttgattacaaccttgatatc

SEQ ID NO: 775401 - DNA, 25 bp, Homo sapien
gttcccagacgggtcagcccggcag

SEQ ID NO: 775402 - DNA, 25 bp, Homo sapien
agttcccagacgggtcagcccggca

SEQ ID NO: 775403 - DNA, 25 bp, Homo sapien
gggattagagtttcaatatacgaat

SEQ ID NO: 775404 - DNA, 25 bp, Homo sapien
caatatacgaatttggcagtgggga

SEQ ID NO: 775405 - DNA, 25 bp, Homo sapien
aatggtcactgtctcttctgagctg

SEQ ID NO: 775406 - DNA, 25 bp, Homo sapien
aacaaaaccgccatcatcatcacgg

SEQ ID NO: 775407 - DNA, 25 bp, Homo sapien
ttggaagattgcacagcagccaggc

SEQ ID NO: 775408 - DNA, 25 bp, Homo sapien
catcacggcccgttctcaatggtca

SEQ ID NO: 775409 - DNA, 25 bp, Homo sapien
tgaacccgggaggcgaagatcgtgc

SEQ ID NO: 775410 - DNA, 25 bp, Homo sapien
aacccgggaggcgaagatcgtgcca

SEQ ID NO: 775411 - DNA, 25 bp, Homo sapien
ccgggaggcgaagatcgtgccattg

SEQ ID NO: 775412 - DNA, 25 bp, Homo sapien
cccgggaggcgaagatcgtgccatt

SEQ ID NO: 775413 - DNA, 25 bp, Homo sapien
gggcacctcctctttctattatacc

SEQ ID NO: 775414 - DNA, 25 bp, Homo sapien
gatggccttgctagggcctctctca

SEQ ID NO: 775415 - DNA, 25 bp, Homo sapien
aaaaggtaggcccaatgctgaggac

SEQ ID NO: 775416 - DNA, 25 bp, Homo sapien
tcatggccgtaatcctgaggctgcc

SEQ ID NO: 775417 - DNA, 25 bp, Homo sapien
tactagactacctgcttggacaatg

SEQ ID NO: 775418 - DNA, 25 bp, Homo sapien
taactcatggcagcgggtagattgg

SEQ ID NO: 775419 - DNA, 25 bp, Homo sapien
ggacaatgtatttgatcactagtag

SEQ ID NO: 775420 - DNA, 25 bp, Homo sapien
tagtgttgctacagtaatcccaggt

SEQ ID NO: 775421 - DNA, 25 bp, Homo sapien
taatcggagtaacgtcaaggcatac

SEQ ID NO: 775422 - DNA, 25 bp, Homo sapien
aaaattagtataactgctgttagtg

SEQ ID NO: 775423 - DNA, 25 bp, Homo sapien
aggataatcggagtaacgtcaaggc

SEQ ID NO: 775424 - DNA, 25 bp, Homo sapien
cggagtaacgtcaaggcatactgga

SEQ ID NO: 775425 - DNA, 25 bp, Homo sapien
ctctttgaatgtgtggtaaggaggt

SEQ ID NO: 775426 - DNA, 25 bp, Homo sapien
gtggacagccgtaaagtcactctaa

SEQ ID NO: 775427 - DNA, 25 bp, Homo sapien
taggttggctctttgaatgtgtggt

SEQ ID NO: 775428 - DNA, 25 bp, Homo sapien
gtcactctaaattagtagatgtttg

SEQ ID NO: 775429 - DNA, 25 bp, Homo sapien
tcctgaggctttcctcgctcaatcc

SEQ ID NO: 775430 - DNA, 25 bp, Homo sapien
gcctgacgttctcctggaggacacc

SEQ ID NO: 775431 - DNA, 25 bp, Homo sapien
tgaggctttcctcgctcaatcctgc

SEQ ID NO: 775432 - DNA, 25 bp, Homo sapien
tcgctcaatcctgcctgacgttctc

SEQ ID NO: 775433 - DNA, 25 bp, Homo sapien
gtcctccttgcatttgtcaagcctg

SEQ ID NO: 775434 - DNA, 25 bp, Homo sapien
cctctatggcccatgttggtggtgg

SEQ ID NO: 775435 - DNA, 25 bp, Homo sapien
ttcctctatggcccatgttggtggt

SEQ ID NO: 775436 - DNA, 25 bp, Homo sapien
cctccttgcatttgtcaagcctgca

SEQ ID NO: 775437 - DNA, 25 bp, Homo sapien
aaactcttctagtgcaatctccaga

SEQ ID NO: 775438 - DNA, 25 bp, Homo sapien
gccaaactcttctagtgcaatctcc

SEQ ID NO: 775439 - DNA, 25 bp, Homo sapien
tgagccaaactcttctagtgcaatc

SEQ ID NO: 775440 - DNA, 25 bp, Homo sapien
actcttctagtgcaatctccagaca

SEQ ID NO: 775441 - DNA, 25 bp, Homo sapien
gaagctgtggatgagatccacgctg

SEQ ID NO: 775442 - DNA, 25 bp, Homo sapien
tggatgagatccacgctgcaaatgc

SEQ ID NO: 775443 - DNA, 25 bp, Homo sapien
gatccacgctgcaaatgctactcac

SEQ ID NO: 775444 - DNA, 25 bp, Homo sapien
tgagatccacgctgcaaatgctact

SEQ ID NO: 775445 - DNA, 25 bp, Homo sapien
actggctgaaaaataggattgaaac

SEQ ID NO: 775446 - DNA, 25 bp, Homo sapien
ttgaaacaaataccgctgaaacagc

SEQ ID NO: 775447 - DNA, 25 bp, Homo sapien
ggattgaaacaaataccgctgaaac

SEQ ID NO: 775448 - DNA, 25 bp, Homo sapien
gcctttatatgactgctgtccttca

SEQ ID NO: 775449 - DNA, 25 bp, Homo sapien
gcataagagctagttttttaagata

SEQ ID NO: 775450 - DNA, 25 bp, Homo sapien
gatataagcttgtatctacagccat

SEQ ID NO: 775451 - DNA, 25 bp, Homo sapien
aatttacttgcataagagctagttt

SEQ ID NO: 775452 - DNA, 25 bp, Homo sapien
tgaatgtattcttacaaaatgcaca

SEQ ID NO: 775453 - DNA, 25 bp, Homo sapien
ttcatgtatgccctctggacttgtg

SEQ ID NO: 775454 - DNA, 25 bp, Homo sapien
ctggttggtcaatgttggctgctct

SEQ ID NO: 775455 - DNA, 25 bp, Homo sapien
tggaagccactggaacaacgttaac

SEQ ID NO: 775456 - DNA, 25 bp, Homo sapien
ggaagccactggaacaacgttaaca

SEQ ID NO: 775457 - DNA, 25 bp, Homo sapien
ctctggttggtcaatgttggctgct

SEQ ID NO: 775458 - DNA, 25 bp, Homo sapien
ccagttgtgcagtggaagctttttc

SEQ ID NO: 775459 - DNA, 25 bp, Homo sapien
tcatggtggcagcattccagaaggg

SEQ ID NO: 775460 - DNA, 25 bp, Homo sapien
cagaagggggtagctgagggttgca

SEQ ID NO: 775461 - DNA, 25 bp, Homo sapien
gttgcaggacagaaaattcccaagg

SEQ ID NO: 775462 - DNA, 25 bp, Homo sapien
gatacctaagctacgacatttccaa

SEQ ID NO: 775463 - DNA, 25 bp, Homo sapien
tctcaatttcgtggtctttcctggg

SEQ ID NO: 775464 - DNA, 25 bp, Homo sapien
agttgacctacaaaccccataggtg

SEQ ID NO: 775465 - DNA, 25 bp, Homo sapien
cccatggttaggttggtctatgtcc

SEQ ID NO: 775466 - DNA, 25 bp, Homo sapien
cgcagcaccgccaacaggtgttgca

SEQ ID NO: 775467 - DNA, 25 bp, Homo sapien
gccaacaggtgttgcagtgccgaat

SEQ ID NO: 775468 - DNA, 25 bp, Homo sapien
agtgccgaattgcacgtctgcccaa

SEQ ID NO: 775469 - DNA, 25 bp, Homo sapien
acgtctgcccaaaccgttgattctg

SEQ ID NO: 775470 - DNA, 25 bp, Homo sapien
aatgcaggttctgaagctgacgcat

SEQ ID NO: 775471 - DNA, 25 bp, Homo sapien
ggatgagtaaactgttggacacatg

SEQ ID NO: 775472 - DNA, 25 bp, Homo sapien
aaactgttggacacatgagatcttc

SEQ ID NO: 775473 - DNA, 25 bp, Homo sapien
gctgacgcatagtctggatgagtaa

SEQ ID NO: 775474 - DNA, 25 bp, Homo sapien
ctgcgatcaaggatgccgtcagggc

SEQ ID NO: 775475 - DNA, 25 bp, Homo sapien
tgccgtcagggcctcagcatctgat

SEQ ID NO: 775476 - DNA, 25 bp, Homo sapien
cctgcttcagctgcgatcaaggatg

SEQ ID NO: 775477 - DNA, 25 bp, Homo sapien
gattcttcctggtaaatcaagaaca

SEQ ID NO: 775478 - DNA, 25 bp, Homo sapien
caaatgatcactcaagacgattgtc

SEQ ID NO: 775479 - DNA, 25 bp, Homo sapien
agatgccacagctctcaacgactcc

SEQ ID NO: 775480 - DNA, 25 bp, Homo sapien
agtcctccgggtgatcaaatgatca

SEQ ID NO: 775481 - DNA, 25 bp, Homo sapien
tcaacaggaccagacgagggagatg

SEQ ID NO: 775482 - DNA, 25 bp, Homo sapien
tgatgtcttctgactgccttctgac

SEQ ID NO: 775483 - DNA, 25 bp, Homo sapien
cccgttgtaacgactctgagtctga

SEQ ID NO: 775484 - DNA, 25 bp, Homo sapien
ttttccaatctctgaccccttagta

SEQ ID NO: 775485 - DNA, 25 bp, Homo sapien
agtaatgtctttgcccgttgtaacg

SEQ ID NO: 775486 - DNA, 25 bp, Homo sapien
gatgagaagtgacagtctctccttc

SEQ ID NO: 775487 - DNA, 25 bp, Homo sapien
gaaagagttctaagcgccagatcag

SEQ ID NO: 775488 - DNA, 25 bp, Homo sapien
tgcttcatgagtgcgggaaaacaga

SEQ ID NO: 775489 - DNA, 25 bp, Homo sapien
tcagggttccataatcccaactgga

SEQ ID NO: 775490 - DNA, 25 bp, Homo sapien
acacagcatcacgaggctccaatca

SEQ ID NO: 775491 - DNA, 25 bp, Homo sapien
gcatcacgaggctccaatcacccat

SEQ ID NO: 775492 - DNA, 25 bp, Homo sapien
tgctacacagcatcacgaggctcca

SEQ ID NO: 775493 - DNA, 25 bp, Homo sapien
ctacacagcatcacgaggctccaat

SEQ ID NO: 775494 - DNA, 25 bp, Homo sapien
ctgtgagttgactcctgccttggac

SEQ ID NO: 775495 - DNA, 25 bp, Homo sapien
caacatgatgaggtcttgagctccc

SEQ ID NO: 775496 - DNA, 25 bp, Homo sapien
ttggacatgggcctacaacatgatg

SEQ ID NO: 775497 - DNA, 25 bp, Homo sapien
tcctgccttggacatgggcctacaa

SEQ ID NO: 775498 - DNA, 25 bp, Homo sapien
ttttgacatccatcccttcagtcat

SEQ ID NO: 775499 - DNA, 25 bp, Homo sapien
agaggactgcaattctggagtcaga

SEQ ID NO: 775500 - DNA, 25 bp, Homo sapien
tcccagaggactgcaattctggagt

SEQ ID NO: 775501 - DNA, 25 bp, Homo sapien
ttcccagaggactgcaattctggag

SEQ ID NO: 775502 - DNA, 25 bp, Homo sapien
ccagaggactgcaattctggagtca

SEQ ID NO: 775503 - DNA, 25 bp, Homo sapien
catgcgaagtcaagggtatctgctc

SEQ ID NO: 775504 - DNA, 25 bp, Homo sapien
tcagcaccgggcttgccattggacg

SEQ ID NO: 775505 - DNA, 25 bp, Homo sapien
tgccactccagagtcagctgcgtga

SEQ ID NO: 775506 - DNA, 25 bp, Homo sapien
taactgggttgcagcctgttcgcca

SEQ ID NO: 775507 - DNA, 25 bp, Homo sapien
tctgatcattcccgcagtttccatc

SEQ ID NO: 775508 - DNA, 25 bp, Homo sapien
ctgatcattcccgcagtttccatct

SEQ ID NO: 775509 - DNA, 25 bp, Homo sapien
tgatcattcccgcagtttccatctt

SEQ ID NO: 775510 - DNA, 25 bp, Homo sapien
tccctgccattacggaggccttatt

SEQ ID NO: 775511 - DNA, 25 bp, Homo sapien
ctaattgagtttgctggccttgaaa

SEQ ID NO: 775512 - DNA, 25 bp, Homo sapien
cattacggaggccttatttatgaga

SEQ ID NO: 775513 - DNA, 25 bp, Homo sapien
gcatccctgtaggtaatgtgatgat

SEQ ID NO: 775514 - DNA, 25 bp, Homo sapien
cgcgttctaatgtaaaaggagaaga

SEQ ID NO: 775515 - DNA, 25 bp, Homo sapien
aaaggagaagaatcggcggacagct

SEQ ID NO: 775516 - DNA, 25 bp, Homo sapien
tcaagttgtaaaacgcgttctaatg

SEQ ID NO: 775517 - DNA, 25 bp, Homo sapien
taatgtaaaaggagaagaatcggcg

SEQ ID NO: 775518 - DNA, 25 bp, Homo sapien
cttgttcaacaatgagccttgatga

SEQ ID NO: 775519 - DNA, 25 bp, Homo sapien
gctccaagcctttgcaaagacacat

SEQ ID NO: 775520 - DNA, 25 bp, Homo sapien
gccttgatgatgctccaagcctttg

SEQ ID NO: 775521 - DNA, 25 bp, Homo sapien
acaatgagccttgatgatgctccaa

SEQ ID NO: 775522 - DNA, 25 bp, Homo sapien
ggaaggtcctctctacttgctttca

SEQ ID NO: 775523 - DNA, 25 bp, Homo sapien
tggctcaggccactccatcgttggg

SEQ ID NO: 775524 - DNA, 25 bp, Homo sapien
gccactccatcgttgggtcaaacac

SEQ ID NO: 775525 - DNA, 25 bp, Homo sapien
gcagaaggagagattgctgcttctc

SEQ ID NO: 775526 - DNA, 25 bp, Homo sapien
tttgcttggcgagtctgcacattca

SEQ ID NO: 775527 - DNA, 25 bp, Homo sapien
tgagtccaggaacgtctcctgagct

SEQ ID NO: 775528 - DNA, 25 bp, Homo sapien
tccctggatagcctgccactctgat

SEQ ID NO: 775529 - DNA, 25 bp, Homo sapien
tgccactctgataacaattatggcc

SEQ ID NO: 775530 - DNA, 25 bp, Homo sapien
gtccaggaacgtctcctgagcttct

SEQ ID NO: 775531 - DNA, 25 bp, Homo sapien
gggccccttcagtgatcccatggtg

SEQ ID NO: 775532 - DNA, 25 bp, Homo sapien
ggccccttcagtgatcccatggtgt

SEQ ID NO: 775533 - DNA, 25 bp, Homo sapien
tattagcctcctgatccaataacct

SEQ ID NO: 775534 - DNA, 25 bp, Homo sapien
aataaccttatacgattagcatgca

SEQ ID NO: 775535 - DNA, 25 bp, Homo sapien
cacccaagagctattagcctcctga

SEQ ID NO: 775536 - DNA, 25 bp, Homo sapien
gatccaataaccttatacgattagc

SEQ ID NO: 775537 - DNA, 25 bp, Homo sapien
gactgtattccacaagctgcctgga

SEQ ID NO: 775538 - DNA, 25 bp, Homo sapien
tgactgtattccacaagctgcctgg

SEQ ID NO: 775539 - DNA, 25 bp, Homo sapien
ttcaaggtgctctttcaatgttggc

SEQ ID NO: 775540 - DNA, 25 bp, Homo sapien
gttggctctgataagaagctttcct

SEQ ID NO: 775541 - DNA, 25 bp, Homo sapien
ggtgctctttcaatgttggctctga

SEQ ID NO: 775542 - DNA, 25 bp, Homo sapien
tgttggctctgataagaagctttcc

SEQ ID NO: 775543 - DNA, 25 bp, Homo sapien
tagggtcttacgatcactctcttta

SEQ ID NO: 775544 - DNA, 25 bp, Homo sapien
tagctctgctcacccagtttcttgt

SEQ ID NO: 775545 - DNA, 25 bp, Homo sapien
tagaggccactgtgatggatagctc

SEQ ID NO: 775546 - DNA, 25 bp, Homo sapien
cagtttcttgtacaccctttctgag

SEQ ID NO: 775547 - DNA, 25 bp, Homo sapien
gagtcgatgttactgccacatgctt

SEQ ID NO: 775548 - DNA, 25 bp, Homo sapien
tgtcctcgccaatgcatggtctcat

SEQ ID NO: 775549 - DNA, 25 bp, Homo sapien
gtctcatgcgacctttcaccacagt

SEQ ID NO: 775550 - DNA, 25 bp, Homo sapien
cacagtaggctgagtcgatgttact

SEQ ID NO: 775551 - DNA, 25 bp, Homo sapien
ttgccagcagcccacctctctagct

SEQ ID NO: 775552 - DNA, 25 bp, Homo sapien
cctttgtcaagggtgaagagtcaaa

SEQ ID NO: 775553 - DNA, 25 bp, Homo sapien
ttgcatcggttcacctttgtcaagg

SEQ ID NO: 775554 - DNA, 25 bp, Homo sapien
cttgaagattgcatcggttcacctt

SEQ ID NO: 775555 - DNA, 25 bp, Homo sapien
cctcttgctcctgtgatgatattct

SEQ ID NO: 775556 - DNA, 25 bp, Homo sapien
tttgtatgcacctgctgtccaccct

SEQ ID NO: 775557 - DNA, 25 bp, Homo sapien
cagggctgggtagctttgtatgcac

SEQ ID NO: 775558 - DNA, 25 bp, Homo sapien
tcctggtggtctcttactctcttgc

SEQ ID NO: 775559 - DNA, 25 bp, Homo sapien
cattccgagtagagatgtcatcttg

SEQ ID NO: 775560 - DNA, 25 bp, Homo sapien
gactaccaagtacattcacatcagt

SEQ ID NO: 775561 - DNA, 25 bp, Homo sapien
gccaccattccgagtagagatgtca

SEQ ID NO: 775562 - DNA, 25 bp, Homo sapien
aagggcagatttgtaacgtcagcat

SEQ ID NO: 775563 - DNA, 25 bp, Homo sapien
ttctgatattcagaaaagcatacat

SEQ ID NO: 775564 - DNA, 25 bp, Homo sapien
aatgaaacagaagtatgaacatttc

SEQ ID NO: 775565 - DNA, 25 bp, Homo sapien
ccattgctttccaaaacatccaatg

SEQ ID NO: 775566 - DNA, 25 bp, Homo sapien
tttccaaaacatccaatgaaacaga

SEQ ID NO: 775567 - DNA, 25 bp, Homo sapien
tttccacttgatccggcttagccag

SEQ ID NO: 775568 - DNA, 25 bp, Homo sapien
tcttggtctcgggtgtcagaaccag

SEQ ID NO: 775569 - DNA, 25 bp, Homo sapien
cagctccttactcagtggaatcctc

SEQ ID NO: 775570 - DNA, 25 bp, Homo sapien
tggaatcctctggagagctgagcaa

SEQ ID NO: 775571 - DNA, 25 bp, Homo sapien
aatccaactctgaaacaaatgactt

SEQ ID NO: 775572 - DNA, 25 bp, Homo sapien
tttcctgtactaaagtggaggcttg

SEQ ID NO: 775573 - DNA, 25 bp, Homo sapien
ctaaagtggaggcttgcatctgaag

SEQ ID NO: 775574 - DNA, 25 bp, Homo sapien
atggccctggtaatccaactctgaa

SEQ ID NO: 775575 - DNA, 25 bp, Homo sapien
caactcgccctggtatgtgaacaag

SEQ ID NO: 775576 - DNA, 25 bp, Homo sapien
tgaacaagacaatgacaggcctcag

SEQ ID NO: 775577 - DNA, 25 bp, Homo sapien
tgttaccacccgcatgccatgaaga

SEQ ID NO: 775578 - DNA, 25 bp, Homo sapien
caactattactgtggtaacaatcac

SEQ ID NO: 775579 - DNA, 25 bp, Homo sapien
caaagctgacttgttagtttcccta

SEQ ID NO: 775580 - DNA, 25 bp, Homo sapien
gcaaagctgacttgttagtttccct

SEQ ID NO: 775581 - DNA, 25 bp, Homo sapien
ggcttctgtagattgtgtctccatg

SEQ ID NO: 775582 - DNA, 25 bp, Homo sapien
gccttggcgctctgtgagaatgatt

SEQ ID NO: 775583 - DNA, 25 bp, Homo sapien
tgaattggctaatgctatcacagca

SEQ ID NO: 775584 - DNA, 25 bp, Homo sapien
tctccatgcaaaagggtggtccttg

SEQ ID NO: 775585 - DNA, 25 bp, Homo sapien
atggcagatagctgctttgagcctc

SEQ ID NO: 775586 - DNA, 25 bp, Homo sapien
aactgttgtaataatgcttgtttga

SEQ ID NO: 775587 - DNA, 25 bp, Homo sapien
cagatagctgctttgagcctccaaa

SEQ ID NO: 775588 - DNA, 25 bp, Homo sapien
agatgaaagggcaggctgttttgga

SEQ ID NO: 775589 - DNA, 25 bp, Homo sapien
gcttcccctgtggtttatggctttc

SEQ ID NO: 775590 - DNA, 25 bp, Homo sapien
tatggctttcaagcactgggctcct

SEQ ID NO: 775591 - DNA, 25 bp, Homo sapien
gaaattcctgtgtgtggcttgctga

SEQ ID NO: 775592 - DNA, 25 bp, Homo sapien
ttgctgagaagacttccaaagaggc

SEQ ID NO: 775593 - DNA, 25 bp, Homo sapien
ccacaggaaagtgtccaacggcatt

SEQ ID NO: 775594 - DNA, 25 bp, Homo sapien
caggaaagtgtccaacggcattcat

SEQ ID NO: 775595 - DNA, 25 bp, Homo sapien
tctccacaggaaagtgtccaacggc

SEQ ID NO: 775596 - DNA, 25 bp, Homo sapien
gcaaacaggtaacacggggctcgat

SEQ ID NO: 775597 - DNA, 25 bp, Homo sapien
tctgttgttcctcacgtttggtcct

SEQ ID NO: 775598 - DNA, 25 bp, Homo sapien
tggtcctaacattcaccgggtatcc

SEQ ID NO: 775599 - DNA, 25 bp, Homo sapien
ccctaatccctgagattcggatggg

SEQ ID NO: 775600 - DNA, 25 bp, Homo sapien
tggcggttttccctaatccctgaga

SEQ ID NO: 775601 - DNA, 25 bp, Homo sapien
cagacaatgacattaataagaatgt

SEQ ID NO: 775602 - DNA, 25 bp, Homo sapien
acattaataagaatgtagcccacac

SEQ ID NO: 775603 - DNA, 25 bp, Homo sapien
tgacattaataagaatgtagcccac

SEQ ID NO: 775604 - DNA, 25 bp, Homo sapien
cttcagacaatgacattaataagaa

SEQ ID NO: 775605 - DNA, 25 bp, Homo sapien
caccctggggtcgtgcaatgcaacg

SEQ ID NO: 775606 - DNA, 25 bp, Homo sapien
cctctcttgccttgagtgttgatgg

SEQ ID NO: 775607 - DNA, 25 bp, Homo sapien
caatgcaacgtgaaggttctaatgg

SEQ ID NO: 775608 - DNA, 25 bp, Homo sapien
tgccatcatcgtttaatagtcttcc

SEQ ID NO: 775609 - DNA, 25 bp, Homo sapien
cctgtgcttgttagtcccaagtaat

SEQ ID NO: 775610 - DNA, 25 bp, Homo sapien
tctcggctcctgcaaaattgttctc

SEQ ID NO: 775611 - DNA, 25 bp, Homo sapien
ccaagtaatgttcgccaaagggcct

SEQ ID NO: 775612 - DNA, 25 bp, Homo sapien
gactctttgagatcgattttcttca

SEQ ID NO: 775613 - DNA, 25 bp, Homo sapien
aatcagcaaaggataatcataatct

SEQ ID NO: 775614 - DNA, 25 bp, Homo sapien
tcagcaaaggataatcataatctat

SEQ ID NO: 775615 - DNA, 25 bp, Homo sapien
gcaaaggataatcataatctatcat

SEQ ID NO: 775616 - DNA, 25 bp, Homo sapien
caaatcagcaaaggataatcataat

SEQ ID NO: 775617 - DNA, 25 bp, Homo sapien
gccacaagggatggcctggactctc

SEQ ID NO: 775618 - DNA, 25 bp, Homo sapien
caagggatggcctggactctcagaa

SEQ ID NO: 775619 - DNA, 25 bp, Homo sapien
acaagggatggcctggactctcaga

SEQ ID NO: 775620 - DNA, 25 bp, Homo sapien
cacaagggatggcctggactctcag

SEQ ID NO: 775621 - DNA, 25 bp, Homo sapien
aaaggatggacaaggccttggcctt

SEQ ID NO: 775622 - DNA, 25 bp, Homo sapien
gacaaaggatggacaaggccttggc

SEQ ID NO: 775623 - DNA, 25 bp, Homo sapien
caaaggatggacaaggccttggcct

SEQ ID NO: 775624 - DNA, 25 bp, Homo sapien
acaaaggatggacaaggccttggcc

SEQ ID NO: 775625 - DNA, 25 bp, Homo sapien
gacatgaaaaataccgcagacttcc

SEQ ID NO: 775626 - DNA, 25 bp, Homo sapien
ctgcaaatttgagatgagacatgaa

SEQ ID NO: 775627 - DNA, 25 bp, Homo sapien
ttgagatgagacatgaaaaataccg

SEQ ID NO: 775628 - DNA, 25 bp, Homo sapien
gatgagacatgaaaaataccgcaga

SEQ ID NO: 775629 - DNA, 25 bp, Homo sapien
taactttaaatcaatttgcccatct

SEQ ID NO: 775630 - DNA, 25 bp, Homo sapien
tttgcccatctttcctaggcttagt

SEQ ID NO: 775631 - DNA, 25 bp, Homo sapien
aagcccagaatcacatttgtgcggc

SEQ ID NO: 775632 - DNA, 25 bp, Homo sapien
taggcttagtgtagttaaacacagc

SEQ ID NO: 775633 - DNA, 25 bp, Homo sapien
tccgaggaatctgcgaggtggaaat

SEQ ID NO: 775634 - DNA, 25 bp, Homo sapien
aatcaggtctccgacacaacaggct

SEQ ID NO: 775635 - DNA, 25 bp, Homo sapien
cagacacgtctgcaatttccgagga

SEQ ID NO: 775636 - DNA, 25 bp, Homo sapien
cactttgtcgcttcttaggctggct

SEQ ID NO: 775637 - DNA, 25 bp, Homo sapien
tcatttgaattgagaagtcagaggt

SEQ ID NO: 775638 - DNA, 25 bp, Homo sapien
taggctgctactctggtacatgctg

SEQ ID NO: 775639 - DNA, 25 bp, Homo sapien
tgagaaattgttagtaggctgctac

SEQ ID NO: 775640 - DNA, 25 bp, Homo sapien
gagaagtcagaggtattttccctaa

SEQ ID NO: 775641 - DNA, 25 bp, Homo sapien
gctgatgttcaattaaaggtagccc

SEQ ID NO: 775642 - DNA, 25 bp, Homo sapien
aaaggtagcccttttgatgctgcac

SEQ ID NO: 775643 - DNA, 25 bp, Homo sapien
gaatgaaatcgatgcagggcaagcg

SEQ ID NO: 775644 - DNA, 25 bp, Homo sapien
gagccggtagtgctaggcagcaact

SEQ ID NO: 775645 - DNA, 25 bp, Homo sapien
tgcagggttttgtattctttgcccc

SEQ ID NO: 775646 - DNA, 25 bp, Homo sapien
tagccacatgcagggttttgtattc

SEQ ID NO: 775647 - DNA, 25 bp, Homo sapien
ccgaagccttcctctgttagtttag

SEQ ID NO: 775648 - DNA, 25 bp, Homo sapien
tctgttagtttagccacatgcaggg

SEQ ID NO: 775649 - DNA, 25 bp, Homo sapien
taggagactgggttgaagaataagg

SEQ ID NO: 775650 - DNA, 25 bp, Homo sapien
gagactgggttgaagaataagggac

SEQ ID NO: 775651 - DNA, 25 bp, Homo sapien
ccaacatgttgaatggctgttagga

SEQ ID NO: 775652 - DNA, 25 bp, Homo sapien
catgttgaatggctgttaggagact

SEQ ID NO: 775653 - DNA, 25 bp, Homo sapien
tctaatttcgcaattgtgtatgtct

SEQ ID NO: 775654 - DNA, 25 bp, Homo sapien
tgggtgaagtctcccatcgaagtca

SEQ ID NO: 775655 - DNA, 25 bp, Homo sapien
acacgagcacattgtttatctaggg

SEQ ID NO: 775656 - DNA, 25 bp, Homo sapien
gctggcgatgccctctctaatttcg

SEQ ID NO: 775657 - DNA, 25 bp, Homo sapien
tgagatgcttgacagtgactacctt

SEQ ID NO: 775658 - DNA, 25 bp, Homo sapien
caatgggttcactgctctgatacgt

SEQ ID NO: 775659 - DNA, 25 bp, Homo sapien
gacatgacagtcaaggtacccggac

SEQ ID NO: 775660 - DNA, 25 bp, Homo sapien
gctggccacacttaaccatcagagg

SEQ ID NO: 775661 - DNA, 25 bp, Homo sapien
tgagcaatataataactagctttca

SEQ ID NO: 775662 - DNA, 25 bp, Homo sapien
gagcaatataataactagctttcag

SEQ ID NO: 775663 - DNA, 25 bp, Homo sapien
aaaaaagctggtgagctgtagagga

SEQ ID NO: 775664 - DNA, 25 bp, Homo sapien
aagctggtgagctgtagaggatttt

SEQ ID NO: 775665 - DNA, 25 bp, Homo sapien
gactggcatccttttgaataagagg

SEQ ID NO: 775666 - DNA, 25 bp, Homo sapien
ttggacaatcatagactggcatcct

SEQ ID NO: 775667 - DNA, 25 bp, Homo sapien
tgagatccaaattggtagccttgga

SEQ ID NO: 775668 - DNA, 25 bp, Homo sapien
acaaaggtctgttgagggctcctct

SEQ ID NO: 775669 - DNA, 25 bp, Homo sapien
agatccaaattggtagccttggaaa

SEQ ID NO: 775670 - DNA, 25 bp, Homo sapien
gagatccaaattggtagccttggaa

SEQ ID NO: 775671 - DNA, 25 bp, Homo sapien
gactttcacttagtactcgtgcatg

SEQ ID NO: 775672 - DNA, 25 bp, Homo sapien
tatatcggccggattctgctttgca

SEQ ID NO: 775673 - DNA, 25 bp, Homo sapien
cttgaacccaaacagggacatctga

SEQ ID NO: 775674 - DNA, 25 bp, Homo sapien
tgactactgtgcagaatcatgcctt

SEQ ID NO: 775675 - DNA, 25 bp, Homo sapien
tctgtagtagaaaccattctgaggg

SEQ ID NO: 775676 - DNA, 25 bp, Homo sapien
tgagcatcatcctgccagaccaaag

SEQ ID NO: 775677 - DNA, 25 bp, Homo sapien
ccttgctggctggaaggatctcaca

SEQ ID NO: 775678 - DNA, 25 bp, Homo sapien
caaaaggaggtttgcagaacgtggc

SEQ ID NO: 775679 - DNA, 25 bp, Homo sapien
ggaggtggatgttatagcaagccaa

SEQ ID NO: 775680 - DNA, 25 bp, Homo sapien
gaggtggatgttatagcaagccaag

SEQ ID NO: 775681 - DNA, 25 bp, Homo sapien
aggtggatgttatagcaagccaaga

SEQ ID NO: 775682 - DNA, 25 bp, Homo sapien
aggaggtggatgttatagcaagcca

SEQ ID NO: 775683 - DNA, 25 bp, Homo sapien
ttcttgcagattagcatatacgtgg

SEQ ID NO: 775684 - DNA, 25 bp, Homo sapien
ctttcttgcagattagcatatacgt

SEQ ID NO: 775685 - DNA, 25 bp, Homo sapien
tcttgcagattagcatatacgtggc

SEQ ID NO: 775686 - DNA, 25 bp, Homo sapien
ttgcagattagcatatacgtggcca

SEQ ID NO: 775687 - DNA, 25 bp, Homo sapien
tctcggctcatagagtgctcaaggt

SEQ ID NO: 775688 - DNA, 25 bp, Homo sapien
tcggctcatagagtgctcaaggtgc

SEQ ID NO: 775689 - DNA, 25 bp, Homo sapien
ctcggctcatagagtgctcaaggtg

SEQ ID NO: 775690 - DNA, 25 bp, Homo sapien
cggctcatagagtgctcaaggtgct

SEQ ID NO: 775691 - DNA, 25 bp, Homo sapien
agcttcatttgaacccaggtccgtt

SEQ ID NO: 775692 - DNA, 25 bp, Homo sapien
gaataggttgcagcagttcaggctt

SEQ ID NO: 775693 - DNA, 25 bp, Homo sapien
catttgaacccaggtccgtttctct

SEQ ID NO: 775694 - DNA, 25 bp, Homo sapien
cagttcaggcttcttcccatggttc

SEQ ID NO: 775695 - DNA, 25 bp, Homo sapien
ggaagtgttatacagatggaatcat

SEQ ID NO: 775696 - DNA, 25 bp, Homo sapien
gaacagcctaatacatttgtctatt

SEQ ID NO: 775697 - DNA, 25 bp, Homo sapien
tgcggtcttttgtgactaactttgt

SEQ ID NO: 775698 - DNA, 25 bp, Homo sapien
ctattctggaagtgttatacagatg

SEQ ID NO: 775699 - DNA, 25 bp, Homo sapien
gaatcaagcggctgtagagataatc

SEQ ID NO: 775700 - DNA, 25 bp, Homo sapien
tatgcagacattctggcttagggct

SEQ ID NO: 775701 - DNA, 25 bp, Homo sapien
gcaacatgtctagaatcaagcggct

SEQ ID NO: 775702 - DNA, 25 bp, Homo sapien
gggctgaatatggactaatgcccat

SEQ ID NO: 775703 - DNA, 25 bp, Homo sapien
tgctctgaggaaatatcggacaaag

SEQ ID NO: 775704 - DNA, 25 bp, Homo sapien
caagcatttctgtaggtggtataga

SEQ ID NO: 775705 - DNA, 25 bp, Homo sapien
gaggaaatatcggacaaaggacact

SEQ ID NO: 775706 - DNA, 25 bp, Homo sapien
aattacagctcaggttcccgtgcag

SEQ ID NO: 775707 - DNA, 25 bp, Homo sapien
agatttcctcatgatgtaaactttg

SEQ ID NO: 775708 - DNA, 25 bp, Homo sapien
gagatttcttgcgtacagatttcct

SEQ ID NO: 775709 - DNA, 25 bp, Homo sapien
catgaagaagagatttcttgcgtac

SEQ ID NO: 775710 - DNA, 25 bp, Homo sapien
cttgcgtacagatttcctcatgatg

SEQ ID NO: 775711 - DNA, 25 bp, Homo sapien
taagaatttctactggttccactgc

SEQ ID NO: 775712 - DNA, 25 bp, Homo sapien
agaatttctactggttccactgcac

SEQ ID NO: 775713 - DNA, 25 bp, Homo sapien
taggtaagaatttctactggttcca

SEQ ID NO: 775714 - DNA, 25 bp, Homo sapien
gtaagaatttctactggttccactg

SEQ ID NO: 775715 - DNA, 25 bp, Homo sapien
tttatacgtgggcttactcgtcagc

SEQ ID NO: 775716 - DNA, 25 bp, Homo sapien
tcagtaatgtgttcggaacctgtct

SEQ ID NO: 775717 - DNA, 25 bp, Homo sapien
tgttcggaacctgtctttggtgcca

SEQ ID NO: 775718 - DNA, 25 bp, Homo sapien
tcagctgtccaaatacagtatgatt

SEQ ID NO: 775719 - DNA, 25 bp, Homo sapien
tcttcacaagtgcagggaacttccc

SEQ ID NO: 775720 - DNA, 25 bp, Homo sapien
tcaggccccattgagatcgtcttct

SEQ ID NO: 775721 - DNA, 25 bp, Homo sapien
ggtgaataggctcctccctgtacac

SEQ ID NO: 775722 - DNA, 25 bp, Homo sapien
gaagcatgtcttcacaagtgcaggg

SEQ ID NO: 775723 - DNA, 25 bp, Homo sapien
tagcagactgaaagtcgagcttcgc

SEQ ID NO: 775724 - DNA, 25 bp, Homo sapien
cagactgaaagtcgagcttcgcttt

SEQ ID NO: 775725 - DNA, 25 bp, Homo sapien
gttccttagcagactgaaagtcgag

SEQ ID NO: 775726 - DNA, 25 bp, Homo sapien
ctgaaagtcgagcttcgctttgtgg

SEQ ID NO: 775727 - DNA, 25 bp, Homo sapien
gaaggcctaattgagctgatttgcc

SEQ ID NO: 775728 - DNA, 25 bp, Homo sapien
ggggtgaaggcctaattgagctgat

SEQ ID NO: 775729 - DNA, 25 bp, Homo sapien
tgaaggcctaattgagctgatttgc

SEQ ID NO: 775730 - DNA, 25 bp, Homo sapien
ggtgaaggcctaattgagctgattt

SEQ ID NO: 775731 - DNA, 25 bp, Homo sapien
tctgttccaaccctcagtgccctca

SEQ ID NO: 775732 - DNA, 25 bp, Homo sapien
cgcggttctgttccaaccctcagtg

SEQ ID NO: 775733 - DNA, 25 bp, Homo sapien
tctgtttcaccacgcggttctgttc

SEQ ID NO: 775734 - DNA, 25 bp, Homo sapien
tcatgccatctgtttcaccacgcgg

SEQ ID NO: 775735 - DNA, 25 bp, Homo sapien
accgcgcctgctatccgaagaacag

SEQ ID NO: 775736 - DNA, 25 bp, Homo sapien
gacaccgcgcctgctatccgaagaa

SEQ ID NO: 775737 - DNA, 25 bp, Homo sapien
gcctgctatccgaagaacagggcca

SEQ ID NO: 775738 - DNA, 25 bp, Homo sapien
tgctatccgaagaacagggccagca

SEQ ID NO: 775739 - DNA, 25 bp, Homo sapien
ccaaagggatgagtggtacatgatt

SEQ ID NO: 775740 - DNA, 25 bp, Homo sapien
catgattgtgcctcattggtgacgt

SEQ ID NO: 775741 - DNA, 25 bp, Homo sapien
tactaaggacccaaagctctggagc

SEQ ID NO: 775742 - DNA, 25 bp, Homo sapien
aaggccacagcaacagccaattatg

SEQ ID NO: 775743 - DNA, 25 bp, Homo sapien
ttaatggccgcaccaaggagaccga

SEQ ID NO: 775744 - DNA, 25 bp, Homo sapien
ttcatcagaaaggttaataagcgca

SEQ ID NO: 775745 - DNA, 25 bp, Homo sapien
gaataccgaaatggaacattcacat

SEQ ID NO: 775746 - DNA, 25 bp, Homo sapien
tatctcgtgacacgggaataccgaa

SEQ ID NO: 775747 - DNA, 25 bp, Homo sapien
tccagcttgtagatttcctttcctc

SEQ ID NO: 775748 - DNA, 25 bp, Homo sapien
tattccagcttgtagatttcctttc

SEQ ID NO: 775749 - DNA, 25 bp, Homo sapien
agccgtattccagcttgtagatttc

SEQ ID NO: 775750 - DNA, 25 bp, Homo sapien
cgtattccagcttgtagatttcctt

SEQ ID NO: 775751 - DNA, 25 bp, Homo sapien
gatgcagattggtttgccttgggaa

SEQ ID NO: 775752 - DNA, 25 bp, Homo sapien
tctaacggagaagtattggaaagta

SEQ ID NO: 775753 - DNA, 25 bp, Homo sapien
gcagattggtttgccttgggaaaga

SEQ ID NO: 775754 - DNA, 25 bp, Homo sapien
aaagtaggattgttgagtgggtgtt

SEQ ID NO: 775755 - DNA, 25 bp, Homo sapien
aaaattgatttctaacataacactg

SEQ ID NO: 775756 - DNA, 25 bp, Homo sapien
aattgatttctaacataacactgtc

SEQ ID NO: 775757 - DNA, 25 bp, Homo sapien
aaattgatttctaacataacactgt

SEQ ID NO: 775758 - DNA, 25 bp, Homo sapien
gtgtatttattctcggtgctgcttc

SEQ ID NO: 775759 - DNA, 25 bp, Homo sapien
taatgctggtgtatttattctcggt

SEQ ID NO: 775760 - DNA, 25 bp, Homo sapien
cagggttgcgggtatatgtgccatt

SEQ ID NO: 775761 - DNA, 25 bp, Homo sapien
aactgagaccgcttgcagggttgcg

SEQ ID NO: 775762 - DNA, 25 bp, Homo sapien
cgcatttctgtacattggtgctctc

SEQ ID NO: 775763 - DNA, 25 bp, Homo sapien
ttcctgccacgcagacagcttcaag

SEQ ID NO: 775764 - DNA, 25 bp, Homo sapien
tgagcacgcatttctgtacattggt

SEQ ID NO: 775765 - DNA, 25 bp, Homo sapien
ttcaagggtgcccatccatctatcc

SEQ ID NO: 775766 - DNA, 25 bp, Homo sapien
aaggaggataatttatgagagagct

SEQ ID NO: 775767 - DNA, 25 bp, Homo sapien
gccactcttctgccacagatgtctg

SEQ ID NO: 775768 - DNA, 25 bp, Homo sapien
tcagccaacgctggacagggaggaa

SEQ ID NO: 775769 - DNA, 25 bp, Homo sapien
tttgcaacaggcccctgccctttcc

SEQ ID NO: 775770 - DNA, 25 bp, Homo sapien
gctgaaagcccatggtctttattga

SEQ ID NO: 775771 - DNA, 25 bp, Homo sapien
ctgaaagcccatggtctttattgat

SEQ ID NO: 775772 - DNA, 25 bp, Homo sapien
ggctgaaagcccatggtctttattg

SEQ ID NO: 775773 - DNA, 25 bp, Homo sapien
ccggagctgataatggactagccat

SEQ ID NO: 775774 - DNA, 25 bp, Homo sapien
tggtggcacagcaggtttggtaaat

SEQ ID NO: 775775 - DNA, 25 bp, Homo sapien
cttgggagcttataagctttgcttt

SEQ ID NO: 775776 - DNA, 25 bp, Homo sapien
tttggtaaattgctggtgccggagc

SEQ ID NO: 775777 - DNA, 25 bp, Homo sapien
cagagccaagcagtgcacggagcag

SEQ ID NO: 775778 - DNA, 25 bp, Homo sapien
tgtgtaggtggagctttgggtttct

SEQ ID NO: 775779 - DNA, 25 bp, Homo sapien
ccaaggtagacaccgaatctaaaca

SEQ ID NO: 775780 - DNA, 25 bp, Homo sapien
ggttttcttacccagaacaggagca

SEQ ID NO: 775781 - DNA, 25 bp, Homo sapien
tttgcacgctttccaccgaacctga

SEQ ID NO: 775782 - DNA, 25 bp, Homo sapien
tatagtgatagtagacccttggcag

SEQ ID NO: 775783 - DNA, 25 bp, Homo sapien
agggtccatgacaccataccaggca

SEQ ID NO: 775784 - DNA, 25 bp, Homo sapien
tttgacatttgtgactttgcacgct

SEQ ID NO: 775785 - DNA, 25 bp, Homo sapien
catcagaggagcacattttgagcac

SEQ ID NO: 775786 - DNA, 25 bp, Homo sapien
taaagcttctaagtccacacccttg

SEQ ID NO: 775787 - DNA, 25 bp, Homo sapien
tatgaagtaggctttcggcgtctgg

SEQ ID NO: 775788 - DNA, 25 bp, Homo sapien
agccagggtgactgagaccactttg

SEQ ID NO: 775789 - DNA, 25 bp, Homo sapien
tggttgaggccagatgatgtgttta

SEQ ID NO: 775790 - DNA, 25 bp, Homo sapien
cctggaagcttgtctcaaggtgttc

SEQ ID NO: 775791 - DNA, 25 bp, Homo sapien
ttttaacatgtcctggaagcttgtc

SEQ ID NO: 775792 - DNA, 25 bp, Homo sapien
ccgaggcccctggaaacagagatgg

SEQ ID NO: 775793 - DNA, 25 bp, Homo sapien
gctgcctgctcatactggggcagat

SEQ ID NO: 775794 - DNA, 25 bp, Homo sapien
ggctgcctgctcatactggggcaga

SEQ ID NO: 775795 - DNA, 25 bp, Homo sapien
tgcctgctcatactggggcagatgt

SEQ ID NO: 775796 - DNA, 25 bp, Homo sapien
ctgcctgctcatactggggcagatg

SEQ ID NO: 775797 - DNA, 25 bp, Homo sapien
ccccattggactatacaggaacaca

SEQ ID NO: 775798 - DNA, 25 bp, Homo sapien
tggaggtccaagagataccacactc

SEQ ID NO: 775799 - DNA, 25 bp, Homo sapien
gatgcctttggagcaatgcccagca

SEQ ID NO: 775800 - DNA, 25 bp, Homo sapien
ggcaagaggtcagatgatcccagta

SEQ ID NO: 775801 - DNA, 25 bp, Homo sapien
gcaattccccctgttgagctgtggc

SEQ ID NO: 775802 - DNA, 25 bp, Homo sapien
caccgtgcccataatatgataattt

SEQ ID NO: 775803 - DNA, 25 bp, Homo sapien
aatttaatgctaaaacattcccgtg

SEQ ID NO: 775804 - DNA, 25 bp, Homo sapien
taaaacattcccgtgcaaggagagc

SEQ ID NO: 775805 - DNA, 25 bp, Homo sapien
cacagagctctcaccatgcggagaa

SEQ ID NO: 775806 - DNA, 25 bp, Homo sapien
ctccctgttgtcgaggaggccacag

SEQ ID NO: 775807 - DNA, 25 bp, Homo sapien
caccatgcggagaaacgatcctttc

SEQ ID NO: 775808 - DNA, 25 bp, Homo sapien
ccctgttgtcgaggaggccacagag

SEQ ID NO: 775809 - DNA, 25 bp, Homo sapien
acatgaaatctatccggaaagcaac

SEQ ID NO: 775810 - DNA, 25 bp, Homo sapien
ctgcaaactgtaacatgaaatctat

SEQ ID NO: 775811 - DNA, 25 bp, Homo sapien
catgaaatctatccggaaagcaaca

SEQ ID NO: 775812 - DNA, 25 bp, Homo sapien
atgaaatctatccggaaagcaacag

SEQ ID NO: 775813 - DNA, 25 bp, Homo sapien
tactccgtcactggagtgacagtcc

SEQ ID NO: 775814 - DNA, 25 bp, Homo sapien
tcccaggagtactccgtcactggag

SEQ ID NO: 775815 - DNA, 25 bp, Homo sapien
cgtcactggagtgacagtccctcat

SEQ ID NO: 775816 - DNA, 25 bp, Homo sapien
ggagtactccgtcactggagtgaca

SEQ ID NO: 775817 - DNA, 25 bp, Homo sapien
ctaagtctgtccctcactggtggcc

SEQ ID NO: 775818 - DNA, 25 bp, Homo sapien
tcactggtggcctctttgagtcacc

SEQ ID NO: 775819 - DNA, 25 bp, Homo sapien
aagagccaatcactccgagtgtctc

SEQ ID NO: 775820 - DNA, 25 bp, Homo sapien
agtagcaaagctaaccctctggcca

SEQ ID NO: 775821 - DNA, 25 bp, Homo sapien
ctaggtgagatgattcacacctgca

SEQ ID NO: 775822 - DNA, 25 bp, Homo sapien
ggctaggtgagatgattcacacctg

SEQ ID NO: 775823 - DNA, 25 bp, Homo sapien
gctggctaggtgagatgattcacac

SEQ ID NO: 775824 - DNA, 25 bp, Homo sapien
cttgctggctaggtgagatgattca

SEQ ID NO: 775825 - DNA, 25 bp, Homo sapien
cttgatgatctcttaggctcctttc

SEQ ID NO: 775826 - DNA, 25 bp, Homo sapien
ctgtgattctggataaacgactgag

SEQ ID NO: 775827 - DNA, 25 bp, Homo sapien
gactttggtgcttgtttcaagtcaa

SEQ ID NO: 775828 - DNA, 25 bp, Homo sapien
catgtcacactgacttgatgatctc

SEQ ID NO: 775829 - DNA, 25 bp, Homo sapien
ccatttgatggcacgttgtgtagaa

SEQ ID NO: 775830 - DNA, 25 bp, Homo sapien
gatggcacgttgtgtagaagattac

SEQ ID NO: 775831 - DNA, 25 bp, Homo sapien
tgatccatttgatggcacgttgtgt

SEQ ID NO: 775832 - DNA, 25 bp, Homo sapien
aaatgatccatttgatggcacgttg

SEQ ID NO: 775833 - DNA, 25 bp, Homo sapien
cgcgatgtctttttattttcttaat

SEQ ID NO: 775834 - DNA, 25 bp, Homo sapien
ttcgcgatgtctttttattttctta

SEQ ID NO: 775835 - DNA, 25 bp, Homo sapien
cttcgcgatgtctttttattttctt

SEQ ID NO: 775836 - DNA, 25 bp, Homo sapien
tcgcgatgtctttttattttcttaa

SEQ ID NO: 775837 - DNA, 25 bp, Homo sapien
ttacccgcatttcactgaatttctt

SEQ ID NO: 775838 - DNA, 25 bp, Homo sapien
gccgtttacccgcatttcactgaat

SEQ ID NO: 775839 - DNA, 25 bp, Homo sapien
agtggtagttcaccggcggcccgca

SEQ ID NO: 775840 - DNA, 25 bp, Homo sapien
gatcagagtagtggtagttcaccgg

SEQ ID NO: 775841 - DNA, 25 bp, Homo sapien
caagaagcttttgctccaaaccact

SEQ ID NO: 775842 - DNA, 25 bp, Homo sapien
tgtagacacctgctgactgtatctt

SEQ ID NO: 775843 - DNA, 25 bp, Homo sapien
gactgtatcttaaggcttgtttctc

SEQ ID NO: 775844 - DNA, 25 bp, Homo sapien
gaagacatcggcatgtagacacctg

SEQ ID NO: 775845 - DNA, 25 bp, Homo sapien
ttaaggaagacatcggcatgtagac

SEQ ID NO: 775846 - DNA, 25 bp, Homo sapien
tcttctgagcccaggatttttatca

SEQ ID NO: 775847 - DNA, 25 bp, Homo sapien
cccaggatttttatcagctaagccc

SEQ ID NO: 775848 - DNA, 25 bp, Homo sapien
agcccaggatttttatcagctaagc

SEQ ID NO: 775849 - DNA, 25 bp, Homo sapien
caggatttttatcagctaagcccat

SEQ ID NO: 775850 - DNA, 25 bp, Homo sapien
acagtctacccggagggcagaaggc

SEQ ID NO: 775851 - DNA, 25 bp, Homo sapien
tgcaaataagtgagtgcgcctgctt

SEQ ID NO: 775852 - DNA, 25 bp, Homo sapien
cctgctttgtgagtgagacctttgt

SEQ ID NO: 775853 - DNA, 25 bp, Homo sapien
ggagccttgtcaaacttctcagcag

SEQ ID NO: 775854 - DNA, 25 bp, Homo sapien
gccttgatgggtgaggaggttttca

SEQ ID NO: 775855 - DNA, 25 bp, Homo sapien
cattggctgcgtgagggtcagaagg

SEQ ID NO: 775856 - DNA, 25 bp, Homo sapien
cagaaggggctccatttgtctgagc

SEQ ID NO: 775857 - DNA, 25 bp, Homo sapien
ggaagccattggctgcgtgagggtc

SEQ ID NO: 775858 - DNA, 25 bp, Homo sapien
gtgtggggatcaggtcctctgggtc

SEQ ID NO: 775859 - DNA, 25 bp, Homo sapien
ttagctgccatgtgagctcaggaag

SEQ ID NO: 775860 - DNA, 25 bp, Homo sapien
aagccagtgtggggatcaggtcctc

SEQ ID NO: 775861 - DNA, 25 bp, Homo sapien
catgtgagctcaggaagccagtgtg

SEQ ID NO: 775862 - DNA, 25 bp, Homo sapien
ggtgctggcacttagcagtacatct

SEQ ID NO: 775863 - DNA, 25 bp, Homo sapien
cttgaataagagaatagagatccca

SEQ ID NO: 775864 - DNA, 25 bp, Homo sapien
gggtgctggcacttagcagtacatc

SEQ ID NO: 775865 - DNA, 25 bp, Homo sapien
gtgctggcacttagcagtacatctc

SEQ ID NO: 775866 - DNA, 25 bp, Homo sapien
tttcttgctccacttgtagcctttg

SEQ ID NO: 775867 - DNA, 25 bp, Homo sapien
cattccaagtcctggtggcattccc

SEQ ID NO: 775868 - DNA, 25 bp, Homo sapien
tcttccttctctccgccacccttgc

SEQ ID NO: 775869 - DNA, 25 bp, Homo sapien
ttgtagcctttgtaaattctcttcc

SEQ ID NO: 775870 - DNA, 25 bp, Homo sapien
tgctcattgctcatggggaactgag

SEQ ID NO: 775871 - DNA, 25 bp, Homo sapien
caaggggtgttgtgacctggaggcc

SEQ ID NO: 775872 - DNA, 25 bp, Homo sapien
agcagcaaggggtgttgtgacctgg

SEQ ID NO: 775873 - DNA, 25 bp, Homo sapien
ctcattgctcatggggaactgaggg

SEQ ID NO: 775874 - DNA, 25 bp, Homo sapien
cacaagggtttcctgacagtatgaa

SEQ ID NO: 775875 - DNA, 25 bp, Homo sapien
tgaattatccttgagtgggttggca

SEQ ID NO: 775876 - DNA, 25 bp, Homo sapien
ggtgagcccaaaactgtcggataat

SEQ ID NO: 775877 - DNA, 25 bp, Homo sapien
tcggataatgggcaaacacaagggt

SEQ ID NO: 775878 - DNA, 25 bp, Homo sapien
gaagcaagcactgaggaaccatggg

SEQ ID NO: 775879 - DNA, 25 bp, Homo sapien
aagcaagcactgaggaaccatgggc

SEQ ID NO: 775880 - DNA, 25 bp, Homo sapien
gctccaccgcgctggggcaatattg

SEQ ID NO: 775881 - DNA, 25 bp, Homo sapien
attgaaaaggtcagcgaaggcaatg

SEQ ID NO: 775882 - DNA, 25 bp, Homo sapien
aaggtcagcgaaggcaatgtcagac

SEQ ID NO: 775883 - DNA, 25 bp, Homo sapien
cgcgctggggcaatattgaaaaggt

SEQ ID NO: 775884 - DNA, 25 bp, Homo sapien
gaggtacagcctgatcgctcctgtt

SEQ ID NO: 775885 - DNA, 25 bp, Homo sapien
tatctgggtcgagaaccatcttcct

SEQ ID NO: 775886 - DNA, 25 bp, Homo sapien
tctaagcctgcaagtgcctgggtgc

SEQ ID NO: 775887 - DNA, 25 bp, Homo sapien
cacttgctgggattaagtcctcccc

SEQ ID NO: 775888 - DNA, 25 bp, Homo sapien
gctaatatggttactcccttcccca

SEQ ID NO: 775889 - DNA, 25 bp, Homo sapien
gaggctaatatggttactcccttcc

SEQ ID NO: 775890 - DNA, 25 bp, Homo sapien
ttgttttagaggctaatatggttac

SEQ ID NO: 775891 - DNA, 25 bp, Homo sapien
ttttagaggctaatatggttactcc

SEQ ID NO: 775892 - DNA, 25 bp, Homo sapien
accaccaacccgcaagtgacttcac

SEQ ID NO: 775893 - DNA, 25 bp, Homo sapien
tagcaccaccaacccgcaagtgact

SEQ ID NO: 775894 - DNA, 25 bp, Homo sapien
ccaccaacccgcaagtgacttcacc

SEQ ID NO: 775895 - DNA, 25 bp, Homo sapien
ccatagcaccaccaacccgcaagtg

SEQ ID NO: 775896 - DNA, 25 bp, Homo sapien
ttgctacttttctctgtaccgttcc

SEQ ID NO: 775897 - DNA, 25 bp, Homo sapien
caaggtcactctcggaccatttgag

SEQ ID NO: 775898 - DNA, 25 bp, Homo sapien
ggcagagtccgaaatttccctttga

SEQ ID NO: 775899 - DNA, 25 bp, Homo sapien
tttgaaccaatgttgggtcccagtg

SEQ ID NO: 775900 - DNA, 25 bp, Homo sapien
ccactcgccgtctgtggaagacaca

SEQ ID NO: 775901 - DNA, 25 bp, Homo sapien
ttatggtgagtgggtgttttctgct

SEQ ID NO: 775902 - DNA, 25 bp, Homo sapien
taaaaagtcttgtcctacggctctc

SEQ ID NO: 775903 - DNA, 25 bp, Homo sapien
tgctctctcttcctcaagtttgtta

SEQ ID NO: 775904 - DNA, 25 bp, Homo sapien
tctctcttcctcaagtttgttaaaa

SEQ ID NO: 775905 - DNA, 25 bp, Homo sapien
aagcagctttttgacgggggagcga

SEQ ID NO: 775906 - DNA, 25 bp, Homo sapien
cactttttccaggtttctgaggcaa

SEQ ID NO: 775907 - DNA, 25 bp, Homo sapien
gacgggggagcgaggtgggaattga

SEQ ID NO: 775908 - DNA, 25 bp, Homo sapien
gaattgagggtttgccatgagtgcc

SEQ ID NO: 775909 - DNA, 25 bp, Homo sapien
tgtggggaagaatggtgaagaagca

SEQ ID NO: 775910 - DNA, 25 bp, Homo sapien
tggggaagaatggtgaagaagcatg

SEQ ID NO: 775911 - DNA, 25 bp, Homo sapien
gaagaatggtgaagaagcatggcca

SEQ ID NO: 775912 - DNA, 25 bp, Homo sapien
gggaagaatggtgaagaagcatggc

SEQ ID NO: 775913 - DNA, 25 bp, Homo sapien
gaagttgtcagcattgtcattctct

SEQ ID NO: 775914 - DNA, 25 bp, Homo sapien
cagctacagctagtctatagaggga

SEQ ID NO: 775915 - DNA, 25 bp, Homo sapien
tcaagcattatagtctggcctggct

SEQ ID NO: 775916 - DNA, 25 bp, Homo sapien
caagcctttctcgaagtccatcaag

SEQ ID NO: 775917 - DNA, 25 bp, Homo sapien
acataccgactagtattatgcttat

SEQ ID NO: 775918 - DNA, 25 bp, Homo sapien
aacataccgactagtattatgctta

SEQ ID NO: 775919 - DNA, 25 bp, Homo sapien
ttaattcaatgttgatggtgataga

SEQ ID NO: 775920 - DNA, 25 bp, Homo sapien
tttaattcaatgttgatggtgatag

SEQ ID NO: 775921 - DNA, 25 bp, Homo sapien
atttaattcaatgttgatggtgata

SEQ ID NO: 775922 - DNA, 25 bp, Homo sapien
taattcaatgttgatggtgatagaa

SEQ ID NO: 775923 - DNA, 25 bp, Homo sapien
gaagttattcacacgacgagtgagg

SEQ ID NO: 775924 - DNA, 25 bp, Homo sapien
ttcacacgacgagtgagggtcccca

SEQ ID NO: 775925 - DNA, 25 bp, Homo sapien
ttattcacacgacgagtgagggtcc

SEQ ID NO: 775926 - DNA, 25 bp, Homo sapien
cttggtgaagttattcacacgacga

SEQ ID NO: 775927 - DNA, 25 bp, Homo sapien
gaagatagactctccacaggggtcc

SEQ ID NO: 775928 - DNA, 25 bp, Homo sapien
ccacaggggtcccttgtggcgcatt

SEQ ID NO: 775929 - DNA, 25 bp, Homo sapien
aggaagatagactctccacaggggt

SEQ ID NO: 775930 - DNA, 25 bp, Homo sapien
caggggtcccttgtggcgcattatt

SEQ ID NO: 775931 - DNA, 25 bp, Homo sapien
ggtcattgtactgagttcctgacat

SEQ ID NO: 775932 - DNA, 25 bp, Homo sapien
ctgaaggctaaatccctaggaatct

SEQ ID NO: 775933 - DNA, 25 bp, Homo sapien
aaggctaaatccctaggaatctgga

SEQ ID NO: 775934 - DNA, 25 bp, Homo sapien
gaggtcattgtactgagttcctgac

SEQ ID NO: 775935 - DNA, 25 bp, Homo sapien
aggtcagtggtccatgacccagggc

SEQ ID NO: 775936 - DNA, 25 bp, Homo sapien
tcaaggtcagtggtccatgacccag

SEQ ID NO: 775937 - DNA, 25 bp, Homo sapien
aagaaggaagtcaaggtcagtggtc

SEQ ID NO: 775938 - DNA, 25 bp, Homo sapien
gaagtcaaggtcagtggtccatgac

SEQ ID NO: 775939 - DNA, 25 bp, Homo sapien
cgagtgggagttataaggacgcgaa

SEQ ID NO: 775940 - DNA, 25 bp, Homo sapien
gccgtttcctagtggccccagtgga

SEQ ID NO: 775941 - DNA, 25 bp, Homo sapien
gatggtagctctgtaagccgtttcc

SEQ ID NO: 775942 - DNA, 25 bp, Homo sapien
ggaattcattccaagcgagtgggag

SEQ ID NO: 775943 - DNA, 25 bp, Homo sapien
ccctcttggaggtccgggtcttgct

SEQ ID NO: 775944 - DNA, 25 bp, Homo sapien
cttggaggtccgggtcttgctgctc

SEQ ID NO: 775945 - DNA, 25 bp, Homo sapien
cagggctgctagaaaaaggctcgca

SEQ ID NO: 775946 - DNA, 25 bp, Homo sapien
tcagggctgctagaaaaaggctcgc

SEQ ID NO: 775947 - DNA, 25 bp, Homo sapien
tactctgcagcgagattcatgtgac

SEQ ID NO: 775948 - DNA, 25 bp, Homo sapien
gacagctccggagagccaaatctca

SEQ ID NO: 775949 - DNA, 25 bp, Homo sapien
gattcatgtgactgcaccccaagat

SEQ ID NO: 775950 - DNA, 25 bp, Homo sapien
tgactgatactctgcagcgagattc

SEQ ID NO: 775951 - DNA, 25 bp, Homo sapien
ccacaatagttgcaggaagactgcc

SEQ ID NO: 775952 - DNA, 25 bp, Homo sapien
aaaacagtttggtgaccacaatagt

SEQ ID NO: 775953 - DNA, 25 bp, Homo sapien
tttggtgaccacaatagttgcagga

SEQ ID NO: 775954 - DNA, 25 bp, Homo sapien
tgaccacaatagttgcaggaagact

SEQ ID NO: 775955 - DNA, 25 bp, Homo sapien
tggccacttcctcctctccttgtca

SEQ ID NO: 775956 - DNA, 25 bp, Homo sapien
ggccacttcctcctctccttgtcat

SEQ ID NO: 775957 - DNA, 25 bp, Homo sapien
gttggccacttcctcctctccttgt

SEQ ID NO: 775958 - DNA, 25 bp, Homo sapien
ttggccacttcctcctctccttgtc

SEQ ID NO: 775959 - DNA, 25 bp, Homo sapien
ctgaacgtctctgatcaggtcagcc

SEQ ID NO: 775960 - DNA, 25 bp, Homo sapien
gggacacaagcccattactgcctcg

SEQ ID NO: 775961 - DNA, 25 bp, Homo sapien
ggctcttactgcattcggaaactga

SEQ ID NO: 775962 - DNA, 25 bp, Homo sapien
tagctctgccacagcgcatgactct

SEQ ID NO: 775963 - DNA, 25 bp, Homo sapien
aggccattcaatacactcagtcaga

SEQ ID NO: 775964 - DNA, 25 bp, Homo sapien
gcctgaggaggcatatccactgaga

SEQ ID NO: 775965 - DNA, 25 bp, Homo sapien
tcaggtgtctggtctgacacatgac

SEQ ID NO: 775966 - DNA, 25 bp, Homo sapien
gactagtaccgtagaaggccattca

SEQ ID NO: 775967 - DNA, 25 bp, Homo sapien
gctgtggatttcctgtgtgctttct

SEQ ID NO: 775968 - DNA, 25 bp, Homo sapien
gtgtgctttctgtgaacttcctgtg

SEQ ID NO: 775969 - DNA, 25 bp, Homo sapien
gctttctgtgaacttcctgtgtgct

SEQ ID NO: 775970 - DNA, 25 bp, Homo sapien
ctgtgtgctttctgtgaacttcctg

SEQ ID NO: 775971 - DNA, 25 bp, Homo sapien
cctgtggacgtcctgtctgcttcta

SEQ ID NO: 775972 - DNA, 25 bp, Homo sapien
gtggacgtcctgtctgcttctagta

SEQ ID NO: 775973 - DNA, 25 bp, Homo sapien
tgcttcctgtggacgtcctgtctgc

SEQ ID NO: 775974 - DNA, 25 bp, Homo sapien
tctgcttcctgtggacgtcctgtct

SEQ ID NO: 775975 - DNA, 25 bp, Homo sapien
gtcttgtggatctcctgttgtcttg

SEQ ID NO: 775976 - DNA, 25 bp, Homo sapien
gcttgttgtggactgcctttctgct

SEQ ID NO: 775977 - DNA, 25 bp, Homo sapien
gtgtcttgtggatctcctgttgtct

SEQ ID NO: 775978 - DNA, 25 bp, Homo sapien
tgtcttgtggatctcctgttgtctt

SEQ ID NO: 775979 - DNA, 25 bp, Homo sapien
ggaattcagagtgggatcctacaaa

SEQ ID NO: 775980 - DNA, 25 bp, Homo sapien
aaacacagtgaacgattgatgcagc

SEQ ID NO: 775981 - DNA, 25 bp, Homo sapien
gataagccatgattagccagtcccc

SEQ ID NO: 775982 - DNA, 25 bp, Homo sapien
tgggcaatccctcttatgactcagt

SEQ ID NO: 775983 - DNA, 25 bp, Homo sapien
taagagttgtctgttagggcatttc

SEQ ID NO: 775984 - DNA, 25 bp, Homo sapien
tggccccactagcaggtacctgcag

SEQ ID NO: 775985 - DNA, 25 bp, Homo sapien
ttctgggcactttggccccactagc

SEQ ID NO: 775986 - DNA, 25 bp, Homo sapien
cctgcagctggttgtctaagagttg

SEQ ID NO: 775987 - DNA, 25 bp, Homo sapien
tctccaaccgagcattttaagagct

SEQ ID NO: 775988 - DNA, 25 bp, Homo sapien
aagctggaccaagctgttaggctgc

SEQ ID NO: 775989 - DNA, 25 bp, Homo sapien
cacagagcctcaccatgggaaagct

SEQ ID NO: 775990 - DNA, 25 bp, Homo sapien
ttttagatatgacccggcggcttct

SEQ ID NO: 775991 - DNA, 25 bp, Homo sapien
ggccctgggaattgctctcttatgg

SEQ ID NO: 775992 - DNA, 25 bp, Homo sapien
cagctgggatcccagaagaaggccc

SEQ ID NO: 775993 - DNA, 25 bp, Homo sapien
gggatctggtaagccctccggagac

SEQ ID NO: 775994 - DNA, 25 bp, Homo sapien
gagacctcagactcataccagctgg

SEQ ID NO: 775995 - DNA, 25 bp, Homo sapien
tcatcaggctttggtgagtacattt

SEQ ID NO: 775996 - DNA, 25 bp, Homo sapien
aacgtggtcagttaatgggaatagc

SEQ ID NO: 775997 - DNA, 25 bp, Homo sapien
tggtgagtacatttgttccaacaaa

SEQ ID NO: 775998 - DNA, 25 bp, Homo sapien
aatcttctgacccacacacaacgtg

SEQ ID NO: 775999 - DNA, 25 bp, Homo sapien
tcacactgcttaaaaacgagacctt

SEQ ID NO: 776000 - DNA, 25 bp, Homo sapien
cttgcaggttttaccaggatgtcac

SEQ ID NO: 776001 - DNA, 25 bp, Homo sapien
ggttttaccaggatgtcacactgct

SEQ ID NO: 776002 - DNA, 25 bp, Homo sapien
tgcttaaaaacgagaccttctgtgt

SEQ ID NO: 776003 - DNA, 25 bp, Homo sapien
acccttagtgctttcactcttcact

SEQ ID NO: 776004 - DNA, 25 bp, Homo sapien
tcacccttagtgctttcactcttca

SEQ ID NO: 776005 - DNA, 25 bp, Homo sapien
gtcacccttagtgctttcactcttc

SEQ ID NO: 776006 - DNA, 25 bp, Homo sapien
ccttagtgctttcactcttcacttc

SEQ ID NO: 776007 - DNA, 25 bp, Homo sapien
tttctgagatttgtccccctagggc

SEQ ID NO: 776008 - DNA, 25 bp, Homo sapien
tctgagatttgtccccctagggcct

SEQ ID NO: 776009 - DNA, 25 bp, Homo sapien
agatttgtccccctagggccttcat

SEQ ID NO: 776010 - DNA, 25 bp, Homo sapien
tgagatttgtccccctagggccttc

SEQ ID NO: 776011 - DNA, 25 bp, Homo sapien
tgctggtccatgtctaatactcttc

SEQ ID NO: 776012 - DNA, 25 bp, Homo sapien
cctgtgaacgtgtgctttcctgctg

SEQ ID NO: 776013 - DNA, 25 bp, Homo sapien
ctgacaccttttgggcgtggagaag

SEQ ID NO: 776014 - DNA, 25 bp, Homo sapien
ttgttgtgagaagaccatagcggcc

SEQ ID NO: 776015 - DNA, 25 bp, Homo sapien
cttcccacattttgactattttggc

SEQ ID NO: 776016 - DNA, 25 bp, Homo sapien
caatataagaaggtgtcagggccac

SEQ ID NO: 776017 - DNA, 25 bp, Homo sapien
ggcaatataagaaggtgtcagggcc

SEQ ID NO: 776018 - DNA, 25 bp, Homo sapien
tcccacattttgactattttggcaa

SEQ ID NO: 776019 - DNA, 25 bp, Homo sapien
agtcctcaagaattctcagtgatct

SEQ ID NO: 776020 - DNA, 25 bp, Homo sapien
atagtcctcaagaattctcagtgat

SEQ ID NO: 776021 - DNA, 25 bp, Homo sapien
tcctcaagaattctcagtgatcttt

SEQ ID NO: 776022 - DNA, 25 bp, Homo sapien
gggcaggagtaaaacatagtcctca

SEQ ID NO: 776023 - DNA, 25 bp, Homo sapien
tcccataacttctatgactttctct

SEQ ID NO: 776024 - DNA, 25 bp, Homo sapien
aggaaggaatcgaactcccagagac

SEQ ID NO: 776025 - DNA, 25 bp, Homo sapien
aaaggaaggaatcgaactcccagag

SEQ ID NO: 776026 - DNA, 25 bp, Homo sapien
ccataacttctatgactttctctac

SEQ ID NO: 776027 - DNA, 25 bp, Homo sapien
gggtttatcatatgagcccaccata

SEQ ID NO: 776028 - DNA, 25 bp, Homo sapien
gacacacgggcatacttcacatctg

SEQ ID NO: 776029 - DNA, 25 bp, Homo sapien
gctatcccaactggcgttaaagtat

SEQ ID NO: 776030 - DNA, 25 bp, Homo sapien
ttcacagtaggaggattgaccagca

SEQ ID NO: 776031 - DNA, 25 bp, Homo sapien
ctggctagttcccttgatagtgggt

SEQ ID NO: 776032 - DNA, 25 bp, Homo sapien
gcatttgttatcgtcttctttatag

SEQ ID NO: 776033 - DNA, 25 bp, Homo sapien
taatgttattgttaccgcccacgca

SEQ ID NO: 776034 - DNA, 25 bp, Homo sapien
cccgatatggtgtttctccgaataa

SEQ ID NO: 776035 - DNA, 25 bp, Homo sapien
agacctttgacctctgttttcagat

SEQ ID NO: 776036 - DNA, 25 bp, Homo sapien
cctttgacctctgttttcagattta

SEQ ID NO: 776037 - DNA, 25 bp, Homo sapien
gagacctttgacctctgttttcaga

SEQ ID NO: 776038 - DNA, 25 bp, Homo sapien
aagagacctttgacctctgttttca

SEQ ID NO: 776039 - DNA, 25 bp, Homo sapien
attcaatatatgagatatcacccca

SEQ ID NO: 776040 - DNA, 25 bp, Homo sapien
tcaatatatgagatatcaccccagg

SEQ ID NO: 776041 - DNA, 25 bp, Homo sapien
caattcaatatatgagatatcaccc

SEQ ID NO: 776042 - DNA, 25 bp, Homo sapien
tgcaattcaatatatgagatatcac

SEQ ID NO: 776043 - DNA, 25 bp, Homo sapien
ctagattggtggagaccaaacccac

SEQ ID NO: 776044 - DNA, 25 bp, Homo sapien
aatactctagtcaactggcttcaat

SEQ ID NO: 776045 - DNA, 25 bp, Homo sapien
aacagctaaatactctagtcaactg

SEQ ID NO: 776046 - DNA, 25 bp, Homo sapien
agattggtggagaccaaacccacga

SEQ ID NO: 776047 - DNA, 25 bp, Homo sapien
cctgcatcgattgaatgcaaatcag

SEQ ID NO: 776048 - DNA, 25 bp, Homo sapien
ggattgcaagactatcctgcatcga

SEQ ID NO: 776049 - DNA, 25 bp, Homo sapien
gattgcaagactatcctgcatcgat

SEQ ID NO: 776050 - DNA, 25 bp, Homo sapien
ttgcaagactatcctgcatcgattg

SEQ ID NO: 776051 - DNA, 25 bp, Homo sapien
tgttggctccctgctaagacttcaa

SEQ ID NO: 776052 - DNA, 25 bp, Homo sapien
gatcacaggacccttcgcatagagg

SEQ ID NO: 776053 - DNA, 25 bp, Homo sapien
tggctactggtaaaggttctgtcct

SEQ ID NO: 776054 - DNA, 25 bp, Homo sapien
caaagcttcacttcttaagagaggg

SEQ ID NO: 776055 - DNA, 25 bp, Homo sapien
tcaagggttaatctctggagtgacc

SEQ ID NO: 776056 - DNA, 25 bp, Homo sapien
taaaaaggcactcaggtttagcact

SEQ ID NO: 776057 - DNA, 25 bp, Homo sapien
taggaatcacttgaatgtcgtggcc

SEQ ID NO: 776058 - DNA, 25 bp, Homo sapien
caaaggtgccattagcccaggctct

SEQ ID NO: 776059 - DNA, 25 bp, Homo sapien
tggtaaacgttactagagctctcct

SEQ ID NO: 776060 - DNA, 25 bp, Homo sapien
tactcgtagcttcaccatcctttgg

SEQ ID NO: 776061 - DNA, 25 bp, Homo sapien
ggaagccactgttccacatgtctgg

SEQ ID NO: 776062 - DNA, 25 bp, Homo sapien
tctttcctggcctcgctgtaggtag

SEQ ID NO: 776063 - DNA, 25 bp, Homo sapien
gggcagctacaatcccgtaatactc

SEQ ID NO: 776064 - DNA, 25 bp, Homo sapien
gcactggggcagctacaatcccgta

SEQ ID NO: 776065 - DNA, 25 bp, Homo sapien
acaatcccgtaatactcctttgatg

SEQ ID NO: 776066 - DNA, 25 bp, Homo sapien
ctgtctagcactggggcagctacaa

SEQ ID NO: 776067 - DNA, 25 bp, Homo sapien
gaaggcctctggtgcagaggtaatt

SEQ ID NO: 776068 - DNA, 25 bp, Homo sapien
ggtaattaccctcattatccacttc

SEQ ID NO: 776069 - DNA, 25 bp, Homo sapien
ttcccgtttcacgtgtggacacgac

SEQ ID NO: 776070 - DNA, 25 bp, Homo sapien
tcagggaacaggtaagcgggaaggc

SEQ ID NO: 776071 - DNA, 25 bp, Homo sapien
tgcaggagctcctaagcttgggcta

SEQ ID NO: 776072 - DNA, 25 bp, Homo sapien
tgttcgatcatgcagagcttgaagc

SEQ ID NO: 776073 - DNA, 25 bp, Homo sapien
cccagcacaagatccgattgaggaa

SEQ ID NO: 776074 - DNA, 25 bp, Homo sapien
gcttgaagcgcttgtgagcagtcag

SEQ ID NO: 776075 - DNA, 25 bp, Homo sapien
caaggattattggaaggtacaggga

SEQ ID NO: 776076 - DNA, 25 bp, Homo sapien
tttctagaacgggaactcactatgt

SEQ ID NO: 776077 - DNA, 25 bp, Homo sapien
catcgagtctattttgcatggttaa

SEQ ID NO: 776078 - DNA, 25 bp, Homo sapien
gcctacggttagctcttcatggaga

SEQ ID NO: 776079 - DNA, 25 bp, Homo sapien
ctcagtctctggaatagctggaatt

SEQ ID NO: 776080 - DNA, 25 bp, Homo sapien
cctcagtctctggaatagctggaat

SEQ ID NO: 776081 - DNA, 25 bp, Homo sapien
gcctcagtctctggaatagctggaa

SEQ ID NO: 776082 - DNA, 25 bp, Homo sapien
gcattctcattcgtaataaaccaga

SEQ ID NO: 776083 - DNA, 25 bp, Homo sapien
tgtaagttagtgtttccatgagctc

SEQ ID NO: 776084 - DNA, 25 bp, Homo sapien
cagtggctaatggttttatcaatca

SEQ ID NO: 776085 - DNA, 25 bp, Homo sapien
gagctctgtgagctgctgcaattaa

SEQ ID NO: 776086 - DNA, 25 bp, Homo sapien
tgatcagtagcttccaatccttcct

SEQ ID NO: 776087 - DNA, 25 bp, Homo sapien
gaacccaaagaggtcatacctgctg

SEQ ID NO: 776088 - DNA, 25 bp, Homo sapien
ggaactccaccaagtatttgatcag

SEQ ID NO: 776089 - DNA, 25 bp, Homo sapien
taagtcatgttctactaaatgtgcc

SEQ ID NO: 776090 - DNA, 25 bp, Homo sapien
ggactggaagattgagtcctcttcc

SEQ ID NO: 776091 - DNA, 25 bp, Homo sapien
aagttctgaggactggaagattgag

SEQ ID NO: 776092 - DNA, 25 bp, Homo sapien
ctgcaaaggtgcctagaataagaag

SEQ ID NO: 776093 - DNA, 25 bp, Homo sapien
cctagaataagaagttctgaggact

SEQ ID NO: 776094 - DNA, 25 bp, Homo sapien
tggctgtctctggacccccaacgga

SEQ ID NO: 776095 - DNA, 25 bp, Homo sapien
ccccaacggactgtgctgagattac

SEQ ID NO: 776096 - DNA, 25 bp, Homo sapien
gtgagtgctcactcttctgggatgt

SEQ ID NO: 776097 - DNA, 25 bp, Homo sapien
ctcctgtccgtgagtgctcactctt

SEQ ID NO: 776098 - DNA, 25 bp, Homo sapien
ttgagaggaccagctctatctgggt

SEQ ID NO: 776099 - DNA, 25 bp, Homo sapien
tgagattataccaccatgctccagc

SEQ ID NO: 776100 - DNA, 25 bp, Homo sapien
gctctatctgggtcccagcattttg

SEQ ID NO: 776101 - DNA, 25 bp, Homo sapien
gcattttgggtgaggccagaggata

SEQ ID NO: 776102 - DNA, 25 bp, Homo sapien
aatgtgttaggaagtcttacattgt

SEQ ID NO: 776103 - DNA, 25 bp, Homo sapien
atgtgttaggaagtcttacattgtt

SEQ ID NO: 776104 - DNA, 25 bp, Homo sapien
tgtgttaggaagtcttacattgttc

SEQ ID NO: 776105 - DNA, 25 bp, Homo sapien
gtgttaggaagtcttacattgttca

SEQ ID NO: 776106 - DNA, 25 bp, Homo sapien
catcaaatttagtgcaaagatagcc

SEQ ID NO: 776107 - DNA, 25 bp, Homo sapien
agatcatcaaatttagtgcaaagat

SEQ ID NO: 776108 - DNA, 25 bp, Homo sapien
caaatttagtgcaaagatagcccct

SEQ ID NO: 776109 - DNA, 25 bp, Homo sapien
tttagtgcaaagatagcccctgtcc

SEQ ID NO: 776110 - DNA, 25 bp, Homo sapien
tgggagggcaggcatcccgtgcatc

SEQ ID NO: 776111 - DNA, 25 bp, Homo sapien
ctcttcgtgttgtaaagcttcccca

SEQ ID NO: 776112 - DNA, 25 bp, Homo sapien
tcttcttattaatggcggtgggagg

SEQ ID NO: 776113 - DNA, 25 bp, Homo sapien
ttaagcctcttcgtgttgtaaagct

SEQ ID NO: 776114 - DNA, 25 bp, Homo sapien
cctctatgttgtcctattgcatgga

SEQ ID NO: 776115 - DNA, 25 bp, Homo sapien
tcctctatgttgtcctattgcatgg

SEQ ID NO: 776116 - DNA, 25 bp, Homo sapien
cgcaccaataactttctccagagaa

SEQ ID NO: 776117 - DNA, 25 bp, Homo sapien
gggtcatggcgcaccaataactttc

SEQ ID NO: 776118 - DNA, 25 bp, Homo sapien
ccagtccatggaaaacccgcatgca

SEQ ID NO: 776119 - DNA, 25 bp, Homo sapien
ccaacacattatggagggcaggcag

SEQ ID NO: 776120 - DNA, 25 bp, Homo sapien
catccttcagtaggccttatgtcaa

SEQ ID NO: 776121 - DNA, 25 bp, Homo sapien
aacccgcatgcattctttggcccaa

SEQ ID NO: 776122 - DNA, 25 bp, Homo sapien
agcaaccggctcagcattctcctgg

SEQ ID NO: 776123 - DNA, 25 bp, Homo sapien
ctggatccaatgagcaaccggctca

SEQ ID NO: 776124 - DNA, 25 bp, Homo sapien
tccaatgagcaaccggctcagcatt

SEQ ID NO: 776125 - DNA, 25 bp, Homo sapien
atgagcaaccggctcagcattctcc

SEQ ID NO: 776126 - DNA, 25 bp, Homo sapien
tcaaaggacgagaagacgagtccat

SEQ ID NO: 776127 - DNA, 25 bp, Homo sapien
ggagttccagccaagtcccaagctt

SEQ ID NO: 776128 - DNA, 25 bp, Homo sapien
gattgcaccagccaggggagttcca

SEQ ID NO: 776129 - DNA, 25 bp, Homo sapien
tctggctgccaaatgcaccttgctc

SEQ ID NO: 776130 - DNA, 25 bp, Homo sapien
ccttgaaagtcccagtactgctact

SEQ ID NO: 776131 - DNA, 25 bp, Homo sapien
taactgtgcaatgtcaaaacaagct

SEQ ID NO: 776132 - DNA, 25 bp, Homo sapien
tagccaaaccccaaattcactgaag

SEQ ID NO: 776133 - DNA, 25 bp, Homo sapien
tgaaggccaacgaagagaatgaaga

SEQ ID NO: 776134 - DNA, 25 bp, Homo sapien
tactccatttgcagccatactcttg

SEQ ID NO: 776135 - DNA, 25 bp, Homo sapien
cacttggcatggcacaatgtagatt

SEQ ID NO: 776136 - DNA, 25 bp, Homo sapien
gctttgaatgagctgggctaaaacg

SEQ ID NO: 776137 - DNA, 25 bp, Homo sapien
tcgagttgggatcctgtcacattta

SEQ ID NO: 776138 - DNA, 25 bp, Homo sapien
tgccagagagatgtaagataactga

SEQ ID NO: 776139 - DNA, 25 bp, Homo sapien
tccacttgccagagagatgtaagat

SEQ ID NO: 776140 - DNA, 25 bp, Homo sapien
cacttgccagagagatgtaagataa

SEQ ID NO: 776141 - DNA, 25 bp, Homo sapien
ctccacttgccagagagatgtaaga

SEQ ID NO: 776142 - DNA, 25 bp, Homo sapien
tattggcctcagtataagatatttc

SEQ ID NO: 776143 - DNA, 25 bp, Homo sapien
aagatatttcttcgggcatatggac

SEQ ID NO: 776144 - DNA, 25 bp, Homo sapien
tatggacaactctgaaattgcaaaa

SEQ ID NO: 776145 - DNA, 25 bp, Homo sapien
tatgcacggaagcacattcatggaa

SEQ ID NO: 776146 - DNA, 25 bp, Homo sapien
catagctcttgctcttctggacggg

SEQ ID NO: 776147 - DNA, 25 bp, Homo sapien
aaacccagctcggtttggcatggca

SEQ ID NO: 776148 - DNA, 25 bp, Homo sapien
ggcacagagcgagacggaagtatta

SEQ ID NO: 776149 - DNA, 25 bp, Homo sapien
gaaggctttgtccaggttcgtagag

SEQ ID NO: 776150 - DNA, 25 bp, Homo sapien
ggagactttagggaggtgtggacca

SEQ ID NO: 776151 - DNA, 25 bp, Homo sapien
gagactttagggaggtgtggaccat

SEQ ID NO: 776152 - DNA, 25 bp, Homo sapien
gcaaggagattcaggacttcagcga

SEQ ID NO: 776153 - DNA, 25 bp, Homo sapien
catgcgtgtctatcagtagcaagga

SEQ ID NO: 776154 - DNA, 25 bp, Homo sapien
gcccatgactgagtgctgcccaatg

SEQ ID NO: 776155 - DNA, 25 bp, Homo sapien
tgacagtgccattttgcccatgact

SEQ ID NO: 776156 - DNA, 25 bp, Homo sapien
ctttgctcatgctggtccagcgtcc

SEQ ID NO: 776157 - DNA, 25 bp, Homo sapien
tggtccagcgtcctacaatctcctt

SEQ ID NO: 776158 - DNA, 25 bp, Homo sapien
gccatccagaattgctgaatttcca

SEQ ID NO: 776159 - DNA, 25 bp, Homo sapien
tcctgccatccagaattgctgaatt

SEQ ID NO: 776160 - DNA, 25 bp, Homo sapien
gaatgacacattgatcaacccatat

SEQ ID NO: 776161 - DNA, 25 bp, Homo sapien
tattcttcagactctaccatgtgaa

SEQ ID NO: 776162 - DNA, 25 bp, Homo sapien
tgtgaagccaatgaaagatgcctgc

SEQ ID NO: 776163 - DNA, 25 bp, Homo sapien
ctgctggtgaccaaatgatgttcat

SEQ ID NO: 776164 - DNA, 25 bp, Homo sapien
cctctctgggtaaaatagctgtgcg

SEQ ID NO: 776165 - DNA, 25 bp, Homo sapien
tacggatcagaaagaccgacagccc

SEQ ID NO: 776166 - DNA, 25 bp, Homo sapien
tgactgcagccgagaatcgatcaac

SEQ ID NO: 776167 - DNA, 25 bp, Homo sapien
cagggcactggaattgatctatacg

SEQ ID NO: 776168 - DNA, 25 bp, Homo sapien
ttttcctccacgtggcaccacagtg

SEQ ID NO: 776169 - DNA, 25 bp, Homo sapien
gcgggtgccaaagcgcgggcctttg

SEQ ID NO: 776170 - DNA, 25 bp, Homo sapien
caccacagtgcgtggacgagcgacc

SEQ ID NO: 776171 - DNA, 25 bp, Homo sapien
cgctgcgaggagagaagggaattca

SEQ ID NO: 776172 - DNA, 25 bp, Homo sapien
gagcagcgccgagcaaagtaatggc

SEQ ID NO: 776173 - DNA, 25 bp, Homo sapien
tcaactcgatccaaaatcgggtccg

SEQ ID NO: 776174 - DNA, 25 bp, Homo sapien
caatcattagcggaagagagggcga

SEQ ID NO: 776175 - DNA, 25 bp, Homo sapien
tgctttgatcaagagactgggaggc

SEQ ID NO: 776176 - DNA, 25 bp, Homo sapien
ttttgcggagtccatggccccgcgt

SEQ ID NO: 776177 - DNA, 25 bp, Homo sapien
acgaggcgagtgagagcgcccgggt

SEQ ID NO: 776178 - DNA, 25 bp, Homo sapien
ttgtcggagcccgacgacgaggcga

SEQ ID NO: 776179 - DNA, 25 bp, Homo sapien
ccgcgaccgccgctttttgcggagt

SEQ ID NO: 776180 - DNA, 25 bp, Homo sapien
atgtcctcttctgccgaggtggact

SEQ ID NO: 776181 - DNA, 25 bp, Homo sapien
tcttctgccgaggtggactctctcc

SEQ ID NO: 776182 - DNA, 25 bp, Homo sapien
caaaagtgacaaagctggtcatggc

SEQ ID NO: 776183 - DNA, 25 bp, Homo sapien
tgccgaggtggactctctccgcttc

SEQ ID NO: 776184 - DNA, 25 bp, Homo sapien
gaaagcagaaccacttgtaaccagc

SEQ ID NO: 776185 - DNA, 25 bp, Homo sapien
tgttctaataggaacatgctgccat

SEQ ID NO: 776186 - DNA, 25 bp, Homo sapien
caaccacagacagcaatgatgaacc

SEQ ID NO: 776187 - DNA, 25 bp, Homo sapien
ccaaattccaagcagcatgttctaa

SEQ ID NO: 776188 - DNA, 25 bp, Homo sapien
ctgtgcctggttttccaagtcgtct

SEQ ID NO: 776189 - DNA, 25 bp, Homo sapien
gcctggttttccaagtcgtctacca

SEQ ID NO: 776190 - DNA, 25 bp, Homo sapien
cgactacaagcttctgtgcctggtt

SEQ ID NO: 776191 - DNA, 25 bp, Homo sapien
gactacaagcttctgtgcctggttt

SEQ ID NO: 776192 - DNA, 25 bp, Homo sapien
accgggaacacgtgcaggaaactgt

SEQ ID NO: 776193 - DNA, 25 bp, Homo sapien
acagagcaccgggaacacgtgcagg

SEQ ID NO: 776194 - DNA, 25 bp, Homo sapien
cacggggaacagagcaccgggaaca

SEQ ID NO: 776195 - DNA, 25 bp, Homo sapien
cacgtgcaggaaactgtctcagagg

SEQ ID NO: 776196 - DNA, 25 bp, Homo sapien
gcaccgaccaagtgaggtataaaac

SEQ ID NO: 776197 - DNA, 25 bp, Homo sapien
gggcttattcaaatcaccaccaatt

SEQ ID NO: 776198 - DNA, 25 bp, Homo sapien
ttcctggaagcaccgaccaagtgag

SEQ ID NO: 776199 - DNA, 25 bp, Homo sapien
gaatgatgcgggcttattcaaatca

SEQ ID NO: 776200 - DNA, 25 bp, Homo sapien
ggaaaggagacacaaatcttgtctc

SEQ ID NO: 776201 - DNA, 25 bp, Homo sapien
ctaacaggaaaggagacacaaatct

SEQ ID NO: 776202 - DNA, 25 bp, Homo sapien
acaggaaaggagacacaaatcttgt

SEQ ID NO: 776203 - DNA, 25 bp, Homo sapien
ccactaacaggaaaggagacacaaa

SEQ ID NO: 776204 - DNA, 25 bp, Homo sapien
gaccaaaggtacctgctgaatcagg

SEQ ID NO: 776205 - DNA, 25 bp, Homo sapien
tgaaaaacgctccagtcaaactcag

SEQ ID NO: 776206 - DNA, 25 bp, Homo sapien
gctaaaactgggtccgctgacttga

SEQ ID NO: 776207 - DNA, 25 bp, Homo sapien
gctgacttgaaaacactggcctgta

SEQ ID NO: 776208 - DNA, 25 bp, Homo sapien
tgactgcatgatagaatcctcgcct

SEQ ID NO: 776209 - DNA, 25 bp, Homo sapien
cacacatggcttggtaccaggcatc

SEQ ID NO: 776210 - DNA, 25 bp, Homo sapien
taaagtccaggagtaccacacatgg

SEQ ID NO: 776211 - DNA, 25 bp, Homo sapien
ccagaatcttgaaagtagaaccaca

SEQ ID NO: 776212 - DNA, 25 bp, Homo sapien
ctactctctaagttcctgatgctta

SEQ ID NO: 776213 - DNA, 25 bp, Homo sapien
cctgatgcttatgctttgtaatgaa

SEQ ID NO: 776214 - DNA, 25 bp, Homo sapien
tatccgcagcttgcctcataaggtg

SEQ ID NO: 776215 - DNA, 25 bp, Homo sapien
tatgtaaatatatccgcagcttgcc

SEQ ID NO: 776216 - DNA, 25 bp, Homo sapien
gcttctaatgagaagttggggctca

SEQ ID NO: 776217 - DNA, 25 bp, Homo sapien
caacctgataggatctagagaaaga

SEQ ID NO: 776218 - DNA, 25 bp, Homo sapien
caactggcaacctgataggatctag

SEQ ID NO: 776219 - DNA, 25 bp, Homo sapien
gatctagagaaagaatcaggactgc

SEQ ID NO: 776220 - DNA, 25 bp, Homo sapien
gaagataaagaagaatgtatcagct

SEQ ID NO: 776221 - DNA, 25 bp, Homo sapien
agctgtacggctggcaaagttattt

SEQ ID NO: 776222 - DNA, 25 bp, Homo sapien
aatgtatcagctgtacggctggcaa

SEQ ID NO: 776223 - DNA, 25 bp, Homo sapien
tacggctggcaaagttattttggaa

SEQ ID NO: 776224 - DNA, 25 bp, Homo sapien
ggacgctgaattagggcccagaaca

SEQ ID NO: 776225 - DNA, 25 bp, Homo sapien
tgttaagactgaccccacatacaga

SEQ ID NO: 776226 - DNA, 25 bp, Homo sapien
ggtactgcagggctagagcattcat

SEQ ID NO: 776227 - DNA, 25 bp, Homo sapien
tgagatgagcaaatcagtgccaagt

SEQ ID NO: 776228 - DNA, 25 bp, Homo sapien
gggcttcaaactcaatcactagtgg

SEQ ID NO: 776229 - DNA, 25 bp, Homo sapien
tgaatcctccctagagaatcgtgga

SEQ ID NO: 776230 - DNA, 25 bp, Homo sapien
tagttctgggccaactccctcagtt

SEQ ID NO: 776231 - DNA, 25 bp, Homo sapien
tagttatttcctgcaccatactggg

SEQ ID NO: 776232 - DNA, 25 bp, Homo sapien
ctcagcaaagaatgggaatgactgc

SEQ ID NO: 776233 - DNA, 25 bp, Homo sapien
ggtagtccaatgctcaaaaactgaa

SEQ ID NO: 776234 - DNA, 25 bp, Homo sapien
tagttatgaccaaagctcagcaaag

SEQ ID NO: 776235 - DNA, 25 bp, Homo sapien
taaatgttcctgtttggtagtccaa

SEQ ID NO: 776236 - DNA, 25 bp, Homo sapien
gaatctcctaggcacttttcaaagt

SEQ ID NO: 776237 - DNA, 25 bp, Homo sapien
taaccctcagtatgtcacaatgtga

SEQ ID NO: 776238 - DNA, 25 bp, Homo sapien
tgggtttaattgtgtcccctcagaa

SEQ ID NO: 776239 - DNA, 25 bp, Homo sapien
tgtacagataggtcaggaatcatgc

SEQ ID NO: 776240 - DNA, 25 bp, Homo sapien
gcagcaaacaaaggaggcacaactg

SEQ ID NO: 776241 - DNA, 25 bp, Homo sapien
caactagtgagtgttctgtagatac

SEQ ID NO: 776242 - DNA, 25 bp, Homo sapien
gccctatggcatcaaaacataattc

SEQ ID NO: 776243 - DNA, 25 bp, Homo sapien
gatgaggtgactctgctcacagcgc

SEQ ID NO: 776244 - DNA, 25 bp, Homo sapien
ataggatttaaggacgctatgaagg

SEQ ID NO: 776245 - DNA, 25 bp, Homo sapien
aggatttaaggacgctatgaaggcc

SEQ ID NO: 776246 - DNA, 25 bp, Homo sapien
gatttaaggacgctatgaaggccat

SEQ ID NO: 776247 - DNA, 25 bp, Homo sapien
taggatttaaggacgctatgaaggc

SEQ ID NO: 776248 - DNA, 25 bp, Homo sapien
caggacctccggcaaaatccattct

SEQ ID NO: 776249 - DNA, 25 bp, Homo sapien
aggccaggacctccggcaaaatcca

SEQ ID NO: 776250 - DNA, 25 bp, Homo sapien
ccaggccaggacctccggcaaaatc

SEQ ID NO: 776251 - DNA, 25 bp, Homo sapien
gccaggacctccggcaaaatccatt

SEQ ID NO: 776252 - DNA, 25 bp, Homo sapien
gtgtgagccacccattagactttac

SEQ ID NO: 776253 - DNA, 25 bp, Homo sapien
tgtgagccacccattagactttaca

SEQ ID NO: 776254 - DNA, 25 bp, Homo sapien
gtgagccacccattagactttacag

SEQ ID NO: 776255 - DNA, 25 bp, Homo sapien
ggtgtgagccacccattagacttta

SEQ ID NO: 776256 - DNA, 25 bp, Homo sapien
tttatcccaatggtaattgccgcta

SEQ ID NO: 776257 - DNA, 25 bp, Homo sapien
gtatattccaaactactattacagc

SEQ ID NO: 776258 - DNA, 25 bp, Homo sapien
tcccaatggtaattgccgctactgg

SEQ ID NO: 776259 - DNA, 25 bp, Homo sapien
aattgccgctactggattgggaatg

SEQ ID NO: 776260 - DNA, 25 bp, Homo sapien
aggtctccatctctatatcctcaga

SEQ ID NO: 776261 - DNA, 25 bp, Homo sapien
gatctggaacaaagcacctggcata

SEQ ID NO: 776262 - DNA, 25 bp, Homo sapien
aatcgagtatgaagatgtcagggcc

SEQ ID NO: 776263 - DNA, 25 bp, Homo sapien
caaatggtgttcaataaatgagttc

SEQ ID NO: 776264 - DNA, 25 bp, Homo sapien
tagtcaggtcttgctcaccaagttc

SEQ ID NO: 776265 - DNA, 25 bp, Homo sapien
caagttctgaattccaagactcaac

SEQ ID NO: 776266 - DNA, 25 bp, Homo sapien
tcatgctgtgcatgaaaaggtcatt

SEQ ID NO: 776267 - DNA, 25 bp, Homo sapien
ccatttctgttctagtcaggtcttg

SEQ ID NO: 776268 - DNA, 25 bp, Homo sapien
tgaaaacctagtgttgcccatgaaa

SEQ ID NO: 776269 - DNA, 25 bp, Homo sapien
gaatcctcactgtacagatgctgaa

SEQ ID NO: 776270 - DNA, 25 bp, Homo sapien
tccctgcccaatagtgtaaagacca

SEQ ID NO: 776271 - DNA, 25 bp, Homo sapien
caaaatacaccaggcgctgacagat

SEQ ID NO: 776272 - DNA, 25 bp, Homo sapien
tgtccactaagcacccaaatacaga

SEQ ID NO: 776273 - DNA, 25 bp, Homo sapien
caaatacagaacaacgaaagccaac

SEQ ID NO: 776274 - DNA, 25 bp, Homo sapien
gttcctgaataggaacatggttttg

SEQ ID NO: 776275 - DNA, 25 bp, Homo sapien
catggctggccatagagcttttctt

SEQ ID NO: 776276 - DNA, 25 bp, Homo sapien
taggttaccacgttctctcccatgg

SEQ ID NO: 776277 - DNA, 25 bp, Homo sapien
gacgtttggcgttttgcaaagctag

SEQ ID NO: 776278 - DNA, 25 bp, Homo sapien
gtatttcctctatatgaccaacctg

SEQ ID NO: 776279 - DNA, 25 bp, Homo sapien
tcaactttgagggtccgcattacaa

SEQ ID NO: 776280 - DNA, 25 bp, Homo sapien
tgctataaagtttccacacagggcc

SEQ ID NO: 776281 - DNA, 25 bp, Homo sapien
aggccaactctcacactctctaatg

SEQ ID NO: 776282 - DNA, 25 bp, Homo sapien
tcccctaagagttatggtcagctgt

SEQ ID NO: 776283 - DNA, 25 bp, Homo sapien
gtgcctgcacagattagaacggctg

SEQ ID NO: 776284 - DNA, 25 bp, Homo sapien
ctcactgtgataggcaagagatacc

SEQ ID NO: 776285 - DNA, 25 bp, Homo sapien
tttcaaggctgggaaagtcacatcc

SEQ ID NO: 776286 - DNA, 25 bp, Homo sapien
gacaaggtccaaacgcctatcaata

SEQ ID NO: 776287 - DNA, 25 bp, Homo sapien
tgtaatacattgcataacacaggac

SEQ ID NO: 776288 - DNA, 25 bp, Homo sapien
cctcctgcttgctagaatcaacaca

SEQ ID NO: 776289 - DNA, 25 bp, Homo sapien
tcaacacaatccacactgcttctgt

SEQ ID NO: 776290 - DNA, 25 bp, Homo sapien
ttctgtagtttattcctgggtccca

SEQ ID NO: 776291 - DNA, 25 bp, Homo sapien
gctagaatcaacacaatccacactg

SEQ ID NO: 776292 - DNA, 25 bp, Homo sapien
aggtgccagggacattcaatggaga

SEQ ID NO: 776293 - DNA, 25 bp, Homo sapien
tcaatggagaaagtaaggtctttca

SEQ ID NO: 776294 - DNA, 25 bp, Homo sapien
gcaactgattttcaacggaggtgcc

SEQ ID NO: 776295 - DNA, 25 bp, Homo sapien
gctggaacgactagataaacatatg

SEQ ID NO: 776296 - DNA, 25 bp, Homo sapien
tggaaaaggtacgacaaatattaca

SEQ ID NO: 776297 - DNA, 25 bp, Homo sapien
aagagttacatattgccaagtgcag

SEQ ID NO: 776298 - DNA, 25 bp, Homo sapien
tgacaaatatcacaaagagttacat

SEQ ID NO: 776299 - DNA, 25 bp, Homo sapien
aagggttacatattgccaggcacaa

SEQ ID NO: 776300 - DNA, 25 bp, Homo sapien
gcagagaatctggagtgtcctctaa

SEQ ID NO: 776301 - DNA, 25 bp, Homo sapien
agtgtcctctaaatcacaggacaag

SEQ ID NO: 776302 - DNA, 25 bp, Homo sapien
gagtgtcctctaaatcacaggacaa

SEQ ID NO: 776303 - DNA, 25 bp, Homo sapien
tatttctgagaagtctctcgtccag

SEQ ID NO: 776304 - DNA, 25 bp, Homo sapien
tctgagaagtctctcgtccagggta

SEQ ID NO: 776305 - DNA, 25 bp, Homo sapien
tttctgagaagtctctcgtccaggg

SEQ ID NO: 776306 - DNA, 25 bp, Homo sapien
gagaagtctctcgtccagggtaacc

SEQ ID NO: 776307 - DNA, 25 bp, Homo sapien
agaagcacttgggtgcacaacagga

SEQ ID NO: 776308 - DNA, 25 bp, Homo sapien
ggtccacgactctcctctcaagaag

SEQ ID NO: 776309 - DNA, 25 bp, Homo sapien
gaagagatgtttaagaactaggcct

SEQ ID NO: 776310 - DNA, 25 bp, Homo sapien
tcctctcaagaagcagccaaatgga

SEQ ID NO: 776311 - DNA, 25 bp, Homo sapien
taggcttctgccacgatctttccga

SEQ ID NO: 776312 - DNA, 25 bp, Homo sapien
tttaaagaggcatcaaatcacctgg

SEQ ID NO: 776313 - DNA, 25 bp, Homo sapien
tcctgaatcagaaaccctttgggta

SEQ ID NO: 776314 - DNA, 25 bp, Homo sapien
tcaaagcgtggtccctgaccagcag

SEQ ID NO: 776315 - DNA, 25 bp, Homo sapien
tagagtaaaacagtagtgcctgtag

SEQ ID NO: 776316 - DNA, 25 bp, Homo sapien
gatatcagagctcaaaggccttaga

SEQ ID NO: 776317 - DNA, 25 bp, Homo sapien
caggaactgcttaagaaattctagc

SEQ ID NO: 776318 - DNA, 25 bp, Homo sapien
tgcctgtagagctttattttaaaac

SEQ ID NO: 776319 - DNA, 25 bp, Homo sapien
gactgtagctacaaataaattccct

SEQ ID NO: 776320 - DNA, 25 bp, Homo sapien
tcttctactggtagggaccatgcaa

SEQ ID NO: 776321 - DNA, 25 bp, Homo sapien
ttctcgagtgcataccaaccaggga

SEQ ID NO: 776322 - DNA, 25 bp, Homo sapien
caaccagggactttggcaatataac

SEQ ID NO: 776323 - DNA, 25 bp, Homo sapien
caggagcagcggtgcttcaagtcaa

SEQ ID NO: 776324 - DNA, 25 bp, Homo sapien
tcaatgagccgaagaggagaagcaa

SEQ ID NO: 776325 - DNA, 25 bp, Homo sapien
catcgtgggcctgtttcctcctaaa

SEQ ID NO: 776326 - DNA, 25 bp, Homo sapien
tcttgagagggtcaaagggattacc

SEQ ID NO: 776327 - DNA, 25 bp, Homo sapien
tcaaacaataccagaggaacgctac

SEQ ID NO: 776328 - DNA, 25 bp, Homo sapien
agtttctttagattgaagcctgccc

SEQ ID NO: 776329 - DNA, 25 bp, Homo sapien
caagtgcccttcaggttaaactgta

SEQ ID NO: 776330 - DNA, 25 bp, Homo sapien
ggaacgctactgtaaggactttaga

SEQ ID NO: 776331 - DNA, 25 bp, Homo sapien
tctcaggtgattgtaaagcacagcc

SEQ ID NO: 776332 - DNA, 25 bp, Homo sapien
tgtcacaggttacactaagtctgcc

SEQ ID NO: 776333 - DNA, 25 bp, Homo sapien
tcaaagacacgatcatgtcacaggt

SEQ ID NO: 776334 - DNA, 25 bp, Homo sapien
tagttctgtgtcaggactgtctaca

SEQ ID NO: 776335 - DNA, 25 bp, Homo sapien
taactatgtgcatgaacccaagctc

SEQ ID NO: 776336 - DNA, 25 bp, Homo sapien
catgcctaaagaactaattgggtcc

SEQ ID NO: 776337 - DNA, 25 bp, Homo sapien
ctgacagaccctctcaaagcagtgt

SEQ ID NO: 776338 - DNA, 25 bp, Homo sapien
gagccacgtaaaagcagagaccaga

SEQ ID NO: 776339 - DNA, 25 bp, Homo sapien
tatgtgatcatggactctgggtaca

SEQ ID NO: 776340 - DNA, 25 bp, Homo sapien
ttatcccctaaatgtgtgcttctgt

SEQ ID NO: 776341 - DNA, 25 bp, Homo sapien
ggattgtgttactctctctctaggg

SEQ ID NO: 776342 - DNA, 25 bp, Homo sapien
tgtcagctccgtcacacagtcattc

SEQ ID NO: 776343 - DNA, 25 bp, Homo sapien
aaagccttatgagctctgacgccgg

SEQ ID NO: 776344 - DNA, 25 bp, Homo sapien
tcagtcttaattatgggctaggcac

SEQ ID NO: 776345 - DNA, 25 bp, Homo sapien
ccttatgagaatcctgtgaggctgg

SEQ ID NO: 776346 - DNA, 25 bp, Homo sapien
gagtcacacggtcaggttcttaggt

SEQ ID NO: 776347 - DNA, 25 bp, Homo sapien
tttttacagtaacacgatgctctcc

SEQ ID NO: 776348 - DNA, 25 bp, Homo sapien
agactattatggagagggctggcat

SEQ ID NO: 776349 - DNA, 25 bp, Homo sapien
gaaataccctaattatgatgctgga

SEQ ID NO: 776350 - DNA, 25 bp, Homo sapien
caaacacagtattgtcatgggttta

SEQ ID NO: 776351 - DNA, 25 bp, Homo sapien
aaacgcagacactccagtggcttgt

SEQ ID NO: 776352 - DNA, 25 bp, Homo sapien
gcagacactccagtggcttgtatgg

SEQ ID NO: 776353 - DNA, 25 bp, Homo sapien
tggcaaggagggttctcagaactga

SEQ ID NO: 776354 - DNA, 25 bp, Homo sapien
gcttgtatggcaaggagggttctca

SEQ ID NO: 776355 - DNA, 25 bp, Homo sapien
ctcaagcattccgaagctgggcgtc

SEQ ID NO: 776356 - DNA, 25 bp, Homo sapien
ctgacaatttatgttgcacacagca

SEQ ID NO: 776357 - DNA, 25 bp, Homo sapien
cacacagcaagcctctgctgatctt

SEQ ID NO: 776358 - DNA, 25 bp, Homo sapien
tctgctgatcttaaccaaggatcag

SEQ ID NO: 776359 - DNA, 25 bp, Homo sapien
gagggagaatttacacagcaaagac

SEQ ID NO: 776360 - DNA, 25 bp, Homo sapien
tacacagcaaagacggctccttgtg

SEQ ID NO: 776361 - DNA, 25 bp, Homo sapien
gaatttacacagcaaagacggctcc

SEQ ID NO: 776362 - DNA, 25 bp, Homo sapien
ctttgagggagaatttacacagcaa

SEQ ID NO: 776363 - DNA, 25 bp, Homo sapien
cgaaggacgtgcactctgagctatt

SEQ ID NO: 776364 - DNA, 25 bp, Homo sapien
ccaggtccttgtgatggtcacctct

SEQ ID NO: 776365 - DNA, 25 bp, Homo sapien
taccacacgaaggacgtgcactctg

SEQ ID NO: 776366 - DNA, 25 bp, Homo sapien
aaattgtcactgatctagccacaca

SEQ ID NO: 776367 - DNA, 25 bp, Homo sapien
cctgctgcttacaccaaaagatggt

SEQ ID NO: 776368 - DNA, 25 bp, Homo sapien
tcctaggaagatccatggctccctg

SEQ ID NO: 776369 - DNA, 25 bp, Homo sapien
ggtaccaactatatcttctccacgg

SEQ ID NO: 776370 - DNA, 25 bp, Homo sapien
cacggcctgccatgactctggtgat

SEQ ID NO: 776371 - DNA, 25 bp, Homo sapien
gcttaggcagtacctggacatctct

SEQ ID NO: 776372 - DNA, 25 bp, Homo sapien
gggctgcttaggcagtacctggaca

SEQ ID NO: 776373 - DNA, 25 bp, Homo sapien
taggcagtacctggacatctctctc

SEQ ID NO: 776374 - DNA, 25 bp, Homo sapien
actggggctgcttaggcagtacctg

SEQ ID NO: 776375 - DNA, 25 bp, Homo sapien
tttcacaggaaaggactgagggccg

SEQ ID NO: 776376 - DNA, 25 bp, Homo sapien
gattcacagtggcaaggcaggtgtt

SEQ ID NO: 776377 - DNA, 25 bp, Homo sapien
tcagctttttacaccagagcctatg

SEQ ID NO: 776378 - DNA, 25 bp, Homo sapien
tgctacactcactaggtaagttatt

SEQ ID NO: 776379 - DNA, 25 bp, Homo sapien
ctgatttcccgcttcgaaaaggctc

SEQ ID NO: 776380 - DNA, 25 bp, Homo sapien
tactaggtgcagctcaacatgaaaa

SEQ ID NO: 776381 - DNA, 25 bp, Homo sapien
tggattcttttagggaacacctcaa

SEQ ID NO: 776382 - DNA, 25 bp, Homo sapien
aatattacctacaaggcctcctgcc

SEQ ID NO: 776383 - DNA, 25 bp, Homo sapien
cacacaaggcttaatggaacaggga

SEQ ID NO: 776384 - DNA, 25 bp, Homo sapien
acaatggctatgacttcatcatgcc

SEQ ID NO: 776385 - DNA, 25 bp, Homo sapien
aatggctatgacttcatcatgccag

SEQ ID NO: 776386 - DNA, 25 bp, Homo sapien
gctatgacttcatcatgccagaatt

SEQ ID NO: 776387 - DNA, 25 bp, Homo sapien
tggctatgacttcatcatgccagaa

SEQ ID NO: 776388 - DNA, 25 bp, Homo sapien
aggttccaacagactgggcttttag

SEQ ID NO: 776389 - DNA, 25 bp, Homo sapien
gtgtccggacactgacattattcat

SEQ ID NO: 776390 - DNA, 25 bp, Homo sapien
caaggttccaacagactgggctttt

SEQ ID NO: 776391 - DNA, 25 bp, Homo sapien
ctgggcttttagtgtccggacactg

SEQ ID NO: 776392 - DNA, 25 bp, Homo sapien
ctgtagaaaagaagagaaggaaagg

SEQ ID NO: 776393 - DNA, 25 bp, Homo sapien
agaagagaaggaaagggaagtggtg

SEQ ID NO: 776394 - DNA, 25 bp, Homo sapien
gctggcagagattgcggtcattttc

SEQ ID NO: 776395 - DNA, 25 bp, Homo sapien
gaaaggacaagccattggtaagtgc

SEQ ID NO: 776396 - DNA, 25 bp, Homo sapien
ggcgtttctccacacgttcctgagg

SEQ ID NO: 776397 - DNA, 25 bp, Homo sapien
tctcgatctgagctgtagtggtgtg

SEQ ID NO: 776398 - DNA, 25 bp, Homo sapien
ttttaccaggattatatgcttcact

SEQ ID NO: 776399 - DNA, 25 bp, Homo sapien
tatgcttcactacgtataaggcaga

SEQ ID NO: 776400 - DNA, 25 bp, Homo sapien
agccttctgggtccatctgaaaccc

SEQ ID NO: 776401 - DNA, 25 bp, Homo sapien
cactacatcatattgaggcttttga

SEQ ID NO: 776402 - DNA, 25 bp, Homo sapien
tagtcttcttttccgatcataaaac

SEQ ID NO: 776403 - DNA, 25 bp, Homo sapien
taagatgtgttacgtcttagtcttc

SEQ ID NO: 776404 - DNA, 25 bp, Homo sapien
gaggaccttgaaagtctcgaagaag

SEQ ID NO: 776405 - DNA, 25 bp, Homo sapien
cataaaactctgtcaccagaggacc

SEQ ID NO: 776406 - DNA, 25 bp, Homo sapien
tatcacaaccatctgctcagttccc

SEQ ID NO: 776407 - DNA, 25 bp, Homo sapien
catcaactcccacgggaatcacgca

SEQ ID NO: 776408 - DNA, 25 bp, Homo sapien
cacgcagcatgtggctatcacaacc

SEQ ID NO: 776409 - DNA, 25 bp, Homo sapien
tcatgtacagacttgtgtggataca

SEQ ID NO: 776410 - DNA, 25 bp, Homo sapien
gttgctaaagagcattcagatgtca

SEQ ID NO: 776411 - DNA, 25 bp, Homo sapien
aggcagtaatgaaagcagttgctaa

SEQ ID NO: 776412 - DNA, 25 bp, Homo sapien
tcagatgtcaccgaaagactgcaaa

SEQ ID NO: 776413 - DNA, 25 bp, Homo sapien
tcaattaacagctcctcgaaaggca

SEQ ID NO: 776414 - DNA, 25 bp, Homo sapien
tctcggctcactgcctcctgggttc

SEQ ID NO: 776415 - DNA, 25 bp, Homo sapien
attataggcacacaccaccaagcct

SEQ ID NO: 776416 - DNA, 25 bp, Homo sapien
aagtagctgggattataggcacaca

SEQ ID NO: 776417 - DNA, 25 bp, Homo sapien
aagcaattctcctgcctaggcctcc

SEQ ID NO: 776418 - DNA, 25 bp, Homo sapien
gaaagaacacacatatggtcccgat

SEQ ID NO: 776419 - DNA, 25 bp, Homo sapien
tatacacatgtgtgggtgaatgcac

SEQ ID NO: 776420 - DNA, 25 bp, Homo sapien
gaaacatactatgttccaggccttg

SEQ ID NO: 776421 - DNA, 25 bp, Homo sapien
gcccatttgaagctgacagaatgaa

SEQ ID NO: 776422 - DNA, 25 bp, Homo sapien
gagcctagcagtcggttaaaccagc

SEQ ID NO: 776423 - DNA, 25 bp, Homo sapien
tactgcctacctgcattacctgagg

SEQ ID NO: 776424 - DNA, 25 bp, Homo sapien
aaatcaactgccataataggtgctg

SEQ ID NO: 776425 - DNA, 25 bp, Homo sapien
gaatagctctggtgtacatatcaca

SEQ ID NO: 776426 - DNA, 25 bp, Homo sapien
tctctacttagagcgcagcaattag

SEQ ID NO: 776427 - DNA, 25 bp, Homo sapien
tactctacagtggtttggtgcatca

SEQ ID NO: 776428 - DNA, 25 bp, Homo sapien
actggttgtgcagcatgaattcaga

SEQ ID NO: 776429 - DNA, 25 bp, Homo sapien
ctggttacttagctctccctctgga

SEQ ID NO: 776430 - DNA, 25 bp, Homo sapien
tggtgtgggaaaactggacgctcac

SEQ ID NO: 776431 - DNA, 25 bp, Homo sapien
taaaatgtccatagtaccacaaatg

SEQ ID NO: 776432 - DNA, 25 bp, Homo sapien
caaaggtgtcaaagccgttcaatgg

SEQ ID NO: 776433 - DNA, 25 bp, Homo sapien
tactggcacgaagacagataaacag

SEQ ID NO: 776434 - DNA, 25 bp, Homo sapien
tcccaaggtagttccaatgtatagc

SEQ ID NO: 776435 - DNA, 25 bp, Homo sapien
aatgtatagccaaagatgcaaaccg

SEQ ID NO: 776436 - DNA, 25 bp, Homo sapien
taaaacgagccctcactgcacattg

SEQ ID NO: 776437 - DNA, 25 bp, Homo sapien
caaaccgctgctctacatgaaagga

SEQ ID NO: 776438 - DNA, 25 bp, Homo sapien
tgaatactcatctctataagacacc

SEQ ID NO: 776439 - DNA, 25 bp, Homo sapien
catttcatagccaatgaatactcat

SEQ ID NO: 776440 - DNA, 25 bp, Homo sapien
catctctataagacacccgtgtacc

SEQ ID NO: 776441 - DNA, 25 bp, Homo sapien
agacacccgtgtaccacagtggacc

SEQ ID NO: 776442 - DNA, 25 bp, Homo sapien
ttatctgtgtgatcaaagttacact

SEQ ID NO: 776443 - DNA, 25 bp, Homo sapien
tttagtaaaggctgtagatgtatta

SEQ ID NO: 776444 - DNA, 25 bp, Homo sapien
agatgtattatctgtgtgatcaaag

SEQ ID NO: 776445 - DNA, 25 bp, Homo sapien
ggctgtagatgtattatctgtgtga

SEQ ID NO: 776446 - DNA, 25 bp, Homo sapien
tctcttccatacagctcttgctgta

SEQ ID NO: 776447 - DNA, 25 bp, Homo sapien
tgtaagttgacgtcccaagttttgc

SEQ ID NO: 776448 - DNA, 25 bp, Homo sapien
cagctcttgctgtaagttgacgtcc

SEQ ID NO: 776449 - DNA, 25 bp, Homo sapien
tgccaggggataactactactactt

SEQ ID NO: 776450 - DNA, 25 bp, Homo sapien
tgggaacaattctagcagtcaggcg

SEQ ID NO: 776451 - DNA, 25 bp, Homo sapien
tattaaggccacaaagcccggtaca

SEQ ID NO: 776452 - DNA, 25 bp, Homo sapien
gcccattgtcatttggaagcccctg

SEQ ID NO: 776453 - DNA, 25 bp, Homo sapien
cagtcaggcgctacaaagtaatgga

SEQ ID NO: 776454 - DNA, 25 bp, Homo sapien
aaagaactctaatggtccagaaggc

SEQ ID NO: 776455 - DNA, 25 bp, Homo sapien
cagcagcggcaattctgatgaagga

SEQ ID NO: 776456 - DNA, 25 bp, Homo sapien
cacctggaattctatgggttgagaa

SEQ ID NO: 776457 - DNA, 25 bp, Homo sapien
aagcagactaccctcagtggcagac

SEQ ID NO: 776458 - DNA, 25 bp, Homo sapien
gaaagtacttcgcttccaagaacag

SEQ ID NO: 776459 - DNA, 25 bp, Homo sapien
attggaaagtacttcgcttccaaga

SEQ ID NO: 776460 - DNA, 25 bp, Homo sapien
cagcaaagtgggctgccgactcgca

SEQ ID NO: 776461 - DNA, 25 bp, Homo sapien
tgccgactcgcattactggacccac

SEQ ID NO: 776462 - DNA, 25 bp, Homo sapien
caagattgagattctaacgcccaga

SEQ ID NO: 776463 - DNA, 25 bp, Homo sapien
aatcaatgctcccaacaggcctgca

SEQ ID NO: 776464 - DNA, 25 bp, Homo sapien
tagtccaggctttctacacccatga

SEQ ID NO: 776465 - DNA, 25 bp, Homo sapien
tccacgcagaacacaaccaggcttt

SEQ ID NO: 776466 - DNA, 25 bp, Homo sapien
tcacccgggtccaggaattcaagtc

SEQ ID NO: 776467 - DNA, 25 bp, Homo sapien
cagtttgaggtagatttgccccaca

SEQ ID NO: 776468 - DNA, 25 bp, Homo sapien
ttttgggcccatattgcagggcagc

SEQ ID NO: 776469 - DNA, 25 bp, Homo sapien
tctgcaacaacggtacctggtaaca

SEQ ID NO: 776470 - DNA, 25 bp, Homo sapien
ggaattaagtggtcatcactgtgct

SEQ ID NO: 776471 - DNA, 25 bp, Homo sapien
ttgtaagatagcagaaacagaagca

SEQ ID NO: 776472 - DNA, 25 bp, Homo sapien
tagtcttcactgcaaataagtttaa

SEQ ID NO: 776473 - DNA, 25 bp, Homo sapien
cctaaagtcccacaagtaactgtgg

SEQ ID NO: 776474 - DNA, 25 bp, Homo sapien
actttgagcacaatgtgaatcttgc

SEQ ID NO: 776475 - DNA, 25 bp, Homo sapien
gaacactttgagcacaatgtgaatc

SEQ ID NO: 776476 - DNA, 25 bp, Homo sapien
tagcaggaacactttgagcacaatg

SEQ ID NO: 776477 - DNA, 25 bp, Homo sapien
acatagcaggaacactttgagcaca

SEQ ID NO: 776478 - DNA, 25 bp, Homo sapien
acgtgcagcccatgttccagtgttt

SEQ ID NO: 776479 - DNA, 25 bp, Homo sapien
cagatgctgctctcgtctcacattt

SEQ ID NO: 776480 - DNA, 25 bp, Homo sapien
aaacgtgcagcccatgttccagtgt

SEQ ID NO: 776481 - DNA, 25 bp, Homo sapien
tttccgtagctttgttcagacaaca

SEQ ID NO: 776482 - DNA, 25 bp, Homo sapien
aaggataatagcctacagctcctat

SEQ ID NO: 776483 - DNA, 25 bp, Homo sapien
caggggtctatgtggaggtctctta

SEQ ID NO: 776484 - DNA, 25 bp, Homo sapien
taatagcctacagctcctatccatg

SEQ ID NO: 776485 - DNA, 25 bp, Homo sapien
gggtctatgtggaggtctcttacat

SEQ ID NO: 776486 - DNA, 25 bp, Homo sapien
taaacccagttaacaagccattctg

SEQ ID NO: 776487 - DNA, 25 bp, Homo sapien
gacgttagtgctctcttcggtctga

SEQ ID NO: 776488 - DNA, 25 bp, Homo sapien
caggcagcagcctatctttagataa

SEQ ID NO: 776489 - DNA, 25 bp, Homo sapien
gccactattatgctgaaagggaagg

SEQ ID NO: 776490 - DNA, 25 bp, Homo sapien
taaggacctggatcataatttaagt

SEQ ID NO: 776491 - DNA, 25 bp, Homo sapien
ggtcaaatttatgatacagcggagt

SEQ ID NO: 776492 - DNA, 25 bp, Homo sapien
aaacctcagccattgaaatagtccc

SEQ ID NO: 776493 - DNA, 25 bp, Homo sapien
tgcttgccatacagtgagcctattc

SEQ ID NO: 776494 - DNA, 25 bp, Homo sapien
agcgttttcttgccttggacccctg

SEQ ID NO: 776495 - DNA, 25 bp, Homo sapien
ctctcaaaccacctctggccggcgc

SEQ ID NO: 776496 - DNA, 25 bp, Homo sapien
ggccggcgccgctaccttttggcag

SEQ ID NO: 776497 - DNA, 25 bp, Homo sapien
tagcacgcttcaagccacactggct

SEQ ID NO: 776498 - DNA, 25 bp, Homo sapien
tccaagcagaataggtccggtaaca

SEQ ID NO: 776499 - DNA, 25 bp, Homo sapien
ggtaacactttcagtaggtccagtc

SEQ ID NO: 776500 - DNA, 25 bp, Homo sapien
cacaagtctagcgtgtccaagcaga

SEQ ID NO: 776501 - DNA, 25 bp, Homo sapien
taccagtcagcagttcacaagtcta

SEQ ID NO: 776502 - DNA, 25 bp, Homo sapien
cacacacgtttgttgggttttgtag

SEQ ID NO: 776503 - DNA, 25 bp, Homo sapien
tgttgcagcaagctaaattatcttc

SEQ ID NO: 776504 - DNA, 25 bp, Homo sapien
cacaaacacacacgtttgttgggtt

SEQ ID NO: 776505 - DNA, 25 bp, Homo sapien
gaattatcttcgtaatgtatcttca

SEQ ID NO: 776506 - DNA, 25 bp, Homo sapien
gttaagtgactgaccactgcttctg

SEQ ID NO: 776507 - DNA, 25 bp, Homo sapien
aaatctccagtggtgtaaaaacctg

SEQ ID NO: 776508 - DNA, 25 bp, Homo sapien
atctccagtggtgtaaaaacctgtt

SEQ ID NO: 776509 - DNA, 25 bp, Homo sapien
cttttctgtctagtgcagttaagtg

SEQ ID NO: 776510 - DNA, 25 bp, Homo sapien
tccacagcggagctggtattaccag

SEQ ID NO: 776511 - DNA, 25 bp, Homo sapien
tgaatgtttcctggtaaacggcatg

SEQ ID NO: 776512 - DNA, 25 bp, Homo sapien
tcagccggcattgatgctcctgaaa

SEQ ID NO: 776513 - DNA, 25 bp, Homo sapien
cctggtaaacggcatgtgatagaat

SEQ ID NO: 776514 - DNA, 25 bp, Homo sapien
ttttttccccactactgtgtcgatg

SEQ ID NO: 776515 - DNA, 25 bp, Homo sapien
tttccccactactgtgtcgatgata

SEQ ID NO: 776516 - DNA, 25 bp, Homo sapien
actactgtgtcgatgataagcactt

SEQ ID NO: 776517 - DNA, 25 bp, Homo sapien
ctgtgtcgatgataagcactttctc

SEQ ID NO: 776518 - DNA, 25 bp, Homo sapien
tttacttccgtgtgctgtacaataa

SEQ ID NO: 776519 - DNA, 25 bp, Homo sapien
tccgtgtgctgtacaataatatcat

SEQ ID NO: 776520 - DNA, 25 bp, Homo sapien
tccacagcaaaaggtcttgatttac

SEQ ID NO: 776521 - DNA, 25 bp, Homo sapien
gtcttgatttacttccgtgtgctgt

SEQ ID NO: 776522 - DNA, 25 bp, Homo sapien
gatggttatcaatctgcagcagggc

SEQ ID NO: 776523 - DNA, 25 bp, Homo sapien
cacaaggtcacttatgactgggcta

SEQ ID NO: 776524 - DNA, 25 bp, Homo sapien
gcagggctggcaaacagaactcttc

SEQ ID NO: 776525 - DNA, 25 bp, Homo sapien
taaagatacgcagtccacaaggtca

SEQ ID NO: 776526 - DNA, 25 bp, Homo sapien
cccattatcgcaacacttctcagag

SEQ ID NO: 776527 - DNA, 25 bp, Homo sapien
gagcaatgcaaaataaaggctagcc

SEQ ID NO: 776528 - DNA, 25 bp, Homo sapien
cactctgtactcctcatggattaag

SEQ ID NO: 776529 - DNA, 25 bp, Homo sapien
taataataacgtttctaggacacca

SEQ ID NO: 776530 - DNA, 25 bp, Homo sapien
gaaaagactgcccataacaagtatt

SEQ ID NO: 776531 - DNA, 25 bp, Homo sapien
tacctagtacattatccagccattc

SEQ ID NO: 776532 - DNA, 25 bp, Homo sapien
ccatatatccgataaaggtcttgta

SEQ ID NO: 776533 - DNA, 25 bp, Homo sapien
ggaaacaatgggactcttacacact

SEQ ID NO: 776534 - DNA, 25 bp, Homo sapien
gggttgtccagtctcaataaagctg

SEQ ID NO: 776535 - DNA, 25 bp, Homo sapien
caagtcactactctggggttgtcca

SEQ ID NO: 776536 - DNA, 25 bp, Homo sapien
actctcttaagctcatgtctgcatg

SEQ ID NO: 776537 - DNA, 25 bp, Homo sapien
aagctcatgtctgcatgccaagtca

SEQ ID NO: 776538 - DNA, 25 bp, Homo sapien
gagagattggttacagccataagta

SEQ ID NO: 776539 - DNA, 25 bp, Homo sapien
aaaacgatgagagattggttacagc

SEQ ID NO: 776540 - DNA, 25 bp, Homo sapien
acagcaagaaaacgatgagagattg

SEQ ID NO: 776541 - DNA, 25 bp, Homo sapien
cgatgagagattggttacagccata

SEQ ID NO: 776542 - DNA, 25 bp, Homo sapien
gatttgcagctgaagtcctatcaag

SEQ ID NO: 776543 - DNA, 25 bp, Homo sapien
acaactcatttgtataaccacgatg

SEQ ID NO: 776544 - DNA, 25 bp, Homo sapien
gaaggttatgtcagctgccgagtct

SEQ ID NO: 776545 - DNA, 25 bp, Homo sapien
ataaccacgatgaatggaggcagca

SEQ ID NO: 776546 - DNA, 25 bp, Homo sapien
aacagttcttcccatttgagtgcca

SEQ ID NO: 776547 - DNA, 25 bp, Homo sapien
acagttcttcccatttgagtgccat

SEQ ID NO: 776548 - DNA, 25 bp, Homo sapien
caacagttcttcccatttgagtgcc

SEQ ID NO: 776549 - DNA, 25 bp, Homo sapien
cccgagagctgctccggtggaagcc

SEQ ID NO: 776550 - DNA, 25 bp, Homo sapien
gtggaagcccttggattctccactg

SEQ ID NO: 776551 - DNA, 25 bp, Homo sapien
agagctgctccggtggaagcccttg

SEQ ID NO: 776552 - DNA, 25 bp, Homo sapien
tggaagcccttggattctccactgg

SEQ ID NO: 776553 - DNA, 25 bp, Homo sapien
acagatgagttaagaatgctgatat

SEQ ID NO: 776554 - DNA, 25 bp, Homo sapien
caagtgttgctcttgaggtacagat

SEQ ID NO: 776555 - DNA, 25 bp, Homo sapien
gtgttgctcttgaggtacagatgag

SEQ ID NO: 776556 - DNA, 25 bp, Homo sapien
cagatgagttaagaatgctgatata

SEQ ID NO: 776557 - DNA, 25 bp, Homo sapien
gaattgtctaccttggctgatggag

SEQ ID NO: 776558 - DNA, 25 bp, Homo sapien
gatggatgtggtattatcatagaga

SEQ ID NO: 776559 - DNA, 25 bp, Homo sapien
cacaaactttcatgagaggtgcaga

SEQ ID NO: 776560 - DNA, 25 bp, Homo sapien
gaactgctcagtgtgctagagtggt

SEQ ID NO: 776561 - DNA, 25 bp, Homo sapien
gaagtagcctgttcccaagctggaa

SEQ ID NO: 776562 - DNA, 25 bp, Homo sapien
tgtattaagcaggtccaaatcatcc

SEQ ID NO: 776563 - DNA, 25 bp, Homo sapien
cagccacaataagtaggagcaaggg

SEQ ID NO: 776564 - DNA, 25 bp, Homo sapien
aagcaggtccaaatcatccttatac

SEQ ID NO: 776565 - DNA, 25 bp, Homo sapien
ggtaagtgtgctaactgtattaagc

SEQ ID NO: 776566 - DNA, 25 bp, Homo sapien
gcaggatactgaatgtatcctgctt

SEQ ID NO: 776567 - DNA, 25 bp, Homo sapien
tttcgactgctgaagcaggatactg

SEQ ID NO: 776568 - DNA, 25 bp, Homo sapien
gggctacgtctgttatttcgactgc

SEQ ID NO: 776569 - DNA, 25 bp, Homo sapien
agagatgccagatggggctacgtct

SEQ ID NO: 776570 - DNA, 25 bp, Homo sapien
gagccttctttacaggcttaagtaa

SEQ ID NO: 776571 - DNA, 25 bp, Homo sapien
tgagccttctttacaggcttaagta

SEQ ID NO: 776572 - DNA, 25 bp, Homo sapien
gctgagccttctttacaggcttaag

SEQ ID NO: 776573 - DNA, 25 bp, Homo sapien
aagctgagccttctttacaggctta

SEQ ID NO: 776574 - DNA, 25 bp, Homo sapien
ggttttgacatctcttttgatagtc

SEQ ID NO: 776575 - DNA, 25 bp, Homo sapien
aaataaccacattgtaacaacttgg

SEQ ID NO: 776576 - DNA, 25 bp, Homo sapien
gtaatgtgtactgtatccaaaaatg

SEQ ID NO: 776577 - DNA, 25 bp, Homo sapien
gatagtccctacctacatatatgta

SEQ ID NO: 776578 - DNA, 25 bp, Homo sapien
ttcctggctatttataagattttcc

SEQ ID NO: 776579 - DNA, 25 bp, Homo sapien
tctctggagactccaatttacatgc

SEQ ID NO: 776580 - DNA, 25 bp, Homo sapien
cagctcacggatgctctgttcaatc

SEQ ID NO: 776581 - DNA, 25 bp, Homo sapien
tagactgtatgaagttttcacacag

SEQ ID NO: 776582 - DNA, 25 bp, Homo sapien
tacagaaattgcttgtctgatggac

SEQ ID NO: 776583 - DNA, 25 bp, Homo sapien
gatttggatagactgctgtgtcaca

SEQ ID NO: 776584 - DNA, 25 bp, Homo sapien
tcaggatctgatttagagaccttgc

SEQ ID NO: 776585 - DNA, 25 bp, Homo sapien
catagtgacataggtaaaaggtgat

SEQ ID NO: 776586 - DNA, 25 bp, Homo sapien
ggctttattagcctatcctcaaggt

SEQ ID NO: 776587 - DNA, 25 bp, Homo sapien
tcaaggtccctgtctgaagtttgca

SEQ ID NO: 776588 - DNA, 25 bp, Homo sapien
tcaagtctgttgataaacccacaga

SEQ ID NO: 776589 - DNA, 25 bp, Homo sapien
cacgatttatgtatattgtccacct

SEQ ID NO: 776590 - DNA, 25 bp, Homo sapien
tctgtctgcttttcactgttggcaa

SEQ ID NO: 776591 - DNA, 25 bp, Homo sapien
tgcttttcactgttggcaatttcat

SEQ ID NO: 776592 - DNA, 25 bp, Homo sapien
gcaatttcattctcctccaaatttg

SEQ ID NO: 776593 - DNA, 25 bp, Homo sapien
tgtctgcttttcactgttggcaatt

SEQ ID NO: 776594 - DNA, 25 bp, Homo sapien
tcatttcttataaccgtctccattt

SEQ ID NO: 776595 - DNA, 25 bp, Homo sapien
catttcttataaccgtctccattta

SEQ ID NO: 776596 - DNA, 25 bp, Homo sapien
ctccatttaccggaatgctgaatct

SEQ ID NO: 776597 - DNA, 25 bp, Homo sapien
taaaacaccatgcaagacccagaca

SEQ ID NO: 776598 - DNA, 25 bp, Homo sapien
tcatctctgaggtatcatggtgtgg

SEQ ID NO: 776599 - DNA, 25 bp, Homo sapien
taagttcaaatcatggctcggccag

SEQ ID NO: 776600 - DNA, 25 bp, Homo sapien
tactagctatatggcgactcacagg

SEQ ID NO: 776601 - DNA, 25 bp, Homo sapien
ctgtaggatctattaaaagcccatt

SEQ ID NO: 776602 - DNA, 25 bp, Homo sapien
cctggcctgtaggatctattaaaag

SEQ ID NO: 776603 - DNA, 25 bp, Homo sapien
gcctgtaggatctattaaaagccca

SEQ ID NO: 776604 - DNA, 25 bp, Homo sapien
ggcctgtaggatctattaaaagccc

SEQ ID NO: 776605 - DNA, 25 bp, Homo sapien
taagggtgggcctcagagtcctata

SEQ ID NO: 776606 - DNA, 25 bp, Homo sapien
caatgaaggttataccaagcctggt

SEQ ID NO: 776607 - DNA, 25 bp, Homo sapien
tagaaagacctgtggctgaaagact

SEQ ID NO: 776608 - DNA, 25 bp, Homo sapien
cagcccatgggaattacacaaaagg

SEQ ID NO: 776609 - DNA, 25 bp, Homo sapien
tacaatagtatggaaaacgacaggc

SEQ ID NO: 776610 - DNA, 25 bp, Homo sapien
caagaggagccaaggaatagcgaga

SEQ ID NO: 776611 - DNA, 25 bp, Homo sapien
ttcatgtacctgagccaaactgggc

SEQ ID NO: 776612 - DNA, 25 bp, Homo sapien
tgagaaggccaggtagaccatgact

SEQ ID NO: 776613 - DNA, 25 bp, Homo sapien
tagtcaatagaggaatcttcggagc

SEQ ID NO: 776614 - DNA, 25 bp, Homo sapien
taataaccactaaagtagactgaga

SEQ ID NO: 776615 - DNA, 25 bp, Homo sapien
tcttcggagcctagccatatttaaa

SEQ ID NO: 776616 - DNA, 25 bp, Homo sapien
tagtggaagagcaaaacatagcaac

SEQ ID NO: 776617 - DNA, 25 bp, Homo sapien
cactttgatgtggtaaggatcccgc

SEQ ID NO: 776618 - DNA, 25 bp, Homo sapien
ggatcccgcttagaatggttgctcg

SEQ ID NO: 776619 - DNA, 25 bp, Homo sapien
tcaaaacaggcaagatagctaaggg

SEQ ID NO: 776620 - DNA, 25 bp, Homo sapien
cctactatgttggaggcaattacca

SEQ ID NO: 776621 - DNA, 25 bp, Homo sapien
caagttactgccgtccagggctgag

SEQ ID NO: 776622 - DNA, 25 bp, Homo sapien
gattgcacaagttactgccgtccag

SEQ ID NO: 776623 - DNA, 25 bp, Homo sapien
gaacagctctttgattgcacaagtt

SEQ ID NO: 776624 - DNA, 25 bp, Homo sapien
gcagggctgatagccctgtccctct

SEQ ID NO: 776625 - DNA, 25 bp, Homo sapien
tctcacgcctttcctgagttggcag

SEQ ID NO: 776626 - DNA, 25 bp, Homo sapien
cctaaatagcataaaacgtgaccac

SEQ ID NO: 776627 - DNA, 25 bp, Homo sapien
caaataataagacaagtggcctcac

SEQ ID NO: 776628 - DNA, 25 bp, Homo sapien
tgaaggtccaaactacataggcttg

SEQ ID NO: 776629 - DNA, 25 bp, Homo sapien
ttgcttcaacgaaaatgcggcagtg

SEQ ID NO: 776630 - DNA, 25 bp, Homo sapien
caaagagacctagggaaccatcacc

SEQ ID NO: 776631 - DNA, 25 bp, Homo sapien
gaaaaaggatgccaagctagaaggg

SEQ ID NO: 776632 - DNA, 25 bp, Homo sapien
tctatgaggcattacctagcacagg

SEQ ID NO: 776633 - DNA, 25 bp, Homo sapien
caatgcatgactatgaaataagaca

SEQ ID NO: 776634 - DNA, 25 bp, Homo sapien
catatcgtagcataaaaatttgaac

SEQ ID NO: 776635 - DNA, 25 bp, Homo sapien
caagtcactttatgcagtacgcaca

SEQ ID NO: 776636 - DNA, 25 bp, Homo sapien
tttcaaacctgataaagcaagtcac

SEQ ID NO: 776637 - DNA, 25 bp, Homo sapien
tgccactaccaagaaaggctcagag

SEQ ID NO: 776638 - DNA, 25 bp, Homo sapien
tacaacaaatgcaaggaggctccct

SEQ ID NO: 776639 - DNA, 25 bp, Homo sapien
tagacacagccatacttggtccaga

SEQ ID NO: 776640 - DNA, 25 bp, Homo sapien
gccatcagagttcaaggaccacaga

SEQ ID NO: 776641 - DNA, 25 bp, Homo sapien
ctatgtaactttaggtgagttactt

SEQ ID NO: 776642 - DNA, 25 bp, Homo sapien
acacagcacagtgcccgactaattt

SEQ ID NO: 776643 - DNA, 25 bp, Homo sapien
gccgggactactgatacacagcaca

SEQ ID NO: 776644 - DNA, 25 bp, Homo sapien
gttgctaccaaagataaatgtctcc

SEQ ID NO: 776645 - DNA, 25 bp, Homo sapien
ccgaaattgattgcccagagagtat

SEQ ID NO: 776646 - DNA, 25 bp, Homo sapien
cgcgcacggtgcgcacacacactgg

SEQ ID NO: 776647 - DNA, 25 bp, Homo sapien
acacacactggcctgcgcccactgt

SEQ ID NO: 776648 - DNA, 25 bp, Homo sapien
tcttaagccggtctgaaaagcgcaa

SEQ ID NO: 776649 - DNA, 25 bp, Homo sapien
cttaagccggtctgaaaagcgcaat

SEQ ID NO: 776650 - DNA, 25 bp, Homo sapien
taattctcgatcacgtgcacactcc

SEQ ID NO: 776651 - DNA, 25 bp, Homo sapien
tatcaatcattaaaactagtgaggc

SEQ ID NO: 776652 - DNA, 25 bp, Homo sapien
tgaggccactcactataccaccata

SEQ ID NO: 776653 - DNA, 25 bp, Homo sapien
gggagttgttataagactaagctat

SEQ ID NO: 776654 - DNA, 25 bp, Homo sapien
ttaagtcccagatctagcttgctat

SEQ ID NO: 776655 - DNA, 25 bp, Homo sapien
cttaagtcccagatctagcttgcta

SEQ ID NO: 776656 - DNA, 25 bp, Homo sapien
tcttggcccatgcaaggtgatctag

SEQ ID NO: 776657 - DNA, 25 bp, Homo sapien
gatctagtttctacacttgggagca

SEQ ID NO: 776658 - DNA, 25 bp, Homo sapien
caaaatatgtccgaatgcaaccact

SEQ ID NO: 776659 - DNA, 25 bp, Homo sapien
tagggaatccaaacagccccatagc

SEQ ID NO: 776660 - DNA, 25 bp, Homo sapien
tgagcttataagaacacgagcttgg

SEQ ID NO: 776661 - DNA, 25 bp, Homo sapien
acgagcttggttctcaaggagccca

SEQ ID NO: 776662 - DNA, 25 bp, Homo sapien
ttcccgaggctcaccaaggaggtaa

SEQ ID NO: 776663 - DNA, 25 bp, Homo sapien
gagcaatgctctagcttcccgaggc

SEQ ID NO: 776664 - DNA, 25 bp, Homo sapien
cataagacacacgatactctccgag

SEQ ID NO: 776665 - DNA, 25 bp, Homo sapien
taagacacacgatactctccgaggc

SEQ ID NO: 776666 - DNA, 25 bp, Homo sapien
gacacataagacacacgatactctc

SEQ ID NO: 776667 - DNA, 25 bp, Homo sapien
atagacacataagacacacgatact

SEQ ID NO: 776668 - DNA, 25 bp, Homo sapien
ttcagcaatgctaaaatggtctggc

SEQ ID NO: 776669 - DNA, 25 bp, Homo sapien
ggcatgcctgagagtaaatcgatac

SEQ ID NO: 776670 - DNA, 25 bp, Homo sapien
aaagatacacttttgatatgtctgt

SEQ ID NO: 776671 - DNA, 25 bp, Homo sapien
gaggaggagttacagtaagacagaa

SEQ ID NO: 776672 - DNA, 25 bp, Homo sapien
aacagaagagttcaggcaggtgaaa

SEQ ID NO: 776673 - DNA, 25 bp, Homo sapien
aaacaacagaagagttcaggcaggt

SEQ ID NO: 776674 - DNA, 25 bp, Homo sapien
aacaacagaagagttcaggcaggtg

SEQ ID NO: 776675 - DNA, 25 bp, Homo sapien
caacagaagagttcaggcaggtgaa

SEQ ID NO: 776676 - DNA, 25 bp, Homo sapien
ccctgtactgcggaaaaagcgcaag

SEQ ID NO: 776677 - DNA, 25 bp, Homo sapien
taagcagatgccgtgagtttagaca

SEQ ID NO: 776678 - DNA, 25 bp, Homo sapien
cctgtactgcggaaaaagcgcaagg

SEQ ID NO: 776679 - DNA, 25 bp, Homo sapien
gtttagacagccagacaactgattt

SEQ ID NO: 776680 - DNA, 25 bp, Homo sapien
gatgagtcccaactatgagctggtg

SEQ ID NO: 776681 - DNA, 25 bp, Homo sapien
gaaataaatccaagtgctccacatg

SEQ ID NO: 776682 - DNA, 25 bp, Homo sapien
ggtcttgtatcgttaaccaggctgg

SEQ ID NO: 776683 - DNA, 25 bp, Homo sapien
catggccatatgttgtctgagctag

SEQ ID NO: 776684 - DNA, 25 bp, Homo sapien
accatggctttctctactgtgcata

SEQ ID NO: 776685 - DNA, 25 bp, Homo sapien
ccatggctttctctactgtgcatac

SEQ ID NO: 776686 - DNA, 25 bp, Homo sapien
ttgtcataaatgtgcttgatgctca

SEQ ID NO: 776687 - DNA, 25 bp, Homo sapien
tgtcataaatgtgcttgatgctcat

SEQ ID NO: 776688 - DNA, 25 bp, Homo sapien
ggcatctctttaccagcaatgggaa

SEQ ID NO: 776689 - DNA, 25 bp, Homo sapien
catagtctaaaacctgattaggacc

SEQ ID NO: 776690 - DNA, 25 bp, Homo sapien
tgggaaattccgctttggtgattct

SEQ ID NO: 776691 - DNA, 25 bp, Homo sapien
tttaccagcaatgggaaattccgct

SEQ ID NO: 776692 - DNA, 25 bp, Homo sapien
tcaggtgtgatgacttcagccatga

SEQ ID NO: 776693 - DNA, 25 bp, Homo sapien
gaaaagcacagcctatgagaagcgc

SEQ ID NO: 776694 - DNA, 25 bp, Homo sapien
tgaatgacaatcaatgaacgccagt

SEQ ID NO: 776695 - DNA, 25 bp, Homo sapien
gacttaaatgcccacagcttggtta

SEQ ID NO: 776696 - DNA, 25 bp, Homo sapien
tgaatattttcgcaaccatgaggag

SEQ ID NO: 776697 - DNA, 25 bp, Homo sapien
tcttgccaacacactctaggctggg

SEQ ID NO: 776698 - DNA, 25 bp, Homo sapien
gattcaacgtttaggcctccattag

SEQ ID NO: 776699 - DNA, 25 bp, Homo sapien
tacctgccctgccataggacggtga

SEQ ID NO: 776700 - DNA, 25 bp, Homo sapien
aatccagggatcaagagcatagcac

SEQ ID NO: 776701 - DNA, 25 bp, Homo sapien
caaaagacctactacacattcagtg

SEQ ID NO: 776702 - DNA, 25 bp, Homo sapien
gacatctagtagaagatcccaacag

SEQ ID NO: 776703 - DNA, 25 bp, Homo sapien
tcccaacagagctatacacaaaaga

SEQ ID NO: 776704 - DNA, 25 bp, Homo sapien
gcaaccatcactctaatctagattg

SEQ ID NO: 776705 - DNA, 25 bp, Homo sapien
tagattgataacacttccatcaccc

SEQ ID NO: 776706 - DNA, 25 bp, Homo sapien
tcaaggttgtgcaaccccaccactg

SEQ ID NO: 776707 - DNA, 25 bp, Homo sapien
tgcataccataaaatacacccacat

SEQ ID NO: 776708 - DNA, 25 bp, Homo sapien
tatattctatcttcacaatctcgat

SEQ ID NO: 776709 - DNA, 25 bp, Homo sapien
tctgtcttatattctatcttcacaa

SEQ ID NO: 776710 - DNA, 25 bp, Homo sapien
gctcaagaggctctgtcttatattc

SEQ ID NO: 776711 - DNA, 25 bp, Homo sapien
agaaatgctcaagaggctctgtctt

SEQ ID NO: 776712 - DNA, 25 bp, Homo sapien
ccccgtaatactatcttcaataaag

SEQ ID NO: 776713 - DNA, 25 bp, Homo sapien
caataaagcactcttgcatgcctca

SEQ ID NO: 776714 - DNA, 25 bp, Homo sapien
gaccatgctgtcacaatgggcacag

SEQ ID NO: 776715 - DNA, 25 bp, Homo sapien
gcatgcctcaagcaatgatgtgacc

SEQ ID NO: 776716 - DNA, 25 bp, Homo sapien
tctttgtcccactggagtagcctcg

SEQ ID NO: 776717 - DNA, 25 bp, Homo sapien
tatctgatctttaattctactaccc

SEQ ID NO: 776718 - DNA, 25 bp, Homo sapien
gcagagctcacaattctctttgtcc

SEQ ID NO: 776719 - DNA, 25 bp, Homo sapien
cctcgttcgggttctgcatcaatat

SEQ ID NO: 776720 - DNA, 25 bp, Homo sapien
tacatcaggatggaggcgtttcttg

SEQ ID NO: 776721 - DNA, 25 bp, Homo sapien
taatatttcgattcaaagcacaagc

SEQ ID NO: 776722 - DNA, 25 bp, Homo sapien
gcaatgcctgtaaaatatccatggg

SEQ ID NO: 776723 - DNA, 25 bp, Homo sapien
tatgtaagccactttgcacagaaac

SEQ ID NO: 776724 - DNA, 25 bp, Homo sapien
caaactccagcttaaagtagactca

SEQ ID NO: 776725 - DNA, 25 bp, Homo sapien
gaccctgcacaaggttgccgttctt

SEQ ID NO: 776726 - DNA, 25 bp, Homo sapien
cagactggaacctacacctggcctt

SEQ ID NO: 776727 - DNA, 25 bp, Homo sapien
tcttaccccatttttacgctgccaa

SEQ ID NO: 776728 - DNA, 25 bp, Homo sapien
gttctgaccctgtccatgaaactca

SEQ ID NO: 776729 - DNA, 25 bp, Homo sapien
aagaggaggacccatcataggacca

SEQ ID NO: 776730 - DNA, 25 bp, Homo sapien
aaagagtggtacaacagtcgaaggt

SEQ ID NO: 776731 - DNA, 25 bp, Homo sapien
tgggccaaggaccacaagtcattca

SEQ ID NO: 776732 - DNA, 25 bp, Homo sapien
actcatctcttgtgggttcgctctc

SEQ ID NO: 776733 - DNA, 25 bp, Homo sapien
tccctacctcttgtaggtgagaatg

SEQ ID NO: 776734 - DNA, 25 bp, Homo sapien
gggaggagccactagtttagttgaa

SEQ ID NO: 776735 - DNA, 25 bp, Homo sapien
cagcaacgctctaaactactgggag

SEQ ID NO: 776736 - DNA, 25 bp, Homo sapien
aaactctccctattactggcccagg

SEQ ID NO: 776737 - DNA, 25 bp, Homo sapien
taagcaatttgacgagagaaaagaa

SEQ ID NO: 776738 - DNA, 25 bp, Homo sapien
tctccctattactggcccaggatga

SEQ ID NO: 776739 - DNA, 25 bp, Homo sapien
cctttaagcaatttgacgagagaaa

SEQ ID NO: 776740 - DNA, 25 bp, Homo sapien
taatttctcattggggtcacgctaa

SEQ ID NO: 776741 - DNA, 25 bp, Homo sapien
cgctaacagtagtcaacagaatcta

SEQ ID NO: 776742 - DNA, 25 bp, Homo sapien
tcattggggtcacgctaacagtagt

SEQ ID NO: 776743 - DNA, 25 bp, Homo sapien
tatcacatagagtattagaattcaa

SEQ ID NO: 776744 - DNA, 25 bp, Homo sapien
cgttacagtcatagcttaatgccaa

SEQ ID NO: 776745 - DNA, 25 bp, Homo sapien
tctgatacctgaattgggatgagga

SEQ ID NO: 776746 - DNA, 25 bp, Homo sapien
gttaacaattgtcaaaggatctgat

SEQ ID NO: 776747 - DNA, 25 bp, Homo sapien
atgaaggttaaactaaaacacactg

SEQ ID NO: 776748 - DNA, 25 bp, Homo sapien
tttaggcagataaatacatcagctg

SEQ ID NO: 776749 - DNA, 25 bp, Homo sapien
caaaagttaaagcaggccacgccaa

SEQ ID NO: 776750 - DNA, 25 bp, Homo sapien
taaaatctagaggtagcacggttat

SEQ ID NO: 776751 - DNA, 25 bp, Homo sapien
ctgctgattgacaaagatgatgttc

SEQ ID NO: 776752 - DNA, 25 bp, Homo sapien
tccatctggaccaaaatttcactag

SEQ ID NO: 776753 - DNA, 25 bp, Homo sapien
ccaaaatttcactagcctccttcat

SEQ ID NO: 776754 - DNA, 25 bp, Homo sapien
tggaccaaaatttcactagcctcct

SEQ ID NO: 776755 - DNA, 25 bp, Homo sapien
catctggaccaaaatttcactagcc

SEQ ID NO: 776756 - DNA, 25 bp, Homo sapien
taagataacgtgtctgtgacagcgc

SEQ ID NO: 776757 - DNA, 25 bp, Homo sapien
gattaggctgcatcacggtatacag

SEQ ID NO: 776758 - DNA, 25 bp, Homo sapien
tctctaactagtagggaaccatctc

SEQ ID NO: 776759 - DNA, 25 bp, Homo sapien
ctgttaatagaaagctgcacaaggg

SEQ ID NO: 776760 - DNA, 25 bp, Homo sapien
atatatatcctactatgccatgtgg

SEQ ID NO: 776761 - DNA, 25 bp, Homo sapien
gccatgtggaaactacctagcaaat

SEQ ID NO: 776762 - DNA, 25 bp, Homo sapien
taactagggtttgttaatcacaggc

SEQ ID NO: 776763 - DNA, 25 bp, Homo sapien
tatgcaatgccttctatgcaaacac

SEQ ID NO: 776764 - DNA, 25 bp, Homo sapien
tcatgcctcagccagacatggttaa

SEQ ID NO: 776765 - DNA, 25 bp, Homo sapien
taatctctctcaacctgcatgggaa

SEQ ID NO: 776766 - DNA, 25 bp, Homo sapien
gtgtcctaaacttcaaactggagtg

SEQ ID NO: 776767 - DNA, 25 bp, Homo sapien
gactgaccttgaggaaagtcacagt

SEQ ID NO: 776768 - DNA, 25 bp, Homo sapien
tgcatctacaacacatgaatatccg

SEQ ID NO: 776769 - DNA, 25 bp, Homo sapien
tgagaagcagccaagtagtgcatct

SEQ ID NO: 776770 - DNA, 25 bp, Homo sapien
ttccccaccagcttgtgagagagga

SEQ ID NO: 776771 - DNA, 25 bp, Homo sapien
tctattccgaactcagggtctaagg

SEQ ID NO: 776772 - DNA, 25 bp, Homo sapien
ggctgtggtggcagaatggaacgta

SEQ ID NO: 776773 - DNA, 25 bp, Homo sapien
gctgcaaggtgctcatcattttctt

SEQ ID NO: 776774 - DNA, 25 bp, Homo sapien
ggaacgtaggcttcaatgataccaa

SEQ ID NO: 776775 - DNA, 25 bp, Homo sapien
ctagagcacaaaggcaccttggcag

SEQ ID NO: 776776 - DNA, 25 bp, Homo sapien
cccagctgatgatgtaccaggtttg

SEQ ID NO: 776777 - DNA, 25 bp, Homo sapien
tctggattaaaaccctgtggactat

SEQ ID NO: 776778 - DNA, 25 bp, Homo sapien
ccaaacctgggacataccgattcta

SEQ ID NO: 776779 - DNA, 25 bp, Homo sapien
gacataccgattctataggtctgga

SEQ ID NO: 776780 - DNA, 25 bp, Homo sapien
tttgagtcacacgaagagatatatc

SEQ ID NO: 776781 - DNA, 25 bp, Homo sapien
tattgatgccgacactgccacggcc

SEQ ID NO: 776782 - DNA, 25 bp, Homo sapien
cactcataattctgggtctttagac

SEQ ID NO: 776783 - DNA, 25 bp, Homo sapien
gcaattcggatccagggcagttaac

SEQ ID NO: 776784 - DNA, 25 bp, Homo sapien
tgtgacatttcagtgggtaccttca

SEQ ID NO: 776785 - DNA, 25 bp, Homo sapien
cactggtggcaacaaacactaggac

SEQ ID NO: 776786 - DNA, 25 bp, Homo sapien
tatggagtgaaatgtgacagcctac

SEQ ID NO: 776787 - DNA, 25 bp, Homo sapien
ggtaccttcatatatcactggtggc

SEQ ID NO: 776788 - DNA, 25 bp, Homo sapien
atcaaactcccttccgccggcctct

SEQ ID NO: 776789 - DNA, 25 bp, Homo sapien
tcttgcctgcggtacggagggttgg

SEQ ID NO: 776790 - DNA, 25 bp, Homo sapien
gatctgtcactcacacatcaaactc

SEQ ID NO: 776791 - DNA, 25 bp, Homo sapien
ttctcccagagacatgctgccagat

SEQ ID NO: 776792 - DNA, 25 bp, Homo sapien
tctcccacgaatgaattggtatccg

SEQ ID NO: 776793 - DNA, 25 bp, Homo sapien
ccctgtactatctcccacgaatgaa

SEQ ID NO: 776794 - DNA, 25 bp, Homo sapien
aatgaattggtatccgtacagggca

SEQ ID NO: 776795 - DNA, 25 bp, Homo sapien
gtactatctcccacgaatgaattgg

SEQ ID NO: 776796 - DNA, 25 bp, Homo sapien
tcaacctgctgtgctgacctggagg

SEQ ID NO: 776797 - DNA, 25 bp, Homo sapien
ccttggaagagcatatcagcagccc

SEQ ID NO: 776798 - DNA, 25 bp, Homo sapien
tagaaacatcagttccccttgggta

SEQ ID NO: 776799 - DNA, 25 bp, Homo sapien
tcatcctgggactgtgattgcctct

SEQ ID NO: 776800 - DNA, 25 bp, Homo sapien
tgaaggagagattcctaggagtttt

SEQ ID NO: 776801 - DNA, 25 bp, Homo sapien
gcaagtgtggaaaggtaaacgcatg

SEQ ID NO: 776802 - DNA, 25 bp, Homo sapien
taggagttttcatgcggtgctgtgt

SEQ ID NO: 776803 - DNA, 25 bp, Homo sapien
gactattaagccatgttgaaggaga

SEQ ID NO: 776804 - DNA, 25 bp, Homo sapien
ccaggtgtacgtccatttcctttgt

SEQ ID NO: 776805 - DNA, 25 bp, Homo sapien
tccaggtgtacgtccatttcctttg

SEQ ID NO: 776806 - DNA, 25 bp, Homo sapien
tactgtcttctagccaataaggtaa

SEQ ID NO: 776807 - DNA, 25 bp, Homo sapien
gtaaaccaaacctagagccatgacc

SEQ ID NO: 776808 - DNA, 25 bp, Homo sapien
agcacacagtgcctgggcctctact

SEQ ID NO: 776809 - DNA, 25 bp, Homo sapien
cgatccataaagcacacagtgcctg

SEQ ID NO: 776810 - DNA, 25 bp, Homo sapien
ttatccaagagacgcctcactgtca

SEQ ID NO: 776811 - DNA, 25 bp, Homo sapien
tcagttttcatctccgtagatctcc

SEQ ID NO: 776812 - DNA, 25 bp, Homo sapien
gatctccacgtccttcttatccaag

SEQ ID NO: 776813 - DNA, 25 bp, Homo sapien
tttcatctccgtagatctccacgtc

SEQ ID NO: 776814 - DNA, 25 bp, Homo sapien
catacctgctgttggaaaaaactta

SEQ ID NO: 776815 - DNA, 25 bp, Homo sapien
tacagagacctgcactatgtcatgc

SEQ ID NO: 776816 - DNA, 25 bp, Homo sapien
tatgtcatgcacaattggcttcttc

SEQ ID NO: 776817 - DNA, 25 bp, Homo sapien
taaaggccttgcaacaatggatgta

SEQ ID NO: 776818 - DNA, 25 bp, Homo sapien
taatcctccaacatgtaattaggca

SEQ ID NO: 776819 - DNA, 25 bp, Homo sapien
ggctgtttctaaacatcaactgcaa

SEQ ID NO: 776820 - DNA, 25 bp, Homo sapien
ggcacttactctgtcaaatctgcta

SEQ ID NO: 776821 - DNA, 25 bp, Homo sapien
tgcaaccatgataccctttaatagt

SEQ ID NO: 776822 - DNA, 25 bp, Homo sapien
tcccgcttactgtggacacctccat

SEQ ID NO: 776823 - DNA, 25 bp, Homo sapien
gcctctctcccgcttactgtggaca

SEQ ID NO: 776824 - DNA, 25 bp, Homo sapien
ctgcctctctcccgcttactgtgga

SEQ ID NO: 776825 - DNA, 25 bp, Homo sapien
tctctcccgcttactgtggacacct

SEQ ID NO: 776826 - DNA, 25 bp, Homo sapien
aagcgcccatcaccatgccgggcta

SEQ ID NO: 776827 - DNA, 25 bp, Homo sapien
actacaagcgcccatcaccatgccg

SEQ ID NO: 776828 - DNA, 25 bp, Homo sapien
tacaagcgcccatcaccatgccggg

SEQ ID NO: 776829 - DNA, 25 bp, Homo sapien
caagcgcccatcaccatgccgggct

SEQ ID NO: 776830 - DNA, 25 bp, Homo sapien
catgtgactgctctatgatgactgc

SEQ ID NO: 776831 - DNA, 25 bp, Homo sapien
gctgcctccttcattgggaaaaaga

SEQ ID NO: 776832 - DNA, 25 bp, Homo sapien
gacccctcacgctgctcttggtgga

SEQ ID NO: 776833 - DNA, 25 bp, Homo sapien
gcaaataccgagatggagctcccat

SEQ ID NO: 776834 - DNA, 25 bp, Homo sapien
ggagttgacaggcaatacatttgta

SEQ ID NO: 776835 - DNA, 25 bp, Homo sapien
tatgccagttgaaaggttactcatc

SEQ ID NO: 776836 - DNA, 25 bp, Homo sapien
tgttacttacaagcaattgactgca

SEQ ID NO: 776837 - DNA, 25 bp, Homo sapien
gcccgcttttttactggagttgaca

SEQ ID NO: 776838 - DNA, 25 bp, Homo sapien
gaaagacagacttaggtaggcacaa

SEQ ID NO: 776839 - DNA, 25 bp, Homo sapien
cagaatctgccattaattcagccaa

SEQ ID NO: 776840 - DNA, 25 bp, Homo sapien
tcttgactgactgtaagtggattac

SEQ ID NO: 776841 - DNA, 25 bp, Homo sapien
tgatgcctactattattccactggt

SEQ ID NO: 776842 - DNA, 25 bp, Homo sapien
aaaaagcccatggtcgccagttcag

SEQ ID NO: 776843 - DNA, 25 bp, Homo sapien
tggatcctttggattcgacagtttc

SEQ ID NO: 776844 - DNA, 25 bp, Homo sapien
gccagttcagactaggcgttgtccc

SEQ ID NO: 776845 - DNA, 25 bp, Homo sapien
tttggattcgacagtttctccaagt

SEQ ID NO: 776846 - DNA, 25 bp, Homo sapien
aatgatcatagaggctccatttagg

SEQ ID NO: 776847 - DNA, 25 bp, Homo sapien
tagaggctccatttaggtccacaat

SEQ ID NO: 776848 - DNA, 25 bp, Homo sapien
aactggagggttaatgatcatagag

SEQ ID NO: 776849 - DNA, 25 bp, Homo sapien
tccatttaggtccacaatattaaga

SEQ ID NO: 776850 - DNA, 25 bp, Homo sapien
taagtctcctaagaggctgcagtct

SEQ ID NO: 776851 - DNA, 25 bp, Homo sapien
caaaggcatcgtctaatggagatcc

SEQ ID NO: 776852 - DNA, 25 bp, Homo sapien
catcattaatgcaagtggctggaag

SEQ ID NO: 776853 - DNA, 25 bp, Homo sapien
tggagatgtccctagacagagaggc

SEQ ID NO: 776854 - DNA, 25 bp, Homo sapien
ctgccaagcaatatgttctcaatcc

SEQ ID NO: 776855 - DNA, 25 bp, Homo sapien
actgctcagctaagaaaacgtcccc

SEQ ID NO: 776856 - DNA, 25 bp, Homo sapien
gccaagcaatatgttctcaatccct

SEQ ID NO: 776857 - DNA, 25 bp, Homo sapien
aatccctcaggcagagtggtgcact

SEQ ID NO: 776858 - DNA, 25 bp, Homo sapien
tttgtgcagcatgacaggagtggta

SEQ ID NO: 776859 - DNA, 25 bp, Homo sapien
tgtgcagcatgacaggagtggtatt

SEQ ID NO: 776860 - DNA, 25 bp, Homo sapien
ctttgtgcagcatgacaggagtggt

SEQ ID NO: 776861 - DNA, 25 bp, Homo sapien
ttgtgcagcatgacaggagtggtat

SEQ ID NO: 776862 - DNA, 25 bp, Homo sapien
gctcttggcaccgttggcgccgtgc

SEQ ID NO: 776863 - DNA, 25 bp, Homo sapien
cttggcaccgttggcgccgtgcaca

SEQ ID NO: 776864 - DNA, 25 bp, Homo sapien
cgttggcgccgtgcacagcagcctg

SEQ ID NO: 776865 - DNA, 25 bp, Homo sapien
ctgcacagacaagctcttggcaccg

SEQ ID NO: 776866 - DNA, 25 bp, Homo sapien
ctaggagctccttttgccagcagtc

SEQ ID NO: 776867 - DNA, 25 bp, Homo sapien
cagcagtccagagcaacaaggcaca

SEQ ID NO: 776868 - DNA, 25 bp, Homo sapien
cagtccagagcaacaaggcacaaag

SEQ ID NO: 776869 - DNA, 25 bp, Homo sapien
gcagtccagagcaacaaggcacaaa

SEQ ID NO: 776870 - DNA, 25 bp, Homo sapien
ccaatgaaagcctggacctgggcaa

SEQ ID NO: 776871 - DNA, 25 bp, Homo sapien
gaaggaggactgctatctggccgta

SEQ ID NO: 776872 - DNA, 25 bp, Homo sapien
tctggccgtaacgtagaagatggaa

SEQ ID NO: 776873 - DNA, 25 bp, Homo sapien
tcgaatggtctggtgatagtccaaa

SEQ ID NO: 776874 - DNA, 25 bp, Homo sapien
tatctgagcttagcaaagtggaaca

SEQ ID NO: 776875 - DNA, 25 bp, Homo sapien
gtatctgagcttagcaaagtggaac

SEQ ID NO: 776876 - DNA, 25 bp, Homo sapien
ccagaagcctcaattaaatctggaa

SEQ ID NO: 776877 - DNA, 25 bp, Homo sapien
cccagaagcctcaattaaatctgga

SEQ ID NO: 776878 - DNA, 25 bp, Homo sapien
acatgcacacatgctgaaatgtttc

SEQ ID NO: 776879 - DNA, 25 bp, Homo sapien
gccgaaaagatgtcaaggtgaaaga

SEQ ID NO: 776880 - DNA, 25 bp, Homo sapien
gctgcttgccatgaggtgtcattgg

SEQ ID NO: 776881 - DNA, 25 bp, Homo sapien
tttttctttgccgaaaagatgtcaa

SEQ ID NO: 776882 - DNA, 25 bp, Homo sapien
ctgctgcttgccatgaggtgtcatt

SEQ ID NO: 776883 - DNA, 25 bp, Homo sapien
agagaatccagccaatcttcacggc

SEQ ID NO: 776884 - DNA, 25 bp, Homo sapien
ggagaggtgagagaatccagccaat

SEQ ID NO: 776885 - DNA, 25 bp, Homo sapien
ccagccaatcttcacggcttggcat

SEQ ID NO: 776886 - DNA, 25 bp, Homo sapien
caacctcctatataaggtgtgaggg

SEQ ID NO: 776887 - DNA, 25 bp, Homo sapien
tgtatcaaaacattctgccaagcct

SEQ ID NO: 776888 - DNA, 25 bp, Homo sapien
gaaagaagaccccatagggagctga

SEQ ID NO: 776889 - DNA, 25 bp, Homo sapien
tgccaagccttccttatgtattctt

SEQ ID NO: 776890 - DNA, 25 bp, Homo sapien
ttttgcggctctgctcagtttgttc

SEQ ID NO: 776891 - DNA, 25 bp, Homo sapien
gtatgtggcacggagaggattttta

SEQ ID NO: 776892 - DNA, 25 bp, Homo sapien
ccaactttgaacattgcaagggtat

SEQ ID NO: 776893 - DNA, 25 bp, Homo sapien
cacggagaggatttttatgagcagg

SEQ ID NO: 776894 - DNA, 25 bp, Homo sapien
acattgcaagggtatgtggcacgga

SEQ ID NO: 776895 - DNA, 25 bp, Homo sapien
ccaatgaggcattctgtcccaccat

SEQ ID NO: 776896 - DNA, 25 bp, Homo sapien
gaagttaatatctgaaaccaatgag

SEQ ID NO: 776897 - DNA, 25 bp, Homo sapien
tatctgaaaccaatgaggcattctg

SEQ ID NO: 776898 - DNA, 25 bp, Homo sapien
agctccaaccgggttttcagcacag

SEQ ID NO: 776899 - DNA, 25 bp, Homo sapien
cggcggggcccaacatagatgctgg

SEQ ID NO: 776900 - DNA, 25 bp, Homo sapien
ctgttccctgctccctaggttgggc

SEQ ID NO: 776901 - DNA, 25 bp, Homo sapien
ctctgttccctgctccctaggttgg

SEQ ID NO: 776902 - DNA, 25 bp, Homo sapien
tggcagaaacagatggtgccgcggg

SEQ ID NO: 776903 - DNA, 25 bp, Homo sapien
aatttatggctgtactttgtcggca

SEQ ID NO: 776904 - DNA, 25 bp, Homo sapien
catttgtagcaagcagctccctgct

SEQ ID NO: 776905 - DNA, 25 bp, Homo sapien
tatcagggattgtatgctgagcacc

SEQ ID NO: 776906 - DNA, 25 bp, Homo sapien
gcaaaagtgtgatgattatcaggga

SEQ ID NO: 776907 - DNA, 25 bp, Homo sapien
gaagaactcagctgtcggcgctgtg

SEQ ID NO: 776908 - DNA, 25 bp, Homo sapien
aatgccccaagagccttacaaatgg

SEQ ID NO: 776909 - DNA, 25 bp, Homo sapien
ctgtgtgaggagaatgacactcatt

SEQ ID NO: 776910 - DNA, 25 bp, Homo sapien
ctggtccaacccacacaaggcttgt

SEQ ID NO: 776911 - DNA, 25 bp, Homo sapien
cagtcattcacattaggggtgctca

SEQ ID NO: 776912 - DNA, 25 bp, Homo sapien
tcactagtgggggacttcctgtttc

SEQ ID NO: 776913 - DNA, 25 bp, Homo sapien
cacattaggggtgctcactagtggg

SEQ ID NO: 776914 - DNA, 25 bp, Homo sapien
caaaataggctgagtgtgcagtcat

SEQ ID NO: 776915 - DNA, 25 bp, Homo sapien
ttgccggacaggttcatagggctga

SEQ ID NO: 776916 - DNA, 25 bp, Homo sapien
gaggttgtaggcgagagaacatatt

SEQ ID NO: 776917 - DNA, 25 bp, Homo sapien
agaacatattttgtgggccgctgtg

SEQ ID NO: 776918 - DNA, 25 bp, Homo sapien
cccttgggagtggaccgtgaccgca

SEQ ID NO: 776919 - DNA, 25 bp, Homo sapien
ctgtcacagcatgtattaaaattag

SEQ ID NO: 776920 - DNA, 25 bp, Homo sapien
gcaaaatggttttcctctcccgctg

SEQ ID NO: 776921 - DNA, 25 bp, Homo sapien
caagggccttctaagagctgagcgc

SEQ ID NO: 776922 - DNA, 25 bp, Homo sapien
tgctgggctaaaggcacagccggct

SEQ ID NO: 776923 - DNA, 25 bp, Homo sapien
gaaattgcctcgctgtgcttctggg

SEQ ID NO: 776924 - DNA, 25 bp, Homo sapien
gaggcccgacttgatgatgatttaa

SEQ ID NO: 776925 - DNA, 25 bp, Homo sapien
taaaaggatatcattgcagacggca

SEQ ID NO: 776926 - DNA, 25 bp, Homo sapien
gcaagcagaattgactttctgaggc

SEQ ID NO: 776927 - DNA, 25 bp, Homo sapien
ccgatgcaaaagtgccatagctcat

SEQ ID NO: 776928 - DNA, 25 bp, Homo sapien
tgcctgggaagccaattgctttgat

SEQ ID NO: 776929 - DNA, 25 bp, Homo sapien
catgctaatagaacttatcgcatta

SEQ ID NO: 776930 - DNA, 25 bp, Homo sapien
gcccttgcttgtgaggcaaatggaa

SEQ ID NO: 776931 - DNA, 25 bp, Homo sapien
tatgagctagctaaaatgacttgcc

SEQ ID NO: 776932 - DNA, 25 bp, Homo sapien
ggagcgcaccatccaatttacagct

SEQ ID NO: 776933 - DNA, 25 bp, Homo sapien
gaggactttgccgtgagctcagcag

SEQ ID NO: 776934 - DNA, 25 bp, Homo sapien
actctctggagcctcgagtgccagc

SEQ ID NO: 776935 - DNA, 25 bp, Homo sapien
caatttacagctccactctctggag

SEQ ID NO: 776936 - DNA, 25 bp, Homo sapien
cttctcttcctggtcactgtcactg

SEQ ID NO: 776937 - DNA, 25 bp, Homo sapien
tcttcctggtcactgtcactgtcac

SEQ ID NO: 776938 - DNA, 25 bp, Homo sapien
tctcttcctggtcactgtcactgtc

SEQ ID NO: 776939 - DNA, 25 bp, Homo sapien
cttcctggtcactgtcactgtcaca

SEQ ID NO: 776940 - DNA, 25 bp, Homo sapien
tggtgcccatgagcctcgaaacaga

SEQ ID NO: 776941 - DNA, 25 bp, Homo sapien
gataaaaacctcaaggcgagagcct

SEQ ID NO: 776942 - DNA, 25 bp, Homo sapien
aaggtcctgtcaacatgaagctggc

SEQ ID NO: 776943 - DNA, 25 bp, Homo sapien
taacgacagtacagaacaagagcct

SEQ ID NO: 776944 - DNA, 25 bp, Homo sapien
acatggataatgcacatgtcagcaa

SEQ ID NO: 776945 - DNA, 25 bp, Homo sapien
acagcacagcgtacccttccatagg

SEQ ID NO: 776946 - DNA, 25 bp, Homo sapien
taatgcacatgtcagcaagctgaca

SEQ ID NO: 776947 - DNA, 25 bp, Homo sapien
gcacagcgtacccttccataggtca

SEQ ID NO: 776948 - DNA, 25 bp, Homo sapien
ttactgctgtgcacatgtccctggc

SEQ ID NO: 776949 - DNA, 25 bp, Homo sapien
ggagtcctacttccaaggagctaag

SEQ ID NO: 776950 - DNA, 25 bp, Homo sapien
gaatgtcagcttggttgtacgaccc

SEQ ID NO: 776951 - DNA, 25 bp, Homo sapien
gggccaatgaccgtgtcttgaacac

SEQ ID NO: 776952 - DNA, 25 bp, Homo sapien
ctatggagtaagagaatggcaggtc

SEQ ID NO: 776953 - DNA, 25 bp, Homo sapien
gcgaatcctccaagcaacacatgaa

SEQ ID NO: 776954 - DNA, 25 bp, Homo sapien
cggttctgcagatccctatggagta

SEQ ID NO: 776955 - DNA, 25 bp, Homo sapien
ggcttgctgaaggtatcccaggaca

SEQ ID NO: 776956 - DNA, 25 bp, Homo sapien
tctactcttcatgaacgtccttgtg

SEQ ID NO: 776957 - DNA, 25 bp, Homo sapien
tgcaatgtattcacgtggctgggag

SEQ ID NO: 776958 - DNA, 25 bp, Homo sapien
aacgtccttgtggttatctgacatt

SEQ ID NO: 776959 - DNA, 25 bp, Homo sapien
tctgacattaatgtgcaatgtattc

SEQ ID NO: 776960 - DNA, 25 bp, Homo sapien
tatttggcaattgcatgttgcctct

SEQ ID NO: 776961 - DNA, 25 bp, Homo sapien
gattaagggtgccaagtgctgcctc

SEQ ID NO: 776962 - DNA, 25 bp, Homo sapien
tcactacagtgaagaacaatcccac

SEQ ID NO: 776963 - DNA, 25 bp, Homo sapien
gctgctgccagtactggagaaagaa

SEQ ID NO: 776964 - DNA, 25 bp, Homo sapien
ggccactgggctatatgccttccaa

SEQ ID NO: 776965 - DNA, 25 bp, Homo sapien
ctatatgtagagctgttgtcacccc

SEQ ID NO: 776966 - DNA, 25 bp, Homo sapien
ggctcaaagacaagagcccactttg

SEQ ID NO: 776967 - DNA, 25 bp, Homo sapien
gccttccaatcagctcagtcacatg

SEQ ID NO: 776968 - DNA, 25 bp, Homo sapien
tggtggcagtcatagttcttcgacc

SEQ ID NO: 776969 - DNA, 25 bp, Homo sapien
gttcttcgaccacccacaaactatg

SEQ ID NO: 776970 - DNA, 25 bp, Homo sapien
taggaatggactcttctagccaagg

SEQ ID NO: 776971 - DNA, 25 bp, Homo sapien
catgatgggtcatggaaatccttgc

SEQ ID NO: 776972 - DNA, 25 bp, Homo sapien
gactaattgtactagccgtgagacc

SEQ ID NO: 776973 - DNA, 25 bp, Homo sapien
ggtaatgaatgcaaccctctagcag

SEQ ID NO: 776974 - DNA, 25 bp, Homo sapien
ccgtgagaccctaggcaagttacct

SEQ ID NO: 776975 - DNA, 25 bp, Homo sapien
tcaatgccagctctcttgggacaac

SEQ ID NO: 776976 - DNA, 25 bp, Homo sapien
gggcccagtccatgtttagatagcg

SEQ ID NO: 776977 - DNA, 25 bp, Homo sapien
gcagtggccagctgaataaggtgct

SEQ ID NO: 776978 - DNA, 25 bp, Homo sapien
tacatacacgtccagggatgagcca

SEQ ID NO: 776979 - DNA, 25 bp, Homo sapien
cagtgattcaccttgaccatgaggc

SEQ ID NO: 776980 - DNA, 25 bp, Homo sapien
tagaaacagtatatccgacaaggga

SEQ ID NO: 776981 - DNA, 25 bp, Homo sapien
tgattccccgtaaagatatccagga

SEQ ID NO: 776982 - DNA, 25 bp, Homo sapien
gacaagggacttactcaaataccat

SEQ ID NO: 776983 - DNA, 25 bp, Homo sapien
taaaggtgtcacttgctcgacttcc

SEQ ID NO: 776984 - DNA, 25 bp, Homo sapien
tctaggcacaaagcactctcttgac

SEQ ID NO: 776985 - DNA, 25 bp, Homo sapien
taagcctgctacgtctgtgtggccc

SEQ ID NO: 776986 - DNA, 25 bp, Homo sapien
tgtggccctgtgcttacggaaggca

SEQ ID NO: 776987 - DNA, 25 bp, Homo sapien
ggtaagcctgctacgtctgtgtggc

SEQ ID NO: 776988 - DNA, 25 bp, Homo sapien
caactcagtgtgctaatccggctca

SEQ ID NO: 776989 - DNA, 25 bp, Homo sapien
taaaggctaagaaccacagtgagag

SEQ ID NO: 776990 - DNA, 25 bp, Homo sapien
ttttcaagagttcccagacagccat

SEQ ID NO: 776991 - DNA, 25 bp, Homo sapien
aaagttgtcctaagtgcatgtgcac

SEQ ID NO: 776992 - DNA, 25 bp, Homo sapien
cttttcacatgagcctaggtaggga

SEQ ID NO: 776993 - DNA, 25 bp, Homo sapien
gagcacacagtagaagacagccagt

SEQ ID NO: 776994 - DNA, 25 bp, Homo sapien
tatgacatgtcccaaccgctttgag

SEQ ID NO: 776995 - DNA, 25 bp, Homo sapien
cccttggagataaactggagcacac

SEQ ID NO: 776996 - DNA, 25 bp, Homo sapien
tctcgtgaaaccagagatacttttt

SEQ ID NO: 776997 - DNA, 25 bp, Homo sapien
taggtaagaacatacggcatttggt

SEQ ID NO: 776998 - DNA, 25 bp, Homo sapien
ataggtaagaacatacggcatttgg

SEQ ID NO: 776999 - DNA, 25 bp, Homo sapien
tataggtaagaacatacggcatttg

SEQ ID NO: 777000 - DNA, 25 bp, Homo sapien
actcctcagcttagagcgccgggca

SEQ ID NO: 777001 - DNA, 25 bp, Homo sapien
cacgagggcttatgaagcgactctc

SEQ ID NO: 777002 - DNA, 25 bp, Homo sapien
ccgtggtgtttctggactcggctcc

SEQ ID NO: 777003 - DNA, 25 bp, Homo sapien
gaaatgctgggagccaaatgacaaa

SEQ ID NO: 777004 - DNA, 25 bp, Homo sapien
gcctgcagctttcagggctaagaag

SEQ ID NO: 777005 - DNA, 25 bp, Homo sapien
tcctgagagctaggacgatcctgag

SEQ ID NO: 777006 - DNA, 25 bp, Homo sapien
tggcccatgaggaaaagtgagatcc

SEQ ID NO: 777007 - DNA, 25 bp, Homo sapien
ttccctgaagggatacgcgtcttcc

SEQ ID NO: 777008 - DNA, 25 bp, Homo sapien
tatctgtgttcttcggttcctacct

SEQ ID NO: 777009 - DNA, 25 bp, Homo sapien
ctcctcatggtggaattttgattta

SEQ ID NO: 777010 - DNA, 25 bp, Homo sapien
aatctaacacaaccattcctctctg

SEQ ID NO: 777011 - DNA, 25 bp, Homo sapien
aaatagtatctaatctctcttgtga

SEQ ID NO: 777012 - DNA, 25 bp, Homo sapien
tctctatacatgatcccctgcaggg

SEQ ID NO: 777013 - DNA, 25 bp, Homo sapien
tgtcaacatgaacagccaggacctg

SEQ ID NO: 777014 - DNA, 25 bp, Homo sapien
ggtcacgtagtttgctcagacagca

SEQ ID NO: 777015 - DNA, 25 bp, Homo sapien
tctagagaaaatacccacttcggcc

SEQ ID NO: 777016 - DNA, 25 bp, Homo sapien
caactaaaatgttcctggtggagac

SEQ ID NO: 777017 - DNA, 25 bp, Homo sapien
ttaactgcctagaactgcaactcag

SEQ ID NO: 777018 - DNA, 25 bp, Homo sapien
aattcctagttcaaagaggacgccg

SEQ ID NO: 777019 - DNA, 25 bp, Homo sapien
tcaaaacaccctagcaataacagtg

SEQ ID NO: 777020 - DNA, 25 bp, Homo sapien
ctggcattttcctcgccatgggccc

SEQ ID NO: 777021 - DNA, 25 bp, Homo sapien
attctggcattttcctcgccatggg

SEQ ID NO: 777022 - DNA, 25 bp, Homo sapien
catgggccccagacaagctcttcat

SEQ ID NO: 777023 - DNA, 25 bp, Homo sapien
ccatgggccccagacaagctcttca

SEQ ID NO: 777024 - DNA, 25 bp, Homo sapien
gtctgttctcttaagtggagtggag

SEQ ID NO: 777025 - DNA, 25 bp, Homo sapien
gaactgaagggatctgagtgtcggg

SEQ ID NO: 777026 - DNA, 25 bp, Homo sapien
tgttctcttaagtggagtggagttg

SEQ ID NO: 777027 - DNA, 25 bp, Homo sapien
ctccagtctgttctcttaagtggag

SEQ ID NO: 777028 - DNA, 25 bp, Homo sapien
gctttgggctgggatgtcaacctgt

SEQ ID NO: 777029 - DNA, 25 bp, Homo sapien
tgaaataacacagtagaaacctcct

SEQ ID NO: 777030 - DNA, 25 bp, Homo sapien
gggtaatagccacacagcatagatg

SEQ ID NO: 777031 - DNA, 25 bp, Homo sapien
cttttgttactagggtcggcacgag

SEQ ID NO: 777032 - DNA, 25 bp, Homo sapien
tctgggaccctttagcacaatgtct

SEQ ID NO: 777033 - DNA, 25 bp, Homo sapien
taactgcctttccacctatcccttc

SEQ ID NO: 777034 - DNA, 25 bp, Homo sapien
tcaacttttatctctgaaggaaata

SEQ ID NO: 777035 - DNA, 25 bp, Homo sapien
tgtcctgcggacacatgcatcacac

SEQ ID NO: 777036 - DNA, 25 bp, Homo sapien
ttcatcccgcccctgaatggagaag

SEQ ID NO: 777037 - DNA, 25 bp, Homo sapien
gcttttccaagaacaggacgggaga

SEQ ID NO: 777038 - DNA, 25 bp, Homo sapien
tagaacaacttgagaaaggcccacg

SEQ ID NO: 777039 - DNA, 25 bp, Homo sapien
cacaagctgctggttcatttcagag

SEQ ID NO: 777040 - DNA, 25 bp, Homo sapien
taagcacatggtcgaagcagcactt

SEQ ID NO: 777041 - DNA, 25 bp, Homo sapien
tgaaataaccgactagctgcaccca

SEQ ID NO: 777042 - DNA, 25 bp, Homo sapien
gaagcggtgggcaaaagtcactcta

SEQ ID NO: 777043 - DNA, 25 bp, Homo sapien
gaaggtgtgccattaatacggagcc

SEQ ID NO: 777044 - DNA, 25 bp, Homo sapien
gggaacataagaagacctcacctct

SEQ ID NO: 777045 - DNA, 25 bp, Homo sapien
tggggaacataagaagacctcacct

SEQ ID NO: 777046 - DNA, 25 bp, Homo sapien
ggaacataagaagacctcacctcta

SEQ ID NO: 777047 - DNA, 25 bp, Homo sapien
cctggggaacataagaagacctcac

SEQ ID NO: 777048 - DNA, 25 bp, Homo sapien
gaatagcaggatactgcactgtaac

SEQ ID NO: 777049 - DNA, 25 bp, Homo sapien
caggaaactcatgatttcgagagga

SEQ ID NO: 777050 - DNA, 25 bp, Homo sapien
tacagaaacgtggataccaagcccc

SEQ ID NO: 777051 - DNA, 25 bp, Homo sapien
tatcaatcagagctcctgtgggccc

SEQ ID NO: 777052 - DNA, 25 bp, Homo sapien
tgctgttcgggctctgctctctcgc

SEQ ID NO: 777053 - DNA, 25 bp, Homo sapien
tctaccttctgttatgatcctgatt

SEQ ID NO: 777054 - DNA, 25 bp, Homo sapien
tgcacctttaatgtcagtcccaggg

SEQ ID NO: 777055 - DNA, 25 bp, Homo sapien
tatgatcctgattggctcctgcacc

SEQ ID NO: 777056 - DNA, 25 bp, Homo sapien
gaaatcttagactcagcaggcttag

SEQ ID NO: 777057 - DNA, 25 bp, Homo sapien
gacacttctgctgggttacaactcc

SEQ ID NO: 777058 - DNA, 25 bp, Homo sapien
gatgttttcctactgaggagcggga

SEQ ID NO: 777059 - DNA, 25 bp, Homo sapien
taaagctcaccccaaatcatgtcag

SEQ ID NO: 777060 - DNA, 25 bp, Homo sapien
tgctatagcttccaacctatttggt

SEQ ID NO: 777061 - DNA, 25 bp, Homo sapien
gagcatcacctgcatgactctatat

SEQ ID NO: 777062 - DNA, 25 bp, Homo sapien
tatcttctgttacttaataaaggga

SEQ ID NO: 777063 - DNA, 25 bp, Homo sapien
gactctatatgctatagcttccaac

SEQ ID NO: 777064 - DNA, 25 bp, Homo sapien
tcctgattgccccacaaaagctata

SEQ ID NO: 777065 - DNA, 25 bp, Homo sapien
ctagctttcagcataagaatggaca

SEQ ID NO: 777066 - DNA, 25 bp, Homo sapien
tttagcaggatcatgaaaatcagcc

SEQ ID NO: 777067 - DNA, 25 bp, Homo sapien
gcatttcatgagtaagtatctgccc

SEQ ID NO: 777068 - DNA, 25 bp, Homo sapien
tctatgaccgtgttgatgccaccat

SEQ ID NO: 777069 - DNA, 25 bp, Homo sapien
gaagggatgtggcaacgctcactat

SEQ ID NO: 777070 - DNA, 25 bp, Homo sapien
tcaggagtccttgggcccaacaaac

SEQ ID NO: 777071 - DNA, 25 bp, Homo sapien
tgtgacagaatgactggttccctgg

SEQ ID NO: 777072 - DNA, 25 bp, Homo sapien
tgaggagactgtcatagtgccagaa

SEQ ID NO: 777073 - DNA, 25 bp, Homo sapien
tgatgatgggatgtacaagaaccct

SEQ ID NO: 777074 - DNA, 25 bp, Homo sapien
tctccactcaaggaacaagggtgaa

SEQ ID NO: 777075 - DNA, 25 bp, Homo sapien
ggcccttgcttggtctcacatggta

SEQ ID NO: 777076 - DNA, 25 bp, Homo sapien
actgctgtcaccggattgtatttta

SEQ ID NO: 777077 - DNA, 25 bp, Homo sapien
cagaactgctgtcaccggattgtat

SEQ ID NO: 777078 - DNA, 25 bp, Homo sapien
gaactgctgtcaccggattgtattt

SEQ ID NO: 777079 - DNA, 25 bp, Homo sapien
acagaactgctgtcaccggattgta

SEQ ID NO: 777080 - DNA, 25 bp, Homo sapien
tagacctactgaataaggcccaggg

SEQ ID NO: 777081 - DNA, 25 bp, Homo sapien
tgaatctacccctaaccagagtgcg

SEQ ID NO: 777082 - DNA, 25 bp, Homo sapien
ccagagtgcgctgcactgcagttta

SEQ ID NO: 777083 - DNA, 25 bp, Homo sapien
gcagcaagtctgaatgccacactag

SEQ ID NO: 777084 - DNA, 25 bp, Homo sapien
cagaatgctcctgtttcctgcctct

SEQ ID NO: 777085 - DNA, 25 bp, Homo sapien
tgtgggcttccatgcgagtgttcat

SEQ ID NO: 777086 - DNA, 25 bp, Homo sapien
cctttgtgactgacccaaggctgga

SEQ ID NO: 777087 - DNA, 25 bp, Homo sapien
cactctcgtacgtgaggacactggg

SEQ ID NO: 777088 - DNA, 25 bp, Homo sapien
catggtgagaggtgatgcattagaa

SEQ ID NO: 777089 - DNA, 25 bp, Homo sapien
agctgtcttggggtgcatggtgaga

SEQ ID NO: 777090 - DNA, 25 bp, Homo sapien
tgcatggtgagaggtgatgcattag

SEQ ID NO: 777091 - DNA, 25 bp, Homo sapien
tggtgagaggtgatgcattagaaac

SEQ ID NO: 777092 - DNA, 25 bp, Homo sapien
tctccttgggttagtacagtggtgt

SEQ ID NO: 777093 - DNA, 25 bp, Homo sapien
tgtcctgtctagctcacatgattgc

SEQ ID NO: 777094 - DNA, 25 bp, Homo sapien
tttggcattagtcaaccaactgctg

SEQ ID NO: 777095 - DNA, 25 bp, Homo sapien
tcactgttccccttctagatggagg

SEQ ID NO: 777096 - DNA, 25 bp, Homo sapien
gatatgccagcagcgtgaaggacag

SEQ ID NO: 777097 - DNA, 25 bp, Homo sapien
ggcactgaagccatgacatttgcag

SEQ ID NO: 777098 - DNA, 25 bp, Homo sapien
ctgggcactgaagccatgacatttg

SEQ ID NO: 777099 - DNA, 25 bp, Homo sapien
acatttgcaggatatgccagcagcg

SEQ ID NO: 777100 - DNA, 25 bp, Homo sapien
caccagttcgtgacattctgaagtc

SEQ ID NO: 777101 - DNA, 25 bp, Homo sapien
tacctatatggtcctgtgctgagtg

SEQ ID NO: 777102 - DNA, 25 bp, Homo sapien
tctgaagtcttataacctgttggtg

SEQ ID NO: 777103 - DNA, 25 bp, Homo sapien
tctatgcaggcctcctacaattaca

SEQ ID NO: 777104 - DNA, 25 bp, Homo sapien
tgatgacctagttccacagggcttt

SEQ ID NO: 777105 - DNA, 25 bp, Homo sapien
cacagtctgtgtaagaaccatccaa

SEQ ID NO: 777106 - DNA, 25 bp, Homo sapien
cgcgattcgcagtgtaaaagcataa

SEQ ID NO: 777107 - DNA, 25 bp, Homo sapien
tatgtctctggagcctcgcgattcg

SEQ ID NO: 777108 - DNA, 25 bp, Homo sapien
gcttctgggtgcctgcaaatcctag

SEQ ID NO: 777109 - DNA, 25 bp, Homo sapien
tatcaacatgactcggctaagctgg

SEQ ID NO: 777110 - DNA, 25 bp, Homo sapien
taacaagcctgactatgccgccaga

SEQ ID NO: 777111 - DNA, 25 bp, Homo sapien
gaacaaaattgtgcatccggcaggt

SEQ ID NO: 777112 - DNA, 25 bp, Homo sapien
gaggagcgcccttagtgcagttccc

SEQ ID NO: 777113 - DNA, 25 bp, Homo sapien
ctgtgggaggagcgcccttagtgca

SEQ ID NO: 777114 - DNA, 25 bp, Homo sapien
ggaggagcgcccttagtgcagttcc

SEQ ID NO: 777115 - DNA, 25 bp, Homo sapien
tgggaggagcgcccttagtgcagtt

SEQ ID NO: 777116 - DNA, 25 bp, Homo sapien
ctggtctgaacgagagacctcaaac

SEQ ID NO: 777117 - DNA, 25 bp, Homo sapien
tgtgcccacttgagaacagtcctca

SEQ ID NO: 777118 - DNA, 25 bp, Homo sapien
gtctgaacgagagacctcaaacccc

SEQ ID NO: 777119 - DNA, 25 bp, Homo sapien
gtgtgcccacttgagaacagtcctc

SEQ ID NO: 777120 - DNA, 25 bp, Homo sapien
tctattatagatgtcaactgggtct

SEQ ID NO: 777121 - DNA, 25 bp, Homo sapien
ggctctccatttgatatctattata

SEQ ID NO: 777122 - DNA, 25 bp, Homo sapien
tcaactgggtcttcaaccagaacag

SEQ ID NO: 777123 - DNA, 25 bp, Homo sapien
agtccatggggaccgccagtgctga

SEQ ID NO: 777124 - DNA, 25 bp, Homo sapien
ctgtagcctactatctgtatctgac

SEQ ID NO: 777125 - DNA, 25 bp, Homo sapien
gtagcctactatctgtatctgacag

SEQ ID NO: 777126 - DNA, 25 bp, Homo sapien
tagcctactatctgtatctgacagc

SEQ ID NO: 777127 - DNA, 25 bp, Homo sapien
atgagagggttttagcagccaggat

SEQ ID NO: 777128 - DNA, 25 bp, Homo sapien
tgtagatctcttgccaactaatcgg

SEQ ID NO: 777129 - DNA, 25 bp, Homo sapien
taatcggccaactgtaaagcatggc

SEQ ID NO: 777130 - DNA, 25 bp, Homo sapien
gatctcttgccaactaatcggccaa

SEQ ID NO: 777131 - DNA, 25 bp, Homo sapien
atacagtatgtagatctcttgccaa

SEQ ID NO: 777132 - DNA, 25 bp, Homo sapien
cagtttgaagctgagaagtggaagc

SEQ ID NO: 777133 - DNA, 25 bp, Homo sapien
ggcagctgggctgagatttccccaa

SEQ ID NO: 777134 - DNA, 25 bp, Homo sapien
cctgcaaagacgtgactgccctgtg

SEQ ID NO: 777135 - DNA, 25 bp, Homo sapien
tccacagaggcgaaagtttcccagc

SEQ ID NO: 777136 - DNA, 25 bp, Homo sapien
tgatggctgctagaacagaacagga

SEQ ID NO: 777137 - DNA, 25 bp, Homo sapien
atgatggctgctagaacagaacagg

SEQ ID NO: 777138 - DNA, 25 bp, Homo sapien
catgatggctgctagaacagaacag

SEQ ID NO: 777139 - DNA, 25 bp, Homo sapien
gccatgggaactcgaatgcataaca

SEQ ID NO: 777140 - DNA, 25 bp, Homo sapien
aattcataaaatcgccatggctccc

SEQ ID NO: 777141 - DNA, 25 bp, Homo sapien
tagctaggccaaacgatgccatggg

SEQ ID NO: 777142 - DNA, 25 bp, Homo sapien
tgctagcaccgcctctgttctctgg

SEQ ID NO: 777143 - DNA, 25 bp, Homo sapien
tctatctgcagagcatatggtgctg

SEQ ID NO: 777144 - DNA, 25 bp, Homo sapien
tatattacgaaaagactattccagg

SEQ ID NO: 777145 - DNA, 25 bp, Homo sapien
tttggagagctacctaatggcagtg

SEQ ID NO: 777146 - DNA, 25 bp, Homo sapien
gaaatgttcctaggtgttctgtggt

SEQ ID NO: 777147 - DNA, 25 bp, Homo sapien
ggtcccagtatagaataggcctcgt

SEQ ID NO: 777148 - DNA, 25 bp, Homo sapien
tagcaacatgcttaaccaaagaagg

SEQ ID NO: 777149 - DNA, 25 bp, Homo sapien
acctgttggtttggctatagctagc

SEQ ID NO: 777150 - DNA, 25 bp, Homo sapien
cactttacagtgaactcaatggcaa

SEQ ID NO: 777151 - DNA, 25 bp, Homo sapien
tgtcctggcctcgaagacatcttag

SEQ ID NO: 777152 - DNA, 25 bp, Homo sapien
tagaggctgtcctgcaaacgtaatc

SEQ ID NO: 777153 - DNA, 25 bp, Homo sapien
cgaaggcactgtgttgtggagcccc

SEQ ID NO: 777154 - DNA, 25 bp, Homo sapien
gagtcagtgctggttacgttcgaag

SEQ ID NO: 777155 - DNA, 25 bp, Homo sapien
cacatgtgcatagctgaaggtcagg

SEQ ID NO: 777156 - DNA, 25 bp, Homo sapien
gtcagactggctttcagccctgaaa

SEQ ID NO: 777157 - DNA, 25 bp, Homo sapien
tacgtccactctaattggcactggg

SEQ ID NO: 777158 - DNA, 25 bp, Homo sapien
gagtgaaaccgtctagtacgtccac

SEQ ID NO: 777159 - DNA, 25 bp, Homo sapien
agccctcatggcctgagcacctcca

SEQ ID NO: 777160 - DNA, 25 bp, Homo sapien
aaggttgacgaacagaagacctgca

SEQ ID NO: 777161 - DNA, 25 bp, Homo sapien
ctcaagagaaaaaggttgacgaaca

SEQ ID NO: 777162 - DNA, 25 bp, Homo sapien
gtatcctgaggctgaattcggaact

SEQ ID NO: 777163 - DNA, 25 bp, Homo sapien
caaagaaaggctcgcccagaaggac

SEQ ID NO: 777164 - DNA, 25 bp, Homo sapien
ttggtagccagaggccatttttaaa

SEQ ID NO: 777165 - DNA, 25 bp, Homo sapien
cgtgcggtgcgggtttcagcggtca

SEQ ID NO: 777166 - DNA, 25 bp, Homo sapien
cagaaggacagagttgctcggcaga

SEQ ID NO: 777167 - DNA, 25 bp, Homo sapien
ctacagagctatccataattgtcca

SEQ ID NO: 777168 - DNA, 25 bp, Homo sapien
tacagagctatccataattgtccac

SEQ ID NO: 777169 - DNA, 25 bp, Homo sapien
gcacacgcccttcgtggctggcagg

SEQ ID NO: 777170 - DNA, 25 bp, Homo sapien
cagcacacgcccttcgtggctggca

SEQ ID NO: 777171 - DNA, 25 bp, Homo sapien
tcgtggctggcaggacgagggattc

SEQ ID NO: 777172 - DNA, 25 bp, Homo sapien
gctggcaggacgagggattcctcct

SEQ ID NO: 777173 - DNA, 25 bp, Homo sapien
gagtgtaacccaagactccaggaaa

SEQ ID NO: 777174 - DNA, 25 bp, Homo sapien
cttttaaacagagcattacgagtgt

SEQ ID NO: 777175 - DNA, 25 bp, Homo sapien
taaacagagcattacgagtgtaacc

SEQ ID NO: 777176 - DNA, 25 bp, Homo sapien
gagcattacgagtgtaacccaagac

SEQ ID NO: 777177 - DNA, 25 bp, Homo sapien
aggcgtctgccaccgcatcccgcta

SEQ ID NO: 777178 - DNA, 25 bp, Homo sapien
cgtctgccaccgcatcccgctaatt

SEQ ID NO: 777179 - DNA, 25 bp, Homo sapien
caggcgtctgccaccgcatcccgct

SEQ ID NO: 777180 - DNA, 25 bp, Homo sapien
accgcatcccgctaatttttgaata

SEQ ID NO: 777181 - DNA, 25 bp, Homo sapien
ctgggtgcacttgtctgagaccaag

SEQ ID NO: 777182 - DNA, 25 bp, Homo sapien
cctaagtcattgtggccactcaggc

SEQ ID NO: 777183 - DNA, 25 bp, Homo sapien
gggcacagctggaatacctaagtca

SEQ ID NO: 777184 - DNA, 25 bp, Homo sapien
tgcacttgtctgagaccaagttctg

SEQ ID NO: 777185 - DNA, 25 bp, Homo sapien
ctgactagaatctggccttgtccct

SEQ ID NO: 777186 - DNA, 25 bp, Homo sapien
tctccaaggtgtatgtgactaaggg

SEQ ID NO: 777187 - DNA, 25 bp, Homo sapien
aggtcctctcggttgtgcctgttct

SEQ ID NO: 777188 - DNA, 25 bp, Homo sapien
cccttggcctcggacatcactgaaa

SEQ ID NO: 777189 - DNA, 25 bp, Homo sapien
cgtgtatcaaaaagtgccgcccctc

SEQ ID NO: 777190 - DNA, 25 bp, Homo sapien
tcctgagcagagagttgagccagct

SEQ ID NO: 777191 - DNA, 25 bp, Homo sapien
gaatacgcagcactcagcatttgag

SEQ ID NO: 777192 - DNA, 25 bp, Homo sapien
tctaaaaagctacttgccagggtca

SEQ ID NO: 777193 - DNA, 25 bp, Homo sapien
tagtaataattcttattgcccactc

SEQ ID NO: 777194 - DNA, 25 bp, Homo sapien
gtaataattcttattgcccactcca

SEQ ID NO: 777195 - DNA, 25 bp, Homo sapien
gctagtaataattcttattgcccac

SEQ ID NO: 777196 - DNA, 25 bp, Homo sapien
aataattcttattgcccactccatt

SEQ ID NO: 777197 - DNA, 25 bp, Homo sapien
cgcgcaggcaaagcgcgcaggcaga

SEQ ID NO: 777198 - DNA, 25 bp, Homo sapien
ttgcggcggcaaagcgcgcaggcaa

SEQ ID NO: 777199 - DNA, 25 bp, Homo sapien
gagcgcgcgcagcttctgatccgct

SEQ ID NO: 777200 - DNA, 25 bp, Homo sapien
ggattggctgctgcgcgggttgcgg

SEQ ID NO: 777201 - DNA, 25 bp, Homo sapien
ccgtgcggtaccacggctggagcca

SEQ ID NO: 777202 - DNA, 25 bp, Homo sapien
ttaggtcttgaggtgtacgtccacg

SEQ ID NO: 777203 - DNA, 25 bp, Homo sapien
ggcaggttcggcatctgctgcttct

SEQ ID NO: 777204 - DNA, 25 bp, Homo sapien
tcagcctcaggagactcaagacgga

SEQ ID NO: 777205 - DNA, 25 bp, Homo sapien
cagtgtgccagttttagagattacc

SEQ ID NO: 777206 - DNA, 25 bp, Homo sapien
tgacccactcgtttcactcttgaag

SEQ ID NO: 777207 - DNA, 25 bp, Homo sapien
gcattgcttgagcaaggcactcaca

SEQ ID NO: 777208 - DNA, 25 bp, Homo sapien
gggagctctggtatctctaaaacag

SEQ ID NO: 777209 - DNA, 25 bp, Homo sapien
tgcagaggccctagctatgtgagag

SEQ ID NO: 777210 - DNA, 25 bp, Homo sapien
tgatcatgctacagtccaaccggtg

SEQ ID NO: 777211 - DNA, 25 bp, Homo sapien
cctgtaaggtaaaagtgcccgatga

SEQ ID NO: 777212 - DNA, 25 bp, Homo sapien
taaaacatgagtgcctggcatccgg

SEQ ID NO: 777213 - DNA, 25 bp, Homo sapien
gtgccagaccccagcgacggggcat

SEQ ID NO: 777214 - DNA, 25 bp, Homo sapien
agtaggagagcacagcacaggctgc

SEQ ID NO: 777215 - DNA, 25 bp, Homo sapien
ggcatttctaagcactggagtagga

SEQ ID NO: 777216 - DNA, 25 bp, Homo sapien
cacatccttgacttggcatttctaa

SEQ ID NO: 777217 - DNA, 25 bp, Homo sapien
ctgtgggcactgacactttgctctc

SEQ ID NO: 777218 - DNA, 25 bp, Homo sapien
gcatctccaggcctgaaagcagtag

SEQ ID NO: 777219 - DNA, 25 bp, Homo sapien
agcagtagctcatgcatgctgtggg

SEQ ID NO: 777220 - DNA, 25 bp, Homo sapien
acactttgctctcggcccaccccag

SEQ ID NO: 777221 - DNA, 25 bp, Homo sapien
taaaagagcagctaggtaaggccca

SEQ ID NO: 777222 - DNA, 25 bp, Homo sapien
agtaaaagagcagctaggtaaggcc

SEQ ID NO: 777223 - DNA, 25 bp, Homo sapien
gtaaaagagcagctaggtaaggccc

SEQ ID NO: 777224 - DNA, 25 bp, Homo sapien
aaaagagcagctaggtaaggcccac

SEQ ID NO: 777225 - DNA, 25 bp, Homo sapien
ctgcagagcaagggtgaacttctgc

SEQ ID NO: 777226 - DNA, 25 bp, Homo sapien
ggctggtgcaactctctgtgatggt

SEQ ID NO: 777227 - DNA, 25 bp, Homo sapien
gaacgcaaatctggctggtgcaact

SEQ ID NO: 777228 - DNA, 25 bp, Homo sapien
acagcatgttgatcattgggcatgc

SEQ ID NO: 777229 - DNA, 25 bp, Homo sapien
tgggcatgctgaacgcaaatctggc

SEQ ID NO: 777230 - DNA, 25 bp, Homo sapien
catttagcagtaggtggttagccaa

SEQ ID NO: 777231 - DNA, 25 bp, Homo sapien
ggaacaggcaacgacttctcagcat

SEQ ID NO: 777232 - DNA, 25 bp, Homo sapien
taagggcatacaaagcaggagctcc

SEQ ID NO: 777233 - DNA, 25 bp, Homo sapien
catttgcgtgcttaatggaaccgcc

SEQ ID NO: 777234 - DNA, 25 bp, Homo sapien
cagtatcttgcacgctgaactgcag

SEQ ID NO: 777235 - DNA, 25 bp, Homo sapien
taagcttaatcacatgggcaacatc

SEQ ID NO: 777236 - DNA, 25 bp, Homo sapien
ttcatctgcatctcaactgtgtggc

SEQ ID NO: 777237 - DNA, 25 bp, Homo sapien
tgaactgcagcgtcgcctgaaggaa

SEQ ID NO: 777238 - DNA, 25 bp, Homo sapien
cactctcggcaaccctcccctctgc

SEQ ID NO: 777239 - DNA, 25 bp, Homo sapien
aggccatccactctcggcaaccctc

SEQ ID NO: 777240 - DNA, 25 bp, Homo sapien
tgaggccatccactctcggcaaccc

SEQ ID NO: 777241 - DNA, 25 bp, Homo sapien
gccatccactctcggcaaccctccc

SEQ ID NO: 777242 - DNA, 25 bp, Homo sapien
agatgagccacaccgtccaagctgt

SEQ ID NO: 777243 - DNA, 25 bp, Homo sapien
ctaagcagatgagccacaccgtcca

SEQ ID NO: 777244 - DNA, 25 bp, Homo sapien
cgtccaagctgtgagttcagccagt

SEQ ID NO: 777245 - DNA, 25 bp, Homo sapien
cacaccgtccaagctgtgagttcag

SEQ ID NO: 777246 - DNA, 25 bp, Homo sapien
caagtggcatctgcagacggttggc

SEQ ID NO: 777247 - DNA, 25 bp, Homo sapien
gcatctgtggcagtacagcaaaccc

SEQ ID NO: 777248 - DNA, 25 bp, Homo sapien
ccgacatccttacattcagctggaa

SEQ ID NO: 777249 - DNA, 25 bp, Homo sapien
gactgccccgcgatggatatgaacc

SEQ ID NO: 777250 - DNA, 25 bp, Homo sapien
cactgcaatatagagctctcctggc

SEQ ID NO: 777251 - DNA, 25 bp, Homo sapien
aatcttgcccttttgcgatccaagc

SEQ ID NO: 777252 - DNA, 25 bp, Homo sapien
cttttgcgatccaagctgctcagac

SEQ ID NO: 777253 - DNA, 25 bp, Homo sapien
ctctgcaaaccccatgtgtaaatct

SEQ ID NO: 777254 - DNA, 25 bp, Homo sapien
gagcccagctttccgctcctctgag

SEQ ID NO: 777255 - DNA, 25 bp, Homo sapien
gatgatgaaggcctgtcagcatatt

SEQ ID NO: 777256 - DNA, 25 bp, Homo sapien
ttacaaccgagatgaaaatgatgat

SEQ ID NO: 777257 - DNA, 25 bp, Homo sapien
tcagcatattgatgaccgggccctc

SEQ ID NO: 777258 - DNA, 25 bp, Homo sapien
cattttaatcgtgcttttgtgggag

SEQ ID NO: 777259 - DNA, 25 bp, Homo sapien
gggaagcagcccattctgacagact

SEQ ID NO: 777260 - DNA, 25 bp, Homo sapien
aataatctgaacttactgcgccgag

SEQ ID NO: 777261 - DNA, 25 bp, Homo sapien
tttgtcatcaggaatggcgcggcga

SEQ ID NO: 777262 - DNA, 25 bp, Homo sapien
tatggcgggactcgtccaaaacctg

SEQ ID NO: 777263 - DNA, 25 bp, Homo sapien
ccagtgagtgatcgggaacaggcat

SEQ ID NO: 777264 - DNA, 25 bp, Homo sapien
tacatgaaggtgatcagcaggtctc

SEQ ID NO: 777265 - DNA, 25 bp, Homo sapien
gaatcattctgccacggtgtgcggc

SEQ ID NO: 777266 - DNA, 25 bp, Homo sapien
gaaacctctgtcaactgtgattgca

SEQ ID NO: 777267 - DNA, 25 bp, Homo sapien
agccttgtagtcctctcagagaggg

SEQ ID NO: 777268 - DNA, 25 bp, Homo sapien
tgcacaagcagtgctgaactcagcc

SEQ ID NO: 777269 - DNA, 25 bp, Homo sapien
gcctccccgagaaagagaccacaat

SEQ ID NO: 777270 - DNA, 25 bp, Homo sapien
cgcgcctggcgaaagacctatttca

SEQ ID NO: 777271 - DNA, 25 bp, Homo sapien
cctggtggacagcaacagaattctg

SEQ ID NO: 777272 - DNA, 25 bp, Homo sapien
catctaatggaccagcatggctgga

SEQ ID NO: 777273 - DNA, 25 bp, Homo sapien
cgtgggctctagcaacggaaagctg

SEQ ID NO: 777274 - DNA, 25 bp, Homo sapien
tacccatgaactccttgtgtctaga

SEQ ID NO: 777275 - DNA, 25 bp, Homo sapien
cagggctaccacaattttctatgac

SEQ ID NO: 777276 - DNA, 25 bp, Homo sapien
gctggtgttaagtaggacgaatcaa

SEQ ID NO: 777277 - DNA, 25 bp, Homo sapien
tactgcagagtaatgaaagacttct

SEQ ID NO: 777278 - DNA, 25 bp, Homo sapien
ggtcaagcacccaaagaaagctaag

SEQ ID NO: 777279 - DNA, 25 bp, Homo sapien
ctggtattaaaatcacggaaggctc

SEQ ID NO: 777280 - DNA, 25 bp, Homo sapien
gaaagctaagtatgtgtaacaccac

SEQ ID NO: 777281 - DNA, 25 bp, Homo sapien
tgagaacaggcggtggtcaagcacc

SEQ ID NO: 777282 - DNA, 25 bp, Homo sapien
tcccactggtaatgcccacagcaag

SEQ ID NO: 777283 - DNA, 25 bp, Homo sapien
ctcccactggtaatgcccacagcaa

SEQ ID NO: 777284 - DNA, 25 bp, Homo sapien
tcttctgaaacaacctatgttctgc

SEQ ID NO: 777285 - DNA, 25 bp, Homo sapien
tctcctgtcaggtaattaggcggca

SEQ ID NO: 777286 - DNA, 25 bp, Homo sapien
tctttctcctgtcaggtaattaggc

SEQ ID NO: 777287 - DNA, 25 bp, Homo sapien
ccgccagggagagtttgtgtttctt

SEQ ID NO: 777288 - DNA, 25 bp, Homo sapien
accaggccaatacctggtggaactg

SEQ ID NO: 777289 - DNA, 25 bp, Homo sapien
aatctggtccaccaggccaatacct

SEQ ID NO: 777290 - DNA, 25 bp, Homo sapien
tctggtccaccaggccaatacctgg

SEQ ID NO: 777291 - DNA, 25 bp, Homo sapien
caggccaatacctggtggaactgtg

SEQ ID NO: 777292 - DNA, 25 bp, Homo sapien
ctgggcctgtgggaagggccgacag

SEQ ID NO: 777293 - DNA, 25 bp, Homo sapien
cagtgggctgggagaataatgcaga

SEQ ID NO: 777294 - DNA, 25 bp, Homo sapien
tgccactgtgcaatgggcagaaggc

SEQ ID NO: 777295 - DNA, 25 bp, Homo sapien
gggacagctgtgtcagcgcagctgc

SEQ ID NO: 777296 - DNA, 25 bp, Homo sapien
ttgtcagtaagctccagctcagagg

SEQ ID NO: 777297 - DNA, 25 bp, Homo sapien
tgtttaaaggtcaactgcatgctga

SEQ ID NO: 777298 - DNA, 25 bp, Homo sapien
gccgccagtggagcccttcttgatg

SEQ ID NO: 777299 - DNA, 25 bp, Homo sapien
gttggcccggcagaatacatgcata

SEQ ID NO: 777300 - DNA, 25 bp, Homo sapien
ggatgctgttccaagtacttaaaca

SEQ ID NO: 777301 - DNA, 25 bp, Homo sapien
cctttcagtaaaccataatgccatt

SEQ ID NO: 777302 - DNA, 25 bp, Homo sapien
tccatatcacttagtgtcgtgctgg

SEQ ID NO: 777303 - DNA, 25 bp, Homo sapien
tgccttagctcacacagccaataag

SEQ ID NO: 777304 - DNA, 25 bp, Homo sapien
tttcttcccagtatttgttagtgaa

SEQ ID NO: 777305 - DNA, 25 bp, Homo sapien
ttttcttcccagtatttgttagtga

SEQ ID NO: 777306 - DNA, 25 bp, Homo sapien
gcaatgggccaacaagctcttttcc

SEQ ID NO: 777307 - DNA, 25 bp, Homo sapien
cacattcctttggtaacctgccagt

SEQ ID NO: 777308 - DNA, 25 bp, Homo sapien
cagttttaaacgcaagtgtgtgcct

SEQ ID NO: 777309 - DNA, 25 bp, Homo sapien
caagtgtgtgcctggctgaagctta

SEQ ID NO: 777310 - DNA, 25 bp, Homo sapien
gaattaggtccaaagaccgcaatgg

SEQ ID NO: 777311 - DNA, 25 bp, Homo sapien
caaagaccgcaatggtggcacattt

SEQ ID NO: 777312 - DNA, 25 bp, Homo sapien
taggtccaaagaccgcaatggtggc

SEQ ID NO: 777313 - DNA, 25 bp, Homo sapien
gccgagaattaggtccaaagaccgc

SEQ ID NO: 777314 - DNA, 25 bp, Homo sapien
taacctgtgtgagatgcgatgtgca

SEQ ID NO: 777315 - DNA, 25 bp, Homo sapien
taaccctggctccttcgctttagaa

SEQ ID NO: 777316 - DNA, 25 bp, Homo sapien
cgtttttctgcctggtacaatgctg

SEQ ID NO: 777317 - DNA, 25 bp, Homo sapien
tctgctaattgtgttcgtttttctg

SEQ ID NO: 777318 - DNA, 25 bp, Homo sapien
catttggtggagtgtggcactgatt

SEQ ID NO: 777319 - DNA, 25 bp, Homo sapien
tccaagtagggggctcccaagactc

SEQ ID NO: 777320 - DNA, 25 bp, Homo sapien
gctgtaatttccaagtagggggctc

SEQ ID NO: 777321 - DNA, 25 bp, Homo sapien
tactgggcttccgtgacaaaatact

SEQ ID NO: 777322 - DNA, 25 bp, Homo sapien
taccctttcgaggaagcagtgacta

SEQ ID NO: 777323 - DNA, 25 bp, Homo sapien
gcttagcaggtctctggccgaggac

SEQ ID NO: 777324 - DNA, 25 bp, Homo sapien
tattatctattcagctgccctggag

SEQ ID NO: 777325 - DNA, 25 bp, Homo sapien
ttggattccttagggattgtccctg

SEQ ID NO: 777326 - DNA, 25 bp, Homo sapien
cactcgcgttgggttgctggttata

SEQ ID NO: 777327 - DNA, 25 bp, Homo sapien
gcatatgggccaactactgcatgta

SEQ ID NO: 777328 - DNA, 25 bp, Homo sapien
gattataatttggattccttaggga

SEQ ID NO: 777329 - DNA, 25 bp, Homo sapien
ttctgctttatcaccggcattctcc

SEQ ID NO: 777330 - DNA, 25 bp, Homo sapien
aacatttctgaaatacggattttct

SEQ ID NO: 777331 - DNA, 25 bp, Homo sapien
atcaccggcattctccacaataaag

SEQ ID NO: 777332 - DNA, 25 bp, Homo sapien
catttctgaaatacggattttctgc

SEQ ID NO: 777333 - DNA, 25 bp, Homo sapien
gacgccgttctgtgagaagcccatg

SEQ ID NO: 777334 - DNA, 25 bp, Homo sapien
caaggccaggtcagaagtctcgctg

SEQ ID NO: 777335 - DNA, 25 bp, Homo sapien
tcagctcaatggcagaagtggctcc

SEQ ID NO: 777336 - DNA, 25 bp, Homo sapien
cattcctaggccatttcgttcgtga

SEQ ID NO: 777337 - DNA, 25 bp, Homo sapien
ctggacagtgtccacgtttactgcg

SEQ ID NO: 777338 - DNA, 25 bp, Homo sapien
agctcggatttgcagataagttgca

SEQ ID NO: 777339 - DNA, 25 bp, Homo sapien
aaatttgggagtggaacatcagaaa

SEQ ID NO: 777340 - DNA, 25 bp, Homo sapien
tttgcagataagttgcaaatgtctt

SEQ ID NO: 777341 - DNA, 25 bp, Homo sapien
gaaatttgggagtggaacatcagaa

SEQ ID NO: 777342 - DNA, 25 bp, Homo sapien
cggttgcagaacaccacccactgtg

SEQ ID NO: 777343 - DNA, 25 bp, Homo sapien
tcccctggctggcccggttgcagaa

SEQ ID NO: 777344 - DNA, 25 bp, Homo sapien
ggctggcccggttgcagaacaccac

SEQ ID NO: 777345 - DNA, 25 bp, Homo sapien
gggtcccctggctggcccggttgca

SEQ ID NO: 777346 - DNA, 25 bp, Homo sapien
cgaggaaaccctctgaaaacatctg

SEQ ID NO: 777347 - DNA, 25 bp, Homo sapien
gcgaggaaaccctctgaaaacatct

SEQ ID NO: 777348 - DNA, 25 bp, Homo sapien
ggcgaggaaaccctctgaaaacatc

SEQ ID NO: 777349 - DNA, 25 bp, Homo sapien
gaggaaaccctctgaaaacatctgg

SEQ ID NO: 777350 - DNA, 25 bp, Homo sapien
ctaacatgtatcgtgtctgtatccc

SEQ ID NO: 777351 - DNA, 25 bp, Homo sapien
cctaacatgtatcgtgtctgtatcc

SEQ ID NO: 777352 - DNA, 25 bp, Homo sapien
tgaactggccacttagaaatcctct

SEQ ID NO: 777353 - DNA, 25 bp, Homo sapien
caaaagtggagcctgttgcttcccc

SEQ ID NO: 777354 - DNA, 25 bp, Homo sapien
caaagcctcgctacatgggcagcag

SEQ ID NO: 777355 - DNA, 25 bp, Homo sapien
cagtgtgctcggtttgatgaataac

SEQ ID NO: 777356 - DNA, 25 bp, Homo sapien
ccgacagccggtcccgcctctccag

SEQ ID NO: 777357 - DNA, 25 bp, Homo sapien
gcggcgacaggacaaaggagaccat

SEQ ID NO: 777358 - DNA, 25 bp, Homo sapien
acaaaggagaccatgtgcggaggga

SEQ ID NO: 777359 - DNA, 25 bp, Homo sapien
gacaggacaaaggagaccatgtgcg

SEQ ID NO: 777360 - DNA, 25 bp, Homo sapien
tttggttctttagcagggctcccga

SEQ ID NO: 777361 - DNA, 25 bp, Homo sapien
cggtcagccccaagttcatggtttg

SEQ ID NO: 777362 - DNA, 25 bp, Homo sapien
tcctcgccaaagtccgagagcggag

SEQ ID NO: 777363 - DNA, 25 bp, Homo sapien
tcccgaagggcgatcgtcaaagacc

SEQ ID NO: 777364 - DNA, 25 bp, Homo sapien
ttctttctcccgctgccgaacccga

SEQ ID NO: 777365 - DNA, 25 bp, Homo sapien
cctggaaacttaagcgcgagttctt

SEQ ID NO: 777366 - DNA, 25 bp, Homo sapien
cagaaacctcctggaaacttaagcg

SEQ ID NO: 777367 - DNA, 25 bp, Homo sapien
ccgcacaggcgagaaggggggcttt

SEQ ID NO: 777368 - DNA, 25 bp, Homo sapien
gggctggacaccatgcctcttgcaa

SEQ ID NO: 777369 - DNA, 25 bp, Homo sapien
agggctggacaccatgcctcttgca

SEQ ID NO: 777370 - DNA, 25 bp, Homo sapien
ttacaataacagtgttgaagagttt

SEQ ID NO: 777371 - DNA, 25 bp, Homo sapien
tacaataacagtgttgaagagtttt

SEQ ID NO: 777372 - DNA, 25 bp, Homo sapien
tgtttacaataacagtgttgaagag

SEQ ID NO: 777373 - DNA, 25 bp, Homo sapien
ctttgtttacaataacagtgttgaa

SEQ ID NO: 777374 - DNA, 25 bp, Homo sapien
ataaaaataagccattactcaggag

SEQ ID NO: 777375 - DNA, 25 bp, Homo sapien
aaaaataagccattactcaggagaa

SEQ ID NO: 777376 - DNA, 25 bp, Homo sapien
aataagccattactcaggagaatga

SEQ ID NO: 777377 - DNA, 25 bp, Homo sapien
aaataagccattactcaggagaatg

SEQ ID NO: 777378 - DNA, 25 bp, Homo sapien
tcaaatcagtttaaatagggactca

SEQ ID NO: 777379 - DNA, 25 bp, Homo sapien
catagtagtagtgattagtcaaatc

SEQ ID NO: 777380 - DNA, 25 bp, Homo sapien
tgcatcacaaagtatgcagacttcc

SEQ ID NO: 777381 - DNA, 25 bp, Homo sapien
gaaacatcaacagtagcttcagaat

SEQ ID NO: 777382 - DNA, 25 bp, Homo sapien
taattctgggagtaacggcaatcac

SEQ ID NO: 777383 - DNA, 25 bp, Homo sapien
tgttcaagtgctaccaagtgtcgcc

SEQ ID NO: 777384 - DNA, 25 bp, Homo sapien
tgaaagctgcgcagaaacctactgg

SEQ ID NO: 777385 - DNA, 25 bp, Homo sapien
tctgggagctcaaaataactgcact

SEQ ID NO: 777386 - DNA, 25 bp, Homo sapien
aaagccacactcctctaaggccaga

SEQ ID NO: 777387 - DNA, 25 bp, Homo sapien
cacactcctctaaggccagaatact

SEQ ID NO: 777388 - DNA, 25 bp, Homo sapien
tctaaggccagaatactaccagtct

SEQ ID NO: 777389 - DNA, 25 bp, Homo sapien
ctcctctaaggccagaatactacca

SEQ ID NO: 777390 - DNA, 25 bp, Homo sapien
tggcatcctataaacagagggctcc

SEQ ID NO: 777391 - DNA, 25 bp, Homo sapien
agggagagcaattcagggatttttc

SEQ ID NO: 777392 - DNA, 25 bp, Homo sapien
aactcctgacgcctgactagtgttg

SEQ ID NO: 777393 - DNA, 25 bp, Homo sapien
gaaccaagaagggagagcaattcag

SEQ ID NO: 777394 - DNA, 25 bp, Homo sapien
tctcaccgtctatctatgagttgtc

SEQ ID NO: 777395 - DNA, 25 bp, Homo sapien
tgagacaaagttgaaggaaagagaa

SEQ ID NO: 777396 - DNA, 25 bp, Homo sapien
cccaggagtacccagttctgcaatt

SEQ ID NO: 777397 - DNA, 25 bp, Homo sapien
tgacttgtcatcgtctatctgtgac

SEQ ID NO: 777398 - DNA, 25 bp, Homo sapien
gagacactgggtgcccacagtagaa

SEQ ID NO: 777399 - DNA, 25 bp, Homo sapien
tcctgcctacgagggtgagcagctg

SEQ ID NO: 777400 - DNA, 25 bp, Homo sapien
gcagtcctggtcagagagggctcca

SEQ ID NO: 777401 - DNA, 25 bp, Homo sapien
tccactagaacctcccaggctgatg

SEQ ID NO: 777402 - DNA, 25 bp, Homo sapien
taaggtcatatggtcgccatggaag

SEQ ID NO: 777403 - DNA, 25 bp, Homo sapien
catgctcggcgggaatgggtttttc

SEQ ID NO: 777404 - DNA, 25 bp, Homo sapien
ggtgaccttgatggtaatataactc

SEQ ID NO: 777405 - DNA, 25 bp, Homo sapien
tattaggtacctggttactaagcca

SEQ ID NO: 777406 - DNA, 25 bp, Homo sapien
tcatcggttgctagggaaatgcccc

SEQ ID NO: 777407 - DNA, 25 bp, Homo sapien
tgcagtaactatggcgactctggcc

SEQ ID NO: 777408 - DNA, 25 bp, Homo sapien
aactggaggtgccttaagctgagcc

SEQ ID NO: 777409 - DNA, 25 bp, Homo sapien
taaagatcagttcacgcaaaggcac

SEQ ID NO: 777410 - DNA, 25 bp, Homo sapien
acagaagcccaagaggtcctgcgga

SEQ ID NO: 777411 - DNA, 25 bp, Homo sapien
tggtttccaccttaagccaattgaa

SEQ ID NO: 777412 - DNA, 25 bp, Homo sapien
gataaagaagccttcacagaagccc

SEQ ID NO: 777413 - DNA, 25 bp, Homo sapien
caggtgggtgtcatctattattcag

SEQ ID NO: 777414 - DNA, 25 bp, Homo sapien
taaatgacaccgcaaggacttccag

SEQ ID NO: 777415 - DNA, 25 bp, Homo sapien
gaatctaatcaaagctttacggcca

SEQ ID NO: 777416 - DNA, 25 bp, Homo sapien
taatgaattactgcatcaggcaagc

SEQ ID NO: 777417 - DNA, 25 bp, Homo sapien
gaccatgagataaaagcttgacggg

SEQ ID NO: 777418 - DNA, 25 bp, Homo sapien
tctaagcaaactggactcataaagc

SEQ ID NO: 777419 - DNA, 25 bp, Homo sapien
gctctaaaagctcatttggctatac

SEQ ID NO: 777420 - DNA, 25 bp, Homo sapien
gctacatctaagtacccccacaaaa

SEQ ID NO: 777421 - DNA, 25 bp, Homo sapien
tatattttccacgtgtccctcttcc

SEQ ID NO: 777422 - DNA, 25 bp, Homo sapien
tgtctaagtcttaaacggaaggtca

SEQ ID NO: 777423 - DNA, 25 bp, Homo sapien
gggtccgcactggcccagccatggt

SEQ ID NO: 777424 - DNA, 25 bp, Homo sapien
ttaaccatcggcacgggagctccaa

SEQ ID NO: 777425 - DNA, 25 bp, Homo sapien
tggcccagccatggtacctttaacc

SEQ ID NO: 777426 - DNA, 25 bp, Homo sapien
catggtacctttaaccatcggcacg

SEQ ID NO: 777427 - DNA, 25 bp, Homo sapien
aaacagaaaacgagggttgaatgtg

SEQ ID NO: 777428 - DNA, 25 bp, Homo sapien
aacagaaaacgagggttgaatgtga

SEQ ID NO: 777429 - DNA, 25 bp, Homo sapien
acatctgaaagaggagggcacttga

SEQ ID NO: 777430 - DNA, 25 bp, Homo sapien
gaagagaataatttccgcagcttta

SEQ ID NO: 777431 - DNA, 25 bp, Homo sapien
ttatcctaacatctgaaagaggagg

SEQ ID NO: 777432 - DNA, 25 bp, Homo sapien
cctaacatctgaaagaggagggcac

SEQ ID NO: 777433 - DNA, 25 bp, Homo sapien
ctgaatttgccatgtcgttttgaca

SEQ ID NO: 777434 - DNA, 25 bp, Homo sapien
gacggccatttcctattgggtatta

SEQ ID NO: 777435 - DNA, 25 bp, Homo sapien
tcagaaaggtcgaagtgaggcaaag

SEQ ID NO: 777436 - DNA, 25 bp, Homo sapien
gagaacgctgtcctactaatgagaa

SEQ ID NO: 777437 - DNA, 25 bp, Homo sapien
tccggtgtaagatgaagacctaact

SEQ ID NO: 777438 - DNA, 25 bp, Homo sapien
tcctcctcctatgtagattttcaaa

SEQ ID NO: 777439 - DNA, 25 bp, Homo sapien
gcctcccaaactaagaacttgccat

SEQ ID NO: 777440 - DNA, 25 bp, Homo sapien
gaataatcttgcctttcattcccct

SEQ ID NO: 777441 - DNA, 25 bp, Homo sapien
gggcacaggagccttgcgccatgca

SEQ ID NO: 777442 - DNA, 25 bp, Homo sapien
gccttgcgccatgcattaaagatcc

SEQ ID NO: 777443 - DNA, 25 bp, Homo sapien
ggccttggcagctcacagtggagct

SEQ ID NO: 777444 - DNA, 25 bp, Homo sapien
ctgtcaccgctcctccgggattggg

SEQ ID NO: 777445 - DNA, 25 bp, Homo sapien
aaaggcgtctcagggatgttcaagc

SEQ ID NO: 777446 - DNA, 25 bp, Homo sapien
ttagagctgcccaaagacagaacgg

SEQ ID NO: 777447 - DNA, 25 bp, Homo sapien
gacagaacggtgctccttgaaaggc

SEQ ID NO: 777448 - DNA, 25 bp, Homo sapien
gacttgtattacatggccccaaggg

SEQ ID NO: 777449 - DNA, 25 bp, Homo sapien
ctgaaattcgtcaaaggcaacacca

SEQ ID NO: 777450 - DNA, 25 bp, Homo sapien
tcaaaggcaacaccaatccaagtgt

SEQ ID NO: 777451 - DNA, 25 bp, Homo sapien
gcaacaccaatccaagtgttggctg

SEQ ID NO: 777452 - DNA, 25 bp, Homo sapien
tcgtcaaaggcaacaccaatccaag

SEQ ID NO: 777453 - DNA, 25 bp, Homo sapien
aaggcatcactaagtcctctgaagc

SEQ ID NO: 777454 - DNA, 25 bp, Homo sapien
gattatgatcctagcagaactcagg

SEQ ID NO: 777455 - DNA, 25 bp, Homo sapien
ggagctgcaatagcaccacgtgtaa

SEQ ID NO: 777456 - DNA, 25 bp, Homo sapien
taagcacttactatgagctgtcagt

SEQ ID NO: 777457 - DNA, 25 bp, Homo sapien
gtagctggaattactggtacatgcc

SEQ ID NO: 777458 - DNA, 25 bp, Homo sapien
tggaattactggtacatgccaccat

SEQ ID NO: 777459 - DNA, 25 bp, Homo sapien
gctggaattactggtacatgccacc

SEQ ID NO: 777460 - DNA, 25 bp, Homo sapien
aagtagctggaattactggtacatg

SEQ ID NO: 777461 - DNA, 25 bp, Homo sapien
attcagctaatggccccaaaccgag

SEQ ID NO: 777462 - DNA, 25 bp, Homo sapien
ctaatggccccaaaccgaggatgtg

SEQ ID NO: 777463 - DNA, 25 bp, Homo sapien
ggagagggcggcctagaaaaggcaa

SEQ ID NO: 777464 - DNA, 25 bp, Homo sapien
ttgcccgtgacattggtggcctcag

SEQ ID NO: 777465 - DNA, 25 bp, Homo sapien
caaagacacaaagacactgtcagaa

SEQ ID NO: 777466 - DNA, 25 bp, Homo sapien
aagacactgtcagaagcaaaatgac

SEQ ID NO: 777467 - DNA, 25 bp, Homo sapien
caaaatgacaggatctagaagctct

SEQ ID NO: 777468 - DNA, 25 bp, Homo sapien
tgccacctcgaatatgtcacctgtc

SEQ ID NO: 777469 - DNA, 25 bp, Homo sapien
tgaaggacaaggctatcattgacct

SEQ ID NO: 777470 - DNA, 25 bp, Homo sapien
gaggtcctaacaaggcaaggttcta

SEQ ID NO: 777471 - DNA, 25 bp, Homo sapien
catgtatggatttgcaccacacagc

SEQ ID NO: 777472 - DNA, 25 bp, Homo sapien
cacacattccttaggcgggaagaca

SEQ ID NO: 777473 - DNA, 25 bp, Homo sapien
caggcgtgggctcgcttcccaaggc

SEQ ID NO: 777474 - DNA, 25 bp, Homo sapien
caaggccccggaaaggccactggag

SEQ ID NO: 777475 - DNA, 25 bp, Homo sapien
tgcaggcgtgggctcgcttcccaag

SEQ ID NO: 777476 - DNA, 25 bp, Homo sapien
cctgcaggcgtgggctcgcttccca

SEQ ID NO: 777477 - DNA, 25 bp, Homo sapien
cttgaacgagcctcaagaatttgga

SEQ ID NO: 777478 - DNA, 25 bp, Homo sapien
acgagcctcaagaatttggataaca

SEQ ID NO: 777479 - DNA, 25 bp, Homo sapien
gttcttgaacgagcctcaagaattt

SEQ ID NO: 777480 - DNA, 25 bp, Homo sapien
tgaacgagcctcaagaatttggata

SEQ ID NO: 777481 - DNA, 25 bp, Homo sapien
caagcccttgctgcggataggtccc

SEQ ID NO: 777482 - DNA, 25 bp, Homo sapien
gctgtcttatcaacctttctgggaa

SEQ ID NO: 777483 - DNA, 25 bp, Homo sapien
ataggtccccatccagctagcaaag

SEQ ID NO: 777484 - DNA, 25 bp, Homo sapien
gaacaataacaccagcgagatggga

SEQ ID NO: 777485 - DNA, 25 bp, Homo sapien
acaggcaatgacatgcgagtgtggc

SEQ ID NO: 777486 - DNA, 25 bp, Homo sapien
aggcaatgacatgcgagtgtggcat

SEQ ID NO: 777487 - DNA, 25 bp, Homo sapien
ccacaggcaatgacatgcgagtgtg

SEQ ID NO: 777488 - DNA, 25 bp, Homo sapien
caggcaatgacatgcgagtgtggca

SEQ ID NO: 777489 - DNA, 25 bp, Homo sapien
gggtctttaagcaccacaggctcaa

SEQ ID NO: 777490 - DNA, 25 bp, Homo sapien
gattggctctttgcaacagtcctgg

SEQ ID NO: 777491 - DNA, 25 bp, Homo sapien
gctgtcatgttctggtagcgtgcca

SEQ ID NO: 777492 - DNA, 25 bp, Homo sapien
tctgtgcgctgcaccaagtcagggt

SEQ ID NO: 777493 - DNA, 25 bp, Homo sapien
cttaaactgttgaggcttaagctac

SEQ ID NO: 777494 - DNA, 25 bp, Homo sapien
ctgctgttgtaggctgacaatggct

SEQ ID NO: 777495 - DNA, 25 bp, Homo sapien
taaactgttgaggcttaagctactg

SEQ ID NO: 777496 - DNA, 25 bp, Homo sapien
ttaaactgttgaggcttaagctact

SEQ ID NO: 777497 - DNA, 25 bp, Homo sapien
tctctaaatgcagcttgttttgttt

SEQ ID NO: 777498 - DNA, 25 bp, Homo sapien
tggcaaaaacaagacagaggagaga

SEQ ID NO: 777499 - DNA, 25 bp, Homo sapien
gaaatttctcactttctctaaatgc

SEQ ID NO: 777500 - DNA, 25 bp, Homo sapien
gagagagcctggatttccataaaga

SEQ ID NO: 777501 - DNA, 25 bp, Homo sapien
cctctgtgctgctttttagacgctt

SEQ ID NO: 777502 - DNA, 25 bp, Homo sapien
gctgctttttagacgcttctttgta

SEQ ID NO: 777503 - DNA, 25 bp, Homo sapien
ggcgctgcacactgggtttctgcct

SEQ ID NO: 777504 - DNA, 25 bp, Homo sapien
gcgctgcacactgggtttctgcctc

SEQ ID NO: 777505 - DNA, 25 bp, Homo sapien
gagctgtgccgggttagaattatag

SEQ ID NO: 777506 - DNA, 25 bp, Homo sapien
tgtgccgggttagaattatagcccc

SEQ ID NO: 777507 - DNA, 25 bp, Homo sapien
tcaggagctgtgccgggttagaatt

SEQ ID NO: 777508 - DNA, 25 bp, Homo sapien
gctgtgccgggttagaattatagcc

SEQ ID NO: 777509 - DNA, 25 bp, Homo sapien
tgagtaagtgctcccggccgggtgt

SEQ ID NO: 777510 - DNA, 25 bp, Homo sapien
gggtgtccggccacctgcagacttc

SEQ ID NO: 777511 - DNA, 25 bp, Homo sapien
gtcttcgctggagtgctgcttctgc

SEQ ID NO: 777512 - DNA, 25 bp, Homo sapien
tgagtcttcgctggagtgctgcttc

SEQ ID NO: 777513 - DNA, 25 bp, Homo sapien
gggagacgatgacgccttttccttc

SEQ ID NO: 777514 - DNA, 25 bp, Homo sapien
aagagggagacgatgacgccttttc

SEQ ID NO: 777515 - DNA, 25 bp, Homo sapien
tccttcagaaaaggacatcggactg

SEQ ID NO: 777516 - DNA, 25 bp, Homo sapien
gacgatgacgccttttccttcagaa

SEQ ID NO: 777517 - DNA, 25 bp, Homo sapien
agttcctgtcgcaagatgtcttgct

SEQ ID NO: 777518 - DNA, 25 bp, Homo sapien
gtccgcaggtagggcggagggccca

SEQ ID NO: 777519 - DNA, 25 bp, Homo sapien
gatggcgtgggggaacggcgtgaag

SEQ ID NO: 777520 - DNA, 25 bp, Homo sapien
gggaacggcgtgaaggtgtgctggt

SEQ ID NO: 777521 - DNA, 25 bp, Homo sapien
atgggaggtgctggcgtcggcatga

SEQ ID NO: 777522 - DNA, 25 bp, Homo sapien
aggtgctggcgtcggcatgatggcg

SEQ ID NO: 777523 - DNA, 25 bp, Homo sapien
tgtgccggtagaatgggtcaacttt

SEQ ID NO: 777524 - DNA, 25 bp, Homo sapien
tcaacttttgtagggtatttgtcaa

SEQ ID NO: 777525 - DNA, 25 bp, Homo sapien
gtcaacttttgtagggtatttgtca

SEQ ID NO: 777526 - DNA, 25 bp, Homo sapien
cggtagaatgggtcaacttttgtag

SEQ ID NO: 777527 - DNA, 25 bp, Homo sapien
caatgtgtagcatggtaatgaaact

SEQ ID NO: 777528 - DNA, 25 bp, Homo sapien
aatgtgtagcatggtaatgaaactc

SEQ ID NO: 777529 - DNA, 25 bp, Homo sapien
tcaatgtgtagcatggtaatgaaac

SEQ ID NO: 777530 - DNA, 25 bp, Homo sapien
ttcaatgtgtagcatggtaatgaaa

SEQ ID NO: 777531 - DNA, 25 bp, Homo sapien
aaaagtagttcaggatcaatcagcc

SEQ ID NO: 777532 - DNA, 25 bp, Homo sapien
cagcaaatgacatcccgggtgaggg

SEQ ID NO: 777533 - DNA, 25 bp, Homo sapien
gacatcgacatgagcaagccacgta

SEQ ID NO: 777534 - DNA, 25 bp, Homo sapien
tgccattagtcaagaagccatgatg

SEQ ID NO: 777535 - DNA, 25 bp, Homo sapien
ctgcaggaggataggaatggaagag

SEQ ID NO: 777536 - DNA, 25 bp, Homo sapien
caaaagggccagtgggtgggatcat

SEQ ID NO: 777537 - DNA, 25 bp, Homo sapien
ccttgtagtgaaccaaaagggccag

SEQ ID NO: 777538 - DNA, 25 bp, Homo sapien
cttcggctgaaatgctccttgtagt

SEQ ID NO: 777539 - DNA, 25 bp, Homo sapien
ggtgggatcataggggggatgcccg

SEQ ID NO: 777540 - DNA, 25 bp, Homo sapien
ggggaggccccagagatttggtgta

SEQ ID NO: 777541 - DNA, 25 bp, Homo sapien
ggaggccccagagatttggtgtaac

SEQ ID NO: 777542 - DNA, 25 bp, Homo sapien
cagtctgtttggggaggccccagag

SEQ ID NO: 777543 - DNA, 25 bp, Homo sapien
tctgtttggggaggccccagagatt

SEQ ID NO: 777544 - DNA, 25 bp, Homo sapien
tccttttggagtaaagtgtgtggga

SEQ ID NO: 777545 - DNA, 25 bp, Homo sapien
gagtaaagtgtgtgggactgtccca

SEQ ID NO: 777546 - DNA, 25 bp, Homo sapien
cagcgacatcgatagggttggatgt

SEQ ID NO: 777547 - DNA, 25 bp, Homo sapien
tgtcccaggccgagcagcgacatcg

SEQ ID NO: 777548 - DNA, 25 bp, Homo sapien
tggtgttacctgagaccaagcctga

SEQ ID NO: 777549 - DNA, 25 bp, Homo sapien
cctggtgttacctgagaccaagcct

SEQ ID NO: 777550 - DNA, 25 bp, Homo sapien
ttacctgagaccaagcctgactttg

SEQ ID NO: 777551 - DNA, 25 bp, Homo sapien
gtgttacctgagaccaagcctgact

SEQ ID NO: 777552 - DNA, 25 bp, Homo sapien
tacatgcctgtcactcaaacaattg

SEQ ID NO: 777553 - DNA, 25 bp, Homo sapien
gtacatctacgctgacaagcccctg

SEQ ID NO: 777554 - DNA, 25 bp, Homo sapien
caaacaattgctctaattaacaaat

SEQ ID NO: 777555 - DNA, 25 bp, Homo sapien
gagaataattaacccattttcacac

SEQ ID NO: 777556 - DNA, 25 bp, Homo sapien
ccttaacataggtctgaaaggatct

SEQ ID NO: 777557 - DNA, 25 bp, Homo sapien
taacataggtctgaaaggatctgtc

SEQ ID NO: 777558 - DNA, 25 bp, Homo sapien
acataggtctgaaaggatctgtcaa

SEQ ID NO: 777559 - DNA, 25 bp, Homo sapien
cttaacataggtctgaaaggatctg

SEQ ID NO: 777560 - DNA, 25 bp, Homo sapien
tctgaaaaacccaatcaccgtcatt

SEQ ID NO: 777561 - DNA, 25 bp, Homo sapien
tcaatcacactatctgaaaaaccca

SEQ ID NO: 777562 - DNA, 25 bp, Homo sapien
ccacagggagtcaaatagaggttgc

SEQ ID NO: 777563 - DNA, 25 bp, Homo sapien
aaagccaatggcctccaacggtcaa

SEQ ID NO: 777564 - DNA, 25 bp, Homo sapien
cagacctggtagagtgggaagccct

SEQ ID NO: 777565 - DNA, 25 bp, Homo sapien
cccacgtgggtttgctactcagaaa

SEQ ID NO: 777566 - DNA, 25 bp, Homo sapien
ttctcttctaccagtcagcgggcag

SEQ ID NO: 777567 - DNA, 25 bp, Homo sapien
aagtaatctacccataagctcggcg

SEQ ID NO: 777568 - DNA, 25 bp, Homo sapien
tttttcgtgaaacaagagtgctttg

SEQ ID NO: 777569 - DNA, 25 bp, Homo sapien
agattttggctgcagaggctttttt

SEQ ID NO: 777570 - DNA, 25 bp, Homo sapien
aaacaagagtgctttgtactctcca

SEQ ID NO: 777571 - DNA, 25 bp, Homo sapien
tgcagaggcttttttcgtgaaacaa

SEQ ID NO: 777572 - DNA, 25 bp, Homo sapien
aatctgccaggcgatgtgaacatgc

SEQ ID NO: 777573 - DNA, 25 bp, Homo sapien
ggtaaatctgccaggcgatgtgaac

SEQ ID NO: 777574 - DNA, 25 bp, Homo sapien
cttgactttctgttggtggtggtaa

SEQ ID NO: 777575 - DNA, 25 bp, Homo sapien
tgaacatgcatagcacaccacttcc

SEQ ID NO: 777576 - DNA, 25 bp, Homo sapien
cctacaccacgaaggtcggactgac

SEQ ID NO: 777577 - DNA, 25 bp, Homo sapien
cattcttccctacaccacgaaggtc

SEQ ID NO: 777578 - DNA, 25 bp, Homo sapien
tccctacaccacgaaggtcggactg

SEQ ID NO: 777579 - DNA, 25 bp, Homo sapien
tcttccctacaccacgaaggtcgga

SEQ ID NO: 777580 - DNA, 25 bp, Homo sapien
ggcacacatgactctaccattttcc

SEQ ID NO: 777581 - DNA, 25 bp, Homo sapien
catcttcatatagggcacacatgac

SEQ ID NO: 777582 - DNA, 25 bp, Homo sapien
catcaggaggaccaatgacagttca

SEQ ID NO: 777583 - DNA, 25 bp, Homo sapien
agttcagcggcatcatcttcatata

SEQ ID NO: 777584 - DNA, 25 bp, Homo sapien
gaaaaatcgtctttggacagcgagg

SEQ ID NO: 777585 - DNA, 25 bp, Homo sapien
gaacgtggctcctgcaagtactgac

SEQ ID NO: 777586 - DNA, 25 bp, Homo sapien
gacagcgaggtaactagccagaacg

SEQ ID NO: 777587 - DNA, 25 bp, Homo sapien
tgttccctaagccaagcgctgatgc

SEQ ID NO: 777588 - DNA, 25 bp, Homo sapien
atcctcttaggcagtagaaattggg

SEQ ID NO: 777589 - DNA, 25 bp, Homo sapien
attgggtcttaatcttcctctcaat

SEQ ID NO: 777590 - DNA, 25 bp, Homo sapien
tgggtcttaatcttcctctcaatct

SEQ ID NO: 777591 - DNA, 25 bp, Homo sapien
tcttaggcagtagaaattgggtctt

SEQ ID NO: 777592 - DNA, 25 bp, Homo sapien
gctggagactgtgaacggtgcactt

SEQ ID NO: 777593 - DNA, 25 bp, Homo sapien
tgggttcaagtttacaaacactgtg

SEQ ID NO: 777594 - DNA, 25 bp, Homo sapien
gaataaaggtgttagtgaagagctg

SEQ ID NO: 777595 - DNA, 25 bp, Homo sapien
cggtgcacttgggttcaagtttaca

SEQ ID NO: 777596 - DNA, 25 bp, Homo sapien
tccagcttatgtgggtctgactgca

SEQ ID NO: 777597 - DNA, 25 bp, Homo sapien
ggagggcggctcaggaactcaggtt

SEQ ID NO: 777598 - DNA, 25 bp, Homo sapien
caggtttcagtccaaagtccagctt

SEQ ID NO: 777599 - DNA, 25 bp, Homo sapien
aacaaagttgaaggccgtgccaggt

SEQ ID NO: 777600 - DNA, 25 bp, Homo sapien
ccctgtaagggaaagatgatctctg

SEQ ID NO: 777601 - DNA, 25 bp, Homo sapien
caactccctggatgtgctgcgatgt

SEQ ID NO: 777602 - DNA, 25 bp, Homo sapien
ggcaccgtattaagggcgaccgcat

SEQ ID NO: 777603 - DNA, 25 bp, Homo sapien
ggactttaaaacacggcatgactga

SEQ ID NO: 777604 - DNA, 25 bp, Homo sapien
gaatattcatcaggccgttagcagt

SEQ ID NO: 777605 - DNA, 25 bp, Homo sapien
gagccttcaaatatgtccccagaca

SEQ ID NO: 777606 - DNA, 25 bp, Homo sapien
tcagagcctaggtgccatggtaaca

SEQ ID NO: 777607 - DNA, 25 bp, Homo sapien
cagtagttcggaattggaagacacc

SEQ ID NO: 777608 - DNA, 25 bp, Homo sapien
gcatctcggaggaccaagttttcac

SEQ ID NO: 777609 - DNA, 25 bp, Homo sapien
gagtatgttagttcgcatgcaccca

SEQ ID NO: 777610 - DNA, 25 bp, Homo sapien
tggttcttggctacgctgctctggg

SEQ ID NO: 777611 - DNA, 25 bp, Homo sapien
gaaggatactataagacccgactct

SEQ ID NO: 777612 - DNA, 25 bp, Homo sapien
tgtgatgaggaggtggcccaaaagg

SEQ ID NO: 777613 - DNA, 25 bp, Homo sapien
gtgatgaggaggtggcccaaaaggg

SEQ ID NO: 777614 - DNA, 25 bp, Homo sapien
tgatgaggaggtggcccaaaagggg

SEQ ID NO: 777615 - DNA, 25 bp, Homo sapien
atctcagttcccattattttgggcg

SEQ ID NO: 777616 - DNA, 25 bp, Homo sapien
gtgcagcgggagcatggtaaacaca

SEQ ID NO: 777617 - DNA, 25 bp, Homo sapien
ggagcatggtaaacacagcagggtt

SEQ ID NO: 777618 - DNA, 25 bp, Homo sapien
gttcccattattttgggcgactcac

SEQ ID NO: 777619 - DNA, 25 bp, Homo sapien
cgaaagaatgcggtgtaagagatga

SEQ ID NO: 777620 - DNA, 25 bp, Homo sapien
ctaccgaaagaatgcggtgtaagag

SEQ ID NO: 777621 - DNA, 25 bp, Homo sapien
aagaatgcggtgtaagagatgaaat

SEQ ID NO: 777622 - DNA, 25 bp, Homo sapien
taccgaaagaatgcggtgtaagaga

SEQ ID NO: 777623 - DNA, 25 bp, Homo sapien
caggctgttgtaaactcggattccc

SEQ ID NO: 777624 - DNA, 25 bp, Homo sapien
tcttcttccaatgggcaggaacagg

SEQ ID NO: 777625 - DNA, 25 bp, Homo sapien
gaagttcaggcagaaccactgccga

SEQ ID NO: 777626 - DNA, 25 bp, Homo sapien
gataccaaggaatggctctcaccca

SEQ ID NO: 777627 - DNA, 25 bp, Homo sapien
gcctgtgaatgtagacggccgatta

SEQ ID NO: 777628 - DNA, 25 bp, Homo sapien
tttccaagtcccccgaaggcattgc

SEQ ID NO: 777629 - DNA, 25 bp, Homo sapien
tgtgaatgtagacggccgattaaaa

SEQ ID NO: 777630 - DNA, 25 bp, Homo sapien
tgctaggcctgtgaatgtagacggc

SEQ ID NO: 777631 - DNA, 25 bp, Homo sapien
atctgctgtaatgaaggtacttacc

SEQ ID NO: 777632 - DNA, 25 bp, Homo sapien
ggaagtcttgtcctacactggagag

SEQ ID NO: 777633 - DNA, 25 bp, Homo sapien
aatgaatacatattattgggagctg

SEQ ID NO: 777634 - DNA, 25 bp, Homo sapien
aacttttaacagcattcagagttaa

SEQ ID NO: 777635 - DNA, 25 bp, Homo sapien
tccagggttcgtgagggttgctaaa

SEQ ID NO: 777636 - DNA, 25 bp, Homo sapien
aacagatgagtctcgtttatctaca

SEQ ID NO: 777637 - DNA, 25 bp, Homo sapien
tctatctctgtcatgagctgcagcg

SEQ ID NO: 777638 - DNA, 25 bp, Homo sapien
tccttgtggccgaacattgagttgg

SEQ ID NO: 777639 - DNA, 25 bp, Homo sapien
tggggactcgagagcggtttctttc

SEQ ID NO: 777640 - DNA, 25 bp, Homo sapien
ccgtggggactcgagagcggtttct

SEQ ID NO: 777641 - DNA, 25 bp, Homo sapien
ggctcccccgtggggactcgagagc

SEQ ID NO: 777642 - DNA, 25 bp, Homo sapien
gactcgagagcggtttctttccgta

SEQ ID NO: 777643 - DNA, 25 bp, Homo sapien
gacacagcacgtgagaaaggctcaa

SEQ ID NO: 777644 - DNA, 25 bp, Homo sapien
ccagtttcagagcaaagaacgtgga

SEQ ID NO: 777645 - DNA, 25 bp, Homo sapien
tgtgcaccagatgggataagaaagc

SEQ ID NO: 777646 - DNA, 25 bp, Homo sapien
agaacgtggatacagagccatctcc

SEQ ID NO: 777647 - DNA, 25 bp, Homo sapien
tgtggcaatccagcccgactgtctg

SEQ ID NO: 777648 - DNA, 25 bp, Homo sapien
tagattttagaggaagcttaatggg

SEQ ID NO: 777649 - DNA, 25 bp, Homo sapien
taagagcctcaaccaagagcacaga

SEQ ID NO: 777650 - DNA, 25 bp, Homo sapien
gcatgtggtcaataaggcaatgatg

SEQ ID NO: 777651 - DNA, 25 bp, Homo sapien
tcagtgttcagatgagcccggatct

SEQ ID NO: 777652 - DNA, 25 bp, Homo sapien
gggtttgtccttctcccgagcctca

SEQ ID NO: 777653 - DNA, 25 bp, Homo sapien
tccttgcgggattccgagtggtctc

SEQ ID NO: 777654 - DNA, 25 bp, Homo sapien
ttcagtggagctgcgggtatgtccc

SEQ ID NO: 777655 - DNA, 25 bp, Homo sapien
ggtcatcatgcgagtcctgtccagg

SEQ ID NO: 777656 - DNA, 25 bp, Homo sapien
caagttctcggtaaggatccctcaa

SEQ ID NO: 777657 - DNA, 25 bp, Homo sapien
gggtctctccggtgaatgtcaagtt

SEQ ID NO: 777658 - DNA, 25 bp, Homo sapien
gcgggtcgttccttagcaggaagtc

SEQ ID NO: 777659 - DNA, 25 bp, Homo sapien
cgtgtgctcgtagtcttctctgagc

SEQ ID NO: 777660 - DNA, 25 bp, Homo sapien
gcacggagtggagccgcgtgtgctc

SEQ ID NO: 777661 - DNA, 25 bp, Homo sapien
gctgtagtcgtgaggctcccggtcc

SEQ ID NO: 777662 - DNA, 25 bp, Homo sapien
tctctgagcatgtgcaagcgctccc

SEQ ID NO: 777663 - DNA, 25 bp, Homo sapien
cgggcctcgatatccttcagcgtgt

SEQ ID NO: 777664 - DNA, 25 bp, Homo sapien
tcccttatctctgcggacagaggag

SEQ ID NO: 777665 - DNA, 25 bp, Homo sapien
cagaggagtcgtccttctgggagag

SEQ ID NO: 777666 - DNA, 25 bp, Homo sapien
ggtcttgttgaggagtccgttctgg

SEQ ID NO: 777667 - DNA, 25 bp, Homo sapien
tatatgggaacacagctttagccga

SEQ ID NO: 777668 - DNA, 25 bp, Homo sapien
tcacgtaagcgcttgttcagggaaa

SEQ ID NO: 777669 - DNA, 25 bp, Homo sapien
tgtgaagtcactggcgacctgtgtg

SEQ ID NO: 777670 - DNA, 25 bp, Homo sapien
tgatggatggcgtggacttctcccc

SEQ ID NO: 777671 - DNA, 25 bp, Homo sapien
caggataacaacgtcagatagcact

SEQ ID NO: 777672 - DNA, 25 bp, Homo sapien
gcaaaaacaggataacaacgtcaga

SEQ ID NO: 777673 - DNA, 25 bp, Homo sapien
ggataacaacgtcagatagcacttt

SEQ ID NO: 777674 - DNA, 25 bp, Homo sapien
aaacaggataacaacgtcagatagc

SEQ ID NO: 777675 - DNA, 25 bp, Homo sapien
ccttcagtttactactaaaatagat

SEQ ID NO: 777676 - DNA, 25 bp, Homo sapien
gtttactactaaaatagatctctct

SEQ ID NO: 777677 - DNA, 25 bp, Homo sapien
gaagctcacaactaaaccttcagtt

SEQ ID NO: 777678 - DNA, 25 bp, Homo sapien
atctgaagctcacaactaaaccttc

SEQ ID NO: 777679 - DNA, 25 bp, Homo sapien
tgaaagctaccactacagttccagt

SEQ ID NO: 777680 - DNA, 25 bp, Homo sapien
aataacatggcacagtttacattac

SEQ ID NO: 777681 - DNA, 25 bp, Homo sapien
taaacagcaaaaaggtccgtataga

SEQ ID NO: 777682 - DNA, 25 bp, Homo sapien
gctccgccgatgagaacatgctgaa

SEQ ID NO: 777683 - DNA, 25 bp, Homo sapien
tacaggtatggcttcttccctaagg

SEQ ID NO: 777684 - DNA, 25 bp, Homo sapien
taacaaattggtgagacactaaccg

SEQ ID NO: 777685 - DNA, 25 bp, Homo sapien
ttcttttcaagagcccggtcttgta

SEQ ID NO: 777686 - DNA, 25 bp, Homo sapien
tctgttcttacacgggctgggttcg

SEQ ID NO: 777687 - DNA, 25 bp, Homo sapien
gcaaactgatgaggactacaccacg

SEQ ID NO: 777688 - DNA, 25 bp, Homo sapien
gactgaccgagtccacagattgaaa

SEQ ID NO: 777689 - DNA, 25 bp, Homo sapien
gaagtagccaggcacaaacaactgg

SEQ ID NO: 777690 - DNA, 25 bp, Homo sapien
cacaggccctaggtcagaattctca

SEQ ID NO: 777691 - DNA, 25 bp, Homo sapien
tcacactgtttgtgcacctccggca

SEQ ID NO: 777692 - DNA, 25 bp, Homo sapien
gagtttcctagcataggggaggttc

SEQ ID NO: 777693 - DNA, 25 bp, Homo sapien
gtttgtgcacctccggcaggccctg

SEQ ID NO: 777694 - DNA, 25 bp, Homo sapien
catgccagagccacttttgtaagca

SEQ ID NO: 777695 - DNA, 25 bp, Homo sapien
caggctgctgcgaggtcggctctcc

SEQ ID NO: 777696 - DNA, 25 bp, Homo sapien
ctcaggctgctgcgaggtcggctct

SEQ ID NO: 777697 - DNA, 25 bp, Homo sapien
aggctcaggctgctgcgaggtcggc

SEQ ID NO: 777698 - DNA, 25 bp, Homo sapien
ggctcaggctgctgcgaggtcggct

SEQ ID NO: 777699 - DNA, 25 bp, Homo sapien
tcaaaggcacccacattccaacatg

SEQ ID NO: 777700 - DNA, 25 bp, Homo sapien
ttatcgtacattttggaaagccagg

SEQ ID NO: 777701 - DNA, 25 bp, Homo sapien
gatttctcctccatatcactgtgca

SEQ ID NO: 777702 - DNA, 25 bp, Homo sapien
cccacattccaacatgaaagatcat

SEQ ID NO: 777703 - DNA, 25 bp, Homo sapien
aggcactttccgtacccaggtggct

SEQ ID NO: 777704 - DNA, 25 bp, Homo sapien
ccttcttatgcagctcttttgggcc

SEQ ID NO: 777705 - DNA, 25 bp, Homo sapien
gtattctgcagagcctctcgttgcc

SEQ ID NO: 777706 - DNA, 25 bp, Homo sapien
gttgccaacagacttgtcttcccca

SEQ ID NO: 777707 - DNA, 25 bp, Homo sapien
cttcttgctgcaattcactacttct

SEQ ID NO: 777708 - DNA, 25 bp, Homo sapien
ctacttcttgctgcaattcactact

SEQ ID NO: 777709 - DNA, 25 bp, Homo sapien
ttgctgcaattcactacttctgctg

SEQ ID NO: 777710 - DNA, 25 bp, Homo sapien
ttcttgctgcaattcactacttctg

SEQ ID NO: 777711 - DNA, 25 bp, Homo sapien
ctcttttcacaataaggacgggaca

SEQ ID NO: 777712 - DNA, 25 bp, Homo sapien
aagtccctaaacacctgtcactcca

SEQ ID NO: 777713 - DNA, 25 bp, Homo sapien
gtcactccagcccttcaaactctgg

SEQ ID NO: 777714 - DNA, 25 bp, Homo sapien
tcacaataaggacgggacagagaaa

SEQ ID NO: 777715 - DNA, 25 bp, Homo sapien
tcttccgaaggtggtcattgcagtt

SEQ ID NO: 777716 - DNA, 25 bp, Homo sapien
cttccgaaggtggtcattgcagttg

SEQ ID NO: 777717 - DNA, 25 bp, Homo sapien
gcctgatgggtctagaagctgatgc

SEQ ID NO: 777718 - DNA, 25 bp, Homo sapien
tgcaggatctcctcaacagaaggtc

SEQ ID NO: 777719 - DNA, 25 bp, Homo sapien
gtccctgacttaaactcagaacaag

SEQ ID NO: 777720 - DNA, 25 bp, Homo sapien
gaaccagctttgacatcaatatgca

SEQ ID NO: 777721 - DNA, 25 bp, Homo sapien
ggcaattctgcttcacagacatggt

SEQ ID NO: 777722 - DNA, 25 bp, Homo sapien
tccagagtcagtcaggggcaattct

SEQ ID NO: 777723 - DNA, 25 bp, Homo sapien
attctgcttcacagacatggttctg

SEQ ID NO: 777724 - DNA, 25 bp, Homo sapien
cagtcaggggcaattctgcttcaca

SEQ ID NO: 777725 - DNA, 25 bp, Homo sapien
gctgagcgagtgtaactgtaactaa

SEQ ID NO: 777726 - DNA, 25 bp, Homo sapien
ggctgagcgagtgtaactgtaacta

SEQ ID NO: 777727 - DNA, 25 bp, Homo sapien
gagcgagtgtaactgtaactaagca

SEQ ID NO: 777728 - DNA, 25 bp, Homo sapien
atgtttttctccacgacttcctcac

SEQ ID NO: 777729 - DNA, 25 bp, Homo sapien
gcagctatgtttgggcgaggtccag

SEQ ID NO: 777730 - DNA, 25 bp, Homo sapien
aatccccctgccaaaagatgaacag

SEQ ID NO: 777731 - DNA, 25 bp, Homo sapien
tgaacagaagctgacggggcagcta

SEQ ID NO: 777732 - DNA, 25 bp, Homo sapien
cttggtgaatataatccccctgcca

SEQ ID NO: 777733 - DNA, 25 bp, Homo sapien
tggacagagtaggacctgaccatct

SEQ ID NO: 777734 - DNA, 25 bp, Homo sapien
ttggacagagtaggacctgaccatc

SEQ ID NO: 777735 - DNA, 25 bp, Homo sapien
gacagagtaggacctgaccatctcc

SEQ ID NO: 777736 - DNA, 25 bp, Homo sapien
agagtaggacctgaccatctccctc

SEQ ID NO: 777737 - DNA, 25 bp, Homo sapien
ctggtcagcattctcagcacaaggg

SEQ ID NO: 777738 - DNA, 25 bp, Homo sapien
cagcattctcagcacaagggttcca

SEQ ID NO: 777739 - DNA, 25 bp, Homo sapien
tcagcattctcagcacaagggttcc

SEQ ID NO: 777740 - DNA, 25 bp, Homo sapien
ggtcagcattctcagcacaagggtt

SEQ ID NO: 777741 - DNA, 25 bp, Homo sapien
catcgttgggtagtgcacagcaaac

SEQ ID NO: 777742 - DNA, 25 bp, Homo sapien
aaccaccccagatgcaggagtacat

SEQ ID NO: 777743 - DNA, 25 bp, Homo sapien
caagtttggatctccgaacccatca

SEQ ID NO: 777744 - DNA, 25 bp, Homo sapien
atcgagtatcgccagcttgttgtca

SEQ ID NO: 777745 - DNA, 25 bp, Homo sapien
caatgtctgtggagacgtgcacaag

SEQ ID NO: 777746 - DNA, 25 bp, Homo sapien
agaggcaagacaacgttgaggaaat

SEQ ID NO: 777747 - DNA, 25 bp, Homo sapien
ctgtggagacgtgcacaagaggcaa

SEQ ID NO: 777748 - DNA, 25 bp, Homo sapien
cactagcagttgatctgacttgtcc

SEQ ID NO: 777749 - DNA, 25 bp, Homo sapien
tgcacaaatatccaggttgtaaggc

SEQ ID NO: 777750 - DNA, 25 bp, Homo sapien
caccctgcctgtaaatccccatgtt

SEQ ID NO: 777751 - DNA, 25 bp, Homo sapien
tccaggttgtaaggccacagattca

SEQ ID NO: 777752 - DNA, 25 bp, Homo sapien
tccaaaatcaccaagtgctatcagg

SEQ ID NO: 777753 - DNA, 25 bp, Homo sapien
gcctgacatccaaggtaaacatcca

SEQ ID NO: 777754 - DNA, 25 bp, Homo sapien
ctttggctccatcgctttcctgccc

SEQ ID NO: 777755 - DNA, 25 bp, Homo sapien
tggctccatcgctttcctgcccagc

SEQ ID NO: 777756 - DNA, 25 bp, Homo sapien
ctgacatccaaggtaaacatccagc

SEQ ID NO: 777757 - DNA, 25 bp, Homo sapien
acagtggcccgtgtgggctgcaggc

SEQ ID NO: 777758 - DNA, 25 bp, Homo sapien
acagacattgctggtgcctcctcgg

SEQ ID NO: 777759 - DNA, 25 bp, Homo sapien
tgcagagttgggaggaccccacaga

SEQ ID NO: 777760 - DNA, 25 bp, Homo sapien
taggtcttggcacagtggcccgtgt

SEQ ID NO: 777761 - DNA, 25 bp, Homo sapien
ccatacgataagtggaatcctcaga

SEQ ID NO: 777762 - DNA, 25 bp, Homo sapien
catacgataagtggaatcctcagaa

SEQ ID NO: 777763 - DNA, 25 bp, Homo sapien
cccatacgataagtggaatcctcag

SEQ ID NO: 777764 - DNA, 25 bp, Homo sapien
tttctccccaatttggctcaccctg

SEQ ID NO: 777765 - DNA, 25 bp, Homo sapien
ccatttctcctcacatcacccagga

SEQ ID NO: 777766 - DNA, 25 bp, Homo sapien
ttctcctcacatcacccaggacaga

SEQ ID NO: 777767 - DNA, 25 bp, Homo sapien
catttctcctcacatcacccaggac

SEQ ID NO: 777768 - DNA, 25 bp, Homo sapien
ttcttggctccctgatgaagttccc

SEQ ID NO: 777769 - DNA, 25 bp, Homo sapien
gcctctgctccaacattcccgcttc

SEQ ID NO: 777770 - DNA, 25 bp, Homo sapien
tcttggctccctgatgaagttccca

SEQ ID NO: 777771 - DNA, 25 bp, Homo sapien
tagcagagccatgtccacagggtgt

SEQ ID NO: 777772 - DNA, 25 bp, Homo sapien
taccagaaagagagctagcagagcc

SEQ ID NO: 777773 - DNA, 25 bp, Homo sapien
caaccacagatgtgggcctgagttc

SEQ ID NO: 777774 - DNA, 25 bp, Homo sapien
tgaaaaccctgttctcctaccagaa

SEQ ID NO: 777775 - DNA, 25 bp, Homo sapien
tggacattggcagccgaagggtatc

SEQ ID NO: 777776 - DNA, 25 bp, Homo sapien
ggacattggcagccgaagggtatct

SEQ ID NO: 777777 - DNA, 25 bp, Homo sapien
gacattggcagccgaagggtatctg

SEQ ID NO: 777778 - DNA, 25 bp, Homo sapien
tagaagtgaccttttgttcccacaa

SEQ ID NO: 777779 - DNA, 25 bp, Homo sapien
gcatgattgccacagtccctggaat

SEQ ID NO: 777780 - DNA, 25 bp, Homo sapien
gccaagacccccacgatttggtggc

SEQ ID NO: 777781 - DNA, 25 bp, Homo sapien
tggcctgaaggttgctctctgacaa

SEQ ID NO: 777782 - DNA, 25 bp, Homo sapien
gccccatcaagttctaggaagatcc

SEQ ID NO: 777783 - DNA, 25 bp, Homo sapien
cccatcaagttctaggaagatccgt

SEQ ID NO: 777784 - DNA, 25 bp, Homo sapien
catcaagttctaggaagatccgtgc

SEQ ID NO: 777785 - DNA, 25 bp, Homo sapien
catcagccccatcaagttctaggaa

SEQ ID NO: 777786 - DNA, 25 bp, Homo sapien
tggtcgtggcaacatgtgatctctt

SEQ ID NO: 777787 - DNA, 25 bp, Homo sapien
tttgcctttcaagactggtcgtggc

SEQ ID NO: 777788 - DNA, 25 bp, Homo sapien
cgtattgtgcctgtattagagttct

SEQ ID NO: 777789 - DNA, 25 bp, Homo sapien
tcaatttggcgtttcccaatcccca

SEQ ID NO: 777790 - DNA, 25 bp, Homo sapien
ggcaccatgcatagaggccaatgga

SEQ ID NO: 777791 - DNA, 25 bp, Homo sapien
taagagtgggagtatgccaaccagt

SEQ ID NO: 777792 - DNA, 25 bp, Homo sapien
ctccttcatggagtagtggtgaccc

SEQ ID NO: 777793 - DNA, 25 bp, Homo sapien
gaaccaggtctgtagctaatacaag

SEQ ID NO: 777794 - DNA, 25 bp, Homo sapien
gcttgaccgagtcaagccctcatgg

SEQ ID NO: 777795 - DNA, 25 bp, Homo sapien
cggtgccttcttgcccgagggcatc

SEQ ID NO: 777796 - DNA, 25 bp, Homo sapien
caagctcctggagttgttggtcgca

SEQ ID NO: 777797 - DNA, 25 bp, Homo sapien
cctcatggctgatggtaccccaggc

SEQ ID NO: 777798 - DNA, 25 bp, Homo sapien
tggtgtgtctctggccctagctgtt

SEQ ID NO: 777799 - DNA, 25 bp, Homo sapien
ggtccacagtgcctacggcagcaag

SEQ ID NO: 777800 - DNA, 25 bp, Homo sapien
tctctcattttgatgggtaaattat

SEQ ID NO: 777801 - DNA, 25 bp, Homo sapien
tcagatgggttaagtggtccacagt

SEQ ID NO: 777802 - DNA, 25 bp, Homo sapien
aaggctgtctgatcaaatgatggga

SEQ ID NO: 777803 - DNA, 25 bp, Homo sapien
tctgatcaaatgatgggatcttttc

SEQ ID NO: 777804 - DNA, 25 bp, Homo sapien
aggttttgggtcagcatagcaaagg

SEQ ID NO: 777805 - DNA, 25 bp, Homo sapien
ttttgggtcagcatagcaaaggctg

SEQ ID NO: 777806 - DNA, 25 bp, Homo sapien
caccagtgatgctgtcagaggtttt

SEQ ID NO: 777807 - DNA, 25 bp, Homo sapien
tcacaccagtgatgctgtcagaggt

SEQ ID NO: 777808 - DNA, 25 bp, Homo sapien
cacaccagtgatgctgtcagaggtt

SEQ ID NO: 777809 - DNA, 25 bp, Homo sapien
ccagtgatgctgtcagaggttttac

SEQ ID NO: 777810 - DNA, 25 bp, Homo sapien
ggaattgaattttacatgcgatgtg

SEQ ID NO: 777811 - DNA, 25 bp, Homo sapien
tgtgatcaattcattaaggctctga

SEQ ID NO: 777812 - DNA, 25 bp, Homo sapien
tgatgttctactctggccatcccag

SEQ ID NO: 777813 - DNA, 25 bp, Homo sapien
tacggctacaatgaatctggaattg

SEQ ID NO: 777814 - DNA, 25 bp, Homo sapien
gcagagaattcacagcaagattttc

SEQ ID NO: 777815 - DNA, 25 bp, Homo sapien
gctctatacagcagagaattcacag

SEQ ID NO: 777816 - DNA, 25 bp, Homo sapien
atgtgctctatacagcagagaattc

SEQ ID NO: 777817 - DNA, 25 bp, Homo sapien
caagattttctttatggggatccat

SEQ ID NO: 777818 - DNA, 25 bp, Homo sapien
ctgtgggaggtaggagggcaggaca

SEQ ID NO: 777819 - DNA, 25 bp, Homo sapien
gaggtaggagggcaggacagcaggc

SEQ ID NO: 777820 - DNA, 25 bp, Homo sapien
tgggaggtaggagggcaggacagca

SEQ ID NO: 777821 - DNA, 25 bp, Homo sapien
gtgggaggtaggagggcaggacagc

SEQ ID NO: 777822 - DNA, 25 bp, Homo sapien
caggaagatgagatagaccgaaggt

SEQ ID NO: 777823 - DNA, 25 bp, Homo sapien
tgtcgttcaggggatggtgtccaca

SEQ ID NO: 777824 - DNA, 25 bp, Homo sapien
ccgaaggtgggctgctaggtgtagg

SEQ ID NO: 777825 - DNA, 25 bp, Homo sapien
tatgggagatccaaccacaggaaga

SEQ ID NO: 777826 - DNA, 25 bp, Homo sapien
aatactgccgtagagcaaatgagga

SEQ ID NO: 777827 - DNA, 25 bp, Homo sapien
ctgccgtagagcaaatgaggaaagt

SEQ ID NO: 777828 - DNA, 25 bp, Homo sapien
ttagcaaatactgccgtagagcaaa

SEQ ID NO: 777829 - DNA, 25 bp, Homo sapien
aagtcttgcaaatgaccatttttta

SEQ ID NO: 777830 - DNA, 25 bp, Homo sapien
aacatattctccagccaacaacttc

SEQ ID NO: 777831 - DNA, 25 bp, Homo sapien
cttcccaggtgtccatgcctctcta

SEQ ID NO: 777832 - DNA, 25 bp, Homo sapien
atgcctctctatcccctctggagtt

SEQ ID NO: 777833 - DNA, 25 bp, Homo sapien
aaacatattctccagccaacaactt

SEQ ID NO: 777834 - DNA, 25 bp, Homo sapien
agaattctaacctccccagtcactg

SEQ ID NO: 777835 - DNA, 25 bp, Homo sapien
tcgaaatactggaattcaacgcccc

SEQ ID NO: 777836 - DNA, 25 bp, Homo sapien
gaagcatattcatttggctcctggt

SEQ ID NO: 777837 - DNA, 25 bp, Homo sapien
tctctgcgtgcaagaattctaacct

SEQ ID NO: 777838 - DNA, 25 bp, Homo sapien
gagggaaaatctggcctggaggctc

SEQ ID NO: 777839 - DNA, 25 bp, Homo sapien
aaatctggcctggaggctcggattc

SEQ ID NO: 777840 - DNA, 25 bp, Homo sapien
atctggcctggaggctcggattctg

SEQ ID NO: 777841 - DNA, 25 bp, Homo sapien
gaaaatctggcctggaggctcggat

SEQ ID NO: 777842 - DNA, 25 bp, Homo sapien
accctttagttctcagtactccctg

SEQ ID NO: 777843 - DNA, 25 bp, Homo sapien
tcccggttggcgatgaagacatcct

SEQ ID NO: 777844 - DNA, 25 bp, Homo sapien
tgagcgggcgggttcgttccatccc

SEQ ID NO: 777845 - DNA, 25 bp, Homo sapien
tggaggcagtcaaggcatgctggct

SEQ ID NO: 777846 - DNA, 25 bp, Homo sapien
ccccggttcgccgactcgtgcgcgc

SEQ ID NO: 777847 - DNA, 25 bp, Homo sapien
ctccccggttcgccgactcgtgcgc

SEQ ID NO: 777848 - DNA, 25 bp, Homo sapien
cccggttcgccgactcgtgcgcgcg

SEQ ID NO: 777849 - DNA, 25 bp, Homo sapien
cggttcgccgactcgtgcgcgcgcg

SEQ ID NO: 777850 - DNA, 25 bp, Homo sapien
ggaggtacgcgtgccgaatcaccct

SEQ ID NO: 777851 - DNA, 25 bp, Homo sapien
gccaaaacgccgagtctcccaattg

SEQ ID NO: 777852 - DNA, 25 bp, Homo sapien
tcccaaaacgtcgcgggcagcgcgg

SEQ ID NO: 777853 - DNA, 25 bp, Homo sapien
ccaattggcggacgcggtgacaccg

SEQ ID NO: 777854 - DNA, 25 bp, Homo sapien
ggcacaccggcctgtctcggagctg

SEQ ID NO: 777855 - DNA, 25 bp, Homo sapien
caagcccccaaaccgcgccgagagc

SEQ ID NO: 777856 - DNA, 25 bp, Homo sapien
gccgccggctcccggacacgttcca

SEQ ID NO: 777857 - DNA, 25 bp, Homo sapien
gccggctcccggacacgttccaagc

SEQ ID NO: 777858 - DNA, 25 bp, Homo sapien
gggcaggcgcctttgttccgctcac

SEQ ID NO: 777859 - DNA, 25 bp, Homo sapien
cccgggcaggcgcctttgttccgct

SEQ ID NO: 777860 - DNA, 25 bp, Homo sapien
tttgttccgctcaccgacccgctcc

SEQ ID NO: 777861 - DNA, 25 bp, Homo sapien
ttgttccgctcaccgacccgctcca

SEQ ID NO: 777862 - DNA, 25 bp, Homo sapien
aggggccgtgcaagcctcacacacc

SEQ ID NO: 777863 - DNA, 25 bp, Homo sapien
agacggccggcagggatccaagccc

SEQ ID NO: 777864 - DNA, 25 bp, Homo sapien
cctgctcgtcccacctcaaggatgc

SEQ ID NO: 777865 - DNA, 25 bp, Homo sapien
acctcaaggatgctcgggcggcgga

SEQ ID NO: 777866 - DNA, 25 bp, Homo sapien
ctttgactcttctcagtgaagccat

SEQ ID NO: 777867 - DNA, 25 bp, Homo sapien
tccagcagcgacaggcgcttcagga

SEQ ID NO: 777868 - DNA, 25 bp, Homo sapien
attcagctgccggtacacgatgtcc

SEQ ID NO: 777869 - DNA, 25 bp, Homo sapien
gccggatctcgtggaaggcgtctcc

SEQ ID NO: 777870 - DNA, 25 bp, Homo sapien
cgaagccggctaccgcgatcaagtt

SEQ ID NO: 777871 - DNA, 25 bp, Homo sapien
cagcgcgcaaggaccctggggctca

SEQ ID NO: 777872 - DNA, 25 bp, Homo sapien
gaagggtaagaaggagcgcgcggga

SEQ ID NO: 777873 - DNA, 25 bp, Homo sapien
gcgcgggagccagggtgtgccggct

SEQ ID NO: 777874 - DNA, 25 bp, Homo sapien
aggcacagggcgcagcgcgcaagga

SEQ ID NO: 777875 - DNA, 25 bp, Homo sapien
ggaatgatttccagtccgcacgcgg

SEQ ID NO: 777876 - DNA, 25 bp, Homo sapien
tccactagtttctgcgctcgggctg

SEQ ID NO: 777877 - DNA, 25 bp, Homo sapien
aacgctgggctctaagactatttcc

SEQ ID NO: 777878 - DNA, 25 bp, Homo sapien
gaccgggagccaactgtactgacat

SEQ ID NO: 777879 - DNA, 25 bp, Homo sapien
caaaacaagcaccggcagaggatga

SEQ ID NO: 777880 - DNA, 25 bp, Homo sapien
ccaaaacaagcaccggcagaggatg

SEQ ID NO: 777881 - DNA, 25 bp, Homo sapien
aaacaagcaccggcagaggatgaag

SEQ ID NO: 777882 - DNA, 25 bp, Homo sapien
aacaagcaccggcagaggatgaagg

SEQ ID NO: 777883 - DNA, 25 bp, Homo sapien
gctgcagagcaagagagcacgtgtc

SEQ ID NO: 777884 - DNA, 25 bp, Homo sapien
tagcagcctctccattaattccaag

SEQ ID NO: 777885 - DNA, 25 bp, Homo sapien
cctcgggagcaatgaatgaagaccg

SEQ ID NO: 777886 - DNA, 25 bp, Homo sapien
acgtgtctccccaggcactaggagc

SEQ ID NO: 777887 - DNA, 25 bp, Homo sapien
gaggagagggtgtctctaaggcttt

SEQ ID NO: 777888 - DNA, 25 bp, Homo sapien
agagggtgtctctaaggctttgagc

SEQ ID NO: 777889 - DNA, 25 bp, Homo sapien
ggagagggtgtctctaaggctttga

SEQ ID NO: 777890 - DNA, 25 bp, Homo sapien
ggagaggagagggtgtctctaaggc

SEQ ID NO: 777891 - DNA, 25 bp, Homo sapien
ctgctgtgcgtcctgcgtgtggact

SEQ ID NO: 777892 - DNA, 25 bp, Homo sapien
tctgctgtgcgtcctgcgtgtggac

SEQ ID NO: 777893 - DNA, 25 bp, Homo sapien
gtaaagggagtgggtgtcctccagc

SEQ ID NO: 777894 - DNA, 25 bp, Homo sapien
agggagtgggtgtcctccagcaccc

SEQ ID NO: 777895 - DNA, 25 bp, Homo sapien
aaagggagtgggtgtcctccagcac

SEQ ID NO: 777896 - DNA, 25 bp, Homo sapien
ggagtgggtgtcctccagcaccctg

SEQ ID NO: 777897 - DNA, 25 bp, Homo sapien
aacaggactccctatttcttcagga

SEQ ID NO: 777898 - DNA, 25 bp, Homo sapien
gaacaggactccctatttcttcagg

SEQ ID NO: 777899 - DNA, 25 bp, Homo sapien
caagaacaggactccctatttcttc

SEQ ID NO: 777900 - DNA, 25 bp, Homo sapien
tccaagaacaggactccctatttct

SEQ ID NO: 777901 - DNA, 25 bp, Homo sapien
cagatgacgaggaggtaaggatact

SEQ ID NO: 777902 - DNA, 25 bp, Homo sapien
taaggatactcgaggagctgacaag

SEQ ID NO: 777903 - DNA, 25 bp, Homo sapien
aggaataagctcatccaccctcggg

SEQ ID NO: 777904 - DNA, 25 bp, Homo sapien
actccccaggccagatatggaagga

SEQ ID NO: 777905 - DNA, 25 bp, Homo sapien
gaggaagatctttcagcccctgtga

SEQ ID NO: 777906 - DNA, 25 bp, Homo sapien
ggctcagccgattgtcatccacatg

SEQ ID NO: 777907 - DNA, 25 bp, Homo sapien
tctaaagaccggtgagcagcaatca

SEQ ID NO: 777908 - DNA, 25 bp, Homo sapien
gaaaacttctctatcagtggctcag

SEQ ID NO: 777909 - DNA, 25 bp, Homo sapien
acatggccctcaacaagagaatggg

SEQ ID NO: 777910 - DNA, 25 bp, Homo sapien
cagtggttgcctcagtaaagaggga

SEQ ID NO: 777911 - DNA, 25 bp, Homo sapien
taaataaacgatggatacactgcaa

SEQ ID NO: 777912 - DNA, 25 bp, Homo sapien
ttcactggaaatagctacaatctgg

SEQ ID NO: 777913 - DNA, 25 bp, Homo sapien
catccgcctccggggttcaaaagat

SEQ ID NO: 777914 - DNA, 25 bp, Homo sapien
gcctggtcttgaaatcctgacctcg

SEQ ID NO: 777915 - DNA, 25 bp, Homo sapien
gcaacatccgcctccggggttcaaa

SEQ ID NO: 777916 - DNA, 25 bp, Homo sapien
gggttacagccgcccgccaccacac

SEQ ID NO: 777917 - DNA, 25 bp, Homo sapien
ctgtggcaggcgaatggcgtgaaac

SEQ ID NO: 777918 - DNA, 25 bp, Homo sapien
gctgtggcaggcgaatggcgtgaaa

SEQ ID NO: 777919 - DNA, 25 bp, Homo sapien
tggcaggcgaatggcgtgaaaccag

SEQ ID NO: 777920 - DNA, 25 bp, Homo sapien
tgtggcaggcgaatggcgtgaaacc

SEQ ID NO: 777921 - DNA, 25 bp, Homo sapien
ttttgtaatttgagtagagacagtt

SEQ ID NO: 777922 - DNA, 25 bp, Homo sapien
tgtaatttgagtagagacagtttca

SEQ ID NO: 777923 - DNA, 25 bp, Homo sapien
aacctctggtgatccgcccacctcg

SEQ ID NO: 777924 - DNA, 25 bp, Homo sapien
caacctctggtgatccgcccacctc

SEQ ID NO: 777925 - DNA, 25 bp, Homo sapien
tggaatgttgtgttttgcctccaga

SEQ ID NO: 777926 - DNA, 25 bp, Homo sapien
ggtggaatgttgtgttttgcctcca

SEQ ID NO: 777927 - DNA, 25 bp, Homo sapien
atggtggaatgttgtgttttgcctc

SEQ ID NO: 777928 - DNA, 25 bp, Homo sapien
ggaatgttgtgttttgcctccagaa

SEQ ID NO: 777929 - DNA, 25 bp, Homo sapien
gggtctgattctcaaccacgggcaa

SEQ ID NO: 777930 - DNA, 25 bp, Homo sapien
ccaacagtcactatgcaggaggaga

SEQ ID NO: 777931 - DNA, 25 bp, Homo sapien
tatgaccacggatgaaagcaagctc

SEQ ID NO: 777932 - DNA, 25 bp, Homo sapien
tgcaataaagtcacaaaccctgggc

SEQ ID NO: 777933 - DNA, 25 bp, Homo sapien
tttctaccatgttggttagcctggt

SEQ ID NO: 777934 - DNA, 25 bp, Homo sapien
gagcagacttttaaatggcacagga

SEQ ID NO: 777935 - DNA, 25 bp, Homo sapien
aatggcacaggagatgcaaatccaa

SEQ ID NO: 777936 - DNA, 25 bp, Homo sapien
tgtgcctgaccaagagcagactttt

SEQ ID NO: 777937 - DNA, 25 bp, Homo sapien
ctgggggcatttcctagggaccctg

SEQ ID NO: 777938 - DNA, 25 bp, Homo sapien
agagaccagtgactgaatacagcat

SEQ ID NO: 777939 - DNA, 25 bp, Homo sapien
catttcctagggaccctgaagagac

SEQ ID NO: 777940 - DNA, 25 bp, Homo sapien
tagggaccctgaagagaccagtgac

SEQ ID NO: 777941 - DNA, 25 bp, Homo sapien
caagtgatgcatacattaagtccat

SEQ ID NO: 777942 - DNA, 25 bp, Homo sapien
aagctaagctcttctgttctgtatc

SEQ ID NO: 777943 - DNA, 25 bp, Homo sapien
gagaattgctgaagccaagtgatgc

SEQ ID NO: 777944 - DNA, 25 bp, Homo sapien
caccacctcaaacaaatttgctgaa

SEQ ID NO: 777945 - DNA, 25 bp, Homo sapien
gaagggagcttctaacattggcagt

SEQ ID NO: 777946 - DNA, 25 bp, Homo sapien
cagtgggtctcacacaagagctggt

SEQ ID NO: 777947 - DNA, 25 bp, Homo sapien
gcagaggagcccatcgcatagttca

SEQ ID NO: 777948 - DNA, 25 bp, Homo sapien
cctttacatgtgacaggcgctgagc

SEQ ID NO: 777949 - DNA, 25 bp, Homo sapien
gccaaggaatgtctagcttgtagct

SEQ ID NO: 777950 - DNA, 25 bp, Homo sapien
cagaaggagcgtggtctgccaacat

SEQ ID NO: 777951 - DNA, 25 bp, Homo sapien
tgccaaggaatgtctagcttgtagc

SEQ ID NO: 777952 - DNA, 25 bp, Homo sapien
tcagaaggagcgtggtctgccaaca

SEQ ID NO: 777953 - DNA, 25 bp, Homo sapien
tcccctgattcctctcttggtgaag

SEQ ID NO: 777954 - DNA, 25 bp, Homo sapien
ccctgattcctctcttggtgaaggt

SEQ ID NO: 777955 - DNA, 25 bp, Homo sapien
tcatcccctgattcctctcttggtg

SEQ ID NO: 777956 - DNA, 25 bp, Homo sapien
gtggaaagtagaggtaggatggcat

SEQ ID NO: 777957 - DNA, 25 bp, Homo sapien
gctcctcaaacctggcaactttggg

SEQ ID NO: 777958 - DNA, 25 bp, Homo sapien
ctcaaacctggcaactttgggcatt

SEQ ID NO: 777959 - DNA, 25 bp, Homo sapien
aatagctggtcccatggttcctgct

SEQ ID NO: 777960 - DNA, 25 bp, Homo sapien
attcccaatagctggtcccatggtt

SEQ ID NO: 777961 - DNA, 25 bp, Homo sapien
aaaagaaccagagccggttgcagct

SEQ ID NO: 777962 - DNA, 25 bp, Homo sapien
gggcttccctgccgccagcttttat

SEQ ID NO: 777963 - DNA, 25 bp, Homo sapien
ttacatctcaaaggcggcgtggacc

SEQ ID NO: 777964 - DNA, 25 bp, Homo sapien
cagggtgagtgttatgagtgttaca

SEQ ID NO: 777965 - DNA, 25 bp, Homo sapien
tttgggaacacactaacatccagtc

SEQ ID NO: 777966 - DNA, 25 bp, Homo sapien
cacactgtggaggttacaatttcaa

SEQ ID NO: 777967 - DNA, 25 bp, Homo sapien
tgcccggaactagaaatagcttcac

SEQ ID NO: 777968 - DNA, 25 bp, Homo sapien
catatattgctgagctgcccggaac

SEQ ID NO: 777969 - DNA, 25 bp, Homo sapien
ttggagctagcatcgatcgtgggtc

SEQ ID NO: 777970 - DNA, 25 bp, Homo sapien
caaggctcaggaaggcctaacacaa

SEQ ID NO: 777971 - DNA, 25 bp, Homo sapien
taacacaagactcacagccagttca

SEQ ID NO: 777972 - DNA, 25 bp, Homo sapien
caaggcccctctaggagataatccc

SEQ ID NO: 777973 - DNA, 25 bp, Homo sapien
catctctgcagtaaatcccattgat

SEQ ID NO: 777974 - DNA, 25 bp, Homo sapien
tgttctcaggacgtgcacacagcag

SEQ ID NO: 777975 - DNA, 25 bp, Homo sapien
tgattccagcgctacagtggcaatg

SEQ ID NO: 777976 - DNA, 25 bp, Homo sapien
aatgtctatacatcccacgagggcc

SEQ ID NO: 777977 - DNA, 25 bp, Homo sapien
ttcaagcccagagtccagatacatt

SEQ ID NO: 777978 - DNA, 25 bp, Homo sapien
gagcttcaagcccagagtccagata

SEQ ID NO: 777979 - DNA, 25 bp, Homo sapien
gaagagcttcaagcccagagtccag

SEQ ID NO: 777980 - DNA, 25 bp, Homo sapien
aaagaagagcttcaagcccagagtc

SEQ ID NO: 777981 - DNA, 25 bp, Homo sapien
gtggtgtcgtcttggttttgaaatc

SEQ ID NO: 777982 - DNA, 25 bp, Homo sapien
tgtcgtcttggttttgaaatccaac

SEQ ID NO: 777983 - DNA, 25 bp, Homo sapien
caagaggtggtgtcgtcttggtttt

SEQ ID NO: 777984 - DNA, 25 bp, Homo sapien
cacaccaagaggtggtgtcgtcttg

SEQ ID NO: 777985 - DNA, 25 bp, Homo sapien
caagctcatgaacatcccccagtca

SEQ ID NO: 777986 - DNA, 25 bp, Homo sapien
catttgttatcctgtccaagctcat

SEQ ID NO: 777987 - DNA, 25 bp, Homo sapien
atttgttatcctgtccaagctcatg

SEQ ID NO: 777988 - DNA, 25 bp, Homo sapien
gtccaagctcatgaacatcccccag

SEQ ID NO: 777989 - DNA, 25 bp, Homo sapien
aaaataactgagtccagcttccaag

SEQ ID NO: 777990 - DNA, 25 bp, Homo sapien
tgcaggcctcggctgtgcaaacaga

SEQ ID NO: 777991 - DNA, 25 bp, Homo sapien
ggccctcagaatagctgacatttcc

SEQ ID NO: 777992 - DNA, 25 bp, Homo sapien
ataactgagtccagcttccaaggcc

SEQ ID NO: 777993 - DNA, 25 bp, Homo sapien
agtcactgtcaatagcaggttcttc

SEQ ID NO: 777994 - DNA, 25 bp, Homo sapien
atagcaggttcttcaccttccaccc

SEQ ID NO: 777995 - DNA, 25 bp, Homo sapien
tttcaaagtcactgtcaatagcagg

SEQ ID NO: 777996 - DNA, 25 bp, Homo sapien
caaagtcactgtcaatagcaggttc

SEQ ID NO: 777997 - DNA, 25 bp, Homo sapien
ttgtcataacacccaccaaactcac

SEQ ID NO: 777998 - DNA, 25 bp, Homo sapien
tgtcataacacccaccaaactcaca

SEQ ID NO: 777999 - DNA, 25 bp, Homo sapien
gttgtcataacacccaccaaactca

SEQ ID NO: 778000 - DNA, 25 bp, Homo sapien
tgctgaccccgcactggactgagat

SEQ ID NO: 778001 - DNA, 25 bp, Homo sapien
tcgaatccaaaaggttcattgagat

SEQ ID NO: 778002 - DNA, 25 bp, Homo sapien
tcaggtcgccaacctagtaagtcct

SEQ ID NO: 778003 - DNA, 25 bp, Homo sapien
tcattgagatatggaaacttctctg

SEQ ID NO: 778004 - DNA, 25 bp, Homo sapien
ttgggaaccatgcatcctcatcagg

SEQ ID NO: 778005 - DNA, 25 bp, Homo sapien
ggaaccatgcatcctcatcaggccc

SEQ ID NO: 778006 - DNA, 25 bp, Homo sapien
tgggaaccatgcatcctcatcaggc

SEQ ID NO: 778007 - DNA, 25 bp, Homo sapien
cttgggaaccatgcatcctcatcag

SEQ ID NO: 778008 - DNA, 25 bp, Homo sapien
ctcatgctgaatctgcttccacact

SEQ ID NO: 778009 - DNA, 25 bp, Homo sapien
cctcatgctgaatctgcttccacac

SEQ ID NO: 778010 - DNA, 25 bp, Homo sapien
ccctcatgctgaatctgcttccaca

SEQ ID NO: 778011 - DNA, 25 bp, Homo sapien
caggaaacctgctccggtagtgaga

SEQ ID NO: 778012 - DNA, 25 bp, Homo sapien
gacatcccctaagcaagtcaagagc

SEQ ID NO: 778013 - DNA, 25 bp, Homo sapien
cggaagcgcccagaaggatccaaat

SEQ ID NO: 778014 - DNA, 25 bp, Homo sapien
gatccaaatctcccacgaagacatc

SEQ ID NO: 778015 - DNA, 25 bp, Homo sapien
taatccggaatggaacggtccagtg

SEQ ID NO: 778016 - DNA, 25 bp, Homo sapien
taaccttcaatgagcccaagggatt

SEQ ID NO: 778017 - DNA, 25 bp, Homo sapien
gaattgtagccatacttctcatggg

SEQ ID NO: 778018 - DNA, 25 bp, Homo sapien
tgaaattttttcactgaggtatgaa

SEQ ID NO: 778019 - DNA, 25 bp, Homo sapien
catccaaagcagacattgtcgggat

SEQ ID NO: 778020 - DNA, 25 bp, Homo sapien
agaccacaacatgcctctgttcact

SEQ ID NO: 778021 - DNA, 25 bp, Homo sapien
acagggtcatcatgccagccgcatc

SEQ ID NO: 778022 - DNA, 25 bp, Homo sapien
ctgttcactgggcatgacatgagga

SEQ ID NO: 778023 - DNA, 25 bp, Homo sapien
gcaaataacgttcctcctcggtata

SEQ ID NO: 778024 - DNA, 25 bp, Homo sapien
cccattgctgcgtgaagacctgcgt

SEQ ID NO: 778025 - DNA, 25 bp, Homo sapien
gacctgcgttagcaaataacgttcc

SEQ ID NO: 778026 - DNA, 25 bp, Homo sapien
gcgtgaagacctgcgttagcaaata

SEQ ID NO: 778027 - DNA, 25 bp, Homo sapien
ctccatgaaagacattgaaacttgt

SEQ ID NO: 778028 - DNA, 25 bp, Homo sapien
gaaagacattgaaacttgtccagaa

SEQ ID NO: 778029 - DNA, 25 bp, Homo sapien
ccatgaaagacattgaaacttgtcc

SEQ ID NO: 778030 - DNA, 25 bp, Homo sapien
tgaaagacattgaaacttgtccaga

SEQ ID NO: 778031 - DNA, 25 bp, Homo sapien
gcttgtataaaccagcttgggtttc

SEQ ID NO: 778032 - DNA, 25 bp, Homo sapien
gaacgaatcggagtataatttggca

SEQ ID NO: 778033 - DNA, 25 bp, Homo sapien
tggcaaactgcctaaagtgagcttg

SEQ ID NO: 778034 - DNA, 25 bp, Homo sapien
gtgtgtgtgcccatgtagacgcctg

SEQ ID NO: 778035 - DNA, 25 bp, Homo sapien
gggttgaatatccttgttgaggtca

SEQ ID NO: 778036 - DNA, 25 bp, Homo sapien
tatcgctcatcaccagtaaccactg

SEQ ID NO: 778037 - DNA, 25 bp, Homo sapien
cctggatttctacctgcttcattag

SEQ ID NO: 778038 - DNA, 25 bp, Homo sapien
aaatctgctgaacgattctggcatc

SEQ ID NO: 778039 - DNA, 25 bp, Homo sapien
acatcactgtcagtgtgagtctccc

SEQ ID NO: 778040 - DNA, 25 bp, Homo sapien
gagatgaactcagtctacacaccca

SEQ ID NO: 778041 - DNA, 25 bp, Homo sapien
aagagatgaactcagtctacacacc

SEQ ID NO: 778042 - DNA, 25 bp, Homo sapien
cagagaacatcactgtcagtgtgag

SEQ ID NO: 778043 - DNA, 25 bp, Homo sapien
ggctcctgtgcaacctattttgctg

SEQ ID NO: 778044 - DNA, 25 bp, Homo sapien
acctcaccatcgctgatgatccttt

SEQ ID NO: 778045 - DNA, 25 bp, Homo sapien
tctactctacgtggccagaatggag

SEQ ID NO: 778046 - DNA, 25 bp, Homo sapien
tttctgcagtatgcaacaccgccat

SEQ ID NO: 778047 - DNA, 25 bp, Homo sapien
gcaggtccttggagtacttgagctc

SEQ ID NO: 778048 - DNA, 25 bp, Homo sapien
tggggcaggtccttggagtacttga

SEQ ID NO: 778049 - DNA, 25 bp, Homo sapien
ctggggcaggtccttggagtacttg

SEQ ID NO: 778050 - DNA, 25 bp, Homo sapien
gggcaggtccttggagtacttgagc

SEQ ID NO: 778051 - DNA, 25 bp, Homo sapien
tgattgacggcactgtgcacggacc

SEQ ID NO: 778052 - DNA, 25 bp, Homo sapien
tgtgtgggcgtgtgattgacggcac

SEQ ID NO: 778053 - DNA, 25 bp, Homo sapien
tcgttcacgaagatgaatatgatgg

SEQ ID NO: 778054 - DNA, 25 bp, Homo sapien
tgcacggaccgcaggatcaccgaca

SEQ ID NO: 778055 - DNA, 25 bp, Homo sapien
ttccggacgacggagcagcttgcag

SEQ ID NO: 778056 - DNA, 25 bp, Homo sapien
catcttccggacgacggagcagctt

SEQ ID NO: 778057 - DNA, 25 bp, Homo sapien
tcttccggacgacggagcagcttgc

SEQ ID NO: 778058 - DNA, 25 bp, Homo sapien
cggacgacggagcagcttgcagggt

SEQ ID NO: 778059 - DNA, 25 bp, Homo sapien
aacaggacccgtggcattgcctcct

SEQ ID NO: 778060 - DNA, 25 bp, Homo sapien
tttaaacaggacccgtggcattgcc

SEQ ID NO: 778061 - DNA, 25 bp, Homo sapien
taaacaggacccgtggcattgcctc

SEQ ID NO: 778062 - DNA, 25 bp, Homo sapien
ttttaaacaggacccgtggcattgc

SEQ ID NO: 778063 - DNA, 25 bp, Homo sapien
tttgccttaagtccagtacctggtc

SEQ ID NO: 778064 - DNA, 25 bp, Homo sapien
taaatacagagaagcccattgcatt

SEQ ID NO: 778065 - DNA, 25 bp, Homo sapien
tggtccacacaatagcccactatgg

SEQ ID NO: 778066 - DNA, 25 bp, Homo sapien
cctgaggataggcagtaggtcttga

SEQ ID NO: 778067 - DNA, 25 bp, Homo sapien
gaataactgaggtgaggcatccggc

SEQ ID NO: 778068 - DNA, 25 bp, Homo sapien
gcagtgtgaatcctatgcgcaaacg

SEQ ID NO: 778069 - DNA, 25 bp, Homo sapien
ggtgctccgtattcaggaccctgaa

SEQ ID NO: 778070 - DNA, 25 bp, Homo sapien
aaacgcgtttggcagccgggagtgg

SEQ ID NO: 778071 - DNA, 25 bp, Homo sapien
tagaaaataaatacgagtagcccaa

SEQ ID NO: 778072 - DNA, 25 bp, Homo sapien
ttagaaaataaatacgagtagccca

SEQ ID NO: 778073 - DNA, 25 bp, Homo sapien
aaaaatgcaagaaggtctataaaca

SEQ ID NO: 778074 - DNA, 25 bp, Homo sapien
aaaatgcaagaaggtctataaacat

SEQ ID NO: 778075 - DNA, 25 bp, Homo sapien
gcggatcaggccttccctcttctga

SEQ ID NO: 778076 - DNA, 25 bp, Homo sapien
ttccagccctcaatgcgagcgcgga

SEQ ID NO: 778077 - DNA, 25 bp, Homo sapien
catactcctctagggggaccttcag

SEQ ID NO: 778078 - DNA, 25 bp, Homo sapien
gggtagcgtttgtggacatactcct

SEQ ID NO: 778079 - DNA, 25 bp, Homo sapien
cgtgggcatcaaagaagccagtgac

SEQ ID NO: 778080 - DNA, 25 bp, Homo sapien
cacgtgggcatcaaagaagccagtg

SEQ ID NO: 778081 - DNA, 25 bp, Homo sapien
gccagcggtgaattccacgtgggca

SEQ ID NO: 778082 - DNA, 25 bp, Homo sapien
agcggtgaattccacgtgggcatca

SEQ ID NO: 778083 - DNA, 25 bp, Homo sapien
ctctcttctctcccgtgaggcacac

SEQ ID NO: 778084 - DNA, 25 bp, Homo sapien
acctctcttctctcccgtgaggcac

SEQ ID NO: 778085 - DNA, 25 bp, Homo sapien
ctgaaacatagagaaatagacatga

SEQ ID NO: 778086 - DNA, 25 bp, Homo sapien
aaatagacatgaaacctctcttctc

SEQ ID NO: 778087 - DNA, 25 bp, Homo sapien
cagctgtacccgtgggccgagttct

SEQ ID NO: 778088 - DNA, 25 bp, Homo sapien
tcctggatgcgggatagaaccggct

SEQ ID NO: 778089 - DNA, 25 bp, Homo sapien
taccgctgcacctcaaagttgtcct

SEQ ID NO: 778090 - DNA, 25 bp, Homo sapien
gagagaagggtctccggcgtcccac

SEQ ID NO: 778091 - DNA, 25 bp, Homo sapien
gaatttgggggctcgttggccgcca

SEQ ID NO: 778092 - DNA, 25 bp, Homo sapien
tgaatttgggggctcgttggccgcc

SEQ ID NO: 778093 - DNA, 25 bp, Homo sapien
ttgaatttgggggctcgttggccgc

SEQ ID NO: 778094 - DNA, 25 bp, Homo sapien
caaggacatggatctcccaagagcc

SEQ ID NO: 778095 - DNA, 25 bp, Homo sapien
gagatgcgacatagccatgagccaa

SEQ ID NO: 778096 - DNA, 25 bp, Homo sapien
gcaaatttccgacctcaagaactgt

SEQ ID NO: 778097 - DNA, 25 bp, Homo sapien
aaaggtcacgtgatgaagggtgcca

SEQ ID NO: 778098 - DNA, 25 bp, Homo sapien
ggctagcaacaacagaatgacgtgg

SEQ ID NO: 778099 - DNA, 25 bp, Homo sapien
caaagtccttttgatatgcaacagg

SEQ ID NO: 778100 - DNA, 25 bp, Homo sapien
gagctgtaaacactcaatcctggag

SEQ ID NO: 778101 - DNA, 25 bp, Homo sapien
ggatcagagggttttcaaccaagcc

SEQ ID NO: 778102 - DNA, 25 bp, Homo sapien
cgggaagtctcagtatctaaagact

SEQ ID NO: 778103 - DNA, 25 bp, Homo sapien
gaagtctcagtatctaaagactcat

SEQ ID NO: 778104 - DNA, 25 bp, Homo sapien
gtctcagtatctaaagactcatcta

SEQ ID NO: 778105 - DNA, 25 bp, Homo sapien
taaagactcatctaatctaacacca

SEQ ID NO: 778106 - DNA, 25 bp, Homo sapien
ccaaggagttgagtgtaaaggcaag

SEQ ID NO: 778107 - DNA, 25 bp, Homo sapien
gaaagctatcctgggaacaacacag

SEQ ID NO: 778108 - DNA, 25 bp, Homo sapien
tgcccactgccggtgtaagttgcat

SEQ ID NO: 778109 - DNA, 25 bp, Homo sapien
gcataaatgaaagctatcctgggaa

SEQ ID NO: 778110 - DNA, 25 bp, Homo sapien
gggtcagtgctgcacaaagtcttac

SEQ ID NO: 778111 - DNA, 25 bp, Homo sapien
tgggtcagtgctgcacaaagtctta

SEQ ID NO: 778112 - DNA, 25 bp, Homo sapien
gaaaccagatatggaacctgcagaa

SEQ ID NO: 778113 - DNA, 25 bp, Homo sapien
gacaaaggtgtgcaaatcccagaaa

SEQ ID NO: 778114 - DNA, 25 bp, Homo sapien
ggaatgtggacttggaaccacttta

SEQ ID NO: 778115 - DNA, 25 bp, Homo sapien
tggaaccactttaaaaacgatgtca

SEQ ID NO: 778116 - DNA, 25 bp, Homo sapien
gcctcttctagtgtgatgtgaattc

SEQ ID NO: 778117 - DNA, 25 bp, Homo sapien
ataatgcctcttctagtgtgatgtg

SEQ ID NO: 778118 - DNA, 25 bp, Homo sapien
cctcaatggaagcaacaccctctgt

SEQ ID NO: 778119 - DNA, 25 bp, Homo sapien
aatggaagcaacaccctctgtcaac

SEQ ID NO: 778120 - DNA, 25 bp, Homo sapien
gtcactgaagaatcacttgtcctca

SEQ ID NO: 778121 - DNA, 25 bp, Homo sapien
ctcatctgtgaagttacatattcgt

SEQ ID NO: 778122 - DNA, 25 bp, Homo sapien
tgtgaagttacatattcgttgagcc

SEQ ID NO: 778123 - DNA, 25 bp, Homo sapien
tgaagtcactgaagaatcacttgtc

SEQ ID NO: 778124 - DNA, 25 bp, Homo sapien
gcttggttctcataggaaggaaagg

SEQ ID NO: 778125 - DNA, 25 bp, Homo sapien
cctgggcaggaatgaagcctgcagc

SEQ ID NO: 778126 - DNA, 25 bp, Homo sapien
tgggcaggaatgaagcctgcagctg

SEQ ID NO: 778127 - DNA, 25 bp, Homo sapien
cttggttctcataggaaggaaaggg

SEQ ID NO: 778128 - DNA, 25 bp, Homo sapien
agagccttgtagaatatatatttga

SEQ ID NO: 778129 - DNA, 25 bp, Homo sapien
gagccttgtagaatatatatttgac

SEQ ID NO: 778130 - DNA, 25 bp, Homo sapien
ctaaagtgggagcagtctttgggac

SEQ ID NO: 778131 - DNA, 25 bp, Homo sapien
gcctggagacctgatatttatgact

SEQ ID NO: 778132 - DNA, 25 bp, Homo sapien
tggattcgaatgcttactctgggta

SEQ ID NO: 778133 - DNA, 25 bp, Homo sapien
gacaaaaatatggatagcctggaga

SEQ ID NO: 778134 - DNA, 25 bp, Homo sapien
tgtgcagagaaggagagaaggtggt

SEQ ID NO: 778135 - DNA, 25 bp, Homo sapien
tgaggatttgtgcagagaaggagag

SEQ ID NO: 778136 - DNA, 25 bp, Homo sapien
gaggatttgtgcagagaaggagaga

SEQ ID NO: 778137 - DNA, 25 bp, Homo sapien
atttgtgcagagaaggagagaaggt

SEQ ID NO: 778138 - DNA, 25 bp, Homo sapien
gacgaacagaagacccgctgaacag

SEQ ID NO: 778139 - DNA, 25 bp, Homo sapien
aagaaggagcgtctgaacatggaga

SEQ ID NO: 778140 - DNA, 25 bp, Homo sapien
aaaagaaggagcgtctgaacatgga

SEQ ID NO: 778141 - DNA, 25 bp, Homo sapien
ctcccggagcagacgaacagaagac

SEQ ID NO: 778142 - DNA, 25 bp, Homo sapien
tttttccgtgaccagtcctaggcca

SEQ ID NO: 778143 - DNA, 25 bp, Homo sapien
aacttgcacacggtgacacagcaga

SEQ ID NO: 778144 - DNA, 25 bp, Homo sapien
aactcagatctttgggactccagaa

SEQ ID NO: 778145 - DNA, 25 bp, Homo sapien
ggtttgtaaatcgttctttgctcag

SEQ ID NO: 778146 - DNA, 25 bp, Homo sapien
gctgcggtaaagaagccttgcccaa

SEQ ID NO: 778147 - DNA, 25 bp, Homo sapien
tactccttggacttgcaccgaattc

SEQ ID NO: 778148 - DNA, 25 bp, Homo sapien
ccaaactgctactctgcctatggag

SEQ ID NO: 778149 - DNA, 25 bp, Homo sapien
atatggctaaagagaggagaaaccc

SEQ ID NO: 778150 - DNA, 25 bp, Homo sapien
gatacctgtttctatagagtatgca

SEQ ID NO: 778151 - DNA, 25 bp, Homo sapien
tgtttctatagagtatgcatctttg

SEQ ID NO: 778152 - DNA, 25 bp, Homo sapien
gggatacctgtttctatagagtatg

SEQ ID NO: 778153 - DNA, 25 bp, Homo sapien
tacctgtttctatagagtatgcatc

SEQ ID NO: 778154 - DNA, 25 bp, Homo sapien
tagggtaacctcgaaacgatcagtg

SEQ ID NO: 778155 - DNA, 25 bp, Homo sapien
gcctttgcactctcacagctaacgg

SEQ ID NO: 778156 - DNA, 25 bp, Homo sapien
tcctcaactgctgaagacagccagc

SEQ ID NO: 778157 - DNA, 25 bp, Homo sapien
ggtgaaaacaccaacctccgtggca

SEQ ID NO: 778158 - DNA, 25 bp, Homo sapien
ctcggggagctctgacgcacagctg

SEQ ID NO: 778159 - DNA, 25 bp, Homo sapien
aatcaggcagggttgctgaagcttc

SEQ ID NO: 778160 - DNA, 25 bp, Homo sapien
agggttgctgaagcttcgtgtccca

SEQ ID NO: 778161 - DNA, 25 bp, Homo sapien
gggagctctgacgcacagctgccct

SEQ ID NO: 778162 - DNA, 25 bp, Homo sapien
gtctgccaccaaaagcatcaggaag

SEQ ID NO: 778163 - DNA, 25 bp, Homo sapien
cagaactgcgttcagtcacggtgat

SEQ ID NO: 778164 - DNA, 25 bp, Homo sapien
cactgcagtccttacccacaggagg

SEQ ID NO: 778165 - DNA, 25 bp, Homo sapien
gaactgagcagtgtaagtcgacagc

SEQ ID NO: 778166 - DNA, 25 bp, Homo sapien
tggacggctacgtgggtcgtttcca

SEQ ID NO: 778167 - DNA, 25 bp, Homo sapien
caatcagtaggttggttaatgcaaa

SEQ ID NO: 778168 - DNA, 25 bp, Homo sapien
tgtctgcaaatccaaccctcaaggt

SEQ ID NO: 778169 - DNA, 25 bp, Homo sapien
cgccaacttctttggcaatcagtag

SEQ ID NO: 778170 - DNA, 25 bp, Homo sapien
tactgagtgttttcgtagtaccgcc

SEQ ID NO: 778171 - DNA, 25 bp, Homo sapien
ttgacattctcttagaccccagcca

SEQ ID NO: 778172 - DNA, 25 bp, Homo sapien
tagaccccagccacccgttggtctc

SEQ ID NO: 778173 - DNA, 25 bp, Homo sapien
ccagccacccgttggtctctgttct

SEQ ID NO: 778174 - DNA, 25 bp, Homo sapien
tcttgacattctcttagaccccagc

SEQ ID NO: 778175 - DNA, 25 bp, Homo sapien
tgggcacaagtcctggtggtgtcat

SEQ ID NO: 778176 - DNA, 25 bp, Homo sapien
tgttgggcacaagtcctggtggtgt

SEQ ID NO: 778177 - DNA, 25 bp, Homo sapien
ctgttgggcacaagtcctggtggtg

SEQ ID NO: 778178 - DNA, 25 bp, Homo sapien
ttgggcacaagtcctggtggtgtca

SEQ ID NO: 778179 - DNA, 25 bp, Homo sapien
agctgcagttgataccacttgcggg

SEQ ID NO: 778180 - DNA, 25 bp, Homo sapien
tctggcacctgcctcgtgagtggca

SEQ ID NO: 778181 - DNA, 25 bp, Homo sapien
ctgacaatcaggagcaaagcacggc

SEQ ID NO: 778182 - DNA, 25 bp, Homo sapien
gactgataaacgaggagctgtcctt

SEQ ID NO: 778183 - DNA, 25 bp, Homo sapien
cacctgctttgtattctggagctac

SEQ ID NO: 778184 - DNA, 25 bp, Homo sapien
gtgggcacctgctttgtattctgga

SEQ ID NO: 778185 - DNA, 25 bp, Homo sapien
ggcacctgctttgtattctggagct

SEQ ID NO: 778186 - DNA, 25 bp, Homo sapien
tcagtgggcacctgctttgtattct

SEQ ID NO: 778187 - DNA, 25 bp, Homo sapien
tgaatgtgtgacgatggtcgctgtt

SEQ ID NO: 778188 - DNA, 25 bp, Homo sapien
gtgtcccaggcgggcctcatcagaa

SEQ ID NO: 778189 - DNA, 25 bp, Homo sapien
gaatgaatgtgtgacgatggtcgct

SEQ ID NO: 778190 - DNA, 25 bp, Homo sapien
ctgtgtcccaggcgggcctcatcag

SEQ ID NO: 778191 - DNA, 25 bp, Homo sapien
ttaaaatcacagaaagcgcccaggc

SEQ ID NO: 778192 - DNA, 25 bp, Homo sapien
cagaggcaaacagggtagttaaaat

SEQ ID NO: 778193 - DNA, 25 bp, Homo sapien
gaggcaaacagggtagttaaaatca

SEQ ID NO: 778194 - DNA, 25 bp, Homo sapien
agaaagcgcccaggccacaaactct

SEQ ID NO: 778195 - DNA, 25 bp, Homo sapien
tgtgtgtttacagaaatcgcatgcc

SEQ ID NO: 778196 - DNA, 25 bp, Homo sapien
cagaaatcgcatgccaatcacactt

SEQ ID NO: 778197 - DNA, 25 bp, Homo sapien
tcacacttatgcaaacgggaccttg

SEQ ID NO: 778198 - DNA, 25 bp, Homo sapien
caaacgggaccttgctcctgctggt

SEQ ID NO: 778199 - DNA, 25 bp, Homo sapien
gcaggaggtccattgaaactccact

SEQ ID NO: 778200 - DNA, 25 bp, Homo sapien
tcggaccctcatcggctggttatga

SEQ ID NO: 778201 - DNA, 25 bp, Homo sapien
ctttggagccaaagggtggactgta

SEQ ID NO: 778202 - DNA, 25 bp, Homo sapien
ctattaggtggaattctttggagcc

SEQ ID NO: 778203 - DNA, 25 bp, Homo sapien
caagcaagggctccaatttccacgt

SEQ ID NO: 778204 - DNA, 25 bp, Homo sapien
ctggagagaggaagattgcaagcaa

SEQ ID NO: 778205 - DNA, 25 bp, Homo sapien
tgtgcagtctcaaagaagcttggag

SEQ ID NO: 778206 - DNA, 25 bp, Homo sapien
ggaaacacatcctagtgcctaaagg

SEQ ID NO: 778207 - DNA, 25 bp, Homo sapien
acttcctgttgaccacgaacgagca

SEQ ID NO: 778208 - DNA, 25 bp, Homo sapien
cgaacgagcagcctatcatggctgg

SEQ ID NO: 778209 - DNA, 25 bp, Homo sapien
cgtatacatccatgccaggatccag

SEQ ID NO: 778210 - DNA, 25 bp, Homo sapien
cagaagaccaatttcaccgaagaac

SEQ ID NO: 778211 - DNA, 25 bp, Homo sapien
gaggaagggacaccatgtcacaaac

SEQ ID NO: 778212 - DNA, 25 bp, Homo sapien
caagaggaagggacaccatgtcaca

SEQ ID NO: 778213 - DNA, 25 bp, Homo sapien
aagaggaagggacaccatgtcacaa

SEQ ID NO: 778214 - DNA, 25 bp, Homo sapien
agaggaagggacaccatgtcacaaa

SEQ ID NO: 778215 - DNA, 25 bp, Homo sapien
taaaaataaatctgcggatgtaaaa

SEQ ID NO: 778216 - DNA, 25 bp, Homo sapien
tctgtatatgtcaataacatctcaa

SEQ ID NO: 778217 - DNA, 25 bp, Homo sapien
tgtgagccaccaaaatctgtatatg

SEQ ID NO: 778218 - DNA, 25 bp, Homo sapien
ataaatctgcggatgtaaaaactaa

SEQ ID NO: 778219 - DNA, 25 bp, Homo sapien
ggactagaaagaggtggattctcac

SEQ ID NO: 778220 - DNA, 25 bp, Homo sapien
tcctttctgctaaaggacatgcatt

SEQ ID NO: 778221 - DNA, 25 bp, Homo sapien
gcatttgccaggaagtcggctaaac

SEQ ID NO: 778222 - DNA, 25 bp, Homo sapien
tagaaagaggtggattctcacctgg

SEQ ID NO: 778223 - DNA, 25 bp, Homo sapien
ttgggccagtgtggccatggaaggg

SEQ ID NO: 778224 - DNA, 25 bp, Homo sapien
gggccagtgtggccatggaagggca

SEQ ID NO: 778225 - DNA, 25 bp, Homo sapien
ggccagtgtggccatggaagggcac

SEQ ID NO: 778226 - DNA, 25 bp, Homo sapien
tttgggccagtgtggccatggaagg

SEQ ID NO: 778227 - DNA, 25 bp, Homo sapien
gaatcggcaagaaggttatctcact

SEQ ID NO: 778228 - DNA, 25 bp, Homo sapien
tgagctttggaggaacaaccgatgc

SEQ ID NO: 778229 - DNA, 25 bp, Homo sapien
taagccaacacggactcagagtctg

SEQ ID NO: 778230 - DNA, 25 bp, Homo sapien
tcctggtgactgttatggagcaaca

SEQ ID NO: 778231 - DNA, 25 bp, Homo sapien
tccagatggctcataatttctatat

SEQ ID NO: 778232 - DNA, 25 bp, Homo sapien
tctctcttggttaacatggatggat

SEQ ID NO: 778233 - DNA, 25 bp, Homo sapien
gaaggccttgcaagagctagctgta

SEQ ID NO: 778234 - DNA, 25 bp, Homo sapien
tggatgggtccctaaaaccatagag

SEQ ID NO: 778235 - DNA, 25 bp, Homo sapien
gagaactgctactcctcaaactcag

SEQ ID NO: 778236 - DNA, 25 bp, Homo sapien
tgatgctttaaacgtggccgggcgc

SEQ ID NO: 778237 - DNA, 25 bp, Homo sapien
gattgcagtcagttgctgggaagcc

SEQ ID NO: 778238 - DNA, 25 bp, Homo sapien
tatggccactacctgctgtaactca

SEQ ID NO: 778239 - DNA, 25 bp, Homo sapien
cattggttgtacatctataatggaa

SEQ ID NO: 778240 - DNA, 25 bp, Homo sapien
tttaaagacattggttgtacatcta

SEQ ID NO: 778241 - DNA, 25 bp, Homo sapien
gacattggttgtacatctataatgg

SEQ ID NO: 778242 - DNA, 25 bp, Homo sapien
aaagacattggttgtacatctataa

SEQ ID NO: 778243 - DNA, 25 bp, Homo sapien
tgccttagtaagctaagtactctga

SEQ ID NO: 778244 - DNA, 25 bp, Homo sapien
caaagaagaccagtctatggtttcc

SEQ ID NO: 778245 - DNA, 25 bp, Homo sapien
gactaactgtggtgcaaaaagtgct

SEQ ID NO: 778246 - DNA, 25 bp, Homo sapien
tccttctccgagcagtccattctgt

SEQ ID NO: 778247 - DNA, 25 bp, Homo sapien
acaggcaactgacagacggacagct

SEQ ID NO: 778248 - DNA, 25 bp, Homo sapien
tcctccttcaagtgataattcagac

SEQ ID NO: 778249 - DNA, 25 bp, Homo sapien
gcacaaaaagcattggtcccacagc

SEQ ID NO: 778250 - DNA, 25 bp, Homo sapien
ggcaactgacagacggacagctcca

SEQ ID NO: 778251 - DNA, 25 bp, Homo sapien
ccttggcttggagctacatcatcct

SEQ ID NO: 778252 - DNA, 25 bp, Homo sapien
ggtcttgatttcctaacctctagcg

SEQ ID NO: 778253 - DNA, 25 bp, Homo sapien
cgattctcaggtcccggcttcctaa

SEQ ID NO: 778254 - DNA, 25 bp, Homo sapien
cctttctagcttttggtggtggcca

SEQ ID NO: 778255 - DNA, 25 bp, Homo sapien
cctgccacatggctacaggccctgt

SEQ ID NO: 778256 - DNA, 25 bp, Homo sapien
tgccacatggctacaggccctgtgt

SEQ ID NO: 778257 - DNA, 25 bp, Homo sapien
ctcccctgccacatggctacaggcc

SEQ ID NO: 778258 - DNA, 25 bp, Homo sapien
cacatggctacaggccctgtgtatc

SEQ ID NO: 778259 - DNA, 25 bp, Homo sapien
tctgagttgtcattctgaccacggt

SEQ ID NO: 778260 - DNA, 25 bp, Homo sapien
gacactcagagataatggccgctgc

SEQ ID NO: 778261 - DNA, 25 bp, Homo sapien
cctctgggtagtggcaaatacagga

SEQ ID NO: 778262 - DNA, 25 bp, Homo sapien
gaccccaaccgtaagcacagagtgg

SEQ ID NO: 778263 - DNA, 25 bp, Homo sapien
tgcagaagacctatgacaacccatg

SEQ ID NO: 778264 - DNA, 25 bp, Homo sapien
tccagtgtgggtaacctagcatagc

SEQ ID NO: 778265 - DNA, 25 bp, Homo sapien
gagaccacgttgcactcagcagtga

SEQ ID NO: 778266 - DNA, 25 bp, Homo sapien
tctgcagaagcaccggtttgggaaa

SEQ ID NO: 778267 - DNA, 25 bp, Homo sapien
tgccaattacgccttggatttgcca

SEQ ID NO: 778268 - DNA, 25 bp, Homo sapien
ctgcaaatgccaattacgccttgga

SEQ ID NO: 778269 - DNA, 25 bp, Homo sapien
tgcaaatgccaattacgccttggat

SEQ ID NO: 778270 - DNA, 25 bp, Homo sapien
aattacgccttggatttgccagcag

SEQ ID NO: 778271 - DNA, 25 bp, Homo sapien
tccccactgcctcttcccaagtcca

SEQ ID NO: 778272 - DNA, 25 bp, Homo sapien
ctgtccccactgcctcttcccaagt

SEQ ID NO: 778273 - DNA, 25 bp, Homo sapien
tgtccccactgcctcttcccaagtc

SEQ ID NO: 778274 - DNA, 25 bp, Homo sapien
ccactgcctcttcccaagtccacca

SEQ ID NO: 778275 - DNA, 25 bp, Homo sapien
agccctcctcgtgcaatcgctcagt

SEQ ID NO: 778276 - DNA, 25 bp, Homo sapien
ttcccgggccgttcacaattattca

SEQ ID NO: 778277 - DNA, 25 bp, Homo sapien
ctcctcgtgcaatcgctcagtgtca

SEQ ID NO: 778278 - DNA, 25 bp, Homo sapien
gtgcaatcgctcagtgtcagaacct

SEQ ID NO: 778279 - DNA, 25 bp, Homo sapien
cctgtattttcttgccacccctggg

SEQ ID NO: 778280 - DNA, 25 bp, Homo sapien
gactgtcccaaaacatgcgatgtgc

SEQ ID NO: 778281 - DNA, 25 bp, Homo sapien
tgtgactgtcccaaaacatgcgatg

SEQ ID NO: 778282 - DNA, 25 bp, Homo sapien
cttgccacccctgggttttatgagg

SEQ ID NO: 778283 - DNA, 25 bp, Homo sapien
tagttctgaatagcgttgatcttga

SEQ ID NO: 778284 - DNA, 25 bp, Homo sapien
gaatagcgttgatcttgaaacctta

SEQ ID NO: 778285 - DNA, 25 bp, Homo sapien
gcgttgatcttgaaaccttaaagaa

SEQ ID NO: 778286 - DNA, 25 bp, Homo sapien
gttttgatagttctgaatagcgttg

SEQ ID NO: 778287 - DNA, 25 bp, Homo sapien
aggctctcaggcctccaacttgtct

SEQ ID NO: 778288 - DNA, 25 bp, Homo sapien
tcaggcctccaacttgtctccccat

SEQ ID NO: 778289 - DNA, 25 bp, Homo sapien
gaggaactgggcaggctctcaggcc

SEQ ID NO: 778290 - DNA, 25 bp, Homo sapien
cagttcctgtaggagcaggaggaac

SEQ ID NO: 778291 - DNA, 25 bp, Homo sapien
cagtgccagtagttagggtcactgg

SEQ ID NO: 778292 - DNA, 25 bp, Homo sapien
tgcctgctcagtgccagtagttagg

SEQ ID NO: 778293 - DNA, 25 bp, Homo sapien
cagaagcaatggtagaggtaagagg

SEQ ID NO: 778294 - DNA, 25 bp, Homo sapien
gcagaaaacagagccatgggcttcc

SEQ ID NO: 778295 - DNA, 25 bp, Homo sapien
gcctaagtggctggaagcagagcaa

SEQ ID NO: 778296 - DNA, 25 bp, Homo sapien
ccctgttgcacagcccgcaatgggt

SEQ ID NO: 778297 - DNA, 25 bp, Homo sapien
tcttgttgtctcactagacggcccc

SEQ ID NO: 778298 - DNA, 25 bp, Homo sapien
aatgtgtatgattactgggcactgc

SEQ ID NO: 778299 - DNA, 25 bp, Homo sapien
tggtgcacaaacatgagatctgggc

SEQ ID NO: 778300 - DNA, 25 bp, Homo sapien
gatctggtgcacaaacatgagatct

SEQ ID NO: 778301 - DNA, 25 bp, Homo sapien
gagcttgagaagcaccttgcagcaa

SEQ ID NO: 778302 - DNA, 25 bp, Homo sapien
acagagctctcaactgtcggcagag

SEQ ID NO: 778303 - DNA, 25 bp, Homo sapien
agagcattcctcttggtgtagaagc

SEQ ID NO: 778304 - DNA, 25 bp, Homo sapien
gagacttgtaatcgtccatccagac

SEQ ID NO: 778305 - DNA, 25 bp, Homo sapien
tggcttcttcttccgctcaatgtgg

SEQ ID NO: 778306 - DNA, 25 bp, Homo sapien
caggttccacgctatgtacacatga

SEQ ID NO: 778307 - DNA, 25 bp, Homo sapien
ggctctttgcgaagttcattacatg

SEQ ID NO: 778308 - DNA, 25 bp, Homo sapien
ttgttggctctttgcgaagttcatt

SEQ ID NO: 778309 - DNA, 25 bp, Homo sapien
tctttgcgaagttcattacatgcag

SEQ ID NO: 778310 - DNA, 25 bp, Homo sapien
ttgcgaagttcattacatgcagaag

SEQ ID NO: 778311 - DNA, 25 bp, Homo sapien
aatgctcttctttcggagacatcac

SEQ ID NO: 778312 - DNA, 25 bp, Homo sapien
catttctgggtaaacatggtccagg

SEQ ID NO: 778313 - DNA, 25 bp, Homo sapien
gacatcaccgatgtcaattcccgga

SEQ ID NO: 778314 - DNA, 25 bp, Homo sapien
tggtccaggtaccactggaaattct

SEQ ID NO: 778315 - DNA, 25 bp, Homo sapien
ggtccaagcagacgtcttttgcctt

SEQ ID NO: 778316 - DNA, 25 bp, Homo sapien
ctggtccaagcagacgtcttttgcc

SEQ ID NO: 778317 - DNA, 25 bp, Homo sapien
aagcagacgtcttttgccttgttgt

SEQ ID NO: 778318 - DNA, 25 bp, Homo sapien
tccaagcagacgtcttttgccttgt

SEQ ID NO: 778319 - DNA, 25 bp, Homo sapien
gccatggcacggatacaatattgct

SEQ ID NO: 778320 - DNA, 25 bp, Homo sapien
atacaatattgctgtgtggttctcc

SEQ ID NO: 778321 - DNA, 25 bp, Homo sapien
ccccagccatggcacggatacaata

SEQ ID NO: 778322 - DNA, 25 bp, Homo sapien
cacggatacaatattgctgtgtggt

SEQ ID NO: 778323 - DNA, 25 bp, Homo sapien
gaaaagttctgaccatgttgtcctg

SEQ ID NO: 778324 - DNA, 25 bp, Homo sapien
ggctatagaggaataaaggctccag

SEQ ID NO: 778325 - DNA, 25 bp, Homo sapien
tgctggtctatcaggttcccactgg

SEQ ID NO: 778326 - DNA, 25 bp, Homo sapien
aggtaaggaaggtcaagttcacagc

SEQ ID NO: 778327 - DNA, 25 bp, Homo sapien
gcgttctctaattcaggacacgtgg

SEQ ID NO: 778328 - DNA, 25 bp, Homo sapien
ggagagccacaccaagcgttctcta

SEQ ID NO: 778329 - DNA, 25 bp, Homo sapien
tccttgcacagaaggagtgggtttg

SEQ ID NO: 778330 - DNA, 25 bp, Homo sapien
cagttgggtgacaggactccttgca

SEQ ID NO: 778331 - DNA, 25 bp, Homo sapien
cagatgcagagccatcgggggcgtt

SEQ ID NO: 778332 - DNA, 25 bp, Homo sapien
ggcgttcagggctgagaaagatgcc

SEQ ID NO: 778333 - DNA, 25 bp, Homo sapien
tggggtcagcactacccctagcccc

SEQ ID NO: 778334 - DNA, 25 bp, Homo sapien
tctggagcggtgtagcaagaagggc

SEQ ID NO: 778335 - DNA, 25 bp, Homo sapien
tgggctgcgggtcagctgtagggac

SEQ ID NO: 778336 - DNA, 25 bp, Homo sapien
ccctgggctgcgggtcagctgtagg

SEQ ID NO: 778337 - DNA, 25 bp, Homo sapien
caaaccctgggctgcgggtcagctg

SEQ ID NO: 778338 - DNA, 25 bp, Homo sapien
aaaccctgggctgcgggtcagctgt

SEQ ID NO: 778339 - DNA, 25 bp, Homo sapien
gctggcattgccctatctgaatctc

SEQ ID NO: 778340 - DNA, 25 bp, Homo sapien
gaccaaatgatatgggacattcgtt

SEQ ID NO: 778341 - DNA, 25 bp, Homo sapien
gaacaccgaaggactcaaggatatg

SEQ ID NO: 778342 - DNA, 25 bp, Homo sapien
gatgcagatcagagtacccaagacc

SEQ ID NO: 778343 - DNA, 25 bp, Homo sapien
ttatttcctgaaatgtgcctcgtga

SEQ ID NO: 778344 - DNA, 25 bp, Homo sapien
gcttctgccaactgtgtgattattt

SEQ ID NO: 778345 - DNA, 25 bp, Homo sapien
aatgtgcctcgtgattccagcctct

SEQ ID NO: 778346 - DNA, 25 bp, Homo sapien
ttcctgaaatgtgcctcgtgattcc

SEQ ID NO: 778347 - DNA, 25 bp, Homo sapien
tcctagcaccggaggatctccatac

SEQ ID NO: 778348 - DNA, 25 bp, Homo sapien
ccttgatcctagcaccggaggatct

SEQ ID NO: 778349 - DNA, 25 bp, Homo sapien
tccatactctgtcccttttgggcca

SEQ ID NO: 778350 - DNA, 25 bp, Homo sapien
gcaccggaggatctccatactctgt

SEQ ID NO: 778351 - DNA, 25 bp, Homo sapien
gggccatttcttgcagaccctgtta

SEQ ID NO: 778352 - DNA, 25 bp, Homo sapien
aagagtgcccgtcgaaatctccagg

SEQ ID NO: 778353 - DNA, 25 bp, Homo sapien
tagtcacacctcgtccatggtatgg

SEQ ID NO: 778354 - DNA, 25 bp, Homo sapien
tcattacagccagtagctgtttcaa

SEQ ID NO: 778355 - DNA, 25 bp, Homo sapien
aagtttgcttcttatcaaatgggag

SEQ ID NO: 778356 - DNA, 25 bp, Homo sapien
aaaggctgcgttgcctgagctccga

SEQ ID NO: 778357 - DNA, 25 bp, Homo sapien
tgggagaggcatattcccagaacct

SEQ ID NO: 778358 - DNA, 25 bp, Homo sapien
tgagctccgacacttacatgatagc

SEQ ID NO: 778359 - DNA, 25 bp, Homo sapien
ggctggtctccttgaacaagggaca

SEQ ID NO: 778360 - DNA, 25 bp, Homo sapien
tggcagataagattctctgcatggg

SEQ ID NO: 778361 - DNA, 25 bp, Homo sapien
gcccaggaatgaaataagtagctct

SEQ ID NO: 778362 - DNA, 25 bp, Homo sapien
aaaggtactcagaagctcttggctc

SEQ ID NO: 778363 - DNA, 25 bp, Homo sapien
ctgagcagcagaagagccccctccc

SEQ ID NO: 778364 - DNA, 25 bp, Homo sapien
agattgccaggagaaccccacctcc

SEQ ID NO: 778365 - DNA, 25 bp, Homo sapien
tgccaggagaaccccacctcctcca

SEQ ID NO: 778366 - DNA, 25 bp, Homo sapien
attgccaggagaaccccacctcctc

SEQ ID NO: 778367 - DNA, 25 bp, Homo sapien
gctgggtgctggccgctttcttttg

SEQ ID NO: 778368 - DNA, 25 bp, Homo sapien
ggctgggtgctggccgctttctttt

SEQ ID NO: 778369 - DNA, 25 bp, Homo sapien
ttgtccaccaggcagcgggtgtcag

SEQ ID NO: 778370 - DNA, 25 bp, Homo sapien
agcgcttgtacaggctgctcttgac

SEQ ID NO: 778371 - DNA, 25 bp, Homo sapien
aagccttccttggtgtagcgggcaa

SEQ ID NO: 778372 - DNA, 25 bp, Homo sapien
ggcagccgactcttggagttgtcca

SEQ ID NO: 778373 - DNA, 25 bp, Homo sapien
tccaggcagcgtcccgtgcccttgt

SEQ ID NO: 778374 - DNA, 25 bp, Homo sapien
tcgatgccagccaggccccggttct

SEQ ID NO: 778375 - DNA, 25 bp, Homo sapien
ctgcggaggatgaggtcgatgccag

SEQ ID NO: 778376 - DNA, 25 bp, Homo sapien
aggcagcgtcccgtgcccttgttca

SEQ ID NO: 778377 - DNA, 25 bp, Homo sapien
ttgatggagttcttaatggtccacc

SEQ ID NO: 778378 - DNA, 25 bp, Homo sapien
tggagttcttaatggtccacctctg

SEQ ID NO: 778379 - DNA, 25 bp, Homo sapien
gagttcttaatggtccacctctgac

SEQ ID NO: 778380 - DNA, 25 bp, Homo sapien
gatggagttcttaatggtccacctc

SEQ ID NO: 778381 - DNA, 25 bp, Homo sapien
tggggggcccatcgagcacctgccg

SEQ ID NO: 778382 - DNA, 25 bp, Homo sapien
tgtctctccgccagggcagctggtc

SEQ ID NO: 778383 - DNA, 25 bp, Homo sapien
ccagggtgcaggaaacttgtgggca

SEQ ID NO: 778384 - DNA, 25 bp, Homo sapien
gacagagtcttcatccggggtccct

SEQ ID NO: 778385 - DNA, 25 bp, Homo sapien
ccagatcctgattctgggatgggag

SEQ ID NO: 778386 - DNA, 25 bp, Homo sapien
ttgctcctcagtaccaggtccacat

SEQ ID NO: 778387 - DNA, 25 bp, Homo sapien
taacctcggaggaaatagtgcctgg

SEQ ID NO: 778388 - DNA, 25 bp, Homo sapien
tatatgtgcaccctaaccagagggc

SEQ ID NO: 778389 - DNA, 25 bp, Homo sapien
tgataagagcctagtgcccagggat

SEQ ID NO: 778390 - DNA, 25 bp, Homo sapien
tcttcagagaggaaacgactgcctt

SEQ ID NO: 778391 - DNA, 25 bp, Homo sapien
cagttctgtcctgctttaaggggga

SEQ ID NO: 778392 - DNA, 25 bp, Homo sapien
cacaagggttagtaagcgagggtca

SEQ ID NO: 778393 - DNA, 25 bp, Homo sapien
agtgtgagggtagaacggcattgcc

SEQ ID NO: 778394 - DNA, 25 bp, Homo sapien
attgccttagtcagccccagtgtgc

SEQ ID NO: 778395 - DNA, 25 bp, Homo sapien
ctgacagatggtgctgatgtgaaca

SEQ ID NO: 778396 - DNA, 25 bp, Homo sapien
agtctccccaggtatcctgatccca

SEQ ID NO: 778397 - DNA, 25 bp, Homo sapien
tcttcactcccttggtccatggcca

SEQ ID NO: 778398 - DNA, 25 bp, Homo sapien
tgccatcaagcccagatgggacccc

SEQ ID NO: 778399 - DNA, 25 bp, Homo sapien
tctcccaaaggacttaagaccaatc

SEQ ID NO: 778400 - DNA, 25 bp, Homo sapien
acctgggactatatggcattcgcca

SEQ ID NO: 778401 - DNA, 25 bp, Homo sapien
cttcttatggaaactgctgactcat

SEQ ID NO: 778402 - DNA, 25 bp, Homo sapien
taaaggtgctagaactacacgcatg

SEQ ID NO: 778403 - DNA, 25 bp, Homo sapien
gagccacacaccaggactttatcct

SEQ ID NO: 778404 - DNA, 25 bp, Homo sapien
ctttgacccagtatatggcaaaatt

SEQ ID NO: 778405 - DNA, 25 bp, Homo sapien
aatttgaagcttagaatcaagaaag

SEQ ID NO: 778406 - DNA, 25 bp, Homo sapien
tggcaaaatttgaagcttagaatca

SEQ ID NO: 778407 - DNA, 25 bp, Homo sapien
cccagtatatggcaaaatttgaagc

SEQ ID NO: 778408 - DNA, 25 bp, Homo sapien
ccagcgagaccaaggaagaaactcc

SEQ ID NO: 778409 - DNA, 25 bp, Homo sapien
aacaaactccagacgcgccacctta

SEQ ID NO: 778410 - DNA, 25 bp, Homo sapien
gaacaaactccagacgcgccacctt

SEQ ID NO: 778411 - DNA, 25 bp, Homo sapien
gagccagcgagaccaaggaagaaac

SEQ ID NO: 778412 - DNA, 25 bp, Homo sapien
gcggggcaggcctcgggactgcagc

SEQ ID NO: 778413 - DNA, 25 bp, Homo sapien
cttcccctgcctccgttggttcctg

SEQ ID NO: 778414 - DNA, 25 bp, Homo sapien
ctgcctccgttggttcctgtgcagc

SEQ ID NO: 778415 - DNA, 25 bp, Homo sapien
ggagtgtgggcgcacgacaccggga

SEQ ID NO: 778416 - DNA, 25 bp, Homo sapien
aaatattcaggtgcggtgatgtgta

SEQ ID NO: 778417 - DNA, 25 bp, Homo sapien
actgcttaaggtcgggatttgagac

SEQ ID NO: 778418 - DNA, 25 bp, Homo sapien
gtgcggtgatgtgtacctgtattcc

SEQ ID NO: 778419 - DNA, 25 bp, Homo sapien
aggactgcttaaggtcgggatttga

SEQ ID NO: 778420 - DNA, 25 bp, Homo sapien
cttggagccacaggggggatgccag

SEQ ID NO: 778421 - DNA, 25 bp, Homo sapien
ccgccaagctcagcgcttggagcca

SEQ ID NO: 778422 - DNA, 25 bp, Homo sapien
tgcctgtcccgagccgagccggggc

SEQ ID NO: 778423 - DNA, 25 bp, Homo sapien
ggtccccgccgccaagctcagcgct

SEQ ID NO: 778424 - DNA, 25 bp, Homo sapien
gatgaactcctagttctcccaggtg

SEQ ID NO: 778425 - DNA, 25 bp, Homo sapien
cagtgaccccgggtgtctgttggca

SEQ ID NO: 778426 - DNA, 25 bp, Homo sapien
gacacttgctttcccggtcctcgga

SEQ ID NO: 778427 - DNA, 25 bp, Homo sapien
cttacgcgttggcagagagcttgca

SEQ ID NO: 778428 - DNA, 25 bp, Homo sapien
atcccgcatagctcagtgtgtggcc

SEQ ID NO: 778429 - DNA, 25 bp, Homo sapien
ttggtttcagtggtctttggtaatc

SEQ ID NO: 778430 - DNA, 25 bp, Homo sapien
ctttggtaatctgtcctgcagctgt

SEQ ID NO: 778431 - DNA, 25 bp, Homo sapien
tccacatcccgcatagctcagtgtg

SEQ ID NO: 778432 - DNA, 25 bp, Homo sapien
ggatcgctggcctactttggaaaca

SEQ ID NO: 778433 - DNA, 25 bp, Homo sapien
tcagtctgatccacacgaaaggctc

SEQ ID NO: 778434 - DNA, 25 bp, Homo sapien
tggtagctcgccattcctgggagga

SEQ ID NO: 778435 - DNA, 25 bp, Homo sapien
tggaaacatgcaggccattgagtgc

SEQ ID NO: 778436 - DNA, 25 bp, Homo sapien
ggtgcaactgcgatattgctccatc

SEQ ID NO: 778437 - DNA, 25 bp, Homo sapien
actgcgatattgctccatccctgga

SEQ ID NO: 778438 - DNA, 25 bp, Homo sapien
caaggtgcaactgcgatattgctcc

SEQ ID NO: 778439 - DNA, 25 bp, Homo sapien
atgcaaggtgcaactgcgatattgc

SEQ ID NO: 778440 - DNA, 25 bp, Homo sapien
tggagctaagagtccgtaacctaaa

SEQ ID NO: 778441 - DNA, 25 bp, Homo sapien
cattggcctcttcagtgatccccat

SEQ ID NO: 778442 - DNA, 25 bp, Homo sapien
cacacctgattgctcaactgcccca

SEQ ID NO: 778443 - DNA, 25 bp, Homo sapien
tcagtgatccccatggagctaagag

SEQ ID NO: 778444 - DNA, 25 bp, Homo sapien
tttattccaaatgcctcgtactcgg

SEQ ID NO: 778445 - DNA, 25 bp, Homo sapien
gacagttttgcacgttgctcttcac

SEQ ID NO: 778446 - DNA, 25 bp, Homo sapien
cacctaaatctagcagtttccctga

SEQ ID NO: 778447 - DNA, 25 bp, Homo sapien
taagtccagactcaggtcataaatc

SEQ ID NO: 778448 - DNA, 25 bp, Homo sapien
catcgggactattagcaatggcttc

SEQ ID NO: 778449 - DNA, 25 bp, Homo sapien
ccccagacagaatctagcatcggga

SEQ ID NO: 778450 - DNA, 25 bp, Homo sapien
tctagcatcgggactattagcaatg

SEQ ID NO: 778451 - DNA, 25 bp, Homo sapien
gacagaatctagcatcgggactatt

SEQ ID NO: 778452 - DNA, 25 bp, Homo sapien
ctcattctgtcctccggacttagga

SEQ ID NO: 778453 - DNA, 25 bp, Homo sapien
ttctgtcctccggacttaggaacca

SEQ ID NO: 778454 - DNA, 25 bp, Homo sapien
tgtcctccggacttaggaaccagtg

SEQ ID NO: 778455 - DNA, 25 bp, Homo sapien
tcctccggacttaggaaccagtgac

SEQ ID NO: 778456 - DNA, 25 bp, Homo sapien
ctcagagtttgtcccggtgacttgc

SEQ ID NO: 778457 - DNA, 25 bp, Homo sapien
ttccttgtcaggcagccaactccca

SEQ ID NO: 778458 - DNA, 25 bp, Homo sapien
gcttggacagtttgtcttgggtata

SEQ ID NO: 778459 - DNA, 25 bp, Homo sapien
tgtcccggtgacttgcaccctggct

SEQ ID NO: 778460 - DNA, 25 bp, Homo sapien
agcattttggaacctgcagagagcc

SEQ ID NO: 778461 - DNA, 25 bp, Homo sapien
agcccatcccgcaccagcattttgg

SEQ ID NO: 778462 - DNA, 25 bp, Homo sapien
ttctgttcctagagcccatcccgca

SEQ ID NO: 778463 - DNA, 25 bp, Homo sapien
gggtgctctcagtttccgtcggcac

SEQ ID NO: 778464 - DNA, 25 bp, Homo sapien
attctttcaacccaagggtcaacag

SEQ ID NO: 778465 - DNA, 25 bp, Homo sapien
caagagagaggcatgaacacacagt

SEQ ID NO: 778466 - DNA, 25 bp, Homo sapien
tccagcagccatccaggtataatgg

SEQ ID NO: 778467 - DNA, 25 bp, Homo sapien
caggagactctctgctgaggtcaac

SEQ ID NO: 778468 - DNA, 25 bp, Homo sapien
ggagacattgctgaacatgtgctgc

SEQ ID NO: 778469 - DNA, 25 bp, Homo sapien
gacattgctgaacatgtgctgctgc

SEQ ID NO: 778470 - DNA, 25 bp, Homo sapien
gagacattgctgaacatgtgctgct

SEQ ID NO: 778471 - DNA, 25 bp, Homo sapien
ctggagacattgctgaacatgtgct

SEQ ID NO: 778472 - DNA, 25 bp, Homo sapien
catgtattcattctaggtccaggca

SEQ ID NO: 778473 - DNA, 25 bp, Homo sapien
gattcacgaggacaaaagagcttca

SEQ ID NO: 778474 - DNA, 25 bp, Homo sapien
gatgttccaggatccgcaggtaggc

SEQ ID NO: 778475 - DNA, 25 bp, Homo sapien
ggcaggaatataccccaaagtgaga

SEQ ID NO: 778476 - DNA, 25 bp, Homo sapien
catattaaccatggcagagtttttc

SEQ ID NO: 778477 - DNA, 25 bp, Homo sapien
gggaaatcatatgctatatttccat

SEQ ID NO: 778478 - DNA, 25 bp, Homo sapien
ttggggaaatcatatgctatatttc

SEQ ID NO: 778479 - DNA, 25 bp, Homo sapien
tggaactcttttccgcagaacaaaa

SEQ ID NO: 778480 - DNA, 25 bp, Homo sapien
gagacgggtcttgtggtgtcacaca

SEQ ID NO: 778481 - DNA, 25 bp, Homo sapien
tgtcacacaggctatgatgcagcca

SEQ ID NO: 778482 - DNA, 25 bp, Homo sapien
ttgtggagacgggtcttgtggtgtc

SEQ ID NO: 778483 - DNA, 25 bp, Homo sapien
tcttgtggtgtcacacaggctatga

SEQ ID NO: 778484 - DNA, 25 bp, Homo sapien
caattcctgagtaacgtgcatttag

SEQ ID NO: 778485 - DNA, 25 bp, Homo sapien
ccagaaaatcaagcacactatgtag

SEQ ID NO: 778486 - DNA, 25 bp, Homo sapien
ctctcccttaaataccaatccagaa

SEQ ID NO: 778487 - DNA, 25 bp, Homo sapien
aatctctaacgccatctgtgtgcag

SEQ ID NO: 778488 - DNA, 25 bp, Homo sapien
agtctcaaactcatatagccaaggg

SEQ ID NO: 778489 - DNA, 25 bp, Homo sapien
gtctcaaactcatatagccaagggt

SEQ ID NO: 778490 - DNA, 25 bp, Homo sapien
tcaaactcatatagccaagggtcat

SEQ ID NO: 778491 - DNA, 25 bp, Homo sapien
tctcaaactcatatagccaagggtc

SEQ ID NO: 778492 - DNA, 25 bp, Homo sapien
tattcatatacaccatgcagcaggg

SEQ ID NO: 778493 - DNA, 25 bp, Homo sapien
caggaagggcaacttctaatttagt

SEQ ID NO: 778494 - DNA, 25 bp, Homo sapien
gctatagattctttcaagtttggaa

SEQ ID NO: 778495 - DNA, 25 bp, Homo sapien
tctttcaagtttggaatgagcagag

SEQ ID NO: 778496 - DNA, 25 bp, Homo sapien
tacgtggccttaaaggcttgcaatg

SEQ ID NO: 778497 - DNA, 25 bp, Homo sapien
caatgtgacattgacctggtgtttc

SEQ ID NO: 778498 - DNA, 25 bp, Homo sapien
ctctcctggcagtggtacgtggcct

SEQ ID NO: 778499 - DNA, 25 bp, Homo sapien
ttaatcatccctggcagagtgctcc

SEQ ID NO: 778500 - DNA, 25 bp, Homo sapien
gaggctagttgttcctgagaattag

SEQ ID NO: 778501 - DNA, 25 bp, Homo sapien
cccagctgcttacagcaggtacctt

SEQ ID NO: 778502 - DNA, 25 bp, Homo sapien
tcaaaggggcgtaagccttgaatcc

SEQ ID NO: 778503 - DNA, 25 bp, Homo sapien
caggtacctttgcagatttatgaga

SEQ ID NO: 778504 - DNA, 25 bp, Homo sapien
gctccttgcatttgcccatctgctg

SEQ ID NO: 778505 - DNA, 25 bp, Homo sapien
ccacggctttcctggactgcagttc

SEQ ID NO: 778506 - DNA, 25 bp, Homo sapien
aggtttccctgtaaactgatccctg

SEQ ID NO: 778507 - DNA, 25 bp, Homo sapien
acttgggtgtgacccatacttcagg

SEQ ID NO: 778508 - DNA, 25 bp, Homo sapien
ccatgagaaactaattttgcatttc

SEQ ID NO: 778509 - DNA, 25 bp, Homo sapien
gtccatgagaaactaattttgcatt

SEQ ID NO: 778510 - DNA, 25 bp, Homo sapien
tggtccatgagaaactaattttgca

SEQ ID NO: 778511 - DNA, 25 bp, Homo sapien
ctggtccatgagaaactaattttgc

SEQ ID NO: 778512 - DNA, 25 bp, Homo sapien
gtaccagctgtctcatagggcccag

SEQ ID NO: 778513 - DNA, 25 bp, Homo sapien
tgttccctcttaagtggtccttcag

SEQ ID NO: 778514 - DNA, 25 bp, Homo sapien
gtctgatgttccctcttaagtggtc

SEQ ID NO: 778515 - DNA, 25 bp, Homo sapien
ttcagacagccctgtaccagctgtc

SEQ ID NO: 778516 - DNA, 25 bp, Homo sapien
tcatgtcaggtaaaatccacttcca

SEQ ID NO: 778517 - DNA, 25 bp, Homo sapien
tccatttcagctgttcacttccttc

SEQ ID NO: 778518 - DNA, 25 bp, Homo sapien
cctccggcttttagggattctgtca

SEQ ID NO: 778519 - DNA, 25 bp, Homo sapien
caggtaaaatccacttccatttcag

SEQ ID NO: 778520 - DNA, 25 bp, Homo sapien
tgccatcgtcaaaactgcaagttcc

SEQ ID NO: 778521 - DNA, 25 bp, Homo sapien
ccatccctgacccaggttgtgggaa

SEQ ID NO: 778522 - DNA, 25 bp, Homo sapien
ctgcaagttccattggaagtcactg

SEQ ID NO: 778523 - DNA, 25 bp, Homo sapien
gaggtcccataagtcctcagttcac

SEQ ID NO: 778524 - DNA, 25 bp, Homo sapien
ctgccatcaggtaaaaacacaggca

SEQ ID NO: 778525 - DNA, 25 bp, Homo sapien
tctttctctgccatcaggtaaaaac

SEQ ID NO: 778526 - DNA, 25 bp, Homo sapien
ttctctgccatcaggtaaaaacaca

SEQ ID NO: 778527 - DNA, 25 bp, Homo sapien
catcaggtaaaaacacaggcagatt

SEQ ID NO: 778528 - DNA, 25 bp, Homo sapien
catgtttgaggagcctctttccatc

SEQ ID NO: 778529 - DNA, 25 bp, Homo sapien
atgtttgaggagcctctttccatct

SEQ ID NO: 778530 - DNA, 25 bp, Homo sapien
tcatgtttgaggagcctctttccat

SEQ ID NO: 778531 - DNA, 25 bp, Homo sapien
taagccttgggcaattcttggattt

SEQ ID NO: 778532 - DNA, 25 bp, Homo sapien
ctaagccttgggcaattcttggatt

SEQ ID NO: 778533 - DNA, 25 bp, Homo sapien
aagccttgggcaattcttggatttc

SEQ ID NO: 778534 - DNA, 25 bp, Homo sapien
gcacacacattctcggtagcagcat

SEQ ID NO: 778535 - DNA, 25 bp, Homo sapien
cactgtgtaattcaaagtaagcctt

SEQ ID NO: 778536 - DNA, 25 bp, Homo sapien
ggttgaacgaatcatgccctccaag

SEQ ID NO: 778537 - DNA, 25 bp, Homo sapien
tacagacatgtcaaactccgcgggt

SEQ ID NO: 778538 - DNA, 25 bp, Homo sapien
tttcccattgcaggatctttctgca

SEQ ID NO: 778539 - DNA, 25 bp, Homo sapien
tcatttcccattgcaggatctttct

SEQ ID NO: 778540 - DNA, 25 bp, Homo sapien
tcccattgcaggatctttctgcatc

SEQ ID NO: 778541 - DNA, 25 bp, Homo sapien
catttcccattgcaggatctttctg

SEQ ID NO: 778542 - DNA, 25 bp, Homo sapien
agtgactactatatttctccctaaa

SEQ ID NO: 778543 - DNA, 25 bp, Homo sapien
tgcatctccccacccattcggagtc

SEQ ID NO: 778544 - DNA, 25 bp, Homo sapien
tgccctggattttgcaactctagtg

SEQ ID NO: 778545 - DNA, 25 bp, Homo sapien
ggagtctctggatcaatatctaagc

SEQ ID NO: 778546 - DNA, 25 bp, Homo sapien
cagtcattgtctgctggcgccagta

SEQ ID NO: 778547 - DNA, 25 bp, Homo sapien
tcataggacagttcgagaaacaagc

SEQ ID NO: 778548 - DNA, 25 bp, Homo sapien
catccaatgagtaccgagcgtggtt

SEQ ID NO: 778549 - DNA, 25 bp, Homo sapien
tgtttcagcaatcccaaaatggcac

SEQ ID NO: 778550 - DNA, 25 bp, Homo sapien
gcagggcactgtctgttatcatcaa

SEQ ID NO: 778551 - DNA, 25 bp, Homo sapien
gaaaactgcattggaaacacttgag

SEQ ID NO: 778552 - DNA, 25 bp, Homo sapien
cacgaattgtgtgtgtggccggttt

SEQ ID NO: 778553 - DNA, 25 bp, Homo sapien
tcctagagcaactacaccttccagt

SEQ ID NO: 778554 - DNA, 25 bp, Homo sapien
tcagcgggaactcagttatatctac

SEQ ID NO: 778555 - DNA, 25 bp, Homo sapien
ccaaattcctgggttcgctctctac

SEQ ID NO: 778556 - DNA, 25 bp, Homo sapien
tactgccaagttcagcgggaactca

SEQ ID NO: 778557 - DNA, 25 bp, Homo sapien
gttatatctactgggtgagtcctac

SEQ ID NO: 778558 - DNA, 25 bp, Homo sapien
caaccagatgggacgaggtaaccct

SEQ ID NO: 778559 - DNA, 25 bp, Homo sapien
gaggtaaccctgagtggatcatgca

SEQ ID NO: 778560 - DNA, 25 bp, Homo sapien
aagtcatcagctgcaaccagatggg

SEQ ID NO: 778561 - DNA, 25 bp, Homo sapien
ccctgagtggatcatgcacatcctg

SEQ ID NO: 778562 - DNA, 25 bp, Homo sapien
ttgagttcagcttcaactaggtcct

SEQ ID NO: 778563 - DNA, 25 bp, Homo sapien
gtttgagttcagcttcaactaggtc

SEQ ID NO: 778564 - DNA, 25 bp, Homo sapien
taggtcctcgcggaccactggtaac

SEQ ID NO: 778565 - DNA, 25 bp, Homo sapien
ttcaactaggtcctcgcggaccact

SEQ ID NO: 778566 - DNA, 25 bp, Homo sapien
cccctttaatcacaagtgcataggg

SEQ ID NO: 778567 - DNA, 25 bp, Homo sapien
tttatagggcctggcagaaccaaac

SEQ ID NO: 778568 - DNA, 25 bp, Homo sapien
cagagcacagaagtaatcattctga

SEQ ID NO: 778569 - DNA, 25 bp, Homo sapien
cctttgaagccgttgattatatctg

SEQ ID NO: 778570 - DNA, 25 bp, Homo sapien
cactgcggatgctggagcggctcgt

SEQ ID NO: 778571 - DNA, 25 bp, Homo sapien
agggtgagcacgtccccctcacaca

SEQ ID NO: 778572 - DNA, 25 bp, Homo sapien
atgctggagcggctcgtgttgtcca

SEQ ID NO: 778573 - DNA, 25 bp, Homo sapien
agcggctcgtgttgtccataaattc

SEQ ID NO: 778574 - DNA, 25 bp, Homo sapien
aatcaaaggcggaagattggaacgg

SEQ ID NO: 778575 - DNA, 25 bp, Homo sapien
tcacagacaagtgatacacaaacgg

SEQ ID NO: 778576 - DNA, 25 bp, Homo sapien
catagcttgcttttatccatttagg

SEQ ID NO: 778577 - DNA, 25 bp, Homo sapien
tgagacaacttgaatcaaaggcgga

SEQ ID NO: 778578 - DNA, 25 bp, Homo sapien
ctcagaaggaagatggcgaaagctc

SEQ ID NO: 778579 - DNA, 25 bp, Homo sapien
gaatgtcaggttccaaaacttgagt

SEQ ID NO: 778580 - DNA, 25 bp, Homo sapien
taggcttaactcttgcagatttggg

SEQ ID NO: 778581 - DNA, 25 bp, Homo sapien
ccatgaaagacaccttgttgggtta

SEQ ID NO: 778582 - DNA, 25 bp, Homo sapien
cagaacagagtccttgtggtggtgc

SEQ ID NO: 778583 - DNA, 25 bp, Homo sapien
acaccttccccagaccgattgtgag

SEQ ID NO: 778584 - DNA, 25 bp, Homo sapien
gatttgctgatcaaaaagggacctt

SEQ ID NO: 778585 - DNA, 25 bp, Homo sapien
gcttccttgggtcatgggagtaata

SEQ ID NO: 778586 - DNA, 25 bp, Homo sapien
gatcaaagggaggacctcgttcatt

SEQ ID NO: 778587 - DNA, 25 bp, Homo sapien
tttcaataggataaggatcaaaggg

SEQ ID NO: 778588 - DNA, 25 bp, Homo sapien
ccattttcaataggataaggatcaa

SEQ ID NO: 778589 - DNA, 25 bp, Homo sapien
gataaggatcaaagggaggacctcg

SEQ ID NO: 778590 - DNA, 25 bp, Homo sapien
gtgaatgcactctgagagggcattg

SEQ ID NO: 778591 - DNA, 25 bp, Homo sapien
agggcattgatttatgtgtgggcat

SEQ ID NO: 778592 - DNA, 25 bp, Homo sapien
tgcactctgagagggcattgattta

SEQ ID NO: 778593 - DNA, 25 bp, Homo sapien
tattctttgaaggtgaatgcactct

SEQ ID NO: 778594 - DNA, 25 bp, Homo sapien
tggcatcttgatgctcacatctgct

SEQ ID NO: 778595 - DNA, 25 bp, Homo sapien
ctgttcctggacaatctgttctgaa

SEQ ID NO: 778596 - DNA, 25 bp, Homo sapien
tctgttcctggacaatctgttctga

SEQ ID NO: 778597 - DNA, 25 bp, Homo sapien
ttggcatcttgatgctcacatctgc

SEQ ID NO: 778598 - DNA, 25 bp, Homo sapien
tcaaagacagcctcgttctcctggt

SEQ ID NO: 778599 - DNA, 25 bp, Homo sapien
tggtctgtagttcccagccaagtgc

SEQ ID NO: 778600 - DNA, 25 bp, Homo sapien
actgtgatgatttggcccagagctc

SEQ ID NO: 778601 - DNA, 25 bp, Homo sapien
catgtggacctgtgaaatgcaccag

SEQ ID NO: 778602 - DNA, 25 bp, Homo sapien
tgctaagtggatcatgatatttgga

SEQ ID NO: 778603 - DNA, 25 bp, Homo sapien
tcttgctaagtggatcatgatattt

SEQ ID NO: 778604 - DNA, 25 bp, Homo sapien
ttcttgctaagtggatcatgatatt

SEQ ID NO: 778605 - DNA, 25 bp, Homo sapien
cttgctaagtggatcatgatatttg

SEQ ID NO: 778606 - DNA, 25 bp, Homo sapien
gagcctgctggagtaaacagttgtg

SEQ ID NO: 778607 - DNA, 25 bp, Homo sapien
tcgggacggcagatcaggagttctt

SEQ ID NO: 778608 - DNA, 25 bp, Homo sapien
cactccggaggcgacttgtcgggac

SEQ ID NO: 778609 - DNA, 25 bp, Homo sapien
tagtcagtgaggtcaagaccatcac

SEQ ID NO: 778610 - DNA, 25 bp, Homo sapien
taagaaggtcactggattgggcccg

SEQ ID NO: 778611 - DNA, 25 bp, Homo sapien
tgcattgtcctcagctatccctcgg

SEQ ID NO: 778612 - DNA, 25 bp, Homo sapien
caattccagattaggcgaagggagc

SEQ ID NO: 778613 - DNA, 25 bp, Homo sapien
tcaattgcgaaaagtgagcgtgggt

SEQ ID NO: 778614 - DNA, 25 bp, Homo sapien
tgatggtgtcttccaggatatcgat

SEQ ID NO: 778615 - DNA, 25 bp, Homo sapien
ttgctgaatgagtccagagtcatag

SEQ ID NO: 778616 - DNA, 25 bp, Homo sapien
tagctgactagcttcataccaccct

SEQ ID NO: 778617 - DNA, 25 bp, Homo sapien
gatggtgtcttccaggatatcgatg

SEQ ID NO: 778618 - DNA, 25 bp, Homo sapien
ggccattcattgattctctgcttcc

SEQ ID NO: 778619 - DNA, 25 bp, Homo sapien
cagggtgtctccaggccattcattg

SEQ ID NO: 778620 - DNA, 25 bp, Homo sapien
tgagctggggattctcatctaccag

SEQ ID NO: 778621 - DNA, 25 bp, Homo sapien
cttctggtgagctggggattctcat

SEQ ID NO: 778622 - DNA, 25 bp, Homo sapien
gggccaaatgatgcagttcctactt

SEQ ID NO: 778623 - DNA, 25 bp, Homo sapien
tattaacgtttgcagcttaggaaca

SEQ ID NO: 778624 - DNA, 25 bp, Homo sapien
acatccaatattgccgtatgggcca

SEQ ID NO: 778625 - DNA, 25 bp, Homo sapien
actcagtttgccacttggaggcaca

SEQ ID NO: 778626 - DNA, 25 bp, Homo sapien
tcaagagccaaccagggttgcctct

SEQ ID NO: 778627 - DNA, 25 bp, Homo sapien
aaggccaccccagtatctgggtaca

SEQ ID NO: 778628 - DNA, 25 bp, Homo sapien
gccctgatgtacttgccagctttcc

SEQ ID NO: 778629 - DNA, 25 bp, Homo sapien
gaggttgtcttgaacactcatttgg

SEQ ID NO: 778630 - DNA, 25 bp, Homo sapien
aagtgcatgaagtgctttgtgattt

SEQ ID NO: 778631 - DNA, 25 bp, Homo sapien
caggtggggttgtgatattcagccc

SEQ ID NO: 778632 - DNA, 25 bp, Homo sapien
gggttgtgatattcagccccatcat

SEQ ID NO: 778633 - DNA, 25 bp, Homo sapien
gaagtgctttgtgatttgaagtctc

SEQ ID NO: 778634 - DNA, 25 bp, Homo sapien
ggaacctccaagttgtccacatctg

SEQ ID NO: 778635 - DNA, 25 bp, Homo sapien
cagacttcagagatatctgtttctt

SEQ ID NO: 778636 - DNA, 25 bp, Homo sapien
tgattaatggtctgtctgttgggct

SEQ ID NO: 778637 - DNA, 25 bp, Homo sapien
cactttggaagtcgcaagggaacct

SEQ ID NO: 778638 - DNA, 25 bp, Homo sapien
tgaagattgttttgcaagtggttgc

SEQ ID NO: 778639 - DNA, 25 bp, Homo sapien
ttgttttgcaagtggttgcagctgc

SEQ ID NO: 778640 - DNA, 25 bp, Homo sapien
cacgatcgaagactgaatggtgatt

SEQ ID NO: 778641 - DNA, 25 bp, Homo sapien
tggttgacttatataggaccttgtc

SEQ ID NO: 778642 - DNA, 25 bp, Homo sapien
ctgcagaatactcaggtaattcctg

SEQ ID NO: 778643 - DNA, 25 bp, Homo sapien
cagaatactcaggtaattcctgagg

SEQ ID NO: 778644 - DNA, 25 bp, Homo sapien
gctctgaaataaattcgagtgtttt

SEQ ID NO: 778645 - DNA, 25 bp, Homo sapien
tactcaggtaattcctgaggcccct

SEQ ID NO: 778646 - DNA, 25 bp, Homo sapien
tcgtaggaggaaggcttagtccctc

SEQ ID NO: 778647 - DNA, 25 bp, Homo sapien
catcactgtggtacctgagtcagct

SEQ ID NO: 778648 - DNA, 25 bp, Homo sapien
cttagtccctcttagaccaagatgg

SEQ ID NO: 778649 - DNA, 25 bp, Homo sapien
gatacctctcgggtacctggccttg

SEQ ID NO: 778650 - DNA, 25 bp, Homo sapien
catccaagggtccactttgcagttc

SEQ ID NO: 778651 - DNA, 25 bp, Homo sapien
cagcatccaagggtccactttgcag

SEQ ID NO: 778652 - DNA, 25 bp, Homo sapien
ttggctctgattttggatagcagca

SEQ ID NO: 778653 - DNA, 25 bp, Homo sapien
gattttggatagcagcatccaaggg

SEQ ID NO: 778654 - DNA, 25 bp, Homo sapien
catggctatgttcaccctttctgaa

SEQ ID NO: 778655 - DNA, 25 bp, Homo sapien
acttgctcatgttgaggattgagga

SEQ ID NO: 778656 - DNA, 25 bp, Homo sapien
tcacatgacgaactgtaaagtgact

SEQ ID NO: 778657 - DNA, 25 bp, Homo sapien
actgtaaagtgacttgaacttgctc

SEQ ID NO: 778658 - DNA, 25 bp, Homo sapien
gatgggacgagaggcaaggaataca

SEQ ID NO: 778659 - DNA, 25 bp, Homo sapien
gtgggttgctccaggctgcgtcttc

SEQ ID NO: 778660 - DNA, 25 bp, Homo sapien
gcgtcttctgtcctcttgggtgatg

SEQ ID NO: 778661 - DNA, 25 bp, Homo sapien
gggtgatgtatggtgagttccactt

SEQ ID NO: 778662 - DNA, 25 bp, Homo sapien
tgccaacagatagggagtgtgggtt

SEQ ID NO: 778663 - DNA, 25 bp, Homo sapien
tcagtttcccgctttatttcaaagc

SEQ ID NO: 778664 - DNA, 25 bp, Homo sapien
aagcaaggtctgtccggacgtagtt

SEQ ID NO: 778665 - DNA, 25 bp, Homo sapien
tttcatgaagtccacgtgtccttga

SEQ ID NO: 778666 - DNA, 25 bp, Homo sapien
ccactgagactttgtgatatggttt

SEQ ID NO: 778667 - DNA, 25 bp, Homo sapien
tttgaaagggttttacgcatctcca

SEQ ID NO: 778668 - DNA, 25 bp, Homo sapien
gtccttgaattgttttgaggcttgc

SEQ ID NO: 778669 - DNA, 25 bp, Homo sapien
caactgtgtagatggtattctggtg

SEQ ID NO: 778670 - DNA, 25 bp, Homo sapien
tagatggtattctggtgttttcctg

SEQ ID NO: 778671 - DNA, 25 bp, Homo sapien
cccctcaactgtgtagatggtattc

SEQ ID NO: 778672 - DNA, 25 bp, Homo sapien
ccttcccctcaactgtgtagatggt

SEQ ID NO: 778673 - DNA, 25 bp, Homo sapien
gaaaagcaaactgtgtccctgcagt

SEQ ID NO: 778674 - DNA, 25 bp, Homo sapien
tcccgagggatggagtacaccatag

SEQ ID NO: 778675 - DNA, 25 bp, Homo sapien
tgctgaaccgtgaggcaatgaaacc

SEQ ID NO: 778676 - DNA, 25 bp, Homo sapien
tacctccttgtgaataaggtgcctg

SEQ ID NO: 778677 - DNA, 25 bp, Homo sapien
ttaatgtgggccagaaaacgtgcca

SEQ ID NO: 778678 - DNA, 25 bp, Homo sapien
cctattttagcagcagggaccgtca

SEQ ID NO: 778679 - DNA, 25 bp, Homo sapien
gaaactggctcagctaatacgtgga

SEQ ID NO: 778680 - DNA, 25 bp, Homo sapien
tcaagcatctattacgagtcgggtc

SEQ ID NO: 778681 - DNA, 25 bp, Homo sapien
tcttagtggtagcagggttactgcc

SEQ ID NO: 778682 - DNA, 25 bp, Homo sapien
agaacggacccacgtcttcagagtg

SEQ ID NO: 778683 - DNA, 25 bp, Homo sapien
gtttttaattaggacacgcaatgca

SEQ ID NO: 778684 - DNA, 25 bp, Homo sapien
gcattagcaattataagaggcagga

SEQ ID NO: 778685 - DNA, 25 bp, Homo sapien
ttccttgatgtccaagaactgccac

SEQ ID NO: 778686 - DNA, 25 bp, Homo sapien
ggccagagtggactgtcccggacaa

SEQ ID NO: 778687 - DNA, 25 bp, Homo sapien
ccagagtggactgtcccggacaact

SEQ ID NO: 778688 - DNA, 25 bp, Homo sapien
agagtggactgtcccggacaacttg

SEQ ID NO: 778689 - DNA, 25 bp, Homo sapien
cacgatttcctcatgctggttgggc

SEQ ID NO: 778690 - DNA, 25 bp, Homo sapien
gaagctgaaggagcacgatttcctc

SEQ ID NO: 778691 - DNA, 25 bp, Homo sapien
gaaggagcacgatttcctcatgctg

SEQ ID NO: 778692 - DNA, 25 bp, Homo sapien
atgctggttgggccctgtttttggt

SEQ ID NO: 778693 - DNA, 25 bp, Homo sapien
ccatatccatcaaaaaatgaatcac

SEQ ID NO: 778694 - DNA, 25 bp, Homo sapien
cctgtaagccatatccatcaaaaaa

SEQ ID NO: 778695 - DNA, 25 bp, Homo sapien
aagccatatccatcaaaaaatgaat

SEQ ID NO: 778696 - DNA, 25 bp, Homo sapien
ctgtaagccatatccatcaaaaaat

SEQ ID NO: 778697 - DNA, 25 bp, Homo sapien
acaccctgctaaggtgtgtcctgct

SEQ ID NO: 778698 - DNA, 25 bp, Homo sapien
acaggaggacaccctgctaaggtgt

SEQ ID NO: 778699 - DNA, 25 bp, Homo sapien
ggacaccctgctaaggtgtgtcctg

SEQ ID NO: 778700 - DNA, 25 bp, Homo sapien
acacaggaggacaccctgctaaggt

SEQ ID NO: 778701 - DNA, 25 bp, Homo sapien
cttaagtatcgagtcagttggaaaa

SEQ ID NO: 778702 - DNA, 25 bp, Homo sapien
tggaaaaagaaccgaagcagggtgc

SEQ ID NO: 778703 - DNA, 25 bp, Homo sapien
aattggcacttaagtatcgagtcag

SEQ ID NO: 778704 - DNA, 25 bp, Homo sapien
gggaatggtaattggcacttaagta

SEQ ID NO: 778705 - DNA, 25 bp, Homo sapien
cagaaccgttctgctttgccgtgaa

SEQ ID NO: 778706 - DNA, 25 bp, Homo sapien
cccaaacctgttcagaaccgttctg

SEQ ID NO: 778707 - DNA, 25 bp, Homo sapien
caaacctgttcagaaccgttctgct

SEQ ID NO: 778708 - DNA, 25 bp, Homo sapien
tgttcagaaccgttctgctttgccg

SEQ ID NO: 778709 - DNA, 25 bp, Homo sapien
tgataggcacagacagcagcacttg

SEQ ID NO: 778710 - DNA, 25 bp, Homo sapien
cagtccccgttaagcagctgtgtgt

SEQ ID NO: 778711 - DNA, 25 bp, Homo sapien
tggaagttcccacgacaaagaaaga

SEQ ID NO: 778712 - DNA, 25 bp, Homo sapien
gaaagaagagctacattgataggca

SEQ ID NO: 778713 - DNA, 25 bp, Homo sapien
gagcctccatattgactgttgtcag

SEQ ID NO: 778714 - DNA, 25 bp, Homo sapien
tgatttttgcgatgagcctggcgtt

SEQ ID NO: 778715 - DNA, 25 bp, Homo sapien
gtttaacgaacatatatgagcctcc

SEQ ID NO: 778716 - DNA, 25 bp, Homo sapien
acttgctcgatgagagaccatccca

SEQ ID NO: 778717 - DNA, 25 bp, Homo sapien
gccagagaaactctggatttgtgaa

SEQ ID NO: 778718 - DNA, 25 bp, Homo sapien
ctctgtcttgcttttgtgttggtca

SEQ ID NO: 778719 - DNA, 25 bp, Homo sapien
tttgtgaaggggctagaagaaggaa

SEQ ID NO: 778720 - DNA, 25 bp, Homo sapien
ttatagatttcctcttgagtagcca

SEQ ID NO: 778721 - DNA, 25 bp, Homo sapien
tagaacagtcggcattcatggtgac

SEQ ID NO: 778722 - DNA, 25 bp, Homo sapien
gacttgacagtagctcctggaaaga

SEQ ID NO: 778723 - DNA, 25 bp, Homo sapien
cattcagcaggatgggagaattcaa

SEQ ID NO: 778724 - DNA, 25 bp, Homo sapien
tcatggtgaccttgagctagcaaat

SEQ ID NO: 778725 - DNA, 25 bp, Homo sapien
tgtgagatgtaggatgcctgatgat

SEQ ID NO: 778726 - DNA, 25 bp, Homo sapien
gatgtaggatgcctgatgatgtcat

SEQ ID NO: 778727 - DNA, 25 bp, Homo sapien
caaggtgatgaggatgctgaataat

SEQ ID NO: 778728 - DNA, 25 bp, Homo sapien
agcaaggtgatgaggatgctgaata

SEQ ID NO: 778729 - DNA, 25 bp, Homo sapien
acttttgtcggataagagggcactc

SEQ ID NO: 778730 - DNA, 25 bp, Homo sapien
tacttttgtcggataagagggcact

SEQ ID NO: 778731 - DNA, 25 bp, Homo sapien
ttacttttgtcggataagagggcac

SEQ ID NO: 778732 - DNA, 25 bp, Homo sapien
cttttgtcggataagagggcactct

SEQ ID NO: 778733 - DNA, 25 bp, Homo sapien
agcattcggcgtcttgttcaaagtc

SEQ ID NO: 778734 - DNA, 25 bp, Homo sapien
tgggccaggagctatgctctttctg

SEQ ID NO: 778735 - DNA, 25 bp, Homo sapien
catcattagacaagttgggccagga

SEQ ID NO: 778736 - DNA, 25 bp, Homo sapien
tcaaagtcacggagagcatcattag

SEQ ID NO: 778737 - DNA, 25 bp, Homo sapien
tgtcctgcttgtcggtgacactggt

SEQ ID NO: 778738 - DNA, 25 bp, Homo sapien
tggtcattgccattcctggcgtttc

SEQ ID NO: 778739 - DNA, 25 bp, Homo sapien
cgtttctgaatgtgatgggctgtga

SEQ ID NO: 778740 - DNA, 25 bp, Homo sapien
gcaggttttagtagcagcctttctc

SEQ ID NO: 778741 - DNA, 25 bp, Homo sapien
gccagctgttaacacgggcccttaa

SEQ ID NO: 778742 - DNA, 25 bp, Homo sapien
tcactgtagccgtggccatcaggca

SEQ ID NO: 778743 - DNA, 25 bp, Homo sapien
aatcaaaattgggatgggaggcaca

SEQ ID NO: 778744 - DNA, 25 bp, Homo sapien
gacagcaggtcacatgcgaggctgc

SEQ ID NO: 778745 - DNA, 25 bp, Homo sapien
tacggtaacctgagcaaactaagct

SEQ ID NO: 778746 - DNA, 25 bp, Homo sapien
tgatcttagacatccagccttcagg

SEQ ID NO: 778747 - DNA, 25 bp, Homo sapien
gacttagcaggaccactttacgtgg

SEQ ID NO: 778748 - DNA, 25 bp, Homo sapien
gaaggagccttaacaagcagtggaa

SEQ ID NO: 778749 - DNA, 25 bp, Homo sapien
ctctgcagggcactagtgtctgtgt

SEQ ID NO: 778750 - DNA, 25 bp, Homo sapien
tgcagggcactagtgtctgtgtctg

SEQ ID NO: 778751 - DNA, 25 bp, Homo sapien
tctgcagggcactagtgtctgtgtc

SEQ ID NO: 778752 - DNA, 25 bp, Homo sapien
tctctgcagggcactagtgtctgtg

SEQ ID NO: 778753 - DNA, 25 bp, Homo sapien
cacacagactgatgtgtatgtttca

SEQ ID NO: 778754 - DNA, 25 bp, Homo sapien
ggccctggctcagaatgtgacttca

SEQ ID NO: 778755 - DNA, 25 bp, Homo sapien
ctgagttccttgggacccttttgag

SEQ ID NO: 778756 - DNA, 25 bp, Homo sapien
ttatttgcacacagactgatgtgta

SEQ ID NO: 778757 - DNA, 25 bp, Homo sapien
cttgcacgggacatgtgctccatca

SEQ ID NO: 778758 - DNA, 25 bp, Homo sapien
ttgcacgggacatgtgctccatcag

SEQ ID NO: 778759 - DNA, 25 bp, Homo sapien
tgcacgggacatgtgctccatcaga

SEQ ID NO: 778760 - DNA, 25 bp, Homo sapien
gcacgggacatgtgctccatcagaa

SEQ ID NO: 778761 - DNA, 25 bp, Homo sapien
tgagtcccgtgtaacccttgtgagc

SEQ ID NO: 778762 - DNA, 25 bp, Homo sapien
gcatgttgccgttccttgagtcccg

SEQ ID NO: 778763 - DNA, 25 bp, Homo sapien
cgctgtctttcttggccggctgtgg

SEQ ID NO: 778764 - DNA, 25 bp, Homo sapien
tgggaagtggtccagcgctgtcttt

SEQ ID NO: 778765 - DNA, 25 bp, Homo sapien
cgggaagcgcaggttaagtttctga

SEQ ID NO: 778766 - DNA, 25 bp, Homo sapien
catcggagtttgtccaggcttgccc

SEQ ID NO: 778767 - DNA, 25 bp, Homo sapien
ctagtagccatgagtagtcagagaa

SEQ ID NO: 778768 - DNA, 25 bp, Homo sapien
ggatgctggcggaccgatgtgaaca

SEQ ID NO: 778769 - DNA, 25 bp, Homo sapien
tttttcatctgttgcgaggacattc

SEQ ID NO: 778770 - DNA, 25 bp, Homo sapien
cctccaattctggggccggtgtcat

SEQ ID NO: 778771 - DNA, 25 bp, Homo sapien
ctgttgcgaggacattctttggatt

SEQ ID NO: 778772 - DNA, 25 bp, Homo sapien
atctgttgcgaggacattctttgga

SEQ ID NO: 778773 - DNA, 25 bp, Homo sapien
aggaatcctgatcttctgtcccttg

SEQ ID NO: 778774 - DNA, 25 bp, Homo sapien
actcctggacaccaatgtggaaaga

SEQ ID NO: 778775 - DNA, 25 bp, Homo sapien
tcataactcctggacaccaatgtgg

SEQ ID NO: 778776 - DNA, 25 bp, Homo sapien
tcttctgcaaggaatcctgatcttc

SEQ ID NO: 778777 - DNA, 25 bp, Homo sapien
taatcaggccttcggctagggtgca

SEQ ID NO: 778778 - DNA, 25 bp, Homo sapien
gttgagaaacgatgggcaagacttg

SEQ ID NO: 778779 - DNA, 25 bp, Homo sapien
ctgaaagcaactattgccagtaatc

SEQ ID NO: 778780 - DNA, 25 bp, Homo sapien
gatgggcaagacttgattgacacac

SEQ ID NO: 778781 - DNA, 25 bp, Homo sapien
ctgagtgccaagactggggcgccag

SEQ ID NO: 778782 - DNA, 25 bp, Homo sapien
agactggggcgccagccatccccag

SEQ ID NO: 778783 - DNA, 25 bp, Homo sapien
agtgccaagactggggcgccagcca

SEQ ID NO: 778784 - DNA, 25 bp, Homo sapien
aagactggggcgccagccatcccca

SEQ ID NO: 778785 - DNA, 25 bp, Homo sapien
tgaggaaggcgcctttcttccattt

SEQ ID NO: 778786 - DNA, 25 bp, Homo sapien
catttgggtcgaagcccgtagctcc

SEQ ID NO: 778787 - DNA, 25 bp, Homo sapien
cttttttcttggacgaggcttgtgt

SEQ ID NO: 778788 - DNA, 25 bp, Homo sapien
cttgtgtgaggaaggcgcctttctt

SEQ ID NO: 778789 - DNA, 25 bp, Homo sapien
accttgccttccgtggagctggctc

SEQ ID NO: 778790 - DNA, 25 bp, Homo sapien
tgttggctccgacactggggcaccc

SEQ ID NO: 778791 - DNA, 25 bp, Homo sapien
gccaccttgccttccgtggagctgg

SEQ ID NO: 778792 - DNA, 25 bp, Homo sapien
ctgttggctccgacactggggcacc

SEQ ID NO: 778793 - DNA, 25 bp, Homo sapien
tccctcggtcctcgcttctctctag

SEQ ID NO: 778794 - DNA, 25 bp, Homo sapien
ttcttcttccctcggtcctcgcttc

SEQ ID NO: 778795 - DNA, 25 bp, Homo sapien
tggttggcagacagcgcctcccgta

SEQ ID NO: 778796 - DNA, 25 bp, Homo sapien
cagatggttggcagacagcgcctcc

SEQ ID NO: 778797 - DNA, 25 bp, Homo sapien
gtgggcgatgccctgcggcagccgt

SEQ ID NO: 778798 - DNA, 25 bp, Homo sapien
gcggtcacgcggaatgctggtcccc

SEQ ID NO: 778799 - DNA, 25 bp, Homo sapien
cctgggctcaggtgtaatcgtggat

SEQ ID NO: 778800 - DNA, 25 bp, Homo sapien
gctggtccccgcagtttcggccatt

SEQ ID NO: 778801 - DNA, 25 bp, Homo sapien
tcttgccaagacaaaccttggttgc

SEQ ID NO: 778802 - DNA, 25 bp, Homo sapien
agacaaaccttggttgcactgtgta

SEQ ID NO: 778803 - DNA, 25 bp, Homo sapien
gccaagacaaaccttggttgcactg

SEQ ID NO: 778804 - DNA, 25 bp, Homo sapien
ggttgcactgtgtattccgtcagtt

SEQ ID NO: 778805 - DNA, 25 bp, Homo sapien
ccacatcgccagatctcagcttggg

SEQ ID NO: 778806 - DNA, 25 bp, Homo sapien
ggaacctttctcattccgagtccaa

SEQ ID NO: 778807 - DNA, 25 bp, Homo sapien
gttagcaaggctcttgggcccacag

SEQ ID NO: 778808 - DNA, 25 bp, Homo sapien
gaggcctctccgctggagctgatct

SEQ ID NO: 778809 - DNA, 25 bp, Homo sapien
caagaggatgagtacgatttcttcc

SEQ ID NO: 778810 - DNA, 25 bp, Homo sapien
gagtccccaggacaacgggccacag

SEQ ID NO: 778811 - DNA, 25 bp, Homo sapien
ggacaacgggccacagaggaatatc

SEQ ID NO: 778812 - DNA, 25 bp, Homo sapien
ggtaaatgtatatgagctgctcggg

SEQ ID NO: 778813 - DNA, 25 bp, Homo sapien
attttcattgaagcttggcgtttgc

SEQ ID NO: 778814 - DNA, 25 bp, Homo sapien
taggccccatgtttactctttcatt

SEQ ID NO: 778815 - DNA, 25 bp, Homo sapien
gaagcttggcgtttgctgatttgtg

SEQ ID NO: 778816 - DNA, 25 bp, Homo sapien
gttgcagtgtcttctcataggcccc

SEQ ID NO: 778817 - DNA, 25 bp, Homo sapien
ctgcgaccgggtgacaagacacatc

SEQ ID NO: 778818 - DNA, 25 bp, Homo sapien
gcaccagttctgaacttcaggatta

SEQ ID NO: 778819 - DNA, 25 bp, Homo sapien
cattgcaccaactagaaggagccca

SEQ ID NO: 778820 - DNA, 25 bp, Homo sapien
aagcccaaacactcagggcagatac

SEQ ID NO: 778821 - DNA, 25 bp, Homo sapien
tccagaacagaggatggacgtggcc

SEQ ID NO: 778822 - DNA, 25 bp, Homo sapien
cctgctggtccaggtctagagagag

SEQ ID NO: 778823 - DNA, 25 bp, Homo sapien
gagggcaaaatagagacccagcgat

SEQ ID NO: 778824 - DNA, 25 bp, Homo sapien
agcgctggatgccagggtgtttcca

SEQ ID NO: 778825 - DNA, 25 bp, Homo sapien
ggacataacacccttcctgtcgtat

SEQ ID NO: 778826 - DNA, 25 bp, Homo sapien
ttgagatcccaacccttgggaagtg

SEQ ID NO: 778827 - DNA, 25 bp, Homo sapien
ctttaaggtgtctttgagatcccaa

SEQ ID NO: 778828 - DNA, 25 bp, Homo sapien
gtgccggcccaatcgcaggacataa

SEQ ID NO: 778829 - DNA, 25 bp, Homo sapien
gtttttgcatatggggagctaatta

SEQ ID NO: 778830 - DNA, 25 bp, Homo sapien
agaagggactcaacatattcagaag

SEQ ID NO: 778831 - DNA, 25 bp, Homo sapien
gaagtttttgcatatggggagctaa

SEQ ID NO: 778832 - DNA, 25 bp, Homo sapien
aagagaagggactcaacatattcag

SEQ ID NO: 778833 - DNA, 25 bp, Homo sapien
gcaggttccaggtcattaagtgtat

SEQ ID NO: 778834 - DNA, 25 bp, Homo sapien
accttcagtgccgtgcgcctgttga

SEQ ID NO: 778835 - DNA, 25 bp, Homo sapien
tggcgaccatcagctcccgacagtt

SEQ ID NO: 778836 - DNA, 25 bp, Homo sapien
cattaagtgtattgggctcagaagc

SEQ ID NO: 778837 - DNA, 25 bp, Homo sapien
tgcttcattagttggccgacggtgg

SEQ ID NO: 778838 - DNA, 25 bp, Homo sapien
tggcttccctcgttacgccagcagg

SEQ ID NO: 778839 - DNA, 25 bp, Homo sapien
gagccagctccattttgggtcccct

SEQ ID NO: 778840 - DNA, 25 bp, Homo sapien
ttgtgtttctctggcacatcgcgag

SEQ ID NO: 778841 - DNA, 25 bp, Homo sapien
actcaggctctatgggaatcccggg

SEQ ID NO: 778842 - DNA, 25 bp, Homo sapien
gaagactcaggctctatgggaatcc

SEQ ID NO: 778843 - DNA, 25 bp, Homo sapien
gatgaagactcaggctctatgggaa

SEQ ID NO: 778844 - DNA, 25 bp, Homo sapien
tggatgaagactcaggctctatggg

SEQ ID NO: 778845 - DNA, 25 bp, Homo sapien
taggtcctttagcaacatggatgcc

SEQ ID NO: 778846 - DNA, 25 bp, Homo sapien
ggattgattgtatcactgtgtagca

SEQ ID NO: 778847 - DNA, 25 bp, Homo sapien
tcatgtcaatgagtcctagagcctg

SEQ ID NO: 778848 - DNA, 25 bp, Homo sapien
catggatgccaatggtggaaatcat

SEQ ID NO: 778849 - DNA, 25 bp, Homo sapien
ttatgtcttcggctccctccgaggg

SEQ ID NO: 778850 - DNA, 25 bp, Homo sapien
tgtggttccttatgtcttcggctcc

SEQ ID NO: 778851 - DNA, 25 bp, Homo sapien
ttcctcttagctgtggttccttatg

SEQ ID NO: 778852 - DNA, 25 bp, Homo sapien
gcttcctcttagctgtggttcctta

SEQ ID NO: 778853 - DNA, 25 bp, Homo sapien
caatggcagaaatccctcctggttt

SEQ ID NO: 778854 - DNA, 25 bp, Homo sapien
ggaagacaatggcagaaatccctcc

SEQ ID NO: 778855 - DNA, 25 bp, Homo sapien
gcagaaatccctcctggtttcctgg

SEQ ID NO: 778856 - DNA, 25 bp, Homo sapien
ctttccggaagacaatggcagaaat

SEQ ID NO: 778857 - DNA, 25 bp, Homo sapien
aagtggattcaagtctggacaatgc

SEQ ID NO: 778858 - DNA, 25 bp, Homo sapien
ttcatccaggtgaggctcatccaca

SEQ ID NO: 778859 - DNA, 25 bp, Homo sapien
atccaggtgaggctcatccacacag

SEQ ID NO: 778860 - DNA, 25 bp, Homo sapien
cacacagtccctggggtaagtggat

SEQ ID NO: 778861 - DNA, 25 bp, Homo sapien
attggtcagtgcatgcgccctacag

SEQ ID NO: 778862 - DNA, 25 bp, Homo sapien
agtgcatgcgccctacaggtggtta

SEQ ID NO: 778863 - DNA, 25 bp, Homo sapien
cattttgattggtcagtgcatgcgc

SEQ ID NO: 778864 - DNA, 25 bp, Homo sapien
gcatgcgccctacaggtggttaaat

SEQ ID NO: 778865 - DNA, 25 bp, Homo sapien
ccagaccgggtccttagagctggca

SEQ ID NO: 778866 - DNA, 25 bp, Homo sapien
cagccagaccgggtccttagagctg

SEQ ID NO: 778867 - DNA, 25 bp, Homo sapien
tctgattggttggtgctcggctcac

SEQ ID NO: 778868 - DNA, 25 bp, Homo sapien
gcttctgattggttggtgctcggct

SEQ ID NO: 778869 - DNA, 25 bp, Homo sapien
aattctccagagagccctaagtggg

SEQ ID NO: 778870 - DNA, 25 bp, Homo sapien
tgcatttgcttgtgccggagccagg

SEQ ID NO: 778871 - DNA, 25 bp, Homo sapien
tcacaaattcacagagcgctgctgg

SEQ ID NO: 778872 - DNA, 25 bp, Homo sapien
gaaaagcggctctgtcaaacggagg

SEQ ID NO: 778873 - DNA, 25 bp, Homo sapien
gagggtagaagcggactgaggccat

SEQ ID NO: 778874 - DNA, 25 bp, Homo sapien
ggagctgagggtagaagcggactga

SEQ ID NO: 778875 - DNA, 25 bp, Homo sapien
gctgagggtagaagcggactgaggc

SEQ ID NO: 778876 - DNA, 25 bp, Homo sapien
ctgagggtagaagcggactgaggcc

SEQ ID NO: 778877 - DNA, 25 bp, Homo sapien
atcaaactctccgctgtggcagaaa

SEQ ID NO: 778878 - DNA, 25 bp, Homo sapien
tgtatgatcagaatcatcaaactct

SEQ ID NO: 778879 - DNA, 25 bp, Homo sapien
gggtgcaatgcattttgtatgatca

SEQ ID NO: 778880 - DNA, 25 bp, Homo sapien
ggtgcaatgcattttgtatgatcag

SEQ ID NO: 778881 - DNA, 25 bp, Homo sapien
tgaaccatttccatgaacggtagtt

SEQ ID NO: 778882 - DNA, 25 bp, Homo sapien
gcgtttgcagctaaatccctttgca

SEQ ID NO: 778883 - DNA, 25 bp, Homo sapien
cccaaagtgattgcctgcagagttc

SEQ ID NO: 778884 - DNA, 25 bp, Homo sapien
tctggatgaatgtcccggaagtcag

SEQ ID NO: 778885 - DNA, 25 bp, Homo sapien
aacacgctgaatggttaacatcccc

SEQ ID NO: 778886 - DNA, 25 bp, Homo sapien
aggggctttaaaacacgctgaatgg

SEQ ID NO: 778887 - DNA, 25 bp, Homo sapien
tgaatggttaacatccccgttcaag

SEQ ID NO: 778888 - DNA, 25 bp, Homo sapien
gggatctgagccaaaacacagctca

SEQ ID NO: 778889 - DNA, 25 bp, Homo sapien
tcctttccgtcagcttgacatgact

SEQ ID NO: 778890 - DNA, 25 bp, Homo sapien
tccgtcagcttgacatgactccaca

SEQ ID NO: 778891 - DNA, 25 bp, Homo sapien
gctctttccgagtcatacccaaagg

SEQ ID NO: 778892 - DNA, 25 bp, Homo sapien
tgacttctgggtgaaatgctctttc

SEQ ID NO: 778893 - DNA, 25 bp, Homo sapien
tagggtaggcagtgcgtgggtccac

SEQ ID NO: 778894 - DNA, 25 bp, Homo sapien
ggtaggcagtgcgtgggtccacagc

SEQ ID NO: 778895 - DNA, 25 bp, Homo sapien
agggtaggcagtgcgtgggtccaca

SEQ ID NO: 778896 - DNA, 25 bp, Homo sapien
ctagggtaggcagtgcgtgggtcca

SEQ ID NO: 778897 - DNA, 25 bp, Homo sapien
gacagcgagcaggaccttggtactt

SEQ ID NO: 778898 - DNA, 25 bp, Homo sapien
agtgtcccgtgcagccccgtgtctg

SEQ ID NO: 778899 - DNA, 25 bp, Homo sapien
ttccctcggtctggaagacagcgag

SEQ ID NO: 778900 - DNA, 25 bp, Homo sapien
tctgaagagggtgtcaccgatgccc

SEQ ID NO: 778901 - DNA, 25 bp, Homo sapien
caggaactcccaacacgggtttgct

SEQ ID NO: 778902 - DNA, 25 bp, Homo sapien
ctgtggctacgtttctctgttccac

SEQ ID NO: 778903 - DNA, 25 bp, Homo sapien
cctgtggctacgtttctctgttcca

SEQ ID NO: 778904 - DNA, 25 bp, Homo sapien
gatgccaggaactcccaacacgggt

SEQ ID NO: 778905 - DNA, 25 bp, Homo sapien
tcaccaacacccatctcaggagcct

SEQ ID NO: 778906 - DNA, 25 bp, Homo sapien
accaacacccatctcaggagcctcc

SEQ ID NO: 778907 - DNA, 25 bp, Homo sapien
gtcaccaacacccatctcaggagcc

SEQ ID NO: 778908 - DNA, 25 bp, Homo sapien
tgtcaccaacacccatctcaggagc

SEQ ID NO: 778909 - DNA, 25 bp, Homo sapien
gcttattcccccttgcttggagcct

SEQ ID NO: 778910 - DNA, 25 bp, Homo sapien
cttgattgatgttggcttattcccc

SEQ ID NO: 778911 - DNA, 25 bp, Homo sapien
attctgttggtcaggagcaatctcg

SEQ ID NO: 778912 - DNA, 25 bp, Homo sapien
tgactggtctctccccttgattgat

SEQ ID NO: 778913 - DNA, 25 bp, Homo sapien
ccttcgtgggtccggttcatgcttt

SEQ ID NO: 778914 - DNA, 25 bp, Homo sapien
cttcgtgggtccggttcatgctttg

SEQ ID NO: 778915 - DNA, 25 bp, Homo sapien
agggttgacataggtggcactgcct

SEQ ID NO: 778916 - DNA, 25 bp, Homo sapien
acataggtggcactgcctctgattt

SEQ ID NO: 778917 - DNA, 25 bp, Homo sapien
tgacataggtggcactgcctctgat

SEQ ID NO: 778918 - DNA, 25 bp, Homo sapien
ggttgacataggtggcactgcctct

SEQ ID NO: 778919 - DNA, 25 bp, Homo sapien
gacatcaagaggacatggaggttct

SEQ ID NO: 778920 - DNA, 25 bp, Homo sapien
tgagtacagttggagacatcaagag

SEQ ID NO: 778921 - DNA, 25 bp, Homo sapien
ggagacatcaagaggacatggaggt

SEQ ID NO: 778922 - DNA, 25 bp, Homo sapien
gacatggaggttcttggaatgccat

SEQ ID NO: 778923 - DNA, 25 bp, Homo sapien
tgagatatcgtcctgtgctgtgtcc

SEQ ID NO: 778924 - DNA, 25 bp, Homo sapien
tccaggacttttgggcttggtggcc

SEQ ID NO: 778925 - DNA, 25 bp, Homo sapien
gagcataccagtgggtgttcctctg

SEQ ID NO: 778926 - DNA, 25 bp, Homo sapien
aagtctgagctggactgagcatacc

SEQ ID NO: 778927 - DNA, 25 bp, Homo sapien
tctgaattctttcctctttctcaag

SEQ ID NO: 778928 - DNA, 25 bp, Homo sapien
tgaattctttcctctttctcaagtt

SEQ ID NO: 778929 - DNA, 25 bp, Homo sapien
ctctgaattctttcctctttctcaa

SEQ ID NO: 778930 - DNA, 25 bp, Homo sapien
ctgaattctttcctctttctcaagt

SEQ ID NO: 778931 - DNA, 25 bp, Homo sapien
tgagtggcagcttgattttcctttc

SEQ ID NO: 778932 - DNA, 25 bp, Homo sapien
catttcactgtcacacagagtcagg

SEQ ID NO: 778933 - DNA, 25 bp, Homo sapien
ttccgtatcggtgtccccattcatt

SEQ ID NO: 778934 - DNA, 25 bp, Homo sapien
tggggattccgcgctctgagtggca

SEQ ID NO: 778935 - DNA, 25 bp, Homo sapien
catattggtcataggctgtctcaga

SEQ ID NO: 778936 - DNA, 25 bp, Homo sapien
cacatctgaggtgtgcgtgacccag

SEQ ID NO: 778937 - DNA, 25 bp, Homo sapien
tccttgtatcttagacctgctgcag

SEQ ID NO: 778938 - DNA, 25 bp, Homo sapien
tggacattgcaaaccgccttctcag

SEQ ID NO: 778939 - DNA, 25 bp, Homo sapien
tgttccggtgctcggcagccagtgt

SEQ ID NO: 778940 - DNA, 25 bp, Homo sapien
gatgcattgcaggagcacgactgtt

SEQ ID NO: 778941 - DNA, 25 bp, Homo sapien
ccagtgtattttctgatcgttgcca

SEQ ID NO: 778942 - DNA, 25 bp, Homo sapien
tacgtcctggatagcatgtgccagc

SEQ ID NO: 778943 - DNA, 25 bp, Homo sapien
catctgtgatggagatgacgatttt

SEQ ID NO: 778944 - DNA, 25 bp, Homo sapien
tagtcatctgtgatggagatgacga

SEQ ID NO: 778945 - DNA, 25 bp, Homo sapien
ttagtcatctgtgatggagatgacg

SEQ ID NO: 778946 - DNA, 25 bp, Homo sapien
gtcatctgtgatggagatgacgatt

SEQ ID NO: 778947 - DNA, 25 bp, Homo sapien
ctgtaaaaaagaatactcgtgttca

SEQ ID NO: 778948 - DNA, 25 bp, Homo sapien
taaaaaagaatactcgtgttcagct

SEQ ID NO: 778949 - DNA, 25 bp, Homo sapien
aaagaatactcgtgttcagctacat

SEQ ID NO: 778950 - DNA, 25 bp, Homo sapien
actcgtgttcagctacatttttaca

SEQ ID NO: 778951 - DNA, 25 bp, Homo sapien
caccacaggagggactccgtgacat

SEQ ID NO: 778952 - DNA, 25 bp, Homo sapien
ggttgaagtgacttgtgcctgtgcc

SEQ ID NO: 778953 - DNA, 25 bp, Homo sapien
gattctgatggttgaagtgacttgt

SEQ ID NO: 778954 - DNA, 25 bp, Homo sapien
taccctattcttgcaagcttggctt

SEQ ID NO: 778955 - DNA, 25 bp, Homo sapien
tcaacggccttataactttccatgc

SEQ ID NO: 778956 - DNA, 25 bp, Homo sapien
cctgggctgtggaaatcaacggcct

SEQ ID NO: 778957 - DNA, 25 bp, Homo sapien
tgtggaaatcaacggccttataact

SEQ ID NO: 778958 - DNA, 25 bp, Homo sapien
ggccttataactttccatgcttgca

SEQ ID NO: 778959 - DNA, 25 bp, Homo sapien
ctgtctgcagtgagactttccctcc

SEQ ID NO: 778960 - DNA, 25 bp, Homo sapien
tctgcagtgagactttccctccatc

SEQ ID NO: 778961 - DNA, 25 bp, Homo sapien
tgtctgcagtgagactttccctcca

SEQ ID NO: 778962 - DNA, 25 bp, Homo sapien
ggctgccacgtcatctgactgtgtc

SEQ ID NO: 778963 - DNA, 25 bp, Homo sapien
taagcttatcgttgaagttaaaata

SEQ ID NO: 778964 - DNA, 25 bp, Homo sapien
tatcctgaaattggaattaagctta

SEQ ID NO: 778965 - DNA, 25 bp, Homo sapien
ggaattaagcttatcgttgaagtta

SEQ ID NO: 778966 - DNA, 25 bp, Homo sapien
aattggaattaagcttatcgttgaa

SEQ ID NO: 778967 - DNA, 25 bp, Homo sapien
ggaaaagtcaacacagcaggcagat

SEQ ID NO: 778968 - DNA, 25 bp, Homo sapien
caggcagatggacatgtctggaggg

SEQ ID NO: 778969 - DNA, 25 bp, Homo sapien
tggtcagtaagcttgtagctgcctc

SEQ ID NO: 778970 - DNA, 25 bp, Homo sapien
ggagagcttgagttcatttctggtc

SEQ ID NO: 778971 - DNA, 25 bp, Homo sapien
ctatagggtaactttctgacattgc

SEQ ID NO: 778972 - DNA, 25 bp, Homo sapien
gaccctatagggtaactttctgaca

SEQ ID NO: 778973 - DNA, 25 bp, Homo sapien
ccctatagggtaactttctgacatt

SEQ ID NO: 778974 - DNA, 25 bp, Homo sapien
cctatagggtaactttctgacattg

SEQ ID NO: 778975 - DNA, 25 bp, Homo sapien
gagcagaggtaagggtaactatgta

SEQ ID NO: 778976 - DNA, 25 bp, Homo sapien
gtaggtatggtgaaagacaatataa

SEQ ID NO: 778977 - DNA, 25 bp, Homo sapien
taagggtaactatgtaggtatggtg

SEQ ID NO: 778978 - DNA, 25 bp, Homo sapien
ggtatggtgaaagacaatataaaca

SEQ ID NO: 778979 - DNA, 25 bp, Homo sapien
tgtggtggaaattcgggctgtgacg

SEQ ID NO: 778980 - DNA, 25 bp, Homo sapien
tctgtttgatcatccttgctcgtgg

SEQ ID NO: 778981 - DNA, 25 bp, Homo sapien
atctggaaagtcctcggacatgcgc

SEQ ID NO: 778982 - DNA, 25 bp, Homo sapien
ttctactcagactccattggccatg

SEQ ID NO: 778983 - DNA, 25 bp, Homo sapien
tcttgcaaacatcgaattcactgaa

SEQ ID NO: 778984 - DNA, 25 bp, Homo sapien
tagctaaaacctggacataatccaa

SEQ ID NO: 778985 - DNA, 25 bp, Homo sapien
ggcaaaactaaactctggtgttcaa

SEQ ID NO: 778986 - DNA, 25 bp, Homo sapien
gtatgtcccagtagcattttataaa

SEQ ID NO: 778987 - DNA, 25 bp, Homo sapien
ttagaagattttgctctcattgttt

SEQ ID NO: 778988 - DNA, 25 bp, Homo sapien
gggttttagaagattttgctctcat

SEQ ID NO: 778989 - DNA, 25 bp, Homo sapien
catcagttgcctcttgaaactctct

SEQ ID NO: 778990 - DNA, 25 bp, Homo sapien
atcagttgcctcttgaaactctctc

SEQ ID NO: 778991 - DNA, 25 bp, Homo sapien
aaggtgtggccttgagacaggaatg

SEQ ID NO: 778992 - DNA, 25 bp, Homo sapien
tggtaaaggtcgaagcgctgggtgt

SEQ ID NO: 778993 - DNA, 25 bp, Homo sapien
gaagactccactgcaggtggaaggt

SEQ ID NO: 778994 - DNA, 25 bp, Homo sapien
cgctgggtgtggaagactccactgc

SEQ ID NO: 778995 - DNA, 25 bp, Homo sapien
cggccgtgtccattcccaaggctta

SEQ ID NO: 778996 - DNA, 25 bp, Homo sapien
ccaaggcttaggtatccagtgcagg

SEQ ID NO: 778997 - DNA, 25 bp, Homo sapien
tgccttttgggagggcccttctcga

SEQ ID NO: 778998 - DNA, 25 bp, Homo sapien
ctcgaggtggcggccgtgtccattc

SEQ ID NO: 778999 - DNA, 25 bp, Homo sapien
atttataatctatatacaagccctg

SEQ ID NO: 779000 - DNA, 25 bp, Homo sapien
taatctatatacaagccctgggggt

SEQ ID NO: 779001 - DNA, 25 bp, Homo sapien
atctatatacaagccctgggggtag

SEQ ID NO: 779002 - DNA, 25 bp, Homo sapien
ttataatctatatacaagccctggg

SEQ ID NO: 779003 - DNA, 25 bp, Homo sapien
ctgctccacagtaaaccattcttag

SEQ ID NO: 779004 - DNA, 25 bp, Homo sapien
attcttagagtttgtgaatcagaga

SEQ ID NO: 779005 - DNA, 25 bp, Homo sapien
actgctccacagtaaaccattctta

SEQ ID NO: 779006 - DNA, 25 bp, Homo sapien
tgctccacagtaaaccattcttaga

SEQ ID NO: 779007 - DNA, 25 bp, Homo sapien
cataaattatgagagtaggcttctt

SEQ ID NO: 779008 - DNA, 25 bp, Homo sapien
ccataaattatgagagtaggcttct

SEQ ID NO: 779009 - DNA, 25 bp, Homo sapien
acagacttgcctccgtgttccttgc

SEQ ID NO: 779010 - DNA, 25 bp, Homo sapien
cttgcctccgtgttccttgcaccat

SEQ ID NO: 779011 - DNA, 25 bp, Homo sapien
cacagacttgcctccgtgttccttg

SEQ ID NO: 779012 - DNA, 25 bp, Homo sapien
agacttgcctccgtgttccttgcac

SEQ ID NO: 779013 - DNA, 25 bp, Homo sapien
atggtaacacagttccaatgcagca

SEQ ID NO: 779014 - DNA, 25 bp, Homo sapien
ggtaacacagttccaatgcagcaca

SEQ ID NO: 779015 - DNA, 25 bp, Homo sapien
tggtaacacagttccaatgcagcac

SEQ ID NO: 779016 - DNA, 25 bp, Homo sapien
taacacagttccaatgcagcacaca

SEQ ID NO: 779017 - DNA, 25 bp, Homo sapien
ttattaaggaggttatagttgcatg

SEQ ID NO: 779018 - DNA, 25 bp, Homo sapien
attaaggaggttatagttgcatgaa

SEQ ID NO: 779019 - DNA, 25 bp, Homo sapien
tattaaggaggttatagttgcatga

SEQ ID NO: 779020 - DNA, 25 bp, Homo sapien
ttaaggaggttatagttgcatgaat

SEQ ID NO: 779021 - DNA, 25 bp, Homo sapien
cattgacaactcacacactttggtg

SEQ ID NO: 779022 - DNA, 25 bp, Homo sapien
aatgctgtcgcgctgcattgacaac

SEQ ID NO: 779023 - DNA, 25 bp, Homo sapien
tctaaaggtctgagcgccagactgg

SEQ ID NO: 779024 - DNA, 25 bp, Homo sapien
tggcaacttataatgagtctaaagg

SEQ ID NO: 779025 - DNA, 25 bp, Homo sapien
tctaagaatatgtaggaatttcata

SEQ ID NO: 779026 - DNA, 25 bp, Homo sapien
taaaagtggactctgaagacctgga

SEQ ID NO: 779027 - DNA, 25 bp, Homo sapien
tgatgagacaaagacccttgcaaca

SEQ ID NO: 779028 - DNA, 25 bp, Homo sapien
catgtgcccgtagtcacaactgctt

SEQ ID NO: 779029 - DNA, 25 bp, Homo sapien
atgggtaagggcactcggcgggcaa

SEQ ID NO: 779030 - DNA, 25 bp, Homo sapien
tgaggaggatgggtaagggcactcg

SEQ ID NO: 779031 - DNA, 25 bp, Homo sapien
ggtaagggcactcggcgggcaagga

SEQ ID NO: 779032 - DNA, 25 bp, Homo sapien
gaggatgggtaagggcactcggcgg

SEQ ID NO: 779033 - DNA, 25 bp, Homo sapien
agccactcggtacggcgctaacgcc

SEQ ID NO: 779034 - DNA, 25 bp, Homo sapien
gtctcgcagtaccagtgcgaacctt

SEQ ID NO: 779035 - DNA, 25 bp, Homo sapien
agtgcgaacctttgggctctccagg

SEQ ID NO: 779036 - DNA, 25 bp, Homo sapien
gcagcgtcgtagctgcccacagttc

SEQ ID NO: 779037 - DNA, 25 bp, Homo sapien
agggctgacccgcgccgtccagcct

SEQ ID NO: 779038 - DNA, 25 bp, Homo sapien
gcgactcactagcttcaggcagccg

SEQ ID NO: 779039 - DNA, 25 bp, Homo sapien
ggccaccagcgcctcgcggtaacga

SEQ ID NO: 779040 - DNA, 25 bp, Homo sapien
agtgcgcggcgccgcgactcactag

SEQ ID NO: 779041 - DNA, 25 bp, Homo sapien
gctccgccagccgacgaccttgttt

SEQ ID NO: 779042 - DNA, 25 bp, Homo sapien
ccacattggttaggcggatctggtt

SEQ ID NO: 779043 - DNA, 25 bp, Homo sapien
cgtaccacggccacattggttaggc

SEQ ID NO: 779044 - DNA, 25 bp, Homo sapien
ttcatccgtaccacggccacattgg

SEQ ID NO: 779045 - DNA, 25 bp, Homo sapien
cctcggaggtgacggctcaggccca

SEQ ID NO: 779046 - DNA, 25 bp, Homo sapien
ctcggacagcgacgtctcatgctca

SEQ ID NO: 779047 - DNA, 25 bp, Homo sapien
tggcttaggcgccaagctcggacag

SEQ ID NO: 779048 - DNA, 25 bp, Homo sapien
cattcactcgacttgggcagagaca

SEQ ID NO: 779049 - DNA, 25 bp, Homo sapien
catgggaggacgtaagaaacacaag

SEQ ID NO: 779050 - DNA, 25 bp, Homo sapien
tcatgggaggacgtaagaaacacaa

SEQ ID NO: 779051 - DNA, 25 bp, Homo sapien
atgggaggacgtaagaaacacaagg

SEQ ID NO: 779052 - DNA, 25 bp, Homo sapien
gtctgcagaacttcatcaaggtctt

SEQ ID NO: 779053 - DNA, 25 bp, Homo sapien
gagtgggtctgcagaacttcatcaa

SEQ ID NO: 779054 - DNA, 25 bp, Homo sapien
ggaaacatttacaaacactgagtgg

SEQ ID NO: 779055 - DNA, 25 bp, Homo sapien
ttaggaaacatttacaaacactgag

SEQ ID NO: 779056 - DNA, 25 bp, Homo sapien
tgttccaaacgcactgatgagatct

SEQ ID NO: 779057 - DNA, 25 bp, Homo sapien
caaacgcactgatgagatcttcctt

SEQ ID NO: 779058 - DNA, 25 bp, Homo sapien
tggtcatctgttccaaacgcactga

SEQ ID NO: 779059 - DNA, 25 bp, Homo sapien
catctgttccaaacgcactgatgag

SEQ ID NO: 779060 - DNA, 25 bp, Homo sapien
tgtgtgtgtctttatctgatacttg

SEQ ID NO: 779061 - DNA, 25 bp, Homo sapien
ctttatctgatacttgaacttctcc

SEQ ID NO: 779062 - DNA, 25 bp, Homo sapien
atctgatacttgaacttctccttta

SEQ ID NO: 779063 - DNA, 25 bp, Homo sapien
gttgtgtgtgtctttatctgatact

SEQ ID NO: 779064 - DNA, 25 bp, Homo sapien
gccacaataattgcaatgtccctaa

SEQ ID NO: 779065 - DNA, 25 bp, Homo sapien
ctgccacaataattgcaatgtccct

SEQ ID NO: 779066 - DNA, 25 bp, Homo sapien
cacaataattgcaatgtccctaaac

SEQ ID NO: 779067 - DNA, 25 bp, Homo sapien
caataattgcaatgtccctaaacat

SEQ ID NO: 779068 - DNA, 25 bp, Homo sapien
ctttgtttcaggagtcacacatttg

SEQ ID NO: 779069 - DNA, 25 bp, Homo sapien
tttgtttcaggagtcacacatttgt

SEQ ID NO: 779070 - DNA, 25 bp, Homo sapien
ctctttgtttcaggagtcacacatt

SEQ ID NO: 779071 - DNA, 25 bp, Homo sapien
tctttgtttcaggagtcacacattt

SEQ ID NO: 779072 - DNA, 25 bp, Homo sapien
tctcaataaggatcacggtgtatgg

SEQ ID NO: 779073 - DNA, 25 bp, Homo sapien
ctcaataaggatcacggtgtatggt

SEQ ID NO: 779074 - DNA, 25 bp, Homo sapien
tttcaccaaatagtggatgtccttc

SEQ ID NO: 779075 - DNA, 25 bp, Homo sapien
ctgctgttttgtactcctgttggtt

SEQ ID NO: 779076 - DNA, 25 bp, Homo sapien
tgtactcctgttggttttcaccaaa

SEQ ID NO: 779077 - DNA, 25 bp, Homo sapien
tcaccaaatagtggatgtccttcat

SEQ ID NO: 779078 - DNA, 25 bp, Homo sapien
aaaacgacgacaagataccaccagg

SEQ ID NO: 779079 - DNA, 25 bp, Homo sapien
tggtagtccccaggtatacagaaat

SEQ ID NO: 779080 - DNA, 25 bp, Homo sapien
tctcaaaagcagacagacgaggcac

SEQ ID NO: 779081 - DNA, 25 bp, Homo sapien
gaaactgaactcttaaacgctgttg

SEQ ID NO: 779082 - DNA, 25 bp, Homo sapien
ctaccaagacaaaatcgagaatgca

SEQ ID NO: 779083 - DNA, 25 bp, Homo sapien
taccaagacaaaatcgagaatgcaa

SEQ ID NO: 779084 - DNA, 25 bp, Homo sapien
catgtgagcacgttctatcttcatt

SEQ ID NO: 779085 - DNA, 25 bp, Homo sapien
tttctatgaccttgatcagtggctt

SEQ ID NO: 779086 - DNA, 25 bp, Homo sapien
gcctcatgtgagcacgttctatctt

SEQ ID NO: 779087 - DNA, 25 bp, Homo sapien
gaccttgatcagtggcttgagcttt

SEQ ID NO: 779088 - DNA, 25 bp, Homo sapien
atttctaactgttggccataatctt

SEQ ID NO: 779089 - DNA, 25 bp, Homo sapien
caatatttaggtaacatgaagcaaa

SEQ ID NO: 779090 - DNA, 25 bp, Homo sapien
atacaatatttaggtaacatgaagc

SEQ ID NO: 779091 - DNA, 25 bp, Homo sapien
tatttaggtaacatgaagcaaagaa

SEQ ID NO: 779092 - DNA, 25 bp, Homo sapien
tagagaatacaatatttaggtaaca

SEQ ID NO: 779093 - DNA, 25 bp, Homo sapien
tcctttatcaggcttctagggattc

SEQ ID NO: 779094 - DNA, 25 bp, Homo sapien
ctgtgtttagtgtcaccaggttcac

SEQ ID NO: 779095 - DNA, 25 bp, Homo sapien
tgtagacagctgaatttacactgtg

SEQ ID NO: 779096 - DNA, 25 bp, Homo sapien
taaataaataagctgcaaagccttg

SEQ ID NO: 779097 - DNA, 25 bp, Homo sapien
tttggcagaccacagacatgaaaca

SEQ ID NO: 779098 - DNA, 25 bp, Homo sapien
tagctcatcaatttctcggaagcag

SEQ ID NO: 779099 - DNA, 25 bp, Homo sapien
tgagacagagtagcaaaatgccact

SEQ ID NO: 779100 - DNA, 25 bp, Homo sapien
caagagctgcctcaagtaactttca

SEQ ID NO: 779101 - DNA, 25 bp, Homo sapien
agaataatctaagttatggcagcat

SEQ ID NO: 779102 - DNA, 25 bp, Homo sapien
aaccaagaataatctaagttatggc

SEQ ID NO: 779103 - DNA, 25 bp, Homo sapien
ataaacataagagtggttttattga

SEQ ID NO: 779104 - DNA, 25 bp, Homo sapien
caagaataatctaagttatggcagc

SEQ ID NO: 779105 - DNA, 25 bp, Homo sapien
tcagcctccttcattgactcattag

SEQ ID NO: 779106 - DNA, 25 bp, Homo sapien
tcacatagaggataagaacctttca

SEQ ID NO: 779107 - DNA, 25 bp, Homo sapien
gatgtgattgctgccctatatttta

SEQ ID NO: 779108 - DNA, 25 bp, Homo sapien
gataagatctcggttcatagcaagc

SEQ ID NO: 779109 - DNA, 25 bp, Homo sapien
cctgggctgtggaaatcaacggcct

SEQ ID NO: 779110 - DNA, 25 bp, Homo sapien
caccacaggagggactccgtgacat

SEQ ID NO: 779111 - DNA, 25 bp, Homo sapien
cataccctattcttgcaagcttggc

SEQ ID NO: 779112 - DNA, 25 bp, Homo sapien
tctgatggttgaagtgacttgtgcc

SEQ ID NO: 779113 - DNA, 25 bp, Homo sapien
ccgcgtctggcatatttcttatatt

SEQ ID NO: 779114 - DNA, 25 bp, Homo sapien
gcgtctggcatatttcttatatttt

SEQ ID NO: 779115 - DNA, 25 bp, Homo sapien
ccaccgcgtctggcatatttcttat

SEQ ID NO: 779116 - DNA, 25 bp, Homo sapien
taggactaatgggtgtgccaccgca

SEQ ID NO: 779117 - DNA, 25 bp, Homo sapien
ccgtagctctctagttacatcctgg

SEQ ID NO: 779118 - DNA, 25 bp, Homo sapien
cgtagctctctagttacatcctgga

SEQ ID NO: 779119 - DNA, 25 bp, Homo sapien
tagctctctagttacatcctggaca

SEQ ID NO: 779120 - DNA, 25 bp, Homo sapien
gtagctctctagttacatcctggac

SEQ ID NO: 779121 - DNA, 25 bp, Homo sapien
cctcattccccctctccacaatctt

SEQ ID NO: 779122 - DNA, 25 bp, Homo sapien
tcccttctctgatgggcagcccctc

SEQ ID NO: 779123 - DNA, 25 bp, Homo sapien
ccaacactgaggtcccttctctgat

SEQ ID NO: 779124 - DNA, 25 bp, Homo sapien
cttcctcttccaagatgtgacctct

SEQ ID NO: 779125 - DNA, 25 bp, Homo sapien
gataatctcactcttataaggtttc

SEQ ID NO: 779126 - DNA, 25 bp, Homo sapien
cttgtacatgataatctcactctta

SEQ ID NO: 779127 - DNA, 25 bp, Homo sapien
taatctcactcttataaggtttcat

SEQ ID NO: 779128 - DNA, 25 bp, Homo sapien
acatgataatctcactcttataagg

SEQ ID NO: 779129 - DNA, 25 bp, Homo sapien
tttgacacaatatcttgctgtgttg

SEQ ID NO: 779130 - DNA, 25 bp, Homo sapien
ttcctgtcacatgagtctcccaagt

SEQ ID NO: 779131 - DNA, 25 bp, Homo sapien
ttttttgacacaatatcttgctgtg

SEQ ID NO: 779132 - DNA, 25 bp, Homo sapien
agtgatcttcctgtcacatgagtct

SEQ ID NO: 779133 - DNA, 25 bp, Homo sapien
ctacagccattgttgtattcaactg

SEQ ID NO: 779134 - DNA, 25 bp, Homo sapien
tacagccattgttgtattcaactgc

SEQ ID NO: 779135 - DNA, 25 bp, Homo sapien
gccattgttgtattcaactgcatca

SEQ ID NO: 779136 - DNA, 25 bp, Homo sapien
cagccattgttgtattcaactgcat

SEQ ID NO: 779137 - DNA, 25 bp, Homo sapien
ccttttagggtcaagtccagggctg

SEQ ID NO: 779138 - DNA, 25 bp, Homo sapien
cctggagcccaagtcctctgggtta

SEQ ID NO: 779139 - DNA, 25 bp, Homo sapien
tccagggctgcgttactgggtcctg

SEQ ID NO: 779140 - DNA, 25 bp, Homo sapien
gagcccaagtcctctgggttagaac

SEQ ID NO: 779141 - DNA, 25 bp, Homo sapien
ctagagcaagcggtgacctgaagag

SEQ ID NO: 779142 - DNA, 25 bp, Homo sapien
ggtgacctgaagaggcgcaggaagc

SEQ ID NO: 779143 - DNA, 25 bp, Homo sapien
caagcggtgacctgaagaggcgcag

SEQ ID NO: 779144 - DNA, 25 bp, Homo sapien
ctgggaactagagcaagcggtgacc

SEQ ID NO: 779145 - DNA, 25 bp, Homo sapien
cgtacagcgacggccggcgccaggc

SEQ ID NO: 779146 - DNA, 25 bp, Homo sapien
gggcaaatccaggcgggtgtccttc

SEQ ID NO: 779147 - DNA, 25 bp, Homo sapien
caaatccaggcgggtgtccttctcg

SEQ ID NO: 779148 - DNA, 25 bp, Homo sapien
caaggctgttctgctcccgaggggc

SEQ ID NO: 779149 - DNA, 25 bp, Homo sapien
aatccaggcgggtgtccttctcggg

SEQ ID NO: 779150 - DNA, 25 bp, Homo sapien
gtctgctcgcgaagtcccctcccgt

SEQ ID NO: 779151 - DNA, 25 bp, Homo sapien
tctgctcgcgaagtcccctcccgtc

SEQ ID NO: 779152 - DNA, 25 bp, Homo sapien
gcgtctgctcgcgaagtcccctccc

SEQ ID NO: 779153 - DNA, 25 bp, Homo sapien
tgctcgcgaagtcccctcccgtcca

SEQ ID NO: 779154 - DNA, 25 bp, Homo sapien
tgcattactacgattctcccagggc

SEQ ID NO: 779155 - DNA, 25 bp, Homo sapien
ttctcccagggcagatataaggggg

SEQ ID NO: 779156 - DNA, 25 bp, Homo sapien
gggcagatataagggggtgatcagc

SEQ ID NO: 779157 - DNA, 25 bp, Homo sapien
cattactacgattctcccagggcag

SEQ ID NO: 779158 - DNA, 25 bp, Homo sapien
gagaccacgctgttgcattccagac

SEQ ID NO: 779159 - DNA, 25 bp, Homo sapien
ccgcctgcctgggccaacatggcaa

SEQ ID NO: 779160 - DNA, 25 bp, Homo sapien
gagccgagaccacgctgttgcattc

SEQ ID NO: 779161 - DNA, 25 bp, Homo sapien
gccgagaccacgctgttgcattcca

SEQ ID NO: 779162 - DNA, 25 bp, Homo sapien
agcaggtcactgaagtcatgagggc

SEQ ID NO: 779163 - DNA, 25 bp, Homo sapien
cagaagcaggtcactgaagtcatga

SEQ ID NO: 779164 - DNA, 25 bp, Homo sapien
gaagcaggtcactgaagtcatgagg

SEQ ID NO: 779165 - DNA, 25 bp, Homo sapien
gggcagaagcaggtcactgaagtca

SEQ ID NO: 779166 - DNA, 25 bp, Homo sapien
cttgcagagactgtggctgatagac

SEQ ID NO: 779167 - DNA, 25 bp, Homo sapien
gaaacttgcagagactgtggctgat

SEQ ID NO: 779168 - DNA, 25 bp, Homo sapien
gctgctcttggaaacttgcagagac

SEQ ID NO: 779169 - DNA, 25 bp, Homo sapien
tcttggaaacttgcagagactgtgg

SEQ ID NO: 779170 - DNA, 25 bp, Homo sapien
gccataagtcagcaatttaatggtt

SEQ ID NO: 779171 - DNA, 25 bp, Homo sapien
gaataagccataagtcagcaattta

SEQ ID NO: 779172 - DNA, 25 bp, Homo sapien
taagtcagcaatttaatggttgttg

SEQ ID NO: 779173 - DNA, 25 bp, Homo sapien
aataagccataagtcagcaatttaa

SEQ ID NO: 779174 - DNA, 25 bp, Homo sapien
ccaacatcacatccccgtatgttat

SEQ ID NO: 779175 - DNA, 25 bp, Homo sapien
cagggaaactagatggctgtagttc

SEQ ID NO: 779176 - DNA, 25 bp, Homo sapien
tcatcagggtccagttgccaccact

SEQ ID NO: 779177 - DNA, 25 bp, Homo sapien
tatgttatcttctcatcagggtcca

SEQ ID NO: 779178 - DNA, 25 bp, Homo sapien
ctgcataacagaaatgctccatttt

SEQ ID NO: 779179 - DNA, 25 bp, Homo sapien
ataacagaaatgctccattttttac

SEQ ID NO: 779180 - DNA, 25 bp, Homo sapien
gcataacagaaatgctccatttttt

SEQ ID NO: 779181 - DNA, 25 bp, Homo sapien
tgcataacagaaatgctccattttt

SEQ ID NO: 779182 - DNA, 25 bp, Homo sapien
aagtacaagatgttgccacctcata

SEQ ID NO: 779183 - DNA, 25 bp, Homo sapien
agtacaagatgttgccacctcataa

SEQ ID NO: 779184 - DNA, 25 bp, Homo sapien
gtacaagatgttgccacctcataag

SEQ ID NO: 779185 - DNA, 25 bp, Homo sapien
cttaatgatgacgtttggcttggtg

SEQ ID NO: 779186 - DNA, 25 bp, Homo sapien
caacttaatgatgacgtttggcttg

SEQ ID NO: 779187 - DNA, 25 bp, Homo sapien
tccctgctccaacttaatgatgacg

SEQ ID NO: 779188 - DNA, 25 bp, Homo sapien
tgctccaacttaatgatgacgtttg

SEQ ID NO: 779189 - DNA, 25 bp, Homo sapien
agatggaagactgagtttcatcgaa

SEQ ID NO: 779190 - DNA, 25 bp, Homo sapien
tgagtttcatcgaaggagtgggatc

SEQ ID NO: 779191 - DNA, 25 bp, Homo sapien
ggaagactgagtttcatcgaaggag

SEQ ID NO: 779192 - DNA, 25 bp, Homo sapien
agactgagtttcatcgaaggagtgg

SEQ ID NO: 779193 - DNA, 25 bp, Homo sapien
tctcaagagaatgggtagactgaac

SEQ ID NO: 779194 - DNA, 25 bp, Homo sapien
taccaccacttcagatttagacagg

SEQ ID NO: 779195 - DNA, 25 bp, Homo sapien
catgatatgccctgttgggagcctt

SEQ ID NO: 779196 - DNA, 25 bp, Homo sapien
ccagggaagagcagtgagaatgcaa

SEQ ID NO: 779197 - DNA, 25 bp, Homo sapien
agcaatcctcttttacctcaacatt

SEQ ID NO: 779198 - DNA, 25 bp, Homo sapien
cactgcaacctgagaactctgagct

SEQ ID NO: 779199 - DNA, 25 bp, Homo sapien
cttttacctcaacattcccaagtag

SEQ ID NO: 779200 - DNA, 25 bp, Homo sapien
ccatgcccagtccagcatatatata

SEQ ID NO: 779201 - DNA, 25 bp, Homo sapien
tcctgcatgtgaccacttctatctg

SEQ ID NO: 779202 - DNA, 25 bp, Homo sapien
catcctgcatgtgaccacttctatc

SEQ ID NO: 779203 - DNA, 25 bp, Homo sapien
tacatcctgcatgtgaccacttcta

SEQ ID NO: 779204 - DNA, 25 bp, Homo sapien
ctgccttataaccaggacccctgtt

SEQ ID NO: 779205 - DNA, 25 bp, Homo sapien
cccaagtatttgagagactgtggtg

SEQ ID NO: 779206 - DNA, 25 bp, Homo sapien
tcccaagtatttgagagactgtggt

SEQ ID NO: 779207 - DNA, 25 bp, Homo sapien
agtcccaagtatttgagagactgtg

SEQ ID NO: 779208 - DNA, 25 bp, Homo sapien
gtcccaagtatttgagagactgtgg

SEQ ID NO: 779209 - DNA, 25 bp, Homo sapien
cataagagagtacagcccattcaca

SEQ ID NO: 779210 - DNA, 25 bp, Homo sapien
tgcagaacatcgatacagaaataga

SEQ ID NO: 779211 - DNA, 25 bp, Homo sapien
tcagctgtctgaaatctgctcaaaa

SEQ ID NO: 779212 - DNA, 25 bp, Homo sapien
taaaggatacaaggagaacaatgtc

SEQ ID NO: 779213 - DNA, 25 bp, Homo sapien
gcctagggcaaagctgtacacagac

SEQ ID NO: 779214 - DNA, 25 bp, Homo sapien
ggctgccaaaaggactgatctgcct

SEQ ID NO: 779215 - DNA, 25 bp, Homo sapien
ggaatttcagtagccatgcacatgc

SEQ ID NO: 779216 - DNA, 25 bp, Homo sapien
caaactagaggcgtgctaacagcat

SEQ ID NO: 779217 - DNA, 25 bp, Homo sapien
taaatgaacgctagcagcaagctgc

SEQ ID NO: 779218 - DNA, 25 bp, Homo sapien
tatgtgtagaagtcctggccatgcc

SEQ ID NO: 779219 - DNA, 25 bp, Homo sapien
gcccatgtgtgaaaacaaccaggat

SEQ ID NO: 779220 - DNA, 25 bp, Homo sapien
gaatactctgaggtttcaaactggc

SEQ ID NO: 779221 - DNA, 25 bp, Homo sapien
tcaatgaaacgagtccagagacgct

SEQ ID NO: 779222 - DNA, 25 bp, Homo sapien
catgactttctctgctgatgccgga

SEQ ID NO: 779223 - DNA, 25 bp, Homo sapien
aaaagagttaagttgctgccacctg

SEQ ID NO: 779224 - DNA, 25 bp, Homo sapien
tatggataaagagacggcacacggc

SEQ ID NO: 779225 - DNA, 25 bp, Homo sapien
aagtgagatcttcggctgaggatgt

SEQ ID NO: 779226 - DNA, 25 bp, Homo sapien
gaagtgagatcttcggctgaggatg

SEQ ID NO: 779227 - DNA, 25 bp, Homo sapien
cgaccacgcgatggaagaagtgaca

SEQ ID NO: 779228 - DNA, 25 bp, Homo sapien
tggaagaagtgacacggtcatgtta

SEQ ID NO: 779229 - DNA, 25 bp, Homo sapien
cacggtcatgttatgagaggagtgt

SEQ ID NO: 779230 - DNA, 25 bp, Homo sapien
ccccgaccacgcgatggaagaagtg

SEQ ID NO: 779231 - DNA, 25 bp, Homo sapien
atctaacattaccagggaagaactg

SEQ ID NO: 779232 - DNA, 25 bp, Homo sapien
cagtaatggttaaccccaacaatct

SEQ ID NO: 779233 - DNA, 25 bp, Homo sapien
tgtaatggcacagtaatggttaacc

SEQ ID NO: 779234 - DNA, 25 bp, Homo sapien
acaatctaacattaccagggaagaa

SEQ ID NO: 779235 - DNA, 25 bp, Homo sapien
ctttgttcctgagatccaggttgct

SEQ ID NO: 779236 - DNA, 25 bp, Homo sapien
gagctggtcccaatgctagaatgat

SEQ ID NO: 779237 - DNA, 25 bp, Homo sapien
ctggtcccaatgctagaatgatctt

SEQ ID NO: 779238 - DNA, 25 bp, Homo sapien
ttcctgagatccaggttgctgctgc

SEQ ID NO: 779239 - DNA, 25 bp, Homo sapien
aacctgggaggtgcgaggcggagga

SEQ ID NO: 779240 - DNA, 25 bp, Homo sapien
tattagctctgaatagatgccaggt

SEQ ID NO: 779241 - DNA, 25 bp, Homo sapien
aatagatgccaggtaatatgctagg

SEQ ID NO: 779242 - DNA, 25 bp, Homo sapien
taatacagacttcctaaatccgaga

SEQ ID NO: 779243 - DNA, 25 bp, Homo sapien
gcatttcgtgatggtagccctagca

SEQ ID NO: 779244 - DNA, 25 bp, Homo sapien
ttccagctgttgaaaccacatggtc

SEQ ID NO: 779245 - DNA, 25 bp, Homo sapien
cacatggtctgtggcatttcgtgat

SEQ ID NO: 779246 - DNA, 25 bp, Homo sapien
gaccctgaagaagtcagccctgctg

SEQ ID NO: 779247 - DNA, 25 bp, Homo sapien
gcagaaatgccagagacgtgcagag

SEQ ID NO: 779248 - DNA, 25 bp, Homo sapien
gccagagacgtgcagagaaaaggtc

SEQ ID NO: 779249 - DNA, 25 bp, Homo sapien
ctgcaagccaacgagagaagaccct

SEQ ID NO: 779250 - DNA, 25 bp, Homo sapien
cagacccaaagctcaacatcaagta

SEQ ID NO: 779251 - DNA, 25 bp, Homo sapien
cccacatgtttacaaagctgagaca

SEQ ID NO: 779252 - DNA, 25 bp, Homo sapien
gaaatagtgcaagtgagaagacagc

SEQ ID NO: 779253 - DNA, 25 bp, Homo sapien
tgttaagggatgtctttcaggcaga

SEQ ID NO: 779254 - DNA, 25 bp, Homo sapien
gactgatccctaagtgtaaggaaac

SEQ ID NO: 779255 - DNA, 25 bp, Homo sapien
gagatgagccccaaagtcacctagt

SEQ ID NO: 779256 - DNA, 25 bp, Homo sapien
caagtcttggtatggatgtggaaca

SEQ ID NO: 779257 - DNA, 25 bp, Homo sapien
caacttggcaactactttcaggcag

SEQ ID NO: 779258 - DNA, 25 bp, Homo sapien
gcggaggagacttaaatatcccagc

SEQ ID NO: 779259 - DNA, 25 bp, Homo sapien
gccgcggaggagacttaaatatccc

SEQ ID NO: 779260 - DNA, 25 bp, Homo sapien
cgcgccgcggaggagacttaaatat

SEQ ID NO: 779261 - DNA, 25 bp, Homo sapien
gcgccgcggaggagacttaaatatc

SEQ ID NO: 779262 - DNA, 25 bp, Homo sapien
cgtccctgacactcgctatgggccg

SEQ ID NO: 779263 - DNA, 25 bp, Homo sapien
tgacactcgctatgggccgccgccg

SEQ ID NO: 779264 - DNA, 25 bp, Homo sapien
cgccgccgctcgcctgctccagccg

SEQ ID NO: 779265 - DNA, 25 bp, Homo sapien
ccctgacactcgctatgggccgccg

SEQ ID NO: 779266 - DNA, 25 bp, Homo sapien
ggacaaggggcgccgatgacgcgcc

SEQ ID NO: 779267 - DNA, 25 bp, Homo sapien
gaggacaaggggcgccgatgacgcg

SEQ ID NO: 779268 - DNA, 25 bp, Homo sapien
taagaggccaaccagcgacaggccc

SEQ ID NO: 779269 - DNA, 25 bp, Homo sapien
aggccaaccagcgacaggcccagga

SEQ ID NO: 779270 - DNA, 25 bp, Homo sapien
ggcggccaggcctatcccgcaggtc

SEQ ID NO: 779271 - DNA, 25 bp, Homo sapien
cggcggccaggcctatcccgcaggt

SEQ ID NO: 779272 - DNA, 25 bp, Homo sapien
ggcggcggccaggcctatcccgcag

SEQ ID NO: 779273 - DNA, 25 bp, Homo sapien
gtgggcggcggccaggcctatcccg

SEQ ID NO: 779274 - DNA, 25 bp, Homo sapien
ggcagagaggggtaaacgtggtgag

SEQ ID NO: 779275 - DNA, 25 bp, Homo sapien
cagagaggggtaaacgtggtgagcg

SEQ ID NO: 779276 - DNA, 25 bp, Homo sapien
gcagagaggggtaaacgtggtgagc

SEQ ID NO: 779277 - DNA, 25 bp, Homo sapien
ccttcttgtgataaccattccagca

SEQ ID NO: 779278 - DNA, 25 bp, Homo sapien
tcttgtgataaccattccagcacac

SEQ ID NO: 779279 - DNA, 25 bp, Homo sapien
gcacagccttcttgtgataaccatt

SEQ ID NO: 779280 - DNA, 25 bp, Homo sapien
agccttcttgtgataaccattccag

SEQ ID NO: 779281 - DNA, 25 bp, Homo sapien
aatcttctgtcaggaggggcgatcc

SEQ ID NO: 779282 - DNA, 25 bp, Homo sapien
cgttacttgatggtgaggacagtgt

SEQ ID NO: 779283 - DNA, 25 bp, Homo sapien
ggacagtgttgagctgattatctgc

SEQ ID NO: 779284 - DNA, 25 bp, Homo sapien
tcagtactgtctcctttgcacatgg

SEQ ID NO: 779285 - DNA, 25 bp, Homo sapien
tccttctctttgagggcactcagta

SEQ ID NO: 779286 - DNA, 25 bp, Homo sapien
ttttattttcctggccatcaaggaa

SEQ ID NO: 779287 - DNA, 25 bp, Homo sapien
tattttcctggccatcaaggaatat

SEQ ID NO: 779288 - DNA, 25 bp, Homo sapien
tcaaggaatatttggtcttcttcct

SEQ ID NO: 779289 - DNA, 25 bp, Homo sapien
ttcttttattttcctggccatcaag

SEQ ID NO: 779290 - DNA, 25 bp, Homo sapien
aatgctgaatgtccactgccactgc

SEQ ID NO: 779291 - DNA, 25 bp, Homo sapien
taggaactggtaatggcattgcggc

SEQ ID NO: 779292 - DNA, 25 bp, Homo sapien
taagcgcctgtcaaggagctcatgg

SEQ ID NO: 779293 - DNA, 25 bp, Homo sapien
agctcatggaagagcttcgggatct

SEQ ID NO: 779294 - DNA, 25 bp, Homo sapien
gagcttcgggatctcttattcaagt

SEQ ID NO: 779295 - DNA, 25 bp, Homo sapien
gaaactgaatttttgagtgtatctt

SEQ ID NO: 779296 - DNA, 25 bp, Homo sapien
gagtgtatcttgttttagtgtattt

SEQ ID NO: 779297 - DNA, 25 bp, Homo sapien
ggaatgacctcaactatctattatg

SEQ ID NO: 779298 - DNA, 25 bp, Homo sapien
cctttgacctgggaatctgacttct

SEQ ID NO: 779299 - DNA, 25 bp, Homo sapien
tgtgaaaaagcaaggttcaaatctg

SEQ ID NO: 779300 - DNA, 25 bp, Homo sapien
tagaaggtggcggttttcagataca

SEQ ID NO: 779301 - DNA, 25 bp, Homo sapien
gacctccagtgatctgccttcctcg

SEQ ID NO: 779302 - DNA, 25 bp, Homo sapien
cttcctcggcctctcaaagtgctgg

SEQ ID NO: 779303 - DNA, 25 bp, Homo sapien
tgcctcccaggttcctgatattctc

SEQ ID NO: 779304 - DNA, 25 bp, Homo sapien
aggttcctgatattctccttcctca

SEQ ID NO: 779305 - DNA, 25 bp, Homo sapien
caaagactggcacaagggtaggtag

SEQ ID NO: 779306 - DNA, 25 bp, Homo sapien
aacagagtctagaaatggacccaca

SEQ ID NO: 779307 - DNA, 25 bp, Homo sapien
taaattagacaaagacggtgctgca

SEQ ID NO: 779308 - DNA, 25 bp, Homo sapien
caaaaggccaagatacaagacagtc

SEQ ID NO: 779309 - DNA, 25 bp, Homo sapien
gagaagggtgatgaactggggccat

SEQ ID NO: 779310 - DNA, 25 bp, Homo sapien
ctagagaagggtgatgaactggggc

SEQ ID NO: 779311 - DNA, 25 bp, Homo sapien
gctagagaagggtgatgaactgggg

SEQ ID NO: 779312 - DNA, 25 bp, Homo sapien
tagagaagggtgatgaactggggcc

SEQ ID NO: 779313 - DNA, 25 bp, Homo sapien
cttattttctttgctggcctctccg

SEQ ID NO: 779314 - DNA, 25 bp, Homo sapien
ttttctttgctggcctctccggtgt

SEQ ID NO: 779315 - DNA, 25 bp, Homo sapien
ttattttctttgctggcctctccgg

SEQ ID NO: 779316 - DNA, 25 bp, Homo sapien
tattttctttgctggcctctccggt

SEQ ID NO: 779317 - DNA, 25 bp, Homo sapien
agtcaagaacctgaaggcgactgcc

SEQ ID NO: 779318 - DNA, 25 bp, Homo sapien
tcgagtcaagaacctgaaggcgact

SEQ ID NO: 779319 - DNA, 25 bp, Homo sapien
gctcgagtcaagaacctgaaggcga

SEQ ID NO: 779320 - DNA, 25 bp, Homo sapien
ctgtgcttgcacccgatccctcatg

SEQ ID NO: 779321 - DNA, 25 bp, Homo sapien
tgaagaactggaatgatgacacagc

SEQ ID NO: 779322 - DNA, 25 bp, Homo sapien
gaagaactggaatgatgacacagct

SEQ ID NO: 779323 - DNA, 25 bp, Homo sapien
aagaactggaatgatgacacagctc

SEQ ID NO: 779324 - DNA, 25 bp, Homo sapien
ttgaagaactggaatgatgacacag

SEQ ID NO: 779325 - DNA, 25 bp, Homo sapien
gtagactgagaattcgagttttgtt

SEQ ID NO: 779326 - DNA, 25 bp, Homo sapien
ctgccaggtgtagactgagaattcg

SEQ ID NO: 779327 - DNA, 25 bp, Homo sapien
ggtgtagactgagaattcgagtttt

SEQ ID NO: 779328 - DNA, 25 bp, Homo sapien
caggtgtagactgagaattcgagtt

SEQ ID NO: 779329 - DNA, 25 bp, Homo sapien
aactttccgcttacgctgcccagag

SEQ ID NO: 779330 - DNA, 25 bp, Homo sapien
aaggtcagctgttcccctcgccgag

SEQ ID NO: 779331 - DNA, 25 bp, Homo sapien
gttcccctcgccgagaaggcagcag

SEQ ID NO: 779332 - DNA, 25 bp, Homo sapien
cagcagctgaactttccgcttacgc

SEQ ID NO: 779333 - DNA, 25 bp, Homo sapien
gaaccactgtaatgaagccttcttc

SEQ ID NO: 779334 - DNA, 25 bp, Homo sapien
cctcggcagtgatcgaatagccaag

SEQ ID NO: 779335 - DNA, 25 bp, Homo sapien
tcctccaaggcctggttgaaccact

SEQ ID NO: 779336 - DNA, 25 bp, Homo sapien
tcttctctaagtctaggtcctcggc

SEQ ID NO: 779337 - DNA, 25 bp, Homo sapien
ggtctcagtgacagagttcgaggca

SEQ ID NO: 779338 - DNA, 25 bp, Homo sapien
gcaggcagggtaaaggtaaatgaag

SEQ ID NO: 779339 - DNA, 25 bp, Homo sapien
caggctcgggggagtctgcatcttc

SEQ ID NO: 779340 - DNA, 25 bp, Homo sapien
ttcttcaagctctctaacagtgggt

SEQ ID NO: 779341 - DNA, 25 bp, Homo sapien
tgccgtgaaggcctgggccgggaac

SEQ ID NO: 779342 - DNA, 25 bp, Homo sapien
tgcgcgcgcagtgccgtgaaggcct

SEQ ID NO: 779343 - DNA, 25 bp, Homo sapien
cgtctgataaagaggtgtgcgcgcg

SEQ ID NO: 779344 - DNA, 25 bp, Homo sapien
tctgataaagaggtgtgcgcgcgca

SEQ ID NO: 779345 - DNA, 25 bp, Homo sapien
tgtctttggaggtgagagggcctca

SEQ ID NO: 779346 - DNA, 25 bp, Homo sapien
tggaggtgccttggtgtcagtggct

SEQ ID NO: 779347 - DNA, 25 bp, Homo sapien
tggcggccctgactgtgataaaccc

SEQ ID NO: 779348 - DNA, 25 bp, Homo sapien
cagtggctggtaccatggatggagc

SEQ ID NO: 779349 - DNA, 25 bp, Homo sapien
tgctggtcgtggtactcacactgct

SEQ ID NO: 779350 - DNA, 25 bp, Homo sapien
cttctcactcttgggtggagccgtg

SEQ ID NO: 779351 - DNA, 25 bp, Homo sapien
tgtttatgccaaagccaaacgcagg

SEQ ID NO: 779352 - DNA, 25 bp, Homo sapien
tggagccgtgaaaatgggcttgaac

SEQ ID NO: 779353 - DNA, 25 bp, Homo sapien
cactaaagtcggcagcgctgctgct

SEQ ID NO: 779354 - DNA, 25 bp, Homo sapien
aactggaatatggagcccatggccg

SEQ ID NO: 779355 - DNA, 25 bp, Homo sapien
ctaaagtcggcagcgctgctgctgg

SEQ ID NO: 779356 - DNA, 25 bp, Homo sapien
cccatggccggggtgaagctggcag

SEQ ID NO: 779357 - DNA, 25 bp, Homo sapien
ctcagcggccccaaatgcgggctgg

SEQ ID NO: 779358 - DNA, 25 bp, Homo sapien
agaagacagcagtggagccgccaaa

SEQ ID NO: 779359 - DNA, 25 bp, Homo sapien
tactgaacgtcagagtgggctggct

SEQ ID NO: 779360 - DNA, 25 bp, Homo sapien
gcgcttgagccaaagggaatgttga

SEQ ID NO: 779361 - DNA, 25 bp, Homo sapien
cacgttgaaggcaaacggtgtgctc

SEQ ID NO: 779362 - DNA, 25 bp, Homo sapien
gtgcccagggcgttctgacctaagc

SEQ ID NO: 779363 - DNA, 25 bp, Homo sapien
ggtggctgtgctcccactctgtcct

SEQ ID NO: 779364 - DNA, 25 bp, Homo sapien
acaggtttgctctcagttgtgctgc

SEQ ID NO: 779365 - DNA, 25 bp, Homo sapien
aaccgagtcttcatgcctggtgccc

SEQ ID NO: 779366 - DNA, 25 bp, Homo sapien
ggcctcctgaccatcgctgcagagg

SEQ ID NO: 779367 - DNA, 25 bp, Homo sapien
cagctgagccagacaaccgagtctt

SEQ ID NO: 779368 - DNA, 25 bp, Homo sapien
ttctcccacccgctaatggccacgc

SEQ ID NO: 779369 - DNA, 25 bp, Homo sapien
cgaaaggtgcaacaccaacaaagcc

SEQ ID NO: 779370 - DNA, 25 bp, Homo sapien
ggtgcaacaccaacaaagccttggg

SEQ ID NO: 779371 - DNA, 25 bp, Homo sapien
agaggctgctgcctgatgtgcccac

SEQ ID NO: 779372 - DNA, 25 bp, Homo sapien
actccaggcgcaggggtgttcagac

SEQ ID NO: 779373 - DNA, 25 bp, Homo sapien
tactttttgcgggtgtgctgccttc

SEQ ID NO: 779374 - DNA, 25 bp, Homo sapien
tcttggatcccgcaccaatggaaaa

SEQ ID NO: 779375 - DNA, 25 bp, Homo sapien
ggatcccgcaccaatggaaaatgaa

SEQ ID NO: 779376 - DNA, 25 bp, Homo sapien
ttcgggcctgcagtcgctgtcgagc

SEQ ID NO: 779377 - DNA, 25 bp, Homo sapien
cagagatccggggtaggtttgcttt

SEQ ID NO: 779378 - DNA, 25 bp, Homo sapien
cgggagtcagggcagcggacactat

SEQ ID NO: 779379 - DNA, 25 bp, Homo sapien
ggctttggccctccgcatcctgctt

SEQ ID NO: 779380 - DNA, 25 bp, Homo sapien
cagggcagcggacactatgtacagg

SEQ ID NO: 779381 - DNA, 25 bp, Homo sapien
gccccctccagcgacgacggtctcg

SEQ ID NO: 779382 - DNA, 25 bp, Homo sapien
ctccagcgacgacggtctcggggaa

SEQ ID NO: 779383 - DNA, 25 bp, Homo sapien
cccctccagcgacgacggtctcggg

SEQ ID NO: 779384 - DNA, 25 bp, Homo sapien
ctgccccctccagcgacgacggtct

SEQ ID NO: 779385 - DNA, 25 bp, Homo sapien
aaattcaggagtcggcacttgtagc

SEQ ID NO: 779386 - DNA, 25 bp, Homo sapien
cacattcaattagcgaggccccaga

SEQ ID NO: 779387 - DNA, 25 bp, Homo sapien
gattcaaagagcaatacacagagcg

SEQ ID NO: 779388 - DNA, 25 bp, Homo sapien
ccaaggcaaagctagattcaagggc

SEQ ID NO: 779389 - DNA, 25 bp, Homo sapien
tagacacacgcattcatacttctcc

SEQ ID NO: 779390 - DNA, 25 bp, Homo sapien
attcatacttctcccaaagaggttg

SEQ ID NO: 779391 - DNA, 25 bp, Homo sapien
tttagacacacgcattcatacttct

SEQ ID NO: 779392 - DNA, 25 bp, Homo sapien
acacgcattcatacttctcccaaag

SEQ ID NO: 779393 - DNA, 25 bp, Homo sapien
taaaaggcaatttagcttaaataca

SEQ ID NO: 779394 - DNA, 25 bp, Homo sapien
gcaatttagcttaaatacaaaaata

SEQ ID NO: 779395 - DNA, 25 bp, Homo sapien
ccaggtattaacgaggatcagagct

SEQ ID NO: 779396 - DNA, 25 bp, Homo sapien
cacgcagccaggtattaacgaggat

SEQ ID NO: 779397 - DNA, 25 bp, Homo sapien
tattaacgaggatcagagctgttct

SEQ ID NO: 779398 - DNA, 25 bp, Homo sapien
aacgaggatcagagctgttctgagg

SEQ ID NO: 779399 - DNA, 25 bp, Homo sapien
cccttcctcgggctgtgttcttgct

SEQ ID NO: 779400 - DNA, 25 bp, Homo sapien
tcttgctggtgagcaaaagtgttgc

SEQ ID NO: 779401 - DNA, 25 bp, Homo sapien
gttcttgctggtgagcaaaagtgtt

SEQ ID NO: 779402 - DNA, 25 bp, Homo sapien
ccttcctcgggctgtgttcttgctg

SEQ ID NO: 779403 - DNA, 25 bp, Homo sapien
gacatggtacaagatgcgctgcagc

SEQ ID NO: 779404 - DNA, 25 bp, Homo sapien
tagatccgcgctatcgtgaggtcca

SEQ ID NO: 779405 - DNA, 25 bp, Homo sapien
tgtttctcttgcaggctagctcccg

SEQ ID NO: 779406 - DNA, 25 bp, Homo sapien
gaactgagacatgtgactccctagg

SEQ ID NO: 779407 - DNA, 25 bp, Homo sapien
tcaagcaattcccttaacttagccc

SEQ ID NO: 779408 - DNA, 25 bp, Homo sapien
tggcctgtgaccgcatcattccaat

SEQ ID NO: 779409 - DNA, 25 bp, Homo sapien
ttcctggcctgtgaccgcatcattc

SEQ ID NO: 779410 - DNA, 25 bp, Homo sapien
gtttcctggcctgtgaccgcatcat

SEQ ID NO: 779411 - DNA, 25 bp, Homo sapien
taggccatcaccaaacctagcagat

SEQ ID NO: 779412 - DNA, 25 bp, Homo sapien
taaaacacgtgactgggtggcttat

SEQ ID NO: 779413 - DNA, 25 bp, Homo sapien
cctgactgggtgttatatatataaa

SEQ ID NO: 779414 - DNA, 25 bp, Homo sapien
cgagatagggccagcgaggtaagct

SEQ ID NO: 779415 - DNA, 25 bp, Homo sapien
ttcattaactgtgtaacaggctggg

SEQ ID NO: 779416 - DNA, 25 bp, Homo sapien
tggcccacatgatgaaaccgcctct

SEQ ID NO: 779417 - DNA, 25 bp, Homo sapien
taggcgtaggctacagccaactttc

SEQ ID NO: 779418 - DNA, 25 bp, Homo sapien
gaccagagtgggtagatcactcgag

SEQ ID NO: 779419 - DNA, 25 bp, Homo sapien
cacagggcacattgggcacttgcag

SEQ ID NO: 779420 - DNA, 25 bp, Homo sapien
tacagaggtcgcacggtgagttgcc

SEQ ID NO: 779421 - DNA, 25 bp, Homo sapien
tgatgggacacgtaacgggaccaca

SEQ ID NO: 779422 - DNA, 25 bp, Homo sapien
cggagcgcacaaaacatgatgggac

SEQ ID NO: 779423 - DNA, 25 bp, Homo sapien
gaaggcccctttatgcccggcagac

SEQ ID NO: 779424 - DNA, 25 bp, Homo sapien
gctgtgactctggtggggttccgaa

SEQ ID NO: 779425 - DNA, 25 bp, Homo sapien
ctggtgcgccccgctgcccttcctg

SEQ ID NO: 779426 - DNA, 25 bp, Homo sapien
tccgaaggcccctttatgcccggca

SEQ ID NO: 779427 - DNA, 25 bp, Homo sapien
ccaggactccctggtttaacgcgct

SEQ ID NO: 779428 - DNA, 25 bp, Homo sapien
caggactccctggtttaacgcgctt

SEQ ID NO: 779429 - DNA, 25 bp, Homo sapien
gctccttctcggatgacgtccttca

SEQ ID NO: 779430 - DNA, 25 bp, Homo sapien
gcaccgaagcatcaggcgccactag

SEQ ID NO: 779431 - DNA, 25 bp, Homo sapien
gcatcctctgacttaaccgctcgta

SEQ ID NO: 779432 - DNA, 25 bp, Homo sapien
gcatcaggcgccactaggtctccag

SEQ ID NO: 779433 - DNA, 25 bp, Homo sapien
aattagaatcgaagggtctgtccaa

SEQ ID NO: 779434 - DNA, 25 bp, Homo sapien
aatcgaagggtctgtccaagtgttc

SEQ ID NO: 779435 - DNA, 25 bp, Homo sapien
tagaatcgaagggtctgtccaagtg

SEQ ID NO: 779436 - DNA, 25 bp, Homo sapien
gaatcgaagggtctgtccaagtgtt

SEQ ID NO: 779437 - DNA, 25 bp, Homo sapien
cagctccatgccccacaatgtaata

SEQ ID NO: 779438 - DNA, 25 bp, Homo sapien
agcccagcgttccataggcgtagtt

SEQ ID NO: 779439 - DNA, 25 bp, Homo sapien
cataggcgtagttcggtttgaacag

SEQ ID NO: 779440 - DNA, 25 bp, Homo sapien
gagcacaaaacttgtctgactcagc

SEQ ID NO: 779441 - DNA, 25 bp, Homo sapien
gagagcacaaaacttgtctgactca

SEQ ID NO: 779442 - DNA, 25 bp, Homo sapien
tcagggcaggccatctagaagaatt

SEQ ID NO: 779443 - DNA, 25 bp, Homo sapien
tgcagtggcggacgatcagcctcag

SEQ ID NO: 779444 - DNA, 25 bp, Homo sapien
catttgtctctctataaagtgctga

SEQ ID NO: 779445 - DNA, 25 bp, Homo sapien
gctgacatttgtgctctgcaacgta

SEQ ID NO: 779446 - DNA, 25 bp, Homo sapien
taatcctggcacttcaagagccaag

SEQ ID NO: 779447 - DNA, 25 bp, Homo sapien
gaggctctgaggtaaagatggaggc

SEQ ID NO: 779448 - DNA, 25 bp, Homo sapien
tgggagtcgaggagtttacccaaga

SEQ ID NO: 779449 - DNA, 25 bp, Homo sapien
gaggagtttacccaagacgaagcat

SEQ ID NO: 779450 - DNA, 25 bp, Homo sapien
aggctctgaggtaaagatggaggct

SEQ ID NO: 779451 - DNA, 25 bp, Homo sapien
ggaaggtgaggctggaggaggaggt

SEQ ID NO: 779452 - DNA, 25 bp, Homo sapien
aggaaggtgaggctggaggaggagg

SEQ ID NO: 779453 - DNA, 25 bp, Homo sapien
ctggaggaaggtgaggctggaggag

SEQ ID NO: 779454 - DNA, 25 bp, Homo sapien
ggaggaaggtgaggctggaggagga

SEQ ID NO: 779455 - DNA, 25 bp, Homo sapien
gtaggcagaaggttacgcaggagaa

SEQ ID NO: 779456 - DNA, 25 bp, Homo sapien
aaggtaggcagaaggttacgcagga

SEQ ID NO: 779457 - DNA, 25 bp, Homo sapien
gaaggtaggcagaaggttacgcagg

SEQ ID NO: 779458 - DNA, 25 bp, Homo sapien
aggaaggtaggcagaaggttacgca

SEQ ID NO: 779459 - DNA, 25 bp, Homo sapien
cacagtcgcctcgaggtttctagcc

SEQ ID NO: 779460 - DNA, 25 bp, Homo sapien
gactcaagcacagtcgcctcgaggt

SEQ ID NO: 779461 - DNA, 25 bp, Homo sapien
gaatatttgagaggcggaaggcaca

SEQ ID NO: 779462 - DNA, 25 bp, Homo sapien
cacaaggcgtgacaattgatgggat

SEQ ID NO: 779463 - DNA, 25 bp, Homo sapien
tccctgaccacaagagacttgcctg

SEQ ID NO: 779464 - DNA, 25 bp, Homo sapien
ggacaagttagttgttttctctgag

SEQ ID NO: 779465 - DNA, 25 bp, Homo sapien
gggataatcttacttgacttccctg

SEQ ID NO: 779466 - DNA, 25 bp, Homo sapien
atgagccctgagatgtttgaagtga

SEQ ID NO: 779467 - DNA, 25 bp, Homo sapien
tgggaggatcacgagctggggagac

SEQ ID NO: 779468 - DNA, 25 bp, Homo sapien
ggaggatcacgagctggggagacgg

SEQ ID NO: 779469 - DNA, 25 bp, Homo sapien
ggatcacgagctggggagacggagg

SEQ ID NO: 779470 - DNA, 25 bp, Homo sapien
gaggatcacgagctggggagacgga

SEQ ID NO: 779471 - DNA, 25 bp, Homo sapien
ctttgtgttccctctgtagcaaatc

SEQ ID NO: 779472 - DNA, 25 bp, Homo sapien
gtagcaaatcgcagtcttctccagg

SEQ ID NO: 779473 - DNA, 25 bp, Homo sapien
tccctctgtagcaaatcgcagtctt

SEQ ID NO: 779474 - DNA, 25 bp, Homo sapien
tgtgttccctctgtagcaaatcgca

SEQ ID NO: 779475 - DNA, 25 bp, Homo sapien
aactcgatggagctggcccgagtgc

SEQ ID NO: 779476 - DNA, 25 bp, Homo sapien
acaactgccccttctagcagcagcc

SEQ ID NO: 779477 - DNA, 25 bp, Homo sapien
cagtggtggttacagttaattgatc

SEQ ID NO: 779478 - DNA, 25 bp, Homo sapien
gatggagacacccatagcagggcgc

SEQ ID NO: 779479 - DNA, 25 bp, Homo sapien
gcagctagctctgtctatgagagtt

SEQ ID NO: 779480 - DNA, 25 bp, Homo sapien
ctagctctgtctatgagagtttggg

SEQ ID NO: 779481 - DNA, 25 bp, Homo sapien
cacaatggggagcagctagctctgt

SEQ ID NO: 779482 - DNA, 25 bp, Homo sapien
gggagcagctagctctgtctatgag

SEQ ID NO: 779483 - DNA, 25 bp, Homo sapien
ctgtaatccctcctgctactcggga

SEQ ID NO: 779484 - DNA, 25 bp, Homo sapien
gacgcctgtaatccctcctgctact

SEQ ID NO: 779485 - DNA, 25 bp, Homo sapien
tgggtggcagaggtggcagtgagat

SEQ ID NO: 779486 - DNA, 25 bp, Homo sapien
tggcagaggtggcagtgagatgaga

SEQ ID NO: 779487 - DNA, 25 bp, Homo sapien
atgcctagctagtttatcgttatta

SEQ ID NO: 779488 - DNA, 25 bp, Homo sapien
gcctagctagtttatcgttattatt

SEQ ID NO: 779489 - DNA, 25 bp, Homo sapien
cctagctagtttatcgttattattt

SEQ ID NO: 779490 - DNA, 25 bp, Homo sapien
tgcctagctagtttatcgttattat

SEQ ID NO: 779491 - DNA, 25 bp, Homo sapien
ctgcctctgaggttcaagtgattct

SEQ ID NO: 779492 - DNA, 25 bp, Homo sapien
agtggcgcagtctcaactaactgca

SEQ ID NO: 779493 - DNA, 25 bp, Homo sapien
agatggagtcttactgtctcccagg

SEQ ID NO: 779494 - DNA, 25 bp, Homo sapien
gcgcagtctcaactaactgcagcct

SEQ ID NO: 779495 - DNA, 25 bp, Homo sapien
atttgaacacttctgttttgtgcag

SEQ ID NO: 779496 - DNA, 25 bp, Homo sapien
caagcagaagcatttagggattggc

SEQ ID NO: 779497 - DNA, 25 bp, Homo sapien
gaccatcataattgtcaggagaagg

SEQ ID NO: 779498 - DNA, 25 bp, Homo sapien
ggcaatgttttacttctcggctgag

SEQ ID NO: 779499 - DNA, 25 bp, Homo sapien
caagagcaatagctatgggcaccaa

SEQ ID NO: 779500 - DNA, 25 bp, Homo sapien
ctagaatttctattaggcggatgtt

SEQ ID NO: 779501 - DNA, 25 bp, Homo sapien
tattaggcggatgttgaatctcctg

SEQ ID NO: 779502 - DNA, 25 bp, Homo sapien
tgaatctcctgaattaatctctaat

SEQ ID NO: 779503 - DNA, 25 bp, Homo sapien
gcggatgttgaatctcctgaattaa

SEQ ID NO: 779504 - DNA, 25 bp, Homo sapien
catcatgagtactgctgtgatcctt

SEQ ID NO: 779505 - DNA, 25 bp, Homo sapien
tattgatggatggtaatgcaggtgc

SEQ ID NO: 779506 - DNA, 25 bp, Homo sapien
ggcagccaaaggatccttctcatca

SEQ ID NO: 779507 - DNA, 25 bp, Homo sapien
ttttaagtatgaagacagctgttca

SEQ ID NO: 779508 - DNA, 25 bp, Homo sapien
tcttgctttggttgcgccatgccga

SEQ ID NO: 779509 - DNA, 25 bp, Homo sapien
cccctaggccggatagagtgcgtcc

SEQ ID NO: 779510 - DNA, 25 bp, Homo sapien
gtaaagccctatcaccgggtctgcg

SEQ ID NO: 779511 - DNA, 25 bp, Homo sapien
ttggcactggccacttgcaggtagg

SEQ ID NO: 779512 - DNA, 25 bp, Homo sapien
ttccgagcgttggtgtcttggcggt

SEQ ID NO: 779513 - DNA, 25 bp, Homo sapien
ggtttccgagcgttggtgtcttggc

SEQ ID NO: 779514 - DNA, 25 bp, Homo sapien
gcgttggtgtctggcggtttccgag

SEQ ID NO: 779515 - DNA, 25 bp, Homo sapien
ggcggtttccgagcgttggtgtctg

SEQ ID NO: 779516 - DNA, 25 bp, Homo sapien
tctggcgtgtattccgagccttggt

SEQ ID NO: 779517 - DNA, 25 bp, Homo sapien
cgtggtctggcgtgtattccgagcc

SEQ ID NO: 779518 - DNA, 25 bp, Homo sapien
aggtggtcgccctccgtcgtggtct

SEQ ID NO: 779519 - DNA, 25 bp, Homo sapien
ccctccgtcgtggtctggcgtgtat

SEQ ID NO: 779520 - DNA, 25 bp, Homo sapien
tagtggctctgtcaaaggtcgagtc

SEQ ID NO: 779521 - DNA, 25 bp, Homo sapien
tctccttttcgcctagtggctctgt

SEQ ID NO: 779522 - DNA, 25 bp, Homo sapien
gcctagtggctctgtcaaaggtcga

SEQ ID NO: 779523 - DNA, 25 bp, Homo sapien
ttttcgcctagtggctctgtcaaag

SEQ ID NO: 779524 - DNA, 25 bp, Homo sapien
gggcctccacgaggcggcctcccac

SEQ ID NO: 779525 - DNA, 25 bp, Homo sapien
catttccagggaggtcggaagccgt

SEQ ID NO: 779526 - DNA, 25 bp, Homo sapien
acgaggcggcctcccacgcgcctcg

SEQ ID NO: 779527 - DNA, 25 bp, Homo sapien
tcggaagccgtggttctcaaagagg

SEQ ID NO: 779528 - DNA, 25 bp, Homo sapien
gagcagctacgcaaattaggatgtg

SEQ ID NO: 779529 - DNA, 25 bp, Homo sapien
cctaagaggtaaaaatgcattgcat

SEQ ID NO: 779530 - DNA, 25 bp, Homo sapien
ggatgtgtctggacgctctactgtc

SEQ ID NO: 779531 - DNA, 25 bp, Homo sapien
tttttaaaactgagcagctacgcaa

SEQ ID NO: 779532 - DNA, 25 bp, Homo sapien
gcgtttacaaatctgacatggaatt

SEQ ID NO: 779533 - DNA, 25 bp, Homo sapien
tcaactgtgctagccaagattcggt

SEQ ID NO: 779534 - DNA, 25 bp, Homo sapien
gatatttagatacagacggcaagtg

SEQ ID NO: 779535 - DNA, 25 bp, Homo sapien
gattcggtgtagcttaccagccaga

SEQ ID NO: 779536 - DNA, 25 bp, Homo sapien
gcaactggccgtcccctatattgca

SEQ ID NO: 779537 - DNA, 25 bp, Homo sapien
catcacaagctctcttagacactac

SEQ ID NO: 779538 - DNA, 25 bp, Homo sapien
tatattgcagcacagtgaacaactg

SEQ ID NO: 779539 - DNA, 25 bp, Homo sapien
ggccgtcccctatattgcagcacag

SEQ ID NO: 779540 - DNA, 25 bp, Homo sapien
tttcctactatcttcttcaccgcag

SEQ ID NO: 779541 - DNA, 25 bp, Homo sapien
ctgtttcctactatcttcttcaccg

SEQ ID NO: 779542 - DNA, 25 bp, Homo sapien
gtttcctactatcttcttcaccgca

SEQ ID NO: 779543 - DNA, 25 bp, Homo sapien
tcctactatcttcttcaccgcagtg

SEQ ID NO: 779544 - DNA, 25 bp, Homo sapien
tagttgtaaagaccgttgcactttg

SEQ ID NO: 779545 - DNA, 25 bp, Homo sapien
cacatccattgcctgaaacttcaat

SEQ ID NO: 779546 - DNA, 25 bp, Homo sapien
cctgaaacttcaatgagatccattc

SEQ ID NO: 779547 - DNA, 25 bp, Homo sapien
cattccatagtccttaagctttaga

SEQ ID NO: 779548 - DNA, 25 bp, Homo sapien
ccattgcctgaaacttcaatgagat

SEQ ID NO: 779549 - DNA, 25 bp, Homo sapien
aactcttgaatcttagatgtgtgat

SEQ ID NO: 779550 - DNA, 25 bp, Homo sapien
cagtgcacaaagtgagctcagagct

SEQ ID NO: 779551 - DNA, 25 bp, Homo sapien
tcagagctttcccccgaaagccaaa

SEQ ID NO: 779552 - DNA, 25 bp, Homo sapien
cccgagttaggtcggcaaactcttg

SEQ ID NO: 779553 - DNA, 25 bp, Homo sapien
tcgccgatacgtggcaggtagaaat

SEQ ID NO: 779554 - DNA, 25 bp, Homo sapien
acgtggcaggtagaaatggtgacat

SEQ ID NO: 779555 - DNA, 25 bp, Homo sapien
cttcgccgatacgtggcaggtagaa

SEQ ID NO: 779556 - DNA, 25 bp, Homo sapien
gtggcaggtagaaatggtgacatca

SEQ ID NO: 779557 - DNA, 25 bp, Homo sapien
ttccttatggcgcacaggtagcgta

SEQ ID NO: 779558 - DNA, 25 bp, Homo sapien
ggcgcacaggtagcgtagaaaataa

SEQ ID NO: 779559 - DNA, 25 bp, Homo sapien
ttgaaattccttatggcgcacaggt

SEQ ID NO: 779560 - DNA, 25 bp, Homo sapien
cgtagaaaataactgcttcacgctg

SEQ ID NO: 779561 - DNA, 25 bp, Homo sapien
aacatctttagtaaatcttttgctc

SEQ ID NO: 779562 - DNA, 25 bp, Homo sapien
acatctttagtaaatcttttgctca

SEQ ID NO: 779563 - DNA, 25 bp, Homo sapien
caattgccatcgacctgcaggttga

SEQ ID NO: 779564 - DNA, 25 bp, Homo sapien
gtgcatgcccaggttaaccacgcgt

SEQ ID NO: 779565 - DNA, 25 bp, Homo sapien
ggagtggaacctaagagctcagcct

SEQ ID NO: 779566 - DNA, 25 bp, Homo sapien
tcagcctgaagagctcggaccgatt

SEQ ID NO: 779567 - DNA, 25 bp, Homo sapien
agcaggaggtgctgcatgcttctaa

SEQ ID NO: 779568 - DNA, 25 bp, Homo sapien
ggtgctgcatgcttctaaacaacca

SEQ ID NO: 779569 - DNA, 25 bp, Homo sapien
gcaggaggtgctgcatgcttctaaa

SEQ ID NO: 779570 - DNA, 25 bp, Homo sapien
ggaggtgctgcatgcttctaaacaa

SEQ ID NO: 779571 - DNA, 25 bp, Homo sapien
ggggagccctcaagaaactgacaat

SEQ ID NO: 779572 - DNA, 25 bp, Homo sapien
gagccctcaagaaactgacaatcac

SEQ ID NO: 779573 - DNA, 25 bp, Homo sapien
ccctcaagaaactgacaatcacggc

SEQ ID NO: 779574 - DNA, 25 bp, Homo sapien
tggggagccctcaagaaactgacaa

SEQ ID NO: 779575 - DNA, 25 bp, Homo sapien
tgggctcagactcaagctcaagcaa

SEQ ID NO: 779576 - DNA, 25 bp, Homo sapien
agcttgggtgtccacagaccgcatg

SEQ ID NO: 779577 - DNA, 25 bp, Homo sapien
cctggcctgtgtgacgtaattctga

SEQ ID NO: 779578 - DNA, 25 bp, Homo sapien
ttcccaccacgtcctcaggtttgat

SEQ ID NO: 779579 - DNA, 25 bp, Homo sapien
agaaaactctaaaggtggctgggca

SEQ ID NO: 779580 - DNA, 25 bp, Homo sapien
ggcatccgcctgtacgtctgactaa

SEQ ID NO: 779581 - DNA, 25 bp, Homo sapien
aaggctgatcccaagctacagggtt

SEQ ID NO: 779582 - DNA, 25 bp, Homo sapien
agttcgagaccaggcaggagaatca

SEQ ID NO: 779583 - DNA, 25 bp, Homo sapien
atttgtgcagatcatctagaagaac

SEQ ID NO: 779584 - DNA, 25 bp, Homo sapien
ccatttgtgcagatcatctagaaga

SEQ ID NO: 779585 - DNA, 25 bp, Homo sapien
tttgtgcagatcatctagaagaacc

SEQ ID NO: 779586 - DNA, 25 bp, Homo sapien
catttgtgcagatcatctagaagaa

SEQ ID NO: 779587 - DNA, 25 bp, Homo sapien
tctgaactctagctagacttgacat

SEQ ID NO: 779588 - DNA, 25 bp, Homo sapien
gaactctagctagacttgacatggg

SEQ ID NO: 779589 - DNA, 25 bp, Homo sapien
tcaattgctctgaactctagctaga

SEQ ID NO: 779590 - DNA, 25 bp, Homo sapien
tgctctgaactctagctagacttga

SEQ ID NO: 779591 - DNA, 25 bp, Homo sapien
tctgtcctcagctatctggccaatg

SEQ ID NO: 779592 - DNA, 25 bp, Homo sapien
tgcccctgagcagcaacctgatttc

SEQ ID NO: 779593 - DNA, 25 bp, Homo sapien
tctgagaagctgacctcagccggag

SEQ ID NO: 779594 - DNA, 25 bp, Homo sapien
ggaggtctctcctggtggtgcccct

SEQ ID NO: 779595 - DNA, 25 bp, Homo sapien
caagagtgttgctgtgtctctcagg

SEQ ID NO: 779596 - DNA, 25 bp, Homo sapien
aaggagtgggagacgcccttgatca

SEQ ID NO: 779597 - DNA, 25 bp, Homo sapien
ttatttatcaagacaagagtgttgc

SEQ ID NO: 779598 - DNA, 25 bp, Homo sapien
ccacacctggacagttatttattta

SEQ ID NO: 779599 - DNA, 25 bp, Homo sapien
ggctcgccatcttggtgtttcctgg

SEQ ID NO: 779600 - DNA, 25 bp, Homo sapien
actggctcgccatcttggtgtttcc

SEQ ID NO: 779601 - DNA, 25 bp, Homo sapien
tggctcgccatcttggtgtttcctg

SEQ ID NO: 779602 - DNA, 25 bp, Homo sapien
tgtctgggtgtcccgcacacatgtg

SEQ ID NO: 779603 - DNA, 25 bp, Homo sapien
gatgggacagattttgggaaagatc

SEQ ID NO: 779604 - DNA, 25 bp, Homo sapien
gggaaagatcatgatgagccatcaa

SEQ ID NO: 779605 - DNA, 25 bp, Homo sapien
cagaacagagactaggtttggtgag

SEQ ID NO: 779606 - DNA, 25 bp, Homo sapien
tctcccagcctcgagaattgataac

SEQ ID NO: 779607 - DNA, 25 bp, Homo sapien
atgataatctcactcttgtaaggtt

SEQ ID NO: 779608 - DNA, 25 bp, Homo sapien
taatctcactcttgtaaggtttcat

SEQ ID NO: 779609 - DNA, 25 bp, Homo sapien
gataatctcactcttgtaaggtttc

SEQ ID NO: 779610 - DNA, 25 bp, Homo sapien
tgataatctcactcttgtaaggttt

SEQ ID NO: 779611 - DNA, 25 bp, Homo sapien
tagtctttttgtacacccagtatct

SEQ ID NO: 779612 - DNA, 25 bp, Homo sapien
aaccatttccttcaatggtataaat

SEQ ID NO: 779613 - DNA, 25 bp, Homo sapien
cacccagtatcttatagaatatcca

SEQ ID NO: 779614 - DNA, 25 bp, Homo sapien
tatagagtttcttagccaaactgga

SEQ ID NO: 779615 - DNA, 25 bp, Homo sapien
tctttggcaataatggtgtcttctt

SEQ ID NO: 779616 - DNA, 25 bp, Homo sapien
aaatctttggcaataatggtgtctt

SEQ ID NO: 779617 - DNA, 25 bp, Homo sapien
tctctcaaattaccaaaatctttgg

SEQ ID NO: 779618 - DNA, 25 bp, Homo sapien
tttggcaataatggtgtcttctttc

SEQ ID NO: 779619 - DNA, 25 bp, Homo sapien
gtttcctactatcttcttcaccgca

SEQ ID NO: 779620 - DNA, 25 bp, Homo sapien
ctgtttcctactatcttcttcaccg

SEQ ID NO: 779621 - DNA, 25 bp, Homo sapien
tttcctactatcttcttcaccgcag

SEQ ID NO: 779622 - DNA, 25 bp, Homo sapien
tcctactatcttcttcaccgcagtg

SEQ ID NO: 779623 - DNA, 25 bp, Homo sapien
tagttgtaaagaccgttgcactttg

SEQ ID NO: 779624 - DNA, 25 bp, Homo sapien
tgcctgaaacttcaatgagatccat

SEQ ID NO: 779625 - DNA, 25 bp, Homo sapien
ccattgcctgaaacttcaatgagat

SEQ ID NO: 779626 - DNA, 25 bp, Homo sapien
cctgaaacttcaatgagatccattc

SEQ ID NO: 779627 - DNA, 25 bp, Homo sapien
cattccatagtccttaagctttaga

SEQ ID NO: 779628 - DNA, 25 bp, Homo sapien
aactcttgaatcttagatgtgtgat

SEQ ID NO: 779629 - DNA, 25 bp, Homo sapien
tcagagctttcccccgaaagccaaa

SEQ ID NO: 779630 - DNA, 25 bp, Homo sapien
cagtgcacaaagtgagctcagagct

SEQ ID NO: 779631 - DNA, 25 bp, Homo sapien
cccgagttaggtcggcaaactcttg

SEQ ID NO: 779632 - DNA, 25 bp, Homo sapien
atgttgggcactgactactcttttc

SEQ ID NO: 779633 - DNA, 25 bp, Homo sapien
tgatgttgggcactgactactcttt

SEQ ID NO: 779634 - DNA, 25 bp, Homo sapien
gatgttgggcactgactactctttt

SEQ ID NO: 779635 - DNA, 25 bp, Homo sapien
tgttgggcactgactactcttttct

SEQ ID NO: 779636 - DNA, 25 bp, Homo sapien
tccttatggcgcacaggtagcgtag

SEQ ID NO: 779637 - DNA, 25 bp, Homo sapien
tgattttcccatcgtgatcaaacac

SEQ ID NO: 779638 - DNA, 25 bp, Homo sapien
cgtgatcaaacaccagtcgagtccc

SEQ ID NO: 779639 - DNA, 25 bp, Homo sapien
cgtagaaaataactgcttcacgctg

SEQ ID NO: 779640 - DNA, 25 bp, Homo sapien
aacatctttagtaaatcttttgctc

SEQ ID NO: 779641 - DNA, 25 bp, Homo sapien
acatctttagtaaatcttttgctca

SEQ ID NO: 779642 - DNA, 25 bp, Homo sapien
caattgccatcgacctgcaggttga

SEQ ID NO: 779643 - DNA, 25 bp, Homo sapien
cgcgtgccaccgtggagtggaacct

SEQ ID NO: 779644 - DNA, 25 bp, Homo sapien
gtgcatgcccaggttaaccacgcgt

SEQ ID NO: 779645 - DNA, 25 bp, Homo sapien
ccgcacccgaatcagttcaactttt

SEQ ID NO: 779646 - DNA, 25 bp, Homo sapien
ggtgctgcatgcttctaaacaacca

SEQ ID NO: 779647 - DNA, 25 bp, Homo sapien
agcaggaggtgctgcatgcttctaa

SEQ ID NO: 779648 - DNA, 25 bp, Homo sapien
ggaggtgctgcatgcttctaaacaa

SEQ ID NO: 779649 - DNA, 25 bp, Homo sapien
gcaggaggtgctgcatgcttctaaa

SEQ ID NO: 779650 - DNA, 25 bp, Homo sapien
ggggagccctcaagaaactgacaat

SEQ ID NO: 779651 - DNA, 25 bp, Homo sapien
tggggagccctcaagaaactgacaa

SEQ ID NO: 779652 - DNA, 25 bp, Homo sapien
ccctcaagaaactgacaatcacggc

SEQ ID NO: 779653 - DNA, 25 bp, Homo sapien
gagccctcaagaaactgacaatcac

SEQ ID NO: 779654 - DNA, 25 bp, Homo sapien
acagatgactgcagtccactgccaa

SEQ ID NO: 779655 - DNA, 25 bp, Homo sapien
cagtccactgccaaggtcatcaaag

SEQ ID NO: 779656 - DNA, 25 bp, Homo sapien
ctaaacagatgactgcagtccactg

SEQ ID NO: 779657 - DNA, 25 bp, Homo sapien
gactgcagtccactgccaaggtcat

SEQ ID NO: 779658 - DNA, 25 bp, Homo sapien
tgggctcagactcaagctcaagcaa

SEQ ID NO: 779659 - DNA, 25 bp, Homo sapien
agcttgggtgtccacagaccgcatg

SEQ ID NO: 779660 - DNA, 25 bp, Homo sapien
cctggcctgtgtgacgtaattctga

SEQ ID NO: 779661 - DNA, 25 bp, Homo sapien
ttcccaccacgtcctcaggtttgat

SEQ ID NO: 779662 - DNA, 25 bp, Homo sapien
ggcatccgcctgtacgtctgactaa

SEQ ID NO: 779663 - DNA, 25 bp, Homo sapien
tcacctccgcgttcaagcaaattct

SEQ ID NO: 779664 - DNA, 25 bp, Homo sapien
aaggctgatcccaagctacagggtt

SEQ ID NO: 779665 - DNA, 25 bp, Homo sapien
gctgatcccaagctacagggttttt

SEQ ID NO: 779666 - DNA, 25 bp, Homo sapien
gacagagctgaatacagtgatcacg

SEQ ID NO: 779667 - DNA, 25 bp, Homo sapien
agagctgaatacagtgatcacgttg

SEQ ID NO: 779668 - DNA, 25 bp, Homo sapien
cagtgatcacgttgtcctccaagga

SEQ ID NO: 779669 - DNA, 25 bp, Homo sapien
gaacctggaccattcttgacagagc

SEQ ID NO: 779670 - DNA, 25 bp, Homo sapien
ttattccaatgctaatggcagacat

SEQ ID NO: 779671 - DNA, 25 bp, Homo sapien
ttccaatgctaatggcagacatcag

SEQ ID NO: 779672 - DNA, 25 bp, Homo sapien
ggaggagaggaaccatttgtgcaga

SEQ ID NO: 779673 - DNA, 25 bp, Homo sapien
tccaatgctaatggcagacatcagg

SEQ ID NO: 779674 - DNA, 25 bp, Homo sapien
ctcaattgctctgaactctagctag

SEQ ID NO: 779675 - DNA, 25 bp, Homo sapien
tgctctgaactctagctagacttga

SEQ ID NO: 779676 - DNA, 25 bp, Homo sapien
gaactctagctagacttgacatggg

SEQ ID NO: 779677 - DNA, 25 bp, Homo sapien
caattgctctgaactctagctagac

SEQ ID NO: 779678 - DNA, 25 bp, Homo sapien
agatagccttgttccggaagtatcg

SEQ ID NO: 779679 - DNA, 25 bp, Homo sapien
gatagccttgttccggaagtatcgg

SEQ ID NO: 779680 - DNA, 25 bp, Homo sapien
ccacacctggacagttatttattta

SEQ ID NO: 779681 - DNA, 25 bp, Homo sapien
aaggagtgggagacgcccttgatca

SEQ ID NO: 779682 - DNA, 25 bp, Homo sapien
caagagtgttgctgtgtctctcagg

SEQ ID NO: 779683 - DNA, 25 bp, Homo sapien
ttatttatcaagacaagagtgttgc

SEQ ID NO: 779684 - DNA, 25 bp, Homo sapien
cagaacagagactaggtttggtgag

SEQ ID NO: 779685 - DNA, 25 bp, Homo sapien
gatcccagcagtgtccagaagaaga

SEQ ID NO: 779686 - DNA, 25 bp, Homo sapien
tgggaaagatcatgatgagccatca

SEQ ID NO: 779687 - DNA, 25 bp, Homo sapien
tctcccagcctcgagaattgataac

SEQ ID NO: 779688 - DNA, 25 bp, Homo sapien
tcctatgatttccagtcctcaaaat

SEQ ID NO: 779689 - DNA, 25 bp, Homo sapien
ctatgatttccagtcctcaaaatat

SEQ ID NO: 779690 - DNA, 25 bp, Homo sapien
cctatgatttccagtcctcaaaata

SEQ ID NO: 779691 - DNA, 25 bp, Homo sapien
tgcactcttgcctgggtgatgacag

SEQ ID NO: 779692 - DNA, 25 bp, Homo sapien
actcttgcctgggtgatgacagcga

SEQ ID NO: 779693 - DNA, 25 bp, Homo sapien
gcactcttgcctgggtgatgacagc

SEQ ID NO: 779694 - DNA, 25 bp, Homo sapien
tcttgcctgggtgatgacagcgaaa

SEQ ID NO: 779695 - DNA, 25 bp, Homo sapien
aaaagtgacaatgggctggacaccg

SEQ ID NO: 779696 - DNA, 25 bp, Homo sapien
gttgttggaaggcatactgatagca

SEQ ID NO: 779697 - DNA, 25 bp, Homo sapien
taatgcccaccctatagagttgttg

SEQ ID NO: 779698 - DNA, 25 bp, Homo sapien
cacatttgacactccctggtagata

SEQ ID NO: 779699 - DNA, 25 bp, Homo sapien
agaaatgagtgctatcaaggaagtt

SEQ ID NO: 779700 - DNA, 25 bp, Homo sapien
atgagtgctatcaaggaagttacca

SEQ ID NO: 779701 - DNA, 25 bp, Homo sapien
aatgagtgctatcaaggaagttacc

SEQ ID NO: 779702 - DNA, 25 bp, Homo sapien
aaatgagtgctatcaaggaagttac

SEQ ID NO: 779703 - DNA, 25 bp, Homo sapien
caagagaagactggatacattggca

SEQ ID NO: 779704 - DNA, 25 bp, Homo sapien
ccagaaggctctagcccaagagaag

SEQ ID NO: 779705 - DNA, 25 bp, Homo sapien
atgcagagatgtttaggacatgagc

SEQ ID NO: 779706 - DNA, 25 bp, Homo sapien
tggaagtgactgcagcctagctgag

SEQ ID NO: 779707 - DNA, 25 bp, Homo sapien
tctgccagactcacaaaactgtaca

SEQ ID NO: 779708 - DNA, 25 bp, Homo sapien
ttgtagctcaataaaccagactgga

SEQ ID NO: 779709 - DNA, 25 bp, Homo sapien
gattgtgatgatgtctacctaaagg

SEQ ID NO: 779710 - DNA, 25 bp, Homo sapien
taagacttgactacaatagggcagt

SEQ ID NO: 779711 - DNA, 25 bp, Homo sapien
ctattcagcctggttgacggaggaa

SEQ ID NO: 779712 - DNA, 25 bp, Homo sapien
gatattggaataactagtcgtgcat

SEQ ID NO: 779713 - DNA, 25 bp, Homo sapien
aacaaatggtgttgcagctgggcat

SEQ ID NO: 779714 - DNA, 25 bp, Homo sapien
cagggtcagctggtttttacaaaat

SEQ ID NO: 779715 - DNA, 25 bp, Homo sapien
aggttaggaggaaaggtgcacgtgg

SEQ ID NO: 779716 - DNA, 25 bp, Homo sapien
tcagatcagtgagggaacactaggc

SEQ ID NO: 779717 - DNA, 25 bp, Homo sapien
aggtgcacgtggacccagctttcct

SEQ ID NO: 779718 - DNA, 25 bp, Homo sapien
aacacctatgagtcagatcagtgag

SEQ ID NO: 779719 - DNA, 25 bp, Homo sapien
catgtgacagttagtagtaatgtct

SEQ ID NO: 779720 - DNA, 25 bp, Homo sapien
tcccatccgtgacaccatgtgacag

SEQ ID NO: 779721 - DNA, 25 bp, Homo sapien
gtgacaccatgtgacagttagtagt

SEQ ID NO: 779722 - DNA, 25 bp, Homo sapien
cccatccgtgacaccatgtgacagt

SEQ ID NO: 779723 - DNA, 25 bp, Homo sapien
gaatctagagatccagaaatcccaa

SEQ ID NO: 779724 - DNA, 25 bp, Homo sapien
tacacaatctcaactccacaaaggc

SEQ ID NO: 779725 - DNA, 25 bp, Homo sapien
gtgactggcctatgagagacactca

SEQ ID NO: 779726 - DNA, 25 bp, Homo sapien
tctgttctccgctgtgttcccattg

SEQ ID NO: 779727 - DNA, 25 bp, Homo sapien
ccctccgcgccctgccggcaccgac

SEQ ID NO: 779728 - DNA, 25 bp, Homo sapien
cccctccgcgccctgccggcaccga

SEQ ID NO: 779729 - DNA, 25 bp, Homo sapien
tggcgacgctggcaacttgcagccg

SEQ ID NO: 779730 - DNA, 25 bp, Homo sapien
gacgctggcaacttgcagccggtgc

SEQ ID NO: 779731 - DNA, 25 bp, Homo sapien
gcgacgctggcaacttgcagccggt

SEQ ID NO: 779732 - DNA, 25 bp, Homo sapien
gctggcaacttgcagccggtgctcc

SEQ ID NO: 779733 - DNA, 25 bp, Homo sapien
gaacttttcacaggcagataacagg

SEQ ID NO: 779734 - DNA, 25 bp, Homo sapien
taaacaagatgccaccggcaggtct

SEQ ID NO: 779735 - DNA, 25 bp, Homo sapien
tgtgtccctagagctcagtgccaaa

SEQ ID NO: 779736 - DNA, 25 bp, Homo sapien
aaacaatagccggactgagcacccg

SEQ ID NO: 779737 - DNA, 25 bp, Homo sapien
ctgggcctgggacaggacaggctgc

SEQ ID NO: 779738 - DNA, 25 bp, Homo sapien
ggcctgggacaggacaggctgcttt

SEQ ID NO: 779739 - DNA, 25 bp, Homo sapien
tgggcctgggacaggacaggctgct

SEQ ID NO: 779740 - DNA, 25 bp, Homo sapien
gggcctgggacaggacaggctgctt

SEQ ID NO: 779741 - DNA, 25 bp, Homo sapien
tttaaatgttatgtccgcacgcacc

SEQ ID NO: 779742 - DNA, 25 bp, Homo sapien
tagacagaagggctggacataacca

SEQ ID NO: 779743 - DNA, 25 bp, Homo sapien
caaaatctcagagcttgtgccagaa

SEQ ID NO: 779744 - DNA, 25 bp, Homo sapien
gcagattggcacatttaaatcccgg

SEQ ID NO: 779745 - DNA, 25 bp, Homo sapien
gcatacttgcctgtgtagtttttgc

SEQ ID NO: 779746 - DNA, 25 bp, Homo sapien
tgcatacttgcctgtgtagtttttg

SEQ ID NO: 779747 - DNA, 25 bp, Homo sapien
taaactgcaattagacagtggcctc

SEQ ID NO: 779748 - DNA, 25 bp, Homo sapien
tcagcccaatgtgttgcgaggaatg

SEQ ID NO: 779749 - DNA, 25 bp, Homo sapien
tgtgtgtagtcttctaagcctgggc

SEQ ID NO: 779750 - DNA, 25 bp, Homo sapien
taagacgttagtgttcactggccgg

SEQ ID NO: 779751 - DNA, 25 bp, Homo sapien
ggcagcaatgagcatttgagccgcc

SEQ ID NO: 779752 - DNA, 25 bp, Homo sapien
atggggcagcaatgagcatttgagc

SEQ ID NO: 779753 - DNA, 25 bp, Homo sapien
tctttcagcctccaggcgtttgctc

SEQ ID NO: 779754 - DNA, 25 bp, Homo sapien
cctccaggcgtttgctcctccagcc

SEQ ID NO: 779755 - DNA, 25 bp, Homo sapien
tgcaatccattggaaggcttgcctg

SEQ ID NO: 779756 - DNA, 25 bp, Homo sapien
cagttcctatgggttaggaatttag

SEQ ID NO: 779757 - DNA, 25 bp, Homo sapien
taggaatttaggtgtggctgaactt

SEQ ID NO: 779758 - DNA, 25 bp, Homo sapien
acttggcagttcaaggcattggctg

SEQ ID NO: 779759 - DNA, 25 bp, Homo sapien
caagacattgctgggagcagagaag

SEQ ID NO: 779760 - DNA, 25 bp, Homo sapien
caccatatggggacacagtagacac

SEQ ID NO: 779761 - DNA, 25 bp, Homo sapien
ggtgcccaagacattgctgggagca

SEQ ID NO: 779762 - DNA, 25 bp, Homo sapien
tctgggaggaagacttgcaagcacc

SEQ ID NO: 779763 - DNA, 25 bp, Homo sapien
catttccagcccgacgatggtacta

SEQ ID NO: 779764 - DNA, 25 bp, Homo sapien
gggtcagttgcttctatcagtctca

SEQ ID NO: 779765 - DNA, 25 bp, Homo sapien
cagaaactgagcgaaaacccaagta

SEQ ID NO: 779766 - DNA, 25 bp, Homo sapien
tggcctactgaacgcaaagtctgag

SEQ ID NO: 779767 - DNA, 25 bp, Homo sapien
attggcctttggtctcttagacggt

SEQ ID NO: 779768 - DNA, 25 bp, Homo sapien
tcattggcctttggtctcttagacg

SEQ ID NO: 779769 - DNA, 25 bp, Homo sapien
gtggctgcggtagctcattggcctt

SEQ ID NO: 779770 - DNA, 25 bp, Homo sapien
tggctgcggtagctcattggccttt

SEQ ID NO: 779771 - DNA, 25 bp, Homo sapien
acgtagatcagtgatgcgagcattc

SEQ ID NO: 779772 - DNA, 25 bp, Homo sapien
tagatcagtgatgcgagcattccat

SEQ ID NO: 779773 - DNA, 25 bp, Homo sapien
cgtagatcagtgatgcgagcattcc

SEQ ID NO: 779774 - DNA, 25 bp, Homo sapien
atcagtgatgcgagcattccatttc

SEQ ID NO: 779775 - DNA, 25 bp, Homo sapien
tagaaaagagggtacgggatcgtca

SEQ ID NO: 779776 - DNA, 25 bp, Homo sapien
tagatggccttctaaaaggaattcc

SEQ ID NO: 779777 - DNA, 25 bp, Homo sapien
ttcaggaagtccttctacataaaga

SEQ ID NO: 779778 - DNA, 25 bp, Homo sapien
tggccttctaaaaggaattccttca

SEQ ID NO: 779779 - DNA, 25 bp, Homo sapien
aattccgtaagtagatggccttcta

SEQ ID NO: 779780 - DNA, 25 bp, Homo sapien
caataatcactaggtaatattcagc

SEQ ID NO: 779781 - DNA, 25 bp, Homo sapien
tttaacatttagtcagtaaggctgg

SEQ ID NO: 779782 - DNA, 25 bp, Homo sapien
tctggatgcttgagcacaactaaat

SEQ ID NO: 779783 - DNA, 25 bp, Homo sapien
gcaaactaataacgactagtacata

SEQ ID NO: 779784 - DNA, 25 bp, Homo sapien
aatcttcacgtgttgaactcagaag

SEQ ID NO: 779785 - DNA, 25 bp, Homo sapien
gtaaatcttcacgtgttgaactcag

SEQ ID NO: 779786 - DNA, 25 bp, Homo sapien
tcttcacgtgttgaactcagaagct

SEQ ID NO: 779787 - DNA, 25 bp, Homo sapien
ttcacgtgttgaactcagaagctca

SEQ ID NO: 779788 - DNA, 25 bp, Homo sapien
gctgatccaccatctttcttaattt

SEQ ID NO: 779789 - DNA, 25 bp, Homo sapien
ttttttgcagaaaagctgatccacc

SEQ ID NO: 779790 - DNA, 25 bp, Homo sapien
taatttagtgattctggcataccat

SEQ ID NO: 779791 - DNA, 25 bp, Homo sapien
ttcttaatttagtgattctggcata

SEQ ID NO: 779792 - DNA, 25 bp, Homo sapien
catcatggacaatagaggacacaac

SEQ ID NO: 779793 - DNA, 25 bp, Homo sapien
cagatttgggcagatttaagtgtcc

SEQ ID NO: 779794 - DNA, 25 bp, Homo sapien
gctactaactgttcaggaccgtaat

SEQ ID NO: 779795 - DNA, 25 bp, Homo sapien
tacactttcatctgcgtggcaacca

SEQ ID NO: 779796 - DNA, 25 bp, Homo sapien
cagatcattcgggtgtgcctcaaat

SEQ ID NO: 779797 - DNA, 25 bp, Homo sapien
tcgggtgtgcctcaaatttttggta

SEQ ID NO: 779798 - DNA, 25 bp, Homo sapien
cacgtacagatcattcgggtgtgcc

SEQ ID NO: 779799 - DNA, 25 bp, Homo sapien
cttccacgtacagatcattcgggtg

SEQ ID NO: 779800 - DNA, 25 bp, Homo sapien
tcagtggtactgtgagtcagaagtt

SEQ ID NO: 779801 - DNA, 25 bp, Homo sapien
gtaacttcagtggtactgtgagtca

SEQ ID NO: 779802 - DNA, 25 bp, Homo sapien
ggtactgtgagtcagaagttctggt

SEQ ID NO: 779803 - DNA, 25 bp, Homo sapien
agtaacttcagtggtactgtgagtc

SEQ ID NO: 779804 - DNA, 25 bp, Homo sapien
ttgcttgaccaaatcaaaagcatgc

SEQ ID NO: 779805 - DNA, 25 bp, Homo sapien
accagtactttgattgcttgaccaa

SEQ ID NO: 779806 - DNA, 25 bp, Homo sapien
tgattgcttgaccaaatcaaaagca

SEQ ID NO: 779807 - DNA, 25 bp, Homo sapien
ttcaccagtactttgattgcttgac

SEQ ID NO: 779808 - DNA, 25 bp, Homo sapien
ggagttcatcgccagctcagtggcc

SEQ ID NO: 779809 - DNA, 25 bp, Homo sapien
agctcagtggccaccgcaggtgacg

SEQ ID NO: 779810 - DNA, 25 bp, Homo sapien
aaggccacggagttcatcgccagct

SEQ ID NO: 779811 - DNA, 25 bp, Homo sapien
gggcgactccaaggccacggagttc

SEQ ID NO: 779812 - DNA, 25 bp, Homo sapien
attttgctagaaagtactcttgttt

SEQ ID NO: 779813 - DNA, 25 bp, Homo sapien
catgttatttatcagtgctgttgca

SEQ ID NO: 779814 - DNA, 25 bp, Homo sapien
ccatgttatttatcagtgctgttgc

SEQ ID NO: 779815 - DNA, 25 bp, Homo sapien
agaaagtactcttgtttgcagtgat

SEQ ID NO: 779816 - DNA, 25 bp, Homo sapien
tcttccacttgcttccgtagcttgg

SEQ ID NO: 779817 - DNA, 25 bp, Homo sapien
cgtagcttggtaattctgacattcc

SEQ ID NO: 779818 - DNA, 25 bp, Homo sapien
cttccgtagcttggtaattctgaca

SEQ ID NO: 779819 - DNA, 25 bp, Homo sapien
tccgtagcttggtaattctgacatt

SEQ ID NO: 779820 - DNA, 25 bp, Homo sapien
gcagcactcagttcgagtggtcaga

SEQ ID NO: 779821 - DNA, 25 bp, Homo sapien
cactcagttcgagtggtcagaggca

SEQ ID NO: 779822 - DNA, 25 bp, Homo sapien
ggcggtgtctacgatacagctaagc

SEQ ID NO: 779823 - DNA, 25 bp, Homo sapien
tacgatacagctaagcagcactcag

SEQ ID NO: 779824 - DNA, 25 bp, Homo sapien
gccttccacatacaagaactccggg

SEQ ID NO: 779825 - DNA, 25 bp, Homo sapien
aagccttccacatacaagaactccg

SEQ ID NO: 779826 - DNA, 25 bp, Homo sapien
ctctggcaagccttccacatacaag

SEQ ID NO: 779827 - DNA, 25 bp, Homo sapien
cacatacaagaactccgggtttgat

SEQ ID NO: 779828 - DNA, 25 bp, Homo sapien
cccaggaggcaagtaggaaataact

SEQ ID NO: 779829 - DNA, 25 bp, Homo sapien
caagtaggaaataactagttcaggt

SEQ ID NO: 779830 - DNA, 25 bp, Homo sapien
ccaggaggcaagtaggaaataacta

SEQ ID NO: 779831 - DNA, 25 bp, Homo sapien
gaggcaagtaggaaataactagttc

SEQ ID NO: 779832 - DNA, 25 bp, Homo sapien
ctttagtgtttattttactagccat

SEQ ID NO: 779833 - DNA, 25 bp, Homo sapien
actcccaggacttcgtggtcttttg

SEQ ID NO: 779834 - DNA, 25 bp, Homo sapien
gaattactcccaggacttcgtggtc

SEQ ID NO: 779835 - DNA, 25 bp, Homo sapien
cctttgaattactcccaggacttcg

SEQ ID NO: 779836 - DNA, 25 bp, Homo sapien
ctcccaggacttcgtggtcttttgg

SEQ ID NO: 779837 - DNA, 25 bp, Homo sapien
gatgtgatccatgttatctgttttc

SEQ ID NO: 779838 - DNA, 25 bp, Homo sapien
aaagctagtttggttaacgtcatct

SEQ ID NO: 779839 - DNA, 25 bp, Homo sapien
taaacacatagctagtgaactgaca

SEQ ID NO: 779840 - DNA, 25 bp, Homo sapien
gaaacataccgaggactggccctta

SEQ ID NO: 779841 - DNA, 25 bp, Homo sapien
tcggggttcgaacagctgaggtttg

SEQ ID NO: 779842 - DNA, 25 bp, Homo sapien
tgggtcggggttcgaacagctgagg

SEQ ID NO: 779843 - DNA, 25 bp, Homo sapien
tagtctgggtcggggttcgaacagc

SEQ ID NO: 779844 - DNA, 25 bp, Homo sapien
tctgggtcggggttcgaacagctga

SEQ ID NO: 779845 - DNA, 25 bp, Homo sapien
tttaggtccgtgattttggcattcc

SEQ ID NO: 779846 - DNA, 25 bp, Homo sapien
cacatttctcattgaagagattttc

SEQ ID NO: 779847 - DNA, 25 bp, Homo sapien
acatttctcattgaagagattttca

SEQ ID NO: 779848 - DNA, 25 bp, Homo sapien
caactttctgttttaggtccgtgat

SEQ ID NO: 779849 - DNA, 25 bp, Homo sapien
ctgcgtggcagtaagaaggtttcaa

SEQ ID NO: 779850 - DNA, 25 bp, Homo sapien
tggcagtaagaaggtttcaaaatag

SEQ ID NO: 779851 - DNA, 25 bp, Homo sapien
cagtaagaaggtttcaaaatagact

SEQ ID NO: 779852 - DNA, 25 bp, Homo sapien
tgcgtggcagtaagaaggtttcaaa

SEQ ID NO: 779853 - DNA, 25 bp, Homo sapien
cagaacatgggcgaaatgacgccat

SEQ ID NO: 779854 - DNA, 25 bp, Homo sapien
gaaaaacccacacgttgccaatgac

SEQ ID NO: 779855 - DNA, 25 bp, Homo sapien
tgacgccattcaatcccgaaaaacc

SEQ ID NO: 779856 - DNA, 25 bp, Homo sapien
caaaacagccgcgtacacgaaacag

SEQ ID NO: 779857 - DNA, 25 bp, Homo sapien
tccagcctcggaatgccaaaagtcg

SEQ ID NO: 779858 - DNA, 25 bp, Homo sapien
aatgatgaacttaattttggctttg

SEQ ID NO: 779859 - DNA, 25 bp, Homo sapien
gatggtcttcggaatggcacaccct

SEQ ID NO: 779860 - DNA, 25 bp, Homo sapien
gaaagactcaaataacgcgaacggc

SEQ ID NO: 779861 - DNA, 25 bp, Homo sapien
tgctaatcccacttcatccagtttc

SEQ ID NO: 779862 - DNA, 25 bp, Homo sapien
atcaactcatgctaatcccacttca

SEQ ID NO: 779863 - DNA, 25 bp, Homo sapien
tcatgctaatcccacttcatccagt

SEQ ID NO: 779864 - DNA, 25 bp, Homo sapien
tcaactcatgctaatcccacttcat

SEQ ID NO: 779865 - DNA, 25 bp, Homo sapien
tccttaatcgccgtctcaaacattt

SEQ ID NO: 779866 - DNA, 25 bp, Homo sapien
cttaatcgccgtctcaaacatttcg

SEQ ID NO: 779867 - DNA, 25 bp, Homo sapien
gtgctctccttaatcgccgtctcaa

SEQ ID NO: 779868 - DNA, 25 bp, Homo sapien
aatcgccgtctcaaacatttcgggc

SEQ ID NO: 779869 - DNA, 25 bp, Homo sapien
cctgaatgatgttaaggtcttcaac

SEQ ID NO: 779870 - DNA, 25 bp, Homo sapien
gcagtagtattaacattgggtgatg

SEQ ID NO: 779871 - DNA, 25 bp, Homo sapien
taaggtcttcaacacctgatgcagt

SEQ ID NO: 779872 - DNA, 25 bp, Homo sapien
ctggaattgtcacctgaatgatgtt

SEQ ID NO: 779873 - DNA, 25 bp, Homo sapien
ctttcgagagtctttcattatcatc

SEQ ID NO: 779874 - DNA, 25 bp, Homo sapien
ttctcttagctgtctagctttttca

SEQ ID NO: 779875 - DNA, 25 bp, Homo sapien
ttccgactaaagaggtcattcactt

SEQ ID NO: 779876 - DNA, 25 bp, Homo sapien
tttcaactttcgagagtctttcatt

SEQ ID NO: 779877 - DNA, 25 bp, Homo sapien
tttgataaactcggcagagtctaag

SEQ ID NO: 779878 - DNA, 25 bp, Homo sapien
atttgataaactcggcagagtctaa

SEQ ID NO: 779879 - DNA, 25 bp, Homo sapien
tgataaactcggcagagtctaagat

SEQ ID NO: 779880 - DNA, 25 bp, Homo sapien
ataaactcggcagagtctaagatcc

SEQ ID NO: 779881 - DNA, 25 bp, Homo sapien
tttagactttggaggccatgccttc

SEQ ID NO: 779882 - DNA, 25 bp, Homo sapien
gattgcacagcataggaagccggat

SEQ ID NO: 779883 - DNA, 25 bp, Homo sapien
cagccatggataatacgggtgtagc

SEQ ID NO: 779884 - DNA, 25 bp, Homo sapien
gaagccggattcgatgactacctgt

SEQ ID NO: 779885 - DNA, 25 bp, Homo sapien
ttgaatccgtctgacccgaagcctg

SEQ ID NO: 779886 - DNA, 25 bp, Homo sapien
gagacctgaactagagacagtggca

SEQ ID NO: 779887 - DNA, 25 bp, Homo sapien
tgacaaggcgccctaagacagaggt

SEQ ID NO: 779888 - DNA, 25 bp, Homo sapien
caaaaaatagaaacgcagagcaggg

SEQ ID NO: 779889 - DNA, 25 bp, Homo sapien
gttattaatcacaagtcctggaaat

SEQ ID NO: 779890 - DNA, 25 bp, Homo sapien
ttattaatcacaagtcctggaaatg

SEQ ID NO: 779891 - DNA, 25 bp, Homo sapien
ggttattaatcacaagtcctggaaa

SEQ ID NO: 779892 - DNA, 25 bp, Homo sapien
tatagattgtattcgctgagcacat

SEQ ID NO: 779893 - DNA, 25 bp, Homo sapien
gagcttgctgacacctgttccagat

SEQ ID NO: 779894 - DNA, 25 bp, Homo sapien
aactttatgcatacacgtcggcagg

SEQ ID NO: 779895 - DNA, 25 bp, Homo sapien
taaacacatactagaggctagacac

SEQ ID NO: 779896 - DNA, 25 bp, Homo sapien
aataatgtaaggatgtgttgttccc

SEQ ID NO: 779897 - DNA, 25 bp, Homo sapien
taaataatgtaaggatgtgttgttc

SEQ ID NO: 779898 - DNA, 25 bp, Homo sapien
aatgtaaggatgtgttgttcccttg

SEQ ID NO: 779899 - DNA, 25 bp, Homo sapien
taaggatgtgttgttcccttggaaa

SEQ ID NO: 779900 - DNA, 25 bp, Homo sapien
tatcacggggccttttgactcactc

SEQ ID NO: 779901 - DNA, 25 bp, Homo sapien
ccttttgactcactctgatcaacca

SEQ ID NO: 779902 - DNA, 25 bp, Homo sapien
gggccttttgactcactctgatcaa

SEQ ID NO: 779903 - DNA, 25 bp, Homo sapien
gtatcacggggccttttgactcact

SEQ ID NO: 779904 - DNA, 25 bp, Homo sapien
gctcactgacttatggcagacatta

SEQ ID NO: 779905 - DNA, 25 bp, Homo sapien
tcaaacccaggagtgaaaaccacag

SEQ ID NO: 779906 - DNA, 25 bp, Homo sapien
gttctcaatcaggacccacagcttg

SEQ ID NO: 779907 - DNA, 25 bp, Homo sapien
caggttaaagtgacggccctcttgc

SEQ ID NO: 779908 - DNA, 25 bp, Homo sapien
tgagatggagcacacgattatccaa

SEQ ID NO: 779909 - DNA, 25 bp, Homo sapien
tcttgagatggagcacacgattatc

SEQ ID NO: 779910 - DNA, 25 bp, Homo sapien
tttcaaatgtggtcctaagttcaca

SEQ ID NO: 779911 - DNA, 25 bp, Homo sapien
tgtggtcctaagttcacatatacaa

SEQ ID NO: 779912 - DNA, 25 bp, Homo sapien
acagagactgatttccacattgttc

SEQ ID NO: 779913 - DNA, 25 bp, Homo sapien
tgtggctggaacttccaactggctt

SEQ ID NO: 779914 - DNA, 25 bp, Homo sapien
ttccaactggcttggttcagctgat

SEQ ID NO: 779915 - DNA, 25 bp, Homo sapien
gaacttccaactggcttggttcagc

SEQ ID NO: 779916 - DNA, 25 bp, Homo sapien
ctggaacttccaactggcttggttc

SEQ ID NO: 779917 - DNA, 25 bp, Homo sapien
gcaaatccaattcacccagaagaaa

SEQ ID NO: 779918 - DNA, 25 bp, Homo sapien
taacctgcaaatccaattcacccag

SEQ ID NO: 779919 - DNA, 25 bp, Homo sapien
ttgtcctgataaaaaagtcttggct

SEQ ID NO: 779920 - DNA, 25 bp, Homo sapien
tagtttaaatgcacaatcctttgtc

SEQ ID NO: 779921 - DNA, 25 bp, Homo sapien
gacctgctcagtgataaatccattc

SEQ ID NO: 779922 - DNA, 25 bp, Homo sapien
tctggcttacatgcatttaaaggac

SEQ ID NO: 779923 - DNA, 25 bp, Homo sapien
taagaaggacaagacaccaaacatc

SEQ ID NO: 779924 - DNA, 25 bp, Homo sapien
catcaaaagagcttcagagagacat

SEQ ID NO: 779925 - DNA, 25 bp, Homo sapien
tgatctgagagcttccatcagtctc

SEQ ID NO: 779926 - DNA, 25 bp, Homo sapien
gggtctggttcttgcttgatctgag

SEQ ID NO: 779927 - DNA, 25 bp, Homo sapien
ttgatctgagagcttccatcagtct

SEQ ID NO: 779928 - DNA, 25 bp, Homo sapien
gtggggtctggttcttgcttgatct

SEQ ID NO: 779929 - DNA, 25 bp, Homo sapien
gggagatcacattagctacgcgtat

SEQ ID NO: 779930 - DNA, 25 bp, Homo sapien
tagcttaaatatccgggaaggctcc

SEQ ID NO: 779931 - DNA, 25 bp, Homo sapien
ttcagaagcactcataaagcgggat

SEQ ID NO: 779932 - DNA, 25 bp, Homo sapien
ccaatgaggaggacaacgttgactc

SEQ ID NO: 779933 - DNA, 25 bp, Homo sapien
atacaagtatattacacagcttggg

SEQ ID NO: 779934 - DNA, 25 bp, Homo sapien
cacagcttggggtagtaacaggtcc

SEQ ID NO: 779935 - DNA, 25 bp, Homo sapien
aagctcttctcaaccactgatactt

SEQ ID NO: 779936 - DNA, 25 bp, Homo sapien
tcttctcaaccactgatactttaag

SEQ ID NO: 779937 - DNA, 25 bp, Homo sapien
tcctgatagtacattcccaagtaca

SEQ ID NO: 779938 - DNA, 25 bp, Homo sapien
cataaaaaatctggtgagattcatt

SEQ ID NO: 779939 - DNA, 25 bp, Homo sapien
aaatcctgatagtacattcccaagt

SEQ ID NO: 779940 - DNA, 25 bp, Homo sapien
tcccaagtacaccagccattccaga

SEQ ID NO: 779941 - DNA, 25 bp, Homo sapien
ggaaccatgagagatagcttaggaa

SEQ ID NO: 779942 - DNA, 25 bp, Homo sapien
caggaatttttcttcactgcagaag

SEQ ID NO: 779943 - DNA, 25 bp, Homo sapien
tgcagaagctgagatgttccagtag

SEQ ID NO: 779944 - DNA, 25 bp, Homo sapien
taaggagagccgtgaacaaaggatc

SEQ ID NO: 779945 - DNA, 25 bp, Homo sapien
gaactaggaaataatgccggccacg

SEQ ID NO: 779946 - DNA, 25 bp, Homo sapien
ttagtgtcatcgagctagccccaat

SEQ ID NO: 779947 - DNA, 25 bp, Homo sapien
gcacctcagggttacaagaagaact

SEQ ID NO: 779948 - DNA, 25 bp, Homo sapien
gaaaactatgccgtcacagagccta

SEQ ID NO: 779949 - DNA, 25 bp, Homo sapien
tatgtagcctgaggaacgagcaacc

SEQ ID NO: 779950 - DNA, 25 bp, Homo sapien
cctgaggaacgagcaaccttgagcc

SEQ ID NO: 779951 - DNA, 25 bp, Homo sapien
gaagcggatgccacagcaagccctg

SEQ ID NO: 779952 - DNA, 25 bp, Homo sapien
gctttatgtagcctgaggaacgagc

SEQ ID NO: 779953 - DNA, 25 bp, Homo sapien
ctgagtccagggtcagctcgtggtc

SEQ ID NO: 779954 - DNA, 25 bp, Homo sapien
tcagctcgtggtccggacctgatct

SEQ ID NO: 779955 - DNA, 25 bp, Homo sapien
tgcctgagtccagggtcagctcgtg

SEQ ID NO: 779956 - DNA, 25 bp, Homo sapien
cagggtcagctcgtggtccggacct

SEQ ID NO: 779957 - DNA, 25 bp, Homo sapien
cacttccaggctgcgccttaaatgc

SEQ ID NO: 779958 - DNA, 25 bp, Homo sapien
ggcacttccaggctgcgccttaaat

SEQ ID NO: 779959 - DNA, 25 bp, Homo sapien
gcacttccaggctgcgccttaaatg

SEQ ID NO: 779960 - DNA, 25 bp, Homo sapien
agcagggcgatgtgacggatgaagg

SEQ ID NO: 779961 - DNA, 25 bp, Homo sapien
cgatgtgacggatgaaggtgtcccc

SEQ ID NO: 779962 - DNA, 25 bp, Homo sapien
gctgggtacgaagcgcttctcaaag

SEQ ID NO: 779963 - DNA, 25 bp, Homo sapien
tggctgggtacgaagcgcttctcaa

SEQ ID NO: 779964 - DNA, 25 bp, Homo sapien
gattggggtgaggaccatctttgca

SEQ ID NO: 779965 - DNA, 25 bp, Homo sapien
gaggaagcccagaggattggggtga

SEQ ID NO: 779966 - DNA, 25 bp, Homo sapien
cagaggattggggtgaggaccatct

SEQ ID NO: 779967 - DNA, 25 bp, Homo sapien
agcccagaggattggggtgaggacc

SEQ ID NO: 779968 - DNA, 25 bp, Homo sapien
gccagagtcgggggaccccattcag

SEQ ID NO: 779969 - DNA, 25 bp, Homo sapien
ccagagtcgggggaccccattcagc

SEQ ID NO: 779970 - DNA, 25 bp, Homo sapien
cagagtcgggggaccccattcagcc

SEQ ID NO: 779971 - DNA, 25 bp, Homo sapien
atggaactcgtagatctcggtgaag

SEQ ID NO: 779972 - DNA, 25 bp, Homo sapien
tcgtagatctcggtgaagcgccggt

SEQ ID NO: 779973 - DNA, 25 bp, Homo sapien
gatctcggtgaagcgccggtagacc

SEQ ID NO: 779974 - DNA, 25 bp, Homo sapien
gtgaagcgccggtagaccaccttct

SEQ ID NO: 779975 - DNA, 25 bp, Homo sapien
ctgttctctggattgatcgcccctg

SEQ ID NO: 779976 - DNA, 25 bp, Homo sapien
gcctcaatagggaacatttctttta

SEQ ID NO: 779977 - DNA, 25 bp, Homo sapien
gcccctgcctcaatagggaacattt

SEQ ID NO: 779978 - DNA, 25 bp, Homo sapien
gattgatcgcccctgcctcaatagg

SEQ ID NO: 779979 - DNA, 25 bp, Homo sapien
tcatcagggcgcaccttgaagaagt

SEQ ID NO: 779980 - DNA, 25 bp, Homo sapien
cgctgcccgtcaaaccacttgggag

SEQ ID NO: 779981 - DNA, 25 bp, Homo sapien
ctcggcggcccgctgcccgtcaaac

SEQ ID NO: 779982 - DNA, 25 bp, Homo sapien
gacagcgggagatcttggtgggcag

SEQ ID NO: 779983 - DNA, 25 bp, Homo sapien
atctgctcgggcagcccaagggagg

SEQ ID NO: 779984 - DNA, 25 bp, Homo sapien
cactgggtagacctgcagaagaact

SEQ ID NO: 779985 - DNA, 25 bp, Homo sapien
agaagaggcactgggtagacctgca

SEQ ID NO: 779986 - DNA, 25 bp, Homo sapien
ggaaaatgctcttgcgggctcccag

SEQ ID NO: 779987 - DNA, 25 bp, Homo sapien
tgtcgcggtactcttgccatctttg

SEQ ID NO: 779988 - DNA, 25 bp, Homo sapien
tctttgggcatcaagtatgtctctg

SEQ ID NO: 779989 - DNA, 25 bp, Homo sapien
ctgtcgcggtactcttgccatcttt

SEQ ID NO: 779990 - DNA, 25 bp, Homo sapien
gccatctttgggcatcaagtatgtc

SEQ ID NO: 779991 - DNA, 25 bp, Homo sapien
ggcagggtgagtgggcattgcaggg

SEQ ID NO: 779992 - DNA, 25 bp, Homo sapien
catctgggcctccagaacaggcgct

SEQ ID NO: 779993 - DNA, 25 bp, Homo sapien
tgagtgggcattgcagggcccatct

SEQ ID NO: 779994 - DNA, 25 bp, Homo sapien
ggcctccagaacaggcgctggcatc

SEQ ID NO: 779995 - DNA, 25 bp, Homo sapien
caatggcgcggtacgtctgcaggat

SEQ ID NO: 779996 - DNA, 25 bp, Homo sapien
ggcgcggtacgtctgcaggatgatg

SEQ ID NO: 779997 - DNA, 25 bp, Homo sapien
cccgtggacagagccatctcggagc

SEQ ID NO: 779998 - DNA, 25 bp, Homo sapien
ggcaatggcgcggtacgtctgcagg

SEQ ID NO: 779999 - DNA, 25 bp, Homo sapien
gacacactgatgtccaatgctcaga

SEQ ID NO: 780000 - DNA, 25 bp, Homo sapien
agctctgagcccacttcataatgaa

SEQ ID NO: 780001 - DNA, 25 bp, Homo sapien
cataatgaacagacggtcccatacc

SEQ ID NO: 780002 - DNA, 25 bp, Homo sapien
tgtgccagaggtgcgggaatgtgac

SEQ ID NO: 780003 - DNA, 25 bp, Homo sapien
gggtcttccgtctcgtcaggactgt

SEQ ID NO: 780004 - DNA, 25 bp, Homo sapien
tccgtctcgtcaggactgtccaggg

SEQ ID NO: 780005 - DNA, 25 bp, Homo sapien
tcagggtcttccgtctcgtcaggac

SEQ ID NO: 780006 - DNA, 25 bp, Homo sapien
ggctcagggtcttccgtctcgtcag

SEQ ID NO: 780007 - DNA, 25 bp, Homo sapien
acagcttcaccctcgagcagggaca

SEQ ID NO: 780008 - DNA, 25 bp, Homo sapien
tcaacagcttcaccctcgagcaggg

SEQ ID NO: 780009 - DNA, 25 bp, Homo sapien
gccttgatggcgacgtatggctcac

SEQ ID NO: 780010 - DNA, 25 bp, Homo sapien
cctccacagcagtgtaggccttgat

SEQ ID NO: 780011 - DNA, 25 bp, Homo sapien
agccgtccaggagcttgtgaattac

SEQ ID NO: 780012 - DNA, 25 bp, Homo sapien
ccagccgtccaggagcttgtgaatt

SEQ ID NO: 780013 - DNA, 25 bp, Homo sapien
caccagccgtccaggagcttgtgaa

SEQ ID NO: 780014 - DNA, 25 bp, Homo sapien
tgatgacccaccagccgtccaggag

SEQ ID NO: 780015 - DNA, 25 bp, Homo sapien
gatccccacaagacaggcaagggtg

SEQ ID NO: 780016 - DNA, 25 bp, Homo sapien
gccagagaaggaataataatagatg

SEQ ID NO: 780017 - DNA, 25 bp, Homo sapien
gggccattgcgcctagctaggaatg

SEQ ID NO: 780018 - DNA, 25 bp, Homo sapien
ttggacaaggacattggatccccac

SEQ ID NO: 780019 - DNA, 25 bp, Homo sapien
tctgtctcctacgaacctttgccta

SEQ ID NO: 780020 - DNA, 25 bp, Homo sapien
tgccttctgtctcctacgaaccttt

SEQ ID NO: 780021 - DNA, 25 bp, Homo sapien
ttctgtctcctacgaacctttgcct

SEQ ID NO: 780022 - DNA, 25 bp, Homo sapien
ccttctgtctcctacgaacctttgc

SEQ ID NO: 780023 - DNA, 25 bp, Homo sapien
aactgagacccttccagcaatcctt

SEQ ID NO: 780024 - DNA, 25 bp, Homo sapien
tgtgcaactgagacccttccagcaa

SEQ ID NO: 780025 - DNA, 25 bp, Homo sapien
cagcaatccttccacagtctaggca

SEQ ID NO: 780026 - DNA, 25 bp, Homo sapien
cctggtctgtgcaactgagaccctt

SEQ ID NO: 780027 - DNA, 25 bp, Homo sapien
ccccgcttgatctggcgttgggcct

SEQ ID NO: 780028 - DNA, 25 bp, Homo sapien
ggcgccccccgcttgatctggcgtt

SEQ ID NO: 780029 - DNA, 25 bp, Homo sapien
ggcgttgggcctgggacacgtcttg

SEQ ID NO: 780030 - DNA, 25 bp, Homo sapien
gttgggcctgggacacgtcttgccc

SEQ ID NO: 780031 - DNA, 25 bp, Homo sapien
tagtctgcacgaccccggcgggaca

SEQ ID NO: 780032 - DNA, 25 bp, Homo sapien
cccagggactcagatgggcacccct

SEQ ID NO: 780033 - DNA, 25 bp, Homo sapien
gggcgtcgtcaaagcccgagggcgc

SEQ ID NO: 780034 - DNA, 25 bp, Homo sapien
agtagggggccggtagtctgcacga

SEQ ID NO: 780035 - DNA, 25 bp, Homo sapien
gcggcgataggcgtcctggctgagg

SEQ ID NO: 780036 - DNA, 25 bp, Homo sapien
gttgcggcgataggcgtcctggctg

SEQ ID NO: 780037 - DNA, 25 bp, Homo sapien
gctgttgcggcgataggcgtcctgg

SEQ ID NO: 780038 - DNA, 25 bp, Homo sapien
gcgataggcgtcctggctgaggcgc

SEQ ID NO: 780039 - DNA, 25 bp, Homo sapien
ggctctgcggtcccggccgcgcctg

SEQ ID NO: 780040 - DNA, 25 bp, Homo sapien
ggcgtcgctgctgcagaaaacggac

SEQ ID NO: 780041 - DNA, 25 bp, Homo sapien
ctggcggcgtcgctgctgcagaaaa

SEQ ID NO: 780042 - DNA, 25 bp, Homo sapien
gccgcgcctggcggcgtcgctgctg

SEQ ID NO: 780043 - DNA, 25 bp, Homo sapien
ctgcggtttagagcgctgcgtctgc

SEQ ID NO: 780044 - DNA, 25 bp, Homo sapien
gtttagagcgctgcgtctgccgctc

SEQ ID NO: 780045 - DNA, 25 bp, Homo sapien
ttagagcgctgcgtctgccgctcct

SEQ ID NO: 780046 - DNA, 25 bp, Homo sapien
cggtttagagcgctgcgtctgccgc

SEQ ID NO: 780047 - DNA, 25 bp, Homo sapien
agcttccgcttggtgctctcgctgc

SEQ ID NO: 780048 - DNA, 25 bp, Homo sapien
gctctcgctgcagcggttcaggatg

SEQ ID NO: 780049 - DNA, 25 bp, Homo sapien
agacgccagcttccgcttggtgctc

SEQ ID NO: 780050 - DNA, 25 bp, Homo sapien
gttcaggatgaggtcggcgctcggc

SEQ ID NO: 780051 - DNA, 25 bp, Homo sapien
cgagacgctagctggggactgcgct

SEQ ID NO: 780052 - DNA, 25 bp, Homo sapien
ggcacggggcggcaagggccgagac

SEQ ID NO: 780053 - DNA, 25 bp, Homo sapien
gctagctggggactgcgctccagcc

SEQ ID NO: 780054 - DNA, 25 bp, Homo sapien
caagggccgagacgctagctgggga

SEQ ID NO: 780055 - DNA, 25 bp, Homo sapien
ggagccgcgctggacaggggtcggg

SEQ ID NO: 780056 - DNA, 25 bp, Homo sapien
tttattgagggtggcgggagccgcg

SEQ ID NO: 780057 - DNA, 25 bp, Homo sapien
cgctggacaggggtcggggctgccc

SEQ ID NO: 780058 - DNA, 25 bp, Homo sapien
ccactccaagcaacatttattgagg

SEQ ID NO: 780059 - DNA, 25 bp, Homo sapien
gcccggccctccctgcattcctgca

SEQ ID NO: 780060 - DNA, 25 bp, Homo sapien
gcggagcccggccctccctgcattc

SEQ ID NO: 780061 - DNA, 25 bp, Homo sapien
gggcggagcccggccctccctgcat

SEQ ID NO: 780062 - DNA, 25 bp, Homo sapien
ccggccctccctgcattcctgcaga

SEQ ID NO: 780063 - DNA, 25 bp, Homo sapien
aaagaaaaggacgattcactcagac

SEQ ID NO: 780064 - DNA, 25 bp, Homo sapien
aatatcaaaggtaactccgcaggcc

SEQ ID NO: 780065 - DNA, 25 bp, Homo sapien
gattcactcagacatagcccctttg

SEQ ID NO: 780066 - DNA, 25 bp, Homo sapien
ccctttgctactggagtggacagat

SEQ ID NO: 780067 - DNA, 25 bp, Homo sapien
aaataaaatgcatgcaatgtggtcc

SEQ ID NO: 780068 - DNA, 25 bp, Homo sapien
taaaatgcatgcaatgtggtccagg

SEQ ID NO: 780069 - DNA, 25 bp, Homo sapien
aaatgcatgcaatgtggtccaggcg

SEQ ID NO: 780070 - DNA, 25 bp, Homo sapien
gcatgcaatgtggtccaggcgtggt

SEQ ID NO: 780071 - DNA, 25 bp, Homo sapien
taaatgagagtagctgtaaaatatg

SEQ ID NO: 780072 - DNA, 25 bp, Homo sapien
tctcacctcctcattggcccagttt

SEQ ID NO: 780073 - DNA, 25 bp, Homo sapien
ggcagccttgagtgatttctcacct

SEQ ID NO: 780074 - DNA, 25 bp, Homo sapien
aatatggttaatgtgaggaccaaac

SEQ ID NO: 780075 - DNA, 25 bp, Homo sapien
ctaatgggccacagatggtactggt

SEQ ID NO: 780076 - DNA, 25 bp, Homo sapien
cctaatgggccacagatggtactgg

SEQ ID NO: 780077 - DNA, 25 bp, Homo sapien
tcctaatgggccacagatggtactg

SEQ ID NO: 780078 - DNA, 25 bp, Homo sapien
gaccatcataattgtcaggagaagg

SEQ ID NO: 780079 - DNA, 25 bp, Homo sapien
caagcagaagcatttagggattggc

SEQ ID NO: 780080 - DNA, 25 bp, Homo sapien
gatcgtgatgggaaacattagagaa

SEQ ID NO: 780081 - DNA, 25 bp, Homo sapien
tgcaagagcaatagctatgggcacc

SEQ ID NO: 780082 - DNA, 25 bp, Homo sapien
gaaactgaatttttgagtgtatctt

SEQ ID NO: 780083 - DNA, 25 bp, Homo sapien
gagtgtatcttgttttagtgtattt

SEQ ID NO: 780084 - DNA, 25 bp, Homo sapien
gacctccagtgatctgccttcctcg

SEQ ID NO: 780085 - DNA, 25 bp, Homo sapien
tgcctcccaggttcctgatattctc

SEQ ID NO: 780086 - DNA, 25 bp, Homo sapien
aggttcctgatattctccttcctca

SEQ ID NO: 780087 - DNA, 25 bp, Homo sapien
cttcctcggcctctcaaagtgctgg

SEQ ID NO: 780088 - DNA, 25 bp, Homo sapien
tagagaagggtgatgaactggggcc

SEQ ID NO: 780089 - DNA, 25 bp, Homo sapien
gagaagggtgatgaactggggccat

SEQ ID NO: 780090 - DNA, 25 bp, Homo sapien
ctagagaagggtgatgaactggggc

SEQ ID NO: 780091 - DNA, 25 bp, Homo sapien
agagaagggtgatgaactggggcca

SEQ ID NO: 780092 - DNA, 25 bp, Homo sapien
tttgctggcctctccggtgtctggg

SEQ ID NO: 780093 - DNA, 25 bp, Homo sapien
cctctccggtgtctgggagcgggat

SEQ ID NO: 780094 - DNA, 25 bp, Homo sapien
tctccggtgtctgggagcgggatga

SEQ ID NO: 780095 - DNA, 25 bp, Homo sapien
cggtgtctgggagcgggatgaggct

SEQ ID NO: 780096 - DNA, 25 bp, Homo sapien
tgtccacgtagcaaatgaaaactgc

SEQ ID NO: 780097 - DNA, 25 bp, Homo sapien
tctgtccacgtagcaaatgaaaact

SEQ ID NO: 780098 - DNA, 25 bp, Homo sapien
ccacgtagcaaatgaaaactgcagg

SEQ ID NO: 780099 - DNA, 25 bp, Homo sapien
ccccttctgtccacgtagcaaatga

SEQ ID NO: 780100 - DNA, 25 bp, Homo sapien
tctgtgcttgcacccgatccctcat

SEQ ID NO: 780101 - DNA, 25 bp, Homo sapien
ctctgtgcttgcacccgatccctca

SEQ ID NO: 780102 - DNA, 25 bp, Homo sapien
ggcctctgtgcttgcacccgatccc

SEQ ID NO: 780103 - DNA, 25 bp, Homo sapien
gcctctgtgcttgcacccgatccct

SEQ ID NO: 780104 - DNA, 25 bp, Homo sapien
ctaggggatcagctcgagtcaagaa

SEQ ID NO: 780105 - DNA, 25 bp, Homo sapien
taggggatcagctcgagtcaagaac

SEQ ID NO: 780106 - DNA, 25 bp, Homo sapien
tgtctgctgccaatggagttgaaga

SEQ ID NO: 780107 - DNA, 25 bp, Homo sapien
gttgaagaactggaatgatgacaca

SEQ ID NO: 780108 - DNA, 25 bp, Homo sapien
agttgaagaactggaatgatgacac

SEQ ID NO: 780109 - DNA, 25 bp, Homo sapien
gctgccaatggagttgaagaactgg

SEQ ID NO: 780110 - DNA, 25 bp, Homo sapien
gtattaatctctacatcctccacaa

SEQ ID NO: 780111 - DNA, 25 bp, Homo sapien
tattaatctctacatcctccacaaa

SEQ ID NO: 780112 - DNA, 25 bp, Homo sapien
ggtgtagactgagaattcgagtttt

SEQ ID NO: 780113 - DNA, 25 bp, Homo sapien
gtagactgagaattcgagttttgtt

SEQ ID NO: 780114 - DNA, 25 bp, Homo sapien
ctgccaggtgtagactgagaattcg

SEQ ID NO: 780115 - DNA, 25 bp, Homo sapien
caggtgtagactgagaattcgagtt

SEQ ID NO: 780116 - DNA, 25 bp, Homo sapien
gttcccctcgccgagaaggcagcag

SEQ ID NO: 780117 - DNA, 25 bp, Homo sapien
cagcagctgaactttccgcttacgc

SEQ ID NO: 780118 - DNA, 25 bp, Homo sapien
aactttccgcttacgctgcccagag

SEQ ID NO: 780119 - DNA, 25 bp, Homo sapien
aaggtcagctgttcccctcgccgag

SEQ ID NO: 780120 - DNA, 25 bp, Homo sapien
gaaccactgtaatgaagccttcttc

SEQ ID NO: 780121 - DNA, 25 bp, Homo sapien
cctcggcagtgatcgaatagccaag

SEQ ID NO: 780122 - DNA, 25 bp, Homo sapien
tcctccaaggcctggttgaaccact

SEQ ID NO: 780123 - DNA, 25 bp, Homo sapien
tcttctctaagtctaggtcctcggc

SEQ ID NO: 780124 - DNA, 25 bp, Homo sapien
ggtctcagtgacagagttcgaggca

SEQ ID NO: 780125 - DNA, 25 bp, Homo sapien
gcaggcagggtaaaggtaaatgaag

SEQ ID NO: 780126 - DNA, 25 bp, Homo sapien
ttcttcaagctctctaacagtgggt

SEQ ID NO: 780127 - DNA, 25 bp, Homo sapien
caggctcgggggagtctgcatcttc

SEQ ID NO: 780128 - DNA, 25 bp, Homo sapien
tgcgcgcgcagtgccgtgaaggcct

SEQ ID NO: 780129 - DNA, 25 bp, Homo sapien
gtctgataaagaggtgtgcgcgcgc

SEQ ID NO: 780130 - DNA, 25 bp, Homo sapien
tctgataaagaggtgtgcgcgcgca

SEQ ID NO: 780131 - DNA, 25 bp, Homo sapien
tgccgtgaaggcctgggccgggaac

SEQ ID NO: 780132 - DNA, 25 bp, Homo sapien
tgtctttggaggtgagagggcctca

SEQ ID NO: 780133 - DNA, 25 bp, Homo sapien
tggaggtgccttggtgtcagtggct

SEQ ID NO: 780134 - DNA, 25 bp, Homo sapien
tggcggccctgactgtgataaaccc

SEQ ID NO: 780135 - DNA, 25 bp, Homo sapien
cagtggctggtaccatggatggagc

SEQ ID NO: 780136 - DNA, 25 bp, Homo sapien
tgtttatgccaaagccaaacgcagg

SEQ ID NO: 780137 - DNA, 25 bp, Homo sapien
cttctcactcttgggtggagccgtg

SEQ ID NO: 780138 - DNA, 25 bp, Homo sapien
tgctggtcgtggtactcacactgct

SEQ ID NO: 780139 - DNA, 25 bp, Homo sapien
tggagccgtgaaaatgggcttgaac

SEQ ID NO: 780140 - DNA, 25 bp, Homo sapien
cactaaagtcggcagcgctgctgct

SEQ ID NO: 780141 - DNA, 25 bp, Homo sapien
ctaaagtcggcagcgctgctgctgg

SEQ ID NO: 780142 - DNA, 25 bp, Homo sapien
aactggaatatggagcccatggccg

SEQ ID NO: 780143 - DNA, 25 bp, Homo sapien
cccatggccggggtgaagctggcag

SEQ ID NO: 780144 - DNA, 25 bp, Homo sapien
agaagacagcagtggagccgccaaa

SEQ ID NO: 780145 - DNA, 25 bp, Homo sapien
tactgaacgtcagagtgggctggct

SEQ ID NO: 780146 - DNA, 25 bp, Homo sapien
ctcagcggccccaaatgcgggctgg

SEQ ID NO: 780147 - DNA, 25 bp, Homo sapien
gcgcttgagccaaagggaatgttga

SEQ ID NO: 780148 - DNA, 25 bp, Homo sapien
cacgttgaaggcaaacggtgtgctc

SEQ ID NO: 780149 - DNA, 25 bp, Homo sapien
ggtggctgtgctcccactctgtcct

SEQ ID NO: 780150 - DNA, 25 bp, Homo sapien
gtgcccagggcgttctgacctaagc

SEQ ID NO: 780151 - DNA, 25 bp, Homo sapien
acaggtttgctctcagttgtgctgc

SEQ ID NO: 780152 - DNA, 25 bp, Homo sapien
agaggctgctgcctgatgtgcccac

SEQ ID NO: 780153 - DNA, 25 bp, Homo sapien
gaaaggtgcaacaccaacaaagcct

SEQ ID NO: 780154 - DNA, 25 bp, Homo sapien
ggtgcaacaccaacaaagccttggg

SEQ ID NO: 780155 - DNA, 25 bp, Homo sapien
actccaggcgcaggggtgttcagac

SEQ ID NO: 780156 - DNA, 25 bp, Homo sapien
tcttggatcccgcaccaatggaaaa

SEQ ID NO: 780157 - DNA, 25 bp, Homo sapien
ttcgggcctgcagtcgctgtcgagc

SEQ ID NO: 780158 - DNA, 25 bp, Homo sapien
ggatcccgcaccaatggaaaatgaa

SEQ ID NO: 780159 - DNA, 25 bp, Homo sapien
tactttttgcgggtgtgctgccttc

SEQ ID NO: 780160 - DNA, 25 bp, Homo sapien
taggtttgctttacgcagctggaag

SEQ ID NO: 780161 - DNA, 25 bp, Homo sapien
cggggtaggtttgctttacgcagct

SEQ ID NO: 780162 - DNA, 25 bp, Homo sapien
ccctccagcgacgacggctctcggg

SEQ ID NO: 780163 - DNA, 25 bp, Homo sapien
gcgcctgcctaagggtgcgctaagc

SEQ ID NO: 780164 - DNA, 25 bp, Homo sapien
cacattcaattagcgaggccccaga

SEQ ID NO: 780165 - DNA, 25 bp, Homo sapien
ttcaaagagcaatacacagagcgtc

SEQ ID NO: 780166 - DNA, 25 bp, Homo sapien
tcctgcctgcggaactgaggtaaac

SEQ ID NO: 780167 - DNA, 25 bp, Homo sapien
ccaaggcaaagctagattcaagggc

SEQ ID NO: 780168 - DNA, 25 bp, Homo sapien
cctgttggaagtgggatccaggcct

SEQ ID NO: 780169 - DNA, 25 bp, Homo sapien
caaggctgagttggctcggctcaag

SEQ ID NO: 780170 - DNA, 25 bp, Homo sapien
gatggaaggctctgttgggccggca

SEQ ID NO: 780171 - DNA, 25 bp, Homo sapien
tgtgagccggaatgaggacctgttg

SEQ ID NO: 780172 - DNA, 25 bp, Homo sapien
catctgaaatgagtatgagccgacc

SEQ ID NO: 780173 - DNA, 25 bp, Homo sapien
tgtctactggtgaacatcggtggag

SEQ ID NO: 780174 - DNA, 25 bp, Homo sapien
gacggtcagcgctttgtcatctggt

SEQ ID NO: 780175 - DNA, 25 bp, Homo sapien
tgagccgaccttccctgggttacga

SEQ ID NO: 780176 - DNA, 25 bp, Homo sapien
catcacttaatttggccaaaccggc

SEQ ID NO: 780177 - DNA, 25 bp, Homo sapien
ctttgaggcctggatcatacctaca

SEQ ID NO: 780178 - DNA, 25 bp, Homo sapien
taccccacgtgctttcttgcttggc

SEQ ID NO: 780179 - DNA, 25 bp, Homo sapien
caaaaccgttattgtggctttgagg

SEQ ID NO: 780180 - DNA, 25 bp, Homo sapien
tctggagactgtcggggaaaacctg

SEQ ID NO: 780181 - DNA, 25 bp, Homo sapien
ctccctctggagactgtcggggaaa

SEQ ID NO: 780182 - DNA, 25 bp, Homo sapien
ttttctgtatgtgccggtctaatct

SEQ ID NO: 780183 - DNA, 25 bp, Homo sapien
tatgtgccggtctaatcttcctctg

SEQ ID NO: 780184 - DNA, 25 bp, Homo sapien
tgctatctgcgcagacgcttccgag

SEQ ID NO: 780185 - DNA, 25 bp, Homo sapien
gcttccgagggcagaaatagtccca

SEQ ID NO: 780186 - DNA, 25 bp, Homo sapien
catgtaatgatagggaacaggaccc

SEQ ID NO: 780187 - DNA, 25 bp, Homo sapien
ggtcccgcctgaggtgatatcgtca

SEQ ID NO: 780188 - DNA, 25 bp, Homo sapien
ctttggccttctttccttgcggcaa

SEQ ID NO: 780189 - DNA, 25 bp, Homo sapien
ctgcttcttcacgccagcaggggcc

SEQ ID NO: 780190 - DNA, 25 bp, Homo sapien
tcttcacgccagcaggggccggagc

SEQ ID NO: 780191 - DNA, 25 bp, Homo sapien
gcttcttcacgccagcaggggccgg

SEQ ID NO: 780192 - DNA, 25 bp, Homo sapien
tggctgtccgccactgcaccctgac

SEQ ID NO: 780193 - DNA, 25 bp, Homo sapien
gaccattgcacaaagtgggcgaggt

SEQ ID NO: 780194 - DNA, 25 bp, Homo sapien
tgggcgaggtccgttttggcctgga

SEQ ID NO: 780195 - DNA, 25 bp, Homo sapien
gttaatagcaggagacagtttctgc

SEQ ID NO: 780196 - DNA, 25 bp, Homo sapien
tttgcccctggtctgtacttctggg

SEQ ID NO: 780197 - DNA, 25 bp, Homo sapien
ttgcccctggtctgtacttctgggc

SEQ ID NO: 780198 - DNA, 25 bp, Homo sapien
ggcccagctgagcgttcttgttctc

SEQ ID NO: 780199 - DNA, 25 bp, Homo sapien
tggcccagctgagcgttcttgttct

SEQ ID NO: 780200 - DNA, 25 bp, Homo sapien
ctggcccagctgagcgttcttgttc

SEQ ID NO: 780201 - DNA, 25 bp, Homo sapien
cttgatgggacccatgttgcgtgga

SEQ ID NO: 780202 - DNA, 25 bp, Homo sapien
agcttgatgggacccatgttgcgtg

SEQ ID NO: 780203 - DNA, 25 bp, Homo sapien
tgatgggacccatgttgcgtggagt

SEQ ID NO: 780204 - DNA, 25 bp, Homo sapien
ccagcttgatgggacccatgttgcg

SEQ ID NO: 780205 - DNA, 25 bp, Homo sapien
tgaggtgcgaggtatgatccgtaat

SEQ ID NO: 780206 - DNA, 25 bp, Homo sapien
ggaagcgcacgaaacatgatgggac

SEQ ID NO: 780207 - DNA, 25 bp, Homo sapien
acgcagggcacgttgggtacgtgca

SEQ ID NO: 780208 - DNA, 25 bp, Homo sapien
aactacagaggccacgcggtgaggt

SEQ ID NO: 780209 - DNA, 25 bp, Homo sapien
ccctgtggcgtgagccttcggcctg

SEQ ID NO: 780210 - DNA, 25 bp, Homo sapien
cttcggcctggtgcgccccgctgcc

SEQ ID NO: 780211 - DNA, 25 bp, Homo sapien
tgccctccctgtggcgtgagccttc

SEQ ID NO: 780212 - DNA, 25 bp, Homo sapien
cctccctgtggcgtgagccttcggc

SEQ ID NO: 780213 - DNA, 25 bp, Homo sapien
ccaggactccctggtttaacgcgct

SEQ ID NO: 780214 - DNA, 25 bp, Homo sapien
caggactccctggtttaacgcgctt

SEQ ID NO: 780215 - DNA, 25 bp, Homo sapien
gctccttctcggatgacgtccttca

SEQ ID NO: 780216 - DNA, 25 bp, Homo sapien
gcaccgaagcatcaggcgccactag

SEQ ID NO: 780217 - DNA, 25 bp, Homo sapien
gcatcctctgacttaaccgctcgta

SEQ ID NO: 780218 - DNA, 25 bp, Homo sapien
gcatcaggcgccactaggtctccag

SEQ ID NO: 780219 - DNA, 25 bp, Homo sapien
ccatgtgttccaggtatcccgagta

SEQ ID NO: 780220 - DNA, 25 bp, Homo sapien
catgtgttccaggtatcccgagtat

SEQ ID NO: 780221 - DNA, 25 bp, Homo sapien
tgtgttccaggtatcccgagtattt

SEQ ID NO: 780222 - DNA, 25 bp, Homo sapien
atgtgttccaggtatcccgagtatt

SEQ ID NO: 780223 - DNA, 25 bp, Homo sapien
agcccagcgttccataggcgtagtt

SEQ ID NO: 780224 - DNA, 25 bp, Homo sapien
gagagcacaaaacttgtctgactca

SEQ ID NO: 780225 - DNA, 25 bp, Homo sapien
cataggcgtagttcggtttgaacag

SEQ ID NO: 780226 - DNA, 25 bp, Homo sapien
gagcacaaaacttgtctgactcagc

SEQ ID NO: 780227 - DNA, 25 bp, Homo sapien
catagaaacgattctggcggaaaag

SEQ ID NO: 780228 - DNA, 25 bp, Homo sapien
tctggcggaaaaggtagttgccaaa

SEQ ID NO: 780229 - DNA, 25 bp, Homo sapien
cgattctggcggaaaaggtagttgc

SEQ ID NO: 780230 - DNA, 25 bp, Homo sapien
gcatcatagaaacgattctggcgga

SEQ ID NO: 780231 - DNA, 25 bp, Homo sapien
gtgctgatcgccggcgcagaagcaa

SEQ ID NO: 780232 - DNA, 25 bp, Homo sapien
aaagcctgctctccatagcacaggg

SEQ ID NO: 780233 - DNA, 25 bp, Homo sapien
ttttggtcaatgatcaaagcctgct

SEQ ID NO: 780234 - DNA, 25 bp, Homo sapien
gctatggtgggtcggtctagcttca

SEQ ID NO: 780235 - DNA, 25 bp, Homo sapien
tctgggctcgaactagaaaatcccg

SEQ ID NO: 780236 - DNA, 25 bp, Homo sapien
aaatcccgggccttttgatactcag

SEQ ID NO: 780237 - DNA, 25 bp, Homo sapien
gatgtcatgattgaagggttgctcc

SEQ ID NO: 780238 - DNA, 25 bp, Homo sapien
gccttttgatactcagtcaggagaa

SEQ ID NO: 780239 - DNA, 25 bp, Homo sapien
ggccgagcacttcaaaaacccagct

SEQ ID NO: 780240 - DNA, 25 bp, Homo sapien
aactgctggtgcagcgcacggccga

SEQ ID NO: 780241 - DNA, 25 bp, Homo sapien
agcgcacggccgagcacttcaaaaa

SEQ ID NO: 780242 - DNA, 25 bp, Homo sapien
ggcggcctcctaacactctgggcaa

SEQ ID NO: 780243 - DNA, 25 bp, Homo sapien
aaccatcgccacagggcgcgaacat

SEQ ID NO: 780244 - DNA, 25 bp, Homo sapien
tcaactttctcctgctgtagaacca

SEQ ID NO: 780245 - DNA, 25 bp, Homo sapien
gggcgcgaacatgcggtgccacatt

SEQ ID NO: 780246 - DNA, 25 bp, Homo sapien
gctgtagaaccatcgccacagggcg

SEQ ID NO: 780247 - DNA, 25 bp, Homo sapien
tatgacagtcaataacagctacaac

SEQ ID NO: 780248 - DNA, 25 bp, Homo sapien
gggagcatcaaaagtatgacagtca

SEQ ID NO: 780249 - DNA, 25 bp, Homo sapien
tcggtggctgcttgggagcgtaggg

SEQ ID NO: 780250 - DNA, 25 bp, Homo sapien
cagctacaaccaaaggtcttgagaa

SEQ ID NO: 780251 - DNA, 25 bp, Homo sapien
cagcaatgccagtggtgtccaccat

SEQ ID NO: 780252 - DNA, 25 bp, Homo sapien
gcagcaatgccagtggtgtccacca

SEQ ID NO: 780253 - DNA, 25 bp, Homo sapien
tacatgtatcgcacagaggtgcaaa

SEQ ID NO: 780254 - DNA, 25 bp, Homo sapien
aagacaatggcagtcaggctgaggc

SEQ ID NO: 780255 - DNA, 25 bp, Homo sapien
gaatccattcctacgaaccaggctg

SEQ ID NO: 780256 - DNA, 25 bp, Homo sapien
caaggagaaataagtccggagatcg

SEQ ID NO: 780257 - DNA, 25 bp, Homo sapien
gatcccacgaggttcaggtagttga

SEQ ID NO: 780258 - DNA, 25 bp, Homo sapien
tctagggtgtgtcccatgaaatgac

SEQ ID NO: 780259 - DNA, 25 bp, Homo sapien
ctttagcataaacgagaatgcgcca

SEQ ID NO: 780260 - DNA, 25 bp, Homo sapien
gaatgcgccaacataggaaagctca

SEQ ID NO: 780261 - DNA, 25 bp, Homo sapien
cttccactcccccaatgatggagaa

SEQ ID NO: 780262 - DNA, 25 bp, Homo sapien
agagatgcggccacaggacattcca

SEQ ID NO: 780263 - DNA, 25 bp, Homo sapien
tcagccgcgtccatgagagatgcgg

SEQ ID NO: 780264 - DNA, 25 bp, Homo sapien
tctcccctcgttggtaggtgaagaa

SEQ ID NO: 780265 - DNA, 25 bp, Homo sapien
aaaaagtagcagtgttctacttgtc

SEQ ID NO: 780266 - DNA, 25 bp, Homo sapien
ttgtcagtagctgcgctttcccctc

SEQ ID NO: 780267 - DNA, 25 bp, Homo sapien
cttctgttacgaacacggaaaacag

SEQ ID NO: 780268 - DNA, 25 bp, Homo sapien
gttctacttgtcagtagctgcgctt

SEQ ID NO: 780269 - DNA, 25 bp, Homo sapien
attctgtcttcaaaacagagaaccc

SEQ ID NO: 780270 - DNA, 25 bp, Homo sapien
gggacattcgcagccggaagcaggg

SEQ ID NO: 780271 - DNA, 25 bp, Homo sapien
ggtgttgactcagggacattcgcag

SEQ ID NO: 780272 - DNA, 25 bp, Homo sapien
atctctattggtgttgactcaggga

SEQ ID NO: 780273 - DNA, 25 bp, Homo sapien
tcaggtccgatcgggacaaagaaat

SEQ ID NO: 780274 - DNA, 25 bp, Homo sapien
acggcagcggggcaaggagtcactg

SEQ ID NO: 780275 - DNA, 25 bp, Homo sapien
tgcctgctggatcccatggcccgag

SEQ ID NO: 780276 - DNA, 25 bp, Homo sapien
gggcaaggagtcactggctgagagt

SEQ ID NO: 780277 - DNA, 25 bp, Homo sapien
gattctgtcagaaggtgaggccctg

SEQ ID NO: 780278 - DNA, 25 bp, Homo sapien
gccagatgaagccagaccgtggtca

SEQ ID NO: 780279 - DNA, 25 bp, Homo sapien
ttgatgataccctggtcccctggtg

SEQ ID NO: 780280 - DNA, 25 bp, Homo sapien
gcaaacatcgccaagttcctggtga

SEQ ID NO: 780281 - DNA, 25 bp, Homo sapien
cacggtggacacgttttgcaagaac

SEQ ID NO: 780282 - DNA, 25 bp, Homo sapien
tatacacgaagcacgtgggcacggc

SEQ ID NO: 780283 - DNA, 25 bp, Homo sapien
ctagaataatgagggtgtcgtggac

SEQ ID NO: 780284 - DNA, 25 bp, Homo sapien
tgcaagaacactctcaaagatatac

SEQ ID NO: 780285 - DNA, 25 bp, Homo sapien
tctcatcgcccacctcaatgtgaga

SEQ ID NO: 780286 - DNA, 25 bp, Homo sapien
cacctcaatgtgagagcccacatga

SEQ ID NO: 780287 - DNA, 25 bp, Homo sapien
aaggtcagcgtcagcgacttcacac

SEQ ID NO: 780288 - DNA, 25 bp, Homo sapien
tgagagcccacatgaaggtcagcgt

SEQ ID NO: 780289 - DNA, 25 bp, Homo sapien
ttggcgagcctgttcaggaacagac

SEQ ID NO: 780290 - DNA, 25 bp, Homo sapien
caagtttggcgagcctgttcaggaa

SEQ ID NO: 780291 - DNA, 25 bp, Homo sapien
caacccaagtttggcgagcctgttc

SEQ ID NO: 780292 - DNA, 25 bp, Homo sapien
caaccaacccaagtttggcgagcct

SEQ ID NO: 780293 - DNA, 25 bp, Homo sapien
tgtggagggtactgaggtccacact

SEQ ID NO: 780294 - DNA, 25 bp, Homo sapien
gagggtactgaggtccacactgtgt

SEQ ID NO: 780295 - DNA, 25 bp, Homo sapien
gggtactgaggtccacactgtgtgt

SEQ ID NO: 780296 - DNA, 25 bp, Homo sapien
cttgtgtggagggtactgaggtcca

SEQ ID NO: 780297 - DNA, 25 bp, Homo sapien
ctgaagccacaaagcccaaggcctc

SEQ ID NO: 780298 - DNA, 25 bp, Homo sapien
cacaaagcccaaggcctcaagtcgg

SEQ ID NO: 780299 - DNA, 25 bp, Homo sapien
agcccaaggcctcaagtcggatggg

SEQ ID NO: 780300 - DNA, 25 bp, Homo sapien
tgaagccacaaagcccaaggcctca

SEQ ID NO: 780301 - DNA, 25 bp, Homo sapien
caggacccgcagtggttcagtgcgg

SEQ ID NO: 780302 - DNA, 25 bp, Homo sapien
tcaggacccgcagtggttcagtgcg

SEQ ID NO: 780303 - DNA, 25 bp, Homo sapien
tgggcctggagaggcgtggggctgc

SEQ ID NO: 780304 - DNA, 25 bp, Homo sapien
ctggaaccagggttgagctgggagg

SEQ ID NO: 780305 - DNA, 25 bp, Homo sapien
gagctgggaggagacccctctgccg

SEQ ID NO: 780306 - DNA, 25 bp, Homo sapien
gaggagacccctctgccggtgtagc

SEQ ID NO: 780307 - DNA, 25 bp, Homo sapien
cctctgccggtgtagcctggggtct

SEQ ID NO: 780308 - DNA, 25 bp, Homo sapien
taaaaagcatccgagtgcgctattc

SEQ ID NO: 780309 - DNA, 25 bp, Homo sapien
tccgagtgcgctattcgctcctctg

SEQ ID NO: 780310 - DNA, 25 bp, Homo sapien
aagcatccgagtgcgctattcgctc

SEQ ID NO: 780311 - DNA, 25 bp, Homo sapien
gagtgcgctattcgctcctctgtga

SEQ ID NO: 780312 - DNA, 25 bp, Homo sapien
tggtgtccccgctgtaagcatgctg

SEQ ID NO: 780313 - DNA, 25 bp, Homo sapien
atgcttctcagcccacgatggtgca

SEQ ID NO: 780314 - DNA, 25 bp, Homo sapien
aagtggtgtccccgctgtaagcatg

SEQ ID NO: 780315 - DNA, 25 bp, Homo sapien
ggaagtggtgtccccgctgtaagca

SEQ ID NO: 780316 - DNA, 25 bp, Homo sapien
ctccctaaggagactgcggaggctc

SEQ ID NO: 780317 - DNA, 25 bp, Homo sapien
tccctaaggagactgcggaggctcc

SEQ ID NO: 780318 - DNA, 25 bp, Homo sapien
gagccactgtcccggcgtattatta

SEQ ID NO: 780319 - DNA, 25 bp, Homo sapien
gccactgtcccggcgtattattact

SEQ ID NO: 780320 - DNA, 25 bp, Homo sapien
gggagccactgtcccggcgtattat

SEQ ID NO: 780321 - DNA, 25 bp, Homo sapien
cactgtcccggcgtattattacttt

SEQ ID NO: 780322 - DNA, 25 bp, Homo sapien
gtcctcgatctgctaacttcatggc

SEQ ID NO: 780323 - DNA, 25 bp, Homo sapien
ctcgatctgctaacttcatggccat

SEQ ID NO: 780324 - DNA, 25 bp, Homo sapien
ctgggtcctcgatctgctaacttca

SEQ ID NO: 780325 - DNA, 25 bp, Homo sapien
gggtcctcgatctgctaacttcatg

SEQ ID NO: 780326 - DNA, 25 bp, Homo sapien
ggcgccctgggcagcgagcgggcag

SEQ ID NO: 780327 - DNA, 25 bp, Homo sapien
agccagagccggcgcaacctcccgg

SEQ ID NO: 780328 - DNA, 25 bp, Homo sapien
tgagccgcccacgtgtgtccgggcg

SEQ ID NO: 780329 - DNA, 25 bp, Homo sapien
gcagccgcccgagggacaggagccg

SEQ ID NO: 780330 - DNA, 25 bp, Homo sapien
gcgccccggtgcctgcccgccacgt

SEQ ID NO: 780331 - DNA, 25 bp, Homo sapien
tcgggctcagcggtcccgcgccccg

SEQ ID NO: 780332 - DNA, 25 bp, Homo sapien
gccccggtgcctgcccgccacgtcg

SEQ ID NO: 780333 - DNA, 25 bp, Homo sapien
ggctcactcgggctcagcggtcccg

SEQ ID NO: 780334 - DNA, 25 bp, Homo sapien
ctggtcggtgcacatgggcgcgtag

SEQ ID NO: 780335 - DNA, 25 bp, Homo sapien
gcctccatgcacagcgcgtgcgggt

SEQ ID NO: 780336 - DNA, 25 bp, Homo sapien
cgctccgggtcgaagcggccgatct

SEQ ID NO: 780337 - DNA, 25 bp, Homo sapien
ccggccagccgaagttgaactgctc

SEQ ID NO: 780338 - DNA, 25 bp, Homo sapien
gcaggtgccactgccgcccgcgccc

SEQ ID NO: 780339 - DNA, 25 bp, Homo sapien
ggcccaggtctccgggagggcgcgc

SEQ ID NO: 780340 - DNA, 25 bp, Homo sapien
ccaggtctccgggagggcgcgcggg

SEQ ID NO: 780341 - DNA, 25 bp, Homo sapien
ctcgcaggtgccactgccgcccgcg

SEQ ID NO: 780342 - DNA, 25 bp, Homo sapien
catagcaaacgatgacgcaggtggc

SEQ ID NO: 780343 - DNA, 25 bp, Homo sapien
tatcttgcggtagcacaggctctgc

SEQ ID NO: 780344 - DNA, 25 bp, Homo sapien
aattttgagcatgaagaccgccacg

SEQ ID NO: 780345 - DNA, 25 bp, Homo sapien
catgtggaaatagctgccgtgggcc

SEQ ID NO: 780346 - DNA, 25 bp, Homo sapien
gccagagaggactcagcagtgccac

SEQ ID NO: 780347 - DNA, 25 bp, Homo sapien
gctcacttgcctgaccttgacagct

SEQ ID NO: 780348 - DNA, 25 bp, Homo sapien
gcttccagaggaacgcaacaataaa

SEQ ID NO: 780349 - DNA, 25 bp, Homo sapien
aataaactccggctggacccctctg

SEQ ID NO: 780350 - DNA, 25 bp, Homo sapien
aaggcacttcacttagagactggag

SEQ ID NO: 780351 - DNA, 25 bp, Homo sapien
ccttctataggcatggagttggcac

SEQ ID NO: 780352 - DNA, 25 bp, Homo sapien
tcattgaggcaagcagcaacattgg

SEQ ID NO: 780353 - DNA, 25 bp, Homo sapien
taaactgcggaatgtggcctctgct

SEQ ID NO: 780354 - DNA, 25 bp, Homo sapien
tagaatgcctgacagaacccgggaa

SEQ ID NO: 780355 - DNA, 25 bp, Homo sapien
taactagaggtctcaccgaaagcct

SEQ ID NO: 780356 - DNA, 25 bp, Homo sapien
ctgagtgtgttacctgaagctgatc

SEQ ID NO: 780357 - DNA, 25 bp, Homo sapien
cagatggatgagacgtgtggaacaa

SEQ ID NO: 780358 - DNA, 25 bp, Homo sapien
tcccatctcaggtttccaggtagct

SEQ ID NO: 780359 - DNA, 25 bp, Homo sapien
cccatctcaggtttccaggtagctg

SEQ ID NO: 780360 - DNA, 25 bp, Homo sapien
ttggtgtgtattggtctccctccgc

SEQ ID NO: 780361 - DNA, 25 bp, Homo sapien
tccaaaaatgtaggtgcaccaagtg

SEQ ID NO: 780362 - DNA, 25 bp, Homo sapien
ctccgcatgagtattagaggatcaa

SEQ ID NO: 780363 - DNA, 25 bp, Homo sapien
tagcttactatttaactggtacaaa

SEQ ID NO: 780364 - DNA, 25 bp, Homo sapien
tgaaactatgatgtcctagggacct

SEQ ID NO: 780365 - DNA, 25 bp, Homo sapien
cacacgggagcaggtaaaatcctga

SEQ ID NO: 780366 - DNA, 25 bp, Homo sapien
tacacaggtttttgactgcgagagg

SEQ ID NO: 780367 - DNA, 25 bp, Homo sapien
gctgaattacaggtatgacgcactg

SEQ ID NO: 780368 - DNA, 25 bp, Homo sapien
aagcttgttctggaaatggttcacc

SEQ ID NO: 780369 - DNA, 25 bp, Homo sapien
gtagatactgcttggttggagatca

SEQ ID NO: 780370 - DNA, 25 bp, Homo sapien
cataacacagcctccttagagaagt

SEQ ID NO: 780371 - DNA, 25 bp, Homo sapien
cctgcctggtatgagaagcttgttc

SEQ ID NO: 780372 - DNA, 25 bp, Homo sapien
catttggacgtgcaagagtactgga

SEQ ID NO: 780373 - DNA, 25 bp, Homo sapien
gaagcagtcagctaacacacaagga

SEQ ID NO: 780374 - DNA, 25 bp, Homo sapien
aaggtacagtgagcgcatttggacg

SEQ ID NO: 780375 - DNA, 25 bp, Homo sapien
tatgaagcccgcttggaaaggtaca

SEQ ID NO: 780376 - DNA, 25 bp, Homo sapien
ccgatccttccaggggatccggcgg

SEQ ID NO: 780377 - DNA, 25 bp, Homo sapien
tcgcgagaccaggtcagccgcgcat

SEQ ID NO: 780378 - DNA, 25 bp, Homo sapien
gaggctgagtctcagcctgcgcccg

SEQ ID NO: 780379 - DNA, 25 bp, Homo sapien
gcacccgggagtatccttttccagc

SEQ ID NO: 780380 - DNA, 25 bp, Homo sapien
cccggagaggagccgctcttcacca

SEQ ID NO: 780381 - DNA, 25 bp, Homo sapien
tcccgctggtgaagccgttgcccgg

SEQ ID NO: 780382 - DNA, 25 bp, Homo sapien
ttcccgctggtgaagccgttgcccg

SEQ ID NO: 780383 - DNA, 25 bp, Homo sapien
ccgctggtgaagccgttgcccggag

SEQ ID NO: 780384 - DNA, 25 bp, Homo sapien
gcctggcgctcgctccgggccgcgg

SEQ ID NO: 780385 - DNA, 25 bp, Homo sapien
cgcggggcctagtgctgcgccgcgg

SEQ ID NO: 780386 - DNA, 25 bp, Homo sapien
gagctctgcgccgtggcgttccgct

SEQ ID NO: 780387 - DNA, 25 bp, Homo sapien
gcgccggcggtgagggagccggagt

SEQ ID NO: 780388 - DNA, 25 bp, Homo sapien
gttccgctccatgactgtcgcgcgg

SEQ ID NO: 780389 - DNA, 25 bp, Homo sapien
gtgagggagccggagttcgcgccgc

SEQ ID NO: 780390 - DNA, 25 bp, Homo sapien
ggatgtcggtgtcgccgtcggtgac

SEQ ID NO: 780391 - DNA, 25 bp, Homo sapien
ctgtatatgcgaggggcttctccgg

SEQ ID NO: 780392 - DNA, 25 bp, Homo sapien
tcggtgacagatggcgcagtatctg

SEQ ID NO: 780393 - DNA, 25 bp, Homo sapien
ttgacctctttgagttctcgtcctc

SEQ ID NO: 780394 - DNA, 25 bp, Homo sapien
caagcagtatacttctacccagatc

SEQ ID NO: 780395 - DNA, 25 bp, Homo sapien
cgcagaacctttggtagggtaagct

SEQ ID NO: 780396 - DNA, 25 bp, Homo sapien
aggcgcccaagaggaaagacaaagc

SEQ ID NO: 780397 - DNA, 25 bp, Homo sapien
cgtggccgagcacggcgcctttaag

SEQ ID NO: 780398 - DNA, 25 bp, Homo sapien
acagaggtagcttttgacctagacc

SEQ ID NO: 780399 - DNA, 25 bp, Homo sapien
gaggaaacttcacagaggtagcttt

SEQ ID NO: 780400 - DNA, 25 bp, Homo sapien
cagaggtagcttttgacctagacct

SEQ ID NO: 780401 - DNA, 25 bp, Homo sapien
ctaggtgatcagaggaaacttcaca

SEQ ID NO: 780402 - DNA, 25 bp, Homo sapien
aatcccagcaatggattctagccca

SEQ ID NO: 780403 - DNA, 25 bp, Homo sapien
tcagatcccatcttcaccaatccca

SEQ ID NO: 780404 - DNA, 25 bp, Homo sapien
gattctagcccacagcggacccaag

SEQ ID NO: 780405 - DNA, 25 bp, Homo sapien
gcaatggattctagcccacagcgga

SEQ ID NO: 780406 - DNA, 25 bp, Homo sapien
ttctagaagagagcgtgcctcaggt

SEQ ID NO: 780407 - DNA, 25 bp, Homo sapien
gcctcaggttacttgaacttgaacg

SEQ ID NO: 780408 - DNA, 25 bp, Homo sapien
gagactgtagactcccggactttcc

SEQ ID NO: 780409 - DNA, 25 bp, Homo sapien
agggcagagagtccgtctagatttc

SEQ ID NO: 780410 - DNA, 25 bp, Homo sapien
gcacacatgagccttccgggctgga

SEQ ID NO: 780411 - DNA, 25 bp, Homo sapien
gttggatctgcagcgccggaaatga

SEQ ID NO: 780412 - DNA, 25 bp, Homo sapien
tctgcctgctcctaggtcgttgagg

SEQ ID NO: 780413 - DNA, 25 bp, Homo sapien
cgcagacggcgtcagaaagctagca

SEQ ID NO: 780414 - DNA, 25 bp, Homo sapien
tgctccttcactgctgacccagagg

SEQ ID NO: 780415 - DNA, 25 bp, Homo sapien
gcagaaaaggaggttccctctctct

SEQ ID NO: 780416 - DNA, 25 bp, Homo sapien
agggcctgatcccaggagacaccag

SEQ ID NO: 780417 - DNA, 25 bp, Homo sapien
agagtgaccacagcagggcaggcat

SEQ ID NO: 780418 - DNA, 25 bp, Homo sapien
tacaaaagtgagctgggtgtcatgg

SEQ ID NO: 780419 - DNA, 25 bp, Homo sapien
ggtgtcatggcatatgcctgtaatc

SEQ ID NO: 780420 - DNA, 25 bp, Homo sapien
aatacaaaagtgagctgggtgtcat

SEQ ID NO: 780421 - DNA, 25 bp, Homo sapien
aatcatttgaacctgggagacggaa

SEQ ID NO: 780422 - DNA, 25 bp, Homo sapien
ctgacacatgatgtttgcaaggagg

SEQ ID NO: 780423 - DNA, 25 bp, Homo sapien
gacacatgatgtttgcaaggaggcc

SEQ ID NO: 780424 - DNA, 25 bp, Homo sapien
cacatgatgtttgcaaggaggccta

SEQ ID NO: 780425 - DNA, 25 bp, Homo sapien
catgatgtttgcaaggaggcctaag

SEQ ID NO: 780426 - DNA, 25 bp, Homo sapien
cgcccgagcccagggcccgggccat

SEQ ID NO: 780427 - DNA, 25 bp, Homo sapien
caggcgcccgagcccagggcccggg

SEQ ID NO: 780428 - DNA, 25 bp, Homo sapien
ggattggcaggcgcccgagcccagg

SEQ ID NO: 780429 - DNA, 25 bp, Homo sapien
ggggattggcaggcgcccgagccca

SEQ ID NO: 780430 - DNA, 25 bp, Homo sapien
gggttaaaggtgagcgggcacgagc

SEQ ID NO: 780431 - DNA, 25 bp, Homo sapien
tccccgagcccagcccgcggctggg

SEQ ID NO: 780432 - DNA, 25 bp, Homo sapien
tgagcgggcacgagccggcggcaga

SEQ ID NO: 780433 - DNA, 25 bp, Homo sapien
aaggtgagcgggcacgagccggcgg

SEQ ID NO: 780434 - DNA, 25 bp, Homo sapien
tcaggtagacctgaggtttttcaca

SEQ ID NO: 780435 - DNA, 25 bp, Homo sapien
ctggaccactttcaggtagacctga

SEQ ID NO: 780436 - DNA, 25 bp, Homo sapien
tgcaagggatacaaacaaacatctc

SEQ ID NO: 780437 - DNA, 25 bp, Homo sapien
agggatacaaacaaacatctctgga

SEQ ID NO: 780438 - DNA, 25 bp, Homo sapien
agtcctgcaccctacttcctatctt

SEQ ID NO: 780439 - DNA, 25 bp, Homo sapien
gagtcctgcaccctacttcctatct

SEQ ID NO: 780440 - DNA, 25 bp, Homo sapien
ctgagtcctgcaccctacttcctat

SEQ ID NO: 780441 - DNA, 25 bp, Homo sapien
tcctgcaccctacttcctatcttcc

SEQ ID NO: 780442 - DNA, 25 bp, Homo sapien
ggtttgaagtatgactgaactcagg

SEQ ID NO: 780443 - DNA, 25 bp, Homo sapien
gtgtctattgttaccatctgatatg

SEQ ID NO: 780444 - DNA, 25 bp, Homo sapien
tgaattcgcacctgttgtgggagag

SEQ ID NO: 780445 - DNA, 25 bp, Homo sapien
ttttatgaggtatatggcgtggtgc

SEQ ID NO: 780446 - DNA, 25 bp, Homo sapien
tccggctccggccgcacgcaccgct

SEQ ID NO: 780447 - DNA, 25 bp, Homo sapien
cggctccggccgcacgcaccgctcc

SEQ ID NO: 780448 - DNA, 25 bp, Homo sapien
gcgcccctcccgctcttaaaggagc

SEQ ID NO: 780449 - DNA, 25 bp, Homo sapien
gctccggccgcacgcaccgctccgc

SEQ ID NO: 780450 - DNA, 25 bp, Homo sapien
aggatcccaaagcgccccgggctgc

SEQ ID NO: 780451 - DNA, 25 bp, Homo sapien
gatcccaaagcgccccgggctgccg

SEQ ID NO: 780452 - DNA, 25 bp, Homo sapien
tgaggatcccaaagcgccccgggct

SEQ ID NO: 780453 - DNA, 25 bp, Homo sapien
atcccaaagcgccccgggctgccgg

SEQ ID NO: 780454 - DNA, 25 bp, Homo sapien
ttcctgctgagccgcacgatccggt

SEQ ID NO: 780455 - DNA, 25 bp, Homo sapien
gagccgcacgatccggtccagcttg

SEQ ID NO: 780456 - DNA, 25 bp, Homo sapien
gcttgggctcatcctgaagcaggtc

SEQ ID NO: 780457 - DNA, 25 bp, Homo sapien
gggctcatcctgaagcaggtcccgg

SEQ ID NO: 780458 - DNA, 25 bp, Homo sapien
agcttgtccgcgcagttctcggcca

SEQ ID NO: 780459 - DNA, 25 bp, Homo sapien
cagtcgctgcagcttgtccgcgcag

SEQ ID NO: 780460 - DNA, 25 bp, Homo sapien
ttctcggccacctcacgaagctcct

SEQ ID NO: 780461 - DNA, 25 bp, Homo sapien
gccagcgcgtagttggaggccaggc

SEQ ID NO: 780462 - DNA, 25 bp, Homo sapien
caccagccccagggggttctcccag

SEQ ID NO: 780463 - DNA, 25 bp, Homo sapien
gggggttctcccagacgtgccctca

SEQ ID NO: 780464 - DNA, 25 bp, Homo sapien
ggggttctcccagacgtgccctcac

SEQ ID NO: 780465 - DNA, 25 bp, Homo sapien
cagcccagcgcgcagtggggactcc

SEQ ID NO: 780466 - DNA, 25 bp, Homo sapien
agcccagcgcgcagtggggactcca

SEQ ID NO: 780467 - DNA, 25 bp, Homo sapien
gccagcccagcgcgcagtggggact

SEQ ID NO: 780468 - DNA, 25 bp, Homo sapien
ccagcccagcgcgcagtggggactc

SEQ ID NO: 780469 - DNA, 25 bp, Homo sapien
tcacaggtaggaaagtgagccctgc

SEQ ID NO: 780470 - DNA, 25 bp, Homo sapien
caatgctaggctctggcatgcgcca

SEQ ID NO: 780471 - DNA, 25 bp, Homo sapien
caccttcagctcactgatcgctgca

SEQ ID NO: 780472 - DNA, 25 bp, Homo sapien
tgcgccaggcattcagggtggactt

SEQ ID NO: 780473 - DNA, 25 bp, Homo sapien
tttggggggatcagcagccgaggtg

SEQ ID NO: 780474 - DNA, 25 bp, Homo sapien
gcctgcgtccgcctcaggtgggcca

SEQ ID NO: 780475 - DNA, 25 bp, Homo sapien
gcgcggccacgctggaaggcaggca

SEQ ID NO: 780476 - DNA, 25 bp, Homo sapien
tgcgagggccgagggctcagcaggg

SEQ ID NO: 780477 - DNA, 25 bp, Homo sapien
catgtgtggacacgtagtagcccca

SEQ ID NO: 780478 - DNA, 25 bp, Homo sapien
aaggcagggtgtcttcagcgccaga

SEQ ID NO: 780479 - DNA, 25 bp, Homo sapien
ccaggcccctgtagttgagtcaagt

SEQ ID NO: 780480 - DNA, 25 bp, Homo sapien
tgatgtaaaacactcctggcggcct

SEQ ID NO: 780481 - DNA, 25 bp, Homo sapien
tccgaggtccagcttgcagccgtcg

SEQ ID NO: 780482 - DNA, 25 bp, Homo sapien
ccgtcgtggttttgtgcaaagcagc

SEQ ID NO: 780483 - DNA, 25 bp, Homo sapien
ggtccagcttgcagccgtcgtggtt

SEQ ID NO: 780484 - DNA, 25 bp, Homo sapien
tgcagccgtcgtggttttgtgcaaa

SEQ ID NO: 780485 - DNA, 25 bp, Homo sapien
ggaaaatcctcgcaagaggtctacg

SEQ ID NO: 780486 - DNA, 25 bp, Homo sapien
gatgagggcccaagtctagggtcta

SEQ ID NO: 780487 - DNA, 25 bp, Homo sapien
cgcaagaggtctacgagaaggatga

SEQ ID NO: 780488 - DNA, 25 bp, Homo sapien
agtctagggtctaaacaaagccagg

SEQ ID NO: 780489 - DNA, 25 bp, Homo sapien
caggctaaaggcgtgttttttctgc

SEQ ID NO: 780490 - DNA, 25 bp, Homo sapien
tggttctttacgcagagcaggctaa

SEQ ID NO: 780491 - DNA, 25 bp, Homo sapien
gctctcttaactgtgagtcactgga

SEQ ID NO: 780492 - DNA, 25 bp, Homo sapien
taggtgctcaagtgtttctgttcgg

SEQ ID NO: 780493 - DNA, 25 bp, Homo sapien
ttcgcaaacggcaggagtatcggtc

SEQ ID NO: 780494 - DNA, 25 bp, Homo sapien
tcgcaagtatgatcgcggcctactc

SEQ ID NO: 780495 - DNA, 25 bp, Homo sapien
cgcaggcccaaatcaaggcggctta

SEQ ID NO: 780496 - DNA, 25 bp, Homo sapien
cacggcgctgtatgatctgctcggc

SEQ ID NO: 780497 - DNA, 25 bp, Homo sapien
ccacaaaattctgcacccagcctgg

SEQ ID NO: 780498 - DNA, 25 bp, Homo sapien
gcaggcccgtggctttccacaaaat

SEQ ID NO: 780499 - DNA, 25 bp, Homo sapien
cagcggctgttaccttggaggttgc

SEQ ID NO: 780500 - DNA, 25 bp, Homo sapien
ggcctaggagcgaggacttattccc

SEQ ID NO: 780501 - DNA, 25 bp, Homo sapien
acacctgcgactggcgcctgccggc

SEQ ID NO: 780502 - DNA, 25 bp, Homo sapien
agcagcacacctgcgactggcgcct

SEQ ID NO: 780503 - DNA, 25 bp, Homo sapien
cgcctgccggcacccggtttttatg

SEQ ID NO: 780504 - DNA, 25 bp, Homo sapien
cgactggcgcctgccggcacccggt

SEQ ID NO: 780505 - DNA, 25 bp, Homo sapien
gtccgccatgctccggacgccggcc

SEQ ID NO: 780506 - DNA, 25 bp, Homo sapien
gccatgctccggacgccggccgcgg

SEQ ID NO: 780507 - DNA, 25 bp, Homo sapien
cgccatgctccggacgccggccgcg

SEQ ID NO: 780508 - DNA, 25 bp, Homo sapien
cagctctgggggtccgccatgctcc

SEQ ID NO: 780509 - DNA, 25 bp, Homo sapien
ttgcgaacgtatttccgggcttctg

SEQ ID NO: 780510 - DNA, 25 bp, Homo sapien
cgtatttccgggcttctgtctcgtc

SEQ ID NO: 780511 - DNA, 25 bp, Homo sapien
gcgaacgtatttccgggcttctgtc

SEQ ID NO: 780512 - DNA, 25 bp, Homo sapien
tatttccgggcttctgtctcgtcat

SEQ ID NO: 780513 - DNA, 25 bp, Homo sapien
acaggggcaacttgccgcttcccga

SEQ ID NO: 780514 - DNA, 25 bp, Homo sapien
ggacgccccgcagtattcaggctcc

SEQ ID NO: 780515 - DNA, 25 bp, Homo sapien
tctacggcctttccgggcaacgcca

SEQ ID NO: 780516 - DNA, 25 bp, Homo sapien
ctttccgggcaacgccagcaacagg

SEQ ID NO: 780517 - DNA, 25 bp, Homo sapien
agacagaaatcggcacccacccggg

SEQ ID NO: 780518 - DNA, 25 bp, Homo sapien
gagacagaaatcggcacccacccgg

SEQ ID NO: 780519 - DNA, 25 bp, Homo sapien
cagagacagaaatcggcacccaccc

SEQ ID NO: 780520 - DNA, 25 bp, Homo sapien
agagacagaaatcggcacccacccg

SEQ ID NO: 780521 - DNA, 25 bp, Homo sapien
ctcaacgctgaggtaccgaggccca

SEQ ID NO: 780522 - DNA, 25 bp, Homo sapien
aacgctgaggtaccgaggcccagag

SEQ ID NO: 780523 - DNA, 25 bp, Homo sapien
ccagagaggtcggcaacttaaagtt

SEQ ID NO: 780524 - DNA, 25 bp, Homo sapien
gagaggtcggcaacttaaagttgat

SEQ ID NO: 780525 - DNA, 25 bp, Homo sapien
gctgtcttggagatttattggcaac

SEQ ID NO: 780526 - DNA, 25 bp, Homo sapien
ccacatgtttaggacaaattgtcac

SEQ ID NO: 780527 - DNA, 25 bp, Homo sapien
aacaaggcgccacgataagcatcct

SEQ ID NO: 780528 - DNA, 25 bp, Homo sapien
gtcacattcgactttgaaaaccacc

SEQ ID NO: 780529 - DNA, 25 bp, Homo sapien
gggttacagaaacccgccatcgcgc

SEQ ID NO: 780530 - DNA, 25 bp, Homo sapien
tggggttacagaaacccgccatcgc

SEQ ID NO: 780531 - DNA, 25 bp, Homo sapien
agctggggttacagaaacccgccat

SEQ ID NO: 780532 - DNA, 25 bp, Homo sapien
gctggggttacagaaacccgccatc

SEQ ID NO: 780533 - DNA, 25 bp, Homo sapien
caagctatttcagccggtgtggtgg

SEQ ID NO: 780534 - DNA, 25 bp, Homo sapien
gagtgcctctagttccggctgctgg

SEQ ID NO: 780535 - DNA, 25 bp, Homo sapien
tagaatgagagcctgtctcacacgc

SEQ ID NO: 780536 - DNA, 25 bp, Homo sapien
gctgcagtcggcagggatcatgcca

SEQ ID NO: 780537 - DNA, 25 bp, Homo sapien
caatatccagcaggtaacagggctt

SEQ ID NO: 780538 - DNA, 25 bp, Homo sapien
aatatccagcaggtaacagggctta

SEQ ID NO: 780539 - DNA, 25 bp, Homo sapien
ccaatatccagcaggtaacagggct

SEQ ID NO: 780540 - DNA, 25 bp, Homo sapien
atatccagcaggtaacagggcttat

SEQ ID NO: 780541 - DNA, 25 bp, Homo sapien
gcatggcagggctgatatccaggcc

SEQ ID NO: 780542 - DNA, 25 bp, Homo sapien
ccacccaatagtgcccttcatctga

SEQ ID NO: 780543 - DNA, 25 bp, Homo sapien
acagataacttccactcagcccagt

SEQ ID NO: 780544 - DNA, 25 bp, Homo sapien
tccaggcccacccaatagtgccctt

SEQ ID NO: 780545 - DNA, 25 bp, Homo sapien
gtgcctggcttgaatgggatgccct

SEQ ID NO: 780546 - DNA, 25 bp, Homo sapien
atgggatgccctggcccatatcccc

SEQ ID NO: 780547 - DNA, 25 bp, Homo sapien
ctgatgcaaccatcaaatgtgcctg

SEQ ID NO: 780548 - DNA, 25 bp, Homo sapien
gcaggtctccctctatctctcggtc

SEQ ID NO: 780549 - DNA, 25 bp, Homo sapien
gacttcttgttagcattacagagcc

SEQ ID NO: 780550 - DNA, 25 bp, Homo sapien
cttcttgttagcattacagagccac

SEQ ID NO: 780551 - DNA, 25 bp, Homo sapien
agacttcttgttagcattacagagc

SEQ ID NO: 780552 - DNA, 25 bp, Homo sapien
aaaaagcagtacaggcgcttggcag

SEQ ID NO: 780553 - DNA, 25 bp, Homo sapien
ctgctctgagttctcagggtacagc

SEQ ID NO: 780554 - DNA, 25 bp, Homo sapien
gcaggacagctcgggatccccggac

SEQ ID NO: 780555 - DNA, 25 bp, Homo sapien
ttctcagggtacagctgcaggacag

SEQ ID NO: 780556 - DNA, 25 bp, Homo sapien
tgcaggacagctcgggatccccgga

SEQ ID NO: 780557 - DNA, 25 bp, Homo sapien
taagattctttgtcgcttccccagg

SEQ ID NO: 780558 - DNA, 25 bp, Homo sapien
taaggtcgctgtaagccacgtagag

SEQ ID NO: 780559 - DNA, 25 bp, Homo sapien
ggatatcaggtcatcaaatgtgcca

SEQ ID NO: 780560 - DNA, 25 bp, Homo sapien
tcacacaacggagaactgtcggtgc

SEQ ID NO: 780561 - DNA, 25 bp, Homo sapien
ggcactgttagggtagtctaccacc

SEQ ID NO: 780562 - DNA, 25 bp, Homo sapien
tagggtagtctaccaccatgccacc

SEQ ID NO: 780563 - DNA, 25 bp, Homo sapien
gtctaccaccatgccaccggagaag

SEQ ID NO: 780564 - DNA, 25 bp, Homo sapien
tttggcactgttagggtagtctacc

SEQ ID NO: 780565 - DNA, 25 bp, Homo sapien
agtggcctgaaagggctatgccact

SEQ ID NO: 780566 - DNA, 25 bp, Homo sapien
ggcctgaaagggctatgccactacc

SEQ ID NO: 780567 - DNA, 25 bp, Homo sapien
tgaaagggctatgccactaccctcc

SEQ ID NO: 780568 - DNA, 25 bp, Homo sapien
tctgcaccactgagtggcctgaaag

SEQ ID NO: 780569 - DNA, 25 bp, Homo sapien
gtcgaaggcccagaaaacaagcaga

SEQ ID NO: 780570 - DNA, 25 bp, Homo sapien
aggtcgaaggcccagaaaacaagca

SEQ ID NO: 780571 - DNA, 25 bp, Homo sapien
tggtataaaggtcgaaggcccagaa

SEQ ID NO: 780572 - DNA, 25 bp, Homo sapien
ctctggtataaaggtcgaaggccca

SEQ ID NO: 780573 - DNA, 25 bp, Homo sapien
actccctgggttcaacttcatcctg

SEQ ID NO: 780574 - DNA, 25 bp, Homo sapien
ctccctgggttcaacttcatcctga

SEQ ID NO: 780575 - DNA, 25 bp, Homo sapien
gactccctgggttcaacttcatcct

SEQ ID NO: 780576 - DNA, 25 bp, Homo sapien
tccctgggttcaacttcatcctgat

SEQ ID NO: 780577 - DNA, 25 bp, Homo sapien
cacagtcgacagttcacagcaggag

SEQ ID NO: 780578 - DNA, 25 bp, Homo sapien
gatacacactgagggacggacagca

SEQ ID NO: 780579 - DNA, 25 bp, Homo sapien
taccgagcaggcacattaaggacat

SEQ ID NO: 780580 - DNA, 25 bp, Homo sapien
tcggatgcctgagcctgatgagcca

SEQ ID NO: 780581 - DNA, 25 bp, Homo sapien
cctcggatgccccttctctcaaatg

SEQ ID NO: 780582 - DNA, 25 bp, Homo sapien
gtctggtggcctcggatgccccttc

SEQ ID NO: 780583 - DNA, 25 bp, Homo sapien
ctcggatgccccttctctcaaatgc

SEQ ID NO: 780584 - DNA, 25 bp, Homo sapien
ccgagtctggtggcctcggatgccc

SEQ ID NO: 780585 - DNA, 25 bp, Homo sapien
cgactggcccccatgtgaatccatg

SEQ ID NO: 780586 - DNA, 25 bp, Homo sapien
ccatgtgaatccatggcaagcttac

SEQ ID NO: 780587 - DNA, 25 bp, Homo sapien
gacacagctatgagctgatggacag

SEQ ID NO: 780588 - DNA, 25 bp, Homo sapien
ctgtggcggagacacagctatgagc

SEQ ID NO: 780589 - DNA, 25 bp, Homo sapien
ccccgcctcgacatccttaatggga

SEQ ID NO: 780590 - DNA, 25 bp, Homo sapien
catgcccgactcttcctcaccattc

SEQ ID NO: 780591 - DNA, 25 bp, Homo sapien
ctccagcacccatgcccgactcttc

SEQ ID NO: 780592 - DNA, 25 bp, Homo sapien
tgccctggcgcctgtgccgctcctt

SEQ ID NO: 780593 - DNA, 25 bp, Homo sapien
cttgcggccggtgtactgggtgtca

SEQ ID NO: 780594 - DNA, 25 bp, Homo sapien
gggcttgcgcttgcggccggtgtac

SEQ ID NO: 780595 - DNA, 25 bp, Homo sapien
cgcttgcggccggtgtactgggtgt

SEQ ID NO: 780596 - DNA, 25 bp, Homo sapien
cggccggtgtactgggtgtcaggtc

SEQ ID NO: 780597 - DNA, 25 bp, Homo sapien
tgcctttccagaaccgcgtggtgac

SEQ ID NO: 780598 - DNA, 25 bp, Homo sapien
aaaataagatgctctcagagctttt

SEQ ID NO: 780599 - DNA, 25 bp, Homo sapien
aataagatgctctcagagctttttt

SEQ ID NO: 780600 - DNA, 25 bp, Homo sapien
gtgcagaggcaagtgcctttccaga

SEQ ID NO: 780601 - DNA, 25 bp, Homo sapien
tcagcggcaaaggtggactcaagac

SEQ ID NO: 780602 - DNA, 25 bp, Homo sapien
ggacagtatttggacacagacccct

SEQ ID NO: 780603 - DNA, 25 bp, Homo sapien
gctgacctgaggatccggaagacac

SEQ ID NO: 780604 - DNA, 25 bp, Homo sapien
tccaagttaaagagtgagtcaggct

SEQ ID NO: 780605 - DNA, 25 bp, Homo sapien
gccggcgccgctgccactcccggga

SEQ ID NO: 780606 - DNA, 25 bp, Homo sapien
gggacttagggtggcctggtgactg

SEQ ID NO: 780607 - DNA, 25 bp, Homo sapien
cccctgctgctgccccagtctcatg

SEQ ID NO: 780608 - DNA, 25 bp, Homo sapien
cctgctgctgccccagtctcatgga

SEQ ID NO: 780609 - DNA, 25 bp, Homo sapien
ccctgctgctgccccagtctcatgg

SEQ ID NO: 780610 - DNA, 25 bp, Homo sapien
ctgctgctgccccagtctcatggac

SEQ ID NO: 780611 - DNA, 25 bp, Homo sapien
ggtgacagaggaggaggcagcgacc

SEQ ID NO: 780612 - DNA, 25 bp, Homo sapien
acagaggaggaggcagcgaccaagt

SEQ ID NO: 780613 - DNA, 25 bp, Homo sapien
ctgtgtcgcagggtgacagaggagg

SEQ ID NO: 780614 - DNA, 25 bp, Homo sapien
tgacagaggaggaggcagcgaccaa

SEQ ID NO: 780615 - DNA, 25 bp, Homo sapien
caatggcttcatcccgttcctggag

SEQ ID NO: 780616 - DNA, 25 bp, Homo sapien
tcctggaggacttggtccagggagg

SEQ ID NO: 780617 - DNA, 25 bp, Homo sapien
aggacttggtccagggagggttctg

SEQ ID NO: 780618 - DNA, 25 bp, Homo sapien
ttggcaatggcttcatcccgttcct

SEQ ID NO: 780619 - DNA, 25 bp, Homo sapien
ccatggcgtgtagcctggctttgca

SEQ ID NO: 780620 - DNA, 25 bp, Homo sapien
cctccatggcgtgtagcctggcttt

SEQ ID NO: 780621 - DNA, 25 bp, Homo sapien
ctgggcctccatggcgtgtagcctg

SEQ ID NO: 780622 - DNA, 25 bp, Homo sapien
ggcctccatggcgtgtagcctggct

SEQ ID NO: 780623 - DNA, 25 bp, Homo sapien
acctcccaggccctgatggcattcc

SEQ ID NO: 780624 - DNA, 25 bp, Homo sapien
tcccaggccctgatggcattcccct

SEQ ID NO: 780625 - DNA, 25 bp, Homo sapien
cccgacccagggagaatctggatcg

SEQ ID NO: 780626 - DNA, 25 bp, Homo sapien
taaagacactactcccaaagtcctg

SEQ ID NO: 780627 - DNA, 25 bp, Homo sapien
tgtgtcaccaccaacgtccccgacc

SEQ ID NO: 780628 - DNA, 25 bp, Homo sapien
tgaataaagacactactcccaaagt

SEQ ID NO: 780629 - DNA, 25 bp, Homo sapien
ggcacagaaggactcagacaggcac

SEQ ID NO: 780630 - DNA, 25 bp, Homo sapien
gcagcctgctccacatttgggcaca

SEQ ID NO: 780631 - DNA, 25 bp, Homo sapien
ttgggcacagaaggactcagacagg

SEQ ID NO: 780632 - DNA, 25 bp, Homo sapien
gcacagaaggactcagacaggcact

SEQ ID NO: 780633 - DNA, 25 bp, Homo sapien
aggacttcatagctgccatccgagg

SEQ ID NO: 780634 - DNA, 25 bp, Homo sapien
gagattatgcggctcttccctcggg

SEQ ID NO: 780635 - DNA, 25 bp, Homo sapien
tcctggtctaagagttgctggcaag

SEQ ID NO: 780636 - DNA, 25 bp, Homo sapien
cagatgcagacggtgccgaacgctg

SEQ ID NO: 780637 - DNA, 25 bp, Homo sapien
tacctcgggccaacactctttctcc

SEQ ID NO: 780638 - DNA, 25 bp, Homo sapien
cactaacctggtagaggtagacggg

SEQ ID NO: 780639 - DNA, 25 bp, Homo sapien
agaggcaggagtcctacctcgggcc

SEQ ID NO: 780640 - DNA, 25 bp, Homo sapien
cgggcgcttcgtgtggagggtgaac

SEQ ID NO: 780641 - DNA, 25 bp, Homo sapien
cgaaaactggcggatgaacagctca

SEQ ID NO: 780642 - DNA, 25 bp, Homo sapien
gctggtggaacgtctcattgctgta

SEQ ID NO: 780643 - DNA, 25 bp, Homo sapien
agccatgagggccatcaacatcgca

SEQ ID NO: 780644 - DNA, 25 bp, Homo sapien
cactttgcaacctatgtggcagcca

SEQ ID NO: 780645 - DNA, 25 bp, Homo sapien
gcccagacatgagctacgagatcat

SEQ ID NO: 780646 - DNA, 25 bp, Homo sapien
tgctgacggtggatgctcgtaacca

SEQ ID NO: 780647 - DNA, 25 bp, Homo sapien
ctacgagatcatgagccaggacctg

SEQ ID NO: 780648 - DNA, 25 bp, Homo sapien
tggtgccctgcgtcgtcgttggcca

SEQ ID NO: 780649 - DNA, 25 bp, Homo sapien
tccgctttcctacaggcttctggac

SEQ ID NO: 780650 - DNA, 25 bp, Homo sapien
gggctcttcggcagcaaaactaact

SEQ ID NO: 780651 - DNA, 25 bp, Homo sapien
ggctcagactctgacctcgatcctt

SEQ ID NO: 780652 - DNA, 25 bp, Homo sapien
aaaactaacttcaactccatcgcca

SEQ ID NO: 780653 - DNA, 25 bp, Homo sapien
atgaccgcccctggcaagctgctgt

SEQ ID NO: 780654 - DNA, 25 bp, Homo sapien
cgggaagccccgactggtgccagca

SEQ ID NO: 780655 - DNA, 25 bp, Homo sapien
aggaatttgccccatgaccgcccct

SEQ ID NO: 780656 - DNA, 25 bp, Homo sapien
tttcgggaagccccgactggtgcca

SEQ ID NO: 780657 - DNA, 25 bp, Homo sapien
tctgtggacaatccgtgggaaggct

SEQ ID NO: 780658 - DNA, 25 bp, Homo sapien
gaaaataaatactcggacataatcc

SEQ ID NO: 780659 - DNA, 25 bp, Homo sapien
gagcttgtggagatgttctggatac

SEQ ID NO: 780660 - DNA, 25 bp, Homo sapien
gagccctggcctgatcctgtaccgt

SEQ ID NO: 780661 - DNA, 25 bp, Homo sapien
cagggagttgtacagcatccagccc

SEQ ID NO: 780662 - DNA, 25 bp, Homo sapien
tcctgcatactcaacagggccagat

SEQ ID NO: 780663 - DNA, 25 bp, Homo sapien
gggccacaattcctgcatactcaac

SEQ ID NO: 780664 - DNA, 25 bp, Homo sapien
gcatactcaacagggccagatttgc

SEQ ID NO: 780665 - DNA, 25 bp, Homo sapien
tactattttgaacagaatcttttct

SEQ ID NO: 780666 - DNA, 25 bp, Homo sapien
atactattttgaacagaatcttttc

SEQ ID NO: 780667 - DNA, 25 bp, Homo sapien
ttttgttgttgttgtatttttagca

SEQ ID NO: 780668 - DNA, 25 bp, Homo sapien
tttgttgttgttgtatttttagcag

SEQ ID NO: 780669 - DNA, 25 bp, Homo sapien
tttggggatacatatgaaggtttct

SEQ ID NO: 780670 - DNA, 25 bp, Homo sapien
cgtgtcacaggagtttgttgaacag

SEQ ID NO: 780671 - DNA, 25 bp, Homo sapien
tggggatacatatgaaggtttctta

SEQ ID NO: 780672 - DNA, 25 bp, Homo sapien
acacgtgtcacaggagtttgttgaa

SEQ ID NO: 780673 - DNA, 25 bp, Homo sapien
tacgaccgcaaggactacgtctaag

SEQ ID NO: 780674 - DNA, 25 bp, Homo sapien
tacgtctaagggacagacgcaggga

SEQ ID NO: 780675 - DNA, 25 bp, Homo sapien
gggcctgggtgaccgccaatacttg

SEQ ID NO: 780676 - DNA, 25 bp, Homo sapien
caacctgcatggactgtgaaacctc

SEQ ID NO: 780677 - DNA, 25 bp, Homo sapien
tggtcggccaacaccattatccggg

SEQ ID NO: 780678 - DNA, 25 bp, Homo sapien
tcatcacgtcgcagaacatctggga

SEQ ID NO: 780679 - DNA, 25 bp, Homo sapien
caagatcaccatcgtggcaggcgtg

SEQ ID NO: 780680 - DNA, 25 bp, Homo sapien
tgcaccaactgcgtgcaggacgaca

SEQ ID NO: 780681 - DNA, 25 bp, Homo sapien
atcttagctggttcattaaggacca

SEQ ID NO: 780682 - DNA, 25 bp, Homo sapien
gccaatcttagctggttcattaagg

SEQ ID NO: 780683 - DNA, 25 bp, Homo sapien
ttcataaataaatctagccaatctt

SEQ ID NO: 780684 - DNA, 25 bp, Homo sapien
aataaatctagccaatcttagctgg

SEQ ID NO: 780685 - DNA, 25 bp, Homo sapien
agagaaacccgcacgctgaccagga

SEQ ID NO: 780686 - DNA, 25 bp, Homo sapien
accaggagactcctaggtcggcagc

SEQ ID NO: 780687 - DNA, 25 bp, Homo sapien
gcacgctgaccaggagactcctagg

SEQ ID NO: 780688 - DNA, 25 bp, Homo sapien
gaggctgagagaaacccgcacgctg

SEQ ID NO: 780689 - DNA, 25 bp, Homo sapien
ctgctgcgggaaaaacaccagcaaa

SEQ ID NO: 780690 - DNA, 25 bp, Homo sapien
gcaaaggcaaggtgcttctctcctc

SEQ ID NO: 780691 - DNA, 25 bp, Homo sapien
ccagcaaaggcaaggtgcttctctc

SEQ ID NO: 780692 - DNA, 25 bp, Homo sapien
ggtgcttctctcctctccgctccag

SEQ ID NO: 780693 - DNA, 25 bp, Homo sapien
gaaggatgtccttggggatcagcca

SEQ ID NO: 780694 - DNA, 25 bp, Homo sapien
gatcagccagtagctcagcacaagt

SEQ ID NO: 780695 - DNA, 25 bp, Homo sapien
ggacccaggtgtgaaggagaggcca

SEQ ID NO: 780696 - DNA, 25 bp, Homo sapien
aaggagaggccagaaggatgtcctt

SEQ ID NO: 780697 - DNA, 25 bp, Homo sapien
tctgttgaccggctaatgaagcaca

SEQ ID NO: 780698 - DNA, 25 bp, Homo sapien
taaagcaatcagtgagtacccatgg

SEQ ID NO: 780699 - DNA, 25 bp, Homo sapien
tgttacagacgggaagttgaggcct

SEQ ID NO: 780700 - DNA, 25 bp, Homo sapien
gacaatctagcatggtccacctgtg

SEQ ID NO: 780701 - DNA, 25 bp, Homo sapien
tcacccgccgtgtggtcattttgca

SEQ ID NO: 780702 - DNA, 25 bp, Homo sapien
cccgccgtgtggtcattttgcatct

SEQ ID NO: 780703 - DNA, 25 bp, Homo sapien
cgccgtgtggtcattttgcatctct

SEQ ID NO: 780704 - DNA, 25 bp, Homo sapien
tcctcacccgccgtgtggtcatttt

SEQ ID NO: 780705 - DNA, 25 bp, Homo sapien
gccttccaataaagccagagtgggt

SEQ ID NO: 780706 - DNA, 25 bp, Homo sapien
gacaaacatgaactagatcctggag

SEQ ID NO: 780707 - DNA, 25 bp, Homo sapien
taaagccagtcctgatgcgcaagcc

SEQ ID NO: 780708 - DNA, 25 bp, Homo sapien
caccgtgagtcaggagataaagcca

SEQ ID NO: 780709 - DNA, 25 bp, Homo sapien
cccagatggtctgcgaggtgacaat

SEQ ID NO: 780710 - DNA, 25 bp, Homo sapien
ggcactatcaccataaggccggcca

SEQ ID NO: 780711 - DNA, 25 bp, Homo sapien
agcgcgatgcccattacctgtagcc

SEQ ID NO: 780712 - DNA, 25 bp, Homo sapien
ccaccagcggattgtagaagtcttg

SEQ ID NO: 780713 - DNA, 25 bp, Homo sapien
cagtcccagaggtgatatcaaggcc

SEQ ID NO: 780714 - DNA, 25 bp, Homo sapien
cagatcccaaagtcagggttaagct

SEQ ID NO: 780715 - DNA, 25 bp, Homo sapien
tgttcttgctagcaggaggcggcct

SEQ ID NO: 780716 - DNA, 25 bp, Homo sapien
ggttaagctatcctggccagcagaa

SEQ ID NO: 780717 - DNA, 25 bp, Homo sapien
aagcgggtgaggcagagagtcctga

SEQ ID NO: 780718 - DNA, 25 bp, Homo sapien
gggccctgggctgaagcgggtgagg

SEQ ID NO: 780719 - DNA, 25 bp, Homo sapien
cccaggctcattagtgtccttggaa

SEQ ID NO: 780720 - DNA, 25 bp, Homo sapien
tacagtgatgaatagctcttcttaa

SEQ ID NO: 780721 - DNA, 25 bp, Homo sapien
tggaggtggtatccggcatctctgc

SEQ ID NO: 780722 - DNA, 25 bp, Homo sapien
tccgagctggaggtggtatccggca

SEQ ID NO: 780723 - DNA, 25 bp, Homo sapien
tgccaaggatggcttcatctccggc

SEQ ID NO: 780724 - DNA, 25 bp, Homo sapien
gtggtatccggcatctctgccaagg

SEQ ID NO: 780725 - DNA, 25 bp, Homo sapien
gtctggcctcccccacctactccag

SEQ ID NO: 780726 - DNA, 25 bp, Homo sapien
tctggcctcccccacctactccagc

SEQ ID NO: 780727 - DNA, 25 bp, Homo sapien
cccacctactccagctgggagaagc

SEQ ID NO: 780728 - DNA, 25 bp, Homo sapien
tcccccacctactccagctgggaga

SEQ ID NO: 780729 - DNA, 25 bp, Homo sapien
ctgagagcctcgtaacctgcaacag

SEQ ID NO: 780730 - DNA, 25 bp, Homo sapien
ggatccccaaaaggctggatctgac

SEQ ID NO: 780731 - DNA, 25 bp, Homo sapien
tcgtaacctgcaacaggatccccaa

SEQ ID NO: 780732 - DNA, 25 bp, Homo sapien
cccaaaaggctggatctgactggag

SEQ ID NO: 780733 - DNA, 25 bp, Homo sapien
aacgagctgagccggcaccactgcg

SEQ ID NO: 780734 - DNA, 25 bp, Homo sapien
ctgcaacgagctgagccggcaccac

SEQ ID NO: 780735 - DNA, 25 bp, Homo sapien
gctgcaacgagctgagccggcacca

SEQ ID NO: 780736 - DNA, 25 bp, Homo sapien
ggctgcaacgagctgagccggcacc

SEQ ID NO: 780737 - DNA, 25 bp, Homo sapien
ggtgggcctgccagttacaggaccc

SEQ ID NO: 780738 - DNA, 25 bp, Homo sapien
tacggggacctgtatcagagccagc

SEQ ID NO: 780739 - DNA, 25 bp, Homo sapien
ttgaagaggttgatcttgaggagca

SEQ ID NO: 780740 - DNA, 25 bp, Homo sapien
gtccctgtagcaccagccatacggg

SEQ ID NO: 780741 - DNA, 25 bp, Homo sapien
caacatcaggccgtgcagacatgac

SEQ ID NO: 780742 - DNA, 25 bp, Homo sapien
ggccaccaacatcaggccgtgcaga

SEQ ID NO: 780743 - DNA, 25 bp, Homo sapien
gacaaaaacagatctgtccagatgg

SEQ ID NO: 780744 - DNA, 25 bp, Homo sapien
aaacagatctgtccagatggccaca

SEQ ID NO: 780745 - DNA, 25 bp, Homo sapien
cctgcccagtcggaagcagtgggac

SEQ ID NO: 780746 - DNA, 25 bp, Homo sapien
gagctgcctgcccagtcggaagcag

SEQ ID NO: 780747 - DNA, 25 bp, Homo sapien
cccagtcggaagcagtgggacttct

SEQ ID NO: 780748 - DNA, 25 bp, Homo sapien
gtcggaagcagtgggacttctgaca

SEQ ID NO: 780749 - DNA, 25 bp, Homo sapien
gatgggcaggtggcccttaggagct

SEQ ID NO: 780750 - DNA, 25 bp, Homo sapien
cagatgggcaggtggcccttaggag

SEQ ID NO: 780751 - DNA, 25 bp, Homo sapien
ctggaacagggagacagatgggcag

SEQ ID NO: 780752 - DNA, 25 bp, Homo sapien
gaacagggagacagatgggcaggtg

SEQ ID NO: 780753 - DNA, 25 bp, Homo sapien
cttaccacgcagttcacttgcaagg

SEQ ID NO: 780754 - DNA, 25 bp, Homo sapien
aggagcttccttaccacgcagttca

SEQ ID NO: 780755 - DNA, 25 bp, Homo sapien
accaggagcttccttaccacgcagt

SEQ ID NO: 780756 - DNA, 25 bp, Homo sapien
gcttccttaccacgcagttcacttg

SEQ ID NO: 780757 - DNA, 25 bp, Homo sapien
ggtggtccaggtgatgagataggcc

SEQ ID NO: 780758 - DNA, 25 bp, Homo sapien
cagctgggtcgtgtgctcaaaggca

SEQ ID NO: 780759 - DNA, 25 bp, Homo sapien
cctcggccagctgggtcgtgtgctc

SEQ ID NO: 780760 - DNA, 25 bp, Homo sapien
cggccagctgggtcgtgtgctcaaa

SEQ ID NO: 780761 - DNA, 25 bp, Homo sapien
tcttgctctggcaaaactgttccag

SEQ ID NO: 780762 - DNA, 25 bp, Homo sapien
tggcaaaactgttccagactctgag

SEQ ID NO: 780763 - DNA, 25 bp, Homo sapien
tccagactctgagtccgaggacgca

SEQ ID NO: 780764 - DNA, 25 bp, Homo sapien
ctgagtccgaggacgcagacagtga

SEQ ID NO: 780765 - DNA, 25 bp, Homo sapien
gtccacctgaccatagggcagccta

SEQ ID NO: 780766 - DNA, 25 bp, Homo sapien
aaggtcaatgatcaagtccacctga

SEQ ID NO: 780767 - DNA, 25 bp, Homo sapien
ggccacagcggccactggtcaaggt

SEQ ID NO: 780768 - DNA, 25 bp, Homo sapien
gggcgaacaggcacagctactcttg

SEQ ID NO: 780769 - DNA, 25 bp, Homo sapien
ggacagatgatcctggtaactcagc

SEQ ID NO: 780770 - DNA, 25 bp, Homo sapien
gacatcacctctgagggccttagcg

SEQ ID NO: 780771 - DNA, 25 bp, Homo sapien
cctcgtctgacgacctgggggagat

SEQ ID NO: 780772 - DNA, 25 bp, Homo sapien
ggtaactcagccaattctgcttctc

SEQ ID NO: 780773 - DNA, 25 bp, Homo sapien
aggatgatgccaacggccccagggt

SEQ ID NO: 780774 - DNA, 25 bp, Homo sapien
tggtccaaggatgatgccaacggcc

SEQ ID NO: 780775 - DNA, 25 bp, Homo sapien
gtaggtcctctagcaggtcagacag

SEQ ID NO: 780776 - DNA, 25 bp, Homo sapien
ctgcggatgggatgagatgggaagg

SEQ ID NO: 780777 - DNA, 25 bp, Homo sapien
ccctcttggccgaggtgcgaattag

SEQ ID NO: 780778 - DNA, 25 bp, Homo sapien
ctcggccctcttggccgaggtgcga

SEQ ID NO: 780779 - DNA, 25 bp, Homo sapien
gagacacaccaatggaatcggaggg

SEQ ID NO: 780780 - DNA, 25 bp, Homo sapien
ggaatgcgggaagtttcttctcggc

SEQ ID NO: 780781 - DNA, 25 bp, Homo sapien
gcccatctgtactcaggcccttggg

SEQ ID NO: 780782 - DNA, 25 bp, Homo sapien
catctgtactcaggcccttggggtg

SEQ ID NO: 780783 - DNA, 25 bp, Homo sapien
ccatctgtactcaggcccttggggt

SEQ ID NO: 780784 - DNA, 25 bp, Homo sapien
gtgcccatctgtactcaggcccttg

SEQ ID NO: 780785 - DNA, 25 bp, Homo sapien
tgcatcgacctttgggacatgtcag

SEQ ID NO: 780786 - DNA, 25 bp, Homo sapien
tccgggcattccagtgcatcgacct

SEQ ID NO: 780787 - DNA, 25 bp, Homo sapien
cagtgcatcgacctttgggacatgt

SEQ ID NO: 780788 - DNA, 25 bp, Homo sapien
gcatcgacctttgggacatgtcagc

SEQ ID NO: 780789 - DNA, 25 bp, Homo sapien
tgcacgacaccaggaaacctcatgt

SEQ ID NO: 780790 - DNA, 25 bp, Homo sapien
tcaggtccagtaactcccgagatat

SEQ ID NO: 780791 - DNA, 25 bp, Homo sapien
gagatatcctctcgacctgtgtggc

SEQ ID NO: 780792 - DNA, 25 bp, Homo sapien
gacgaaagagtgtggccggatctcc

SEQ ID NO: 780793 - DNA, 25 bp, Homo sapien
gatcagcatgaaggaatgtgctgtc

SEQ ID NO: 780794 - DNA, 25 bp, Homo sapien
agtgaggagagccggcgaagatcgg

SEQ ID NO: 780795 - DNA, 25 bp, Homo sapien
agccaccgggaagagatcagcatga

SEQ ID NO: 780796 - DNA, 25 bp, Homo sapien
agcggacaggatgggccgccggaga

SEQ ID NO: 780797 - DNA, 25 bp, Homo sapien
cagaagctgagtaggctcctgacag

SEQ ID NO: 780798 - DNA, 25 bp, Homo sapien
tccatgcggtccaggcagatgatgg

SEQ ID NO: 780799 - DNA, 25 bp, Homo sapien
gcagaagtggagtccttctctcccg

SEQ ID NO: 780800 - DNA, 25 bp, Homo sapien
tggtggaatccgacaccagcagcag

SEQ ID NO: 780801 - DNA, 25 bp, Homo sapien
aacacggggaatattaatagcttca

SEQ ID NO: 780802 - DNA, 25 bp, Homo sapien
ttcaatggctagagaggagtctggc

SEQ ID NO: 780803 - DNA, 25 bp, Homo sapien
cagggccaaggggtcataaacacgg

SEQ ID NO: 780804 - DNA, 25 bp, Homo sapien
tggattccaacaggctgtactcccc

SEQ ID NO: 780805 - DNA, 25 bp, Homo sapien
tggaaatttttagaaccttgacagc

SEQ ID NO: 780806 - DNA, 25 bp, Homo sapien
gaagggcctgagctggagaaatatc

SEQ ID NO: 780807 - DNA, 25 bp, Homo sapien
gtgtgcccacgtgagaaggagcagc

SEQ ID NO: 780808 - DNA, 25 bp, Homo sapien
cagctggtgggtagagctgctgaag

SEQ ID NO: 780809 - DNA, 25 bp, Homo sapien
ttcctgactccgtgtgcccacgtga

SEQ ID NO: 780810 - DNA, 25 bp, Homo sapien
catatgtagggctgcattcccggca

SEQ ID NO: 780811 - DNA, 25 bp, Homo sapien
cgaccgggccggagcttgctctctg

SEQ ID NO: 780812 - DNA, 25 bp, Homo sapien
gaaagtgcatgactccaggtcagat

SEQ ID NO: 780813 - DNA, 25 bp, Homo sapien
tgccagatccggaggacagcccgac

SEQ ID NO: 780814 - DNA, 25 bp, Homo sapien
cgttcactcaggattagcagggcgg

SEQ ID NO: 780815 - DNA, 25 bp, Homo sapien
ggcgttcatgtctgaagtggcagcc

SEQ ID NO: 780816 - DNA, 25 bp, Homo sapien
tctccggcctcagcgaggttggggg

SEQ ID NO: 780817 - DNA, 25 bp, Homo sapien
ggaggcagactgtgttctccggcct

SEQ ID NO: 780818 - DNA, 25 bp, Homo sapien
gggaagcaggatacgcgggagtctc

SEQ ID NO: 780819 - DNA, 25 bp, Homo sapien
acatggtgcaggtcgccttggtgat

SEQ ID NO: 780820 - DNA, 25 bp, Homo sapien
cgatgcagaaaggggaagaacagct

SEQ ID NO: 780821 - DNA, 25 bp, Homo sapien
ttggtgatgggcgatgcagaaaggg

SEQ ID NO: 780822 - DNA, 25 bp, Homo sapien
ctcccagctggggatcttttctaga

SEQ ID NO: 780823 - DNA, 25 bp, Homo sapien
gggatcttttctagagccacaggcc

SEQ ID NO: 780824 - DNA, 25 bp, Homo sapien
ggggatcttttctagagccacaggc

SEQ ID NO: 780825 - DNA, 25 bp, Homo sapien
ccagctggggatcttttctagagcc

SEQ ID NO: 780826 - DNA, 25 bp, Homo sapien
tgctgaagaatgatgctgagacttg

SEQ ID NO: 780827 - DNA, 25 bp, Homo sapien
tagagtggaggccatgaagctggag

SEQ ID NO: 780828 - DNA, 25 bp, Homo sapien
tctaagacattcgaaagctgccggg

SEQ ID NO: 780829 - DNA, 25 bp, Homo sapien
tgctgagacttgaactagagtggag

SEQ ID NO: 780830 - DNA, 25 bp, Homo sapien
aggctctgtgtccagacgccagctg

SEQ ID NO: 780831 - DNA, 25 bp, Homo sapien
ctcacctcttggtgggcgctgggca

SEQ ID NO: 780832 - DNA, 25 bp, Homo sapien
ttctcctcacctcttggtgggcgct

SEQ ID NO: 780833 - DNA, 25 bp, Homo sapien
tccccctgctcagtgaggctctgtg

SEQ ID NO: 780834 - DNA, 25 bp, Homo sapien
cccgggaagtgccagagggatgcca

SEQ ID NO: 780835 - DNA, 25 bp, Homo sapien
ggtgcccgggaagtgccagagggat

SEQ ID NO: 780836 - DNA, 25 bp, Homo sapien
ggaagccggtgcccgggaagtgcca

SEQ ID NO: 780837 - DNA, 25 bp, Homo sapien
gccggtgcccgggaagtgccagagg

SEQ ID NO: 780838 - DNA, 25 bp, Homo sapien
ttcttttggtctgggaagagccctg

SEQ ID NO: 780839 - DNA, 25 bp, Homo sapien
ttgcatgtatctgtacagatgtgtt

SEQ ID NO: 780840 - DNA, 25 bp, Homo sapien
tgaattttgcatgtatctgtacaga

SEQ ID NO: 780841 - DNA, 25 bp, Homo sapien
gagccctgaagatcagcaaccatag

SEQ ID NO: 780842 - DNA, 25 bp, Homo sapien
gggccacaggggtacagaggctgca

SEQ ID NO: 780843 - DNA, 25 bp, Homo sapien
gctgggggtaccctgggaattcagc

SEQ ID NO: 780844 - DNA, 25 bp, Homo sapien
tctgagcagggctgggggtaccctg

SEQ ID NO: 780845 - DNA, 25 bp, Homo sapien
ctggggggccacaggggtacagagg

SEQ ID NO: 780846 - DNA, 25 bp, Homo sapien
gttctccagtgtgcagattccaggg

SEQ ID NO: 780847 - DNA, 25 bp, Homo sapien
tgttctccagtgtgcagattccagg

SEQ ID NO: 780848 - DNA, 25 bp, Homo sapien
ggctgttctccagtgtgcagattcc

SEQ ID NO: 780849 - DNA, 25 bp, Homo sapien
gctgttctccagtgtgcagattcca

SEQ ID NO: 780850 - DNA, 25 bp, Homo sapien
cagcacagtccaggagatctgtggg

SEQ ID NO: 780851 - DNA, 25 bp, Homo sapien
gggttgatgtcagctgctcagacac

SEQ ID NO: 780852 - DNA, 25 bp, Homo sapien
cacagtccaggagatctgtggggtt

SEQ ID NO: 780853 - DNA, 25 bp, Homo sapien
cttccagcacagtccaggagatctg

SEQ ID NO: 780854 - DNA, 25 bp, Homo sapien
gcaaggctctaacgctgtctgtgga

SEQ ID NO: 780855 - DNA, 25 bp, Homo sapien
tgaacttggactcccagatgtagcc

SEQ ID NO: 780856 - DNA, 25 bp, Homo sapien
tctgtggactctggactgagaccca

SEQ ID NO: 780857 - DNA, 25 bp, Homo sapien
ggccatctgagagcgatgttggaca

SEQ ID NO: 780858 - DNA, 25 bp, Homo sapien
cacttagcggcagccgctggtgcac

SEQ ID NO: 780859 - DNA, 25 bp, Homo sapien
tgactccctgccagaaagccactta

SEQ ID NO: 780860 - DNA, 25 bp, Homo sapien
tcagcacaggctgcgtgacgggccg

SEQ ID NO: 780861 - DNA, 25 bp, Homo sapien
gagacacccaatctgtcagcacagg

SEQ ID NO: 780862 - DNA, 25 bp, Homo sapien
ttttgaaatccgcaagccagaggcc

SEQ ID NO: 780863 - DNA, 25 bp, Homo sapien
gagattaaggtccatcccacgcaag

SEQ ID NO: 780864 - DNA, 25 bp, Homo sapien
tgcatctgatgtaggcctggcagcc

SEQ ID NO: 780865 - DNA, 25 bp, Homo sapien
gagactccagatacctgcacagggc

SEQ ID NO: 780866 - DNA, 25 bp, Homo sapien
gatatttatagccctgtcctggcac

SEQ ID NO: 780867 - DNA, 25 bp, Homo sapien
tcggcggccaagatatttatagccc

SEQ ID NO: 780868 - DNA, 25 bp, Homo sapien
ccagtcggcggccaagatatttata

SEQ ID NO: 780869 - DNA, 25 bp, Homo sapien
ctgggccagtcggcggccaagatat

SEQ ID NO: 780870 - DNA, 25 bp, Homo sapien
ttttgaagaccgagaaatgacacca

SEQ ID NO: 780871 - DNA, 25 bp, Homo sapien
gaaatgacaccaacatattttcgtg

SEQ ID NO: 780872 - DNA, 25 bp, Homo sapien
ccaacatattttcgtgattgccatg

SEQ ID NO: 780873 - DNA, 25 bp, Homo sapien
atattttcgtgattgccatgttgtg

SEQ ID NO: 780874 - DNA, 25 bp, Homo sapien
tgaccgaacgcgtaggaggaagcca

SEQ ID NO: 780875 - DNA, 25 bp, Homo sapien
cgagagcaccactactgcggacatg

SEQ ID NO: 780876 - DNA, 25 bp, Homo sapien
cacagcgaccagcagtgtccgtcat

SEQ ID NO: 780877 - DNA, 25 bp, Homo sapien
tactgcggacatgtgcaggagtgac

SEQ ID NO: 780878 - DNA, 25 bp, Homo sapien
gatgcccgcctcgtgctgttgacct

SEQ ID NO: 780879 - DNA, 25 bp, Homo sapien
tgcccgcctcgtgctgttgaccttg

SEQ ID NO: 780880 - DNA, 25 bp, Homo sapien
cagtgggtctgcggggactggagct

SEQ ID NO: 780881 - DNA, 25 bp, Homo sapien
gcagtgggtctgcggggactggagc

SEQ ID NO: 780882 - DNA, 25 bp, Homo sapien
aactcctaaagccacgactccactc

SEQ ID NO: 780883 - DNA, 25 bp, Homo sapien
tcctaaagccacgactccactcccc

SEQ ID NO: 780884 - DNA, 25 bp, Homo sapien
ctaaagccacgactccactccccac

SEQ ID NO: 780885 - DNA, 25 bp, Homo sapien
tttccttgcaaccaactcctaaagc

SEQ ID NO: 780886 - DNA, 25 bp, Homo sapien
ggcccaggatgatatgtgttgtgtt

SEQ ID NO: 780887 - DNA, 25 bp, Homo sapien
tgacagggcccaggatgatatgtgt

SEQ ID NO: 780888 - DNA, 25 bp, Homo sapien
ttggtgacagggcccaggatgatat

SEQ ID NO: 780889 - DNA, 25 bp, Homo sapien
ggcttggtgacagggcccaggatga

SEQ ID NO: 780890 - DNA, 25 bp, Homo sapien
gcgcccaggccggcgtccgggagga

SEQ ID NO: 780891 - DNA, 25 bp, Homo sapien
ggcagcgcccaggccggcgtccggg

SEQ ID NO: 780892 - DNA, 25 bp, Homo sapien
caggtgggcagcgcccaggccggcg

SEQ ID NO: 780893 - DNA, 25 bp, Homo sapien
ggtgggcagcgcccaggccggcgtc

SEQ ID NO: 780894 - DNA, 25 bp, Homo sapien
tgtggactgtctcagatcgaaaatc

SEQ ID NO: 780895 - DNA, 25 bp, Homo sapien
ctcagatcgaaaatcataatctggg

SEQ ID NO: 780896 - DNA, 25 bp, Homo sapien
ctcagatcggagatcctaatctggg

SEQ ID NO: 780897 - DNA, 25 bp, Homo sapien
cgtctcagatcggagatcctaatct

SEQ ID NO: 780898 - DNA, 25 bp, Homo sapien
ggaactgggcgcgggcaccagcggt

SEQ ID NO: 780899 - DNA, 25 bp, Homo sapien
caccagcggtcctggagaaggagct

SEQ ID NO: 780900 - DNA, 25 bp, Homo sapien
ctgggcgcgggcaccagcggtcctg

SEQ ID NO: 780901 - DNA, 25 bp, Homo sapien
taagaaacggaactgggcgcgggca

SEQ ID NO: 780902 - DNA, 25 bp, Homo sapien
ctggcgctgcccacctttgccctgc

SEQ ID NO: 780903 - DNA, 25 bp, Homo sapien
cgcaccctcctggcgctgcccacct

SEQ ID NO: 780904 - DNA, 25 bp, Homo sapien
accctcctggcgctgcccacctttg

SEQ ID NO: 780905 - DNA, 25 bp, Homo sapien
cctggcgctgcccacctttgccctg

SEQ ID NO: 780906 - DNA, 25 bp, Homo sapien
gctgtgttcccgtccacacaggctg

SEQ ID NO: 780907 - DNA, 25 bp, Homo sapien
tcacaggggtctgcattgggtacac

SEQ ID NO: 780908 - DNA, 25 bp, Homo sapien
gtcgtgggcccgcagctgtgttccc

SEQ ID NO: 780909 - DNA, 25 bp, Homo sapien
tacaccgccgcgtggctgtgtcgtg

SEQ ID NO: 780910 - DNA, 25 bp, Homo sapien
cttccaaagtcgtgcattccggtgg

SEQ ID NO: 780911 - DNA, 25 bp, Homo sapien
cggcacgcacagtcctgccttgtgg

SEQ ID NO: 780912 - DNA, 25 bp, Homo sapien
tttcttggatgacacagtctccttc

SEQ ID NO: 780913 - DNA, 25 bp, Homo sapien
aagtcgtgcattccggtgggaagcc

SEQ ID NO: 780914 - DNA, 25 bp, Homo sapien
caaacggccatgtggacggctgttc

SEQ ID NO: 780915 - DNA, 25 bp, Homo sapien
agtgaggacactactggcatgggtg

SEQ ID NO: 780916 - DNA, 25 bp, Homo sapien
cgcccaagcatgcaaacggccatgt

SEQ ID NO: 780917 - DNA, 25 bp, Homo sapien
tgtggacggctgttcttgccccgtt

SEQ ID NO: 780918 - DNA, 25 bp, Homo sapien
gtatggggcggacaggcctggccat

SEQ ID NO: 780919 - DNA, 25 bp, Homo sapien
ctggagggatgggtaggatgacgtg

SEQ ID NO: 780920 - DNA, 25 bp, Homo sapien
tctggcagggctagtatggggcgga

SEQ ID NO: 780921 - DNA, 25 bp, Homo sapien
aggatgacgtggatgcctcagtgca

SEQ ID NO: 780922 - DNA, 25 bp, Homo sapien
cctggaccagctcgctcctgcggcc

SEQ ID NO: 780923 - DNA, 25 bp, Homo sapien
tggaccagctcgctcctgcggccgc

SEQ ID NO: 780924 - DNA, 25 bp, Homo sapien
ggcctggaccagctcgctcctgcgg

SEQ ID NO: 780925 - DNA, 25 bp, Homo sapien
gcctggaccagctcgctcctgcggc

SEQ ID NO: 780926 - DNA, 25 bp, Homo sapien
tgtgggaaaacccagatttgtttca

SEQ ID NO: 780927 - DNA, 25 bp, Homo sapien
cctggggctccatagaaaattcatt

SEQ ID NO: 780928 - DNA, 25 bp, Homo sapien
gatccctggttcagggccgtttgga

SEQ ID NO: 780929 - DNA, 25 bp, Homo sapien
tcctctacgtggagctttgcactga

SEQ ID NO: 780930 - DNA, 25 bp, Homo sapien
cctcggaaatggtagagactcgatc

SEQ ID NO: 780931 - DNA, 25 bp, Homo sapien
gcccgctctccgcacctcgttttat

SEQ ID NO: 780932 - DNA, 25 bp, Homo sapien
tcggggagaaatgccccagcccgct

SEQ ID NO: 780933 - DNA, 25 bp, Homo sapien
caaagcctaattgttgcctcgtcgg

SEQ ID NO: 780934 - DNA, 25 bp, Homo sapien
tttatccccaaagcctaattgttgc

SEQ ID NO: 780935 - DNA, 25 bp, Homo sapien
gggccgccgccgtcagacccgccat

SEQ ID NO: 780936 - DNA, 25 bp, Homo sapien
ggcccaaagggcccgcagctgtggg

SEQ ID NO: 780937 - DNA, 25 bp, Homo sapien
tggcccaaagggcccgcagctgtgg

SEQ ID NO: 780938 - DNA, 25 bp, Homo sapien
ctggcccaaagggcccgcagctgtg

SEQ ID NO: 780939 - DNA, 25 bp, Homo sapien
gctttcaggccctggctcgttgccc

SEQ ID NO: 780940 - DNA, 25 bp, Homo sapien
cccgcctgtgggtacccatgtccct

SEQ ID NO: 780941 - DNA, 25 bp, Homo sapien
gggcccgcctgtgggtacccatgtc

SEQ ID NO: 780942 - DNA, 25 bp, Homo sapien
ctttcaggccctggctcgttgcccc

SEQ ID NO: 780943 - DNA, 25 bp, Homo sapien
tggaagcagcctgtttgggagcgag

SEQ ID NO: 780944 - DNA, 25 bp, Homo sapien
aagcagcctgtttgggagcgagcct

SEQ ID NO: 780945 - DNA, 25 bp, Homo sapien
agcctggggccagccgatcttggca

SEQ ID NO: 780946 - DNA, 25 bp, Homo sapien
ccagccgatcttggcagggggcttt

SEQ ID NO: 780947 - DNA, 25 bp, Homo sapien
ggaacgctgtgatgctggatccaga

SEQ ID NO: 780948 - DNA, 25 bp, Homo sapien
gggaacgctgtgatgctggatccag

SEQ ID NO: 780949 - DNA, 25 bp, Homo sapien
gctgctacagcgagcattaaggagg

SEQ ID NO: 780950 - DNA, 25 bp, Homo sapien
ctgggctgctacagcgagcattaag

SEQ ID NO: 780951 - DNA, 25 bp, Homo sapien
cagcgagcattaaggaggtgcagct

SEQ ID NO: 780952 - DNA, 25 bp, Homo sapien
gctacagcgagcattaaggaggtgc

SEQ ID NO: 780953 - DNA, 25 bp, Homo sapien
gcagcccactcccttcccgagctga

SEQ ID NO: 780954 - DNA, 25 bp, Homo sapien
ggcagcccactcccttcccgagctg

SEQ ID NO: 780955 - DNA, 25 bp, Homo sapien
cagcccactcccttcccgagctgag

SEQ ID NO: 780956 - DNA, 25 bp, Homo sapien
ctggggtggaagacactgggtctga

SEQ ID NO: 780957 - DNA, 25 bp, Homo sapien
gacactgggtctgagcacctctcac

SEQ ID NO: 780958 - DNA, 25 bp, Homo sapien
gaagacactgggtctgagcacctct

SEQ ID NO: 780959 - DNA, 25 bp, Homo sapien
gtggaagacactgggtctgagcacc

SEQ ID NO: 780960 - DNA, 25 bp, Homo sapien
tggttctccctggagtcagggagag

SEQ ID NO: 780961 - DNA, 25 bp, Homo sapien
ttctccctggagtcagggagagggc

SEQ ID NO: 780962 - DNA, 25 bp, Homo sapien
ctggttctccctggagtcagggaga

SEQ ID NO: 780963 - DNA, 25 bp, Homo sapien
ggttctccctggagtcagggagagg

SEQ ID NO: 780964 - DNA, 25 bp, Homo sapien
tggataaaagactcctccaggaact

SEQ ID NO: 780965 - DNA, 25 bp, Homo sapien
ggataaaagactcctccaggaactc

SEQ ID NO: 780966 - DNA, 25 bp, Homo sapien
ggaactccaccaggaatggccccag

SEQ ID NO: 780967 - DNA, 25 bp, Homo sapien
tgtgtggaagtttcatgtacgttac

SEQ ID NO: 780968 - DNA, 25 bp, Homo sapien
tgtgcatctattatggacatcagca

SEQ ID NO: 780969 - DNA, 25 bp, Homo sapien
gcatcatccgcatgacctgggtgtg

SEQ ID NO: 780970 - DNA, 25 bp, Homo sapien
cttctgtagtgtcaaaatgtgcatc

SEQ ID NO: 780971 - DNA, 25 bp, Homo sapien
caatgcagaacatggctaattttaa

SEQ ID NO: 780972 - DNA, 25 bp, Homo sapien
tcctccaagggctccgagaccagcc

SEQ ID NO: 780973 - DNA, 25 bp, Homo sapien
cctccaagggctccgagaccagccc

SEQ ID NO: 780974 - DNA, 25 bp, Homo sapien
tggcttaagaggtttgcctccaggc

SEQ ID NO: 780975 - DNA, 25 bp, Homo sapien
tcaatttgggtcttctaggccaagc

SEQ ID NO: 780976 - DNA, 25 bp, Homo sapien
tcctagtgggatcaatgaatgtacc

SEQ ID NO: 780977 - DNA, 25 bp, Homo sapien
tccaggaagacagggtataggtgct

SEQ ID NO: 780978 - DNA, 25 bp, Homo sapien
gattgactccttcaccctgagctgg

SEQ ID NO: 780979 - DNA, 25 bp, Homo sapien
ccaaatgccccaaggattctagcat

SEQ ID NO: 780980 - DNA, 25 bp, Homo sapien
cccaaatgccccaaggattctagca

SEQ ID NO: 780981 - DNA, 25 bp, Homo sapien
ttgcaccgatccctaacaagcctgg

SEQ ID NO: 780982 - DNA, 25 bp, Homo sapien
catccaccagtagtttagtgagcga

SEQ ID NO: 780983 - DNA, 25 bp, Homo sapien
gagcgactactatgtgcagtgcagg

SEQ ID NO: 780984 - DNA, 25 bp, Homo sapien
ggctaacaagattcagcagggcttt

SEQ ID NO: 780985 - DNA, 25 bp, Homo sapien
ccaaggccagcacccgcaagccctc

SEQ ID NO: 780986 - DNA, 25 bp, Homo sapien
ccagcacccgcaagccctccgggaa

SEQ ID NO: 780987 - DNA, 25 bp, Homo sapien
aggccagcacccgcaagccctccgg

SEQ ID NO: 780988 - DNA, 25 bp, Homo sapien
ctgccccaaggccagcacccgcaag

SEQ ID NO: 780989 - DNA, 25 bp, Homo sapien
ggcagttggtatcagcatcagtccc

SEQ ID NO: 780990 - DNA, 25 bp, Homo sapien
tgatttcctcatgtcctgggcagct

SEQ ID NO: 780991 - DNA, 25 bp, Homo sapien
ggaacccaggtactcagctgtgatt

SEQ ID NO: 780992 - DNA, 25 bp, Homo sapien
gttccatgaccgtgctgcataccag

SEQ ID NO: 780993 - DNA, 25 bp, Homo sapien
ctgagatcaactgcaccaggtgcgg

SEQ ID NO: 780994 - DNA, 25 bp, Homo sapien
agctgagatcaactgcaccaggtgc

SEQ ID NO: 780995 - DNA, 25 bp, Homo sapien
gctgagatcaactgcaccaggtgcg

SEQ ID NO: 780996 - DNA, 25 bp, Homo sapien
cagagcccccggaaaggtaactgcg

SEQ ID NO: 780997 - DNA, 25 bp, Homo sapien
gtaactgcggggaaggcgccgagcc

SEQ ID NO: 780998 - DNA, 25 bp, Homo sapien
tccaccaggcaccagagcccccgga

SEQ ID NO: 780999 - DNA, 25 bp, Homo sapien
aggtaactgcggggaaggcgccgag

SEQ ID NO: 781000 - DNA, 25 bp, Homo sapien
cagctttataggctgcagcagcgtc

SEQ ID NO: 781001 - DNA, 25 bp, Homo sapien
tagcagctttataggctgcagcagc

SEQ ID NO: 781002 - DNA, 25 bp, Homo sapien
agctttataggctgcagcagcgtca

SEQ ID NO: 781003 - DNA, 25 bp, Homo sapien
caactcctgggacaccaccaagccc

SEQ ID NO: 781004 - DNA, 25 bp, Homo sapien
gcagacactcctaagccaccaactc

SEQ ID NO: 781005 - DNA, 25 bp, Homo sapien
ccaccaactcctgggacaccaccaa

SEQ ID NO: 781006 - DNA, 25 bp, Homo sapien
ctgcagacactcctaagccaccaac

SEQ ID NO: 781007 - DNA, 25 bp, Homo sapien
ggcctgcaactttgacccagggagt

SEQ ID NO: 781008 - DNA, 25 bp, Homo sapien
ctgcaactttgacccagggagttcg

SEQ ID NO: 781009 - DNA, 25 bp, Homo sapien
acccagggagttcggggatagccat

SEQ ID NO: 781010 - DNA, 25 bp, Homo sapien
ccaggcctgcaactttgacccaggg

SEQ ID NO: 781011 - DNA, 25 bp, Homo sapien
gctccaggctgaggaaccaccgcac

SEQ ID NO: 781012 - DNA, 25 bp, Homo sapien
ccaggcttcactccggctccaggct

SEQ ID NO: 781013 - DNA, 25 bp, Homo sapien
ggctccaggctgaggaaccaccgca

SEQ ID NO: 781014 - DNA, 25 bp, Homo sapien
cactttcccaggcttcactccggct

SEQ ID NO: 781015 - DNA, 25 bp, Homo sapien
acgccacctgggtatacacctggca

SEQ ID NO: 781016 - DNA, 25 bp, Homo sapien
gccacctgggtatacacctggcagc

SEQ ID NO: 781017 - DNA, 25 bp, Homo sapien
gagcacgccacctgggtatacacct

SEQ ID NO: 781018 - DNA, 25 bp, Homo sapien
ctgggagcacgccacctgggtatac

SEQ ID NO: 781019 - DNA, 25 bp, Homo sapien
ggacggactgccagggaccttatgt

SEQ ID NO: 781020 - DNA, 25 bp, Homo sapien
gactgccagggaccttatgtctgtt

SEQ ID NO: 781021 - DNA, 25 bp, Homo sapien
tgatgatggtctgtgcctgggatca

SEQ ID NO: 781022 - DNA, 25 bp, Homo sapien
gggaccttatgtctgttagcctgag

SEQ ID NO: 781023 - DNA, 25 bp, Homo sapien
ggacaaagcagtgagtgtaggaagg

SEQ ID NO: 781024 - DNA, 25 bp, Homo sapien
ctgccgggggacaaagcagtgagtg

SEQ ID NO: 781025 - DNA, 25 bp, Homo sapien
gggacaaagcagtgagtgtaggaag

SEQ ID NO: 781026 - DNA, 25 bp, Homo sapien
ccgggggacaaagcagtgagtgtag

SEQ ID NO: 781027 - DNA, 25 bp, Homo sapien
agccttgggcttaactcctgctcca

SEQ ID NO: 781028 - DNA, 25 bp, Homo sapien
ggcttaactcctgctccagtgggaa

SEQ ID NO: 781029 - DNA, 25 bp, Homo sapien
taactcctgctccagtgggaactcc

SEQ ID NO: 781030 - DNA, 25 bp, Homo sapien
ctggagccttgggcttaactcctgc

SEQ ID NO: 781031 - DNA, 25 bp, Homo sapien
ggtggaatggggtgatctcaactca

SEQ ID NO: 781032 - DNA, 25 bp, Homo sapien
tggggtggaatggggtgatctcaac

SEQ ID NO: 781033 - DNA, 25 bp, Homo sapien
gctggggtggaatggggtgatctca

SEQ ID NO: 781034 - DNA, 25 bp, Homo sapien
gggtggaatggggtgatctcaactc

SEQ ID NO: 781035 - DNA, 25 bp, Homo sapien
ggattccagcaaaagctccacctac

SEQ ID NO: 781036 - DNA, 25 bp, Homo sapien
ccagtgggactccaggttgcggtcc

SEQ ID NO: 781037 - DNA, 25 bp, Homo sapien
tgggactccaggttgcggtccccca

SEQ ID NO: 781038 - DNA, 25 bp, Homo sapien
cccagtgggactccaggttgcggtc

SEQ ID NO: 781039 - DNA, 25 bp, Homo sapien
cagtgggactccaggttgcggtccc

SEQ ID NO: 781040 - DNA, 25 bp, Homo sapien
atagggcagtttccctgtggtgtag

SEQ ID NO: 781041 - DNA, 25 bp, Homo sapien
catagggcagtttccctgtggtgta

SEQ ID NO: 781042 - DNA, 25 bp, Homo sapien
gtggtgtagggcagtccatagccac

SEQ ID NO: 781043 - DNA, 25 bp, Homo sapien
cctgtggtgtagggcagtccatagc

SEQ ID NO: 781044 - DNA, 25 bp, Homo sapien
accagccactcctccgggcccatag

SEQ ID NO: 781045 - DNA, 25 bp, Homo sapien
ccagccactcctccgggcccatagc

SEQ ID NO: 781046 - DNA, 25 bp, Homo sapien
gcaccagccactcctccgggcccat

SEQ ID NO: 781047 - DNA, 25 bp, Homo sapien
ctgcaccagccactcctccgggccc

SEQ ID NO: 781048 - DNA, 25 bp, Homo sapien
cctgttgggtaaccagccttgcccg

SEQ ID NO: 781049 - DNA, 25 bp, Homo sapien
tgtccctgttgggtaaccagccttg

SEQ ID NO: 781050 - DNA, 25 bp, Homo sapien
ctgtccctgttgggtaaccagcctt

SEQ ID NO: 781051 - DNA, 25 bp, Homo sapien
tccctgttgggtaaccagccttgcc

SEQ ID NO: 781052 - DNA, 25 bp, Homo sapien
ggaagtgacgtgaggctttccttac

SEQ ID NO: 781053 - DNA, 25 bp, Homo sapien
aagatcagtgctcccttggctggaa

SEQ ID NO: 781054 - DNA, 25 bp, Homo sapien
tctggagcctggaagatcagtgctc

SEQ ID NO: 781055 - DNA, 25 bp, Homo sapien
tgctcccttggctggaagtgacgtg

SEQ ID NO: 781056 - DNA, 25 bp, Homo sapien
tgctgctgctgcctgggggccaacc

SEQ ID NO: 781057 - DNA, 25 bp, Homo sapien
gctgctgctgcctgggggccaaccc

SEQ ID NO: 781058 - DNA, 25 bp, Homo sapien
gaactttgctgctgctttagctgcc

SEQ ID NO: 781059 - DNA, 25 bp, Homo sapien
aactttgctgctgctttagctgccg

SEQ ID NO: 781060 - DNA, 25 bp, Homo sapien
cgaactttgctgctgctttagctgc

SEQ ID NO: 781061 - DNA, 25 bp, Homo sapien
gtgcaatgtagtttcccaaggaccc

SEQ ID NO: 781062 - DNA, 25 bp, Homo sapien
gcaatgtagtttcccaaggaccctc

SEQ ID NO: 781063 - DNA, 25 bp, Homo sapien
cagtgcaatgtagtttcccaaggac

SEQ ID NO: 781064 - DNA, 25 bp, Homo sapien
gggacagtgcaatgtagtttcccaa

SEQ ID NO: 781065 - DNA, 25 bp, Homo sapien
accagggaggactccggctgctcca

SEQ ID NO: 781066 - DNA, 25 bp, Homo sapien
caggaattgccccaggcacgccagg

SEQ ID NO: 781067 - DNA, 25 bp, Homo sapien
ccaggaattgccccaggcacgccag

SEQ ID NO: 781068 - DNA, 25 bp, Homo sapien
caacaccagggaggactccggctgc

SEQ ID NO: 781069 - DNA, 25 bp, Homo sapien
catacttggctgccttagcggctgc

SEQ ID NO: 781070 - DNA, 25 bp, Homo sapien
atacttggctgccttagcggctgct

SEQ ID NO: 781071 - DNA, 25 bp, Homo sapien
gaatgtgatctattcctaaagcaca

SEQ ID NO: 781072 - DNA, 25 bp, Homo sapien
cacccatttagttgatgcagcagac

SEQ ID NO: 781073 - DNA, 25 bp, Homo sapien
cctctgctgagttaatcagggcaaa

SEQ ID NO: 781074 - DNA, 25 bp, Homo sapien
tgggcacccatttagttgatgcagc

SEQ ID NO: 781075 - DNA, 25 bp, Homo sapien
tgtggagagactaagagggtcccta

SEQ ID NO: 781076 - DNA, 25 bp, Homo sapien
tagagtatggaagtgacagttggtc

SEQ ID NO: 781077 - DNA, 25 bp, Homo sapien
tgcatggatcctactcatcagagag

SEQ ID NO: 781078 - DNA, 25 bp, Homo sapien
tcccctaacctatgggaacctcaga

SEQ ID NO: 781079 - DNA, 25 bp, Homo sapien
cctggcccaccaggcactaagcctg

SEQ ID NO: 781080 - DNA, 25 bp, Homo sapien
gggacaccaacacctggaacgccag

SEQ ID NO: 781081 - DNA, 25 bp, Homo sapien
tatttggctgcctttgcagctgcct

SEQ ID NO: 781082 - DNA, 25 bp, Homo sapien
ggctgcctttgcagctgccttagca

SEQ ID NO: 781083 - DNA, 25 bp, Homo sapien
gcctttgcagctgccttagcagctg

SEQ ID NO: 781084 - DNA, 25 bp, Homo sapien
cgtatttggctgcctttgcagctgc

SEQ ID NO: 781085 - DNA, 25 bp, Homo sapien
aatgcctccaactccgactccgggc

SEQ ID NO: 781086 - DNA, 25 bp, Homo sapien
ccgtaagtaggaatgcctccaactc

SEQ ID NO: 781087 - DNA, 25 bp, Homo sapien
cccgtaagtaggaatgcctccaact

SEQ ID NO: 781088 - DNA, 25 bp, Homo sapien
tccaactccgactccgggcctggcc

SEQ ID NO: 781089 - DNA, 25 bp, Homo sapien
ctccgactccgacaccaaagccggg

SEQ ID NO: 781090 - DNA, 25 bp, Homo sapien
tccgactccgacaccaaagccggga

SEQ ID NO: 781091 - DNA, 25 bp, Homo sapien
tccgactccgggaacacctccgaca

SEQ ID NO: 781092 - DNA, 25 bp, Homo sapien
ccagggacacctgcgactccaggga

SEQ ID NO: 781093 - DNA, 25 bp, Homo sapien
atgtccccaggtgtgactaaggctc

SEQ ID NO: 781094 - DNA, 25 bp, Homo sapien
agccgagcagacaagaagcccccat

SEQ ID NO: 781095 - DNA, 25 bp, Homo sapien
atcccttctcaacccatgtccccag

SEQ ID NO: 781096 - DNA, 25 bp, Homo sapien
gagcacattcaagcccgatctacag

SEQ ID NO: 781097 - DNA, 25 bp, Homo sapien
tacttggcagccttggcggcagctg

SEQ ID NO: 781098 - DNA, 25 bp, Homo sapien
gcggcagctgctgcctgagcttcgg

SEQ ID NO: 781099 - DNA, 25 bp, Homo sapien
cgtacttggcagccttggcggcagc

SEQ ID NO: 781100 - DNA, 25 bp, Homo sapien
cttggcagccttggcggcagctgct

SEQ ID NO: 781101 - DNA, 25 bp, Homo sapien
gggtgatgagccagtgaccaacagt

SEQ ID NO: 781102 - DNA, 25 bp, Homo sapien
gtggggtgatgagccagtgaccaac

SEQ ID NO: 781103 - DNA, 25 bp, Homo sapien
gatgagccagtgaccaacagtccta

SEQ ID NO: 781104 - DNA, 25 bp, Homo sapien
gtgatgagccagtgaccaacagtcc

SEQ ID NO: 781105 - DNA, 25 bp, Homo sapien
tgcccggcacacctgggactgcgcc

SEQ ID NO: 781106 - DNA, 25 bp, Homo sapien
acacctgggactgcgcctggggcac

SEQ ID NO: 781107 - DNA, 25 bp, Homo sapien
cggcacacctgggactgcgcctggg

SEQ ID NO: 781108 - DNA, 25 bp, Homo sapien
cctggggcacctggcactagcccac

SEQ ID NO: 781109 - DNA, 25 bp, Homo sapien
ggcggctttggcggctgctttagca

SEQ ID NO: 781110 - DNA, 25 bp, Homo sapien
tgggcggctttggcggctgctttag

SEQ ID NO: 781111 - DNA, 25 bp, Homo sapien
ggctttggcggctgctttagcagct

SEQ ID NO: 781112 - DNA, 25 bp, Homo sapien
cggctttggcggctgctttagcagc

SEQ ID NO: 781113 - DNA, 25 bp, Homo sapien
gagccacgccgacaccaggaactaa

SEQ ID NO: 781114 - DNA, 25 bp, Homo sapien
aggagccacgccgacaccaggaact

SEQ ID NO: 781115 - DNA, 25 bp, Homo sapien
caggagccacgccgacaccaggaac

SEQ ID NO: 781116 - DNA, 25 bp, Homo sapien
tccaggagccacgccgacaccagga

SEQ ID NO: 781117 - DNA, 25 bp, Homo sapien
agccacaccaactccaggagccacg

SEQ ID NO: 781118 - DNA, 25 bp, Homo sapien
accaactccaggagccacgccaact

SEQ ID NO: 781119 - DNA, 25 bp, Homo sapien
tccaggagccacaccgacaccagga

SEQ ID NO: 781120 - DNA, 25 bp, Homo sapien
cacgccaactccaggagccaagcca

SEQ ID NO: 781121 - DNA, 25 bp, Homo sapien
ggccaatgccgggagccacgccaac

SEQ ID NO: 781122 - DNA, 25 bp, Homo sapien
ccagggccaatgccgggagccacgc

SEQ ID NO: 781123 - DNA, 25 bp, Homo sapien
accagggccaatgccgggagccacg

SEQ ID NO: 781124 - DNA, 25 bp, Homo sapien
agggccaatgccgggagccacgcca

SEQ ID NO: 781125 - DNA, 25 bp, Homo sapien
tccagggacgccgacaccaactcca

SEQ ID NO: 781126 - DNA, 25 bp, Homo sapien
tccaagtccagggacgccgacacca

SEQ ID NO: 781127 - DNA, 25 bp, Homo sapien
agggacgccgacaccaactccaagt

SEQ ID NO: 781128 - DNA, 25 bp, Homo sapien
aagtccagggacgccgacaccaact

SEQ ID NO: 781129 - DNA, 25 bp, Homo sapien
aggaacaccagcaccaactccaagt

SEQ ID NO: 781130 - DNA, 25 bp, Homo sapien
ccagcaccaactccaagtccaggaa

SEQ ID NO: 781131 - DNA, 25 bp, Homo sapien
aactccaagtccaggaacaccagca

SEQ ID NO: 781132 - DNA, 25 bp, Homo sapien
ctgccccgaagccaggaacaccagc

SEQ ID NO: 781133 - DNA, 25 bp, Homo sapien
caggggacaggctccgcctaactcc

SEQ ID NO: 781134 - DNA, 25 bp, Homo sapien
aggaggagggatctccttccctgag

SEQ ID NO: 781135 - DNA, 25 bp, Homo sapien
gacaggctccgcctaactccctcat

SEQ ID NO: 781136 - DNA, 25 bp, Homo sapien
gctccgcctaactccctcatctgca

SEQ ID NO: 781137 - DNA, 25 bp, Homo sapien
catatttggctgctttagcggcagc

SEQ ID NO: 781138 - DNA, 25 bp, Homo sapien
tttggctgctttagcggcagccagg

SEQ ID NO: 781139 - DNA, 25 bp, Homo sapien
tatttggctgctttagcggcagcca

SEQ ID NO: 781140 - DNA, 25 bp, Homo sapien
ctgctttagcggcagccagggctcc

SEQ ID NO: 781141 - DNA, 25 bp, Homo sapien
cctttttctattgtgaccaccccag

SEQ ID NO: 781142 - DNA, 25 bp, Homo sapien
agactcctcatacccacagcaggcc

SEQ ID NO: 781143 - DNA, 25 bp, Homo sapien
cagctcctttgctcgggccagagag

SEQ ID NO: 781144 - DNA, 25 bp, Homo sapien
tcctcatacccacagcaggcccagt

SEQ ID NO: 781145 - DNA, 25 bp, Homo sapien
tgcccagactcctcatacccacagc

SEQ ID NO: 781146 - DNA, 25 bp, Homo sapien
tgccagagcgccaagtgcagaggct

SEQ ID NO: 781147 - DNA, 25 bp, Homo sapien
caggaattcaggggctacagacagc

SEQ ID NO: 781148 - DNA, 25 bp, Homo sapien
tgtgggactgccacgtcctctgggc

SEQ ID NO: 781149 - DNA, 25 bp, Homo sapien
gggctggctcgtggtgggagcggtc

SEQ ID NO: 781150 - DNA, 25 bp, Homo sapien
cccggctggttggtggatccctggg

SEQ ID NO: 781151 - DNA, 25 bp, Homo sapien
gcccggctggttggtggatccctgg

SEQ ID NO: 781152 - DNA, 25 bp, Homo sapien
tgcccggctggttggtggatccctg

SEQ ID NO: 781153 - DNA, 25 bp, Homo sapien
atgtgacactgtggaggagcagtgg

SEQ ID NO: 781154 - DNA, 25 bp, Homo sapien
caggaagtccagtccatattttgtt

SEQ ID NO: 781155 - DNA, 25 bp, Homo sapien
tgacactgtggaggagcagtggaca

SEQ ID NO: 781156 - DNA, 25 bp, Homo sapien
acactgtggaggagcagtggacagg

SEQ ID NO: 781157 - DNA, 25 bp, Homo sapien
gggaaaatgagtgttccatttctga

SEQ ID NO: 781158 - DNA, 25 bp, Homo sapien
aaatgagtgttccatttctgaacga

SEQ ID NO: 781159 - DNA, 25 bp, Homo sapien
ggagggaaaatgagtgttccatttc

SEQ ID NO: 781160 - DNA, 25 bp, Homo sapien
gagtgttccatttctgaacgatggg

SEQ ID NO: 781161 - DNA, 25 bp, Homo sapien
ccaaggaccccaggcactgctgctc

SEQ ID NO: 781162 - DNA, 25 bp, Homo sapien
ctccaaggaccccaggcactgctgc

SEQ ID NO: 781163 - DNA, 25 bp, Homo sapien
gagccctccaaggaccccaggcact

SEQ ID NO: 781164 - DNA, 25 bp, Homo sapien
ccgagccctccaaggaccccaggca

SEQ ID NO: 781165 - DNA, 25 bp, Homo sapien
ctgggaacacagaccgagttcaggg

SEQ ID NO: 781166 - DNA, 25 bp, Homo sapien
agggaggcactctgtactggttaga

SEQ ID NO: 781167 - DNA, 25 bp, Homo sapien
aacacagaccgagttcagggaggca

SEQ ID NO: 781168 - DNA, 25 bp, Homo sapien
tgtactggttagattccctccccac

SEQ ID NO: 781169 - DNA, 25 bp, Homo sapien
gcagcggcggcggcgggtccggctc

SEQ ID NO: 781170 - DNA, 25 bp, Homo sapien
caaactgggcggctttggcagcagc

SEQ ID NO: 781171 - DNA, 25 bp, Homo sapien
tggcagcagctttggctgcggcagc

SEQ ID NO: 781172 - DNA, 25 bp, Homo sapien
ctttggcagcagctttggctgcggc

SEQ ID NO: 781173 - DNA, 25 bp, Homo sapien
agccctccgactccgagtcctccga

SEQ ID NO: 781174 - DNA, 25 bp, Homo sapien
tggaactccaagccctccgactccg

SEQ ID NO: 781175 - DNA, 25 bp, Homo sapien
tccgagtcctccgagcccagcggct

SEQ ID NO: 781176 - DNA, 25 bp, Homo sapien
tccaagccctccgactccgagtcct

SEQ ID NO: 781177 - DNA, 25 bp, Homo sapien
ttagctgctttagcggctgcagctg

SEQ ID NO: 781178 - DNA, 25 bp, Homo sapien
tttagctgctttagcggctgcagct

SEQ ID NO: 781179 - DNA, 25 bp, Homo sapien
gaactgcccggcaccccctaggaca

SEQ ID NO: 781180 - DNA, 25 bp, Homo sapien
gggagacaatccgaagccaggtctt

SEQ ID NO: 781181 - DNA, 25 bp, Homo sapien
aatccgaagccaggtcttgctgcca

SEQ ID NO: 781182 - DNA, 25 bp, Homo sapien
gagacaatccgaagccaggtcttgc

SEQ ID NO: 781183 - DNA, 25 bp, Homo sapien
aatgggagacaatccgaagccaggt

SEQ ID NO: 781184 - DNA, 25 bp, Homo sapien
gacgcaatcgtcttgccctgtcatc

SEQ ID NO: 781185 - DNA, 25 bp, Homo sapien
gctagagggcagtggtgtagtctca

SEQ ID NO: 781186 - DNA, 25 bp, Homo sapien
tagagggcagtggtgtagtctcagc

SEQ ID NO: 781187 - DNA, 25 bp, Homo sapien
aatcgtcttgccctgtcatcaccca

SEQ ID NO: 781188 - DNA, 25 bp, Homo sapien
tctcttccggccacaagctttcccc

SEQ ID NO: 781189 - DNA, 25 bp, Homo sapien
ttctcttccggccacaagctttccc

SEQ ID NO: 781190 - DNA, 25 bp, Homo sapien
attttctcttccggccacaagcttt

SEQ ID NO: 781191 - DNA, 25 bp, Homo sapien
ttttctcttccggccacaagctttc

SEQ ID NO: 781192 - DNA, 25 bp, Homo sapien
cgtgtagcaccaagttcccctggag

SEQ ID NO: 781193 - DNA, 25 bp, Homo sapien
ccaacgttgatgaggtcgtgagtca

SEQ ID NO: 781194 - DNA, 25 bp, Homo sapien
attctccaccaagcagtagcaccaa

SEQ ID NO: 781195 - DNA, 25 bp, Homo sapien
aggaagataagagcaccagcgtgta

SEQ ID NO: 781196 - DNA, 25 bp, Homo sapien
gaatccagctttgaggcttcaggtg

SEQ ID NO: 781197 - DNA, 25 bp, Homo sapien
tctacaagggcaaggtggctattcc

SEQ ID NO: 781198 - DNA, 25 bp, Homo sapien
acccagccagctagtggtgccgggc

SEQ ID NO: 781199 - DNA, 25 bp, Homo sapien
gagggatgctagagcgaatccagct

SEQ ID NO: 781200 - DNA, 25 bp, Homo sapien
ggcacaggcggccatgacaggtcaa

SEQ ID NO: 781201 - DNA, 25 bp, Homo sapien
tatcacagcgagacacaaaaagatg

SEQ ID NO: 781202 - DNA, 25 bp, Homo sapien
ggccatgacaggtcaaccaggttga

SEQ ID NO: 781203 - DNA, 25 bp, Homo sapien
tatttattgatctatcacagcgaga

SEQ ID NO: 781204 - DNA, 25 bp, Homo sapien
aaaaaaggtgtgtttcatccagagt

SEQ ID NO: 781205 - DNA, 25 bp, Homo sapien
catccagagttatattagagtgatt

SEQ ID NO: 781206 - DNA, 25 bp, Homo sapien
tcatttattagtcatttctgaagca

SEQ ID NO: 781207 - DNA, 25 bp, Homo sapien
aaccaaaagagaatatcaacaatca

SEQ ID NO: 781208 - DNA, 25 bp, Homo sapien
ggcgcctctcggacaccggcgggga

SEQ ID NO: 781209 - DNA, 25 bp, Homo sapien
gcgcctctcggacaccggcggggaa

SEQ ID NO: 781210 - DNA, 25 bp, Homo sapien
gcgagctcgcccaccgccgccggcc

SEQ ID NO: 781211 - DNA, 25 bp, Homo sapien
cgagctcgcccaccgccgccggccc

SEQ ID NO: 781212 - DNA, 25 bp, Homo sapien
cgcgagctcgcccaccgccgccggc

SEQ ID NO: 781213 - DNA, 25 bp, Homo sapien
agctcgcccaccgccgccggcccgg

SEQ ID NO: 781214 - DNA, 25 bp, Homo sapien
tgcaacaaagtagcgtcaacctcat

SEQ ID NO: 781215 - DNA, 25 bp, Homo sapien
cctccaggtgcaacaaagtagcgtc

SEQ ID NO: 781216 - DNA, 25 bp, Homo sapien
tccaggtgcaacaaagtagcgtcaa

SEQ ID NO: 781217 - DNA, 25 bp, Homo sapien
caggtgcaacaaagtagcgtcaacc

SEQ ID NO: 781218 - DNA, 25 bp, Homo sapien
cctggcacctcctctagccagccac

SEQ ID NO: 781219 - DNA, 25 bp, Homo sapien
tctagccagccacaggcatgcttag

SEQ ID NO: 781220 - DNA, 25 bp, Homo sapien
tggcacctcctctagccagccacag

SEQ ID NO: 781221 - DNA, 25 bp, Homo sapien
gccagccacaggcatgcttagtcat

SEQ ID NO: 781222 - DNA, 25 bp, Homo sapien
agggcctggaggtactggccatcat

SEQ ID NO: 781223 - DNA, 25 bp, Homo sapien
ggccatcatagatcctctggccgca

SEQ ID NO: 781224 - DNA, 25 bp, Homo sapien
tctgcgtgccagtccgcgttcaggg

SEQ ID NO: 781225 - DNA, 25 bp, Homo sapien
tggccgcagcttgcacacacgggca

SEQ ID NO: 781226 - DNA, 25 bp, Homo sapien
gctccgaggcggccgttttttctga

SEQ ID NO: 781227 - DNA, 25 bp, Homo sapien
ggcagtatgtgagccaaagggaagc

SEQ ID NO: 781228 - DNA, 25 bp, Homo sapien
tggtcataaccttccgggaggcagg

SEQ ID NO: 781229 - DNA, 25 bp, Homo sapien
ccaaggagatgctaccagggatgcg

SEQ ID NO: 781230 - DNA, 25 bp, Homo sapien
ggaccagtccaagcctggtcataac

SEQ ID NO: 781231 - DNA, 25 bp, Homo sapien
gcggcgtcttcttggggctgaagcc

SEQ ID NO: 781232 - DNA, 25 bp, Homo sapien
ccctctggaggaagcggcgtcttct

SEQ ID NO: 781233 - DNA, 25 bp, Homo sapien
gaagcggcgtcttcttggggctgaa

SEQ ID NO: 781234 - DNA, 25 bp, Homo sapien
cctctggaggaagcggcgtcttctt

SEQ ID NO: 781235 - DNA, 25 bp, Homo sapien
ttctcatagtactggtgcgacaggg

SEQ ID NO: 781236 - DNA, 25 bp, Homo sapien
gctcagagcacccatggcaggactc

SEQ ID NO: 781237 - DNA, 25 bp, Homo sapien
ccatagcgggcccagtagtccttct

SEQ ID NO: 781238 - DNA, 25 bp, Homo sapien
aaccagtcccttggtgatttgctca

SEQ ID NO: 781239 - DNA, 25 bp, Homo sapien
acgtgaggcagatgaaacactcggg

SEQ ID NO: 781240 - DNA, 25 bp, Homo sapien
gcgtgtaggtgtccccgtcaccgat

SEQ ID NO: 781241 - DNA, 25 bp, Homo sapien
tccaccagcgtgtaggtgtccccgt

SEQ ID NO: 781242 - DNA, 25 bp, Homo sapien
cgtcaccgataaaggtcccacacgt

SEQ ID NO: 781243 - DNA, 25 bp, Homo sapien
tgtgtgagtgctcggtgccacagcc

SEQ ID NO: 781244 - DNA, 25 bp, Homo sapien
cacgcttgccatgagatgaggctgg

SEQ ID NO: 781245 - DNA, 25 bp, Homo sapien
ccctggacgcggacggtgtgtgagt

SEQ ID NO: 781246 - DNA, 25 bp, Homo sapien
caggcaggatctgctcgatgacggg

SEQ ID NO: 781247 - DNA, 25 bp, Homo sapien
tcttgttggatcagacatggactaa

SEQ ID NO: 781248 - DNA, 25 bp, Homo sapien
cttgttggatcagacatggactaaa

SEQ ID NO: 781249 - DNA, 25 bp, Homo sapien
ttgttggatcagacatggactaaag

SEQ ID NO: 781250 - DNA, 25 bp, Homo sapien
aatggcagtcggggctcactgaaac

SEQ ID NO: 781251 - DNA, 25 bp, Homo sapien
gcagatgagtgccttgggtcccaaa

SEQ ID NO: 781252 - DNA, 25 bp, Homo sapien
gagaccctcgatcagttgcctataa

SEQ ID NO: 781253 - DNA, 25 bp, Homo sapien
tgagccacaattgcagggtgaagac

SEQ ID NO: 781254 - DNA, 25 bp, Homo sapien
tagtggcttcatatctgactcccaa

SEQ ID NO: 781255 - DNA, 25 bp, Homo sapien
cacatctgggctcatgcagcccgga

SEQ ID NO: 781256 - DNA, 25 bp, Homo sapien
tcgtccaggggcacatttcggatgg

SEQ ID NO: 781257 - DNA, 25 bp, Homo sapien
caagatccggtctccgacgtggatg

SEQ ID NO: 781258 - DNA, 25 bp, Homo sapien
tcggatgggcgtgccattgatttcc

SEQ ID NO: 781259 - DNA, 25 bp, Homo sapien
tcatgctcgagggtcagctggagca

SEQ ID NO: 781260 - DNA, 25 bp, Homo sapien
tccccgctgggagtataagccggag

SEQ ID NO: 781261 - DNA, 25 bp, Homo sapien
caggcggctggtttcctgaatcagc

SEQ ID NO: 781262 - DNA, 25 bp, Homo sapien
cagcccgtggcccagtgtatcgtga

SEQ ID NO: 781263 - DNA, 25 bp, Homo sapien
tggctccccgacctaggtcccacag

SEQ ID NO: 781264 - DNA, 25 bp, Homo sapien
tgaaccgaggagcaggctgacttac

SEQ ID NO: 781265 - DNA, 25 bp, Homo sapien
agtgaaagcacccagctgaaccgag

SEQ ID NO: 781266 - DNA, 25 bp, Homo sapien
tccctggctcaagcctgggctgcat

SEQ ID NO: 781267 - DNA, 25 bp, Homo sapien
gagacctgtcgatgctgcagctcct

SEQ ID NO: 781268 - DNA, 25 bp, Homo sapien
cagcgcccggagacctgtcgatgct

SEQ ID NO: 781269 - DNA, 25 bp, Homo sapien
agcccagtgagccagcgcccggaga

SEQ ID NO: 781270 - DNA, 25 bp, Homo sapien
gcccggagacctgtcgatgctgcag

SEQ ID NO: 781271 - DNA, 25 bp, Homo sapien
ggactcagagcgacccaggtccttg

SEQ ID NO: 781272 - DNA, 25 bp, Homo sapien
acctccccgtggatgaggtccgacg

SEQ ID NO: 781273 - DNA, 25 bp, Homo sapien
agcacctccccgtggatgaggtccg

SEQ ID NO: 781274 - DNA, 25 bp, Homo sapien
tccgacggccggaagatgcggtgtg

SEQ ID NO: 781275 - DNA, 25 bp, Homo sapien
tccccgtggatgaggtccgacggcc

SEQ ID NO: 781276 - DNA, 25 bp, Homo sapien
tccttgaggaacgtcctctgggtct

SEQ ID NO: 781277 - DNA, 25 bp, Homo sapien
acctcacctgtctcacggtgtgtca

SEQ ID NO: 781278 - DNA, 25 bp, Homo sapien
atcacctcacctgtctcacggtgtg

SEQ ID NO: 781279 - DNA, 25 bp, Homo sapien
gtctcctcgtcgaaccggatcagct

SEQ ID NO: 781280 - DNA, 25 bp, Homo sapien
ggtgttccaggcatcgcatgacctt

SEQ ID NO: 781281 - DNA, 25 bp, Homo sapien
gtgttccaggcatcgcatgaccttc

SEQ ID NO: 781282 - DNA, 25 bp, Homo sapien
tgttccaggcatcgcatgaccttca

SEQ ID NO: 781283 - DNA, 25 bp, Homo sapien
gttccaggcatcgcatgaccttcac

SEQ ID NO: 781284 - DNA, 25 bp, Homo sapien
agttgagcctcttgtccttgtagag

SEQ ID NO: 781285 - DNA, 25 bp, Homo sapien
tgatgaagttgagcctcttgtcctt

SEQ ID NO: 781286 - DNA, 25 bp, Homo sapien
agtgatgaagttgagcctcttgtcc

SEQ ID NO: 781287 - DNA, 25 bp, Homo sapien
tgaagttgagcctcttgtccttgta

SEQ ID NO: 781288 - DNA, 25 bp, Homo sapien
ccggagcgtgccgcccttgatgtac

SEQ ID NO: 781289 - DNA, 25 bp, Homo sapien
cttgatgatgccccggagcgtgccg

SEQ ID NO: 781290 - DNA, 25 bp, Homo sapien
tgatgccccggagcgtgccgccctt

SEQ ID NO: 781291 - DNA, 25 bp, Homo sapien
tgccccggagcgtgccgcccttgat

SEQ ID NO: 781292 - DNA, 25 bp, Homo sapien
tcagggttcagagggcctttgagac

SEQ ID NO: 781293 - DNA, 25 bp, Homo sapien
tgtggcttccccccattgaagagat

SEQ ID NO: 781294 - DNA, 25 bp, Homo sapien
ttaggaatcagggttcagagggcct

SEQ ID NO: 781295 - DNA, 25 bp, Homo sapien
ttagatggagtcagtcgctcccctt

SEQ ID NO: 781296 - DNA, 25 bp, Homo sapien
tagggtccacaccttggatacaagg

SEQ ID NO: 781297 - DNA, 25 bp, Homo sapien
gaagatcccatggtctcagggtggt

SEQ ID NO: 781298 - DNA, 25 bp, Homo sapien
gtaatccaacctgaggaagatccca

SEQ ID NO: 781299 - DNA, 25 bp, Homo sapien
tgtcaagttacacctagcaggagcc

SEQ ID NO: 781300 - DNA, 25 bp, Homo sapien
tgatgcgatgtccttggcaaagctc

SEQ ID NO: 781301 - DNA, 25 bp, Homo sapien
catccctgatgcgatgtccttggca

SEQ ID NO: 781302 - DNA, 25 bp, Homo sapien
tccctgatgcgatgtccttggcaaa

SEQ ID NO: 781303 - DNA, 25 bp, Homo sapien
cctgatgcgatgtccttggcaaagc

SEQ ID NO: 781304 - DNA, 25 bp, Homo sapien
agttgtgggagttgaggtctcggtg

SEQ ID NO: 781305 - DNA, 25 bp, Homo sapien
tgtgggagttgaggtctcggtggat

SEQ ID NO: 781306 - DNA, 25 bp, Homo sapien
ttgtgggagttgaggtctcggtgga

SEQ ID NO: 781307 - DNA, 25 bp, Homo sapien
gcagttgtgggagttgaggtctcgg

SEQ ID NO: 781308 - DNA, 25 bp, Homo sapien
actccagcccatacgcctatgcccc

SEQ ID NO: 781309 - DNA, 25 bp, Homo sapien
tgtgctctatgaagaccacggtcct

SEQ ID NO: 781310 - DNA, 25 bp, Homo sapien
tctatgaagaccacggtcctggtcc

SEQ ID NO: 781311 - DNA, 25 bp, Homo sapien
tgatttatgagaccctcctaccagc

SEQ ID NO: 781312 - DNA, 25 bp, Homo sapien
gagaacatacctctgatacgctgta

SEQ ID NO: 781313 - DNA, 25 bp, Homo sapien
tgcgggaagcacctgaagatagcag

SEQ ID NO: 781314 - DNA, 25 bp, Homo sapien
gatcctagtactgcccgcttggcct

SEQ ID NO: 781315 - DNA, 25 bp, Homo sapien
gtcatgctgggacccgatcctagta

SEQ ID NO: 781316 - DNA, 25 bp, Homo sapien
tcgtccaccatgagacgcgccagcc

SEQ ID NO: 781317 - DNA, 25 bp, Homo sapien
atgagacgcgccagcccgaagtcag

SEQ ID NO: 781318 - DNA, 25 bp, Homo sapien
accatgagacgcgccagcccgaagt

SEQ ID NO: 781319 - DNA, 25 bp, Homo sapien
cgttgatcatctcaggtgccatcca

SEQ ID NO: 781320 - DNA, 25 bp, Homo sapien
gaacctgtgttcatgtgtcacctgc

SEQ ID NO: 781321 - DNA, 25 bp, Homo sapien
taagggtccctatcagaaggatgga

SEQ ID NO: 781322 - DNA, 25 bp, Homo sapien
tgactgcgtcctgatccctgggact

SEQ ID NO: 781323 - DNA, 25 bp, Homo sapien
tgggcccaatgtcaccgtaagggtc

SEQ ID NO: 781324 - DNA, 25 bp, Homo sapien
ctcgcacaggacgatcccaaaggag

SEQ ID NO: 781325 - DNA, 25 bp, Homo sapien
ggacgatcccaaaggagaacacatc

SEQ ID NO: 781326 - DNA, 25 bp, Homo sapien
atccaccttctcatcatagctgcgg

SEQ ID NO: 781327 - DNA, 25 bp, Homo sapien
atcccaaaggagaacacatccacct

SEQ ID NO: 781328 - DNA, 25 bp, Homo sapien
cagatcgcaacagcgcacggtgatg

SEQ ID NO: 781329 - DNA, 25 bp, Homo sapien
ggaatcctcgcacgttgaggccaaa

SEQ ID NO: 781330 - DNA, 25 bp, Homo sapien
gggcagtagcggtccaggaatcctc

SEQ ID NO: 781331 - DNA, 25 bp, Homo sapien
ggtctgcgttcacccgcccgatgat

SEQ ID NO: 781332 - DNA, 25 bp, Homo sapien
gccgcgccggtaggtctcccagaaa

SEQ ID NO: 781333 - DNA, 25 bp, Homo sapien
gtggccggccaggtgcatgcggagg

SEQ ID NO: 781334 - DNA, 25 bp, Homo sapien
tgggcaggcagtccgctctcgccgc

SEQ ID NO: 781335 - DNA, 25 bp, Homo sapien
agggtctccagccagtgttccagct

SEQ ID NO: 781336 - DNA, 25 bp, Homo sapien
ggagagtcctcgatacctgttgcta

SEQ ID NO: 781337 - DNA, 25 bp, Homo sapien
gctgctgcagccgtatgaaaaaata

SEQ ID NO: 781338 - DNA, 25 bp, Homo sapien
caagacagaggttacagcagggcga

SEQ ID NO: 781339 - DNA, 25 bp, Homo sapien
tgggtcccacctccctaagtcatgg

SEQ ID NO: 781340 - DNA, 25 bp, Homo sapien
cgaggaaggaccccgcaatataact

SEQ ID NO: 781341 - DNA, 25 bp, Homo sapien
gaggaaggaccccgcaatataactc

SEQ ID NO: 781342 - DNA, 25 bp, Homo sapien
gaaccagggtgagcgaggaaggacc

SEQ ID NO: 781343 - DNA, 25 bp, Homo sapien
agcgaggaaggaccccgcaatataa

SEQ ID NO: 781344 - DNA, 25 bp, Homo sapien
gatcgtcgtaggtgtcgaagtccgc

SEQ ID NO: 781345 - DNA, 25 bp, Homo sapien
cgtcgtaggtgtcgaagtccgccat

SEQ ID NO: 781346 - DNA, 25 bp, Homo sapien
atcgtcgtaggtgtcgaagtccgcc

SEQ ID NO: 781347 - DNA, 25 bp, Homo sapien
tcgtcgtaggtgtcgaagtccgcca

SEQ ID NO: 781348 - DNA, 25 bp, Homo sapien
actaaaacttaaattgaccacgctg

SEQ ID NO: 781349 - DNA, 25 bp, Homo sapien
tgtagtcccaatgcaactaaaactt

SEQ ID NO: 781350 - DNA, 25 bp, Homo sapien
ttattgtagtcccaatgcaactaaa

SEQ ID NO: 781351 - DNA, 25 bp, Homo sapien
ttgaccacgctgtttaagaagaatt

SEQ ID NO: 781352 - DNA, 25 bp, Homo sapien
gccagggcttttacatgaaccgtca

SEQ ID NO: 781353 - DNA, 25 bp, Homo sapien
tggaactaagcaatggaacacttgg

SEQ ID NO: 781354 - DNA, 25 bp, Homo sapien
gaaccgtcatgcagagacctcttag

SEQ ID NO: 781355 - DNA, 25 bp, Homo sapien
tggctgaactgatgaaactctggtc

SEQ ID NO: 781356 - DNA, 25 bp, Homo sapien
gtatgtgccgccacacccgttttgt

SEQ ID NO: 781357 - DNA, 25 bp, Homo sapien
aggtatgtgccgccacacccgtttt

SEQ ID NO: 781358 - DNA, 25 bp, Homo sapien
tatgtgccgccacacccgttttgta

SEQ ID NO: 781359 - DNA, 25 bp, Homo sapien
acaggtatgtgccgccacacccgtt

SEQ ID NO: 781360 - DNA, 25 bp, Homo sapien
cccgggtgtgcaggtctaatcagca

SEQ ID NO: 781361 - DNA, 25 bp, Homo sapien
ggaaggccatgcttaaccagagact

SEQ ID NO: 781362 - DNA, 25 bp, Homo sapien
tgatgtaaaagcaaccaggcgacaa

SEQ ID NO: 781363 - DNA, 25 bp, Homo sapien
cagaaggtcctgatcaagacggaaa

SEQ ID NO: 781364 - DNA, 25 bp, Homo sapien
tcatagaaactactgcttattgagt

SEQ ID NO: 781365 - DNA, 25 bp, Homo sapien
gaaactactgcttattgagttttgg

SEQ ID NO: 781366 - DNA, 25 bp, Homo sapien
ccttcatagaaactactgcttattg

SEQ ID NO: 781367 - DNA, 25 bp, Homo sapien
aactaaccttcatagaaactactgc

SEQ ID NO: 781368 - DNA, 25 bp, Homo sapien
aggttcaagtgattctatggcttca

SEQ ID NO: 781369 - DNA, 25 bp, Homo sapien
ggttcaagtgattctatggcttcag

SEQ ID NO: 781370 - DNA, 25 bp, Homo sapien
cgtattgaaaggtagatttcctacg

SEQ ID NO: 781371 - DNA, 25 bp, Homo sapien
gtagatttcctacgtatgctgtgta

SEQ ID NO: 781372 - DNA, 25 bp, Homo sapien
gatttcctacgtatgctgtgtaggg

SEQ ID NO: 781373 - DNA, 25 bp, Homo sapien
gaaaggtagatttcctacgtatgct

SEQ ID NO: 781374 - DNA, 25 bp, Homo sapien
gaatgctgctcggatcccttcttct

SEQ ID NO: 781375 - DNA, 25 bp, Homo sapien
ggagaatgctgctcggatcccttct

SEQ ID NO: 781376 - DNA, 25 bp, Homo sapien
ggcaggagaatgctgctcggatccc

SEQ ID NO: 781377 - DNA, 25 bp, Homo sapien
caggagaatgctgctcggatccctt

SEQ ID NO: 781378 - DNA, 25 bp, Homo sapien
agggaatccacttcatcgaattcta

SEQ ID NO: 781379 - DNA, 25 bp, Homo sapien
aagggaatccacttcatcgaattct

SEQ ID NO: 781380 - DNA, 25 bp, Homo sapien
aatgtccacacgaagtgaccgatcg

SEQ ID NO: 781381 - DNA, 25 bp, Homo sapien
tgtccacacgaagtgaccgatcgcc

SEQ ID NO: 781382 - DNA, 25 bp, Homo sapien
atgtccacacgaagtgaccgatcgc

SEQ ID NO: 781383 - DNA, 25 bp, Homo sapien
caatgtccacacgaagtgaccgatc

SEQ ID NO: 781384 - DNA, 25 bp, Homo sapien
cgggaatcccatccacctctagatt

SEQ ID NO: 781385 - DNA, 25 bp, Homo sapien
tctagattctcgagagctacccatt

SEQ ID NO: 781386 - DNA, 25 bp, Homo sapien
aagtcatcccgggaatcccatccac

SEQ ID NO: 781387 - DNA, 25 bp, Homo sapien
ccatccacctctagattctcgagag

SEQ ID NO: 781388 - DNA, 25 bp, Homo sapien
tgacatcgctgtctgaagtggcccc

SEQ ID NO: 781389 - DNA, 25 bp, Homo sapien
tgggatgagctttctaacaggctga

SEQ ID NO: 781390 - DNA, 25 bp, Homo sapien
tgtcttacagacaaaaccggtgtgg

SEQ ID NO: 781391 - DNA, 25 bp, Homo sapien
tgatggcaccacagactacttacta

SEQ ID NO: 781392 - DNA, 25 bp, Homo sapien
caaactatcgtctccaagctgctta

SEQ ID NO: 781393 - DNA, 25 bp, Homo sapien
tggagtaatgacagcgctaacagac

SEQ ID NO: 781394 - DNA, 25 bp, Homo sapien
ggagagcaaacaaacgagctgttta

SEQ ID NO: 781395 - DNA, 25 bp, Homo sapien
ccaaatgccaatgtgtggagtaatg

SEQ ID NO: 781396 - DNA, 25 bp, Homo sapien
tgcccatgggggggcctgttcgccg

SEQ ID NO: 781397 - DNA, 25 bp, Homo sapien
gggcctgttcgccggtcgcctgggc

SEQ ID NO: 781398 - DNA, 25 bp, Homo sapien
ctgttcgccggtcgcctgggcgact

SEQ ID NO: 781399 - DNA, 25 bp, Homo sapien
catgggggggcctgttcgccggtcg

SEQ ID NO: 781400 - DNA, 25 bp, Homo sapien
gtcgcgactgttcgaggtttaagct

SEQ ID NO: 781401 - DNA, 25 bp, Homo sapien
ggcgtcgcgactgttcgaggtttaa

SEQ ID NO: 781402 - DNA, 25 bp, Homo sapien
ctaggcctggcacccccgaagatag

SEQ ID NO: 781403 - DNA, 25 bp, Homo sapien
ctacttgattgaggggcgtcgcgac

SEQ ID NO: 781404 - DNA, 25 bp, Homo sapien
tttccgctgtgaggaggccaatggc

SEQ ID NO: 781405 - DNA, 25 bp, Homo sapien
aaggaaaaatgacgcagcaccgcag

SEQ ID NO: 781406 - DNA, 25 bp, Homo sapien
caaatactaagcacattccgctggg

SEQ ID NO: 781407 - DNA, 25 bp, Homo sapien
acacacgtgtgaatgcatgcaagca

SEQ ID NO: 781408 - DNA, 25 bp, Homo sapien
cttgtaccctactggtgggaacata

SEQ ID NO: 781409 - DNA, 25 bp, Homo sapien
cctgttcagttgcataaattctagt

SEQ ID NO: 781410 - DNA, 25 bp, Homo sapien
ttttgtacctcgaagagatacctgc

SEQ ID NO: 781411 - DNA, 25 bp, Homo sapien
attactttcaatgcacggctgcgcc

SEQ ID NO: 781412 - DNA, 25 bp, Homo sapien
tatcggagagaggaaaaacttttca

SEQ ID NO: 781413 - DNA, 25 bp, Homo sapien
catcagcagaattatcggagagagg

SEQ ID NO: 781414 - DNA, 25 bp, Homo sapien
cagaattatcggagagaggaaaaac

SEQ ID NO: 781415 - DNA, 25 bp, Homo sapien
cagcagaattatcggagagaggaaa

SEQ ID NO: 781416 - DNA, 25 bp, Homo sapien
ctgcttccttcacgggcctgggcac

SEQ ID NO: 781417 - DNA, 25 bp, Homo sapien
ccctgcttccttcacgggcctgggc

SEQ ID NO: 781418 - DNA, 25 bp, Homo sapien
tggtctgtgaaaggacctcatatgc

SEQ ID NO: 781419 - DNA, 25 bp, Homo sapien
tctgcctcgcctgtaggtgggacta

SEQ ID NO: 781420 - DNA, 25 bp, Homo sapien
aggaagagagatacactccaataga

SEQ ID NO: 781421 - DNA, 25 bp, Homo sapien
agagatacactccaatagacaggga

SEQ ID NO: 781422 - DNA, 25 bp, Homo sapien
ggaagagagatacactccaatagac

SEQ ID NO: 781423 - DNA, 25 bp, Homo sapien
ctgatgccaacaccactgacactgg

SEQ ID NO: 781424 - DNA, 25 bp, Homo sapien
agccactgaatcatccgtacatccg

SEQ ID NO: 781425 - DNA, 25 bp, Homo sapien
ccggacaggctcagctatgaagagg

SEQ ID NO: 781426 - DNA, 25 bp, Homo sapien
agtccagggttcctcaccacggccg

SEQ ID NO: 781427 - DNA, 25 bp, Homo sapien
gcttgagatcaagagctccagacca

SEQ ID NO: 781428 - DNA, 25 bp, Homo sapien
gatcgcttgagatcaagagctccag

SEQ ID NO: 781429 - DNA, 25 bp, Homo sapien
tcgcttgagatcaagagctccagac

SEQ ID NO: 781430 - DNA, 25 bp, Homo sapien
aggatcgcttgagatcaagagctcc

SEQ ID NO: 781431 - DNA, 25 bp, Homo sapien
cctggtgaatggaggcgtggccctc

SEQ ID NO: 781432 - DNA, 25 bp, Homo sapien
ggccctctcgagtgggtttccaaga

SEQ ID NO: 781433 - DNA, 25 bp, Homo sapien
agaactgttgcaactaggaacagac

SEQ ID NO: 781434 - DNA, 25 bp, Homo sapien
aagaactgttgcaactaggaacaga

SEQ ID NO: 781435 - DNA, 25 bp, Homo sapien
tgaccaggcctcagcaaaacatacg

SEQ ID NO: 781436 - DNA, 25 bp, Homo sapien
tctggctggcacctgaccggcttct

SEQ ID NO: 781437 - DNA, 25 bp, Homo sapien
gccttggagccacagcgtgatgacc

SEQ ID NO: 781438 - DNA, 25 bp, Homo sapien
gaggaggtggcccaagagcatgatc

SEQ ID NO: 781439 - DNA, 25 bp, Homo sapien
taatctagacaactgccctttgagg

SEQ ID NO: 781440 - DNA, 25 bp, Homo sapien
gagagctcacgtctgctaagtggaa

SEQ ID NO: 781441 - DNA, 25 bp, Homo sapien
tacctgagcctaggctgcggaaaca

SEQ ID NO: 781442 - DNA, 25 bp, Homo sapien
gaggacgaggttcactgcatttcac

SEQ ID NO: 781443 - DNA, 25 bp, Homo sapien
gctcctggtgttgcctcttgtgatg

SEQ ID NO: 781444 - DNA, 25 bp, Homo sapien
gttggctcctggtgttgcctcttgt

SEQ ID NO: 781445 - DNA, 25 bp, Homo sapien
tggctcctggtgttgcctcttgtga

SEQ ID NO: 781446 - DNA, 25 bp, Homo sapien
ggctcctggtgttgcctcttgtgat

SEQ ID NO: 781447 - DNA, 25 bp, Homo sapien
cgggccacagcagttcagtccccga

SEQ ID NO: 781448 - DNA, 25 bp, Homo sapien
gggccacagcagttcagtccccgag

SEQ ID NO: 781449 - DNA, 25 bp, Homo sapien
gctccgggccacagcagttcagtcc

SEQ ID NO: 781450 - DNA, 25 bp, Homo sapien
tccgggccacagcagttcagtcccc

SEQ ID NO: 781451 - DNA, 25 bp, Homo sapien
ggtagattttctctgacctctttgc

SEQ ID NO: 781452 - DNA, 25 bp, Homo sapien
gacttctctgctggtagattttctc

SEQ ID NO: 781453 - DNA, 25 bp, Homo sapien
gctggtagattttctctgacctctt

SEQ ID NO: 781454 - DNA, 25 bp, Homo sapien
tctctgctggtagattttctctgac

SEQ ID NO: 781455 - DNA, 25 bp, Homo sapien
ccgtaaagctctgttggtcctcacg

SEQ ID NO: 781456 - DNA, 25 bp, Homo sapien
cgtaaagctctgttggtcctcacgc

SEQ ID NO: 781457 - DNA, 25 bp, Homo sapien
ccccgtaaagctctgttggtcctca

SEQ ID NO: 781458 - DNA, 25 bp, Homo sapien
cccgtaaagctctgttggtcctcac

SEQ ID NO: 781459 - DNA, 25 bp, Homo sapien
tgccatgtccgccaggggtcctggc

SEQ ID NO: 781460 - DNA, 25 bp, Homo sapien
ggtcctggccatgcctgcccgacca

SEQ ID NO: 781461 - DNA, 25 bp, Homo sapien
cttgtgggtgccatgtccgccaggg

SEQ ID NO: 781462 - DNA, 25 bp, Homo sapien
tgtccgccaggggtcctggccatgc

SEQ ID NO: 781463 - DNA, 25 bp, Homo sapien
ggacctccaggactttcattcttgt

SEQ ID NO: 781464 - DNA, 25 bp, Homo sapien
caggtgaggacctccaggactttca

SEQ ID NO: 781465 - DNA, 25 bp, Homo sapien
tgaggacctccaggactttcattct

SEQ ID NO: 781466 - DNA, 25 bp, Homo sapien
ggtgaggacctccaggactttcatt

SEQ ID NO: 781467 - DNA, 25 bp, Homo sapien
tccaggctggggtagaattgcaaca

SEQ ID NO: 781468 - DNA, 25 bp, Homo sapien
gctggggtagaattgcaacagcttg

SEQ ID NO: 781469 - DNA, 25 bp, Homo sapien
ctggggtagaattgcaacagcttgt

SEQ ID NO: 781470 - DNA, 25 bp, Homo sapien
aggctggggtagaattgcaacagct

SEQ ID NO: 781471 - DNA, 25 bp, Homo sapien
agggccagctatttcccgtgtctga

SEQ ID NO: 781472 - DNA, 25 bp, Homo sapien
ggcagggccagctatttcccgtgtc

SEQ ID NO: 781473 - DNA, 25 bp, Homo sapien
ggccagctatttcccgtgtctgagc

SEQ ID NO: 781474 - DNA, 25 bp, Homo sapien
caaggcagggccagctatttcccgt

SEQ ID NO: 781475 - DNA, 25 bp, Homo sapien
ggaagaaagacccagctaattgctt

SEQ ID NO: 781476 - DNA, 25 bp, Homo sapien
gcttcctccgacccgtgtctgcttc

SEQ ID NO: 781477 - DNA, 25 bp, Homo sapien
ggcttcctccgacccgtgtctgctt

SEQ ID NO: 781478 - DNA, 25 bp, Homo sapien
aggcttcctccgacccgtgtctgct

SEQ ID NO: 781479 - DNA, 25 bp, Homo sapien
gtaggcttcctccgacccgtgtctg

SEQ ID NO: 781480 - DNA, 25 bp, Homo sapien
ccattccccatcgtttgcccatctg

SEQ ID NO: 781481 - DNA, 25 bp, Homo sapien
tatgtgaccttaggccattccccat

SEQ ID NO: 781482 - DNA, 25 bp, Homo sapien
cattccccatcgtttgcccatctgt

SEQ ID NO: 781483 - DNA, 25 bp, Homo sapien
accttaggccattccccatcgtttg

SEQ ID NO: 781484 - DNA, 25 bp, Homo sapien
ttgtaatactccatggcaatggggt

SEQ ID NO: 781485 - DNA, 25 bp, Homo sapien
gtaatactccatggcaatggggtct

SEQ ID NO: 781486 - DNA, 25 bp, Homo sapien
gcttcgagaaccgcccccagttgta

SEQ ID NO: 781487 - DNA, 25 bp, Homo sapien
accgcccccagttgtaatactccat

SEQ ID NO: 781488 - DNA, 25 bp, Homo sapien
gcctggaggtatggcttctgccctg

SEQ ID NO: 781489 - DNA, 25 bp, Homo sapien
atggcttctgccctgagctcccaca

SEQ ID NO: 781490 - DNA, 25 bp, Homo sapien
tggcttctgccctgagctcccacac

SEQ ID NO: 781491 - DNA, 25 bp, Homo sapien
cctgcctggaggtatggcttctgcc

SEQ ID NO: 781492 - DNA, 25 bp, Homo sapien
tggttttctgcttgcaaatgagcac

SEQ ID NO: 781493 - DNA, 25 bp, Homo sapien
cacattctcgtaggaattggcatca

SEQ ID NO: 781494 - DNA, 25 bp, Homo sapien
aaatgagcacattctcgtaggaatt

SEQ ID NO: 781495 - DNA, 25 bp, Homo sapien
ggttttctgcttgcaaatgagcaca

SEQ ID NO: 781496 - DNA, 25 bp, Homo sapien
gtgacaggctgaggtcccctctgca

SEQ ID NO: 781497 - DNA, 25 bp, Homo sapien
gaggccacctatgccctcctgctgg

SEQ ID NO: 781498 - DNA, 25 bp, Homo sapien
cagagggacagagaccagaagtggg

SEQ ID NO: 781499 - DNA, 25 bp, Homo sapien
cctcatcttcttccggggaggcaga

SEQ ID NO: 781500 - DNA, 25 bp, Homo sapien
ccttcctggactcgcgccactgatg

SEQ ID NO: 781501 - DNA, 25 bp, Homo sapien
cttcctggactcgcgccactgatgg

SEQ ID NO: 781502 - DNA, 25 bp, Homo sapien
accttcctggactcgcgccactgat

SEQ ID NO: 781503 - DNA, 25 bp, Homo sapien
ggggatgcttctctctggagttgcc

SEQ ID NO: 781504 - DNA, 25 bp, Homo sapien
ttcccaccgggccaggggatgcttc

SEQ ID NO: 781505 - DNA, 25 bp, Homo sapien
ggcttcccaccgggccaggggatgc

SEQ ID NO: 781506 - DNA, 25 bp, Homo sapien
aggggatgcttctctctggagttgc

SEQ ID NO: 781507 - DNA, 25 bp, Homo sapien
cacctccccattcacgtaatccggt

SEQ ID NO: 781508 - DNA, 25 bp, Homo sapien
gcacctagagcaggacttgcccgta

SEQ ID NO: 781509 - DNA, 25 bp, Homo sapien
tctgtttccagcattgaccgagtgc

SEQ ID NO: 781510 - DNA, 25 bp, Homo sapien
tcgctgagatgacggcctgggtctc

SEQ ID NO: 781511 - DNA, 25 bp, Homo sapien
agtcagtgggactctagggcatcca

SEQ ID NO: 781512 - DNA, 25 bp, Homo sapien
caacagccagaaaaattgaattaga

SEQ ID NO: 781513 - DNA, 25 bp, Homo sapien
tcccagtacccatttgtctgcccaa

SEQ ID NO: 781514 - DNA, 25 bp, Homo sapien
cagccagaaaaattgaattagaaac

SEQ ID NO: 781515 - DNA, 25 bp, Homo sapien
ctcccagtacccatttgtctgccca

SEQ ID NO: 781516 - DNA, 25 bp, Homo sapien
tttttgtgtttttgagacagagtct

SEQ ID NO: 781517 - DNA, 25 bp, Homo sapien
cacgcctggcccattttgtttgttt

SEQ ID NO: 781518 - DNA, 25 bp, Homo sapien
acgcctggcccattttgtttgtttg

SEQ ID NO: 781519 - DNA, 25 bp, Homo sapien
ccacgcctggcccattttgtttgtt

SEQ ID NO: 781520 - DNA, 25 bp, Homo sapien
tccttccaggagcaaccatggcagg

SEQ ID NO: 781521 - DNA, 25 bp, Homo sapien
tgggtgacagcttatcctaaatcct

SEQ ID NO: 781522 - DNA, 25 bp, Homo sapien
ggtccatgagcacagtggtccctct

SEQ ID NO: 781523 - DNA, 25 bp, Homo sapien
tccgtccataccaggagccgggtta

SEQ ID NO: 781524 - DNA, 25 bp, Homo sapien
cagctcttcccatgagacagtcaca

SEQ ID NO: 781525 - DNA, 25 bp, Homo sapien
acatttctgactcaaggtccctctg

SEQ ID NO: 781526 - DNA, 25 bp, Homo sapien
tgagacagtcacaacactgtttaat

SEQ ID NO: 781527 - DNA, 25 bp, Homo sapien
aacatttctgactcaaggtccctct

SEQ ID NO: 781528 - DNA, 25 bp, Homo sapien
tacaggtgccctattctgaggtaca

SEQ ID NO: 781529 - DNA, 25 bp, Homo sapien
tgaaaatagcggaaggagtgaactc

SEQ ID NO: 781530 - DNA, 25 bp, Homo sapien
tggccagttagagcagagacttcac

SEQ ID NO: 781531 - DNA, 25 bp, Homo sapien
ctggcaaggctgtgtcagaagacaa

SEQ ID NO: 781532 - DNA, 25 bp, Homo sapien
tcagacccagggtcgagcaatttct

SEQ ID NO: 781533 - DNA, 25 bp, Homo sapien
gacgtgtcttatttgatcccagcga

SEQ ID NO: 781534 - DNA, 25 bp, Homo sapien
cagcgacttccctgcacagaggttc

SEQ ID NO: 781535 - DNA, 25 bp, Homo sapien
ggagcactgtgctgttccccagtag

SEQ ID NO: 781536 - DNA, 25 bp, Homo sapien
gcagtccaccttctcaggatttggc

SEQ ID NO: 781537 - DNA, 25 bp, Homo sapien
catccttgacatgtgtttgctcctg

SEQ ID NO: 781538 - DNA, 25 bp, Homo sapien
caggcgctgaacaacctgcagtcca

SEQ ID NO: 781539 - DNA, 25 bp, Homo sapien
cgtgttcaaggtacaagcgctagtg

SEQ ID NO: 781540 - DNA, 25 bp, Homo sapien
taataaacgtcgagtaccgagcgcg

SEQ ID NO: 781541 - DNA, 25 bp, Homo sapien
ggaattcccatcttgcagccgagaa

SEQ ID NO: 781542 - DNA, 25 bp, Homo sapien
agagcgacctgctttctcggaaggc

SEQ ID NO: 781543 - DNA, 25 bp, Homo sapien
caatctggaaaagtgggcacgggca

SEQ ID NO: 781544 - DNA, 25 bp, Homo sapien
atattatgacaatttgggctatggg

SEQ ID NO: 781545 - DNA, 25 bp, Homo sapien
tgacaatttgggctatgggaggaaa

SEQ ID NO: 781546 - DNA, 25 bp, Homo sapien
ttatgacaatttgggctatgggagg

SEQ ID NO: 781547 - DNA, 25 bp, Homo sapien
caatttgggctatgggaggaaagat

SEQ ID NO: 781548 - DNA, 25 bp, Homo sapien
aagaccgctccatcagtttaaaggg

SEQ ID NO: 781549 - DNA, 25 bp, Homo sapien
aaaacactgtgttaagttgtgaatc

SEQ ID NO: 781550 - DNA, 25 bp, Homo sapien
taaaagacctgtgaataatgattga

SEQ ID NO: 781551 - DNA, 25 bp, Homo sapien
aaaccaactgcttggccagacgcgg

SEQ ID NO: 781552 - DNA, 25 bp, Homo sapien
tccggtgcccttgaagtgagtcagg

SEQ ID NO: 781553 - DNA, 25 bp, Homo sapien
gatattgattgcttaaccttcccgg

SEQ ID NO: 781554 - DNA, 25 bp, Homo sapien
tgtgccgctgatgggcgatgagtcc

SEQ ID NO: 781555 - DNA, 25 bp, Homo sapien
gatgagtccgggactccggtgccct

SEQ ID NO: 781556 - DNA, 25 bp, Homo sapien
tctctccaagtttcttgtcggcctg

SEQ ID NO: 781557 - DNA, 25 bp, Homo sapien
tgcatcaagggtgcccgcttgccca

SEQ ID NO: 781558 - DNA, 25 bp, Homo sapien
tgtctctccaagtttcttgtcggcc

SEQ ID NO: 781559 - DNA, 25 bp, Homo sapien
ctactgcatcaagggtgcccgcttg

SEQ ID NO: 781560 - DNA, 25 bp, Homo sapien
cctgcagggtcactgggctggtgcc

SEQ ID NO: 781561 - DNA, 25 bp, Homo sapien
cctgggcagggaggaacaccagcat

SEQ ID NO: 781562 - DNA, 25 bp, Homo sapien
tgcagggtcactgggctggtgccct

SEQ ID NO: 781563 - DNA, 25 bp, Homo sapien
cctccctgcagggtcactgggctgg

SEQ ID NO: 781564 - DNA, 25 bp, Homo sapien
taaaggaaggccatagtagctctct

SEQ ID NO: 781565 - DNA, 25 bp, Homo sapien
ctgccaggtgatagggggacttccc

SEQ ID NO: 781566 - DNA, 25 bp, Homo sapien
agcccagtggtaaaggaaggccata

SEQ ID NO: 781567 - DNA, 25 bp, Homo sapien
gtggtaaaggaaggccatagtagct

SEQ ID NO: 781568 - DNA, 25 bp, Homo sapien
cttggggtatatcggtcttggagga

SEQ ID NO: 781569 - DNA, 25 bp, Homo sapien
tggggtatatcggtcttggaggaag

SEQ ID NO: 781570 - DNA, 25 bp, Homo sapien
ggtatatcggtcttggaggaagctc

SEQ ID NO: 781571 - DNA, 25 bp, Homo sapien
gggtatatcggtcttggaggaagct

SEQ ID NO: 781572 - DNA, 25 bp, Homo sapien
ttgggaataattttcgagccagagc

SEQ ID NO: 781573 - DNA, 25 bp, Homo sapien
gcctcacgggaggatttttcatggg

SEQ ID NO: 781574 - DNA, 25 bp, Homo sapien
tgctgacgccggctgtgaccagcag

SEQ ID NO: 781575 - DNA, 25 bp, Homo sapien
cattttcttgctgacgccggctgtg

SEQ ID NO: 781576 - DNA, 25 bp, Homo sapien
cgcgtttggtgaaacgcatcctcca

SEQ ID NO: 781577 - DNA, 25 bp, Homo sapien
atcgcgtttggtgaaacgcatcctc

SEQ ID NO: 781578 - DNA, 25 bp, Homo sapien
gcgtttggtgaaacgcatcctccag

SEQ ID NO: 781579 - DNA, 25 bp, Homo sapien
cgtttggtgaaacgcatcctccagc

SEQ ID NO: 781580 - DNA, 25 bp, Homo sapien
cggccgagccgagctgagcgcccgc

SEQ ID NO: 781581 - DNA, 25 bp, Homo sapien
cgcggagccagcggagccagcggag

SEQ ID NO: 781582 - DNA, 25 bp, Homo sapien
ctgggaaggcgggaggcgcgcaccg

SEQ ID NO: 781583 - DNA, 25 bp, Homo sapien
ggccgagccgagctgagcgcccgcg

SEQ ID NO: 781584 - DNA, 25 bp, Homo sapien
ggggatccccgcgataggtgctcag

SEQ ID NO: 781585 - DNA, 25 bp, Homo sapien
gatccccgcgataggtgctcagggc

SEQ ID NO: 781586 - DNA, 25 bp, Homo sapien
ccggggatccccgcgataggtgctc

SEQ ID NO: 781587 - DNA, 25 bp, Homo sapien
ggatccccgcgataggtgctcaggg

SEQ ID NO: 781588 - DNA, 25 bp, Homo sapien
gcgctggggggcgaggatgctgcgg

SEQ ID NO: 781589 - DNA, 25 bp, Homo sapien
aggaagccactctgtacggcagcaa

SEQ ID NO: 781590 - DNA, 25 bp, Homo sapien
tagacagcagatgccggaaagcgat

SEQ ID NO: 781591 - DNA, 25 bp, Homo sapien
ttgaacccgggctgttaagctccag

SEQ ID NO: 781592 - DNA, 25 bp, Homo sapien
tctgaactcttcaccgccaaggtag

SEQ ID NO: 781593 - DNA, 25 bp, Homo sapien
tggcctggcggccatccagatagtg

SEQ ID NO: 781594 - DNA, 25 bp, Homo sapien
agggtgcccggctgtctgtactgct

SEQ ID NO: 781595 - DNA, 25 bp, Homo sapien
gggatagggccttgccccagcatca

SEQ ID NO: 781596 - DNA, 25 bp, Homo sapien
gggataaatcccgagctgccctgag

SEQ ID NO: 781597 - DNA, 25 bp, Homo sapien
atcaaccagtgcctgtacaaacaaa

SEQ ID NO: 781598 - DNA, 25 bp, Homo sapien
tcccatataacccaaccacccaaga

SEQ ID NO: 781599 - DNA, 25 bp, Homo sapien
tcaaccagtgcctgtacaaacaaaa

SEQ ID NO: 781600 - DNA, 25 bp, Homo sapien
agtaaaatctccatcaaccagtgcc

SEQ ID NO: 781601 - DNA, 25 bp, Homo sapien
tgacccgattcccactcctagaggg

SEQ ID NO: 781602 - DNA, 25 bp, Homo sapien
tatgacttatgtgggttgacccgat

SEQ ID NO: 781603 - DNA, 25 bp, Homo sapien
tttccccatccttggttcatatgac

SEQ ID NO: 781604 - DNA, 25 bp, Homo sapien
cagcctctgagtaagtcagactaca

SEQ ID NO: 781605 - DNA, 25 bp, Homo sapien
cctggtgtgcagttacctgcctcaa

SEQ ID NO: 781606 - DNA, 25 bp, Homo sapien
tatatcctggtgtgcagttacctgc

SEQ ID NO: 781607 - DNA, 25 bp, Homo sapien
cctcttatatcctggtgtgcagtta

SEQ ID NO: 781608 - DNA, 25 bp, Homo sapien
ggtgtgcagttacctgcctcaactc

SEQ ID NO: 781609 - DNA, 25 bp, Homo sapien
tcacgtcctctctgccatcttcact

SEQ ID NO: 781610 - DNA, 25 bp, Homo sapien
cgtcctctctgccatcttcactcac

SEQ ID NO: 781611 - DNA, 25 bp, Homo sapien
acgtcctctctgccatcttcactca

SEQ ID NO: 781612 - DNA, 25 bp, Homo sapien
cacgtcctctctgccatcttcactc

SEQ ID NO: 781613 - DNA, 25 bp, Homo sapien
tgggcaggtggacaagggtgagtgc

SEQ ID NO: 781614 - DNA, 25 bp, Homo sapien
ctgggcaggtggacaagggtgagtg

SEQ ID NO: 781615 - DNA, 25 bp, Homo sapien
gcaggtggacaagggtgagtgctgg

SEQ ID NO: 781616 - DNA, 25 bp, Homo sapien
ggcaggtggacaagggtgagtgctg

SEQ ID NO: 781617 - DNA, 25 bp, Homo sapien
acccagtagatgtccggcccatggg

SEQ ID NO: 781618 - DNA, 25 bp, Homo sapien
aggatgaagctgacccagtagatgt

SEQ ID NO: 781619 - DNA, 25 bp, Homo sapien
caccgccgccgaggatgaagctgac

SEQ ID NO: 781620 - DNA, 25 bp, Homo sapien
tggggctggagtgcttccccccacg

SEQ ID NO: 781621 - DNA, 25 bp, Homo sapien
gactcaaactctactgctcaagcga

SEQ ID NO: 781622 - DNA, 25 bp, Homo sapien
catcctggtcaatataatgagatcc

SEQ ID NO: 781623 - DNA, 25 bp, Homo sapien
atcctggtcaatataatgagatcct

SEQ ID NO: 781624 - DNA, 25 bp, Homo sapien
tcctggtcaatataatgagatcctg

SEQ ID NO: 781625 - DNA, 25 bp, Homo sapien
acgtcagggacattaggaggcagcc

SEQ ID NO: 781626 - DNA, 25 bp, Homo sapien
tggagaagcccgtggccaggccacc

SEQ ID NO: 781627 - DNA, 25 bp, Homo sapien
ctggaccacgtcagggacattagga

SEQ ID NO: 781628 - DNA, 25 bp, Homo sapien
tcagatcgatcctggaccacgtcag

SEQ ID NO: 781629 - DNA, 25 bp, Homo sapien
cctaggtgttgtgcaagtggtctcc

SEQ ID NO: 781630 - DNA, 25 bp, Homo sapien
tggcccctatgtgggacctaggtgt

SEQ ID NO: 781631 - DNA, 25 bp, Homo sapien
ggccctcagctgttgacccgagacc

SEQ ID NO: 781632 - DNA, 25 bp, Homo sapien
ttgtgcaagtggtctccgagacccc

SEQ ID NO: 781633 - DNA, 25 bp, Homo sapien
cgctgtctgagaggttggatcccga

SEQ ID NO: 781634 - DNA, 25 bp, Homo sapien
ttggagggccgcgtgaagataccct

SEQ ID NO: 781635 - DNA, 25 bp, Homo sapien
tggccgtgcccgaatgcaatgacag

SEQ ID NO: 781636 - DNA, 25 bp, Homo sapien
tcttcacggagctgttgaggacgct

SEQ ID NO: 781637 - DNA, 25 bp, Homo sapien
ccatgtttatctgaacctaaatatt

SEQ ID NO: 781638 - DNA, 25 bp, Homo sapien
tatctgaacctaaatatttctttct

SEQ ID NO: 781639 - DNA, 25 bp, Homo sapien
ttaccatgtttatctgaacctaaat

SEQ ID NO: 781640 - DNA, 25 bp, Homo sapien
taaatgtgtatgtttatttaccatg

SEQ ID NO: 781641 - DNA, 25 bp, Homo sapien
tgtcctgactcagccacctgaggag

SEQ ID NO: 781642 - DNA, 25 bp, Homo sapien
ctgtgcatggccagtgttttgtttt

SEQ ID NO: 781643 - DNA, 25 bp, Homo sapien
aagtgactgtcctgactcagccacc

SEQ ID NO: 781644 - DNA, 25 bp, Homo sapien
cactgtgcatggccagtgttttgtt

SEQ ID NO: 781645 - DNA, 25 bp, Homo sapien
ccacgtaccgcaccacgccagtctt

SEQ ID NO: 781646 - DNA, 25 bp, Homo sapien
accacgccagtcttcgtcccgccaa

SEQ ID NO: 781647 - DNA, 25 bp, Homo sapien
gtctgtctcccccacgtaccgcacc

SEQ ID NO: 781648 - DNA, 25 bp, Homo sapien
cgccaccgccccatcattcttccca

SEQ ID NO: 781649 - DNA, 25 bp, Homo sapien
ctcgtgcctcagctacctaagtagc

SEQ ID NO: 781650 - DNA, 25 bp, Homo sapien
gtgattctcgtgcctcagctaccta

SEQ ID NO: 781651 - DNA, 25 bp, Homo sapien
tgcaaccgacgcctccccagttcaa

SEQ ID NO: 781652 - DNA, 25 bp, Homo sapien
tcactgcaaccgacgcctccccagt

SEQ ID NO: 781653 - DNA, 25 bp, Homo sapien
ctgacggagctgatggaggaactgc

SEQ ID NO: 781654 - DNA, 25 bp, Homo sapien
atcactttgtggatgggcgcgaaga

SEQ ID NO: 781655 - DNA, 25 bp, Homo sapien
gatgggcgcgaagagaccaaacttg

SEQ ID NO: 781656 - DNA, 25 bp, Homo sapien
gggaagccgatacggatcactttgt

SEQ ID NO: 781657 - DNA, 25 bp, Homo sapien
cacctcgcagatgtggcttgtggcc

SEQ ID NO: 781658 - DNA, 25 bp, Homo sapien
ccttgagcagggcaatctccttctc

SEQ ID NO: 781659 - DNA, 25 bp, Homo sapien
tcagcccgttccaggtctcgttcag

SEQ ID NO: 781660 - DNA, 25 bp, Homo sapien
tgcgggcgtagcgtgaagaggtctc

SEQ ID NO: 781661 - DNA, 25 bp, Homo sapien
ccaccttctctttccgcacgctctc

SEQ ID NO: 781662 - DNA, 25 bp, Homo sapien
tttccgcacgctctccacgagcagc

SEQ ID NO: 781663 - DNA, 25 bp, Homo sapien
acgctctccacgagcagccgggctc

SEQ ID NO: 781664 - DNA, 25 bp, Homo sapien
tctccacgagcagccgggctcgctg

SEQ ID NO: 781665 - DNA, 25 bp, Homo sapien
tttgcccagagcaacgggattcacc

SEQ ID NO: 781666 - DNA, 25 bp, Homo sapien
gaggcgaggccatcaaaatgtccca

SEQ ID NO: 781667 - DNA, 25 bp, Homo sapien
aaatgtcccacagtcctggaaagct

SEQ ID NO: 781668 - DNA, 25 bp, Homo sapien
ccagaatccagaggcgaggccatca

SEQ ID NO: 781669 - DNA, 25 bp, Homo sapien
tccaggtctcccttggtgatggact

SEQ ID NO: 781670 - DNA, 25 bp, Homo sapien
tccacgcggaactgcagatcctcca

SEQ ID NO: 781671 - DNA, 25 bp, Homo sapien
gcggaactgcagatcctccaccttc

SEQ ID NO: 781672 - DNA, 25 bp, Homo sapien
aggtctcccttggtgatggactcct

SEQ ID NO: 781673 - DNA, 25 bp, Homo sapien
gttccagctccccaatgcgcgcgtg

SEQ ID NO: 781674 - DNA, 25 bp, Homo sapien
cccaatgcgcgcgtgctccagctgc

SEQ ID NO: 781675 - DNA, 25 bp, Homo sapien
tgtccgctaattctcggagcagccg

SEQ ID NO: 781676 - DNA, 25 bp, Homo sapien
cctgttgtccgctaattctcggagc

SEQ ID NO: 781677 - DNA, 25 bp, Homo sapien
tctccttcacgtgcatggcggtctc

SEQ ID NO: 781678 - DNA, 25 bp, Homo sapien
catgttctcgctggtggcctgctga

SEQ ID NO: 781679 - DNA, 25 bp, Homo sapien
agtttttccagctcgtgcacacgca

SEQ ID NO: 781680 - DNA, 25 bp, Homo sapien
ttgaggaactcgatagcctgcgcct

SEQ ID NO: 781681 - DNA, 25 bp, Homo sapien
cacagtttccttcgtcctgatcgtc

SEQ ID NO: 781682 - DNA, 25 bp, Homo sapien
tccacagtttccttcgtcctgatcg

SEQ ID NO: 781683 - DNA, 25 bp, Homo sapien
tcctgatcgtctcctctgaaatgtc

SEQ ID NO: 781684 - DNA, 25 bp, Homo sapien
cttcgtcctgatcgtctcctctgaa

SEQ ID NO: 781685 - DNA, 25 bp, Homo sapien
caaacctgcacatgtctattttatg

SEQ ID NO: 781686 - DNA, 25 bp, Homo sapien
tggcacatgaagagaataacaagtc

SEQ ID NO: 781687 - DNA, 25 bp, Homo sapien
gacaaagcttgactaattaaaacat

SEQ ID NO: 781688 - DNA, 25 bp, Homo sapien
agaattttgataaagcagagaagaa

SEQ ID NO: 781689 - DNA, 25 bp, Homo sapien
tgagcatctcggtctgggaggtcaa

SEQ ID NO: 781690 - DNA, 25 bp, Homo sapien
ttgggccctgagcatctcggtctgg

SEQ ID NO: 781691 - DNA, 25 bp, Homo sapien
tgtccctcttgttcagcttgtcctg

SEQ ID NO: 781692 - DNA, 25 bp, Homo sapien
gaggtcaaggctgtcacctctttgt

SEQ ID NO: 781693 - DNA, 25 bp, Homo sapien
tggcagctgaatggcacggccccag

SEQ ID NO: 781694 - DNA, 25 bp, Homo sapien
attggcagctgaatggcacggcccc

SEQ ID NO: 781695 - DNA, 25 bp, Homo sapien
cagctgaatggcacggccccagtga

SEQ ID NO: 781696 - DNA, 25 bp, Homo sapien
taattggcagctgaatggcacggcc

SEQ ID NO: 781697 - DNA, 25 bp, Homo sapien
cttttttggggccaattctgccttg

SEQ ID NO: 781698 - DNA, 25 bp, Homo sapien
tttttggggccaattctgccttgta

SEQ ID NO: 781699 - DNA, 25 bp, Homo sapien
ttctcgcctgacttacacttgctct

SEQ ID NO: 781700 - DNA, 25 bp, Homo sapien
tgggtcttccgggacacggtctcca

SEQ ID NO: 781701 - DNA, 25 bp, Homo sapien
tggcccgaggcgtcatgggtcttcc

SEQ ID NO: 781702 - DNA, 25 bp, Homo sapien
ctggctgatgaggactagctggccc

SEQ ID NO: 781703 - DNA, 25 bp, Homo sapien
gcaacacccgcagttcgttcaggct

SEQ ID NO: 781704 - DNA, 25 bp, Homo sapien
ggtcagcttttcacgcaggccccgg

SEQ ID NO: 781705 - DNA, 25 bp, Homo sapien
gggagtgacgattggcctccagcag

SEQ ID NO: 781706 - DNA, 25 bp, Homo sapien
cagccttgtgtacctcacggctcag

SEQ ID NO: 781707 - DNA, 25 bp, Homo sapien
tcgatgagggagtagcgcctctgat

SEQ ID NO: 781708 - DNA, 25 bp, Homo sapien
tgggccttgtcagggcagctcctca

SEQ ID NO: 781709 - DNA, 25 bp, Homo sapien
ctctgatccgacagggatttctctt

SEQ ID NO: 781710 - DNA, 25 bp, Homo sapien
gcgtcctccgtgctcatcagctggt

SEQ ID NO: 781711 - DNA, 25 bp, Homo sapien
ctgctggtggatgccgtttgcagaa

SEQ ID NO: 781712 - DNA, 25 bp, Homo sapien
tttgcagaaccggaattgccgatgg

SEQ ID NO: 781713 - DNA, 25 bp, Homo sapien
ctgagctttgtcctgctggtggatg

SEQ ID NO: 781714 - DNA, 25 bp, Homo sapien
tggatgccgtttgcagaaccggaat

SEQ ID NO: 781715 - DNA, 25 bp, Homo sapien
aatcaagtttgcctgcaacagcacc

SEQ ID NO: 781716 - DNA, 25 bp, Homo sapien
tgtattcttagtgacgtttcaagga

SEQ ID NO: 781717 - DNA, 25 bp, Homo sapien
aagagcagggtgaatctggaatcaa

SEQ ID NO: 781718 - DNA, 25 bp, Homo sapien
cctgagggaccctactgtaaagctt

SEQ ID NO: 781719 - DNA, 25 bp, Homo sapien
ctcctgtttctagcgagcatctgtg

SEQ ID NO: 781720 - DNA, 25 bp, Homo sapien
atcacactaactcctctgaggctgg

SEQ ID NO: 781721 - DNA, 25 bp, Homo sapien
tgaccccatgtgtctcgcagggtgg

SEQ ID NO: 781722 - DNA, 25 bp, Homo sapien
ggccaggaggacaaaatcacactaa

SEQ ID NO: 781723 - DNA, 25 bp, Homo sapien
tttgcagtatctgtaggcacggtcc

SEQ ID NO: 781724 - DNA, 25 bp, Homo sapien
gacagggccgctaagatggtcctca

SEQ ID NO: 781725 - DNA, 25 bp, Homo sapien
gaacgtggtgtgtacataaggaccc

SEQ ID NO: 781726 - DNA, 25 bp, Homo sapien
tcacactctctgtagaaggctgggc

SEQ ID NO: 781727 - DNA, 25 bp, Homo sapien
caggtggcactcatgagggcgatct

SEQ ID NO: 781728 - DNA, 25 bp, Homo sapien
tctgggccgttcctatgaattgcac

SEQ ID NO: 781729 - DNA, 25 bp, Homo sapien
gcttctccctctggtccactgatgg

SEQ ID NO: 781730 - DNA, 25 bp, Homo sapien
tgtcctgtgcgttacgggaaagccg

SEQ ID NO: 781731 - DNA, 25 bp, Homo sapien
tgttagtagactaatcggtgcccct

SEQ ID NO: 781732 - DNA, 25 bp, Homo sapien
gaaagagctgtatttgaccctgggt

SEQ ID NO: 781733 - DNA, 25 bp, Homo sapien
taaagcatcgcttctagacggctgt

SEQ ID NO: 781734 - DNA, 25 bp, Homo sapien
gaactgcatgcgagagctaccgaaa

SEQ ID NO: 781735 - DNA, 25 bp, Homo sapien
aagctttattgtcccgagcacagac

SEQ ID NO: 781736 - DNA, 25 bp, Homo sapien
acaagctttattgtcccgagcacag

SEQ ID NO: 781737 - DNA, 25 bp, Homo sapien
tattgtcccgagcacagactcgcca

SEQ ID NO: 781738 - DNA, 25 bp, Homo sapien
ctttattgtcccgagcacagactcg

SEQ ID NO: 781739 - DNA, 25 bp, Homo sapien
accagggtgcccaagaattgggaga

SEQ ID NO: 781740 - DNA, 25 bp, Homo sapien
attgggagagatcgagaagcccggg

SEQ ID NO: 781741 - DNA, 25 bp, Homo sapien
gcaccagggtgcccaagaattggga

SEQ ID NO: 781742 - DNA, 25 bp, Homo sapien
gaattgggagagatcgagaagcccg

SEQ ID NO: 781743 - DNA, 25 bp, Homo sapien
ctgggacaaggacagccccagatgt

SEQ ID NO: 781744 - DNA, 25 bp, Homo sapien
gggacaaggacagccccagatgtct

SEQ ID NO: 781745 - DNA, 25 bp, Homo sapien
tcctgggacaaggacagccccagat

SEQ ID NO: 781746 - DNA, 25 bp, Homo sapien
aggacagccccagatgtcttcagct

SEQ ID NO: 781747 - DNA, 25 bp, Homo sapien
tgtaatcccagtaagattgccagcc

SEQ ID NO: 781748 - DNA, 25 bp, Homo sapien
tgccgctgcctccttaattaatccg

SEQ ID NO: 781749 - DNA, 25 bp, Homo sapien
accaccctccattggctgccattta

SEQ ID NO: 781750 - DNA, 25 bp, Homo sapien
ctccttaattaatccgggagaatgg

SEQ ID NO: 781751 - DNA, 25 bp, Homo sapien
ctttctgcacgaccctccatactca

SEQ ID NO: 781752 - DNA, 25 bp, Homo sapien
ggccctaacttatcttaaatgggca

SEQ ID NO: 781753 - DNA, 25 bp, Homo sapien
aacctaggtgcagattggcccagag

SEQ ID NO: 781754 - DNA, 25 bp, Homo sapien
tccatactcatgaagccacaaacct

SEQ ID NO: 781755 - DNA, 25 bp, Homo sapien
catggcaaaggtgcaggaattccca

SEQ ID NO: 781756 - DNA, 25 bp, Homo sapien
gccagtagccagaaaatgcaccttg

SEQ ID NO: 781757 - DNA, 25 bp, Homo sapien
ttggactacagcaccacactgggac

SEQ ID NO: 781758 - DNA, 25 bp, Homo sapien
taagacacaaacagcctggagggtc

SEQ ID NO: 781759 - DNA, 25 bp, Homo sapien
gaacagaactaggttggaagcggcc

SEQ ID NO: 781760 - DNA, 25 bp, Homo sapien
tccccgtggtggtgtggtatccatc

SEQ ID NO: 781761 - DNA, 25 bp, Homo sapien
aatgctcgtgaggtttccccgtggt

SEQ ID NO: 781762 - DNA, 25 bp, Homo sapien
tcactgggcagtctgacatctgaat

SEQ ID NO: 781763 - DNA, 25 bp, Homo sapien
tgctaccaaggttgcgggctgtcca

SEQ ID NO: 781764 - DNA, 25 bp, Homo sapien
tgcacccagctgaagatatcgtttt

SEQ ID NO: 781765 - DNA, 25 bp, Homo sapien
gaaaatgggagcaatgaatcacggg

SEQ ID NO: 781766 - DNA, 25 bp, Homo sapien
gccaataagaatccccaaagccgtg

SEQ ID NO: 781767 - DNA, 25 bp, Homo sapien
cttaaggtgtgtgccatcgtgtcca

SEQ ID NO: 781768 - DNA, 25 bp, Homo sapien
ccagcctatgatcgcaatggcgtga

SEQ ID NO: 781769 - DNA, 25 bp, Homo sapien
cccaatggacaagggttgagtatca

SEQ ID NO: 781770 - DNA, 25 bp, Homo sapien
gtgatcgtcccaaatccttcctgag

SEQ ID NO: 781771 - DNA, 25 bp, Homo sapien
ctggaccacacctgccacctccacg

SEQ ID NO: 781772 - DNA, 25 bp, Homo sapien
cacctgccacctccacgcacacaga

SEQ ID NO: 781773 - DNA, 25 bp, Homo sapien
tggaccacacctgccacctccacgc

SEQ ID NO: 781774 - DNA, 25 bp, Homo sapien
ctgccacctccacgcacacagacat

SEQ ID NO: 781775 - DNA, 25 bp, Homo sapien
ggagactaatctccgggctgtcagc

SEQ ID NO: 781776 - DNA, 25 bp, Homo sapien
agcaggtgctcctgcccttgaagga

SEQ ID NO: 781777 - DNA, 25 bp, Homo sapien
taaaacacagtgcaaggatttgagc

SEQ ID NO: 781778 - DNA, 25 bp, Homo sapien
caactggcgttgtggccttggagac

SEQ ID NO: 781779 - DNA, 25 bp, Homo sapien
cagccccaccttcctggactcaagc

SEQ ID NO: 781780 - DNA, 25 bp, Homo sapien
tgcagccccaccttcctggactcaa

SEQ ID NO: 781781 - DNA, 25 bp, Homo sapien
gtacctgggactacatgattgcgcc

SEQ ID NO: 781782 - DNA, 25 bp, Homo sapien
gactacatgattgcgccaccatacc

SEQ ID NO: 781783 - DNA, 25 bp, Homo sapien
atgaccaaagccctcagccagagga

SEQ ID NO: 781784 - DNA, 25 bp, Homo sapien
ggctggtacctcaatccccatataa

SEQ ID NO: 781785 - DNA, 25 bp, Homo sapien
cagtctaaccagtgaggcattccca

SEQ ID NO: 781786 - DNA, 25 bp, Homo sapien
cagaaatagactccacggcggtgtg

SEQ ID NO: 781787 - DNA, 25 bp, Homo sapien
tgcccttagagacccgagataggct

SEQ ID NO: 781788 - DNA, 25 bp, Homo sapien
tggccggcatctatcacaggagaac

SEQ ID NO: 781789 - DNA, 25 bp, Homo sapien
cctgtctactagaatggctgctgga

SEQ ID NO: 781790 - DNA, 25 bp, Homo sapien
ttataagaagaggtcatggccgggc

SEQ ID NO: 781791 - DNA, 25 bp, Homo sapien
gaaattggaaccctgtgtgctgctg

SEQ ID NO: 781792 - DNA, 25 bp, Homo sapien
ctggtgagaacgtggggaaattgga

SEQ ID NO: 781793 - DNA, 25 bp, Homo sapien
aataggactaccagccaggtccagt

SEQ ID NO: 781794 - DNA, 25 bp, Homo sapien
aaaaacaagagctggtgagaacgtg

SEQ ID NO: 781795 - DNA, 25 bp, Homo sapien
ttctgcacccaatggggtagggaag

SEQ ID NO: 781796 - DNA, 25 bp, Homo sapien
atggggctggcaccacaaagggcac

SEQ ID NO: 781797 - DNA, 25 bp, Homo sapien
gcagacagggagtttctgcacccaa

SEQ ID NO: 781798 - DNA, 25 bp, Homo sapien
gctggcaccacaaagggcaccaggc

SEQ ID NO: 781799 - DNA, 25 bp, Homo sapien
tgatctcgtctttgcgggtgaacgc

SEQ ID NO: 781800 - DNA, 25 bp, Homo sapien
agttccagcggtcgggtccgcagcc

SEQ ID NO: 781801 - DNA, 25 bp, Homo sapien
agtctaaggcagacacgaggctggt

SEQ ID NO: 781802 - DNA, 25 bp, Homo sapien
acgtcacagcgcttacccagcaagg

SEQ ID NO: 781803 - DNA, 25 bp, Homo sapien
gactgtagctccttccgggcattca

SEQ ID NO: 781804 - DNA, 25 bp, Homo sapien
accacaaaggcgctctcatcgtgca

SEQ ID NO: 781805 - DNA, 25 bp, Homo sapien
cgttcagtttggacagcgctgagca

SEQ ID NO: 781806 - DNA, 25 bp, Homo sapien
cacaggccacctcggcgttcagttt

SEQ ID NO: 781807 - DNA, 25 bp, Homo sapien
ctctgccggagggagagaaaaccct

SEQ ID NO: 781808 - DNA, 25 bp, Homo sapien
cgaacactgtcttgaccaatctatg

SEQ ID NO: 781809 - DNA, 25 bp, Homo sapien
ttctgtgctctgacacgaacactgt

SEQ ID NO: 781810 - DNA, 25 bp, Homo sapien
atctatgccaccgttttctgctctg

SEQ ID NO: 781811 - DNA, 25 bp, Homo sapien
gaccgagggaggctacggcctccac

SEQ ID NO: 781812 - DNA, 25 bp, Homo sapien
aaagaacatcaaacacctcctctac

SEQ ID NO: 781813 - DNA, 25 bp, Homo sapien
atctgagccatgttccagggaggac

SEQ ID NO: 781814 - DNA, 25 bp, Homo sapien
tcctctaccatcttccgcagaaggt

SEQ ID NO: 781815 - DNA, 25 bp, Homo sapien
gaagcggatgcggtggctgtgttcc

SEQ ID NO: 781816 - DNA, 25 bp, Homo sapien
tgagcagcctctcatagggcagtgg

SEQ ID NO: 781817 - DNA, 25 bp, Homo sapien
cttcggaaggccaggccttcgggca

SEQ ID NO: 781818 - DNA, 25 bp, Homo sapien
tcatactcggctggccttcggaagg

SEQ ID NO: 781819 - DNA, 25 bp, Homo sapien
gaccccttgggaatcagggagacac

SEQ ID NO: 781820 - DNA, 25 bp, Homo sapien
gcaggccacagtcccgtgacccctt

SEQ ID NO: 781821 - DNA, 25 bp, Homo sapien
gggagacaccgttcagctccaccag

SEQ ID NO: 781822 - DNA, 25 bp, Homo sapien
agtcccgcccgccatcctcaagtgg

SEQ ID NO: 781823 - DNA, 25 bp, Homo sapien
agaagtcttgggcaccggtggcctt

SEQ ID NO: 781824 - DNA, 25 bp, Homo sapien
ctggcatgggccgactcaggcccag

SEQ ID NO: 781825 - DNA, 25 bp, Homo sapien
gcaggaaggtgcttcctgcttgagc

SEQ ID NO: 781826 - DNA, 25 bp, Homo sapien
cctgcttgagctctcggatggcgtg

SEQ ID NO: 781827 - DNA, 25 bp, Homo sapien
ttggagatcccagcagcaatgttac

SEQ ID NO: 781828 - DNA, 25 bp, Homo sapien
tgtcccaccccctagacttggagat

SEQ ID NO: 781829 - DNA, 25 bp, Homo sapien
tagacttggagatcccagcagcaat

SEQ ID NO: 781830 - DNA, 25 bp, Homo sapien
cccctagacttggagatcccagcag

SEQ ID NO: 781831 - DNA, 25 bp, Homo sapien
gacatggctccttccaacctaagag

SEQ ID NO: 781832 - DNA, 25 bp, Homo sapien
ggaggctgtcccctgcatgagtgac

SEQ ID NO: 781833 - DNA, 25 bp, Homo sapien
cgcaggcgtcctcttagtccaaggc

SEQ ID NO: 781834 - DNA, 25 bp, Homo sapien
ggccaaggacatcattcacagatgg

SEQ ID NO: 781835 - DNA, 25 bp, Homo sapien
tacaggtatgcctggcaagacccag

SEQ ID NO: 781836 - DNA, 25 bp, Homo sapien
tatagcacgtgatgtggatctccca

SEQ ID NO: 781837 - DNA, 25 bp, Homo sapien
tctgggaagcaggtaccactagcat

SEQ ID NO: 781838 - DNA, 25 bp, Homo sapien
ccaggatgcctagccactaagtaga

SEQ ID NO: 781839 - DNA, 25 bp, Homo sapien
tgtcatggacgatggagaagagaat

SEQ ID NO: 781840 - DNA, 25 bp, Homo sapien
ctgacttgtcatggacgatggagaa

SEQ ID NO: 781841 - DNA, 25 bp, Homo sapien
tggagaagagaatgcgcttggaggc

SEQ ID NO: 781842 - DNA, 25 bp, Homo sapien
aatgcgcttggaggcatggacgttc

SEQ ID NO: 781843 - DNA, 25 bp, Homo sapien
ggagcgtgttgatgtcctcggtttc

SEQ ID NO: 781844 - DNA, 25 bp, Homo sapien
aaacaggatctgcacacactcccgg

SEQ ID NO: 781845 - DNA, 25 bp, Homo sapien
cccggagcgtgttgatgtcctcggt

SEQ ID NO: 781846 - DNA, 25 bp, Homo sapien
ttaaacaggatctgcacacactccc

SEQ ID NO: 781847 - DNA, 25 bp, Homo sapien
tggggccacacggcgggccgcgccg

SEQ ID NO: 781848 - DNA, 25 bp, Homo sapien
agaccacaggtgtgtggttaatttt

SEQ ID NO: 781849 - DNA, 25 bp, Homo sapien
agctaagaccacaggtgtgtggtta

SEQ ID NO: 781850 - DNA, 25 bp, Homo sapien
ctaagaccacaggtgtgtggttaat

SEQ ID NO: 781851 - DNA, 25 bp, Homo sapien
tcagcctgcaagtagctaagaccac

SEQ ID NO: 781852 - DNA, 25 bp, Homo sapien
caggcagggggcgtcaagttcccaa

SEQ ID NO: 781853 - DNA, 25 bp, Homo sapien
cacagagagggaaccatcagggtac

SEQ ID NO: 781854 - DNA, 25 bp, Homo sapien
cagggggcgtcaagttcccaatgtg

SEQ ID NO: 781855 - DNA, 25 bp, Homo sapien
cagagagggaaccatcagggtaccc

SEQ ID NO: 781856 - DNA, 25 bp, Homo sapien
cctgtgaatttgtctccgtctggtt

SEQ ID NO: 781857 - DNA, 25 bp, Homo sapien
agccccagcccttgagcaattggtc

SEQ ID NO: 781858 - DNA, 25 bp, Homo sapien
tttgtctccgtctggttcatctggt

SEQ ID NO: 781859 - DNA, 25 bp, Homo sapien
tgagcaattggtcctttgagtgcct

SEQ ID NO: 781860 - DNA, 25 bp, Homo sapien
agtggatactatggcgctcctccag

SEQ ID NO: 781861 - DNA, 25 bp, Homo sapien
gactccataagtgcaggggcgcttg

SEQ ID NO: 781862 - DNA, 25 bp, Homo sapien
acaggcaatcttccggtagggcacg

SEQ ID NO: 781863 - DNA, 25 bp, Homo sapien
gatcttgtccgggatgcccacgatc

SEQ ID NO: 781864 - DNA, 25 bp, Homo sapien
tggccagcctctaagcacagttctg

SEQ ID NO: 781865 - DNA, 25 bp, Homo sapien
gacagcatcagggacttacaccatt

SEQ ID NO: 781866 - DNA, 25 bp, Homo sapien
ggcccacatgataggcactgaccaa

SEQ ID NO: 781867 - DNA, 25 bp, Homo sapien
tgtcagggagcggtcagatgccctc

SEQ ID NO: 781868 - DNA, 25 bp, Homo sapien
cagcattggttgtcgttttattatt

SEQ ID NO: 781869 - DNA, 25 bp, Homo sapien
agtcagcattggttgtcgttttatt

SEQ ID NO: 781870 - DNA, 25 bp, Homo sapien
gtcagcattggttgtcgttttatta

SEQ ID NO: 781871 - DNA, 25 bp, Homo sapien
gatggagacacagtcagcattggtt

SEQ ID NO: 781872 - DNA, 25 bp, Homo sapien
caatgtccaagggaggacccagcag

SEQ ID NO: 781873 - DNA, 25 bp, Homo sapien
gtgcaaggctgacggtgacttctgt

SEQ ID NO: 781874 - DNA, 25 bp, Homo sapien
tgacttctgttttcacgctggaggc

SEQ ID NO: 781875 - DNA, 25 bp, Homo sapien
gtcccagcctgcatacctgacaatg

SEQ ID NO: 781876 - DNA, 25 bp, Homo sapien
agtggctggaccacggacagagcct

SEQ ID NO: 781877 - DNA, 25 bp, Homo sapien
caggcagctgattatggaggtacag

SEQ ID NO: 781878 - DNA, 25 bp, Homo sapien
cagggtggtgcctggtggtgggtca

SEQ ID NO: 781879 - DNA, 25 bp, Homo sapien
ttatggaggtacagcttccctgcca

SEQ ID NO: 781880 - DNA, 25 bp, Homo sapien
aaatgatgcatggaacctctagcca

SEQ ID NO: 781881 - DNA, 25 bp, Homo sapien
ggaacctctagccaggaaaatgagg

SEQ ID NO: 781882 - DNA, 25 bp, Homo sapien
gactggagttctggcattctttccc

SEQ ID NO: 781883 - DNA, 25 bp, Homo sapien
tccaggactggagttctggcattct

SEQ ID NO: 781884 - DNA, 25 bp, Homo sapien
ccgatcgtggcagcacaaggtgaac

SEQ ID NO: 781885 - DNA, 25 bp, Homo sapien
tttagggacccaagtcatccaggta

SEQ ID NO: 781886 - DNA, 25 bp, Homo sapien
ggtctctcagcgtgaaaacaggagt

SEQ ID NO: 781887 - DNA, 25 bp, Homo sapien
tcttggagggtctaatctgctcaca

SEQ ID NO: 781888 - DNA, 25 bp, Homo sapien
tgtgaaaattcgctcatcaaacatc

SEQ ID NO: 781889 - DNA, 25 bp, Homo sapien
ctgtgaaaattcgctcatcaaacat

SEQ ID NO: 781890 - DNA, 25 bp, Homo sapien
tagagacctctgcagaggtgtcctc

SEQ ID NO: 781891 - DNA, 25 bp, Homo sapien
cagcttcgtggtgtctttggtaaac

SEQ ID NO: 781892 - DNA, 25 bp, Homo sapien
agcaaggtcaaggacggtggcccta

SEQ ID NO: 781893 - DNA, 25 bp, Homo sapien
ggtggccctagagacctctgcagag

SEQ ID NO: 781894 - DNA, 25 bp, Homo sapien
gggatcctaggcttggcacactggg

SEQ ID NO: 781895 - DNA, 25 bp, Homo sapien
agctctggggatcctaggcttggca

SEQ ID NO: 781896 - DNA, 25 bp, Homo sapien
cctaggcttggcacactgggggttt

SEQ ID NO: 781897 - DNA, 25 bp, Homo sapien
tctggggatcctaggcttggcacac

SEQ ID NO: 781898 - DNA, 25 bp, Homo sapien
gtcttcagacatgctgcccttgtct

SEQ ID NO: 781899 - DNA, 25 bp, Homo sapien
cacagtcttcagacatgctgccctt

SEQ ID NO: 781900 - DNA, 25 bp, Homo sapien
cagtcttcagacatgctgcccttgt

SEQ ID NO: 781901 - DNA, 25 bp, Homo sapien
ttcagacatgctgcccttgtctgac

SEQ ID NO: 781902 - DNA, 25 bp, Homo sapien
ctcaattttgatcggcctcagcccg

SEQ ID NO: 781903 - DNA, 25 bp, Homo sapien
gatcctctggctcaattttgatcgg

SEQ ID NO: 781904 - DNA, 25 bp, Homo sapien
cctgaatgatgtccagatcctctgg

SEQ ID NO: 781905 - DNA, 25 bp, Homo sapien
ctgggacggtgacctgaatgatgtc

SEQ ID NO: 781906 - DNA, 25 bp, Homo sapien
agaatcctccgatggcaggtgccca

SEQ ID NO: 781907 - DNA, 25 bp, Homo sapien
gaatcctccgatggcaggtgcccag

SEQ ID NO: 781908 - DNA, 25 bp, Homo sapien
ggatagctacgccacagactgctgt

SEQ ID NO: 781909 - DNA, 25 bp, Homo sapien
gtccccagtgattacgtttgcaaca

SEQ ID NO: 781910 - DNA, 25 bp, Homo sapien
actgctgtcaagtctggtcatgccc

SEQ ID NO: 781911 - DNA, 25 bp, Homo sapien
cagcctgagcttggcgtcaaccaaa

SEQ ID NO: 781912 - DNA, 25 bp, Homo sapien
ctatgctccccaggctggttgtaaa

SEQ ID NO: 781913 - DNA, 25 bp, Homo sapien
gtctcctcaatagctggaactagag

SEQ ID NO: 781914 - DNA, 25 bp, Homo sapien
atgctccccaggctggttgtaaact

SEQ ID NO: 781915 - DNA, 25 bp, Homo sapien
tgctatgctccccaggctggttgta

SEQ ID NO: 781916 - DNA, 25 bp, Homo sapien
gccgcgcgtcctcactcagaccttt

SEQ ID NO: 781917 - DNA, 25 bp, Homo sapien
ctcgggccgcgcgtcctcactcaga

SEQ ID NO: 781918 - DNA, 25 bp, Homo sapien
cgcgcgtcctcactcagacctttgt

SEQ ID NO: 781919 - DNA, 25 bp, Homo sapien
gggccgcgcgtcctcactcagacct

SEQ ID NO: 781920 - DNA, 25 bp, Homo sapien
aggcaaaaggcagtctgttgaggct

SEQ ID NO: 781921 - DNA, 25 bp, Homo sapien
aaggcaaaaggcagtctgttgaggc

SEQ ID NO: 781922 - DNA, 25 bp, Homo sapien
cgtatcgtgtgttgaagagcagctc

SEQ ID NO: 781923 - DNA, 25 bp, Homo sapien
acctgcttccgcaggggccggatca

SEQ ID NO: 781924 - DNA, 25 bp, Homo sapien
ggccggatcacgtcaccgtggctgt

SEQ ID NO: 781925 - DNA, 25 bp, Homo sapien
caggggccggatcacgtcaccgtgg

SEQ ID NO: 781926 - DNA, 25 bp, Homo sapien
tcctccgggtgcatcagaaacttgg

SEQ ID NO: 781927 - DNA, 25 bp, Homo sapien
acaaacagctcctccgggtgcatca

SEQ ID NO: 781928 - DNA, 25 bp, Homo sapien
cagctcctccgggtgcatcagaaac

SEQ ID NO: 781929 - DNA, 25 bp, Homo sapien
gagcttggcgatcccgaagcagttg

SEQ ID NO: 781930 - DNA, 25 bp, Homo sapien
gagaaaagaaaggcctggtgccgtg

SEQ ID NO: 781931 - DNA, 25 bp, Homo sapien
gaaaagaaaggcctggtgccgtggc

SEQ ID NO: 781932 - DNA, 25 bp, Homo sapien
aaagaaaggcctggtgccgtggctc

SEQ ID NO: 781933 - DNA, 25 bp, Homo sapien
agagaaaagaaaggcctggtgccgt

SEQ ID NO: 781934 - DNA, 25 bp, Homo sapien
ggctctttgactccctcagtgagca

SEQ ID NO: 781935 - DNA, 25 bp, Homo sapien
ctctttgactccctcagtgagcagc

SEQ ID NO: 781936 - DNA, 25 bp, Homo sapien
tctttgactccctcagtgagcagct

SEQ ID NO: 781937 - DNA, 25 bp, Homo sapien
gggctctttgactccctcagtgagc

SEQ ID NO: 781938 - DNA, 25 bp, Homo sapien
gcagggcagggggagagaagccaag

SEQ ID NO: 781939 - DNA, 25 bp, Homo sapien
cagggcagggggagagaagccaagt

SEQ ID NO: 781940 - DNA, 25 bp, Homo sapien
gcagggggagagaagccaagtgagg

SEQ ID NO: 781941 - DNA, 25 bp, Homo sapien
gggcagggggagagaagccaagtga

SEQ ID NO: 781942 - DNA, 25 bp, Homo sapien
ttcaggctctcgtccaccagagggt

SEQ ID NO: 781943 - DNA, 25 bp, Homo sapien
tcaggctctcgtccaccagagggtc

SEQ ID NO: 781944 - DNA, 25 bp, Homo sapien
ggctctcgtccaccagagggtcccc

SEQ ID NO: 781945 - DNA, 25 bp, Homo sapien
tctcgtccaccagagggtccccgga

SEQ ID NO: 781946 - DNA, 25 bp, Homo sapien
ctgcaaagcgcaaaacgattatggg

SEQ ID NO: 781947 - DNA, 25 bp, Homo sapien
tgggctgttgagtgaaaaagcactt

SEQ ID NO: 781948 - DNA, 25 bp, Homo sapien
tgttgagtgaaaaagcacttggtga

SEQ ID NO: 781949 - DNA, 25 bp, Homo sapien
aacgattatgggtttgggctgttga

SEQ ID NO: 781950 - DNA, 25 bp, Homo sapien
ctcccttagtgtgttggcgatgtcg

SEQ ID NO: 781951 - DNA, 25 bp, Homo sapien
ttggcgatgtcgatccgtgagagcc

SEQ ID NO: 781952 - DNA, 25 bp, Homo sapien
cgatccgtgagagcctcgcgtcata

SEQ ID NO: 781953 - DNA, 25 bp, Homo sapien
tagtgtgttggcgatgtcgatccgt

SEQ ID NO: 781954 - DNA, 25 bp, Homo sapien
ccgggtacttgatgcccaaggcttc

SEQ ID NO: 781955 - DNA, 25 bp, Homo sapien
accgggtacttgatgcccaaggctt

SEQ ID NO: 781956 - DNA, 25 bp, Homo sapien
caggctttgggatgagtccttggaa

SEQ ID NO: 781957 - DNA, 25 bp, Homo sapien
gctttgggatgagtccttggaaagg

SEQ ID NO: 781958 - DNA, 25 bp, Homo sapien
aggctttgggatgagtccttggaaa

SEQ ID NO: 781959 - DNA, 25 bp, Homo sapien
ctttgggatgagtccttggaaaggc

SEQ ID NO: 781960 - DNA, 25 bp, Homo sapien
tggcattttggtctcacctcggctg

SEQ ID NO: 781961 - DNA, 25 bp, Homo sapien
tttggtctcacctcggctgcagaaa

SEQ ID NO: 781962 - DNA, 25 bp, Homo sapien
caagttagtctttactgagggtggc

SEQ ID NO: 781963 - DNA, 25 bp, Homo sapien
tgcaggcacagatgcgtcatccaag

SEQ ID NO: 781964 - DNA, 25 bp, Homo sapien
agggccaggcctgaagggccctgtc

SEQ ID NO: 781965 - DNA, 25 bp, Homo sapien
cagggccaggcctgaagggccctgt

SEQ ID NO: 781966 - DNA, 25 bp, Homo sapien
gccaggcctgaagggccctgtccat

SEQ ID NO: 781967 - DNA, 25 bp, Homo sapien
ggccaggcctgaagggccctgtcca

SEQ ID NO: 781968 - DNA, 25 bp, Homo sapien
cagtggggctgtacgggttcctccg

SEQ ID NO: 781969 - DNA, 25 bp, Homo sapien
gtgattggcgacaaggaaatgactc

SEQ ID NO: 781970 - DNA, 25 bp, Homo sapien
gaaatgactctcaagtcttgggcag

SEQ ID NO: 781971 - DNA, 25 bp, Homo sapien
tgtgcctgtgtgtgattggcgacaa

SEQ ID NO: 781972 - DNA, 25 bp, Homo sapien
ggaaatgactctcaagtcttgggca

SEQ ID NO: 781973 - DNA, 25 bp, Homo sapien
atggcccactctgccacttcagaag

SEQ ID NO: 781974 - DNA, 25 bp, Homo sapien
tgggcccggcagtagggcgtctcgt

SEQ ID NO: 781975 - DNA, 25 bp, Homo sapien
agaaaggaggcgtcgggccaactct

SEQ ID NO: 781976 - DNA, 25 bp, Homo sapien
agggcgtctcgtctgcccacaaagg

SEQ ID NO: 781977 - DNA, 25 bp, Homo sapien
ccttgtccaaatccatgcagacaac

SEQ ID NO: 781978 - DNA, 25 bp, Homo sapien
gcagacaacagtgatggagtcctgg

SEQ ID NO: 781979 - DNA, 25 bp, Homo sapien
gcctgcagggaagcaacagcacatt

SEQ ID NO: 781980 - DNA, 25 bp, Homo sapien
aaggaccagctcctagagcctgcag

SEQ ID NO: 781981 - DNA, 25 bp, Homo sapien
gtggcttggcctcccgtgcgcaagc

SEQ ID NO: 781982 - DNA, 25 bp, Homo sapien
gctgccagaatggaggccctgttcc

SEQ ID NO: 781983 - DNA, 25 bp, Homo sapien
tgccagaatggaggccctgttcccc

SEQ ID NO: 781984 - DNA, 25 bp, Homo sapien
cccgtgcgcaagctgccagaatgga

SEQ ID NO: 781985 - DNA, 25 bp, Homo sapien
ccaggtaaccgtcacggcctatctg

SEQ ID NO: 781986 - DNA, 25 bp, Homo sapien
gaaacagaccgtgtctgggagtgtg

SEQ ID NO: 781987 - DNA, 25 bp, Homo sapien
cgtcacggcctatctgctgcttgag

SEQ ID NO: 781988 - DNA, 25 bp, Homo sapien
actgcccaggtaaccgtcacggcct

SEQ ID NO: 781989 - DNA, 25 bp, Homo sapien
cccgagtctgttggcgtcatcttca

SEQ ID NO: 781990 - DNA, 25 bp, Homo sapien
tctccccgagtctgttggcgtcatc

SEQ ID NO: 781991 - DNA, 25 bp, Homo sapien
accttctccccgagtctgttggcgt

SEQ ID NO: 781992 - DNA, 25 bp, Homo sapien
aggatcaccttctccccgagtctgt

SEQ ID NO: 781993 - DNA, 25 bp, Homo sapien
tgggctgtcccggattagtttataa

SEQ ID NO: 781994 - DNA, 25 bp, Homo sapien
tagtttataagggaccagcaccggc

SEQ ID NO: 781995 - DNA, 25 bp, Homo sapien
gatgtcatcaggcagacccgtgacc

SEQ ID NO: 781996 - DNA, 25 bp, Homo sapien
gacccgtgacctccacggcgtctgg

SEQ ID NO: 781997 - DNA, 25 bp, Homo sapien
taatataacattgaaggcgggccgg

SEQ ID NO: 781998 - DNA, 25 bp, Homo sapien
tataacattgaaggcgggccgggta

SEQ ID NO: 781999 - DNA, 25 bp, Homo sapien
aacacataatataacattgaaggcg

SEQ ID NO: 782000 - DNA, 25 bp, Homo sapien
cataatataacattgaaggcgggcc

SEQ ID NO: 782001 - DNA, 25 bp, Homo sapien
ctgctccctgagatatgctgctgct

SEQ ID NO: 782002 - DNA, 25 bp, Homo sapien
gctccctgagatatgctgctgctgc

SEQ ID NO: 782003 - DNA, 25 bp, Homo sapien
ccctgagatatgctgctgctgctgc

SEQ ID NO: 782004 - DNA, 25 bp, Homo sapien
tccctgagatatgctgctgctgctg

SEQ ID NO: 782005 - DNA, 25 bp, Homo sapien
gcatcattgcagatttctgcaaagg

SEQ ID NO: 782006 - DNA, 25 bp, Homo sapien
ggcatcattgcagatttctgcaaag

SEQ ID NO: 782007 - DNA, 25 bp, Homo sapien
catcattgcagatttctgcaaaggg

SEQ ID NO: 782008 - DNA, 25 bp, Homo sapien
caggcggcccccaggtgcctagtga

SEQ ID NO: 782009 - DNA, 25 bp, Homo sapien
gcggcccccaggtgcctagtgaaag

SEQ ID NO: 782010 - DNA, 25 bp, Homo sapien
ccccaggtgcctagtgaaaggttct

SEQ ID NO: 782011 - DNA, 25 bp, Homo sapien
ttaatcagaaccatcatgccaggcg

SEQ ID NO: 782012 - DNA, 25 bp, Homo sapien
ttaatgacacagagtaagggcaggc

SEQ ID NO: 782013 - DNA, 25 bp, Homo sapien
tggggcaaatgtctcttcaactggt

SEQ ID NO: 782014 - DNA, 25 bp, Homo sapien
gggtctgtggtgaggcatagagacc

SEQ ID NO: 782015 - DNA, 25 bp, Homo sapien
gtctcttcaactggtggagaagtca

SEQ ID NO: 782016 - DNA, 25 bp, Homo sapien
gcctatattgttttttagggtctca

SEQ ID NO: 782017 - DNA, 25 bp, Homo sapien
gagccatcgaacctggcctatattg

SEQ ID NO: 782018 - DNA, 25 bp, Homo sapien
accgtgttgggcaggcagctcttga

SEQ ID NO: 782019 - DNA, 25 bp, Homo sapien
ttgtatttctgcatcattatgttgc

SEQ ID NO: 782020 - DNA, 25 bp, Homo sapien
tgcctgcctttgctaacaccgtatc

SEQ ID NO: 782021 - DNA, 25 bp, Homo sapien
gcctttgctaacaccgtatcctcat

SEQ ID NO: 782022 - DNA, 25 bp, Homo sapien
ctgcctgcctttgctaacaccgtat

SEQ ID NO: 782023 - DNA, 25 bp, Homo sapien
cctgcctttgctaacaccgtatcct

SEQ ID NO: 782024 - DNA, 25 bp, Homo sapien
ggaaaaggctgttgacactggaagc

SEQ ID NO: 782025 - DNA, 25 bp, Homo sapien
gggaaaaggctgttgacactggaag

SEQ ID NO: 782026 - DNA, 25 bp, Homo sapien
tcttgcgcttgggaatgctgctgtc

SEQ ID NO: 782027 - DNA, 25 bp, Homo sapien
ccgctttctcttgcgcttgggaatg

SEQ ID NO: 782028 - DNA, 25 bp, Homo sapien
tttctcttgcgcttgggaatgctgc

SEQ ID NO: 782029 - DNA, 25 bp, Homo sapien
tctcttgcgcttgggaatgctgctg

SEQ ID NO: 782030 - DNA, 25 bp, Homo sapien
ctgaatccgggttagaggacgagga

SEQ ID NO: 782031 - DNA, 25 bp, Homo sapien
gaggagacggaatttccttccgaga

SEQ ID NO: 782032 - DNA, 25 bp, Homo sapien
agaggagacggaatttccttccgag

SEQ ID NO: 782033 - DNA, 25 bp, Homo sapien
tgaatccgggttagaggacgaggaa

SEQ ID NO: 782034 - DNA, 25 bp, Homo sapien
agtgagatctggttggccgatgcca

SEQ ID NO: 782035 - DNA, 25 bp, Homo sapien
agtgcctgtgagtaccccacgagaa

SEQ ID NO: 782036 - DNA, 25 bp, Homo sapien
tgtctccagctctggtgcggctgaa

SEQ ID NO: 782037 - DNA, 25 bp, Homo sapien
gatgtgaattcctgcctgagtgcct

SEQ ID NO: 782038 - DNA, 25 bp, Homo sapien
ccacgagaaggatgggctacctctt

SEQ ID NO: 782039 - DNA, 25 bp, Homo sapien
tgatgcggaacaaacccaaaatgct

SEQ ID NO: 782040 - DNA, 25 bp, Homo sapien
ggactggattaggactccaggtgat

SEQ ID NO: 782041 - DNA, 25 bp, Homo sapien
cttggccccgcgggttcaagcgagt

SEQ ID NO: 782042 - DNA, 25 bp, Homo sapien
aaacccaaaatgcttagttctgctt

SEQ ID NO: 782043 - DNA, 25 bp, Homo sapien
taattaagaggtcccgggagctgca

SEQ ID NO: 782044 - DNA, 25 bp, Homo sapien
agtccaccatgtacattggccattg

SEQ ID NO: 782045 - DNA, 25 bp, Homo sapien
agtaattaagaggtcccgggagctg

SEQ ID NO: 782046 - DNA, 25 bp, Homo sapien
ggagctgcacgttcaggccggcata

SEQ ID NO: 782047 - DNA, 25 bp, Homo sapien
aaaactaaaaggcatcgatacatat

SEQ ID NO: 782048 - DNA, 25 bp, Homo sapien
gccttggtggcaggaatatagtgta

SEQ ID NO: 782049 - DNA, 25 bp, Homo sapien
ctgagtgaggtcctgattcagtact

SEQ ID NO: 782050 - DNA, 25 bp, Homo sapien
gatacatatccgaatatacattttg

SEQ ID NO: 782051 - DNA, 25 bp, Homo sapien
tgcgccctctccatgcacgggatgg

SEQ ID NO: 782052 - DNA, 25 bp, Homo sapien
tccatgcacgggatggcagtgcccg

SEQ ID NO: 782053 - DNA, 25 bp, Homo sapien
cggggcaggagccacttccggctct

SEQ ID NO: 782054 - DNA, 25 bp, Homo sapien
gctctggccgcggatctgagcggtg

SEQ ID NO: 782055 - DNA, 25 bp, Homo sapien
taaacagcatctgggcgcttctgcg

SEQ ID NO: 782056 - DNA, 25 bp, Homo sapien
gaaaagcggccctttgcacaagacc

SEQ ID NO: 782057 - DNA, 25 bp, Homo sapien
cagtaaggctttcccatcggataag

SEQ ID NO: 782058 - DNA, 25 bp, Homo sapien
tgcgaggaaaagagtcagtaaggct

SEQ ID NO: 782059 - DNA, 25 bp, Homo sapien
aatgacacattgtgtgacatgctct

SEQ ID NO: 782060 - DNA, 25 bp, Homo sapien
acaatgacacattgtgtgacatgct

SEQ ID NO: 782061 - DNA, 25 bp, Homo sapien
caatgacacattgtgtgacatgctc

SEQ ID NO: 782062 - DNA, 25 bp, Homo sapien
tagatatatcacataagtgggatta

SEQ ID NO: 782063 - DNA, 25 bp, Homo sapien
tctcctgatctctagttgcctttat

SEQ ID NO: 782064 - DNA, 25 bp, Homo sapien
attaaacgctaactctccatatccc

SEQ ID NO: 782065 - DNA, 25 bp, Homo sapien
taagtgggattatacaattgttcct

SEQ ID NO: 782066 - DNA, 25 bp, Homo sapien
gtgatcttcccacttgattttccca

SEQ ID NO: 782067 - DNA, 25 bp, Homo sapien
ggggccatcatagtttattgcagcc

SEQ ID NO: 782068 - DNA, 25 bp, Homo sapien
tacagtggggccatcatagtttatt

SEQ ID NO: 782069 - DNA, 25 bp, Homo sapien
acttgattttcccaccacactcagc

SEQ ID NO: 782070 - DNA, 25 bp, Homo sapien
cagttggcaccgatgtgcagataac

SEQ ID NO: 782071 - DNA, 25 bp, Homo sapien
tgcagataaccagtgaagcccagga

SEQ ID NO: 782072 - DNA, 25 bp, Homo sapien
tgtgaaattctcaggcgagagctct

SEQ ID NO: 782073 - DNA, 25 bp, Homo sapien
ccctgggtctgatctggtttcacga

SEQ ID NO: 782074 - DNA, 25 bp, Homo sapien
tcttcttgtaatgatgtgagaatct

SEQ ID NO: 782075 - DNA, 25 bp, Homo sapien
gcagtgcctgttccatcttaactaa

SEQ ID NO: 782076 - DNA, 25 bp, Homo sapien
tgtgagaatctatgcctgaatctgt

SEQ ID NO: 782077 - DNA, 25 bp, Homo sapien
gctttctggcgcaacatgttgctgt

SEQ ID NO: 782078 - DNA, 25 bp, Homo sapien
atatgaaaaaagtccatgtttcttt

SEQ ID NO: 782079 - DNA, 25 bp, Homo sapien
gatctcgagctcccaacctcaggtg

SEQ ID NO: 782080 - DNA, 25 bp, Homo sapien
taatatgaaaaaagtccatgtttct

SEQ ID NO: 782081 - DNA, 25 bp, Homo sapien
atctcgagctcccaacctcaggtga

SEQ ID NO: 782082 - DNA, 25 bp, Homo sapien
tcggtaggtggcgaccacgacgctt

SEQ ID NO: 782083 - DNA, 25 bp, Homo sapien
gaaaactttccgagcagccagtctt

SEQ ID NO: 782084 - DNA, 25 bp, Homo sapien
tcaatctgggttctccgattggcat

SEQ ID NO: 782085 - DNA, 25 bp, Homo sapien
tccaagcctttgtcgctagcgagaa

SEQ ID NO: 782086 - DNA, 25 bp, Homo sapien
tggggattcgggccacgacggccat

SEQ ID NO: 782087 - DNA, 25 bp, Homo sapien
gggattcgggccacgacggccatcc

SEQ ID NO: 782088 - DNA, 25 bp, Homo sapien
ggattcgggccacgacggccatcct

SEQ ID NO: 782089 - DNA, 25 bp, Homo sapien
ttcgggccacgacggccatcctccc

SEQ ID NO: 782090 - DNA, 25 bp, Homo sapien
ccacattccttgcaaattgcgaggc

SEQ ID NO: 782091 - DNA, 25 bp, Homo sapien
agccgccgtccaagtccgccacttg

SEQ ID NO: 782092 - DNA, 25 bp, Homo sapien
tccttgcaaattgcgaggcagggaa

SEQ ID NO: 782093 - DNA, 25 bp, Homo sapien
cattccttgcaaattgcgaggcagg

SEQ ID NO: 782094 - DNA, 25 bp, Homo sapien
acggaaatctggacgggtggtggct

SEQ ID NO: 782095 - DNA, 25 bp, Homo sapien
gagccggggtgcagaaacggaaatc

SEQ ID NO: 782096 - DNA, 25 bp, Homo sapien
tgcagaaacggaaatctggacgggt

SEQ ID NO: 782097 - DNA, 25 bp, Homo sapien
ggtgcagaaacggaaatctggacgg

SEQ ID NO: 782098 - DNA, 25 bp, Homo sapien
tcagcgccttgatccgatcactggg

SEQ ID NO: 782099 - DNA, 25 bp, Homo sapien
ctcgctcagcgccttgatccgatca

SEQ ID NO: 782100 - DNA, 25 bp, Homo sapien
gtgcgtgtcggtcgcgctcctgtca

SEQ ID NO: 782101 - DNA, 25 bp, Homo sapien
agctggcgagcggacgggaggcgag

SEQ ID NO: 782102 - DNA, 25 bp, Homo sapien
agccgcaaatcagcgcaaatccata

SEQ ID NO: 782103 - DNA, 25 bp, Homo sapien
atccccagccgcaaatcagcgcaaa

SEQ ID NO: 782104 - DNA, 25 bp, Homo sapien
ccagccgcaaatcagcgcaaatcca

SEQ ID NO: 782105 - DNA, 25 bp, Homo sapien
gtgaacatccccagccgcaaatcag

SEQ ID NO: 782106 - DNA, 25 bp, Homo sapien
ctaccaccggcaaggcacgaggacg

SEQ ID NO: 782107 - DNA, 25 bp, Homo sapien
ccaccggcaaggcacgaggacgatg

SEQ ID NO: 782108 - DNA, 25 bp, Homo sapien
accggcaaggcacgaggacgatgcc

SEQ ID NO: 782109 - DNA, 25 bp, Homo sapien
ggcaaggcacgaggacgatgccaaa

SEQ ID NO: 782110 - DNA, 25 bp, Homo sapien
caagagccatggagggggcacggaa

SEQ ID NO: 782111 - DNA, 25 bp, Homo sapien
gagggggcacggaagacactcaaat

SEQ ID NO: 782112 - DNA, 25 bp, Homo sapien
agacactcaaatgtaagcagcattg

SEQ ID NO: 782113 - DNA, 25 bp, Homo sapien
gcacggaagacactcaaatgtaagc

SEQ ID NO: 782114 - DNA, 25 bp, Homo sapien
ccaattacggtctgaaaactcaatc

SEQ ID NO: 782115 - DNA, 25 bp, Homo sapien
taatacatgccatcgtcctcctctg

SEQ ID NO: 782116 - DNA, 25 bp, Homo sapien
taacactaatgaatcttgcagggtc

SEQ ID NO: 782117 - DNA, 25 bp, Homo sapien
cacgtcatgtatgtgttatagtcaa

SEQ ID NO: 782118 - DNA, 25 bp, Homo sapien
ggaaggtgagctttgcaatcaggca

SEQ ID NO: 782119 - DNA, 25 bp, Homo sapien
agccacccacacccgacaatcttta

SEQ ID NO: 782120 - DNA, 25 bp, Homo sapien
ccacccacacccgacaatctttact

SEQ ID NO: 782121 - DNA, 25 bp, Homo sapien
cacccacacccgacaatctttactt

SEQ ID NO: 782122 - DNA, 25 bp, Homo sapien
agggctgcttaagaccaagagttcg

SEQ ID NO: 782123 - DNA, 25 bp, Homo sapien
aagagttcgacaccagcttggcaat

SEQ ID NO: 782124 - DNA, 25 bp, Homo sapien
acgtgggagggctgcttaagaccaa

SEQ ID NO: 782125 - DNA, 25 bp, Homo sapien
aaaagtatccaggtgtggtacacgc

SEQ ID NO: 782126 - DNA, 25 bp, Homo sapien
agaacagctgataacttaaaagaca

SEQ ID NO: 782127 - DNA, 25 bp, Homo sapien
tatccaactgactagatgtcctcaa

SEQ ID NO: 782128 - DNA, 25 bp, Homo sapien
taaatggtcgacatctgcttgacac

SEQ ID NO: 782129 - DNA, 25 bp, Homo sapien
tatgtccactgagtagcttctatag

SEQ ID NO: 782130 - DNA, 25 bp, Homo sapien
gaaacatcctcagtcagaagaataa

SEQ ID NO: 782131 - DNA, 25 bp, Homo sapien
tcatgtatcgcttaatgccaaggga

SEQ ID NO: 782132 - DNA, 25 bp, Homo sapien
tattaacagccactaaagccaagtt

SEQ ID NO: 782133 - DNA, 25 bp, Homo sapien
tgccaagggaaaaattagtgacatc

SEQ ID NO: 782134 - DNA, 25 bp, Homo sapien
tctattctcaacgttttttgacttc

SEQ ID NO: 782135 - DNA, 25 bp, Homo sapien
tttcaatctcctcagttcttctatt

SEQ ID NO: 782136 - DNA, 25 bp, Homo sapien
cttctattctcaacgttttttgact

SEQ ID NO: 782137 - DNA, 25 bp, Homo sapien
ctattctcaacgttttttgacttca

SEQ ID NO: 782138 - DNA, 25 bp, Homo sapien
tatactggctccacatatagctaga

SEQ ID NO: 782139 - DNA, 25 bp, Homo sapien
tagattgcgaggttaccaattccca

SEQ ID NO: 782140 - DNA, 25 bp, Homo sapien
tatagctagatccaaaaccacaaaa

SEQ ID NO: 782141 - DNA, 25 bp, Homo sapien
gaacaatttatgaattagccagaac

SEQ ID NO: 782142 - DNA, 25 bp, Homo sapien
tgtcaagagacaacacctgcctaga

SEQ ID NO: 782143 - DNA, 25 bp, Homo sapien
gaataactaacctcaccaactctgg

SEQ ID NO: 782144 - DNA, 25 bp, Homo sapien
cagtagaagttaacccaggccacaa

SEQ ID NO: 782145 - DNA, 25 bp, Homo sapien
caggccacaagtaaggatgcagact

SEQ ID NO: 782146 - DNA, 25 bp, Homo sapien
tcctttagatgtaaccacgtattta

SEQ ID NO: 782147 - DNA, 25 bp, Homo sapien
gtatttttagatgcaacactatttt

SEQ ID NO: 782148 - DNA, 25 bp, Homo sapien
ttagatgtaaccacgtatttatgac

SEQ ID NO: 782149 - DNA, 25 bp, Homo sapien
tagatgcaacactatttttgcttaa

SEQ ID NO: 782150 - DNA, 25 bp, Homo sapien
gcagtggcacgttctgggttccctg

SEQ ID NO: 782151 - DNA, 25 bp, Homo sapien
agtggcacgttctgggttccctgca

SEQ ID NO: 782152 - DNA, 25 bp, Homo sapien
gtggcacgttctgggttccctgcaa

SEQ ID NO: 782153 - DNA, 25 bp, Homo sapien
gcacgttctgggttccctgcaacct

SEQ ID NO: 782154 - DNA, 25 bp, Homo sapien
gggtggacattgcaacttgggccat

SEQ ID NO: 782155 - DNA, 25 bp, Homo sapien
gagggtggacattgcaacttgggcc

SEQ ID NO: 782156 - DNA, 25 bp, Homo sapien
gggagggtggacattgcaacttggg

SEQ ID NO: 782157 - DNA, 25 bp, Homo sapien
atcttcaacggggagggtggacatt

SEQ ID NO: 782158 - DNA, 25 bp, Homo sapien
aatgcaggccacttcggctttggac

SEQ ID NO: 782159 - DNA, 25 bp, Homo sapien
acgtcctctttcagttccgacgaca

SEQ ID NO: 782160 - DNA, 25 bp, Homo sapien
gtcctctttcagttccgacgacaaa

SEQ ID NO: 782161 - DNA, 25 bp, Homo sapien
cactgcaatgcaggccacttcggct

SEQ ID NO: 782162 - DNA, 25 bp, Homo sapien
tacactcatccgatttgcctgggtt

SEQ ID NO: 782163 - DNA, 25 bp, Homo sapien
gcatctacactcatccgatttgcct

SEQ ID NO: 782164 - DNA, 25 bp, Homo sapien
actcatccgatttgcctgggttgta

SEQ ID NO: 782165 - DNA, 25 bp, Homo sapien
atctacactcatccgatttgcctgg

SEQ ID NO: 782166 - DNA, 25 bp, Homo sapien
tatataatgtatcttttagaaaaat

SEQ ID NO: 782167 - DNA, 25 bp, Homo sapien
ttatataatgtatcttttagaaaaa

SEQ ID NO: 782168 - DNA, 25 bp, Homo sapien
tgagcatgcttattagaaagaaaca

SEQ ID NO: 782169 - DNA, 25 bp, Homo sapien
gagcatgcttattagaaagaaacag

SEQ ID NO: 782170 - DNA, 25 bp, Homo sapien
cttattagaaagaaacagctaggcc

SEQ ID NO: 782171 - DNA, 25 bp, Homo sapien
agaaagaaacagctaggccaggcat

SEQ ID NO: 782172 - DNA, 25 bp, Homo sapien
tgtcaacctattgggcagcgagcct

SEQ ID NO: 782173 - DNA, 25 bp, Homo sapien
tctcaggtacaatttggcctcagaa

SEQ ID NO: 782174 - DNA, 25 bp, Homo sapien
cacatagagagagcaatggttggtt

SEQ ID NO: 782175 - DNA, 25 bp, Homo sapien
tatcaggtaaatacaaacttcccat

SEQ ID NO: 782176 - DNA, 25 bp, Homo sapien
ctggggcagatgaaaagcggatgaa

SEQ ID NO: 782177 - DNA, 25 bp, Homo sapien
ggcagatgaaaagcggatgaacatc

SEQ ID NO: 782178 - DNA, 25 bp, Homo sapien
ggggcagatgaaaagcggatgaaca

SEQ ID NO: 782179 - DNA, 25 bp, Homo sapien
cagatgaaaagcggatgaacatcat

SEQ ID NO: 782180 - DNA, 25 bp, Homo sapien
ggtacaggtaccactgtggatttgc

SEQ ID NO: 782181 - DNA, 25 bp, Homo sapien
tggtacaggtaccactgtggatttg

SEQ ID NO: 782182 - DNA, 25 bp, Homo sapien
gatcatagttctcggggtgtttaaa

SEQ ID NO: 782183 - DNA, 25 bp, Homo sapien
ctcttaatgatgaatgaaatccctg

SEQ ID NO: 782184 - DNA, 25 bp, Homo sapien
tcagggttgcaagatcatagttctc

SEQ ID NO: 782185 - DNA, 25 bp, Homo sapien
tgaatgaaatccctgctttgttctc

SEQ ID NO: 782186 - DNA, 25 bp, Homo sapien
ctacatgcttctttggctctaaaaa

SEQ ID NO: 782187 - DNA, 25 bp, Homo sapien
tacatgcttctttggctctaaaaaa

SEQ ID NO: 782188 - DNA, 25 bp, Homo sapien
atgcttctttggctctaaaaaaggt

SEQ ID NO: 782189 - DNA, 25 bp, Homo sapien
acatgcttctttggctctaaaaaag

SEQ ID NO: 782190 - DNA, 25 bp, Homo sapien
cctggagatagtattgacctgtcag

SEQ ID NO: 782191 - DNA, 25 bp, Homo sapien
gatagtattgacctgtcagcatctg

SEQ ID NO: 782192 - DNA, 25 bp, Homo sapien
gagatagtattgacctgtcagcatc

SEQ ID NO: 782193 - DNA, 25 bp, Homo sapien
tggagatagtattgacctgtcagca

SEQ ID NO: 782194 - DNA, 25 bp, Homo sapien
agaatcttctgtgggttcagttttc

SEQ ID NO: 782195 - DNA, 25 bp, Homo sapien
agttttcactttgatggggccacaa

SEQ ID NO: 782196 - DNA, 25 bp, Homo sapien
ttcagttttcactttgatggggcca

SEQ ID NO: 782197 - DNA, 25 bp, Homo sapien
cagaatcttctgtgggttcagtttt

SEQ ID NO: 782198 - DNA, 25 bp, Homo sapien
aatgttatattgataataatcagga

SEQ ID NO: 782199 - DNA, 25 bp, Homo sapien
gttatattgataataatcaggatct

SEQ ID NO: 782200 - DNA, 25 bp, Homo sapien
tgttatattgataataatcaggatc

SEQ ID NO: 782201 - DNA, 25 bp, Homo sapien
tgaatgttatattgataataatcag

SEQ ID NO: 782202 - DNA, 25 bp, Homo sapien
ctgaagagaattgggaaaacatccg

SEQ ID NO: 782203 - DNA, 25 bp, Homo sapien
tccaaaacacagaaagtactctgag

SEQ ID NO: 782204 - DNA, 25 bp, Homo sapien
agaaatttcacaaagatgcaccaca

SEQ ID NO: 782205 - DNA, 25 bp, Homo sapien
catccgaagttgtttgaaaggcttc

SEQ ID NO: 782206 - DNA, 25 bp, Homo sapien
cttgcaaaggcttcgataggggctg

SEQ ID NO: 782207 - DNA, 25 bp, Homo sapien
tgcaaaggcttcgataggggctgtt

SEQ ID NO: 782208 - DNA, 25 bp, Homo sapien
caaaggcttcgataggggctgtttt

SEQ ID NO: 782209 - DNA, 25 bp, Homo sapien
aggcttcgataggggctgtttttca

SEQ ID NO: 782210 - DNA, 25 bp, Homo sapien
tgaattaaaagtcccatactgaggt

SEQ ID NO: 782211 - DNA, 25 bp, Homo sapien
aactgtcatttggtagctaatatcc

SEQ ID NO: 782212 - DNA, 25 bp, Homo sapien
tactgaggtcacatctttttggttc

SEQ ID NO: 782213 - DNA, 25 bp, Homo sapien
aatgcttacggtctgaaaaactgtc

SEQ ID NO: 782214 - DNA, 25 bp, Homo sapien
actagatattggaatctgaggaagc

SEQ ID NO: 782215 - DNA, 25 bp, Homo sapien
tctttagcagttaagtcgaacaatg

SEQ ID NO: 782216 - DNA, 25 bp, Homo sapien
caaatacagagtagacctaagtagg

SEQ ID NO: 782217 - DNA, 25 bp, Homo sapien
gaatctaggtaacaatgcaaacaat

SEQ ID NO: 782218 - DNA, 25 bp, Homo sapien
ttcattgccctctgaagaatggtgg

SEQ ID NO: 782219 - DNA, 25 bp, Homo sapien
ggtacttccatttctgtgccttcat

SEQ ID NO: 782220 - DNA, 25 bp, Homo sapien
catttctgtgccttcattgccctct

SEQ ID NO: 782221 - DNA, 25 bp, Homo sapien
ttctgctggtacttccatttctgtg

SEQ ID NO: 782222 - DNA, 25 bp, Homo sapien
atacaacaaatagtggaaaatatgc

SEQ ID NO: 782223 - DNA, 25 bp, Homo sapien
catacaacaaatagtggaaaatatg

SEQ ID NO: 782224 - DNA, 25 bp, Homo sapien
aggataatagaatctataaaataga

SEQ ID NO: 782225 - DNA, 25 bp, Homo sapien
ttaaggataatagaatctataaaat

SEQ ID NO: 782226 - DNA, 25 bp, Homo sapien
cctcagtcaggcgttcaattctaaa

SEQ ID NO: 782227 - DNA, 25 bp, Homo sapien
taataacctgttggctaggaaggca

SEQ ID NO: 782228 - DNA, 25 bp, Homo sapien
taatatggcacaagaaaaccaggac

SEQ ID NO: 782229 - DNA, 25 bp, Homo sapien
tggaaataagaagccaccctacatg

SEQ ID NO: 782230 - DNA, 25 bp, Homo sapien
ttcaatagtcacctcaacttcaggg

SEQ ID NO: 782231 - DNA, 25 bp, Homo sapien
aatagtcacctcaacttcagggtcc

SEQ ID NO: 782232 - DNA, 25 bp, Homo sapien
agtcacctcaacttcagggtcctca

SEQ ID NO: 782233 - DNA, 25 bp, Homo sapien
caatagtcacctcaacttcagggtc

SEQ ID NO: 782234 - DNA, 25 bp, Homo sapien
cgcacccagctggatgtagttattg

SEQ ID NO: 782235 - DNA, 25 bp, Homo sapien
gcacccagctggatgtagttattga

SEQ ID NO: 782236 - DNA, 25 bp, Homo sapien
caccgcacccagctggatgtagtta

SEQ ID NO: 782237 - DNA, 25 bp, Homo sapien
ccgcacccagctggatgtagttatt

SEQ ID NO: 782238 - DNA, 25 bp, Homo sapien
atgctggcttccaaaggttaaaaca

SEQ ID NO: 782239 - DNA, 25 bp, Homo sapien
gaagtgtgtaagtttggacctcaat

SEQ ID NO: 782240 - DNA, 25 bp, Homo sapien
ggcacctgggtttgtatgactgtaa

SEQ ID NO: 782241 - DNA, 25 bp, Homo sapien
ggtcaagacaccctataaatagatt

SEQ ID NO: 782242 - DNA, 25 bp, Homo sapien
gtggctgcggtagctcattggcctt

SEQ ID NO: 782243 - DNA, 25 bp, Homo sapien
tggctgcggtagctcattggccttt

SEQ ID NO: 782244 - DNA, 25 bp, Homo sapien
tcattggcctttggtctcttagacg

SEQ ID NO: 782245 - DNA, 25 bp, Homo sapien
attggcctttggtctcttagacggt

SEQ ID NO: 782246 - DNA, 25 bp, Homo sapien
cgtagatcagtgatgcgagcattcc

SEQ ID NO: 782247 - DNA, 25 bp, Homo sapien
tagatcagtgatgcgagcattccat

SEQ ID NO: 782248 - DNA, 25 bp, Homo sapien
atcagtgatgcgagcattccatttc

SEQ ID NO: 782249 - DNA, 25 bp, Homo sapien
acgtagatcagtgatgcgagcattc

SEQ ID NO: 782250 - DNA, 25 bp, Homo sapien
tagatggccttctaaaaggaattcc

SEQ ID NO: 782251 - DNA, 25 bp, Homo sapien
ttcaggaagtccttctacataaaga

SEQ ID NO: 782252 - DNA, 25 bp, Homo sapien
tggccttctaaaaggaattccttca

SEQ ID NO: 782253 - DNA, 25 bp, Homo sapien
aattccgtaagtagatggccttcta

SEQ ID NO: 782254 - DNA, 25 bp, Homo sapien
caataatcactaggtaatattcagc

SEQ ID NO: 782255 - DNA, 25 bp, Homo sapien
gcaaactaataacgactagtacata

SEQ ID NO: 782256 - DNA, 25 bp, Homo sapien
tctggatgcttgagcacaactaaat

SEQ ID NO: 782257 - DNA, 25 bp, Homo sapien
tttaacatttagtcagtaaggctgg

SEQ ID NO: 782258 - DNA, 25 bp, Homo sapien
acgtgttgaattcagaagctcatgt

SEQ ID NO: 782259 - DNA, 25 bp, Homo sapien
atcttcacgtgttgaattcagaagc

SEQ ID NO: 782260 - DNA, 25 bp, Homo sapien
aagctggcttatcaagctgtaaatc

SEQ ID NO: 782261 - DNA, 25 bp, Homo sapien
tgaagctggcttatcaagctgtaaa

SEQ ID NO: 782262 - DNA, 25 bp, Homo sapien
taatttagtgattctggcataccat

SEQ ID NO: 782263 - DNA, 25 bp, Homo sapien
ttttttgcagaaaagctgatccacc

SEQ ID NO: 782264 - DNA, 25 bp, Homo sapien
gctgatccaccatctttcttaattt

SEQ ID NO: 782265 - DNA, 25 bp, Homo sapien
ttcttaatttagtgattctggcata

SEQ ID NO: 782266 - DNA, 25 bp, Homo sapien
tacactttcatctgcgtggcaacca

SEQ ID NO: 782267 - DNA, 25 bp, Homo sapien
catcatggacaatagaggacacaac

SEQ ID NO: 782268 - DNA, 25 bp, Homo sapien
gctactaactgttcaggaccgtaat

SEQ ID NO: 782269 - DNA, 25 bp, Homo sapien
cagatttgggcagatttaagtgtcc

SEQ ID NO: 782270 - DNA, 25 bp, Homo sapien
tcgggtgtgcctcaaatttttggta

SEQ ID NO: 782271 - DNA, 25 bp, Homo sapien
cagatcattcgggtgtgcctcaaat

SEQ ID NO: 782272 - DNA, 25 bp, Homo sapien
cttccacgtacagatcattcgggtg

SEQ ID NO: 782273 - DNA, 25 bp, Homo sapien
cacgtacagatcattcgggtgtgcc

SEQ ID NO: 782274 - DNA, 25 bp, Homo sapien
gtaacttcagtggtactgtgagtca

SEQ ID NO: 782275 - DNA, 25 bp, Homo sapien
agtaacttcagtggtactgtgagtc

SEQ ID NO: 782276 - DNA, 25 bp, Homo sapien
ggtactgtgagtcagaagttctggt

SEQ ID NO: 782277 - DNA, 25 bp, Homo sapien
tcagtggtactgtgagtcagaagtt

SEQ ID NO: 782278 - DNA, 25 bp, Homo sapien
ttcaccagtactttgattgcttgac

SEQ ID NO: 782279 - DNA, 25 bp, Homo sapien
ttgcttgaccaaatcaaaagcatgc

SEQ ID NO: 782280 - DNA, 25 bp, Homo sapien
accagtactttgattgcttgaccaa

SEQ ID NO: 782281 - DNA, 25 bp, Homo sapien
tgattgcttgaccaaatcaaaagca

SEQ ID NO: 782282 - DNA, 25 bp, Homo sapien
gacctagagacgttattcagcttca

SEQ ID NO: 782283 - DNA, 25 bp, Homo sapien
tggaggtcaacttggagacaatgca

SEQ ID NO: 782284 - DNA, 25 bp, Homo sapien
caatgcaggatgactgaagtgtttc

SEQ ID NO: 782285 - DNA, 25 bp, Homo sapien
catgtagaatatcactgatgtggac

SEQ ID NO: 782286 - DNA, 25 bp, Homo sapien
ggagttcatcgccagctcagtggcc

SEQ ID NO: 782287 - DNA, 25 bp, Homo sapien
aaggccacggagttcatcgccagct

SEQ ID NO: 782288 - DNA, 25 bp, Homo sapien
gggcgactccaaggccacggagttc

SEQ ID NO: 782289 - DNA, 25 bp, Homo sapien
agctcagtggccaccgcaggtgacg

SEQ ID NO: 782290 - DNA, 25 bp, Homo sapien
catcttccaattactggagaagcca

SEQ ID NO: 782291 - DNA, 25 bp, Homo sapien
ggtccttgcatcttccaattactgg

SEQ ID NO: 782292 - DNA, 25 bp, Homo sapien
ccttgcatcttccaattactggaga

SEQ ID NO: 782293 - DNA, 25 bp, Homo sapien
tggccaggtccttgcatcttccaat

SEQ ID NO: 782294 - DNA, 25 bp, Homo sapien
acgcccggcctgcagtgattctctt

SEQ ID NO: 782295 - DNA, 25 bp, Homo sapien
cacgcccggcctgcagtgattctct

SEQ ID NO: 782296 - DNA, 25 bp, Homo sapien
cgcccggcctgcagtgattctctta

SEQ ID NO: 782297 - DNA, 25 bp, Homo sapien
tcttccacttgcttccgtagcttgg

SEQ ID NO: 782298 - DNA, 25 bp, Homo sapien
cgtagcttggtaattctgacattcc

SEQ ID NO: 782299 - DNA, 25 bp, Homo sapien
cttccgtagcttggtaattctgaca

SEQ ID NO: 782300 - DNA, 25 bp, Homo sapien
tccgtagcttggtaattctgacatt

SEQ ID NO: 782301 - DNA, 25 bp, Homo sapien
tcagtagcaagtgtagtggtagaaa

SEQ ID NO: 782302 - DNA, 25 bp, Homo sapien
tggtcccgaacttctatacttcatt

SEQ ID NO: 782303 - DNA, 25 bp, Homo sapien
ccaagagaaatgaagtcatctgctt

SEQ ID NO: 782304 - DNA, 25 bp, Homo sapien
gacatggccctttgttgatatgtta

SEQ ID NO: 782305 - DNA, 25 bp, Homo sapien
tccaggaaaccgctgtcaacaaatc

SEQ ID NO: 782306 - DNA, 25 bp, Homo sapien
ggaaaccgctgtcaacaaatctaag

SEQ ID NO: 782307 - DNA, 25 bp, Homo sapien
gcactccaggaaaccgctgtcaaca

SEQ ID NO: 782308 - DNA, 25 bp, Homo sapien
caggaaaccgctgtcaacaaatcta

SEQ ID NO: 782309 - DNA, 25 bp, Homo sapien
gggcaaatctgaagaacgagcctaa

SEQ ID NO: 782310 - DNA, 25 bp, Homo sapien
tacagtatggacaagctccctacgg

SEQ ID NO: 782311 - DNA, 25 bp, Homo sapien
tccctacggtcaagcaatatccact

SEQ ID NO: 782312 - DNA, 25 bp, Homo sapien
ttgcggaggataacatttgacacag

SEQ ID NO: 782313 - DNA, 25 bp, Homo sapien
aagccttccacatacaagaactccg

SEQ ID NO: 782314 - DNA, 25 bp, Homo sapien
ctctggcaagccttccacatacaag

SEQ ID NO: 782315 - DNA, 25 bp, Homo sapien
gccttccacatacaagaactccggg

SEQ ID NO: 782316 - DNA, 25 bp, Homo sapien
cacatacaagaactccgggtttgat

SEQ ID NO: 782317 - DNA, 25 bp, Homo sapien
cccaggaggcaagtaggaaataact

SEQ ID NO: 782318 - DNA, 25 bp, Homo sapien
ccaggaggcaagtaggaaataacta

SEQ ID NO: 782319 - DNA, 25 bp, Homo sapien
caagtaggaaataactagttcaggt

SEQ ID NO: 782320 - DNA, 25 bp, Homo sapien
gaggcaagtaggaaataactagttc

SEQ ID NO: 782321 - DNA, 25 bp, Homo sapien
ctttagtgtttattttactagccat

SEQ ID NO: 782322 - DNA, 25 bp, Homo sapien
actcccaggacttcgtggtcttttg

SEQ ID NO: 782323 - DNA, 25 bp, Homo sapien
cctttgaattactcccaggacttcg

SEQ ID NO: 782324 - DNA, 25 bp, Homo sapien
gaattactcccaggacttcgtggtc

SEQ ID NO: 782325 - DNA, 25 bp, Homo sapien
ctcccaggacttcgtggtcttttgg

SEQ ID NO: 782326 - DNA, 25 bp, Homo sapien
gacgtaagtgtctctaggttacaat

SEQ ID NO: 782327 - DNA, 25 bp, Homo sapien
aaatgggtattcttgtcattccggc

SEQ ID NO: 782328 - DNA, 25 bp, Homo sapien
ttccggcgagttccacagaaaccat

SEQ ID NO: 782329 - DNA, 25 bp, Homo sapien
caacacacatttaatgacgtaagtg

SEQ ID NO: 782330 - DNA, 25 bp, Homo sapien
tctgggtcggggttcgaacagctga

SEQ ID NO: 782331 - DNA, 25 bp, Homo sapien
tgggtcggggttcgaacagctgagg

SEQ ID NO: 782332 - DNA, 25 bp, Homo sapien
tagtctgggtcggggttcgaacagc

SEQ ID NO: 782333 - DNA, 25 bp, Homo sapien
tcggggttcgaacagctgaggtttg

SEQ ID NO: 782334 - DNA, 25 bp, Homo sapien
cacatttctcattgaagagattttc

SEQ ID NO: 782335 - DNA, 25 bp, Homo sapien
tttaggtccgtgattttggcattcc

SEQ ID NO: 782336 - DNA, 25 bp, Homo sapien
acatttctcattgaagagattttca

SEQ ID NO: 782337 - DNA, 25 bp, Homo sapien
caactttctgttttaggtccgtgat

SEQ ID NO: 782338 - DNA, 25 bp, Homo sapien
tgcgtggcagtaagaaggtttcaaa

SEQ ID NO: 782339 - DNA, 25 bp, Homo sapien
tggcagtaagaaggtttcaaaatag

SEQ ID NO: 782340 - DNA, 25 bp, Homo sapien
cagtaagaaggtttcaaaatagact

SEQ ID NO: 782341 - DNA, 25 bp, Homo sapien
ctgcgtggcagtaagaaggtttcaa

SEQ ID NO: 782342 - DNA, 25 bp, Homo sapien
cagaacatgggcgaaatgacgccat

SEQ ID NO: 782343 - DNA, 25 bp, Homo sapien
gaaaaacccacacgttgccaatgac

SEQ ID NO: 782344 - DNA, 25 bp, Homo sapien
caaaacagccgcgtacacgaaacag

SEQ ID NO: 782345 - DNA, 25 bp, Homo sapien
tgacgccattcaatcccgaaaaacc

SEQ ID NO: 782346 - DNA, 25 bp, Homo sapien
aatgatgaacttaattttggctttg

SEQ ID NO: 782347 - DNA, 25 bp, Homo sapien
tccagcctcggaatgccaaaagtcg

SEQ ID NO: 782348 - DNA, 25 bp, Homo sapien
gaaagactcaaataacgcgaacggc

SEQ ID NO: 782349 - DNA, 25 bp, Homo sapien
gatggtcttcggaatggcacaccct

SEQ ID NO: 782350 - DNA, 25 bp, Homo sapien
tgctaatcccacttcatccagtttc

SEQ ID NO: 782351 - DNA, 25 bp, Homo sapien
tcaactcatgctaatcccacttcat

SEQ ID NO: 782352 - DNA, 25 bp, Homo sapien
tcatgctaatcccacttcatccagt

SEQ ID NO: 782353 - DNA, 25 bp, Homo sapien
atcaactcatgctaatcccacttca

SEQ ID NO: 782354 - DNA, 25 bp, Homo sapien
tgctgggatttatggccgcacccgg

SEQ ID NO: 782355 - DNA, 25 bp, Homo sapien
tatgttagcctaatccacagatgtt

SEQ ID NO: 782356 - DNA, 25 bp, Homo sapien
tctctctagtatggtggagtcctcc

SEQ ID NO: 782357 - DNA, 25 bp, Homo sapien
gcatcaaatagtaacaacatagctg

SEQ ID NO: 782358 - DNA, 25 bp, Homo sapien
gtgctctccttaatcgccgtctcaa

SEQ ID NO: 782359 - DNA, 25 bp, Homo sapien
aatcgccgtctcaaacatttcgggc

SEQ ID NO: 782360 - DNA, 25 bp, Homo sapien
cttaatcgccgtctcaaacatttcg

SEQ ID NO: 782361 - DNA, 25 bp, Homo sapien
tccttaatcgccgtctcaaacattt

SEQ ID NO: 782362 - DNA, 25 bp, Homo sapien
cctgaatgatgttaaggtcttcaac

SEQ ID NO: 782363 - DNA, 25 bp, Homo sapien
ctggaattgtcacctgaatgatgtt

SEQ ID NO: 782364 - DNA, 25 bp, Homo sapien
taaggtcttcaacacctgatgcagt

SEQ ID NO: 782365 - DNA, 25 bp, Homo sapien
gcagtagtattaacattgggtgatg

SEQ ID NO: 782366 - DNA, 25 bp, Homo sapien
ttctcttagctgtctagctttttca

SEQ ID NO: 782367 - DNA, 25 bp, Homo sapien
tttcaactttcgagagtctttcatt

SEQ ID NO: 782368 - DNA, 25 bp, Homo sapien
ttccgactaaagaggtcattcactt

SEQ ID NO: 782369 - DNA, 25 bp, Homo sapien
ctttcgagagtctttcattatcatc

SEQ ID NO: 782370 - DNA, 25 bp, Homo sapien
gttggagtgtggtggcttgatctca

SEQ ID NO: 782371 - DNA, 25 bp, Homo sapien
aagtgtgagccacactgccagatgg

SEQ ID NO: 782372 - DNA, 25 bp, Homo sapien
gttcaagcaattctcgtgccacagc

SEQ ID NO: 782373 - DNA, 25 bp, Homo sapien
gctcactgcaatctctgcctcccag

SEQ ID NO: 782374 - DNA, 25 bp, Homo sapien
atttgataaactcggcagagtctaa

SEQ ID NO: 782375 - DNA, 25 bp, Homo sapien
tgataaactcggcagagtctaagat

SEQ ID NO: 782376 - DNA, 25 bp, Homo sapien
tttgataaactcggcagagtctaag

SEQ ID NO: 782377 - DNA, 25 bp, Homo sapien
ataaactcggcagagtctaagatcc

SEQ ID NO: 782378 - DNA, 25 bp, Homo sapien
gcaaggttgaatccgtctgacccga

SEQ ID NO: 782379 - DNA, 25 bp, Homo sapien
caatgagaagtattatccgtgacct

SEQ ID NO: 782380 - DNA, 25 bp, Homo sapien
caatcatcatgcctgctctacggga

SEQ ID NO: 782381 - DNA, 25 bp, Homo sapien
caggtgggcatctcttacagtgaca

SEQ ID NO: 782382 - DNA, 25 bp, Homo sapien
gttattaatcacaagtcctggaaat

SEQ ID NO: 782383 - DNA, 25 bp, Homo sapien
ttattaatcacaagtcctggaaatg

SEQ ID NO: 782384 - DNA, 25 bp, Homo sapien
ggttattaatcacaagtcctggaaa

SEQ ID NO: 782385 - DNA, 25 bp, Homo sapien
aattttacaactaggaagtgcctgg

SEQ ID NO: 782386 - DNA, 25 bp, Homo sapien
catcgaggataggaagttaagaagc

SEQ ID NO: 782387 - DNA, 25 bp, Homo sapien
ctgagggctaaaacaagtatttggc

SEQ ID NO: 782388 - DNA, 25 bp, Homo sapien
tatttggcctggttactgacatagg

SEQ ID NO: 782389 - DNA, 25 bp, Homo sapien
ccttctgactcactctgatcaacca

SEQ ID NO: 782390 - DNA, 25 bp, Homo sapien
tctgactcactctgatcaaccagct

SEQ ID NO: 782391 - DNA, 25 bp, Homo sapien
ggccttctgactcactctgatcaac

SEQ ID NO: 782392 - DNA, 25 bp, Homo sapien
ttgtatcacggggccttctgactca

SEQ ID NO: 782393 - DNA, 25 bp, Homo sapien
tgagatggagcacacgattatccaa

SEQ ID NO: 782394 - DNA, 25 bp, Homo sapien
tcttgagatggagcacacgattatc

SEQ ID NO: 782395 - DNA, 25 bp, Homo sapien
tttcaaatgtggtcctaagttcaca

SEQ ID NO: 782396 - DNA, 25 bp, Homo sapien
tgtggtcctaagttcacatatacaa

SEQ ID NO: 782397 - DNA, 25 bp, Homo sapien
acagagactgatttccacattgttc

SEQ ID NO: 782398 - DNA, 25 bp, Homo sapien
tgtggctggaacttccaactggctt

SEQ ID NO: 782399 - DNA, 25 bp, Homo sapien
ttccaactggcttggttcagctgat

SEQ ID NO: 782400 - DNA, 25 bp, Homo sapien
ctggaacttccaactggcttggttc

SEQ ID NO: 782401 - DNA, 25 bp, Homo sapien
gaacttccaactggcttggttcagc

SEQ ID NO: 782402 - DNA, 25 bp, Homo sapien
gcaaaagcagctatgcgtcatcact

SEQ ID NO: 782403 - DNA, 25 bp, Homo sapien
aatggagcaaaagcagctatgcgtc

SEQ ID NO: 782404 - DNA, 25 bp, Homo sapien
gcagctatgcgtcatcactcaacag

SEQ ID NO: 782405 - DNA, 25 bp, Homo sapien
tatgcgtcatcactcaacagcataa

SEQ ID NO: 782406 - DNA, 25 bp, Homo sapien
gacctgctcagtgataaatccattc

SEQ ID NO: 782407 - DNA, 25 bp, Homo sapien
tctggcttacatgcatttaaaggac

SEQ ID NO: 782408 - DNA, 25 bp, Homo sapien
taagaaggacaagacaccaaacatc

SEQ ID NO: 782409 - DNA, 25 bp, Homo sapien
catcaaaagagcttcagagagacat

SEQ ID NO: 782410 - DNA, 25 bp, Homo sapien
gggtctggttcttgcttgatctgag

SEQ ID NO: 782411 - DNA, 25 bp, Homo sapien
gtggggtctggttcttgcttgatct

SEQ ID NO: 782412 - DNA, 25 bp, Homo sapien
acgtggggtctggttcttgcttgat

SEQ ID NO: 782413 - DNA, 25 bp, Homo sapien
ttgatctgagagcttccatcagtct

SEQ ID NO: 782414 - DNA, 25 bp, Homo sapien
tagcttaaatatccgggaaggctcc

SEQ ID NO: 782415 - DNA, 25 bp, Homo sapien
ccaatgaggaggacaacgttgactc

SEQ ID NO: 782416 - DNA, 25 bp, Homo sapien
gggagatcacattagctacgcgtat

SEQ ID NO: 782417 - DNA, 25 bp, Homo sapien
ttcagaagcactcataaagcgggat

SEQ ID NO: 782418 - DNA, 25 bp, Homo sapien
atacaagtatattacacagcttggg

SEQ ID NO: 782419 - DNA, 25 bp, Homo sapien
gctcttctcaaccactgatacttta

SEQ ID NO: 782420 - DNA, 25 bp, Homo sapien
cataaaaaatctggtgagattcatt

SEQ ID NO: 782421 - DNA, 25 bp, Homo sapien
aaatcctgatagtacattcccaagt

SEQ ID NO: 782422 - DNA, 25 bp, Homo sapien
caggaatttttcttcactgcagaag

SEQ ID NO: 782423 - DNA, 25 bp, Homo sapien
ggaaccatgagagatagcttaggaa

SEQ ID NO: 782424 - DNA, 25 bp, Homo sapien
tgcagaagctgagatgttccagtag

SEQ ID NO: 782425 - DNA, 25 bp, Homo sapien
taaggagagccgtgaacaaaggatc

SEQ ID NO: 782426 - DNA, 25 bp, Homo sapien
gaactaggaaataatgccggccacg

SEQ ID NO: 782427 - DNA, 25 bp, Homo sapien
gaaaactatgccgtcacagagccta

SEQ ID NO: 782428 - DNA, 25 bp, Homo sapien
gcacctcagggttacaagaagaact

SEQ ID NO: 782429 - DNA, 25 bp, Homo sapien
ttagtgtcatcgagctagccccaat

SEQ ID NO: 782430 - DNA, 25 bp, Homo sapien
tatgtagcctgaggaacgagcaacc

SEQ ID NO: 782431 - DNA, 25 bp, Homo sapien
gaagcggatgccacagcaagccctg

SEQ ID NO: 782432 - DNA, 25 bp, Homo sapien
cctgaggaacgagcaaccttgagcc

SEQ ID NO: 782433 - DNA, 25 bp, Homo sapien
gctttatgtagcctgaggaacgagc

SEQ ID NO: 782434 - DNA, 25 bp, Homo sapien
ggtcagctcatggtccggacctgat

SEQ ID NO: 782435 - DNA, 25 bp, Homo sapien
cagggtcagctcatggtccggacct

SEQ ID NO: 782436 - DNA, 25 bp, Homo sapien
ccagggtcagctcatggtccggacc

SEQ ID NO: 782437 - DNA, 25 bp, Homo sapien
tcagctcatggtccggacctgatct

SEQ ID NO: 782438 - DNA, 25 bp, Homo sapien
ggcacttccaggctgcgccttaaat

SEQ ID NO: 782439 - DNA, 25 bp, Homo sapien
cacttccaggctgcgccttaaatgc

SEQ ID NO: 782440 - DNA, 25 bp, Homo sapien
gcacttccaggctgcgccttaaatg

SEQ ID NO: 782441 - DNA, 25 bp, Homo sapien
agcagggcgatgtgacggatgaagg

SEQ ID NO: 782442 - DNA, 25 bp, Homo sapien
gctgggtacgaagcgcttctcaaag

SEQ ID NO: 782443 - DNA, 25 bp, Homo sapien
cgatgtgacggatgaaggtgtcccc

SEQ ID NO: 782444 - DNA, 25 bp, Homo sapien
tggctgggtacgaagcgcttctcaa

SEQ ID NO: 782445 - DNA, 25 bp, Homo sapien
atggaactcgtagatctcggtgaag

SEQ ID NO: 782446 - DNA, 25 bp, Homo sapien
tcgtagatctcggtgaagcgccggt

SEQ ID NO: 782447 - DNA, 25 bp, Homo sapien
gtgaagcgccggtagaccaccttct

SEQ ID NO: 782448 - DNA, 25 bp, Homo sapien
gatctcggtgaagcgccggtagacc

SEQ ID NO: 782449 - DNA, 25 bp, Homo sapien
aggtccttcccaaagggtggagctg

SEQ ID NO: 782450 - DNA, 25 bp, Homo sapien
cttcccaaagggtggagctggaacg

SEQ ID NO: 782451 - DNA, 25 bp, Homo sapien
tgtccctcctccgtccccacactca

SEQ ID NO: 782452 - DNA, 25 bp, Homo sapien
gagctggaacggtgggtccctgtcc

SEQ ID NO: 782453 - DNA, 25 bp, Homo sapien
gcctcaatagggaacatttctttta

SEQ ID NO: 782454 - DNA, 25 bp, Homo sapien
gcccctgcctcaatagggaacattt

SEQ ID NO: 782455 - DNA, 25 bp, Homo sapien
gattgatcgcccctgcctcaatagg

SEQ ID NO: 782456 - DNA, 25 bp, Homo sapien
ctgttctctggattgatcgcccctg

SEQ ID NO: 782457 - DNA, 25 bp, Homo sapien
tcatcagggcgcaccttgaagaagt

SEQ ID NO: 782458 - DNA, 25 bp, Homo sapien
ctcggcggcccgctgcccgtcaaac

SEQ ID NO: 782459 - DNA, 25 bp, Homo sapien
gacagcgggagatcttggtgggcag

SEQ ID NO: 782460 - DNA, 25 bp, Homo sapien
cgctgcccgtcaaaccacttgggag

SEQ ID NO: 782461 - DNA, 25 bp, Homo sapien
ggaaaatgctcttgcgggctcccag

SEQ ID NO: 782462 - DNA, 25 bp, Homo sapien
atctgctcgggcagcccaagggagg

SEQ ID NO: 782463 - DNA, 25 bp, Homo sapien
cactgggtagacctgcagaagaact

SEQ ID NO: 782464 - DNA, 25 bp, Homo sapien
agaagaggcactgggtagacctgca

SEQ ID NO: 782465 - DNA, 25 bp, Homo sapien
tctttgggcatcaagtatgtctctg

SEQ ID NO: 782466 - DNA, 25 bp, Homo sapien
tgtcgcggtactcttgccatctttg

SEQ ID NO: 782467 - DNA, 25 bp, Homo sapien
gccatctttgggcatcaagtatgtc

SEQ ID NO: 782468 - DNA, 25 bp, Homo sapien
ctgtcgcggtactcttgccatcttt

SEQ ID NO: 782469 - DNA, 25 bp, Homo sapien
ggcgcggtacgtctgcaggatgatg

SEQ ID NO: 782470 - DNA, 25 bp, Homo sapien
cccgtggacagagccatctcggagc

SEQ ID NO: 782471 - DNA, 25 bp, Homo sapien
ggcaatggcgcggtacgtctgcagg

SEQ ID NO: 782472 - DNA, 25 bp, Homo sapien
caatggcgcggtacgtctgcaggat

SEQ ID NO: 782473 - DNA, 25 bp, Homo sapien
tgtgccagaggtgcgggaatgtgac

SEQ ID NO: 782474 - DNA, 25 bp, Homo sapien
cataatgaacagacggtcccatacc

SEQ ID NO: 782475 - DNA, 25 bp, Homo sapien
gacacactgatgtccaatgctcaga

SEQ ID NO: 782476 - DNA, 25 bp, Homo sapien
agctctgagcccacttcataatgaa

SEQ ID NO: 782477 - DNA, 25 bp, Homo sapien
tcagggtcttccgtctcgtcaggac

SEQ ID NO: 782478 - DNA, 25 bp, Homo sapien
gggtcttccgtctcgtcaggactgt

SEQ ID NO: 782479 - DNA, 25 bp, Homo sapien
tccgtctcgtcaggactgtccaggg

SEQ ID NO: 782480 - DNA, 25 bp, Homo sapien
ggctcagggtcttccgtctcgtcag

SEQ ID NO: 782481 - DNA, 25 bp, Homo sapien
agctgcagctaactgtcggcctggg

SEQ ID NO: 782482 - DNA, 25 bp, Homo sapien
ccatgagtaggtggctggagcatcc

SEQ ID NO: 782483 - DNA, 25 bp, Homo sapien
cagtgtttaaacgatagccacaggc

SEQ ID NO: 782484 - DNA, 25 bp, Homo sapien
cataacgatgaaggtctgtccagac

SEQ ID NO: 782485 - DNA, 25 bp, Homo sapien
gccttgatggcgacgtatggctcac

SEQ ID NO: 782486 - DNA, 25 bp, Homo sapien
cctccacagcagtgtaggccttgat

SEQ ID NO: 782487 - DNA, 25 bp, Homo sapien
acagcttcaccctcgagcagggaca

SEQ ID NO: 782488 - DNA, 25 bp, Homo sapien
tcaacagcttcaccctcgagcaggg

SEQ ID NO: 782489 - DNA, 25 bp, Homo sapien
agccgtccaggagcttgtgaatgac

SEQ ID NO: 782490 - DNA, 25 bp, Homo sapien
ccagccgtccaggagcttgtgaatg

SEQ ID NO: 782491 - DNA, 25 bp, Homo sapien
tgatgacccaccagccgtccaggag

SEQ ID NO: 782492 - DNA, 25 bp, Homo sapien
caccagccgtccaggagcttgtgaa

SEQ ID NO: 782493 - DNA, 25 bp, Homo sapien
ggtcttgaacttgtagccttgagtg

SEQ ID NO: 782494 - DNA, 25 bp, Homo sapien
gtcttgaacttgtagccttgagtga

SEQ ID NO: 782495 - DNA, 25 bp, Homo sapien
ctgcacctgactgcaagaaagcttt

SEQ ID NO: 782496 - DNA, 25 bp, Homo sapien
gagacactgcacctgactgcaagaa

SEQ ID NO: 782497 - DNA, 25 bp, Homo sapien
tcagggctctctctgaacaattggg

SEQ ID NO: 782498 - DNA, 25 bp, Homo sapien
aagacattggcggattatatttgcc

SEQ ID NO: 782499 - DNA, 25 bp, Homo sapien
ggttgcaaacaaccggacacctgcc

SEQ ID NO: 782500 - DNA, 25 bp, Homo sapien
tacctccaagccaccaaattctatg

SEQ ID NO: 782501 - DNA, 25 bp, Homo sapien
gttgggcctgggacacgtcttgccc

SEQ ID NO: 782502 - DNA, 25 bp, Homo sapien
ccccgcttgatctggcgttgggcct

SEQ ID NO: 782503 - DNA, 25 bp, Homo sapien
ggcgccccccgcttgatctggcgtt

SEQ ID NO: 782504 - DNA, 25 bp, Homo sapien
ggcgttgggcctgggacacgtcttg

SEQ ID NO: 782505 - DNA, 25 bp, Homo sapien
cctggcactgccaagctatggccta

SEQ ID NO: 782506 - DNA, 25 bp, Homo sapien
tagacagagcgaacccgtggtgcgc

SEQ ID NO: 782507 - DNA, 25 bp, Homo sapien
gcagagcctgggcggttttccacgc

SEQ ID NO: 782508 - DNA, 25 bp, Homo sapien
gctatggcctagacagagcgaaccc

SEQ ID NO: 782509 - DNA, 25 bp, Homo sapien
gggcgtcgtcaaagcccgagggcgc

SEQ ID NO: 782510 - DNA, 25 bp, Homo sapien
tagtctgcacgaccccggcgggaca

SEQ ID NO: 782511 - DNA, 25 bp, Homo sapien
cccagggactcagatgggcacccct

SEQ ID NO: 782512 - DNA, 25 bp, Homo sapien
agtagggggccggtagtctgcacga

SEQ ID NO: 782513 - DNA, 25 bp, Homo sapien
tgcagaaaacggacgctgttgcggc

SEQ ID NO: 782514 - DNA, 25 bp, Homo sapien
gtcgctgctgcagaaaacggacgct

SEQ ID NO: 782515 - DNA, 25 bp, Homo sapien
gcgataggcgtcctggctgaggcgc

SEQ ID NO: 782516 - DNA, 25 bp, Homo sapien
aaaacggacgctgttgcggcgatag

SEQ ID NO: 782517 - DNA, 25 bp, Homo sapien
ctgcggtttagagcgctgcgtctgc

SEQ ID NO: 782518 - DNA, 25 bp, Homo sapien
ttagagcgctgcgtctgccgctcct

SEQ ID NO: 782519 - DNA, 25 bp, Homo sapien
gtttagagcgctgcgtctgccgctc

SEQ ID NO: 782520 - DNA, 25 bp, Homo sapien
cggtttagagcgctgcgtctgccgc

SEQ ID NO: 782521 - DNA, 25 bp, Homo sapien
agacgccagcttccgcttggtgctc

SEQ ID NO: 782522 - DNA, 25 bp, Homo sapien
gttcaggatgaggtcggcgctcggc

SEQ ID NO: 782523 - DNA, 25 bp, Homo sapien
gctctcgctgcagcggttcaggatg

SEQ ID NO: 782524 - DNA, 25 bp, Homo sapien
agcttccgcttggtgctctcgctgc

SEQ ID NO: 782525 - DNA, 25 bp, Homo sapien
acgctagctggggactgcgctccag

SEQ ID NO: 782526 - DNA, 25 bp, Homo sapien
gcgtccagacgccaggctctataga

SEQ ID NO: 782527 - DNA, 25 bp, Homo sapien
tcggcgtccagacgccaggctctat

SEQ ID NO: 782528 - DNA, 25 bp, Homo sapien
ggcacggggcggcaagggccgagac

SEQ ID NO: 782529 - DNA, 25 bp, Homo sapien
caagcaacatttattgagggtggcg

SEQ ID NO: 782530 - DNA, 25 bp, Homo sapien
tttattgagggtggcgggagccgcg

SEQ ID NO: 782531 - DNA, 25 bp, Homo sapien
caacatttattgagggtggcgggag

SEQ ID NO: 782532 - DNA, 25 bp, Homo sapien
gagccgcgctggacaggggtcgggg

SEQ ID NO: 782533 - DNA, 25 bp, Homo sapien
ccggccctccctgcattcctgcaga

SEQ ID NO: 782534 - DNA, 25 bp, Homo sapien
tccctgcattcctgcagagcctcgg

SEQ ID NO: 782535 - DNA, 25 bp, Homo sapien
gcggagcccggccctccctgcattc

SEQ ID NO: 782536 - DNA, 25 bp, Homo sapien
gggcggagcccggccctccctgcat

SEQ ID NO: 782537 - DNA, 25 bp, Homo sapien
caacatctgcctccccggttcaagc

SEQ ID NO: 782538 - DNA, 25 bp, Homo sapien
tgggattgtggatgcatgccaccac

SEQ ID NO: 782539 - DNA, 25 bp, Homo sapien
tagctgggattgtggatgcatgcca

SEQ ID NO: 782540 - DNA, 25 bp, Homo sapien
cccagtagctgggattgtggatgca

SEQ ID NO: 782541 - DNA, 25 bp, Homo sapien
tgaagatggaccacgtcatggacgt

SEQ ID NO: 782542 - DNA, 25 bp, Homo sapien
tccggaatcactctgtgctcagaag

SEQ ID NO: 782543 - DNA, 25 bp, Homo sapien
taacgggcttgtcacaaaactgaag

SEQ ID NO: 782544 - DNA, 25 bp, Homo sapien
gatggtggatgccaataacgggctt

SEQ ID NO: 782545 - DNA, 25 bp, Homo sapien
ggttctgtggccgtcacccttgtca

SEQ ID NO: 782546 - DNA, 25 bp, Homo sapien
accttgattacctgcagggtggcca

SEQ ID NO: 782547 - DNA, 25 bp, Homo sapien
catgagccgctgtacatggcctaca

SEQ ID NO: 782548 - DNA, 25 bp, Homo sapien
tgtacactcgaacacacttatacga

SEQ ID NO: 782549 - DNA, 25 bp, Homo sapien
aatatcaaaggtaactccgcaggcc

SEQ ID NO: 782550 - DNA, 25 bp, Homo sapien
gaagtgcaagtatctaaaggaagtg

SEQ ID NO: 782551 - DNA, 25 bp, Homo sapien
cgcaggcctgcagccggtgaactca

SEQ ID NO: 782552 - DNA, 25 bp, Homo sapien
tgaagttgaaagtgtgatttaaggc

SEQ ID NO: 782553 - DNA, 25 bp, Homo sapien
gtgagattctgtgtcaaaaaaaaac

SEQ ID NO: 782554 - DNA, 25 bp, Homo sapien
accttgggctacagagtgagattct

SEQ ID NO: 782555 - DNA, 25 bp, Homo sapien
tccaccttgggctacagagtgagat

SEQ ID NO: 782556 - DNA, 25 bp, Homo sapien
tgagattctgtgtcaaaaaaaaaca

SEQ ID NO: 782557 - DNA, 25 bp, Homo sapien
gtcccatatgcaaaacatagctggg

SEQ ID NO: 782558 - DNA, 25 bp, Homo sapien
tagctggggctacacgggagggtga

SEQ ID NO: 782559 - DNA, 25 bp, Homo sapien
ctgcagtcccatatgcaaaacatag

SEQ ID NO: 782560 - DNA, 25 bp, Homo sapien
ttagctgagcctggtaatacatgcc

SEQ ID NO: 782561 - DNA, 25 bp, Homo sapien
tgtgatgaaatctcgcgctgtgcag

SEQ ID NO: 782562 - DNA, 25 bp, Homo sapien
cagttggagattgctcacggctgca

SEQ ID NO: 782563 - DNA, 25 bp, Homo sapien
cagttgggatcaatcttcagtggcg

SEQ ID NO: 782564 - DNA, 25 bp, Homo sapien
ccatttggagaggaaggcgtcatag

SEQ ID NO: 782565 - DNA, 25 bp, Homo sapien
atcccacaatcagcgatggctgagg

SEQ ID NO: 782566 - DNA, 25 bp, Homo sapien
ggtgagaaaggccccgccagcaatc

SEQ ID NO: 782567 - DNA, 25 bp, Homo sapien
ccgccagcaatccatcccacaatca

SEQ ID NO: 782568 - DNA, 25 bp, Homo sapien
caagcaactgcatgcacgtctgggg

SEQ ID NO: 782569 - DNA, 25 bp, Homo sapien
tttgaggggagtaaagatgttatct

SEQ ID NO: 782570 - DNA, 25 bp, Homo sapien
ttttgaggggagtaaagatgttatc

SEQ ID NO: 782571 - DNA, 25 bp, Homo sapien
ctggcatgttggagcccacctgtgg

SEQ ID NO: 782572 - DNA, 25 bp, Homo sapien
cctggcatgttggagcccacctgtg

SEQ ID NO: 782573 - DNA, 25 bp, Homo sapien
gaactgacctttcataagcaggact

SEQ ID NO: 782574 - DNA, 25 bp, Homo sapien
gcaggactgtccttttatctgagtt

SEQ ID NO: 782575 - DNA, 25 bp, Homo sapien
gagttgataaatctgagacatatat

SEQ ID NO: 782576 - DNA, 25 bp, Homo sapien
gataaatctgagacatatattgata

SEQ ID NO: 782577 - DNA, 25 bp, Homo sapien
tatttatgaaatgcatacacagttc

SEQ ID NO: 782578 - DNA, 25 bp, Homo sapien
aatctgagacatatattgataaagg

SEQ ID NO: 782579 - DNA, 25 bp, Homo sapien
tgtctcgacccagccagtattcaat

SEQ ID NO: 782580 - DNA, 25 bp, Homo sapien
gattcctatccaatgggtagctccc

SEQ ID NO: 782581 - DNA, 25 bp, Homo sapien
aaaactgatggattggctaggcaca

SEQ ID NO: 782582 - DNA, 25 bp, Homo sapien
catggaattgtagatgctagtgcca

SEQ ID NO: 782583 - DNA, 25 bp, Homo sapien
ctgtaatccctcctgctactcggga

SEQ ID NO: 782584 - DNA, 25 bp, Homo sapien
gacgcctgtaatccctcctgctact

SEQ ID NO: 782585 - DNA, 25 bp, Homo sapien
tggcagaggtggcagtgagatgaga

SEQ ID NO: 782586 - DNA, 25 bp, Homo sapien
tgggtggcagaggtggcagtgagat

SEQ ID NO: 782587 - DNA, 25 bp, Homo sapien
atgcctagctagtttatcgttatta

SEQ ID NO: 782588 - DNA, 25 bp, Homo sapien
gcctagctagtttatcgttattatt

SEQ ID NO: 782589 - DNA, 25 bp, Homo sapien
cctagctagtttatcgttattattt

SEQ ID NO: 782590 - DNA, 25 bp, Homo sapien
tgcctagctagtttatcgttattat

SEQ ID NO: 782591 - DNA, 25 bp, Homo sapien
caaaatttaacctggtgttatctag

SEQ ID NO: 782592 - DNA, 25 bp, Homo sapien
cgggagatcaaaatttaacctggtg

SEQ ID NO: 782593 - DNA, 25 bp, Homo sapien
gcatggacccagaaagtagcaggaa

SEQ ID NO: 782594 - DNA, 25 bp, Homo sapien
gggcatggacccagaaagtagcagg

SEQ ID NO: 782595 - DNA, 25 bp, Homo sapien
ttgggagatagaggcaggtggatcc

SEQ ID NO: 782596 - DNA, 25 bp, Homo sapien
tgggagatagaggcaggtggatccc

SEQ ID NO: 782597 - DNA, 25 bp, Homo sapien
ggtggatcccttgagcttaggaatt

SEQ ID NO: 782598 - DNA, 25 bp, Homo sapien
ttaggaatttgagactaggctgggc

SEQ ID NO: 782599 - DNA, 25 bp, Homo sapien
tggccaatctggtttcattccctcc

SEQ ID NO: 782600 - DNA, 25 bp, Homo sapien
ccagaggtgatttttgtggccaatc

SEQ ID NO: 782601 - DNA, 25 bp, Homo sapien
ttttgtggccaatctggtttcattc

SEQ ID NO: 782602 - DNA, 25 bp, Homo sapien
tttccagaggtgatttttgtggcca

SEQ ID NO: 782603 - DNA, 25 bp, Homo sapien
gaccatcataattgtcaggagaagg

SEQ ID NO: 782604 - DNA, 25 bp, Homo sapien
caagcagaagcatttagggattggc

SEQ ID NO: 782605 - DNA, 25 bp, Homo sapien
caagagcaatagctatgggcaccaa

SEQ ID NO: 782606 - DNA, 25 bp, Homo sapien
gtgcccggccttgactaccatattt

SEQ ID NO: 782607 - DNA, 25 bp, Homo sapien
tgcattgggaaaagatcaatctatt

SEQ ID NO: 782608 - DNA, 25 bp, Homo sapien
tggttgcattgggaaaagatcaatc

SEQ ID NO: 782609 - DNA, 25 bp, Homo sapien
gcacggtgacgtctgcctgaggtca

SEQ ID NO: 782610 - DNA, 25 bp, Homo sapien
ctgaggtcacattcaagaagctgat

SEQ ID NO: 782611 - DNA, 25 bp, Homo sapien
ggacaaggttacagagttgctgaga

SEQ ID NO: 782612 - DNA, 25 bp, Homo sapien
cagctgtgaaaggaatattctggtg

SEQ ID NO: 782613 - DNA, 25 bp, Homo sapien
tttctcagctgtgaaaggaatattc

SEQ ID NO: 782614 - DNA, 25 bp, Homo sapien
tgcgcccagcatgttagacaatttt

SEQ ID NO: 782615 - DNA, 25 bp, Homo sapien
gggacctgaccgcacgcctggagct

SEQ ID NO: 782616 - DNA, 25 bp, Homo sapien
tcaccagcaccgagaagtccgcgtg

SEQ ID NO: 782617 - DNA, 25 bp, Homo sapien
gttggtcttatttccattctcttgg

SEQ ID NO: 782618 - DNA, 25 bp, Homo sapien
cgtgaagtgcgtgaaggctctgaaa

SEQ ID NO: 782619 - DNA, 25 bp, Homo sapien
ggtgcccctaggccggatagagtgc

SEQ ID NO: 782620 - DNA, 25 bp, Homo sapien
caggtaaagccctatcacggggtct

SEQ ID NO: 782621 - DNA, 25 bp, Homo sapien
taaagccctatcacggggtctgcgc

SEQ ID NO: 782622 - DNA, 25 bp, Homo sapien
ctcttgctttggttgcgccatgccg

SEQ ID NO: 782623 - DNA, 25 bp, Homo sapien
ttgcgccatgccgatgtaccaggta

SEQ ID NO: 782624 - DNA, 25 bp, Homo sapien
agcgttggtgtctggcggtttccga

SEQ ID NO: 782625 - DNA, 25 bp, Homo sapien
cgagcgttggtgtctggcggtttcc

SEQ ID NO: 782626 - DNA, 25 bp, Homo sapien
ttccgagcgttggtgtctggcggtt

SEQ ID NO: 782627 - DNA, 25 bp, Homo sapien
tccgagcgttggtgtctggcggttt

SEQ ID NO: 782628 - DNA, 25 bp, Homo sapien
ttttcgcctagtggctctgtcaaag

SEQ ID NO: 782629 - DNA, 25 bp, Homo sapien
tctccttttcgcctagtggctctgt

SEQ ID NO: 782630 - DNA, 25 bp, Homo sapien
tagtggctctgtcaaaggtcgagtc

SEQ ID NO: 782631 - DNA, 25 bp, Homo sapien
gcctagtggctctgtcaaaggtcga

SEQ ID NO: 782632 - DNA, 25 bp, Homo sapien
gcgagaggggcgaccgcgagcccag

SEQ ID NO: 782633 - DNA, 25 bp, Homo sapien
gaggggcgaccgcgagcccagctca

SEQ ID NO: 782634 - DNA, 25 bp, Homo sapien
aggggcgaccgcgagcccagctcac

SEQ ID NO: 782635 - DNA, 25 bp, Homo sapien
cgagaggggcgaccgcgagcccagc

SEQ ID NO: 782636 - DNA, 25 bp, Homo sapien
gctggggcgctgaggatgccgctcc

SEQ ID NO: 782637 - DNA, 25 bp, Homo sapien
aatgggcaccggatcgctggggcgc

SEQ ID NO: 782638 - DNA, 25 bp, Homo sapien
taatgggcaccggatcgctggggcg

SEQ ID NO: 782639 - DNA, 25 bp, Homo sapien
tgaggatgccgctccggggcctcca

SEQ ID NO: 782640 - DNA, 25 bp, Homo sapien
gatatgtctggatgctctactgtcc

SEQ ID NO: 782641 - DNA, 25 bp, Homo sapien
tttttaaaactgagcagctacgcaa

SEQ ID NO: 782642 - DNA, 25 bp, Homo sapien
ttaggatatgtctggatgctctact

SEQ ID NO: 782643 - DNA, 25 bp, Homo sapien
gagcagctacgcaaattaggatatg

SEQ ID NO: 782644 - DNA, 25 bp, Homo sapien
gatatttagatacagacggcaaatt

SEQ ID NO: 782645 - DNA, 25 bp, Homo sapien
tcaactgtgctagccaagattcggt

SEQ ID NO: 782646 - DNA, 25 bp, Homo sapien
gcgtttacaaatctgacatggaatt

SEQ ID NO: 782647 - DNA, 25 bp, Homo sapien
gattcggtgtagcttaccagccaga

SEQ ID NO: 782648 - DNA, 25 bp, Homo sapien
catcacaagctctcttagacactac

SEQ ID NO: 782649 - DNA, 25 bp, Homo sapien
ggccgtcccctatattgcagcacag

SEQ ID NO: 782650 - DNA, 25 bp, Homo sapien
gcaactggccgtcccctatattgca

SEQ ID NO: 782651 - DNA, 25 bp, Homo sapien
tatattgcagcacagtgaacaactg

SEQ ID NO: 782652 - DNA, 25 bp, Homo sapien
cccagcaatttgggacacagaggca

SEQ ID NO: 782653 - DNA, 25 bp, Homo sapien
gcaatttgggacacagaggcaggcg

SEQ ID NO: 782654 - DNA, 25 bp, Homo sapien
gatcacttgagatcaggagtttgag

SEQ ID NO: 782655 - DNA, 25 bp, Homo sapien
ttgagatcaggagtttgagaccagc

SEQ ID NO: 782656 - DNA, 25 bp, Homo sapien
aaatctttggcaataatggtgtctt

SEQ ID NO: 782657 - DNA, 25 bp, Homo sapien
tctttggcaataatggtgtcttctt

SEQ ID NO: 782658 - DNA, 25 bp, Homo sapien
tctctcaaattaccaaaatctttgg

SEQ ID NO: 782659 - DNA, 25 bp, Homo sapien
tttggcaataatggtgtcttctttc

SEQ ID NO: 782660 - DNA, 25 bp, Homo sapien
cattgttttacaatccttaaacaag

SEQ ID NO: 782661 - DNA, 25 bp, Homo sapien
acaagtacccaaaatacttctggat

SEQ ID NO: 782662 - DNA, 25 bp, Homo sapien
tcaaattcaacacatccttactatc

SEQ ID NO: 782663 - DNA, 25 bp, Homo sapien
acttctggatagacacttcaaattc

SEQ ID NO: 782664 - DNA, 25 bp, Homo sapien
ttagactcagtactaccggcccaga

SEQ ID NO: 782665 - DNA, 25 bp, Homo sapien
ttctaccatcttcttcaccgcagtg

SEQ ID NO: 782666 - DNA, 25 bp, Homo sapien
ctaccatcttcttcaccgcagtgct

SEQ ID NO: 782667 - DNA, 25 bp, Homo sapien
ttttctaccatcttcttcaccgcag

SEQ ID NO: 782668 - DNA, 25 bp, Homo sapien
tagttgtaaagaccgttgcactttg

SEQ ID NO: 782669 - DNA, 25 bp, Homo sapien
cattccatagtccttaagctttaga

SEQ ID NO: 782670 - DNA, 25 bp, Homo sapien
cctgaaacttcaatgagatccattc

SEQ ID NO: 782671 - DNA, 25 bp, Homo sapien
ccattgcctgaaacttcaatgagat

SEQ ID NO: 782672 - DNA, 25 bp, Homo sapien
tgcctgaaacttcaatgagatccat

SEQ ID NO: 782673 - DNA, 25 bp, Homo sapien
aactcttgaatcttagatgtgtgat

SEQ ID NO: 782674 - DNA, 25 bp, Homo sapien
ctcagtgcacaaagtgagctcagag

SEQ ID NO: 782675 - DNA, 25 bp, Homo sapien
gtgcacaaagtgagctcagagcttc

SEQ ID NO: 782676 - DNA, 25 bp, Homo sapien
cccgagttaggtcggcaaactcttg

SEQ ID NO: 782677 - DNA, 25 bp, Homo sapien
tgttgggcactgactactcttttct

SEQ ID NO: 782678 - DNA, 25 bp, Homo sapien
tgatgttgggcactgactactcttt

SEQ ID NO: 782679 - DNA, 25 bp, Homo sapien
atgttgggcactgactactcttttc

SEQ ID NO: 782680 - DNA, 25 bp, Homo sapien
gatgttgggcactgactactctttt

SEQ ID NO: 782681 - DNA, 25 bp, Homo sapien
tcgccgatacgtggcaggtagaaat

SEQ ID NO: 782682 - DNA, 25 bp, Homo sapien
tcgtgatcaaacaccagtcgagtcc

SEQ ID NO: 782683 - DNA, 25 bp, Homo sapien
cgtagaaaataactgcttcacgctg

SEQ ID NO: 782684 - DNA, 25 bp, Homo sapien
ttccttatggcgcacaggtagcgta

SEQ ID NO: 782685 - DNA, 25 bp, Homo sapien
cccagtcctaataaacattatgtga

SEQ ID NO: 782686 - DNA, 25 bp, Homo sapien
tgtttcccagtcctaataaacatta

SEQ ID NO: 782687 - DNA, 25 bp, Homo sapien
aaagcatttctcaataaattatggg

SEQ ID NO: 782688 - DNA, 25 bp, Homo sapien
gcatttctcaataaattatgggaag

SEQ ID NO: 782689 - DNA, 25 bp, Homo sapien
gcgcgcgcctgtaatggtagctact

SEQ ID NO: 782690 - DNA, 25 bp, Homo sapien
cacagtctgaagtgtagtgacgcaa

SEQ ID NO: 782691 - DNA, 25 bp, Homo sapien
tcttactctgtctcacagtctgaag

SEQ ID NO: 782692 - DNA, 25 bp, Homo sapien
gcagccagggcgccaaagtgagact

SEQ ID NO: 782693 - DNA, 25 bp, Homo sapien
gtcagcatgaagtcgatacagaagc

SEQ ID NO: 782694 - DNA, 25 bp, Homo sapien
gggagccctcaaggaactgacaatc

SEQ ID NO: 782695 - DNA, 25 bp, Homo sapien
tggggagccctcaaggaactgacaa

SEQ ID NO: 782696 - DNA, 25 bp, Homo sapien
ggagccctcaaggaactgacaatca

SEQ ID NO: 782697 - DNA, 25 bp, Homo sapien
gccctcaaggaactgacaatcacgg

SEQ ID NO: 782698 - DNA, 25 bp, Homo sapien
gcctatggctcctggtggatttaga

SEQ ID NO: 782699 - DNA, 25 bp, Homo sapien
gctcctggtggatttagatacctcc

SEQ ID NO: 782700 - DNA, 25 bp, Homo sapien
ggtggatttagatacctcctggtgc

SEQ ID NO: 782701 - DNA, 25 bp, Homo sapien
gatgcctatggctcctggtggattt

SEQ ID NO: 782702 - DNA, 25 bp, Homo sapien
tcacctccgcgttcaagcaaattct

SEQ ID NO: 782703 - DNA, 25 bp, Homo sapien
acaggcatccgcctgtacgtctgac

SEQ ID NO: 782704 - DNA, 25 bp, Homo sapien
gtgcccagaccccaagctagagttt

SEQ ID NO: 782705 - DNA, 25 bp, Homo sapien
tccgcctgtacgtctgactaacttt

SEQ ID NO: 782706 - DNA, 25 bp, Homo sapien
cagtgatcacgttgtcctccaagga

SEQ ID NO: 782707 - DNA, 25 bp, Homo sapien
gacagagctgaatacagtgatcacg

SEQ ID NO: 782708 - DNA, 25 bp, Homo sapien
ttcttgacagagctgaatacagtga

SEQ ID NO: 782709 - DNA, 25 bp, Homo sapien
agagctgaatacagtgatcacgttg

SEQ ID NO: 782710 - DNA, 25 bp, Homo sapien
ttccaatgctaatggcagacatcag

SEQ ID NO: 782711 - DNA, 25 bp, Homo sapien
ttattccaatgctaatggcagacat

SEQ ID NO: 782712 - DNA, 25 bp, Homo sapien
tccaatgctaatggcagacatcagg

SEQ ID NO: 782713 - DNA, 25 bp, Homo sapien
ttcagcaggaactttattccaatgc

SEQ ID NO: 782714 - DNA, 25 bp, Homo sapien
ctcaattgctctgaactctagctag

SEQ ID NO: 782715 - DNA, 25 bp, Homo sapien
caattgctctgaactctagctagac

SEQ ID NO: 782716 - DNA, 25 bp, Homo sapien
gaactctagctagacttgacatggg

SEQ ID NO: 782717 - DNA, 25 bp, Homo sapien
tgctctgaactctagctagacttga

SEQ ID NO: 782718 - DNA, 25 bp, Homo sapien
gccaccgcgtctggtgtatttttta

SEQ ID NO: 782719 - DNA, 25 bp, Homo sapien
gaggagacccgctctcatataccct

SEQ ID NO: 782720 - DNA, 25 bp, Homo sapien
tatacccttgctccgtgagctttgg

SEQ ID NO: 782721 - DNA, 25 bp, Homo sapien
tctacttcctgtacgaggagacccg

SEQ ID NO: 782722 - DNA, 25 bp, Homo sapien
gagacacagtcttgctctgttgccc

SEQ ID NO: 782723 - DNA, 25 bp, Homo sapien
gtgagacacagtcttgctctgttgc

SEQ ID NO: 782724 - DNA, 25 bp, Homo sapien
ttttgtttttgttttgtgagacaca

SEQ ID NO: 782725 - DNA, 25 bp, Homo sapien
ttgtttttgttttgtgagacacagt

SEQ ID NO: 782726 - DNA, 25 bp, Homo sapien
gccagaacccacaggttctttggat

SEQ ID NO: 782727 - DNA, 25 bp, Homo sapien
tgctgtccccgcctcctgagtggct

SEQ ID NO: 782728 - DNA, 25 bp, Homo sapien
ccaagtttaagccattctgctgtcc

SEQ ID NO: 782729 - DNA, 25 bp, Homo sapien
ttctttggatggtctctgaatgtca

SEQ ID NO: 782730 - DNA, 25 bp, Homo sapien
cgtcttcatgtcgtctcagggcaca

SEQ ID NO: 782731 - DNA, 25 bp, Homo sapien
tgccccaaacttagcgcctgtcgtg

SEQ ID NO: 782732 - DNA, 25 bp, Homo sapien
tcagggcagtgagtccatttacaca

SEQ ID NO: 782733 - DNA, 25 bp, Homo sapien
aagtagctggctgtgcaattctggc

SEQ ID NO: 782734 - DNA, 25 bp, Homo sapien
gacttcaagagatcatttctcctca

SEQ ID NO: 782735 - DNA, 25 bp, Homo sapien
cattgagatctgaagggtggtgaaa

SEQ ID NO: 782736 - DNA, 25 bp, Homo sapien
ggctaaggtttctgtcaaaagtgac

SEQ ID NO: 782737 - DNA, 25 bp, Homo sapien
ggtgaaatgtcatttaggaacaggg

SEQ ID NO: 782738 - DNA, 25 bp, Homo sapien
ttatccagtctcctgttggtgaacg

SEQ ID NO: 782739 - DNA, 25 bp, Homo sapien
actgctacaacatattccattatac

SEQ ID NO: 782740 - DNA, 25 bp, Homo sapien
ctcctgttggtgaacgtttactttg

SEQ ID NO: 782741 - DNA, 25 bp, Homo sapien
tccaagttgatactacgtagactat

SEQ ID NO: 782742 - DNA, 25 bp, Homo sapien
tacttcccgaaggaaacatagcaga

SEQ ID NO: 782743 - DNA, 25 bp, Homo sapien
aatggccaaaaagtccaacacagtg

SEQ ID NO: 782744 - DNA, 25 bp, Homo sapien
gaatcctcaaaagtcagtagtaaga

SEQ ID NO: 782745 - DNA, 25 bp, Homo sapien
ctttgtgagcttagattaggaaaaa

SEQ ID NO: 782746 - DNA, 25 bp, Homo sapien
tctcccgggttcaagtgattctgct

SEQ ID NO: 782747 - DNA, 25 bp, Homo sapien
ggcatgcgccaccaccctggccaat

SEQ ID NO: 782748 - DNA, 25 bp, Homo sapien
tggctcaccgcaacttccgtctccc

SEQ ID NO: 782749 - DNA, 25 bp, Homo sapien
cttccgtctcccgggttcaagtgat

SEQ ID NO: 782750 - DNA, 25 bp, Homo sapien
gtgccaccatgccagctgatttttg

SEQ ID NO: 782751 - DNA, 25 bp, Homo sapien
tcccgaggagttgggactagaggca

SEQ ID NO: 782752 - DNA, 25 bp, Homo sapien
atgccagctgatttttgtattttta

SEQ ID NO: 782753 - DNA, 25 bp, Homo sapien
gtagaggcaaggtttcaccatgttg

SEQ ID NO: 782754 - DNA, 25 bp, Homo sapien
gaatctagagatccagaaatcccaa

SEQ ID NO: 782755 - DNA, 25 bp, Homo sapien
tacacaatctcaactccacaaaggc

SEQ ID NO: 782756 - DNA, 25 bp, Homo sapien
gtgactggcctatgagagacactca

SEQ ID NO: 782757 - DNA, 25 bp, Homo sapien
tctgttctccgctgtgttcccattg

SEQ ID NO: 782758 - DNA, 25 bp, Homo sapien
ccgcgcccggtccacggcggctcat

SEQ ID NO: 782759 - DNA, 25 bp, Homo sapien
gcccgcgcccggtccacggcggctc

SEQ ID NO: 782760 - DNA, 25 bp, Homo sapien
cccgcgcccggtccacggcggctca

SEQ ID NO: 782761 - DNA, 25 bp, Homo sapien
cgcccgcgcccggtccacggcggct

SEQ ID NO: 782762 - DNA, 25 bp, Homo sapien
tggcgacgctggcaacttgcagccg

SEQ ID NO: 782763 - DNA, 25 bp, Homo sapien
gctggcaacttgcagccggtgctcc

SEQ ID NO: 782764 - DNA, 25 bp, Homo sapien
gacgctggcaacttgcagccggtgc

SEQ ID NO: 782765 - DNA, 25 bp, Homo sapien
gcgacgctggcaacttgcagccggt

SEQ ID NO: 782766 - DNA, 25 bp, Homo sapien
ctgggcctgggacaggacaggctgc

SEQ ID NO: 782767 - DNA, 25 bp, Homo sapien
tgggcctgggacaggacaggctgct

SEQ ID NO: 782768 - DNA, 25 bp, Homo sapien
ggcctgggacaggacaggctgcttt

SEQ ID NO: 782769 - DNA, 25 bp, Homo sapien
gggcctgggacaggacaggctgctt

SEQ ID NO: 782770 - DNA, 25 bp, Homo sapien
caaaatctcagagcttgtgccagaa

SEQ ID NO: 782771 - DNA, 25 bp, Homo sapien
tttaaatgttatgtccgcacgcacc

SEQ ID NO: 782772 - DNA, 25 bp, Homo sapien
gcagattggcacatttaaatcccgg

SEQ ID NO: 782773 - DNA, 25 bp, Homo sapien
tagacagaagggctggacataacca

SEQ ID NO: 782774 - DNA, 25 bp, Homo sapien
acagagggccctcagctaggtcaca

SEQ ID NO: 782775 - DNA, 25 bp, Homo sapien
tcagggttaccacagaggacaaggg

SEQ ID NO: 782776 - DNA, 25 bp, Homo sapien
aggacaagggaagctcatcggacag

SEQ ID NO: 782777 - DNA, 25 bp, Homo sapien
tgtgatcctgccttctacaacgaca

SEQ ID NO: 782778 - DNA, 25 bp, Homo sapien
gaagaagagtgagcccaacgtgccc

SEQ ID NO: 782779 - DNA, 25 bp, Homo sapien
agtgagcccaacgtgccctcaggga

SEQ ID NO: 782780 - DNA, 25 bp, Homo sapien
agaagaagagtgagcccaacgtgcc

SEQ ID NO: 782781 - DNA, 25 bp, Homo sapien
gaagagtgagcccaacgtgccctca

SEQ ID NO: 782782 - DNA, 25 bp, Homo sapien
gcatacttgcctgtgtagtttttgc

SEQ ID NO: 782783 - DNA, 25 bp, Homo sapien
tgcatacttgcctgtgtagtttttg

SEQ ID NO: 782784 - DNA, 25 bp, Homo sapien
tcagcagatccggcccaggaaggca

SEQ ID NO: 782785 - DNA, 25 bp, Homo sapien
gcagcaggaagtttccatgggccca

SEQ ID NO: 782786 - DNA, 25 bp, Homo sapien
caggaaggcagcaggaagtttccat

SEQ ID NO: 782787 - DNA, 25 bp, Homo sapien
ggaagtttccatgggcccatgctta

SEQ ID NO: 782788 - DNA, 25 bp, Homo sapien
tttttaagcagagatctagctcaga

SEQ ID NO: 782789 - DNA, 25 bp, Homo sapien
tatgttcaatgtgttatggtgaggg

SEQ ID NO: 782790 - DNA, 25 bp, Homo sapien
gcagagatctagctcagaggttgga

SEQ ID NO: 782791 - DNA, 25 bp, Homo sapien
gctcagaggttggagtatgttcaat

SEQ ID NO: 782792 - DNA, 25 bp, Homo sapien
caagacattgctgggagcagagaag

SEQ ID NO: 782793 - DNA, 25 bp, Homo sapien
caccatatggggacacagtagacac

SEQ ID NO: 782794 - DNA, 25 bp, Homo sapien
ggtgcccaagacattgctgggagca

SEQ ID NO: 782795 - DNA, 25 bp, Homo sapien
tctgggaggaagacttgcaagcacc

SEQ ID NO: 782796 - DNA, 25 bp, Homo sapien
gggtcagttgcttctatcagtctca

SEQ ID NO: 782797 - DNA, 25 bp, Homo sapien
tggcctactgaacgcaaagtctgag

SEQ ID NO: 782798 - DNA, 25 bp, Homo sapien
cagaaactgagcgaaaacccaagta

SEQ ID NO: 782799 - DNA, 25 bp, Homo sapien
catttccagcccgacgatggtacta

SEQ ID NO: 782800 - DNA, 25 bp, Homo sapien
gctcccagttctgggcgagccttgt

SEQ ID NO: 782801 - DNA, 25 bp, Homo sapien
actatagtgtggctcgtggttaggt

SEQ ID NO: 782802 - DNA, 25 bp, Homo sapien
ggcgagccttgtagtatttgctgat

SEQ ID NO: 782803 - DNA, 25 bp, Homo sapien
tggttaggtgcgagggcattttctt

SEQ ID NO: 782804 - DNA, 25 bp, Homo sapien
ccatacagggccctacagttccttg

SEQ ID NO: 782805 - DNA, 25 bp, Homo sapien
tacagggccctacagttccttgatt

SEQ ID NO: 782806 - DNA, 25 bp, Homo sapien
tttgcctcccgaagagttaagatta

SEQ ID NO: 782807 - DNA, 25 bp, Homo sapien
cccgaagagttaagattacaggatt

SEQ ID NO: 782808 - DNA, 25 bp, Homo sapien
gcaccaccataccaggctgatttaa

SEQ ID NO: 782809 - DNA, 25 bp, Homo sapien
ccaccataccaggctgatttaaaaa

SEQ ID NO: 782810 - DNA, 25 bp, Homo sapien
taaaaaaatcttgaggccgggcaca

SEQ ID NO: 782811 - DNA, 25 bp, Homo sapien
ttaagaaacagtgtcccactctttc

SEQ ID NO: 782812 - DNA, 25 bp, Homo sapien
tgtggcacagtttaccaccagttca

SEQ ID NO: 782813 - DNA, 25 bp, Homo sapien
tctgtggcacagtttaccaccagtt

SEQ ID NO: 782814 - DNA, 25 bp, Homo sapien
agtttaccaccagttcaccagcaaa

SEQ ID NO: 782815 - DNA, 25 bp, Homo sapien
gcacagtttaccaccagttcaccag

SEQ ID NO: 782816 - DNA, 25 bp, Homo sapien
agcccagcccgatgacgtcttccct

SEQ ID NO: 782817 - DNA, 25 bp, Homo sapien
gcccagcccgatgacgtcttccctc

SEQ ID NO: 782818 - DNA, 25 bp, Homo sapien
ccagcccgatgacgtcttccctcat

SEQ ID NO: 782819 - DNA, 25 bp, Homo sapien
tgagcccagcccgatgacgtcttcc

SEQ ID NO: 782820 - DNA, 25 bp, Homo sapien
cgacaatgatagtgtaatcctctgg

SEQ ID NO: 782821 - DNA, 25 bp, Homo sapien
cctcatcgacaatgatagtgtaatc

SEQ ID NO: 782822 - DNA, 25 bp, Homo sapien
tccttcctcatcgacaatgatagtg

SEQ ID NO: 782823 - DNA, 25 bp, Homo sapien
taggaatccttcctcatcgacaatg

SEQ ID NO: 782824 - DNA, 25 bp, Homo sapien
aagatgttctaaagcactttgtagg

SEQ ID NO: 782825 - DNA, 25 bp, Homo sapien
cccacagtgttgagactaaaagcgt

SEQ ID NO: 782826 - DNA, 25 bp, Homo sapien
gcactttgtaggtttcagtgaaaca

SEQ ID NO: 782827 - DNA, 25 bp, Homo sapien
cactgcgcccgactgaagatgttct

SEQ ID NO: 782828 - DNA, 25 bp, Homo sapien
ccacacatggtggtataccatcttc

SEQ ID NO: 782829 - DNA, 25 bp, Homo sapien
gagagtcttctcagactgtcctagg

SEQ ID NO: 782830 - DNA, 25 bp, Homo sapien
ctcagactgtcctaggccacacatg

SEQ ID NO: 782831 - DNA, 25 bp, Homo sapien
tagcctcatactgcagcccctaggc

SEQ ID NO: 782832 - DNA, 25 bp, Homo sapien
cctgaccatgccttgccatgcgtgg

SEQ ID NO: 782833 - DNA, 25 bp, Homo sapien
gcgtggcatggaccacaatgatgta

SEQ ID NO: 782834 - DNA, 25 bp, Homo sapien
catgccttgccatgcgtggcatgga

SEQ ID NO: 782835 - DNA, 25 bp, Homo sapien
cacaatgatgtaccgctgtccccag

SEQ ID NO: 782836 - DNA, 25 bp, Homo sapien
ggtgctgacataaccaagactctgc

SEQ ID NO: 782837 - DNA, 25 bp, Homo sapien
gaggcctgtctcttatcaaagccgc

SEQ ID NO: 782838 - DNA, 25 bp, Homo sapien
cagcggaagcggctgctgatatagc

SEQ ID NO: 782839 - DNA, 25 bp, Homo sapien
gatatagcctccgaggtggtgaagt

SEQ ID NO: 782840 - DNA, 25 bp, Homo sapien
tgagaaggaccagtggtcagccagt

SEQ ID NO: 782841 - DNA, 25 bp, Homo sapien
ctgagaaggaccagtggtcagccag

SEQ ID NO: 782842 - DNA, 25 bp, Homo sapien
gatgactgacttggcgatcttggtc

SEQ ID NO: 782843 - DNA, 25 bp, Homo sapien
cgtggacagcatgaacacggatatg

SEQ ID NO: 782844 - DNA, 25 bp, Homo sapien
caggatgaagtctgtctgatacgtg

SEQ ID NO: 782845 - DNA, 25 bp, Homo sapien
cggatatgttctggtcagccagtgg

SEQ ID NO: 782846 - DNA, 25 bp, Homo sapien
ggtctcgccattgacgacccgcagg

SEQ ID NO: 782847 - DNA, 25 bp, Homo sapien
cgccattgacgacccgcaggatggt

SEQ ID NO: 782848 - DNA, 25 bp, Homo sapien
tgacgacccgcaggatggtgaactc

SEQ ID NO: 782849 - DNA, 25 bp, Homo sapien
tcggctgccacggtctcgccattga

SEQ ID NO: 782850 - DNA, 25 bp, Homo sapien
tgacacagaacctgttgctcgggct

SEQ ID NO: 782851 - DNA, 25 bp, Homo sapien
gtgacacagaacctgttgctcgggc

SEQ ID NO: 782852 - DNA, 25 bp, Homo sapien
atccccagtggccatggggtccttc

SEQ ID NO: 782853 - DNA, 25 bp, Homo sapien
tgctgcgtctgcacgtccatcacca

SEQ ID NO: 782854 - DNA, 25 bp, Homo sapien
caccagggagatgtagccctcgatg

SEQ ID NO: 782855 - DNA, 25 bp, Homo sapien
gagaagaagcggatgtggccgcagt

SEQ ID NO: 782856 - DNA, 25 bp, Homo sapien
cagagctctccggatgcgcttgtga

SEQ ID NO: 782857 - DNA, 25 bp, Homo sapien
caggggctgtcctccaatccggacc

SEQ ID NO: 782858 - DNA, 25 bp, Homo sapien
caatccggaccatcttccagagctc

SEQ ID NO: 782859 - DNA, 25 bp, Homo sapien
agctctccggatgcgcttgtgaaca

SEQ ID NO: 782860 - DNA, 25 bp, Homo sapien
aacagaaatttcaggctccccaagc

SEQ ID NO: 782861 - DNA, 25 bp, Homo sapien
catattaaatttcaagagggggcaa

SEQ ID NO: 782862 - DNA, 25 bp, Homo sapien
tccccaagaggcctgtgtacagctg

SEQ ID NO: 782863 - DNA, 25 bp, Homo sapien
taaaagcactccgattgaagcctgc

SEQ ID NO: 782864 - DNA, 25 bp, Homo sapien
ggtatcgaactgctgtactcaaatg

SEQ ID NO: 782865 - DNA, 25 bp, Homo sapien
ctggccatccctcttgaaggcttaa

SEQ ID NO: 782866 - DNA, 25 bp, Homo sapien
ttgaaggcttaacccagatgtcccc

SEQ ID NO: 782867 - DNA, 25 bp, Homo sapien
gcactggcgtgagctcacttcacta

SEQ ID NO: 782868 - DNA, 25 bp, Homo sapien
tgagatctgggccacgatgccacac

SEQ ID NO: 782869 - DNA, 25 bp, Homo sapien
agatctgggccacgatgccacactc

SEQ ID NO: 782870 - DNA, 25 bp, Homo sapien
atcaaacttgaaagtactgatgtag

SEQ ID NO: 782871 - DNA, 25 bp, Homo sapien
tcaaacttgaaagtactgatgtagt

SEQ ID NO: 782872 - DNA, 25 bp, Homo sapien
cagggcactgatgacaccattgatg

SEQ ID NO: 782873 - DNA, 25 bp, Homo sapien
cttcagggcactgatgacaccattg

SEQ ID NO: 782874 - DNA, 25 bp, Homo sapien
ggcactgatgacaccattgatgttc

SEQ ID NO: 782875 - DNA, 25 bp, Homo sapien
ctgatgacaccattgatgttctctt

SEQ ID NO: 782876 - DNA, 25 bp, Homo sapien
gcctgagcaatgttacgaaatcccg

SEQ ID NO: 782877 - DNA, 25 bp, Homo sapien
agcggctccagcgtcttgtaacaga

SEQ ID NO: 782878 - DNA, 25 bp, Homo sapien
cctccggtgctcagatagaactaca

SEQ ID NO: 782879 - DNA, 25 bp, Homo sapien
tcaagtactcatgaatgccacagcc

SEQ ID NO: 782880 - DNA, 25 bp, Homo sapien
gaagatcaccaaatagtgccctggg

SEQ ID NO: 782881 - DNA, 25 bp, Homo sapien
gaagctgcctgcgtaaaaagtgcca

SEQ ID NO: 782882 - DNA, 25 bp, Homo sapien
tatatggtggctcaaatgtgcccgc

SEQ ID NO: 782883 - DNA, 25 bp, Homo sapien
taaggagttccatgcaactgcggat

SEQ ID NO: 782884 - DNA, 25 bp, Homo sapien
caggctctgcctattacactaacca

SEQ ID NO: 782885 - DNA, 25 bp, Homo sapien
aggccctgctcggagcggactagaa

SEQ ID NO: 782886 - DNA, 25 bp, Homo sapien
aaagcgcttcactcaggaagtggcg

SEQ ID NO: 782887 - DNA, 25 bp, Homo sapien
ccatgcaaagcgcttcactcaggaa

SEQ ID NO: 782888 - DNA, 25 bp, Homo sapien
tgtcttgggacctgaacttggcctg

SEQ ID NO: 782889 - DNA, 25 bp, Homo sapien
tcaaggcctgacaacaagactgcta

SEQ ID NO: 782890 - DNA, 25 bp, Homo sapien
cagatcttgggagcgatggaacgcc

SEQ ID NO: 782891 - DNA, 25 bp, Homo sapien
gaagccgagcgccatattgtgaaga

SEQ ID NO: 782892 - DNA, 25 bp, Homo sapien
cactcccggtctccaggttctcttc

SEQ ID NO: 782893 - DNA, 25 bp, Homo sapien
tcactcccggtctccaggttctctt

SEQ ID NO: 782894 - DNA, 25 bp, Homo sapien
tgagctgaggtcacgccactgtact

SEQ ID NO: 782895 - DNA, 25 bp, Homo sapien
ccagcctgggcaacaaaagtgaaac

SEQ ID NO: 782896 - DNA, 25 bp, Homo sapien
ttgagccaggaggtggaggatgcag

SEQ ID NO: 782897 - DNA, 25 bp, Homo sapien
caacaaaagtgaaactccgtctcaa

SEQ ID NO: 782898 - DNA, 25 bp, Homo sapien
taaatgaataaataggccgggcacg

SEQ ID NO: 782899 - DNA, 25 bp, Homo sapien
ataaatgaataaataggccgggcac

SEQ ID NO: 782900 - DNA, 25 bp, Homo sapien
cagatttatcaactcaagtgcagcc

SEQ ID NO: 782901 - DNA, 25 bp, Homo sapien
aagtgcagccaaattctgtctctaa

SEQ ID NO: 782902 - DNA, 25 bp, Homo sapien
taattcttaaattttgtatacagac

SEQ ID NO: 782903 - DNA, 25 bp, Homo sapien
tcttaaattttgtatacagacaagg

SEQ ID NO: 782904 - DNA, 25 bp, Homo sapien
ccacaggtgggctccaacatgccag

SEQ ID NO: 782905 - DNA, 25 bp, Homo sapien
accacaggtgggctccaacatgcca

SEQ ID NO: 782906 - DNA, 25 bp, Homo sapien
tgcctggccaggaatgtgtaatcaa

SEQ ID NO: 782907 - DNA, 25 bp, Homo sapien
tgactgaagccaatcgtaacatgag

SEQ ID NO: 782908 - DNA, 25 bp, Homo sapien
catgagtagtaccacgttacgtttc

SEQ ID NO: 782909 - DNA, 25 bp, Homo sapien
tctacaagcagagagttgaatccac

SEQ ID NO: 782910 - DNA, 25 bp, Homo sapien
gctgagactatagatgtgtgccacc

SEQ ID NO: 782911 - DNA, 25 bp, Homo sapien
agacaaagtattgttctgtcaccca

SEQ ID NO: 782912 - DNA, 25 bp, Homo sapien
ggctggaatacagtggcaccatcat

SEQ ID NO: 782913 - DNA, 25 bp, Homo sapien
cagcctcaatttcccaggttcaagt

SEQ ID NO: 782914 - DNA, 25 bp, Homo sapien
acgcttcggggcgtgtgggtggcgg

SEQ ID NO: 782915 - DNA, 25 bp, Homo sapien
cggccgcggagtccgaggcctgggc

SEQ ID NO: 782916 - DNA, 25 bp, Homo sapien
cgggggacgagcacgcttcggggcg

SEQ ID NO: 782917 - DNA, 25 bp, Homo sapien
gggagcagccgatggccgagggcgg

SEQ ID NO: 782918 - DNA, 25 bp, Homo sapien
gacgggcggagcgtggcatcacgca

SEQ ID NO: 782919 - DNA, 25 bp, Homo sapien
gcacacccccgctcggccaatcagg

SEQ ID NO: 782920 - DNA, 25 bp, Homo sapien
cgggcggagcgtggcatcacgcaca

SEQ ID NO: 782921 - DNA, 25 bp, Homo sapien
ggcggagcgtggcatcacgcacacc

SEQ ID NO: 782922 - DNA, 25 bp, Homo sapien
aacaaatgtccgcacaaaaacgtgt

SEQ ID NO: 782923 - DNA, 25 bp, Homo sapien
aattacccaaatagccatcaatgga

SEQ ID NO: 782924 - DNA, 25 bp, Homo sapien
tccgcacaaaaacgtgtacaccaat

SEQ ID NO: 782925 - DNA, 25 bp, Homo sapien
ccaaatagccatcaatggatggaaa

SEQ ID NO: 782926 - DNA, 25 bp, Homo sapien
gagtcttcaattgcagccgtgagca

SEQ ID NO: 782927 - DNA, 25 bp, Homo sapien
gtccacggaagtcacacagcctatg

SEQ ID NO: 782928 - DNA, 25 bp, Homo sapien
gattgatcccaactgcaagccggtg

SEQ ID NO: 782929 - DNA, 25 bp, Homo sapien
ggtgacttgaacacatacactggga

SEQ ID NO: 782930 - DNA, 25 bp, Homo sapien
cccagacctgggacttgttttctgt

SEQ ID NO: 782931 - DNA, 25 bp, Homo sapien
cctgggactcccaagcttaagtgat

SEQ ID NO: 782932 - DNA, 25 bp, Homo sapien
aatactggaattataggaatgagac

SEQ ID NO: 782933 - DNA, 25 bp, Homo sapien
cagcctgggactcccaagcttaagt

SEQ ID NO: 782934 - DNA, 25 bp, Homo sapien
cgagtagttgaaattacaggtgcgt

SEQ ID NO: 782935 - DNA, 25 bp, Homo sapien
caccacatctggctaatttttgtat

SEQ ID NO: 782936 - DNA, 25 bp, Homo sapien
gtgccaccacatctggctaattttt

SEQ ID NO: 782937 - DNA, 25 bp, Homo sapien
ttcaccataagaacttgtaccacag

SEQ ID NO: 782938 - DNA, 25 bp, Homo sapien
tctcccaaagccgatatagttatta

SEQ ID NO: 782939 - DNA, 25 bp, Homo sapien
gcaccatttactgagatcacagatt

SEQ ID NO: 782940 - DNA, 25 bp, Homo sapien
tgtaccacagaataaaatctcccaa

SEQ ID NO: 782941 - DNA, 25 bp, Homo sapien
caagctctgatgtcaaaagtctgct

SEQ ID NO: 782942 - DNA, 25 bp, Homo sapien
ggcgtcaactatgctaccagtaatc

SEQ ID NO: 782943 - DNA, 25 bp, Homo sapien
tggcccctgtgaattctgacatata

SEQ ID NO: 782944 - DNA, 25 bp, Homo sapien
caggatgataccacgtggaattcaa

SEQ ID NO: 782945 - DNA, 25 bp, Homo sapien
ttattttccgtgaaaggacacagag

SEQ ID NO: 782946 - DNA, 25 bp, Homo sapien
taacatgtactgaactacactctat

SEQ ID NO: 782947 - DNA, 25 bp, Homo sapien
gaactacactctatgcgccgatgct

SEQ ID NO: 782948 - DNA, 25 bp, Homo sapien
gatgcttttacgatcacccaattta

SEQ ID NO: 782949 - DNA, 25 bp, Homo sapien
actgtataagtatatgaattgtatc

SEQ ID NO: 782950 - DNA, 25 bp, Homo sapien
gtgccatgatcatagttggagtgca

SEQ ID NO: 782951 - DNA, 25 bp, Homo sapien
ctgtataagtatatgaattgtatct

SEQ ID NO: 782952 - DNA, 25 bp, Homo sapien
tgccatgatcatagttggagtgcag

SEQ ID NO: 782953 - DNA, 25 bp, Homo sapien
tacacctggctcaatcaactacttc

SEQ ID NO: 782954 - DNA, 25 bp, Homo sapien
tatgaatgtttcacttctgaccttt

SEQ ID NO: 782955 - DNA, 25 bp, Homo sapien
aaatccaaaggagtcacatattatg

SEQ ID NO: 782956 - DNA, 25 bp, Homo sapien
tctgaccttttatgaatcccctcaa

SEQ ID NO: 782957 - DNA, 25 bp, Homo sapien
attaagtacctgtcagctaccatca

SEQ ID NO: 782958 - DNA, 25 bp, Homo sapien
tttgtaagcaaaagatacacagatc

SEQ ID NO: 782959 - DNA, 25 bp, Homo sapien
ctatgttttgcatatgggactgcag

SEQ ID NO: 782960 - DNA, 25 bp, Homo sapien
ggcatgtattaccaggctcagctaa

SEQ ID NO: 782961 - DNA, 25 bp, Homo sapien
ctgaggaggactcttcttcaacagg

SEQ ID NO: 782962 - DNA, 25 bp, Homo sapien
ggcagggtggacactgctacctggg

SEQ ID NO: 782963 - DNA, 25 bp, Homo sapien
gcagggtggacactgctacctgggc

SEQ ID NO: 782964 - DNA, 25 bp, Homo sapien
agggcagacacgaggaatgtcacca

SEQ ID NO: 782965 - DNA, 25 bp, Homo sapien
gggcagacacgaggaatgtcaccac

SEQ ID NO: 782966 - DNA, 25 bp, Homo sapien
gcattaacaaaagcgcatcctctct

SEQ ID NO: 782967 - DNA, 25 bp, Homo sapien
tctttctgaaaatccgtcctggcat

SEQ ID NO: 782968 - DNA, 25 bp, Homo sapien
atcctctctcggttccgacgacaaa

SEQ ID NO: 782969 - DNA, 25 bp, Homo sapien
gtacactgcgatgcaggccacttct

SEQ ID NO: 782970 - DNA, 25 bp, Homo sapien
ttatttggtaagctgaatccaagaa

SEQ ID NO: 782971 - DNA, 25 bp, Homo sapien
gttaggatcgtttctaggagaatgc

SEQ ID NO: 782972 - DNA, 25 bp, Homo sapien
tgtggaagtcttgcctgcgatcctt

SEQ ID NO: 782973 - DNA, 25 bp, Homo sapien
cgatccttttgagattgggaataca

SEQ ID NO: 782974 - DNA, 25 bp, Homo sapien
tctacggaatagagtagggagtcca

SEQ ID NO: 782975 - DNA, 25 bp, Homo sapien
ttcatatggaacaccaagggactct

SEQ ID NO: 782976 - DNA, 25 bp, Homo sapien
gaccaaatatttagcatgcatgcca

SEQ ID NO: 782977 - DNA, 25 bp, Homo sapien
gcataaagacaaatagatctacgga

SEQ ID NO: 782978 - DNA, 25 bp, Homo sapien
actcactggaatgagtgccacactg

SEQ ID NO: 782979 - DNA, 25 bp, Homo sapien
aatgctgttggtcatcacaggcagg

SEQ ID NO: 782980 - DNA, 25 bp, Homo sapien
tgccacactgggtatcccaaatgct

SEQ ID NO: 782981 - DNA, 25 bp, Homo sapien
gtgggggtgtcactaaaactcactg

SEQ ID NO: 782982 - DNA, 25 bp, Homo sapien
tctgggacttcgataagacttgctg

SEQ ID NO: 782983 - DNA, 25 bp, Homo sapien
ggacttcgataagacttgctgggaa

SEQ ID NO: 782984 - DNA, 25 bp, Homo sapien
cttcgataagacttgctgggaagcc

SEQ ID NO: 782985 - DNA, 25 bp, Homo sapien
attttctgggacttcgataagactt

SEQ ID NO: 782986 - DNA, 25 bp, Homo sapien
tggaattacaggtgtgagccaccac

SEQ ID NO: 782987 - DNA, 25 bp, Homo sapien
tccgccagcctcagcctaccagagt

SEQ ID NO: 782988 - DNA, 25 bp, Homo sapien
cgccagcctcagcctaccagagtgc

SEQ ID NO: 782989 - DNA, 25 bp, Homo sapien
tgatccgccagcctcagcctaccag

SEQ ID NO: 782990 - DNA, 25 bp, Homo sapien
tatggtgccactgaaattcactgcg

SEQ ID NO: 782991 - DNA, 25 bp, Homo sapien
ggaactccctaggaaactgcctgtg

SEQ ID NO: 782992 - DNA, 25 bp, Homo sapien
tctgggcgttataaggaagatggcc

SEQ ID NO: 782993 - DNA, 25 bp, Homo sapien
taaacaggatttggtcacggcccac

SEQ ID NO: 782994 - DNA, 25 bp, Homo sapien
tttgctatacagttgaaacgtggca

SEQ ID NO: 782995 - DNA, 25 bp, Homo sapien
aaccacatagtaatttgaacacaga

SEQ ID NO: 782996 - DNA, 25 bp, Homo sapien
tcagtctagtcagaagagagaaacc

SEQ ID NO: 782997 - DNA, 25 bp, Homo sapien
taggaagactatacccctgaaccca

SEQ ID NO: 782998 - DNA, 25 bp, Homo sapien
taagcatttgtgctgtacacttccg

SEQ ID NO: 782999 - DNA, 25 bp, Homo sapien
gatgattggcattaggtcagtttct

SEQ ID NO: 783000 - DNA, 25 bp, Homo sapien
tatgataaacaggttaatgaactat

SEQ ID NO: 783001 - DNA, 25 bp, Homo sapien
cattaggtcagtttctaagcatttg

SEQ ID NO: 783002 - DNA, 25 bp, Homo sapien
gtttcgcccgagtggacctgcatcc

SEQ ID NO: 783003 - DNA, 25 bp, Homo sapien
tgagtatttccgtttcgcccgagtg

SEQ ID NO: 783004 - DNA, 25 bp, Homo sapien
tgccttcctgagtatttccgtttcg

SEQ ID NO: 783005 - DNA, 25 bp, Homo sapien
gacctgcatcccgttcacagggcag

SEQ ID NO: 783006 - DNA, 25 bp, Homo sapien
aattcccatcttcatgcctatggaa

SEQ ID NO: 783007 - DNA, 25 bp, Homo sapien
gggaggtgactgagccaacattgac

SEQ ID NO: 783008 - DNA, 25 bp, Homo sapien
gcccagcctgttatctagcttttta

SEQ ID NO: 783009 - DNA, 25 bp, Homo sapien
agacatgggtaggtggagtgacaac

SEQ ID NO: 783010 - DNA, 25 bp, Homo sapien
tggtgtgaacctaacgttctaccag

SEQ ID NO: 783011 - DNA, 25 bp, Homo sapien
ggatggtgtgaacctaacgttctac

SEQ ID NO: 783012 - DNA, 25 bp, Homo sapien
ttggatggtgtgaacctaacgttct

SEQ ID NO: 783013 - DNA, 25 bp, Homo sapien
gatggtgtgaacctaacgttctacc

SEQ ID NO: 783014 - DNA, 25 bp, Homo sapien
acagccgactggtctcgcagcatct

SEQ ID NO: 783015 - DNA, 25 bp, Homo sapien
ggaagcccctgcactaccacagccg

SEQ ID NO: 783016 - DNA, 25 bp, Homo sapien
gccgactggtctcgcagcatcttct

SEQ ID NO: 783017 - DNA, 25 bp, Homo sapien
cccctgcactaccacagccgactgg

SEQ ID NO: 783018 - DNA, 25 bp, Homo sapien
tacccagcacggaccaatgaaaaaa

SEQ ID NO: 783019 - DNA, 25 bp, Homo sapien
cagtcagctctgaaacgcagcaggc

SEQ ID NO: 783020 - DNA, 25 bp, Homo sapien
caggcgggatgcacgagtgaattaa

SEQ ID NO: 783021 - DNA, 25 bp, Homo sapien
aaaagcatgacacatctgaacagtc

SEQ ID NO: 783022 - DNA, 25 bp, Homo sapien
ctgactctctggtcctaggaagggt

SEQ ID NO: 783023 - DNA, 25 bp, Homo sapien
gctgactctctggtcctaggaaggg

SEQ ID NO: 783024 - DNA, 25 bp, Homo sapien
ccagctgactctctggtcctaggaa

SEQ ID NO: 783025 - DNA, 25 bp, Homo sapien
cagctgactctctggtcctaggaag

SEQ ID NO: 783026 - DNA, 25 bp, Homo sapien
tttaatgaagaagaagtggttcagc

SEQ ID NO: 783027 - DNA, 25 bp, Homo sapien
ccaaacctgagaagctgtcacttac

SEQ ID NO: 783028 - DNA, 25 bp, Homo sapien
cacatgtgtgccacgatggcttgct

SEQ ID NO: 783029 - DNA, 25 bp, Homo sapien
atggcttgctgcacctattggcccg

SEQ ID NO: 783030 - DNA, 25 bp, Homo sapien
ggtcttggagcatattccccgagga

SEQ ID NO: 783031 - DNA, 25 bp, Homo sapien
ggtgccttgtgaactgtgccacccc

SEQ ID NO: 783032 - DNA, 25 bp, Homo sapien
tgaagcatgtcatacacccagcagg

SEQ ID NO: 783033 - DNA, 25 bp, Homo sapien
cttactccacttaggcagtctcagc

SEQ ID NO: 783034 - DNA, 25 bp, Homo sapien
ggatctctccgcatctgttaccatc

SEQ ID NO: 783035 - DNA, 25 bp, Homo sapien
ctttcacttggtgatactatggatc

SEQ ID NO: 783036 - DNA, 25 bp, Homo sapien
cgcatctgttaccatcccagggcca

SEQ ID NO: 783037 - DNA, 25 bp, Homo sapien
gatactatggatctctccgcatctg

SEQ ID NO: 783038 - DNA, 25 bp, Homo sapien
cagttttcacattgatggggccgca

SEQ ID NO: 783039 - DNA, 25 bp, Homo sapien
tccatgggttcagttttcacattga

SEQ ID NO: 783040 - DNA, 25 bp, Homo sapien
cagaatcttccatgggttcagtttt

SEQ ID NO: 783041 - DNA, 25 bp, Homo sapien
agttttcacattgatggggccgcag

SEQ ID NO: 783042 - DNA, 25 bp, Homo sapien
gtgatccaccgtgcgcagccttgtt

SEQ ID NO: 783043 - DNA, 25 bp, Homo sapien
aaatgataacctgctagatacttgg

SEQ ID NO: 783044 - DNA, 25 bp, Homo sapien
gaaaggtgtcaaatgataacctgct

SEQ ID NO: 783045 - DNA, 25 bp, Homo sapien
cgcttggccgatacttgattctaaa

SEQ ID NO: 783046 - DNA, 25 bp, Homo sapien
agaagcaagaatggggtcaacccca

SEQ ID NO: 783047 - DNA, 25 bp, Homo sapien
tggggtcaaccccattgaagaggga

SEQ ID NO: 783048 - DNA, 25 bp, Homo sapien
catttttcctctaattaatgctggt

SEQ ID NO: 783049 - DNA, 25 bp, Homo sapien
gcaagaatggggtcaaccccattga

SEQ ID NO: 783050 - DNA, 25 bp, Homo sapien
ggtttgacctagaaccacactgcac

SEQ ID NO: 783051 - DNA, 25 bp, Homo sapien
gcctgtcacgtcagaaacgagacca

SEQ ID NO: 783052 - DNA, 25 bp, Homo sapien
cagttgtggcgaaaagatccttggg

SEQ ID NO: 783053 - DNA, 25 bp, Homo sapien
tgtgctgagctgaaatactgcgccc

SEQ ID NO: 783054 - DNA, 25 bp, Homo sapien
tgattctttcttgactgagacagct

SEQ ID NO: 783055 - DNA, 25 bp, Homo sapien
ttctgattctttcttgactgagaca

SEQ ID NO: 783056 - DNA, 25 bp, Homo sapien
gatagtaattaggatcttctgattc

SEQ ID NO: 783057 - DNA, 25 bp, Homo sapien
tattgatagtaattaggatcttctg

SEQ ID NO: 783058 - DNA, 25 bp, Homo sapien
tccattggtaattccatttctatta

SEQ ID NO: 783059 - DNA, 25 bp, Homo sapien
cttccattggtaattccatttctat

SEQ ID NO: 783060 - DNA, 25 bp, Homo sapien
ccattggtaattccatttctattac

SEQ ID NO: 783061 - DNA, 25 bp, Homo sapien
ttccattggtaattccatttctatt

SEQ ID NO: 783062 - DNA, 25 bp, Homo sapien
ttttcacctcggcttcagggtcctc

SEQ ID NO: 783063 - DNA, 25 bp, Homo sapien
gattttcacctcggcttcagggtcc

SEQ ID NO: 783064 - DNA, 25 bp, Homo sapien
ttcgattttcacctcggcttcaggg

SEQ ID NO: 783065 - DNA, 25 bp, Homo sapien
tcgattttcacctcggcttcagggt

SEQ ID NO: 783066 - DNA, 25 bp, Homo sapien
ttcctttagatacttgcacttcaac

SEQ ID NO: 783067 - DNA, 25 bp, Homo sapien
tgagttcaccggctgcaggcctgcg

SEQ ID NO: 783068 - DNA, 25 bp, Homo sapien
caggcctgcggagttacctttgata

SEQ ID NO: 783069 - DNA, 25 bp, Homo sapien
gggctatgtctgagtgaatcgtcct

SEQ ID NO: 783070 - DNA, 25 bp, Homo sapien
aacagtcacttgaacgatgttaaga

SEQ ID NO: 783071 - DNA, 25 bp, Homo sapien
gcagaatttgtaacactggatgaat

SEQ ID NO: 783072 - DNA, 25 bp, Homo sapien
ctgctgcagaatttgtaacactgga

SEQ ID NO: 783073 - DNA, 25 bp, Homo sapien
cacttgaacgatgttaagatcttca

SEQ ID NO: 783074 - DNA, 25 bp, Homo sapien
tcggctaaagaggtcattaacttgt

SEQ ID NO: 783075 - DNA, 25 bp, Homo sapien
ttcggctaaagaggtcattaacttg

SEQ ID NO: 783076 - DNA, 25 bp, Homo sapien
tttaggtatatgaattctggatata

SEQ ID NO: 783077 - DNA, 25 bp, Homo sapien
ttaggtatatgaattctggatataa

SEQ ID NO: 783078 - DNA, 25 bp, Homo sapien
tcctcatggaactgatttccagata

SEQ ID NO: 783079 - DNA, 25 bp, Homo sapien
ctcctcatggaactgatttccagat

SEQ ID NO: 783080 - DNA, 25 bp, Homo sapien
cctcctcatggaactgatttccaga

SEQ ID NO: 783081 - DNA, 25 bp, Homo sapien
cctcatggaactgatttccagatag

SEQ ID NO: 783082 - DNA, 25 bp, Homo sapien
atgcccggcctatttatttatgttt

SEQ ID NO: 783083 - DNA, 25 bp, Homo sapien
caggttaagtgattctcacgcctca

SEQ ID NO: 783084 - DNA, 25 bp, Homo sapien
tgagatggaggctcattctgctgcc

SEQ ID NO: 783085 - DNA, 25 bp, Homo sapien
tatgttttgagatggaggctcattc

SEQ ID NO: 783086 - DNA, 25 bp, Homo sapien
actgagctcaagccctggaagcggc

SEQ ID NO: 783087 - DNA, 25 bp, Homo sapien
attactgagctcaagccctggaagc

SEQ ID NO: 783088 - DNA, 25 bp, Homo sapien
ttactgagctcaagccctggaagcg

SEQ ID NO: 783089 - DNA, 25 bp, Homo sapien
cattactgagctcaagccctggaag

SEQ ID NO: 783090 - DNA, 25 bp, Homo sapien
ccatggcccaacattgccggaacgt

SEQ ID NO: 783091 - DNA, 25 bp, Homo sapien
aacattgccggaacgttcttctcac

SEQ ID NO: 783092 - DNA, 25 bp, Homo sapien
ccaacattgccggaacgttcttctc

SEQ ID NO: 783093 - DNA, 25 bp, Homo sapien
tggcccaacattgccggaacgttct

SEQ ID NO: 783094 - DNA, 25 bp, Homo sapien
tgctgtgccaggtggaacccctttt

SEQ ID NO: 783095 - DNA, 25 bp, Homo sapien
tgtgccaggtggaaccccttttgct

SEQ ID NO: 783096 - DNA, 25 bp, Homo sapien
tgccaggtggaaccccttttgcttc

SEQ ID NO: 783097 - DNA, 25 bp, Homo sapien
cactggaagggttctaggggcctct

SEQ ID NO: 783098 - DNA, 25 bp, Homo sapien
ggctggagtgtagtattgcaattat

SEQ ID NO: 783099 - DNA, 25 bp, Homo sapien
tggagtgtagtattgcaattatggt

SEQ ID NO: 783100 - DNA, 25 bp, Homo sapien
tgcaattatggttctctgctgtctc

SEQ ID NO: 783101 - DNA, 25 bp, Homo sapien
gtagtattgcaattatggttctctg

SEQ ID NO: 783102 - DNA, 25 bp, Homo sapien
tgcttgttatgtccagtttaaacag

SEQ ID NO: 783103 - DNA, 25 bp, Homo sapien
gacacctttgatgaggttcagcatg

SEQ ID NO: 783104 - DNA, 25 bp, Homo sapien
caaaagtacatgagccaaacaaaag

SEQ ID NO: 783105 - DNA, 25 bp, Homo sapien
ccgtgccaggcctcatccttatttt

SEQ ID NO: 783106 - DNA, 25 bp, Homo sapien
tgttcaaagcgttcagatgcatcgt

SEQ ID NO: 783107 - DNA, 25 bp, Homo sapien
tcttcaggaccgtgttgcattgcag

SEQ ID NO: 783108 - DNA, 25 bp, Homo sapien
gattttgtacccgtcatgggcaccg

SEQ ID NO: 783109 - DNA, 25 bp, Homo sapien
agttttgctaggaacgcccggatca

SEQ ID NO: 783110 - DNA, 25 bp, Homo sapien
tagtgaggcatacaatgtaatataa

SEQ ID NO: 783111 - DNA, 25 bp, Homo sapien
gggactagaagactccagcctttcc

SEQ ID NO: 783112 - DNA, 25 bp, Homo sapien
ctcccaatcccttgggactagaaga

SEQ ID NO: 783113 - DNA, 25 bp, Homo sapien
aagaactcattttgtcagctgggca

SEQ ID NO: 783114 - DNA, 25 bp, Homo sapien
ttccttctccaaaagagcgctgagc

SEQ ID NO: 783115 - DNA, 25 bp, Homo sapien
tataaaccagcctatctgggattcc

SEQ ID NO: 783116 - DNA, 25 bp, Homo sapien
aaaagagcgctgagcttgccagagc

SEQ ID NO: 783117 - DNA, 25 bp, Homo sapien
cctccaactcccattataaaccagc

SEQ ID NO: 783118 - DNA, 25 bp, Homo sapien
ccaacaattttcttgaggccagtca

SEQ ID NO: 783119 - DNA, 25 bp, Homo sapien
actaaagttgcctgctctaagggct

SEQ ID NO: 783120 - DNA, 25 bp, Homo sapien
gatccccttaaagtggcccttgcag

SEQ ID NO: 783121 - DNA, 25 bp, Homo sapien
ttttttccaagctgaggtcctgacc

SEQ ID NO: 783122 - DNA, 25 bp, Homo sapien
tatgtgaggacgggggaggtgggtc

SEQ ID NO: 783123 - DNA, 25 bp, Homo sapien
ctatgtgaggacgggggaggtgggt

SEQ ID NO: 783124 - DNA, 25 bp, Homo sapien
ggagagctgtcccacatttgcggaa

SEQ ID NO: 783125 - DNA, 25 bp, Homo sapien
aaggtgcaaagtgaagctgccagtc

SEQ ID NO: 783126 - DNA, 25 bp, Homo sapien
ccctagcattgaagccagcctgtag

SEQ ID NO: 783127 - DNA, 25 bp, Homo sapien
taacttgtcacgaaggccacgagtg

SEQ ID NO: 783128 - DNA, 25 bp, Homo sapien
atcctcccaccagccaagaattggg

SEQ ID NO: 783129 - DNA, 25 bp, Homo sapien
ccccatcctgtgtctctgataatct

SEQ ID NO: 783130 - DNA, 25 bp, Homo sapien
tttctcagccttttagacacacact

SEQ ID NO: 783131 - DNA, 25 bp, Homo sapien
tgcatacctgcagccgggcccgggg

SEQ ID NO: 783132 - DNA, 25 bp, Homo sapien
agccacaagccccctgccaaggctc

SEQ ID NO: 783133 - DNA, 25 bp, Homo sapien
gaacccacagccacaagccccctgc

SEQ ID NO: 783134 - DNA, 25 bp, Homo sapien
agccccctgccaaggctcaggcagc

SEQ ID NO: 783135 - DNA, 25 bp, Homo sapien
cctgccaaggctcaggcagcctggc

SEQ ID NO: 783136 - DNA, 25 bp, Homo sapien
tctggcccgcggaagatgagcttca

SEQ ID NO: 783137 - DNA, 25 bp, Homo sapien
tttttctggcccgcggaagatgagc

SEQ ID NO: 783138 - DNA, 25 bp, Homo sapien
aggaagctgtggcaagtgttgacac

SEQ ID NO: 783139 - DNA, 25 bp, Homo sapien
ctgtggcaagtgttgacaccacagc

SEQ ID NO: 783140 - DNA, 25 bp, Homo sapien
ccagtttctggacttggatgtgttt

SEQ ID NO: 783141 - DNA, 25 bp, Homo sapien
tcgctgctcatcttcctaaatggaa

SEQ ID NO: 783142 - DNA, 25 bp, Homo sapien
tggaaggtcgctgctcatcttccta

SEQ ID NO: 783143 - DNA, 25 bp, Homo sapien
cttctggaaggtcgctgctcatctt

SEQ ID NO: 783144 - DNA, 25 bp, Homo sapien
ggccatcagcgcacatcagagttag

SEQ ID NO: 783145 - DNA, 25 bp, Homo sapien
tagatgaggacgttgttgccccagt

SEQ ID NO: 783146 - DNA, 25 bp, Homo sapien
gcaaggaaatgtctccctcccagga

SEQ ID NO: 783147 - DNA, 25 bp, Homo sapien
gactgtgtgaattaaaccctgcctg

SEQ ID NO: 783148 - DNA, 25 bp, Homo sapien
gggacagcgccacttgcggtgtttc

SEQ ID NO: 783149 - DNA, 25 bp, Homo sapien
gctcggcgtaggtgggacgcagacc

SEQ ID NO: 783150 - DNA, 25 bp, Homo sapien
gtgtttctcagaccgctgctgccca

SEQ ID NO: 783151 - DNA, 25 bp, Homo sapien
ttgctctctcggctgttttcatggt

SEQ ID NO: 783152 - DNA, 25 bp, Homo sapien
taaggatgcaacctctgacgttctg

SEQ ID NO: 783153 - DNA, 25 bp, Homo sapien
taggctctgtgacggcatagttttc

SEQ ID NO: 783154 - DNA, 25 bp, Homo sapien
gagatttcacaagcaatgcgagttg

SEQ ID NO: 783155 - DNA, 25 bp, Homo sapien
gacgttctgcgccttcctaggagag

SEQ ID NO: 783156 - DNA, 25 bp, Homo sapien
aggggtcgccgtggccggcattatt

SEQ ID NO: 783157 - DNA, 25 bp, Homo sapien
gggtcgccgtggccggcattatttc

SEQ ID NO: 783158 - DNA, 25 bp, Homo sapien
taggaacgctgttctagccggcccc

SEQ ID NO: 783159 - DNA, 25 bp, Homo sapien
ttaggaacgctgttctagccggccc

SEQ ID NO: 783160 - DNA, 25 bp, Homo sapien
tagctcgatgacactaaggccccaa

SEQ ID NO: 783161 - DNA, 25 bp, Homo sapien
gattttttatgtactcagcagagcc

SEQ ID NO: 783162 - DNA, 25 bp, Homo sapien
gagcagtagcttgagacccgaagtc

SEQ ID NO: 783163 - DNA, 25 bp, Homo sapien
gacctgttactaccccaagctgtgt

SEQ ID NO: 783164 - DNA, 25 bp, Homo sapien
ggcgggtgcctgtaatcccagctac

SEQ ID NO: 783165 - DNA, 25 bp, Homo sapien
aataaaacagttagctgggcatgat

SEQ ID NO: 783166 - DNA, 25 bp, Homo sapien
tcgggaggctgaggcaggatagtcg

SEQ ID NO: 783167 - DNA, 25 bp, Homo sapien
gactccatcacaagaaaaaaagaac

SEQ ID NO: 783168 - DNA, 25 bp, Homo sapien
tttgagacggcgattaaggagagca

SEQ ID NO: 783169 - DNA, 25 bp, Homo sapien
gaaatgtttgagacggcgattaagg

SEQ ID NO: 783170 - DNA, 25 bp, Homo sapien
aggcccgaaatgtttgagacggcga

SEQ ID NO: 783171 - DNA, 25 bp, Homo sapien
gagacggcgattaaggagagcacct

SEQ ID NO: 783172 - DNA, 25 bp, Homo sapien
tgattgtgtttgacactgggagatg

SEQ ID NO: 783173 - DNA, 25 bp, Homo sapien
tgcactcttgtatatgtttaaaact

SEQ ID NO: 783174 - DNA, 25 bp, Homo sapien
agggctgaattagctctggagtcag

SEQ ID NO: 783175 - DNA, 25 bp, Homo sapien
aaactgctttttaagctgcactctt

SEQ ID NO: 783176 - DNA, 25 bp, Homo sapien
ttttggcattccgaggctggagaag

SEQ ID NO: 783177 - DNA, 25 bp, Homo sapien
acttttggcattccgaggctggaga

SEQ ID NO: 783178 - DNA, 25 bp, Homo sapien
tcgacttttggcattccgaggctgg

SEQ ID NO: 783179 - DNA, 25 bp, Homo sapien
ttggcattccgaggctggagaagat

SEQ ID NO: 783180 - DNA, 25 bp, Homo sapien
tcagctgttcgaaccccgacccaga

SEQ ID NO: 783181 - DNA, 25 bp, Homo sapien
ttcaagccacgagggagagagtttt

SEQ ID NO: 783182 - DNA, 25 bp, Homo sapien
ccttcaagccacgagggagagagtt

SEQ ID NO: 783183 - DNA, 25 bp, Homo sapien
ttcccttcaagccacgagggagaga

SEQ ID NO: 783184 - DNA, 25 bp, Homo sapien
gagggccggtacagtgtcctccatg

SEQ ID NO: 783185 - DNA, 25 bp, Homo sapien
tgagctggcgatgaactccgtggcc

SEQ ID NO: 783186 - DNA, 25 bp, Homo sapien
gaagctgaataacgtctctaggtct

SEQ ID NO: 783187 - DNA, 25 bp, Homo sapien
gcttgtgggcttgatcaggccgtca

SEQ ID NO: 783188 - DNA, 25 bp, Homo sapien
tcctgtagtggagaagataaaagtc

SEQ ID NO: 783189 - DNA, 25 bp, Homo sapien
taactcataggttaacctcagcatg

SEQ ID NO: 783190 - DNA, 25 bp, Homo sapien
tggtcaagcaatcaaagtactggtg

SEQ ID NO: 783191 - DNA, 25 bp, Homo sapien
tctgtagcagggtaacaaaattatc

SEQ ID NO: 783192 - DNA, 25 bp, Homo sapien
cacagcaccttgtggacatgagtga

SEQ ID NO: 783193 - DNA, 25 bp, Homo sapien
tgggtgtgccctaaaatacttctcc

SEQ ID NO: 783194 - DNA, 25 bp, Homo sapien
gagtgaaggtcagtcagtgtgccaa

SEQ ID NO: 783195 - DNA, 25 bp, Homo sapien
taatcatgctcacgactactaaggt

SEQ ID NO: 783196 - DNA, 25 bp, Homo sapien
ggtaagttctcagcgaacgacgtga

SEQ ID NO: 783197 - DNA, 25 bp, Homo sapien
agtgagggagttcaacttcggtaag

SEQ ID NO: 783198 - DNA, 25 bp, Homo sapien
ttctcagcgaacgacgtgacctttt

SEQ ID NO: 783199 - DNA, 25 bp, Homo sapien
acttcggtaagttctcagcgaacga

SEQ ID NO: 783200 - DNA, 25 bp, Homo sapien
aaaatagctttaaagccctgctcac

SEQ ID NO: 783201 - DNA, 25 bp, Homo sapien
tgctaaagctcacaatacagaaata

SEQ ID NO: 783202 - DNA, 25 bp, Homo sapien
taacaaggaaaaagcctgctaaagc

SEQ ID NO: 783203 - DNA, 25 bp, Homo sapien
aactattgatactcaaaatagcttt

SEQ ID NO: 783204 - DNA, 25 bp, Homo sapien
tctcagtagaaattgggacctgcca

SEQ ID NO: 783205 - DNA, 25 bp, Homo sapien
ttcagtaggccatgaatacttgggt

SEQ ID NO: 783206 - DNA, 25 bp, Homo sapien
gactcagactttgcgttcagtaggc

SEQ ID NO: 783207 - DNA, 25 bp, Homo sapien
gaagttagtaccatcgtcgggctgg

SEQ ID NO: 783208 - DNA, 25 bp, Homo sapien
gcccgtcagtccaaattagcctggt

SEQ ID NO: 783209 - DNA, 25 bp, Homo sapien
tgatagcacccacgttatagggctg

SEQ ID NO: 783210 - DNA, 25 bp, Homo sapien
tgacctgcttatgtgattcccatgg

SEQ ID NO: 783211 - DNA, 25 bp, Homo sapien
gcttgagtgaggcacacttgacctg

SEQ ID NO: 783212 - DNA, 25 bp, Homo sapien
caaatgtgaaatcaaggcccggtgc

SEQ ID NO: 783213 - DNA, 25 bp, Homo sapien
atgtgaaatcaaggcccggtgcggt

SEQ ID NO: 783214 - DNA, 25 bp, Homo sapien
gggagagttcaaatgtgaaatcaag

SEQ ID NO: 783215 - DNA, 25 bp, Homo sapien
ggagagttcaaatgtgaaatcaagg

SEQ ID NO: 783216 - DNA, 25 bp, Homo sapien
tactgcatgagatcccacttgtatg

SEQ ID NO: 783217 - DNA, 25 bp, Homo sapien
tatgaaatacctggtgtagccggag

SEQ ID NO: 783218 - DNA, 25 bp, Homo sapien
tgctgtccgtattgaaaatgtgctt

SEQ ID NO: 783219 - DNA, 25 bp, Homo sapien
gcttaacacgattgaattgcacact

SEQ ID NO: 783220 - DNA, 25 bp, Homo sapien
acccatgcctcagtgtgcaggatga

SEQ ID NO: 783221 - DNA, 25 bp, Homo sapien
gacacttcttgaggtcggcttcagc

SEQ ID NO: 783222 - DNA, 25 bp, Homo sapien
gactggtcgtcccttggtgttgact

SEQ ID NO: 783223 - DNA, 25 bp, Homo sapien
tcaaaaaagtcagttgtagctgggc

SEQ ID NO: 783224 - DNA, 25 bp, Homo sapien
cctgcagacaatagggcaaacctga

SEQ ID NO: 783225 - DNA, 25 bp, Homo sapien
tagggcaaacctgaccatgtgatca

SEQ ID NO: 783226 - DNA, 25 bp, Homo sapien
cagacaatagggcaaacctgaccat

SEQ ID NO: 783227 - DNA, 25 bp, Homo sapien
aaacctgaccatgtgatcaccctac

SEQ ID NO: 783228 - DNA, 25 bp, Homo sapien
cccagcacttcaggctgatcgcttg

SEQ ID NO: 783229 - DNA, 25 bp, Homo sapien
ctttaaataattactagattggcca

SEQ ID NO: 783230 - DNA, 25 bp, Homo sapien
aataattactagattggccaagcac

SEQ ID NO: 783231 - DNA, 25 bp, Homo sapien
aattactagattggccaagcacagt

SEQ ID NO: 783232 - DNA, 25 bp, Homo sapien
tctccagcaaaggtagagggtgaga

SEQ ID NO: 783233 - DNA, 25 bp, Homo sapien
tatgttctccagcaaaggtagaggg

SEQ ID NO: 783234 - DNA, 25 bp, Homo sapien
ggaggaaaagacgtgagtcctgtat

SEQ ID NO: 783235 - DNA, 25 bp, Homo sapien
gacgtgagtcctgtatgttctccag

SEQ ID NO: 783236 - DNA, 25 bp, Homo sapien
tgcagagcggtgaagacactagctt

SEQ ID NO: 783237 - DNA, 25 bp, Homo sapien
ctagctttggagaagtacaatggca

SEQ ID NO: 783238 - DNA, 25 bp, Homo sapien
gtggtgatgagagctaccgttgact

SEQ ID NO: 783239 - DNA, 25 bp, Homo sapien
gactttgccatattttgcagagcgg

SEQ ID NO: 783240 - DNA, 25 bp, Homo sapien
ttgagtgatctgctaccagagctgt

SEQ ID NO: 783241 - DNA, 25 bp, Homo sapien
cctcccgggcttgagtgatctgcta

SEQ ID NO: 783242 - DNA, 25 bp, Homo sapien
cgggcttgagtgatctgctaccaga

SEQ ID NO: 783243 - DNA, 25 bp, Homo sapien
tcccgggcttgagtgatctgctacc

SEQ ID NO: 783244 - DNA, 25 bp, Homo sapien
tagatccgggatttaaatgtgccaa

SEQ ID NO: 783245 - DNA, 25 bp, Homo sapien
tcaggcaagaagtgatagatccggg

SEQ ID NO: 783246 - DNA, 25 bp, Homo sapien
tagttggaagagaggatctagaccc

SEQ ID NO: 783247 - DNA, 25 bp, Homo sapien
tcagaggtgcgtgcggacataacat

SEQ ID NO: 783248 - DNA, 25 bp, Homo sapien
cctgtaggaggtggcactagatctt

SEQ ID NO: 783249 - DNA, 25 bp, Homo sapien
aacgccgggtgcctacctgtaggag

SEQ ID NO: 783250 - DNA, 25 bp, Homo sapien
ggtggcactagatcttagagctttt

SEQ ID NO: 783251 - DNA, 25 bp, Homo sapien
gaagggctggtctagcagggtacct

SEQ ID NO: 783252 - DNA, 25 bp, Homo sapien
gatgcagagataccttgccccttcc

SEQ ID NO: 783253 - DNA, 25 bp, Homo sapien
gggtccaagggatgcagagatacct

SEQ ID NO: 783254 - DNA, 25 bp, Homo sapien
tccaagggatgcagagataccttgc

SEQ ID NO: 783255 - DNA, 25 bp, Homo sapien
aagggatgcagagataccttgcccc

SEQ ID NO: 783256 - DNA, 25 bp, Homo sapien
tcaggtgatccactggcctcgacct

SEQ ID NO: 783257 - DNA, 25 bp, Homo sapien
cacctggctaatttggtgtggagac

SEQ ID NO: 783258 - DNA, 25 bp, Homo sapien
ctaatttggtgtggagacggggctt

SEQ ID NO: 783259 - DNA, 25 bp, Homo sapien
caggtgatccactggcctcgacctc

SEQ ID NO: 783260 - DNA, 25 bp, Homo sapien
cctaggcaacattgcgaaaaataca

SEQ ID NO: 783261 - DNA, 25 bp, Homo sapien
ggtgatggagcaagattccgactca

SEQ ID NO: 783262 - DNA, 25 bp, Homo sapien
ggcaacattgcgaaaaatacaaata

SEQ ID NO: 783263 - DNA, 25 bp, Homo sapien
ggcacgagaatcgctgaaccaaggg

SEQ ID NO: 783264 - DNA, 25 bp, Homo sapien
gagggaattctaccaggacggtgcc

SEQ ID NO: 783265 - DNA, 25 bp, Homo sapien
tctttacagcgtgatggtctcaggg

SEQ ID NO: 783266 - DNA, 25 bp, Homo sapien
gaatcctcaggacttggcaactcag

SEQ ID NO: 783267 - DNA, 25 bp, Homo sapien
caggacttagggagcagatttgcca

SEQ ID NO: 783268 - DNA, 25 bp, Homo sapien
cctgataagaaaatgaagctgtggg

SEQ ID NO: 783269 - DNA, 25 bp, Homo sapien
taagaaaatgaagctgtgggccagg

SEQ ID NO: 783270 - DNA, 25 bp, Homo sapien
gtgaacccccatctccgctatacaa

SEQ ID NO: 783271 - DNA, 25 bp, Homo sapien
tgataagaaaatgaagctgtgggcc

SEQ ID NO: 783272 - DNA, 25 bp, Homo sapien
tattttacctaggaggaaaagagca

SEQ ID NO: 783273 - DNA, 25 bp, Homo sapien
caacctatgagtcaggaactcttat

SEQ ID NO: 783274 - DNA, 25 bp, Homo sapien
taaacagtgtgttcaggccgggtgt

SEQ ID NO: 783275 - DNA, 25 bp, Homo sapien
tcagtttttgttgcaacctatgagt

SEQ ID NO: 783276 - DNA, 25 bp, Homo sapien
gtgacctaactctgcactccgaagg

SEQ ID NO: 783277 - DNA, 25 bp, Homo sapien
tagtcaaattcagaggcccagcaaa

SEQ ID NO: 783278 - DNA, 25 bp, Homo sapien
actccgaagggagtgactcaactcc

SEQ ID NO: 783279 - DNA, 25 bp, Homo sapien
cagcaaagttgttcccatgggtcag

SEQ ID NO: 783280 - DNA, 25 bp, Homo sapien
taaggtagaggtggtcaaggttctc

SEQ ID NO: 783281 - DNA, 25 bp, Homo sapien
cagccataagccactgtgttggact

SEQ ID NO: 783282 - DNA, 25 bp, Homo sapien
tctgctatgtttccttcgggaagta

SEQ ID NO: 783283 - DNA, 25 bp, Homo sapien
caaaacatggttaacaggatagagc

SEQ ID NO: 783284 - DNA, 25 bp, Homo sapien
gagtctggcagaatgcataccttta

SEQ ID NO: 783285 - DNA, 25 bp, Homo sapien
tacctttaggtagacatcatcacaa

SEQ ID NO: 783286 - DNA, 25 bp, Homo sapien
cacaatcaagatataaaagggttcc

SEQ ID NO: 783287 - DNA, 25 bp, Homo sapien
aaaattgcacactgccctattgtag

SEQ ID NO: 783288 - DNA, 25 bp, Homo sapien
tgctcacacttggactggtgcagga

SEQ ID NO: 783289 - DNA, 25 bp, Homo sapien
ggtttctgggatgacttgcacttaa

SEQ ID NO: 783290 - DNA, 25 bp, Homo sapien
ctggctcaagcaggatagaagtgac

SEQ ID NO: 783291 - DNA, 25 bp, Homo sapien
tgactaacacccctttcttggcagc

SEQ ID NO: 783292 - DNA, 25 bp, Homo sapien
gcaactgatgaaataggaactctgg

SEQ ID NO: 783293 - DNA, 25 bp, Homo sapien
gccttttgctctgctatcgggcaga

SEQ ID NO: 783294 - DNA, 25 bp, Homo sapien
tcgggcagatggcattgtctctgct

SEQ ID NO: 783295 - DNA, 25 bp, Homo sapien
ttcctggcccaggtgagacattcgg

SEQ ID NO: 783296 - DNA, 25 bp, Homo sapien
acctggagcacaaggggaaactggg

SEQ ID NO: 783297 - DNA, 25 bp, Homo sapien
gacctggagcacaaggggaaactgg

SEQ ID NO: 783298 - DNA, 25 bp, Homo sapien
agcttgaagcgtgttggggtctcct

SEQ ID NO: 783299 - DNA, 25 bp, Homo sapien
aagcttgaagcgtgttggggtctcc

SEQ ID NO: 783300 - DNA, 25 bp, Homo sapien
ctcttctctgtacatgcccgtttca

SEQ ID NO: 783301 - DNA, 25 bp, Homo sapien
ccgctgggggctccgctcttcctgg

SEQ ID NO: 783302 - DNA, 25 bp, Homo sapien
tcttcctggggctgcggttgatggc

SEQ ID NO: 783303 - DNA, 25 bp, Homo sapien
cctggggctgcggttgatggctcat

SEQ ID NO: 783304 - DNA, 25 bp, Homo sapien
ggtgctccgctgggggctccgctct

SEQ ID NO: 783305 - DNA, 25 bp, Homo sapien
gattcatccaaacattctctcttcc

SEQ ID NO: 783306 - DNA, 25 bp, Homo sapien
atcagattcatccaaacattctctc

SEQ ID NO: 783307 - DNA, 25 bp, Homo sapien
cagattcatccaaacattctctctt

SEQ ID NO: 783308 - DNA, 25 bp, Homo sapien
ccttctctggctcatcatcagattc

SEQ ID NO: 783309 - DNA, 25 bp, Homo sapien
cctgttgaaggcctcgtagtactca

SEQ ID NO: 783310 - DNA, 25 bp, Homo sapien
gcgacactcgccgtcgcttcgcctt

SEQ ID NO: 783311 - DNA, 25 bp, Homo sapien
tactcagggagcacgagcgacactc

SEQ ID NO: 783312 - DNA, 25 bp, Homo sapien
gcttcgccttcatcttgaggccaca

SEQ ID NO: 783313 - DNA, 25 bp, Homo sapien
ccattggaaaagtgtggttattgga

SEQ ID NO: 783314 - DNA, 25 bp, Homo sapien
tcccattggaaaagtgtggttattg

SEQ ID NO: 783315 - DNA, 25 bp, Homo sapien
cccattggaaaagtgtggttattgg

SEQ ID NO: 783316 - DNA, 25 bp, Homo sapien
cattggaaaagtgtggttattggaa

SEQ ID NO: 783317 - DNA, 25 bp, Homo sapien
gtgtgcctcccgggggaaagtctca

SEQ ID NO: 783318 - DNA, 25 bp, Homo sapien
tgtgagaatctacaggatgtagagc

SEQ ID NO: 783319 - DNA, 25 bp, Homo sapien
tgagaatctacaggatgtagagctg

SEQ ID NO: 783320 - DNA, 25 bp, Homo sapien
tgtgcctcccgggggaaagtctcag

SEQ ID NO: 783321 - DNA, 25 bp, Homo sapien
ttgtccgacaccctcagatctttgt

SEQ ID NO: 783322 - DNA, 25 bp, Homo sapien
gtcccaggccaggagtcttttaatg

SEQ ID NO: 783323 - DNA, 25 bp, Homo sapien
ggccaggagtcttttaatgacagga

SEQ ID NO: 783324 - DNA, 25 bp, Homo sapien
caggagtcttttaatgacaggatcc

SEQ ID NO: 783325 - DNA, 25 bp, Homo sapien
gaaggtcggatgcaaatccgagaag

SEQ ID NO: 783326 - DNA, 25 bp, Homo sapien
aaggtcggatgcaaatccgagaagc

SEQ ID NO: 783327 - DNA, 25 bp, Homo sapien
gcccggctgaaatacgctatgacca

SEQ ID NO: 783328 - DNA, 25 bp, Homo sapien
aggccggcccggctgaaatacgcta

SEQ ID NO: 783329 - DNA, 25 bp, Homo sapien
ccggcccggctgaaatacgctatga

SEQ ID NO: 783330 - DNA, 25 bp, Homo sapien
ggaggccggcccggctgaaatacgc

SEQ ID NO: 783331 - DNA, 25 bp, Homo sapien
caggagagacctccggctgaggtca

SEQ ID NO: 783332 - DNA, 25 bp, Homo sapien
ccaccaggagagacctccggctgag

SEQ ID NO: 783333 - DNA, 25 bp, Homo sapien
aggacagaaatcaggttgctgctca

SEQ ID NO: 783334 - DNA, 25 bp, Homo sapien
ctgaggacagaaatcaggttgctgc

SEQ ID NO: 783335 - DNA, 25 bp, Homo sapien
cgggtctcctcgtacaggaagtaga

SEQ ID NO: 783336 - DNA, 25 bp, Homo sapien
agagcgggtctcctcgtacaggaag

SEQ ID NO: 783337 - DNA, 25 bp, Homo sapien
agggtatatgagagcgggtctcctc

SEQ ID NO: 783338 - DNA, 25 bp, Homo sapien
atatgagagcgggtctcctcgtaca

SEQ ID NO: 783339 - DNA, 25 bp, Homo sapien
ccacacccagtgctctgggtcataa

SEQ ID NO: 783340 - DNA, 25 bp, Homo sapien
cttctctcaggccgatgacctcagg

SEQ ID NO: 783341 - DNA, 25 bp, Homo sapien
tcagtcacaaacctaaacagcaaat

SEQ ID NO: 783342 - DNA, 25 bp, Homo sapien
taatagatacaaagattgaaaggta

SEQ ID NO: 783343 - DNA, 25 bp, Homo sapien
agataaaaagagtgctcgcttcagg

SEQ ID NO: 783344 - DNA, 25 bp, Homo sapien
tagaagagattattatggaagtatc

SEQ ID NO: 783345 - DNA, 25 bp, Homo sapien
tgtatcgacttcatgctgaccaggg

SEQ ID NO: 783346 - DNA, 25 bp, Homo sapien
tacagatttacaaaccgcgtcccac

SEQ ID NO: 783347 - DNA, 25 bp, Homo sapien
cctcattcttgagggattagggatg

SEQ ID NO: 783348 - DNA, 25 bp, Homo sapien
tggtctgatgcagttacagatttac

SEQ ID NO: 783349 - DNA, 25 bp, Homo sapien
tccatgttctcagcggttatccttg

SEQ ID NO: 783350 - DNA, 25 bp, Homo sapien
ccttggatgtgagatctcatgcact

SEQ ID NO: 783351 - DNA, 25 bp, Homo sapien
gttacttaaacatatgcagctaaaa

SEQ ID NO: 783352 - DNA, 25 bp, Homo sapien
tacttgtaaagcgtttggtgctaat

SEQ ID NO: 783353 - DNA, 25 bp, Homo sapien
gactggtgtttgatcacgatgggaa

SEQ ID NO: 783354 - DNA, 25 bp, Homo sapien
ccacgtatcggcgaaggttgggact

SEQ ID NO: 783355 - DNA, 25 bp, Homo sapien
tgggactcgactggtgtttgatcac

SEQ ID NO: 783356 - DNA, 25 bp, Homo sapien
atcacgatgggaaaatcatccagaa

SEQ ID NO: 783357 - DNA, 25 bp, Homo sapien
ttcattttcgaccacctttcttcca

SEQ ID NO: 783358 - DNA, 25 bp, Homo sapien
cattgcccataagaattgtttccca

SEQ ID NO: 783359 - DNA, 25 bp, Homo sapien
tccacattgcccataagaattgttt

SEQ ID NO: 783360 - DNA, 25 bp, Homo sapien
cataagaattgtttcccatgctgaa

SEQ ID NO: 783361 - DNA, 25 bp, Homo sapien
agccaggaacaaattgggaagaagc

SEQ ID NO: 783362 - DNA, 25 bp, Homo sapien
gaccacctggccatcgaagtcctgc

SEQ ID NO: 783363 - DNA, 25 bp, Homo sapien
ggaccacctggccatcgaagtcctg

SEQ ID NO: 783364 - DNA, 25 bp, Homo sapien
ctggaccacctggccatcgaagtcc

SEQ ID NO: 783365 - DNA, 25 bp, Homo sapien
ccacctggccatcgaagtcctgcat

SEQ ID NO: 783366 - DNA, 25 bp, Homo sapien
gaacagactatgatcctgaccacag

SEQ ID NO: 783367 - DNA, 25 bp, Homo sapien
cctttatccgtcaggaacagactat

SEQ ID NO: 783368 - DNA, 25 bp, Homo sapien
gaatagacttctcctttatccgtca

SEQ ID NO: 783369 - DNA, 25 bp, Homo sapien
gactatgatcctgaccacaggcgac

SEQ ID NO: 783370 - DNA, 25 bp, Homo sapien
caatcaccgtaggtggcaacttgga

SEQ ID NO: 783371 - DNA, 25 bp, Homo sapien
ttggataacgttcactcccgccagg

SEQ ID NO: 783372 - DNA, 25 bp, Homo sapien
gcgagctggtgatattgtagtgacc

SEQ ID NO: 783373 - DNA, 25 bp, Homo sapien
gccaggcagcaatcaccgtaggtgg

SEQ ID NO: 783374 - DNA, 25 bp, Homo sapien
gtaacagggagagccgtacttctcc

SEQ ID NO: 783375 - DNA, 25 bp, Homo sapien
acagggagagccgtacttctcccca

SEQ ID NO: 783376 - DNA, 25 bp, Homo sapien
tggtaacagggagagccgtacttct

SEQ ID NO: 783377 - DNA, 25 bp, Homo sapien
gggagagccgtacttctccccaaca

SEQ ID NO: 783378 - DNA, 25 bp, Homo sapien
accgcatgcagcctgtcgcaccttc

SEQ ID NO: 783379 - DNA, 25 bp, Homo sapien
gtttaacactgcacagcccgtgcca

SEQ ID NO: 783380 - DNA, 25 bp, Homo sapien
cactcctgagaagtgtaagcagcgg

SEQ ID NO: 783381 - DNA, 25 bp, Homo sapien
tgcagcctgtcgcaccttccccact

SEQ ID NO: 783382 - DNA, 25 bp, Homo sapien
acagcttcccaatgagccaccggaa

SEQ ID NO: 783383 - DNA, 25 bp, Homo sapien
cagcttcccaatgagccaccggaaa

SEQ ID NO: 783384 - DNA, 25 bp, Homo sapien
ctacagcttcccaatgagccaccgg

SEQ ID NO: 783385 - DNA, 25 bp, Homo sapien
gcttcccaatgagccaccggaaaga

SEQ ID NO: 783386 - DNA, 25 bp, Homo sapien
tctttaacttttcctgcttctcaac

SEQ ID NO: 783387 - DNA, 25 bp, Homo sapien
gttgagaagcaggaaaagttaaaga

SEQ ID NO: 783388 - DNA, 25 bp, Homo sapien
tccacatcggatgcgggaaacctgg

SEQ ID NO: 783389 - DNA, 25 bp, Homo sapien
ttgaactccgtcaagccaaagagag

SEQ ID NO: 783390 - DNA, 25 bp, Homo sapien
ggaatcatttcagggacggcacttt

SEQ ID NO: 783391 - DNA, 25 bp, Homo sapien
tccatagccccagacaaaaacatgt

SEQ ID NO: 783392 - DNA, 25 bp, Homo sapien
catatcctgggtcagatcagggtct

SEQ ID NO: 783393 - DNA, 25 bp, Homo sapien
cacgggacagtctgacaaatcggcc

SEQ ID NO: 783394 - DNA, 25 bp, Homo sapien
tctgtggctttgtaatctggcaggc

SEQ ID NO: 783395 - DNA, 25 bp, Homo sapien
accctgcagggtaagcggatattct

SEQ ID NO: 783396 - DNA, 25 bp, Homo sapien
catgggaaatactggtcctccaggc

SEQ ID NO: 783397 - DNA, 25 bp, Homo sapien
tactggtcctccaggcgaccgattc

SEQ ID NO: 783398 - DNA, 25 bp, Homo sapien
gttcttgccccatacaaacagctct

SEQ ID NO: 783399 - DNA, 25 bp, Homo sapien
ttcccaggcaccctcggatgttctt

SEQ ID NO: 783400 - DNA, 25 bp, Homo sapien
catgcagatgcaccacgggtatctc

SEQ ID NO: 783401 - DNA, 25 bp, Homo sapien
caccacagagtgtgcaatgacatag

SEQ ID NO: 783402 - DNA, 25 bp, Homo sapien
catgccgcgctgcaggagtgcagcc

SEQ ID NO: 783403 - DNA, 25 bp, Homo sapien
cacgggtatctcatgggtgtcacca

SEQ ID NO: 783404 - DNA, 25 bp, Homo sapien
acttgaggcagaagttaaggagacc

SEQ ID NO: 783405 - DNA, 25 bp, Homo sapien
gttccaacattttgtgaggccaagg

SEQ ID NO: 783406 - DNA, 25 bp, Homo sapien
tgggaagaccacttgaggcagaagt

SEQ ID NO: 783407 - DNA, 25 bp, Homo sapien
accacttgaggcagaagttaaggag

SEQ ID NO: 783408 - DNA, 25 bp, Homo sapien
ttgtgagaaccacctaggtgggtac

SEQ ID NO: 783409 - DNA, 25 bp, Homo sapien
tgtgagaaccacctaggtgggtaca

SEQ ID NO: 783410 - DNA, 25 bp, Homo sapien
gagaaccacctaggtgggtacatac

SEQ ID NO: 783411 - DNA, 25 bp, Homo sapien
tgagaaccacctaggtgggtacata

SEQ ID NO: 783412 - DNA, 25 bp, Homo sapien
caaagcaaaggaagccacgatggtc

SEQ ID NO: 783413 - DNA, 25 bp, Homo sapien
tttcccgggacagtgcgcttcctca

SEQ ID NO: 783414 - DNA, 25 bp, Homo sapien
cgggacagtgcgcttcctcacggct

SEQ ID NO: 783415 - DNA, 25 bp, Homo sapien
gagggctctggccattcaagcccaa

SEQ ID NO: 783416 - DNA, 25 bp, Homo sapien
gagctttgcacctacgccaggagac

SEQ ID NO: 783417 - DNA, 25 bp, Homo sapien
tcacagtctgtggagtttaccgagc

SEQ ID NO: 783418 - DNA, 25 bp, Homo sapien
gagggaaaccgcctaatccagatgg

SEQ ID NO: 783419 - DNA, 25 bp, Homo sapien
gcacgtcgatgcagaaagcctgaga

SEQ ID NO: 783420 - DNA, 25 bp, Homo sapien
aggcaggctgcgtcccaagtcacga

SEQ ID NO: 783421 - DNA, 25 bp, Homo sapien
tcacaggcaggctgcgtcccaagtc

SEQ ID NO: 783422 - DNA, 25 bp, Homo sapien
ctcaaagacccttgccaggagccct

SEQ ID NO: 783423 - DNA, 25 bp, Homo sapien
aagtcacgaccaccaagcaggggca

SEQ ID NO: 783424 - DNA, 25 bp, Homo sapien
gtggtccacgccacatgccacgtcc

SEQ ID NO: 783425 - DNA, 25 bp, Homo sapien
tggtccacgccacatgccacgtcca

SEQ ID NO: 783426 - DNA, 25 bp, Homo sapien
ggtccacgccacatgccacgtccac

SEQ ID NO: 783427 - DNA, 25 bp, Homo sapien
gcttctcaggcgagacgtgacacca

SEQ ID NO: 783428 - DNA, 25 bp, Homo sapien
gacaccgtcgcatgttacttggaga

SEQ ID NO: 783429 - DNA, 25 bp, Homo sapien
caagctaagctttcctaagacgggc

SEQ ID NO: 783430 - DNA, 25 bp, Homo sapien
taagggattcaggacagagcgtcac

SEQ ID NO: 783431 - DNA, 25 bp, Homo sapien
gacagctccagatggaatcccaggc

SEQ ID NO: 783432 - DNA, 25 bp, Homo sapien
acaaaccaagagactgccatgacag

SEQ ID NO: 783433 - DNA, 25 bp, Homo sapien
gcctgaatgaaaaccgagggccgaa

SEQ ID NO: 783434 - DNA, 25 bp, Homo sapien
caggccacggtgcttctagtgtccc

SEQ ID NO: 783435 - DNA, 25 bp, Homo sapien
ttattccaagacagatttgtaaaag

SEQ ID NO: 783436 - DNA, 25 bp, Homo sapien
ggcaagtcacgctactaaatcaaac

SEQ ID NO: 783437 - DNA, 25 bp, Homo sapien
gaaaggcaagtcacgctactaaatc

SEQ ID NO: 783438 - DNA, 25 bp, Homo sapien
agggaaaggcaagtcacgctactaa

SEQ ID NO: 783439 - DNA, 25 bp, Homo sapien
tctccagagaccctccatcccccat

SEQ ID NO: 783440 - DNA, 25 bp, Homo sapien
cttctccagagaccctccatccccc

SEQ ID NO: 783441 - DNA, 25 bp, Homo sapien
ttctccagagaccctccatccccca

SEQ ID NO: 783442 - DNA, 25 bp, Homo sapien
tttgtcatgcagagcacagtcagcg

SEQ ID NO: 783443 - DNA, 25 bp, Homo sapien
ggagacgggagcttgcaaacactga

SEQ ID NO: 783444 - DNA, 25 bp, Homo sapien
cattcacgtgctcactaaagcgaga

SEQ ID NO: 783445 - DNA, 25 bp, Homo sapien
gatgatcaagcctagcaaccgagct

SEQ ID NO: 783446 - DNA, 25 bp, Homo sapien
aattcggaacccttggttggtgcag

SEQ ID NO: 783447 - DNA, 25 bp, Homo sapien
agcaggagcgtctcgggtagctgca

SEQ ID NO: 783448 - DNA, 25 bp, Homo sapien
gtctcgggtagctgcatagtgtccc

SEQ ID NO: 783449 - DNA, 25 bp, Homo sapien
atgaattcggaacccttggttggtg

SEQ ID NO: 783450 - DNA, 25 bp, Homo sapien
agcagcagcggcgttccatcgctcc

SEQ ID NO: 783451 - DNA, 25 bp, Homo sapien
ctggcgtgcccgggtcaccagcagc

SEQ ID NO: 783452 - DNA, 25 bp, Homo sapien
cgttccatcgctcccaagatctggg

SEQ ID NO: 783453 - DNA, 25 bp, Homo sapien
agcggcgttccatcgctcccaagat

SEQ ID NO: 783454 - DNA, 25 bp, Homo sapien
agcccccaccatcgtagtgggggca

SEQ ID NO: 783455 - DNA, 25 bp, Homo sapien
cccccaccatcgtagtgggggcagg

SEQ ID NO: 783456 - DNA, 25 bp, Homo sapien
cagagcccccaccatcgtagtgggg

SEQ ID NO: 783457 - DNA, 25 bp, Homo sapien
agagcccccaccatcgtagtggggg

SEQ ID NO: 783458 - DNA, 25 bp, Homo sapien
gagcagagttccctctaaaagagta

SEQ ID NO: 783459 - DNA, 25 bp, Homo sapien
ggagctgataacagtcccaagccct

SEQ ID NO: 783460 - DNA, 25 bp, Homo sapien
ccctctaaaagagtagggagctgat

SEQ ID NO: 783461 - DNA, 25 bp, Homo sapien
gacagtctaggaagagttgagcaga

SEQ ID NO: 783462 - DNA, 25 bp, Homo sapien
ccagagcaagagattcaagggccca

SEQ ID NO: 783463 - DNA, 25 bp, Homo sapien
tcagtagcagtcttgttgtcaggcc

SEQ ID NO: 783464 - DNA, 25 bp, Homo sapien
cacttctaagtgaggcctggctgta

SEQ ID NO: 783465 - DNA, 25 bp, Homo sapien
tgtcttcacaatatggcgctcggct

SEQ ID NO: 783466 - DNA, 25 bp, Homo sapien
ggcccattcaaaggaggccgggctc

SEQ ID NO: 783467 - DNA, 25 bp, Homo sapien
gttaggcctggtgggggcccattca

SEQ ID NO: 783468 - DNA, 25 bp, Homo sapien
ctggtgggggcccattcaaaggagg

SEQ ID NO: 783469 - DNA, 25 bp, Homo sapien
ccattcaaaggaggccgggctcggt

SEQ ID NO: 783470 - DNA, 25 bp, Homo sapien
ccctttctgagcctagagatctgga

SEQ ID NO: 783471 - DNA, 25 bp, Homo sapien
ggccacattttccagggataccctg

SEQ ID NO: 783472 - DNA, 25 bp, Homo sapien
ccagggcactatttggtgatcttca

SEQ ID NO: 783473 - DNA, 25 bp, Homo sapien
gcccctgttaaagcccagggcacta

SEQ ID NO: 783474 - DNA, 25 bp, Homo sapien
agcgtagccagggtgacatttgttc

SEQ ID NO: 783475 - DNA, 25 bp, Homo sapien
agccagggtgacatttgttcagcag

SEQ ID NO: 783476 - DNA, 25 bp, Homo sapien
cgtagccagggtgacatttgttcag

SEQ ID NO: 783477 - DNA, 25 bp, Homo sapien
tagccagggtgacatttgttcagca

SEQ ID NO: 783478 - DNA, 25 bp, Homo sapien
tgggtggcactttttacgcaggcag

SEQ ID NO: 783479 - DNA, 25 bp, Homo sapien
tcaaagagcctgtgacatgggacgt

SEQ ID NO: 783480 - DNA, 25 bp, Homo sapien
tacgattattacagaagccgatggg

SEQ ID NO: 783481 - DNA, 25 bp, Homo sapien
catacacgcgggcacatttgagcca

SEQ ID NO: 783482 - DNA, 25 bp, Homo sapien
tgtgcttttctccaccctcttcaga

SEQ ID NO: 783483 - DNA, 25 bp, Homo sapien
aaactcttgactcctgggtttgagc

SEQ ID NO: 783484 - DNA, 25 bp, Homo sapien
actatgcctggccacatttctttct

SEQ ID NO: 783485 - DNA, 25 bp, Homo sapien
ttttaatctgtgcttttctccaccc

SEQ ID NO: 783486 - DNA, 25 bp, Homo sapien
tgctgtccgtattgaaaatgtgctt

SEQ ID NO: 783487 - DNA, 25 bp, Homo sapien
gcttaacacgattgaattgcacact

SEQ ID NO: 783488 - DNA, 25 bp, Homo sapien
tactgcatgagatcccacttgtatg

SEQ ID NO: 783489 - DNA, 25 bp, Homo sapien
tatgaaatacctggtgtagccggag

SEQ ID NO: 783490 - DNA, 25 bp, Homo sapien
gagaagtcttgtgagtccttaaacc

SEQ ID NO: 783491 - DNA, 25 bp, Homo sapien
acccatgcctcagtgtgcaggatga

SEQ ID NO: 783492 - DNA, 25 bp, Homo sapien
gacacttcttgaggtcggcttcagc

SEQ ID NO: 783493 - DNA, 25 bp, Homo sapien
gactggtcgtcccttggtgttgact

SEQ ID NO: 783494 - DNA, 25 bp, Homo sapien
aataattactagattggccaagcac

SEQ ID NO: 783495 - DNA, 25 bp, Homo sapien
cccagcacttcaggctgatcgcttg

SEQ ID NO: 783496 - DNA, 25 bp, Homo sapien
ctttaaataattactagattggcca

SEQ ID NO: 783497 - DNA, 25 bp, Homo sapien
aattactagattggccaagcacagt

SEQ ID NO: 783498 - DNA, 25 bp, Homo sapien
tctccagcaaaggtagagggtgaga

SEQ ID NO: 783499 - DNA, 25 bp, Homo sapien
tatgttctccagcaaaggtagaggg

SEQ ID NO: 783500 - DNA, 25 bp, Homo sapien
gacgtgagtcctgtatgttctccag

SEQ ID NO: 783501 - DNA, 25 bp, Homo sapien
ggaggaaaagacgtgagtcctgtat

SEQ ID NO: 783502 - DNA, 25 bp, Homo sapien
tcccgggcttgagtgatctgctacc

SEQ ID NO: 783503 - DNA, 25 bp, Homo sapien
ttgagtgatctgctaccagagctgt

SEQ ID NO: 783504 - DNA, 25 bp, Homo sapien
cctcccgggcttgagtgatctgcta

SEQ ID NO: 783505 - DNA, 25 bp, Homo sapien
cgggcttgagtgatctgctaccaga

SEQ ID NO: 783506 - DNA, 25 bp, Homo sapien
cctgtaggaggtggcactagatctt

SEQ ID NO: 783507 - DNA, 25 bp, Homo sapien
gaagggctggtctagcagggtacct

SEQ ID NO: 783508 - DNA, 25 bp, Homo sapien
ggtggcactagatcttagagctttt

SEQ ID NO: 783509 - DNA, 25 bp, Homo sapien
aacgccgggtgcctacctgtaggag

SEQ ID NO: 783510 - DNA, 25 bp, Homo sapien
tcctcaagagctaatgatagcgcta

SEQ ID NO: 783511 - DNA, 25 bp, Homo sapien
tgatagcatgctgaaaccttcctga

SEQ ID NO: 783512 - DNA, 25 bp, Homo sapien
taaattcctattcagtcctcaagag

SEQ ID NO: 783513 - DNA, 25 bp, Homo sapien
tattgttccctacatacctctgtgc

SEQ ID NO: 783514 - DNA, 25 bp, Homo sapien
cctaggcaacattgcgaaaaataca

SEQ ID NO: 783515 - DNA, 25 bp, Homo sapien
ggtgatggagcaagattccgactca

SEQ ID NO: 783516 - DNA, 25 bp, Homo sapien
ggcaacattgcgaaaaatacaaata

SEQ ID NO: 783517 - DNA, 25 bp, Homo sapien
ggcacgagaatcgctgaaccaaggg

SEQ ID NO: 783518 - DNA, 25 bp, Homo sapien
tcaagttctagtgcacataggcaga

SEQ ID NO: 783519 - DNA, 25 bp, Homo sapien
tatcaagttctagtgcacataggca

SEQ ID NO: 783520 - DNA, 25 bp, Homo sapien
atcaagttctagtgcacataggcag

SEQ ID NO: 783521 - DNA, 25 bp, Homo sapien
taagaaaatgaagctgtgggccagg

SEQ ID NO: 783522 - DNA, 25 bp, Homo sapien
gtgaacccccatctccgctatacaa

SEQ ID NO: 783523 - DNA, 25 bp, Homo sapien
cctgataagaaaatgaagctgtggg

SEQ ID NO: 783524 - DNA, 25 bp, Homo sapien
tgataagaaaatgaagctgtgggcc

SEQ ID NO: 783525 - DNA, 25 bp, Homo sapien
cctgtacaagggtcagaggccatga

SEQ ID NO: 783526 - DNA, 25 bp, Homo sapien
tctggtcagtctacatagcaaagaa

SEQ ID NO: 783527 - DNA, 25 bp, Homo sapien
tatgggtcttagctgcaagcaacag

SEQ ID NO: 783528 - DNA, 25 bp, Homo sapien
gcagatgggaccagagatataagca

SEQ ID NO: 783529 - DNA, 25 bp, Homo sapien
tattttacctaggaggaaaagagca

SEQ ID NO: 783530 - DNA, 25 bp, Homo sapien
taaacagtgtgttcaggccgggtgt

SEQ ID NO: 783531 - DNA, 25 bp, Homo sapien
caacctatgagtcaggaactcttat

SEQ ID NO: 783532 - DNA, 25 bp, Homo sapien
tcagtttttgttgcaacctatgagt

SEQ ID NO: 783533 - DNA, 25 bp, Homo sapien
gtgacctaactctgcactccgaagg

SEQ ID NO: 783534 - DNA, 25 bp, Homo sapien
actccgaagggagtgactcaactcc

SEQ ID NO: 783535 - DNA, 25 bp, Homo sapien
cagcaaagttgttcccatgggtcag

SEQ ID NO: 783536 - DNA, 25 bp, Homo sapien
tagtcaaattcagaggcccagcaaa

SEQ ID NO: 783537 - DNA, 25 bp, Homo sapien
caaaacatggttaacaggatagagc

SEQ ID NO: 783538 - DNA, 25 bp, Homo sapien
taaggtagaggtggtcaaggttctc

SEQ ID NO: 783539 - DNA, 25 bp, Homo sapien
cagccataagccactgtgttggact

SEQ ID NO: 783540 - DNA, 25 bp, Homo sapien
tctgctatgtttccttcgggaagta

SEQ ID NO: 783541 - DNA, 25 bp, Homo sapien
tccagtctggtttattgagctacaa

SEQ ID NO: 783542 - DNA, 25 bp, Homo sapien
tatagtctacgtagtatcaacttgg

SEQ ID NO: 783543 - DNA, 25 bp, Homo sapien
gagctacaatttgcatacagtgaaa

SEQ ID NO: 783544 - DNA, 25 bp, Homo sapien
tgttcaccaacaggagactggataa

SEQ ID NO: 783545 - DNA, 25 bp, Homo sapien
ggtacagacaagattctgcagacag

SEQ ID NO: 783546 - DNA, 25 bp, Homo sapien
gacttgaaattggtgttcagccctg

SEQ ID NO: 783547 - DNA, 25 bp, Homo sapien
tagaagcatagtgttcatcacagct

SEQ ID NO: 783548 - DNA, 25 bp, Homo sapien
gctcaggactgaggtagaagcatag

SEQ ID NO: 783549 - DNA, 25 bp, Homo sapien
ttcctggcccaggtgagacattcgg

SEQ ID NO: 783550 - DNA, 25 bp, Homo sapien
gccttttgctctgctatcgggcaga

SEQ ID NO: 783551 - DNA, 25 bp, Homo sapien
gcaactgatgaaataggaactctgg

SEQ ID NO: 783552 - DNA, 25 bp, Homo sapien
tcgggcagatggcattgtctctgct

SEQ ID NO: 783553 - DNA, 25 bp, Homo sapien
acctggagcacaaggggaaactggg

SEQ ID NO: 783554 - DNA, 25 bp, Homo sapien
gacctggagcacaaggggaaactgg

SEQ ID NO: 783555 - DNA, 25 bp, Homo sapien
tcaccatgtggtccaggctaatctc

SEQ ID NO: 783556 - DNA, 25 bp, Homo sapien
tttcaccatgtggtccaggctaatc

SEQ ID NO: 783557 - DNA, 25 bp, Homo sapien
ggtttcaccatgtggtccaggctaa

SEQ ID NO: 783558 - DNA, 25 bp, Homo sapien
accatgtggtccaggctaatctcga

SEQ ID NO: 783559 - DNA, 25 bp, Homo sapien
gtccaactgaactcccaggtgccga

SEQ ID NO: 783560 - DNA, 25 bp, Homo sapien
tgtccaactgaactcccaggtgccg

SEQ ID NO: 783561 - DNA, 25 bp, Homo sapien
actgaactcccaggtgccgacagag

SEQ ID NO: 783562 - DNA, 25 bp, Homo sapien
caactgaactcccaggtgccgacag

SEQ ID NO: 783563 - DNA, 25 bp, Homo sapien
tcttcctggggctgcggttgatggc

SEQ ID NO: 783564 - DNA, 25 bp, Homo sapien
gagggggtaccctgaggtgctctgc

SEQ ID NO: 783565 - DNA, 25 bp, Homo sapien
ctgctgggggctccgctcttcctgg

SEQ ID NO: 783566 - DNA, 25 bp, Homo sapien
cctggggctgcggttgatggctcat

SEQ ID NO: 783567 - DNA, 25 bp, Homo sapien
caacatgcatctcccggattccagt

SEQ ID NO: 783568 - DNA, 25 bp, Homo sapien
catctcccggattccagttattctc

SEQ ID NO: 783569 - DNA, 25 bp, Homo sapien
tgcaacatgcatctcccggattcca

SEQ ID NO: 783570 - DNA, 25 bp, Homo sapien
atgcatctcccggattccagttatt

SEQ ID NO: 783571 - DNA, 25 bp, Homo sapien
catcagattcatccaaacattccct

SEQ ID NO: 783572 - DNA, 25 bp, Homo sapien
ctccttctctggctcatcatcagat

SEQ ID NO: 783573 - DNA, 25 bp, Homo sapien
ccttctctggctcatcatcagattc

SEQ ID NO: 783574 - DNA, 25 bp, Homo sapien
tcagattcatccaaacattccctct

SEQ ID NO: 783575 - DNA, 25 bp, Homo sapien
cccattggaaaagtgtggttattgg

SEQ ID NO: 783576 - DNA, 25 bp, Homo sapien
ccattggaaaagtgtggttattgga

SEQ ID NO: 783577 - DNA, 25 bp, Homo sapien
tcccattggaaaagtgtggttattg

SEQ ID NO: 783578 - DNA, 25 bp, Homo sapien
cattggaaaagtgtggttattggaa

SEQ ID NO: 783579 - DNA, 25 bp, Homo sapien
tgtgagaatctacaggatgtagagc

SEQ ID NO: 783580 - DNA, 25 bp, Homo sapien
tgagaatctacaggatgtagagctg

SEQ ID NO: 783581 - DNA, 25 bp, Homo sapien
gtgtgcctcccgggggaaagtctca

SEQ ID NO: 783582 - DNA, 25 bp, Homo sapien
tgtgcctcccgggggaaagtctcag

SEQ ID NO: 783583 - DNA, 25 bp, Homo sapien
caggagtcttttaatgacaggatcc

SEQ ID NO: 783584 - DNA, 25 bp, Homo sapien
ggccaggagtcttttaatgacagga

SEQ ID NO: 783585 - DNA, 25 bp, Homo sapien
gtcccaggccaggagtcttttaatg

SEQ ID NO: 783586 - DNA, 25 bp, Homo sapien
ttgtccgacaccctcagatctttgt

SEQ ID NO: 783587 - DNA, 25 bp, Homo sapien
gaaggtcggatgcaaatccgagaag

SEQ ID NO: 783588 - DNA, 25 bp, Homo sapien
aaggtcggatgcaaatccgagaagc

SEQ ID NO: 783589 - DNA, 25 bp, Homo sapien
ggaggccggcccggctgaaatacgc

SEQ ID NO: 783590 - DNA, 25 bp, Homo sapien
aggccggcccggctgaaatacgcta

SEQ ID NO: 783591 - DNA, 25 bp, Homo sapien
gcccggctgaaatacgctatgacca

SEQ ID NO: 783592 - DNA, 25 bp, Homo sapien
ccggcccggctgaaatacgctatga

SEQ ID NO: 783593 - DNA, 25 bp, Homo sapien
ccaccaggagagacctccggctgag

SEQ ID NO: 783594 - DNA, 25 bp, Homo sapien
aggacagaaatcaggttgctgctca

SEQ ID NO: 783595 - DNA, 25 bp, Homo sapien
ctgaggacagaaatcaggttgctgc

SEQ ID NO: 783596 - DNA, 25 bp, Homo sapien
caggagagacctccggctgaggtca

SEQ ID NO: 783597 - DNA, 25 bp, Homo sapien
agagcgggtctcctcgtacaggaag

SEQ ID NO: 783598 - DNA, 25 bp, Homo sapien
atatgagagcgggtctcctcgtaca

SEQ ID NO: 783599 - DNA, 25 bp, Homo sapien
agggtatatgagagcgggtctcctc

SEQ ID NO: 783600 - DNA, 25 bp, Homo sapien
cgggtctcctcgtacaggaagtaga

SEQ ID NO: 783601 - DNA, 25 bp, Homo sapien
ccacacccagtgctctgggtcataa

SEQ ID NO: 783602 - DNA, 25 bp, Homo sapien
cttctctcaggccgatgacctcagg

SEQ ID NO: 783603 - DNA, 25 bp, Homo sapien
taatagatacaaagattgaaaggta

SEQ ID NO: 783604 - DNA, 25 bp, Homo sapien
tagaagagattattatggaagtatc

SEQ ID NO: 783605 - DNA, 25 bp, Homo sapien
tcagtcacaaacctaaacagcaaat

SEQ ID NO: 783606 - DNA, 25 bp, Homo sapien
agataaaaagagtgctcgcttcagg

SEQ ID NO: 783607 - DNA, 25 bp, Homo sapien
tgtatcgacttcatgctgaccaggg

SEQ ID NO: 783608 - DNA, 25 bp, Homo sapien
tggtctgatgcagttacagatttac

SEQ ID NO: 783609 - DNA, 25 bp, Homo sapien
tacagatttacaaaccgcgtcccac

SEQ ID NO: 783610 - DNA, 25 bp, Homo sapien
cctcattcttgagggattagggatg

SEQ ID NO: 783611 - DNA, 25 bp, Homo sapien
tccatgttctcagcggttatccttg

SEQ ID NO: 783612 - DNA, 25 bp, Homo sapien
gttacttaaacatatgcagctaaaa

SEQ ID NO: 783613 - DNA, 25 bp, Homo sapien
tacttgtaaagcgtttggtgctaat

SEQ ID NO: 783614 - DNA, 25 bp, Homo sapien
ccttggatgtgagatctcatgcact

SEQ ID NO: 783615 - DNA, 25 bp, Homo sapien
cctggtattctctcacagtgatgtc

SEQ ID NO: 783616 - DNA, 25 bp, Homo sapien
gcctggtattctctcacagtgatgt

SEQ ID NO: 783617 - DNA, 25 bp, Homo sapien
ggtattctctcacagtgatgtcacc

SEQ ID NO: 783618 - DNA, 25 bp, Homo sapien
accatttctacctgccacgtatcgg

SEQ ID NO: 783619 - DNA, 25 bp, Homo sapien
aagttcagcccaagtttcagcccag

SEQ ID NO: 783620 - DNA, 25 bp, Homo sapien
ttctgaaacagcctccaatccgtgc

SEQ ID NO: 783621 - DNA, 25 bp, Homo sapien
ctgaggtgaggcctgatttagctcc

SEQ ID NO: 783622 - DNA, 25 bp, Homo sapien
tgggaataagtcaacctgcagcgga

SEQ ID NO: 783623 - DNA, 25 bp, Homo sapien
cacaaactgaatgcggaaggaaatc

SEQ ID NO: 783624 - DNA, 25 bp, Homo sapien
agtctctcgctcatgggaaaggcac

SEQ ID NO: 783625 - DNA, 25 bp, Homo sapien
aacgggctgcggctctcctaggagt

SEQ ID NO: 783626 - DNA, 25 bp, Homo sapien
cacatggcttcctaacgggctgcgg

SEQ ID NO: 783627 - DNA, 25 bp, Homo sapien
ggtaagcagaaacgatgaaacctta

SEQ ID NO: 783628 - DNA, 25 bp, Homo sapien
gggatcaggatgggaaagaaaagta

SEQ ID NO: 783629 - DNA, 25 bp, Homo sapien
tagggtaagcagaaacgatgaaacc

SEQ ID NO: 783630 - DNA, 25 bp, Homo sapien
aaaagtagggtaagcagaaacgatg

SEQ ID NO: 783631 - DNA, 25 bp, Homo sapien
gtccaactgaactcccaggtgccga

SEQ ID NO: 783632 - DNA, 25 bp, Homo sapien
tgtccaactgaactcccaggtgccg

SEQ ID NO: 783633 - DNA, 25 bp, Homo sapien
caactgaactcccaggtgccgacag

SEQ ID NO: 783634 - DNA, 25 bp, Homo sapien
actgaactcccaggtgccgacagag

SEQ ID NO: 783635 - DNA, 25 bp, Homo sapien
gggggctccgctcttcctgcggctg

SEQ ID NO: 783636 - DNA, 25 bp, Homo sapien
tcttcctgcggctgcggttgatggc

SEQ ID NO: 783637 - DNA, 25 bp, Homo sapien
tgggggctccgctcttcctgcggct

SEQ ID NO: 783638 - DNA, 25 bp, Homo sapien
cctgcggctgcggttgatggctcat

SEQ ID NO: 783639 - DNA, 25 bp, Homo sapien
cgtggggggctgggatctaccccag

SEQ ID NO: 783640 - DNA, 25 bp, Homo sapien
ccttctctggctcatcatcagattc

SEQ ID NO: 783641 - DNA, 25 bp, Homo sapien
catcagattcatccaaacattccct

SEQ ID NO: 783642 - DNA, 25 bp, Homo sapien
tcagattcatccaaacattccctct

SEQ ID NO: 783643 - DNA, 25 bp, Homo sapien
ctccttctctggctcatcatcagat

SEQ ID NO: 783644 - DNA, 25 bp, Homo sapien
gcgacactcgccgtcgcttcgcctt

SEQ ID NO: 783645 - DNA, 25 bp, Homo sapien
gcttcgccttcatcttgaggccaca

SEQ ID NO: 783646 - DNA, 25 bp, Homo sapien
cctgttgaaggcctcgtagtactca

SEQ ID NO: 783647 - DNA, 25 bp, Homo sapien
tactcagggagcacgagcgacactc

SEQ ID NO: 783648 - DNA, 25 bp, Homo sapien
cccattggaaaagtgtggttattgg

SEQ ID NO: 783649 - DNA, 25 bp, Homo sapien
ccattggaaaagtgtggttattgga

SEQ ID NO: 783650 - DNA, 25 bp, Homo sapien
cattggaaaagtgtggttattggaa

SEQ ID NO: 783651 - DNA, 25 bp, Homo sapien
tcccattggaaaagtgtggttattg

SEQ ID NO: 783652 - DNA, 25 bp, Homo sapien
tgagaatctacaggatgtagagctg

SEQ ID NO: 783653 - DNA, 25 bp, Homo sapien
gtgtgcctcccgggggaaagtctca

SEQ ID NO: 783654 - DNA, 25 bp, Homo sapien
tgtgcctcccgggggaaagtctcag

SEQ ID NO: 783655 - DNA, 25 bp, Homo sapien
tgtgagaatctacaggatgtagagc

SEQ ID NO: 783656 - DNA, 25 bp, Homo sapien
gtcccaggccaggagtcttttaatg

SEQ ID NO: 783657 - DNA, 25 bp, Homo sapien
ggccaggagtcttttaatgacagga

SEQ ID NO: 783658 - DNA, 25 bp, Homo sapien
ttgtccgacaccctcagatctttgt

SEQ ID NO: 783659 - DNA, 25 bp, Homo sapien
caggagtcttttaatgacaggatcc

SEQ ID NO: 783660 - DNA, 25 bp, Homo sapien
gaaggtcggatgcaaatccgagaag

SEQ ID NO: 783661 - DNA, 25 bp, Homo sapien
aaggtcggatgcaaatccgagaagc

SEQ ID NO: 783662 - DNA, 25 bp, Homo sapien
aggccggcccggctgaaatacgcta

SEQ ID NO: 783663 - DNA, 25 bp, Homo sapien
ggaggccggcccggctgaaatacgc

SEQ ID NO: 783664 - DNA, 25 bp, Homo sapien
ccggcccggctgaaatacgctatga

SEQ ID NO: 783665 - DNA, 25 bp, Homo sapien
gcccggctgaaatacgctatgacca

SEQ ID NO: 783666 - DNA, 25 bp, Homo sapien
caggagagacctccggctgaggtca

SEQ ID NO: 783667 - DNA, 25 bp, Homo sapien
ctgaggacagaaatcaggttgctgc

SEQ ID NO: 783668 - DNA, 25 bp, Homo sapien
aggacagaaatcaggttgctgctca

SEQ ID NO: 783669 - DNA, 25 bp, Homo sapien
ccaccaggagagacctccggctgag

SEQ ID NO: 783670 - DNA, 25 bp, Homo sapien
cgggtctcctcgtacaggaagtaga

SEQ ID NO: 783671 - DNA, 25 bp, Homo sapien
agggtatatgagagcgggtctcctc

SEQ ID NO: 783672 - DNA, 25 bp, Homo sapien
agagcgggtctcctcgtacaggaag

SEQ ID NO: 783673 - DNA, 25 bp, Homo sapien
atatgagagcgggtctcctcgtaca

SEQ ID NO: 783674 - DNA, 25 bp, Homo sapien
aagccctgcagcgcatggaacaaaa

SEQ ID NO: 783675 - DNA, 25 bp, Homo sapien
ccaagccctgcagcgcatggaacaa

SEQ ID NO: 783676 - DNA, 25 bp, Homo sapien
gccctgcagcgcatggaacaaaaga

SEQ ID NO: 783677 - DNA, 25 bp, Homo sapien
cctgcagcgcatggaacaaaagaag

SEQ ID NO: 783678 - DNA, 25 bp, Homo sapien
ccacacccagtgctctgggtcataa

SEQ ID NO: 783679 - DNA, 25 bp, Homo sapien
cttctctcaggccgatgacctcagg

SEQ ID NO: 783680 - DNA, 25 bp, Homo sapien
taatagatacaaagattgaaaggta

SEQ ID NO: 783681 - DNA, 25 bp, Homo sapien
tagaagagattattatggaagtatc

SEQ ID NO: 783682 - DNA, 25 bp, Homo sapien
tcagtcacaaacctaaacagcaaat

SEQ ID NO: 783683 - DNA, 25 bp, Homo sapien
agataaaaagagtgctcgcttcagg

SEQ ID NO: 783684 - DNA, 25 bp, Homo sapien
cctcattcttgagggattagggatg

SEQ ID NO: 783685 - DNA, 25 bp, Homo sapien
tgtatcgacttcatgctgaccaggg

SEQ ID NO: 783686 - DNA, 25 bp, Homo sapien
tggtctgatgcagttacagatttac

SEQ ID NO: 783687 - DNA, 25 bp, Homo sapien
tacagatttacaaaccgcgtcccac

SEQ ID NO: 783688 - DNA, 25 bp, Homo sapien
ccttggatgtgagatctcatgcact

SEQ ID NO: 783689 - DNA, 25 bp, Homo sapien
gttacttaaacatatgcagctaaaa

SEQ ID NO: 783690 - DNA, 25 bp, Homo sapien
tccatgttctcagcggttatccttg

SEQ ID NO: 783691 - DNA, 25 bp, Homo sapien
tacttgtaaagcgtttggtgctaat

SEQ ID NO: 783692 - DNA, 25 bp, Homo sapien
ttctgaaacagcctccaatccgtgc

SEQ ID NO: 783693 - DNA, 25 bp, Homo sapien
aagttcagcccaagtttcagcccag

SEQ ID NO: 783694 - DNA, 25 bp, Homo sapien
tgggaataagtcaacctgcagcgga

SEQ ID NO: 783695 - DNA, 25 bp, Homo sapien
ctgaggtgaggcctgatttagctcc

SEQ ID NO: 783696 - DNA, 25 bp, Homo sapien
ccgctgggggctccgctcttcctgg

SEQ ID NO: 783697 - DNA, 25 bp, Homo sapien
cctggggctgcggttgatggctcat

SEQ ID NO: 783698 - DNA, 25 bp, Homo sapien
tcttcctggggctgcggttgatggc

SEQ ID NO: 783699 - DNA, 25 bp, Homo sapien
ggtgctccgctgggggctccgctct

SEQ ID NO: 783700 - DNA, 25 bp, Homo sapien
catcagattcatccaaacattccct

SEQ ID NO: 783701 - DNA, 25 bp, Homo sapien
ccttctctggctcatcatcagattc

SEQ ID NO: 783702 - DNA, 25 bp, Homo sapien
ctccttctctggctcatcatcagat

SEQ ID NO: 783703 - DNA, 25 bp, Homo sapien
tcagattcatccaaacattccctct

SEQ ID NO: 783704 - DNA, 25 bp, Homo sapien
gcttcgccttcatcttgaggccaca

SEQ ID NO: 783705 - DNA, 25 bp, Homo sapien
cctgttgaaggcctcgtagtactca

SEQ ID NO: 783706 - DNA, 25 bp, Homo sapien
gcgacactcgccgtcgcttcgcctt

SEQ ID NO: 783707 - DNA, 25 bp, Homo sapien
tactcagggagcacgagcgacactc

SEQ ID NO: 783708 - DNA, 25 bp, Homo sapien
cccattggaaaagtgtggttattgg

SEQ ID NO: 783709 - DNA, 25 bp, Homo sapien
ccattggaaaagtgtggttattgga

SEQ ID NO: 783710 - DNA, 25 bp, Homo sapien
cattggaaaagtgtggttattggaa

SEQ ID NO: 783711 - DNA, 25 bp, Homo sapien
tcccattggaaaagtgtggttattg

SEQ ID NO: 783712 - DNA, 25 bp, Homo sapien
gtgtgcctcccgggggaaagtctca

SEQ ID NO: 783713 - DNA, 25 bp, Homo sapien
tgagaatctacaggatgtagagctg

SEQ ID NO: 783714 - DNA, 25 bp, Homo sapien
tgtgagaatctacaggatgtagagc

SEQ ID NO: 783715 - DNA, 25 bp, Homo sapien
tgtgcctcccgggggaaagtctcag

SEQ ID NO: 783716 - DNA, 25 bp, Homo sapien
ttgtccgacaccctcagatctttgt

SEQ ID NO: 783717 - DNA, 25 bp, Homo sapien
gtcccaggccaggagtcttttaatg

SEQ ID NO: 783718 - DNA, 25 bp, Homo sapien
caggagtcttttaatgacaggatcc

SEQ ID NO: 783719 - DNA, 25 bp, Homo sapien
ggccaggagtcttttaatgacagga

SEQ ID NO: 783720 - DNA, 25 bp, Homo sapien
gaaggtcggatgcaaatccgagaag

SEQ ID NO: 783721 - DNA, 25 bp, Homo sapien
aaggtcggatgcaaatccgagaagc

SEQ ID NO: 783722 - DNA, 25 bp, Homo sapien
ggaggccggcccggctgaaatacgc

SEQ ID NO: 783723 - DNA, 25 bp, Homo sapien
gcccggctgaaatacgctatgacca

SEQ ID NO: 783724 - DNA, 25 bp, Homo sapien
ccggcccggctgaaatacgctatga

SEQ ID NO: 783725 - DNA, 25 bp, Homo sapien
aggccggcccggctgaaatacgcta

SEQ ID NO: 783726 - DNA, 25 bp, Homo sapien
ctgaggacagaaatcaggttgctgc

SEQ ID NO: 783727 - DNA, 25 bp, Homo sapien
ccaccaggagagacctccggctgag

SEQ ID NO: 783728 - DNA, 25 bp, Homo sapien
caggagagacctccggctgaggtca

SEQ ID NO: 783729 - DNA, 25 bp, Homo sapien
aggacagaaatcaggttgctgctca

SEQ ID NO: 783730 - DNA, 25 bp, Homo sapien
cgggtctcctcgtacaggaagtaga

SEQ ID NO: 783731 - DNA, 25 bp, Homo sapien
agagcgggtctcctcgtacaggaag

SEQ ID NO: 783732 - DNA, 25 bp, Homo sapien
agggtatatgagagcgggtctcctc

SEQ ID NO: 783733 - DNA, 25 bp, Homo sapien
atatgagagcgggtctcctcgtaca

SEQ ID NO: 783734 - DNA, 25 bp, Homo sapien
atgtaacggcataactggaaccaaa

SEQ ID NO: 783735 - DNA, 25 bp, Homo sapien
tggaacaaaagaagtggaaccgata

SEQ ID NO: 783736 - DNA, 25 bp, Homo sapien
caaggctatctgagagcagttcttc

SEQ ID NO: 783737 - DNA, 25 bp, Homo sapien
accgatacttccggaacaaggctat

SEQ ID NO: 783738 - DNA, 25 bp, Homo sapien
ccacacccagtgctctgggtcataa

SEQ ID NO: 783739 - DNA, 25 bp, Homo sapien
cttctctcaggccgatgacctcagg

SEQ ID NO: 783740 - DNA, 25 bp, Homo sapien
tagaagagattattatggaagtatc

SEQ ID NO: 783741 - DNA, 25 bp, Homo sapien
tcagtcacaaacctaaacagcaaat

SEQ ID NO: 783742 - DNA, 25 bp, Homo sapien
taatagatacaaagattgaaaggta

SEQ ID NO: 783743 - DNA, 25 bp, Homo sapien
agataaaaagagtgctcgcttcagg

SEQ ID NO: 783744 - DNA, 25 bp, Homo sapien
cctcattcttgagggattagggatg

SEQ ID NO: 783745 - DNA, 25 bp, Homo sapien
tgtatcgacttcatgctgaccaggg

SEQ ID NO: 783746 - DNA, 25 bp, Homo sapien
tacagatttacaaaccgcgtcccac

SEQ ID NO: 783747 - DNA, 25 bp, Homo sapien
tggtctgatgcagttacagatttac

SEQ ID NO: 783748 - DNA, 25 bp, Homo sapien
tccatgttctcagcggttatccttg

SEQ ID NO: 783749 - DNA, 25 bp, Homo sapien
tacttgtaaagcgtttggtgctaat

SEQ ID NO: 783750 - DNA, 25 bp, Homo sapien
gttacttaaacatatgcagctaaaa

SEQ ID NO: 783751 - DNA, 25 bp, Homo sapien
ccttggatgtgagatctcatgcact

SEQ ID NO: 783752 - DNA, 25 bp, Homo sapien
ggtccaggctctttgacgtcacgga

SEQ ID NO: 783753 - DNA, 25 bp, Homo sapien
ggtggagcacaacgtcgaaagcagc

SEQ ID NO: 783754 - DNA, 25 bp, Homo sapien
aaaaaacgcagtccggtgtgctctg

SEQ ID NO: 783755 - DNA, 25 bp, Homo sapien
tcacggactcgacctttgacagagc

SEQ ID NO: 783756 - DNA, 25 bp, Homo sapien
ccgccgctcctgccgtgcatgttgg

SEQ ID NO: 783757 - DNA, 25 bp, Homo sapien
gggagccagtacatgcaggtgggct

SEQ ID NO: 783758 - DNA, 25 bp, Homo sapien
cgccgctcctgccgtgcatgttggg

SEQ ID NO: 783759 - DNA, 25 bp, Homo sapien
agccagtacatgcaggtgggctcca

SEQ ID NO: 783760 - DNA, 25 bp, Homo sapien
aactatgttgtttaggtgccgggca

SEQ ID NO: 783761 - DNA, 25 bp, Homo sapien
aaaatatatgctgtatgcttaccta

SEQ ID NO: 783762 - DNA, 25 bp, Homo sapien
gcttacctatatcaaaactatgttg

SEQ ID NO: 783763 - DNA, 25 bp, Homo sapien
gaattactgagttacattctcattg

SEQ ID NO: 783764 - DNA, 25 bp, Homo sapien
ttgaagctgtcctcaaatcattttc

SEQ ID NO: 783765 - DNA, 25 bp, Homo sapien
gctggtggctctgactgtttccggc

SEQ ID NO: 783766 - DNA, 25 bp, Homo sapien
gtggctctgactgtttccggctatg

SEQ ID NO: 783767 - DNA, 25 bp, Homo sapien
ctggtggctctgactgtttccggct

SEQ ID NO: 783768 - DNA, 25 bp, Homo sapien
tggtggctctgactgtttccggcta

SEQ ID NO: 783769 - DNA, 25 bp, Homo sapien
tggcagctttcgcagcattgaaaag

SEQ ID NO: 783770 - DNA, 25 bp, Homo sapien
cagctttcgcagcattgaaaagatc

SEQ ID NO: 783771 - DNA, 25 bp, Homo sapien
cttttggcagctttcgcagcattga

SEQ ID NO: 783772 - DNA, 25 bp, Homo sapien
gctttcgcagcattgaaaagatcat

SEQ ID NO: 783773 - DNA, 25 bp, Homo sapien
taagaaatccagaggaaagcaagca

SEQ ID NO: 783774 - DNA, 25 bp, Homo sapien
ggccataaggctaagtctccataaa

SEQ ID NO: 783775 - DNA, 25 bp, Homo sapien
gccaactcaatactaggccataagg

SEQ ID NO: 783776 - DNA, 25 bp, Homo sapien
tgattgtgccaactcaatactaggc

SEQ ID NO: 783777 - DNA, 25 bp, Homo sapien
tattttaaatagctgtcggtgagga

SEQ ID NO: 783778 - DNA, 25 bp, Homo sapien
tgaggaaagacgtgctgtagctttg

SEQ ID NO: 783779 - DNA, 25 bp, Homo sapien
gtagctttgcatccaacacccaatt

SEQ ID NO: 783780 - DNA, 25 bp, Homo sapien
cagatagcacggatctcaggaagga

SEQ ID NO: 783781 - DNA, 25 bp, Homo sapien
cagagccttcacgcacttcacgcgg

SEQ ID NO: 783782 - DNA, 25 bp, Homo sapien
agagccttcacgcacttcacgcgga

SEQ ID NO: 783783 - DNA, 25 bp, Homo sapien
tcagagccttcacgcacttcacgcg

SEQ ID NO: 783784 - DNA, 25 bp, Homo sapien
tccacgatcatggaaaccatccagt

SEQ ID NO: 783785 - DNA, 25 bp, Homo sapien
tcagtaatctgacggcctccactgc

SEQ ID NO: 783786 - DNA, 25 bp, Homo sapien
cactgtactctctgtccacgatcat

SEQ ID NO: 783787 - DNA, 25 bp, Homo sapien
tgccacactgtactctctgtccacg

SEQ ID NO: 783788 - DNA, 25 bp, Homo sapien
gaagacagaaatattaccctctcaa

SEQ ID NO: 783789 - DNA, 25 bp, Homo sapien
tactgcaactcaggaatgacctcag

SEQ ID NO: 783790 - DNA, 25 bp, Homo sapien
tgacctcagtcaacctgcacagatg

SEQ ID NO: 783791 - DNA, 25 bp, Homo sapien
aaaactcctaaatggagagtggaag

SEQ ID NO: 783792 - DNA, 25 bp, Homo sapien
atggggtagacgctctcacagtcca

SEQ ID NO: 783793 - DNA, 25 bp, Homo sapien
tctcacagtccacgtccatcagcac

SEQ ID NO: 783794 - DNA, 25 bp, Homo sapien
cgtccatcagcaccccttccatgtt

SEQ ID NO: 783795 - DNA, 25 bp, Homo sapien
acaatggggtagacgctctcacagt

SEQ ID NO: 783796 - DNA, 25 bp, Homo sapien
tccagtacagaaattcacccacagc

SEQ ID NO: 783797 - DNA, 25 bp, Homo sapien
ttccagtacagaaattcacccacag

SEQ ID NO: 783798 - DNA, 25 bp, Homo sapien
aggccttaagtagggcagcagcaca

SEQ ID NO: 783799 - DNA, 25 bp, Homo sapien
gaggccttaagtagggcagcagcac

SEQ ID NO: 783800 - DNA, 25 bp, Homo sapien
ggggaggccttaagtagggcagcag

SEQ ID NO: 783801 - DNA, 25 bp, Homo sapien
gaaaaggaggtgcagagctaaggaa

SEQ ID NO: 783802 - DNA, 25 bp, Homo sapien
tcttatctcgcactcagggtagaaa

SEQ ID NO: 783803 - DNA, 25 bp, Homo sapien
ttatctcgcactcagggtagaaaag

SEQ ID NO: 783804 - DNA, 25 bp, Homo sapien
gttcttatctcgcactcagggtaga

SEQ ID NO: 783805 - DNA, 25 bp, Homo sapien
cgttcttatctcgcactcagggtag

SEQ ID NO: 783806 - DNA, 25 bp, Homo sapien
gggctctggcgttgctctcttccac

SEQ ID NO: 783807 - DNA, 25 bp, Homo sapien
gcacctgggctctggcgttgctctc

SEQ ID NO: 783808 - DNA, 25 bp, Homo sapien
gctggaagaaagtcctctgggcacc

SEQ ID NO: 783809 - DNA, 25 bp, Homo sapien
tctccacaaagaaggacagcagaag

SEQ ID NO: 783810 - DNA, 25 bp, Homo sapien
ttgtaggtcctatgcacaacagcca

SEQ ID NO: 783811 - DNA, 25 bp, Homo sapien
cacttgtaggtcctatgcacaacag

SEQ ID NO: 783812 - DNA, 25 bp, Homo sapien
ccagcccacttgtaggtcctatgca

SEQ ID NO: 783813 - DNA, 25 bp, Homo sapien
caaccccagcccacttgtaggtcct

SEQ ID NO: 783814 - DNA, 25 bp, Homo sapien
ggttactgattaaatatcgctctcc

SEQ ID NO: 783815 - DNA, 25 bp, Homo sapien
gggatttagtgatggcatgttaaaa

SEQ ID NO: 783816 - DNA, 25 bp, Homo sapien
ctgattaaatatcgctctccttcct

SEQ ID NO: 783817 - DNA, 25 bp, Homo sapien
catgttaaaataccctaggaagtgg

SEQ ID NO: 783818 - DNA, 25 bp, Homo sapien
tgtctactaagtaagcagcgtggtc

SEQ ID NO: 783819 - DNA, 25 bp, Homo sapien
caccctaggaggtggaaggtccctg

SEQ ID NO: 783820 - DNA, 25 bp, Homo sapien
ttgtacaagtgaagcaagcaatctc

SEQ ID NO: 783821 - DNA, 25 bp, Homo sapien
cttgtacaagtgaagcaagcaatct

SEQ ID NO: 783822 - DNA, 25 bp, Homo sapien
aaaaacatagaatcaaagattagcc

SEQ ID NO: 783823 - DNA, 25 bp, Homo sapien
tcaaagattagccaccttccaactc

SEQ ID NO: 783824 - DNA, 25 bp, Homo sapien
tcaaaaacatagaatcaaagattag

SEQ ID NO: 783825 - DNA, 25 bp, Homo sapien
gattagccaccttccaactccaagt

SEQ ID NO: 783826 - DNA, 25 bp, Homo sapien
caaggccagtaccttcatgtcatga

SEQ ID NO: 783827 - DNA, 25 bp, Homo sapien
taaccttgtccccaccagaatattc

SEQ ID NO: 783828 - DNA, 25 bp, Homo sapien
ggcttccaatggcaactcgagacgt

SEQ ID NO: 783829 - DNA, 25 bp, Homo sapien
tcgagacgttagtttactccagagt

SEQ ID NO: 783830 - DNA, 25 bp, Homo sapien
caccaagcccggcccgaatataatt

SEQ ID NO: 783831 - DNA, 25 bp, Homo sapien
gtattataggattgagccaccaagc

SEQ ID NO: 783832 - DNA, 25 bp, Homo sapien
tttggtaaagatgggttctcattat

SEQ ID NO: 783833 - DNA, 25 bp, Homo sapien
tggtaaagatgggttctcattatgt

SEQ ID NO: 783834 - DNA, 25 bp, Homo sapien
ggattagaggcgtgtgacaccacgc

SEQ ID NO: 783835 - DNA, 25 bp, Homo sapien
gattagaggcgtgtgacaccacgcc

SEQ ID NO: 783836 - DNA, 25 bp, Homo sapien
attagaggcgtgtgacaccacgccc

SEQ ID NO: 783837 - DNA, 25 bp, Homo sapien
ttagaggcgtgtgacaccacgcccg

SEQ ID NO: 783838 - DNA, 25 bp, Homo sapien
aacatccgcctaatagaaattctag

SEQ ID NO: 783839 - DNA, 25 bp, Homo sapien
cgggacggtggctccccacactttg

SEQ ID NO: 783840 - DNA, 25 bp, Homo sapien
aattcaggagattcaacatccgcct

SEQ ID NO: 783841 - DNA, 25 bp, Homo sapien
taataatacgccgggacggtggctc

SEQ ID NO: 783842 - DNA, 25 bp, Homo sapien
taagaagattgaccatttggtgccc

SEQ ID NO: 783843 - DNA, 25 bp, Homo sapien
ggtgcccatagctattgctcttgca

SEQ ID NO: 783844 - DNA, 25 bp, Homo sapien
ttgcccagcccctagaacgtgttat

SEQ ID NO: 783845 - DNA, 25 bp, Homo sapien
tattctgaaataagagcgggatgct

SEQ ID NO: 783846 - DNA, 25 bp, Homo sapien
cctgagtggctggaaggccaaggga

SEQ ID NO: 783847 - DNA, 25 bp, Homo sapien
gagtggctggaaggccaagggagga

SEQ ID NO: 783848 - DNA, 25 bp, Homo sapien
agtttgaggctgtgccaccacacgc

SEQ ID NO: 783849 - DNA, 25 bp, Homo sapien
ggagtttgaggctgtgccaccacac

SEQ ID NO: 783850 - DNA, 25 bp, Homo sapien
aaaactgcacaaaacagaagtgttc

SEQ ID NO: 783851 - DNA, 25 bp, Homo sapien
cagagaaaactgcacaaaacagaag

SEQ ID NO: 783852 - DNA, 25 bp, Homo sapien
gagaaaactgcacaaaacagaagtg

SEQ ID NO: 783853 - DNA, 25 bp, Homo sapien
tataacagagaaaactgcacaaaac

SEQ ID NO: 783854 - DNA, 25 bp, Homo sapien
gaatagaggcgcatagatgcctaga

SEQ ID NO: 783855 - DNA, 25 bp, Homo sapien
gagggaatgaaaccagattggccac

SEQ ID NO: 783856 - DNA, 25 bp, Homo sapien
gcaccaagcccaggttgagctttta

SEQ ID NO: 783857 - DNA, 25 bp, Homo sapien
gacgcagtctcgctgcattacccaa

SEQ ID NO: 783858 - DNA, 25 bp, Homo sapien
gtgagaaatcgctcaaggctgccag

SEQ ID NO: 783859 - DNA, 25 bp, Homo sapien
taattgacccgtttggtcctcacat

SEQ ID NO: 783860 - DNA, 25 bp, Homo sapien
agacactgcttttccctaattgacc

SEQ ID NO: 783861 - DNA, 25 bp, Homo sapien
tcctcacattaaccatattttacag

SEQ ID NO: 783862 - DNA, 25 bp, Homo sapien
cgcctggaccacattgcatgcattt

SEQ ID NO: 783863 - DNA, 25 bp, Homo sapien
accacgcctggaccacattgcatgc

SEQ ID NO: 783864 - DNA, 25 bp, Homo sapien
cacgcctggaccacattgcatgcat

SEQ ID NO: 783865 - DNA, 25 bp, Homo sapien
cctggaccacattgcatgcatttta

SEQ ID NO: 783866 - DNA, 25 bp, Homo sapien
ccagcctagtctcaaattcctaagc

SEQ ID NO: 783867 - DNA, 25 bp, Homo sapien
gcctagtctcaaattcctaagctca

SEQ ID NO: 783868 - DNA, 25 bp, Homo sapien
caaattcctaagctcaagggatcca

SEQ ID NO: 783869 - DNA, 25 bp, Homo sapien
gcccagcctagtctcaaattcctaa

SEQ ID NO: 783870 - DNA, 25 bp, Homo sapien
acaggcgtgcactgccatacccgac

SEQ ID NO: 783871 - DNA, 25 bp, Homo sapien
actgagtctcgctttatcacctagg

SEQ ID NO: 783872 - DNA, 25 bp, Homo sapien
aggcgtgcactgccatacccgacta

SEQ ID NO: 783873 - DNA, 25 bp, Homo sapien
gcgtgcactgccatacccgactaat

SEQ ID NO: 783874 - DNA, 25 bp, Homo sapien
gatatgtccttccagctgatggacc

SEQ ID NO: 783875 - DNA, 25 bp, Homo sapien
tgaagacttcctgctactttctggg

SEQ ID NO: 783876 - DNA, 25 bp, Homo sapien
ggaggcctccggatggatatgtcct

SEQ ID NO: 783877 - DNA, 25 bp, Homo sapien
gacgggcacaacagtcacctggttt

SEQ ID NO: 783878 - DNA, 25 bp, Homo sapien
tcattgcaaaggatgactgcaaaag

SEQ ID NO: 783879 - DNA, 25 bp, Homo sapien
gttctcactgtgaccagtcatggga

SEQ ID NO: 783880 - DNA, 25 bp, Homo sapien
gactaaactgctgcactctagactg

SEQ ID NO: 783881 - DNA, 25 bp, Homo sapien
taataacgataaactagctaggcat

SEQ ID NO: 783882 - DNA, 25 bp, Homo sapien
aaccaccactgcactcgggccagct

SEQ ID NO: 783883 - DNA, 25 bp, Homo sapien
gtcgttgtgatcaattaactgtaac

SEQ ID NO: 783884 - DNA, 25 bp, Homo sapien
tgtaagtcgttgtgatcaattaact

SEQ ID NO: 783885 - DNA, 25 bp, Homo sapien
cgttgtgatcaattaactgtaacca

SEQ ID NO: 783886 - DNA, 25 bp, Homo sapien
aaagagacaattgtggatttctgac

SEQ ID NO: 783887 - DNA, 25 bp, Homo sapien
tgacattcaaatgtacaatttcgcc

SEQ ID NO: 783888 - DNA, 25 bp, Homo sapien
gaatggacttaacaccaatacctcc

SEQ ID NO: 783889 - DNA, 25 bp, Homo sapien
aatttcgcctccttgataaagaatg

SEQ ID NO: 783890 - DNA, 25 bp, Homo sapien
atgcccttcgccttgtcagcctgga

SEQ ID NO: 783891 - DNA, 25 bp, Homo sapien
gcgaagggaagacgcctaatgattc

SEQ ID NO: 783892 - DNA, 25 bp, Homo sapien
tcagcctggagaagactgcgatttg

SEQ ID NO: 783893 - DNA, 25 bp, Homo sapien
ttgcacttcgaagccatgcccttcg

SEQ ID NO: 783894 - DNA, 25 bp, Homo sapien
tatctctcgctcaagcttccaggct

SEQ ID NO: 783895 - DNA, 25 bp, Homo sapien
agcacaagcccactgcaaatctctg

SEQ ID NO: 783896 - DNA, 25 bp, Homo sapien
tggccaagcctaacaggaatgggtg

SEQ ID NO: 783897 - DNA, 25 bp, Homo sapien
ggccaaagcgattcacctggccaag

SEQ ID NO: 783898 - DNA, 25 bp, Homo sapien
ggccgggaaaggtccctcatagaca

SEQ ID NO: 783899 - DNA, 25 bp, Homo sapien
tcatagacactcgaagcttccaggg

SEQ ID NO: 783900 - DNA, 25 bp, Homo sapien
acaagggcgattttcagggcaggca

SEQ ID NO: 783901 - DNA, 25 bp, Homo sapien
ggttcatctgattgtacccgtcagc

SEQ ID NO: 783902 - DNA, 25 bp, Homo sapien
atgcattcacgagtggcaggtgtct

SEQ ID NO: 783903 - DNA, 25 bp, Homo sapien
gatgcattcacgagtggcaggtgtc

SEQ ID NO: 783904 - DNA, 25 bp, Homo sapien
aggcaaggactgaggtgaatccata

SEQ ID NO: 783905 - DNA, 25 bp, Homo sapien
catatggattcaccaccactaacac

SEQ ID NO: 783906 - DNA, 25 bp, Homo sapien
tgcctcatgccccttggtggaattc

SEQ ID NO: 783907 - DNA, 25 bp, Homo sapien
tctaaaacttgcctcggtccctcac

SEQ ID NO: 783908 - DNA, 25 bp, Homo sapien
tagatagaaagcacctggaactggt

SEQ ID NO: 783909 - DNA, 25 bp, Homo sapien
aattggttgcaatcaacaccaggga

SEQ ID NO: 783910 - DNA, 25 bp, Homo sapien
cccagcagtcaggtggttggtaact

SEQ ID NO: 783911 - DNA, 25 bp, Homo sapien
gtttaactggcatatgacctgggag

SEQ ID NO: 783912 - DNA, 25 bp, Homo sapien
cccggcctgttattgtttgttgaca

SEQ ID NO: 783913 - DNA, 25 bp, Homo sapien
tcctactctaaacgtcttggttaca

SEQ ID NO: 783914 - DNA, 25 bp, Homo sapien
tggacttctggtgtgagcaatatag

SEQ ID NO: 783915 - DNA, 25 bp, Homo sapien
tttgatagcctgaaaaccatcctac

SEQ ID NO: 783916 - DNA, 25 bp, Homo sapien
taaatagcctgcgacagtgtccaga

SEQ ID NO: 783917 - DNA, 25 bp, Homo sapien
cacagtggctgtttggagagttctc

SEQ ID NO: 783918 - DNA, 25 bp, Homo sapien
caagtaagattatccccgcagaagg

SEQ ID NO: 783919 - DNA, 25 bp, Homo sapien
cagaggagcgttacacctgagggaa

SEQ ID NO: 783920 - DNA, 25 bp, Homo sapien
ctttttggaaattggggtcagcagg

SEQ ID NO: 783921 - DNA, 25 bp, Homo sapien
tgacggtgaaggtcgggattgtccc

SEQ ID NO: 783922 - DNA, 25 bp, Homo sapien
caaccccgggatgaatgaatgggct

SEQ ID NO: 783923 - DNA, 25 bp, Homo sapien
tgtttgcaaaaggccttgacggtga

SEQ ID NO: 783924 - DNA, 25 bp, Homo sapien
aagacagcgtcttgataggttgccc

SEQ ID NO: 783925 - DNA, 25 bp, Homo sapien
catctgcaggcactgttggaaccag

SEQ ID NO: 783926 - DNA, 25 bp, Homo sapien
cagtacccaaggatgatgtcccagc

SEQ ID NO: 783927 - DNA, 25 bp, Homo sapien
cagttgttgcgccatggtgcctagc

SEQ ID NO: 783928 - DNA, 25 bp, Homo sapien
tgaaggacgtcatccgagaaggagc

SEQ ID NO: 783929 - DNA, 25 bp, Homo sapien
tgatgcttcggtgctaggtacgccc

SEQ ID NO: 783930 - DNA, 25 bp, Homo sapien
tggagacctagtggcgcctgatgct

SEQ ID NO: 783931 - DNA, 25 bp, Homo sapien
catcagtccctgtacgagcggttaa

SEQ ID NO: 783932 - DNA, 25 bp, Homo sapien
tagttccagagctcgcgagggccag

SEQ ID NO: 783933 - DNA, 25 bp, Homo sapien
gcggcggttggaacgaaacgatgag

SEQ ID NO: 783934 - DNA, 25 bp, Homo sapien
gtagttccagagctcgcgagggcca

SEQ ID NO: 783935 - DNA, 25 bp, Homo sapien
ttggaacgaaacgatgagtgcctcc

SEQ ID NO: 783936 - DNA, 25 bp, Homo sapien
tgttttgtgcgctccgattacgggc

SEQ ID NO: 783937 - DNA, 25 bp, Homo sapien
cctgcaagtgcccaatgtgccctgt

SEQ ID NO: 783938 - DNA, 25 bp, Homo sapien
ggtcccgttacgtgtcccatcatgt

SEQ ID NO: 783939 - DNA, 25 bp, Homo sapien
tgtgccctgtgtggtcccgttacgt

SEQ ID NO: 783940 - DNA, 25 bp, Homo sapien
tgtaagtgccccatcgtgctctctg

SEQ ID NO: 783941 - DNA, 25 bp, Homo sapien
ctgtcgctccagttagatgccccat

SEQ ID NO: 783942 - DNA, 25 bp, Homo sapien
atgccccgcacgctctggttacatg

SEQ ID NO: 783943 - DNA, 25 bp, Homo sapien
tgccccgcgagctccaattacgtgc

SEQ ID NO: 783944 - DNA, 25 bp, Homo sapien
tgaaagttggctgtagcctacgcct

SEQ ID NO: 783945 - DNA, 25 bp, Homo sapien
caagagcaagatgtacagtgtttcc

SEQ ID NO: 783946 - DNA, 25 bp, Homo sapien
tgtatatacgtgcactctcaagagc

SEQ ID NO: 783947 - DNA, 25 bp, Homo sapien
catgctctgcgtgctcgttaggtgc

SEQ ID NO: 783948 - DNA, 25 bp, Homo sapien
tttcttcttcccagcagggaacagc

SEQ ID NO: 783949 - DNA, 25 bp, Homo sapien
tggcttctcacaatccgctgggcct

SEQ ID NO: 783950 - DNA, 25 bp, Homo sapien
gaagtgggaagtgcagctggacgcc

SEQ ID NO: 783951 - DNA, 25 bp, Homo sapien
gaacagcaggcacagagtcagaagt

SEQ ID NO: 783952 - DNA, 25 bp, Homo sapien
cgcactgtagcattagggactcctt

SEQ ID NO: 783953 - DNA, 25 bp, Homo sapien
ggtccttctcgcagaaaaggctgag

SEQ ID NO: 783954 - DNA, 25 bp, Homo sapien
agcgcaccttggtgtccaggtggta

SEQ ID NO: 783955 - DNA, 25 bp, Homo sapien
aaccaggcagcccttgcagtaggag

SEQ ID NO: 783956 - DNA, 25 bp, Homo sapien
tggtcaccagcagatccagaattag

SEQ ID NO: 783957 - DNA, 25 bp, Homo sapien
cacttgctggcataaacggacagag

SEQ ID NO: 783958 - DNA, 25 bp, Homo sapien
gaatttttggcttggatcgtgccca

SEQ ID NO: 783959 - DNA, 25 bp, Homo sapien
caggaacttcccaggcataagaggg

SEQ ID NO: 783960 - DNA, 25 bp, Homo sapien
ctcagagaagagggctgcgagctcc

SEQ ID NO: 783961 - DNA, 25 bp, Homo sapien
caccagtttggcgatgagctcatcc

SEQ ID NO: 783962 - DNA, 25 bp, Homo sapien
gctcagagaagagggctgcgagctc

SEQ ID NO: 783963 - DNA, 25 bp, Homo sapien
ccggtttttcaccagtttggcgatg

SEQ ID NO: 783964 - DNA, 25 bp, Homo sapien
gacaactgggttgaattcccctgag

SEQ ID NO: 783965 - DNA, 25 bp, Homo sapien
caacttggagccagtcctaacgaca

SEQ ID NO: 783966 - DNA, 25 bp, Homo sapien
tgagaactgagctctacaggaaagt

SEQ ID NO: 783967 - DNA, 25 bp, Homo sapien
ggagtcacgcccatgctttcagctg

SEQ ID NO: 783968 - DNA, 25 bp, Homo sapien
ggcggatcacccagctgaagacatc

SEQ ID NO: 783969 - DNA, 25 bp, Homo sapien
gaactcgcggcggatcacccagctg

SEQ ID NO: 783970 - DNA, 25 bp, Homo sapien
agcacacactcggcttgggccagcc

SEQ ID NO: 783971 - DNA, 25 bp, Homo sapien
ttctcctcgtccaccgggtggcgca

SEQ ID NO: 783972 - DNA, 25 bp, Homo sapien
ccagatgaactcatggtggtcctca

SEQ ID NO: 783973 - DNA, 25 bp, Homo sapien
catggtggtcctcattgccgaactg

SEQ ID NO: 783974 - DNA, 25 bp, Homo sapien
tgaactcatggtggtcctcattgcc

SEQ ID NO: 783975 - DNA, 25 bp, Homo sapien
actcatggtggtcctcattgccgaa

SEQ ID NO: 783976 - DNA, 25 bp, Homo sapien
gttaagctgaatggaggaaccagtg

SEQ ID NO: 783977 - DNA, 25 bp, Homo sapien
taggtacccacagttcaccatctgc

SEQ ID NO: 783978 - DNA, 25 bp, Homo sapien
cacctgtctgcgagacccttgaagg

SEQ ID NO: 783979 - DNA, 25 bp, Homo sapien
gtgactttcctctatcttccccagg

SEQ ID NO: 783980 - DNA, 25 bp, Homo sapien
ggacatgcccttgacgtccaggcgg

SEQ ID NO: 783981 - DNA, 25 bp, Homo sapien
ccacaggataaatctcagggatggg

SEQ ID NO: 783982 - DNA, 25 bp, Homo sapien
ctgaatggctggagcgctactggat

SEQ ID NO: 783983 - DNA, 25 bp, Homo sapien
agtaggaagatcatgagcgcggttt

SEQ ID NO: 783984 - DNA, 25 bp, Homo sapien
ttgctggagtacaccagccccttga

SEQ ID NO: 783985 - DNA, 25 bp, Homo sapien
ctggaagttgctggagtacaccagc

SEQ ID NO: 783986 - DNA, 25 bp, Homo sapien
ccctggcggctctccacgccggcca

SEQ ID NO: 783987 - DNA, 25 bp, Homo sapien
gaagttgctggagtacaccagcccc

SEQ ID NO: 783988 - DNA, 25 bp, Homo sapien
gggagacaagctgggtcgggggctc

SEQ ID NO: 783989 - DNA, 25 bp, Homo sapien
gagacaagctgggtcgggggctccc

SEQ ID NO: 783990 - DNA, 25 bp, Homo sapien
ggagacaagctgggtcgggggctcc

SEQ ID NO: 783991 - DNA, 25 bp, Homo sapien
agggagacaagctgggtcgggggct

SEQ ID NO: 783992 - DNA, 25 bp, Homo sapien
gcggagtagcgctgcgtttcgcaca

SEQ ID NO: 783993 - DNA, 25 bp, Homo sapien
gcatccagcacggcggagtagcgct

SEQ ID NO: 783994 - DNA, 25 bp, Homo sapien
ccagcgcgtacagctgcttcacgtt

SEQ ID NO: 783995 - DNA, 25 bp, Homo sapien
gtttcgcacaccagcgcgtacagct

SEQ ID NO: 783996 - DNA, 25 bp, Homo sapien
cagcttcttcgcactgaggaggccg

SEQ ID NO: 783997 - DNA, 25 bp, Homo sapien
cggctgcagcttcttcgcactgagg

SEQ ID NO: 783998 - DNA, 25 bp, Homo sapien
gctgcagcttcttcgcactgaggag

SEQ ID NO: 783999 - DNA, 25 bp, Homo sapien
gcttcttcgcactgaggaggccggc

SEQ ID NO: 784000 - DNA, 25 bp, Homo sapien
tcatttcaggtgagcgacttgctcc

SEQ ID NO: 784001 - DNA, 25 bp, Homo sapien
gggctgaaaccagatgacaaagcgc

SEQ ID NO: 784002 - DNA, 25 bp, Homo sapien
aggtgagcgacttgctccagtcccg

SEQ ID NO: 784003 - DNA, 25 bp, Homo sapien
ccagatgacaaagcgctgaccgtcg

SEQ ID NO: 784004 - DNA, 25 bp, Homo sapien
cgaagttaaagcattttcatcccat

SEQ ID NO: 784005 - DNA, 25 bp, Homo sapien
tgtacttcggttatttaatccttca

SEQ ID NO: 784006 - DNA, 25 bp, Homo sapien
atctcaattcgtaacccagggaagg

SEQ ID NO: 784007 - DNA, 25 bp, Homo sapien
atttaatccttcaaaacactcgaag

SEQ ID NO: 784008 - DNA, 25 bp, Homo sapien
taactctaatagagcccgggcactg

SEQ ID NO: 784009 - DNA, 25 bp, Homo sapien
gacagaaacgccctaagcaagaagt

SEQ ID NO: 784010 - DNA, 25 bp, Homo sapien
gatcacctgactagatggttacaga

SEQ ID NO: 784011 - DNA, 25 bp, Homo sapien
gaaattaactacacaacaggatcgg

SEQ ID NO: 784012 - DNA, 25 bp, Homo sapien
ggtgccgtcccaacagagccttcca

SEQ ID NO: 784013 - DNA, 25 bp, Homo sapien
acaccccgaagaaccttgagccgag

SEQ ID NO: 784014 - DNA, 25 bp, Homo sapien
agctcacaccccgaagaaccttgag

SEQ ID NO: 784015 - DNA, 25 bp, Homo sapien
tcatgccagctcacaccccgaagaa

SEQ ID NO: 784016 - DNA, 25 bp, Homo sapien
gaaccttgagccgagccaactcaac

SEQ ID NO: 784017 - DNA, 25 bp, Homo sapien
aataactacataaacggagcaggtc

SEQ ID NO: 784018 - DNA, 25 bp, Homo sapien
caggtcttgagagtgttcacacgca

SEQ ID NO: 784019 - DNA, 25 bp, Homo sapien
gaagcccgaccctgataggagaaac

SEQ ID NO: 784020 - DNA, 25 bp, Homo sapien
tgttcacacgcacaaatcgaggcag

SEQ ID NO: 784021 - DNA, 25 bp, Homo sapien
tccagcctcggtgagagtgacagag

SEQ ID NO: 784022 - DNA, 25 bp, Homo sapien
tgtggtcatcccaataagaaatgag

SEQ ID NO: 784023 - DNA, 25 bp, Homo sapien
gagcttcctacagtcaacctcaagg

SEQ ID NO: 784024 - DNA, 25 bp, Homo sapien
gagtgcttaacctaggcagtgtccg

SEQ ID NO: 784025 - DNA, 25 bp, Homo sapien
gatgagatatcccacagatgtggag

SEQ ID NO: 784026 - DNA, 25 bp, Homo sapien
ctgatgagatatcccacagatgtgg

SEQ ID NO: 784027 - DNA, 25 bp, Homo sapien
tgatgagatatcccacagatgtgga

SEQ ID NO: 784028 - DNA, 25 bp, Homo sapien
ggccaccccttcataatcccagctg

SEQ ID NO: 784029 - DNA, 25 bp, Homo sapien
caagaaaggacttagcatggccggg

SEQ ID NO: 784030 - DNA, 25 bp, Homo sapien
tggaattcaaacacaagcagccgtt

SEQ ID NO: 784031 - DNA, 25 bp, Homo sapien
cagaaatctatcgaagtggcagagc

SEQ ID NO: 784032 - DNA, 25 bp, Homo sapien
catgcctgcaatcctgtagggaaaa

SEQ ID NO: 784033 - DNA, 25 bp, Homo sapien
ggagcctgggcaagtgattcaatct

SEQ ID NO: 784034 - DNA, 25 bp, Homo sapien
tcaacagggtgataagggaatccgg

SEQ ID NO: 784035 - DNA, 25 bp, Homo sapien
atccgggatccgcagttgagggaat

SEQ ID NO: 784036 - DNA, 25 bp, Homo sapien
ctactgtttaccagcagtgggagcc

SEQ ID NO: 784037 - DNA, 25 bp, Homo sapien
tatttcaacggtccattcatgcaac

SEQ ID NO: 784038 - DNA, 25 bp, Homo sapien
tgccaggccctatttcaacggtcca

SEQ ID NO: 784039 - DNA, 25 bp, Homo sapien
ggccctatttcaacggtccattcat

SEQ ID NO: 784040 - DNA, 25 bp, Homo sapien
ttcaacggtccattcatgcaacaaa

SEQ ID NO: 784041 - DNA, 25 bp, Homo sapien
tgggtgttcatgcagatctgtctgg

SEQ ID NO: 784042 - DNA, 25 bp, Homo sapien
agaatgaggtgtccggcccggtaca

SEQ ID NO: 784043 - DNA, 25 bp, Homo sapien
tgtctgggcgggaaacaccagcagc

SEQ ID NO: 784044 - DNA, 25 bp, Homo sapien
tccggcccggtacagtgggtgttca

SEQ ID NO: 784045 - DNA, 25 bp, Homo sapien
tggcgggggtccagcagcatggctg

SEQ ID NO: 784046 - DNA, 25 bp, Homo sapien
ctggcgggggtccagcagcatggct

SEQ ID NO: 784047 - DNA, 25 bp, Homo sapien
ggggtccagcagcatggctgggaga

SEQ ID NO: 784048 - DNA, 25 bp, Homo sapien
gtccagcagcatggctgggagacag

SEQ ID NO: 784049 - DNA, 25 bp, Homo sapien
tcagaagagcagccaagtgactggt

SEQ ID NO: 784050 - DNA, 25 bp, Homo sapien
tgactggtcttattgcctggggcgg

SEQ ID NO: 784051 - DNA, 25 bp, Homo sapien
agaagagcagccaagtgactggtct

SEQ ID NO: 784052 - DNA, 25 bp, Homo sapien
tggtcttattgcctggggcggcaca

SEQ ID NO: 784053 - DNA, 25 bp, Homo sapien
gatccagcaggacatagtggacctc

SEQ ID NO: 784054 - DNA, 25 bp, Homo sapien
gcaggacatagtggacctcacgata

SEQ ID NO: 784055 - DNA, 25 bp, Homo sapien
gacctcacgatagcgcggatctaag

SEQ ID NO: 784056 - DNA, 25 bp, Homo sapien
tagtggacctcacgatagcgcggat

SEQ ID NO: 784057 - DNA, 25 bp, Homo sapien
ccaggtctaagctgctgtggacctc

SEQ ID NO: 784058 - DNA, 25 bp, Homo sapien
gtgtcagaactaagaccaaaacaga

SEQ ID NO: 784059 - DNA, 25 bp, Homo sapien
gaaaagcgtgtctcggttacacagc

SEQ ID NO: 784060 - DNA, 25 bp, Homo sapien
taagaccaaaacagatgactccagg

SEQ ID NO: 784061 - DNA, 25 bp, Homo sapien
tgccccgggatcctccagctgtctg

SEQ ID NO: 784062 - DNA, 25 bp, Homo sapien
gatcctccagctgtctgctcggcat

SEQ ID NO: 784063 - DNA, 25 bp, Homo sapien
ggctaggtgtccctgccccgggatc

SEQ ID NO: 784064 - DNA, 25 bp, Homo sapien
cctgccccgggatcctccagctgtc

SEQ ID NO: 784065 - DNA, 25 bp, Homo sapien
ggaagggaaagtgagcgcgtggcac

SEQ ID NO: 784066 - DNA, 25 bp, Homo sapien
gggaagggaaagtgagcgcgtggca

SEQ ID NO: 784067 - DNA, 25 bp, Homo sapien
cagagggagcacatggagtagacga

SEQ ID NO: 784068 - DNA, 25 bp, Homo sapien
gggagcacatggagtagacgagccg

SEQ ID NO: 784069 - DNA, 25 bp, Homo sapien
cgcccgggttctgctgcagcgcatc

SEQ ID NO: 784070 - DNA, 25 bp, Homo sapien
gcccgggttctgctgcagcgcatct

SEQ ID NO: 784071 - DNA, 25 bp, Homo sapien
gacccgttcaattacagcaacgaag

SEQ ID NO: 784072 - DNA, 25 bp, Homo sapien
aacgaagaagccaccgctaagcgtg

SEQ ID NO: 784073 - DNA, 25 bp, Homo sapien
tcggcacccgggaacgtgctcaggc

SEQ ID NO: 784074 - DNA, 25 bp, Homo sapien
gtcggcatctcgacccgttcaatta

SEQ ID NO: 784075 - DNA, 25 bp, Homo sapien
ctagagaagtgtagatgttagatgt

SEQ ID NO: 784076 - DNA, 25 bp, Homo sapien
gagaagtgtagatgttagatgtgcc

SEQ ID NO: 784077 - DNA, 25 bp, Homo sapien
gatgtgccagtaccatcctgcgcct

SEQ ID NO: 784078 - DNA, 25 bp, Homo sapien
tgttagatgtgccagtaccatcctg

SEQ ID NO: 784079 - DNA, 25 bp, Homo sapien
ctatgtgcaaggcggtgtgcaagca

SEQ ID NO: 784080 - DNA, 25 bp, Homo sapien
atgtgcaaggcggtgtgcaagcacc

SEQ ID NO: 784081 - DNA, 25 bp, Homo sapien
ggtgctgatgctttggcctgtgagg

SEQ ID NO: 784082 - DNA, 25 bp, Homo sapien
gcggtgtgcaagcaccggctgcggc

SEQ ID NO: 784083 - DNA, 25 bp, Homo sapien
ctttcccaccaggaaggagtcagcc

SEQ ID NO: 784084 - DNA, 25 bp, Homo sapien
ccaggaaggagtcagcctggagcct

SEQ ID NO: 784085 - DNA, 25 bp, Homo sapien
cccaccaggaaggagtcagcctgga

SEQ ID NO: 784086 - DNA, 25 bp, Homo sapien
caggaaggagtcagcctggagcctc

SEQ ID NO: 784087 - DNA, 25 bp, Homo sapien
cagcaagaacacagcccgaggaagg

SEQ ID NO: 784088 - DNA, 25 bp, Homo sapien
ggtcctccacggagaggacaggcat

SEQ ID NO: 784089 - DNA, 25 bp, Homo sapien
tatttctgcaggcaacacttttgct

SEQ ID NO: 784090 - DNA, 25 bp, Homo sapien
gcattttatttctgcaggcaacact

SEQ ID NO: 784091 - DNA, 25 bp, Homo sapien
cattttatttctgcaggcaacactt

SEQ ID NO: 784092 - DNA, 25 bp, Homo sapien
tttatttctgcaggcaacacttttg

SEQ ID NO: 784093 - DNA, 25 bp, Homo sapien
tcattcctgttgagtctagttggaa

SEQ ID NO: 784094 - DNA, 25 bp, Homo sapien
tggaatttttagtatgaatgtgaga

SEQ ID NO: 784095 - DNA, 25 bp, Homo sapien
tttctcctgcttgtgacattaagaa

SEQ ID NO: 784096 - DNA, 25 bp, Homo sapien
gggactttccattacaaatagagac

SEQ ID NO: 784097 - DNA, 25 bp, Homo sapien
ttccgcaggcaggacagccggtccg

SEQ ID NO: 784098 - DNA, 25 bp, Homo sapien
caggcaggacagccggtccgggaac

SEQ ID NO: 784099 - DNA, 25 bp, Homo sapien
cgcaggcaggacagccggtccggga

SEQ ID NO: 784100 - DNA, 25 bp, Homo sapien
cagttccgcaggcaggacagccggt

SEQ ID NO: 784101 - DNA, 25 bp, Homo sapien
gagtgaacctcaagcctaaatacct

SEQ ID NO: 784102 - DNA, 25 bp, Homo sapien
tagaccctcctagtgtcagtacctg

SEQ ID NO: 784103 - DNA, 25 bp, Homo sapien
taagttatgcctgtgcaaagaagag

SEQ ID NO: 784104 - DNA, 25 bp, Homo sapien
gaagaggctcaaatgctgtccccgg

SEQ ID NO: 784105 - DNA, 25 bp, Homo sapien
catgttcaagcccattttcacggct

SEQ ID NO: 784106 - DNA, 25 bp, Homo sapien
gaacacagaacacctcaccttccag

SEQ ID NO: 784107 - DNA, 25 bp, Homo sapien
gcagcagtgtgagtaccacgaccag

SEQ ID NO: 784108 - DNA, 25 bp, Homo sapien
tgcgtttggctttggcataaacagt

SEQ ID NO: 784109 - DNA, 25 bp, Homo sapien
catccagtaggtacccattgttaac

SEQ ID NO: 784110 - DNA, 25 bp, Homo sapien
gttctacatagcagggtcacagcat

SEQ ID NO: 784111 - DNA, 25 bp, Homo sapien
aagtaaaattcctctgtcccagcga

SEQ ID NO: 784112 - DNA, 25 bp, Homo sapien
gaatcggtaacgtgcaaatattacc

SEQ ID NO: 784113 - DNA, 25 bp, Homo sapien
ttttgttcccgttatcacactgata

SEQ ID NO: 784114 - DNA, 25 bp, Homo sapien
gcagactaccagactttttaaacag

SEQ ID NO: 784115 - DNA, 25 bp, Homo sapien
tcttccttactaaacagagcttata

SEQ ID NO: 784116 - DNA, 25 bp, Homo sapien
taactacaccaaagtgtattggcag

SEQ ID NO: 784117 - DNA, 25 bp, Homo sapien
tgttcctgtgtaaaataacatgtac

SEQ ID NO: 784118 - DNA, 25 bp, Homo sapien
tgtctctcacttgcactatttctgg

SEQ ID NO: 784119 - DNA, 25 bp, Homo sapien
gccttcaggatttgatctatatcat

SEQ ID NO: 784120 - DNA, 25 bp, Homo sapien
ggcaagaaatttggtatcattctta

SEQ ID NO: 784121 - DNA, 25 bp, Homo sapien
tgtagattgtttgccttgcaatgtt

SEQ ID NO: 784122 - DNA, 25 bp, Homo sapien
tgtgtagattgtttgccttgcaatg

SEQ ID NO: 784123 - DNA, 25 bp, Homo sapien
tcctgtgtagattgtttgccttgca

SEQ ID NO: 784124 - DNA, 25 bp, Homo sapien
cctgtgtagattgtttgccttgcaa

SEQ ID NO: 784125 - DNA, 25 bp, Homo sapien
aactcgagattatattcacccagat

SEQ ID NO: 784126 - DNA, 25 bp, Homo sapien
tcgagattatattcacccagatatt

SEQ ID NO: 784127 - DNA, 25 bp, Homo sapien
ctcgagattatattcacccagatat

SEQ ID NO: 784128 - DNA, 25 bp, Homo sapien
actcgagattatattcacccagata

SEQ ID NO: 784129 - DNA, 25 bp, Homo sapien
tgccatccaagctctagatctgtgg

SEQ ID NO: 784130 - DNA, 25 bp, Homo sapien
gcttagctcattagaatgccatcca

SEQ ID NO: 784131 - DNA, 25 bp, Homo sapien
tgggctttgagacgcatcatgagtt

SEQ ID NO: 784132 - DNA, 25 bp, Homo sapien
tcccaactgtggtcggtttagatgc

SEQ ID NO: 784133 - DNA, 25 bp, Homo sapien
tagcctattgagctttcttttgcgg

SEQ ID NO: 784134 - DNA, 25 bp, Homo sapien
ttcttatgcaggtgatttctgcctt

SEQ ID NO: 784135 - DNA, 25 bp, Homo sapien
gttgagtgttcacagggtgttagcc

SEQ ID NO: 784136 - DNA, 25 bp, Homo sapien
tatcactcttttagacccttctgag

SEQ ID NO: 784137 - DNA, 25 bp, Homo sapien
gtccccaatttcagggaatccatgg

SEQ ID NO: 784138 - DNA, 25 bp, Homo sapien
aatccatggattacctaagccagcc

SEQ ID NO: 784139 - DNA, 25 bp, Homo sapien
cacatatttccaatggtgtccccaa

SEQ ID NO: 784140 - DNA, 25 bp, Homo sapien
gctcacacatatttccaatggtgtc

SEQ ID NO: 784141 - DNA, 25 bp, Homo sapien
atgaaaccttataagagtgagatta

SEQ ID NO: 784142 - DNA, 25 bp, Homo sapien
tgaaaccttataagagtgagattat

SEQ ID NO: 784143 - DNA, 25 bp, Homo sapien
gaaaccttataagagtgagattatc

SEQ ID NO: 784144 - DNA, 25 bp, Homo sapien
gatgaaaccttataagagtgagatt

SEQ ID NO: 784145 - DNA, 25 bp, Homo sapien
cttacggaacctagtctccgttctg

SEQ ID NO: 784146 - DNA, 25 bp, Homo sapien
atctgtcccctcttacggaacctag

SEQ ID NO: 784147 - DNA, 25 bp, Homo sapien
tacggaacctagtctccgttctgtc

SEQ ID NO: 784148 - DNA, 25 bp, Homo sapien
gaatttctccattcttcccacacac

SEQ ID NO: 784149 - DNA, 25 bp, Homo sapien
tgaatttctccattcttcccacaca

SEQ ID NO: 784150 - DNA, 25 bp, Homo sapien
gcctgaatttctccattcttcccac

SEQ ID NO: 784151 - DNA, 25 bp, Homo sapien
tttctccattcttcccacacaccct

SEQ ID NO: 784152 - DNA, 25 bp, Homo sapien
actcgcagactgctggcttctctaa

SEQ ID NO: 784153 - DNA, 25 bp, Homo sapien
tccccagactcgcagactgctggct

SEQ ID NO: 784154 - DNA, 25 bp, Homo sapien
gcttctctaagccatctttctgatt

SEQ ID NO: 784155 - DNA, 25 bp, Homo sapien
ccagactcgcagactgctggcttct

SEQ ID NO: 784156 - DNA, 25 bp, Homo sapien
aggccaccgtgtaatgcttctgcat

SEQ ID NO: 784157 - DNA, 25 bp, Homo sapien
aagaaaccaggccaccgtgtaatgc

SEQ ID NO: 784158 - DNA, 25 bp, Homo sapien
tgagtaaagaaaccaggccaccgtg

SEQ ID NO: 784159 - DNA, 25 bp, Homo sapien
accaggccaccgtgtaatgcttctg

SEQ ID NO: 784160 - DNA, 25 bp, Homo sapien
tacatggggggctgggatctacccc

SEQ ID NO: 784161 - DNA, 25 bp, Homo sapien
atggggggctgggatctaccccagg

SEQ ID NO: 784162 - DNA, 25 bp, Homo sapien
ctacatggggggctgggatctaccc

SEQ ID NO: 784163 - DNA, 25 bp, Homo sapien
acatggggggctgggatctacccca

SEQ ID NO: 784164 - DNA, 25 bp, Homo sapien
caagctgactgttgaagcccttgtg

SEQ ID NO: 784165 - DNA, 25 bp, Homo sapien
tcctccgcagattcatctgaccact

SEQ ID NO: 784166 - DNA, 25 bp, Homo sapien
aagctgactgttgaagcccttgtgg

SEQ ID NO: 784167 - DNA, 25 bp, Homo sapien
ccggctcctccgcagattcatctga

SEQ ID NO: 784168 - DNA, 25 bp, Homo sapien
aagaacaggattggaggtgctctct

SEQ ID NO: 784169 - DNA, 25 bp, Homo sapien
aaagaacaggattggaggtgctctc

SEQ ID NO: 784170 - DNA, 25 bp, Homo sapien
ccagctcatttttgtgcttctagaa

SEQ ID NO: 784171 - DNA, 25 bp, Homo sapien
tgagccagtgcaccctgcctcagta

SEQ ID NO: 784172 - DNA, 25 bp, Homo sapien
cctgcctcagtacctccattcttcc

SEQ ID NO: 784173 - DNA, 25 bp, Homo sapien
catttttgtgcttctagaagagaca

SEQ ID NO: 784174 - DNA, 25 bp, Homo sapien
caaaaggacctatgcggggggctgg

SEQ ID NO: 784175 - DNA, 25 bp, Homo sapien
ggctcaggggcgagcaccttccgtg

SEQ ID NO: 784176 - DNA, 25 bp, Homo sapien
ctcaggggcgagcaccttccgtggc

SEQ ID NO: 784177 - DNA, 25 bp, Homo sapien
gcaaaaggacctatgcggggggctg

SEQ ID NO: 784178 - DNA, 25 bp, Homo sapien
gggagcacgagcgacactcgccgtc

SEQ ID NO: 784179 - DNA, 25 bp, Homo sapien
cgacactcgccgtcgcttcagcttc

SEQ ID NO: 784180 - DNA, 25 bp, Homo sapien
aagcagcctgttgaaggcctcgtgg

SEQ ID NO: 784181 - DNA, 25 bp, Homo sapien
acgagcgacactcgccgtcgcttca

SEQ ID NO: 784182 - DNA, 25 bp, Homo sapien
tgcacctggcccgaaaccaagcttt

SEQ ID NO: 784183 - DNA, 25 bp, Homo sapien
ccaagcgctgacctttatcaagttg

SEQ ID NO: 784184 - DNA, 25 bp, Homo sapien
atctcctaagtgtccctcatgagtg

SEQ ID NO: 784185 - DNA, 25 bp, Homo sapien
tatcaagttgacctaatcctttatc

SEQ ID NO: 784186 - DNA, 25 bp, Homo sapien
tcccaggccaggaatcttttaatga

SEQ ID NO: 784187 - DNA, 25 bp, Homo sapien
gccaggaatcttttaatgacaggat

SEQ ID NO: 784188 - DNA, 25 bp, Homo sapien
caggccaggaatcttttaatgacag

SEQ ID NO: 784189 - DNA, 25 bp, Homo sapien
ttgtccgacaccctcagatctttgt

SEQ ID NO: 784190 - DNA, 25 bp, Homo sapien
gaaggtcggatgcaaatccgagaag

SEQ ID NO: 784191 - DNA, 25 bp, Homo sapien
aaggtcggatgcaaatccgagaagc

SEQ ID NO: 784192 - DNA, 25 bp, Homo sapien
ggaagccggcccggctgaaatacgc

SEQ ID NO: 784193 - DNA, 25 bp, Homo sapien
gaaatgaatgcgttggtattgccag

SEQ ID NO: 784194 - DNA, 25 bp, Homo sapien
agccggcccggctgaaatacgctat

SEQ ID NO: 784195 - DNA, 25 bp, Homo sapien
tggtattgccaggaggggaagccgg

SEQ ID NO: 784196 - DNA, 25 bp, Homo sapien
gaccgtccctagctcaggactggca

SEQ ID NO: 784197 - DNA, 25 bp, Homo sapien
aagggaccgtccctagctcaggact

SEQ ID NO: 784198 - DNA, 25 bp, Homo sapien
aggtaagggaccgtccctagctcag

SEQ ID NO: 784199 - DNA, 25 bp, Homo sapien
gggaccgtccctagctcaggactgg

SEQ ID NO: 784200 - DNA, 25 bp, Homo sapien
caagagaggcctccggctgaggtca

SEQ ID NO: 784201 - DNA, 25 bp, Homo sapien
accaccaagagaggcctccggctga

SEQ ID NO: 784202 - DNA, 25 bp, Homo sapien
gcaccaccaagagaggcctccggct

SEQ ID NO: 784203 - DNA, 25 bp, Homo sapien
accaagagaggcctccggctgaggt

SEQ ID NO: 784204 - DNA, 25 bp, Homo sapien
agggtatgcgagagcggttcttccc

SEQ ID NO: 784205 - DNA, 25 bp, Homo sapien
ctaactggaaccaacgcttacggag

SEQ ID NO: 784206 - DNA, 25 bp, Homo sapien
agcggttcttcccatacaggaagtg

SEQ ID NO: 784207 - DNA, 25 bp, Homo sapien
ccaacgcttacggagcaagggtatg

SEQ ID NO: 784208 - DNA, 25 bp, Homo sapien
gcttacggagcaagggtatgcgaga

SEQ ID NO: 784209 - DNA, 25 bp, Homo sapien
ctaactggaaccgacgcttacggag

SEQ ID NO: 784210 - DNA, 25 bp, Homo sapien
tgcgagagcggttcttcctggccct

SEQ ID NO: 784211 - DNA, 25 bp, Homo sapien
caagggtatgcgagagcggttcttc

SEQ ID NO: 784212 - DNA, 25 bp, Homo sapien
ccctcaggttcatggaacggcctaa

SEQ ID NO: 784213 - DNA, 25 bp, Homo sapien
caggttcatggaacggcctaactgg

SEQ ID NO: 784214 - DNA, 25 bp, Homo sapien
gccctcaggttcatggaacggccta

SEQ ID NO: 784215 - DNA, 25 bp, Homo sapien
ctcaggttcatggaacggcctaact

SEQ ID NO: 784216 - DNA, 25 bp, Homo sapien
cagtgctctgggtcataagcctgga

SEQ ID NO: 784217 - DNA, 25 bp, Homo sapien
ccagtgctctgggtcataagcctgg

SEQ ID NO: 784218 - DNA, 25 bp, Homo sapien
agtgctctgggtcataagcctggat

SEQ ID NO: 784219 - DNA, 25 bp, Homo sapien
gaaaggcgagcgcgatctcgcgccc

SEQ ID NO: 784220 - DNA, 25 bp, Homo sapien
aaaggcgagcgcgatctcgcgccca

SEQ ID NO: 784221 - DNA, 25 bp, Homo sapien
ctaggaaaggcgagcgcgatctcgc

SEQ ID NO: 784222 - DNA, 25 bp, Homo sapien
aggaaaggcgagcgcgatctcgcgc

SEQ ID NO: 784223 - DNA, 25 bp, Homo sapien
cttctctcaggccgatgacctcagg

SEQ ID NO: 784224 - DNA, 25 bp, Homo sapien
tagaagagattattatggaagtatc

SEQ ID NO: 784225 - DNA, 25 bp, Homo sapien
aaagagtgctcgcttcaggagcaca

SEQ ID NO: 784226 - DNA, 25 bp, Homo sapien
gagattattatggaagtatcataga

SEQ ID NO: 784227 - DNA, 25 bp, Homo sapien
agataaaaagagtgctcgcttcagg

SEQ ID NO: 784228 - DNA, 25 bp, Homo sapien
atagatacaaagattgaaaggtaaa

SEQ ID NO: 784229 - DNA, 25 bp, Homo sapien
agtcacaaacctaaacagcaaataa

SEQ ID NO: 784230 - DNA, 25 bp, Homo sapien
tcagtcacaaacctaaacagcaaat

SEQ ID NO: 784231 - DNA, 25 bp, Homo sapien
taatagatacaaagattgaaaggta

SEQ ID NO: 784232 - DNA, 25 bp, Homo sapien
gtaaaaaattacacctgaattctca

SEQ ID NO: 784233 - DNA, 25 bp, Homo sapien
ttccccaagagacgcactctattgt

SEQ ID NO: 784234 - DNA, 25 bp, Homo sapien
ccaagagacgcactctattgttctc

SEQ ID NO: 784235 - DNA, 25 bp, Homo sapien
tgtttccccaagagacgcactctat

SEQ ID NO: 784236 - DNA, 25 bp, Homo sapien
actcctgctgggatcatgggtgtga

SEQ ID NO: 784237 - DNA, 25 bp, Homo sapien
ttcctctctcaatatttttctctca

SEQ ID NO: 784238 - DNA, 25 bp, Homo sapien
tcttaccacctggttttcctctctc

SEQ ID NO: 784239 - DNA, 25 bp, Homo sapien
caaactcctgctgggatcatgggtg

SEQ ID NO: 784240 - DNA, 25 bp, Homo sapien
atctcagctactcagaagtctgatg

SEQ ID NO: 784241 - DNA, 25 bp, Homo sapien
tcagctactcagaagtctgatgcag

SEQ ID NO: 784242 - DNA, 25 bp, Homo sapien
agtctgatgcaggagaattgctaaa

SEQ ID NO: 784243 - DNA, 25 bp, Homo sapien
ataaaacaaaagtccgggcgtgatg

SEQ ID NO: 784244 - DNA, 25 bp, Homo sapien
tgagacagtatctctcacccagtct

SEQ ID NO: 784245 - DNA, 25 bp, Homo sapien
tttgagacagtatctctcacccagt

SEQ ID NO: 784246 - DNA, 25 bp, Homo sapien
acagtatctctcacccagtctggag

SEQ ID NO: 784247 - DNA, 25 bp, Homo sapien
agtgcaacagcgtggtctccgctca

SEQ ID NO: 784248 - DNA, 25 bp, Homo sapien
gacatgtctttcaggtgaccctcaa

SEQ ID NO: 784249 - DNA, 25 bp, Homo sapien
gagagtagatttttccagacatgtc

SEQ ID NO: 784250 - DNA, 25 bp, Homo sapien
gaaactgattaccactcatagggac

SEQ ID NO: 784251 - DNA, 25 bp, Homo sapien
tgaccctcaactacctcaggtttga

SEQ ID NO: 784252 - DNA, 25 bp, Homo sapien
gattagttggctttggcccctcgac

SEQ ID NO: 784253 - DNA, 25 bp, Homo sapien
caccaggtaacacgggaatcacagg

SEQ ID NO: 784254 - DNA, 25 bp, Homo sapien
ggaactgtcccagctaccaagtcag

SEQ ID NO: 784255 - DNA, 25 bp, Homo sapien
acaggtacatgtcgctccggtcaga

SEQ ID NO: 784256 - DNA, 25 bp, Homo sapien
tattttatatctgagcaaggagttt

SEQ ID NO: 784257 - DNA, 25 bp, Homo sapien
gccatcttggcagggttattttata

SEQ ID NO: 784258 - DNA, 25 bp, Homo sapien
gactagtttagattgtctgctgatg

SEQ ID NO: 784259 - DNA, 25 bp, Homo sapien
gatgcagccgtccatagcagtaccc

SEQ ID NO: 784260 - DNA, 25 bp, Homo sapien
aagcagaggctaattcagtgtcaca

SEQ ID NO: 784261 - DNA, 25 bp, Homo sapien
tgacacaccttggattaaaacggga

SEQ ID NO: 784262 - DNA, 25 bp, Homo sapien
cactagtgacaagtctcgggtgagc

SEQ ID NO: 784263 - DNA, 25 bp, Homo sapien
tgcaagccttctaaatgagtcactg

SEQ ID NO: 784264 - DNA, 25 bp, Homo sapien
tcttgatgcgggtcaacatttccaa

SEQ ID NO: 784265 - DNA, 25 bp, Homo sapien
gatctcagccattctaactcatatg

SEQ ID NO: 784266 - DNA, 25 bp, Homo sapien
tgtggcaactaaaccaatcggtgtg

SEQ ID NO: 784267 - DNA, 25 bp, Homo sapien
catttccaaaagtggctagtcctca

SEQ ID NO: 784268 - DNA, 25 bp, Homo sapien
caactgtggtagctccagcgatggt

SEQ ID NO: 784269 - DNA, 25 bp, Homo sapien
ggtagctccagcgatggtgctgccc

SEQ ID NO: 784270 - DNA, 25 bp, Homo sapien
cccaactgtggtagctccagcgatg

SEQ ID NO: 784271 - DNA, 25 bp, Homo sapien
ctgtggtagctccagcgatggtgct

SEQ ID NO: 784272 - DNA, 25 bp, Homo sapien
tgatgtcattaaggaagtacaaggg

SEQ ID NO: 784273 - DNA, 25 bp, Homo sapien
cattaaggaagtacaagggaatttg

SEQ ID NO: 784274 - DNA, 25 bp, Homo sapien
ggaagtacaagggaatttgcttaga

SEQ ID NO: 784275 - DNA, 25 bp, Homo sapien
gatgtcattaaggaagtacaaggga

SEQ ID NO: 784276 - DNA, 25 bp, Homo sapien
ccttgtagccgctggtttaggaaga

SEQ ID NO: 784277 - DNA, 25 bp, Homo sapien
tgggacagtcctggcaagctcaggc

SEQ ID NO: 784278 - DNA, 25 bp, Homo sapien
caatgggccccaaaccatagagtgg

SEQ ID NO: 784279 - DNA, 25 bp, Homo sapien
gcagagcttacaggtgccttgtagc

SEQ ID NO: 784280 - DNA, 25 bp, Homo sapien
tggtgtggtgccctggatcctggca

SEQ ID NO: 784281 - DNA, 25 bp, Homo sapien
tcttgtggttgtatggcaaagagcc

SEQ ID NO: 784282 - DNA, 25 bp, Homo sapien
ggctgtccacaactgtctgtgaaag

SEQ ID NO: 784283 - DNA, 25 bp, Homo sapien
ggccctcttgtggttgtatggcaaa

SEQ ID NO: 784284 - DNA, 25 bp, Homo sapien
gtttcctccatgacgacaggagcag

SEQ ID NO: 784285 - DNA, 25 bp, Homo sapien
tgccagcgtgactttgcagtttggg

SEQ ID NO: 784286 - DNA, 25 bp, Homo sapien
gcagccttacaagggaggagcccct

SEQ ID NO: 784287 - DNA, 25 bp, Homo sapien
gtgctagggaagcagaaccaaggtt

SEQ ID NO: 784288 - DNA, 25 bp, Homo sapien
ctttacaagccagaaaggcaatgag

SEQ ID NO: 784289 - DNA, 25 bp, Homo sapien
tgtgcattcctcaaatcctgagctc

SEQ ID NO: 784290 - DNA, 25 bp, Homo sapien
gccacttgcctggtccttgagtgca

SEQ ID NO: 784291 - DNA, 25 bp, Homo sapien
ggcggaggctggcttagttcctttc

SEQ ID NO: 784292 - DNA, 25 bp, Homo sapien
gattaagggaggctcgtctgcatcc

SEQ ID NO: 784293 - DNA, 25 bp, Homo sapien
ttaaagtacttgacacaagccaggc

SEQ ID NO: 784294 - DNA, 25 bp, Homo sapien
gaatcacagaggctaaggtcccgtt

SEQ ID NO: 784295 - DNA, 25 bp, Homo sapien
gactctcagatcgtagacaagttag

SEQ ID NO: 784296 - DNA, 25 bp, Homo sapien
tgtgaagcaggatttagtgtcctac

SEQ ID NO: 784297 - DNA, 25 bp, Homo sapien
ctacgagcacctgtcttcggaggcc

SEQ ID NO: 784298 - DNA, 25 bp, Homo sapien
ttcctcacagcggccttgtgaagca

SEQ ID NO: 784299 - DNA, 25 bp, Homo sapien
ctccgagttgcacttctggtcaggg

SEQ ID NO: 784300 - DNA, 25 bp, Homo sapien
gtaaatgatattgatggcagagcgg

SEQ ID NO: 784301 - DNA, 25 bp, Homo sapien
taaatgatattgatggcagagcgga

SEQ ID NO: 784302 - DNA, 25 bp, Homo sapien
tctggtcaacctgttgttgctgctg

SEQ ID NO: 784303 - DNA, 25 bp, Homo sapien
agacttctggtcaacctgttgttgc

SEQ ID NO: 784304 - DNA, 25 bp, Homo sapien
gaaaagataccattagcaaagccac

SEQ ID NO: 784305 - DNA, 25 bp, Homo sapien
ggttctctccacagatactacctca

SEQ ID NO: 784306 - DNA, 25 bp, Homo sapien
gaaggcttcctaaagcataccacaa

SEQ ID NO: 784307 - DNA, 25 bp, Homo sapien
tgactacggaaaaatgagaagcttt

SEQ ID NO: 784308 - DNA, 25 bp, Homo sapien
attcacagcaggataaagaagaggt

SEQ ID NO: 784309 - DNA, 25 bp, Homo sapien
gtgcccggcccagatgtgttttaga

SEQ ID NO: 784310 - DNA, 25 bp, Homo sapien
ttttagaaaaatagatattcacagc

SEQ ID NO: 784311 - DNA, 25 bp, Homo sapien
aaatagatattcacagcaggataaa

SEQ ID NO: 784312 - DNA, 25 bp, Homo sapien
tgcagacgcagcatgatggactccc

SEQ ID NO: 784313 - DNA, 25 bp, Homo sapien
gcagcatgatggactcccctgggag

SEQ ID NO: 784314 - DNA, 25 bp, Homo sapien
tcgaggggctccaccgacagctcat

SEQ ID NO: 784315 - DNA, 25 bp, Homo sapien
cccctgcagacgcagcatgatggac

SEQ ID NO: 784316 - DNA, 25 bp, Homo sapien
gtccttgaatgccacggcacagcca

SEQ ID NO: 784317 - DNA, 25 bp, Homo sapien
tgtactccaaggagcgtgtccttga

SEQ ID NO: 784318 - DNA, 25 bp, Homo sapien
agctgcagtcgaaaactgtactcca

SEQ ID NO: 784319 - DNA, 25 bp, Homo sapien
tctacagtgagttgatattaccttt

SEQ ID NO: 784320 - DNA, 25 bp, Homo sapien
tggacccggatcaggggcttgaagg

SEQ ID NO: 784321 - DNA, 25 bp, Homo sapien
acccggatcaggggcttgaaggact

SEQ ID NO: 784322 - DNA, 25 bp, Homo sapien
cccggatcaggggcttgaaggactg

SEQ ID NO: 784323 - DNA, 25 bp, Homo sapien
ggacccggatcaggggcttgaagga

SEQ ID NO: 784324 - DNA, 25 bp, Homo sapien
tgcacagcttgtggttggtcattcc

SEQ ID NO: 784325 - DNA, 25 bp, Homo sapien
cagtgctgctcccgtggctgcacag

SEQ ID NO: 784326 - DNA, 25 bp, Homo sapien
tcagtgctgctcccgtggctgcaca

SEQ ID NO: 784327 - DNA, 25 bp, Homo sapien
acagcttgtggttggtcattccaaa

SEQ ID NO: 784328 - DNA, 25 bp, Homo sapien
gcttccatgctgcatgagtcttggg

SEQ ID NO: 784329 - DNA, 25 bp, Homo sapien
gcttcgggtcggcagctctggccag

SEQ ID NO: 784330 - DNA, 25 bp, Homo sapien
gactcttcaccaaaggcttcgggtc

SEQ ID NO: 784331 - DNA, 25 bp, Homo sapien
gggaacttggcacacctatgcagcc

SEQ ID NO: 784332 - DNA, 25 bp, Homo sapien
ttaacacttttggggcatcaataga

SEQ ID NO: 784333 - DNA, 25 bp, Homo sapien
aactgtcgtgacatttgatttggca

SEQ ID NO: 784334 - DNA, 25 bp, Homo sapien
acaggcaacaactacaaaaccagac

SEQ ID NO: 784335 - DNA, 25 bp, Homo sapien
aacacggggcaaaactgtcgtgaca

SEQ ID NO: 784336 - DNA, 25 bp, Homo sapien
gttatatattaacaacccacagcag

SEQ ID NO: 784337 - DNA, 25 bp, Homo sapien
cacagcagacgtcacattcaatggt

SEQ ID NO: 784338 - DNA, 25 bp, Homo sapien
tacaaggatgcctaactttgccact

SEQ ID NO: 784339 - DNA, 25 bp, Homo sapien
tgatcctaaggataccaccaaaaag

SEQ ID NO: 784340 - DNA, 25 bp, Homo sapien
gggatgaggccctgagatctttcct

SEQ ID NO: 784341 - DNA, 25 bp, Homo sapien
tctcccaagtgctggttgacaagca

SEQ ID NO: 784342 - DNA, 25 bp, Homo sapien
acaagcagcaggtgataagggatga

SEQ ID NO: 784343 - DNA, 25 bp, Homo sapien
taagggatgaggccctgagatcttt

SEQ ID NO: 784344 - DNA, 25 bp, Homo sapien
ggcgccgtggggatcccggggcagc

SEQ ID NO: 784345 - DNA, 25 bp, Homo sapien
cgtggggatcccggggcagccgagg

SEQ ID NO: 784346 - DNA, 25 bp, Homo sapien
gcggcgccgtggggatcccggggca

SEQ ID NO: 784347 - DNA, 25 bp, Homo sapien
cgccgtggggatcccggggcagccg

SEQ ID NO: 784348 - DNA, 25 bp, Homo sapien
acagcaccaaattccactcgcgtcc

SEQ ID NO: 784349 - DNA, 25 bp, Homo sapien
gtcacagcaccaaattccactcgcg

SEQ ID NO: 784350 - DNA, 25 bp, Homo sapien
agcaccaaattccactcgcgtccgt

SEQ ID NO: 784351 - DNA, 25 bp, Homo sapien
tcacagcaccaaattccactcgcgt

SEQ ID NO: 784352 - DNA, 25 bp, Homo sapien
tctggcgggcaggggtgagggacac

SEQ ID NO: 784353 - DNA, 25 bp, Homo sapien
tggcgggcaggggtgagggacacaa

SEQ ID NO: 784354 - DNA, 25 bp, Homo sapien
tctctggcgggcaggggtgagggac

SEQ ID NO: 784355 - DNA, 25 bp, Homo sapien
agctttttagtcacctgggtgcagg

SEQ ID NO: 784356 - DNA, 25 bp, Homo sapien
ggggctgtaagaattcagcaaacat

SEQ ID NO: 784357 - DNA, 25 bp, Homo sapien
gtgtcctgtccaccacggtgtctcc

SEQ ID NO: 784358 - DNA, 25 bp, Homo sapien
ctgtccaccacggtgtctccagagc

SEQ ID NO: 784359 - DNA, 25 bp, Homo sapien
tggggctgtaagaattcagcaaaca

SEQ ID NO: 784360 - DNA, 25 bp, Homo sapien
gctgaccaccctgtcgtgcgtcggg

SEQ ID NO: 784361 - DNA, 25 bp, Homo sapien
agatcatacgctgaccaccctgtcg

SEQ ID NO: 784362 - DNA, 25 bp, Homo sapien
cagtcgatgcgtgtggagatcatac

SEQ ID NO: 784363 - DNA, 25 bp, Homo sapien
gccttggatatgcacggccagtcga

SEQ ID NO: 784364 - DNA, 25 bp, Homo sapien
ttggcacctgaatggtgacttgggt

SEQ ID NO: 784365 - DNA, 25 bp, Homo sapien
gaatggtgacttgggttccaccctg

SEQ ID NO: 784366 - DNA, 25 bp, Homo sapien
cacctgaatggtgacttgggttcca

SEQ ID NO: 784367 - DNA, 25 bp, Homo sapien
tcacagagttggcacctgaatggtg

SEQ ID NO: 784368 - DNA, 25 bp, Homo sapien
ctctgggcgtccacatcccccccgc

SEQ ID NO: 784369 - DNA, 25 bp, Homo sapien
tctctgggcgtccacatcccccccg

SEQ ID NO: 784370 - DNA, 25 bp, Homo sapien
gtctctgggcgtccacatccccccc

SEQ ID NO: 784371 - DNA, 25 bp, Homo sapien
ttgtgtacacgcaggctccagttgt

SEQ ID NO: 784372 - DNA, 25 bp, Homo sapien
cttgtgtacacgcaggctccagttg

SEQ ID NO: 784373 - DNA, 25 bp, Homo sapien
cttcctttgtggcctgagctgatga

SEQ ID NO: 784374 - DNA, 25 bp, Homo sapien
aagacttcctttgtggcctgagctg

SEQ ID NO: 784375 - DNA, 25 bp, Homo sapien
gacttcctttgtggcctgagctgat

SEQ ID NO: 784376 - DNA, 25 bp, Homo sapien
tcctttgtggcctgagctgatgaac

SEQ ID NO: 784377 - DNA, 25 bp, Homo sapien
gattggacaccagcagtttcccacc

SEQ ID NO: 784378 - DNA, 25 bp, Homo sapien
ttcccacccgtctccacgccggcac

SEQ ID NO: 784379 - DNA, 25 bp, Homo sapien
ctagattggacaccagcagtttccc

SEQ ID NO: 784380 - DNA, 25 bp, Homo sapien
acaccagcagtttcccacccgtctc

SEQ ID NO: 784381 - DNA, 25 bp, Homo sapien
ctgttatgtatcaatctgtgatgtg

SEQ ID NO: 784382 - DNA, 25 bp, Homo sapien
cagaggggtgccgtagtactgcttc

SEQ ID NO: 784383 - DNA, 25 bp, Homo sapien
gcgcatgtctgctgatcctaagctg

SEQ ID NO: 784384 - DNA, 25 bp, Homo sapien
ctgaatgttcacagggcggccagcc

SEQ ID NO: 784385 - DNA, 25 bp, Homo sapien
cagcgccacggtttctagtcatgcc

SEQ ID NO: 784386 - DNA, 25 bp, Homo sapien
cctccagcgccacggtttctagtca

SEQ ID NO: 784387 - DNA, 25 bp, Homo sapien
tccagcgccacggtttctagtcatg

SEQ ID NO: 784388 - DNA, 25 bp, Homo sapien
ccagcgccacggtttctagtcatgc

SEQ ID NO: 784389 - DNA, 25 bp, Homo sapien
ctgcctcttccccggtcgcctccac

SEQ ID NO: 784390 - DNA, 25 bp, Homo sapien
gtccatctcctctgccgaaaagctg

SEQ ID NO: 784391 - DNA, 25 bp, Homo sapien
cattataggcgtccatctcctctgc

SEQ ID NO: 784392 - DNA, 25 bp, Homo sapien
tgctttgaattcctgccggcgcctc

SEQ ID NO: 784393 - DNA, 25 bp, Homo sapien
cctagatttggcgtttgctaacaat

SEQ ID NO: 784394 - DNA, 25 bp, Homo sapien
tcttggcattccacggcttgtagac

SEQ ID NO: 784395 - DNA, 25 bp, Homo sapien
gggttctggcatgcccctataatcc

SEQ ID NO: 784396 - DNA, 25 bp, Homo sapien
tcagctaggttggttccttggagag

SEQ ID NO: 784397 - DNA, 25 bp, Homo sapien
gcggcagtttcccttggcaacagca

SEQ ID NO: 784398 - DNA, 25 bp, Homo sapien
ccttggcaacagcagaggagccggc

SEQ ID NO: 784399 - DNA, 25 bp, Homo sapien
tcctcgcggcagtttcccttggcaa

SEQ ID NO: 784400 - DNA, 25 bp, Homo sapien
gcctcctcgcggcagtttcccttgg

SEQ ID NO: 784401 - DNA, 25 bp, Homo sapien
gccagttgcgaagggcctcggactt

SEQ ID NO: 784402 - DNA, 25 bp, Homo sapien
gcccggaaaccagcagcgagagcag

SEQ ID NO: 784403 - DNA, 25 bp, Homo sapien
tggcggatggcacctcgggacacaa

SEQ ID NO: 784404 - DNA, 25 bp, Homo sapien
cctcggacttcagcgtgaggcccga

SEQ ID NO: 784405 - DNA, 25 bp, Homo sapien
gaagggattacagtgatgacgaaga

SEQ ID NO: 784406 - DNA, 25 bp, Homo sapien
catggatttgctagcgaatggattt

SEQ ID NO: 784407 - DNA, 25 bp, Homo sapien
atttggggccttaaccagtctggtg

SEQ ID NO: 784408 - DNA, 25 bp, Homo sapien
ccttggagagcgagcatggatttgc

SEQ ID NO: 784409 - DNA, 25 bp, Homo sapien
gctctattacatccaggctggctga

SEQ ID NO: 784410 - DNA, 25 bp, Homo sapien
taatcatgtcacaggtcctctaggc

SEQ ID NO: 784411 - DNA, 25 bp, Homo sapien
ttgattccaggagttgaacgctgca

SEQ ID NO: 784412 - DNA, 25 bp, Homo sapien
tgcccaaatacgactaaactcaagg

SEQ ID NO: 784413 - DNA, 25 bp, Homo sapien
ctacgttgcccaggctagccttgaa

SEQ ID NO: 784414 - DNA, 25 bp, Homo sapien
ttgtagagacaaagtcttgctacgt

SEQ ID NO: 784415 - DNA, 25 bp, Homo sapien
tgctacgttgcccaggctagccttg

SEQ ID NO: 784416 - DNA, 25 bp, Homo sapien
gtagagacaaagtcttgctacgttg

SEQ ID NO: 784417 - DNA, 25 bp, Homo sapien
ctgggcagtttgagggttaattaag

SEQ ID NO: 784418 - DNA, 25 bp, Homo sapien
taagtgtaacagcttcggggtggat

SEQ ID NO: 784419 - DNA, 25 bp, Homo sapien
cagtctcctctgctgtaatcctgac

SEQ ID NO: 784420 - DNA, 25 bp, Homo sapien
gggtgtcacttaacactctgtgtgc

SEQ ID NO: 784421 - DNA, 25 bp, Homo sapien
cagtgatgacacagcctcgaatgac

SEQ ID NO: 784422 - DNA, 25 bp, Homo sapien
acggtggtgactcccagcatggcaa

SEQ ID NO: 784423 - DNA, 25 bp, Homo sapien
ggtgcccacggttctctcgaaattg

SEQ ID NO: 784424 - DNA, 25 bp, Homo sapien
cagatgatgatagcgccgcagagca

SEQ ID NO: 784425 - DNA, 25 bp, Homo sapien
gaggtctggggaatgagccacgagg

SEQ ID NO: 784426 - DNA, 25 bp, Homo sapien
gaaagaggtctggggaatgagccac

SEQ ID NO: 784427 - DNA, 25 bp, Homo sapien
gtctggggaatgagccacgaggcac

SEQ ID NO: 784428 - DNA, 25 bp, Homo sapien
aagaggtctggggaatgagccacga

SEQ ID NO: 784429 - DNA, 25 bp, Homo sapien
cccgatggacagcccgcagacatta

SEQ ID NO: 784430 - DNA, 25 bp, Homo sapien
agcccgatggacagcccgcagacat

SEQ ID NO: 784431 - DNA, 25 bp, Homo sapien
ccgatggacagcccgcagacattac

SEQ ID NO: 784432 - DNA, 25 bp, Homo sapien
gcccgatggacagcccgcagacatt

SEQ ID NO: 784433 - DNA, 25 bp, Homo sapien
tatgatcagatatgactcggccacg

SEQ ID NO: 784434 - DNA, 25 bp, Homo sapien
ttgacatgcgttgttctatagctct

SEQ ID NO: 784435 - DNA, 25 bp, Homo sapien
ttttatctacttgacaccccagacc

SEQ ID NO: 784436 - DNA, 25 bp, Homo sapien
cctaatacagcattcagtgtctagc

SEQ ID NO: 784437 - DNA, 25 bp, Homo sapien
agccttcatgcttagcacgctgcac

SEQ ID NO: 784438 - DNA, 25 bp, Homo sapien
gccttcatgcttagcacgctgcaca

SEQ ID NO: 784439 - DNA, 25 bp, Homo sapien
aggttcccactcactctacagaagc

SEQ ID NO: 784440 - DNA, 25 bp, Homo sapien
cacaggttcccactcactctacaga

SEQ ID NO: 784441 - DNA, 25 bp, Homo sapien
gagaggtcgatggaatagcagtagg

SEQ ID NO: 784442 - DNA, 25 bp, Homo sapien
tgagaggtcgatggaatagcagtag

SEQ ID NO: 784443 - DNA, 25 bp, Homo sapien
gaggtcgatggaatagcagtaggtg

SEQ ID NO: 784444 - DNA, 25 bp, Homo sapien
ctgagaggtcgatggaatagcagta

SEQ ID NO: 784445 - DNA, 25 bp, Homo sapien
ctcctctcggctgaagaccctgaga

SEQ ID NO: 784446 - DNA, 25 bp, Homo sapien
cctgagacgtacttgaacacggata

SEQ ID NO: 784447 - DNA, 25 bp, Homo sapien
gaaggtctgatcgagcttcagtgcc

SEQ ID NO: 784448 - DNA, 25 bp, Homo sapien
gaacacggatatcctcctcatcagg

SEQ ID NO: 784449 - DNA, 25 bp, Homo sapien
gatttaacagcacttaagagttctg

SEQ ID NO: 784450 - DNA, 25 bp, Homo sapien
tttaacagcacttaagagttctgtc

SEQ ID NO: 784451 - DNA, 25 bp, Homo sapien
aacagcacttaagagttctgtcact

SEQ ID NO: 784452 - DNA, 25 bp, Homo sapien
aaaagatttaacagcacttaagagt

SEQ ID NO: 784453 - DNA, 25 bp, Homo sapien
tatcgaggctattgtgtgtcacagc

SEQ ID NO: 784454 - DNA, 25 bp, Homo sapien
cagcctatctacaagtcactcagga

SEQ ID NO: 784455 - DNA, 25 bp, Homo sapien
gcagcaggtatgtgtctaatgtcaa

SEQ ID NO: 784456 - DNA, 25 bp, Homo sapien
actcaggatcacatgttaagtgtcc

SEQ ID NO: 784457 - DNA, 25 bp, Homo sapien
gcttctagtcccaggtacttaagag

SEQ ID NO: 784458 - DNA, 25 bp, Homo sapien
atatgcttctagtcccaggtactta

SEQ ID NO: 784459 - DNA, 25 bp, Homo sapien
tatgcttctagtcccaggtacttaa

SEQ ID NO: 784460 - DNA, 25 bp, Homo sapien
gtaggaggactgcttaaacccagaa

SEQ ID NO: 784461 - DNA, 25 bp, Homo sapien
tctaaaccagatggagcgttgggac

SEQ ID NO: 784462 - DNA, 25 bp, Homo sapien
aaaccagatggagcgttgggaccag

SEQ ID NO: 784463 - DNA, 25 bp, Homo sapien
cagcttctaaaccagatggagcgtt

SEQ ID NO: 784464 - DNA, 25 bp, Homo sapien
gcttctaaaccagatggagcgttgg

SEQ ID NO: 784465 - DNA, 25 bp, Homo sapien
gcttctgaccactggcgtgctgcgt

SEQ ID NO: 784466 - DNA, 25 bp, Homo sapien
tgcacatagcacaggccggaggcag

SEQ ID NO: 784467 - DNA, 25 bp, Homo sapien
gtaggagccaggcaccgggttcagt

SEQ ID NO: 784468 - DNA, 25 bp, Homo sapien
gggtttggaccaaagtggttctgca

SEQ ID NO: 784469 - DNA, 25 bp, Homo sapien
aaggccaagtgagatgacttcccta

SEQ ID NO: 784470 - DNA, 25 bp, Homo sapien
ggccaagtgagatgacttccctaga

SEQ ID NO: 784471 - DNA, 25 bp, Homo sapien
caagtgagatgacttccctagaaat

SEQ ID NO: 784472 - DNA, 25 bp, Homo sapien
gccaagtgagatgacttccctagaa

SEQ ID NO: 784473 - DNA, 25 bp, Homo sapien
gcagacaacatggacacctcagcat

SEQ ID NO: 784474 - DNA, 25 bp, Homo sapien
tctgatggcagaacgtctcgctttc

SEQ ID NO: 784475 - DNA, 25 bp, Homo sapien
cgaggagccttgtccgtgttactaa

SEQ ID NO: 784476 - DNA, 25 bp, Homo sapien
tctgcatctgtaagctgggccagta

SEQ ID NO: 784477 - DNA, 25 bp, Homo sapien
gtggtaaagccagcgtcttctcccg

SEQ ID NO: 784478 - DNA, 25 bp, Homo sapien
gtaaagccagcgtcttctcccgtct

SEQ ID NO: 784479 - DNA, 25 bp, Homo sapien
gcgtcttctcccgtcttgcttcagg

SEQ ID NO: 784480 - DNA, 25 bp, Homo sapien
aaagccagcgtcttctcccgtcttg

SEQ ID NO: 784481 - DNA, 25 bp, Homo sapien
gtgctaggattacagatgtgagcca

SEQ ID NO: 784482 - DNA, 25 bp, Homo sapien
gaattcctgacctcgtaatccacca

SEQ ID NO: 784483 - DNA, 25 bp, Homo sapien
actgcgcccggccaatttttgcatt

SEQ ID NO: 784484 - DNA, 25 bp, Homo sapien
aatccaccagccttggcctcccaaa

SEQ ID NO: 784485 - DNA, 25 bp, Homo sapien
agcgagcagggcatgaatctgcttc

SEQ ID NO: 784486 - DNA, 25 bp, Homo sapien
cagggaaactgataatgtctggaag

SEQ ID NO: 784487 - DNA, 25 bp, Homo sapien
ctccgccaaccgagcagggaaactg

SEQ ID NO: 784488 - DNA, 25 bp, Homo sapien
agggcatgaatctgcttctctgctg

SEQ ID NO: 784489 - DNA, 25 bp, Homo sapien
ggtctccatgcttgtccctgccatg

SEQ ID NO: 784490 - DNA, 25 bp, Homo sapien
aaagcctccgtacatcccgatggtc

SEQ ID NO: 784491 - DNA, 25 bp, Homo sapien
cctgccatgggacataaagggcctg

SEQ ID NO: 784492 - DNA, 25 bp, Homo sapien
ctgttcccagtgcacagcgcggctt

SEQ ID NO: 784493 - DNA, 25 bp, Homo sapien
gacggagccgctctggcctccaaga

SEQ ID NO: 784494 - DNA, 25 bp, Homo sapien
agaggccctgctgacggagccgctc

SEQ ID NO: 784495 - DNA, 25 bp, Homo sapien
agcggaagcccctatgtggacctct

SEQ ID NO: 784496 - DNA, 25 bp, Homo sapien
tctggggagcaaaggttggaactgc

SEQ ID NO: 784497 - DNA, 25 bp, Homo sapien
gagaaatgttccaccctcagtaccc

SEQ ID NO: 784498 - DNA, 25 bp, Homo sapien
agtacccctgctaggcacggaaagc

SEQ ID NO: 784499 - DNA, 25 bp, Homo sapien
gacctgtaggtatacagccagcctg

SEQ ID NO: 784500 - DNA, 25 bp, Homo sapien
gctctgtccccatgctaaggaggca

SEQ ID NO: 784501 - DNA, 25 bp, Homo sapien
gactctgttgccacatggaagcccc

SEQ ID NO: 784502 - DNA, 25 bp, Homo sapien
catccccactggagctaatataggt

SEQ ID NO: 784503 - DNA, 25 bp, Homo sapien
gctaatataggttcagcacaacata

SEQ ID NO: 784504 - DNA, 25 bp, Homo sapien
actgccattggactctgttgccaca

SEQ ID NO: 784505 - DNA, 25 bp, Homo sapien
ttagctacagcagatcaggtttccg

SEQ ID NO: 784506 - DNA, 25 bp, Homo sapien
tgggtcttcctaacacggccaaaga

SEQ ID NO: 784507 - DNA, 25 bp, Homo sapien
tgaactgagaaagcaaacatggcct

SEQ ID NO: 784508 - DNA, 25 bp, Homo sapien
caggtttccggctagctgtgtggcc

SEQ ID NO: 784509 - DNA, 25 bp, Homo sapien
tgaggcgctaccaccgccttcgccg

SEQ ID NO: 784510 - DNA, 25 bp, Homo sapien
ccggctgctctctgcgggcacctgg

SEQ ID NO: 784511 - DNA, 25 bp, Homo sapien
ccacaccactgaggcgctaccaccg

SEQ ID NO: 784512 - DNA, 25 bp, Homo sapien
tctctgcgggcacctgggcagggct

SEQ ID NO: 784513 - DNA, 25 bp, Homo sapien
cgccgtcgccgcgaaagatagcact

SEQ ID NO: 784514 - DNA, 25 bp, Homo sapien
ccgtcgccgcgaaagatagcactca

SEQ ID NO: 784515 - DNA, 25 bp, Homo sapien
ccgccgtcgccgcgaaagatagcac

SEQ ID NO: 784516 - DNA, 25 bp, Homo sapien
cgtcgccgcgaaagatagcactcac

SEQ ID NO: 784517 - DNA, 25 bp, Homo sapien
gctgtggaaaagtcgaccctcaggc

SEQ ID NO: 784518 - DNA, 25 bp, Homo sapien
aggccgccgcgggagatcagctcta

SEQ ID NO: 784519 - DNA, 25 bp, Homo sapien
gagccctgagataccgagccctaac

SEQ ID NO: 784520 - DNA, 25 bp, Homo sapien
gagagttaaagtggcttagcccgtg

SEQ ID NO: 784521 - DNA, 25 bp, Homo sapien
taataagctatctgctcagcgaaag

SEQ ID NO: 784522 - DNA, 25 bp, Homo sapien
ccaacattagatggcatgaaggtca

SEQ ID NO: 784523 - DNA, 25 bp, Homo sapien
ccaacagcaggtcctaaaattcagg

SEQ ID NO: 784524 - DNA, 25 bp, Homo sapien
tcaacccagagttaaccaacagcag

SEQ ID NO: 784525 - DNA, 25 bp, Homo sapien
tcaaagtatcactaggacacagtgc

SEQ ID NO: 784526 - DNA, 25 bp, Homo sapien
cagtgctctaagaacaccggcatca

SEQ ID NO: 784527 - DNA, 25 bp, Homo sapien
gcactgatgatgcatgcccacgaag

SEQ ID NO: 784528 - DNA, 25 bp, Homo sapien
accggcatcaccaccgcagaggtga

SEQ ID NO: 784529 - DNA, 25 bp, Homo sapien
agggacaggagtcttttgtccttgg

SEQ ID NO: 784530 - DNA, 25 bp, Homo sapien
agccttctgctttcaggagattttc

SEQ ID NO: 784531 - DNA, 25 bp, Homo sapien
tgaggccttgataagccttctgctt

SEQ ID NO: 784532 - DNA, 25 bp, Homo sapien
aggccttgataagccttctgctttc

SEQ ID NO: 784533 - DNA, 25 bp, Homo sapien
tttgaggccttgataagccttctgc

SEQ ID NO: 784534 - DNA, 25 bp, Homo sapien
tctggcgattccaaggtgtgaggtt

SEQ ID NO: 784535 - DNA, 25 bp, Homo sapien
tatctggcgattccaaggtgtgagg

SEQ ID NO: 784536 - DNA, 25 bp, Homo sapien
ttatctggcgattccaaggtgtgag

SEQ ID NO: 784537 - DNA, 25 bp, Homo sapien
tggcgattccaaggtgtgaggtttt

SEQ ID NO: 784538 - DNA, 25 bp, Homo sapien
tttcaaaatgagtttctggacagac

SEQ ID NO: 784539 - DNA, 25 bp, Homo sapien
caaaatgagtttctggacagacttc

SEQ ID NO: 784540 - DNA, 25 bp, Homo sapien
ttgaccttggcttgtctacgtttca

SEQ ID NO: 784541 - DNA, 25 bp, Homo sapien
gcttgtctacgtttcaaaatgagtt

SEQ ID NO: 784542 - DNA, 25 bp, Homo sapien
gaagatggaggtgtgccaatctcct

SEQ ID NO: 784543 - DNA, 25 bp, Homo sapien
aagaagatggaggtgtgccaatctc

SEQ ID NO: 784544 - DNA, 25 bp, Homo sapien
agatggaggtgtgccaatctccttc

SEQ ID NO: 784545 - DNA, 25 bp, Homo sapien
ggaggtgtgccaatctccttcagaa

SEQ ID NO: 784546 - DNA, 25 bp, Homo sapien
agagacccaccacatcacacagtac

SEQ ID NO: 784547 - DNA, 25 bp, Homo sapien
atcacacagtacacctgcatgagag

SEQ ID NO: 784548 - DNA, 25 bp, Homo sapien
ggcagtgacccacatcacatggctt

SEQ ID NO: 784549 - DNA, 25 bp, Homo sapien
tacacctgcatgagaggctagaggg

SEQ ID NO: 784550 - DNA, 25 bp, Homo sapien
tgagggcttaatgctccatttctca

SEQ ID NO: 784551 - DNA, 25 bp, Homo sapien
gcttgagttgggagagccacagctc

SEQ ID NO: 784552 - DNA, 25 bp, Homo sapien
caagagagctgcgtacttgccggca

SEQ ID NO: 784553 - DNA, 25 bp, Homo sapien
cagctagctgtggagatgtgcttga

SEQ ID NO: 784554 - DNA, 25 bp, Homo sapien
tccccgtgcctgcttctagcagcat

SEQ ID NO: 784555 - DNA, 25 bp, Homo sapien
gctccccgtgcctgcttctagcagc

SEQ ID NO: 784556 - DNA, 25 bp, Homo sapien
agctccccgtgcctgcttctagcag

SEQ ID NO: 784557 - DNA, 25 bp, Homo sapien
gcagctccccgtgcctgcttctagc

SEQ ID NO: 784558 - DNA, 25 bp, Homo sapien
tgtggctaaaagtactgagcactcc

SEQ ID NO: 784559 - DNA, 25 bp, Homo sapien
gatgtactccgaaagccttgcaggc

SEQ ID NO: 784560 - DNA, 25 bp, Homo sapien
tacgtccatgcgtgcagcaaacagc

SEQ ID NO: 784561 - DNA, 25 bp, Homo sapien
caaagcactaaggatgccagggagt

SEQ ID NO: 784562 - DNA, 25 bp, Homo sapien
catatcttggaagcatttacaggga

SEQ ID NO: 784563 - DNA, 25 bp, Homo sapien
tatcttggaagcatttacagggaag

SEQ ID NO: 784564 - DNA, 25 bp, Homo sapien
atttacagggaagccaccaagaggg

SEQ ID NO: 784565 - DNA, 25 bp, Homo sapien
atcttggaagcatttacagggaagc

SEQ ID NO: 784566 - DNA, 25 bp, Homo sapien
gcctctgctgacaaaccctagcttg

SEQ ID NO: 784567 - DNA, 25 bp, Homo sapien
tgtcacctgcttatagggaaggaag

SEQ ID NO: 784568 - DNA, 25 bp, Homo sapien
gatgaagtcctgactcacactgggc

SEQ ID NO: 784569 - DNA, 25 bp, Homo sapien
tatcagttcattgctgtcaggcgag

SEQ ID NO: 784570 - DNA, 25 bp, Homo sapien
acagactatggaatgcctttataat

SEQ ID NO: 784571 - DNA, 25 bp, Homo sapien
gactatggaatgcctttataatctg

SEQ ID NO: 784572 - DNA, 25 bp, Homo sapien
cagactatggaatgcctttataatc

SEQ ID NO: 784573 - DNA, 25 bp, Homo sapien
tacagactatggaatgcctttataa

SEQ ID NO: 784574 - DNA, 25 bp, Homo sapien
tcacatcatacttcgtacaaaaacc

SEQ ID NO: 784575 - DNA, 25 bp, Homo sapien
tgagatgtcttcacatcatacttcg

SEQ ID NO: 784576 - DNA, 25 bp, Homo sapien
catcatacttcgtacaaaaacctaa

SEQ ID NO: 784577 - DNA, 25 bp, Homo sapien
tgtcttcacatcatacttcgtacaa

SEQ ID NO: 784578 - DNA, 25 bp, Homo sapien
ccactggaaccagtcaggagtgcca

SEQ ID NO: 784579 - DNA, 25 bp, Homo sapien
cccactggaaccagtcaggagtgcc

SEQ ID NO: 784580 - DNA, 25 bp, Homo sapien
cactggaaccagtcaggagtgccat

SEQ ID NO: 784581 - DNA, 25 bp, Homo sapien
accagtaggttaggagacccacgat

SEQ ID NO: 784582 - DNA, 25 bp, Homo sapien
aaacagaatcatgtccgtcatgctg

SEQ ID NO: 784583 - DNA, 25 bp, Homo sapien
atgtctgaattttggtgaactcggg

SEQ ID NO: 784584 - DNA, 25 bp, Homo sapien
gacccacgatgagcgaaaacagaat

SEQ ID NO: 784585 - DNA, 25 bp, Homo sapien
agaggaggctgagaggcggcactta

SEQ ID NO: 784586 - DNA, 25 bp, Homo sapien
gaggaggctgagaggcggcacttac

SEQ ID NO: 784587 - DNA, 25 bp, Homo sapien
tacccagattggaatagggaatcgg

SEQ ID NO: 784588 - DNA, 25 bp, Homo sapien
tctgctttacggtgtgaaggctgta

SEQ ID NO: 784589 - DNA, 25 bp, Homo sapien
tgcctggccctgaacccagttttta

SEQ ID NO: 784590 - DNA, 25 bp, Homo sapien
aattccctgtccatggtataagaac

SEQ ID NO: 784591 - DNA, 25 bp, Homo sapien
catggggctaatggttggaaacgcc

SEQ ID NO: 784592 - DNA, 25 bp, Homo sapien
aacagaaagtggtttgctggagctc

SEQ ID NO: 784593 - DNA, 25 bp, Homo sapien
ctctgatgaacacgtggggagggca

SEQ ID NO: 784594 - DNA, 25 bp, Homo sapien
tggaaacgccagtctttggtgaaaa

SEQ ID NO: 784595 - DNA, 25 bp, Homo sapien
aaagtcctctcggaatttccctgag

SEQ ID NO: 784596 - DNA, 25 bp, Homo sapien
gcagatggaaagttcggccctgtgc

SEQ ID NO: 784597 - DNA, 25 bp, Homo sapien
tgaggaagttgcctgggcccgtggc

SEQ ID NO: 784598 - DNA, 25 bp, Homo sapien
agttcggccctgtgcatcccctgtt

SEQ ID NO: 784599 - DNA, 25 bp, Homo sapien
caggtggagacgagtacgtgcaccc

SEQ ID NO: 784600 - DNA, 25 bp, Homo sapien
cagagcgggctcctcaggtggagac

SEQ ID NO: 784601 - DNA, 25 bp, Homo sapien
gctcctcaggtggagacgagtacgt

SEQ ID NO: 784602 - DNA, 25 bp, Homo sapien
gtggagacgagtacgtgcaccccat

SEQ ID NO: 784603 - DNA, 25 bp, Homo sapien
tgccgccagggacagtgtcaggaac

SEQ ID NO: 784604 - DNA, 25 bp, Homo sapien
agtctgccgccagggacagtgtcag

SEQ ID NO: 784605 - DNA, 25 bp, Homo sapien
gccagggacagtgtcaggaactgac

SEQ ID NO: 784606 - DNA, 25 bp, Homo sapien
gccgccagggacagtgtcaggaact

SEQ ID NO: 784607 - DNA, 25 bp, Homo sapien
gctgctctctctgacagaggaggtc

SEQ ID NO: 784608 - DNA, 25 bp, Homo sapien
aaagctgctctctctgacagaggag

SEQ ID NO: 784609 - DNA, 25 bp, Homo sapien
cttcatcttttccacaaagctgctc

SEQ ID NO: 784610 - DNA, 25 bp, Homo sapien
tccacaaagctgctctctctgacag

SEQ ID NO: 784611 - DNA, 25 bp, Homo sapien
ccagacgggagaagcttcgtgagtt

SEQ ID NO: 784612 - DNA, 25 bp, Homo sapien
gacgccagccgtctgctagacttga

SEQ ID NO: 784613 - DNA, 25 bp, Homo sapien
gctttggttaggcaagaatgactcc

SEQ ID NO: 784614 - DNA, 25 bp, Homo sapien
ggacatcctctatgcggtgacgcca

SEQ ID NO: 784615 - DNA, 25 bp, Homo sapien
aatcctattccccagagcccgttgg

SEQ ID NO: 784616 - DNA, 25 bp, Homo sapien
gccaattgaacgtgctttgcaagat

SEQ ID NO: 784617 - DNA, 25 bp, Homo sapien
gctggagttgcagccaattcggttc

SEQ ID NO: 784618 - DNA, 25 bp, Homo sapien
gcagctgttgaaaagcctgaaatcc

SEQ ID NO: 784619 - DNA, 25 bp, Homo sapien
cccttctaagttcctctgggacttg

SEQ ID NO: 784620 - DNA, 25 bp, Homo sapien
gctttgagtcccttctaagttcctc

SEQ ID NO: 784621 - DNA, 25 bp, Homo sapien
gagtcccttctaagttcctctggga

SEQ ID NO: 784622 - DNA, 25 bp, Homo sapien
tctaagttcctctgggacttgcttc

SEQ ID NO: 784623 - DNA, 25 bp, Homo sapien
catcccgtagcggtgggcgtccttg

SEQ ID NO: 784624 - DNA, 25 bp, Homo sapien
tcagggtccgctgacatgcctcgca

SEQ ID NO: 784625 - DNA, 25 bp, Homo sapien
tggacaggcggttggcaaactcctc

SEQ ID NO: 784626 - DNA, 25 bp, Homo sapien
tctgggagccgtagaacacgatgat

SEQ ID NO: 784627 - DNA, 25 bp, Homo sapien
cagaaaaccaccagggcgttgtcga

SEQ ID NO: 784628 - DNA, 25 bp, Homo sapien
gggtctccctcaccgtaggtggcca

SEQ ID NO: 784629 - DNA, 25 bp, Homo sapien
accccagagagatccacgtctgtct

SEQ ID NO: 784630 - DNA, 25 bp, Homo sapien
cgttgtcgatctctggcaggctgct

SEQ ID NO: 784631 - DNA, 25 bp, Homo sapien
gagagggtctcacaagtggcctgcc

SEQ ID NO: 784632 - DNA, 25 bp, Homo sapien
gggctgcctttcagatacatggatc

SEQ ID NO: 784633 - DNA, 25 bp, Homo sapien
caggccaccgggagcccatagcagt

SEQ ID NO: 784634 - DNA, 25 bp, Homo sapien
gagcccatagcagtctctgggtgac

SEQ ID NO: 784635 - DNA, 25 bp, Homo sapien
aggcctggccctcgacctgaccagt

SEQ ID NO: 784636 - DNA, 25 bp, Homo sapien
tggccctcgacctgaccagtgggag

SEQ ID NO: 784637 - DNA, 25 bp, Homo sapien
gcctggccctcgacctgaccagtgg

SEQ ID NO: 784638 - DNA, 25 bp, Homo sapien
tctgaggcctggccctcgacctgac

SEQ ID NO: 784639 - DNA, 25 bp, Homo sapien
cagctcaaagatgcgctgggcgccg

SEQ ID NO: 784640 - DNA, 25 bp, Homo sapien
gaagtgctcgtaggtcttgttccca

SEQ ID NO: 784641 - DNA, 25 bp, Homo sapien
tgtccacgtacttgcccatggcatt

SEQ ID NO: 784642 - DNA, 25 bp, Homo sapien
aaccccagctcaaagatgcgctggg

SEQ ID NO: 784643 - DNA, 25 bp, Homo sapien
agtgttcacacacggccggccagaa

SEQ ID NO: 784644 - DNA, 25 bp, Homo sapien
ccaccccaaagtgttcacacacggc

SEQ ID NO: 784645 - DNA, 25 bp, Homo sapien
ggccagaactgctctcgccaggtga

SEQ ID NO: 784646 - DNA, 25 bp, Homo sapien
cggccagaactgctctcgccaggtg

SEQ ID NO: 784647 - DNA, 25 bp, Homo sapien
tatgtcggtgtggaccacaagctcg

SEQ ID NO: 784648 - DNA, 25 bp, Homo sapien
catgtacaccttggccgcatctatg

SEQ ID NO: 784649 - DNA, 25 bp, Homo sapien
gaccacaagctcgtactggcgaatg

SEQ ID NO: 784650 - DNA, 25 bp, Homo sapien
gcttctggttctcgtagctcttcag

SEQ ID NO: 784651 - DNA, 25 bp, Homo sapien
cggttacatcaagggctctcccagc

SEQ ID NO: 784652 - DNA, 25 bp, Homo sapien
caaggacgcttctggttgcacaaag

SEQ ID NO: 784653 - DNA, 25 bp, Homo sapien
aagcacagggaatctcagagatctc

SEQ ID NO: 784654 - DNA, 25 bp, Homo sapien
gatctccatgaggaaatctcaccgg

SEQ ID NO: 784655 - DNA, 25 bp, Homo sapien
gactgcagccaggaacggattcttg

SEQ ID NO: 784656 - DNA, 25 bp, Homo sapien
ctgattttggagtccgagatgtcca

SEQ ID NO: 784657 - DNA, 25 bp, Homo sapien
cagcttccggttggtggtgactgca

SEQ ID NO: 784658 - DNA, 25 bp, Homo sapien
caattccaggtgcatgaggtggcgc

SEQ ID NO: 784659 - DNA, 25 bp, Homo sapien
cagagtgagggttcagggggtgaca

SEQ ID NO: 784660 - DNA, 25 bp, Homo sapien
acagccacgtggtccccagattcat

SEQ ID NO: 784661 - DNA, 25 bp, Homo sapien
tacacagccacgtggtccccagatt

SEQ ID NO: 784662 - DNA, 25 bp, Homo sapien
tgggtacacagccacgtggtcccca

SEQ ID NO: 784663 - DNA, 25 bp, Homo sapien
ctgggtacacagccacgtggtcccc

SEQ ID NO: 784664 - DNA, 25 bp, Homo sapien
tcagggacatgacgacgtccaggtc

SEQ ID NO: 784665 - DNA, 25 bp, Homo sapien
ggcacccaggattttgcccagctgg

SEQ ID NO: 784666 - DNA, 25 bp, Homo sapien
ctggttgacgagagcagagtcgttg

SEQ ID NO: 784667 - DNA, 25 bp, Homo sapien
ttgttcagggacatgacgacgtcca

SEQ ID NO: 784668 - DNA, 25 bp, Homo sapien
gtgctttcaccgcacactacacggt

SEQ ID NO: 784669 - DNA, 25 bp, Homo sapien
tggaagccgacagtaagggcagccc

SEQ ID NO: 784670 - DNA, 25 bp, Homo sapien
caggcttccctacaggcgggctgtg

SEQ ID NO: 784671 - DNA, 25 bp, Homo sapien
cagctggtgctggaaacaaggccta

SEQ ID NO: 784672 - DNA, 25 bp, Homo sapien
tcgtacagcacgttggtacgcggcg

SEQ ID NO: 784673 - DNA, 25 bp, Homo sapien
tccgaggcgtactgcgccagctcgt

SEQ ID NO: 784674 - DNA, 25 bp, Homo sapien
gaggaggccatcttgcgcagcagct

SEQ ID NO: 784675 - DNA, 25 bp, Homo sapien
gaatgggtgcttcttgttggactcc

SEQ ID NO: 784676 - DNA, 25 bp, Homo sapien
gccaggatgtgcctccgggcctcca

SEQ ID NO: 784677 - DNA, 25 bp, Homo sapien
gggccgcagggacgggcagtcctgc

SEQ ID NO: 784678 - DNA, 25 bp, Homo sapien
gatggagtagtagcgggcctgcagg

SEQ ID NO: 784679 - DNA, 25 bp, Homo sapien
tcacacaggtggtcgatggggggcc

SEQ ID NO: 784680 - DNA, 25 bp, Homo sapien
tggctggcagggcagtgccggccct

SEQ ID NO: 784681 - DNA, 25 bp, Homo sapien
agggctgggcctccagcgtgtggct

SEQ ID NO: 784682 - DNA, 25 bp, Homo sapien
ggctgggcctccagcgtgtggctgg

SEQ ID NO: 784683 - DNA, 25 bp, Homo sapien
ctggcagggcagtgccggccctcac

SEQ ID NO: 784684 - DNA, 25 bp, Homo sapien
tcctgtgccgccttgcactctgcct

SEQ ID NO: 784685 - DNA, 25 bp, Homo sapien
ggagggccgtgtgagctccaccgcc

SEQ ID NO: 784686 - DNA, 25 bp, Homo sapien
aagccagcccgactgagtccacagc

SEQ ID NO: 784687 - DNA, 25 bp, Homo sapien
ctcagatctcggagctcctgtgccg

SEQ ID NO: 784688 - DNA, 25 bp, Homo sapien
cagttggtggccacgcccttgttga

SEQ ID NO: 784689 - DNA, 25 bp, Homo sapien
tgttgatgcggccagccttggtctc

SEQ ID NO: 784690 - DNA, 25 bp, Homo sapien
gcggaactgggacttgcgcacgaac

SEQ ID NO: 784691 - DNA, 25 bp, Homo sapien
gatgaagcctatgaagggtgccacc

SEQ ID NO: 784692 - DNA, 25 bp, Homo sapien
ggtagtcctcatccgagcggcggca

SEQ ID NO: 784693 - DNA, 25 bp, Homo sapien
ggtgagcgcaccgtccctgtggaac

SEQ ID NO: 784694 - DNA, 25 bp, Homo sapien
tcccggtacaggtagtcctcatccg

SEQ ID NO: 784695 - DNA, 25 bp, Homo sapien
gcggcagccgtagtacagcagcgtc

SEQ ID NO: 784696 - DNA, 25 bp, Homo sapien
catgcccaccttcgtgggtgcccgc

SEQ ID NO: 784697 - DNA, 25 bp, Homo sapien
ctcatgcccaccttcgtgggtgccc

SEQ ID NO: 784698 - DNA, 25 bp, Homo sapien
tcatgcccaccttcgtgggtgcccg

SEQ ID NO: 784699 - DNA, 25 bp, Homo sapien
gtgggcaccgccttcgatcaacttc

SEQ ID NO: 784700 - DNA, 25 bp, Homo sapien
aacttccacaggtgctctcggtctt

SEQ ID NO: 784701 - DNA, 25 bp, Homo sapien
ccacagacgtagatgtgggcaccgc

SEQ ID NO: 784702 - DNA, 25 bp, Homo sapien
tccacaggtgctctcggtcttgctt

SEQ ID NO: 784703 - DNA, 25 bp, Homo sapien
cctattccagtgaccccactcactc

SEQ ID NO: 784704 - DNA, 25 bp, Homo sapien
tattccagtgaccccactcactcac

SEQ ID NO: 784705 - DNA, 25 bp, Homo sapien
ctattccagtgaccccactcactca

SEQ ID NO: 784706 - DNA, 25 bp, Homo sapien
ccctattccagtgaccccactcact

SEQ ID NO: 784707 - DNA, 25 bp, Homo sapien
acatccctggccatgttccgtgcat

SEQ ID NO: 784708 - DNA, 25 bp, Homo sapien
tagctccacacgtccagggagtagc

SEQ ID NO: 784709 - DNA, 25 bp, Homo sapien
tgtcgtagaaggtgttctgcacatc

SEQ ID NO: 784710 - DNA, 25 bp, Homo sapien
cgagctcagccacgatgtcgtagaa

SEQ ID NO: 784711 - DNA, 25 bp, Homo sapien
gagtctttgtcactgggcctgcgcc

SEQ ID NO: 784712 - DNA, 25 bp, Homo sapien
cacccaggagactacgggagggagc

SEQ ID NO: 784713 - DNA, 25 bp, Homo sapien
cttctgtgcagccaccgagggccag

SEQ ID NO: 784714 - DNA, 25 bp, Homo sapien
ccaggagagctgattacaggccgga

SEQ ID NO: 784715 - DNA, 25 bp, Homo sapien
ttgggggtgaagttgtaggctagaa

SEQ ID NO: 784716 - DNA, 25 bp, Homo sapien
gggtgaagttgtaggctagaaagtc

SEQ ID NO: 784717 - DNA, 25 bp, Homo sapien
tgaagttgtaggctagaaagtcctt

SEQ ID NO: 784718 - DNA, 25 bp, Homo sapien
tgttgcccccatgtgcactttgggg

SEQ ID NO: 784719 - DNA, 25 bp, Homo sapien
ggagatccttaagaggaatccacac

SEQ ID NO: 784720 - DNA, 25 bp, Homo sapien
aatccacacgtggaaaaagtatgat

SEQ ID NO: 784721 - DNA, 25 bp, Homo sapien
gcaggtccagatggcggtgttggga

SEQ ID NO: 784722 - DNA, 25 bp, Homo sapien
aggcagaggatgtggaacctgactt

SEQ ID NO: 784723 - DNA, 25 bp, Homo sapien
gggcagttcctgcttgaccaggtag

SEQ ID NO: 784724 - DNA, 25 bp, Homo sapien
caggtagagtgctttgagaaggaga

SEQ ID NO: 784725 - DNA, 25 bp, Homo sapien
cagtggatgaggggcagttcctgct

SEQ ID NO: 784726 - DNA, 25 bp, Homo sapien
cttgaccaggtagagtgctttgaga

SEQ ID NO: 784727 - DNA, 25 bp, Homo sapien
ccgtcagtcaggatggaagtcccct

SEQ ID NO: 784728 - DNA, 25 bp, Homo sapien
cccaccaagggtctcttaagaagag

SEQ ID NO: 784729 - DNA, 25 bp, Homo sapien
ggacaaagcctgtgctagcaccctg

SEQ ID NO: 784730 - DNA, 25 bp, Homo sapien
aatgaaacatcccttcccagttggc

SEQ ID NO: 784731 - DNA, 25 bp, Homo sapien
cttggcagttgagcgctgggtcaag

SEQ ID NO: 784732 - DNA, 25 bp, Homo sapien
gggtggcttggcagttgagcgctgg

SEQ ID NO: 784733 - DNA, 25 bp, Homo sapien
gtggcttggcagttgagcgctgggt

SEQ ID NO: 784734 - DNA, 25 bp, Homo sapien
ggcttggcagttgagcgctgggtca

SEQ ID NO: 784735 - DNA, 25 bp, Homo sapien
ctccaggatcatcaagtgttgtctc

SEQ ID NO: 784736 - DNA, 25 bp, Homo sapien
gatcatcaagtgttgtctcttcacc

SEQ ID NO: 784737 - DNA, 25 bp, Homo sapien
caggatcatcaagtgttgtctcttc

SEQ ID NO: 784738 - DNA, 25 bp, Homo sapien
ggatcatcaagtgttgtctcttcac

SEQ ID NO: 784739 - DNA, 25 bp, Homo sapien
taagccttggtcatgctggcacagc

SEQ ID NO: 784740 - DNA, 25 bp, Homo sapien
taagctactgccatgtgtcaggccc

SEQ ID NO: 784741 - DNA, 25 bp, Homo sapien
attggctgtggaccctgacccttac

SEQ ID NO: 784742 - DNA, 25 bp, Homo sapien
gtcaggcccactgctaggcaattta

SEQ ID NO: 784743 - DNA, 25 bp, Homo sapien
gaagtcacataacgagtagggaggt

SEQ ID NO: 784744 - DNA, 25 bp, Homo sapien
aaaaatgtcattcaattcccaaaca

SEQ ID NO: 784745 - DNA, 25 bp, Homo sapien
ggtttttctgggacgacagaggaga

SEQ ID NO: 784746 - DNA, 25 bp, Homo sapien
ccaaacataaagcaggtcctgacag

SEQ ID NO: 784747 - DNA, 25 bp, Homo sapien
tggctttccaggataggtcccagca

SEQ ID NO: 784748 - DNA, 25 bp, Homo sapien
ctgagagtcgctgattgtggcagat

SEQ ID NO: 784749 - DNA, 25 bp, Homo sapien
caccaaggggcttccaagagctgag

SEQ ID NO: 784750 - DNA, 25 bp, Homo sapien
cccagcagaacaaccgggaggtgtt

SEQ ID NO: 784751 - DNA, 25 bp, Homo sapien
cagagacttgtgaatgtttggaatc

SEQ ID NO: 784752 - DNA, 25 bp, Homo sapien
aattgttccaagaaagcagagactt

SEQ ID NO: 784753 - DNA, 25 bp, Homo sapien
tcagaaagatgctaatagggagagc

SEQ ID NO: 784754 - DNA, 25 bp, Homo sapien
gatgctaatagggagagctttgaga

SEQ ID NO: 784755 - DNA, 25 bp, Homo sapien
cactgctgataatggcgacctccag

SEQ ID NO: 784756 - DNA, 25 bp, Homo sapien
caagttgcagagacccttgggttca

SEQ ID NO: 784757 - DNA, 25 bp, Homo sapien
cagccctgcaagctttagaggacca

SEQ ID NO: 784758 - DNA, 25 bp, Homo sapien
tgtagggacaacaacttccgtggtc

SEQ ID NO: 784759 - DNA, 25 bp, Homo sapien
tgacggggaagtgactccaacgacc

SEQ ID NO: 784760 - DNA, 25 bp, Homo sapien
caggagctggtgacggggaagtgac

SEQ ID NO: 784761 - DNA, 25 bp, Homo sapien
gcctcgcgagagtgaccggacttcc

SEQ ID NO: 784762 - DNA, 25 bp, Homo sapien
tctctggggcctcgcgagagtgacc

SEQ ID NO: 784763 - DNA, 25 bp, Homo sapien
ccgaggtgctgaagctgcggcggag

SEQ ID NO: 784764 - DNA, 25 bp, Homo sapien
ggtgctgaagctgcggcggagagca

SEQ ID NO: 784765 - DNA, 25 bp, Homo sapien
gaggtgctgaagctgcggcggagag

SEQ ID NO: 784766 - DNA, 25 bp, Homo sapien
gctgaagctgcggcggagagcagcg

SEQ ID NO: 784767 - DNA, 25 bp, Homo sapien
gccagtgccgggcatccctgcggtc

SEQ ID NO: 784768 - DNA, 25 bp, Homo sapien
agccagtgccgggcatccctgcggt

SEQ ID NO: 784769 - DNA, 25 bp, Homo sapien
tctggccaaatgactgtaaccctgg

SEQ ID NO: 784770 - DNA, 25 bp, Homo sapien
cctaggcttaagtggtcgcgggcca

SEQ ID NO: 784771 - DNA, 25 bp, Homo sapien
gcactgttaagacacctggcggcag

SEQ ID NO: 784772 - DNA, 25 bp, Homo sapien
tattcacgcacaactcacacggatg

SEQ ID NO: 784773 - DNA, 25 bp, Homo sapien
gctgaggccagctaataacaggctt

SEQ ID NO: 784774 - DNA, 25 bp, Homo sapien
aaagtggcagacacgggaactctcg

SEQ ID NO: 784775 - DNA, 25 bp, Homo sapien
caatcactcccgttattcgaaggca

SEQ ID NO: 784776 - DNA, 25 bp, Homo sapien
gaccaaaattacagccatacccagg

SEQ ID NO: 784777 - DNA, 25 bp, Homo sapien
tagagtctgtgatactcagggtact

SEQ ID NO: 784778 - DNA, 25 bp, Homo sapien
gaaaggactcttaggaggaaatgag

SEQ ID NO: 784779 - DNA, 25 bp, Homo sapien
tgaagaacaagctggactccatcag

SEQ ID NO: 784780 - DNA, 25 bp, Homo sapien
cagttgccaaagcaagatacaatca

SEQ ID NO: 784781 - DNA, 25 bp, Homo sapien
cactccgggtgtgtgcgcgatatca

SEQ ID NO: 784782 - DNA, 25 bp, Homo sapien
gcggctttggtctcgatgtggctca

SEQ ID NO: 784783 - DNA, 25 bp, Homo sapien
tatcatagagggtcaggcggctcac

SEQ ID NO: 784784 - DNA, 25 bp, Homo sapien
gaggcccctagcacagctactttag

SEQ ID NO: 784785 - DNA, 25 bp, Homo sapien
tctccagggtcagcgcgcccagtac

SEQ ID NO: 784786 - DNA, 25 bp, Homo sapien
gtctccagggtcagcgcgcccagta

SEQ ID NO: 784787 - DNA, 25 bp, Homo sapien
agtctccagggtcagcgcgcccagt

SEQ ID NO: 784788 - DNA, 25 bp, Homo sapien
tccacaaaagcgaactgagccactg

SEQ ID NO: 784789 - DNA, 25 bp, Homo sapien
ccaactaatggcctcgagaaaggct

SEQ ID NO: 784790 - DNA, 25 bp, Homo sapien
gagctgacaattcccgtggcaggaa

SEQ ID NO: 784791 - DNA, 25 bp, Homo sapien
tctgttgacgactactgccctgcga

SEQ ID NO: 784792 - DNA, 25 bp, Homo sapien
catcacaacctttcaggcagtcagg

SEQ ID NO: 784793 - DNA, 25 bp, Homo sapien
ggactccagccggaataactaccac

SEQ ID NO: 784794 - DNA, 25 bp, Homo sapien
ggcagctgttcaggtccgaggtagc

SEQ ID NO: 784795 - DNA, 25 bp, Homo sapien
aactaccacatcacaacctttcagg

SEQ ID NO: 784796 - DNA, 25 bp, Homo sapien
cagatcatggcttccgggcagtgct

SEQ ID NO: 784797 - DNA, 25 bp, Homo sapien
ggcattggtgttgaacaggtcgtcc

SEQ ID NO: 784798 - DNA, 25 bp, Homo sapien
cattggtgttgaacaggtcgtcccg

SEQ ID NO: 784799 - DNA, 25 bp, Homo sapien
gattggcaatgacgcagatcatggc

SEQ ID NO: 784800 - DNA, 25 bp, Homo sapien
gttggggttgtacactccatgcttc

SEQ ID NO: 784801 - DNA, 25 bp, Homo sapien
tctgacgatgtccagggtcgtcacg

SEQ ID NO: 784802 - DNA, 25 bp, Homo sapien
tcgtcacgccgaagattttgttggg

SEQ ID NO: 784803 - DNA, 25 bp, Homo sapien
tccagggtcgtcacgccgaagattt

SEQ ID NO: 784804 - DNA, 25 bp, Homo sapien
tcaaatccattccaggatacccatg

SEQ ID NO: 784805 - DNA, 25 bp, Homo sapien
cccatgagttagaagtctgccacct

SEQ ID NO: 784806 - DNA, 25 bp, Homo sapien
ctcaaacagtgattgggacagaaag

SEQ ID NO: 784807 - DNA, 25 bp, Homo sapien
ctccctacacagaacaatccaagtt

SEQ ID NO: 784808 - DNA, 25 bp, Homo sapien
catggccaccaatgacagggacgtt

SEQ ID NO: 784809 - DNA, 25 bp, Homo sapien
caatgacagggacgttgactcgagc

SEQ ID NO: 784810 - DNA, 25 bp, Homo sapien
cgttgactcgagctggatccaaacc

SEQ ID NO: 784811 - DNA, 25 bp, Homo sapien
cagggacgttgactcgagctggatc

SEQ ID NO: 784812 - DNA, 25 bp, Homo sapien
gctttagccttgaccacctccgtgc

SEQ ID NO: 784813 - DNA, 25 bp, Homo sapien
ttgaccacctccgtgccggcctcct

SEQ ID NO: 784814 - DNA, 25 bp, Homo sapien
atccgcccagtgagtgctgtcagct

SEQ ID NO: 784815 - DNA, 25 bp, Homo sapien
ttagccttgaccacctccgtgccgg

SEQ ID NO: 784816 - DNA, 25 bp, Homo sapien
caagcagcagcggtgtggagaagta

SEQ ID NO: 784817 - DNA, 25 bp, Homo sapien
ctgtgacttaacgaaggaacattcc

SEQ ID NO: 784818 - DNA, 25 bp, Homo sapien
ccggcatacgccatggagagggtgg

SEQ ID NO: 784819 - DNA, 25 bp, Homo sapien
ggtacattccgtttcctgtgactta

SEQ ID NO: 784820 - DNA, 25 bp, Homo sapien
tcaagggcctatgagaaccgggtgc

SEQ ID NO: 784821 - DNA, 25 bp, Homo sapien
gcacccgctgtcaaactgcagggaa

SEQ ID NO: 784822 - DNA, 25 bp, Homo sapien
cttgaaaacaacagcactcgccagg

SEQ ID NO: 784823 - DNA, 25 bp, Homo sapien
cacttgctgggaggttcacccttca

SEQ ID NO: 784824 - DNA, 25 bp, Homo sapien
aaaagaggagactttgccgatgccc

SEQ ID NO: 784825 - DNA, 25 bp, Homo sapien
agactttgccgatgcccaggttctt

SEQ ID NO: 784826 - DNA, 25 bp, Homo sapien
aagaggagactttgccgatgcccag

SEQ ID NO: 784827 - DNA, 25 bp, Homo sapien
ggagactttgccgatgcccaggttc

SEQ ID NO: 784828 - DNA, 25 bp, Homo sapien
ctcggggatggcatccgagatcatc

SEQ ID NO: 784829 - DNA, 25 bp, Homo sapien
cccttcttgatggaggccttcagct

SEQ ID NO: 784830 - DNA, 25 bp, Homo sapien
cttcccccttcttgatggaggcctt

SEQ ID NO: 784831 - DNA, 25 bp, Homo sapien
ttcacgaaatcttcccccttcttga

SEQ ID NO: 784832 - DNA, 25 bp, Homo sapien
gccacccacaatttggaaggcatga

SEQ ID NO: 784833 - DNA, 25 bp, Homo sapien
gacatgatgccttcataaattaagg

SEQ ID NO: 784834 - DNA, 25 bp, Homo sapien
aatacaaagtttatctgcaacggct

SEQ ID NO: 784835 - DNA, 25 bp, Homo sapien
gcaacggctttgcagtgacatgatg

SEQ ID NO: 784836 - DNA, 25 bp, Homo sapien
tcggtcagaagatgaaatcccaagg

SEQ ID NO: 784837 - DNA, 25 bp, Homo sapien
tcgccgctgaactatgaacccgtgg

SEQ ID NO: 784838 - DNA, 25 bp, Homo sapien
tgatggcagcatggcgtcctaggcc

SEQ ID NO: 784839 - DNA, 25 bp, Homo sapien
tctaaagttggctctcacagggaag

SEQ ID NO: 784840 - DNA, 25 bp, Homo sapien
cctattgttccaactgtagtatacg

SEQ ID NO: 784841 - DNA, 25 bp, Homo sapien
gaaacttgcatgtcgttcttgcaca

SEQ ID NO: 784842 - DNA, 25 bp, Homo sapien
ccctattgttccaactgtagtatac

SEQ ID NO: 784843 - DNA, 25 bp, Homo sapien
cagaaacttgcatgtcgttcttgca

SEQ ID NO: 784844 - DNA, 25 bp, Homo sapien
cgtaagcagtttgccctgtagcatg

SEQ ID NO: 784845 - DNA, 25 bp, Homo sapien
agtactgtgaatgtgggtcgtgtca

SEQ ID NO: 784846 - DNA, 25 bp, Homo sapien
gaccaggtcatttatcgtaagcagt

SEQ ID NO: 784847 - DNA, 25 bp, Homo sapien
gctgctggcgactgaactgggcttc

SEQ ID NO: 784848 - DNA, 25 bp, Homo sapien
atcaaatcccaagttcctgtacgta

SEQ ID NO: 784849 - DNA, 25 bp, Homo sapien
caagttcctgtacgtagaaggtttg

SEQ ID NO: 784850 - DNA, 25 bp, Homo sapien
aggattccctttcgaagccctcctg

SEQ ID NO: 784851 - DNA, 25 bp, Homo sapien
agacaggattccctttcgaagccct

SEQ ID NO: 784852 - DNA, 25 bp, Homo sapien
ctgacctattctgtgtggagtgagg

SEQ ID NO: 784853 - DNA, 25 bp, Homo sapien
cgtctgcgcatgcgctctcctggaa

SEQ ID NO: 784854 - DNA, 25 bp, Homo sapien
gcatgcgctctcctggaatacccag

SEQ ID NO: 784855 - DNA, 25 bp, Homo sapien
tgcgcatgcgctctcctggaatacc

SEQ ID NO: 784856 - DNA, 25 bp, Homo sapien
tctgcgcatgcgctctcctggaata

SEQ ID NO: 784857 - DNA, 25 bp, Homo sapien
tccttgtagcttattggtgtcggcg

SEQ ID NO: 784858 - DNA, 25 bp, Homo sapien
cttgtagcttattggtgtcggcggc

SEQ ID NO: 784859 - DNA, 25 bp, Homo sapien
ccttgtagcttattggtgtcggcgg

SEQ ID NO: 784860 - DNA, 25 bp, Homo sapien
acgcgagtgtgcggcaagggctgta

SEQ ID NO: 784861 - DNA, 25 bp, Homo sapien
gacgcgagtgtgcggcaagggctgt

SEQ ID NO: 784862 - DNA, 25 bp, Homo sapien
cgcgagtgtgcggcaagggctgtag

SEQ ID NO: 784863 - DNA, 25 bp, Homo sapien
tcagccaagtccagggccaccctgc

SEQ ID NO: 784864 - DNA, 25 bp, Homo sapien
cagccttgcccctccaggcggtcgg

SEQ ID NO: 784865 - DNA, 25 bp, Homo sapien
ccgcgggcgccactgcagaaggcat

SEQ ID NO: 784866 - DNA, 25 bp, Homo sapien
tgcccctccaggcggtcggggccca

SEQ ID NO: 784867 - DNA, 25 bp, Homo sapien
cgcagtcttcagacatgctgccctt

SEQ ID NO: 784868 - DNA, 25 bp, Homo sapien
tggcccgcagtcttcagacatgctg

SEQ ID NO: 784869 - DNA, 25 bp, Homo sapien
gtcttcagacatgctgcccttgtct

SEQ ID NO: 784870 - DNA, 25 bp, Homo sapien
ttcagacatgctgcccttgtctgac

SEQ ID NO: 784871 - DNA, 25 bp, Homo sapien
ggttcaattttgatcggcctcagcc

SEQ ID NO: 784872 - DNA, 25 bp, Homo sapien
agtgacctgaatgatgtccagaacc

SEQ ID NO: 784873 - DNA, 25 bp, Homo sapien
ttcaattttgatcggcctcagccca

SEQ ID NO: 784874 - DNA, 25 bp, Homo sapien
gaatgatgtccagaacctctggttc

SEQ ID NO: 784875 - DNA, 25 bp, Homo sapien
agaatcctccgatggcaggtgccca

SEQ ID NO: 784876 - DNA, 25 bp, Homo sapien
gaatcctccgatggcaggtgcccag

SEQ ID NO: 784877 - DNA, 25 bp, Homo sapien
aggaatctcaacccctgtgtctcat

SEQ ID NO: 784878 - DNA, 25 bp, Homo sapien
gctgctgtaaggccacccggtgcca

SEQ ID NO: 784879 - DNA, 25 bp, Homo sapien
ggaatctcaacccctgtgtctcatg

SEQ ID NO: 784880 - DNA, 25 bp, Homo sapien
tcctccgggtgcatcagaaacttgg

SEQ ID NO: 784881 - DNA, 25 bp, Homo sapien
cagctcctccgggtgcatcagaaac

SEQ ID NO: 784882 - DNA, 25 bp, Homo sapien
acaaacagctcctccgggtgcatca

SEQ ID NO: 784883 - DNA, 25 bp, Homo sapien
gagcttggcgatcccgaagcagttg

SEQ ID NO: 784884 - DNA, 25 bp, Homo sapien
gcgggaactgcgggggagttgtggc

SEQ ID NO: 784885 - DNA, 25 bp, Homo sapien
aggcgggaactgcgggggagttgtg

SEQ ID NO: 784886 - DNA, 25 bp, Homo sapien
gcagctgaggctaccttggacaatg

SEQ ID NO: 784887 - DNA, 25 bp, Homo sapien
agctgaggctaccttggacaatgtg

SEQ ID NO: 784888 - DNA, 25 bp, Homo sapien
tgttccgactgggggcaagatgcca

SEQ ID NO: 784889 - DNA, 25 bp, Homo sapien
cccgtgttccgactgggggcaagat

SEQ ID NO: 784890 - DNA, 25 bp, Homo sapien
aggttgtcaatttcccgactcctca

SEQ ID NO: 784891 - DNA, 25 bp, Homo sapien
cccttgacggcaggctgtgctggag

SEQ ID NO: 784892 - DNA, 25 bp, Homo sapien
ggcccttgacggcaggctgtgctgg

SEQ ID NO: 784893 - DNA, 25 bp, Homo sapien
ttgtcaatttcccgactcctcagca

SEQ ID NO: 784894 - DNA, 25 bp, Homo sapien
accgaggcgcctctctgctcgcccg

SEQ ID NO: 784895 - DNA, 25 bp, Homo sapien
tgaccgccgcgatctaccgggcgct

SEQ ID NO: 784896 - DNA, 25 bp, Homo sapien
gctgccgccgcttgctgaaatgctg

SEQ ID NO: 784897 - DNA, 25 bp, Homo sapien
tgctcgcccgccagccagagcggcc

SEQ ID NO: 784898 - DNA, 25 bp, Homo sapien
cgtccgtcagcttccgccggcacag

SEQ ID NO: 784899 - DNA, 25 bp, Homo sapien
ggatgctaagggagccgtggcaccg

SEQ ID NO: 784900 - DNA, 25 bp, Homo sapien
ggagccgtggcaccgtccgtcagct

SEQ ID NO: 784901 - DNA, 25 bp, Homo sapien
ggcaggatgctaagggagccgtggc

SEQ ID NO: 784902 - DNA, 25 bp, Homo sapien
tcatgcagcttttaagtggggaaga

SEQ ID NO: 784903 - DNA, 25 bp, Homo sapien
gaatcaaggacgatctctgctttct

SEQ ID NO: 784904 - DNA, 25 bp, Homo sapien
gaatgaatgaatcaaggacgatctc

SEQ ID NO: 784905 - DNA, 25 bp, Homo sapien
tggggatgacaatgtgttcatgcag

SEQ ID NO: 784906 - DNA, 25 bp, Homo sapien
tccgcccggaccctggcactccagc

SEQ ID NO: 784907 - DNA, 25 bp, Homo sapien
ctccgcccggaccctggcactccag

SEQ ID NO: 784908 - DNA, 25 bp, Homo sapien
caagcacctggtgctcttacctcct

SEQ ID NO: 784909 - DNA, 25 bp, Homo sapien
agcacctggtgctcttacctcctcc

SEQ ID NO: 784910 - DNA, 25 bp, Homo sapien
cctctaagagccattggctgggaat

SEQ ID NO: 784911 - DNA, 25 bp, Homo sapien
gaactaccgaggaccatcctctctg

SEQ ID NO: 784912 - DNA, 25 bp, Homo sapien
ttggctgggaatcgtgtcacctcca

SEQ ID NO: 784913 - DNA, 25 bp, Homo sapien
ctcagggcacgagtgggttggacac

SEQ ID NO: 784914 - DNA, 25 bp, Homo sapien
tgagggacagacacagacacgaggc

SEQ ID NO: 784915 - DNA, 25 bp, Homo sapien
ctgagggacagacacagacacgagg

SEQ ID NO: 784916 - DNA, 25 bp, Homo sapien
gccctggagccgctggcctgggccg

SEQ ID NO: 784917 - DNA, 25 bp, Homo sapien
cgtggctggccctggagccgctggc

SEQ ID NO: 784918 - DNA, 25 bp, Homo sapien
cctggagccgctggcctgggccgct

SEQ ID NO: 784919 - DNA, 25 bp, Homo sapien
ctggccctggagccgctggcctggg

SEQ ID NO: 784920 - DNA, 25 bp, Homo sapien
ccccgttgttcacggtggaggacat

SEQ ID NO: 784921 - DNA, 25 bp, Homo sapien
gtggactgcatgctggccgccccgt

SEQ ID NO: 784922 - DNA, 25 bp, Homo sapien
tgcgggaagccgttcgcggcgtcgg

SEQ ID NO: 784923 - DNA, 25 bp, Homo sapien
tcgcggcgtcgggtgtggactgcat

SEQ ID NO: 784924 - DNA, 25 bp, Homo sapien
ctcgtggtccaggatctcgcggtgc

SEQ ID NO: 784925 - DNA, 25 bp, Homo sapien
ggatctcgcggtgcgcgcgcttcac

SEQ ID NO: 784926 - DNA, 25 bp, Homo sapien
caggatctcgcggtgcgcgcgcttc

SEQ ID NO: 784927 - DNA, 25 bp, Homo sapien
tccaggatctcgcggtgcgcgcgct

SEQ ID NO: 784928 - DNA, 25 bp, Homo sapien
ctgccggaatgtccccactttctgc

SEQ ID NO: 784929 - DNA, 25 bp, Homo sapien
aatgtccccactttctgccgaatct

SEQ ID NO: 784930 - DNA, 25 bp, Homo sapien
ccggaatgtccccactttctgccga

SEQ ID NO: 784931 - DNA, 25 bp, Homo sapien
ggaatgtccccactttctgccgaat

SEQ ID NO: 784932 - DNA, 25 bp, Homo sapien
caggccggtcctccctggtgagcac

SEQ ID NO: 784933 - DNA, 25 bp, Homo sapien
cccaggccggtcctccctggtgagc

SEQ ID NO: 784934 - DNA, 25 bp, Homo sapien
ccaggccggtcctccctggtgagca

SEQ ID NO: 784935 - DNA, 25 bp, Homo sapien
ccccaggccggtcctccctggtgag

SEQ ID NO: 784936 - DNA, 25 bp, Homo sapien
gatttggtgtgtgggctcttacatc

SEQ ID NO: 784937 - DNA, 25 bp, Homo sapien
tacatcccagagtgtgtgcttactc

SEQ ID NO: 784938 - DNA, 25 bp, Homo sapien
tcttacaccctctttagccaccaag

SEQ ID NO: 784939 - DNA, 25 bp, Homo sapien
tagcagtgggatttggtgtgtgggc

SEQ ID NO: 784940 - DNA, 25 bp, Homo sapien
ggaacagcaaatgaatgaatataat

SEQ ID NO: 784941 - DNA, 25 bp, Homo sapien
cagcaaatgaatgaatataattaac

SEQ ID NO: 784942 - DNA, 25 bp, Homo sapien
aacagcaaatgaatgaatataatta

SEQ ID NO: 784943 - DNA, 25 bp, Homo sapien
atagcggaacagcaaatgaatgaat

SEQ ID NO: 784944 - DNA, 25 bp, Homo sapien
attgaggtctgtctgttcctacagt

SEQ ID NO: 784945 - DNA, 25 bp, Homo sapien
tacccagcaatacagaaagtctgca

SEQ ID NO: 784946 - DNA, 25 bp, Homo sapien
ttacgatgactaagactgggtgtgg

SEQ ID NO: 784947 - DNA, 25 bp, Homo sapien
atactttacccctcactacccagca

SEQ ID NO: 784948 - DNA, 25 bp, Homo sapien
gcgaggggtaactgcggcccctggc

SEQ ID NO: 784949 - DNA, 25 bp, Homo sapien
aactgcggcccctggccttacaggg

SEQ ID NO: 784950 - DNA, 25 bp, Homo sapien
ccttacagggctaggcagagatttg

SEQ ID NO: 784951 - DNA, 25 bp, Homo sapien
taggcagagatttggggaacccaac

SEQ ID NO: 784952 - DNA, 25 bp, Homo sapien
tgacctagccccgcaagtctgcggg

SEQ ID NO: 784953 - DNA, 25 bp, Homo sapien
ttttctcggcgcagggggcctgacc

SEQ ID NO: 784954 - DNA, 25 bp, Homo sapien
cagtctcgggacgacttttcttcac

SEQ ID NO: 784955 - DNA, 25 bp, Homo sapien
tagccccgcaagtctgcgggctgct

SEQ ID NO: 784956 - DNA, 25 bp, Homo sapien
gtcatcgtcaaagggcgcgtactcc

SEQ ID NO: 784957 - DNA, 25 bp, Homo sapien
gtcaaagggcgcgtactccaggccc

SEQ ID NO: 784958 - DNA, 25 bp, Homo sapien
ccgtcgtcatcgtcaaagggcgcgt

SEQ ID NO: 784959 - DNA, 25 bp, Homo sapien
gtccactgggccgtcgtcatcgtca

SEQ ID NO: 784960 - DNA, 25 bp, Homo sapien
gatgccgagctgctagaccaatgct

SEQ ID NO: 784961 - DNA, 25 bp, Homo sapien
ggcgatgccgagctgctagaccaat

SEQ ID NO: 784962 - DNA, 25 bp, Homo sapien
gggcgatgccgagctgctagaccaa

SEQ ID NO: 784963 - DNA, 25 bp, Homo sapien
ccgagctgctagaccaatgcttggt

SEQ ID NO: 784964 - DNA, 25 bp, Homo sapien
cattcggactccagtctcctctttt

SEQ ID NO: 784965 - DNA, 25 bp, Homo sapien
ctgcattcggactccagtctcctct

SEQ ID NO: 784966 - DNA, 25 bp, Homo sapien
ttcggactccagtctcctctttttg

SEQ ID NO: 784967 - DNA, 25 bp, Homo sapien
tgcattcggactccagtctcctctt

SEQ ID NO: 784968 - DNA, 25 bp, Homo sapien
ctgtctcggcgatgcttcttcacac

SEQ ID NO: 784969 - DNA, 25 bp, Homo sapien
tcttcttgcggaggggtgaggagct

SEQ ID NO: 784970 - DNA, 25 bp, Homo sapien
cttcttcttcttgcggaggggtgag

SEQ ID NO: 784971 - DNA, 25 bp, Homo sapien
gtctcggcgatgcttcttcacactc

SEQ ID NO: 784972 - DNA, 25 bp, Homo sapien
cttcctccgggacccagaatcagac

SEQ ID NO: 784973 - DNA, 25 bp, Homo sapien
tttcttttgcacttggagcttcgag

SEQ ID NO: 784974 - DNA, 25 bp, Homo sapien
ctcttttcttttgcacttggagctt

SEQ ID NO: 784975 - DNA, 25 bp, Homo sapien
tcttttgcacttggagcttcgagat

SEQ ID NO: 784976 - DNA, 25 bp, Homo sapien
cttttcttttgcacttggagcttcg

SEQ ID NO: 784977 - DNA, 25 bp, Homo sapien
gctatggcgatgagacctccggcct

SEQ ID NO: 784978 - DNA, 25 bp, Homo sapien
gctgccactgctatggcgatgagac

SEQ ID NO: 784979 - DNA, 25 bp, Homo sapien
agctgccactgctatggcgatgaga

SEQ ID NO: 784980 - DNA, 25 bp, Homo sapien
cactgctatggcgatgagacctccg

SEQ ID NO: 784981 - DNA, 25 bp, Homo sapien
gaaggcgaccggcttccgctggacc

SEQ ID NO: 784982 - DNA, 25 bp, Homo sapien
ggcttccgctggaccgctggctgcc

SEQ ID NO: 784983 - DNA, 25 bp, Homo sapien
ttcgcccttcgtctcggtgcttggg

SEQ ID NO: 784984 - DNA, 25 bp, Homo sapien
tggctgcccgtctttcgcccttcgt

SEQ ID NO: 784985 - DNA, 25 bp, Homo sapien
gaaccctccgcaaagcgaagcgtac

SEQ ID NO: 784986 - DNA, 25 bp, Homo sapien
cgcagcccgcggcgcgggaaccctc

SEQ ID NO: 784987 - DNA, 25 bp, Homo sapien
gcggcgcgggaaccctccgcaaagc

SEQ ID NO: 784988 - DNA, 25 bp, Homo sapien
cgcgggaaccctccgcaaagcgaag

SEQ ID NO: 784989 - DNA, 25 bp, Homo sapien
aggtgggcgcaacggcctagcactc

SEQ ID NO: 784990 - DNA, 25 bp, Homo sapien
ccttcagtttgccaagcgcaagggt

SEQ ID NO: 784991 - DNA, 25 bp, Homo sapien
tcctgcctgggactcctatcaatgt

SEQ ID NO: 784992 - DNA, 25 bp, Homo sapien
cctgtctctcgaatcctgctcctgc

SEQ ID NO: 784993 - DNA, 25 bp, Homo sapien
ggtggccgtgggaagaggagccggc

SEQ ID NO: 784994 - DNA, 25 bp, Homo sapien
tggccgtgggaagaggagccggcag

SEQ ID NO: 784995 - DNA, 25 bp, Homo sapien
agaggagccggcaggtttgagacac

SEQ ID NO: 784996 - DNA, 25 bp, Homo sapien
gagccggcaggtttgagacaccagt

SEQ ID NO: 784997 - DNA, 25 bp, Homo sapien
tgtgccaaactagagtcccatgctg

SEQ ID NO: 784998 - DNA, 25 bp, Homo sapien
tcatggtaaagtctgggacccctct

SEQ ID NO: 784999 - DNA, 25 bp, Homo sapien
tctgaatgcaggtttgagacccggg

SEQ ID NO: 785000 - DNA, 25 bp, Homo sapien
tgaaaggagtcacaaaatgccgtct

SEQ ID NO: 785001 - DNA, 25 bp, Homo sapien
tgtctcagctaaactctgccaggtg

SEQ ID NO: 785002 - DNA, 25 bp, Homo sapien
ttgaaaggaggatttgctgccgctg

SEQ ID NO: 785003 - DNA, 25 bp, Homo sapien
tgatggtcctgaacagcctgtcctg

SEQ ID NO: 785004 - DNA, 25 bp, Homo sapien
tgaaccgaggagtagcagcaagctc

SEQ ID NO: 785005 - DNA, 25 bp, Homo sapien
ccttggcctagggacatgagagagc

SEQ ID NO: 785006 - DNA, 25 bp, Homo sapien
taaacaatgggttccactagccaag

SEQ ID NO: 785007 - DNA, 25 bp, Homo sapien
ttaaacaaggccaatcggagtggac

SEQ ID NO: 785008 - DNA, 25 bp, Homo sapien
gaaaacctccatagagcatgcagga

SEQ ID NO: 785009 - DNA, 25 bp, Homo sapien
ggaatatgaaaccaaccagggcaag

SEQ ID NO: 785010 - DNA, 25 bp, Homo sapien
gttacaaatgagtagtcactaaaat

SEQ ID NO: 785011 - DNA, 25 bp, Homo sapien
tcatttgaagaaagtgcaagttaca

SEQ ID NO: 785012 - DNA, 25 bp, Homo sapien
cacagaaatgcattcggacaacaga

SEQ ID NO: 785013 - DNA, 25 bp, Homo sapien
cttttggaattgttctgctctgagg

SEQ ID NO: 785014 - DNA, 25 bp, Homo sapien
tctagtaccctcagtgtggctggat

SEQ ID NO: 785015 - DNA, 25 bp, Homo sapien
gtcccctagggtccacctctgactc

SEQ ID NO: 785016 - DNA, 25 bp, Homo sapien
ctgactctagtaccctcagtgtggc

SEQ ID NO: 785017 - DNA, 25 bp, Homo sapien
tctgcttagtgtgtgtgggaacgaa

SEQ ID NO: 785018 - DNA, 25 bp, Homo sapien
tccagatggggcctggcacaaagga

SEQ ID NO: 785019 - DNA, 25 bp, Homo sapien
tctcctggcatggacatccagatgg

SEQ ID NO: 785020 - DNA, 25 bp, Homo sapien
tgaatcagggacctcgcctgcctct

SEQ ID NO: 785021 - DNA, 25 bp, Homo sapien
tcagtggtcttcgtccgtcctccat

SEQ ID NO: 785022 - DNA, 25 bp, Homo sapien
catcatgctcagtggtcttcgtccg

SEQ ID NO: 785023 - DNA, 25 bp, Homo sapien
tgctcagtggtcttcgtccgtcctc

SEQ ID NO: 785024 - DNA, 25 bp, Homo sapien
catgctcagtggtcttcgtccgtcc

SEQ ID NO: 785025 - DNA, 25 bp, Homo sapien
cataggatgctcagagacctccgaa

SEQ ID NO: 785026 - DNA, 25 bp, Homo sapien
tccagggcgccttttccaggctgca

SEQ ID NO: 785027 - DNA, 25 bp, Homo sapien
gggaagatccaaggccaagcactat

SEQ ID NO: 785028 - DNA, 25 bp, Homo sapien
tatgatcccatagaacctggttcct

SEQ ID NO: 785029 - DNA, 25 bp, Homo sapien
gaacaccctggaatcggccctggtg

SEQ ID NO: 785030 - DNA, 25 bp, Homo sapien
catggcccaagatgatagtcactgg

SEQ ID NO: 785031 - DNA, 25 bp, Homo sapien
tctaggttggatggctgttcacccc

SEQ ID NO: 785032 - DNA, 25 bp, Homo sapien
gagtttgttgtgacgccttaaggca

SEQ ID NO: 785033 - DNA, 25 bp, Homo sapien
tctggcaccatcaaaagggccctgg

SEQ ID NO: 785034 - DNA, 25 bp, Homo sapien
tgggcaactcttaggtgaccgctgg

SEQ ID NO: 785035 - DNA, 25 bp, Homo sapien
gagagcctgcctctatctcaccgag

SEQ ID NO: 785036 - DNA, 25 bp, Homo sapien
cacaaggattgggacacagaaaacc

SEQ ID NO: 785037 - DNA, 25 bp, Homo sapien
gtgtccgccgtggcctcgctcagag

SEQ ID NO: 785038 - DNA, 25 bp, Homo sapien
accttgggacgacggcgccgagcgc

SEQ ID NO: 785039 - DNA, 25 bp, Homo sapien
tgccggagtcgctgctggagcgggc

SEQ ID NO: 785040 - DNA, 25 bp, Homo sapien
cgccttgtcacggaccctgggcgag

SEQ ID NO: 785041 - DNA, 25 bp, Homo sapien
tgtgcggaggaaatccatgggagga

SEQ ID NO: 785042 - DNA, 25 bp, Homo sapien
tcagtggagggagggtaactcccta

SEQ ID NO: 785043 - DNA, 25 bp, Homo sapien
agggtaactccctagagagagttgg

SEQ ID NO: 785044 - DNA, 25 bp, Homo sapien
gagttgagatcagtgtgcggaggaa

SEQ ID NO: 785045 - DNA, 25 bp, Homo sapien
gggacggagaggtgctggcgggccg

SEQ ID NO: 785046 - DNA, 25 bp, Homo sapien
cgcccggggacggagaggtgctggc

SEQ ID NO: 785047 - DNA, 25 bp, Homo sapien
cggccgtgcgcgcccggggacggag

SEQ ID NO: 785048 - DNA, 25 bp, Homo sapien
tgcgcgcccggggacggagaggtgc

SEQ ID NO: 785049 - DNA, 25 bp, Homo sapien
agcgagatttggagggcgagcggct

SEQ ID NO: 785050 - DNA, 25 bp, Homo sapien
cagagcgcgagcgagatttggaggg

SEQ ID NO: 785051 - DNA, 25 bp, Homo sapien
cgcgagcgagatttggagggcgagc

SEQ ID NO: 785052 - DNA, 25 bp, Homo sapien
ctgtggggccgcttctccgcagagc

SEQ ID NO: 785053 - DNA, 25 bp, Homo sapien
ttgcggatgggcgagtagctgcggg

SEQ ID NO: 785054 - DNA, 25 bp, Homo sapien
gatgcgccgcggctccatgaagctt

SEQ ID NO: 785055 - DNA, 25 bp, Homo sapien
atgaagcttggcgagtcccggcgcc

SEQ ID NO: 785056 - DNA, 25 bp, Homo sapien
ctcggcctcagagtgccttgcgcgg

SEQ ID NO: 785057 - DNA, 25 bp, Homo sapien
tgtgcagaggggtccgcctggcccc

SEQ ID NO: 785058 - DNA, 25 bp, Homo sapien
ccccaggctgaccacaggccactca

SEQ ID NO: 785059 - DNA, 25 bp, Homo sapien
catctcccaggcagcctgtgcagag

SEQ ID NO: 785060 - DNA, 25 bp, Homo sapien
gaccacaggccactcagcaggctgg

SEQ ID NO: 785061 - DNA, 25 bp, Homo sapien
ggaaaggagaccatgtctctgcccg

SEQ ID NO: 785062 - DNA, 25 bp, Homo sapien
gccttctccaaatggaatctgacgg

SEQ ID NO: 785063 - DNA, 25 bp, Homo sapien
aaagctgattacaggccatcccagg

SEQ ID NO: 785064 - DNA, 25 bp, Homo sapien
tgcccgatccgaacacctgctaata

SEQ ID NO: 785065 - DNA, 25 bp, Homo sapien
gtagtcgctgctcaagcagctggag

SEQ ID NO: 785066 - DNA, 25 bp, Homo sapien
gggtcgagtagtcgctgctcaagca

SEQ ID NO: 785067 - DNA, 25 bp, Homo sapien
ctgggccggtagtatggaataggac

SEQ ID NO: 785068 - DNA, 25 bp, Homo sapien
ctccgggtcgagtagtcgctgctca

SEQ ID NO: 785069 - DNA, 25 bp, Homo sapien
gccggggctggggctgcggctgtgg

SEQ ID NO: 785070 - DNA, 25 bp, Homo sapien
tgtggccggggctggggctgcggct

SEQ ID NO: 785071 - DNA, 25 bp, Homo sapien
ctcccgtggctgtggccggggctgg

SEQ ID NO: 785072 - DNA, 25 bp, Homo sapien
tggccggggctggggctgcggctgt

SEQ ID NO: 785073 - DNA, 25 bp, Homo sapien
ctgggggtcctcgaggggctgcgtg

SEQ ID NO: 785074 - DNA, 25 bp, Homo sapien
ctgctccggctgtggtagctgggac

SEQ ID NO: 785075 - DNA, 25 bp, Homo sapien
agaagcccccgctctcagagctgct

SEQ ID NO: 785076 - DNA, 25 bp, Homo sapien
ctgcgtgtccggctgcgggtcccat

SEQ ID NO: 785077 - DNA, 25 bp, Homo sapien
gcaaggagatatagccccctcccca

SEQ ID NO: 785078 - DNA, 25 bp, Homo sapien
gggcaaggagatatagccccctccc

SEQ ID NO: 785079 - DNA, 25 bp, Homo sapien
tgggggcaaggagatatagccccct

SEQ ID NO: 785080 - DNA, 25 bp, Homo sapien
caaggagatatagccccctccccac

SEQ ID NO: 785081 - DNA, 25 bp, Homo sapien
ttgtccactggatgcccaccctcaa

SEQ ID NO: 785082 - DNA, 25 bp, Homo sapien
ggacacccgtagaagcagcacatct

SEQ ID NO: 785083 - DNA, 25 bp, Homo sapien
atctgcccgtgcactggccctgaga

SEQ ID NO: 785084 - DNA, 25 bp, Homo sapien
gagattcctgtgttcgtaacggctc

SEQ ID NO: 785085 - DNA, 25 bp, Homo sapien
cggcagcagtcccaagcctggtgag

SEQ ID NO: 785086 - DNA, 25 bp, Homo sapien
cagcagtcccaagcctggtgagttg

SEQ ID NO: 785087 - DNA, 25 bp, Homo sapien
catccaccggcagcagtcccaagcc

SEQ ID NO: 785088 - DNA, 25 bp, Homo sapien
atccaccggcagcagtcccaagcct

SEQ ID NO: 785089 - DNA, 25 bp, Homo sapien
cagagcagatcatggactctggtac

SEQ ID NO: 785090 - DNA, 25 bp, Homo sapien
tgcactgagctaaggtgaagtgaca

SEQ ID NO: 785091 - DNA, 25 bp, Homo sapien
tctgcccagtgataagagaggagtg

SEQ ID NO: 785092 - DNA, 25 bp, Homo sapien
tcagaccaagagtgaggtgcctagc

SEQ ID NO: 785093 - DNA, 25 bp, Homo sapien
cagtagtcatggctggtaggacctt

SEQ ID NO: 785094 - DNA, 25 bp, Homo sapien
cccacctcttgtcatgcagtagtca

SEQ ID NO: 785095 - DNA, 25 bp, Homo sapien
tcttgtcatgcagtagtcatggctg

SEQ ID NO: 785096 - DNA, 25 bp, Homo sapien
catgcagtagtcatggctggtagga

SEQ ID NO: 785097 - DNA, 25 bp, Homo sapien
gggctactcagtcagtgaacgactt

SEQ ID NO: 785098 - DNA, 25 bp, Homo sapien
tccaaagcacatgttatcctatgcc

SEQ ID NO: 785099 - DNA, 25 bp, Homo sapien
cctggttgggccaaggaagacttca

SEQ ID NO: 785100 - DNA, 25 bp, Homo sapien
ccaaggtactcccttgtcaggtcca

SEQ ID NO: 785101 - DNA, 25 bp, Homo sapien
ttattcgagtccaatttttatccgc

SEQ ID NO: 785102 - DNA, 25 bp, Homo sapien
tattcgagtccaatttttatccgca

SEQ ID NO: 785103 - DNA, 25 bp, Homo sapien
gcaccaagggttttattcgagtcca

SEQ ID NO: 785104 - DNA, 25 bp, Homo sapien
aaaccagaagagtgcgccccaggct

SEQ ID NO: 785105 - DNA, 25 bp, Homo sapien
tcaggaccctctggcgagaagtgcc

SEQ ID NO: 785106 - DNA, 25 bp, Homo sapien
ctggcgagaagtgcccacatcctgg

SEQ ID NO: 785107 - DNA, 25 bp, Homo sapien
cgctgctctgggactggagtttcct

SEQ ID NO: 785108 - DNA, 25 bp, Homo sapien
gcccagtgggtctcatttgggagct

SEQ ID NO: 785109 - DNA, 25 bp, Homo sapien
tcctggttgacaccccatgggacag

SEQ ID NO: 785110 - DNA, 25 bp, Homo sapien
caccccatgggacagcatcagaaag

SEQ ID NO: 785111 - DNA, 25 bp, Homo sapien
catttgggagctcctggttgacacc

SEQ ID NO: 785112 - DNA, 25 bp, Homo sapien
taatggcaatgacccgtttgagggc

SEQ ID NO: 785113 - DNA, 25 bp, Homo sapien
tggcaatgacccgtttgagggccgc

SEQ ID NO: 785114 - DNA, 25 bp, Homo sapien
attaatggcaatgacccgtttgagg

SEQ ID NO: 785115 - DNA, 25 bp, Homo sapien
gcaatgacccgtttgagggccgccc

SEQ ID NO: 785116 - DNA, 25 bp, Homo sapien
cagtcgggtatttttagcaggcggt

SEQ ID NO: 785117 - DNA, 25 bp, Homo sapien
gctgactctgctctggacgtctgct

SEQ ID NO: 785118 - DNA, 25 bp, Homo sapien
tggacgtctgctcagaaaagtgcgg

SEQ ID NO: 785119 - DNA, 25 bp, Homo sapien
tttatgctcctccagtcgggtattt

SEQ ID NO: 785120 - DNA, 25 bp, Homo sapien
gcaggagcgagaaggggacgcggcg

SEQ ID NO: 785121 - DNA, 25 bp, Homo sapien
cgcaggagcgagaaggggacgcggc

SEQ ID NO: 785122 - DNA, 25 bp, Homo sapien
cccgcaggagcgagaaggggacgcg

SEQ ID NO: 785123 - DNA, 25 bp, Homo sapien
ccgcaggagcgagaaggggacgcgg

SEQ ID NO: 785124 - DNA, 25 bp, Homo sapien
atgcgggtaccagtcgcggaagggg

SEQ ID NO: 785125 - DNA, 25 bp, Homo sapien
tatgcgggtaccagtcgcggaaggg

SEQ ID NO: 785126 - DNA, 25 bp, Homo sapien
tgccgcctaaccactgcgaccactc

SEQ ID NO: 785127 - DNA, 25 bp, Homo sapien
tgctgccgcctaaccactgcgacca

SEQ ID NO: 785128 - DNA, 25 bp, Homo sapien
cgcctaaccactgcgaccactcctc

SEQ ID NO: 785129 - DNA, 25 bp, Homo sapien
ctgctgccgcctaaccactgcgacc

SEQ ID NO: 785130 - DNA, 25 bp, Homo sapien
gggctctcgatggcggcggggggca

SEQ ID NO: 785131 - DNA, 25 bp, Homo sapien
ggggctctcgatggcggcggggggc

SEQ ID NO: 785132 - DNA, 25 bp, Homo sapien
ggctctcgatggcggcggggggcag

SEQ ID NO: 785133 - DNA, 25 bp, Homo sapien
ttgacatccagggacacgcgccagc

SEQ ID NO: 785134 - DNA, 25 bp, Homo sapien
ccagcggtccgcagtgtgccggatc

SEQ ID NO: 785135 - DNA, 25 bp, Homo sapien
agtgtgccggatctccgagaccccg

SEQ ID NO: 785136 - DNA, 25 bp, Homo sapien
gcgaagtggttgacatccagggaca

SEQ ID NO: 785137 - DNA, 25 bp, Homo sapien
tacagagcagaaagcgcccttagaa

SEQ ID NO: 785138 - DNA, 25 bp, Homo sapien
gactgcaggctggtagggattaaca

SEQ ID NO: 785139 - DNA, 25 bp, Homo sapien
cctgagcaagggaatcaggagtcct

SEQ ID NO: 785140 - DNA, 25 bp, Homo sapien
tgagcagtacgcaggcgcacttgga

SEQ ID NO: 785141 - DNA, 25 bp, Homo sapien
gaagagggaaatcagactgcggggg

SEQ ID NO: 785142 - DNA, 25 bp, Homo sapien
agagggaaatcagactgcgggggag

SEQ ID NO: 785143 - DNA, 25 bp, Homo sapien
ggactgcctttcggccccgctaggc

SEQ ID NO: 785144 - DNA, 25 bp, Homo sapien
agggaaatcagactgcgggggaggg

SEQ ID NO: 785145 - DNA, 25 bp, Homo sapien
ctcgtcctgccgctcctcgtgcttg

SEQ ID NO: 785146 - DNA, 25 bp, Homo sapien
gctcgtcctgccgctcctcgtgctt

SEQ ID NO: 785147 - DNA, 25 bp, Homo sapien
ggaaaggcaagcgttacattacaca

SEQ ID NO: 785148 - DNA, 25 bp, Homo sapien
agcgttacattacacaccgggtggg

SEQ ID NO: 785149 - DNA, 25 bp, Homo sapien
ggcaagcgttacattacacaccggg

SEQ ID NO: 785150 - DNA, 25 bp, Homo sapien
ttacacaccgggtgggtccctgtgc

SEQ ID NO: 785151 - DNA, 25 bp, Homo sapien
gactcgaaggtgactgggatggtga

SEQ ID NO: 785152 - DNA, 25 bp, Homo sapien
cccgcgactcgaaggtgactgggat

SEQ ID NO: 785153 - DNA, 25 bp, Homo sapien
gcgactcgaaggtgactgggatggt

SEQ ID NO: 785154 - DNA, 25 bp, Homo sapien
ctcgaaggtgactgggatggtgatc

SEQ ID NO: 785155 - DNA, 25 bp, Homo sapien
cggcagtctcatcggattttgcagc

SEQ ID NO: 785156 - DNA, 25 bp, Homo sapien
ggcggcagtctcatcggattttgca

SEQ ID NO: 785157 - DNA, 25 bp, Homo sapien
gcagtctcatcggattttgcagctt

SEQ ID NO: 785158 - DNA, 25 bp, Homo sapien
ttggcggcagtctcatcggattttg

SEQ ID NO: 785159 - DNA, 25 bp, Homo sapien
gaagataaatgtatcaaaagaacac

SEQ ID NO: 785160 - DNA, 25 bp, Homo sapien
ggcacagccagtggcggcagcaggg

SEQ ID NO: 785161 - DNA, 25 bp, Homo sapien
ggaggcacagccagtggcggcagca

SEQ ID NO: 785162 - DNA, 25 bp, Homo sapien
gaacacacaggtggcgggggaggca

SEQ ID NO: 785163 - DNA, 25 bp, Homo sapien
gcaaagatgactcctgaaagccagc

SEQ ID NO: 785164 - DNA, 25 bp, Homo sapien
agcacgggcctgagcaaagatgact

SEQ ID NO: 785165 - DNA, 25 bp, Homo sapien
caaatggcaggtgcctgaggcttcc

SEQ ID NO: 785166 - DNA, 25 bp, Homo sapien
tttatggatgtgagtcagcctgtgt

SEQ ID NO: 785167 - DNA, 25 bp, Homo sapien
cagcagtagcaagccacttagggtc

SEQ ID NO: 785168 - DNA, 25 bp, Homo sapien
aacaaacaattccagatgcgccgcc

SEQ ID NO: 785169 - DNA, 25 bp, Homo sapien
gaattctggactcaccgggactaca

SEQ ID NO: 785170 - DNA, 25 bp, Homo sapien
tcaacggtgaaggtctgcagcgtcg

SEQ ID NO: 785171 - DNA, 25 bp, Homo sapien
ggcagggctgtctcttgtaagcagc

SEQ ID NO: 785172 - DNA, 25 bp, Homo sapien
tcgtccttgggaggcacagttagat

SEQ ID NO: 785173 - DNA, 25 bp, Homo sapien
cagttagatgggcaaagcgaggtcc

SEQ ID NO: 785174 - DNA, 25 bp, Homo sapien
tctcccagcaccaactggcggttgg

SEQ ID NO: 785175 - DNA, 25 bp, Homo sapien
cacctttgttacgtgcttgggagga

SEQ ID NO: 785176 - DNA, 25 bp, Homo sapien
caatggtcggactgttgctagggcc

SEQ ID NO: 785177 - DNA, 25 bp, Homo sapien
tgtcccggcccgtactggttggcta

SEQ ID NO: 785178 - DNA, 25 bp, Homo sapien
aatgacgtgatctctcgtgtcccgg

SEQ ID NO: 785179 - DNA, 25 bp, Homo sapien
gtctgcagctgttctgcccctatgc

SEQ ID NO: 785180 - DNA, 25 bp, Homo sapien
ggtcctggtggtctgcagctgttct

SEQ ID NO: 785181 - DNA, 25 bp, Homo sapien
tcacttggcccactgggtcctggtg

SEQ ID NO: 785182 - DNA, 25 bp, Homo sapien
ggtggtctgcagctgttctgcccct

SEQ ID NO: 785183 - DNA, 25 bp, Homo sapien
cagctccgtgtttctctaaggaatt

SEQ ID NO: 785184 - DNA, 25 bp, Homo sapien
tgcacttgcctatgatactgtctct

SEQ ID NO: 785185 - DNA, 25 bp, Homo sapien
aacaaatatgttctctgaatgagcc

SEQ ID NO: 785186 - DNA, 25 bp, Homo sapien
cacacacggaccatctttagcagtt

SEQ ID NO: 785187 - DNA, 25 bp, Homo sapien
cctcttgagagaaacgtgaaacgcc

SEQ ID NO: 785188 - DNA, 25 bp, Homo sapien
taaagtcagtgacgaggaactcccg

SEQ ID NO: 785189 - DNA, 25 bp, Homo sapien
gatagaagaaccacgatgaccacag

SEQ ID NO: 785190 - DNA, 25 bp, Homo sapien
ggaactcccgagacgtgtaatgaca

SEQ ID NO: 785191 - DNA, 25 bp, Homo sapien
gagacccagtacgagagcaaagtgt

SEQ ID NO: 785192 - DNA, 25 bp, Homo sapien
gatcaagaattgcagcgagacccag

SEQ ID NO: 785193 - DNA, 25 bp, Homo sapien
gtggagtcctccgagaaggcctaca

SEQ ID NO: 785194 - DNA, 25 bp, Homo sapien
gctgagcctgctggataactacctg

SEQ ID NO: 785195 - DNA, 25 bp, Homo sapien
gcccaagggctcaatagtaatgtca

SEQ ID NO: 785196 - DNA, 25 bp, Homo sapien
cccaagggctcaatagtaatgtcaa

SEQ ID NO: 785197 - DNA, 25 bp, Homo sapien
ccaagggctcaatagtaatgtcaaa

SEQ ID NO: 785198 - DNA, 25 bp, Homo sapien
caagggctcaatagtaatgtcaaag

SEQ ID NO: 785199 - DNA, 25 bp, Homo sapien
ttttctgctgtctttacaacactgt

SEQ ID NO: 785200 - DNA, 25 bp, Homo sapien
tgctgtctttacaacactgtctgct

SEQ ID NO: 785201 - DNA, 25 bp, Homo sapien
tctgctgtctttacaacactgtctg

SEQ ID NO: 785202 - DNA, 25 bp, Homo sapien
ctgtctttacaacactgtctgctaa

SEQ ID NO: 785203 - DNA, 25 bp, Homo sapien
gagtaattctgtgaaagtaggaacc

SEQ ID NO: 785204 - DNA, 25 bp, Homo sapien
ggagtaattctgtgaaagtaggaac

SEQ ID NO: 785205 - DNA, 25 bp, Homo sapien
ctggagtaattctgtgaaagtagga

SEQ ID NO: 785206 - DNA, 25 bp, Homo sapien
tggagtaattctgtgaaagtaggaa

SEQ ID NO: 785207 - DNA, 25 bp, Homo sapien
tcaggatgaggttctcttcatcgaa

SEQ ID NO: 785208 - DNA, 25 bp, Homo sapien
gttgggtccaacatctgccatgggc

SEQ ID NO: 785209 - DNA, 25 bp, Homo sapien
caggatgaggttctcttcatcgaat

SEQ ID NO: 785210 - DNA, 25 bp, Homo sapien
caacatctgccatgggcaagatgcc

SEQ ID NO: 785211 - DNA, 25 bp, Homo sapien
tgccaaagacctccatgctggccat

SEQ ID NO: 785212 - DNA, 25 bp, Homo sapien
caaagacctccatgctggccatcta

SEQ ID NO: 785213 - DNA, 25 bp, Homo sapien
aaagacctccatgctggccatctaa

SEQ ID NO: 785214 - DNA, 25 bp, Homo sapien
cttgccaaagacctccatgctggcc

SEQ ID NO: 785215 - DNA, 25 bp, Homo sapien
ttgccattcctggactcgtagcgct

SEQ ID NO: 785216 - DNA, 25 bp, Homo sapien
tgccattcctggactcgtagcgctc

SEQ ID NO: 785217 - DNA, 25 bp, Homo sapien
catggcctccacaatattcatgctc

SEQ ID NO: 785218 - DNA, 25 bp, Homo sapien
ccacaatattcatgctcgctttcac

SEQ ID NO: 785219 - DNA, 25 bp, Homo sapien
ctaaacagccaggacctgtgggcag

SEQ ID NO: 785220 - DNA, 25 bp, Homo sapien
cagctgcagctggaagcatagagct

SEQ ID NO: 785221 - DNA, 25 bp, Homo sapien
taaacagccaggacctgtgggcagc

SEQ ID NO: 785222 - DNA, 25 bp, Homo sapien
gggcagctgcagctggaagcataga

SEQ ID NO: 785223 - DNA, 25 bp, Homo sapien
actggatgggcggggctgactgggc

SEQ ID NO: 785224 - DNA, 25 bp, Homo sapien
cactggatgggcggggctgactggg

SEQ ID NO: 785225 - DNA, 25 bp, Homo sapien
ctggatgggcggggctgactgggcc

SEQ ID NO: 785226 - DNA, 25 bp, Homo sapien
aactgcggccaccacgaggacgcgg

SEQ ID NO: 785227 - DNA, 25 bp, Homo sapien
gactgggccacttcggctacggccg

SEQ ID NO: 785228 - DNA, 25 bp, Homo sapien
acaacgtgggctgcgccggcaccga

SEQ ID NO: 785229 - DNA, 25 bp, Homo sapien
aggctcgcctgagcgactgcttcca

SEQ ID NO: 785230 - DNA, 25 bp, Homo sapien
tggagatcctgcacagtggcctgtg

SEQ ID NO: 785231 - DNA, 25 bp, Homo sapien
accaacgccttcttcggctatggca

SEQ ID NO: 785232 - DNA, 25 bp, Homo sapien
tcctgctggacaacgtgcactgcga

SEQ ID NO: 785233 - DNA, 25 bp, Homo sapien
atggcaccggacacatcctgctgga

SEQ ID NO: 785234 - DNA, 25 bp, Homo sapien
cagaatgccaaaggcaagtggaaat

SEQ ID NO: 785235 - DNA, 25 bp, Homo sapien
tctgccgtcgtctccactcagaatg

SEQ ID NO: 785236 - DNA, 25 bp, Homo sapien
cactcagaatgccaaaggcaagtgg

SEQ ID NO: 785237 - DNA, 25 bp, Homo sapien
agcttttgcctctgccgtcgtctcc

SEQ ID NO: 785238 - DNA, 25 bp, Homo sapien
tgtggggatcaggatcgggggtcct

SEQ ID NO: 785239 - DNA, 25 bp, Homo sapien
gtcacctgggatttgaaatctgtgg

SEQ ID NO: 785240 - DNA, 25 bp, Homo sapien
ccagctggtgccggccacctccact

SEQ ID NO: 785241 - DNA, 25 bp, Homo sapien
cagctggtgccggccacctccactc

SEQ ID NO: 785242 - DNA, 25 bp, Homo sapien
agctggtgccggccacctccactcc

SEQ ID NO: 785243 - DNA, 25 bp, Homo sapien
tccagctggtgccggccacctccac

SEQ ID NO: 785244 - DNA, 25 bp, Homo sapien
catctaggaaggcactatttgctcc

SEQ ID NO: 785245 - DNA, 25 bp, Homo sapien
tgcttattctcaatacggcagggac

SEQ ID NO: 785246 - DNA, 25 bp, Homo sapien
gtttgagttaacaacacccaatgtg

SEQ ID NO: 785247 - DNA, 25 bp, Homo sapien
gactgagtcccttaatcctgacact

SEQ ID NO: 785248 - DNA, 25 bp, Homo sapien
ctgcagagcagcaggcagccgcctc

SEQ ID NO: 785249 - DNA, 25 bp, Homo sapien
cctgcagagcagcaggcagccgcct

SEQ ID NO: 785250 - DNA, 25 bp, Homo sapien
tacctgcagagcagcaggcagccgc

SEQ ID NO: 785251 - DNA, 25 bp, Homo sapien
ggtacctgcagagcagcaggcagcc

SEQ ID NO: 785252 - DNA, 25 bp, Homo sapien
tgggggtagcacagctcagtactac

SEQ ID NO: 785253 - DNA, 25 bp, Homo sapien
gttgggggtagcacagctcagtact

SEQ ID NO: 785254 - DNA, 25 bp, Homo sapien
aggggttgggggtagcacagctcag

SEQ ID NO: 785255 - DNA, 25 bp, Homo sapien
ggcagatgaagagcctatagctcag

SEQ ID NO: 785256 - DNA, 25 bp, Homo sapien
tacggacgtctcaggatggctggct

SEQ ID NO: 785257 - DNA, 25 bp, Homo sapien
gctgtacggacgtctcaggatggct

SEQ ID NO: 785258 - DNA, 25 bp, Homo sapien
ctccaccagtacgggctgtacggac

SEQ ID NO: 785259 - DNA, 25 bp, Homo sapien
acgtctcaggatggctggctccacc

SEQ ID NO: 785260 - DNA, 25 bp, Homo sapien
gcatgctgttgccacactcgtggag

SEQ ID NO: 785261 - DNA, 25 bp, Homo sapien
aggtcagcagccctgatgagcttcc

SEQ ID NO: 785262 - DNA, 25 bp, Homo sapien
tggagtccaacctcaaacctgacca

SEQ ID NO: 785263 - DNA, 25 bp, Homo sapien
cctgatgagcttcccggtgccaaaa

SEQ ID NO: 785264 - DNA, 25 bp, Homo sapien
gagaagttaatgctgccggccatca

SEQ ID NO: 785265 - DNA, 25 bp, Homo sapien
gcagtcaggaagtgcccagctgtta

SEQ ID NO: 785266 - DNA, 25 bp, Homo sapien
catgtaacacccaagcaatagaggc

SEQ ID NO: 785267 - DNA, 25 bp, Homo sapien
ggcagactggatcaaccacatggca

SEQ ID NO: 785268 - DNA, 25 bp, Homo sapien
agtcctcacgatggacaggtttccc

SEQ ID NO: 785269 - DNA, 25 bp, Homo sapien
ggtgctgtacaccagggcatcgtca

SEQ ID NO: 785270 - DNA, 25 bp, Homo sapien
gatgggaatctctgcgcggttagtc

SEQ ID NO: 785271 - DNA, 25 bp, Homo sapien
ggtagcggcactcgatgggaatctc

SEQ ID NO: 785272 - DNA, 25 bp, Homo sapien
ctccatcagacgcagagagaaagtc

SEQ ID NO: 785273 - DNA, 25 bp, Homo sapien
gcttctcctctgagaacaccgtggt

SEQ ID NO: 785274 - DNA, 25 bp, Homo sapien
tgagaacaccgtggtcctgaagggc

SEQ ID NO: 785275 - DNA, 25 bp, Homo sapien
ccatcagacgcagagagaaagtcag

SEQ ID NO: 785276 - DNA, 25 bp, Homo sapien
acgcagtggtccacaaacaaccgca

SEQ ID NO: 785277 - DNA, 25 bp, Homo sapien
ccatggaagtccacgatggtgtgat

SEQ ID NO: 785278 - DNA, 25 bp, Homo sapien
cattctggtctggtgtcggtgtggc

SEQ ID NO: 785279 - DNA, 25 bp, Homo sapien
aacaaccgcagtggcacgtggctgc

SEQ ID NO: 785280 - DNA, 25 bp, Homo sapien
tgcagaagaggcatcagtgagaccg

SEQ ID NO: 785281 - DNA, 25 bp, Homo sapien
ggaagacatccactgtgaactggag

SEQ ID NO: 785282 - DNA, 25 bp, Homo sapien
aactggagtgtatctggcccgggtc

SEQ ID NO: 785283 - DNA, 25 bp, Homo sapien
catgtttctggagtcattagcaaag

SEQ ID NO: 785284 - DNA, 25 bp, Homo sapien
agtacttcccggctagatgttggtc

SEQ ID NO: 785285 - DNA, 25 bp, Homo sapien
accagtacttcccggctagatgttg

SEQ ID NO: 785286 - DNA, 25 bp, Homo sapien
tcccggctagatgttggtccttgca

SEQ ID NO: 785287 - DNA, 25 bp, Homo sapien
tacttcccggctagatgttggtcct

SEQ ID NO: 785288 - DNA, 25 bp, Homo sapien
accgcctcacctctcatctcagtga

SEQ ID NO: 785289 - DNA, 25 bp, Homo sapien
ctattctaagctcaccgcctcacct

SEQ ID NO: 785290 - DNA, 25 bp, Homo sapien
cacctctcatctcagtgagcttgtt

SEQ ID NO: 785291 - DNA, 25 bp, Homo sapien
aaccacctattctaagctcaccgcc

SEQ ID NO: 785292 - DNA, 25 bp, Homo sapien
tacactgtagccactacctccgagg

SEQ ID NO: 785293 - DNA, 25 bp, Homo sapien
ctggagtacactgtagccactacct

SEQ ID NO: 785294 - DNA, 25 bp, Homo sapien
ctgtagccactacctccgaggttta

SEQ ID NO: 785295 - DNA, 25 bp, Homo sapien
gagtacactgtagccactacctccg

SEQ ID NO: 785296 - DNA, 25 bp, Homo sapien
tcctgctcagctagggtgaccttca

SEQ ID NO: 785297 - DNA, 25 bp, Homo sapien
aaggaacaggccttgttgagttcat

SEQ ID NO: 785298 - DNA, 25 bp, Homo sapien
cctgctcagctagggtgaccttcag

SEQ ID NO: 785299 - DNA, 25 bp, Homo sapien
gaacaggccttgttgagttcatctg

SEQ ID NO: 785300 - DNA, 25 bp, Homo sapien
agagaagcagcttagatttttgttg

SEQ ID NO: 785301 - DNA, 25 bp, Homo sapien
aaagagaagcagcttagatttttgt

SEQ ID NO: 785302 - DNA, 25 bp, Homo sapien
aagagaagcagcttagatttttgtt

SEQ ID NO: 785303 - DNA, 25 bp, Homo sapien
gagaagcagcttagatttttgttgc

SEQ ID NO: 785304 - DNA, 25 bp, Homo sapien
gatgtcagccgagccttccactggg

SEQ ID NO: 785305 - DNA, 25 bp, Homo sapien
ttgacagatgtcagccgagccttcc

SEQ ID NO: 785306 - DNA, 25 bp, Homo sapien
cagcattgacagatgtcagccgagc

SEQ ID NO: 785307 - DNA, 25 bp, Homo sapien
ctttgttacagcattgacagatgtc

SEQ ID NO: 785308 - DNA, 25 bp, Homo sapien
gaatggcttggagtgccacagtcac

SEQ ID NO: 785309 - DNA, 25 bp, Homo sapien
gagaaccaggataacagcagtcaga

SEQ ID NO: 785310 - DNA, 25 bp, Homo sapien
gcagtcagagtcagggacaccacca

SEQ ID NO: 785311 - DNA, 25 bp, Homo sapien
aaagcccactgctctacttcatggt

SEQ ID NO: 785312 - DNA, 25 bp, Homo sapien
caggaagatcagtggccccacggtg

SEQ ID NO: 785313 - DNA, 25 bp, Homo sapien
cacagggtgggaggcagtgcgacac

SEQ ID NO: 785314 - DNA, 25 bp, Homo sapien
ttattcggaagcagacacagggtgg

SEQ ID NO: 785315 - DNA, 25 bp, Homo sapien
gaagcagacacagggtgggaggcag

SEQ ID NO: 785316 - DNA, 25 bp, Homo sapien
ttcggaagcagacacagggtgggag

SEQ ID NO: 785317 - DNA, 25 bp, Homo sapien
tcctgtggggatagtttcattctca

SEQ ID NO: 785318 - DNA, 25 bp, Homo sapien
cagttcttgtcgctcctgtggggat

SEQ ID NO: 785319 - DNA, 25 bp, Homo sapien
tataagttgttcaagaaaagggatc

SEQ ID NO: 785320 - DNA, 25 bp, Homo sapien
aactagtgccacctgacttttagca

SEQ ID NO: 785321 - DNA, 25 bp, Homo sapien
ggcgagcacacgtaccttattttag

SEQ ID NO: 785322 - DNA, 25 bp, Homo sapien
tatttgcaaacttttcagatgaatg

SEQ ID NO: 785323 - DNA, 25 bp, Homo sapien
ccagtgaaaagggtgagccttttct

SEQ ID NO: 785324 - DNA, 25 bp, Homo sapien
cttattttagatttgccacaaggga

SEQ ID NO: 785325 - DNA, 25 bp, Homo sapien
aatgaatgacgtggcccaagaaaga

SEQ ID NO: 785326 - DNA, 25 bp, Homo sapien
ctggctaggtccaagtgggaggatc

SEQ ID NO: 785327 - DNA, 25 bp, Homo sapien
gggccaccagtgctctgaagcaact

SEQ ID NO: 785328 - DNA, 25 bp, Homo sapien
gacgtggcccaagaaagaatgtgac

SEQ ID NO: 785329 - DNA, 25 bp, Homo sapien
tcggcgtcgcagcttccgagcgagc

SEQ ID NO: 785330 - DNA, 25 bp, Homo sapien
gtcgcagcttccgagcgagccgctg

SEQ ID NO: 785331 - DNA, 25 bp, Homo sapien
gccagagtgaaactcggcgtcgcag

SEQ ID NO: 785332 - DNA, 25 bp, Homo sapien
gaaactcggcgtcgcagcttccgag

SEQ ID NO: 785333 - DNA, 25 bp, Homo sapien
aggacggggctgagggcaccaccgc

SEQ ID NO: 785334 - DNA, 25 bp, Homo sapien
ggctgagggcaccaccgcgctcggg

SEQ ID NO: 785335 - DNA, 25 bp, Homo sapien
ggacggggctgagggcaccaccgcg

SEQ ID NO: 785336 - DNA, 25 bp, Homo sapien
cggggctgagggcaccaccgcgctc

SEQ ID NO: 785337 - DNA, 25 bp, Homo sapien
ggagccggtggcaatctcgtcaccc

SEQ ID NO: 785338 - DNA, 25 bp, Homo sapien
tcagggagccggtggcaatctcgtc

SEQ ID NO: 785339 - DNA, 25 bp, Homo sapien
tcgtcagggagccggtggcaatctc

SEQ ID NO: 785340 - DNA, 25 bp, Homo sapien
aggggtgcgcgccttccgagcgacc

SEQ ID NO: 785341 - DNA, 25 bp, Homo sapien
gctggctgagacagtcgcgatgaaa

SEQ ID NO: 785342 - DNA, 25 bp, Homo sapien
tgagacagtcgcgatgaaagcgcag

SEQ ID NO: 785343 - DNA, 25 bp, Homo sapien
cgatgaaagcgcagctccagaaaag

SEQ ID NO: 785344 - DNA, 25 bp, Homo sapien
gaagtggagccagcttggaggagga

SEQ ID NO: 785345 - DNA, 25 bp, Homo sapien
tggagcaggaggtacaacagtcttc

SEQ ID NO: 785346 - DNA, 25 bp, Homo sapien
tattttccaatagcctgggtggagc

SEQ ID NO: 785347 - DNA, 25 bp, Homo sapien
cagatgttggatccgtgtgctgtgc

SEQ ID NO: 785348 - DNA, 25 bp, Homo sapien
taacaatcaaggagatggttgaaga

SEQ ID NO: 785349 - DNA, 25 bp, Homo sapien
catcttgatacaaaccacaaacaac

SEQ ID NO: 785350 - DNA, 25 bp, Homo sapien
gctgactcagcgacacaaattccaa

SEQ ID NO: 785351 - DNA, 25 bp, Homo sapien
cttaggaggaatgacttgtttgagt

SEQ ID NO: 785352 - DNA, 25 bp, Homo sapien
tgaaaggcttgctgactcagcgaca

SEQ ID NO: 785353 - DNA, 25 bp, Homo sapien
tgtcccttctggatgaagacaccag

SEQ ID NO: 785354 - DNA, 25 bp, Homo sapien
tcccttctggatgaagacaccagct

SEQ ID NO: 785355 - DNA, 25 bp, Homo sapien
cccttctggatgaagacaccagctc

SEQ ID NO: 785356 - DNA, 25 bp, Homo sapien
actgtcccttctggatgaagacacc

SEQ ID NO: 785357 - DNA, 25 bp, Homo sapien
aagtggaaaaagtgacctagagact

SEQ ID NO: 785358 - DNA, 25 bp, Homo sapien
tggaaaaagtgacctagagactgca

SEQ ID NO: 785359 - DNA, 25 bp, Homo sapien
tgggtctcatcgaatagtacgcaga

SEQ ID NO: 785360 - DNA, 25 bp, Homo sapien
tcgaatagtacgcagagcccctgcc

SEQ ID NO: 785361 - DNA, 25 bp, Homo sapien
tgaaggaaaattacaggcagaagga

SEQ ID NO: 785362 - DNA, 25 bp, Homo sapien
tggcccgggtgaaggcactatacga

SEQ ID NO: 785363 - DNA, 25 bp, Homo sapien
gcactatacgaggagctggatctgc

SEQ ID NO: 785364 - DNA, 25 bp, Homo sapien
gaaggaaaattacaggcagaaggag

SEQ ID NO: 785365 - DNA, 25 bp, Homo sapien
gactggcagagttggcaatgacttc

SEQ ID NO: 785366 - DNA, 25 bp, Homo sapien
gagttggcaatgacttccaggacaa

SEQ ID NO: 785367 - DNA, 25 bp, Homo sapien
cccagtgtgactggcagagttggca

SEQ ID NO: 785368 - DNA, 25 bp, Homo sapien
agtgtctgctacaggccactccaga

SEQ ID NO: 785369 - DNA, 25 bp, Homo sapien
gacaagaaggagcacaccagtgcca

SEQ ID NO: 785370 - DNA, 25 bp, Homo sapien
gatgacaagaaggagcacaccagtg

SEQ ID NO: 785371 - DNA, 25 bp, Homo sapien
agatgcaccgaaaaaaggcacaaat

SEQ ID NO: 785372 - DNA, 25 bp, Homo sapien
tggatgacaagaaggagcacaccag

SEQ ID NO: 785373 - DNA, 25 bp, Homo sapien
tcctccctcagaatgaatggaaacc

SEQ ID NO: 785374 - DNA, 25 bp, Homo sapien
aggaacccgcatccaggaacacagc

SEQ ID NO: 785375 - DNA, 25 bp, Homo sapien
taacagccaagcaggaacccgcatc

SEQ ID NO: 785376 - DNA, 25 bp, Homo sapien
acagccctttgctcctccctcagaa

SEQ ID NO: 785377 - DNA, 25 bp, Homo sapien
cttaacaatatgtgagaaacccatc

SEQ ID NO: 785378 - DNA, 25 bp, Homo sapien
caatatgtgagaaacccatctgatc

SEQ ID NO: 785379 - DNA, 25 bp, Homo sapien
gccacggctactttcaacttaacaa

SEQ ID NO: 785380 - DNA, 25 bp, Homo sapien
taaacaggtactcaactcatactga

SEQ ID NO: 785381 - DNA, 25 bp, Homo sapien
tcctgggtgtcacgcatctctcggg

SEQ ID NO: 785382 - DNA, 25 bp, Homo sapien
tgggtgtcacgcatctctcgggcag

SEQ ID NO: 785383 - DNA, 25 bp, Homo sapien
catctctcgggcagccacggccgcc

SEQ ID NO: 785384 - DNA, 25 bp, Homo sapien
atctctcgggcagccacggccgcct

SEQ ID NO: 785385 - DNA, 25 bp, Homo sapien
ggcggaatggttcagctcagtgtct

SEQ ID NO: 785386 - DNA, 25 bp, Homo sapien
gcgggcggaatggttcagctcagtg

SEQ ID NO: 785387 - DNA, 25 bp, Homo sapien
ggcgggcggaatggttcagctcagt

SEQ ID NO: 785388 - DNA, 25 bp, Homo sapien
cgggcgggcggaatggttcagctca

SEQ ID NO: 785389 - DNA, 25 bp, Homo sapien
gcccagcttgcatcgctcaggatga

SEQ ID NO: 785390 - DNA, 25 bp, Homo sapien
gcttgcatcgctcaggatgacccat

SEQ ID NO: 785391 - DNA, 25 bp, Homo sapien
caggcccagcttgcatcgctcagga

SEQ ID NO: 785392 - DNA, 25 bp, Homo sapien
ctcttcccttgcgaacactccacgt

SEQ ID NO: 785393 - DNA, 25 bp, Homo sapien
ctggcctggagtcccggggtcattg

SEQ ID NO: 785394 - DNA, 25 bp, Homo sapien
gagtcccggggtcattgcccagcgc

SEQ ID NO: 785395 - DNA, 25 bp, Homo sapien
tggagtcccggggtcattgcccagc

SEQ ID NO: 785396 - DNA, 25 bp, Homo sapien
gcctggagtcccggggtcattgccc

SEQ ID NO: 785397 - DNA, 25 bp, Homo sapien
ctgggtccagctggggaggtcaata

SEQ ID NO: 785398 - DNA, 25 bp, Homo sapien
caggctcccaagcccaaaacgttgg

SEQ ID NO: 785399 - DNA, 25 bp, Homo sapien
ggtccagctggggaggtcaataatg

SEQ ID NO: 785400 - DNA, 25 bp, Homo sapien
gacaaactgctgctcgatgaagctg

SEQ ID NO: 785401 - DNA, 25 bp, Homo sapien
gtagttgacagtgtagttgtacccc

SEQ ID NO: 785402 - DNA, 25 bp, Homo sapien
tctgcgtgtgggtggtgtagttgac

SEQ ID NO: 785403 - DNA, 25 bp, Homo sapien
gtccaggagccatcgtcgctcagcc

SEQ ID NO: 785404 - DNA, 25 bp, Homo sapien
gggccaagtccacgagctggttgcc

SEQ ID NO: 785405 - DNA, 25 bp, Homo sapien
gcccggcggagcgatgatggtggtc

SEQ ID NO: 785406 - DNA, 25 bp, Homo sapien
ggaggttggtcatggagtggcggta

SEQ ID NO: 785407 - DNA, 25 bp, Homo sapien
agcaggcgacgcctgtgtggcccgg

SEQ ID NO: 785408 - DNA, 25 bp, Homo sapien
tggtcatggagtggcggtagcggcc

SEQ ID NO: 785409 - DNA, 25 bp, Homo sapien
aggctggagcggtagaggggctggc

SEQ ID NO: 785410 - DNA, 25 bp, Homo sapien
gtgttcagcctgggcgcagaccggg

SEQ ID NO: 785411 - DNA, 25 bp, Homo sapien
tgactgcaccggaggtggaggatcc

SEQ ID NO: 785412 - DNA, 25 bp, Homo sapien
cgcagaccgggccccggagagtgag

SEQ ID NO: 785413 - DNA, 25 bp, Homo sapien
aacacagggcagacaaaacgagcgg

SEQ ID NO: 785414 - DNA, 25 bp, Homo sapien
aaacgagcggccgttgcccacgata

SEQ ID NO: 785415 - DNA, 25 bp, Homo sapien
agggcagacaaaacgagcggccgtt

SEQ ID NO: 785416 - DNA, 25 bp, Homo sapien
gcagacaaaacgagcggccgttgcc

SEQ ID NO: 785417 - DNA, 25 bp, Homo sapien
atgattcccaaaggccgccagggca

SEQ ID NO: 785418 - DNA, 25 bp, Homo sapien
tgtgctgagcatggcaagtcgcctt

SEQ ID NO: 785419 - DNA, 25 bp, Homo sapien
gcagtggtgagacccaggacaaata

SEQ ID NO: 785420 - DNA, 25 bp, Homo sapien
gatgctagaggcgtatgctcccgct

SEQ ID NO: 785421 - DNA, 25 bp, Homo sapien
tcctcagagggctcggacctgcaga

SEQ ID NO: 785422 - DNA, 25 bp, Homo sapien
gacctgcagaacgttcccagatggg

SEQ ID NO: 785423 - DNA, 25 bp, Homo sapien
gaaacgtgagacatgaggactccga

SEQ ID NO: 785424 - DNA, 25 bp, Homo sapien
gtccctatagtcatggcctcaggca

SEQ ID NO: 785425 - DNA, 25 bp, Homo sapien
ggtggacggaacctcagaggttatc

SEQ ID NO: 785426 - DNA, 25 bp, Homo sapien
ggaacctcagaggttatcaatcgcc

SEQ ID NO: 785427 - DNA, 25 bp, Homo sapien
ggacggaacctcagaggttatcaat

SEQ ID NO: 785428 - DNA, 25 bp, Homo sapien
ctcagaggttatcaatcgccctcac

SEQ ID NO: 785429 - DNA, 25 bp, Homo sapien
atcgcagttcctccccggtgtgtgt

SEQ ID NO: 785430 - DNA, 25 bp, Homo sapien
tgtccctgctgtgacctctaggaac

SEQ ID NO: 785431 - DNA, 25 bp, Homo sapien
ctctaggaactgaaccgtacaagga

SEQ ID NO: 785432 - DNA, 25 bp, Homo sapien
tccagaggttcccaagataggggcc

SEQ ID NO: 785433 - DNA, 25 bp, Homo sapien
gcacatatctgaacgagaacgtttg

SEQ ID NO: 785434 - DNA, 25 bp, Homo sapien
aaaggaaagtggatcatctctgatg

SEQ ID NO: 785435 - DNA, 25 bp, Homo sapien
gaagcacagcgaggcttccagtggg

SEQ ID NO: 785436 - DNA, 25 bp, Homo sapien
tctgaacgagaacgtttgcttccgt

SEQ ID NO: 785437 - DNA, 25 bp, Homo sapien
tgcccagccaaccagtggtaatttt

SEQ ID NO: 785438 - DNA, 25 bp, Homo sapien
acacactggaagcatgctgggccca

SEQ ID NO: 785439 - DNA, 25 bp, Homo sapien
gatgagggagatatggaaacccaac

SEQ ID NO: 785440 - DNA, 25 bp, Homo sapien
tcatgccggtagagtgacacactgg

SEQ ID NO: 785441 - DNA, 25 bp, Homo sapien
taaaccccacgataggatgctctgg

SEQ ID NO: 785442 - DNA, 25 bp, Homo sapien
catagcacctgtttagaggagaaaa

SEQ ID NO: 785443 - DNA, 25 bp, Homo sapien
tagcaaatgatcatgaccgtcatca

SEQ ID NO: 785444 - DNA, 25 bp, Homo sapien
aaaagacaggtcagtatcataaacc

SEQ ID NO: 785445 - DNA, 25 bp, Homo sapien
cactgaggtgtcttcgcgcttttac

SEQ ID NO: 785446 - DNA, 25 bp, Homo sapien
gcacaccgctgacttattggaaacg

SEQ ID NO: 785447 - DNA, 25 bp, Homo sapien
cgcttttacgctccttgggtgcctg

SEQ ID NO: 785448 - DNA, 25 bp, Homo sapien
aacactgcgtcatggccaagtggga

SEQ ID NO: 785449 - DNA, 25 bp, Homo sapien
gggcacagtggcagggacgctccct

SEQ ID NO: 785450 - DNA, 25 bp, Homo sapien
cgctccctgggctgcttgagggacc

SEQ ID NO: 785451 - DNA, 25 bp, Homo sapien
cagtggcagggacgctccctgggct

SEQ ID NO: 785452 - DNA, 25 bp, Homo sapien
gggacgctccctgggctgcttgagg

SEQ ID NO: 785453 - DNA, 25 bp, Homo sapien
ctctgctgggctttggcatctgcat

SEQ ID NO: 785454 - DNA, 25 bp, Homo sapien
ctgcgagcgcctgctggactctgct

SEQ ID NO: 785455 - DNA, 25 bp, Homo sapien
agcgcctgctggactctgctgggct

SEQ ID NO: 785456 - DNA, 25 bp, Homo sapien
actctgctgggctttggcatctgca

SEQ ID NO: 785457 - DNA, 25 bp, Homo sapien
aactgagccgtgacttttggaagcc

SEQ ID NO: 785458 - DNA, 25 bp, Homo sapien
tttggaagccagacgggaggcggga

SEQ ID NO: 785459 - DNA, 25 bp, Homo sapien
cacacagggagtccaatggctgaca

SEQ ID NO: 785460 - DNA, 25 bp, Homo sapien
tggctgacatcagaacactcgtcat

SEQ ID NO: 785461 - DNA, 25 bp, Homo sapien
gcatccccgcgcacattgagtgagg

SEQ ID NO: 785462 - DNA, 25 bp, Homo sapien
aagaggtctaagctgccaggaggaa

SEQ ID NO: 785463 - DNA, 25 bp, Homo sapien
agacagccgcttcgggcacaaacta

SEQ ID NO: 785464 - DNA, 25 bp, Homo sapien
gattcaacttgcattaccctggcat

SEQ ID NO: 785465 - DNA, 25 bp, Homo sapien
gaagagagaagtacataagcagcgt

SEQ ID NO: 785466 - DNA, 25 bp, Homo sapien
agaagagagaagtacataagcagcg

SEQ ID NO: 785467 - DNA, 25 bp, Homo sapien
tagaagagagaagtacataagcagc

SEQ ID NO: 785468 - DNA, 25 bp, Homo sapien
ctagaagagagaagtacataagcag

SEQ ID NO: 785469 - DNA, 25 bp, Homo sapien
ctttcagctcttccgtgtagttttt

SEQ ID NO: 785470 - DNA, 25 bp, Homo sapien
actttcagctcttccgtgtagtttt

SEQ ID NO: 785471 - DNA, 25 bp, Homo sapien
cagatttttctcatggactcaacag

SEQ ID NO: 785472 - DNA, 25 bp, Homo sapien
agatttttctcatggactcaacaga

SEQ ID NO: 785473 - DNA, 25 bp, Homo sapien
gggtgaaacggcccagtcacaccag

SEQ ID NO: 785474 - DNA, 25 bp, Homo sapien
gtgaaacggcccagtcacaccagat

SEQ ID NO: 785475 - DNA, 25 bp, Homo sapien
tggggtgaaacggcccagtcacacc

SEQ ID NO: 785476 - DNA, 25 bp, Homo sapien
tgaaacggcccagtcacaccagatg

SEQ ID NO: 785477 - DNA, 25 bp, Homo sapien
ggagacaggaattgccagatggaca

SEQ ID NO: 785478 - DNA, 25 bp, Homo sapien
ctcatgggcactaaagctggcaggg

SEQ ID NO: 785479 - DNA, 25 bp, Homo sapien
caagctgcgtgctggctgtgcagac

SEQ ID NO: 785480 - DNA, 25 bp, Homo sapien
tctgaacgaggagccagctcatggg

SEQ ID NO: 785481 - DNA, 25 bp, Homo sapien
gctgacgtgggccagtcttggaaaa

SEQ ID NO: 785482 - DNA, 25 bp, Homo sapien
tcatgctcgccaacagtgggctggg

SEQ ID NO: 785483 - DNA, 25 bp, Homo sapien
gagaccaaacatgggtcatgctcgc

SEQ ID NO: 785484 - DNA, 25 bp, Homo sapien
tgctgaaatgctggaagtgcagtca

SEQ ID NO: 785485 - DNA, 25 bp, Homo sapien
tggcccacagctagggacccgattg

SEQ ID NO: 785486 - DNA, 25 bp, Homo sapien
gtggcccacagctagggacccgatt

SEQ ID NO: 785487 - DNA, 25 bp, Homo sapien
ggcccacagctagggacccgattgc

SEQ ID NO: 785488 - DNA, 25 bp, Homo sapien
agaggcagacgcaacccactgagct

SEQ ID NO: 785489 - DNA, 25 bp, Homo sapien
gaggcagacgcaacccactgagctg

SEQ ID NO: 785490 - DNA, 25 bp, Homo sapien
aggcagacgcaacccactgagctgg

SEQ ID NO: 785491 - DNA, 25 bp, Homo sapien
ctgtaaactatgaggatggtcccgc

SEQ ID NO: 785492 - DNA, 25 bp, Homo sapien
gggagcgacatctggaaccgtaata

SEQ ID NO: 785493 - DNA, 25 bp, Homo sapien
caggagggacactgcagacttccat

SEQ ID NO: 785494 - DNA, 25 bp, Homo sapien
atggtcccgcagtcctcgtggccgg

SEQ ID NO: 785495 - DNA, 25 bp, Homo sapien
tcaacaagacaaaaagatgcctcca

SEQ ID NO: 785496 - DNA, 25 bp, Homo sapien
ctacgatccaccttggctcaagaca

SEQ ID NO: 785497 - DNA, 25 bp, Homo sapien
gcctgctgccccgttatcttcccac

SEQ ID NO: 785498 - DNA, 25 bp, Homo sapien
gctagggcccgtctgagtctcctct

SEQ ID NO: 785499 - DNA, 25 bp, Homo sapien
cactggcggggaaaccctctggcag

SEQ ID NO: 785500 - DNA, 25 bp, Homo sapien
ttgtctggaaggtagcactggcggg

SEQ ID NO: 785501 - DNA, 25 bp, Homo sapien
cggccctgggcgttgtctggaaggt

SEQ ID NO: 785502 - DNA, 25 bp, Homo sapien
cggctttccgggattggggtgctca

SEQ ID NO: 785503 - DNA, 25 bp, Homo sapien
tcgggatagccgtggcccgtaatgt

SEQ ID NO: 785504 - DNA, 25 bp, Homo sapien
tctcacccgtggtgctggacgtgcc

SEQ ID NO: 785505 - DNA, 25 bp, Homo sapien
tgcccactgtgaagatgagccgcct

SEQ ID NO: 785506 - DNA, 25 bp, Homo sapien
gtaatgttgcggtccatctctgtct

SEQ ID NO: 785507 - DNA, 25 bp, Homo sapien
gggaagtctctactcgccccacacc

SEQ ID NO: 785508 - DNA, 25 bp, Homo sapien
ccatgagtacaactgcccagggctg

SEQ ID NO: 785509 - DNA, 25 bp, Homo sapien
agcctctcgggctgggcacttcctg

SEQ ID NO: 785510 - DNA, 25 bp, Homo sapien
cctgcgcactgaggtagctgcatcc

SEQ ID NO: 785511 - DNA, 25 bp, Homo sapien
aattgaggtaaaagaagctgaccca

SEQ ID NO: 785512 - DNA, 25 bp, Homo sapien
aacaaaattgaggtaaaagaagctg

SEQ ID NO: 785513 - DNA, 25 bp, Homo sapien
agaagctgacccagaacccacgccc

SEQ ID NO: 785514 - DNA, 25 bp, Homo sapien
tgcaaacaaaattgaggtaaaagaa

SEQ ID NO: 785515 - DNA, 25 bp, Homo sapien
gggctggaaagacctgcaaatgtaa

SEQ ID NO: 785516 - DNA, 25 bp, Homo sapien
gctggtctggctgcttcgggctgca

SEQ ID NO: 785517 - DNA, 25 bp, Homo sapien
ggtgggaggcaggccagtatccagc

SEQ ID NO: 785518 - DNA, 25 bp, Homo sapien
gaagctggttaatcaggctgcccca

SEQ ID NO: 785519 - DNA, 25 bp, Homo sapien
tgcagccctaggtgaggctgccccc

SEQ ID NO: 785520 - DNA, 25 bp, Homo sapien
agccctaggtgaggctgcccccagg

SEQ ID NO: 785521 - DNA, 25 bp, Homo sapien
ccctaggtgaggctgcccccagggt

SEQ ID NO: 785522 - DNA, 25 bp, Homo sapien
cctaggtgaggctgcccccagggta

SEQ ID NO: 785523 - DNA, 25 bp, Homo sapien
caggctgggccggagacagttcaac

SEQ ID NO: 785524 - DNA, 25 bp, Homo sapien
gctgggccggagacagttcaacgcc

SEQ ID NO: 785525 - DNA, 25 bp, Homo sapien
gagacagttcaacgccaggaggagc

SEQ ID NO: 785526 - DNA, 25 bp, Homo sapien
ggccggagacagttcaacgccagga

SEQ ID NO: 785527 - DNA, 25 bp, Homo sapien
tggctggacgcgtccatccaggacc

SEQ ID NO: 785528 - DNA, 25 bp, Homo sapien
gtctggctggacgcgtccatccagg

SEQ ID NO: 785529 - DNA, 25 bp, Homo sapien
gctggacgcgtccatccaggacccc

SEQ ID NO: 785530 - DNA, 25 bp, Homo sapien
ctggctggacgcgtccatccaggac

SEQ ID NO: 785531 - DNA, 25 bp, Homo sapien
caccacgagccagacggtatcgctg

SEQ ID NO: 785532 - DNA, 25 bp, Homo sapien
tatctgtggtgtgtagggcaccagc

SEQ ID NO: 785533 - DNA, 25 bp, Homo sapien
atcgaagacacagcgcggctgctcc

SEQ ID NO: 785534 - DNA, 25 bp, Homo sapien
ctggcgctggcaagcccatcgaaga

SEQ ID NO: 785535 - DNA, 25 bp, Homo sapien
tatgagtgggggttctgtgttcgcc

SEQ ID NO: 785536 - DNA, 25 bp, Homo sapien
ggagaaagcagctttgtccttatga

SEQ ID NO: 785537 - DNA, 25 bp, Homo sapien
gggttctgtgttcgcccagtctcca

SEQ ID NO: 785538 - DNA, 25 bp, Homo sapien
ctttgtccttatgagtgggggttct

SEQ ID NO: 785539 - DNA, 25 bp, Homo sapien
gaggccggaatgtcagccagtgtct

SEQ ID NO: 785540 - DNA, 25 bp, Homo sapien
gcagcgtcatgtagtggccatcggt

SEQ ID NO: 785541 - DNA, 25 bp, Homo sapien
cagtgtctccgggttctggaagccc

SEQ ID NO: 785542 - DNA, 25 bp, Homo sapien
tagtggccatcggtcagcagctgtg

SEQ ID NO: 785543 - DNA, 25 bp, Homo sapien
agggcctcggtttgtctctttgcag

SEQ ID NO: 785544 - DNA, 25 bp, Homo sapien
cccgcagagggcctcggtttgtctc

SEQ ID NO: 785545 - DNA, 25 bp, Homo sapien
atcaccagcagcctgaggacccagg

SEQ ID NO: 785546 - DNA, 25 bp, Homo sapien
cctcggtttgtctctttgcagggct

SEQ ID NO: 785547 - DNA, 25 bp, Homo sapien
ggtgtccatcaggaggaacttcacc

SEQ ID NO: 785548 - DNA, 25 bp, Homo sapien
ggtggagagtgatggggtctgacca

SEQ ID NO: 785549 - DNA, 25 bp, Homo sapien
cacttggtctcagccctgggtgagc

SEQ ID NO: 785550 - DNA, 25 bp, Homo sapien
ctgggtgagcccctggtgtccatca

SEQ ID NO: 785551 - DNA, 25 bp, Homo sapien
ccctggccaggtgtcgatggatccg

SEQ ID NO: 785552 - DNA, 25 bp, Homo sapien
ccgccctggccaggtgtcgatggat

SEQ ID NO: 785553 - DNA, 25 bp, Homo sapien
ttcgccgccctggccaggtgtcgat

SEQ ID NO: 785554 - DNA, 25 bp, Homo sapien
acttcgccgccctggccaggtgtcg

SEQ ID NO: 785555 - DNA, 25 bp, Homo sapien
agaggatggaggtaatgacgatcat

SEQ ID NO: 785556 - DNA, 25 bp, Homo sapien
ccaagagtaggaggccggccagaga

SEQ ID NO: 785557 - DNA, 25 bp, Homo sapien
aagcgcatggtagaggctgccaaga

SEQ ID NO: 785558 - DNA, 25 bp, Homo sapien
gaggctgccaagaaggccaagagta

SEQ ID NO: 785559 - DNA, 25 bp, Homo sapien
catgtagcgcttgcccatgaaggag

SEQ ID NO: 785560 - DNA, 25 bp, Homo sapien
ggtcatgtagcgcttgcccatgaag

SEQ ID NO: 785561 - DNA, 25 bp, Homo sapien
agtgtggcggcctctctgggtggga

SEQ ID NO: 785562 - DNA, 25 bp, Homo sapien
tggcggcctctctgggtgggatgtg

SEQ ID NO: 785563 - DNA, 25 bp, Homo sapien
gggggtccaggccaggcttgcagcc

SEQ ID NO: 785564 - DNA, 25 bp, Homo sapien
gggagggggtccaggccaggcttgc

SEQ ID NO: 785565 - DNA, 25 bp, Homo sapien
gggtccaggccaggcttgcagccca

SEQ ID NO: 785566 - DNA, 25 bp, Homo sapien
gagggggtccaggccaggcttgcag

SEQ ID NO: 785567 - DNA, 25 bp, Homo sapien
atctcccccagccccatgcaaagag

SEQ ID NO: 785568 - DNA, 25 bp, Homo sapien
cccagccccatgcaaagaggccagg

SEQ ID NO: 785569 - DNA, 25 bp, Homo sapien
ctcccccagccccatgcaaagaggc

SEQ ID NO: 785570 - DNA, 25 bp, Homo sapien
cccccagccccatgcaaagaggcca

SEQ ID NO: 785571 - DNA, 25 bp, Homo sapien
tgcaggagctgggacaaagcaccat

SEQ ID NO: 785572 - DNA, 25 bp, Homo sapien
gagggggcctgtgggtgcaggagct

SEQ ID NO: 785573 - DNA, 25 bp, Homo sapien
ggagctgggacaaagcaccatgcac

SEQ ID NO: 785574 - DNA, 25 bp, Homo sapien
caggagctgggacaaagcaccatgc

SEQ ID NO: 785575 - DNA, 25 bp, Homo sapien
gagagggagagaaaccagaaaggca

SEQ ID NO: 785576 - DNA, 25 bp, Homo sapien
agatgcttggagagggagagaaacc

SEQ ID NO: 785577 - DNA, 25 bp, Homo sapien
gattccaggcagggtacggggtgtg

SEQ ID NO: 785578 - DNA, 25 bp, Homo sapien
ttggagagggagagaaaccagaaag

SEQ ID NO: 785579 - DNA, 25 bp, Homo sapien
cctcccctaaaccctcctgagtgca

SEQ ID NO: 785580 - DNA, 25 bp, Homo sapien
gacacgtggtcgtctcaggtctaga

SEQ ID NO: 785581 - DNA, 25 bp, Homo sapien
gaagccccaagtctaacactgtatg

SEQ ID NO: 785582 - DNA, 25 bp, Homo sapien
tagagccatccatatgcacaagagg

SEQ ID NO: 785583 - DNA, 25 bp, Homo sapien
gccagaattggtagtcagatgacca

SEQ ID NO: 785584 - DNA, 25 bp, Homo sapien
aacgtggcatctgctaccgcctcgg

SEQ ID NO: 785585 - DNA, 25 bp, Homo sapien
gcgaccccgagtggcgacgacggga

SEQ ID NO: 785586 - DNA, 25 bp, Homo sapien
ggcagcgaatagcagcgagcatgca

SEQ ID NO: 785587 - DNA, 25 bp, Homo sapien
cgagcatgcacactggccgtgaggc

SEQ ID NO: 785588 - DNA, 25 bp, Homo sapien
gttctgcacaatgccgttcccgtga

SEQ ID NO: 785589 - DNA, 25 bp, Homo sapien
catgttctgctcaaagccgtcacga

SEQ ID NO: 785590 - DNA, 25 bp, Homo sapien
tgcacaatgccgttcccgtgacatg

SEQ ID NO: 785591 - DNA, 25 bp, Homo sapien
ccgttcccgtgacatgttctgctca

SEQ ID NO: 785592 - DNA, 25 bp, Homo sapien
gccaatggattttgtggtgtttccc

SEQ ID NO: 785593 - DNA, 25 bp, Homo sapien
ctgcaagtcattaccccgcaacagt

SEQ ID NO: 785594 - DNA, 25 bp, Homo sapien
cattaccccgcaacagttgctgttt

SEQ ID NO: 785595 - DNA, 25 bp, Homo sapien
ggccaatggattttgtggtgtttcc

SEQ ID NO: 785596 - DNA, 25 bp, Homo sapien
ctgctgccatccgaattcctttgat

SEQ ID NO: 785597 - DNA, 25 bp, Homo sapien
cttccgatcaataggtttgatggcc

SEQ ID NO: 785598 - DNA, 25 bp, Homo sapien
tatctgatggactgacttccgatca

SEQ ID NO: 785599 - DNA, 25 bp, Homo sapien
cactggcccagagcatatctgatgg

SEQ ID NO: 785600 - DNA, 25 bp, Homo sapien
caataggtttgatggccttagcagg

SEQ ID NO: 785601 - DNA, 25 bp, Homo sapien
tcactgcagtgcttagactcagtac

SEQ ID NO: 785602 - DNA, 25 bp, Homo sapien
cttcactgcagtgcttagactcagt

SEQ ID NO: 785603 - DNA, 25 bp, Homo sapien
tccttcactgcagtgcttagactca

SEQ ID NO: 785604 - DNA, 25 bp, Homo sapien
ccttcactgcagtgcttagactcag

SEQ ID NO: 785605 - DNA, 25 bp, Homo sapien
tagtggcaccagcatccagactgtt

SEQ ID NO: 785606 - DNA, 25 bp, Homo sapien
attagtggcaccagcatccagactg

SEQ ID NO: 785607 - DNA, 25 bp, Homo sapien
caatattagtggcaccagcatccag

SEQ ID NO: 785608 - DNA, 25 bp, Homo sapien
tggcaccagcatccagactgttttc

SEQ ID NO: 785609 - DNA, 25 bp, Homo sapien
tagtggttaacaccgttgcactttg

SEQ ID NO: 785610 - DNA, 25 bp, Homo sapien
gatcaattagtggttaacaccgttg

SEQ ID NO: 785611 - DNA, 25 bp, Homo sapien
gtgatcaattagtggttaacaccgt

SEQ ID NO: 785612 - DNA, 25 bp, Homo sapien
caattagtggttaacaccgttgcac

SEQ ID NO: 785613 - DNA, 25 bp, Homo sapien
ctaaaagacagtgagacagagagca

SEQ ID NO: 785614 - DNA, 25 bp, Homo sapien
gatctaaacggttgaggagtcatca

SEQ ID NO: 785615 - DNA, 25 bp, Homo sapien
agatctaaacggttgaggagtcatc

SEQ ID NO: 785616 - DNA, 25 bp, Homo sapien
tcaccgatgcgtggcaggtagaaat

SEQ ID NO: 785617 - DNA, 25 bp, Homo sapien
ccttatggcgcacaggtagtgtaga

SEQ ID NO: 785618 - DNA, 25 bp, Homo sapien
cattcctttgaaattccttatggcg

SEQ ID NO: 785619 - DNA, 25 bp, Homo sapien
tcgtgatcaaacaccagtcgagtcc

SEQ ID NO: 785620 - DNA, 25 bp, Homo sapien
ttataaaaccgtaatcatataatac

SEQ ID NO: 785621 - DNA, 25 bp, Homo sapien
tataaaaccgtaatcatataataca

SEQ ID NO: 785622 - DNA, 25 bp, Homo sapien
agaagcatgacctccatccctaatc

SEQ ID NO: 785623 - DNA, 25 bp, Homo sapien
atcccacaagcgctcactcaatatc

SEQ ID NO: 785624 - DNA, 25 bp, Homo sapien
gatcccacaagcgctcactcaatat

SEQ ID NO: 785625 - DNA, 25 bp, Homo sapien
tcccacaagcgctcactcaatatca

SEQ ID NO: 785626 - DNA, 25 bp, Homo sapien
tgacaatcacggcagaaggcgaagg

SEQ ID NO: 785627 - DNA, 25 bp, Homo sapien
actgacaatcacggcagaaggcgaa

SEQ ID NO: 785628 - DNA, 25 bp, Homo sapien
aaactgacaatcacggcagaaggcg

SEQ ID NO: 785629 - DNA, 25 bp, Homo sapien
aactgacaatcacggcagaaggcga

SEQ ID NO: 785630 - DNA, 25 bp, Homo sapien
atgccacggcccaaatagctgcacg

SEQ ID NO: 785631 - DNA, 25 bp, Homo sapien
ataagaaatttcagatgccacggcc

SEQ ID NO: 785632 - DNA, 25 bp, Homo sapien
tgaaataagccgaggtacttccctg

SEQ ID NO: 785633 - DNA, 25 bp, Homo sapien
catcacgcccggacttttgttttat

SEQ ID NO: 785634 - DNA, 25 bp, Homo sapien
cagttcactgccaaggtcatcaaag

SEQ ID NO: 785635 - DNA, 25 bp, Homo sapien
gactgcagttcactgccaaggtcat

SEQ ID NO: 785636 - DNA, 25 bp, Homo sapien
cagatgactgcagttcactgccaag

SEQ ID NO: 785637 - DNA, 25 bp, Homo sapien
ctaaacagatgactgcagttcactg

SEQ ID NO: 785638 - DNA, 25 bp, Homo sapien
gctatgtagtagttcccctaaattc

SEQ ID NO: 785639 - DNA, 25 bp, Homo sapien
tagctatgtagtagttcccctaaat

SEQ ID NO: 785640 - DNA, 25 bp, Homo sapien
ctatgtagtagttcccctaaattct

SEQ ID NO: 785641 - DNA, 25 bp, Homo sapien
tatagctatgtagtagttcccctaa

SEQ ID NO: 785642 - DNA, 25 bp, Homo sapien
ttcttgatggagctgaatacagtga

SEQ ID NO: 785643 - DNA, 25 bp, Homo sapien
atacagtgatcacgttgtcctcctg

SEQ ID NO: 785644 - DNA, 25 bp, Homo sapien
tggagctgaatacagtgatcacgtt

SEQ ID NO: 785645 - DNA, 25 bp, Homo sapien
tgatcacgttgtcctcctgggagca

SEQ ID NO: 785646 - DNA, 25 bp, Homo sapien
cctcattccccctctccacaatctt

SEQ ID NO: 785647 - DNA, 25 bp, Homo sapien
tcccttctctgatgggcagcccctc

SEQ ID NO: 785648 - DNA, 25 bp, Homo sapien
ccaacactgaggtcccttctctgat

SEQ ID NO: 785649 - DNA, 25 bp, Homo sapien
cttcctcttccaagatgtgacctct

SEQ ID NO: 785650 - DNA, 25 bp, Homo sapien
ccgaccagctcccacggtcttgagt

SEQ ID NO: 785651 - DNA, 25 bp, Homo sapien
gtgcccgaccagctcccacggtctt

SEQ ID NO: 785652 - DNA, 25 bp, Homo sapien
cagctcccacggtcttgagtcttgg

SEQ ID NO: 785653 - DNA, 25 bp, Homo sapien
actgtgcccgaccagctcccacggt

SEQ ID NO: 785654 - DNA, 25 bp, Homo sapien
cacgctactgcactccaaaaaaaaa

SEQ ID NO: 785655 - DNA, 25 bp, Homo sapien
gatcacgctactgcactccaaaaaa

SEQ ID NO: 785656 - DNA, 25 bp, Homo sapien
aatcacttgagactgggaggaagag

SEQ ID NO: 785657 - DNA, 25 bp, Homo sapien
gaatcacttgagactgggaggaaga

SEQ ID NO: 785658 - DNA, 25 bp, Homo sapien
tcagtattcctgggatctcttgtac

SEQ ID NO: 785659 - DNA, 25 bp, Homo sapien
gactagagtttcttagccgaactgg

SEQ ID NO: 785660 - DNA, 25 bp, Homo sapien
tagactagagtttcttagccgaact

SEQ ID NO: 785661 - DNA, 25 bp, Homo sapien
atatagactagagtttcttagccga

SEQ ID NO: 785662 - DNA, 25 bp, Homo sapien
actagagtttcttagccgaactgga

SEQ ID NO: 785663 - DNA, 25 bp, Homo sapien
agtgatcttcctgtcacatgagtct

SEQ ID NO: 785664 - DNA, 25 bp, Homo sapien
tttgacacaatatcttgctgtgttg

SEQ ID NO: 785665 - DNA, 25 bp, Homo sapien
ttcctgtcacatgagtctcccaagt

SEQ ID NO: 785666 - DNA, 25 bp, Homo sapien
ttttttgacacaatatcttgctgtg

SEQ ID NO: 785667 - DNA, 25 bp, Homo sapien
ccaacccagagagtttcaaatcgga

SEQ ID NO: 785668 - DNA, 25 bp, Homo sapien
tgatggagctaaatcaggccccacc

SEQ ID NO: 785669 - DNA, 25 bp, Homo sapien
cggaatggattccaatgatggagct

SEQ ID NO: 785670 - DNA, 25 bp, Homo sapien
caagcgaggcccagatcatatttca

SEQ ID NO: 785671 - DNA, 25 bp, Homo sapien
caatgattcatcacaattttttggt

SEQ ID NO: 785672 - DNA, 25 bp, Homo sapien
tctaacagtgttcttgcccagttgt

SEQ ID NO: 785673 - DNA, 25 bp, Homo sapien
tgttcttgcccagttgtttcataaa

SEQ ID NO: 785674 - DNA, 25 bp, Homo sapien
tttttggtgaaatctaacagtgttc

SEQ ID NO: 785675 - DNA, 25 bp, Homo sapien
ctggcccgggcggtcagcgtctagc

SEQ ID NO: 785676 - DNA, 25 bp, Homo sapien
tagccccgcagactcggtgattctc

SEQ ID NO: 785677 - DNA, 25 bp, Homo sapien
ggtgattctcgtccactagaggcca

SEQ ID NO: 785678 - DNA, 25 bp, Homo sapien
ctcgggggtcctggctcgagcctct

SEQ ID NO: 785679 - DNA, 25 bp, Homo sapien
tcccgtcgccccttcgcctccgcca

SEQ ID NO: 785680 - DNA, 25 bp, Homo sapien
cccgtcgccccttcgcctccgccat

SEQ ID NO: 785681 - DNA, 25 bp, Homo sapien
cgtacagcgacggccggcgccaggc

SEQ ID NO: 785682 - DNA, 25 bp, Homo sapien
ttctcggggcccagatccgcctccc

SEQ ID NO: 785683 - DNA, 25 bp, Homo sapien
tggggcaaatccaggtgggtgtcct

SEQ ID NO: 785684 - DNA, 25 bp, Homo sapien
ctatggggcaaatccaggtgggtgt

SEQ ID NO: 785685 - DNA, 25 bp, Homo sapien
ggcaaatccaggtgggtgtccttct

SEQ ID NO: 785686 - DNA, 25 bp, Homo sapien
tgttctgctcccgaggggcccgggc

SEQ ID NO: 785687 - DNA, 25 bp, Homo sapien
ggctgttctgctcccgaggggcccg

SEQ ID NO: 785688 - DNA, 25 bp, Homo sapien
caaggctgttctgctcccgaggggc

SEQ ID NO: 785689 - DNA, 25 bp, Homo sapien
aaggctgttctgctcccgaggggcc

SEQ ID NO: 785690 - DNA, 25 bp, Homo sapien
cgcacgcgtctgctcacgaggtccc

SEQ ID NO: 785691 - DNA, 25 bp, Homo sapien
gctggcgcacgcgtctgctcacgag

SEQ ID NO: 785692 - DNA, 25 bp, Homo sapien
tggcgcacgcgtctgctcacgaggt

SEQ ID NO: 785693 - DNA, 25 bp, Homo sapien
ggcgcacgcgtctgctcacgaggtc

SEQ ID NO: 785694 - DNA, 25 bp, Homo sapien
ccgcctgcctgggccaacatggcaa

SEQ ID NO: 785695 - DNA, 25 bp, Homo sapien
gtgagccgagaccacgctgttgcat

SEQ ID NO: 785696 - DNA, 25 bp, Homo sapien
ccgagaccacgctgttgcattccag

SEQ ID NO: 785697 - DNA, 25 bp, Homo sapien
gagccgagaccacgctgttgcattc

SEQ ID NO: 785698 - DNA, 25 bp, Homo sapien
agcaggtcactgaagtcatgagggc

SEQ ID NO: 785699 - DNA, 25 bp, Homo sapien
gggcagaagcaggtcactgaagtca

SEQ ID NO: 785700 - DNA, 25 bp, Homo sapien
gaagcaggtcactgaagtcatgagg

SEQ ID NO: 785701 - DNA, 25 bp, Homo sapien
cagaagcaggtcactgaagtcatga

SEQ ID NO: 785702 - DNA, 25 bp, Homo sapien
cttgcagagactgtggctgatagac

SEQ ID NO: 785703 - DNA, 25 bp, Homo sapien
tcttggaaacttgcagagactgtgg

SEQ ID NO: 785704 - DNA, 25 bp, Homo sapien
gaaacttgcagagactgtggctgat

SEQ ID NO: 785705 - DNA, 25 bp, Homo sapien
gctgctcttggaaacttgcagagac

SEQ ID NO: 785706 - DNA, 25 bp, Homo sapien
aaataaaattgaggaacatatacac

SEQ ID NO: 785707 - DNA, 25 bp, Homo sapien
aaattgaggaacatatacacaagca

SEQ ID NO: 785708 - DNA, 25 bp, Homo sapien
attgaggaacatatacacaagcagg

SEQ ID NO: 785709 - DNA, 25 bp, Homo sapien
taaaattgaggaacatatacacaag

SEQ ID NO: 785710 - DNA, 25 bp, Homo sapien
tgtgcaacccgaacaaaaagacgaa

SEQ ID NO: 785711 - DNA, 25 bp, Homo sapien
ggatcacgatatttccgtccctgga

SEQ ID NO: 785712 - DNA, 25 bp, Homo sapien
gaacaaatatttgacggatgatcac

SEQ ID NO: 785713 - DNA, 25 bp, Homo sapien
ggtgatggaagatgcgcccgctttc

SEQ ID NO: 785714 - DNA, 25 bp, Homo sapien
ggattcaaagtaggttaagctatca

SEQ ID NO: 785715 - DNA, 25 bp, Homo sapien
gcaaaatctactaataaaaacagac

SEQ ID NO: 785716 - DNA, 25 bp, Homo sapien
taaaaagacacctgctttctcatgg

SEQ ID NO: 785717 - DNA, 25 bp, Homo sapien
gcgacttaagcatctacactctaaa

SEQ ID NO: 785718 - DNA, 25 bp, Homo sapien
acagcataggcaatgttacacagag

SEQ ID NO: 785719 - DNA, 25 bp, Homo sapien
tccactgactgtcaagtatctctgt

SEQ ID NO: 785720 - DNA, 25 bp, Homo sapien
tgtccacagcataggcaatgttaca

SEQ ID NO: 785721 - DNA, 25 bp, Homo sapien
atccactgactgtcaagtatctctg

SEQ ID NO: 785722 - DNA, 25 bp, Homo sapien
aggaagaaattgaaggacaaagtgg

SEQ ID NO: 785723 - DNA, 25 bp, Homo sapien
agaaattgaaggacaaagtgggctg

SEQ ID NO: 785724 - DNA, 25 bp, Homo sapien
agaaggaagaaattgaaggacaaag

SEQ ID NO: 785725 - DNA, 25 bp, Homo sapien
gaagaaattgaaggacaaagtgggc

SEQ ID NO: 785726 - DNA, 25 bp, Homo sapien
taacacggcactgtaagttggtgat

SEQ ID NO: 785727 - DNA, 25 bp, Homo sapien
ctataccataacacggcactgtaag

SEQ ID NO: 785728 - DNA, 25 bp, Homo sapien
cacggcactgtaagttggtgatatt

SEQ ID NO: 785729 - DNA, 25 bp, Homo sapien
accataacacggcactgtaagttgg

SEQ ID NO: 785730 - DNA, 25 bp, Homo sapien
tatctatggcaaatatagcattatg

SEQ ID NO: 785731 - DNA, 25 bp, Homo sapien
ccattggggaaatcactatctatgg

SEQ ID NO: 785732 - DNA, 25 bp, Homo sapien
agatccattggggaaatcactatct

SEQ ID NO: 785733 - DNA, 25 bp, Homo sapien
atgtaccttgcccagatccattggg

SEQ ID NO: 785734 - DNA, 25 bp, Homo sapien
taacaggctccggtgcgtgtccttc

SEQ ID NO: 785735 - DNA, 25 bp, Homo sapien
tcccaggcaggctttacttctaatt

SEQ ID NO: 785736 - DNA, 25 bp, Homo sapien
gggactttctccactgaaatctaaa

SEQ ID NO: 785737 - DNA, 25 bp, Homo sapien
tctgcagggactttctccactgaaa

SEQ ID NO: 785738 - DNA, 25 bp, Homo sapien
gcctgactagcattaacagatctct

SEQ ID NO: 785739 - DNA, 25 bp, Homo sapien
tagtagttcagatagttcacccggg

SEQ ID NO: 785740 - DNA, 25 bp, Homo sapien
tagctgcagaattatagacatagag

SEQ ID NO: 785741 - DNA, 25 bp, Homo sapien
gatctctacctatgtttagctgcag

SEQ ID NO: 785742 - DNA, 25 bp, Homo sapien
ggaaatcatcacatgtatcatcaaa

SEQ ID NO: 785743 - DNA, 25 bp, Homo sapien
gaaatcatcacatgtatcatcaaag

SEQ ID NO: 785744 - DNA, 25 bp, Homo sapien
aaatcatcacatgtatcatcaaaga

SEQ ID NO: 785745 - DNA, 25 bp, Homo sapien
cgaaaatcaattgaagacggattaa

SEQ ID NO: 785746 - DNA, 25 bp, Homo sapien
taacaccttatacgaaaatcaattg

SEQ ID NO: 785747 - DNA, 25 bp, Homo sapien
ccttatacgaaaatcaattgaagac

SEQ ID NO: 785748 - DNA, 25 bp, Homo sapien
atatggagccaaaagagcccgcatc

SEQ ID NO: 785749 - DNA, 25 bp, Homo sapien
ttaaaacaaggatacggtggagcca

SEQ ID NO: 785750 - DNA, 25 bp, Homo sapien
acctggctaattaagtcatcttcta

SEQ ID NO: 785751 - DNA, 25 bp, Homo sapien
tatttaaccattccaatattgatat

SEQ ID NO: 785752 - DNA, 25 bp, Homo sapien
taattaagtcatcttctaatgaatg

SEQ ID NO: 785753 - DNA, 25 bp, Homo sapien
tctaattggtaggtagtggtatctc

SEQ ID NO: 785754 - DNA, 25 bp, Homo sapien
gcttagtttggtaagtggctgtacc

SEQ ID NO: 785755 - DNA, 25 bp, Homo sapien
ttttgcatccccatgagcaatggat

SEQ ID NO: 785756 - DNA, 25 bp, Homo sapien
gctggagagtatggtcaaagtatgc

SEQ ID NO: 785757 - DNA, 25 bp, Homo sapien
ctaaaaggaggagccatctggccat

SEQ ID NO: 785758 - DNA, 25 bp, Homo sapien
ctcagtcctgagatggcaaaaatac

SEQ ID NO: 785759 - DNA, 25 bp, Homo sapien
gccagggcctctcagtcctgagatg

SEQ ID NO: 785760 - DNA, 25 bp, Homo sapien
ggcctctcagtcctgagatggcaaa

SEQ ID NO: 785761 - DNA, 25 bp, Homo sapien
tttgccagggcctctcagtcctgag

SEQ ID NO: 785762 - DNA, 25 bp, Homo sapien
gatgatacttcctttgaagctgccc

SEQ ID NO: 785763 - DNA, 25 bp, Homo sapien
catctttcaaggtttaggaccatca

SEQ ID NO: 785764 - DNA, 25 bp, Homo sapien
cactttgccctagaattcagaagac

SEQ ID NO: 785765 - DNA, 25 bp, Homo sapien
gaccatcatgatggagctcctccgc

SEQ ID NO: 785766 - DNA, 25 bp, Homo sapien
gcaagaagcccataggaacacaatt

SEQ ID NO: 785767 - DNA, 25 bp, Homo sapien
aatgtcatattgaattacggccaaa

SEQ ID NO: 785768 - DNA, 25 bp, Homo sapien
tttcagttttcacaactacatgaag

SEQ ID NO: 785769 - DNA, 25 bp, Homo sapien
agagaaaatctaccaattccttact

SEQ ID NO: 785770 - DNA, 25 bp, Homo sapien
gcctattcctcatctcacaatgggt

SEQ ID NO: 785771 - DNA, 25 bp, Homo sapien
catcccttgagagatagtacctgaa

SEQ ID NO: 785772 - DNA, 25 bp, Homo sapien
tagttaaaacagttgctaggcagcc

SEQ ID NO: 785773 - DNA, 25 bp, Homo sapien
cactgccttggagtttacttggaaa

SEQ ID NO: 785774 - DNA, 25 bp, Homo sapien
taaaatgtaaatgaacccaggactc

SEQ ID NO: 785775 - DNA, 25 bp, Homo sapien
tgtattcaacgtgatggtaaaggcc

SEQ ID NO: 785776 - DNA, 25 bp, Homo sapien
cattgagatcagagctaacttggga

SEQ ID NO: 785777 - DNA, 25 bp, Homo sapien
taacttgggaaatccaggcttgcat

SEQ ID NO: 785778 - DNA, 25 bp, Homo sapien
cctagatattctcaatgattgttgc

SEQ ID NO: 785779 - DNA, 25 bp, Homo sapien
ttagcaacattgaacctattttagc

SEQ ID NO: 785780 - DNA, 25 bp, Homo sapien
ggaaagaaggttgtcctagatattc

SEQ ID NO: 785781 - DNA, 25 bp, Homo sapien
gagtacaacttgtatcagtttagca

SEQ ID NO: 785782 - DNA, 25 bp, Homo sapien
tgaagaagttcctagcagtgagacc

SEQ ID NO: 785783 - DNA, 25 bp, Homo sapien
tatttcaaaacaaccctgtcacaac

SEQ ID NO: 785784 - DNA, 25 bp, Homo sapien
cacaactctttctatgctctacaca

SEQ ID NO: 785785 - DNA, 25 bp, Homo sapien
aatttagcagtttggctccagtaag

SEQ ID NO: 785786 - DNA, 25 bp, Homo sapien
gagtatagcagggaaagccaggcac

SEQ ID NO: 785787 - DNA, 25 bp, Homo sapien
tgctccctcttattggcaggccaag

SEQ ID NO: 785788 - DNA, 25 bp, Homo sapien
taactgggaatatcttacaaggcac

SEQ ID NO: 785789 - DNA, 25 bp, Homo sapien
caaggcacaaacatgctaggatggc

SEQ ID NO: 785790 - DNA, 25 bp, Homo sapien
aagactcagctaggatgcttcaact

SEQ ID NO: 785791 - DNA, 25 bp, Homo sapien
tacaggctgaatgttgtcctcccaa

SEQ ID NO: 785792 - DNA, 25 bp, Homo sapien
gacccgataagattattactgaggg

SEQ ID NO: 785793 - DNA, 25 bp, Homo sapien
gaagcttcagtacctgtgcatgtga

SEQ ID NO: 785794 - DNA, 25 bp, Homo sapien
aggacacacagtggtttaagtcatc

SEQ ID NO: 785795 - DNA, 25 bp, Homo sapien
cctcatagggctgcagtctgatgga

SEQ ID NO: 785796 - DNA, 25 bp, Homo sapien
atcctgggtgtgatgtttaagtcac

SEQ ID NO: 785797 - DNA, 25 bp, Homo sapien
gagagattgaactatagaatattta

SEQ ID NO: 785798 - DNA, 25 bp, Homo sapien
aatgatagcttttacctccctgagg

SEQ ID NO: 785799 - DNA, 25 bp, Homo sapien
tccctgaggagctgctagtacctac

SEQ ID NO: 785800 - DNA, 25 bp, Homo sapien
tgtaagccttagcattggtactttc

SEQ ID NO: 785801 - DNA, 25 bp, Homo sapien
tatccgtaatcaaatccagtactga

SEQ ID NO: 785802 - DNA, 25 bp, Homo sapien
ccgggtgggcaattgtcatatctca

SEQ ID NO: 785803 - DNA, 25 bp, Homo sapien
catattagctgcttctagtcagccc

SEQ ID NO: 785804 - DNA, 25 bp, Homo sapien
gtcttctctccttgaaattggtgca

SEQ ID NO: 785805 - DNA, 25 bp, Homo sapien
ccgaagtttactcttggatgatcta

SEQ ID NO: 785806 - DNA, 25 bp, Homo sapien
ggcagtactactgcagctgcaatga

SEQ ID NO: 785807 - DNA, 25 bp, Homo sapien
gcatgctggaggtgccggcatatca

SEQ ID NO: 785808 - DNA, 25 bp, Homo sapien
ccggcatatcaaccaggccctttgt

SEQ ID NO: 785809 - DNA, 25 bp, Homo sapien
cctgaaggcagtaagggcagtacta

SEQ ID NO: 785810 - DNA, 25 bp, Homo sapien
agatcttagcttggcatgcccagga

SEQ ID NO: 785811 - DNA, 25 bp, Homo sapien
aatggttgtggcagcaggactttca

SEQ ID NO: 785812 - DNA, 25 bp, Homo sapien
cagttggtacaatcagccctgggtg

SEQ ID NO: 785813 - DNA, 25 bp, Homo sapien
ggattcaagccaggagtccctgccc

SEQ ID NO: 785814 - DNA, 25 bp, Homo sapien
tggaaccagcacaatcaattggagg

SEQ ID NO: 785815 - DNA, 25 bp, Homo sapien
taagaacctttgctatggaaccagc

SEQ ID NO: 785816 - DNA, 25 bp, Homo sapien
tttcagaaggccaagacctttgtgc

SEQ ID NO: 785817 - DNA, 25 bp, Homo sapien
tgttttgctgcaatccttagattcc

SEQ ID NO: 785818 - DNA, 25 bp, Homo sapien
gggtccccccgctgtgtgcagccta

SEQ ID NO: 785819 - DNA, 25 bp, Homo sapien
atgacagatccagaagtctaggagg

SEQ ID NO: 785820 - DNA, 25 bp, Homo sapien
tagcaacttggtgccctgcattcca

SEQ ID NO: 785821 - DNA, 25 bp, Homo sapien
cccatgacagatccagaagtctagg

SEQ ID NO: 785822 - DNA, 25 bp, Homo sapien
tctccatgtatggtgggagtgacct

SEQ ID NO: 785823 - DNA, 25 bp, Homo sapien
aatctccatgtatggtgggagtgac

SEQ ID NO: 785824 - DNA, 25 bp, Homo sapien
ataatctccatgtatggtgggagtg

SEQ ID NO: 785825 - DNA, 25 bp, Homo sapien
tccatgtatggtgggagtgacctag

SEQ ID NO: 785826 - DNA, 25 bp, Homo sapien
ggaagggaattggatcctatctttg

SEQ ID NO: 785827 - DNA, 25 bp, Homo sapien
gacagcatacatttgagtcttgcag

SEQ ID NO: 785828 - DNA, 25 bp, Homo sapien
tctatgggtgtcactatttgtggga

SEQ ID NO: 785829 - DNA, 25 bp, Homo sapien
tatctaacttgccaatctgtgcctt

SEQ ID NO: 785830 - DNA, 25 bp, Homo sapien
tttgctgagggttgttttgtggcca

SEQ ID NO: 785831 - DNA, 25 bp, Homo sapien
gatctgcctaatactgtcagtgtca

SEQ ID NO: 785832 - DNA, 25 bp, Homo sapien
ggccaatcatgtggttgactttaga

SEQ ID NO: 785833 - DNA, 25 bp, Homo sapien
tctgggtactcctacattgggtggg

SEQ ID NO: 785834 - DNA, 25 bp, Homo sapien
catacaatgcgttagggagagtccc

SEQ ID NO: 785835 - DNA, 25 bp, Homo sapien
tttggtagaattaggctgtggatcc

SEQ ID NO: 785836 - DNA, 25 bp, Homo sapien
gttcaaccttgggagcttatgtttc

SEQ ID NO: 785837 - DNA, 25 bp, Homo sapien
taattgcgtctatttgggtcctccc

SEQ ID NO: 785838 - DNA, 25 bp, Homo sapien
ggtatagaaacagattgcagataga

SEQ ID NO: 785839 - DNA, 25 bp, Homo sapien
tgcagatagagatagtgtgacttcc

SEQ ID NO: 785840 - DNA, 25 bp, Homo sapien
gatctaggagctgctaggcagaaac

SEQ ID NO: 785841 - DNA, 25 bp, Homo sapien
tttttattggatctaggagctgcta

SEQ ID NO: 785842 - DNA, 25 bp, Homo sapien
tgcaactccactagcatctgctgtt

SEQ ID NO: 785843 - DNA, 25 bp, Homo sapien
tacccatgtagtgtcattgtttagc

SEQ ID NO: 785844 - DNA, 25 bp, Homo sapien
taagcacaggccctattaggtagct

SEQ ID NO: 785845 - DNA, 25 bp, Homo sapien
tagtccctggtatctgttgttcccc

SEQ ID NO: 785846 - DNA, 25 bp, Homo sapien
tgctcaatgggtataacagaatgtt

SEQ ID NO: 785847 - DNA, 25 bp, Homo sapien
tacacctaatggacttagaacagtg

SEQ ID NO: 785848 - DNA, 25 bp, Homo sapien
tctaaaggtaaggttgaaccagagc

SEQ ID NO: 785849 - DNA, 25 bp, Homo sapien
tcaggatcatatataccctcaatgg

SEQ ID NO: 785850 - DNA, 25 bp, Homo sapien
ccataattcagctgggtctagtggc

SEQ ID NO: 785851 - DNA, 25 bp, Homo sapien
cgattgagctaaggaattcaaggct

SEQ ID NO: 785852 - DNA, 25 bp, Homo sapien
taattcagctgggtctagtggcttg

SEQ ID NO: 785853 - DNA, 25 bp, Homo sapien
attcagctgggtctagtggcttgca

SEQ ID NO: 785854 - DNA, 25 bp, Homo sapien
tgcttctaaattctggagggttcag

SEQ ID NO: 785855 - DNA, 25 bp, Homo sapien
gagggttcaggtagagaggaaaagc

SEQ ID NO: 785856 - DNA, 25 bp, Homo sapien
gagaggaaaagcaaatgttttcatt

SEQ ID NO: 785857 - DNA, 25 bp, Homo sapien
aaaaaatcataaattgcttctaaat

SEQ ID NO: 785858 - DNA, 25 bp, Homo sapien
gagtagaaactgaatcggcgacccc

SEQ ID NO: 785859 - DNA, 25 bp, Homo sapien
aaccgcaggcatggtatgtcataga

SEQ ID NO: 785860 - DNA, 25 bp, Homo sapien
gtggtccacgtctgcttccctgtaa

SEQ ID NO: 785861 - DNA, 25 bp, Homo sapien
gctgtaacaaaggtgactgtggcac

SEQ ID NO: 785862 - DNA, 25 bp, Homo sapien
tgggtaagtgaacctttacaccatc

SEQ ID NO: 785863 - DNA, 25 bp, Homo sapien
ttgctacttgctctaacattgggta

SEQ ID NO: 785864 - DNA, 25 bp, Homo sapien
gtggattccagtctaaaactagttg

SEQ ID NO: 785865 - DNA, 25 bp, Homo sapien
gaacctttacaccatcttagagatg

SEQ ID NO: 785866 - DNA, 25 bp, Homo sapien
tggaattataggcactcaatcacca

SEQ ID NO: 785867 - DNA, 25 bp, Homo sapien
ggcgtgagctatcacactcccctct

SEQ ID NO: 785868 - DNA, 25 bp, Homo sapien
ttttgggggaaatggagtgtcactc

SEQ ID NO: 785869 - DNA, 25 bp, Homo sapien
tgagctatcacactcccctcttttt

SEQ ID NO: 785870 - DNA, 25 bp, Homo sapien
agatgacatcgatgccacttcacct

SEQ ID NO: 785871 - DNA, 25 bp, Homo sapien
aagatgacatcgatgccacttcacc

SEQ ID NO: 785872 - DNA, 25 bp, Homo sapien
agggtttcatcattttggccaggct

SEQ ID NO: 785873 - DNA, 25 bp, Homo sapien
gcccggctaatccttgtatttctta

SEQ ID NO: 785874 - DNA, 25 bp, Homo sapien
gagacagggtttcatcattttggcc

SEQ ID NO: 785875 - DNA, 25 bp, Homo sapien
cggctaatccttgtatttcttagta

SEQ ID NO: 785876 - DNA, 25 bp, Homo sapien
taaatttctttgctcaacaccactc

SEQ ID NO: 785877 - DNA, 25 bp, Homo sapien
ttttgtggccaacagtcacattctt

SEQ ID NO: 785878 - DNA, 25 bp, Homo sapien
tgggccacgtcattcattttcagtt

SEQ ID NO: 785879 - DNA, 25 bp, Homo sapien
ttggacctagccaggtgctgggatt

SEQ ID NO: 785880 - DNA, 25 bp, Homo sapien
gacactgggttccagcatcaatgct

SEQ ID NO: 785881 - DNA, 25 bp, Homo sapien
aacttctttaactccactccaggtg

SEQ ID NO: 785882 - DNA, 25 bp, Homo sapien
ggttcacccgcctctgacaatagta

SEQ ID NO: 785883 - DNA, 25 bp, Homo sapien
tagtgcgtccgctaattggcctcca

SEQ ID NO: 785884 - DNA, 25 bp, Homo sapien
agacagtagaggaatgaaagaatga

SEQ ID NO: 785885 - DNA, 25 bp, Homo sapien
tgaaagaatgaccattccatagaca

SEQ ID NO: 785886 - DNA, 25 bp, Homo sapien
gaatgaccattccatagacagagca

SEQ ID NO: 785887 - DNA, 25 bp, Homo sapien
tggctggttacccatttttatgatt

SEQ ID NO: 785888 - DNA, 25 bp, Homo sapien
tgtcccctcgcaactccaggatggt

SEQ ID NO: 785889 - DNA, 25 bp, Homo sapien
gaggatcgcccctcctgacagaaga

SEQ ID NO: 785890 - DNA, 25 bp, Homo sapien
tggaagaatactctcccttttcgtg

SEQ ID NO: 785891 - DNA, 25 bp, Homo sapien
ctggaatggttatcacaagaaggct

SEQ ID NO: 785892 - DNA, 25 bp, Homo sapien
gcgcttctcggcctgtcgctggtcg

SEQ ID NO: 785893 - DNA, 25 bp, Homo sapien
ttccaaaacagctgtgtctcgggag

SEQ ID NO: 785894 - DNA, 25 bp, Homo sapien
ggtcggcctcctactgtacctcgtg

SEQ ID NO: 785895 - DNA, 25 bp, Homo sapien
gcggcggccgatagcgagtgtcagg

SEQ ID NO: 785896 - DNA, 25 bp, Homo sapien
gtcccactagtctactgatactgag

SEQ ID NO: 785897 - DNA, 25 bp, Homo sapien
ttcttgagtagggagtctgcagtca

SEQ ID NO: 785898 - DNA, 25 bp, Homo sapien
gagcccctactgacctagacactat

SEQ ID NO: 785899 - DNA, 25 bp, Homo sapien
gggaggatctggaacccaaactgca

SEQ ID NO: 785900 - DNA, 25 bp, Homo sapien
cttgtacttgacattgagcttcagg

SEQ ID NO: 785901 - DNA, 25 bp, Homo sapien
gtacttgacattgagcttcaggtct

SEQ ID NO: 785902 - DNA, 25 bp, Homo sapien
tgtatttcttgtacttgacattgag

SEQ ID NO: 785903 - DNA, 25 bp, Homo sapien
ttcttgtacttgacattgagcttca

SEQ ID NO: 785904 - DNA, 25 bp, Homo sapien
cctgaaggacatccgctaacatttc

SEQ ID NO: 785905 - DNA, 25 bp, Homo sapien
gaaggacatccgctaacatttctta

SEQ ID NO: 785906 - DNA, 25 bp, Homo sapien
gcctgaaggacatccgctaacattt

SEQ ID NO: 785907 - DNA, 25 bp, Homo sapien
ggacatccgctaacatttcttactg

SEQ ID NO: 785908 - DNA, 25 bp, Homo sapien
gcagcaacctggatctcgaacaaag

SEQ ID NO: 785909 - DNA, 25 bp, Homo sapien
agatcattctagcattgggaccagc

SEQ ID NO: 785910 - DNA, 25 bp, Homo sapien
cattacagatgagcttcggctgccc

SEQ ID NO: 785911 - DNA, 25 bp, Homo sapien
tagcttgatccgttcctctccagga

SEQ ID NO: 785912 - DNA, 25 bp, Homo sapien
gaaaatcatgggcagatggagcttt

SEQ ID NO: 785913 - DNA, 25 bp, Homo sapien
gcagcttttccctactgtcaccaga

SEQ ID NO: 785914 - DNA, 25 bp, Homo sapien
gagcagggtggatctagaccatgca

SEQ ID NO: 785915 - DNA, 25 bp, Homo sapien
actgcgtcgggacatgccgtgtgcc

SEQ ID NO: 785916 - DNA, 25 bp, Homo sapien
ccttccctgtggagttgcagggtct

SEQ ID NO: 785917 - DNA, 25 bp, Homo sapien
tggagacaagaccagcagctcgaga

SEQ ID NO: 785918 - DNA, 25 bp, Homo sapien
gagcagagaatagctgatgcccagg

SEQ ID NO: 785919 - DNA, 25 bp, Homo sapien
caaacctcttggatgtgactctgga

SEQ ID NO: 785920 - DNA, 25 bp, Homo sapien
tgtgtagtcaaaagggcactgtccc

SEQ ID NO: 785921 - DNA, 25 bp, Homo sapien
gttccacagtgtctacagtatctgg

SEQ ID NO: 785922 - DNA, 25 bp, Homo sapien
tcttcgctgtcatttggctcgaaag

SEQ ID NO: 785923 - DNA, 25 bp, Homo sapien
gccacctctgcttgtgttggcccaa

SEQ ID NO: 785924 - DNA, 25 bp, Homo sapien
gccagtttgaaacctcagagtattc

SEQ ID NO: 785925 - DNA, 25 bp, Homo sapien
tgttttcacacatgggcacttggag

SEQ ID NO: 785926 - DNA, 25 bp, Homo sapien
gtgcaacccagaggccaatttgttt

SEQ ID NO: 785927 - DNA, 25 bp, Homo sapien
ccacattgccgttgagctctcagag

SEQ ID NO: 785928 - DNA, 25 bp, Homo sapien
ccatttaacttcatatgccgtgcta

SEQ ID NO: 785929 - DNA, 25 bp, Homo sapien
tcaaccttttaccaattcaagtgga

SEQ ID NO: 785930 - DNA, 25 bp, Homo sapien
agtggaatgtagaaactctactgct

SEQ ID NO: 785931 - DNA, 25 bp, Homo sapien
tatgatcattggctagtatcaacct

SEQ ID NO: 785932 - DNA, 25 bp, Homo sapien
tctgttatgcagcttatgaggtggc

SEQ ID NO: 785933 - DNA, 25 bp, Homo sapien
tcagagattctgaagccgagcaact

SEQ ID NO: 785934 - DNA, 25 bp, Homo sapien
ttaattccttgtgggcactagctgc

SEQ ID NO: 785935 - DNA, 25 bp, Homo sapien
ccttgggtgaggatagcttgctttc

SEQ ID NO: 785936 - DNA, 25 bp, Homo sapien
cagttaactttataggccagtgtcc

SEQ ID NO: 785937 - DNA, 25 bp, Homo sapien
tgaaattctctagcgtggctcgcaa

SEQ ID NO: 785938 - DNA, 25 bp, Homo sapien
taggaaatcttaacaggtccatggc

SEQ ID NO: 785939 - DNA, 25 bp, Homo sapien
ttgtcctgaccggaaacccaagtgc

SEQ ID NO: 785940 - DNA, 25 bp, Homo sapien
cctctacagaactgtcggaatcttt

SEQ ID NO: 785941 - DNA, 25 bp, Homo sapien
ttcctctacagaactgtcggaatct

SEQ ID NO: 785942 - DNA, 25 bp, Homo sapien
ctacagaactgtcggaatctttaag

SEQ ID NO: 785943 - DNA, 25 bp, Homo sapien
cagaactgtcggaatctttaagtaa

SEQ ID NO: 785944 - DNA, 25 bp, Homo sapien
cctaagtcaaccatataagctacct

SEQ ID NO: 785945 - DNA, 25 bp, Homo sapien
tgagaggtacacaacaatttctttt

SEQ ID NO: 785946 - DNA, 25 bp, Homo sapien
gctataaaccctggaattagttgca

SEQ ID NO: 785947 - DNA, 25 bp, Homo sapien
cagcaaaatgaggtgctatctgcat

SEQ ID NO: 785948 - DNA, 25 bp, Homo sapien
ctctgcctcctccagcagctgtgtc

SEQ ID NO: 785949 - DNA, 25 bp, Homo sapien
ctgcctcctccagcagctgtgtcat

SEQ ID NO: 785950 - DNA, 25 bp, Homo sapien
tctgcctcctccagcagctgtgtca

SEQ ID NO: 785951 - DNA, 25 bp, Homo sapien
ctccatgtcattatatggctgtttt

SEQ ID NO: 785952 - DNA, 25 bp, Homo sapien
cattttcgtttcctatcttactctc

SEQ ID NO: 785953 - DNA, 25 bp, Homo sapien
tccatgtcattatatggctgttttc

SEQ ID NO: 785954 - DNA, 25 bp, Homo sapien
gtttcctatcttactctccatgtca

SEQ ID NO: 785955 - DNA, 25 bp, Homo sapien
ctaggatgtcctttgtcccacttgg

SEQ ID NO: 785956 - DNA, 25 bp, Homo sapien
ccctaggatgtcctttgtcccactt

SEQ ID NO: 785957 - DNA, 25 bp, Homo sapien
cctaggatgtcctttgtcccacttg

SEQ ID NO: 785958 - DNA, 25 bp, Homo sapien
catagctcagagtaatttgatcgtc

SEQ ID NO: 785959 - DNA, 25 bp, Homo sapien
tttgcctttggtttgaatgtcctcc

SEQ ID NO: 785960 - DNA, 25 bp, Homo sapien
ctcagcttgtcaaagtcgttctccg

SEQ ID NO: 785961 - DNA, 25 bp, Homo sapien
ctgttgctggtgaggaactgtgttc

SEQ ID NO: 785962 - DNA, 25 bp, Homo sapien
ttccatttatactgaggtctgcttc

SEQ ID NO: 785963 - DNA, 25 bp, Homo sapien
tttcactatctactaccctagagct

SEQ ID NO: 785964 - DNA, 25 bp, Homo sapien
tttgaggtagaatggttcctgtcaa

SEQ ID NO: 785965 - DNA, 25 bp, Homo sapien
tgcctgagtgcctatttctgcaaac

SEQ ID NO: 785966 - DNA, 25 bp, Homo sapien
tcatgggcatggcatgcgtttccat

SEQ ID NO: 785967 - DNA, 25 bp, Homo sapien
catgggcatggcatgcgtttccatt

SEQ ID NO: 785968 - DNA, 25 bp, Homo sapien
atgggcatggcatgcgtttccattt

SEQ ID NO: 785969 - DNA, 25 bp, Homo sapien
tgggcatggcatgcgtttccatttg

SEQ ID NO: 785970 - DNA, 25 bp, Homo sapien
catacaagaggatggccataatggg

SEQ ID NO: 785971 - DNA, 25 bp, Homo sapien
tcttcgtatggttaagctgtgacac

SEQ ID NO: 785972 - DNA, 25 bp, Homo sapien
gatggtagcacattcagaagcctat

SEQ ID NO: 785973 - DNA, 25 bp, Homo sapien
tcaaaatgaattcctgggctgtgtc

SEQ ID NO: 785974 - DNA, 25 bp, Homo sapien
gacgtggctgtgaaacatctcaagt

SEQ ID NO: 785975 - DNA, 25 bp, Homo sapien
tgacaaaaagggacgtggctgtgaa

SEQ ID NO: 785976 - DNA, 25 bp, Homo sapien
tggctgtgaaacatctcaagtccac

SEQ ID NO: 785977 - DNA, 25 bp, Homo sapien
catgacaaaaagggacgtggctgtg

SEQ ID NO: 785978 - DNA, 25 bp, Homo sapien
cagcacaggataaacccgcccctat

SEQ ID NO: 785979 - DNA, 25 bp, Homo sapien
gagccacaatgatgagatttgggtg

SEQ ID NO: 785980 - DNA, 25 bp, Homo sapien
aggcattatgggagccacaatgatg

SEQ ID NO: 785981 - DNA, 25 bp, Homo sapien
cataggcattatgggagccacaatg

SEQ ID NO: 785982 - DNA, 25 bp, Homo sapien
tccggatacgaaggaaaaggctgcc

SEQ ID NO: 785983 - DNA, 25 bp, Homo sapien
tctaaaaggatccggatacgaagga

SEQ ID NO: 785984 - DNA, 25 bp, Homo sapien
ccctctgggcggcagcgctgcacat

SEQ ID NO: 785985 - DNA, 25 bp, Homo sapien
cctctgggcggcagcgctgcacatg

SEQ ID NO: 785986 - DNA, 25 bp, Homo sapien
tgtcaataatcttattcaggtgctc

SEQ ID NO: 785987 - DNA, 25 bp, Homo sapien
gtgtcaataatcttattcaggtgct

SEQ ID NO: 785988 - DNA, 25 bp, Homo sapien
cctttcagagtgtcaataatcttat

SEQ ID NO: 785989 - DNA, 25 bp, Homo sapien
tttcagagtgtcaataatcttattc

SEQ ID NO: 785990 - DNA, 25 bp, Homo sapien
taagccacttctgtcatgcagcgag

SEQ ID NO: 785991 - DNA, 25 bp, Homo sapien
tagatcttgccaacttgactagtcc

SEQ ID NO: 785992 - DNA, 25 bp, Homo sapien
cttgaaaggacagaaaacattccct

SEQ ID NO: 785993 - DNA, 25 bp, Homo sapien
tgcccagcacacatcaaattccttt

SEQ ID NO: 785994 - DNA, 25 bp, Homo sapien
tggtccatctggcagtcccaggttc

SEQ ID NO: 785995 - DNA, 25 bp, Homo sapien
gatttgctcttcaggagggtcttcc

SEQ ID NO: 785996 - DNA, 25 bp, Homo sapien
tgttcattttctttcgtggcccctg

SEQ ID NO: 785997 - DNA, 25 bp, Homo sapien
aagtgagttctttagttggtccatc

SEQ ID NO: 785998 - DNA, 25 bp, Homo sapien
gagtagcgctcagtattgcacccac

SEQ ID NO: 785999 - DNA, 25 bp, Homo sapien
gcacccactaatttgtctgtagaaa

SEQ ID NO: 786000 - DNA, 25 bp, Homo sapien
gattgcattcctcgtataaactgta

SEQ ID NO: 786001 - DNA, 25 bp, Homo sapien
tccttgcaactgagttattggtacc

SEQ ID NO: 786002 - DNA, 25 bp, Homo sapien
cactaggtgtttttaacagttggct

SEQ ID NO: 786003 - DNA, 25 bp, Homo sapien
tgcccccttgacatgaatctacagt

SEQ ID NO: 786004 - DNA, 25 bp, Homo sapien
ctgaaggcaggtcatctgtgcacta

SEQ ID NO: 786005 - DNA, 25 bp, Homo sapien
taacagttggctttgaaggggatac

SEQ ID NO: 786006 - DNA, 25 bp, Homo sapien
tccacacttccttggtctctggtgc

SEQ ID NO: 786007 - DNA, 25 bp, Homo sapien
gctttccaccataagttagaaatga

SEQ ID NO: 786008 - DNA, 25 bp, Homo sapien
aataagcacttgtactttgcaccat

SEQ ID NO: 786009 - DNA, 25 bp, Homo sapien
cacttgtactttgcaccataaaaca

SEQ ID NO: 786010 - DNA, 25 bp, Homo sapien
tatggtcacgaacaaagtctgtgtt

SEQ ID NO: 786011 - DNA, 25 bp, Homo sapien
catgcatgcatgtagttttaaggag

SEQ ID NO: 786012 - DNA, 25 bp, Homo sapien
gctgcaagcagtggtgaggttgtgg

SEQ ID NO: 786013 - DNA, 25 bp, Homo sapien
ttaaggagaacacattatggtcacg

SEQ ID NO: 786014 - DNA, 25 bp, Homo sapien
aggtcaacctccttgctcttgccag

SEQ ID NO: 786015 - DNA, 25 bp, Homo sapien
cctaagttcgtatcattgcaggcca

SEQ ID NO: 786016 - DNA, 25 bp, Homo sapien
ggagcccctaagttcgtatcattgc

SEQ ID NO: 786017 - DNA, 25 bp, Homo sapien
acaaggagcccctaagttcgtatca

SEQ ID NO: 786018 - DNA, 25 bp, Homo sapien
tagaagacttctatctcattgacag

SEQ ID NO: 786019 - DNA, 25 bp, Homo sapien
tgtttgtgtagaagacttctatctc

SEQ ID NO: 786020 - DNA, 25 bp, Homo sapien
cagtggtaacgttgatctcagaatt

SEQ ID NO: 786021 - DNA, 25 bp, Homo sapien
ctcattgacagtggtaacgttgatc

SEQ ID NO: 786022 - DNA, 25 bp, Homo sapien
aatcataaagaggtcagtgatttat

SEQ ID NO: 786023 - DNA, 25 bp, Homo sapien
gaggtcagtgatttataattcagaa

SEQ ID NO: 786024 - DNA, 25 bp, Homo sapien
tatagagaatgccttaggggaactc

SEQ ID NO: 786025 - DNA, 25 bp, Homo sapien
gggaactctaagaagcttgaagtca

SEQ ID NO: 786026 - DNA, 25 bp, Homo sapien
tcttggtgagttccgaatgcacaaa

SEQ ID NO: 786027 - DNA, 25 bp, Homo sapien
tcctagatggaatggcagaatagcc

SEQ ID NO: 786028 - DNA, 25 bp, Homo sapien
taaagggcttgccagttgccagtgg

SEQ ID NO: 786029 - DNA, 25 bp, Homo sapien
tattttgtaaagtccgctttgtgaa

SEQ ID NO: 786030 - DNA, 25 bp, Homo sapien
caggcagttgtccagcatgagtggc

SEQ ID NO: 786031 - DNA, 25 bp, Homo sapien
gcagttgtccagcatgagtggctgc

SEQ ID NO: 786032 - DNA, 25 bp, Homo sapien
gtccctatgtttcttgggaacacca

SEQ ID NO: 786033 - DNA, 25 bp, Homo sapien
agttgtccagcatgagtggctgcat

SEQ ID NO: 786034 - DNA, 25 bp, Homo sapien
ctcatttatttggctggacatggca

SEQ ID NO: 786035 - DNA, 25 bp, Homo sapien
tttcatttcttttgccgggatgaag

SEQ ID NO: 786036 - DNA, 25 bp, Homo sapien
ttgccgggatgaagtaaaaacaaca

SEQ ID NO: 786037 - DNA, 25 bp, Homo sapien
acaacaaccatgaagttcagtctca

SEQ ID NO: 786038 - DNA, 25 bp, Homo sapien
gaattgagaccttggtagatttgtc

SEQ ID NO: 786039 - DNA, 25 bp, Homo sapien
ggaacttgtaggaattgagaccttg

SEQ ID NO: 786040 - DNA, 25 bp, Homo sapien
gagaccttggtagatttgtctattc

SEQ ID NO: 786041 - DNA, 25 bp, Homo sapien
caaagaacctcgtggggcttcacac

SEQ ID NO: 786042 - DNA, 25 bp, Homo sapien
gaaactcggcgtcgcagcttccgag

SEQ ID NO: 786043 - DNA, 25 bp, Homo sapien
tcggcgtcgcagcttccgagcgagc

SEQ ID NO: 786044 - DNA, 25 bp, Homo sapien
gtcgcagcttccgagcgagccgctg

SEQ ID NO: 786045 - DNA, 25 bp, Homo sapien
gccagagtgaaactcggcgtcgcag

SEQ ID NO: 786046 - DNA, 25 bp, Homo sapien
aggacggggctgagggcaccaccgc

SEQ ID NO: 786047 - DNA, 25 bp, Homo sapien
ggctgagggcaccaccgcgctcggg

SEQ ID NO: 786048 - DNA, 25 bp, Homo sapien
ggacggggctgagggcaccaccgcg

SEQ ID NO: 786049 - DNA, 25 bp, Homo sapien
cggggctgagggcaccaccgcgctc

SEQ ID NO: 786050 - DNA, 25 bp, Homo sapien
catcttgatacaaaccacaaacaac

SEQ ID NO: 786051 - DNA, 25 bp, Homo sapien
gctgactcagcgacacaaattccaa

SEQ ID NO: 786052 - DNA, 25 bp, Homo sapien
ccttaggaggaatgacttgtttgag

SEQ ID NO: 786053 - DNA, 25 bp, Homo sapien
tcccttctggatgaagacaccagct

SEQ ID NO: 786054 - DNA, 25 bp, Homo sapien
ctctccccacgaagaagctggcatg

SEQ ID NO: 786055 - DNA, 25 bp, Homo sapien
gctggcatgatgtaagaagaccgcc

SEQ ID NO: 786056 - DNA, 25 bp, Homo sapien
gccacaaagcgaataatccagtcta

SEQ ID NO: 786057 - DNA, 25 bp, Homo sapien
taagaagaccgccacaaagcgaata

SEQ ID NO: 786058 - DNA, 25 bp, Homo sapien
tcatcgaatagtacgcagagcccct

SEQ ID NO: 786059 - DNA, 25 bp, Homo sapien
gatgacaagaaggagcacaccagtg

SEQ ID NO: 786060 - DNA, 25 bp, Homo sapien
tggaaaaagtgacctagagactgca

SEQ ID NO: 786061 - DNA, 25 bp, Homo sapien
ccagccgtgttcttgcagtatgaga

SEQ ID NO: 786062 - DNA, 25 bp, Homo sapien
tcctccctcagaatgaatggaaacc

SEQ ID NO: 786063 - DNA, 25 bp, Homo sapien
aggaacccgcatccaggaacacagc

SEQ ID NO: 786064 - DNA, 25 bp, Homo sapien
acagccctttgctcctccctcagaa

SEQ ID NO: 786065 - DNA, 25 bp, Homo sapien
taacagccaagcaggaacccgcatc

SEQ ID NO: 786066 - DNA, 25 bp, Homo sapien
ctgacacactgtgcgtgacctggaa

SEQ ID NO: 786067 - DNA, 25 bp, Homo sapien
gatgccttgttagaaagcctctcca

SEQ ID NO: 786068 - DNA, 25 bp, Homo sapien
tgacctggaactagaaatgaccttc

SEQ ID NO: 786069 - DNA, 25 bp, Homo sapien
ctttcgggcactttccaggaggcct

SEQ ID NO: 786070 - DNA, 25 bp, Homo sapien
tacagtctctcgtcaggtcttcgcc

SEQ ID NO: 786071 - DNA, 25 bp, Homo sapien
gatcgtggctgaggcaccatggaat

SEQ ID NO: 786072 - DNA, 25 bp, Homo sapien
caagatctgcactggcacaagaatt

SEQ ID NO: 786073 - DNA, 25 bp, Homo sapien
tttgagtggaaatcaccctgcccag

SEQ ID NO: 786074 - DNA, 25 bp, Homo sapien
cacctgggctattctttctttacct

SEQ ID NO: 786075 - DNA, 25 bp, Homo sapien
tgggtgtcacgcatctctcgggcag

SEQ ID NO: 786076 - DNA, 25 bp, Homo sapien
catctctcgggcagccacggccgcc

SEQ ID NO: 786077 - DNA, 25 bp, Homo sapien
atctctcgggcagccacggccgcct

SEQ ID NO: 786078 - DNA, 25 bp, Homo sapien
tcctgggtgtcacgcatctctcggg

SEQ ID NO: 786079 - DNA, 25 bp, Homo sapien
gcccagcttgcatcgctcaggatga

SEQ ID NO: 786080 - DNA, 25 bp, Homo sapien
caggcccagcttgcatcgctcagga

SEQ ID NO: 786081 - DNA, 25 bp, Homo sapien
ctcttcccttgcgaacactccacgt

SEQ ID NO: 786082 - DNA, 25 bp, Homo sapien
gcttgcatcgctcaggatgacccat

SEQ ID NO: 786083 - DNA, 25 bp, Homo sapien
agcctcaagggatagactcgcctca

SEQ ID NO: 786084 - DNA, 25 bp, Homo sapien
cagctggaacaataggcattcacca

SEQ ID NO: 786085 - DNA, 25 bp, Homo sapien
agcagctggaacaataggcattcac

SEQ ID NO: 786086 - DNA, 25 bp, Homo sapien
actcctagcctcaagggatagactc

SEQ ID NO: 786087 - DNA, 25 bp, Homo sapien
gcctggagtcccggggtcattgccc

SEQ ID NO: 786088 - DNA, 25 bp, Homo sapien
gagtcccggggtcattgcccagcgc

SEQ ID NO: 786089 - DNA, 25 bp, Homo sapien
tggagtcccggggtcattgcccagc

SEQ ID NO: 786090 - DNA, 25 bp, Homo sapien
ctggcctggagtcccggggtcattg

SEQ ID NO: 786091 - DNA, 25 bp, Homo sapien
cagggaagggcttggggccatggcc

SEQ ID NO: 786092 - DNA, 25 bp, Homo sapien
gggaagggcttggggccatggccat

SEQ ID NO: 786093 - DNA, 25 bp, Homo sapien
agggaagggcttggggccatggcca

SEQ ID NO: 786094 - DNA, 25 bp, Homo sapien
ccatagccacagctgcggggctggt

SEQ ID NO: 786095 - DNA, 25 bp, Homo sapien
caggctcccaagcccaaaacgttgg

SEQ ID NO: 786096 - DNA, 25 bp, Homo sapien
ctgggtccagctggggaggtcaata

SEQ ID NO: 786097 - DNA, 25 bp, Homo sapien
gacaaactgctgctcgatgaagctg

SEQ ID NO: 786098 - DNA, 25 bp, Homo sapien
ggtccagctggggaggtcaataatg

SEQ ID NO: 786099 - DNA, 25 bp, Homo sapien
gtagttgacagtgtagttgtacccc

SEQ ID NO: 786100 - DNA, 25 bp, Homo sapien
tctgcgtgtgggtggtgtagttgac

SEQ ID NO: 786101 - DNA, 25 bp, Homo sapien
gtccaggagccatcgtcgctcagcc

SEQ ID NO: 786102 - DNA, 25 bp, Homo sapien
gggccaagtccacgagctggttgcc

SEQ ID NO: 786103 - DNA, 25 bp, Homo sapien
ggaggttggtcatggagtggcggta

SEQ ID NO: 786104 - DNA, 25 bp, Homo sapien
gcccggcggagcgatgatggtggtc

SEQ ID NO: 786105 - DNA, 25 bp, Homo sapien
agcaggcgacgcctgtgtggcccgg

SEQ ID NO: 786106 - DNA, 25 bp, Homo sapien
tggtcatggagtggcggtagcggcc

SEQ ID NO: 786107 - DNA, 25 bp, Homo sapien
aggctggagcggtagaggggctggc

SEQ ID NO: 786108 - DNA, 25 bp, Homo sapien
gtgttcagcctgggcgcagaccggg

SEQ ID NO: 786109 - DNA, 25 bp, Homo sapien
tgactgcaccggaggtggaggatcc

SEQ ID NO: 786110 - DNA, 25 bp, Homo sapien
cgcagaccgggccccggagagtgag

SEQ ID NO: 786111 - DNA, 25 bp, Homo sapien
gtccctatagtcatggcctcaggca

SEQ ID NO: 786112 - DNA, 25 bp, Homo sapien
tcctcagagggctcggacctgcaga

SEQ ID NO: 786113 - DNA, 25 bp, Homo sapien
gaaacgtgagacatgaggactccga

SEQ ID NO: 786114 - DNA, 25 bp, Homo sapien
gacctgcagaacgttcccagatggg

SEQ ID NO: 786115 - DNA, 25 bp, Homo sapien
gaaatttggcactgcaagtctacaa

SEQ ID NO: 786116 - DNA, 25 bp, Homo sapien
aagtgaaggcattcaggaccctcta

SEQ ID NO: 786117 - DNA, 25 bp, Homo sapien
tctgcaactctaaggttccataagt

SEQ ID NO: 786118 - DNA, 25 bp, Homo sapien
cagaaaaatcccaggaagtgaggtc

SEQ ID NO: 786119 - DNA, 25 bp, Homo sapien
ttggcatctgcatgggcacagtggc

SEQ ID NO: 786120 - DNA, 25 bp, Homo sapien
tttggcatctgcatgggcacagtgg

SEQ ID NO: 786121 - DNA, 25 bp, Homo sapien
tggcatctgcatgggcacagtggca

SEQ ID NO: 786122 - DNA, 25 bp, Homo sapien
tttccatagtgccagctccccggtc

SEQ ID NO: 786123 - DNA, 25 bp, Homo sapien
tcggcctaccccactttccatagtg

SEQ ID NO: 786124 - DNA, 25 bp, Homo sapien
gtgtcctgctggacgaacccgttcc

SEQ ID NO: 786125 - DNA, 25 bp, Homo sapien
tccctgatgacccagcgcttcctgg

SEQ ID NO: 786126 - DNA, 25 bp, Homo sapien
gtgagagcagacacgcagagaggga

SEQ ID NO: 786127 - DNA, 25 bp, Homo sapien
ctgcacgggcgtgagagcagacacg

SEQ ID NO: 786128 - DNA, 25 bp, Homo sapien
attagaagactccttcggcatgtga

SEQ ID NO: 786129 - DNA, 25 bp, Homo sapien
cttcggcatgtgacgccaacaaacc

SEQ ID NO: 786130 - DNA, 25 bp, Homo sapien
tttggaagccagacgggaggcggga

SEQ ID NO: 786131 - DNA, 25 bp, Homo sapien
aactgagccgtgacttttggaagcc

SEQ ID NO: 786132 - DNA, 25 bp, Homo sapien
cacacagggagtccaatggctgaca

SEQ ID NO: 786133 - DNA, 25 bp, Homo sapien
tggctgacatcagaacactcgtcat

SEQ ID NO: 786134 - DNA, 25 bp, Homo sapien
gagaagggctgcatctccataaaca

SEQ ID NO: 786135 - DNA, 25 bp, Homo sapien
tgacggcctcactcgctgtctgtgc

SEQ ID NO: 786136 - DNA, 25 bp, Homo sapien
taaagcctctcctacggacaagaag

SEQ ID NO: 786137 - DNA, 25 bp, Homo sapien
tctaggtagtgggagtagcagaacc

SEQ ID NO: 786138 - DNA, 25 bp, Homo sapien
catgcagactagctcctaagtccag

SEQ ID NO: 786139 - DNA, 25 bp, Homo sapien
tgtcccgggaaacgcctgccactga

SEQ ID NO: 786140 - DNA, 25 bp, Homo sapien
actgggaaggtctgtcacatgcaga

SEQ ID NO: 786141 - DNA, 25 bp, Homo sapien
cgggaaacgcctgccactgactggg

SEQ ID NO: 786142 - DNA, 25 bp, Homo sapien
cagcacagtctcctgggagccgcat

SEQ ID NO: 786143 - DNA, 25 bp, Homo sapien
cagcagcacagtctcctgggagccg

SEQ ID NO: 786144 - DNA, 25 bp, Homo sapien
agaaacagcagcacagtctcctggg

SEQ ID NO: 786145 - DNA, 25 bp, Homo sapien
tcagccccaggagccatggaggatg

SEQ ID NO: 786146 - DNA, 25 bp, Homo sapien
gaggaaggcaaggaagaggtctaag

SEQ ID NO: 786147 - DNA, 25 bp, Homo sapien
ggaggccagagggcgaggaaggcaa

SEQ ID NO: 786148 - DNA, 25 bp, Homo sapien
gaggaggccagagggcgaggaaggc

SEQ ID NO: 786149 - DNA, 25 bp, Homo sapien
gagaggaggccagagggcgaggaag

SEQ ID NO: 786150 - DNA, 25 bp, Homo sapien
tagaagagagaagtacataagcagc

SEQ ID NO: 786151 - DNA, 25 bp, Homo sapien
agaagagagaagtacataagcagcg

SEQ ID NO: 786152 - DNA, 25 bp, Homo sapien
ctagaagagagaagtacataagcag

SEQ ID NO: 786153 - DNA, 25 bp, Homo sapien
gaagagagaagtacataagcagcgt

SEQ ID NO: 786154 - DNA, 25 bp, Homo sapien
actttcagctcttccgtgtagtttt

SEQ ID NO: 786155 - DNA, 25 bp, Homo sapien
ctttcagctcttccgtgtagttttt

SEQ ID NO: 786156 - DNA, 25 bp, Homo sapien
gctgtcagtcacatcgctgtatcca

SEQ ID NO: 786157 - DNA, 25 bp, Homo sapien
gtcacatcgctgtatccagacgctg

SEQ ID NO: 786158 - DNA, 25 bp, Homo sapien
cttattgccgttgcagtacatggcc

SEQ ID NO: 786159 - DNA, 25 bp, Homo sapien
gttgcagtacatggccaggaggcac

SEQ ID NO: 786160 - DNA, 25 bp, Homo sapien
tctccacgggtgaatcgcatttgca

SEQ ID NO: 786161 - DNA, 25 bp, Homo sapien
accatcagatggtaaagggccccgg

SEQ ID NO: 786162 - DNA, 25 bp, Homo sapien
tttgcagtcggatagacagccttgc

SEQ ID NO: 786163 - DNA, 25 bp, Homo sapien
gaaagctttgttttgcaccagcaac

SEQ ID NO: 786164 - DNA, 25 bp, Homo sapien
tatgaggatggtcccgcagtcctcg

SEQ ID NO: 786165 - DNA, 25 bp, Homo sapien
tggaaccgtaatacctccatctttc

SEQ ID NO: 786166 - DNA, 25 bp, Homo sapien
caggagggacactgcagacttccat

SEQ ID NO: 786167 - DNA, 25 bp, Homo sapien
gggagcgacatctggaaccgtaata

SEQ ID NO: 786168 - DNA, 25 bp, Homo sapien
agaaggcccctcatctggatgccat

SEQ ID NO: 786169 - DNA, 25 bp, Homo sapien
caagaaggcccctcatctggatgcc

SEQ ID NO: 786170 - DNA, 25 bp, Homo sapien
aagaaggcccctcatctggatgcca

SEQ ID NO: 786171 - DNA, 25 bp, Homo sapien
tcaagaaggcccctcatctggatgc

SEQ ID NO: 786172 - DNA, 25 bp, Homo sapien
gagggccagccttttgctgccacag

SEQ ID NO: 786173 - DNA, 25 bp, Homo sapien
ccagaacaagtccagctaagatggc

SEQ ID NO: 786174 - DNA, 25 bp, Homo sapien
taagagcttaccctaagccccggca

SEQ ID NO: 786175 - DNA, 25 bp, Homo sapien
gttcaggaaagagtggagggccagc

SEQ ID NO: 786176 - DNA, 25 bp, Homo sapien
tcctcccccgctccgagatgccaac

SEQ ID NO: 786177 - DNA, 25 bp, Homo sapien
ccccgctccgagatgccaaccccga

SEQ ID NO: 786178 - DNA, 25 bp, Homo sapien
gctcctcccccgctccgagatgcca

SEQ ID NO: 786179 - DNA, 25 bp, Homo sapien
ccgctccgagatgccaaccccgaat

SEQ ID NO: 786180 - DNA, 25 bp, Homo sapien
gcgggaggaacagacaccaggatag

SEQ ID NO: 786181 - DNA, 25 bp, Homo sapien
gaggaacagacaccaggatagggtg

SEQ ID NO: 786182 - DNA, 25 bp, Homo sapien
gggaggaacagacaccaggataggg

SEQ ID NO: 786183 - DNA, 25 bp, Homo sapien
ctgcgggaggaacagacaccaggat

SEQ ID NO: 786184 - DNA, 25 bp, Homo sapien
ttgtctggaaggtagcactggcggg

SEQ ID NO: 786185 - DNA, 25 bp, Homo sapien
cactggcggggaaaccctctggcag

SEQ ID NO: 786186 - DNA, 25 bp, Homo sapien
cggccctgggcgttgtctggaaggt

SEQ ID NO: 786187 - DNA, 25 bp, Homo sapien
cggctttccgggattggggtgctca

SEQ ID NO: 786188 - DNA, 25 bp, Homo sapien
ccccggggcgcatggtggcactcac

SEQ ID NO: 786189 - DNA, 25 bp, Homo sapien
tgccgcctggtcagggccccgtcca

SEQ ID NO: 786190 - DNA, 25 bp, Homo sapien
gccgcctggtcagggccccgtccac

SEQ ID NO: 786191 - DNA, 25 bp, Homo sapien
gggcgcccagggtccaatcactcca

SEQ ID NO: 786192 - DNA, 25 bp, Homo sapien
tggccacgggggacaaaaggtgagc

SEQ ID NO: 786193 - DNA, 25 bp, Homo sapien
ggcgcccagggtccaatcactccag

SEQ ID NO: 786194 - DNA, 25 bp, Homo sapien
gcccagggtccaatcactccagcag

SEQ ID NO: 786195 - DNA, 25 bp, Homo sapien
gtatcgctggcgctggcaagcccat

SEQ ID NO: 786196 - DNA, 25 bp, Homo sapien
caccacgagccagacggtatcgctg

SEQ ID NO: 786197 - DNA, 25 bp, Homo sapien
atcgaagacacagcgcggctgctcc

SEQ ID NO: 786198 - DNA, 25 bp, Homo sapien
ctggcaagcccatcgaagacacagc

SEQ ID NO: 786199 - DNA, 25 bp, Homo sapien
gaggccggaatgtcagccagtgtct

SEQ ID NO: 786200 - DNA, 25 bp, Homo sapien
cagtgtctccgggttctggaagccc

SEQ ID NO: 786201 - DNA, 25 bp, Homo sapien
gcagcgtcatgtagtggccatcggt

SEQ ID NO: 786202 - DNA, 25 bp, Homo sapien
tagtggccatcggtcagcagctgtg

SEQ ID NO: 786203 - DNA, 25 bp, Homo sapien
gctcggtttgtctctttgcagggct

SEQ ID NO: 786204 - DNA, 25 bp, Homo sapien
gaggggctcggtttgtctctttgca

SEQ ID NO: 786205 - DNA, 25 bp, Homo sapien
gggctcggtttgtctctttgcaggg

SEQ ID NO: 786206 - DNA, 25 bp, Homo sapien
cgcagaggggctcggtttgtctctt

SEQ ID NO: 786207 - DNA, 25 bp, Homo sapien
actgtggtggtgcactcacttgcaa

SEQ ID NO: 786208 - DNA, 25 bp, Homo sapien
cacagaagaccccaatttttgcatt

SEQ ID NO: 786209 - DNA, 25 bp, Homo sapien
gggccttgccgtaaagcaaactgtg

SEQ ID NO: 786210 - DNA, 25 bp, Homo sapien
aatttttgcattcacgcccaggcca

SEQ ID NO: 786211 - DNA, 25 bp, Homo sapien
gccaatggattttgtggtgtttccc

SEQ ID NO: 786212 - DNA, 25 bp, Homo sapien
ggccaatggattttgtggtgtttcc

SEQ ID NO: 786213 - DNA, 25 bp, Homo sapien
atctgcaagtcattaccccgcaaca

SEQ ID NO: 786214 - DNA, 25 bp, Homo sapien
tgcaagtcattaccccgcaacagtt

SEQ ID NO: 786215 - DNA, 25 bp, Homo sapien
cattaccccgcaacagttgctgttt

SEQ ID NO: 786216 - DNA, 25 bp, Homo sapien
ctgctgccatccgaattcctttgat

SEQ ID NO: 786217 - DNA, 25 bp, Homo sapien
gaaatgggtggcttagacactccag

SEQ ID NO: 786218 - DNA, 25 bp, Homo sapien
tggacatggagagttcagctagaga

SEQ ID NO: 786219 - DNA, 25 bp, Homo sapien
cactccagggaggtaaagcgatcgc

SEQ ID NO: 786220 - DNA, 25 bp, Homo sapien
gctagagaggaaccacggacatccc

SEQ ID NO: 786221 - DNA, 25 bp, Homo sapien
cacccggcccacctggataacttct

SEQ ID NO: 786222 - DNA, 25 bp, Homo sapien
gcacccggcccacctggataacttc

SEQ ID NO: 786223 - DNA, 25 bp, Homo sapien
attttatagagattagatgttggta

SEQ ID NO: 786224 - DNA, 25 bp, Homo sapien
gactgttttctactaactccttcac

SEQ ID NO: 786225 - DNA, 25 bp, Homo sapien
tgcagtgcttagactcagtaccact

SEQ ID NO: 786226 - DNA, 25 bp, Homo sapien
tttctactaactccttcactgcagt

SEQ ID NO: 786227 - DNA, 25 bp, Homo sapien
tgttttctactaactccttcactgc

SEQ ID NO: 786228 - DNA, 25 bp, Homo sapien
tagttgtaaagaccgttgcactttg

SEQ ID NO: 786229 - DNA, 25 bp, Homo sapien
cctgaaacttcaatgagatccattc

SEQ ID NO: 786230 - DNA, 25 bp, Homo sapien
ccattgcctgaaacttcaatgagat

SEQ ID NO: 786231 - DNA, 25 bp, Homo sapien
cacatccattgcctgaaacttcaat

SEQ ID NO: 786232 - DNA, 25 bp, Homo sapien
cattccatagtccttaagctttaga

SEQ ID NO: 786233 - DNA, 25 bp, Homo sapien
tcagagctttcccccgaaagccaaa

SEQ ID NO: 786234 - DNA, 25 bp, Homo sapien
aactcttgaatcttagatgtgtgat

SEQ ID NO: 786235 - DNA, 25 bp, Homo sapien
cccgagttaggtcggcaaactcttg

SEQ ID NO: 786236 - DNA, 25 bp, Homo sapien
cagtgcacaaagtgagctcagagct

SEQ ID NO: 786237 - DNA, 25 bp, Homo sapien
atgttgggcactgactactcttttc

SEQ ID NO: 786238 - DNA, 25 bp, Homo sapien
tgttgggcactgactactcttttct

SEQ ID NO: 786239 - DNA, 25 bp, Homo sapien
tgatgttgggcactgactactcttt

SEQ ID NO: 786240 - DNA, 25 bp, Homo sapien
gatgttgggcactgactactctttt

SEQ ID NO: 786241 - DNA, 25 bp, Homo sapien
tcgccgatacgtggcaggtagaaat

SEQ ID NO: 786242 - DNA, 25 bp, Homo sapien
atcgtgatcaaacaccagtcgagtc

SEQ ID NO: 786243 - DNA, 25 bp, Homo sapien
gagtcccaaccttcgccgatacgtg

SEQ ID NO: 786244 - DNA, 25 bp, Homo sapien
cgtgatcaaacaccagtcgagtccc

SEQ ID NO: 786245 - DNA, 25 bp, Homo sapien
tatggcgcacaggtagcgtagaaaa

SEQ ID NO: 786246 - DNA, 25 bp, Homo sapien
ttccttatggcgcacaggtagcgta

SEQ ID NO: 786247 - DNA, 25 bp, Homo sapien
ggcgcacaggtagcgtagaaaataa

SEQ ID NO: 786248 - DNA, 25 bp, Homo sapien
ttgaaattccttatggcgcacaggt

SEQ ID NO: 786249 - DNA, 25 bp, Homo sapien
ctcacagtctgaagtgtagtgacgc

SEQ ID NO: 786250 - DNA, 25 bp, Homo sapien
tcttactctgtctcacagtctgaag

SEQ ID NO: 786251 - DNA, 25 bp, Homo sapien
gtgcgcgcctgtaatggtagctact

SEQ ID NO: 786252 - DNA, 25 bp, Homo sapien
gcagccagggcgccaaagtgagact

SEQ ID NO: 786253 - DNA, 25 bp, Homo sapien
caattgccatcgacctgcaggttga

SEQ ID NO: 786254 - DNA, 25 bp, Homo sapien
caccgtggagtggaacctaagagct

SEQ ID NO: 786255 - DNA, 25 bp, Homo sapien
gtgcatgcccaggttaaccacgcgt

SEQ ID NO: 786256 - DNA, 25 bp, Homo sapien
tcagcctgaagagctcggaccgatt

SEQ ID NO: 786257 - DNA, 25 bp, Homo sapien
ctcgtggccactgttccgttacttt

SEQ ID NO: 786258 - DNA, 25 bp, Homo sapien
ctgttggggcccctcgtggccactg

SEQ ID NO: 786259 - DNA, 25 bp, Homo sapien
gcccctcgtggccactgttccgtta

SEQ ID NO: 786260 - DNA, 25 bp, Homo sapien
tctgttggggcccctcgtggccact

SEQ ID NO: 786261 - DNA, 25 bp, Homo sapien
gcaggaggtgctgcatgcttctaaa

SEQ ID NO: 786262 - DNA, 25 bp, Homo sapien
ggaggtgctgcatgcttctaaacaa

SEQ ID NO: 786263 - DNA, 25 bp, Homo sapien
agcaggaggtgctgcatgcttctaa

SEQ ID NO: 786264 - DNA, 25 bp, Homo sapien
ggtgctgcatgcttctaaacaacca

SEQ ID NO: 786265 - DNA, 25 bp, Homo sapien
ctggggagccctcaagaagctgaca

SEQ ID NO: 786266 - DNA, 25 bp, Homo sapien
gagccctcaagaagctgacaatcac

SEQ ID NO: 786267 - DNA, 25 bp, Homo sapien
ccctcaagaagctgacaatcacggc

SEQ ID NO: 786268 - DNA, 25 bp, Homo sapien
gggagccctcaagaagctgacaatc

SEQ ID NO: 786269 - DNA, 25 bp, Homo sapien
acagatgactgcagtccactgccaa

SEQ ID NO: 786270 - DNA, 25 bp, Homo sapien
cagtccactgccaaggtcatcaaag

SEQ ID NO: 786271 - DNA, 25 bp, Homo sapien
ctaaacagatgactgcagtccactg

SEQ ID NO: 786272 - DNA, 25 bp, Homo sapien
gactgcagtccactgccaaggtcat

SEQ ID NO: 786273 - DNA, 25 bp, Homo sapien
tcacctccgcgttcaagcaaattct

SEQ ID NO: 786274 - DNA, 25 bp, Homo sapien
acaggcatccgcctgtacgtctgac

SEQ ID NO: 786275 - DNA, 25 bp, Homo sapien
gtgcccagaccccaagctagagttt

SEQ ID NO: 786276 - DNA, 25 bp, Homo sapien
tccgcctgtacgtctgactaacttt

SEQ ID NO: 786277 - DNA, 25 bp, Homo sapien
gtgcaagggctcagattggcacaga

SEQ ID NO: 786278 - DNA, 25 bp, Homo sapien
agtgcaagggctcagattggcacag

SEQ ID NO: 786279 - DNA, 25 bp, Homo sapien
ccatttgtgcagatcatctagaaga

SEQ ID NO: 786280 - DNA, 25 bp, Homo sapien
atttgtgcagatcatctagaagaac

SEQ ID NO: 786281 - DNA, 25 bp, Homo sapien
catttgtgcagatcatctagaagaa

SEQ ID NO: 786282 - DNA, 25 bp, Homo sapien
tttgtgcagatcatctagaagaacc

SEQ ID NO: 786283 - DNA, 25 bp, Homo sapien
tgtacgaggagacccgctctcatat

SEQ ID NO: 786284 - DNA, 25 bp, Homo sapien
gaggagacccgctctcatataccct

SEQ ID NO: 786285 - DNA, 25 bp, Homo sapien
tctacttcctgtacgaggagacccg

SEQ ID NO: 786286 - DNA, 25 bp, Homo sapien
catgagccacgtctggcgtattttt

SEQ ID NO: 786287 - DNA, 25 bp, Homo sapien
gggtgtgtgggaagaatggagaaat

SEQ ID NO: 786288 - DNA, 25 bp, Homo sapien
aagaatggagaaattcaggctgggt

SEQ ID NO: 786289 - DNA, 25 bp, Homo sapien
tgtgtgggaagaatggagaaattca

SEQ ID NO: 786290 - DNA, 25 bp, Homo sapien
tgggaagaatggagaaattcaggct

SEQ ID NO: 786291 - DNA, 25 bp, Homo sapien
cagaacagagactaggtttggtgag

SEQ ID NO: 786292 - DNA, 25 bp, Homo sapien
tgggaaagatcatgatgagccatca

SEQ ID NO: 786293 - DNA, 25 bp, Homo sapien
tctcccagcctcgagaattgataac

SEQ ID NO: 786294 - DNA, 25 bp, Homo sapien
gatcccagcagtgtccagaagaaga

SEQ ID NO: 786295 - DNA, 25 bp, Homo sapien
cccagtatcttatagaatatccata

SEQ ID NO: 786296 - DNA, 25 bp, Homo sapien
aaccatttccttcaatggtataaat

SEQ ID NO: 786297 - DNA, 25 bp, Homo sapien
tagtctttttgtacacccagtatct

SEQ ID NO: 786298 - DNA, 25 bp, Homo sapien
tgtacacccagtatcttatagaata

SEQ ID NO: 786299 - DNA, 25 bp, Homo sapien
tttgcgttaacacaagtcatccaca

SEQ ID NO: 786300 - DNA, 25 bp, Homo sapien
gacgagcagcatcttatttgcgtta

SEQ ID NO: 786301 - DNA, 25 bp, Homo sapien
gtctcatcgaataattgaagccagt

SEQ ID NO: 786302 - DNA, 25 bp, Homo sapien
caggacttgctataacaggttgcca

SEQ ID NO: 786303 - DNA, 25 bp, Homo sapien
tatctagtatccacatggagaaaac

SEQ ID NO: 786304 - DNA, 25 bp, Homo sapien
gagaaaacatacattgtatctctca

SEQ ID NO: 786305 - DNA, 25 bp, Homo sapien
tggagaaaacatacattgtatctct

SEQ ID NO: 786306 - DNA, 25 bp, Homo sapien
gaaaacatacattgtatctctcaaa

SEQ ID NO: 786307 - DNA, 25 bp, Homo sapien
gcaaatctgatggactgacttccga

SEQ ID NO: 786308 - DNA, 25 bp, Homo sapien
ctgcccagagcaaatctgatggact

SEQ ID NO: 786309 - DNA, 25 bp, Homo sapien
gactgacttccgatcaataggtttg

SEQ ID NO: 786310 - DNA, 25 bp, Homo sapien
ccgatcaataggtttgatggcctta

SEQ ID NO: 786311 - DNA, 25 bp, Homo sapien
gttttctactatcttcttcatccag

SEQ ID NO: 786312 - DNA, 25 bp, Homo sapien
ctgttttctactatcttcttcatcc

SEQ ID NO: 786313 - DNA, 25 bp, Homo sapien
ttctactatcttcttcatccagtgc

SEQ ID NO: 786314 - DNA, 25 bp, Homo sapien
catccagtgcttagactcagtacca

SEQ ID NO: 786315 - DNA, 25 bp, Homo sapien
tagttgtaaagaccgttgcactttg

SEQ ID NO: 786316 - DNA, 25 bp, Homo sapien
cctgaaacttcaatgagatccattc

SEQ ID NO: 786317 - DNA, 25 bp, Homo sapien
cattccatagtccttaagctttaga

SEQ ID NO: 786318 - DNA, 25 bp, Homo sapien
cacatccattgcctgaaacttcaat

SEQ ID NO: 786319 - DNA, 25 bp, Homo sapien
ccattgcctgaaacttcaatgagat

SEQ ID NO: 786320 - DNA, 25 bp, Homo sapien
tcagagctttcccccgaaagccaaa

SEQ ID NO: 786321 - DNA, 25 bp, Homo sapien
cagtgcacaaagtgagctcagagct

SEQ ID NO: 786322 - DNA, 25 bp, Homo sapien
cccgagttaggtcggcaaactcttg

SEQ ID NO: 786323 - DNA, 25 bp, Homo sapien
aactcttgaatcttagatgtgtgat

SEQ ID NO: 786324 - DNA, 25 bp, Homo sapien
ttcagaagtactaggacttagattg

SEQ ID NO: 786325 - DNA, 25 bp, Homo sapien
tcagaagtactaggacttagattgg

SEQ ID NO: 786326 - DNA, 25 bp, Homo sapien
tttcagaagtactaggacttagatt

SEQ ID NO: 786327 - DNA, 25 bp, Homo sapien
atttcagaagtactaggacttagat

SEQ ID NO: 786328 - DNA, 25 bp, Homo sapien
tcgtgatcaaacaccagtcgagtcc

SEQ ID NO: 786329 - DNA, 25 bp, Homo sapien
ttccttatggcgcacaggtagcgta

SEQ ID NO: 786330 - DNA, 25 bp, Homo sapien
cgtagaaaataactgcttcacgctg

SEQ ID NO: 786331 - DNA, 25 bp, Homo sapien
tcgccgatacgtggcaggtagaaat

SEQ ID NO: 786332 - DNA, 25 bp, Homo sapien
gcgcgcgcctgtaatggtagctact

SEQ ID NO: 786333 - DNA, 25 bp, Homo sapien
tctgtctcacagtctgaagtgtggt

SEQ ID NO: 786334 - DNA, 25 bp, Homo sapien
gcagccagggcgccaaagtgagact

SEQ ID NO: 786335 - DNA, 25 bp, Homo sapien
ctcacagtctgaagtgtggtgacgc

SEQ ID NO: 786336 - DNA, 25 bp, Homo sapien
cattcaaattcataagggtgccagt

SEQ ID NO: 786337 - DNA, 25 bp, Homo sapien
gggtgccagtaactcatttatcaga

SEQ ID NO: 786338 - DNA, 25 bp, Homo sapien
ctgctttttaaacacgacaattata

SEQ ID NO: 786339 - DNA, 25 bp, Homo sapien
aatataagtacataaggtcaggcat

SEQ ID NO: 786340 - DNA, 25 bp, Homo sapien
gtgcatgcccaggttaaccacgcgt

SEQ ID NO: 786341 - DNA, 25 bp, Homo sapien
caattgccatcgacctgcaggttga

SEQ ID NO: 786342 - DNA, 25 bp, Homo sapien
caccgtggagtggaacctaagagct

SEQ ID NO: 786343 - DNA, 25 bp, Homo sapien
tcagcctgaagagctcggaccgatt

SEQ ID NO: 786344 - DNA, 25 bp, Homo sapien
gagccctcaagaagctgacaatcac

SEQ ID NO: 786345 - DNA, 25 bp, Homo sapien
ctggggagccctcaagaagctgaca

SEQ ID NO: 786346 - DNA, 25 bp, Homo sapien
ccctcaagaagctgacaatcacggc

SEQ ID NO: 786347 - DNA, 25 bp, Homo sapien
gggagccctcaagaagctgacaatc

SEQ ID NO: 786348 - DNA, 25 bp, Homo sapien
ctgccaaggtcatcaaaggggtgac

SEQ ID NO: 786349 - DNA, 25 bp, Homo sapien
tgccaaggtcatcaaaggggtgact

SEQ ID NO: 786350 - DNA, 25 bp, Homo sapien
acagacagaaatatcggcattgaca

SEQ ID NO: 786351 - DNA, 25 bp, Homo sapien
tatcggcattgacacgggccatgga

SEQ ID NO: 786352 - DNA, 25 bp, Homo sapien
gaaatatcggcattgacacgggcca

SEQ ID NO: 786353 - DNA, 25 bp, Homo sapien
cagaaatatcggcattgacacgggc

SEQ ID NO: 786354 - DNA, 25 bp, Homo sapien
tggaattggggtcttgcgctgtcac

SEQ ID NO: 786355 - DNA, 25 bp, Homo sapien
gcctcaggctcaagctcaagctcaa

SEQ ID NO: 786356 - DNA, 25 bp, Homo sapien
tgaaagacaggcactctgccatgaa

SEQ ID NO: 786357 - DNA, 25 bp, Homo sapien
cagagattgtgtctcctcacgccct

SEQ ID NO: 786358 - DNA, 25 bp, Homo sapien
tttgaaaaacatgggtatagaatta

SEQ ID NO: 786359 - DNA, 25 bp, Homo sapien
gatatatatactaacacgtctaata

SEQ ID NO: 786360 - DNA, 25 bp, Homo sapien
attttgaaaaacatgggtatagaat

SEQ ID NO: 786361 - DNA, 25 bp, Homo sapien
atttgtgcagatcatctagaagaac

SEQ ID NO: 786362 - DNA, 25 bp, Homo sapien
ccatttgtgcagatcatctagaaga

SEQ ID NO: 786363 - DNA, 25 bp, Homo sapien
tttgtgcagatcatctagaagaacc

SEQ ID NO: 786364 - DNA, 25 bp, Homo sapien
catttgtgcagatcatctagaagaa

SEQ ID NO: 786365 - DNA, 25 bp, Homo sapien
actctcggccaccagttgggctttt

SEQ ID NO: 786366 - DNA, 25 bp, Homo sapien
cagtcctgagctagggacagtccct

SEQ ID NO: 786367 - DNA, 25 bp, Homo sapien
ccactctcggccaccagttgggctt

SEQ ID NO: 786368 - DNA, 25 bp, Homo sapien
caccactctcggccaccagttgggc

SEQ ID NO: 786369 - DNA, 25 bp, Homo sapien
ccgtagctctctagttacatcctgg

SEQ ID NO: 786370 - DNA, 25 bp, Homo sapien
tagctctctagttacatcctggaca

SEQ ID NO: 786371 - DNA, 25 bp, Homo sapien
cgtagctctctagttacatcctgga

SEQ ID NO: 786372 - DNA, 25 bp, Homo sapien
gtagctctctagttacatcctggac

SEQ ID NO: 786373 - DNA, 25 bp, Homo sapien
cctcattccccctctccacaatctt

SEQ ID NO: 786374 - DNA, 25 bp, Homo sapien
tcccttctctgatgggcagcccctc

SEQ ID NO: 786375 - DNA, 25 bp, Homo sapien
ccaacactgaggtcccttctctgat

SEQ ID NO: 786376 - DNA, 25 bp, Homo sapien
cttcctcttccaagatgtgacctct

SEQ ID NO: 786377 - DNA, 25 bp, Homo sapien
cagctcccacggtcttgagtcttgg

SEQ ID NO: 786378 - DNA, 25 bp, Homo sapien
tgagtcttggcacccacacattttt

SEQ ID NO: 786379 - DNA, 25 bp, Homo sapien
actgtgcccgaccagctcccacggt

SEQ ID NO: 786380 - DNA, 25 bp, Homo sapien
cttgagtcttggcacccacacattt

SEQ ID NO: 786381 - DNA, 25 bp, Homo sapien
tcaaaatgtctcttggactcaaaat

SEQ ID NO: 786382 - DNA, 25 bp, Homo sapien
tcagtattcctgggatctcttgtac

SEQ ID NO: 786383 - DNA, 25 bp, Homo sapien
gtctcttggactcaaaattgcctta

SEQ ID NO: 786384 - DNA, 25 bp, Homo sapien
ggcttaggtaatccatggattccct

SEQ ID NO: 786385 - DNA, 25 bp, Homo sapien
ctcaagtcctcctgccccgacctcc

SEQ ID NO: 786386 - DNA, 25 bp, Homo sapien
tctggagatggggtgctcgctatgt

SEQ ID NO: 786387 - DNA, 25 bp, Homo sapien
tctcaaactctaggcctcaagtcct

SEQ ID NO: 786388 - DNA, 25 bp, Homo sapien
tttttctggagatggggtgctcgct

SEQ ID NO: 786389 - DNA, 25 bp, Homo sapien
gagggtcatggagtctttcacgcct

SEQ ID NO: 786390 - DNA, 25 bp, Homo sapien
tgtgtattcaggtcaacttctggaa

SEQ ID NO: 786391 - DNA, 25 bp, Homo sapien
tgtaactcactagtgggctgtgtcc

SEQ ID NO: 786392 - DNA, 25 bp, Homo sapien
tgttctgtaaatgatccctctcgag

SEQ ID NO: 786393 - DNA, 25 bp, Homo sapien
ataatgtgcacctgaatgatcactg

SEQ ID NO: 786394 - DNA, 25 bp, Homo sapien
ccatccaacaactgcaggatacatt

SEQ ID NO: 786395 - DNA, 25 bp, Homo sapien
aactgaaggacaatagtgacacagc

SEQ ID NO: 786396 - DNA, 25 bp, Homo sapien
actgcaggatacattctattcaaca

SEQ ID NO: 786397 - DNA, 25 bp, Homo sapien
tttgagtcaacactgccggaaacta

SEQ ID NO: 786398 - DNA, 25 bp, Homo sapien
cagagaatacagtacagtgggatca

SEQ ID NO: 786399 - DNA, 25 bp, Homo sapien
caagggtaatataaagcatggtctc

SEQ ID NO: 786400 - DNA, 25 bp, Homo sapien
tatattaagagcattgggaagccct

SEQ ID NO: 786401 - DNA, 25 bp, Homo sapien
ggtgaatttacgctgcaacccacat

SEQ ID NO: 786402 - DNA, 25 bp, Homo sapien
tcacaagtcctgtactacgatgagg

SEQ ID NO: 786403 - DNA, 25 bp, Homo sapien
gaagcttaagctgatgttagccaga

SEQ ID NO: 786404 - DNA, 25 bp, Homo sapien
tctagctccagttaggaagaccaag

SEQ ID NO: 786405 - DNA, 25 bp, Homo sapien
tacatttagacatatcaagccctac

SEQ ID NO: 786406 - DNA, 25 bp, Homo sapien
ttcttaatggttagcaaagacatcc

SEQ ID NO: 786407 - DNA, 25 bp, Homo sapien
tgttcataaagttagcacacttgaa

SEQ ID NO: 786408 - DNA, 25 bp, Homo sapien
atgttttcttctactgggaccatgt

SEQ ID NO: 786409 - DNA, 25 bp, Homo sapien
ttaaagattcaattgccatgggaga

SEQ ID NO: 786410 - DNA, 25 bp, Homo sapien
cccttgaacttgagatactggttga

SEQ ID NO: 786411 - DNA, 25 bp, Homo sapien
gggtcatcgaccacatagggaaatt

SEQ ID NO: 786412 - DNA, 25 bp, Homo sapien
taggagcacttcttagtatcagcaa

SEQ ID NO: 786413 - DNA, 25 bp, Homo sapien
gattccttgcacttgatccctatcc

SEQ ID NO: 786414 - DNA, 25 bp, Homo sapien
tctttgatcgtgaatgagtgttgaa

SEQ ID NO: 786415 - DNA, 25 bp, Homo sapien
tagtgatgagagtgtgattccttgc

SEQ ID NO: 786416 - DNA, 25 bp, Homo sapien
taatatgaccaactatactgactga

SEQ ID NO: 786417 - DNA, 25 bp, Homo sapien
gtgtggctcaatgtctgatctcttg

SEQ ID NO: 786418 - DNA, 25 bp, Homo sapien
gatttatttggtgagccttatgcca

SEQ ID NO: 786419 - DNA, 25 bp, Homo sapien
tcaaatgactatataagtgtggctc

SEQ ID NO: 786420 - DNA, 25 bp, Homo sapien
taataggtcctttgattttccagtc

SEQ ID NO: 786421 - DNA, 25 bp, Homo sapien
aatagaaactggagtctactagatg

SEQ ID NO: 786422 - DNA, 25 bp, Homo sapien
gggtaaacattggataattatggac

SEQ ID NO: 786423 - DNA, 25 bp, Homo sapien
cactcaacatattcactgaagctct

SEQ ID NO: 786424 - DNA, 25 bp, Homo sapien
gcagcatggatgcggttggaagcca

SEQ ID NO: 786425 - DNA, 25 bp, Homo sapien
aaatctggcagtggtcttaacttcc

SEQ ID NO: 786426 - DNA, 25 bp, Homo sapien
gacctcttgccttgatactagcaat

SEQ ID NO: 786427 - DNA, 25 bp, Homo sapien
cctgaacgtcatctgtaatgtgtcc

SEQ ID NO: 786428 - DNA, 25 bp, Homo sapien
tgttttagaccctcttgacctcttg

SEQ ID NO: 786429 - DNA, 25 bp, Homo sapien
tcctagcctaggtcattatgaagtt

SEQ ID NO: 786430 - DNA, 25 bp, Homo sapien
gatgcttaatttcgaatctggacac

SEQ ID NO: 786431 - DNA, 25 bp, Homo sapien
gaaggacttgtagtcaccgataaat

SEQ ID NO: 786432 - DNA, 25 bp, Homo sapien
aatgtcccaatctgctttaagaagg

SEQ ID NO: 786433 - DNA, 25 bp, Homo sapien
gataaattgctgagtattagttctc

SEQ ID NO: 786434 - DNA, 25 bp, Homo sapien
tctgactctattggagacaatgaaa

SEQ ID NO: 786435 - DNA, 25 bp, Homo sapien
catgatttaaacaaactgattcgat

SEQ ID NO: 786436 - DNA, 25 bp, Homo sapien
tatgttatgatccagaacagtgact

SEQ ID NO: 786437 - DNA, 25 bp, Homo sapien
ccatggtagcattcaggaactggac

SEQ ID NO: 786438 - DNA, 25 bp, Homo sapien
catacagtgtttgggcttagctcca

SEQ ID NO: 786439 - DNA, 25 bp, Homo sapien
cagtgaacttgattgcaaccgcaaa

SEQ ID NO: 786440 - DNA, 25 bp, Homo sapien
gacatttatcgtgctttatgaccga

SEQ ID NO: 786441 - DNA, 25 bp, Homo sapien
gagagcgggcagtgtttagtctcac

SEQ ID NO: 786442 - DNA, 25 bp, Homo sapien
tcatggctggtgaaagtaagtccca

SEQ ID NO: 786443 - DNA, 25 bp, Homo sapien
tgaaacctgtcgttaaagaactcag

SEQ ID NO: 786444 - DNA, 25 bp, Homo sapien
caaagttgggcaggaggtgaaacct

SEQ ID NO: 786445 - DNA, 25 bp, Homo sapien
taccgaagatgggttgctgaaagcc

SEQ ID NO: 786446 - DNA, 25 bp, Homo sapien
gctgaaagccaagtatctttataca

SEQ ID NO: 786447 - DNA, 25 bp, Homo sapien
gcagggaagttctgttactgtatct

SEQ ID NO: 786448 - DNA, 25 bp, Homo sapien
tcatggtaagctgacaaaggcgtaa

SEQ ID NO: 786449 - DNA, 25 bp, Homo sapien
gacctaccagttagcttcccagaga

SEQ ID NO: 786450 - DNA, 25 bp, Homo sapien
tgtaatgcttaccacgatgatgatg

SEQ ID NO: 786451 - DNA, 25 bp, Homo sapien
gttaagagcactatattgagagcca

SEQ ID NO: 786452 - DNA, 25 bp, Homo sapien
acaacgtctggcacatagctaagtc

SEQ ID NO: 786453 - DNA, 25 bp, Homo sapien
gacttgtcctctgaagactcaagag

SEQ ID NO: 786454 - DNA, 25 bp, Homo sapien
tatttgcgtatctgccatcagcatg

SEQ ID NO: 786455 - DNA, 25 bp, Homo sapien
taactcctaggatgatgaattagca

SEQ ID NO: 786456 - DNA, 25 bp, Homo sapien
catgctcctcagttgtgacaaggga

SEQ ID NO: 786457 - DNA, 25 bp, Homo sapien
tgggactagcatcttgcagtctgtt

SEQ ID NO: 786458 - DNA, 25 bp, Homo sapien
ctggctgtgtagaagttcaaagtat

SEQ ID NO: 786459 - DNA, 25 bp, Homo sapien
tagaagttcaaagtattgagggtga

SEQ ID NO: 786460 - DNA, 25 bp, Homo sapien
ttgcaaaattgaaacagagcatggg

SEQ ID NO: 786461 - DNA, 25 bp, Homo sapien
cccttggtcctgatccttatttagg

SEQ ID NO: 786462 - DNA, 25 bp, Homo sapien
tggtcctgatccttatttaggctcc

SEQ ID NO: 786463 - DNA, 25 bp, Homo sapien
gtcctgatccttatttaggctccta

SEQ ID NO: 786464 - DNA, 25 bp, Homo sapien
cctgatccttatttaggctcctatt

SEQ ID NO: 786465 - DNA, 25 bp, Homo sapien
tctatagagacaatcacattttccc

SEQ ID NO: 786466 - DNA, 25 bp, Homo sapien
atctatagagacaatcacattttcc

SEQ ID NO: 786467 - DNA, 25 bp, Homo sapien
taaaaaaatctattgagataagaaa

SEQ ID NO: 786468 - DNA, 25 bp, Homo sapien
tttttagtttgtgagtggtgaatta

SEQ ID NO: 786469 - DNA, 25 bp, Homo sapien
gttgacaggctcttagaaactgaga

SEQ ID NO: 786470 - DNA, 25 bp, Homo sapien
gcattccacaaacgttgatatgttg

SEQ ID NO: 786471 - DNA, 25 bp, Homo sapien
cgttgctgttcaaagcgattactga

SEQ ID NO: 786472 - DNA, 25 bp, Homo sapien
ggattattacaccttcttggacaat

SEQ ID NO: 786473 - DNA, 25 bp, Homo sapien
tctatctccaccatacgaggaataa

SEQ ID NO: 786474 - DNA, 25 bp, Homo sapien
ggaataacaggaagactgttgtctg

SEQ ID NO: 786475 - DNA, 25 bp, Homo sapien
ttgtcaaaattcagcagactatatt

SEQ ID NO: 786476 - DNA, 25 bp, Homo sapien
acctatttgtccactcttttgccag

SEQ ID NO: 786477 - DNA, 25 bp, Homo sapien
tggaatgcctgggtaggtctaaagc

SEQ ID NO: 786478 - DNA, 25 bp, Homo sapien
tgtgcacgttagaaaagtcccactg

SEQ ID NO: 786479 - DNA, 25 bp, Homo sapien
ggtgcaatctagaatcctcacactg

SEQ ID NO: 786480 - DNA, 25 bp, Homo sapien
tcttgcttgctatgaaaatgtgcac

SEQ ID NO: 786481 - DNA, 25 bp, Homo sapien
tctgagtaggtataacatgtgggct

SEQ ID NO: 786482 - DNA, 25 bp, Homo sapien
gggcagcaccttacatgaggcagaa

SEQ ID NO: 786483 - DNA, 25 bp, Homo sapien
caagcactcttgttcagggcgccta

SEQ ID NO: 786484 - DNA, 25 bp, Homo sapien
gatcacacagcaaggattggcagta

SEQ ID NO: 786485 - DNA, 25 bp, Homo sapien
gtttcagataaatcaacaaaccgct

SEQ ID NO: 786486 - DNA, 25 bp, Homo sapien
aaccgctcatcttgaatgttaattg

SEQ ID NO: 786487 - DNA, 25 bp, Homo sapien
tgggcactatggcataaatgggctc

SEQ ID NO: 786488 - DNA, 25 bp, Homo sapien
gggcactatggcataaatgggctct

SEQ ID NO: 786489 - DNA, 25 bp, Homo sapien
tgagttgggttttactgtagtaaca

SEQ ID NO: 786490 - DNA, 25 bp, Homo sapien
tgttgagttgggttttactgtagta

SEQ ID NO: 786491 - DNA, 25 bp, Homo sapien
ttgggttttactgtagtaacatata

SEQ ID NO: 786492 - DNA, 25 bp, Homo sapien
cttccttaacatctctcctaaatgt

SEQ ID NO: 786493 - DNA, 25 bp, Homo sapien
tttcctcattgccaatgccactgtg

SEQ ID NO: 786494 - DNA, 25 bp, Homo sapien
tcctcattgccaatgccactgtgca

SEQ ID NO: 786495 - DNA, 25 bp, Homo sapien
ccttaacatctctcctaaatgtatt

SEQ ID NO: 786496 - DNA, 25 bp, Homo sapien
tctagcttctgcatagttaccgctt

SEQ ID NO: 786497 - DNA, 25 bp, Homo sapien
catagttaccgctttaacatttgcc

SEQ ID NO: 786498 - DNA, 25 bp, Homo sapien
aacatttgccctatatacgcggcct

SEQ ID NO: 786499 - DNA, 25 bp, Homo sapien
ttgccctatatacgcggcctgcata

SEQ ID NO: 786500 - DNA, 25 bp, Homo sapien
catctattcttcaatgtggaaatat

SEQ ID NO: 786501 - DNA, 25 bp, Homo sapien
tgtcatcacaataagctcttgttta

SEQ ID NO: 786502 - DNA, 25 bp, Homo sapien
tataattaggtttatgtttcatgtc

SEQ ID NO: 786503 - DNA, 25 bp, Homo sapien
aagttatgagtaatgtcatcacaat

SEQ ID NO: 786504 - DNA, 25 bp, Homo sapien
catctgctagaaccttttgccttaa

SEQ ID NO: 786505 - DNA, 25 bp, Homo sapien
gagctgatttacctatgactgaggg

SEQ ID NO: 786506 - DNA, 25 bp, Homo sapien
acattagaatcttgtcttggttcca

SEQ ID NO: 786507 - DNA, 25 bp, Homo sapien
ctgataatagtaatgctccaaatga

SEQ ID NO: 786508 - DNA, 25 bp, Homo sapien
gacaatgatcgatatccttctggga

SEQ ID NO: 786509 - DNA, 25 bp, Homo sapien
gctgtactacagttcaggctggtgg

SEQ ID NO: 786510 - DNA, 25 bp, Homo sapien
tgtaagtgaggcacaccctggtggc

SEQ ID NO: 786511 - DNA, 25 bp, Homo sapien
gatcagacccaagcactttaagcca

SEQ ID NO: 786512 - DNA, 25 bp, Homo sapien
ggacctctacttaccatgaacgtga

SEQ ID NO: 786513 - DNA, 25 bp, Homo sapien
gagagttttagcatgccactaaggg

SEQ ID NO: 786514 - DNA, 25 bp, Homo sapien
gaaattccacagacttaatcgccta

SEQ ID NO: 786515 - DNA, 25 bp, Homo sapien
ggacagggcggagatcactttcatt

SEQ ID NO: 786516 - DNA, 25 bp, Homo sapien
tgttgttacccagtacaggagcccc

SEQ ID NO: 786517 - DNA, 25 bp, Homo sapien
ctgcaggctgatgacaacggagacc

SEQ ID NO: 786518 - DNA, 25 bp, Homo sapien
caatgtacttcatggtcgcctggag

SEQ ID NO: 786519 - DNA, 25 bp, Homo sapien
tcagcaggatcgaggaggtgttcaa

SEQ ID NO: 786520 - DNA, 25 bp, Homo sapien
caaactgcgtttgatgagggctatc

SEQ ID NO: 786521 - DNA, 25 bp, Homo sapien
taaaacttgtgatgcaaacgctccc

SEQ ID NO: 786522 - DNA, 25 bp, Homo sapien
tcttcctgtgcgtttctaaaacttg

SEQ ID NO: 786523 - DNA, 25 bp, Homo sapien
gacagtttggataactagctcttac

SEQ ID NO: 786524 - DNA, 25 bp, Homo sapien
tacatgatcagaggtagatctaggg

SEQ ID NO: 786525 - DNA, 25 bp, Homo sapien
gaagtgtaaagagtctgccaacatt

SEQ ID NO: 786526 - DNA, 25 bp, Homo sapien
catgactatcattcctgtatgaggg

SEQ ID NO: 786527 - DNA, 25 bp, Homo sapien
taaattcctccgctacagctacagg

SEQ ID NO: 786528 - DNA, 25 bp, Homo sapien
aacctccacctcctgggttcaagtg

SEQ ID NO: 786529 - DNA, 25 bp, Homo sapien
ctccacctcctgggttcaagtgatt

SEQ ID NO: 786530 - DNA, 25 bp, Homo sapien
ggtggggctgggggatggagtttca

SEQ ID NO: 786531 - DNA, 25 bp, Homo sapien
gtggggctgggggatggagtttcac

SEQ ID NO: 786532 - DNA, 25 bp, Homo sapien
catatgtgtacacaaagagattatc

SEQ ID NO: 786533 - DNA, 25 bp, Homo sapien
aagcagcaaaacatgtaagatgttc

SEQ ID NO: 786534 - DNA, 25 bp, Homo sapien
ctaacagcatacactcatatgtgta

SEQ ID NO: 786535 - DNA, 25 bp, Homo sapien
agcaaaacatgtaagatgttccctg

SEQ ID NO: 786536 - DNA, 25 bp, Homo sapien
caaggtatacttggcttttaacgct

SEQ ID NO: 786537 - DNA, 25 bp, Homo sapien
gtatacttggcttttaacgctgcca

SEQ ID NO: 786538 - DNA, 25 bp, Homo sapien
ctcatcacggcgtcatgcagcaagg

SEQ ID NO: 786539 - DNA, 25 bp, Homo sapien
cgtcatgcagcaaggtatacttggc

SEQ ID NO: 786540 - DNA, 25 bp, Homo sapien
ggaagttaagtcaaagcaccctgca

SEQ ID NO: 786541 - DNA, 25 bp, Homo sapien
tataaactcgcagatgtacacggcc

SEQ ID NO: 786542 - DNA, 25 bp, Homo sapien
tagataagagctatccaggctgggc

SEQ ID NO: 786543 - DNA, 25 bp, Homo sapien
tgtcaaagcgcaagctggaagtgcc

SEQ ID NO: 786544 - DNA, 25 bp, Homo sapien
gcattagagggaactaagtggtcaa

SEQ ID NO: 786545 - DNA, 25 bp, Homo sapien
gagaatggtgagtatttgcaatggc

SEQ ID NO: 786546 - DNA, 25 bp, Homo sapien
tatttgcaatggcattagagggaac

SEQ ID NO: 786547 - DNA, 25 bp, Homo sapien
aactaagtggtcaagatgtaaaatg

SEQ ID NO: 786548 - DNA, 25 bp, Homo sapien
tcctagcagcacgaatgaagagtct

SEQ ID NO: 786549 - DNA, 25 bp, Homo sapien
tagagggagattcctacaaccccag

SEQ ID NO: 786550 - DNA, 25 bp, Homo sapien
gggacataacacgttccaggcatga

SEQ ID NO: 786551 - DNA, 25 bp, Homo sapien
gaaaaaggacatggcggaatctcca

SEQ ID NO: 786552 - DNA, 25 bp, Homo sapien
ggtctagtgaggatagctgctcccc

SEQ ID NO: 786553 - DNA, 25 bp, Homo sapien
gaaaaacagagactcacataatgag

SEQ ID NO: 786554 - DNA, 25 bp, Homo sapien
tttttgtgccaagtcagttgaccct

SEQ ID NO: 786555 - DNA, 25 bp, Homo sapien
gacatgtacatcctcggtggctcct

SEQ ID NO: 786556 - DNA, 25 bp, Homo sapien
taatctgtactgattatggaactct

SEQ ID NO: 786557 - DNA, 25 bp, Homo sapien
tatttgctcagtgaaacgtttggca

SEQ ID NO: 786558 - DNA, 25 bp, Homo sapien
tatcagcttgctgcaggtgaaactg

SEQ ID NO: 786559 - DNA, 25 bp, Homo sapien
gaaacgtttggcattctgtagcagt

SEQ ID NO: 786560 - DNA, 25 bp, Homo sapien
ttcagtgtgccggagagaactgtgc

SEQ ID NO: 786561 - DNA, 25 bp, Homo sapien
gacttttcagtgtgccggagagaac

SEQ ID NO: 786562 - DNA, 25 bp, Homo sapien
gtgccggagagaactgtgcacttac

SEQ ID NO: 786563 - DNA, 25 bp, Homo sapien
ggaaaagacttttcagtgtgccgga

SEQ ID NO: 786564 - DNA, 25 bp, Homo sapien
gaagggcaagggaatgctaataact

SEQ ID NO: 786565 - DNA, 25 bp, Homo sapien
tgactgcagctctcaatgagatggc

SEQ ID NO: 786566 - DNA, 25 bp, Homo sapien
actggtttggtggagtgtgttctct

SEQ ID NO: 786567 - DNA, 25 bp, Homo sapien
ctctggtactgctatagtcatggga

SEQ ID NO: 786568 - DNA, 25 bp, Homo sapien
gtttgcatatgtggtcctgttgctg

SEQ ID NO: 786569 - DNA, 25 bp, Homo sapien
cctgaggaacaatctagtagtagga

SEQ ID NO: 786570 - DNA, 25 bp, Homo sapien
tgatcctgaggaacaatctagtagt

SEQ ID NO: 786571 - DNA, 25 bp, Homo sapien
tagtaggagatgaagtttgcatatg

SEQ ID NO: 786572 - DNA, 25 bp, Homo sapien
tgtgagtcagagtcacataagcaaa

SEQ ID NO: 786573 - DNA, 25 bp, Homo sapien
cctctaactataatgtgagtcagag

SEQ ID NO: 786574 - DNA, 25 bp, Homo sapien
tcagagtcacataagcaaatgtcac

SEQ ID NO: 786575 - DNA, 25 bp, Homo sapien
tggaacccacggtcctctaactata

SEQ ID NO: 786576 - DNA, 25 bp, Homo sapien
catatttctttgagtttaccctgtt

SEQ ID NO: 786577 - DNA, 25 bp, Homo sapien
tgagtttaccctgtttggggctcat

SEQ ID NO: 786578 - DNA, 25 bp, Homo sapien
ttcaccaaacatggggagttttcag

SEQ ID NO: 786579 - DNA, 25 bp, Homo sapien
tctcatggatgcctatagatctgtt

SEQ ID NO: 786580 - DNA, 25 bp, Homo sapien
ggactcccacccaactttgtgaaca

SEQ ID NO: 786581 - DNA, 25 bp, Homo sapien
aattctccacccataccacagtgat

SEQ ID NO: 786582 - DNA, 25 bp, Homo sapien
cacttccctgcttgataaattccca

SEQ ID NO: 786583 - DNA, 25 bp, Homo sapien
cccacttagaggagttatctcagca

SEQ ID NO: 786584 - DNA, 25 bp, Homo sapien
tcctggctttgttatcttctcaaat

SEQ ID NO: 786585 - DNA, 25 bp, Homo sapien
tctcaaattcttttactatgatgat

SEQ ID NO: 786586 - DNA, 25 bp, Homo sapien
ggctttgttatcttctcaaattctt

SEQ ID NO: 786587 - DNA, 25 bp, Homo sapien
gttatcttctcaaattcttttacta

SEQ ID NO: 786588 - DNA, 25 bp, Homo sapien
tagatgccaaatcttctcgtaaatt

SEQ ID NO: 786589 - DNA, 25 bp, Homo sapien
ctttaggacgacctgatgtcccaac

SEQ ID NO: 786590 - DNA, 25 bp, Homo sapien
gatgtcccaacaattcttctagttc

SEQ ID NO: 786591 - DNA, 25 bp, Homo sapien
atttctttacgtaattcttcagtgc

SEQ ID NO: 786592 - DNA, 25 bp, Homo sapien
tcagcaagggttatagaaaagcccc

SEQ ID NO: 786593 - DNA, 25 bp, Homo sapien
gaagctaagtttgtctaacaccgca

SEQ ID NO: 786594 - DNA, 25 bp, Homo sapien
cacggtgaccttgtaagagagctat

SEQ ID NO: 786595 - DNA, 25 bp, Homo sapien
tgaagcgtggtgtctactaaatgca

SEQ ID NO: 786596 - DNA, 25 bp, Homo sapien
tagtaaagaaacgaaatcatgttaa

SEQ ID NO: 786597 - DNA, 25 bp, Homo sapien
ctagtaaagaaacgaaatcatgtta

SEQ ID NO: 786598 - DNA, 25 bp, Homo sapien
ttccaatttgtactggaatggtttg

SEQ ID NO: 786599 - DNA, 25 bp, Homo sapien
tccaatttgtactggaatggtttga

SEQ ID NO: 786600 - DNA, 25 bp, Homo sapien
ccaatttgtactggaatggtttgat

SEQ ID NO: 786601 - DNA, 25 bp, Homo sapien
tcaaagtaaaaatattaaatcatac

SEQ ID NO: 786602 - DNA, 25 bp, Homo sapien
tgatctcagcagtgggtaaagacca

SEQ ID NO: 786603 - DNA, 25 bp, Homo sapien
gatataaacaacctagacagggccc

SEQ ID NO: 786604 - DNA, 25 bp, Homo sapien
tatctccactgagtgccacggaagg

SEQ ID NO: 786605 - DNA, 25 bp, Homo sapien
cacacataacttggactggcaggga

SEQ ID NO: 786606 - DNA, 25 bp, Homo sapien
tttagggagtcatttagcgttttga

SEQ ID NO: 786607 - DNA, 25 bp, Homo sapien
tagcgttttgacttcttgttccaag

SEQ ID NO: 786608 - DNA, 25 bp, Homo sapien
ttagcgttttgacttcttgttccaa

SEQ ID NO: 786609 - DNA, 25 bp, Homo sapien
ctttagggagtcatttagcgttttg

SEQ ID NO: 786610 - DNA, 25 bp, Homo sapien
gcttgaccaattggttatgttctcg

SEQ ID NO: 786611 - DNA, 25 bp, Homo sapien
caagtaaggctcgtttgccttcaac

SEQ ID NO: 786612 - DNA, 25 bp, Homo sapien
tcatccactatagcactaaccttgt

SEQ ID NO: 786613 - DNA, 25 bp, Homo sapien
gcttcattctctctggctaattcca

SEQ ID NO: 786614 - DNA, 25 bp, Homo sapien
gcttgtcaatgagactgttgcgtaa

SEQ ID NO: 786615 - DNA, 25 bp, Homo sapien
tgcgtaaattgagatccaagatccc

SEQ ID NO: 786616 - DNA, 25 bp, Homo sapien
tagaagcctttgatgcagtgcttga

SEQ ID NO: 786617 - DNA, 25 bp, Homo sapien
gagtttgcctaagtgcatcccagga

SEQ ID NO: 786618 - DNA, 25 bp, Homo sapien
tcttagctacttcaacttccttgtg

SEQ ID NO: 786619 - DNA, 25 bp, Homo sapien
cagataatgtagaatcatctttggg

SEQ ID NO: 786620 - DNA, 25 bp, Homo sapien
acttccttgtgaagctctcgccttc

SEQ ID NO: 786621 - DNA, 25 bp, Homo sapien
ggccaaattcctcttagctacttca

SEQ ID NO: 786622 - DNA, 25 bp, Homo sapien
aaggttgactactagctctttcatg

SEQ ID NO: 786623 - DNA, 25 bp, Homo sapien
gcaagttgttgttctactaacttag

SEQ ID NO: 786624 - DNA, 25 bp, Homo sapien
caattttgatttgagtcatgcggag

SEQ ID NO: 786625 - DNA, 25 bp, Homo sapien
gttgttctactaacttagactccat

SEQ ID NO: 786626 - DNA, 25 bp, Homo sapien
atcctgatttcaagatcctttgctt

SEQ ID NO: 786627 - DNA, 25 bp, Homo sapien
cttcttgtgtatcctgatttcaaga

SEQ ID NO: 786628 - DNA, 25 bp, Homo sapien
tgatttcaagatcctttgctttcat

SEQ ID NO: 786629 - DNA, 25 bp, Homo sapien
tgtgtatcctgatttcaagatcctt

SEQ ID NO: 786630 - DNA, 25 bp, Homo sapien
tcgaatggtgtcatacagtttagca

SEQ ID NO: 786631 - DNA, 25 bp, Homo sapien
ttgactaacggcactatttctcaga

SEQ ID NO: 786632 - DNA, 25 bp, Homo sapien
tctttcatttcgaatggtgtcatac

SEQ ID NO: 786633 - DNA, 25 bp, Homo sapien
tttcttgactaacggcactatttct

SEQ ID NO: 786634 - DNA, 25 bp, Homo sapien
cgtgtttcagcatggaattttgtag

SEQ ID NO: 786635 - DNA, 25 bp, Homo sapien
gttggcgtgtttcagcatggaattt

SEQ ID NO: 786636 - DNA, 25 bp, Homo sapien
tggcgtgtttcagcatggaattttg

SEQ ID NO: 786637 - DNA, 25 bp, Homo sapien
gatggtaacattgttggcgtgtttc

SEQ ID NO: 786638 - DNA, 25 bp, Homo sapien
cgtatcttttgcgaagctgcaccat

SEQ ID NO: 786639 - DNA, 25 bp, Homo sapien
ggcaagtctgtcaatgttatttaac

SEQ ID NO: 786640 - DNA, 25 bp, Homo sapien
cattgtgatcgtgttggcaagtctg

SEQ ID NO: 786641 - DNA, 25 bp, Homo sapien
tacaattttgcgcacatcgttttgc

SEQ ID NO: 786642 - DNA, 25 bp, Homo sapien
ggatcacagatagtcaccaatggct

SEQ ID NO: 786643 - DNA, 25 bp, Homo sapien
caactttgaggctgaccatgtggtt

SEQ ID NO: 786644 - DNA, 25 bp, Homo sapien
gggcattgagaccaccgttttacta

SEQ ID NO: 786645 - DNA, 25 bp, Homo sapien
caacatagcatacttccagaggatc

SEQ ID NO: 786646 - DNA, 25 bp, Homo sapien
ttcttcccgctctatcagctgaacg

SEQ ID NO: 786647 - DNA, 25 bp, Homo sapien
tcttcccgctctatcagctgaacgc

SEQ ID NO: 786648 - DNA, 25 bp, Homo sapien
atttcttcttcccgctctatcagct

SEQ ID NO: 786649 - DNA, 25 bp, Homo sapien
ttcccgctctatcagctgaacgcca

SEQ ID NO: 786650 - DNA, 25 bp, Homo sapien
ctgaatttggagcacagctaggtcg

SEQ ID NO: 786651 - DNA, 25 bp, Homo sapien
gaatttggagcacagctaggtcggc

SEQ ID NO: 786652 - DNA, 25 bp, Homo sapien
tttggagcacagctaggtcggcatc

SEQ ID NO: 786653 - DNA, 25 bp, Homo sapien
agcacagctaggtcggcatccaggg

SEQ ID NO: 786654 - DNA, 25 bp, Homo sapien
ctttccctggaaggaagcgagctct

SEQ ID NO: 786655 - DNA, 25 bp, Homo sapien
agcgagctctattctcaccatcagg

SEQ ID NO: 786656 - DNA, 25 bp, Homo sapien
tctccaggtctttaattctgtctgt

SEQ ID NO: 786657 - DNA, 25 bp, Homo sapien
aggctttacgaactgtttctccagg

SEQ ID NO: 786658 - DNA, 25 bp, Homo sapien
taatgaaggataggtctgtcagcat

SEQ ID NO: 786659 - DNA, 25 bp, Homo sapien
tcaacgaggagctaacagatgcaat

SEQ ID NO: 786660 - DNA, 25 bp, Homo sapien
cctttggaatctcgaaaccactgga

SEQ ID NO: 786661 - DNA, 25 bp, Homo sapien
tatctgtgaaactacatcaacgagg

SEQ ID NO: 786662 - DNA, 25 bp, Homo sapien
tcatctaagacaaaatcttatttcc

SEQ ID NO: 786663 - DNA, 25 bp, Homo sapien
atctaagacaaaatcttatttccta

SEQ ID NO: 786664 - DNA, 25 bp, Homo sapien
aagtcatctaagacaaaatcttatt

SEQ ID NO: 786665 - DNA, 25 bp, Homo sapien
gtcatctaagacaaaatcttatttc

SEQ ID NO: 786666 - DNA, 25 bp, Homo sapien
gcttgcagccctgagttttgctgca

SEQ ID NO: 786667 - DNA, 25 bp, Homo sapien
ttggctaagagcagtgtgtcctgct

SEQ ID NO: 786668 - DNA, 25 bp, Homo sapien
ccttcttggccagttgtagttccag

SEQ ID NO: 786669 - DNA, 25 bp, Homo sapien
cttcttggctaagagcagtgtgtcc

SEQ ID NO: 786670 - DNA, 25 bp, Homo sapien
taaagcctaatctctccagtgcttc

SEQ ID NO: 786671 - DNA, 25 bp, Homo sapien
ctaatctctccagtgcttctctcaa

SEQ ID NO: 786672 - DNA, 25 bp, Homo sapien
ctctccagtgcttctctcaataaat

SEQ ID NO: 786673 - DNA, 25 bp, Homo sapien
gtcataaagcctaatctctccagtg

SEQ ID NO: 786674 - DNA, 25 bp, Homo sapien
tccagtggcagacgtgtgactcaca

SEQ ID NO: 786675 - DNA, 25 bp, Homo sapien
tagagtctggcacatgctaggcatt

SEQ ID NO: 786676 - DNA, 25 bp, Homo sapien
gaggccaagttgtgatttgcacacc

SEQ ID NO: 786677 - DNA, 25 bp, Homo sapien
caaagtgcatgagcttaactgagcc

SEQ ID NO: 786678 - DNA, 25 bp, Homo sapien
ttctcagttgcatttttgatccttc

SEQ ID NO: 786679 - DNA, 25 bp, Homo sapien
tgatccttctttgatagccattcat

SEQ ID NO: 786680 - DNA, 25 bp, Homo sapien
catttttgatccttctttgatagcc

SEQ ID NO: 786681 - DNA, 25 bp, Homo sapien
tcagttgcatttttgatccttcttt

SEQ ID NO: 786682 - DNA, 25 bp, Homo sapien
tggacagctcagcaacaagagccat

SEQ ID NO: 786683 - DNA, 25 bp, Homo sapien
gagtggcagacctttttctatcctg

SEQ ID NO: 786684 - DNA, 25 bp, Homo sapien
ggttagggcttgtttcatggacagc

SEQ ID NO: 786685 - DNA, 25 bp, Homo sapien
tgagacttttcagcgatggccaagg

SEQ ID NO: 786686 - DNA, 25 bp, Homo sapien
taggcattcggacgctgctctgcag

SEQ ID NO: 786687 - DNA, 25 bp, Homo sapien
cagttgtgtaaacaccattgggcag

SEQ ID NO: 786688 - DNA, 25 bp, Homo sapien
cattgggcagctggcgattatctgc

SEQ ID NO: 786689 - DNA, 25 bp, Homo sapien
aagcaccataaggttttggcaaagg

SEQ ID NO: 786690 - DNA, 25 bp, Homo sapien
gttgaagtcttttccttgagaggcc

SEQ ID NO: 786691 - DNA, 25 bp, Homo sapien
tgtgggtacaaggaagcctggttga

SEQ ID NO: 786692 - DNA, 25 bp, Homo sapien
tacaaggaagcctggttgaagtctt

SEQ ID NO: 786693 - DNA, 25 bp, Homo sapien
gagaggcctggatttgttcacatat

SEQ ID NO: 786694 - DNA, 25 bp, Homo sapien
taaatgtaggacagttctatgtccc

SEQ ID NO: 786695 - DNA, 25 bp, Homo sapien
tactctgttgctgactaattgtggt

SEQ ID NO: 786696 - DNA, 25 bp, Homo sapien
taaatagaaaccctgttgtactctg

SEQ ID NO: 786697 - DNA, 25 bp, Homo sapien
tatgtcccattcaacgtcatgaaag

SEQ ID NO: 786698 - DNA, 25 bp, Homo sapien
ccctgaagccaggggatctgccctg

SEQ ID NO: 786699 - DNA, 25 bp, Homo sapien
aggccatcaatccctgaagccaggg

SEQ ID NO: 786700 - DNA, 25 bp, Homo sapien
caggccatcaatccctgaagccagg

SEQ ID NO: 786701 - DNA, 25 bp, Homo sapien
gcttggtgctgcttgctttctagct

SEQ ID NO: 786702 - DNA, 25 bp, Homo sapien
tgctgcttgctttctagctgtctga

SEQ ID NO: 786703 - DNA, 25 bp, Homo sapien
cctaccgggtcttgccttgtttgtg

SEQ ID NO: 786704 - DNA, 25 bp, Homo sapien
tctagctgtctgatcctaccgggtc

SEQ ID NO: 786705 - DNA, 25 bp, Homo sapien
cacttccagtagtgtggtgcaggca

SEQ ID NO: 786706 - DNA, 25 bp, Homo sapien
ccactgtgggttggcaagagaatca

SEQ ID NO: 786707 - DNA, 25 bp, Homo sapien
tgtgcttttgcgatgggagtccctg

SEQ ID NO: 786708 - DNA, 25 bp, Homo sapien
tatcttgctgttagagtggccgcac

SEQ ID NO: 786709 - DNA, 25 bp, Homo sapien
tatccttgacgtgaaaagtcaccga

SEQ ID NO: 786710 - DNA, 25 bp, Homo sapien
tgacgtgaaaagtcaccgataaaac

SEQ ID NO: 786711 - DNA, 25 bp, Homo sapien
tgtattgcattatatccttgacgtg

SEQ ID NO: 786712 - DNA, 25 bp, Homo sapien
tctctgatgctcttaactgtattgc

SEQ ID NO: 786713 - DNA, 25 bp, Homo sapien
gtgaaaaactcagtatcactgagga

SEQ ID NO: 786714 - DNA, 25 bp, Homo sapien
tgaaaaactcagtatcactgaggat

SEQ ID NO: 786715 - DNA, 25 bp, Homo sapien
taccttgctcgtgcaaacctatgca

SEQ ID NO: 786716 - DNA, 25 bp, Homo sapien
gcaaggttagatgcacatatgtggg

SEQ ID NO: 786717 - DNA, 25 bp, Homo sapien
tatcctgaggtagctaataacagcc

SEQ ID NO: 786718 - DNA, 25 bp, Homo sapien
gatcaggagtatccctatgggttac

SEQ ID NO: 786719 - DNA, 25 bp, Homo sapien
catcctcccctgtggagttgcattt

SEQ ID NO: 786720 - DNA, 25 bp, Homo sapien
ccactgggcagcaattggggtgacc

SEQ ID NO: 786721 - DNA, 25 bp, Homo sapien
caagtcacagcagatttccactggg

SEQ ID NO: 786722 - DNA, 25 bp, Homo sapien
tggagttgcatttgccacaagtcac

SEQ ID NO: 786723 - DNA, 25 bp, Homo sapien
cgctgtccacttcagtgaatttgga

SEQ ID NO: 786724 - DNA, 25 bp, Homo sapien
aacgctggtgaaagttttcttgatg

SEQ ID NO: 786725 - DNA, 25 bp, Homo sapien
taaatgacccacatctacaactcct

SEQ ID NO: 786726 - DNA, 25 bp, Homo sapien
tgaatttggaagtgggtattaaatg

SEQ ID NO: 786727 - DNA, 25 bp, Homo sapien
tttgagaaagaatccgtgaccacca

SEQ ID NO: 786728 - DNA, 25 bp, Homo sapien
cactccgggctttttgatgatttgg

SEQ ID NO: 786729 - DNA, 25 bp, Homo sapien
tgttgaaccgtgtccgtggctcagg

SEQ ID NO: 786730 - DNA, 25 bp, Homo sapien
agtttgtccccacatttgcgagacg

SEQ ID NO: 786731 - DNA, 25 bp, Homo sapien
cgacctttagctctggtatatcttc

SEQ ID NO: 786732 - DNA, 25 bp, Homo sapien
atcttcaaagctagccatttcatgc

SEQ ID NO: 786733 - DNA, 25 bp, Homo sapien
tcttcaaagctagccatttcatgca

SEQ ID NO: 786734 - DNA, 25 bp, Homo sapien
cctttagctctggtatatcttcaaa

SEQ ID NO: 786735 - DNA, 25 bp, Homo sapien
aggaggtaggagttgtagtgagccg

SEQ ID NO: 786736 - DNA, 25 bp, Homo sapien
ctcaggaggtaggagttgtagtgag

SEQ ID NO: 786737 - DNA, 25 bp, Homo sapien
tcagtactaccacctaatcctcaga

SEQ ID NO: 786738 - DNA, 25 bp, Homo sapien
gattatgtggagcatttggctgcca

SEQ ID NO: 786739 - DNA, 25 bp, Homo sapien
ccaggacaggattatgtggagcatt

SEQ ID NO: 786740 - DNA, 25 bp, Homo sapien
ttcagtactaccacctaatcctcag

SEQ ID NO: 786741 - DNA, 25 bp, Homo sapien
gtcactcaagtttgcctacagcaca

SEQ ID NO: 786742 - DNA, 25 bp, Homo sapien
tcactcaagtttgcctacagcacaa

SEQ ID NO: 786743 - DNA, 25 bp, Homo sapien
ctcaagtttgcctacagcacaatag

SEQ ID NO: 786744 - DNA, 25 bp, Homo sapien
aagtttgcctacagcacaataggag

SEQ ID NO: 786745 - DNA, 25 bp, Homo sapien
aggtggtgacagtaggtcttctgtg

SEQ ID NO: 786746 - DNA, 25 bp, Homo sapien
ttgcccctccagaggtggtgacagt

SEQ ID NO: 786747 - DNA, 25 bp, Homo sapien
gcttcattaaagggagctttcaggg

SEQ ID NO: 786748 - DNA, 25 bp, Homo sapien
aggtcttctgtggagggaattgctg

SEQ ID NO: 786749 - DNA, 25 bp, Homo sapien
atgacctcagatgctggggtatgcg

SEQ ID NO: 786750 - DNA, 25 bp, Homo sapien
aataatgaggtctctggtaagctgg

SEQ ID NO: 786751 - DNA, 25 bp, Homo sapien
gggccacgcggaaggcagcagtgtg

SEQ ID NO: 786752 - DNA, 25 bp, Homo sapien
ggattttgctgccagatgacctcag

SEQ ID NO: 786753 - DNA, 25 bp, Homo sapien
cttgaccactggtttccaggcaatg

SEQ ID NO: 786754 - DNA, 25 bp, Homo sapien
acttctaactattggctctgtcttg

SEQ ID NO: 786755 - DNA, 25 bp, Homo sapien
gtgtgtgctccataactcatgaaag

SEQ ID NO: 786756 - DNA, 25 bp, Homo sapien
tgtagctgttcacaaagcttcattg

SEQ ID NO: 786757 - DNA, 25 bp, Homo sapien
gttgggtgtttaggtcgccattcca

SEQ ID NO: 786758 - DNA, 25 bp, Homo sapien
tgtttaggtcgccattccatcactt

SEQ ID NO: 786759 - DNA, 25 bp, Homo sapien
tgggtgtttaggtcgccattccatc

SEQ ID NO: 786760 - DNA, 25 bp, Homo sapien
gggtgtttaggtcgccattccatca

SEQ ID NO: 786761 - DNA, 25 bp, Homo sapien
atcaaaccggttgcaatgcttctct

SEQ ID NO: 786762 - DNA, 25 bp, Homo sapien
tttttgatcaaaccggttgcaatgc

SEQ ID NO: 786763 - DNA, 25 bp, Homo sapien
caactttttgatcaaaccggttgca

SEQ ID NO: 786764 - DNA, 25 bp, Homo sapien
attgcaactttttgatcaaaccggt

SEQ ID NO: 786765 - DNA, 25 bp, Homo sapien
tagcatcgtctcagtttccaggttg

SEQ ID NO: 786766 - DNA, 25 bp, Homo sapien
tccttattgactagcatcgtctcag

SEQ ID NO: 786767 - DNA, 25 bp, Homo sapien
ccaggttgtttccacccattaatga

SEQ ID NO: 786768 - DNA, 25 bp, Homo sapien
gctttccactaataactgcatgccc

SEQ ID NO: 786769 - DNA, 25 bp, Homo sapien
cccacgtcctccctactgaccacaa

SEQ ID NO: 786770 - DNA, 25 bp, Homo sapien
tcctccctactgaccacaaaatagg

SEQ ID NO: 786771 - DNA, 25 bp, Homo sapien
cgtcctccctactgaccacaaaata

SEQ ID NO: 786772 - DNA, 25 bp, Homo sapien
cacgtcctccctactgaccacaaaa

SEQ ID NO: 786773 - DNA, 25 bp, Homo sapien
ggcctagagatacttgctgtatgtg

SEQ ID NO: 786774 - DNA, 25 bp, Homo sapien
gaatcctttgaacagtggcctagag

SEQ ID NO: 786775 - DNA, 25 bp, Homo sapien
tgagctggggacttcgggaatcctt

SEQ ID NO: 786776 - DNA, 25 bp, Homo sapien
tgtgtcttgggcctactccataaac

SEQ ID NO: 786777 - DNA, 25 bp, Homo sapien
cccgtgtcaggcttattggcaaaca

SEQ ID NO: 786778 - DNA, 25 bp, Homo sapien
acagtgtccagttcaaggtgccagc

SEQ ID NO: 786779 - DNA, 25 bp, Homo sapien
atggcaaagaggtcaccacccgtgt

SEQ ID NO: 786780 - DNA, 25 bp, Homo sapien
aacaaatggtgcttgcacagtgtcc

SEQ ID NO: 786781 - DNA, 25 bp, Homo sapien
tcgtagctgaggaacttacaggctt

SEQ ID NO: 786782 - DNA, 25 bp, Homo sapien
tcggcggtctctcggaggagggagg

SEQ ID NO: 786783 - DNA, 25 bp, Homo sapien
cccgaggtacctggtagtcgtagct

SEQ ID NO: 786784 - DNA, 25 bp, Homo sapien
tacctggtagtcgtagctgaggaac

SEQ ID NO: 786785 - DNA, 25 bp, Homo sapien
tgctcagacagcccttttgtccatt

SEQ ID NO: 786786 - DNA, 25 bp, Homo sapien
tcgcttcaagccctacaccctgctt

SEQ ID NO: 786787 - DNA, 25 bp, Homo sapien
ctcagacagcccttttgtccatttt

SEQ ID NO: 786788 - DNA, 25 bp, Homo sapien
ctcccatggctttatcactcgcttc

SEQ ID NO: 786789 - DNA, 25 bp, Homo sapien
tggccaaagcttacaggtcctgagt

SEQ ID NO: 786790 - DNA, 25 bp, Homo sapien
caaatgtcagacacatggccaaagc

SEQ ID NO: 786791 - DNA, 25 bp, Homo sapien
tgagagtctcccacaatggcatttc

SEQ ID NO: 786792 - DNA, 25 bp, Homo sapien
gaaactggcagtaagggagcataac

SEQ ID NO: 786793 - DNA, 25 bp, Homo sapien
gaacacagctagctctccgctcgcc

SEQ ID NO: 786794 - DNA, 25 bp, Homo sapien
tcaggaacacagctagctctccgct

SEQ ID NO: 786795 - DNA, 25 bp, Homo sapien
tctccgctcgccctgcccccccttc

SEQ ID NO: 786796 - DNA, 25 bp, Homo sapien
cgcctcaggaacacagctagctctc

SEQ ID NO: 786797 - DNA, 25 bp, Homo sapien
agctcgttcccccagcacgtccctc

SEQ ID NO: 786798 - DNA, 25 bp, Homo sapien
gctcgttcccccagcacgtccctcc

SEQ ID NO: 786799 - DNA, 25 bp, Homo sapien
ccagctcgttcccccagcacgtccc

SEQ ID NO: 786800 - DNA, 25 bp, Homo sapien
cagctcgttcccccagcacgtccct

SEQ ID NO: 786801 - DNA, 25 bp, Homo sapien
catgaagtcccgggcgaagttgtcc

SEQ ID NO: 786802 - DNA, 25 bp, Homo sapien
aatttcctcaggatctccacttgct

SEQ ID NO: 786803 - DNA, 25 bp, Homo sapien
ggcgaagttgtcctccccattgtgg

SEQ ID NO: 786804 - DNA, 25 bp, Homo sapien
cattgtggtcaggactcttcatggc

SEQ ID NO: 786805 - DNA, 25 bp, Homo sapien
ccggcaagaaaacgcgacagcgagg

SEQ ID NO: 786806 - DNA, 25 bp, Homo sapien
cagaggtacacaaagcactggcggc

SEQ ID NO: 786807 - DNA, 25 bp, Homo sapien
ggtacacaaagcactggcggcccgg

SEQ ID NO: 786808 - DNA, 25 bp, Homo sapien
ctccggcgccggcaagaaaacgcga

SEQ ID NO: 786809 - DNA, 25 bp, Homo sapien
tcaatacccccgttcctctgtcagc

SEQ ID NO: 786810 - DNA, 25 bp, Homo sapien
gtcacagccagataccttgcctcga

SEQ ID NO: 786811 - DNA, 25 bp, Homo sapien
acgatctgcactcctcccggtcaca

SEQ ID NO: 786812 - DNA, 25 bp, Homo sapien
gttcctctgtcagccacgatctgca

SEQ ID NO: 786813 - DNA, 25 bp, Homo sapien
cgcaatatccgtaggagcagcagcc

SEQ ID NO: 786814 - DNA, 25 bp, Homo sapien
tttccaacgccccagtcttgcgcaa

SEQ ID NO: 786815 - DNA, 25 bp, Homo sapien
tcttgcgcaatatccgtaggagcag

SEQ ID NO: 786816 - DNA, 25 bp, Homo sapien
cccagtcttgcgcaatatccgtagg

SEQ ID NO: 786817 - DNA, 25 bp, Homo sapien
gactaaggagcaaccacttcccaaa

SEQ ID NO: 786818 - DNA, 25 bp, Homo sapien
ccgccaagactaaggagcaaccact

SEQ ID NO: 786819 - DNA, 25 bp, Homo sapien
ctaaggagcaaccacttcccaaagt

SEQ ID NO: 786820 - DNA, 25 bp, Homo sapien
caagactaaggagcaaccacttccc

SEQ ID NO: 786821 - DNA, 25 bp, Homo sapien
ctatatgtaacagcagaaagtagaa

SEQ ID NO: 786822 - DNA, 25 bp, Homo sapien
cagaattactatatgtaacagcaga

SEQ ID NO: 786823 - DNA, 25 bp, Homo sapien
tcctgggaagctatcttatgcaaca

SEQ ID NO: 786824 - DNA, 25 bp, Homo sapien
taaatgtttatatacgtctacctag

SEQ ID NO: 786825 - DNA, 25 bp, Homo sapien
cagttagtaaacttcctgaacagag

SEQ ID NO: 786826 - DNA, 25 bp, Homo sapien
gtctgttcagttagtaaacttcctg

SEQ ID NO: 786827 - DNA, 25 bp, Homo sapien
ctcacaggtctgttcagttagtaaa

SEQ ID NO: 786828 - DNA, 25 bp, Homo sapien
aacttcctgaacagagtactgccat

SEQ ID NO: 786829 - DNA, 25 bp, Homo sapien
ttaagtgagtatggcggtgcatgcc

SEQ ID NO: 786830 - DNA, 25 bp, Homo sapien
ctccggaggctagggcaaaaggact

SEQ ID NO: 786831 - DNA, 25 bp, Homo sapien
aaccaaaccacagatccaagcagct

SEQ ID NO: 786832 - DNA, 25 bp, Homo sapien
ctgtttcagaaactaggcaagcaag

SEQ ID NO: 786833 - DNA, 25 bp, Homo sapien
ccggccgctattctcaatttctgaa

SEQ ID NO: 786834 - DNA, 25 bp, Homo sapien
cacgcccggccgctattctcaattt

SEQ ID NO: 786835 - DNA, 25 bp, Homo sapien
ttggtagctactcccccaacagtta

SEQ ID NO: 786836 - DNA, 25 bp, Homo sapien
ttttatcaaatttggtagctactcc

SEQ ID NO: 786837 - DNA, 25 bp, Homo sapien
gaataccacttgaactaggaggaca

SEQ ID NO: 786838 - DNA, 25 bp, Homo sapien
gatattaaaactatggctcccgact

SEQ ID NO: 786839 - DNA, 25 bp, Homo sapien
gctggttccactgatgttccgccaa

SEQ ID NO: 786840 - DNA, 25 bp, Homo sapien
taaaaacatacagcaggccggaagc

SEQ ID NO: 786841 - DNA, 25 bp, Homo sapien
actttgaagtaaacagggccagtct

SEQ ID NO: 786842 - DNA, 25 bp, Homo sapien
ttgtctgccaagaaactccctgctt

SEQ ID NO: 786843 - DNA, 25 bp, Homo sapien
tatgccatccctgatagaacacgaa

SEQ ID NO: 786844 - DNA, 25 bp, Homo sapien
gatagtagtactggcatacaggccc

SEQ ID NO: 786845 - DNA, 25 bp, Homo sapien
ggtggcttgtgcctgtaatcccagc

SEQ ID NO: 786846 - DNA, 25 bp, Homo sapien
aaaaatatgtatatgggctgggcac

SEQ ID NO: 786847 - DNA, 25 bp, Homo sapien
actttaggaggccaaggtgggcaga

SEQ ID NO: 786848 - DNA, 25 bp, Homo sapien
tcacttgaggtcaggagctcaagac

SEQ ID NO: 786849 - DNA, 25 bp, Homo sapien
gtctccccatgtatgttgcggaggc

SEQ ID NO: 786850 - DNA, 25 bp, Homo sapien
actctgttgtctaaactggaatgca

SEQ ID NO: 786851 - DNA, 25 bp, Homo sapien
aaagcttttatgtgaaatgactaca

SEQ ID NO: 786852 - DNA, 25 bp, Homo sapien
cccatgtatgttgcggaggctggtc

SEQ ID NO: 786853 - DNA, 25 bp, Homo sapien
ttacagatgcgtgccaccaggtcca

SEQ ID NO: 786854 - DNA, 25 bp, Homo sapien
ggaattacagatgcgtgccaccagg

SEQ ID NO: 786855 - DNA, 25 bp, Homo sapien
aattacagatgcgtgccaccaggtc

SEQ ID NO: 786856 - DNA, 25 bp, Homo sapien
tggaattacagatgcgtgccaccag

SEQ ID NO: 786857 - DNA, 25 bp, Homo sapien
tggcagtatgtccttgtatctgttc

SEQ ID NO: 786858 - DNA, 25 bp, Homo sapien
tccagtggctgtgggatatatcttt

SEQ ID NO: 786859 - DNA, 25 bp, Homo sapien
ggcagtatgtccttgtatctgttct

SEQ ID NO: 786860 - DNA, 25 bp, Homo sapien
tttctccagtggctgtgggatatat

SEQ ID NO: 786861 - DNA, 25 bp, Homo sapien
aggagtctttaatgtcaatttaact

SEQ ID NO: 786862 - DNA, 25 bp, Homo sapien
gaaggagtctttaatgtcaatttaa

SEQ ID NO: 786863 - DNA, 25 bp, Homo sapien
tgaaggagtctttaatgtcaattta

SEQ ID NO: 786864 - DNA, 25 bp, Homo sapien
agtctttaatgtcaatttaactcgg

SEQ ID NO: 786865 - DNA, 25 bp, Homo sapien
aactgactcatacaatgaatcagtg

SEQ ID NO: 786866 - DNA, 25 bp, Homo sapien
gaatcagtgtcattaagcataagta

SEQ ID NO: 786867 - DNA, 25 bp, Homo sapien
tataaaccaaacaatgtcactgact

SEQ ID NO: 786868 - DNA, 25 bp, Homo sapien
tactaaactggtacataactgactc

SEQ ID NO: 786869 - DNA, 25 bp, Homo sapien
tttgctaaaggtccttgagttgcta

SEQ ID NO: 786870 - DNA, 25 bp, Homo sapien
tacatatgcttttggcccatagacg

SEQ ID NO: 786871 - DNA, 25 bp, Homo sapien
gagttgctacatatgcttttggccc

SEQ ID NO: 786872 - DNA, 25 bp, Homo sapien
cacaacattatactcccatatcatc

SEQ ID NO: 786873 - DNA, 25 bp, Homo sapien
aattggttccaattaacatgatgtt

SEQ ID NO: 786874 - DNA, 25 bp, Homo sapien
tccaaacaagggctaactatacagc

SEQ ID NO: 786875 - DNA, 25 bp, Homo sapien
gggagtgagataaagaacgtatcag

SEQ ID NO: 786876 - DNA, 25 bp, Homo sapien
caccgagaagtataattggcttgcc

SEQ ID NO: 786877 - DNA, 25 bp, Homo sapien
tcaaattctcggcaggccattacaa

SEQ ID NO: 786878 - DNA, 25 bp, Homo sapien
aaattctcggcaggccattacaatg

SEQ ID NO: 786879 - DNA, 25 bp, Homo sapien
ccatctcaaattctcggcaggccat

SEQ ID NO: 786880 - DNA, 25 bp, Homo sapien
atctcaaattctcggcaggccatta

SEQ ID NO: 786881 - DNA, 25 bp, Homo sapien
atggtgcaaacgttatggggtcttc

SEQ ID NO: 786882 - DNA, 25 bp, Homo sapien
tgcaaacgttatggggtcttctcca

SEQ ID NO: 786883 - DNA, 25 bp, Homo sapien
taaatggtgcaaacgttatggggtc

SEQ ID NO: 786884 - DNA, 25 bp, Homo sapien
aacgttatggggtcttctccataca

SEQ ID NO: 786885 - DNA, 25 bp, Homo sapien
gagtgtcctgatgaagtagtctgtt

SEQ ID NO: 786886 - DNA, 25 bp, Homo sapien
tgtcctgatgaagtagtctgttctt

SEQ ID NO: 786887 - DNA, 25 bp, Homo sapien
aaattcaagtaagagtgtcctgatg

SEQ ID NO: 786888 - DNA, 25 bp, Homo sapien
ttgaaattcaagtaagagtgtcctg

SEQ ID NO: 786889 - DNA, 25 bp, Homo sapien
tggatgagcaatataccgtaagcac

SEQ ID NO: 786890 - DNA, 25 bp, Homo sapien
ggcagttctacttccagagcatgta

SEQ ID NO: 786891 - DNA, 25 bp, Homo sapien
caagtgtgggctctaaaccaggcag

SEQ ID NO: 786892 - DNA, 25 bp, Homo sapien
cctaagggcttcacatgtaacaatt

SEQ ID NO: 786893 - DNA, 25 bp, Homo sapien
tgtccagaatagaatcaaatgatga

SEQ ID NO: 786894 - DNA, 25 bp, Homo sapien
taatgaaactgatacagcctacgag

SEQ ID NO: 786895 - DNA, 25 bp, Homo sapien
tggtctggccagttcacataatgaa

SEQ ID NO: 786896 - DNA, 25 bp, Homo sapien
tcattaagcttatcatgtccagaat

SEQ ID NO: 786897 - DNA, 25 bp, Homo sapien
taaacggtctgtcaaccaaatgaga

SEQ ID NO: 786898 - DNA, 25 bp, Homo sapien
tgttctatagcttcccaccatgtga

SEQ ID NO: 786899 - DNA, 25 bp, Homo sapien
tacaaggccctagtcccaaacattg

SEQ ID NO: 786900 - DNA, 25 bp, Homo sapien
tgagaccacatcaacttacaaggcc

SEQ ID NO: 786901 - DNA, 25 bp, Homo sapien
gcttaactaggtcagtaatcattga

SEQ ID NO: 786902 - DNA, 25 bp, Homo sapien
agtgtaattggtgtctactgcagcc

SEQ ID NO: 786903 - DNA, 25 bp, Homo sapien
tcacattcagaggtagcttaactag

SEQ ID NO: 786904 - DNA, 25 bp, Homo sapien
tacccggtcatgacacttattgcaa

SEQ ID NO: 786905 - DNA, 25 bp, Homo sapien
tgaatgcagataacaagtcccttag

SEQ ID NO: 786906 - DNA, 25 bp, Homo sapien
tggcccatgaataaaaagtagccct

SEQ ID NO: 786907 - DNA, 25 bp, Homo sapien
tctccagtggaactagtggaaagca

SEQ ID NO: 786908 - DNA, 25 bp, Homo sapien
tgagcattacggtcaaaccaagtga

SEQ ID NO: 786909 - DNA, 25 bp, Homo sapien
gaaacttatgtattgcaaacaggca

SEQ ID NO: 786910 - DNA, 25 bp, Homo sapien
tacactattgtgttagggaaagact

SEQ ID NO: 786911 - DNA, 25 bp, Homo sapien
ggcaaaggagaagttagctatcaat

SEQ ID NO: 786912 - DNA, 25 bp, Homo sapien
tctgatcacataccttaaccataaa

SEQ ID NO: 786913 - DNA, 25 bp, Homo sapien
aagtaactgcttctcaactagagaa

SEQ ID NO: 786914 - DNA, 25 bp, Homo sapien
agagaaaggcttatgcatcttagaa

SEQ ID NO: 786915 - DNA, 25 bp, Homo sapien
tcttagaattgaaaatcactatgag

SEQ ID NO: 786916 - DNA, 25 bp, Homo sapien
actatgagtaattataagatgttac

SEQ ID NO: 786917 - DNA, 25 bp, Homo sapien
tgtgtacacactggaccatgggatg

SEQ ID NO: 786918 - DNA, 25 bp, Homo sapien
tatcttgcaagcaggacatacttcc

SEQ ID NO: 786919 - DNA, 25 bp, Homo sapien
gaaactgaggacagtgaagtcttga

SEQ ID NO: 786920 - DNA, 25 bp, Homo sapien
tctactatgtgactaatgggctggt

SEQ ID NO: 786921 - DNA, 25 bp, Homo sapien
tttgaaaaacaattgatttttgtga

SEQ ID NO: 786922 - DNA, 25 bp, Homo sapien
gaaaaacaattgatttttgtgataa

SEQ ID NO: 786923 - DNA, 25 bp, Homo sapien
acaattgatttttgtgataaaacaa

SEQ ID NO: 786924 - DNA, 25 bp, Homo sapien
aacaattgatttttgtgataaaaca

SEQ ID NO: 786925 - DNA, 25 bp, Homo sapien
taaattccacgtataatctatggca

SEQ ID NO: 786926 - DNA, 25 bp, Homo sapien
gtaaattccacgtataatctatggc

SEQ ID NO: 786927 - DNA, 25 bp, Homo sapien
tttagtaaattccacgtataatcta

SEQ ID NO: 786928 - DNA, 25 bp, Homo sapien
tagtaaattccacgtataatctatg

SEQ ID NO: 786929 - DNA, 25 bp, Homo sapien
tatgttaaaatgtgatcgaattcca

SEQ ID NO: 786930 - DNA, 25 bp, Homo sapien
aattatggcataagccatggcacct

SEQ ID NO: 786931 - DNA, 25 bp, Homo sapien
tgctagcattcatttatgtgtccct

SEQ ID NO: 786932 - DNA, 25 bp, Homo sapien
taagccatggcacctatccaaaata

SEQ ID NO: 786933 - DNA, 25 bp, Homo sapien
tgtactgcagaatgcctttgtgttc

SEQ ID NO: 786934 - DNA, 25 bp, Homo sapien
ttaaatacattaaattcctctggta

SEQ ID NO: 786935 - DNA, 25 bp, Homo sapien
taaatacattaaattcctctggtat

SEQ ID NO: 786936 - DNA, 25 bp, Homo sapien
tttgtttgtactgcagaatgccttt

SEQ ID NO: 786937 - DNA, 25 bp, Homo sapien
ttctgagctccatgaatttcatata

SEQ ID NO: 786938 - DNA, 25 bp, Homo sapien
aacagttgggcaatagctctatgaa

SEQ ID NO: 786939 - DNA, 25 bp, Homo sapien
aatttcatatagttgtagctgtttt

SEQ ID NO: 786940 - DNA, 25 bp, Homo sapien
gctctatgaacaagttcatattgct

SEQ ID NO: 786941 - DNA, 25 bp, Homo sapien
gtttttcaggctctatggagctgac

SEQ ID NO: 786942 - DNA, 25 bp, Homo sapien
ttcaggctctatggagctgaccatg

SEQ ID NO: 786943 - DNA, 25 bp, Homo sapien
ttttcaggctctatggagctgacca

SEQ ID NO: 786944 - DNA, 25 bp, Homo sapien
ctgcgggtccttggtggttttggag

SEQ ID NO: 786945 - DNA, 25 bp, Homo sapien
taagcagctaccctgaacaagaagg

SEQ ID NO: 786946 - DNA, 25 bp, Homo sapien
tgtgcagggattctaaccaaacctt

SEQ ID NO: 786947 - DNA, 25 bp, Homo sapien
caatgctaagacatgaccctggccg

SEQ ID NO: 786948 - DNA, 25 bp, Homo sapien
tgggaagtcgatcagttttggcaga

SEQ ID NO: 786949 - DNA, 25 bp, Homo sapien
gactcactgtaacttccgcctcccg

SEQ ID NO: 786950 - DNA, 25 bp, Homo sapien
cgactcactgtaacttccgcctccc

SEQ ID NO: 786951 - DNA, 25 bp, Homo sapien
cttgtgatctgcccgcctcagcctc

SEQ ID NO: 786952 - DNA, 25 bp, Homo sapien
ttgtgatctgcccgcctcagcctcc

SEQ ID NO: 786953 - DNA, 25 bp, Homo sapien
caagaattctgggaagtatcaccga

SEQ ID NO: 786954 - DNA, 25 bp, Homo sapien
caacactggctttggatggtatcta

SEQ ID NO: 786955 - DNA, 25 bp, Homo sapien
catcaagaggcaagcggtctggcct

SEQ ID NO: 786956 - DNA, 25 bp, Homo sapien
tagttttattctgggtcacagcacc

SEQ ID NO: 786957 - DNA, 25 bp, Homo sapien
ggtagccatcattactttcagcaga

SEQ ID NO: 786958 - DNA, 25 bp, Homo sapien
taccagtctgtatgtgtcactacca

SEQ ID NO: 786959 - DNA, 25 bp, Homo sapien
cagcagatcaaagaggagtttcaag

SEQ ID NO: 786960 - DNA, 25 bp, Homo sapien
tttgcctgcacgttataaataccag

SEQ ID NO: 786961 - DNA, 25 bp, Homo sapien
gcagagtgccgggacgcaattatgg

SEQ ID NO: 786962 - DNA, 25 bp, Homo sapien
agtgccgggacgcaattatggctca

SEQ ID NO: 786963 - DNA, 25 bp, Homo sapien
caggcagagtgccgggacgcaatta

SEQ ID NO: 786964 - DNA, 25 bp, Homo sapien
cccaggcagagtgccgggacgcaat

SEQ ID NO: 786965 - DNA, 25 bp, Homo sapien
tacatttatttagctggagacgcaa

SEQ ID NO: 786966 - DNA, 25 bp, Homo sapien
caattttcaacacgcatgaggtgag

SEQ ID NO: 786967 - DNA, 25 bp, Homo sapien
aagaaaaagaaatgcgacggtcctg

SEQ ID NO: 786968 - DNA, 25 bp, Homo sapien
tgagtatgattgcttttgccccacc

SEQ ID NO: 786969 - DNA, 25 bp, Homo sapien
acatgtcatctaaacaaaatcagag

SEQ ID NO: 786970 - DNA, 25 bp, Homo sapien
tattgagcaaagataatgtatacag

SEQ ID NO: 786971 - DNA, 25 bp, Homo sapien
ttcctgtcactctacagacatcatt

SEQ ID NO: 786972 - DNA, 25 bp, Homo sapien
gaaaccttttccactcattatcaag

SEQ ID NO: 786973 - DNA, 25 bp, Homo sapien
ggtgaatcttcactaacatcaacat

SEQ ID NO: 786974 - DNA, 25 bp, Homo sapien
gggaggaggtgaatcttcactaaca

SEQ ID NO: 786975 - DNA, 25 bp, Homo sapien
ttgctaacacaaacgattcaggagt

SEQ ID NO: 786976 - DNA, 25 bp, Homo sapien
taacacaaacgattcaggagttctt

SEQ ID NO: 786977 - DNA, 25 bp, Homo sapien
gaatttaattatgtagcacaatagc

SEQ ID NO: 786978 - DNA, 25 bp, Homo sapien
tagaatatgaagtaaatgtaaaagc

SEQ ID NO: 786979 - DNA, 25 bp, Homo sapien
caatagctaatagattaaaatcagg

SEQ ID NO: 786980 - DNA, 25 bp, Homo sapien
atgtaaaagcaaaagagacactcac

SEQ ID NO: 786981 - DNA, 25 bp, Homo sapien
gttattaacaccttgaatttctgaa

SEQ ID NO: 786982 - DNA, 25 bp, Homo sapien
aaatcttattgttattaacaccttg

SEQ ID NO: 786983 - DNA, 25 bp, Homo sapien
gagaaaaatgaaatcttattgttat

SEQ ID NO: 786984 - DNA, 25 bp, Homo sapien
tcttattgttattaacaccttgaat

SEQ ID NO: 786985 - DNA, 25 bp, Homo sapien
gttcagatcgttcctgactttgaag

SEQ ID NO: 786986 - DNA, 25 bp, Homo sapien
ttttttgttcagatcgttcctgact

SEQ ID NO: 786987 - DNA, 25 bp, Homo sapien
ctccattccgatcttacaggtgtat

SEQ ID NO: 786988 - DNA, 25 bp, Homo sapien
tcactccattccgatcttacaggtg

SEQ ID NO: 786989 - DNA, 25 bp, Homo sapien
tgtgcctagtgttataatgggaagc

SEQ ID NO: 786990 - DNA, 25 bp, Homo sapien
aaaaaatgttatctcctatggacaa

SEQ ID NO: 786991 - DNA, 25 bp, Homo sapien
ccatgccacgccctcaaaatattta

SEQ ID NO: 786992 - DNA, 25 bp, Homo sapien
caaaagaagcgactatgtgcctagt

SEQ ID NO: 786993 - DNA, 25 bp, Homo sapien
tcccaagaaatcaaggcctatcatt

SEQ ID NO: 786994 - DNA, 25 bp, Homo sapien
tatcccaagaaatcaaggcctatca

SEQ ID NO: 786995 - DNA, 25 bp, Homo sapien
tggatgagcactgaaaagcatgggc

SEQ ID NO: 786996 - DNA, 25 bp, Homo sapien
cactgaaaagcatgggctactgcat

SEQ ID NO: 786997 - DNA, 25 bp, Homo sapien
acatttctcattttcagaggttatc

SEQ ID NO: 786998 - DNA, 25 bp, Homo sapien
catttctcattttcagaggttatca

SEQ ID NO: 786999 - DNA, 25 bp, Homo sapien
tttctcattttcagaggttatcaag

SEQ ID NO: 787000 - DNA, 25 bp, Homo sapien
tctcattttcagaggttatcaagcc

SEQ ID NO: 787001 - DNA, 25 bp, Homo sapien
gacatattacattcccttaaggtag

SEQ ID NO: 787002 - DNA, 25 bp, Homo sapien
ggtcacacagaaatctgcagtgagt

SEQ ID NO: 787003 - DNA, 25 bp, Homo sapien
cagtgagtacttctgcaatgtgagg

SEQ ID NO: 787004 - DNA, 25 bp, Homo sapien
gtcaggtattattgtggtcacacag

SEQ ID NO: 787005 - DNA, 25 bp, Homo sapien
tgtcactgaaagtaggtggacattc

SEQ ID NO: 787006 - DNA, 25 bp, Homo sapien
tggattttctgatatttgttctctc

SEQ ID NO: 787007 - DNA, 25 bp, Homo sapien
ggtggacattctatgcacatttcat

SEQ ID NO: 787008 - DNA, 25 bp, Homo sapien
tagtgaatacctcccgctggatgat

SEQ ID NO: 787009 - DNA, 25 bp, Homo sapien
catgactagtccaagcaactttgga

SEQ ID NO: 787010 - DNA, 25 bp, Homo sapien
cacaatggcaaatgagcttttctca

SEQ ID NO: 787011 - DNA, 25 bp, Homo sapien
catgttttattcttggcaagtgtca

SEQ ID NO: 787012 - DNA, 25 bp, Homo sapien
cctgccagtgttaactacttactaa

SEQ ID NO: 787013 - DNA, 25 bp, Homo sapien
tgaaggtggatctcttggtcctttg

SEQ ID NO: 787014 - DNA, 25 bp, Homo sapien
tgggttttccacatcgattaccaaa

SEQ ID NO: 787015 - DNA, 25 bp, Homo sapien
aggtggatctcttggtcctttgggt

SEQ ID NO: 787016 - DNA, 25 bp, Homo sapien
tttgggttttccacatcgattacca

SEQ ID NO: 787017 - DNA, 25 bp, Homo sapien
ccagtataacttaaagtgtcttcta

SEQ ID NO: 787018 - DNA, 25 bp, Homo sapien
tataacttaaagtgtcttctagctc

SEQ ID NO: 787019 - DNA, 25 bp, Homo sapien
taacttaaagtgtcttctagctccc

SEQ ID NO: 787020 - DNA, 25 bp, Homo sapien
ttccagtataacttaaagtgtcttc

SEQ ID NO: 787021 - DNA, 25 bp, Homo sapien
ggcacttactgaatctctgactaga

SEQ ID NO: 787022 - DNA, 25 bp, Homo sapien
gtagtataaggcaggtagatggtcc

SEQ ID NO: 787023 - DNA, 25 bp, Homo sapien
tattaacatgtctacaagcagcgtg

SEQ ID NO: 787024 - DNA, 25 bp, Homo sapien
tctctgataacctgcaaagctggct

SEQ ID NO: 787025 - DNA, 25 bp, Homo sapien
aatttagggtatgtattatattcag

SEQ ID NO: 787026 - DNA, 25 bp, Homo sapien
tcacagaagaggatatccacatggt

SEQ ID NO: 787027 - DNA, 25 bp, Homo sapien
ttgaacaggtagttcacagaagagg

SEQ ID NO: 787028 - DNA, 25 bp, Homo sapien
tagtatctgcttcagacttgaacag

SEQ ID NO: 787029 - DNA, 25 bp, Homo sapien
ccattttgcatttatcccatttgca

SEQ ID NO: 787030 - DNA, 25 bp, Homo sapien
tgcatttatcccatttgcatttatt

SEQ ID NO: 787031 - DNA, 25 bp, Homo sapien
atttatcccatttgcatttattcca

SEQ ID NO: 787032 - DNA, 25 bp, Homo sapien
ttccattttgcatttatcccatttg

SEQ ID NO: 787033 - DNA, 25 bp, Homo sapien
tttgcaagttatgtgcatctgggtc

SEQ ID NO: 787034 - DNA, 25 bp, Homo sapien
caatttctttgcaagttatgtgcat

SEQ ID NO: 787035 - DNA, 25 bp, Homo sapien
tgcaagttatgtgcatctgggtcca

SEQ ID NO: 787036 - DNA, 25 bp, Homo sapien
ttctttgcaagttatgtgcatctgg

SEQ ID NO: 787037 - DNA, 25 bp, Homo sapien
ctaaaggcgcgggccaacacaccca

SEQ ID NO: 787038 - DNA, 25 bp, Homo sapien
gactaaaggcgcgggccaacacacc

SEQ ID NO: 787039 - DNA, 25 bp, Homo sapien
gaaacaaggtttcaggccgggcaca

SEQ ID NO: 787040 - DNA, 25 bp, Homo sapien
gggactaaaggcgcgggccaacaca

SEQ ID NO: 787041 - DNA, 25 bp, Homo sapien
caaaagcagctatctcaggcatagt

SEQ ID NO: 787042 - DNA, 25 bp, Homo sapien
tatatcagaggattttcagctggct

SEQ ID NO: 787043 - DNA, 25 bp, Homo sapien
cagctggctggagaatcatgcttag

SEQ ID NO: 787044 - DNA, 25 bp, Homo sapien
ggtggttcacaactacaactcagtg

SEQ ID NO: 787045 - DNA, 25 bp, Homo sapien
cagtatttccgcatgtttgctgcaa

SEQ ID NO: 787046 - DNA, 25 bp, Homo sapien
aaaaattgccccatgaacaatgtgg

SEQ ID NO: 787047 - DNA, 25 bp, Homo sapien
tgtttcccctatacctgagacttgg

SEQ ID NO: 787048 - DNA, 25 bp, Homo sapien
gacagatttagatggagaggtacca

SEQ ID NO: 787049 - DNA, 25 bp, Homo sapien
aaatgacctggttatctattgccaa

SEQ ID NO: 787050 - DNA, 25 bp, Homo sapien
gaaatgacctggttatctattgcca

SEQ ID NO: 787051 - DNA, 25 bp, Homo sapien
ctttaaagaacaagtggaggccagg

SEQ ID NO: 787052 - DNA, 25 bp, Homo sapien
ttgcgctcctgttgtatttactctc

SEQ ID NO: 787053 - DNA, 25 bp, Homo sapien
tgcgctcctgttgtatttactctcc

SEQ ID NO: 787054 - DNA, 25 bp, Homo sapien
tttgcgctcctgttgtatttactct

SEQ ID NO: 787055 - DNA, 25 bp, Homo sapien
gcggcagcgacacagtgcacggggc

SEQ ID NO: 787056 - DNA, 25 bp, Homo sapien
gccgcggcagcgacacagtgcacgg

SEQ ID NO: 787057 - DNA, 25 bp, Homo sapien
gggccgcggcagcgacacagtgcac

SEQ ID NO: 787058 - DNA, 25 bp, Homo sapien
ccgcggcagcgacacagtgcacggg

SEQ ID NO: 787059 - DNA, 25 bp, Homo sapien
agaaactgctccgagaagaggacgg

SEQ ID NO: 787060 - DNA, 25 bp, Homo sapien
agtttgcgcggcaccggctgagaca

SEQ ID NO: 787061 - DNA, 25 bp, Homo sapien
cttcttggcggacagagaacccgga

SEQ ID NO: 787062 - DNA, 25 bp, Homo sapien
ggaggagagttgcagcttgccaaac

SEQ ID NO: 787063 - DNA, 25 bp, Homo sapien
gctgagcgtgcagcagcgtaggagg

SEQ ID NO: 787064 - DNA, 25 bp, Homo sapien
gacttggcgttagccgaggcagcgg

SEQ ID NO: 787065 - DNA, 25 bp, Homo sapien
gcgcgacttggcgttagccgaggca

SEQ ID NO: 787066 - DNA, 25 bp, Homo sapien
gagcgtgcagcagcgtaggagggac

SEQ ID NO: 787067 - DNA, 25 bp, Homo sapien
ggccccaccgagaccgtgcctcctc

SEQ ID NO: 787068 - DNA, 25 bp, Homo sapien
ccccaccgagaccgtgcctcctcct

SEQ ID NO: 787069 - DNA, 25 bp, Homo sapien
gccccaccgagaccgtgcctcctcc

SEQ ID NO: 787070 - DNA, 25 bp, Homo sapien
tcgggccccaccgagaccgtgcctc

SEQ ID NO: 787071 - DNA, 25 bp, Homo sapien
tctctgcaaccgaaattacaggctc

SEQ ID NO: 787072 - DNA, 25 bp, Homo sapien
ccctctctgcaaccgaaattacagg

SEQ ID NO: 787073 - DNA, 25 bp, Homo sapien
gaaaataagagtgtcggccatcccc

SEQ ID NO: 787074 - DNA, 25 bp, Homo sapien
ggaggaagaaacgatacagaaaata

SEQ ID NO: 787075 - DNA, 25 bp, Homo sapien
ttcacaaatcctgcagcgcactaac

SEQ ID NO: 787076 - DNA, 25 bp, Homo sapien
aaacattctgcagccgcttgatctg

SEQ ID NO: 787077 - DNA, 25 bp, Homo sapien
gcttgatctggcgaaaaatcgtcaa

SEQ ID NO: 787078 - DNA, 25 bp, Homo sapien
aatcgtcaaagctcctggttttatc

SEQ ID NO: 787079 - DNA, 25 bp, Homo sapien
ttctaatgctcaaacattctgcagc

SEQ ID NO: 787080 - DNA, 25 bp, Homo sapien
ctttatagctaatgtctggttctga

SEQ ID NO: 787081 - DNA, 25 bp, Homo sapien
tgactcagactgttcaatcagccag

SEQ ID NO: 787082 - DNA, 25 bp, Homo sapien
actttctgcggtgataaaaatctgc

SEQ ID NO: 787083 - DNA, 25 bp, Homo sapien
cactgagtagcaagagagaactttc

SEQ ID NO: 787084 - DNA, 25 bp, Homo sapien
gctatgtcattactctactggtggc

SEQ ID NO: 787085 - DNA, 25 bp, Homo sapien
tgaactgattcatgcaactgtactg

SEQ ID NO: 787086 - DNA, 25 bp, Homo sapien
aaaacaccacaatggaagctgcaaa

SEQ ID NO: 787087 - DNA, 25 bp, Homo sapien
ccatctatacataaacaaagggcat

SEQ ID NO: 787088 - DNA, 25 bp, Homo sapien
tagacaacgtaattgcagttacccc

SEQ ID NO: 787089 - DNA, 25 bp, Homo sapien
tcttagaatatgcactcgggtatga

SEQ ID NO: 787090 - DNA, 25 bp, Homo sapien
gtttctaagtttctgcaatgggcac

SEQ ID NO: 787091 - DNA, 25 bp, Homo sapien
tgattggtttgccactcttactttc

SEQ ID NO: 787092 - DNA, 25 bp, Homo sapien
atgttaaagtccttgaaatcctgtc

SEQ ID NO: 787093 - DNA, 25 bp, Homo sapien
tctgatgttaaagtccttgaaatcc

SEQ ID NO: 787094 - DNA, 25 bp, Homo sapien
cccacacttctgattggtttgccac

SEQ ID NO: 787095 - DNA, 25 bp, Homo sapien
ttcagcaaaatctttacttctccat

SEQ ID NO: 787096 - DNA, 25 bp, Homo sapien
tctctttcttgatctcattcattac

SEQ ID NO: 787097 - DNA, 25 bp, Homo sapien
gatctcattcattactttatgtttc

SEQ ID NO: 787098 - DNA, 25 bp, Homo sapien
cagcaaaatctttacttctccattc

SEQ ID NO: 787099 - DNA, 25 bp, Homo sapien
ttttcatttcctcatcattgttcat

SEQ ID NO: 787100 - DNA, 25 bp, Homo sapien
cctcatatataaacagcaaatgaat

SEQ ID NO: 787101 - DNA, 25 bp, Homo sapien
atatataaacagcaaatgaatgcaa

SEQ ID NO: 787102 - DNA, 25 bp, Homo sapien
tcatatataaacagcaaatgaatgc

SEQ ID NO: 787103 - DNA, 25 bp, Homo sapien
catatataaacagcaaatgaatgca

SEQ ID NO: 787104 - DNA, 25 bp, Homo sapien
gcgaccgaacctggccttaagcaga

SEQ ID NO: 787105 - DNA, 25 bp, Homo sapien
ttttccatggacatcccagaagtca

SEQ ID NO: 787106 - DNA, 25 bp, Homo sapien
tggctattgggctaaaccaagggta

SEQ ID NO: 787107 - DNA, 25 bp, Homo sapien
gacttttcaagcattcatcactagc

SEQ ID NO: 787108 - DNA, 25 bp, Homo sapien
tacaaatgcacaaagcagaccacac

SEQ ID NO: 787109 - DNA, 25 bp, Homo sapien
tacacacgtgtatagagtcagagcc

SEQ ID NO: 787110 - DNA, 25 bp, Homo sapien
gatgcaggtatacttagagccagag

SEQ ID NO: 787111 - DNA, 25 bp, Homo sapien
gaccacacacacaaagtaccacaga

SEQ ID NO: 787112 - DNA, 25 bp, Homo sapien
tcatagccataagtacaaccatatg

SEQ ID NO: 787113 - DNA, 25 bp, Homo sapien
tagccataagtacaaccatatgctg

SEQ ID NO: 787114 - DNA, 25 bp, Homo sapien
tcactataacaaatcatagccataa

SEQ ID NO: 787115 - DNA, 25 bp, Homo sapien
tgtcctccttcactataacaaatca

SEQ ID NO: 787116 - DNA, 25 bp, Homo sapien
aaaaagtaaaacagtccagacatgg

SEQ ID NO: 787117 - DNA, 25 bp, Homo sapien
ttgagcacagtaggttgaggatgct

SEQ ID NO: 787118 - DNA, 25 bp, Homo sapien
gcttggggaacatagagagacctca

SEQ ID NO: 787119 - DNA, 25 bp, Homo sapien
agtaaaacagtccagacatggtggc

SEQ ID NO: 787120 - DNA, 25 bp, Homo sapien
gttacatctacagtgtgtgctacca

SEQ ID NO: 787121 - DNA, 25 bp, Homo sapien
aatccagtgccacaatcctgtctca

SEQ ID NO: 787122 - DNA, 25 bp, Homo sapien
cagacagacgggcatagagcaaagt

SEQ ID NO: 787123 - DNA, 25 bp, Homo sapien
ttcatgtacacagcgagagagagac

SEQ ID NO: 787124 - DNA, 25 bp, Homo sapien
tacccatcacgtagaaagctgcaga

SEQ ID NO: 787125 - DNA, 25 bp, Homo sapien
ggtaaataagtagctgccccatgaa

SEQ ID NO: 787126 - DNA, 25 bp, Homo sapien
tactgtaggcatggataaccgatgc

SEQ ID NO: 787127 - DNA, 25 bp, Homo sapien
taaccgatgcacctccattaggctg

SEQ ID NO: 787128 - DNA, 25 bp, Homo sapien
tcagcaccaatgtgaagaaaataca

SEQ ID NO: 787129 - DNA, 25 bp, Homo sapien
cattattagagccaaagaattgagg

SEQ ID NO: 787130 - DNA, 25 bp, Homo sapien
caccataaatatggagatacagata

SEQ ID NO: 787131 - DNA, 25 bp, Homo sapien
tcatagtgatccaccataaatatgg

SEQ ID NO: 787132 - DNA, 25 bp, Homo sapien
tccaacatgtcaaggaactcaggga

SEQ ID NO: 787133 - DNA, 25 bp, Homo sapien
tcattgggccagctctgtaagtacc

SEQ ID NO: 787134 - DNA, 25 bp, Homo sapien
tcagggaaataatctcctacttctt

SEQ ID NO: 787135 - DNA, 25 bp, Homo sapien
taccatgagaatacgttctttttac

SEQ ID NO: 787136 - DNA, 25 bp, Homo sapien
aaataattatgcttggatggttctg

SEQ ID NO: 787137 - DNA, 25 bp, Homo sapien
gataaataattatgcagattgcaat

SEQ ID NO: 787138 - DNA, 25 bp, Homo sapien
cctgctagaggtatgattcactata

SEQ ID NO: 787139 - DNA, 25 bp, Homo sapien
tattgttcccctgacaaacacactt

SEQ ID NO: 787140 - DNA, 25 bp, Homo sapien
ttagactagatagcgtcccccatgg

SEQ ID NO: 787141 - DNA, 25 bp, Homo sapien
ctgtaattttagactagatagcgtc

SEQ ID NO: 787142 - DNA, 25 bp, Homo sapien
actagatagcgtcccccatggcagt

SEQ ID NO: 787143 - DNA, 25 bp, Homo sapien
taattttagactagatagcgtcccc

SEQ ID NO: 787144 - DNA, 25 bp, Homo sapien
tgactttggcatatcagccacaggg

SEQ ID NO: 787145 - DNA, 25 bp, Homo sapien
atcatttgttctcctggacgaaccc

SEQ ID NO: 787146 - DNA, 25 bp, Homo sapien
gactttggcatatcagccacaggga

SEQ ID NO: 787147 - DNA, 25 bp, Homo sapien
gttctcctggacgaacccacatgat

SEQ ID NO: 787148 - DNA, 25 bp, Homo sapien
tccaacagcagctgtagtctgtcgt

SEQ ID NO: 787149 - DNA, 25 bp, Homo sapien
tagtctgtcgttcaaaaccttgtcc

SEQ ID NO: 787150 - DNA, 25 bp, Homo sapien
cacttgttcgaggtaggtactgaag

SEQ ID NO: 787151 - DNA, 25 bp, Homo sapien
tgtcctatatgatctgcatgagctc

SEQ ID NO: 787152 - DNA, 25 bp, Homo sapien
ctttcattaaaatagcggtagttat

SEQ ID NO: 787153 - DNA, 25 bp, Homo sapien
tgatgaaacctagattttagcaatt

SEQ ID NO: 787154 - DNA, 25 bp, Homo sapien
cacccagccagattctagcaattta

SEQ ID NO: 787155 - DNA, 25 bp, Homo sapien
ttaaaatagcggtagttatatatac

SEQ ID NO: 787156 - DNA, 25 bp, Homo sapien
tgcattcgttgaactacttctaaga

SEQ ID NO: 787157 - DNA, 25 bp, Homo sapien
ggaggttcatgtaaatctaactgca

SEQ ID NO: 787158 - DNA, 25 bp, Homo sapien
catctttggttatacggggttgatc

SEQ ID NO: 787159 - DNA, 25 bp, Homo sapien
aatctaactgcattcgttgaactac

SEQ ID NO: 787160 - DNA, 25 bp, Homo sapien
aatgtcattatcatatagctgaatc

SEQ ID NO: 787161 - DNA, 25 bp, Homo sapien
tcctggcatagcgaatgccttccct

SEQ ID NO: 787162 - DNA, 25 bp, Homo sapien
ttgcatcatcaacccattggacaca

SEQ ID NO: 787163 - DNA, 25 bp, Homo sapien
gccttccctcctcagttgattcagt

SEQ ID NO: 787164 - DNA, 25 bp, Homo sapien
cagctgaaactgtcttgaactgatg

SEQ ID NO: 787165 - DNA, 25 bp, Homo sapien
tgaggtccaagaacagatgatgtgg

SEQ ID NO: 787166 - DNA, 25 bp, Homo sapien
cttacagatgcaataggttcatgtt

SEQ ID NO: 787167 - DNA, 25 bp, Homo sapien
gatataatttgagccgaatatgcca

SEQ ID NO: 787168 - DNA, 25 bp, Homo sapien
tgtgttgccttgtatcaactagact

SEQ ID NO: 787169 - DNA, 25 bp, Homo sapien
tgttgccttgtatcaactagactta

SEQ ID NO: 787170 - DNA, 25 bp, Homo sapien
gtgctgaactgtgttgccttgtatc

SEQ ID NO: 787171 - DNA, 25 bp, Homo sapien
gaactgtgttgccttgtatcaacta

SEQ ID NO: 787172 - DNA, 25 bp, Homo sapien
aaaaggattttagatggtatatgca

SEQ ID NO: 787173 - DNA, 25 bp, Homo sapien
aaaggattttagatggtatatgcaa

SEQ ID NO: 787174 - DNA, 25 bp, Homo sapien
aaaaaggattttagatggtatatgc

SEQ ID NO: 787175 - DNA, 25 bp, Homo sapien
aaaaaaggattttagatggtatatg

SEQ ID NO: 787176 - DNA, 25 bp, Homo sapien
taatgtcagctctattctaaaacct

SEQ ID NO: 787177 - DNA, 25 bp, Homo sapien
aatgtttacagtgcatctggcccta

SEQ ID NO: 787178 - DNA, 25 bp, Homo sapien
cttcacagttatggacaggcactga

SEQ ID NO: 787179 - DNA, 25 bp, Homo sapien
acagacataggagcaagtccttggc

SEQ ID NO: 787180 - DNA, 25 bp, Homo sapien
tgcactacaataccacactaaatag

SEQ ID NO: 787181 - DNA, 25 bp, Homo sapien
gaattgtcagtttgtctttacagac

SEQ ID NO: 787182 - DNA, 25 bp, Homo sapien
cactaaatagatataccagcagaga

SEQ ID NO: 787183 - DNA, 25 bp, Homo sapien
gcctgcacagtgtgaggaacttaaa

SEQ ID NO: 787184 - DNA, 25 bp, Homo sapien
cacccggccgatgtatgcattttta

SEQ ID NO: 787185 - DNA, 25 bp, Homo sapien
taatgcaaatttacccaaacggtgc

SEQ ID NO: 787186 - DNA, 25 bp, Homo sapien
tcaatgaccaccactcgagaaaagt

SEQ ID NO: 787187 - DNA, 25 bp, Homo sapien
gagcagagtttcttacagcaacgca

SEQ ID NO: 787188 - DNA, 25 bp, Homo sapien
tcttgtcctgctgattgtgaaaatg

SEQ ID NO: 787189 - DNA, 25 bp, Homo sapien
ggcggtgtaagtctggctttgaccc

SEQ ID NO: 787190 - DNA, 25 bp, Homo sapien
ggctttgaccctcgacatggatcac

SEQ ID NO: 787191 - DNA, 25 bp, Homo sapien
cgacatggatcacacaatattaaaa

SEQ ID NO: 787192 - DNA, 25 bp, Homo sapien
aaagcaccttggaactggttcctca

SEQ ID NO: 787193 - DNA, 25 bp, Homo sapien
gagaaagcaccttggaactggttcc

SEQ ID NO: 787194 - DNA, 25 bp, Homo sapien
gcaccttggaactggttcctcatat

SEQ ID NO: 787195 - DNA, 25 bp, Homo sapien
tgagaaagcaccttggaactggttc

SEQ ID NO: 787196 - DNA, 25 bp, Homo sapien
ctggcttttcacactactcttcttg

SEQ ID NO: 787197 - DNA, 25 bp, Homo sapien
tggcttttcacactactcttcttga

SEQ ID NO: 787198 - DNA, 25 bp, Homo sapien
ttttcacactactcttcttgatcat

SEQ ID NO: 787199 - DNA, 25 bp, Homo sapien
gcttttcacactactcttcttgatc

SEQ ID NO: 787200 - DNA, 25 bp, Homo sapien
gcaacagcctctttaaactgtttaa

SEQ ID NO: 787201 - DNA, 25 bp, Homo sapien
ccttggctcagagagtactactcac

SEQ ID NO: 787202 - DNA, 25 bp, Homo sapien
cttttttccgatcctgcaacagcct

SEQ ID NO: 787203 - DNA, 25 bp, Homo sapien
tgtttaaatgagaatgtccttggct

SEQ ID NO: 787204 - DNA, 25 bp, Homo sapien
tcaaaattaggaagtcagttgggaa

SEQ ID NO: 787205 - DNA, 25 bp, Homo sapien
tgtattttgtcatgggctgtaagga

SEQ ID NO: 787206 - DNA, 25 bp, Homo sapien
taaagttgtaagtgcctggactcga

SEQ ID NO: 787207 - DNA, 25 bp, Homo sapien
ctggactcgagtgatagcactgaaa

SEQ ID NO: 787208 - DNA, 25 bp, Homo sapien
tttcctcctaccacgcatgcttttg

SEQ ID NO: 787209 - DNA, 25 bp, Homo sapien
ttttccctgttatcttcctgcatct

SEQ ID NO: 787210 - DNA, 25 bp, Homo sapien
tttccatcaagtatcctctctcatc

SEQ ID NO: 787211 - DNA, 25 bp, Homo sapien
gttcctatccctagcaccttctgat

SEQ ID NO: 787212 - DNA, 25 bp, Homo sapien
taaaactgggatcgtatgtcatcgt

SEQ ID NO: 787213 - DNA, 25 bp, Homo sapien
gtagctcagcatacaggcgtacaat

SEQ ID NO: 787214 - DNA, 25 bp, Homo sapien
tgagcacatttttggagtacgcacc

SEQ ID NO: 787215 - DNA, 25 bp, Homo sapien
tagtaggaaacataacgactgctca

SEQ ID NO: 787216 - DNA, 25 bp, Homo sapien
aaggatccaaactggcgaatttgct

SEQ ID NO: 787217 - DNA, 25 bp, Homo sapien
gtccctctccgctttccggccggca

SEQ ID NO: 787218 - DNA, 25 bp, Homo sapien
aatttgctgatcttcgcgtccctct

SEQ ID NO: 787219 - DNA, 25 bp, Homo sapien
aactggcgaatttgctgatcttcgc

SEQ ID NO: 787220 - DNA, 25 bp, Homo sapien
tcggttggtttgcactggcggacaa

SEQ ID NO: 787221 - DNA, 25 bp, Homo sapien
tgaatccagattggcgtcctctcta

SEQ ID NO: 787222 - DNA, 25 bp, Homo sapien
gacaaatggtccaattaccgcggaa

SEQ ID NO: 787223 - DNA, 25 bp, Homo sapien
tgccgcctttctgtcgaacccgaaa

SEQ ID NO: 787224 - DNA, 25 bp, Homo sapien
agagcccaaggagccacaacgaggc

SEQ ID NO: 787225 - DNA, 25 bp, Homo sapien
aggtgcgcgcgggagactccgaagc

SEQ ID NO: 787226 - DNA, 25 bp, Homo sapien
gaagctagcgccgccgccaacagag

SEQ ID NO: 787227 - DNA, 25 bp, Homo sapien
gccgccgccaacagagcccaaggag

SEQ ID NO: 787228 - DNA, 25 bp, Homo sapien
cgtaggagcgagcgccgcgccgcta

SEQ ID NO: 787229 - DNA, 25 bp, Homo sapien
gagcgagcgccgcgccgctaggagg

SEQ ID NO: 787230 - DNA, 25 bp, Homo sapien
cgagcgccgcgccgctaggaggcgg

SEQ ID NO: 787231 - DNA, 25 bp, Homo sapien
aggagcgagcgccgcgccgctagga

SEQ ID NO: 787232 - DNA, 25 bp, Homo sapien
aattctgtcagaactcgacgacctc

SEQ ID NO: 787233 - DNA, 25 bp, Homo sapien
cccggccctcaggtacgggagactg

SEQ ID NO: 787234 - DNA, 25 bp, Homo sapien
ttcggcccgtcaccatcaagacttg

SEQ ID NO: 787235 - DNA, 25 bp, Homo sapien
gcacagcgccaagggaaggaagcaa

SEQ ID NO: 787236 - DNA, 25 bp, Homo sapien
gcttgtggatccattacttcccagt

SEQ ID NO: 787237 - DNA, 25 bp, Homo sapien
cagcttgtggatccattacttccca

SEQ ID NO: 787238 - DNA, 25 bp, Homo sapien
cttcccagttcgggggtcttctgtg

SEQ ID NO: 787239 - DNA, 25 bp, Homo sapien
aaacagcttgtggatccattacttc

SEQ ID NO: 787240 - DNA, 25 bp, Homo sapien
tcccaccttccaaaaggagactgaa

SEQ ID NO: 787241 - DNA, 25 bp, Homo sapien
ctgaacagcatgcagacatagcact

SEQ ID NO: 787242 - DNA, 25 bp, Homo sapien
catacaaatgactttatttcccacc

SEQ ID NO: 787243 - DNA, 25 bp, Homo sapien
ggagactgaacagcatgcagacata

SEQ ID NO: 787244 - DNA, 25 bp, Homo sapien
ccactgaaatcacacattggtcatt

SEQ ID NO: 787245 - DNA, 25 bp, Homo sapien
cactgaaatcacacattggtcattt

SEQ ID NO: 787246 - DNA, 25 bp, Homo sapien
tccactgaaatcacacattggtcat

SEQ ID NO: 787247 - DNA, 25 bp, Homo sapien
tcttttgataccagactatagcatc

SEQ ID NO: 787248 - DNA, 25 bp, Homo sapien
cttttgataccagactatagcatct

SEQ ID NO: 787249 - DNA, 25 bp, Homo sapien
ttcttttgataccagactatagcat

SEQ ID NO: 787250 - DNA, 25 bp, Homo sapien
aaacactgaatgaagagcccttggt

SEQ ID NO: 787251 - DNA, 25 bp, Homo sapien
caaacactgaatgaagagcccttgg

SEQ ID NO: 787252 - DNA, 25 bp, Homo sapien
acttttatactaaggagaactatag

SEQ ID NO: 787253 - DNA, 25 bp, Homo sapien
aaaggtactgctagggaagagtgaa

SEQ ID NO: 787254 - DNA, 25 bp, Homo sapien
attactgtgtagaagcctaaaaagg

SEQ ID NO: 787255 - DNA, 25 bp, Homo sapien
gaactatagatggatccccttggag

SEQ ID NO: 787256 - DNA, 25 bp, Homo sapien
ctgttcctgagacattacgttctcc

SEQ ID NO: 787257 - DNA, 25 bp, Homo sapien
tgagacattacgttctcctggcctg

SEQ ID NO: 787258 - DNA, 25 bp, Homo sapien
tcctgagacattacgttctcctggc

SEQ ID NO: 787259 - DNA, 25 bp, Homo sapien
gttcctgagacattacgttctcctg

SEQ ID NO: 787260 - DNA, 25 bp, Homo sapien
cttggatgatgaactgtgaagaccc

SEQ ID NO: 787261 - DNA, 25 bp, Homo sapien
ttggatgatgaactgtgaagaccct

SEQ ID NO: 787262 - DNA, 25 bp, Homo sapien
tggatgatgaactgtgaagaccctg

SEQ ID NO: 787263 - DNA, 25 bp, Homo sapien
gcgggatgtgaaggaggacgttgtg

SEQ ID NO: 787264 - DNA, 25 bp, Homo sapien
acatgtggggatgaccaagcacagg

SEQ ID NO: 787265 - DNA, 25 bp, Homo sapien
aggagggcatccacttgtaagacat

SEQ ID NO: 787266 - DNA, 25 bp, Homo sapien
accacatgtggggatgaccaagcac

SEQ ID NO: 787267 - DNA, 25 bp, Homo sapien
aattcggtcaatttatatatctagc

SEQ ID NO: 787268 - DNA, 25 bp, Homo sapien
acagatttctagaattcggtcaatt

SEQ ID NO: 787269 - DNA, 25 bp, Homo sapien
aagctagctagttatcaaagattcc

SEQ ID NO: 787270 - DNA, 25 bp, Homo sapien
tagctagttatcaaagattccattc

SEQ ID NO: 787271 - DNA, 25 bp, Homo sapien
tccagatgaccaagcactttgtcat

SEQ ID NO: 787272 - DNA, 25 bp, Homo sapien
aactcatcctgtatctttggtaaca

SEQ ID NO: 787273 - DNA, 25 bp, Homo sapien
ccagatgaccaagcactttgtcatc

SEQ ID NO: 787274 - DNA, 25 bp, Homo sapien
ctacaaactcatcctgtatctttgg

SEQ ID NO: 787275 - DNA, 25 bp, Homo sapien
tgatttctctctgttcaacagattt

SEQ ID NO: 787276 - DNA, 25 bp, Homo sapien
atatttgttgatcatatgctccaat

SEQ ID NO: 787277 - DNA, 25 bp, Homo sapien
gatttctctctgttcaacagatttt

SEQ ID NO: 787278 - DNA, 25 bp, Homo sapien
ttctctctgttcaacagatttttcc

SEQ ID NO: 787279 - DNA, 25 bp, Homo sapien
tttgcttgactatcccaactcttct

SEQ ID NO: 787280 - DNA, 25 bp, Homo sapien
gcttgactatcccaactcttcttca

SEQ ID NO: 787281 - DNA, 25 bp, Homo sapien
tgctctttatttgcttgactatccc

SEQ ID NO: 787282 - DNA, 25 bp, Homo sapien
ttatttgcttgactatcccaactct

SEQ ID NO: 787283 - DNA, 25 bp, Homo sapien
catctgatctataactgtctgtgaa

SEQ ID NO: 787284 - DNA, 25 bp, Homo sapien
aggacttcatctgatctataactgt

SEQ ID NO: 787285 - DNA, 25 bp, Homo sapien
tgtgaacgatcgagataacttgcta

SEQ ID NO: 787286 - DNA, 25 bp, Homo sapien
tataactgtctgtgaacgatcgaga

SEQ ID NO: 787287 - DNA, 25 bp, Homo sapien
caggtatgtcccagctaattaagaa

SEQ ID NO: 787288 - DNA, 25 bp, Homo sapien
aggtatgtcccagctaattaagaaa

SEQ ID NO: 787289 - DNA, 25 bp, Homo sapien
caacatctatgaggtctggtttcac

SEQ ID NO: 787290 - DNA, 25 bp, Homo sapien
caagatcaacatctatgaggtctgg

SEQ ID NO: 787291 - DNA, 25 bp, Homo sapien
tcttacaagatcaacatctatgagg

SEQ ID NO: 787292 - DNA, 25 bp, Homo sapien
tgaggtctggtttcacatgtgctgt

SEQ ID NO: 787293 - DNA, 25 bp, Homo sapien
gaagtccaaggactttcaggctttg

SEQ ID NO: 787294 - DNA, 25 bp, Homo sapien
tttctggtcagagaagtccaaggac

SEQ ID NO: 787295 - DNA, 25 bp, Homo sapien
atacaactcgaacaattccctttct

SEQ ID NO: 787296 - DNA, 25 bp, Homo sapien
gatgttacttgtaaccaccaccgga

SEQ ID NO: 787297 - DNA, 25 bp, Homo sapien
taagatgtaacctggcttagaagaa

SEQ ID NO: 787298 - DNA, 25 bp, Homo sapien
gaaaataacggctttgttcacgtga

SEQ ID NO: 787299 - DNA, 25 bp, Homo sapien
tttatctaaataacagtctgcagtt

SEQ ID NO: 787300 - DNA, 25 bp, Homo sapien
caaaattatcatagtccacaccctt

SEQ ID NO: 787301 - DNA, 25 bp, Homo sapien
aaaagtgatcatgtccctcccatgg

SEQ ID NO: 787302 - DNA, 25 bp, Homo sapien
gagacagtagcttttcctccgtaac

SEQ ID NO: 787303 - DNA, 25 bp, Homo sapien
tcctctcaagttaaggtttagaaga

SEQ ID NO: 787304 - DNA, 25 bp, Homo sapien
gaaattctgacgacaaggcattaga

SEQ ID NO: 787305 - DNA, 25 bp, Homo sapien
gaaagagccaacctaagaatgtgac

SEQ ID NO: 787306 - DNA, 25 bp, Homo sapien
aaagagccaacctaagaatgtgacc

SEQ ID NO: 787307 - DNA, 25 bp, Homo sapien
agtgaagatattatccgagcctctc

SEQ ID NO: 787308 - DNA, 25 bp, Homo sapien
tattatccgagcctctcaatccagc

SEQ ID NO: 787309 - DNA, 25 bp, Homo sapien
gttttgcctacacagcatcccttag

SEQ ID NO: 787310 - DNA, 25 bp, Homo sapien
tctgccgcagcctaaccatggtatt

SEQ ID NO: 787311 - DNA, 25 bp, Homo sapien
gctaactattactacatgaagggaa

SEQ ID NO: 787312 - DNA, 25 bp, Homo sapien
taaactctcggaacaagacaacacc

SEQ ID NO: 787313 - DNA, 25 bp, Homo sapien
cctctgtcagaggtatgctgtgtgg

SEQ ID NO: 787314 - DNA, 25 bp, Homo sapien
cacctctgtcagaggtatgctgtgt

SEQ ID NO: 787315 - DNA, 25 bp, Homo sapien
ctgtgtgggctagaagtggagcaga

SEQ ID NO: 787316 - DNA, 25 bp, Homo sapien
tgctgtgtgggctagaagtggagca

SEQ ID NO: 787317 - DNA, 25 bp, Homo sapien
tcttgtggaaacaatctggcaatgc

SEQ ID NO: 787318 - DNA, 25 bp, Homo sapien
tggaaacaatctggcaatgcacagt

SEQ ID NO: 787319 - DNA, 25 bp, Homo sapien
ggtgttcttgtggaaacaatctggc

SEQ ID NO: 787320 - DNA, 25 bp, Homo sapien
aatctggcaatgcacagttcccagg

SEQ ID NO: 787321 - DNA, 25 bp, Homo sapien
caacgctgtgagaggtgcttgtacc

SEQ ID NO: 787322 - DNA, 25 bp, Homo sapien
tgttatctgtggtactagaaccatc

SEQ ID NO: 787323 - DNA, 25 bp, Homo sapien
tgtaccgtggttctgaactgctccc

SEQ ID NO: 787324 - DNA, 25 bp, Homo sapien
tccttccctatgtacttccaaatgg

SEQ ID NO: 787325 - DNA, 25 bp, Homo sapien
gattcctgtcacttttagccttagt

SEQ ID NO: 787326 - DNA, 25 bp, Homo sapien
aactaatatgcctgactgatctacc

SEQ ID NO: 787327 - DNA, 25 bp, Homo sapien
tgagagctgtaattcctgtttgctg

SEQ ID NO: 787328 - DNA, 25 bp, Homo sapien
tttgacctggtgatttagagacaga

SEQ ID NO: 787329 - DNA, 25 bp, Homo sapien
tccccactatctcctcaaagttcat

SEQ ID NO: 787330 - DNA, 25 bp, Homo sapien
tccctccaatcttctctgggttgtt

SEQ ID NO: 787331 - DNA, 25 bp, Homo sapien
gtttctctccccactatctcctcaa

SEQ ID NO: 787332 - DNA, 25 bp, Homo sapien
tgcttccctccaatcttctctgggt

SEQ ID NO: 787333 - DNA, 25 bp, Homo sapien
tgaacactgtgcaacctgcagatgt

SEQ ID NO: 787334 - DNA, 25 bp, Homo sapien
cccttgaacactgtgcaacctgcag

SEQ ID NO: 787335 - DNA, 25 bp, Homo sapien
tctcccttgaacactgtgcaacctg

SEQ ID NO: 787336 - DNA, 25 bp, Homo sapien
aacactgtgcaacctgcagatgtgg

SEQ ID NO: 787337 - DNA, 25 bp, Homo sapien
ccatcttcaccgcttttaacagtct

SEQ ID NO: 787338 - DNA, 25 bp, Homo sapien
actgaggttcatggttttgtattcc

SEQ ID NO: 787339 - DNA, 25 bp, Homo sapien
ctcttctggtcgaatagtttcacac

SEQ ID NO: 787340 - DNA, 25 bp, Homo sapien
cagtcttcttcccatcaagggatac

SEQ ID NO: 787341 - DNA, 25 bp, Homo sapien
tgtttcttataatggtgtgactttc

SEQ ID NO: 787342 - DNA, 25 bp, Homo sapien
ttccgaagaacaccttcagaagtcc

SEQ ID NO: 787343 - DNA, 25 bp, Homo sapien
gagtatcctgtttcaggaccttcct

SEQ ID NO: 787344 - DNA, 25 bp, Homo sapien
tcagaagtcctgtccacatgacgac

SEQ ID NO: 787345 - DNA, 25 bp, Homo sapien
atgtatacacttaaggacaaagtat

SEQ ID NO: 787346 - DNA, 25 bp, Homo sapien
ggcaatcatattccagcacagcgta

SEQ ID NO: 787347 - DNA, 25 bp, Homo sapien
gcattagtgtctgtatggcaaccac

SEQ ID NO: 787348 - DNA, 25 bp, Homo sapien
caaatgacatgggtgaagaggcaat

SEQ ID NO: 787349 - DNA, 25 bp, Homo sapien
gaggcaatagagcagacacactggc

SEQ ID NO: 787350 - DNA, 25 bp, Homo sapien
aaagttccgattccttcacctagca

SEQ ID NO: 787351 - DNA, 25 bp, Homo sapien
cgtaaccttttactccagtgacagt

SEQ ID NO: 787352 - DNA, 25 bp, Homo sapien
gctttgattatgttccaccctaggc

SEQ ID NO: 787353 - DNA, 25 bp, Homo sapien
tgagcccctaagcatggcttgttct

SEQ ID NO: 787354 - DNA, 25 bp, Homo sapien
tggccttgcactctcagaatcctgt

SEQ ID NO: 787355 - DNA, 25 bp, Homo sapien
ctggaacttgaacagcgagagctgc

SEQ ID NO: 787356 - DNA, 25 bp, Homo sapien
gagagctgcaactagtacccgattt

SEQ ID NO: 787357 - DNA, 25 bp, Homo sapien
tgtctcactggtacaagatgaatgg

SEQ ID NO: 787358 - DNA, 25 bp, Homo sapien
ctcatagctccacataagccaaaac

SEQ ID NO: 787359 - DNA, 25 bp, Homo sapien
tccacataagccaaaaccataaacc

SEQ ID NO: 787360 - DNA, 25 bp, Homo sapien
ccacataagccaaaaccataaacca

SEQ ID NO: 787361 - DNA, 25 bp, Homo sapien
tagctccacataagccaaaaccata

SEQ ID NO: 787362 - DNA, 25 bp, Homo sapien
tatcctataaaatcgtgctgtccaa

SEQ ID NO: 787363 - DNA, 25 bp, Homo sapien
ccagcctctgggattgttatagcag

SEQ ID NO: 787364 - DNA, 25 bp, Homo sapien
aatatagtaccctcctcacatgtgg

SEQ ID NO: 787365 - DNA, 25 bp, Homo sapien
gagctcccttatttccaccgtgtaa

SEQ ID NO: 787366 - DNA, 25 bp, Homo sapien
tgttgatacatgcagccgagttcat

SEQ ID NO: 787367 - DNA, 25 bp, Homo sapien
gccgagttcattcaatttcactgct

SEQ ID NO: 787368 - DNA, 25 bp, Homo sapien
attcatgttgatacatgcagccgag

SEQ ID NO: 787369 - DNA, 25 bp, Homo sapien
tacatgcagccgagttcattcaatt

SEQ ID NO: 787370 - DNA, 25 bp, Homo sapien
gcccggccgctatatatgttttcaa

SEQ ID NO: 787371 - DNA, 25 bp, Homo sapien
catactcgtgtttccaactgtggga

SEQ ID NO: 787372 - DNA, 25 bp, Homo sapien
tatattcagctatagaggagggcta

SEQ ID NO: 787373 - DNA, 25 bp, Homo sapien
gttcttggctaactgaaaccttcgc

SEQ ID NO: 787374 - DNA, 25 bp, Homo sapien
ctgggtgggaactatggagccaggg

SEQ ID NO: 787375 - DNA, 25 bp, Homo sapien
tgggaactatggagccagggcaaat

SEQ ID NO: 787376 - DNA, 25 bp, Homo sapien
aactatggagccagggcaaatgact

SEQ ID NO: 787377 - DNA, 25 bp, Homo sapien
gtgggaactatggagccagggcaaa

SEQ ID NO: 787378 - DNA, 25 bp, Homo sapien
cattccactgatttcaagtacagac

SEQ ID NO: 787379 - DNA, 25 bp, Homo sapien
tatcattccactgatttcaagtaca

SEQ ID NO: 787380 - DNA, 25 bp, Homo sapien
tcattccactgatttcaagtacaga

SEQ ID NO: 787381 - DNA, 25 bp, Homo sapien
ttccactgatttcaagtacagacat

SEQ ID NO: 787382 - DNA, 25 bp, Homo sapien
gagaaaaattatagaccgtatcatc

SEQ ID NO: 787383 - DNA, 25 bp, Homo sapien
caacaatctctagtccaaagaaaag

SEQ ID NO: 787384 - DNA, 25 bp, Homo sapien
cttggtcagataagtgaaaacacta

SEQ ID NO: 787385 - DNA, 25 bp, Homo sapien
gagtggtttggtgacaaatcactgt

SEQ ID NO: 787386 - DNA, 25 bp, Homo sapien
gctcacactgagatatgttataggg

SEQ ID NO: 787387 - DNA, 25 bp, Homo sapien
taagttacagagcacaaactagatc

SEQ ID NO: 787388 - DNA, 25 bp, Homo sapien
gagacttccccgtcaactgctttta

SEQ ID NO: 787389 - DNA, 25 bp, Homo sapien
taaaagcttccagtatgctagactg

SEQ ID NO: 787390 - DNA, 25 bp, Homo sapien
tgtagcttgagaaagtcggaaaaca

SEQ ID NO: 787391 - DNA, 25 bp, Homo sapien
caaaaatctggtatcctattcctgg

SEQ ID NO: 787392 - DNA, 25 bp, Homo sapien
ctattcctggtatatggctgttcac

SEQ ID NO: 787393 - DNA, 25 bp, Homo sapien
gacacgcgaaccacaaaacttatta

SEQ ID NO: 787394 - DNA, 25 bp, Homo sapien
gaaataataaagtacttcaggaata

SEQ ID NO: 787395 - DNA, 25 bp, Homo sapien
ccttgcagatgttaaatgtccaaag

SEQ ID NO: 787396 - DNA, 25 bp, Homo sapien
ttaagataggaacggagagatagcc

SEQ ID NO: 787397 - DNA, 25 bp, Homo sapien
gaggaacctcagattttcgagccct

SEQ ID NO: 787398 - DNA, 25 bp, Homo sapien
tcttcaaccggaaatgaggaacctc

SEQ ID NO: 787399 - DNA, 25 bp, Homo sapien
gataaatacaactgagatagtcaat

SEQ ID NO: 787400 - DNA, 25 bp, Homo sapien
caactgagatagtcaataagaaagc

SEQ ID NO: 787401 - DNA, 25 bp, Homo sapien
gcagatgaaactattacatcaactg

SEQ ID NO: 787402 - DNA, 25 bp, Homo sapien
tcaactgatcgctgaggacctcgac

SEQ ID NO: 787403 - DNA, 25 bp, Homo sapien
tacacaggtcaaggcctcatctcct

SEQ ID NO: 787404 - DNA, 25 bp, Homo sapien
gggcataaaatttcaagtctctggg

SEQ ID NO: 787405 - DNA, 25 bp, Homo sapien
catgctgccatagcattaatgctta

SEQ ID NO: 787406 - DNA, 25 bp, Homo sapien
tctgggatacaatactaatactggc

SEQ ID NO: 787407 - DNA, 25 bp, Homo sapien
tagacctatgttggatctcccacga

SEQ ID NO: 787408 - DNA, 25 bp, Homo sapien
tctcaattgtgccagtattaaactg

SEQ ID NO: 787409 - DNA, 25 bp, Homo sapien
tctactttgactatacgacagccag

SEQ ID NO: 787410 - DNA, 25 bp, Homo sapien
tataaaattggccactgatgccttc

SEQ ID NO: 787411 - DNA, 25 bp, Homo sapien
tcagagattgtatgtgtcaggcaaa

SEQ ID NO: 787412 - DNA, 25 bp, Homo sapien
tctgtctcgccccatagctaaagga

SEQ ID NO: 787413 - DNA, 25 bp, Homo sapien
taatgtgtctgtaaagtcgcttgga

SEQ ID NO: 787414 - DNA, 25 bp, Homo sapien
tagctttaggcctctgtctgtctcg

SEQ ID NO: 787415 - DNA, 25 bp, Homo sapien
taatgccatctgatcatatattagg

SEQ ID NO: 787416 - DNA, 25 bp, Homo sapien
cttcccacattgatatataatgcca

SEQ ID NO: 787417 - DNA, 25 bp, Homo sapien
ccattggtcattctatacctgggca

SEQ ID NO: 787418 - DNA, 25 bp, Homo sapien
gtttatggtgtctttgcaggacaca

SEQ ID NO: 787419 - DNA, 25 bp, Homo sapien
tattggccagtaaaacaatcaacca

SEQ ID NO: 787420 - DNA, 25 bp, Homo sapien
cactgggttcttggatattacatct

SEQ ID NO: 787421 - DNA, 25 bp, Homo sapien
taatacctgctaatctaatgggcgt

SEQ ID NO: 787422 - DNA, 25 bp, Homo sapien
gaagttaatatctgggagccaaatc

SEQ ID NO: 787423 - DNA, 25 bp, Homo sapien
tagaaacattctacattaattatga

SEQ ID NO: 787424 - DNA, 25 bp, Homo sapien
ttagaaacattctacattaattatg

SEQ ID NO: 787425 - DNA, 25 bp, Homo sapien
aaataaacatagattgttcataaat

SEQ ID NO: 787426 - DNA, 25 bp, Homo sapien
gaaacattctacattaattatgaaa

SEQ ID NO: 787427 - DNA, 25 bp, Homo sapien
gatgcaccagattaccaattcccaa

SEQ ID NO: 787428 - DNA, 25 bp, Homo sapien
aaaaagtgttaacgagatgcaccag

SEQ ID NO: 787429 - DNA, 25 bp, Homo sapien
tgtagtgacaatcaaggaagatctc

SEQ ID NO: 787430 - DNA, 25 bp, Homo sapien
ggaagatctcgtgtacatgaagtag

SEQ ID NO: 787431 - DNA, 25 bp, Homo sapien
gaatgtacacccaaaccaaagctag

SEQ ID NO: 787432 - DNA, 25 bp, Homo sapien
gaaaaatgctctaaccccaagccag

SEQ ID NO: 787433 - DNA, 25 bp, Homo sapien
taagccagaactcgtgctaagccaa

SEQ ID NO: 787434 - DNA, 25 bp, Homo sapien
caagccagtggaagaagcaagccta

SEQ ID NO: 787435 - DNA, 25 bp, Homo sapien
ctttagcagtttagtagccagtttt

SEQ ID NO: 787436 - DNA, 25 bp, Homo sapien
tagcagtttagtagccagttttaaa

SEQ ID NO: 787437 - DNA, 25 bp, Homo sapien
tttagcagtttagtagccagtttta

SEQ ID NO: 787438 - DNA, 25 bp, Homo sapien
ttagcagtttagtagccagttttaa

SEQ ID NO: 787439 - DNA, 25 bp, Homo sapien
caacctgggtgatgttataaagcag

SEQ ID NO: 787440 - DNA, 25 bp, Homo sapien
cagctgacaggataacaacctgggt

SEQ ID NO: 787441 - DNA, 25 bp, Homo sapien
gcaagtcactgataacaccagaaac

SEQ ID NO: 787442 - DNA, 25 bp, Homo sapien
taaagcagcggattcattgtaagcc

SEQ ID NO: 787443 - DNA, 25 bp, Homo sapien
gaatcagtgacaagctttcaggcag

SEQ ID NO: 787444 - DNA, 25 bp, Homo sapien
cattgatggagaaacggtgctgagc

SEQ ID NO: 787445 - DNA, 25 bp, Homo sapien
cctcaagtaaggcaagttcacggca

SEQ ID NO: 787446 - DNA, 25 bp, Homo sapien
cattcatggtattcttaaaggcagc

SEQ ID NO: 787447 - DNA, 25 bp, Homo sapien
gtttgctgtattcaaaaacaaagaa

SEQ ID NO: 787448 - DNA, 25 bp, Homo sapien
attaccatagaaatgtatatgacct

SEQ ID NO: 787449 - DNA, 25 bp, Homo sapien
ccagtttgctgtattcaaaaacaaa

SEQ ID NO: 787450 - DNA, 25 bp, Homo sapien
ccatagaaatgtatatgacctgaaa

SEQ ID NO: 787451 - DNA, 25 bp, Homo sapien
ttgtcctaagagaccttctggtgct

SEQ ID NO: 787452 - DNA, 25 bp, Homo sapien
tgtcctaagagaccttctggtgctc

SEQ ID NO: 787453 - DNA, 25 bp, Homo sapien
gcttgtcctaagagaccttctggtg

SEQ ID NO: 787454 - DNA, 25 bp, Homo sapien
cttgtcctaagagaccttctggtgc

SEQ ID NO: 787455 - DNA, 25 bp, Homo sapien
cctgagaatccaaaagatgacgcca

SEQ ID NO: 787456 - DNA, 25 bp, Homo sapien
aacaggctcgatggaaaacttaaag

SEQ ID NO: 787457 - DNA, 25 bp, Homo sapien
gacgccaagtcattttcagctcgtg

SEQ ID NO: 787458 - DNA, 25 bp, Homo sapien
tgtggtcgctgaggcatcataagga

SEQ ID NO: 787459 - DNA, 25 bp, Homo sapien
cttcaggagggcagctagaggtgtg

SEQ ID NO: 787460 - DNA, 25 bp, Homo sapien
ttgaaccaggcaagaagcctcctgg

SEQ ID NO: 787461 - DNA, 25 bp, Homo sapien
tggggagaacgggaatccagcatgc

SEQ ID NO: 787462 - DNA, 25 bp, Homo sapien
ctggcaccaccaggatccttcagga

SEQ ID NO: 787463 - DNA, 25 bp, Homo sapien
aactacaacagggatcaccacggca

SEQ ID NO: 787464 - DNA, 25 bp, Homo sapien
agacagagcagcatacggaggctca

SEQ ID NO: 787465 - DNA, 25 bp, Homo sapien
gacagagcagcatacggaggctcac

SEQ ID NO: 787466 - DNA, 25 bp, Homo sapien
ggatcaccacggcagacaggaggca

SEQ ID NO: 787467 - DNA, 25 bp, Homo sapien
attaaatatgacctggaggtagatg

SEQ ID NO: 787468 - DNA, 25 bp, Homo sapien
ggtattaaatatgacctggaggtag

SEQ ID NO: 787469 - DNA, 25 bp, Homo sapien
gtattaaatatgacctggaggtaga

SEQ ID NO: 787470 - DNA, 25 bp, Homo sapien
aaggtattaaatatgacctggaggt

SEQ ID NO: 787471 - DNA, 25 bp, Homo sapien
tcagatggttggcaccggtaagtcc

SEQ ID NO: 787472 - DNA, 25 bp, Homo sapien
acagagtctcatcgcaggctgctgc

SEQ ID NO: 787473 - DNA, 25 bp, Homo sapien
tagtcaggtgcatggtccagaggcc

SEQ ID NO: 787474 - DNA, 25 bp, Homo sapien
gaccattcacgttctgggcatccag

SEQ ID NO: 787475 - DNA, 25 bp, Homo sapien
gccaggctcgaacaggtctcaaact

SEQ ID NO: 787476 - DNA, 25 bp, Homo sapien
gaagccaggtcctattgacaacatg

SEQ ID NO: 787477 - DNA, 25 bp, Homo sapien
tctcacgtattcaggtgcatcaggc

SEQ ID NO: 787478 - DNA, 25 bp, Homo sapien
cctcagacaggtttagtgcccatct

SEQ ID NO: 787479 - DNA, 25 bp, Homo sapien
tcatatagctgcacacaaggagatg

SEQ ID NO: 787480 - DNA, 25 bp, Homo sapien
gatacaaaatctgtggccaaccatg

SEQ ID NO: 787481 - DNA, 25 bp, Homo sapien
tttactctaaggacagcgctgactt

SEQ ID NO: 787482 - DNA, 25 bp, Homo sapien
cccagccccgtgtgtctctaaatga

SEQ ID NO: 787483 - DNA, 25 bp, Homo sapien
tgtagaagcaatggccaaatccaca

SEQ ID NO: 787484 - DNA, 25 bp, Homo sapien
caatacgggcgattctacaggacaa

SEQ ID NO: 787485 - DNA, 25 bp, Homo sapien
tgattctcagcgtcagatggcctca

SEQ ID NO: 787486 - DNA, 25 bp, Homo sapien
tcttcacgacatgaataatcaggtg

SEQ ID NO: 787487 - DNA, 25 bp, Homo sapien
gacccgccagtaggattgacaagac

SEQ ID NO: 787488 - DNA, 25 bp, Homo sapien
agtgagcctgaattgagagccgccc

SEQ ID NO: 787489 - DNA, 25 bp, Homo sapien
aatatataatcgtgactgtctccag

SEQ ID NO: 787490 - DNA, 25 bp, Homo sapien
gccccggatgctcatcgtcattagt

SEQ ID NO: 787491 - DNA, 25 bp, Homo sapien
agccagcctcttggataagagactc

SEQ ID NO: 787492 - DNA, 25 bp, Homo sapien
tggataagagactcccagctgaact

SEQ ID NO: 787493 - DNA, 25 bp, Homo sapien
tccactgaccttcccaccagaagag

SEQ ID NO: 787494 - DNA, 25 bp, Homo sapien
accaaagtccctcatagcctgttct

SEQ ID NO: 787495 - DNA, 25 bp, Homo sapien
ctgtggaacagaagcgtctggggga

SEQ ID NO: 787496 - DNA, 25 bp, Homo sapien
aacagaagcgtctgggggagagtca

SEQ ID NO: 787497 - DNA, 25 bp, Homo sapien
tggaacagaagcgtctgggggagag

SEQ ID NO: 787498 - DNA, 25 bp, Homo sapien
acagaagcgtctgggggagagtcag

SEQ ID NO: 787499 - DNA, 25 bp, Homo sapien
tgaggaagtgactgctctgctgaag

SEQ ID NO: 787500 - DNA, 25 bp, Homo sapien
gtaatgccacaaccaatgacacaat

SEQ ID NO: 787501 - DNA, 25 bp, Homo sapien
ttttcatcatcaggtaagtaatgcc

SEQ ID NO: 787502 - DNA, 25 bp, Homo sapien
agaagtcaaggacaccatagcaggg

SEQ ID NO: 787503 - DNA, 25 bp, Homo sapien
ctgcaggcatgcctggattcttgct

SEQ ID NO: 787504 - DNA, 25 bp, Homo sapien
catgcctggattcttgcttcttgat

SEQ ID NO: 787505 - DNA, 25 bp, Homo sapien
gcttcttgatctggatttccaactc

SEQ ID NO: 787506 - DNA, 25 bp, Homo sapien
cctggattcttgcttcttgatctgg

SEQ ID NO: 787507 - DNA, 25 bp, Homo sapien
aaatgagagccttatcttaagagct

SEQ ID NO: 787508 - DNA, 25 bp, Homo sapien
ggtaaccggccaccacaaatgagag

SEQ ID NO: 787509 - DNA, 25 bp, Homo sapien
gctctaggagtttgacgaatctttt

SEQ ID NO: 787510 - DNA, 25 bp, Homo sapien
cctgatgaaactgcctcttggagag

SEQ ID NO: 787511 - DNA, 25 bp, Homo sapien
caactatagtgccagacaggatgcc

SEQ ID NO: 787512 - DNA, 25 bp, Homo sapien
tgtattccaagcatgagacacgcca

SEQ ID NO: 787513 - DNA, 25 bp, Homo sapien
tcagtttggaactacagccaggcat

SEQ ID NO: 787514 - DNA, 25 bp, Homo sapien
cagaggtggtaaaccctgtggctac

SEQ ID NO: 787515 - DNA, 25 bp, Homo sapien
tcccaggctagcagagatggatagc

SEQ ID NO: 787516 - DNA, 25 bp, Homo sapien
tttaatcaagataggcaacgctgca

SEQ ID NO: 787517 - DNA, 25 bp, Homo sapien
caacgctgcagttcctttatgaaga

SEQ ID NO: 787518 - DNA, 25 bp, Homo sapien
gaggcttttctgtcgtcccaggcta

SEQ ID NO: 787519 - DNA, 25 bp, Homo sapien
tggcatccatcctcggtgttagcag

SEQ ID NO: 787520 - DNA, 25 bp, Homo sapien
ttgttctcgacatatctagacaggg

SEQ ID NO: 787521 - DNA, 25 bp, Homo sapien
ttgtatcctagggaacagtttgcca

SEQ ID NO: 787522 - DNA, 25 bp, Homo sapien
tcggaaccgttcacccatgacatgt

SEQ ID NO: 787523 - DNA, 25 bp, Homo sapien
gcatcgcatcaacgcgcagacctaa

SEQ ID NO: 787524 - DNA, 25 bp, Homo sapien
gtgcttgggcggcatcgcatcaacg

SEQ ID NO: 787525 - DNA, 25 bp, Homo sapien
aacgcgcagacctaaactgatccta

SEQ ID NO: 787526 - DNA, 25 bp, Homo sapien
tgtccggtgtgcttgggcggcatcg

SEQ ID NO: 787527 - DNA, 25 bp, Homo sapien
tcacacgcatagatccacgaggcac

SEQ ID NO: 787528 - DNA, 25 bp, Homo sapien
atagatccacgaggcaccaaggcct

SEQ ID NO: 787529 - DNA, 25 bp, Homo sapien
tgggagcatcgacgtgaagtcccac

SEQ ID NO: 787530 - DNA, 25 bp, Homo sapien
accaaggcctgggagcatcgacgtg

SEQ ID NO: 787531 - DNA, 25 bp, Homo sapien
tctccactcatgaccatataccaat

SEQ ID NO: 787532 - DNA, 25 bp, Homo sapien
tcaatgtggtttcttcgttctccac

SEQ ID NO: 787533 - DNA, 25 bp, Homo sapien
cccagaattcaaatctatcaatgtg

SEQ ID NO: 787534 - DNA, 25 bp, Homo sapien
cagaattcaaatctatcaatgtggt

SEQ ID NO: 787535 - DNA, 25 bp, Homo sapien
ggttcttgcacaggggggttatcca

SEQ ID NO: 787536 - DNA, 25 bp, Homo sapien
tccaggtggcagatctaccaggttc

SEQ ID NO: 787537 - DNA, 25 bp, Homo sapien
tgccttgggggcactggttcttgca

SEQ ID NO: 787538 - DNA, 25 bp, Homo sapien
ggttatccaggtggcagatctacca

SEQ ID NO: 787539 - DNA, 25 bp, Homo sapien
cagttgtcctaaaggattgccccac

SEQ ID NO: 787540 - DNA, 25 bp, Homo sapien
gattgccccactcaaaatcttttcc

SEQ ID NO: 787541 - DNA, 25 bp, Homo sapien
aaaggattgccccactcaaaatctt

SEQ ID NO: 787542 - DNA, 25 bp, Homo sapien
tcctaaaggattgccccactcaaaa

SEQ ID NO: 787543 - DNA, 25 bp, Homo sapien
caactctctttccacccataacagc

SEQ ID NO: 787544 - DNA, 25 bp, Homo sapien
tcaactctctttccacccataacag

SEQ ID NO: 787545 - DNA, 25 bp, Homo sapien
aactctctttccacccataacagcc

SEQ ID NO: 787546 - DNA, 25 bp, Homo sapien
tggaaaggacttggagccataagtg

SEQ ID NO: 787547 - DNA, 25 bp, Homo sapien
gagagacacttaagtgaggaagccc

SEQ ID NO: 787548 - DNA, 25 bp, Homo sapien
tcctggaaaggacttggagccataa

SEQ ID NO: 787549 - DNA, 25 bp, Homo sapien
cctgagagacacttaagtgaggaag

SEQ ID NO: 787550 - DNA, 25 bp, Homo sapien
tcagcaatggtaaggttagggaatc

SEQ ID NO: 787551 - DNA, 25 bp, Homo sapien
tttaacgaccaagttacagtagctg

SEQ ID NO: 787552 - DNA, 25 bp, Homo sapien
tccggttcatgcaaggatctcctat

SEQ ID NO: 787553 - DNA, 25 bp, Homo sapien
tggaaactcaaggttcccaggaatc

SEQ ID NO: 787554 - DNA, 25 bp, Homo sapien
cagaattcattcaacagaggtgaca

SEQ ID NO: 787555 - DNA, 25 bp, Homo sapien
aacagtgctgagtctgggaaaccct

SEQ ID NO: 787556 - DNA, 25 bp, Homo sapien
ggctgatgggctcactcaacttggt

SEQ ID NO: 787557 - DNA, 25 bp, Homo sapien
actgatgagtgtcccacacagaggc

SEQ ID NO: 787558 - DNA, 25 bp, Homo sapien
gacatactgtatagcctgaaagcca

SEQ ID NO: 787559 - DNA, 25 bp, Homo sapien
tctaaaactaggcattgtcccaggg

SEQ ID NO: 787560 - DNA, 25 bp, Homo sapien
gaacaggcctgagtctggatccact

SEQ ID NO: 787561 - DNA, 25 bp, Homo sapien
gatgtggtcattcaccgcaaagaga

SEQ ID NO: 787562 - DNA, 25 bp, Homo sapien
gatctggctatcatgttaacaggcc

SEQ ID NO: 787563 - DNA, 25 bp, Homo sapien
tatttttgtatagggcccagtagca

SEQ ID NO: 787564 - DNA, 25 bp, Homo sapien
ttgcacatacctgagaagtcctggg

SEQ ID NO: 787565 - DNA, 25 bp, Homo sapien
tagcactaccttgaccacatgactg

SEQ ID NO: 787566 - DNA, 25 bp, Homo sapien
tttagcctataaacctgctctaatt

SEQ ID NO: 787567 - DNA, 25 bp, Homo sapien
tataaacctgctctaatttatccca

SEQ ID NO: 787568 - DNA, 25 bp, Homo sapien
gcctataaacctgctctaatttatc

SEQ ID NO: 787569 - DNA, 25 bp, Homo sapien
taaacctgctctaatttatcccatt

SEQ ID NO: 787570 - DNA, 25 bp, Homo sapien
aaatttcccagtgccttatatgaat

SEQ ID NO: 787571 - DNA, 25 bp, Homo sapien
atttcccagtgccttatatgaattc

SEQ ID NO: 787572 - DNA, 25 bp, Homo sapien
actgaaatttcccagtgccttatat

SEQ ID NO: 787573 - DNA, 25 bp, Homo sapien
tgaaatttcccagtgccttatatga

SEQ ID NO: 787574 - DNA, 25 bp, Homo sapien
caaatgtttgcaagcctttactgtg

SEQ ID NO: 787575 - DNA, 25 bp, Homo sapien
tttgcatttggcaaatgtttgcaag

SEQ ID NO: 787576 - DNA, 25 bp, Homo sapien
ttgcaagcctttactgtgtgtcact

SEQ ID NO: 787577 - DNA, 25 bp, Homo sapien
ctttactgtgtgtcactgctgtact

SEQ ID NO: 787578 - DNA, 25 bp, Homo sapien
acttgctgcacctttggatagctct

SEQ ID NO: 787579 - DNA, 25 bp, Homo sapien
gcacctttggatagctctgttctgg

SEQ ID NO: 787580 - DNA, 25 bp, Homo sapien
gctgcacctttggatagctctgttc

SEQ ID NO: 787581 - DNA, 25 bp, Homo sapien
actctcttgctaaccccattttcta

SEQ ID NO: 787582 - DNA, 25 bp, Homo sapien
cagaataacatgtacttcatccgaa

SEQ ID NO: 787583 - DNA, 25 bp, Homo sapien
ccatcaccagccattcttttcaagg

SEQ ID NO: 787584 - DNA, 25 bp, Homo sapien
caacagactgtcatacagaataaca

SEQ ID NO: 787585 - DNA, 25 bp, Homo sapien
caaggacagcttgttattattctct

SEQ ID NO: 787586 - DNA, 25 bp, Homo sapien
aataaaggatatgtttgacacaata

SEQ ID NO: 787587 - DNA, 25 bp, Homo sapien
tattcaggttaataaaggatatgtt

SEQ ID NO: 787588 - DNA, 25 bp, Homo sapien
aaaggatatgtttgacacaatatca

SEQ ID NO: 787589 - DNA, 25 bp, Homo sapien
caggttaataaaggatatgtttgac

SEQ ID NO: 787590 - DNA, 25 bp, Homo sapien
cctcctccaatggactcagtatttc

SEQ ID NO: 787591 - DNA, 25 bp, Homo sapien
ttgtctacatgatatgctcctcctc

SEQ ID NO: 787592 - DNA, 25 bp, Homo sapien
tcattgtctacatgatatgctcctc

SEQ ID NO: 787593 - DNA, 25 bp, Homo sapien
tgctcctcctccaatggactcagta

SEQ ID NO: 787594 - DNA, 25 bp, Homo sapien
gattctcgtggacttcagtgtgaat

SEQ ID NO: 787595 - DNA, 25 bp, Homo sapien
ttctcgtggacttcagtgtgaatat

SEQ ID NO: 787596 - DNA, 25 bp, Homo sapien
ctgtctctgagattctcgtggactt

SEQ ID NO: 787597 - DNA, 25 bp, Homo sapien
gtctctgagattctcgtggacttca

SEQ ID NO: 787598 - DNA, 25 bp, Homo sapien
agtcaggagaatcacttcaatccgg

SEQ ID NO: 787599 - DNA, 25 bp, Homo sapien
tcaggagaatcacttcaatccggga

SEQ ID NO: 787600 - DNA, 25 bp, Homo sapien
ccgggaggcagaggttgcagtgagc

SEQ ID NO: 787601 - DNA, 25 bp, Homo sapien
gagtcaggagaatcacttcaatccg

SEQ ID NO: 787602 - DNA, 25 bp, Homo sapien
agtgtggtccttgggagtctctaaa

SEQ ID NO: 787603 - DNA, 25 bp, Homo sapien
tgtggtccttgggagtctctaaatc

SEQ ID NO: 787604 - DNA, 25 bp, Homo sapien
ggtccttgggagtctctaaatctgg

SEQ ID NO: 787605 - DNA, 25 bp, Homo sapien
gcagtgtggtccttgggagtctcta

SEQ ID NO: 787606 - DNA, 25 bp, Homo sapien
tggaaattggttgttgagatgttgc

SEQ ID NO: 787607 - DNA, 25 bp, Homo sapien
gaaatgatctgattcatagtattgg

SEQ ID NO: 787608 - DNA, 25 bp, Homo sapien
tggttgttgagatgttgctgcttct

SEQ ID NO: 787609 - DNA, 25 bp, Homo sapien
tagtattggaaattggttgttgaga

SEQ ID NO: 787610 - DNA, 25 bp, Homo sapien
aaaaataacaaccataacttcattg

SEQ ID NO: 787611 - DNA, 25 bp, Homo sapien
aacttcattgttgggttctccctgg

SEQ ID NO: 787612 - DNA, 25 bp, Homo sapien
taacaaccataacttcattgttggg

SEQ ID NO: 787613 - DNA, 25 bp, Homo sapien
cataacttcattgttgggttctccc

SEQ ID NO: 787614 - DNA, 25 bp, Homo sapien
tggaagcatctctcatcagtagtct

SEQ ID NO: 787615 - DNA, 25 bp, Homo sapien
tctaagtttccattccatggtgaga

SEQ ID NO: 787616 - DNA, 25 bp, Homo sapien
tttggaagcatctctcatcagtagt

SEQ ID NO: 787617 - DNA, 25 bp, Homo sapien
ggaatctcatccttaaatatcctga

SEQ ID NO: 787618 - DNA, 25 bp, Homo sapien
cagaagatccttctagggttatttt

SEQ ID NO: 787619 - DNA, 25 bp, Homo sapien
atactatcctgtcttctttgaagag

SEQ ID NO: 787620 - DNA, 25 bp, Homo sapien
tccagaagatccttctagggttatt

SEQ ID NO: 787621 - DNA, 25 bp, Homo sapien
aattatactatcctgtcttctttga

SEQ ID NO: 787622 - DNA, 25 bp, Homo sapien
gggcttggatgtgagcatcatgact

SEQ ID NO: 787623 - DNA, 25 bp, Homo sapien
gcttggatgtgagcatcatgactac

SEQ ID NO: 787624 - DNA, 25 bp, Homo sapien
gatgtgagcatcatgactacagaga

SEQ ID NO: 787625 - DNA, 25 bp, Homo sapien
ttggatgtgagcatcatgactacag

SEQ ID NO: 787626 - DNA, 25 bp, Homo sapien
gagttagttcgaagttttccatgga

SEQ ID NO: 787627 - DNA, 25 bp, Homo sapien
gacatgattgatggtgcacacggcc

SEQ ID NO: 787628 - DNA, 25 bp, Homo sapien
ggtcctgggtgcttcatgacatgat

SEQ ID NO: 787629 - DNA, 25 bp, Homo sapien
cacggccatgtctgctaggagttag

SEQ ID NO: 787630 - DNA, 25 bp, Homo sapien
cagaacccacttggccaagatggct

SEQ ID NO: 787631 - DNA, 25 bp, Homo sapien
tctgcaaggccaccaaaagatgcgc

SEQ ID NO: 787632 - DNA, 25 bp, Homo sapien
tgccgggtggcccacaagatggcct

SEQ ID NO: 787633 - DNA, 25 bp, Homo sapien
gcagtgagatcccataaaacaccat

SEQ ID NO: 787634 - DNA, 25 bp, Homo sapien
cctcgtgagccaggcaccccaagga

SEQ ID NO: 787635 - DNA, 25 bp, Homo sapien
gtttctgcagccgcatgagctgctt

SEQ ID NO: 787636 - DNA, 25 bp, Homo sapien
tttctgcagccgcatgagctgcttt

SEQ ID NO: 787637 - DNA, 25 bp, Homo sapien
tctgcagccgcatgagctgcttttt

SEQ ID NO: 787638 - DNA, 25 bp, Homo sapien
ttctgcagccgcatgagctgctttt

SEQ ID NO: 787639 - DNA, 25 bp, Homo sapien
cacatcccagggcggtgatgcagga

SEQ ID NO: 787640 - DNA, 25 bp, Homo sapien
acctatattgctgcccttggatccc

SEQ ID NO: 787641 - DNA, 25 bp, Homo sapien
catatcccaaggtcgcaatggcaga

SEQ ID NO: 787642 - DNA, 25 bp, Homo sapien
gagtccctcggtcttaggacctctg

SEQ ID NO: 787643 - DNA, 25 bp, Homo sapien
ttcattctggtcacaaaatacaggg

SEQ ID NO: 787644 - DNA, 25 bp, Homo sapien
taagatcatgctgtccctaagcact

SEQ ID NO: 787645 - DNA, 25 bp, Homo sapien
aaagagatgcccctttcacgaggcg

SEQ ID NO: 787646 - DNA, 25 bp, Homo sapien
gccacagagtatagcacgagaaggt

SEQ ID NO: 787647 - DNA, 25 bp, Homo sapien
tgaaaacttcaactggctcttgatt

SEQ ID NO: 787648 - DNA, 25 bp, Homo sapien
tcatgaaaacttcaactggctcttg

SEQ ID NO: 787649 - DNA, 25 bp, Homo sapien
gaaaacttcaactggctcttgattt

SEQ ID NO: 787650 - DNA, 25 bp, Homo sapien
catgaaaacttcaactggctcttga

SEQ ID NO: 787651 - DNA, 25 bp, Homo sapien
cagaagacacgatttgctgggacag

SEQ ID NO: 787652 - DNA, 25 bp, Homo sapien
atttgctgggacagctttcatgcaa

SEQ ID NO: 787653 - DNA, 25 bp, Homo sapien
gctgctggtccagaagacacgattt

SEQ ID NO: 787654 - DNA, 25 bp, Homo sapien
tacacaatttgcttaactagctgct

SEQ ID NO: 787655 - DNA, 25 bp, Homo sapien
gcttacacccagtgttatgggagat

SEQ ID NO: 787656 - DNA, 25 bp, Homo sapien
tgtcgtgatgctgcttacacccagt

SEQ ID NO: 787657 - DNA, 25 bp, Homo sapien
agcagcatgtaaaattgtcgtgatg

SEQ ID NO: 787658 - DNA, 25 bp, Homo sapien
ttatgggagatgcttcagacagcag

SEQ ID NO: 787659 - DNA, 25 bp, Homo sapien
taccatgaaacaaagtagtaatgcg

SEQ ID NO: 787660 - DNA, 25 bp, Homo sapien
gaaacaaagtagtaatgcgatgcat

SEQ ID NO: 787661 - DNA, 25 bp, Homo sapien
ccatgaaacaaagtagtaatgcgat

SEQ ID NO: 787662 - DNA, 25 bp, Homo sapien
atgaaacaaagtagtaatgcgatgc

SEQ ID NO: 787663 - DNA, 25 bp, Homo sapien
acagctttttccatgttccttcgtt

SEQ ID NO: 787664 - DNA, 25 bp, Homo sapien
ccacagctttttccatgttccttcg

SEQ ID NO: 787665 - DNA, 25 bp, Homo sapien
cacagctttttccatgttccttcgt

SEQ ID NO: 787666 - DNA, 25 bp, Homo sapien
cagctttttccatgttccttcgttt

SEQ ID NO: 787667 - DNA, 25 bp, Homo sapien
catcatgttttcgattccaggtccc

SEQ ID NO: 787668 - DNA, 25 bp, Homo sapien
gcatcatgttttcgattccaggtcc

SEQ ID NO: 787669 - DNA, 25 bp, Homo sapien
tcatgttttcgattccaggtccctt

SEQ ID NO: 787670 - DNA, 25 bp, Homo sapien
atcatgttttcgattccaggtccct

SEQ ID NO: 787671 - DNA, 25 bp, Homo sapien
tctgcctgctgtttgctatctttcc

SEQ ID NO: 787672 - DNA, 25 bp, Homo sapien
cctggtctctgctgtagtaggactt

SEQ ID NO: 787673 - DNA, 25 bp, Homo sapien
taaaaggaataggtatcctatggtg

SEQ ID NO: 787674 - DNA, 25 bp, Homo sapien
tcaagttcaaattccctgtcaggct

SEQ ID NO: 787675 - DNA, 25 bp, Homo sapien
agatccatttctacttttacccgtg

SEQ ID NO: 787676 - DNA, 25 bp, Homo sapien
tgtttgaggcaaggatcgtatcttc

SEQ ID NO: 787677 - DNA, 25 bp, Homo sapien
gtatcccttctgtcttatttagcat

SEQ ID NO: 787678 - DNA, 25 bp, Homo sapien
tacttttacgtctccaagtagatgg

SEQ ID NO: 787679 - DNA, 25 bp, Homo sapien
tcgaggatgtacttagagtaaagcc

SEQ ID NO: 787680 - DNA, 25 bp, Homo sapien
agtaaagcctggatgttgggaatgc

SEQ ID NO: 787681 - DNA, 25 bp, Homo sapien
gatcgatgagtaatgtggtcccaca

SEQ ID NO: 787682 - DNA, 25 bp, Homo sapien
taggttttataagtcatgtgtgctc

SEQ ID NO: 787683 - DNA, 25 bp, Homo sapien
gggtcgtggactgagaccatcagct

SEQ ID NO: 787684 - DNA, 25 bp, Homo sapien
tcgtggactgagaccatcagctttc

SEQ ID NO: 787685 - DNA, 25 bp, Homo sapien
tggactgagaccatcagctttcctt

SEQ ID NO: 787686 - DNA, 25 bp, Homo sapien
tcccgggggtcgtggactgagacca

SEQ ID NO: 787687 - DNA, 25 bp, Homo sapien
gaagcttgaatcacttgtcccttgg

SEQ ID NO: 787688 - DNA, 25 bp, Homo sapien
ggtgagtgtttgtcctacaattgag

SEQ ID NO: 787689 - DNA, 25 bp, Homo sapien
tcccttggaaaatagcttggcagtc

SEQ ID NO: 787690 - DNA, 25 bp, Homo sapien
gataggcagcgacctatagcattgg

SEQ ID NO: 787691 - DNA, 25 bp, Homo sapien
ttccttctgcaagagttgatatatc

SEQ ID NO: 787692 - DNA, 25 bp, Homo sapien
gttgatatatctgtacttccattca

SEQ ID NO: 787693 - DNA, 25 bp, Homo sapien
caagagttgatatatctgtacttcc

SEQ ID NO: 787694 - DNA, 25 bp, Homo sapien
tctgcaagagttgatatatctgtac

SEQ ID NO: 787695 - DNA, 25 bp, Homo sapien
tgtgacctcgggcacaactttagaa

SEQ ID NO: 787696 - DNA, 25 bp, Homo sapien
gagatttatggctgaaacaggagcc

SEQ ID NO: 787697 - DNA, 25 bp, Homo sapien
tgaatgtgagtgctgggagatttat

SEQ ID NO: 787698 - DNA, 25 bp, Homo sapien
aacaggagcctttctcgggattctc

SEQ ID NO: 787699 - DNA, 25 bp, Homo sapien
tgtctcttgaggtggtacagacgca

SEQ ID NO: 787700 - DNA, 25 bp, Homo sapien
tggtacagacgcaactgagacaaag

SEQ ID NO: 787701 - DNA, 25 bp, Homo sapien
actgagacaaagctgtgaatggcag

SEQ ID NO: 787702 - DNA, 25 bp, Homo sapien
tgagacaaagctgtgaatggcagcc

SEQ ID NO: 787703 - DNA, 25 bp, Homo sapien
tctggttaaggaaatgtgagatttg

SEQ ID NO: 787704 - DNA, 25 bp, Homo sapien
cagaggggaccctgaaactgcagct

SEQ ID NO: 787705 - DNA, 25 bp, Homo sapien
actctggttaaggaaatgtgagatt

SEQ ID NO: 787706 - DNA, 25 bp, Homo sapien
aggggaccctgaaactgcagctggg

SEQ ID NO: 787707 - DNA, 25 bp, Homo sapien
tacatgtcgagaaatattcacattg

SEQ ID NO: 787708 - DNA, 25 bp, Homo sapien
ttaactgctgtacatgtcgagaaat

SEQ ID NO: 787709 - DNA, 25 bp, Homo sapien
gctgtacatgtcgagaaatattcac

SEQ ID NO: 787710 - DNA, 25 bp, Homo sapien
cagtaccttggtgttttaactgctg

SEQ ID NO: 787711 - DNA, 25 bp, Homo sapien
ccaatctcggggtcctgcattagtc

SEQ ID NO: 787712 - DNA, 25 bp, Homo sapien
ggtcctgcattagtcttcagtgcca

SEQ ID NO: 787713 - DNA, 25 bp, Homo sapien
attagtcttcagtgccagagtctca

SEQ ID NO: 787714 - DNA, 25 bp, Homo sapien
tgcattagtcttcagtgccagagtc

SEQ ID NO: 787715 - DNA, 25 bp, Homo sapien
tccacataccagataagggactgat

SEQ ID NO: 787716 - DNA, 25 bp, Homo sapien
cagataagggactgatattcctcct

SEQ ID NO: 787717 - DNA, 25 bp, Homo sapien
taccagataagggactgatattcct

SEQ ID NO: 787718 - DNA, 25 bp, Homo sapien
ttgttctccacataccagataaggg

SEQ ID NO: 787719 - DNA, 25 bp, Homo sapien
tccagttggaaccatcgttgtcgcc

SEQ ID NO: 787720 - DNA, 25 bp, Homo sapien
ccagttggaaccatcgttgtcgcca

SEQ ID NO: 787721 - DNA, 25 bp, Homo sapien
cagttggaaccatcgttgtcgccat

SEQ ID NO: 787722 - DNA, 25 bp, Homo sapien
ctcacattgcaggaggccatggata

SEQ ID NO: 787723 - DNA, 25 bp, Homo sapien
aaactcacattgcaggaggccatgg

SEQ ID NO: 787724 - DNA, 25 bp, Homo sapien
gatacatgataggaatttcaaactt

SEQ ID NO: 787725 - DNA, 25 bp, Homo sapien
ttcaaacttgacgtcaaactcacat

SEQ ID NO: 787726 - DNA, 25 bp, Homo sapien
gcaattgtgccacctctgtacatct

SEQ ID NO: 787727 - DNA, 25 bp, Homo sapien
tgctgtctttctgtcgagctcaggg

SEQ ID NO: 787728 - DNA, 25 bp, Homo sapien
tctttctgtcgagctcagggacagc

SEQ ID NO: 787729 - DNA, 25 bp, Homo sapien
aggcaattgtgccacctctgtacat

SEQ ID NO: 787730 - DNA, 25 bp, Homo sapien
tctttgtgctggaataccctcttct

SEQ ID NO: 787731 - DNA, 25 bp, Homo sapien
ttgtgctggaataccctcttctgaa

SEQ ID NO: 787732 - DNA, 25 bp, Homo sapien
tctctttgtgctggaataccctctt

SEQ ID NO: 787733 - DNA, 25 bp, Homo sapien
cggccccagagccatgaaatgagct

SEQ ID NO: 787734 - DNA, 25 bp, Homo sapien
caagagcctgtagttcaaattctaa

SEQ ID NO: 787735 - DNA, 25 bp, Homo sapien
tgtccaaatatcaaccctgaagtgt

SEQ ID NO: 787736 - DNA, 25 bp, Homo sapien
tgtgtagaatgcgtgactgctccct

SEQ ID NO: 787737 - DNA, 25 bp, Homo sapien
taatctatagtacagccacgatgaa

SEQ ID NO: 787738 - DNA, 25 bp, Homo sapien
aaatcgcaatcctgcagcttagagg

SEQ ID NO: 787739 - DNA, 25 bp, Homo sapien
gaaatatcactgcaccatcctagag

SEQ ID NO: 787740 - DNA, 25 bp, Homo sapien
ctaagggatctgtatgcctccagga

SEQ ID NO: 787741 - DNA, 25 bp, Homo sapien
caaaactaggtcatggcagggcgtg

SEQ ID NO: 787742 - DNA, 25 bp, Homo sapien
tactattttcttgttagaactcagt

SEQ ID NO: 787743 - DNA, 25 bp, Homo sapien
cttactattttcttgttagaactca

SEQ ID NO: 787744 - DNA, 25 bp, Homo sapien
ttactattttcttgttagaactcag

SEQ ID NO: 787745 - DNA, 25 bp, Homo sapien
aggtcagactcaggttgggccttca

SEQ ID NO: 787746 - DNA, 25 bp, Homo sapien
tcagactcaggttgggccttcaccc

SEQ ID NO: 787747 - DNA, 25 bp, Homo sapien
taatacaaatcccacttcaggtcag

SEQ ID NO: 787748 - DNA, 25 bp, Homo sapien
caaatcccacttcaggtcagactca

SEQ ID NO: 787749 - DNA, 25 bp, Homo sapien
gagtggctctcgtctgtcgtttttc

SEQ ID NO: 787750 - DNA, 25 bp, Homo sapien
tcttgagtggctctcgtctgtcgtt

SEQ ID NO: 787751 - DNA, 25 bp, Homo sapien
gtctgtcgtttttcacactcctggt

SEQ ID NO: 787752 - DNA, 25 bp, Homo sapien
ggctctcgtctgtcgtttttcacac

SEQ ID NO: 787753 - DNA, 25 bp, Homo sapien
gacaggaaataaagtagttctccta

SEQ ID NO: 787754 - DNA, 25 bp, Homo sapien
catcttcaactaagaatagaatagt

SEQ ID NO: 787755 - DNA, 25 bp, Homo sapien
ctcctagaagtggcttatatagcat

SEQ ID NO: 787756 - DNA, 25 bp, Homo sapien
agcatcttcaactaagaatagaata

SEQ ID NO: 787757 - DNA, 25 bp, Homo sapien
tcttaaggttgactcccgctctgag

SEQ ID NO: 787758 - DNA, 25 bp, Homo sapien
acatgggttacataagcttcttata

SEQ ID NO: 787759 - DNA, 25 bp, Homo sapien
tgactgacctctgctatttagaagc

SEQ ID NO: 787760 - DNA, 25 bp, Homo sapien
gcttcttataaaactgcttagtgac

SEQ ID NO: 787761 - DNA, 25 bp, Homo sapien
gaacggtacctactttctcaagcca

SEQ ID NO: 787762 - DNA, 25 bp, Homo sapien
gaatccaatgcgttcctgacacgtc

SEQ ID NO: 787763 - DNA, 25 bp, Homo sapien
ccagtagcttacctagtacaggcaa

SEQ ID NO: 787764 - DNA, 25 bp, Homo sapien
tatatcctaagctccaaacccgtga

SEQ ID NO: 787765 - DNA, 25 bp, Homo sapien
taatctatgagtgatccaggttctc

SEQ ID NO: 787766 - DNA, 25 bp, Homo sapien
tgcccaacagtgcaattactggctt

SEQ ID NO: 787767 - DNA, 25 bp, Homo sapien
ccctcttgaaggacagacgtctagg

SEQ ID NO: 787768 - DNA, 25 bp, Homo sapien
taaaggtgctataacatgtgcaggt

SEQ ID NO: 787769 - DNA, 25 bp, Homo sapien
ggttactctagccttgtagttgagt

SEQ ID NO: 787770 - DNA, 25 bp, Homo sapien
tactctagccttgtagttgagtttg

SEQ ID NO: 787771 - DNA, 25 bp, Homo sapien
gttactctagccttgtagttgagtt

SEQ ID NO: 787772 - DNA, 25 bp, Homo sapien
actctagccttgtagttgagtttga

SEQ ID NO: 787773 - DNA, 25 bp, Homo sapien
ttctagggttgtgacgctgactgcc

SEQ ID NO: 787774 - DNA, 25 bp, Homo sapien
gacttcgcttatcacatgtgtagtg

SEQ ID NO: 787775 - DNA, 25 bp, Homo sapien
tgtgtagtgttatcttctccccagg

SEQ ID NO: 787776 - DNA, 25 bp, Homo sapien
tctccttactctgtcaagtctctga

SEQ ID NO: 787777 - DNA, 25 bp, Homo sapien
tggagttgtcagagaaaatcatggc

SEQ ID NO: 787778 - DNA, 25 bp, Homo sapien
cagagaaaatcatggcagtggattc

SEQ ID NO: 787779 - DNA, 25 bp, Homo sapien
ttgtcagagaaaatcatggcagtgg

SEQ ID NO: 787780 - DNA, 25 bp, Homo sapien
gccatttggagttgtcagagaaaat

SEQ ID NO: 787781 - DNA, 25 bp, Homo sapien
gaatgatttttagggagacctggac

SEQ ID NO: 787782 - DNA, 25 bp, Homo sapien
ccatgattgtacatatgtgttaggt

SEQ ID NO: 787783 - DNA, 25 bp, Homo sapien
gaactatatgactttgctaacaaaa

SEQ ID NO: 787784 - DNA, 25 bp, Homo sapien
ctttccatgattgtacatatgtgtt

SEQ ID NO: 787785 - DNA, 25 bp, Homo sapien
caaaacgatgtacccaaacaccagg

SEQ ID NO: 787786 - DNA, 25 bp, Homo sapien
gacacaaaacgatgtacccaaacac

SEQ ID NO: 787787 - DNA, 25 bp, Homo sapien
cagcttcttcacagtccactggaat

SEQ ID NO: 787788 - DNA, 25 bp, Homo sapien
tgtacccaaacaccaggtttgcaaa

SEQ ID NO: 787789 - DNA, 25 bp, Homo sapien
aaattccgagtgttatggcttcagt

SEQ ID NO: 787790 - DNA, 25 bp, Homo sapien
ctgtgtaggacttatattttgtatt

SEQ ID NO: 787791 - DNA, 25 bp, Homo sapien
tggttttaggtatgagtgttgaatc

SEQ ID NO: 787792 - DNA, 25 bp, Homo sapien
gctctgtgactggattgaaaattcc

SEQ ID NO: 787793 - DNA, 25 bp, Homo sapien
cctggtctagaggacaaagtgctga

SEQ ID NO: 787794 - DNA, 25 bp, Homo sapien
tcactgttcaagatagggttcctgc

SEQ ID NO: 787795 - DNA, 25 bp, Homo sapien
ccgtgtggcccagttcttaatagga

SEQ ID NO: 787796 - DNA, 25 bp, Homo sapien
tctgacaggcagagttcaggcggta

SEQ ID NO: 787797 - DNA, 25 bp, Homo sapien
tatcacactgagactgatgttttgc

SEQ ID NO: 787798 - DNA, 25 bp, Homo sapien
ctgatatatcacactgagactgatg

SEQ ID NO: 787799 - DNA, 25 bp, Homo sapien
gatatatcacactgagactgatgtt

SEQ ID NO: 787800 - DNA, 25 bp, Homo sapien
taactgatatatcacactgagactg

SEQ ID NO: 787801 - DNA, 25 bp, Homo sapien
tgtccccaggcaatgtaatgtctat

SEQ ID NO: 787802 - DNA, 25 bp, Homo sapien
tattcccgagtgtggcttcgtcatg

SEQ ID NO: 787803 - DNA, 25 bp, Homo sapien
tgactgtgcactcgacttgaaagct

SEQ ID NO: 787804 - DNA, 25 bp, Homo sapien
tacatgttactatgctgtgcccctg

SEQ ID NO: 787805 - DNA, 25 bp, Homo sapien
tctgcattcctatattcaagttcgg

SEQ ID NO: 787806 - DNA, 25 bp, Homo sapien
aactgaaacatagcagctcgacttt

SEQ ID NO: 787807 - DNA, 25 bp, Homo sapien
gaaagctctcccctcaactgaaaca

SEQ ID NO: 787808 - DNA, 25 bp, Homo sapien
cggtgtttgacgacctttggccaga

SEQ ID NO: 787809 - DNA, 25 bp, Homo sapien
tgtgcgcctacgtagagaactaaga

SEQ ID NO: 787810 - DNA, 25 bp, Homo sapien
aaacaaaccatttgccgaggaggtg

SEQ ID NO: 787811 - DNA, 25 bp, Homo sapien
catttgccgaggaggtgtgcgccta

SEQ ID NO: 787812 - DNA, 25 bp, Homo sapien
gaactaagaaattgctttcacgagg

SEQ ID NO: 787813 - DNA, 25 bp, Homo sapien
gaaacccgttcaagttcattgtcag

SEQ ID NO: 787814 - DNA, 25 bp, Homo sapien
aaacccgttcaagttcattgtcagt

SEQ ID NO: 787815 - DNA, 25 bp, Homo sapien
ggaaacccgttcaagttcattgtca

SEQ ID NO: 787816 - DNA, 25 bp, Homo sapien
cacactgcatcagttgagtcactat

SEQ ID NO: 787817 - DNA, 25 bp, Homo sapien
gcaaggtggaagctgaatcgatttt

SEQ ID NO: 787818 - DNA, 25 bp, Homo sapien
tttctagccttattttggaagtcac

SEQ ID NO: 787819 - DNA, 25 bp, Homo sapien
gaagctgaatcgatttttctagcct

SEQ ID NO: 787820 - DNA, 25 bp, Homo sapien
aaatccgtaactagttgtaatcagt

SEQ ID NO: 787821 - DNA, 25 bp, Homo sapien
tccgtaactagttgtaatcagttag

SEQ ID NO: 787822 - DNA, 25 bp, Homo sapien
agaaatccgtaactagttgtaatca

SEQ ID NO: 787823 - DNA, 25 bp, Homo sapien
cgtaactagttgtaatcagttagtt

SEQ ID NO: 787824 - DNA, 25 bp, Homo sapien
tatctggcaagcaccacctgatata

SEQ ID NO: 787825 - DNA, 25 bp, Homo sapien
tctggcaagcaccacctgatatata

SEQ ID NO: 787826 - DNA, 25 bp, Homo sapien
atctggcaagcaccacctgatatat

SEQ ID NO: 787827 - DNA, 25 bp, Homo sapien
ctgactcatgccagtgctctccttc

SEQ ID NO: 787828 - DNA, 25 bp, Homo sapien
ctggctagagctctgatctcctgcc

SEQ ID NO: 787829 - DNA, 25 bp, Homo sapien
cttcaggggtagttgagctctgctt

SEQ ID NO: 787830 - DNA, 25 bp, Homo sapien
cctgcctgactcatgccagtgctct

SEQ ID NO: 787831 - DNA, 25 bp, Homo sapien
ggaacttctaaaagttctcttctga

SEQ ID NO: 787832 - DNA, 25 bp, Homo sapien
caaggttgcacttatgggcaaacaa

SEQ ID NO: 787833 - DNA, 25 bp, Homo sapien
taacaggaacaaggttgcacttatg

SEQ ID NO: 787834 - DNA, 25 bp, Homo sapien
caaacaaggagttaggtggagagat

SEQ ID NO: 787835 - DNA, 25 bp, Homo sapien
ggcttgaaggttctctgttgagaac

SEQ ID NO: 787836 - DNA, 25 bp, Homo sapien
tggcttgaaggttctctgttgagaa

SEQ ID NO: 787837 - DNA, 25 bp, Homo sapien
gcttgaaggttctctgttgagaacc

SEQ ID NO: 787838 - DNA, 25 bp, Homo sapien
ccaaattaagatgcgctctggcagt

SEQ ID NO: 787839 - DNA, 25 bp, Homo sapien
ggtctttgagtagtcgagccgttcc

SEQ ID NO: 787840 - DNA, 25 bp, Homo sapien
tgtgaacctagtgaaaaatggctcc

SEQ ID NO: 787841 - DNA, 25 bp, Homo sapien
catatctctgtctcgtcctgaggga

SEQ ID NO: 787842 - DNA, 25 bp, Homo sapien
aaagttgtgtctgtattggatatgc

SEQ ID NO: 787843 - DNA, 25 bp, Homo sapien
taataggcttctttaagtcatgatc

SEQ ID NO: 787844 - DNA, 25 bp, Homo sapien
gaaaatacatgcagtccatattcca

SEQ ID NO: 787845 - DNA, 25 bp, Homo sapien
tacactagtgttagggttaaagctc

SEQ ID NO: 787846 - DNA, 25 bp, Homo sapien
ttttttaatttgagacgacagagtc

SEQ ID NO: 787847 - DNA, 25 bp, Homo sapien
ttttaatttgagacgacagagtctc

SEQ ID NO: 787848 - DNA, 25 bp, Homo sapien
tggggtttcactgtgatagtcagga

SEQ ID NO: 787849 - DNA, 25 bp, Homo sapien
atggggtttcactgtgatagtcagg

SEQ ID NO: 787850 - DNA, 25 bp, Homo sapien
aaagctgttcggcaccacgtttgtc

SEQ ID NO: 787851 - DNA, 25 bp, Homo sapien
tacaaaaaagctgttcggcaccacg

SEQ ID NO: 787852 - DNA, 25 bp, Homo sapien
gagggatctgcttagtactgtcaaa

SEQ ID NO: 787853 - DNA, 25 bp, Homo sapien
tgcttagtactgtcaaagtttacaa

SEQ ID NO: 787854 - DNA, 25 bp, Homo sapien
ctggtaaatcttcctatggcaaaca

SEQ ID NO: 787855 - DNA, 25 bp, Homo sapien
tagtaaccatgaggagacatcggat

SEQ ID NO: 787856 - DNA, 25 bp, Homo sapien
tttggaattcacctgctaggccatg

SEQ ID NO: 787857 - DNA, 25 bp, Homo sapien
aatgaaacatagaaattcctgttgt

SEQ ID NO: 787858 - DNA, 25 bp, Homo sapien
gatcttcttgcaaggtagtaaccat

SEQ ID NO: 787859 - DNA, 25 bp, Homo sapien
ctgggtgagctacctccacagtggc

SEQ ID NO: 787860 - DNA, 25 bp, Homo sapien
tgggtgagctacctccacagtggca

SEQ ID NO: 787861 - DNA, 25 bp, Homo sapien
ctgctgatgtggaagtggggtgctc

SEQ ID NO: 787862 - DNA, 25 bp, Homo sapien
tgcctctgctgatgtggaagtgggg

SEQ ID NO: 787863 - DNA, 25 bp, Homo sapien
ctccacataagatctctgattttaa

SEQ ID NO: 787864 - DNA, 25 bp, Homo sapien
cattcctccacataagatctctgat

SEQ ID NO: 787865 - DNA, 25 bp, Homo sapien
acataagatctctgattttaatagc

SEQ ID NO: 787866 - DNA, 25 bp, Homo sapien
agaaaacttagcatttgcattcctc

SEQ ID NO: 787867 - DNA, 25 bp, Homo sapien
acttgtctccaaataagcttgctat

SEQ ID NO: 787868 - DNA, 25 bp, Homo sapien
ccaactattttcgttctatcttcca

SEQ ID NO: 787869 - DNA, 25 bp, Homo sapien
tagtcaccaaaatgaccaactattt

SEQ ID NO: 787870 - DNA, 25 bp, Homo sapien
taagcttgctattgtagtcaccaaa

SEQ ID NO: 787871 - DNA, 25 bp, Homo sapien
tctctgacacgggatgcaggcactt

SEQ ID NO: 787872 - DNA, 25 bp, Homo sapien
tctttctctgacacgggatgcaggc

SEQ ID NO: 787873 - DNA, 25 bp, Homo sapien
attatctttctctgacacgggatgc

SEQ ID NO: 787874 - DNA, 25 bp, Homo sapien
tgacacgggatgcaggcactttgtt

SEQ ID NO: 787875 - DNA, 25 bp, Homo sapien
attgggtaaagagtgaatacccatc

SEQ ID NO: 787876 - DNA, 25 bp, Homo sapien
tagatgggcaaattgggtaaagagt

SEQ ID NO: 787877 - DNA, 25 bp, Homo sapien
gcaaattgggtaaagagtgaatacc

SEQ ID NO: 787878 - DNA, 25 bp, Homo sapien
aaagacatagatgggcaaattgggt

SEQ ID NO: 787879 - DNA, 25 bp, Homo sapien
catggctgatttccggttaacttgc

SEQ ID NO: 787880 - DNA, 25 bp, Homo sapien
acttctggttaaggcacatggctga

SEQ ID NO: 787881 - DNA, 25 bp, Homo sapien
gaaggagctgctaggtttactcagc

SEQ ID NO: 787882 - DNA, 25 bp, Homo sapien
tcaactctccgttccaatatgacag

SEQ ID NO: 787883 - DNA, 25 bp, Homo sapien
gaatcctgagaacaatctcaaattc

SEQ ID NO: 787884 - DNA, 25 bp, Homo sapien
tctttgaaaatcaagcctctggagt

SEQ ID NO: 787885 - DNA, 25 bp, Homo sapien
caaattcacagcctgtaacatcttt

SEQ ID NO: 787886 - DNA, 25 bp, Homo sapien
cccattgtgctatcatgtcttccat

SEQ ID NO: 787887 - DNA, 25 bp, Homo sapien
aaggatctcatcacttggtatgtcc

SEQ ID NO: 787888 - DNA, 25 bp, Homo sapien
gatctcatcacttggtatgtcccac

SEQ ID NO: 787889 - DNA, 25 bp, Homo sapien
ttggtatgtcccacatattagattg

SEQ ID NO: 787890 - DNA, 25 bp, Homo sapien
atctgttgttctatagttggcattt

SEQ ID NO: 787891 - DNA, 25 bp, Homo sapien
ggggtcatgttgagaaaagacttga

SEQ ID NO: 787892 - DNA, 25 bp, Homo sapien
aagacttgactgctttgcactaaga

SEQ ID NO: 787893 - DNA, 25 bp, Homo sapien
aagagtttgaactgagctctattcc

SEQ ID NO: 787894 - DNA, 25 bp, Homo sapien
attccaaacgttcttctgaagttat

SEQ ID NO: 787895 - DNA, 25 bp, Homo sapien
gatgaagccagttgcattcgcattc

SEQ ID NO: 787896 - DNA, 25 bp, Homo sapien
tttgggcactctgcttctatagcca

SEQ ID NO: 787897 - DNA, 25 bp, Homo sapien
gagtgtcgctttcaagatgaagcca

SEQ ID NO: 787898 - DNA, 25 bp, Homo sapien
caggataattctgcatgtccaagag

SEQ ID NO: 787899 - DNA, 25 bp, Homo sapien
tctatgtgtgctgcctatgtgaaca

SEQ ID NO: 787900 - DNA, 25 bp, Homo sapien
ccagtgttctatgtgtgctgcctat

SEQ ID NO: 787901 - DNA, 25 bp, Homo sapien
cactgtatcattccagtgttctatg

SEQ ID NO: 787902 - DNA, 25 bp, Homo sapien
tgttctatgtgtgctgcctatgtga

SEQ ID NO: 787903 - DNA, 25 bp, Homo sapien
tggtttcgtcttatgtgcttatggt

SEQ ID NO: 787904 - DNA, 25 bp, Homo sapien
ggtgagtggtttcgtcttatgtgct

SEQ ID NO: 787905 - DNA, 25 bp, Homo sapien
cttgacgaaggacaagggtgagtgg

SEQ ID NO: 787906 - DNA, 25 bp, Homo sapien
gacaagggtgagtggtttcgtctta

SEQ ID NO: 787907 - DNA, 25 bp, Homo sapien
gggctctgtgtgtcctgtaataact

SEQ ID NO: 787908 - DNA, 25 bp, Homo sapien
aataacttaaagtgacagtcaagca

SEQ ID NO: 787909 - DNA, 25 bp, Homo sapien
ctttcttggtaatgggggggctctg

SEQ ID NO: 787910 - DNA, 25 bp, Homo sapien
ctggattcctttcttggtaatgggg

SEQ ID NO: 787911 - DNA, 25 bp, Homo sapien
gattcaaagtagagctgccctcctc

SEQ ID NO: 787912 - DNA, 25 bp, Homo sapien
gagcagatgcaaacctatccttcct

SEQ ID NO: 787913 - DNA, 25 bp, Homo sapien
ttcaggagcagatgcaaacctatcc

SEQ ID NO: 787914 - DNA, 25 bp, Homo sapien
gcacattcagcattgctaaggcaga

SEQ ID NO: 787915 - DNA, 25 bp, Homo sapien
cgctgctgagtggttctgtagaaaa

SEQ ID NO: 787916 - DNA, 25 bp, Homo sapien
tttgggataggagagtctgaaagac

SEQ ID NO: 787917 - DNA, 25 bp, Homo sapien
ccttgctgatgggatgcagaataat

SEQ ID NO: 787918 - DNA, 25 bp, Homo sapien
gttttatgttaagacctgcaagtag

SEQ ID NO: 787919 - DNA, 25 bp, Homo sapien
gatcctcagattctcatgggttgtt

SEQ ID NO: 787920 - DNA, 25 bp, Homo sapien
gcttctacaggttttcaggctcttt

SEQ ID NO: 787921 - DNA, 25 bp, Homo sapien
gctctttaggagactgacttgcact

SEQ ID NO: 787922 - DNA, 25 bp, Homo sapien
caatgaagagcttctacaggttttc

SEQ ID NO: 787923 - DNA, 25 bp, Homo sapien
tgttaccacacaacccatgagcatt

SEQ ID NO: 787924 - DNA, 25 bp, Homo sapien
tgtgttctttaatggcgcctacaaa

SEQ ID NO: 787925 - DNA, 25 bp, Homo sapien
cacctttcgtggcttttaattcagg

SEQ ID NO: 787926 - DNA, 25 bp, Homo sapien
gagttggccctctttgcttccacaa

SEQ ID NO: 787927 - DNA, 25 bp, Homo sapien
tccacagaatcaccatagtcagtgt

SEQ ID NO: 787928 - DNA, 25 bp, Homo sapien
tatccacagaatcaccatagtcagt

SEQ ID NO: 787929 - DNA, 25 bp, Homo sapien
atccacagaatcaccatagtcagtg

SEQ ID NO: 787930 - DNA, 25 bp, Homo sapien
ttgacaaccaccaccaaagtttcca

SEQ ID NO: 787931 - DNA, 25 bp, Homo sapien
ccaccaccaaagtttccagaaccat

SEQ ID NO: 787932 - DNA, 25 bp, Homo sapien
gacaaccaccaccaaagtttccaga

SEQ ID NO: 787933 - DNA, 25 bp, Homo sapien
tgacaaccaccaccaaagtttccag

SEQ ID NO: 787934 - DNA, 25 bp, Homo sapien
tccattatagctatccccatcaaag

SEQ ID NO: 787935 - DNA, 25 bp, Homo sapien
atcaaagacaccatgacccctgagg

SEQ ID NO: 787936 - DNA, 25 bp, Homo sapien
ggagtaactaggactgcctccaaca

SEQ ID NO: 787937 - DNA, 25 bp, Homo sapien
taactaccatcgttatcaaatccat

SEQ ID NO: 787938 - DNA, 25 bp, Homo sapien
caccactatgcttggttgaccccat

SEQ ID NO: 787939 - DNA, 25 bp, Homo sapien
tggttgaccccataaatcctttgta

SEQ ID NO: 787940 - DNA, 25 bp, Homo sapien
ctgtaacttccctgtcactctctgg

SEQ ID NO: 787941 - DNA, 25 bp, Homo sapien
tgctgccactggaaccaccccagcc

SEQ ID NO: 787942 - DNA, 25 bp, Homo sapien
cttctgcaatattataaataatctg

SEQ ID NO: 787943 - DNA, 25 bp, Homo sapien
ttggaatatctcttcaataacttga

SEQ ID NO: 787944 - DNA, 25 bp, Homo sapien
aatattggaatatctcttcaataac

SEQ ID NO: 787945 - DNA, 25 bp, Homo sapien
caaaataatattggaatatctcttc

SEQ ID NO: 787946 - DNA, 25 bp, Homo sapien
aataatggtctcaattttacttgga

SEQ ID NO: 787947 - DNA, 25 bp, Homo sapien
tatactactttcctaatcactcttg

SEQ ID NO: 787948 - DNA, 25 bp, Homo sapien
tagaaagccattgttcaaacatagt

SEQ ID NO: 787949 - DNA, 25 bp, Homo sapien
gggccttgagagaagcctatactac

SEQ ID NO: 787950 - DNA, 25 bp, Homo sapien
gggcaagagaacatgcacctccaca

SEQ ID NO: 787951 - DNA, 25 bp, Homo sapien
caagagaacatgcacctccacagag

SEQ ID NO: 787952 - DNA, 25 bp, Homo sapien
tgccaccctcatgctttgcattctc

SEQ ID NO: 787953 - DNA, 25 bp, Homo sapien
gcaagagaacatgcacctccacaga

SEQ ID NO: 787954 - DNA, 25 bp, Homo sapien
acaaggaggtgatctgcacccaggg

SEQ ID NO: 787955 - DNA, 25 bp, Homo sapien
gacaaggaggtgatctgcacccagg

SEQ ID NO: 787956 - DNA, 25 bp, Homo sapien
gattgatagcttttgcccatggagc

SEQ ID NO: 787957 - DNA, 25 bp, Homo sapien
ccagcccagcaataaatggattgat

SEQ ID NO: 787958 - DNA, 25 bp, Homo sapien
aagccaacacttccgtgtgctccag

SEQ ID NO: 787959 - DNA, 25 bp, Homo sapien
tcgatgggccactgacaaggtcttc

SEQ ID NO: 787960 - DNA, 25 bp, Homo sapien
accaaagggtgaacatcccacattc

SEQ ID NO: 787961 - DNA, 25 bp, Homo sapien
cctgtgtgccctcagggattctgag

SEQ ID NO: 787962 - DNA, 25 bp, Homo sapien
atgcatattccaagcgctttgcagt

SEQ ID NO: 787963 - DNA, 25 bp, Homo sapien
caagcgctttgcagtattatcttct

SEQ ID NO: 787964 - DNA, 25 bp, Homo sapien
tattccaagcgctttgcagtattat

SEQ ID NO: 787965 - DNA, 25 bp, Homo sapien
tgcatattccaagcgctttgcagta

SEQ ID NO: 787966 - DNA, 25 bp, Homo sapien
tgactttgccgttttcatctctagg

SEQ ID NO: 787967 - DNA, 25 bp, Homo sapien
cgggttagtaagtttcaatcgctgc

SEQ ID NO: 787968 - DNA, 25 bp, Homo sapien
ttctgattccgcatcatttgaagca

SEQ ID NO: 787969 - DNA, 25 bp, Homo sapien
tcagttcaaagactagcaggtcggg

SEQ ID NO: 787970 - DNA, 25 bp, Homo sapien
tctgcttaaatgtgttggtggttag

SEQ ID NO: 787971 - DNA, 25 bp, Homo sapien
cacattagtcagtgatgtctgctta

SEQ ID NO: 787972 - DNA, 25 bp, Homo sapien
tgtaagaggtgctttcattaacacc

SEQ ID NO: 787973 - DNA, 25 bp, Homo sapien
cacagatgtcgggataggtgaacat

SEQ ID NO: 787974 - DNA, 25 bp, Homo sapien
taaggctgtccgtgaggtagttaag

SEQ ID NO: 787975 - DNA, 25 bp, Homo sapien
atgttttgactaaggctgtccgtga

SEQ ID NO: 787976 - DNA, 25 bp, Homo sapien
tgaggtagttaagacattgtgtgtc

SEQ ID NO: 787977 - DNA, 25 bp, Homo sapien
taagacattgtgtgtcagatgagac

SEQ ID NO: 787978 - DNA, 25 bp, Homo sapien
tctttgccgcttctctgacttccaa

SEQ ID NO: 787979 - DNA, 25 bp, Homo sapien
tctttcatgggagtgcatggaggat

SEQ ID NO: 787980 - DNA, 25 bp, Homo sapien
gggtccatctttcatgggagtgcat

SEQ ID NO: 787981 - DNA, 25 bp, Homo sapien
tgacttccaaccaagaggttcttta

SEQ ID NO: 787982 - DNA, 25 bp, Homo sapien
aaaagacacagactggcaaattgga

SEQ ID NO: 787983 - DNA, 25 bp, Homo sapien
gataaagagtcaagacccatcagtg

SEQ ID NO: 787984 - DNA, 25 bp, Homo sapien
tgtaaatggactaaatgctccaatt

SEQ ID NO: 787985 - DNA, 25 bp, Homo sapien
taaagagtcaagacccatcagtgtg

SEQ ID NO: 787986 - DNA, 25 bp, Homo sapien
tatgattttgactgttctatactga

SEQ ID NO: 787987 - DNA, 25 bp, Homo sapien
ccatttggttgttgattaacctcta

SEQ ID NO: 787988 - DNA, 25 bp, Homo sapien
tattttgagttatagcatgtaaaca

SEQ ID NO: 787989 - DNA, 25 bp, Homo sapien
tctatactgaaacatgaccatattt

SEQ ID NO: 787990 - DNA, 25 bp, Homo sapien
tccaataaaagcgtattgaaattta

SEQ ID NO: 787991 - DNA, 25 bp, Homo sapien
tgctttcttgtattgtaaattcaga

SEQ ID NO: 787992 - DNA, 25 bp, Homo sapien
ccagctggggatttgacttccaata

SEQ ID NO: 787993 - DNA, 25 bp, Homo sapien
aactccaccatttcccgtgattgtg

SEQ ID NO: 787994 - DNA, 25 bp, Homo sapien
aagtcattcttctgaaaatttcctc

SEQ ID NO: 787995 - DNA, 25 bp, Homo sapien
caaggatctgtctcattcttctttg

SEQ ID NO: 787996 - DNA, 25 bp, Homo sapien
tgaaaatttcctctacaaggatctg

SEQ ID NO: 787997 - DNA, 25 bp, Homo sapien
atttcctctacaaggatctgtctca

SEQ ID NO: 787998 - DNA, 25 bp, Homo sapien
cttgctttgaaggattgggctgaga

SEQ ID NO: 787999 - DNA, 25 bp, Homo sapien
ggaacaattgggatggggatttctg

SEQ ID NO: 788000 - DNA, 25 bp, Homo sapien
ctgagaagctaatggaggggtggga

SEQ ID NO: 788001 - DNA, 25 bp, Homo sapien
atttctggactgatctgcatccaaa

SEQ ID NO: 788002 - DNA, 25 bp, Homo sapien
gttgtatgcacagcaaccaacactg

SEQ ID NO: 788003 - DNA, 25 bp, Homo sapien
gcgttggtggttgtatgcacagcaa

SEQ ID NO: 788004 - DNA, 25 bp, Homo sapien
tacagcataaaaggcgcttgagcaa

SEQ ID NO: 788005 - DNA, 25 bp, Homo sapien
tatttaatgactaggaggcctgaga

SEQ ID NO: 788006 - DNA, 25 bp, Homo sapien
cactcaggaagataacacaggtttt

SEQ ID NO: 788007 - DNA, 25 bp, Homo sapien
gacagtattcatcgttctctgataa

SEQ ID NO: 788008 - DNA, 25 bp, Homo sapien
gactaggaatgtagcagggaatatc

SEQ ID NO: 788009 - DNA, 25 bp, Homo sapien
cattcccacctgacgaaagttaagt

SEQ ID NO: 788010 - DNA, 25 bp, Homo sapien
taaggcagattgtaagttccctacc

SEQ ID NO: 788011 - DNA, 25 bp, Homo sapien
gtaaggcactgcgtggtaccacact

SEQ ID NO: 788012 - DNA, 25 bp, Homo sapien
atcttaaaactgtgtccatctgggc

SEQ ID NO: 788013 - DNA, 25 bp, Homo sapien
tctgggcccactaggtgtagctatg

SEQ ID NO: 788014 - DNA, 25 bp, Homo sapien
gtgaaactctggacatgtataggaa

SEQ ID NO: 788015 - DNA, 25 bp, Homo sapien
cattcaaatctgagtgcatctcttt

SEQ ID NO: 788016 - DNA, 25 bp, Homo sapien
ggacatgtataggaatgtgcacaca

SEQ ID NO: 788017 - DNA, 25 bp, Homo sapien
ctgcactgctgacttatgctgtaga

SEQ ID NO: 788018 - DNA, 25 bp, Homo sapien
tgttgattaagggatctgggagaag

SEQ ID NO: 788019 - DNA, 25 bp, Homo sapien
cgggtgccagttcaggattgtcctg

SEQ ID NO: 788020 - DNA, 25 bp, Homo sapien
aaaatgtatcttgggtctggaagct

SEQ ID NO: 788021 - DNA, 25 bp, Homo sapien
cagggcgggtgccagttcaggattg

SEQ ID NO: 788022 - DNA, 25 bp, Homo sapien
ccaaaatgtatcttgggtctggaag

SEQ ID NO: 788023 - DNA, 25 bp, Homo sapien
caggagatgattccaaagcagcagc

SEQ ID NO: 788024 - DNA, 25 bp, Homo sapien
aggagatgattccaaagcagcagca

SEQ ID NO: 788025 - DNA, 25 bp, Homo sapien
ggagatgattccaaagcagcagcag

SEQ ID NO: 788026 - DNA, 25 bp, Homo sapien
agatcaccagagctccagacagcag

SEQ ID NO: 788027 - DNA, 25 bp, Homo sapien
gagcaggaagatcaccagagctcca

SEQ ID NO: 788028 - DNA, 25 bp, Homo sapien
ggaagatcaccagagctccagacag

SEQ ID NO: 788029 - DNA, 25 bp, Homo sapien
cacctgctccttgtgaaagagcagg

SEQ ID NO: 788030 - DNA, 25 bp, Homo sapien
tagaaggagactaatcaggaagagc

SEQ ID NO: 788031 - DNA, 25 bp, Homo sapien
aatgcccagtgtgatgcccgtgctc

SEQ ID NO: 788032 - DNA, 25 bp, Homo sapien
gagtccaatgcccagtgtgatgccc

SEQ ID NO: 788033 - DNA, 25 bp, Homo sapien
gaaggagactaatcaggaagagccc

SEQ ID NO: 788034 - DNA, 25 bp, Homo sapien
agagtcccagcatccaggttcagac

SEQ ID NO: 788035 - DNA, 25 bp, Homo sapien
tagatggactcagtgcccagcagag

SEQ ID NO: 788036 - DNA, 25 bp, Homo sapien
agcagagtcccagcatccaggttca

SEQ ID NO: 788037 - DNA, 25 bp, Homo sapien
ttagatggactcagtgcccagcaga

SEQ ID NO: 788038 - DNA, 25 bp, Homo sapien
aagccaccagcaccgtagcacccag

SEQ ID NO: 788039 - DNA, 25 bp, Homo sapien
tgccagcattgacccagccaactgc

SEQ ID NO: 788040 - DNA, 25 bp, Homo sapien
agtgcctgccagcattgacccagcc

SEQ ID NO: 788041 - DNA, 25 bp, Homo sapien
tccaggaagaagtcagcacaagcca

SEQ ID NO: 788042 - DNA, 25 bp, Homo sapien
ggagagttcacttcagttgcccaag

SEQ ID NO: 788043 - DNA, 25 bp, Homo sapien
tctgcatagaaccaggtgaggtgcc

SEQ ID NO: 788044 - DNA, 25 bp, Homo sapien
tagctctatagacacccagacctgg

SEQ ID NO: 788045 - DNA, 25 bp, Homo sapien
taggtcacatgttcaggagagttca

SEQ ID NO: 788046 - DNA, 25 bp, Homo sapien
tgttgtcctgcattctatgatggca

SEQ ID NO: 788047 - DNA, 25 bp, Homo sapien
aaatggtaactgttgtcctgcattc

SEQ ID NO: 788048 - DNA, 25 bp, Homo sapien
cctgcattctatgatggcagcaacc

SEQ ID NO: 788049 - DNA, 25 bp, Homo sapien
ggtaactgttgtcctgcattctatg

SEQ ID NO: 788050 - DNA, 25 bp, Homo sapien
ctagtgagacatcccactgtgcatt

SEQ ID NO: 788051 - DNA, 25 bp, Homo sapien
tgtgcattgatgtaaccaataatat

SEQ ID NO: 788052 - DNA, 25 bp, Homo sapien
atatgcccttgtgggccaatatggg

SEQ ID NO: 788053 - DNA, 25 bp, Homo sapien
tgtaaccaataatatgcccttgtgg

SEQ ID NO: 788054 - DNA, 25 bp, Homo sapien
ttgagatcagggcaaggaatgagga

SEQ ID NO: 788055 - DNA, 25 bp, Homo sapien
agatcagggcaaggaatgaggagga

SEQ ID NO: 788056 - DNA, 25 bp, Homo sapien
cctcttgagatcagggcaaggaatg

SEQ ID NO: 788057 - DNA, 25 bp, Homo sapien
ctcttgagatcagggcaaggaatga

SEQ ID NO: 788058 - DNA, 25 bp, Homo sapien
gacgtgctggccgtgatcaaacact

SEQ ID NO: 788059 - DNA, 25 bp, Homo sapien
cctccggctcaagtgtgtcaagcaa

SEQ ID NO: 788060 - DNA, 25 bp, Homo sapien
tcaagcaaggtgagagcagcggctt

SEQ ID NO: 788061 - DNA, 25 bp, Homo sapien
tatgagagcggcagcaaattggtgt

SEQ ID NO: 788062 - DNA, 25 bp, Homo sapien
cagctcggctactgctcgctccggc

SEQ ID NO: 788063 - DNA, 25 bp, Homo sapien
ctcggctactgctcgctccggctgc

SEQ ID NO: 788064 - DNA, 25 bp, Homo sapien
gctcggctactgctcgctccggctg

SEQ ID NO: 788065 - DNA, 25 bp, Homo sapien
agctcggctactgctcgctccggct

SEQ ID NO: 788066 - DNA, 25 bp, Homo sapien
gcagctgccatggatatcagctaac

SEQ ID NO: 788067 - DNA, 25 bp, Homo sapien
catggatatcagctaacaacacaca

SEQ ID NO: 788068 - DNA, 25 bp, Homo sapien
tatcagctaacaacacacacccagg

SEQ ID NO: 788069 - DNA, 25 bp, Homo sapien
ttcccactcgcaccacgcaggagtg

SEQ ID NO: 788070 - DNA, 25 bp, Homo sapien
tccaggtcccgctatttctgctcca

SEQ ID NO: 788071 - DNA, 25 bp, Homo sapien
ctgaagaaaggtccgcactgggctc

SEQ ID NO: 788072 - DNA, 25 bp, Homo sapien
tcggagggagtcagcgcgtcctcct

SEQ ID NO: 788073 - DNA, 25 bp, Homo sapien
aggacgctcgcagagcccgagatgt

SEQ ID NO: 788074 - DNA, 25 bp, Homo sapien
gcgtaatcagggtacgcagcctcca

SEQ ID NO: 788075 - DNA, 25 bp, Homo sapien
atatagatgaagacatgaaacctct

SEQ ID NO: 788076 - DNA, 25 bp, Homo sapien
cccggggaatgcgaggctgcttccc

SEQ ID NO: 788077 - DNA, 25 bp, Homo sapien
ggctgcttcccttctgcgtaatcag

SEQ ID NO: 788078 - DNA, 25 bp, Homo sapien
cctgcatccttttgcccctgtcctc

SEQ ID NO: 788079 - DNA, 25 bp, Homo sapien
tcagtggaaatcagcagcctccctg

SEQ ID NO: 788080 - DNA, 25 bp, Homo sapien
tgttaatgtctcacaggaaattagc

SEQ ID NO: 788081 - DNA, 25 bp, Homo sapien
aattagctcttcagtggaaatcagc

SEQ ID NO: 788082 - DNA, 25 bp, Homo sapien
cagagtctggattgaaacctggtct

SEQ ID NO: 788083 - DNA, 25 bp, Homo sapien
ccaggagagcactgctgtgactgat

SEQ ID NO: 788084 - DNA, 25 bp, Homo sapien
tattctcagtaagccgcagagtctg

SEQ ID NO: 788085 - DNA, 25 bp, Homo sapien
caggaaggtcaagcagtttactcaa

SEQ ID NO: 788086 - DNA, 25 bp, Homo sapien
ccatgaaatggcctagtgagagaag

SEQ ID NO: 788087 - DNA, 25 bp, Homo sapien
ctttcagggtgagcaggtgtagacc

SEQ ID NO: 788088 - DNA, 25 bp, Homo sapien
gctgtgtatttcatgggcggcactg

SEQ ID NO: 788089 - DNA, 25 bp, Homo sapien
gaaagtaagccgttcaactctggaa

SEQ ID NO: 788090 - DNA, 25 bp, Homo sapien
tcttcattgatatgtgctctcctgc

SEQ ID NO: 788091 - DNA, 25 bp, Homo sapien
gctctcctgcattctgttattgtaa

SEQ ID NO: 788092 - DNA, 25 bp, Homo sapien
gctgtccctggctcttgaagacact

SEQ ID NO: 788093 - DNA, 25 bp, Homo sapien
tcaactctgcacagacccagtgctg

SEQ ID NO: 788094 - DNA, 25 bp, Homo sapien
gagtcatgctctcaaagaagcctag

SEQ ID NO: 788095 - DNA, 25 bp, Homo sapien
cagttactggacttaagctgggcac

SEQ ID NO: 788096 - DNA, 25 bp, Homo sapien
tcaacagtgttgtaatgcaagccag

SEQ ID NO: 788097 - DNA, 25 bp, Homo sapien
taagggtaagtgcacgaaaaatggc

SEQ ID NO: 788098 - DNA, 25 bp, Homo sapien
taaaatgcctaatctctacactata

SEQ ID NO: 788099 - DNA, 25 bp, Homo sapien
taaactagattggtatatgcaaaca

SEQ ID NO: 788100 - DNA, 25 bp, Homo sapien
cacctattgttaacaaatgaaggaa

SEQ ID NO: 788101 - DNA, 25 bp, Homo sapien
ggcctatagtaggaagcatagtcat

SEQ ID NO: 788102 - DNA, 25 bp, Homo sapien
tcagagggacatgttgaaagggcaa

SEQ ID NO: 788103 - DNA, 25 bp, Homo sapien
gacctgcatagtagaagcctctcta

SEQ ID NO: 788104 - DNA, 25 bp, Homo sapien
taaaggctcacatatcatgccaggt

SEQ ID NO: 788105 - DNA, 25 bp, Homo sapien
taagaatccaggactctgtactgat

SEQ ID NO: 788106 - DNA, 25 bp, Homo sapien
agaaaagtctgccacatccaaggtc

SEQ ID NO: 788107 - DNA, 25 bp, Homo sapien
gctactgtattcatccaaagggagg

SEQ ID NO: 788108 - DNA, 25 bp, Homo sapien
taagctattgctaaacagagtcccc

SEQ ID NO: 788109 - DNA, 25 bp, Homo sapien
ctgaaagagactagaaacaatggcc

SEQ ID NO: 788110 - DNA, 25 bp, Homo sapien
gatacacacgcgtacagataaatgt

SEQ ID NO: 788111 - DNA, 25 bp, Homo sapien
gacagggtgtcaaatatatcacgtg

SEQ ID NO: 788112 - DNA, 25 bp, Homo sapien
tacatccaatttcaaacgctgtgtg

SEQ ID NO: 788113 - DNA, 25 bp, Homo sapien
tccaagtatgatatatgacagggtg

SEQ ID NO: 788114 - DNA, 25 bp, Homo sapien
tgaggaacattcatacaagaagctg

SEQ ID NO: 788115 - DNA, 25 bp, Homo sapien
gaaggaggtcattctaggccattaa

SEQ ID NO: 788116 - DNA, 25 bp, Homo sapien
taagttgcagcacctatacccaaaa

SEQ ID NO: 788117 - DNA, 25 bp, Homo sapien
aatactaatctcttttggacgacac

SEQ ID NO: 788118 - DNA, 25 bp, Homo sapien
tgccagggagtccgagaaggtgaat

SEQ ID NO: 788119 - DNA, 25 bp, Homo sapien
gtgccagggagtccgagaaggtgaa

SEQ ID NO: 788120 - DNA, 25 bp, Homo sapien
ggtgccagggagtccgagaaggtga

SEQ ID NO: 788121 - DNA, 25 bp, Homo sapien
gccagggagtccgagaaggtgaata

SEQ ID NO: 788122 - DNA, 25 bp, Homo sapien
catatgacatagaagtctgtttctg

SEQ ID NO: 788123 - DNA, 25 bp, Homo sapien
aagatcagcctcaaaatcacaatga

SEQ ID NO: 788124 - DNA, 25 bp, Homo sapien
gtgttaagtgtctgtgggtccctca

SEQ ID NO: 788125 - DNA, 25 bp, Homo sapien
gcttttatagcaggaagtgtgaagg

SEQ ID NO: 788126 - DNA, 25 bp, Homo sapien
gactgttatcttactcagcaaggcc

SEQ ID NO: 788127 - DNA, 25 bp, Homo sapien
cagcgtgctccctcatatcattaga

SEQ ID NO: 788128 - DNA, 25 bp, Homo sapien
tgtgacctacaagaccctacatgaa

SEQ ID NO: 788129 - DNA, 25 bp, Homo sapien
gcgagtgggagctaacttcagtaca

SEQ ID NO: 788130 - DNA, 25 bp, Homo sapien
cagcagtctgctcagtagaggacac

SEQ ID NO: 788131 - DNA, 25 bp, Homo sapien
aacctcttacgtgtcaggagtccca

SEQ ID NO: 788132 - DNA, 25 bp, Homo sapien
gaaaggtgaggctatcagtatcagc

SEQ ID NO: 788133 - DNA, 25 bp, Homo sapien
tttgagaaaggagctaccacctctc

SEQ ID NO: 788134 - DNA, 25 bp, Homo sapien
tgtttcctctggattggatgtggac

SEQ ID NO: 788135 - DNA, 25 bp, Homo sapien
gtgtttcctctggattggatgtgga

SEQ ID NO: 788136 - DNA, 25 bp, Homo sapien
tgtgtttcctctggattggatgtgg

SEQ ID NO: 788137 - DNA, 25 bp, Homo sapien
aagctccccagaggtatgtgtttcc

SEQ ID NO: 788138 - DNA, 25 bp, Homo sapien
ccctgagacctcttgctacagcata

SEQ ID NO: 788139 - DNA, 25 bp, Homo sapien
gtacaaccatgttttgatgcaagtg

SEQ ID NO: 788140 - DNA, 25 bp, Homo sapien
tacaacctggaaatacttctagaat

SEQ ID NO: 788141 - DNA, 25 bp, Homo sapien
ccttagataaaccaatacaacctgg

SEQ ID NO: 788142 - DNA, 25 bp, Homo sapien
tccatttggtgacgtctttttgttg

SEQ ID NO: 788143 - DNA, 25 bp, Homo sapien
ccacatccatttggtgacgtctttt

SEQ ID NO: 788144 - DNA, 25 bp, Homo sapien
tttccacatccatttggtgacgtct

SEQ ID NO: 788145 - DNA, 25 bp, Homo sapien
acatccatttggtgacgtctttttg

SEQ ID NO: 788146 - DNA, 25 bp, Homo sapien
taactaaaactcttcatgttgtcag

SEQ ID NO: 788147 - DNA, 25 bp, Homo sapien
tcagtccacagcaattgcatctaac

SEQ ID NO: 788148 - DNA, 25 bp, Homo sapien
gtccacagcaattgcatctaacctt

SEQ ID NO: 788149 - DNA, 25 bp, Homo sapien
tccacagcaattgcatctaaccttt

SEQ ID NO: 788150 - DNA, 25 bp, Homo sapien
cagtccacagcaattgcatctaacc

SEQ ID NO: 788151 - DNA, 25 bp, Homo sapien
actccagagttactgccttgaaaaa

SEQ ID NO: 788152 - DNA, 25 bp, Homo sapien
tttggttctgtaactccagagttac

SEQ ID NO: 788153 - DNA, 25 bp, Homo sapien
tggctgtgcaccaaaatcaccaagg

SEQ ID NO: 788154 - DNA, 25 bp, Homo sapien
tcattgaggaattcccatttgtggc

SEQ ID NO: 788155 - DNA, 25 bp, Homo sapien
tattcataaacctcgtacagcattt

SEQ ID NO: 788156 - DNA, 25 bp, Homo sapien
cataaacctcgtacagcatttctcc

SEQ ID NO: 788157 - DNA, 25 bp, Homo sapien
ttcataaacctcgtacagcatttct

SEQ ID NO: 788158 - DNA, 25 bp, Homo sapien
ctattcataaacctcgtacagcatt

SEQ ID NO: 788159 - DNA, 25 bp, Homo sapien
gtaatccatgcccttattcctgagg

SEQ ID NO: 788160 - DNA, 25 bp, Homo sapien
gagtcctggtactttgtctttctca

SEQ ID NO: 788161 - DNA, 25 bp, Homo sapien
ccatgcccttattcctgagggctgt

SEQ ID NO: 788162 - DNA, 25 bp, Homo sapien
atgatgggtaatccatgcccttatt

SEQ ID NO: 788163 - DNA, 25 bp, Homo sapien
atcaaatgagatttggtgtgttcag

SEQ ID NO: 788164 - DNA, 25 bp, Homo sapien
tcaaatgagatttggtgtgttcagg

SEQ ID NO: 788165 - DNA, 25 bp, Homo sapien
gagatcaaatgagatttggtgtgtt

SEQ ID NO: 788166 - DNA, 25 bp, Homo sapien
ttctgagatcaaatgagatttggtg

SEQ ID NO: 788167 - DNA, 25 bp, Homo sapien
taagatgcttgccattcgaccagtc

SEQ ID NO: 788168 - DNA, 25 bp, Homo sapien
agtaagatgcttgccattcgaccag

SEQ ID NO: 788169 - DNA, 25 bp, Homo sapien
agatgcttgccattcgaccagtcgt

SEQ ID NO: 788170 - DNA, 25 bp, Homo sapien
ttgagtaagatgcttgccattcgac

SEQ ID NO: 788171 - DNA, 25 bp, Homo sapien
cttttagctggcagatactaggcat

SEQ ID NO: 788172 - DNA, 25 bp, Homo sapien
cagaaactctagttccctgaaggtc

SEQ ID NO: 788173 - DNA, 25 bp, Homo sapien
ttctgttcttttagctggcagatac

SEQ ID NO: 788174 - DNA, 25 bp, Homo sapien
tctcagaaactctagttccctgaag

SEQ ID NO: 788175 - DNA, 25 bp, Homo sapien
gacagatgcttgtgaagtattcagg

SEQ ID NO: 788176 - DNA, 25 bp, Homo sapien
ttctgctgcattggtaacagtatgc

SEQ ID NO: 788177 - DNA, 25 bp, Homo sapien
gatgatagctctggaatctcggaca

SEQ ID NO: 788178 - DNA, 25 bp, Homo sapien
tgtctggagtactagcacccttctg

SEQ ID NO: 788179 - DNA, 25 bp, Homo sapien
gacaatacaccatgaggctgggcat

SEQ ID NO: 788180 - DNA, 25 bp, Homo sapien
tattgtattccacctggagacgcag

SEQ ID NO: 788181 - DNA, 25 bp, Homo sapien
tctctccatgagtagggtacagaag

SEQ ID NO: 788182 - DNA, 25 bp, Homo sapien
tactcacgtatgatctcagctagga

SEQ ID NO: 788183 - DNA, 25 bp, Homo sapien
tcaaagctcgtatagggttcttcgc

SEQ ID NO: 788184 - DNA, 25 bp, Homo sapien
tcattgtgtgccctaaagactacag

SEQ ID NO: 788185 - DNA, 25 bp, Homo sapien
tccagtggctcaggatcagctcttc

SEQ ID NO: 788186 - DNA, 25 bp, Homo sapien
gaaaagactatttgagcacagtggc

SEQ ID NO: 788187 - DNA, 25 bp, Homo sapien
cacatctgtcaatttcaactgtgat

SEQ ID NO: 788188 - DNA, 25 bp, Homo sapien
ctgtgttgttatttaccttatggta

SEQ ID NO: 788189 - DNA, 25 bp, Homo sapien
ttccacatctgtcaatttcaactgt

SEQ ID NO: 788190 - DNA, 25 bp, Homo sapien
tgtgttgttatttaccttatggtaa

SEQ ID NO: 788191 - DNA, 25 bp, Homo sapien
gacacccacatagcaggtttcttgc

SEQ ID NO: 788192 - DNA, 25 bp, Homo sapien
taactgatatgcttaaagcctctga

SEQ ID NO: 788193 - DNA, 25 bp, Homo sapien
gaacaacttgtacccatcctggctt

SEQ ID NO: 788194 - DNA, 25 bp, Homo sapien
ggctttcaaggtactgacacccaca

SEQ ID NO: 788195 - DNA, 25 bp, Homo sapien
cctcaggtggttatatattagagaa

SEQ ID NO: 788196 - DNA, 25 bp, Homo sapien
caagcctcaggtggttatatattag

SEQ ID NO: 788197 - DNA, 25 bp, Homo sapien
tatattagagaatggtcgctcttca

SEQ ID NO: 788198 - DNA, 25 bp, Homo sapien
tggttatatattagagaatggtcgc

SEQ ID NO: 788199 - DNA, 25 bp, Homo sapien
cagaaaagctggtaagttcaaggtc

SEQ ID NO: 788200 - DNA, 25 bp, Homo sapien
aggtcaaggtcttcccttctttcag

SEQ ID NO: 788201 - DNA, 25 bp, Homo sapien
aaaagctggtaagttcaaggtcaag

SEQ ID NO: 788202 - DNA, 25 bp, Homo sapien
cttctttcagggctatgtttagtca

SEQ ID NO: 788203 - DNA, 25 bp, Homo sapien
gtcatgtgagcttgaccgtagttct

SEQ ID NO: 788204 - DNA, 25 bp, Homo sapien
tgtcatgtgagcttgaccgtagttc

SEQ ID NO: 788205 - DNA, 25 bp, Homo sapien
tattgggtcaaccttgtgcttggtt

SEQ ID NO: 788206 - DNA, 25 bp, Homo sapien
tctaatgcccaatccacagttattg

SEQ ID NO: 788207 - DNA, 25 bp, Homo sapien
gaaagcaatgtggtccaaacacaca

SEQ ID NO: 788208 - DNA, 25 bp, Homo sapien
caatggggaaagcaatgtggtccaa

SEQ ID NO: 788209 - DNA, 25 bp, Homo sapien
ctatgacttctgtaatgactactca

SEQ ID NO: 788210 - DNA, 25 bp, Homo sapien
tctaatccaaacctgttctcagtgc

SEQ ID NO: 788211 - DNA, 25 bp, Homo sapien
cagtgcagtagtgacctctatgact

SEQ ID NO: 788212 - DNA, 25 bp, Homo sapien
tcaacatctaatccaaacctgttct

SEQ ID NO: 788213 - DNA, 25 bp, Homo sapien
tacccataaactggaatgtatatct

SEQ ID NO: 788214 - DNA, 25 bp, Homo sapien
taaactggaatgtatatcttctgtt

SEQ ID NO: 788215 - DNA, 25 bp, Homo sapien
cttcttttacccataaactggaatg

SEQ ID NO: 788216 - DNA, 25 bp, Homo sapien
atgcaagtgtgggctcttgtagtct

SEQ ID NO: 788217 - DNA, 25 bp, Homo sapien
acatcgtacagctccctccagactc

SEQ ID NO: 788218 - DNA, 25 bp, Homo sapien
catcgtacagctccctccagactca

SEQ ID NO: 788219 - DNA, 25 bp, Homo sapien
ccagctgctgactccaaatgcaact

SEQ ID NO: 788220 - DNA, 25 bp, Homo sapien
tatttagtggaggtgcagtttgatt

SEQ ID NO: 788221 - DNA, 25 bp, Homo sapien
ctcacgggaccccacaggacatagt

SEQ ID NO: 788222 - DNA, 25 bp, Homo sapien
agtcacacactaccagataattgaa

SEQ ID NO: 788223 - DNA, 25 bp, Homo sapien
caagatagtatgtccatgggttggg

SEQ ID NO: 788224 - DNA, 25 bp, Homo sapien
caagctgttacataatggcaaatgg

SEQ ID NO: 788225 - DNA, 25 bp, Homo sapien
tgccatagttggataattacgtacc

SEQ ID NO: 788226 - DNA, 25 bp, Homo sapien
ccactagtatgggactgtgaaatca

SEQ ID NO: 788227 - DNA, 25 bp, Homo sapien
tcttggtaactttcgttctggtcta

SEQ ID NO: 788228 - DNA, 25 bp, Homo sapien
actgctttactcttggtaactttcg

SEQ ID NO: 788229 - DNA, 25 bp, Homo sapien
tagcaaagcaatccactgctttact

SEQ ID NO: 788230 - DNA, 25 bp, Homo sapien
tccactgctttactcttggtaactt

SEQ ID NO: 788231 - DNA, 25 bp, Homo sapien
taaaagcacttgttagcttctgcct

SEQ ID NO: 788232 - DNA, 25 bp, Homo sapien
agcacttgttagcttctgcctctgg

SEQ ID NO: 788233 - DNA, 25 bp, Homo sapien
aaagcacttgttagcttctgcctct

SEQ ID NO: 788234 - DNA, 25 bp, Homo sapien
ttaaaagcacttgttagcttctgcc

SEQ ID NO: 788235 - DNA, 25 bp, Homo sapien
caaagaataccagttaagcagtcca

SEQ ID NO: 788236 - DNA, 25 bp, Homo sapien
gaggcattcatctacccttccagtg

SEQ ID NO: 788237 - DNA, 25 bp, Homo sapien
gagcaataggaccacaggatttctg

SEQ ID NO: 788238 - DNA, 25 bp, Homo sapien
accagttaggtagctagtgagacca

SEQ ID NO: 788239 - DNA, 25 bp, Homo sapien
tgaaaggctccagatgggtatgtga

SEQ ID NO: 788240 - DNA, 25 bp, Homo sapien
atgtcatctgcatcaacaagatgta

SEQ ID NO: 788241 - DNA, 25 bp, Homo sapien
catctgcatcaacaagatgtagccc

SEQ ID NO: 788242 - DNA, 25 bp, Homo sapien
gctgaaaggctccagatgggtatgt

SEQ ID NO: 788243 - DNA, 25 bp, Homo sapien
aaacagccatacccaaagtctcgtt

SEQ ID NO: 788244 - DNA, 25 bp, Homo sapien
aaaacagccatacccaaagtctcgt

SEQ ID NO: 788245 - DNA, 25 bp, Homo sapien
aacagccatacccaaagtctcgttt

SEQ ID NO: 788246 - DNA, 25 bp, Homo sapien
agtctcttagcatctgaaaccacag

SEQ ID NO: 788247 - DNA, 25 bp, Homo sapien
aaaacaggatacttacagccttcag

SEQ ID NO: 788248 - DNA, 25 bp, Homo sapien
gaagccatgtgtttaggacactcga

SEQ ID NO: 788249 - DNA, 25 bp, Homo sapien
tctgttaatggcctactaagaagcc

SEQ ID NO: 788250 - DNA, 25 bp, Homo sapien
cgccggcagccacgcaaggtttttc

SEQ ID NO: 788251 - DNA, 25 bp, Homo sapien
ccggcagccacgcaaggtttttcaa

SEQ ID NO: 788252 - DNA, 25 bp, Homo sapien
ccacgcaaggtttttcaaaatgcaa

SEQ ID NO: 788253 - DNA, 25 bp, Homo sapien
cagccacgcaaggtttttcaaaatg

SEQ ID NO: 788254 - DNA, 25 bp, Homo sapien
gagagctgccaaagttgccgaaaaa

SEQ ID NO: 788255 - DNA, 25 bp, Homo sapien
aagccagttctgggcgtttgagcat

SEQ ID NO: 788256 - DNA, 25 bp, Homo sapien
ctgtgcgtacctgccccttcgggtg

SEQ ID NO: 788257 - DNA, 25 bp, Homo sapien
agggagctgtgcgtacctgcccctt

SEQ ID NO: 788258 - DNA, 25 bp, Homo sapien
ggctgttcctcacgaccaggctctg

SEQ ID NO: 788259 - DNA, 25 bp, Homo sapien
aatctctgggtacagtggccgctgc

SEQ ID NO: 788260 - DNA, 25 bp, Homo sapien
tagcgggcgttcgaacgcctcccga

SEQ ID NO: 788261 - DNA, 25 bp, Homo sapien
accacttcctaagcggagtcgaggg

SEQ ID NO: 788262 - DNA, 25 bp, Homo sapien
agtgcgggctccaagcacaggggaa

SEQ ID NO: 788263 - DNA, 25 bp, Homo sapien
cgggctccaagcacaggggaatcct

SEQ ID NO: 788264 - DNA, 25 bp, Homo sapien
gctccaagcacaggggaatcctttc

SEQ ID NO: 788265 - DNA, 25 bp, Homo sapien
tgcgggctccaagcacaggggaatc

SEQ ID NO: 788266 - DNA, 25 bp, Homo sapien
ccgaaagcgagagcctgccgccgct

SEQ ID NO: 788267 - DNA, 25 bp, Homo sapien
tgccgaaagcgagagcctgccgccg

SEQ ID NO: 788268 - DNA, 25 bp, Homo sapien
cgaaagcgagagcctgccgccgctc

SEQ ID NO: 788269 - DNA, 25 bp, Homo sapien
ggtgccgaaagcgagagcctgccgc

SEQ ID NO: 788270 - DNA, 25 bp, Homo sapien
cttctcgccgtcctcacggaggttg

SEQ ID NO: 788271 - DNA, 25 bp, Homo sapien
tcgatcatcttactccgctccaccg

SEQ ID NO: 788272 - DNA, 25 bp, Homo sapien
cctcacggaggttgcggtcgatcat

SEQ ID NO: 788273 - DNA, 25 bp, Homo sapien
gcagcagcttgacctcgcgcgccgc

SEQ ID NO: 788274 - DNA, 25 bp, Homo sapien
tagggtgatggaactctgggcaaaa

SEQ ID NO: 788275 - DNA, 25 bp, Homo sapien
actagggtgatggaactctgggcaa

SEQ ID NO: 788276 - DNA, 25 bp, Homo sapien
acaggactagggtgatggaactctg

SEQ ID NO: 788277 - DNA, 25 bp, Homo sapien
ttacaggactagggtgatggaactc

SEQ ID NO: 788278 - DNA, 25 bp, Homo sapien
taaagagtcacagagaactatcccc

SEQ ID NO: 788279 - DNA, 25 bp, Homo sapien
tcctgagttagatcaagagccctgg

SEQ ID NO: 788280 - DNA, 25 bp, Homo sapien
tgtcagaccaccataattccagagg

SEQ ID NO: 788281 - DNA, 25 bp, Homo sapien
ccaagagtggagaagttcagtaccc

SEQ ID NO: 788282 - DNA, 25 bp, Homo sapien
tacagggcattcagttaggagcaac

SEQ ID NO: 788283 - DNA, 25 bp, Homo sapien
gattgcagcaaggacatacagtagg

SEQ ID NO: 788284 - DNA, 25 bp, Homo sapien
accccgggagcctatgagaaatgca

SEQ ID NO: 788285 - DNA, 25 bp, Homo sapien
tcatactggctctacaggaaagggc

SEQ ID NO: 788286 - DNA, 25 bp, Homo sapien
tttatcacaaacattaccagaggaa

SEQ ID NO: 788287 - DNA, 25 bp, Homo sapien
aatctcatcatgaaggaccagccct

SEQ ID NO: 788288 - DNA, 25 bp, Homo sapien
cagcctgacctgaacaatcgtatca

SEQ ID NO: 788289 - DNA, 25 bp, Homo sapien
gaagcggatgtttccatgcaagatg

SEQ ID NO: 788290 - DNA, 25 bp, Homo sapien
tgctcatgaacatgcctgggcagga

SEQ ID NO: 788291 - DNA, 25 bp, Homo sapien
agagctactgacgacttctggccag

SEQ ID NO: 788292 - DNA, 25 bp, Homo sapien
gggcactccctgaaagaggaacata

SEQ ID NO: 788293 - DNA, 25 bp, Homo sapien
tgtgtgtccagcatccagcttgaga

SEQ ID NO: 788294 - DNA, 25 bp, Homo sapien
ggcatacgccaccacgcctaatatt

SEQ ID NO: 788295 - DNA, 25 bp, Homo sapien
atttttgtaattttagtagacacag

SEQ ID NO: 788296 - DNA, 25 bp, Homo sapien
caggtttcaccatattggccaggct

SEQ ID NO: 788297 - DNA, 25 bp, Homo sapien
aggcatacgccaccacgcctaatat

SEQ ID NO: 788298 - DNA, 25 bp, Homo sapien
acaccaattggggagcatagcagaa

SEQ ID NO: 788299 - DNA, 25 bp, Homo sapien
tcccccacaccaattggggagcata

SEQ ID NO: 788300 - DNA, 25 bp, Homo sapien
cccacaccaattggggagcatagca

SEQ ID NO: 788301 - DNA, 25 bp, Homo sapien
accaattggggagcatagcagaagg

SEQ ID NO: 788302 - DNA, 25 bp, Homo sapien
ttctcccaagttgggccccttatca

SEQ ID NO: 788303 - DNA, 25 bp, Homo sapien
ccaagttgggccccttatcaacgtg

SEQ ID NO: 788304 - DNA, 25 bp, Homo sapien
tctcccaagttgggccccttatcaa

SEQ ID NO: 788305 - DNA, 25 bp, Homo sapien
caagttgggccccttatcaacgtgg

SEQ ID NO: 788306 - DNA, 25 bp, Homo sapien
ataaccgttcgagtcaccagcttgg

SEQ ID NO: 788307 - DNA, 25 bp, Homo sapien
ttccaggtgcgcgttccttccttct

SEQ ID NO: 788308 - DNA, 25 bp, Homo sapien
gctactggtaacaggcacacagagg

SEQ ID NO: 788309 - DNA, 25 bp, Homo sapien
aacttctcggtctccctaccttatg

SEQ ID NO: 788310 - DNA, 25 bp, Homo sapien
cggtcaacgaatgcagggtaaagcc

SEQ ID NO: 788311 - DNA, 25 bp, Homo sapien
taacaccagagatccaatctaaggc

SEQ ID NO: 788312 - DNA, 25 bp, Homo sapien
taggctgattcggttcttctgtgag

SEQ ID NO: 788313 - DNA, 25 bp, Homo sapien
gaagtgtacagattgaacggtcaac

SEQ ID NO: 788314 - DNA, 25 bp, Homo sapien
tgtgattcctgctgcctctcacttt

SEQ ID NO: 788315 - DNA, 25 bp, Homo sapien
cactctgcatgtgattcctgctgcc

SEQ ID NO: 788316 - DNA, 25 bp, Homo sapien
gattcctgctgcctctcactttgca

SEQ ID NO: 788317 - DNA, 25 bp, Homo sapien
ccactctgcatgtgattcctgctgc

SEQ ID NO: 788318 - DNA, 25 bp, Homo sapien
agttccaggaacacccactgctgct

SEQ ID NO: 788319 - DNA, 25 bp, Homo sapien
tccaggaacacccactgctgctcat

SEQ ID NO: 788320 - DNA, 25 bp, Homo sapien
gttccaggaacacccactgctgctc

SEQ ID NO: 788321 - DNA, 25 bp, Homo sapien
ttccaggaacacccactgctgctca

SEQ ID NO: 788322 - DNA, 25 bp, Homo sapien
acaattgtacttttaccagattcac

SEQ ID NO: 788323 - DNA, 25 bp, Homo sapien
cacaattgtacttttaccagattca

SEQ ID NO: 788324 - DNA, 25 bp, Homo sapien
gaacggtacactaacttaaacagca

SEQ ID NO: 788325 - DNA, 25 bp, Homo sapien
cggtacactaacttaaacagcaaat

SEQ ID NO: 788326 - DNA, 25 bp, Homo sapien
ggtgttactgtagaccactgctttg

SEQ ID NO: 788327 - DNA, 25 bp, Homo sapien
tccccatagccctaatgatagcaat

SEQ ID NO: 788328 - DNA, 25 bp, Homo sapien
gatagcaataattgactggatggtg

SEQ ID NO: 788329 - DNA, 25 bp, Homo sapien
tgagtcaccaaagtctatcttcaac

SEQ ID NO: 788330 - DNA, 25 bp, Homo sapien
gggatatctggcatgctgtacttat

SEQ ID NO: 788331 - DNA, 25 bp, Homo sapien
taataagtcctcattccaagcggtg

SEQ ID NO: 788332 - DNA, 25 bp, Homo sapien
aagactttaagggagcatgatggct

SEQ ID NO: 788333 - DNA, 25 bp, Homo sapien
gaactcagaaaggagctatgaagca

SEQ ID NO: 788334 - DNA, 25 bp, Homo sapien
tccagctagcacaaagagttggcgt

SEQ ID NO: 788335 - DNA, 25 bp, Homo sapien
tactctcgggatctgttgaaacagg

SEQ ID NO: 788336 - DNA, 25 bp, Homo sapien
caagttctgcagtcataaagccttc

SEQ ID NO: 788337 - DNA, 25 bp, Homo sapien
agaatcattaagctggtactctcgg

SEQ ID NO: 788338 - DNA, 25 bp, Homo sapien
tctgttaactcacgtccaagtagtg

SEQ ID NO: 788339 - DNA, 25 bp, Homo sapien
actcacgtccaagtagtgtgcacag

SEQ ID NO: 788340 - DNA, 25 bp, Homo sapien
cccggcctatgtttctgttaactca

SEQ ID NO: 788341 - DNA, 25 bp, Homo sapien
tgtttctgttaactcacgtccaagt

SEQ ID NO: 788342 - DNA, 25 bp, Homo sapien
gcaagtagtgatgaaagctcttccc

SEQ ID NO: 788343 - DNA, 25 bp, Homo sapien
aaagaaggattcatggatagcgagg

SEQ ID NO: 788344 - DNA, 25 bp, Homo sapien
tcccaaaggctgaacgagatgtttc

SEQ ID NO: 788345 - DNA, 25 bp, Homo sapien
aaaggaatgacactgccccaggaga

SEQ ID NO: 788346 - DNA, 25 bp, Homo sapien
gagaacatcttgttgagtcgggatg

SEQ ID NO: 788347 - DNA, 25 bp, Homo sapien
ttgagtcgggatgtaatttggttga

SEQ ID NO: 788348 - DNA, 25 bp, Homo sapien
ctgagaacatcttgttgagtcggga

SEQ ID NO: 788349 - DNA, 25 bp, Homo sapien
gttgagtcgggatgtaatttggttg

SEQ ID NO: 788350 - DNA, 25 bp, Homo sapien
tcgtagtcactcagtgctacacaga

SEQ ID NO: 788351 - DNA, 25 bp, Homo sapien
ttcagctagaaccaggtcgtagtca

SEQ ID NO: 788352 - DNA, 25 bp, Homo sapien
agtgctacacagaagatgatcgccg

SEQ ID NO: 788353 - DNA, 25 bp, Homo sapien
cactccttcgaagcaatgaatccac

SEQ ID NO: 788354 - DNA, 25 bp, Homo sapien
ggtgagattgactctccatgttttc

SEQ ID NO: 788355 - DNA, 25 bp, Homo sapien
gcttgaggtgagattgactctccat

SEQ ID NO: 788356 - DNA, 25 bp, Homo sapien
aggcttgaggtgagattgactctcc

SEQ ID NO: 788357 - DNA, 25 bp, Homo sapien
ttgaggtgagattgactctccatgt

SEQ ID NO: 788358 - DNA, 25 bp, Homo sapien
caatcgtcactaacagcaaggattt

SEQ ID NO: 788359 - DNA, 25 bp, Homo sapien
taaaaccaatcgtcactaacagcaa

SEQ ID NO: 788360 - DNA, 25 bp, Homo sapien
aaataaaaccaatcgtcactaacag

SEQ ID NO: 788361 - DNA, 25 bp, Homo sapien
aaccaatcgtcactaacagcaagga

SEQ ID NO: 788362 - DNA, 25 bp, Homo sapien
aaaccacttgttgttacatatgctg

SEQ ID NO: 788363 - DNA, 25 bp, Homo sapien
tataatggatgtatctgtaaaccac

SEQ ID NO: 788364 - DNA, 25 bp, Homo sapien
tattctggatagcatatagtgagag

SEQ ID NO: 788365 - DNA, 25 bp, Homo sapien
catatagtgagagggctctttttga

SEQ ID NO: 788366 - DNA, 25 bp, Homo sapien
taaatgtagcctagtcgttcatggt

SEQ ID NO: 788367 - DNA, 25 bp, Homo sapien
ttaaatgtagcctagtcgttcatgg

SEQ ID NO: 788368 - DNA, 25 bp, Homo sapien
taatgactaagttatcccttaaaca

SEQ ID NO: 788369 - DNA, 25 bp, Homo sapien
aaatttcctttacatggcattccgt

SEQ ID NO: 788370 - DNA, 25 bp, Homo sapien
tttcctttacatggcattccgtgtt

SEQ ID NO: 788371 - DNA, 25 bp, Homo sapien
tcctttacatggcattccgtgttca

SEQ ID NO: 788372 - DNA, 25 bp, Homo sapien
taaaataactgcttaaaatactgaa

SEQ ID NO: 788373 - DNA, 25 bp, Homo sapien
tgcaaaaagttaaaataactgctta

SEQ ID NO: 788374 - DNA, 25 bp, Homo sapien
ataactgcttaaaatactgaattca

SEQ ID NO: 788375 - DNA, 25 bp, Homo sapien
aggaaagaaacataaatgcaaaaag

SEQ ID NO: 788376 - DNA, 25 bp, Homo sapien
aaaagagaccacaatcttttagatt

SEQ ID NO: 788377 - DNA, 25 bp, Homo sapien
cttttattgaggtcttcaaactgac

SEQ ID NO: 788378 - DNA, 25 bp, Homo sapien
tgaggtcttcaaactgacattgaat

SEQ ID NO: 788379 - DNA, 25 bp, Homo sapien
aagagaccacaatcttttagattat

SEQ ID NO: 788380 - DNA, 25 bp, Homo sapien
tctagataagggctgtaatgtttcc

SEQ ID NO: 788381 - DNA, 25 bp, Homo sapien
tgtgttgctgcaagactctagtcta

SEQ ID NO: 788382 - DNA, 25 bp, Homo sapien
tcatcaatatactagagcccagctt

SEQ ID NO: 788383 - DNA, 25 bp, Homo sapien
ctggcaaacgtagtaatagtctgtc

SEQ ID NO: 788384 - DNA, 25 bp, Homo sapien
catacaatgtttaaatagttgatcc

SEQ ID NO: 788385 - DNA, 25 bp, Homo sapien
aatagttgatccaaaggcaggtgta

SEQ ID NO: 788386 - DNA, 25 bp, Homo sapien
caaaatgcatacaatgtttaaatag

SEQ ID NO: 788387 - DNA, 25 bp, Homo sapien
aaggcaggtgtattcatcttaagaa

SEQ ID NO: 788388 - DNA, 25 bp, Homo sapien
taagtctaagacagtatatcctcag

SEQ ID NO: 788389 - DNA, 25 bp, Homo sapien
caaaaatgctcttaggatccctcca

SEQ ID NO: 788390 - DNA, 25 bp, Homo sapien
tcaaaccaaatctaacgtggaatct

SEQ ID NO: 788391 - DNA, 25 bp, Homo sapien
tcacctttgaggcaatgcattcata

SEQ ID NO: 788392 - DNA, 25 bp, Homo sapien
tatgctaggtacaagagactcctca

SEQ ID NO: 788393 - DNA, 25 bp, Homo sapien
tatacttcaacccagtgacaacacg

SEQ ID NO: 788394 - DNA, 25 bp, Homo sapien
ttcacaatgtggatattacaggtcc

SEQ ID NO: 788395 - DNA, 25 bp, Homo sapien
gcaacgtgtactgaaagactaacct

SEQ ID NO: 788396 - DNA, 25 bp, Homo sapien
gaggactcggattggtcaggtctaa

SEQ ID NO: 788397 - DNA, 25 bp, Homo sapien
tcaggtctaagcctagagacggaga

SEQ ID NO: 788398 - DNA, 25 bp, Homo sapien
cactcgtccaatgctggaggactcg

SEQ ID NO: 788399 - DNA, 25 bp, Homo sapien
tggcagctctatcagaatcatgtag

SEQ ID NO: 788400 - DNA, 25 bp, Homo sapien
aataactgcaaaattgtatgtctaa

SEQ ID NO: 788401 - DNA, 25 bp, Homo sapien
cactgaaattgtacaaacatttgtc

SEQ ID NO: 788402 - DNA, 25 bp, Homo sapien
gaagactagctttacactgaaattg

SEQ ID NO: 788403 - DNA, 25 bp, Homo sapien
tcctggtaaaatagagaatacacag

SEQ ID NO: 788404 - DNA, 25 bp, Homo sapien
tcctgatttaagtcctgcagatagc

SEQ ID NO: 788405 - DNA, 25 bp, Homo sapien
tcagatcgatcccattaaactaatg

SEQ ID NO: 788406 - DNA, 25 bp, Homo sapien
caaaacatgcatgtaaggccttgga

SEQ ID NO: 788407 - DNA, 25 bp, Homo sapien
gacaagggtagctaaaatctgcaca

SEQ ID NO: 788408 - DNA, 25 bp, Homo sapien
tatgagccagggaatgtgaacagcc

SEQ ID NO: 788409 - DNA, 25 bp, Homo sapien
ccttataggaaagaggcaggagtca

SEQ ID NO: 788410 - DNA, 25 bp, Homo sapien
tatcaggttgctcttatgtccagga

SEQ ID NO: 788411 - DNA, 25 bp, Homo sapien
gagctcagtgtaatcaaaagggtcc

SEQ ID NO: 788412 - DNA, 25 bp, Homo sapien
agagtacagcctcttgttcacccat

SEQ ID NO: 788413 - DNA, 25 bp, Homo sapien
cagcagttttactaagtctctcctc

SEQ ID NO: 788414 - DNA, 25 bp, Homo sapien
ccagcagttttactaagtctctcct

SEQ ID NO: 788415 - DNA, 25 bp, Homo sapien
ttcattcgtaaaactgaatctttta

SEQ ID NO: 788416 - DNA, 25 bp, Homo sapien
agcttcaatgtccctgtttagtttc

SEQ ID NO: 788417 - DNA, 25 bp, Homo sapien
tatctcaggactattctctgttttg

SEQ ID NO: 788418 - DNA, 25 bp, Homo sapien
ctgaatcttttatctcaggactatt

SEQ ID NO: 788419 - DNA, 25 bp, Homo sapien
cttgttctgtgctaatgtgatcatc

SEQ ID NO: 788420 - DNA, 25 bp, Homo sapien
tgtgctaatgtgatcatcttggtac

SEQ ID NO: 788421 - DNA, 25 bp, Homo sapien
agtgcttgaaaatcttgttctgtgc

SEQ ID NO: 788422 - DNA, 25 bp, Homo sapien
ctagtgcttgaaaatcttgttctgt

SEQ ID NO: 788423 - DNA, 25 bp, Homo sapien
ttccaacatgagctggttcaccact

SEQ ID NO: 788424 - DNA, 25 bp, Homo sapien
actgactgttcacacatgtgatccc

SEQ ID NO: 788425 - DNA, 25 bp, Homo sapien
cactgactgttcacacatgtgatcc

SEQ ID NO: 788426 - DNA, 25 bp, Homo sapien
aactgccagggttgtacagcttgtt

SEQ ID NO: 788427 - DNA, 25 bp, Homo sapien
cgagcttcccagtcaactgccaggg

SEQ ID NO: 788428 - DNA, 25 bp, Homo sapien
gcctcacaggaaacccctatggcaa

SEQ ID NO: 788429 - DNA, 25 bp, Homo sapien
tgtacaagtaaactgcatgacgtgg

SEQ ID NO: 788430 - DNA, 25 bp, Homo sapien
tcctcatgagcattattctgtctaa

SEQ ID NO: 788431 - DNA, 25 bp, Homo sapien
ggaattggtacatctggagttgagc

SEQ ID NO: 788432 - DNA, 25 bp, Homo sapien
taaccacatggctagagttttcctc

SEQ ID NO: 788433 - DNA, 25 bp, Homo sapien
tgtctaaatcgccaagtcataaagg

SEQ ID NO: 788434 - DNA, 25 bp, Homo sapien
ttccaacttagaacctactcttaga

SEQ ID NO: 788435 - DNA, 25 bp, Homo sapien
cttccaacttagaacctactcttag

SEQ ID NO: 788436 - DNA, 25 bp, Homo sapien
cagtagatgtattcctgatgatact

SEQ ID NO: 788437 - DNA, 25 bp, Homo sapien
ttattttctgtgtaatggtgtatta

SEQ ID NO: 788438 - DNA, 25 bp, Homo sapien
accatgatcagcaaatcagtagatg

SEQ ID NO: 788439 - DNA, 25 bp, Homo sapien
tggtgtattaatttagctggtattg

SEQ ID NO: 788440 - DNA, 25 bp, Homo sapien
tgctttggccattggtgcattaacc

SEQ ID NO: 788441 - DNA, 25 bp, Homo sapien
tggtgcattaaccagctgcatacag

SEQ ID NO: 788442 - DNA, 25 bp, Homo sapien
tgcatacagatgtcccttgacaaca

SEQ ID NO: 788443 - DNA, 25 bp, Homo sapien
tcctttctgacctcggagcttctgt

SEQ ID NO: 788444 - DNA, 25 bp, Homo sapien
acttagtgcggcacccgatgagcac

SEQ ID NO: 788445 - DNA, 25 bp, Homo sapien
agtgcggcacccgatgagcacagct

SEQ ID NO: 788446 - DNA, 25 bp, Homo sapien
tgcggcacccgatgagcacagctca

SEQ ID NO: 788447 - DNA, 25 bp, Homo sapien
ttagtgcggcacccgatgagcacag

SEQ ID NO: 788448 - DNA, 25 bp, Homo sapien
tactgggtgcattgttgaggtaaca

SEQ ID NO: 788449 - DNA, 25 bp, Homo sapien
ttcgttctcaaagccatgtgtcctg

SEQ ID NO: 788450 - DNA, 25 bp, Homo sapien
tcagtggtataaggagctcaaggtg

SEQ ID NO: 788451 - DNA, 25 bp, Homo sapien
tcaaggtggttccatggaattctca

SEQ ID NO: 788452 - DNA, 25 bp, Homo sapien
ctttaaggtgctgaggtctagcagc

SEQ ID NO: 788453 - DNA, 25 bp, Homo sapien
tcaagggttgtcaccagagagcacg

SEQ ID NO: 788454 - DNA, 25 bp, Homo sapien
agggttgtcaccagagagcacggaa

SEQ ID NO: 788455 - DNA, 25 bp, Homo sapien
cacggaatccccaatctttaaggtg

SEQ ID NO: 788456 - DNA, 25 bp, Homo sapien
gtctcttctctagagcatagggtag

SEQ ID NO: 788457 - DNA, 25 bp, Homo sapien
agaatatgtagccagctgtctcttc

SEQ ID NO: 788458 - DNA, 25 bp, Homo sapien
gcatagggtagacttatcctttctc

SEQ ID NO: 788459 - DNA, 25 bp, Homo sapien
gcactaccagtaggaacaagtgtgg

SEQ ID NO: 788460 - DNA, 25 bp, Homo sapien
cgtgatggactaaccccgtggtgca

SEQ ID NO: 788461 - DNA, 25 bp, Homo sapien
cccagctcctttgagatttgactgt

SEQ ID NO: 788462 - DNA, 25 bp, Homo sapien
tggatggactaaccccgtgatggac

SEQ ID NO: 788463 - DNA, 25 bp, Homo sapien
gagatttgactgttagtgtccagca

SEQ ID NO: 788464 - DNA, 25 bp, Homo sapien
tcgtgcacactctccttgctttatt

SEQ ID NO: 788465 - DNA, 25 bp, Homo sapien
tgttctcaatcgtgcacactctcct

SEQ ID NO: 788466 - DNA, 25 bp, Homo sapien
tcaatcgtgcacactctccttgctt

SEQ ID NO: 788467 - DNA, 25 bp, Homo sapien
ttctcaatcgtgcacactctccttg

SEQ ID NO: 788468 - DNA, 25 bp, Homo sapien
gctgacctctttcacgtgaggactt

SEQ ID NO: 788469 - DNA, 25 bp, Homo sapien
ctgccctggcgtcatgtttaaacat

SEQ ID NO: 788470 - DNA, 25 bp, Homo sapien
tgcctagaatctgtccctggactgc

SEQ ID NO: 788471 - DNA, 25 bp, Homo sapien
gactgccctggcgtcatgtttaaac

SEQ ID NO: 788472 - DNA, 25 bp, Homo sapien
cttctcaaggctgtttgccatatca

SEQ ID NO: 788473 - DNA, 25 bp, Homo sapien
tctcaaggctgtttgccatatcatt

SEQ ID NO: 788474 - DNA, 25 bp, Homo sapien
tcaaggctgtttgccatatcatttt

SEQ ID NO: 788475 - DNA, 25 bp, Homo sapien
tgccatatcattttcctctgctgaa

SEQ ID NO: 788476 - DNA, 25 bp, Homo sapien
gacaagtccttgaggggacaactga

SEQ ID NO: 788477 - DNA, 25 bp, Homo sapien
tccttgaggggacaactgaagcgca

SEQ ID NO: 788478 - DNA, 25 bp, Homo sapien
cttggctaccgaaaagcaggataaa

SEQ ID NO: 788479 - DNA, 25 bp, Homo sapien
gggacaactgaagcgcaaaataggc

SEQ ID NO: 788480 - DNA, 25 bp, Homo sapien
caggcttggcctgatatggtgcact

SEQ ID NO: 788481 - DNA, 25 bp, Homo sapien
tatctgggaatataggtacacaaca

SEQ ID NO: 788482 - DNA, 25 bp, Homo sapien
tctggaatgtagagaacctagagag

SEQ ID NO: 788483 - DNA, 25 bp, Homo sapien
tctggaactctcagttaatctggaa

SEQ ID NO: 788484 - DNA, 25 bp, Homo sapien
aaccttggatatgaggtccacacca

SEQ ID NO: 788485 - DNA, 25 bp, Homo sapien
tagaattatcgggttctccttcttc

SEQ ID NO: 788486 - DNA, 25 bp, Homo sapien
cctaaaccttggatatgaggtccac

SEQ ID NO: 788487 - DNA, 25 bp, Homo sapien
gaattatcgggttctccttcttcta

SEQ ID NO: 788488 - DNA, 25 bp, Homo sapien
ggcaacaacgagtcttcttatcatt

SEQ ID NO: 788489 - DNA, 25 bp, Homo sapien
tcatgggtaaggcaacaacgagtct

SEQ ID NO: 788490 - DNA, 25 bp, Homo sapien
tagcaaagtcatgaattcatgggta

SEQ ID NO: 788491 - DNA, 25 bp, Homo sapien
tcatgaattcatgggtaaggcaaca

SEQ ID NO: 788492 - DNA, 25 bp, Homo sapien
tgtttgcggtagagtaaatggttgc

SEQ ID NO: 788493 - DNA, 25 bp, Homo sapien
tttgtcttgtattgtttgcggtaga

SEQ ID NO: 788494 - DNA, 25 bp, Homo sapien
tagagtaaatggttgcataggtggt

SEQ ID NO: 788495 - DNA, 25 bp, Homo sapien
taaatggttgcataggtggttgtgt

SEQ ID NO: 788496 - DNA, 25 bp, Homo sapien
ggtaaggccaccttctggataatgg

SEQ ID NO: 788497 - DNA, 25 bp, Homo sapien
ttaagggcagctttgatgactgaca

SEQ ID NO: 788498 - DNA, 25 bp, Homo sapien
ctgacaaaggccagttcgcagggag

SEQ ID NO: 788499 - DNA, 25 bp, Homo sapien
tattgtcctgaacctggtaaggcca

SEQ ID NO: 788500 - DNA, 25 bp, Homo sapien
catatgagacacaggcaaagccagt

SEQ ID NO: 788501 - DNA, 25 bp, Homo sapien
tcagtttgggacaaaaccaagcaca

SEQ ID NO: 788502 - DNA, 25 bp, Homo sapien
tctttatcaccactgctgcgaccag

SEQ ID NO: 788503 - DNA, 25 bp, Homo sapien
gcgaccactccaccaaatcaagagg

SEQ ID NO: 788504 - DNA, 25 bp, Homo sapien
ccttggatgtactcactagctctag

SEQ ID NO: 788505 - DNA, 25 bp, Homo sapien
tgtagacagaagtatgcatcaggct

SEQ ID NO: 788506 - DNA, 25 bp, Homo sapien
tccattctcgagtgaaaacgactgg

SEQ ID NO: 788507 - DNA, 25 bp, Homo sapien
aaagctctagcccatgttcaggttc

SEQ ID NO: 788508 - DNA, 25 bp, Homo sapien
aggttgcagcagctgtgatggcgcc

SEQ ID NO: 788509 - DNA, 25 bp, Homo sapien
aggttgaggttgcagcagctgtgat

SEQ ID NO: 788510 - DNA, 25 bp, Homo sapien
gaggttgcagcagctgtgatggcgc

SEQ ID NO: 788511 - DNA, 25 bp, Homo sapien
ttgaggttgcagcagctgtgatggc

SEQ ID NO: 788512 - DNA, 25 bp, Homo sapien
gaatgcctaccaacgtaattcttgg

SEQ ID NO: 788513 - DNA, 25 bp, Homo sapien
gaggatgccagttgaatgcctacca

SEQ ID NO: 788514 - DNA, 25 bp, Homo sapien
gcagctgggcatctggttacctcca

SEQ ID NO: 788515 - DNA, 25 bp, Homo sapien
cacttccatatgtcccctccaggag

SEQ ID NO: 788516 - DNA, 25 bp, Homo sapien
catggtatgctcatgtactcagtaa

SEQ ID NO: 788517 - DNA, 25 bp, Homo sapien
gggaatttagcctggcacaatcaga

SEQ ID NO: 788518 - DNA, 25 bp, Homo sapien
cagaatctgcagtatccttgaggtc

SEQ ID NO: 788519 - DNA, 25 bp, Homo sapien
ttacaggagtaacacaggaggaagt

SEQ ID NO: 788520 - DNA, 25 bp, Homo sapien
tagctgaaggcaggttccaccgctt

SEQ ID NO: 788521 - DNA, 25 bp, Homo sapien
tgaaggcaggttccaccgcttgccg

SEQ ID NO: 788522 - DNA, 25 bp, Homo sapien
aggcaggttccaccgcttgccgctt

SEQ ID NO: 788523 - DNA, 25 bp, Homo sapien
tcttgtagctgaaggcaggttccac

SEQ ID NO: 788524 - DNA, 25 bp, Homo sapien
cttgaccctttctgaaggtcccttg

SEQ ID NO: 788525 - DNA, 25 bp, Homo sapien
aagaagatgtatttccaagtcgtgg

SEQ ID NO: 788526 - DNA, 25 bp, Homo sapien
tgtatttccaagtcgtgggaagaaa

SEQ ID NO: 788527 - DNA, 25 bp, Homo sapien
ctgaaggtcccttgagtagtaattc

SEQ ID NO: 788528 - DNA, 25 bp, Homo sapien
tctgctactattacttgatgtgaca

SEQ ID NO: 788529 - DNA, 25 bp, Homo sapien
tcttgactcaacctgatctccttga

SEQ ID NO: 788530 - DNA, 25 bp, Homo sapien
tgacctgcagtacaatgcagcgtct

SEQ ID NO: 788531 - DNA, 25 bp, Homo sapien
ggatcctcaattccaccagcctttt

SEQ ID NO: 788532 - DNA, 25 bp, Homo sapien
ttatcccaggaacaacaagaagtct

SEQ ID NO: 788533 - DNA, 25 bp, Homo sapien
attcaggtggagaaaccagtaaggc

SEQ ID NO: 788534 - DNA, 25 bp, Homo sapien
gattcacgattggatctgagttaca

SEQ ID NO: 788535 - DNA, 25 bp, Homo sapien
gagatgggccagatatcacagtagt

SEQ ID NO: 788536 - DNA, 25 bp, Homo sapien
taataggtcctatgtactgagcact

SEQ ID NO: 788537 - DNA, 25 bp, Homo sapien
tgcctgaccctttacgacgtagata

SEQ ID NO: 788538 - DNA, 25 bp, Homo sapien
taaagagtattgctatgacaccagg

SEQ ID NO: 788539 - DNA, 25 bp, Homo sapien
tgtatcagattagccaccctttgag

SEQ ID NO: 788540 - DNA, 25 bp, Homo sapien
gctccagagtcttgcaggagcagat

SEQ ID NO: 788541 - DNA, 25 bp, Homo sapien
cttctagaagagcttgctttcggag

SEQ ID NO: 788542 - DNA, 25 bp, Homo sapien
gatttccacggcatagcagctgaga

SEQ ID NO: 788543 - DNA, 25 bp, Homo sapien
gatgtaggacctcaagactggctcc

SEQ ID NO: 788544 - DNA, 25 bp, Homo sapien
tagatgagagtgcatcaactacaaa

SEQ ID NO: 788545 - DNA, 25 bp, Homo sapien
agatgagagtgcatcaactacaaag

SEQ ID NO: 788546 - DNA, 25 bp, Homo sapien
taataattacctttctagagagccc

SEQ ID NO: 788547 - DNA, 25 bp, Homo sapien
gaagaggataatcaaattggccaga

SEQ ID NO: 788548 - DNA, 25 bp, Homo sapien
taggcaactagaaatccatagcatc

SEQ ID NO: 788549 - DNA, 25 bp, Homo sapien
tcagagttccatgaaagaaggtcat

SEQ ID NO: 788550 - DNA, 25 bp, Homo sapien
tattgtggaaccaatggcatacttt

SEQ ID NO: 788551 - DNA, 25 bp, Homo sapien
gacttgaaagcttattgtggaacca

SEQ ID NO: 788552 - DNA, 25 bp, Homo sapien
gaaatgacttgaaagcttattgtgg

SEQ ID NO: 788553 - DNA, 25 bp, Homo sapien
gaaagcttattgtggaaccaatggc

SEQ ID NO: 788554 - DNA, 25 bp, Homo sapien
aagagcacaaggccacaaatgttaa

SEQ ID NO: 788555 - DNA, 25 bp, Homo sapien
cattagaagtccgatgaaagagcac

SEQ ID NO: 788556 - DNA, 25 bp, Homo sapien
actttcagaatgctagttgggaaga

SEQ ID NO: 788557 - DNA, 25 bp, Homo sapien
gctagttgggaagaccagggaatta

SEQ ID NO: 788558 - DNA, 25 bp, Homo sapien
tgcagtcctcagtacataaatgcgt

SEQ ID NO: 788559 - DNA, 25 bp, Homo sapien
gacaattcttaataggatcaaatgg

SEQ ID NO: 788560 - DNA, 25 bp, Homo sapien
gcgtgagagtttaaatatgcaacca

SEQ ID NO: 788561 - DNA, 25 bp, Homo sapien
gcaggaaagtcctacactgcagtcc

SEQ ID NO: 788562 - DNA, 25 bp, Homo sapien
gatgagtcacagaaagaatcaattc

SEQ ID NO: 788563 - DNA, 25 bp, Homo sapien
gacatgaattttacaggaaatgaac

SEQ ID NO: 788564 - DNA, 25 bp, Homo sapien
gagtcacagaaagaatcaattcgtc

SEQ ID NO: 788565 - DNA, 25 bp, Homo sapien
caggaaatgaactgatgagtcacag

SEQ ID NO: 788566 - DNA, 25 bp, Homo sapien
tcccttgtctcagcaacttagttgc

SEQ ID NO: 788567 - DNA, 25 bp, Homo sapien
gtctcagcaacttagttgcatcctc

SEQ ID NO: 788568 - DNA, 25 bp, Homo sapien
tcttcccttgtctcagcaacttagt

SEQ ID NO: 788569 - DNA, 25 bp, Homo sapien
ccttgtctcagcaacttagttgcat

SEQ ID NO: 788570 - DNA, 25 bp, Homo sapien
gcctaccagtggcagaactaataat

SEQ ID NO: 788571 - DNA, 25 bp, Homo sapien
tttctttctacacatgattaacata

SEQ ID NO: 788572 - DNA, 25 bp, Homo sapien
ctaatgcctaccagtggcagaacta

SEQ ID NO: 788573 - DNA, 25 bp, Homo sapien
taccagtggcagaactaataatgtc

SEQ ID NO: 788574 - DNA, 25 bp, Homo sapien
gaaagagatcataaaacagaagctt

SEQ ID NO: 788575 - DNA, 25 bp, Homo sapien
aaacacccactgaaacgtatcattt

SEQ ID NO: 788576 - DNA, 25 bp, Homo sapien
cactgaaacgtatcattttgcccgt

SEQ ID NO: 788577 - DNA, 25 bp, Homo sapien
gaaacgtatcattttgcccgttcta

SEQ ID NO: 788578 - DNA, 25 bp, Homo sapien
tcctggatatgattaaagtggtttc

SEQ ID NO: 788579 - DNA, 25 bp, Homo sapien
ttcttgttcaggaggtgaattagtg

SEQ ID NO: 788580 - DNA, 25 bp, Homo sapien
taagcacctgtttcttgcaaactcc

SEQ ID NO: 788581 - DNA, 25 bp, Homo sapien
taaagtggtttctacaagctctggt

SEQ ID NO: 788582 - DNA, 25 bp, Homo sapien
cattagaatacctccaaacacagcc

SEQ ID NO: 788583 - DNA, 25 bp, Homo sapien
gtctccaactggcattagaatacct

SEQ ID NO: 788584 - DNA, 25 bp, Homo sapien
tgagcccacagttccggtcacagcc

SEQ ID NO: 788585 - DNA, 25 bp, Homo sapien
tttttaattgtcttctggataagca

SEQ ID NO: 788586 - DNA, 25 bp, Homo sapien
taaagtcgcatcatatagagttgca

SEQ ID NO: 788587 - DNA, 25 bp, Homo sapien
gagttgcagtggttcataattacct

SEQ ID NO: 788588 - DNA, 25 bp, Homo sapien
tactaacatgcatacctgtagacag

SEQ ID NO: 788589 - DNA, 25 bp, Homo sapien
tcctactcaaaagcatgccaacatg

SEQ ID NO: 788590 - DNA, 25 bp, Homo sapien
gctgtagagtagtatacaaggccag

SEQ ID NO: 788591 - DNA, 25 bp, Homo sapien
tgatttaaggacttgcgcctgtaag

SEQ ID NO: 788592 - DNA, 25 bp, Homo sapien
gaaaaacataccgacgactattgtg

SEQ ID NO: 788593 - DNA, 25 bp, Homo sapien
ccctattggctaggtgagttggcaa

SEQ ID NO: 788594 - DNA, 25 bp, Homo sapien
aagcactccattgatttaattcccc

SEQ ID NO: 788595 - DNA, 25 bp, Homo sapien
tctttattaccctactcaaagtata

SEQ ID NO: 788596 - DNA, 25 bp, Homo sapien
aaaattattggtgaccatgttctaa

SEQ ID NO: 788597 - DNA, 25 bp, Homo sapien
tccttgtaaaagattgcacggataa

SEQ ID NO: 788598 - DNA, 25 bp, Homo sapien
tagaatcaggactatctaaccccgt

SEQ ID NO: 788599 - DNA, 25 bp, Homo sapien
tctctagcgacaaataaggcaaacg

SEQ ID NO: 788600 - DNA, 25 bp, Homo sapien
taataatatgcttctgacgctacca

SEQ ID NO: 788601 - DNA, 25 bp, Homo sapien
gagtctgtgacagaatgtgcttgac

SEQ ID NO: 788602 - DNA, 25 bp, Homo sapien
tacattggacctgctagagtgatgg

SEQ ID NO: 788603 - DNA, 25 bp, Homo sapien
tgcccaggttaaagagctccaactt

SEQ ID NO: 788604 - DNA, 25 bp, Homo sapien
gagagtcatcaaacctccctagggt

SEQ ID NO: 788605 - DNA, 25 bp, Homo sapien
gaagcaccacttcacagaatgacag

SEQ ID NO: 788606 - DNA, 25 bp, Homo sapien
aaccttaccatacacttgcagcaga

SEQ ID NO: 788607 - DNA, 25 bp, Homo sapien
caagcccaagtacctcattcatgag

SEQ ID NO: 788608 - DNA, 25 bp, Homo sapien
aaagtgacccttcggcaagctttag

SEQ ID NO: 788609 - DNA, 25 bp, Homo sapien
gacacgactgttgattttaaggcaa

SEQ ID NO: 788610 - DNA, 25 bp, Homo sapien
ctgtacgtataaggacctctttgct

SEQ ID NO: 788611 - DNA, 25 bp, Homo sapien
cacttcctgtggattttgcacatca

SEQ ID NO: 788612 - DNA, 25 bp, Homo sapien
taaaagcaattgtaccttcttcgag

SEQ ID NO: 788613 - DNA, 25 bp, Homo sapien
tgcacatcaaagatccaaaactgtc

SEQ ID NO: 788614 - DNA, 25 bp, Homo sapien
gccagggtctctagcaaactaacga

SEQ ID NO: 788615 - DNA, 25 bp, Homo sapien
tataaatcttgagtaggtaccgcag

SEQ ID NO: 788616 - DNA, 25 bp, Homo sapien
cgattcgggtaaaactgctaagaca

SEQ ID NO: 788617 - DNA, 25 bp, Homo sapien
gatcagctgtcaactaccagaggag

SEQ ID NO: 788618 - DNA, 25 bp, Homo sapien
tgggttacattttccttggctagaa

SEQ ID NO: 788619 - DNA, 25 bp, Homo sapien
gttccaactgatagtgaaggttcga

SEQ ID NO: 788620 - DNA, 25 bp, Homo sapien
cagccagattgagaactgtgaagtt

SEQ ID NO: 788621 - DNA, 25 bp, Homo sapien
tagtgaaggttcgaagatggcacca

SEQ ID NO: 788622 - DNA, 25 bp, Homo sapien
tagagaatgtttcgacaaaaaataa

SEQ ID NO: 788623 - DNA, 25 bp, Homo sapien
aggattaattacatgagttctagag

SEQ ID NO: 788624 - DNA, 25 bp, Homo sapien
ggtcttctaatgcagtcgattctta

SEQ ID NO: 788625 - DNA, 25 bp, Homo sapien
gattttgtcactttccaaatgacca

SEQ ID NO: 788626 - DNA, 25 bp, Homo sapien
cactgtctggaaagctcggaatggt

SEQ ID NO: 788627 - DNA, 25 bp, Homo sapien
ggtacactgtctggaaagctcggaa

SEQ ID NO: 788628 - DNA, 25 bp, Homo sapien
ctactggtacactgtctggaaagct

SEQ ID NO: 788629 - DNA, 25 bp, Homo sapien
ctggtacactgtctggaaagctcgg

SEQ ID NO: 788630 - DNA, 25 bp, Homo sapien
ctgttggcggatagctagactctgc

SEQ ID NO: 788631 - DNA, 25 bp, Homo sapien
ttaaaggttattgcccactggtaca

SEQ ID NO: 788632 - DNA, 25 bp, Homo sapien
tagagccccaagcaaatagccgaat

SEQ ID NO: 788633 - DNA, 25 bp, Homo sapien
tagccgaattcgactttccaaacaa

SEQ ID NO: 788634 - DNA, 25 bp, Homo sapien
catatttgccccttaagagtttttg

SEQ ID NO: 788635 - DNA, 25 bp, Homo sapien
gcagagttcatatttgccccttaag

SEQ ID NO: 788636 - DNA, 25 bp, Homo sapien
aaattgtacttcatccacataaatg

SEQ ID NO: 788637 - DNA, 25 bp, Homo sapien
tgtacttcatccacataaatgcccg

SEQ ID NO: 788638 - DNA, 25 bp, Homo sapien
ggtctcagtacagcatctccagggt

SEQ ID NO: 788639 - DNA, 25 bp, Homo sapien
caatggtgcggatgaaatgctggcc

SEQ ID NO: 788640 - DNA, 25 bp, Homo sapien
gatttcgacgaggacaactgacttc

SEQ ID NO: 788641 - DNA, 25 bp, Homo sapien
caggcgtgttcatcacaacggcagg

SEQ ID NO: 788642 - DNA, 25 bp, Homo sapien
ataaatggattaaatgctaatattg

SEQ ID NO: 788643 - DNA, 25 bp, Homo sapien
ctgtttaagacaagaatacaatatt

SEQ ID NO: 788644 - DNA, 25 bp, Homo sapien
tacaatattagattttaacaaataa

SEQ ID NO: 788645 - DNA, 25 bp, Homo sapien
actgtttaagacaagaatacaatat

SEQ ID NO: 788646 - DNA, 25 bp, Homo sapien
aataagtgaattgaggatcatttga

SEQ ID NO: 788647 - DNA, 25 bp, Homo sapien
ataagtgaattgaggatcatttgaa

SEQ ID NO: 788648 - DNA, 25 bp, Homo sapien
ttgaacaaattgattttgatagata

SEQ ID NO: 788649 - DNA, 25 bp, Homo sapien
tggatccctatagccccataacagt

SEQ ID NO: 788650 - DNA, 25 bp, Homo sapien
caactgtggtagtaacagggtacgg

SEQ ID NO: 788651 - DNA, 25 bp, Homo sapien
cagaccaactgtggtagtaacaggg

SEQ ID NO: 788652 - DNA, 25 bp, Homo sapien
aaaatggatccctatagccccataa

SEQ ID NO: 788653 - DNA, 25 bp, Homo sapien
ataaaattatgccttgccaatgcca

SEQ ID NO: 788654 - DNA, 25 bp, Homo sapien
aaaattatgccttgccaatgccatt

SEQ ID NO: 788655 - DNA, 25 bp, Homo sapien
taaaattatgccttgccaatgccat

SEQ ID NO: 788656 - DNA, 25 bp, Homo sapien
ttgaaaactttataaactccatctg

SEQ ID NO: 788657 - DNA, 25 bp, Homo sapien
gtcgattatggcaactttacttatg

SEQ ID NO: 788658 - DNA, 25 bp, Homo sapien
tacctttatatgtgtcgattatggc

SEQ ID NO: 788659 - DNA, 25 bp, Homo sapien
aaaactttataaactccatctgcag

SEQ ID NO: 788660 - DNA, 25 bp, Homo sapien
tactcagtagtataagtgttcagaa

SEQ ID NO: 788661 - DNA, 25 bp, Homo sapien
cagaaacttagatctctacttaggg

SEQ ID NO: 788662 - DNA, 25 bp, Homo sapien
tccaatgggatacatgaattactca

SEQ ID NO: 788663 - DNA, 25 bp, Homo sapien
tatcttattgcaatgtacctgatgc

SEQ ID NO: 788664 - DNA, 25 bp, Homo sapien
gtgactttcccaataggacagattc

SEQ ID NO: 788665 - DNA, 25 bp, Homo sapien
gtcgcagtgactttcccaataggac

SEQ ID NO: 788666 - DNA, 25 bp, Homo sapien
cagtgactttcccaataggacagat

SEQ ID NO: 788667 - DNA, 25 bp, Homo sapien
cgcagtgactttcccaataggacag

SEQ ID NO: 788668 - DNA, 25 bp, Homo sapien
gcacaagtagtctacctgccttggt

SEQ ID NO: 788669 - DNA, 25 bp, Homo sapien
tatctcagctataagccttgcttag

SEQ ID NO: 788670 - DNA, 25 bp, Homo sapien
tagccggaactaaaagcgtgtgcca

SEQ ID NO: 788671 - DNA, 25 bp, Homo sapien
tgtgaccagcctcccattgcttttt

SEQ ID NO: 788672 - DNA, 25 bp, Homo sapien
tggcaagtgtgtcaaccttgtgacc

SEQ ID NO: 788673 - DNA, 25 bp, Homo sapien
gctacagctatgatccatggcaaac

SEQ ID NO: 788674 - DNA, 25 bp, Homo sapien
ccatatggacattgacaacaactgc

SEQ ID NO: 788675 - DNA, 25 bp, Homo sapien
catgaatatcactaatacgagccgt

SEQ ID NO: 788676 - DNA, 25 bp, Homo sapien
cttccagtgaagttcatttggatct

SEQ ID NO: 788677 - DNA, 25 bp, Homo sapien
cccaccagtagagtggcacttttct

SEQ ID NO: 788678 - DNA, 25 bp, Homo sapien
acttttcttccagtgaagttcattt

SEQ ID NO: 788679 - DNA, 25 bp, Homo sapien
ccaccagtagagtggcacttttctt

SEQ ID NO: 788680 - DNA, 25 bp, Homo sapien
ggcggctgctattgtcaacaacaaa

SEQ ID NO: 788681 - DNA, 25 bp, Homo sapien
gaaatgttaaggctaacattgtgtt

SEQ ID NO: 788682 - DNA, 25 bp, Homo sapien
ggctggcggctgctattgtcaacaa

SEQ ID NO: 788683 - DNA, 25 bp, Homo sapien
atggctggcggctgctattgtcaac

SEQ ID NO: 788684 - DNA, 25 bp, Homo sapien
ctgtttaaaaatcgagtggcaaatg

SEQ ID NO: 788685 - DNA, 25 bp, Homo sapien
aatgtaatgcaaactgcctaagtaa

SEQ ID NO: 788686 - DNA, 25 bp, Homo sapien
taagtaatttatctagcagccacat

SEQ ID NO: 788687 - DNA, 25 bp, Homo sapien
aatgattagatgtaatgtgtgttct

SEQ ID NO: 788688 - DNA, 25 bp, Homo sapien
aagaaaagaactgcaatacctggct

SEQ ID NO: 788689 - DNA, 25 bp, Homo sapien
cagtctttagggacagagcttgggc

SEQ ID NO: 788690 - DNA, 25 bp, Homo sapien
ctttagaaagattgggcacgccctt

SEQ ID NO: 788691 - DNA, 25 bp, Homo sapien
cttgtgtgttatctactgggcccca

SEQ ID NO: 788692 - DNA, 25 bp, Homo sapien
cagagatgttaaatgcctacccaca

SEQ ID NO: 788693 - DNA, 25 bp, Homo sapien
gatgtctagcacaccatatgatgta

SEQ ID NO: 788694 - DNA, 25 bp, Homo sapien
tagttgtctgggttttcaactggag

SEQ ID NO: 788695 - DNA, 25 bp, Homo sapien
ttctgtgcagaaacaatagttgtct

SEQ ID NO: 788696 - DNA, 25 bp, Homo sapien
ggattcctttcagattaacgtcgga

SEQ ID NO: 788697 - DNA, 25 bp, Homo sapien
gacttgcatacagaaaatgaggaag

SEQ ID NO: 788698 - DNA, 25 bp, Homo sapien
ggaagtgaaatgtacacaggtctcc

SEQ ID NO: 788699 - DNA, 25 bp, Homo sapien
tccaagtatgtcctatgttcttctt

SEQ ID NO: 788700 - DNA, 25 bp, Homo sapien
tctgaaacatcaggacttgcataca

SEQ ID NO: 788701 - DNA, 25 bp, Homo sapien
tatttgcccaatcgaatgtcaaggt

SEQ ID NO: 788702 - DNA, 25 bp, Homo sapien
taagatctcagataattcctggtca

SEQ ID NO: 788703 - DNA, 25 bp, Homo sapien
cacatgcatccatatagatacacac

SEQ ID NO: 788704 - DNA, 25 bp, Homo sapien
gatgattaaaactgttgcgctacaa

SEQ ID NO: 788705 - DNA, 25 bp, Homo sapien
tgaccaataggttgacctgcagccg

SEQ ID NO: 788706 - DNA, 25 bp, Homo sapien
tgcaaattgtaaagtgaatccagtt

SEQ ID NO: 788707 - DNA, 25 bp, Homo sapien
ttctgatggcttgaccaataggttg

SEQ ID NO: 788708 - DNA, 25 bp, Homo sapien
gacctgcagccgttttgcaaattgt

SEQ ID NO: 788709 - DNA, 25 bp, Homo sapien
gaagatactacgatactacagatca

SEQ ID NO: 788710 - DNA, 25 bp, Homo sapien
tgggcagctaacaaaataagagatg

SEQ ID NO: 788711 - DNA, 25 bp, Homo sapien
gctaaagataagttgatatcagatg

SEQ ID NO: 788712 - DNA, 25 bp, Homo sapien
tgctatcaaatgctcaaataaaacc

SEQ ID NO: 788713 - DNA, 25 bp, Homo sapien
caaagaataggcacaatatagttcc

SEQ ID NO: 788714 - DNA, 25 bp, Homo sapien
aagccaaagaataggcacaatatag

SEQ ID NO: 788715 - DNA, 25 bp, Homo sapien
ccaaagaataggcacaatatagttc

SEQ ID NO: 788716 - DNA, 25 bp, Homo sapien
agaataggcacaatatagttcctct

SEQ ID NO: 788717 - DNA, 25 bp, Homo sapien
taatgactaacagctgcaaatacaa

SEQ ID NO: 788718 - DNA, 25 bp, Homo sapien
tgtatactcatccatatgggtaatg

SEQ ID NO: 788719 - DNA, 25 bp, Homo sapien
caattggatcatctcaaataggtta

SEQ ID NO: 788720 - DNA, 25 bp, Homo sapien
tgggtaatggaaatacatatagctt

SEQ ID NO: 788721 - DNA, 25 bp, Homo sapien
caaaataaacccttcaattgcctat

SEQ ID NO: 788722 - DNA, 25 bp, Homo sapien
tcaacattatttgggtacgttagta

SEQ ID NO: 788723 - DNA, 25 bp, Homo sapien
taatcaacattatttgggtacgtta

SEQ ID NO: 788724 - DNA, 25 bp, Homo sapien
aataaacccttcaattgcctatcac

SEQ ID NO: 788725 - DNA, 25 bp, Homo sapien
cacaccaacactgagtaagatcatt

SEQ ID NO: 788726 - DNA, 25 bp, Homo sapien
ttcgatctgcatgcacaatatgaaa

SEQ ID NO: 788727 - DNA, 25 bp, Homo sapien
acttctgaacatgtttgccttctca

SEQ ID NO: 788728 - DNA, 25 bp, Homo sapien
tacttgacttctgaacatgtttgcc

SEQ ID NO: 788729 - DNA, 25 bp, Homo sapien
ttaaaaatgatcagtggctagacat

SEQ ID NO: 788730 - DNA, 25 bp, Homo sapien
agaaatatatatggcctaatatgta

SEQ ID NO: 788731 - DNA, 25 bp, Homo sapien
tatgtaacttctctttgataaagtg

SEQ ID NO: 788732 - DNA, 25 bp, Homo sapien
cagtggctagacatgtctagaaata

SEQ ID NO: 788733 - DNA, 25 bp, Homo sapien
gtgctattgttacaatggtcacaag

SEQ ID NO: 788734 - DNA, 25 bp, Homo sapien
gttacaatggtcacaagtacatctt

SEQ ID NO: 788735 - DNA, 25 bp, Homo sapien
agatatactttagtgatctgcgtga

SEQ ID NO: 788736 - DNA, 25 bp, Homo sapien
tctcccagaattaaagatatacttt

SEQ ID NO: 788737 - DNA, 25 bp, Homo sapien
ttaggaaaggtcaggcattcattca

SEQ ID NO: 788738 - DNA, 25 bp, Homo sapien
gcatgtctacatgcagcaatcctgg

SEQ ID NO: 788739 - DNA, 25 bp, Homo sapien
catctttaagagtgcatggacacta

SEQ ID NO: 788740 - DNA, 25 bp, Homo sapien
ggatttggaaaatgcacggccagca

SEQ ID NO: 788741 - DNA, 25 bp, Homo sapien
aatttagctataaatagacccaagg

SEQ ID NO: 788742 - DNA, 25 bp, Homo sapien
tgttgacaaagttgctccagcaagc

SEQ ID NO: 788743 - DNA, 25 bp, Homo sapien
taatcaacagtttattctctgcttg

SEQ ID NO: 788744 - DNA, 25 bp, Homo sapien
taaagctccaccgtcttacactttg

SEQ ID NO: 788745 - DNA, 25 bp, Homo sapien
tagctgaagtgcatctgccctggac

SEQ ID NO: 788746 - DNA, 25 bp, Homo sapien
ccttcagaccaagttccatttaaag

SEQ ID NO: 788747 - DNA, 25 bp, Homo sapien
caaggaacggtagctgaagtgcatc

SEQ ID NO: 788748 - DNA, 25 bp, Homo sapien
aaggtgtatgtactactttcaaaag

SEQ ID NO: 788749 - DNA, 25 bp, Homo sapien
gacttcaccaatagggcaaaacaca

SEQ ID NO: 788750 - DNA, 25 bp, Homo sapien
tgtagagtggcagtatatcttagat

SEQ ID NO: 788751 - DNA, 25 bp, Homo sapien
gagagaagttctctaacggacttca

SEQ ID NO: 788752 - DNA, 25 bp, Homo sapien
cacataagaagggtgcttcaagaca

SEQ ID NO: 788753 - DNA, 25 bp, Homo sapien
catcctgttggtcggtattaccaag

SEQ ID NO: 788754 - DNA, 25 bp, Homo sapien
cttcaactaaaagataaggtgtgct

SEQ ID NO: 788755 - DNA, 25 bp, Homo sapien
tgtagctggcgcacaaatgtgaaga

SEQ ID NO: 788756 - DNA, 25 bp, Homo sapien
tattaccaagggtcatgatgtagct

SEQ ID NO: 788757 - DNA, 25 bp, Homo sapien
tgtacactcttcttctgaattggcc

SEQ ID NO: 788758 - DNA, 25 bp, Homo sapien
ttgaatcagaacaacacaaattggt

SEQ ID NO: 788759 - DNA, 25 bp, Homo sapien
caaattggtttgtgcttgagccagg

SEQ ID NO: 788760 - DNA, 25 bp, Homo sapien
gaaaccaattattgaatcagaacaa

SEQ ID NO: 788761 - DNA, 25 bp, Homo sapien
atgatggtgtttcccccggatgagg

SEQ ID NO: 788762 - DNA, 25 bp, Homo sapien
tgacaggaatgcagggcctaggatt

SEQ ID NO: 788763 - DNA, 25 bp, Homo sapien
agttgaatagggcagctactgggat

SEQ ID NO: 788764 - DNA, 25 bp, Homo sapien
ccccggatgaggatgacaggaatgc

SEQ ID NO: 788765 - DNA, 25 bp, Homo sapien
tataaaccgctagtgtgctaaaatg

SEQ ID NO: 788766 - DNA, 25 bp, Homo sapien
tgaagatgccaagcgtaagttgcaa

SEQ ID NO: 788767 - DNA, 25 bp, Homo sapien
tgaataacaatgcatagtctacgct

SEQ ID NO: 788768 - DNA, 25 bp, Homo sapien
ctttatgaggcgattatgacagcaa

SEQ ID NO: 788769 - DNA, 25 bp, Homo sapien
tttagtatccaaacaggccagttac

SEQ ID NO: 788770 - DNA, 25 bp, Homo sapien
taagtgaacccctgctcaagaaaca

SEQ ID NO: 788771 - DNA, 25 bp, Homo sapien
gcaattgtcctactgctgtaaagga

SEQ ID NO: 788772 - DNA, 25 bp, Homo sapien
tccttctgtgggtaaaacacaagct

SEQ ID NO: 788773 - DNA, 25 bp, Homo sapien
catattaatatcttggacagatact

SEQ ID NO: 788774 - DNA, 25 bp, Homo sapien
caggtagattcttggtttgtggctt

SEQ ID NO: 788775 - DNA, 25 bp, Homo sapien
ggcactaagtatgctttaagcacct

SEQ ID NO: 788776 - DNA, 25 bp, Homo sapien
gcaccttcagagatgcaaaagatct

SEQ ID NO: 788777 - DNA, 25 bp, Homo sapien
tgcagctacctttgagccacaaaag

SEQ ID NO: 788778 - DNA, 25 bp, Homo sapien
caggaaaccagaagcgacgacattg

SEQ ID NO: 788779 - DNA, 25 bp, Homo sapien
gaacaacattaacttcgccagggca

SEQ ID NO: 788780 - DNA, 25 bp, Homo sapien
tagaattgtagacaggccacaaggg

SEQ ID NO: 788781 - DNA, 25 bp, Homo sapien
cctcttcctggcattctttctaagt

SEQ ID NO: 788782 - DNA, 25 bp, Homo sapien
tttctaagtcctttggaaatgctgc

SEQ ID NO: 788783 - DNA, 25 bp, Homo sapien
ggcattctttctaagtcctttggaa

SEQ ID NO: 788784 - DNA, 25 bp, Homo sapien
tctttctaagtcctttggaaatgct

SEQ ID NO: 788785 - DNA, 25 bp, Homo sapien
ctaacgctcatcaagatagtctgct

SEQ ID NO: 788786 - DNA, 25 bp, Homo sapien
catcaagatagtctgcttgcagata

SEQ ID NO: 788787 - DNA, 25 bp, Homo sapien
tctgcttgcagataagataaagtgt

SEQ ID NO: 788788 - DNA, 25 bp, Homo sapien
ataaagtgtgctcacttaggttgcc

SEQ ID NO: 788789 - DNA, 25 bp, Homo sapien
ctggggaatcggaagagagcaataa

SEQ ID NO: 788790 - DNA, 25 bp, Homo sapien
tagtgcctgaattctttcaggggac

SEQ ID NO: 788791 - DNA, 25 bp, Homo sapien
ctagtgcctgaattctttcagggga

SEQ ID NO: 788792 - DNA, 25 bp, Homo sapien
gtgcctgaattctttcaggggacca

SEQ ID NO: 788793 - DNA, 25 bp, Homo sapien
gcctgaattctttcaggggaccatg

SEQ ID NO: 788794 - DNA, 25 bp, Homo sapien
caaactaaatgtagttgtcacacta

SEQ ID NO: 788795 - DNA, 25 bp, Homo sapien
gttcaatctgtgtaagaaaacaaac

SEQ ID NO: 788796 - DNA, 25 bp, Homo sapien
aactgtcataatggtgaatgttcaa

SEQ ID NO: 788797 - DNA, 25 bp, Homo sapien
ccaaagtgtaagtttgtgaatagat

SEQ ID NO: 788798 - DNA, 25 bp, Homo sapien
gaggattgcagctgctctacgtcga

SEQ ID NO: 788799 - DNA, 25 bp, Homo sapien
cataataccactgaaagtcaggtac

SEQ ID NO: 788800 - DNA, 25 bp, Homo sapien
tacgtcgacttcttagactacataa

SEQ ID NO: 788801 - DNA, 25 bp, Homo sapien
taacaatgtgtgatgctcagaggat

SEQ ID NO: 788802 - DNA, 25 bp, Homo sapien
tcttgaaataaatcagtggaataag

SEQ ID NO: 788803 - DNA, 25 bp, Homo sapien
tatctgcggtggattatatttctct

SEQ ID NO: 788804 - DNA, 25 bp, Homo sapien
atttctcttgaaataaatcagtgga

SEQ ID NO: 788805 - DNA, 25 bp, Homo sapien
gaaataaatcagtggaataagccat

SEQ ID NO: 788806 - DNA, 25 bp, Homo sapien
tgggtgaataaatgacagccttgcc

SEQ ID NO: 788807 - DNA, 25 bp, Homo sapien
agccttgcctttacttgaactggga

SEQ ID NO: 788808 - DNA, 25 bp, Homo sapien
tgactgtttctgtgctccagcaagg

SEQ ID NO: 788809 - DNA, 25 bp, Homo sapien
ctagggctgactgtttctgtgctcc

SEQ ID NO: 788810 - DNA, 25 bp, Homo sapien
gaatcccagaatgactaaacttgaa

SEQ ID NO: 788811 - DNA, 25 bp, Homo sapien
ccaagatgagagagacataacctgt

SEQ ID NO: 788812 - DNA, 25 bp, Homo sapien
tacattgacatccataagacccaag

SEQ ID NO: 788813 - DNA, 25 bp, Homo sapien
tgtgtaaagtgcctaagtagcatac

SEQ ID NO: 788814 - DNA, 25 bp, Homo sapien
ttcaaggtgcctaaaaactgcaagg

SEQ ID NO: 788815 - DNA, 25 bp, Homo sapien
gctaaagttgttcatatggccgtat

SEQ ID NO: 788816 - DNA, 25 bp, Homo sapien
cacataccaatgtccagaggcagaa

SEQ ID NO: 788817 - DNA, 25 bp, Homo sapien
ttttcagtagccgtgcagaaggcct

SEQ ID NO: 788818 - DNA, 25 bp, Homo sapien
cttcctccttatacaaataactagg

SEQ ID NO: 788819 - DNA, 25 bp, Homo sapien
gccttcctccttatacaaataacta

SEQ ID NO: 788820 - DNA, 25 bp, Homo sapien
tccttatacaaataactaggagtat

SEQ ID NO: 788821 - DNA, 25 bp, Homo sapien
tacaaataactaggagtataagcca

SEQ ID NO: 788822 - DNA, 25 bp, Homo sapien
tggatcacctgacacttggtagaaa

SEQ ID NO: 788823 - DNA, 25 bp, Homo sapien
tctagggagctcatcgggtactttt

SEQ ID NO: 788824 - DNA, 25 bp, Homo sapien
gaacttgaaaatgatagagcagaac

SEQ ID NO: 788825 - DNA, 25 bp, Homo sapien
gagcagaacaggtatcctctctagg

SEQ ID NO: 788826 - DNA, 25 bp, Homo sapien
cagagccacatgttaatggaaatat

SEQ ID NO: 788827 - DNA, 25 bp, Homo sapien
tctctaccacattgccgctgtgttt

SEQ ID NO: 788828 - DNA, 25 bp, Homo sapien
tgtaagcacagttaattgttcccat

SEQ ID NO: 788829 - DNA, 25 bp, Homo sapien
gaagccaattgtaagcacagttaat

SEQ ID NO: 788830 - DNA, 25 bp, Homo sapien
gctgctgctatgaagccaattgtaa

SEQ ID NO: 788831 - DNA, 25 bp, Homo sapien
gctatgaagccaattgtaagcacag

SEQ ID NO: 788832 - DNA, 25 bp, Homo sapien
cattgttaagggatgcgtgactgca

SEQ ID NO: 788833 - DNA, 25 bp, Homo sapien
cataaggtgccagtaattcagcggg

SEQ ID NO: 788834 - DNA, 25 bp, Homo sapien
aatagtggatcaaaccctgtcaggg

SEQ ID NO: 788835 - DNA, 25 bp, Homo sapien
catgggcctctagaaataaacctgg

SEQ ID NO: 788836 - DNA, 25 bp, Homo sapien
gttacttccggtgcaataagcatca

SEQ ID NO: 788837 - DNA, 25 bp, Homo sapien
agtcttgtgttacttccggtgcaat

SEQ ID NO: 788838 - DNA, 25 bp, Homo sapien
ataagcatcataggcaatttcaagg

SEQ ID NO: 788839 - DNA, 25 bp, Homo sapien
tcaaggtgtgtagagcaatgagtct

SEQ ID NO: 788840 - DNA, 25 bp, Homo sapien
ctttagattctctcgtaattacttt

SEQ ID NO: 788841 - DNA, 25 bp, Homo sapien
tttagattctctcgtaattacttta

SEQ ID NO: 788842 - DNA, 25 bp, Homo sapien
ttagattctctcgtaattactttac

SEQ ID NO: 788843 - DNA, 25 bp, Homo sapien
gaaggagccatatttggaacttaga

SEQ ID NO: 788844 - DNA, 25 bp, Homo sapien
gttgtcataagcaccgaaggagcca

SEQ ID NO: 788845 - DNA, 25 bp, Homo sapien
agtgctttccccaaggttgtcataa

SEQ ID NO: 788846 - DNA, 25 bp, Homo sapien
gaacttagaatgtgtgagcttctaa

SEQ ID NO: 788847 - DNA, 25 bp, Homo sapien
gtttctcttgttgcaaagacttcca

SEQ ID NO: 788848 - DNA, 25 bp, Homo sapien
aacacacgcggtttgtcagggaagc

SEQ ID NO: 788849 - DNA, 25 bp, Homo sapien
tacattggtatgctcaagcctggac

SEQ ID NO: 788850 - DNA, 25 bp, Homo sapien
cgagttgtttctttaggcggtgaca

SEQ ID NO: 788851 - DNA, 25 bp, Homo sapien
caacctcggtaagctaaattggtca

SEQ ID NO: 788852 - DNA, 25 bp, Homo sapien
gctgtaatcggacaccaagagcgct

SEQ ID NO: 788853 - DNA, 25 bp, Homo sapien
gaatttcacctttgcgacgtgctag

SEQ ID NO: 788854 - DNA, 25 bp, Homo sapien
tccgaggtgcttgattgagcgacgc

SEQ ID NO: 788855 - DNA, 25 bp, Homo sapien
tccaaccccggtagcaaactgatga

SEQ ID NO: 788856 - DNA, 25 bp, Homo sapien
tcactgctcttgcagggagttccaa

SEQ ID NO: 788857 - DNA, 25 bp, Homo sapien
gctcttgcagggagttccaagacca

SEQ ID NO: 788858 - DNA, 25 bp, Homo sapien
tcttgcagggagttccaagaccaca

SEQ ID NO: 788859 - DNA, 25 bp, Homo sapien
actgctcttgcagggagttccaaga

SEQ ID NO: 788860 - DNA, 25 bp, Homo sapien
gagactattctattccaatgagcaa

SEQ ID NO: 788861 - DNA, 25 bp, Homo sapien
cccattctcatggtaaggacggatg

SEQ ID NO: 788862 - DNA, 25 bp, Homo sapien
tgttgggtcttaaagctgatgcttc

SEQ ID NO: 788863 - DNA, 25 bp, Homo sapien
gaattcctattagccgagcaagggc

SEQ ID NO: 788864 - DNA, 25 bp, Homo sapien
agtggataatgtaagcatcggccat

SEQ ID NO: 788865 - DNA, 25 bp, Homo sapien
gagatgtcatcaagtttaaaaccac

SEQ ID NO: 788866 - DNA, 25 bp, Homo sapien
cacatccagatacattcagctcgtt

SEQ ID NO: 788867 - DNA, 25 bp, Homo sapien
tcagctcgttcttgtttcttcattc

SEQ ID NO: 788868 - DNA, 25 bp, Homo sapien
aaaaccacaagtagtgatactggat

SEQ ID NO: 788869 - DNA, 25 bp, Homo sapien
caaatgctctgatagtttcatccag

SEQ ID NO: 788870 - DNA, 25 bp, Homo sapien
gctctgatagtttcatccagaggtt

SEQ ID NO: 788871 - DNA, 25 bp, Homo sapien
caggatatcagggtgacagtggatt

SEQ ID NO: 788872 - DNA, 25 bp, Homo sapien
gttcacaaatgctctgatagtttca

SEQ ID NO: 788873 - DNA, 25 bp, Homo sapien
aactgctgaatttcaatttcctata

SEQ ID NO: 788874 - DNA, 25 bp, Homo sapien
aaactgctgaatttcaatttcctat

SEQ ID NO: 788875 - DNA, 25 bp, Homo sapien
taaactgctgaatttcaatttccta

SEQ ID NO: 788876 - DNA, 25 bp, Homo sapien
ttccaccttaccactctccccataa

SEQ ID NO: 788877 - DNA, 25 bp, Homo sapien
ctaagctgttaaaactctttgttca

SEQ ID NO: 788878 - DNA, 25 bp, Homo sapien
ttggccctcgtgtatgataaaaacc

SEQ ID NO: 788879 - DNA, 25 bp, Homo sapien
ccataactgtaagatttctttgtca

SEQ ID NO: 788880 - DNA, 25 bp, Homo sapien
atccccacgtcgtgggaaggacctg

SEQ ID NO: 788881 - DNA, 25 bp, Homo sapien
tgaatcatggggcagttactcccat

SEQ ID NO: 788882 - DNA, 25 bp, Homo sapien
tcatggggcagttactcccatgctg

SEQ ID NO: 788883 - DNA, 25 bp, Homo sapien
cataatccccacgtcgtgggaagga

SEQ ID NO: 788884 - DNA, 25 bp, Homo sapien
ccactgggtatgtctgactttcttt

SEQ ID NO: 788885 - DNA, 25 bp, Homo sapien
cccactgggtatgtctgactttctt

SEQ ID NO: 788886 - DNA, 25 bp, Homo sapien
cactgggtatgtctgactttctttg

SEQ ID NO: 788887 - DNA, 25 bp, Homo sapien
gatgggaaatctgcttatagggttt

SEQ ID NO: 788888 - DNA, 25 bp, Homo sapien
gaatcatgcttgatgggaaatctgc

SEQ ID NO: 788889 - DNA, 25 bp, Homo sapien
ggaaatctgcttatagggtttattg

SEQ ID NO: 788890 - DNA, 25 bp, Homo sapien
ttctgatgaatcatgcttgatggga

SEQ ID NO: 788891 - DNA, 25 bp, Homo sapien
tctccaggcaatctggactccacag

SEQ ID NO: 788892 - DNA, 25 bp, Homo sapien
aatctggactccacagaaataaaac

SEQ ID NO: 788893 - DNA, 25 bp, Homo sapien
aggcaatctggactccacagaaata

SEQ ID NO: 788894 - DNA, 25 bp, Homo sapien
tttctccaggcaatctggactccac

SEQ ID NO: 788895 - DNA, 25 bp, Homo sapien
ggagagcattggttattggtaaatc

SEQ ID NO: 788896 - DNA, 25 bp, Homo sapien
gcattggttattggtaaatctcgga

SEQ ID NO: 788897 - DNA, 25 bp, Homo sapien
tattggtaaatctcggatatcaact

SEQ ID NO: 788898 - DNA, 25 bp, Homo sapien
tggttattggtaaatctcggatatc

SEQ ID NO: 788899 - DNA, 25 bp, Homo sapien
tccacagatactgtgtttctctgag

SEQ ID NO: 788900 - DNA, 25 bp, Homo sapien
gaactcaaggtcatcttggtatacc

SEQ ID NO: 788901 - DNA, 25 bp, Homo sapien
cctacagtgactgagcttcatgtcc

SEQ ID NO: 788902 - DNA, 25 bp, Homo sapien
tctacaatgtgaaaggtactgtcct

SEQ ID NO: 788903 - DNA, 25 bp, Homo sapien
gattctccatggaacggtgttacag

SEQ ID NO: 788904 - DNA, 25 bp, Homo sapien
ctgacattctgtaagcagctttcat

SEQ ID NO: 788905 - DNA, 25 bp, Homo sapien
ctgtaagcagctttcatatttagat

SEQ ID NO: 788906 - DNA, 25 bp, Homo sapien
taagcagctttcatatttagatcat

SEQ ID NO: 788907 - DNA, 25 bp, Homo sapien
agcagctttcatatttagatcattt

SEQ ID NO: 788908 - DNA, 25 bp, Homo sapien
ctctggaattattttatttggttgg

SEQ ID NO: 788909 - DNA, 25 bp, Homo sapien
tattctctggaattattttatttgg

SEQ ID NO: 788910 - DNA, 25 bp, Homo sapien
tctctggaattattttatttggttg

SEQ ID NO: 788911 - DNA, 25 bp, Homo sapien
actattctctggaattattttattt

SEQ ID NO: 788912 - DNA, 25 bp, Homo sapien
cagttaaagtaggaagcctctcatc

SEQ ID NO: 788913 - DNA, 25 bp, Homo sapien
gagcaaagctattagcctgtccaga

SEQ ID NO: 788914 - DNA, 25 bp, Homo sapien
cattaaattcctgctgccaagtgaa

SEQ ID NO: 788915 - DNA, 25 bp, Homo sapien
tccagaagatcagttaaagtaggaa

SEQ ID NO: 788916 - DNA, 25 bp, Homo sapien
tctatcagtcttgggcactctgaca

SEQ ID NO: 788917 - DNA, 25 bp, Homo sapien
cactgctgctaagactgccgcttct

SEQ ID NO: 788918 - DNA, 25 bp, Homo sapien
tgcagtgacacaacattgaggaatg

SEQ ID NO: 788919 - DNA, 25 bp, Homo sapien
tgtcgcaacatagacagcactgctg

SEQ ID NO: 788920 - DNA, 25 bp, Homo sapien
attccggacacagtaatacctaggt

SEQ ID NO: 788921 - DNA, 25 bp, Homo sapien
ccgattccggacacagtaataccta

SEQ ID NO: 788922 - DNA, 25 bp, Homo sapien
caccgattccggacacagtaatacc

SEQ ID NO: 788923 - DNA, 25 bp, Homo sapien
gattccggacacagtaatacctagg

SEQ ID NO: 788924 - DNA, 25 bp, Homo sapien
tccccagcgagtgctgcccccagct

SEQ ID NO: 788925 - DNA, 25 bp, Homo sapien
ggagtgcgagcacatggtgcaggac

SEQ ID NO: 788926 - DNA, 25 bp, Homo sapien
ggtctctataatctttattcctgta

SEQ ID NO: 788927 - DNA, 25 bp, Homo sapien
taatctttattcctgtaagagttac

SEQ ID NO: 788928 - DNA, 25 bp, Homo sapien
tctataatctttattcctgtaagag

SEQ ID NO: 788929 - DNA, 25 bp, Homo sapien
tataatctttattcctgtaagagtt

SEQ ID NO: 788930 - DNA, 25 bp, Homo sapien
tatgttcatgcagtccaatatggta

SEQ ID NO: 788931 - DNA, 25 bp, Homo sapien
tattgaacaggacaattctagagct

SEQ ID NO: 788932 - DNA, 25 bp, Homo sapien
cacatatggctactaatgacttgac

SEQ ID NO: 788933 - DNA, 25 bp, Homo sapien
tgtactgtaacctagagcagtgctg

SEQ ID NO: 788934 - DNA, 25 bp, Homo sapien
tgcagggacccgccgagcccatgcc

SEQ ID NO: 788935 - DNA, 25 bp, Homo sapien
ctggaactcgagctggcccacaagt

SEQ ID NO: 788936 - DNA, 25 bp, Homo sapien
ggacccgccgagcccatgcccacct

SEQ ID NO: 788937 - DNA, 25 bp, Homo sapien
tggcccacaagtgccgcgcacagcc

SEQ ID NO: 788938 - DNA, 25 bp, Homo sapien
ccatggagttgtacccacatggagg

SEQ ID NO: 788939 - DNA, 25 bp, Homo sapien
tcaagatgttccactgtggactgca

SEQ ID NO: 788940 - DNA, 25 bp, Homo sapien
ggagttgtacccacatggagggaaa

SEQ ID NO: 788941 - DNA, 25 bp, Homo sapien
gattccaggcagtcatcaagatgtt

SEQ ID NO: 788942 - DNA, 25 bp, Homo sapien
tttcagacagtgctataaacttcag

SEQ ID NO: 788943 - DNA, 25 bp, Homo sapien
cacagagactgtcagaatagagttg

SEQ ID NO: 788944 - DNA, 25 bp, Homo sapien
ctggtggtttggctggatttaatct

SEQ ID NO: 788945 - DNA, 25 bp, Homo sapien
gtatcacatatgctaaactggtggt

SEQ ID NO: 788946 - DNA, 25 bp, Homo sapien
agattgacactgagtaaaggccatg

SEQ ID NO: 788947 - DNA, 25 bp, Homo sapien
gagctctctaatacctttagattga

SEQ ID NO: 788948 - DNA, 25 bp, Homo sapien
acactgagtaaaggccatgtatatc

SEQ ID NO: 788949 - DNA, 25 bp, Homo sapien
acctttagattgacactgagtaaag

SEQ ID NO: 788950 - DNA, 25 bp, Homo sapien
tcttttcagcaaatacatcagcacc

SEQ ID NO: 788951 - DNA, 25 bp, Homo sapien
atcttttcagcaaatacatcagcac

SEQ ID NO: 788952 - DNA, 25 bp, Homo sapien
ttttcagcaaatacatcagcaccag

SEQ ID NO: 788953 - DNA, 25 bp, Homo sapien
cttttcagcaaatacatcagcacca

SEQ ID NO: 788954 - DNA, 25 bp, Homo sapien
atacactctgcagccacattatagc

SEQ ID NO: 788955 - DNA, 25 bp, Homo sapien
tctgcagccacattatagctctcct

SEQ ID NO: 788956 - DNA, 25 bp, Homo sapien
gcagccacattatagctctcctttt

SEQ ID NO: 788957 - DNA, 25 bp, Homo sapien
cactctgcagccacattatagctct

SEQ ID NO: 788958 - DNA, 25 bp, Homo sapien
actagaccctaagctatcagaagaa

SEQ ID NO: 788959 - DNA, 25 bp, Homo sapien
cattggttctttgaaagactaaaca

SEQ ID NO: 788960 - DNA, 25 bp, Homo sapien
ttcagagacagtaggtagattaact

SEQ ID NO: 788961 - DNA, 25 bp, Homo sapien
catcagagtctgctatgaatacctc

SEQ ID NO: 788962 - DNA, 25 bp, Homo sapien
atatagaatataggtcgggcacagt

SEQ ID NO: 788963 - DNA, 25 bp, Homo sapien
tatagaatataggtcgggcacagtg

SEQ ID NO: 788964 - DNA, 25 bp, Homo sapien
catctgcaatatgtgatttaagaat

SEQ ID NO: 788965 - DNA, 25 bp, Homo sapien
atctgcaatatgtgatttaagaata

SEQ ID NO: 788966 - DNA, 25 bp, Homo sapien
gaagagacagtcattatattaagtt

SEQ ID NO: 788967 - DNA, 25 bp, Homo sapien
gcagttatcaacctcagcattcact

SEQ ID NO: 788968 - DNA, 25 bp, Homo sapien
gacagtcattatattaagttcctgg

SEQ ID NO: 788969 - DNA, 25 bp, Homo sapien
ttttgactggtaacctaatgctgca

SEQ ID NO: 788970 - DNA, 25 bp, Homo sapien
tgacaaccagagatacctggcatct

SEQ ID NO: 788971 - DNA, 25 bp, Homo sapien
gaagcttacgttgagcaccagcagc

SEQ ID NO: 788972 - DNA, 25 bp, Homo sapien
tctgacaggattggttgtaaataca

SEQ ID NO: 788973 - DNA, 25 bp, Homo sapien
taatgtcctcaggagctatgaacaa

SEQ ID NO: 788974 - DNA, 25 bp, Homo sapien
gctatgataaccttatgagcaagac

SEQ ID NO: 788975 - DNA, 25 bp, Homo sapien
cacttgcaggtcttacagccccaat

SEQ ID NO: 788976 - DNA, 25 bp, Homo sapien
ttcacttgcaggtcttacagcccca

SEQ ID NO: 788977 - DNA, 25 bp, Homo sapien
ttgcaggtcttacagccccaatctc

SEQ ID NO: 788978 - DNA, 25 bp, Homo sapien
caacttcacttgcaggtcttacagc

SEQ ID NO: 788979 - DNA, 25 bp, Homo sapien
gccttcagcttcaattctctgatag

SEQ ID NO: 788980 - DNA, 25 bp, Homo sapien
ttataaaagtcttctactgatctta

SEQ ID NO: 788981 - DNA, 25 bp, Homo sapien
caaagaaatgctctaatatagacta

SEQ ID NO: 788982 - DNA, 25 bp, Homo sapien
ccttcagcttcaattctctgatagt

SEQ ID NO: 788983 - DNA, 25 bp, Homo sapien
ggcttggagacttaaatagctgaga

SEQ ID NO: 788984 - DNA, 25 bp, Homo sapien
gtagcggcaaagacataagttaggc

SEQ ID NO: 788985 - DNA, 25 bp, Homo sapien
ttcctccttttctatgaacgagcag

SEQ ID NO: 788986 - DNA, 25 bp, Homo sapien
caccactcaacctttgtagcggcaa

SEQ ID NO: 788987 - DNA, 25 bp, Homo sapien
ctttttcccatccttgctgccaatt

SEQ ID NO: 788988 - DNA, 25 bp, Homo sapien
ccatccttgctgccaattatttcat

SEQ ID NO: 788989 - DNA, 25 bp, Homo sapien
ttcccatccttgctgccaattattt

SEQ ID NO: 788990 - DNA, 25 bp, Homo sapien
ttttcccatccttgctgccaattat

SEQ ID NO: 788991 - DNA, 25 bp, Homo sapien
catctgaggtcctgtgttttatttc

SEQ ID NO: 788992 - DNA, 25 bp, Homo sapien
ggagaacgcccactcatctgaggtc

SEQ ID NO: 788993 - DNA, 25 bp, Homo sapien
ctgttaagtgggcagggtttgctat

SEQ ID NO: 788994 - DNA, 25 bp, Homo sapien
tgtatctggaccatatcttggcaaa

SEQ ID NO: 788995 - DNA, 25 bp, Homo sapien
tgcccagggttcatcgtaattgagc

SEQ ID NO: 788996 - DNA, 25 bp, Homo sapien
ctgctgctgactttacccctccgga

SEQ ID NO: 788997 - DNA, 25 bp, Homo sapien
cagacctgctgctgactttacccct

SEQ ID NO: 788998 - DNA, 25 bp, Homo sapien
tccagcaaggcggcgcccattgcca

SEQ ID NO: 788999 - DNA, 25 bp, Homo sapien
ctttccagactctgtgtaacaagct

SEQ ID NO: 789000 - DNA, 25 bp, Homo sapien
tgtgaaagccaaaccagaggtaagg

SEQ ID NO: 789001 - DNA, 25 bp, Homo sapien
tgtaacaagctgtcctggtttggct

SEQ ID NO: 789002 - DNA, 25 bp, Homo sapien
attgaaatctgactcggcagtgacc

SEQ ID NO: 789003 - DNA, 25 bp, Homo sapien
tgtcatcaatatagttggtcagcat

SEQ ID NO: 789004 - DNA, 25 bp, Homo sapien
tgtcaaattagcctaatgtcatcaa

SEQ ID NO: 789005 - DNA, 25 bp, Homo sapien
aatgtcatcaatatagttggtcagc

SEQ ID NO: 789006 - DNA, 25 bp, Homo sapien
taatgtcatcaatatagttggtcag

SEQ ID NO: 789007 - DNA, 25 bp, Homo sapien
tagaatatacttccctaaaatccaa

SEQ ID NO: 789008 - DNA, 25 bp, Homo sapien
gagagccactttcaattatagaata

SEQ ID NO: 789009 - DNA, 25 bp, Homo sapien
cacagtcatataatgaataggtcag

SEQ ID NO: 789010 - DNA, 25 bp, Homo sapien
tcagagtttcattcaaaataggtag

SEQ ID NO: 789011 - DNA, 25 bp, Homo sapien
catgagattacagctagaggtgtgc

SEQ ID NO: 789012 - DNA, 25 bp, Homo sapien
taaagcgttggtctagaaaaatctc

SEQ ID NO: 789013 - DNA, 25 bp, Homo sapien
gcaaagttcgaaggccagcagagcc

SEQ ID NO: 789014 - DNA, 25 bp, Homo sapien
cagcagagcccaaccataaagcgtt

SEQ ID NO: 789015 - DNA, 25 bp, Homo sapien
ggtgttgtcactaccagctctccaa

SEQ ID NO: 789016 - DNA, 25 bp, Homo sapien
ctgtagtaaagcaaaatcgggtgtt

SEQ ID NO: 789017 - DNA, 25 bp, Homo sapien
aagcaaaatcgggtgttgtcactac

SEQ ID NO: 789018 - DNA, 25 bp, Homo sapien
aatcgggtgttgtcactaccagctc

SEQ ID NO: 789019 - DNA, 25 bp, Homo sapien
tgagttactctaccaaatgcagaag

SEQ ID NO: 789020 - DNA, 25 bp, Homo sapien
gcagaagatctataatccagcttgt

SEQ ID NO: 789021 - DNA, 25 bp, Homo sapien
tcagtatacccgtgtgcattcagac

SEQ ID NO: 789022 - DNA, 25 bp, Homo sapien
taagctgacaggatcactttgactc

SEQ ID NO: 789023 - DNA, 25 bp, Homo sapien
gcttccagttcaaatcttaacccga

SEQ ID NO: 789024 - DNA, 25 bp, Homo sapien
taacccgaccttataaccttctgca

SEQ ID NO: 789025 - DNA, 25 bp, Homo sapien
cgaccttataaccttctgcatggaa

SEQ ID NO: 789026 - DNA, 25 bp, Homo sapien
cttctgcatggaagtttttcccatc

SEQ ID NO: 789027 - DNA, 25 bp, Homo sapien
cttgtagatgtgttgatccggattt

SEQ ID NO: 789028 - DNA, 25 bp, Homo sapien
tagatgtgttgatccggattttggt

SEQ ID NO: 789029 - DNA, 25 bp, Homo sapien
tgttgatccggattttggttttcag

SEQ ID NO: 789030 - DNA, 25 bp, Homo sapien
tgtgttgatccggattttggttttc

SEQ ID NO: 789031 - DNA, 25 bp, Homo sapien
ccaaagcacagcagacacagttacc

SEQ ID NO: 789032 - DNA, 25 bp, Homo sapien
gacacagttaccaataatgcaaaga

SEQ ID NO: 789033 - DNA, 25 bp, Homo sapien
cagcagacacagttaccaataatgc

SEQ ID NO: 789034 - DNA, 25 bp, Homo sapien
agcacagcagacacagttaccaata

SEQ ID NO: 789035 - DNA, 25 bp, Homo sapien
ccatactcctgatgttgatcatctc

SEQ ID NO: 789036 - DNA, 25 bp, Homo sapien
ccacatggctatttatccgtatttc

SEQ ID NO: 789037 - DNA, 25 bp, Homo sapien
tattcatcagctctggttgtacaac

SEQ ID NO: 789038 - DNA, 25 bp, Homo sapien
ataagggatttcttgagagagttcc

SEQ ID NO: 789039 - DNA, 25 bp, Homo sapien
caggaatggaccgacgaagaacaaa

SEQ ID NO: 789040 - DNA, 25 bp, Homo sapien
ttgcaggaatggaccgacgaagaac

SEQ ID NO: 789041 - DNA, 25 bp, Homo sapien
atggaccgacgaagaacaaacttct

SEQ ID NO: 789042 - DNA, 25 bp, Homo sapien
actgattgcaggaatggaccgacga

SEQ ID NO: 789043 - DNA, 25 bp, Homo sapien
gcagtatcggcttattctgtggagg

SEQ ID NO: 789044 - DNA, 25 bp, Homo sapien
cctgttggtcgtattctaagtctaa

SEQ ID NO: 789045 - DNA, 25 bp, Homo sapien
tattctgtggaggatctcctgttgg

SEQ ID NO: 789046 - DNA, 25 bp, Homo sapien
cttttgcagtatcggcttattctgt

SEQ ID NO: 789047 - DNA, 25 bp, Homo sapien
tcagtactgaagatgctgtaaaaca

SEQ ID NO: 789048 - DNA, 25 bp, Homo sapien
tactgaagatgctgtaaaacatgta

SEQ ID NO: 789049 - DNA, 25 bp, Homo sapien
cagtactgaagatgctgtaaaacat

SEQ ID NO: 789050 - DNA, 25 bp, Homo sapien
ctgtaaaacatgtaattgtgctttc

SEQ ID NO: 789051 - DNA, 25 bp, Homo sapien
tctcctgactctacattcctgaagc

SEQ ID NO: 789052 - DNA, 25 bp, Homo sapien
gctttgattgagatttgtccctgcc

SEQ ID NO: 789053 - DNA, 25 bp, Homo sapien
tctgcctactggataatagtctgga

SEQ ID NO: 789054 - DNA, 25 bp, Homo sapien
ggaatggttggcagattacagaatg

SEQ ID NO: 789055 - DNA, 25 bp, Homo sapien
tccctgacaatcagaacataacagc

SEQ ID NO: 789056 - DNA, 25 bp, Homo sapien
tttatccctgacaatcagaacataa

SEQ ID NO: 789057 - DNA, 25 bp, Homo sapien
cctgacaatcagaacataacagcag

SEQ ID NO: 789058 - DNA, 25 bp, Homo sapien
tgacaatcagaacataacagcagcc

SEQ ID NO: 789059 - DNA, 25 bp, Homo sapien
tatgatggaacaagtggccccacca

SEQ ID NO: 789060 - DNA, 25 bp, Homo sapien
aaggtatgatggaacaagtggcccc

SEQ ID NO: 789061 - DNA, 25 bp, Homo sapien
cgggccctgaaggactttgtgctcc

SEQ ID NO: 789062 - DNA, 25 bp, Homo sapien
caaggtcgggccctgaaggactttg

SEQ ID NO: 789063 - DNA, 25 bp, Homo sapien
ccacagtgaagttttgagttacctg

SEQ ID NO: 789064 - DNA, 25 bp, Homo sapien
cctggaataaatgtcagctcggaac

SEQ ID NO: 789065 - DNA, 25 bp, Homo sapien
ccagcgtacagtagtccctgaaagg

SEQ ID NO: 789066 - DNA, 25 bp, Homo sapien
ccctgaaaggtctgataattctcct

SEQ ID NO: 789067 - DNA, 25 bp, Homo sapien
ggcagactcagacagcatatttgca

SEQ ID NO: 789068 - DNA, 25 bp, Homo sapien
aagtcttggaaagtaatgacatccg

SEQ ID NO: 789069 - DNA, 25 bp, Homo sapien
tccacgtattaaaaaggcagactca

SEQ ID NO: 789070 - DNA, 25 bp, Homo sapien
taaggttgcatatcaaaagaaaggc

SEQ ID NO: 789071 - DNA, 25 bp, Homo sapien
ttctgtccttgcaatagtttgctca

SEQ ID NO: 789072 - DNA, 25 bp, Homo sapien
gtgatgttccccaccccgcgttcaa

SEQ ID NO: 789073 - DNA, 25 bp, Homo sapien
cccaccccgcgttcaagtgttctca

SEQ ID NO: 789074 - DNA, 25 bp, Homo sapien
tctgtccttgcaatagtttgctcag

SEQ ID NO: 789075 - DNA, 25 bp, Homo sapien
tgctcccgagatccaactacgggct

SEQ ID NO: 789076 - DNA, 25 bp, Homo sapien
agacttgccctacagtggatcctct

SEQ ID NO: 789077 - DNA, 25 bp, Homo sapien
gacgggcggtggctcgcctcgcagc

SEQ ID NO: 789078 - DNA, 25 bp, Homo sapien
ccgcagctgttggcaccagacttgc

SEQ ID NO: 789079 - DNA, 25 bp, Homo sapien
ttgagcagcaataatgagctggtct

SEQ ID NO: 789080 - DNA, 25 bp, Homo sapien
gacaataaacagagaatgggcattc

SEQ ID NO: 789081 - DNA, 25 bp, Homo sapien
agcaataatgagctggtctgccaaa

SEQ ID NO: 789082 - DNA, 25 bp, Homo sapien
gggccgaggctgccacttttgagca

SEQ ID NO: 789083 - DNA, 25 bp, Homo sapien
tgcctaggtagtcttctatggtctc

SEQ ID NO: 789084 - DNA, 25 bp, Homo sapien
cctaggtagtcttctatggtctcta

SEQ ID NO: 789085 - DNA, 25 bp, Homo sapien
tcttctatggtctctatagttttac

SEQ ID NO: 789086 - DNA, 25 bp, Homo sapien
attgcctaggtagtcttctatggtc

SEQ ID NO: 789087 - DNA, 25 bp, Homo sapien
gaagtggattggcaacgacaaggtg

SEQ ID NO: 789088 - DNA, 25 bp, Homo sapien
tggagccctgaaagggtggcatgct

SEQ ID NO: 789089 - DNA, 25 bp, Homo sapien
catgctgcaggggacggtagaggga

SEQ ID NO: 789090 - DNA, 25 bp, Homo sapien
attggcaacgacaaggtggctgctg

SEQ ID NO: 789091 - DNA, 25 bp, Homo sapien
tggacttggccgtagaagggcactt

SEQ ID NO: 789092 - DNA, 25 bp, Homo sapien
ttctgagctatcactattgcttggg

SEQ ID NO: 789093 - DNA, 25 bp, Homo sapien
actattgcttgggtgactgagtgtt

SEQ ID NO: 789094 - DNA, 25 bp, Homo sapien
gggcacttttgcaatgcaaaatgtt

SEQ ID NO: 789095 - DNA, 25 bp, Homo sapien
gtttctatgtttcgggaattcaaca

SEQ ID NO: 789096 - DNA, 25 bp, Homo sapien
atgactggtttctatgtttcgggaa

SEQ ID NO: 789097 - DNA, 25 bp, Homo sapien
ctgtagggtagtaactgggagagca

SEQ ID NO: 789098 - DNA, 25 bp, Homo sapien
tagggtagtaactgggagagcagag

SEQ ID NO: 789099 - DNA, 25 bp, Homo sapien
caaaactctggcgttctggcgtcag

SEQ ID NO: 789100 - DNA, 25 bp, Homo sapien
aatacaaaactctggcgttctggcg

SEQ ID NO: 789101 - DNA, 25 bp, Homo sapien
cgttctggcgtcagattctgtctgc

SEQ ID NO: 789102 - DNA, 25 bp, Homo sapien
tcagttgcgaatacaaaactctggc

SEQ ID NO: 789103 - DNA, 25 bp, Homo sapien
acaatatctttagaatactctttcc

SEQ ID NO: 789104 - DNA, 25 bp, Homo sapien
tttgcaggtcattttccctttaaca

SEQ ID NO: 789105 - DNA, 25 bp, Homo sapien
gattttgatcagaacaaggtatttg

SEQ ID NO: 789106 - DNA, 25 bp, Homo sapien
gggctccttgtcaataacttgctga

SEQ ID NO: 789107 - DNA, 25 bp, Homo sapien
tccagtggctgtcagaaacttttaa

SEQ ID NO: 789108 - DNA, 25 bp, Homo sapien
gatgctcaggacacagtcttttgca

SEQ ID NO: 789109 - DNA, 25 bp, Homo sapien
tataggcaccacattccatccagtg

SEQ ID NO: 789110 - DNA, 25 bp, Homo sapien
taaaccacagtatatcccacactca

SEQ ID NO: 789111 - DNA, 25 bp, Homo sapien
tctgataaggctggttggagtagcc

SEQ ID NO: 789112 - DNA, 25 bp, Homo sapien
taagaaaataagtatagccctggga

SEQ ID NO: 789113 - DNA, 25 bp, Homo sapien
gctgttccaacataccttgactctg

SEQ ID NO: 789114 - DNA, 25 bp, Homo sapien
ccctgggaagtatgcaaactgtagg

SEQ ID NO: 789115 - DNA, 25 bp, Homo sapien
gctggtacacatagccactgagcca

SEQ ID NO: 789116 - DNA, 25 bp, Homo sapien
cactgagccactgttgcaggtggta

SEQ ID NO: 789117 - DNA, 25 bp, Homo sapien
cttataggttaaggcctgctggtac

SEQ ID NO: 789118 - DNA, 25 bp, Homo sapien
cttagtacctatgggtgtttgccac

SEQ ID NO: 789119 - DNA, 25 bp, Homo sapien
ttgaatgcctgaaggagaatcctgc

SEQ ID NO: 789120 - DNA, 25 bp, Homo sapien
agttgattgaatgcctgaaggagaa

SEQ ID NO: 789121 - DNA, 25 bp, Homo sapien
ttgattgaatgcctgaaggagaatc

SEQ ID NO: 789122 - DNA, 25 bp, Homo sapien
gattgaatgcctgaaggagaatcct

SEQ ID NO: 789123 - DNA, 25 bp, Homo sapien
tctgcctgttgcaagtctgataggg

SEQ ID NO: 789124 - DNA, 25 bp, Homo sapien
tgcaagtctgatagggtcccatagg

SEQ ID NO: 789125 - DNA, 25 bp, Homo sapien
cccataggtgggaataggatgcagg

SEQ ID NO: 789126 - DNA, 25 bp, Homo sapien
aataggatgcagggtacttgtggct

SEQ ID NO: 789127 - DNA, 25 bp, Homo sapien
gtctcagttcataagaccactcagt

SEQ ID NO: 789128 - DNA, 25 bp, Homo sapien
gttcataagaccactcagtgccact

SEQ ID NO: 789129 - DNA, 25 bp, Homo sapien
gaatgtttctgactcagagtagaca

SEQ ID NO: 789130 - DNA, 25 bp, Homo sapien
tctgactcagagtagacaagaaatg

SEQ ID NO: 789131 - DNA, 25 bp, Homo sapien
tctacatgggtcgttgctagctggt

SEQ ID NO: 789132 - DNA, 25 bp, Homo sapien
tcggacgcgcctatttttggaacaa

SEQ ID NO: 789133 - DNA, 25 bp, Homo sapien
gatcgcactctagtcttacaacggc

SEQ ID NO: 789134 - DNA, 25 bp, Homo sapien
tttaagccagaagcggaaagcagtc

SEQ ID NO: 789135 - DNA, 25 bp, Homo sapien
gatgagaagagtgtcagtatcattt

SEQ ID NO: 789136 - DNA, 25 bp, Homo sapien
actggagtttcagaagtgttatggg

SEQ ID NO: 789137 - DNA, 25 bp, Homo sapien
tattcatgtagggggagggtagctc

SEQ ID NO: 789138 - DNA, 25 bp, Homo sapien
tagggggagggtagctcttctgtgg

SEQ ID NO: 789139 - DNA, 25 bp, Homo sapien
ctggagtttcagaagtgttatgggc

SEQ ID NO: 789140 - DNA, 25 bp, Homo sapien
gtcagaacgaggagtaagctctgaa

SEQ ID NO: 789141 - DNA, 25 bp, Homo sapien
cagaacgaggagtaagctctgaatg

SEQ ID NO: 789142 - DNA, 25 bp, Homo sapien
ggctcaagtcagaacgaggagtaag

SEQ ID NO: 789143 - DNA, 25 bp, Homo sapien
caagtcagaacgaggagtaagctct

SEQ ID NO: 789144 - DNA, 25 bp, Homo sapien
tgccactgatgcttggaacttgggc

SEQ ID NO: 789145 - DNA, 25 bp, Homo sapien
ctgccactgatgcttggaacttggg

SEQ ID NO: 789146 - DNA, 25 bp, Homo sapien
tatatctgcctcttaggcaaggttt

SEQ ID NO: 789147 - DNA, 25 bp, Homo sapien
atatatctgcctcttaggcaaggtt

SEQ ID NO: 789148 - DNA, 25 bp, Homo sapien
gctagatacaagatacagctaagta

SEQ ID NO: 789149 - DNA, 25 bp, Homo sapien
tcatcaaacaaaccgtacaaagtaa

SEQ ID NO: 789150 - DNA, 25 bp, Homo sapien
gaaatttcaagagcatattgccaaa

SEQ ID NO: 789151 - DNA, 25 bp, Homo sapien
ctcctagaaatttcaagagcatatt

SEQ ID NO: 789152 - DNA, 25 bp, Homo sapien
cccaaatgtttgtataatagcagta

SEQ ID NO: 789153 - DNA, 25 bp, Homo sapien
cttgacctcaagtagattccgccac

SEQ ID NO: 789154 - DNA, 25 bp, Homo sapien
catatttagtgaaagtctccagagt

SEQ ID NO: 789155 - DNA, 25 bp, Homo sapien
tctccagagtgaattactttgagga

SEQ ID NO: 789156 - DNA, 25 bp, Homo sapien
tatgatggcctattacgagtggcac

SEQ ID NO: 789157 - DNA, 25 bp, Homo sapien
aaagaccagttgcagtgtttatggc

SEQ ID NO: 789158 - DNA, 25 bp, Homo sapien
gaatccagttgagagtacttaccat

SEQ ID NO: 789159 - DNA, 25 bp, Homo sapien
catcatcgagggaaggtgactctga

SEQ ID NO: 789160 - DNA, 25 bp, Homo sapien
agcaatgataaagccgatgctcctg

SEQ ID NO: 789161 - DNA, 25 bp, Homo sapien
caagctgacgatggaaagaagcgct

SEQ ID NO: 789162 - DNA, 25 bp, Homo sapien
acaactgcctattagcaagctgacg

SEQ ID NO: 789163 - DNA, 25 bp, Homo sapien
aagaagcgctgtaaatctcacaagc

SEQ ID NO: 789164 - DNA, 25 bp, Homo sapien
caggagcaactgagtcatcctccca

SEQ ID NO: 789165 - DNA, 25 bp, Homo sapien
aggagcaactgagtcatcctcccag

SEQ ID NO: 789166 - DNA, 25 bp, Homo sapien
gcaggagcaactgagtcatcctccc

SEQ ID NO: 789167 - DNA, 25 bp, Homo sapien
ggagcaactgagtcatcctcccagt

SEQ ID NO: 789168 - DNA, 25 bp, Homo sapien
tctgatttgtggcttatgttcttct

SEQ ID NO: 789169 - DNA, 25 bp, Homo sapien
ctgatttgtggcttatgttcttctt

SEQ ID NO: 789170 - DNA, 25 bp, Homo sapien
ctgcattgctaccatttctgggtgg

SEQ ID NO: 789171 - DNA, 25 bp, Homo sapien
tgcattgctaccatttctgggtggt

SEQ ID NO: 789172 - DNA, 25 bp, Homo sapien
tcatattatagtccaggacagccat

SEQ ID NO: 789173 - DNA, 25 bp, Homo sapien
ctgtcatattatagtccaggacagc

SEQ ID NO: 789174 - DNA, 25 bp, Homo sapien
ggccatgtcaactcttctctctgtc

SEQ ID NO: 789175 - DNA, 25 bp, Homo sapien
gccatgtcaactcttctctctgtca

SEQ ID NO: 789176 - DNA, 25 bp, Homo sapien
ctggctgaatcctcagttttgtgga

SEQ ID NO: 789177 - DNA, 25 bp, Homo sapien
gaacttagcagttatgcactgaggt

SEQ ID NO: 789178 - DNA, 25 bp, Homo sapien
ctgcccacacaggtagtaatttcct

SEQ ID NO: 789179 - DNA, 25 bp, Homo sapien
gttttgtggaacttagcagttatgc

SEQ ID NO: 789180 - DNA, 25 bp, Homo sapien
tccatttactctcaatgtcttccct

SEQ ID NO: 789181 - DNA, 25 bp, Homo sapien
tggctgcatctagacggccatcttt

SEQ ID NO: 789182 - DNA, 25 bp, Homo sapien
gtggtacatattcctcctggctgca

SEQ ID NO: 789183 - DNA, 25 bp, Homo sapien
ccagtgtcctggtccctatgtggta

SEQ ID NO: 789184 - DNA, 25 bp, Homo sapien
taattttggaataagtgcgatgtgg

SEQ ID NO: 789185 - DNA, 25 bp, Homo sapien
ttaattttggaataagtgcgatgtg

SEQ ID NO: 789186 - DNA, 25 bp, Homo sapien
ggttaattttggaataagtgcgatg

SEQ ID NO: 789187 - DNA, 25 bp, Homo sapien
gtggttaattttggaataagtgcga

SEQ ID NO: 789188 - DNA, 25 bp, Homo sapien
gcaaagcttattctcaacaaagggt

SEQ ID NO: 789189 - DNA, 25 bp, Homo sapien
tgttcacctgaagcataaaatttgg

SEQ ID NO: 789190 - DNA, 25 bp, Homo sapien
tttcctctaagtgaactgccagtcc

SEQ ID NO: 789191 - DNA, 25 bp, Homo sapien
tgatgttcaaccgtatggctgagac

SEQ ID NO: 789192 - DNA, 25 bp, Homo sapien
gcctcagctacaggatctctttgct

SEQ ID NO: 789193 - DNA, 25 bp, Homo sapien
ccaagttgtaactatgctgtcccat

SEQ ID NO: 789194 - DNA, 25 bp, Homo sapien
gatctccgtgttggcaacagccaag

SEQ ID NO: 789195 - DNA, 25 bp, Homo sapien
ggctctcagtttgcaccaagttgta

SEQ ID NO: 789196 - DNA, 25 bp, Homo sapien
gcaggcatgctggtgccgtaatctc

SEQ ID NO: 789197 - DNA, 25 bp, Homo sapien
caggaactctcagcaggcatgctgg

SEQ ID NO: 789198 - DNA, 25 bp, Homo sapien
gataccatgaaacgtagctttctcc

SEQ ID NO: 789199 - DNA, 25 bp, Homo sapien
caatacagcctgtctatctgtagtc

SEQ ID NO: 789200 - DNA, 25 bp, Homo sapien
ttactgccaaacaccaaccgtggtc

SEQ ID NO: 789201 - DNA, 25 bp, Homo sapien
tgcattcatgcaaaaggccaactgg

SEQ ID NO: 789202 - DNA, 25 bp, Homo sapien
tatcgggttcaaataggcagtatcc

SEQ ID NO: 789203 - DNA, 25 bp, Homo sapien
taagtgacctttgcaacccaagtgt

SEQ ID NO: 789204 - DNA, 25 bp, Homo sapien
tgaatgaaggtagccttaacagtgc

SEQ ID NO: 789205 - DNA, 25 bp, Homo sapien
gactcatgaactccatacctaccaa

SEQ ID NO: 789206 - DNA, 25 bp, Homo sapien
gcctattggtgtaggtataccaaca

SEQ ID NO: 789207 - DNA, 25 bp, Homo sapien
ttgattataggatagaacccgtacc

SEQ ID NO: 789208 - DNA, 25 bp, Homo sapien
tggcggaaagcatctcttcgccagg

SEQ ID NO: 789209 - DNA, 25 bp, Homo sapien
gcatctcttcgccaggcagcaggag

SEQ ID NO: 789210 - DNA, 25 bp, Homo sapien
gaaagcatctcttcgccaggcagca

SEQ ID NO: 789211 - DNA, 25 bp, Homo sapien
tcatggcggaaagcatctcttcgcc

SEQ ID NO: 789212 - DNA, 25 bp, Homo sapien
tactgcactttgttgccgtttataa

SEQ ID NO: 789213 - DNA, 25 bp, Homo sapien
tccgtcagacactctagcacatatg

SEQ ID NO: 789214 - DNA, 25 bp, Homo sapien
ttatttacttgagcgaattcaacag

SEQ ID NO: 789215 - DNA, 25 bp, Homo sapien
tcaacagacatcgattaaattcttc

SEQ ID NO: 789216 - DNA, 25 bp, Homo sapien
agtgggcccgtagcttattcttcct

SEQ ID NO: 789217 - DNA, 25 bp, Homo sapien
ttcagtgggcccgtagcttattctt

SEQ ID NO: 789218 - DNA, 25 bp, Homo sapien
tgcttggaaattcagtgggcccgta

SEQ ID NO: 789219 - DNA, 25 bp, Homo sapien
tggaaattcagtgggcccgtagctt

SEQ ID NO: 789220 - DNA, 25 bp, Homo sapien
gtcaatttcatagattcgaagagtg

SEQ ID NO: 789221 - DNA, 25 bp, Homo sapien
ttcatagattcgaagagtgaaatag

SEQ ID NO: 789222 - DNA, 25 bp, Homo sapien
attcgaagagtgaaatagtggttgc

SEQ ID NO: 789223 - DNA, 25 bp, Homo sapien
aaatggtcaatttcatagattcgaa

SEQ ID NO: 789224 - DNA, 25 bp, Homo sapien
tcagggtcaagttgtgcgcacacac

SEQ ID NO: 789225 - DNA, 25 bp, Homo sapien
gagctcttgggcgactacctacatt

SEQ ID NO: 789226 - DNA, 25 bp, Homo sapien
aatgaagctggctgcattgactgac

SEQ ID NO: 789227 - DNA, 25 bp, Homo sapien
cactgaatgctagaacccctcaaag

SEQ ID NO: 789228 - DNA, 25 bp, Homo sapien
tgttcgggcatggtagcttcacacc

SEQ ID NO: 789229 - DNA, 25 bp, Homo sapien
tcaggcaatgaagccatatcaagac

SEQ ID NO: 789230 - DNA, 25 bp, Homo sapien
catgaagagaatctatatggatatt

SEQ ID NO: 789231 - DNA, 25 bp, Homo sapien
ttacagtgaaccatgttcctgccgc

SEQ ID NO: 789232 - DNA, 25 bp, Homo sapien
taatgactttgctcccctccatcaa

SEQ ID NO: 789233 - DNA, 25 bp, Homo sapien
atgactttgctcccctccatcaact

SEQ ID NO: 789234 - DNA, 25 bp, Homo sapien
aatgactttgctcccctccatcaac

SEQ ID NO: 789235 - DNA, 25 bp, Homo sapien
ctaatgactttgctcccctccatca

SEQ ID NO: 789236 - DNA, 25 bp, Homo sapien
gttacataatgagtggagttgtgca

SEQ ID NO: 789237 - DNA, 25 bp, Homo sapien
ggtctgacacagaggccttatacat

SEQ ID NO: 789238 - DNA, 25 bp, Homo sapien
cataatgagtggagttgtgcaccag

SEQ ID NO: 789239 - DNA, 25 bp, Homo sapien
tgagtggagttgtgcaccagtgctc

SEQ ID NO: 789240 - DNA, 25 bp, Homo sapien
aattcttaggacatcttaatcccag

SEQ ID NO: 789241 - DNA, 25 bp, Homo sapien
gagtttgctactgcactgagactcc

SEQ ID NO: 789242 - DNA, 25 bp, Homo sapien
gatgtatgacggctttcacagaatg

SEQ ID NO: 789243 - DNA, 25 bp, Homo sapien
gctaccaaggtctattgtggctctc

SEQ ID NO: 789244 - DNA, 25 bp, Homo sapien
ccatacagtagtaactcttcttggg

SEQ ID NO: 789245 - DNA, 25 bp, Homo sapien
catctaaatccctgccatacagtag

SEQ ID NO: 789246 - DNA, 25 bp, Homo sapien
ttcttggggcttccactttctactg

SEQ ID NO: 789247 - DNA, 25 bp, Homo sapien
tccctgccatacagtagtaactctt

SEQ ID NO: 789248 - DNA, 25 bp, Homo sapien
ggcacatagtcatccgcatatagag

SEQ ID NO: 789249 - DNA, 25 bp, Homo sapien
ccgcatatagagcaggtgatgagta

SEQ ID NO: 789250 - DNA, 25 bp, Homo sapien
tagtcatccgcatatagagcaggtg

SEQ ID NO: 789251 - DNA, 25 bp, Homo sapien
tcttccacagttcatgggcacatag

SEQ ID NO: 789252 - DNA, 25 bp, Homo sapien
tttctgtgtgggttaaagagctgtc

SEQ ID NO: 789253 - DNA, 25 bp, Homo sapien
cttcatctccaatgatcagtcttcc

SEQ ID NO: 789254 - DNA, 25 bp, Homo sapien
ttcatctccaatgatcagtcttcca

SEQ ID NO: 789255 - DNA, 25 bp, Homo sapien
ctgtgtgggttaaagagctgtcctc

SEQ ID NO: 789256 - DNA, 25 bp, Homo sapien
cagggacattgaaacagttcagaaa

SEQ ID NO: 789257 - DNA, 25 bp, Homo sapien
gacagggacattgaaacagttcaga

SEQ ID NO: 789258 - DNA, 25 bp, Homo sapien
agggacattgaaacagttcagaaac

SEQ ID NO: 789259 - DNA, 25 bp, Homo sapien
atgggtatcattaagtgtgcatttt

SEQ ID NO: 789260 - DNA, 25 bp, Homo sapien
gacagatgcagttcgattttcctaa

SEQ ID NO: 789261 - DNA, 25 bp, Homo sapien
cctgggtttggacgaagacttatgt

SEQ ID NO: 789262 - DNA, 25 bp, Homo sapien
gaaacctgatgtgtcattgcagtga

SEQ ID NO: 789263 - DNA, 25 bp, Homo sapien
caacaataacttacaagacctgggt

SEQ ID NO: 789264 - DNA, 25 bp, Homo sapien
gcatactgggtattttcaattccga

SEQ ID NO: 789265 - DNA, 25 bp, Homo sapien
caacttccctagatcactcggtgga

SEQ ID NO: 789266 - DNA, 25 bp, Homo sapien
cctggaacttgttgggagcatactg

SEQ ID NO: 789267 - DNA, 25 bp, Homo sapien
gatcactcggtggatccgaacataa

SEQ ID NO: 789268 - DNA, 25 bp, Homo sapien
cataggagcataaaaccataggcag

SEQ ID NO: 789269 - DNA, 25 bp, Homo sapien
cacacagagaattcatgcctaaact

SEQ ID NO: 789270 - DNA, 25 bp, Homo sapien
tattgactctgatatccagcatgct

SEQ ID NO: 789271 - DNA, 25 bp, Homo sapien
ggtgggaaattacgaagagcttcat

SEQ ID NO: 789272 - DNA, 25 bp, Homo sapien
tcctgtagctcctttgagatctatg

SEQ ID NO: 789273 - DNA, 25 bp, Homo sapien
gactgtcataacactttgcacagtg

SEQ ID NO: 789274 - DNA, 25 bp, Homo sapien
tgggctgcgttcattacagcaggga

SEQ ID NO: 789275 - DNA, 25 bp, Homo sapien
gtagctcctttgagatctatgactg

SEQ ID NO: 789276 - DNA, 25 bp, Homo sapien
ttgatgactgtatacttctttattc

SEQ ID NO: 789277 - DNA, 25 bp, Homo sapien
atttgatgactgtatacttctttat

SEQ ID NO: 789278 - DNA, 25 bp, Homo sapien
tatttgatgactgtatacttcttta

SEQ ID NO: 789279 - DNA, 25 bp, Homo sapien
cttatttgatgactgtatacttctt

SEQ ID NO: 789280 - DNA, 25 bp, Homo sapien
caatgcagggactctataaataggt

SEQ ID NO: 789281 - DNA, 25 bp, Homo sapien
taaataggtccttaatcatgctatg

SEQ ID NO: 789282 - DNA, 25 bp, Homo sapien
ctttatatccacaggtggacaacaa

SEQ ID NO: 789283 - DNA, 25 bp, Homo sapien
tatgaacttcttgagctagatccat

SEQ ID NO: 789284 - DNA, 25 bp, Homo sapien
ttccccacttctcccaacttccaga

SEQ ID NO: 789285 - DNA, 25 bp, Homo sapien
ggttatctgaatctctttcaattcc

SEQ ID NO: 789286 - DNA, 25 bp, Homo sapien
tttagtcttatctagtgccaggtgg

SEQ ID NO: 789287 - DNA, 25 bp, Homo sapien
tcccaacttccagatgtccttgtcc

SEQ ID NO: 789288 - DNA, 25 bp, Homo sapien
agagttggctttggtattatttgcc

SEQ ID NO: 789289 - DNA, 25 bp, Homo sapien
ctgtgctgtagcaacgagtggtcta

SEQ ID NO: 789290 - DNA, 25 bp, Homo sapien
ttgaggctctcagtgctaacgtttc

SEQ ID NO: 789291 - DNA, 25 bp, Homo sapien
aagtgaaagtgagtatatgggccta

SEQ ID NO: 789292 - DNA, 25 bp, Homo sapien
tgcataacttgcacagacctctgtt

SEQ ID NO: 789293 - DNA, 25 bp, Homo sapien
tctgttgcctccagcatggatcata

SEQ ID NO: 789294 - DNA, 25 bp, Homo sapien
catatattcattacgttcaagagca

SEQ ID NO: 789295 - DNA, 25 bp, Homo sapien
gaggtcaatgtttccctattgcaag

SEQ ID NO: 789296 - DNA, 25 bp, Homo sapien
gagtatcacataccggaccttttag

SEQ ID NO: 789297 - DNA, 25 bp, Homo sapien
gcttaaatgagaggccatcaagtac

SEQ ID NO: 789298 - DNA, 25 bp, Homo sapien
ggtgaaaagtgttagttctttcatc

SEQ ID NO: 789299 - DNA, 25 bp, Homo sapien
cttttctgattctaatgtggagcca

SEQ ID NO: 789300 - DNA, 25 bp, Homo sapien
ttctttcctaactccagcatccttg

SEQ ID NO: 789301 - DNA, 25 bp, Homo sapien
caagactatggataattggagatta

SEQ ID NO: 789302 - DNA, 25 bp, Homo sapien
actatggataattggagattagaaa

SEQ ID NO: 789303 - DNA, 25 bp, Homo sapien
gactatggataattggagattagaa

SEQ ID NO: 789304 - DNA, 25 bp, Homo sapien
aagactatggataattggagattag

SEQ ID NO: 789305 - DNA, 25 bp, Homo sapien
ctgttaaagggcctattcttatact

SEQ ID NO: 789306 - DNA, 25 bp, Homo sapien
tgttaaagggcctattcttatactg

SEQ ID NO: 789307 - DNA, 25 bp, Homo sapien
ttctgttaaagggcctattcttata

SEQ ID NO: 789308 - DNA, 25 bp, Homo sapien
tctgttaaagggcctattcttatac

SEQ ID NO: 789309 - DNA, 25 bp, Homo sapien
tattgagtcatttagagaaccgtag

SEQ ID NO: 789310 - DNA, 25 bp, Homo sapien
tctgttggaggtttcactgggtaca

SEQ ID NO: 789311 - DNA, 25 bp, Homo sapien
cagagggctctattgagtcatttag

SEQ ID NO: 789312 - DNA, 25 bp, Homo sapien
tagagaaccgtagtctgttggaggt

SEQ ID NO: 789313 - DNA, 25 bp, Homo sapien
ggaccaaaataatgtagaatcttat

SEQ ID NO: 789314 - DNA, 25 bp, Homo sapien
ttctttgtttgtacttgtagtgctt

SEQ ID NO: 789315 - DNA, 25 bp, Homo sapien
ttcctgtgtggaaatggttactgat

SEQ ID NO: 789316 - DNA, 25 bp, Homo sapien
cctgaaatacgcatgtttggaccaa

SEQ ID NO: 789317 - DNA, 25 bp, Homo sapien
tcattttgaagtagcacagaagtta

SEQ ID NO: 789318 - DNA, 25 bp, Homo sapien
cattttgaagtagcacagaagttat

SEQ ID NO: 789319 - DNA, 25 bp, Homo sapien
ttggcatccagacacaggaaccaaa

SEQ ID NO: 789320 - DNA, 25 bp, Homo sapien
aagtccttggcatccagacacagga

SEQ ID NO: 789321 - DNA, 25 bp, Homo sapien
agatggcgccaaaccacagcaggga

SEQ ID NO: 789322 - DNA, 25 bp, Homo sapien
ccagagcctaacttccaccagatgg

SEQ ID NO: 789323 - DNA, 25 bp, Homo sapien
ctcaggaaactcacaatcatgctga

SEQ ID NO: 789324 - DNA, 25 bp, Homo sapien
caggaaactcacaatcatgctgaag

SEQ ID NO: 789325 - DNA, 25 bp, Homo sapien
ggaaactcacaatcatgctgaaggg

SEQ ID NO: 789326 - DNA, 25 bp, Homo sapien
tgctgaaggggaagcagacaacttc

SEQ ID NO: 789327 - DNA, 25 bp, Homo sapien
gcattcacatttcagctcaaggatg

SEQ ID NO: 789328 - DNA, 25 bp, Homo sapien
ccttctatgaagttggtggccgttg

SEQ ID NO: 789329 - DNA, 25 bp, Homo sapien
aattcatagggcactttgggtgcag

SEQ ID NO: 789330 - DNA, 25 bp, Homo sapien
tcaaggatggactaggcaagaagcc

SEQ ID NO: 789331 - DNA, 25 bp, Homo sapien
gcagtaagactaagttataatctta

SEQ ID NO: 789332 - DNA, 25 bp, Homo sapien
gttataatcttatttagtctattag

SEQ ID NO: 789333 - DNA, 25 bp, Homo sapien
gactaagttataatcttatttagtc

SEQ ID NO: 789334 - DNA, 25 bp, Homo sapien
tagcagtaagactaagttataatct

SEQ ID NO: 789335 - DNA, 25 bp, Homo sapien
cttagagggcgagcgcaggccagaa

SEQ ID NO: 789336 - DNA, 25 bp, Homo sapien
gcgcaggccagaaggcagtgaaggc

SEQ ID NO: 789337 - DNA, 25 bp, Homo sapien
caggccagaaggcagtgaaggcgca

SEQ ID NO: 789338 - DNA, 25 bp, Homo sapien
aggccagaaggcagtgaaggcgcag

SEQ ID NO: 789339 - DNA, 25 bp, Homo sapien
ttacgaaggtgcaggctgacaccag

SEQ ID NO: 789340 - DNA, 25 bp, Homo sapien
agaactataagaaggatgtaccacc

SEQ ID NO: 789341 - DNA, 25 bp, Homo sapien
cacgtgcagcaagatgatgaccagc

SEQ ID NO: 789342 - DNA, 25 bp, Homo sapien
cagcagacgggtcaggagaactata

SEQ ID NO: 789343 - DNA, 25 bp, Homo sapien
caggattataaatgccgacagcagg

SEQ ID NO: 789344 - DNA, 25 bp, Homo sapien
ttaggcagagtttgaggcttcggca

SEQ ID NO: 789345 - DNA, 25 bp, Homo sapien
tccttgtcttggcagattaggcaga

SEQ ID NO: 789346 - DNA, 25 bp, Homo sapien
agctgcctcctgcaacaaagaatac

SEQ ID NO: 789347 - DNA, 25 bp, Homo sapien
gcaaggtctgatattgcaagtatat

SEQ ID NO: 789348 - DNA, 25 bp, Homo sapien
tattgaatgcaaggtctgatattgc

SEQ ID NO: 789349 - DNA, 25 bp, Homo sapien
ggtctgcaaagagtcaattgcattg

SEQ ID NO: 789350 - DNA, 25 bp, Homo sapien
cattgtatattgaatgcaaggtctg

SEQ ID NO: 789351 - DNA, 25 bp, Homo sapien
tttgcaatctgagatgtatccagca

SEQ ID NO: 789352 - DNA, 25 bp, Homo sapien
tgcagggagtcagtgggatctttag

SEQ ID NO: 789353 - DNA, 25 bp, Homo sapien
cagtgggatctttagcaagcacttc

SEQ ID NO: 789354 - DNA, 25 bp, Homo sapien
ttttgcaatctgagatgtatccagc

SEQ ID NO: 789355 - DNA, 25 bp, Homo sapien
gccgaggtggagtagcacttattct

SEQ ID NO: 789356 - DNA, 25 bp, Homo sapien
tctgggagttcactagaatcaaccc

SEQ ID NO: 789357 - DNA, 25 bp, Homo sapien
ttagattctgccaccgagggacgct

SEQ ID NO: 789358 - DNA, 25 bp, Homo sapien
ttaaatctctgtgtcgggatgcccc

SEQ ID NO: 789359 - DNA, 25 bp, Homo sapien
gatgagctgccactgaacttatgga

SEQ ID NO: 789360 - DNA, 25 bp, Homo sapien
ctgccctcaccaattgattcctgtt

SEQ ID NO: 789361 - DNA, 25 bp, Homo sapien
gctgccctcaccaattgattcctgt

SEQ ID NO: 789362 - DNA, 25 bp, Homo sapien
tctccatccaactgcccgtcattct

SEQ ID NO: 789363 - DNA, 25 bp, Homo sapien
gtccagaaggcaaaagtgatccctg

SEQ ID NO: 789364 - DNA, 25 bp, Homo sapien
tccagaaggcaaaagtgatccctgg

SEQ ID NO: 789365 - DNA, 25 bp, Homo sapien
ggcctagttttacactcttgaccca

SEQ ID NO: 789366 - DNA, 25 bp, Homo sapien
atatgtctaacatcctcagtgaagc

SEQ ID NO: 789367 - DNA, 25 bp, Homo sapien
tttttcctatgtgggtcagatgcac

SEQ ID NO: 789368 - DNA, 25 bp, Homo sapien
caggttgttctataaggcaagggat

SEQ ID NO: 789369 - DNA, 25 bp, Homo sapien
tccaagcctccaaataatatcagca

SEQ ID NO: 789370 - DNA, 25 bp, Homo sapien
ccaagcctccaaataatatcagcat

SEQ ID NO: 789371 - DNA, 25 bp, Homo sapien
gtccaagcctccaaataatatcagc

SEQ ID NO: 789372 - DNA, 25 bp, Homo sapien
ctttctcttcgttcaataatgtctt

SEQ ID NO: 789373 - DNA, 25 bp, Homo sapien
ttctcttcgttcaataatgtcttca

SEQ ID NO: 789374 - DNA, 25 bp, Homo sapien
tctcttcgttcaataatgtcttcag

SEQ ID NO: 789375 - DNA, 25 bp, Homo sapien
caactttctcttcgttcaataatgt

SEQ ID NO: 789376 - DNA, 25 bp, Homo sapien
tttttcatcaatctccctggagaaa

SEQ ID NO: 789377 - DNA, 25 bp, Homo sapien
tagcctcttcaatagtcaagtactc

SEQ ID NO: 789378 - DNA, 25 bp, Homo sapien
ggcttttgggttatagcctcttcaa

SEQ ID NO: 789379 - DNA, 25 bp, Homo sapien
tcttcaatagtcaagtactcctcca

SEQ ID NO: 789380 - DNA, 25 bp, Homo sapien
ctcctgcaggcttttgggttatagc

SEQ ID NO: 789381 - DNA, 25 bp, Homo sapien
ttcttgtattcaaagtcagtgcagt

SEQ ID NO: 789382 - DNA, 25 bp, Homo sapien
gccactggaatcttaaaattagaga

SEQ ID NO: 789383 - DNA, 25 bp, Homo sapien
tatattgtttcatggcagtagagat

SEQ ID NO: 789384 - DNA, 25 bp, Homo sapien
tagggtcctataatttagtttctca

SEQ ID NO: 789385 - DNA, 25 bp, Homo sapien
atattgtttcatggcagtagagatt

SEQ ID NO: 789386 - DNA, 25 bp, Homo sapien
gatagccaagtgtaagggcactctc

SEQ ID NO: 789387 - DNA, 25 bp, Homo sapien
ttcaaaaacacgaatgcatacatgg

SEQ ID NO: 789388 - DNA, 25 bp, Homo sapien
gaaatgacaaggctccagactgaaa

SEQ ID NO: 789389 - DNA, 25 bp, Homo sapien
ggcactctctagaaagctattgtca

SEQ ID NO: 789390 - DNA, 25 bp, Homo sapien
gcaaaaccatttggatgccgtataa

SEQ ID NO: 789391 - DNA, 25 bp, Homo sapien
aaatcctggcaaaaccatttggatg

SEQ ID NO: 789392 - DNA, 25 bp, Homo sapien
gccgtataatcatcagtaaagaaac

SEQ ID NO: 789393 - DNA, 25 bp, Homo sapien
catttggatgccgtataatcatcag

SEQ ID NO: 789394 - DNA, 25 bp, Homo sapien
aagatgggttttggtgagctttcac

SEQ ID NO: 789395 - DNA, 25 bp, Homo sapien
cagagagggtcctgctggctctaaa

SEQ ID NO: 789396 - DNA, 25 bp, Homo sapien
gctggctctaaagtgagtcatttct

SEQ ID NO: 789397 - DNA, 25 bp, Homo sapien
gagggtcctgctggctctaaagtga

SEQ ID NO: 789398 - DNA, 25 bp, Homo sapien
tcctgctggctctaaagtgagtcat

SEQ ID NO: 789399 - DNA, 25 bp, Homo sapien
gatcaggggaagaggaggacttcat

SEQ ID NO: 789400 - DNA, 25 bp, Homo sapien
ccaaggatcaggggaagaggaggac

SEQ ID NO: 789401 - DNA, 25 bp, Homo sapien
aggatcaggggaagaggaggacttc

SEQ ID NO: 789402 - DNA, 25 bp, Homo sapien
caaggatcaggggaagaggaggact

SEQ ID NO: 789403 - DNA, 25 bp, Homo sapien
ttggcaatgtcagttccctcattca

SEQ ID NO: 789404 - DNA, 25 bp, Homo sapien
taaatcatcacattctctataaatc

SEQ ID NO: 789405 - DNA, 25 bp, Homo sapien
cttggcaatgtcagttccctcattc

SEQ ID NO: 789406 - DNA, 25 bp, Homo sapien
tcttggcaatgtcagttccctcatt

SEQ ID NO: 789407 - DNA, 25 bp, Homo sapien
tctctttctgtacccgtacgtcttg

SEQ ID NO: 789408 - DNA, 25 bp, Homo sapien
gcattacttcttatccatcgcagga

SEQ ID NO: 789409 - DNA, 25 bp, Homo sapien
cgcaggaatatgtagggttttggct

SEQ ID NO: 789410 - DNA, 25 bp, Homo sapien
gtacgtcttgaatctttttacctgc

SEQ ID NO: 789411 - DNA, 25 bp, Homo sapien
ttaaagctgtggctcttttctatca

SEQ ID NO: 789412 - DNA, 25 bp, Homo sapien
aaaagttgctggtgctgttattgtc

SEQ ID NO: 789413 - DNA, 25 bp, Homo sapien
ctatcaaaagttgctggtgctgtta

SEQ ID NO: 789414 - DNA, 25 bp, Homo sapien
ggctcttttctatcaaaagttgctg

SEQ ID NO: 789415 - DNA, 25 bp, Homo sapien
gcaagaaaagtagaccatcacggta

SEQ ID NO: 789416 - DNA, 25 bp, Homo sapien
taaaatttagctagttcacactggg

SEQ ID NO: 789417 - DNA, 25 bp, Homo sapien
tcatatgggtcgaaagcaagagagt

SEQ ID NO: 789418 - DNA, 25 bp, Homo sapien
gagattctcatatagttcggcagtg

SEQ ID NO: 789419 - DNA, 25 bp, Homo sapien
ggcagcatagggaagttgtgacttt

SEQ ID NO: 789420 - DNA, 25 bp, Homo sapien
cagcatagggaagttgtgactttcc

SEQ ID NO: 789421 - DNA, 25 bp, Homo sapien
cagtatctcgtaagttatataactc

SEQ ID NO: 789422 - DNA, 25 bp, Homo sapien
ttctctgcattggttgaactccatc

SEQ ID NO: 789423 - DNA, 25 bp, Homo sapien
gatcagatcaggtgaattcaagatg

SEQ ID NO: 789424 - DNA, 25 bp, Homo sapien
ggtaatttctcatcctagtactaac

SEQ ID NO: 789425 - DNA, 25 bp, Homo sapien
tgcttaggtgccaagatcagatcag

SEQ ID NO: 789426 - DNA, 25 bp, Homo sapien
gaattcaagatggtacggctataaa

SEQ ID NO: 789427 - DNA, 25 bp, Homo sapien
ctttctcttaggatatactgcagta

SEQ ID NO: 789428 - DNA, 25 bp, Homo sapien
tgcatggtcctttctcttaggatat

SEQ ID NO: 789429 - DNA, 25 bp, Homo sapien
tctcttaggatatactgcagtataa

SEQ ID NO: 789430 - DNA, 25 bp, Homo sapien
ggtcctttctcttaggatatactgc

SEQ ID NO: 789431 - DNA, 25 bp, Homo sapien
cacccaagcgagaagttggatgtct

SEQ ID NO: 789432 - DNA, 25 bp, Homo sapien
ctgtgcagatcatagcagcacccac

SEQ ID NO: 789433 - DNA, 25 bp, Homo sapien
acccacccaagcgagaagttggatg

SEQ ID NO: 789434 - DNA, 25 bp, Homo sapien
tgtgcagatcatagcagcacccacc

SEQ ID NO: 789435 - DNA, 25 bp, Homo sapien
cagtaatcaataatgagcagcaagg

SEQ ID NO: 789436 - DNA, 25 bp, Homo sapien
gtaacatcctgatttgattccagga

SEQ ID NO: 789437 - DNA, 25 bp, Homo sapien
cagagcagctggcaattacttggag

SEQ ID NO: 789438 - DNA, 25 bp, Homo sapien
agcagcaaggtcaggtggcattttt

SEQ ID NO: 789439 - DNA, 25 bp, Homo sapien
tttcattagtagtaatggaaagatt

SEQ ID NO: 789440 - DNA, 25 bp, Homo sapien
ccacggaaagcttcttttcattagt

SEQ ID NO: 789441 - DNA, 25 bp, Homo sapien
tcattagtagtaatggaaagattca

SEQ ID NO: 789442 - DNA, 25 bp, Homo sapien
cattagtagtaatggaaagattcat

SEQ ID NO: 789443 - DNA, 25 bp, Homo sapien
aatgactaagaacgagccctttgcc

SEQ ID NO: 789444 - DNA, 25 bp, Homo sapien
ttaatgactaagaacgagccctttg

SEQ ID NO: 789445 - DNA, 25 bp, Homo sapien
taatgactaagaacgagccctttgc

SEQ ID NO: 789446 - DNA, 25 bp, Homo sapien
ttctggcagtagatggcccatcttt

SEQ ID NO: 789447 - DNA, 25 bp, Homo sapien
actggtaagctgtaaggtacggcca

SEQ ID NO: 789448 - DNA, 25 bp, Homo sapien
acctaaagccaactggtaagctgta

SEQ ID NO: 789449 - DNA, 25 bp, Homo sapien
gatgtctgcttcttggccacctaaa

SEQ ID NO: 789450 - DNA, 25 bp, Homo sapien
tgccacattagatcctgcacactct

SEQ ID NO: 789451 - DNA, 25 bp, Homo sapien
caggtactcagtatccaggattatc

SEQ ID NO: 789452 - DNA, 25 bp, Homo sapien
ttcccttcaggtactcagtatccag

SEQ ID NO: 789453 - DNA, 25 bp, Homo sapien
aactgccacattagatcctgcacac

SEQ ID NO: 789454 - DNA, 25 bp, Homo sapien
taccacctttactaacaatatccat

SEQ ID NO: 789455 - DNA, 25 bp, Homo sapien
ttaccacctttactaacaatatcca

SEQ ID NO: 789456 - DNA, 25 bp, Homo sapien
ttagatggacaggaattgaaggagt

SEQ ID NO: 789457 - DNA, 25 bp, Homo sapien
tagatggacaggaattgaaggagtc

SEQ ID NO: 789458 - DNA, 25 bp, Homo sapien
agaatattgggttggcaaaggcggt

SEQ ID NO: 789459 - DNA, 25 bp, Homo sapien
gctttggtgcttctaggacctgtgt

SEQ ID NO: 789460 - DNA, 25 bp, Homo sapien
ctttggtgcttctaggacctgtgtc

SEQ ID NO: 789461 - DNA, 25 bp, Homo sapien
atcttttagagaaccagcaaggtct

SEQ ID NO: 789462 - DNA, 25 bp, Homo sapien
tggagcaccctattgaagtctccct

SEQ ID NO: 789463 - DNA, 25 bp, Homo sapien
gtttggagcaccctattgaagtctc

SEQ ID NO: 789464 - DNA, 25 bp, Homo sapien
ggagcaccctattgaagtctccctt

SEQ ID NO: 789465 - DNA, 25 bp, Homo sapien
ctctggtttggagcaccctattgaa

SEQ ID NO: 789466 - DNA, 25 bp, Homo sapien
gaccatccaaatccagaaaaaatta

SEQ ID NO: 789467 - DNA, 25 bp, Homo sapien
aatgaccatccaaatccagaaaaaa

SEQ ID NO: 789468 - DNA, 25 bp, Homo sapien
tgaccatccaaatccagaaaaaatt

SEQ ID NO: 789469 - DNA, 25 bp, Homo sapien
catccaaatccagaaaaaattaata

SEQ ID NO: 789470 - DNA, 25 bp, Homo sapien
tataaggcagccgtctccgtttctt

SEQ ID NO: 789471 - DNA, 25 bp, Homo sapien
gccttttctgatgagttaactgcca

SEQ ID NO: 789472 - DNA, 25 bp, Homo sapien
tacgagttaatgtccggacctctgt

SEQ ID NO: 789473 - DNA, 25 bp, Homo sapien
gatgtgggttcttctacctgcagga

SEQ ID NO: 789474 - DNA, 25 bp, Homo sapien
aaagctcatttctaatcttataata

SEQ ID NO: 789475 - DNA, 25 bp, Homo sapien
tcttataatagaagacaaagtatat

SEQ ID NO: 789476 - DNA, 25 bp, Homo sapien
aggaaatctggaaaagctcatttct

SEQ ID NO: 789477 - DNA, 25 bp, Homo sapien
aaatctggaaaagctcatttctaat

SEQ ID NO: 789478 - DNA, 25 bp, Homo sapien
gaatactcaagtcttccggtcagcc

SEQ ID NO: 789479 - DNA, 25 bp, Homo sapien
cagggctcccatgtataccaaaatt

SEQ ID NO: 789480 - DNA, 25 bp, Homo sapien
cagaaatacagttggtatacacagg

SEQ ID NO: 789481 - DNA, 25 bp, Homo sapien
tcatgaatactcaagtcttccggtc

SEQ ID NO: 789482 - DNA, 25 bp, Homo sapien
actatgaaggtgttataataaatta

SEQ ID NO: 789483 - DNA, 25 bp, Homo sapien
tcatttgactggataaactttacat

SEQ ID NO: 789484 - DNA, 25 bp, Homo sapien
atgaaggtgttataataaattattc

SEQ ID NO: 789485 - DNA, 25 bp, Homo sapien
aaattattctacatactcatttgac

SEQ ID NO: 789486 - DNA, 25 bp, Homo sapien
tagggaagctggctgaaacaaagga

SEQ ID NO: 789487 - DNA, 25 bp, Homo sapien
tgagagagaagtataaacgatcaac

SEQ ID NO: 789488 - DNA, 25 bp, Homo sapien
gtgttttaagggtcaccactgaaga

SEQ ID NO: 789489 - DNA, 25 bp, Homo sapien
tcaacaattgaggatagggagacta

SEQ ID NO: 789490 - DNA, 25 bp, Homo sapien
ggagactgggatccagctaccctcc

SEQ ID NO: 789491 - DNA, 25 bp, Homo sapien
atccagctaccctcccacacatggt

SEQ ID NO: 789492 - DNA, 25 bp, Homo sapien
actggagactgggatccagctaccc

SEQ ID NO: 789493 - DNA, 25 bp, Homo sapien
tccagctaccctcccacacatggta

SEQ ID NO: 789494 - DNA, 25 bp, Homo sapien
tttccactctttcaatttgatcttc

SEQ ID NO: 789495 - DNA, 25 bp, Homo sapien
tcctcagctgtcagcagacatctca

SEQ ID NO: 789496 - DNA, 25 bp, Homo sapien
cctcagctgtcagcagacatctcat

SEQ ID NO: 789497 - DNA, 25 bp, Homo sapien
tagaaaaggcctctacctatccagt

SEQ ID NO: 789498 - DNA, 25 bp, Homo sapien
ggcctctacctatccagtgaaagta

SEQ ID NO: 789499 - DNA, 25 bp, Homo sapien
cctctacctatccagtgaaagtatc

SEQ ID NO: 789500 - DNA, 25 bp, Homo sapien
tgtagaaaaggcctctacctatcca

SEQ ID NO: 789501 - DNA, 25 bp, Homo sapien
aaggtgctcaatggaggtgtttttt

SEQ ID NO: 789502 - DNA, 25 bp, Homo sapien
gtcgcaaggtgctcaatggaggtgt

SEQ ID NO: 789503 - DNA, 25 bp, Homo sapien
ctcaatggaggtgttttttgagcca

SEQ ID NO: 789504 - DNA, 25 bp, Homo sapien
ggtgctcaatggaggtgttttttga

SEQ ID NO: 789505 - DNA, 25 bp, Homo sapien
tgcctggtgcatttgacattcctct

SEQ ID NO: 789506 - DNA, 25 bp, Homo sapien
cttgcctggtgcatttgacattcct

SEQ ID NO: 789507 - DNA, 25 bp, Homo sapien
ggtgcatttgacattcctcttgcat

SEQ ID NO: 789508 - DNA, 25 bp, Homo sapien
cctggtgcatttgacattcctcttg

SEQ ID NO: 789509 - DNA, 25 bp, Homo sapien
cttgatctccatacaatgctgctgg

SEQ ID NO: 789510 - DNA, 25 bp, Homo sapien
gcagggaccttgtatattccctcag

SEQ ID NO: 789511 - DNA, 25 bp, Homo sapien
ttccctcagcttggagagaatcagt

SEQ ID NO: 789512 - DNA, 25 bp, Homo sapien
gctggatgaatatcaagagaggctc

SEQ ID NO: 789513 - DNA, 25 bp, Homo sapien
ctgagattagagtttcttctgtccc

SEQ ID NO: 789514 - DNA, 25 bp, Homo sapien
tctgtttctttcatccaggcagctt

SEQ ID NO: 789515 - DNA, 25 bp, Homo sapien
tgtccccatcttcctgtatattttc

SEQ ID NO: 789516 - DNA, 25 bp, Homo sapien
tcatccaggcagcttgaagcagcat

SEQ ID NO: 789517 - DNA, 25 bp, Homo sapien
gctttcaacgttgttgatgatttta

SEQ ID NO: 789518 - DNA, 25 bp, Homo sapien
ttttagtacaaatctctccaagtga

SEQ ID NO: 789519 - DNA, 25 bp, Homo sapien
tgggtaaagctttcaacgttgttga

SEQ ID NO: 789520 - DNA, 25 bp, Homo sapien
atctctccaagtgacagtacttcat

SEQ ID NO: 789521 - DNA, 25 bp, Homo sapien
ttcagggttttctatgtaaagattc

SEQ ID NO: 789522 - DNA, 25 bp, Homo sapien
gggttttctatgtaaagattcatac

SEQ ID NO: 789523 - DNA, 25 bp, Homo sapien
gttttctatgtaaagattcatactg

SEQ ID NO: 789524 - DNA, 25 bp, Homo sapien
cagggttttctatgtaaagattcat

SEQ ID NO: 789525 - DNA, 25 bp, Homo sapien
tccatggatggctatttggaatgat

SEQ ID NO: 789526 - DNA, 25 bp, Homo sapien
gctatttggaatgatgttaagaaga

SEQ ID NO: 789527 - DNA, 25 bp, Homo sapien
gatggctatttggaatgatgttaag

SEQ ID NO: 789528 - DNA, 25 bp, Homo sapien
tggaatgatgttaagaagaggcagt

SEQ ID NO: 789529 - DNA, 25 bp, Homo sapien
agatgagggttgcagactgagccac

SEQ ID NO: 789530 - DNA, 25 bp, Homo sapien
gaactcacttcatagcagtggcagg

SEQ ID NO: 789531 - DNA, 25 bp, Homo sapien
aaatgatttttggacctgctaccag

SEQ ID NO: 789532 - DNA, 25 bp, Homo sapien
caggatttgattgctgcattgtagc

SEQ ID NO: 789533 - DNA, 25 bp, Homo sapien
gtactagaaggtacatgttcaggac

SEQ ID NO: 789534 - DNA, 25 bp, Homo sapien
ttgtactagaaggtacatgttcagg

SEQ ID NO: 789535 - DNA, 25 bp, Homo sapien
tactagaaggtacatgttcaggaca

SEQ ID NO: 789536 - DNA, 25 bp, Homo sapien
tgtactagaaggtacatgttcagga

SEQ ID NO: 789537 - DNA, 25 bp, Homo sapien
ttggcagagaagaatcccctgctct

SEQ ID NO: 789538 - DNA, 25 bp, Homo sapien
aaggtttggcagagaagaatcccct

SEQ ID NO: 789539 - DNA, 25 bp, Homo sapien
ggcagagaagaatcccctgctctac

SEQ ID NO: 789540 - DNA, 25 bp, Homo sapien
ggtttggcagagaagaatcccctgc

SEQ ID NO: 789541 - DNA, 25 bp, Homo sapien
tgctcttgtgtatagcccattgaca

SEQ ID NO: 789542 - DNA, 25 bp, Homo sapien
tcagggccacaattgcttgctcttg

SEQ ID NO: 789543 - DNA, 25 bp, Homo sapien
tggactgaccttttacaagtgtact

SEQ ID NO: 789544 - DNA, 25 bp, Homo sapien
tctgtcaggattgctgaaaatggct

SEQ ID NO: 789545 - DNA, 25 bp, Homo sapien
gaggagcggggtgctcaaccacagc

SEQ ID NO: 789546 - DNA, 25 bp, Homo sapien
aggagcggggtgctcaaccacagcc

SEQ ID NO: 789547 - DNA, 25 bp, Homo sapien
tcttggggatgttccccagaacttg

SEQ ID NO: 789548 - DNA, 25 bp, Homo sapien
gaagactgaggagtcctagtagtac

SEQ ID NO: 789549 - DNA, 25 bp, Homo sapien
ggctaatttgctgcagcaattaagg

SEQ ID NO: 789550 - DNA, 25 bp, Homo sapien
cctatctgttataacaatgctggaa

SEQ ID NO: 789551 - DNA, 25 bp, Homo sapien
taaggattctcttgacctatctgtt

SEQ ID NO: 789552 - DNA, 25 bp, Homo sapien
catgtgaccacttccaactttgcaa

SEQ ID NO: 789553 - DNA, 25 bp, Homo sapien
tatcatcatagctgttggctttaac

SEQ ID NO: 789554 - DNA, 25 bp, Homo sapien
tgtgttatcatcatagctgttggct

SEQ ID NO: 789555 - DNA, 25 bp, Homo sapien
gttatcatcatagctgttggcttta

SEQ ID NO: 789556 - DNA, 25 bp, Homo sapien
gtgttatcatcatagctgttggctt

SEQ ID NO: 789557 - DNA, 25 bp, Homo sapien
atttccagtgacctgacgattgacc

SEQ ID NO: 789558 - DNA, 25 bp, Homo sapien
atgcggcatgcattccaggtgaaaa

SEQ ID NO: 789559 - DNA, 25 bp, Homo sapien
tgaccagggtggtattgcttaaaat

SEQ ID NO: 789560 - DNA, 25 bp, Homo sapien
ccatgtgtgaggcaatgcggcatgc

SEQ ID NO: 789561 - DNA, 25 bp, Homo sapien
tattaaaagggtcatatgctgcttc

SEQ ID NO: 789562 - DNA, 25 bp, Homo sapien
attaaaagggtcatatgctgcttct

SEQ ID NO: 789563 - DNA, 25 bp, Homo sapien
tgcaattattccgcaaaaatctctt

SEQ ID NO: 789564 - DNA, 25 bp, Homo sapien
tgtgcaattattccgcaaaaatctc

SEQ ID NO: 789565 - DNA, 25 bp, Homo sapien
gcataggcggcgcaaacagctgccg

SEQ ID NO: 789566 - DNA, 25 bp, Homo sapien
ccccagggaattggcagcataggcg

SEQ ID NO: 789567 - DNA, 25 bp, Homo sapien
caagtcccagttgcggggacatctc

SEQ ID NO: 789568 - DNA, 25 bp, Homo sapien
gtcgcatcggcttctctctcgagtc

SEQ ID NO: 789569 - DNA, 25 bp, Homo sapien
gcaggaaagagaaggtccactaagt

SEQ ID NO: 789570 - DNA, 25 bp, Homo sapien
aagcaggaaagagaaggtccactaa

SEQ ID NO: 789571 - DNA, 25 bp, Homo sapien
ctaagcaggaaagagaaggtccact

SEQ ID NO: 789572 - DNA, 25 bp, Homo sapien
caggaaagagaaggtccactaagtt

SEQ ID NO: 789573 - DNA, 25 bp, Homo sapien
tactgaagagtgttaatgttctccc

SEQ ID NO: 789574 - DNA, 25 bp, Homo sapien
ctccctcggaaatggtaaatgacgg

SEQ ID NO: 789575 - DNA, 25 bp, Homo sapien
gaagagtgttaatgttctccctcgg

SEQ ID NO: 789576 - DNA, 25 bp, Homo sapien
tgttaatgttctccctcggaaatgg

SEQ ID NO: 789577 - DNA, 25 bp, Homo sapien
cttctctaaactggccgtaagtctg

SEQ ID NO: 789578 - DNA, 25 bp, Homo sapien
gagtaatcaacttctctaaactggc

SEQ ID NO: 789579 - DNA, 25 bp, Homo sapien
tcaacttctctaaactggccgtaag

SEQ ID NO: 789580 - DNA, 25 bp, Homo sapien
tatttgagagtaatcaacttctcta

SEQ ID NO: 789581 - DNA, 25 bp, Homo sapien
agtaatgatgcagtatttggtccat

SEQ ID NO: 789582 - DNA, 25 bp, Homo sapien
ctgagtaatgatgcagtatttggtc

SEQ ID NO: 789583 - DNA, 25 bp, Homo sapien
attttctgagtaatgatgcagtatt

SEQ ID NO: 789584 - DNA, 25 bp, Homo sapien
ttctgagtaatgatgcagtatttgg

SEQ ID NO: 789585 - DNA, 25 bp, Homo sapien
gctctgccagtagccagagccctga

SEQ ID NO: 789586 - DNA, 25 bp, Homo sapien
cagcatggctctgccagtagccaga

SEQ ID NO: 789587 - DNA, 25 bp, Homo sapien
atggctctgccagtagccagagccc

SEQ ID NO: 789588 - DNA, 25 bp, Homo sapien
gccagtagccagagccctgatctct

SEQ ID NO: 789589 - DNA, 25 bp, Homo sapien
gatatttgacccacactcttgacaa

SEQ ID NO: 789590 - DNA, 25 bp, Homo sapien
actgccgaggagcaagagtgccatc

SEQ ID NO: 789591 - DNA, 25 bp, Homo sapien
catacagaaggctttgaatctcttc

SEQ ID NO: 789592 - DNA, 25 bp, Homo sapien
gccatctgctggttaacaacattga

SEQ ID NO: 789593 - DNA, 25 bp, Homo sapien
agacccctgtgctcggaagccacag

SEQ ID NO: 789594 - DNA, 25 bp, Homo sapien
gttggaaagcaacacttcttatgat

SEQ ID NO: 789595 - DNA, 25 bp, Homo sapien
aaagcaacacttcttatgatgcaag

SEQ ID NO: 789596 - DNA, 25 bp, Homo sapien
ggaaagcaacacttcttatgatgca

SEQ ID NO: 789597 - DNA, 25 bp, Homo sapien
gctgttggaaagcaacacttcttat

SEQ ID NO: 789598 - DNA, 25 bp, Homo sapien
tgcacaacaatgcttgagcccagtg

SEQ ID NO: 789599 - DNA, 25 bp, Homo sapien
tcataggagcatggaccctgctgag

SEQ ID NO: 789600 - DNA, 25 bp, Homo sapien
tacggatacataagacccacacgag

SEQ ID NO: 789601 - DNA, 25 bp, Homo sapien
cacctgggagttcatgagaaatacg

SEQ ID NO: 789602 - DNA, 25 bp, Homo sapien
tacgaatgctcacgggattgtttgg

SEQ ID NO: 789603 - DNA, 25 bp, Homo sapien
tgattgcaaattttctcaccaggga

SEQ ID NO: 789604 - DNA, 25 bp, Homo sapien
tactaccaggagacgggtaaccatg

SEQ ID NO: 789605 - DNA, 25 bp, Homo sapien
ataaagccagtgtttcggaaccact

SEQ ID NO: 789606 - DNA, 25 bp, Homo sapien
gaaatgttaaactgcccatgtggta

SEQ ID NO: 789607 - DNA, 25 bp, Homo sapien
tggagagccttaaagatcttgtagg

SEQ ID NO: 789608 - DNA, 25 bp, Homo sapien
tgttcatctcagtaaagtatgctct

SEQ ID NO: 789609 - DNA, 25 bp, Homo sapien
taagaaagaatggtcgtatcctcaa

SEQ ID NO: 789610 - DNA, 25 bp, Homo sapien
gcatctttagcacagttcataacct

SEQ ID NO: 789611 - DNA, 25 bp, Homo sapien
atttagtctgatagtacaaaaggct

SEQ ID NO: 789612 - DNA, 25 bp, Homo sapien
tatataaagtgatacacagtacatg

SEQ ID NO: 789613 - DNA, 25 bp, Homo sapien
tgttactcagagaatatatgggatt

SEQ ID NO: 789614 - DNA, 25 bp, Homo sapien
caaatcgtctgcaaacattgtattg

SEQ ID NO: 789615 - DNA, 25 bp, Homo sapien
gagggagtgtatctagcagtcatta

SEQ ID NO: 789616 - DNA, 25 bp, Homo sapien
gtagtaggctattcttgcacagttt

SEQ ID NO: 789617 - DNA, 25 bp, Homo sapien
gagagaacatgctattcccatgtag

SEQ ID NO: 789618 - DNA, 25 bp, Homo sapien
atcaggactgtactaacaaagctat

SEQ ID NO: 789619 - DNA, 25 bp, Homo sapien
aagctattttcacctgaagtatcat

SEQ ID NO: 789620 - DNA, 25 bp, Homo sapien
gctattttcacctgaagtatcattc

SEQ ID NO: 789621 - DNA, 25 bp, Homo sapien
ggactgtactaacaaagctattttc

SEQ ID NO: 789622 - DNA, 25 bp, Homo sapien
caaactctttgactgcaaaatccga

SEQ ID NO: 789623 - DNA, 25 bp, Homo sapien
cagggaatgtgggatcctcgatgtc

SEQ ID NO: 789624 - DNA, 25 bp, Homo sapien
ggaatgtgggatcctcgatgtcctt

SEQ ID NO: 789625 - DNA, 25 bp, Homo sapien
aaatatatcccatttgacagccatg

SEQ ID NO: 789626 - DNA, 25 bp, Homo sapien
catattacatgacataagacctgga

SEQ ID NO: 789627 - DNA, 25 bp, Homo sapien
cagaggactggcaatccagcagagt

SEQ ID NO: 789628 - DNA, 25 bp, Homo sapien
cagatacagtagctaaggcaggaac

SEQ ID NO: 789629 - DNA, 25 bp, Homo sapien
gagatactttagattctgggcaatc

SEQ ID NO: 789630 - DNA, 25 bp, Homo sapien
aaggagaccttatggacttcaaagc

SEQ ID NO: 789631 - DNA, 25 bp, Homo sapien
ttattgagtaattgtgaaggagacc

SEQ ID NO: 789632 - DNA, 25 bp, Homo sapien
tttctcattgatacattagtgccag

SEQ ID NO: 789633 - DNA, 25 bp, Homo sapien
gctctacatcctagcaaaacttcat

SEQ ID NO: 789634 - DNA, 25 bp, Homo sapien
tctgctgaaaaaggcactaagaact

SEQ ID NO: 789635 - DNA, 25 bp, Homo sapien
caggctgatgtagagtctgctgaaa

SEQ ID NO: 789636 - DNA, 25 bp, Homo sapien
ggcactaagaactttatttaaggca

SEQ ID NO: 789637 - DNA, 25 bp, Homo sapien
tcatgaaccaaaactgtcccaagaa

SEQ ID NO: 789638 - DNA, 25 bp, Homo sapien
catatggttgatgttgtggcaaatc

SEQ ID NO: 789639 - DNA, 25 bp, Homo sapien
catgtctacatgaagtgtagcagaa

SEQ ID NO: 789640 - DNA, 25 bp, Homo sapien
atcatgtctacatgaagtgtagcag

SEQ ID NO: 789641 - DNA, 25 bp, Homo sapien
tgttgtggcaaatcatgtctacatg

SEQ ID NO: 789642 - DNA, 25 bp, Homo sapien
ctcataactcaatgcgtattcctca

SEQ ID NO: 789643 - DNA, 25 bp, Homo sapien
aatcgtttatacacgtaattgccaa

SEQ ID NO: 789644 - DNA, 25 bp, Homo sapien
tattagcaactaatcgtttatacac

SEQ ID NO: 789645 - DNA, 25 bp, Homo sapien
cctcaattttaagaatactattagc

SEQ ID NO: 789646 - DNA, 25 bp, Homo sapien
tcaaaggcttacgcaaggtgtgaca

SEQ ID NO: 789647 - DNA, 25 bp, Homo sapien
caaaggcttacgcaaggtgtgacat

SEQ ID NO: 789648 - DNA, 25 bp, Homo sapien
aaggcttacgcaaggtgtgacatct

SEQ ID NO: 789649 - DNA, 25 bp, Homo sapien
aaaggcttacgcaaggtgtgacatc

SEQ ID NO: 789650 - DNA, 25 bp, Homo sapien
tggtaaagacaaattgttgtcaatg

SEQ ID NO: 789651 - DNA, 25 bp, Homo sapien
catgatgagttaaagatcaaaaagc

SEQ ID NO: 789652 - DNA, 25 bp, Homo sapien
taaagatcaaaaagccctcaaattc

SEQ ID NO: 789653 - DNA, 25 bp, Homo sapien
tctaatgtaatatttggtaaagaca

SEQ ID NO: 789654 - DNA, 25 bp, Homo sapien
tcttcaaacttgaggacttccttgc

SEQ ID NO: 789655 - DNA, 25 bp, Homo sapien
tcatgaccaggccttgttgaccatg

SEQ ID NO: 789656 - DNA, 25 bp, Homo sapien
gctaatcttcttgtcacctaaagcc

SEQ ID NO: 789657 - DNA, 25 bp, Homo sapien
tcaatgactcttttagctgggccct

SEQ ID NO: 789658 - DNA, 25 bp, Homo sapien
caactgtatttgctactgaggttca

SEQ ID NO: 789659 - DNA, 25 bp, Homo sapien
gatgggcagaaatcgagtactttag

SEQ ID NO: 789660 - DNA, 25 bp, Homo sapien
catagcatatagaaggatgagccca

SEQ ID NO: 789661 - DNA, 25 bp, Homo sapien
tgggcttggacaaaaaagactaggc

SEQ ID NO: 789662 - DNA, 25 bp, Homo sapien
ctgtgacctcctgtagcctcatgca

SEQ ID NO: 789663 - DNA, 25 bp, Homo sapien
acctgtgacctcctgtagcctcatg

SEQ ID NO: 789664 - DNA, 25 bp, Homo sapien
tgtgacctcctgtagcctcatgcat

SEQ ID NO: 789665 - DNA, 25 bp, Homo sapien
aacctgtgacctcctgtagcctcat

SEQ ID NO: 789666 - DNA, 25 bp, Homo sapien
ttttaatgcttcatcgctgattgtg

SEQ ID NO: 789667 - DNA, 25 bp, Homo sapien
gtgctgtgcaattggctgtaaccaa

SEQ ID NO: 789668 - DNA, 25 bp, Homo sapien
accaatctgaccctgcttgatccat

SEQ ID NO: 789669 - DNA, 25 bp, Homo sapien
ggtcataattagagatgcagctggg

SEQ ID NO: 789670 - DNA, 25 bp, Homo sapien
cagtcaggtgagcatagttaatctc

SEQ ID NO: 789671 - DNA, 25 bp, Homo sapien
caggtgagcatagttaatctcagag

SEQ ID NO: 789672 - DNA, 25 bp, Homo sapien
ggtgagcatagttaatctcagagaa

SEQ ID NO: 789673 - DNA, 25 bp, Homo sapien
agggttcagtcaggtgagcatagtt

SEQ ID NO: 789674 - DNA, 25 bp, Homo sapien
tgtatgatacctatctgttttgctg

SEQ ID NO: 789675 - DNA, 25 bp, Homo sapien
agtgtatgatacctatctgttttgc

SEQ ID NO: 789676 - DNA, 25 bp, Homo sapien
aaagtgtatgatacctatctgtttt

SEQ ID NO: 789677 - DNA, 25 bp, Homo sapien
gtatgatacctatctgttttgctgg

SEQ ID NO: 789678 - DNA, 25 bp, Homo sapien
catctgccaacatcagtgtttccaa

SEQ ID NO: 789679 - DNA, 25 bp, Homo sapien
gccaacatcagtgtttccaattcat

SEQ ID NO: 789680 - DNA, 25 bp, Homo sapien
tttttcccaatactgaacatctgcc

SEQ ID NO: 789681 - DNA, 25 bp, Homo sapien
ctgaacatctgccaacatcagtgtt

SEQ ID NO: 789682 - DNA, 25 bp, Homo sapien
tccccatggtgctgttgtaaacata

SEQ ID NO: 789683 - DNA, 25 bp, Homo sapien
tttctgctccatcgctgccaaaatc

SEQ ID NO: 789684 - DNA, 25 bp, Homo sapien
tgttacttcgttttccccatggtgc

SEQ ID NO: 789685 - DNA, 25 bp, Homo sapien
aatccttctctgaaaacttcctgct

SEQ ID NO: 789686 - DNA, 25 bp, Homo sapien
gtcatcaggatcagaagtattaacg

SEQ ID NO: 789687 - DNA, 25 bp, Homo sapien
tgccttcatcaggtcttgaaaggaa

SEQ ID NO: 789688 - DNA, 25 bp, Homo sapien
gaagtattaacggtatgagtacaaa

SEQ ID NO: 789689 - DNA, 25 bp, Homo sapien
acctcaacgaggcttcaattaacat

SEQ ID NO: 789690 - DNA, 25 bp, Homo sapien
caaccagtaatattaagaagtctgt

SEQ ID NO: 789691 - DNA, 25 bp, Homo sapien
atccatgctttggaggcacaggcac

SEQ ID NO: 789692 - DNA, 25 bp, Homo sapien
gtctgttgacaactatacttgatgt

SEQ ID NO: 789693 - DNA, 25 bp, Homo sapien
ttacaatattggagctatcaaatcc

SEQ ID NO: 789694 - DNA, 25 bp, Homo sapien
caacagcaatctatccagcagtggg

SEQ ID NO: 789695 - DNA, 25 bp, Homo sapien
cttgtagctcatatcaaagctgtaa

SEQ ID NO: 789696 - DNA, 25 bp, Homo sapien
tagccagcaaaatctaatggctccc

SEQ ID NO: 789697 - DNA, 25 bp, Homo sapien
ctccctctggtcaaaagctgtcaac

SEQ ID NO: 789698 - DNA, 25 bp, Homo sapien
tattttcagtgaccatcaggcttct

SEQ ID NO: 789699 - DNA, 25 bp, Homo sapien
ggcttctagactgtgatcagttctg

SEQ ID NO: 789700 - DNA, 25 bp, Homo sapien
gatcagttctgtcagcactccgaga

SEQ ID NO: 789701 - DNA, 25 bp, Homo sapien
gtcagcactccgagaaaagcaccag

SEQ ID NO: 789702 - DNA, 25 bp, Homo sapien
cagacttctaatactcaggggagag

SEQ ID NO: 789703 - DNA, 25 bp, Homo sapien
tttctggtttatcatgttgggatga

SEQ ID NO: 789704 - DNA, 25 bp, Homo sapien
tatcatgttgggatgatgtagcaca

SEQ ID NO: 789705 - DNA, 25 bp, Homo sapien
gatgtagcacaatcagccacaggag

SEQ ID NO: 789706 - DNA, 25 bp, Homo sapien
gaggttagctatgccctgggacact

SEQ ID NO: 789707 - DNA, 25 bp, Homo sapien
tgtacatgcgtatagattccccaag

SEQ ID NO: 789708 - DNA, 25 bp, Homo sapien
ggtggtctcaatcacacggacaggt

SEQ ID NO: 789709 - DNA, 25 bp, Homo sapien
tagacagcttagcactgcgcagaga

SEQ ID NO: 789710 - DNA, 25 bp, Homo sapien
ttcagattgctttggtaagagcagt

SEQ ID NO: 789711 - DNA, 25 bp, Homo sapien
tactgcaaagattatcaatggtatc

SEQ ID NO: 789712 - DNA, 25 bp, Homo sapien
tttcagattgctttggtaagagcag

SEQ ID NO: 789713 - DNA, 25 bp, Homo sapien
catacagatatttaatgcacgtgtg

SEQ ID NO: 789714 - DNA, 25 bp, Homo sapien
gattaacttagaaccttgcctcata

SEQ ID NO: 789715 - DNA, 25 bp, Homo sapien
caaatatttgaataggcagcgcacc

SEQ ID NO: 789716 - DNA, 25 bp, Homo sapien
cataaagctacatcttagaatgaaa

SEQ ID NO: 789717 - DNA, 25 bp, Homo sapien
aagacttagggcttgcatcatctaa

SEQ ID NO: 789718 - DNA, 25 bp, Homo sapien
tgcacccatgggcttaacaccatgt

SEQ ID NO: 789719 - DNA, 25 bp, Homo sapien
ccaggtgcatagtgcaggttgccag

SEQ ID NO: 789720 - DNA, 25 bp, Homo sapien
atgggctggtgctgattgtctgcag

SEQ ID NO: 789721 - DNA, 25 bp, Homo sapien
tgatgaaatttaaccgttctactga

SEQ ID NO: 789722 - DNA, 25 bp, Homo sapien
tgaaatttaaccgttctactgagcc

SEQ ID NO: 789723 - DNA, 25 bp, Homo sapien
aaatagttatttgggtagttgatga

SEQ ID NO: 789724 - DNA, 25 bp, Homo sapien
ttaaccgttctactgagccatccat

SEQ ID NO: 789725 - DNA, 25 bp, Homo sapien
ttttcatttgatggctccggacctt

SEQ ID NO: 789726 - DNA, 25 bp, Homo sapien
tttttcatttgatggctccggacct

SEQ ID NO: 789727 - DNA, 25 bp, Homo sapien
catttcaacatgagactttggggga

SEQ ID NO: 789728 - DNA, 25 bp, Homo sapien
aacatgagactttgggggacaaata

SEQ ID NO: 789729 - DNA, 25 bp, Homo sapien
tatccaaaccatatccttcttcttc

SEQ ID NO: 789730 - DNA, 25 bp, Homo sapien
tgagactttgggggacaaatatcca

SEQ ID NO: 789731 - DNA, 25 bp, Homo sapien
tgtgaacacttaatgaaatacttat

SEQ ID NO: 789732 - DNA, 25 bp, Homo sapien
tgatgtgaacacttaatgaaatact

SEQ ID NO: 789733 - DNA, 25 bp, Homo sapien
tgtttcttgatgtgaacacttaatg

SEQ ID NO: 789734 - DNA, 25 bp, Homo sapien
tcttgatgtgaacacttaatgaaat

SEQ ID NO: 789735 - DNA, 25 bp, Homo sapien
cagtagaggatttgaaacgaacaaa

SEQ ID NO: 789736 - DNA, 25 bp, Homo sapien
tcagtagaggatttgaaacgaacaa

SEQ ID NO: 789737 - DNA, 25 bp, Homo sapien
tttcagtagaggatttgaaacgaac

SEQ ID NO: 789738 - DNA, 25 bp, Homo sapien
tttttcagtagaggatttgaaacga

SEQ ID NO: 789739 - DNA, 25 bp, Homo sapien
taccagtcctggtgttttcaagtac

SEQ ID NO: 789740 - DNA, 25 bp, Homo sapien
ccagtcctggtgttttcaagtacat

SEQ ID NO: 789741 - DNA, 25 bp, Homo sapien
accagtcctggtgttttcaagtaca

SEQ ID NO: 789742 - DNA, 25 bp, Homo sapien
tttggattctagttggtagtttctc

SEQ ID NO: 789743 - DNA, 25 bp, Homo sapien
tccctgtgtgatctcttataggttc

SEQ ID NO: 789744 - DNA, 25 bp, Homo sapien
ctgtgtgatctcttataggttcctc

SEQ ID NO: 789745 - DNA, 25 bp, Homo sapien
ttggattctagttggtagtttctcc

SEQ ID NO: 789746 - DNA, 25 bp, Homo sapien
gaggacagtttggtgcacagagaaa

SEQ ID NO: 789747 - DNA, 25 bp, Homo sapien
gcactttcattttgacatacactga

SEQ ID NO: 789748 - DNA, 25 bp, Homo sapien
gcattctttagtgccagcatgaggc

SEQ ID NO: 789749 - DNA, 25 bp, Homo sapien
tgtggaggaagatcatcgatatcag

SEQ ID NO: 789750 - DNA, 25 bp, Homo sapien
tttacctttaattctggccgtgatc

SEQ ID NO: 789751 - DNA, 25 bp, Homo sapien
gcttaactttgttgaggatctcagt

SEQ ID NO: 789752 - DNA, 25 bp, Homo sapien
tctggccgtgatcactttattctgc

SEQ ID NO: 789753 - DNA, 25 bp, Homo sapien
tctgcttaactttgttgaggatctc

SEQ ID NO: 789754 - DNA, 25 bp, Homo sapien
gtccttcagcctttctcctgggcat

SEQ ID NO: 789755 - DNA, 25 bp, Homo sapien
atccttcaccttgactttatgtcct

SEQ ID NO: 789756 - DNA, 25 bp, Homo sapien
tctcttttctgcaggcttattcccc

SEQ ID NO: 789757 - DNA, 25 bp, Homo sapien
tcaccttgactttatgtccttcagc

SEQ ID NO: 789758 - DNA, 25 bp, Homo sapien
tgtgcaaaatcagggaatctctcct

SEQ ID NO: 789759 - DNA, 25 bp, Homo sapien
cctaaaataccaatgaagtgttctg

SEQ ID NO: 789760 - DNA, 25 bp, Homo sapien
ttttgtgccaaggtgaacgtgtgtg

SEQ ID NO: 789761 - DNA, 25 bp, Homo sapien
caaggtgaacgtgtgtgcaaaatca

SEQ ID NO: 789762 - DNA, 25 bp, Homo sapien
tatccactctggcatctgctggctt

SEQ ID NO: 789763 - DNA, 25 bp, Homo sapien
ctggcatctgctggctttgcccgca

SEQ ID NO: 789764 - DNA, 25 bp, Homo sapien
cctatccactctggcatctgctggc

SEQ ID NO: 789765 - DNA, 25 bp, Homo sapien
actctggcatctgctggctttgccc

SEQ ID NO: 789766 - DNA, 25 bp, Homo sapien
aaaacacacactgactagagcacat

SEQ ID NO: 789767 - DNA, 25 bp, Homo sapien
cactgactagagcacatccataggg

SEQ ID NO: 789768 - DNA, 25 bp, Homo sapien
ctgactagagcacatccatagggag

SEQ ID NO: 789769 - DNA, 25 bp, Homo sapien
cacacactgactagagcacatccat

SEQ ID NO: 789770 - DNA, 25 bp, Homo sapien
tttcccagcttcccccacattggag

SEQ ID NO: 789771 - DNA, 25 bp, Homo sapien
agatgccagcgaagttttttaaagg

SEQ ID NO: 789772 - DNA, 25 bp, Homo sapien
cagagatgccagcgaagttttttaa

SEQ ID NO: 789773 - DNA, 25 bp, Homo sapien
tcacagagatgccagcgaagttttt

SEQ ID NO: 789774 - DNA, 25 bp, Homo sapien
cacagagatgccagcgaagtttttt

SEQ ID NO: 789775 - DNA, 25 bp, Homo sapien
ccataagaccccaggaattgggcag

SEQ ID NO: 789776 - DNA, 25 bp, Homo sapien
ctgccataagaccccaggaattggg

SEQ ID NO: 789777 - DNA, 25 bp, Homo sapien
taagaccccaggaattgggcagcat

SEQ ID NO: 789778 - DNA, 25 bp, Homo sapien
cataagaccccaggaattgggcagc

SEQ ID NO: 789779 - DNA, 25 bp, Homo sapien
cttcggcggcgtccacgggcagaaa

SEQ ID NO: 789780 - DNA, 25 bp, Homo sapien
ggcgtccacgggcagaaaggtgttc

SEQ ID NO: 789781 - DNA, 25 bp, Homo sapien
ttcttcggcggcgtccacgggcaga

SEQ ID NO: 789782 - DNA, 25 bp, Homo sapien
cggcggcgtccacgggcagaaaggt

SEQ ID NO: 789783 - DNA, 25 bp, Homo sapien
tccatgagcgttccccattgctcaa

SEQ ID NO: 789784 - DNA, 25 bp, Homo sapien
gactctcattggttgtttcaaagct

SEQ ID NO: 789785 - DNA, 25 bp, Homo sapien
ttaccacacagtccatgagcgttcc

SEQ ID NO: 789786 - DNA, 25 bp, Homo sapien
aaaatggctcctcagactctcattg

SEQ ID NO: 789787 - DNA, 25 bp, Homo sapien
tatctttttcacagttaagtgggca

SEQ ID NO: 789788 - DNA, 25 bp, Homo sapien
atatctttttcacagttaagtgggc

SEQ ID NO: 789789 - DNA, 25 bp, Homo sapien
atctttttcacagttaagtgggcac

SEQ ID NO: 789790 - DNA, 25 bp, Homo sapien
aaatatctttttcacagttaagtgg

SEQ ID NO: 789791 - DNA, 25 bp, Homo sapien
atcttatccacagagtcatggtcgt

SEQ ID NO: 789792 - DNA, 25 bp, Homo sapien
tctcttaggtgatgttctttggtgt

SEQ ID NO: 789793 - DNA, 25 bp, Homo sapien
gacaatcttatccacagagtcatgg

SEQ ID NO: 789794 - DNA, 25 bp, Homo sapien
caatcttatccacagagtcatggtc

SEQ ID NO: 789795 - DNA, 25 bp, Homo sapien
ctttggctggatgaagtactcgcca

SEQ ID NO: 789796 - DNA, 25 bp, Homo sapien
gatgaagtactcgccatctcttgct

SEQ ID NO: 789797 - DNA, 25 bp, Homo sapien
tggctggatgaagtactcgccatct

SEQ ID NO: 789798 - DNA, 25 bp, Homo sapien
gctggatgaagtactcgccatctct

SEQ ID NO: 789799 - DNA, 25 bp, Homo sapien
caccatatccaccagcaccacggct

SEQ ID NO: 789800 - DNA, 25 bp, Homo sapien
accatatccaccagcaccacggctg

SEQ ID NO: 789801 - DNA, 25 bp, Homo sapien
gccaccatatccaccagcaccacgg

SEQ ID NO: 789802 - DNA, 25 bp, Homo sapien
catatccaccagcaccacggctgcc

SEQ ID NO: 789803 - DNA, 25 bp, Homo sapien
gcttctgcctccaaaatttcctccc

SEQ ID NO: 789804 - DNA, 25 bp, Homo sapien
cgccataggggccagagcttctgcc

SEQ ID NO: 789805 - DNA, 25 bp, Homo sapien
caaaatttcctcccttcatgggtct

SEQ ID NO: 789806 - DNA, 25 bp, Homo sapien
tcatgggtctaaaatttgaagactg

SEQ ID NO: 789807 - DNA, 25 bp, Homo sapien
ccttggttttgcaaagtattgcctc

SEQ ID NO: 789808 - DNA, 25 bp, Homo sapien
ttggttttgcaaagtattgcctcca

SEQ ID NO: 789809 - DNA, 25 bp, Homo sapien
caccttggttttgcaaagtattgcc

SEQ ID NO: 789810 - DNA, 25 bp, Homo sapien
gccaccttggttttgcaaagtattg

SEQ ID NO: 789811 - DNA, 25 bp, Homo sapien
cacaaatctcttgtaacctgtagct

SEQ ID NO: 789812 - DNA, 25 bp, Homo sapien
tcacaaatctcttgtaacctgtagc

SEQ ID NO: 789813 - DNA, 25 bp, Homo sapien
tggctgagttcacaaatctcttgta

SEQ ID NO: 789814 - DNA, 25 bp, Homo sapien
gagttcacaaatctcttgtaacctg

SEQ ID NO: 789815 - DNA, 25 bp, Homo sapien
tttacactttccgcagaatagaaat

SEQ ID NO: 789816 - DNA, 25 bp, Homo sapien
tacactttccgcagaatagaaatta

SEQ ID NO: 789817 - DNA, 25 bp, Homo sapien
cactttccgcagaatagaaattaaa

SEQ ID NO: 789818 - DNA, 25 bp, Homo sapien
acactttccgcagaatagaaattaa

SEQ ID NO: 789819 - DNA, 25 bp, Homo sapien
tgtgcaattatctccaattattgaa

SEQ ID NO: 789820 - DNA, 25 bp, Homo sapien
ttaaattctagctctttcttgcaag

SEQ ID NO: 789821 - DNA, 25 bp, Homo sapien
aattctagctctttcttgcaagtca

SEQ ID NO: 789822 - DNA, 25 bp, Homo sapien
aaaacaaattactgttgtgcaatta

SEQ ID NO: 789823 - DNA, 25 bp, Homo sapien
tttatgctgctaaatagaatcccgc

SEQ ID NO: 789824 - DNA, 25 bp, Homo sapien
taatttgcaaaagccacaacagtag

SEQ ID NO: 789825 - DNA, 25 bp, Homo sapien
cacattattgacttttggaaaccaa

SEQ ID NO: 789826 - DNA, 25 bp, Homo sapien
tccaaagagctcaaaacactacatc

SEQ ID NO: 789827 - DNA, 25 bp, Homo sapien
ataatagtaggtggtgccaagatca

SEQ ID NO: 789828 - DNA, 25 bp, Homo sapien
ggtgccaagatcaataccaattgca

SEQ ID NO: 789829 - DNA, 25 bp, Homo sapien
tgccaagatcaataccaattgcagg

SEQ ID NO: 789830 - DNA, 25 bp, Homo sapien
gtggtgccaagatcaataccaattg

SEQ ID NO: 789831 - DNA, 25 bp, Homo sapien
tcggtttccctgatcattggcaatt

SEQ ID NO: 789832 - DNA, 25 bp, Homo sapien
ggttcggtttccctgatcattggca

SEQ ID NO: 789833 - DNA, 25 bp, Homo sapien
ggtttccctgatcattggcaattat

SEQ ID NO: 789834 - DNA, 25 bp, Homo sapien
gttcggtttccctgatcattggcaa

SEQ ID NO: 789835 - DNA, 25 bp, Homo sapien
gccagcatcatttaccaccgtgaaa

SEQ ID NO: 789836 - DNA, 25 bp, Homo sapien
catatcaaactggacaatggcatca

SEQ ID NO: 789837 - DNA, 25 bp, Homo sapien
catgctggcacggttcattggaact

SEQ ID NO: 789838 - DNA, 25 bp, Homo sapien
catttggcatcaaaagccatgctgg

SEQ ID NO: 789839 - DNA, 25 bp, Homo sapien
gaagacacctcctatgggtagcagc

SEQ ID NO: 789840 - DNA, 25 bp, Homo sapien
tagaagacacctcctatgggtagca

SEQ ID NO: 789841 - DNA, 25 bp, Homo sapien
gacacctcctatgggtagcagcttt

SEQ ID NO: 789842 - DNA, 25 bp, Homo sapien
ctcctatgggtagcagctttttgtc

SEQ ID NO: 789843 - DNA, 25 bp, Homo sapien
tcattcaagtaagctggcactgtga

SEQ ID NO: 789844 - DNA, 25 bp, Homo sapien
cattcaagtaagctggcactgtgac

SEQ ID NO: 789845 - DNA, 25 bp, Homo sapien
gcaatagcagcgacaattggcacat

SEQ ID NO: 789846 - DNA, 25 bp, Homo sapien
gcagcgacaattggcacattgataa

SEQ ID NO: 789847 - DNA, 25 bp, Homo sapien
tctttgatagccctgatgctgagag

SEQ ID NO: 789848 - DNA, 25 bp, Homo sapien
gtaagcaatagcagcgacaattggc

SEQ ID NO: 789849 - DNA, 25 bp, Homo sapien
cacaagcagtatagaggtgccagac

SEQ ID NO: 789850 - DNA, 25 bp, Homo sapien
catagtgaggatcaaaaacaccacc

SEQ ID NO: 789851 - DNA, 25 bp, Homo sapien
gaacaggctcagcattcaattctcc

SEQ ID NO: 789852 - DNA, 25 bp, Homo sapien
tgaagagaattgacctcagtactgg

SEQ ID NO: 789853 - DNA, 25 bp, Homo sapien
ctggacagctgcatcataagcaaca

SEQ ID NO: 789854 - DNA, 25 bp, Homo sapien
ctagataggacggctgcctggacag

SEQ ID NO: 789855 - DNA, 25 bp, Homo sapien
acagctgcatcataagcaacagctt

SEQ ID NO: 789856 - DNA, 25 bp, Homo sapien
tagataggacggctgcctggacagc

SEQ ID NO: 789857 - DNA, 25 bp, Homo sapien
tcaatctgatgagcaccatggtgtg

SEQ ID NO: 789858 - DNA, 25 bp, Homo sapien
cctggtaggaatggtagcatcacac

SEQ ID NO: 789859 - DNA, 25 bp, Homo sapien
atcacacttgatgaggacagccatg

SEQ ID NO: 789860 - DNA, 25 bp, Homo sapien
ccttggcaatgacatgctaggcttg

SEQ ID NO: 789861 - DNA, 25 bp, Homo sapien
catggcacttgctaagaatcttctg

SEQ ID NO: 789862 - DNA, 25 bp, Homo sapien
tctcagtttcctggaccataggctc

SEQ ID NO: 789863 - DNA, 25 bp, Homo sapien
cacatagggatcaagtgaattcttg

SEQ ID NO: 789864 - DNA, 25 bp, Homo sapien
tgctttcatgttgaacacataggga

SEQ ID NO: 789865 - DNA, 25 bp, Homo sapien
tctctgcagtctgattcttgtcgag

SEQ ID NO: 789866 - DNA, 25 bp, Homo sapien
cttgctgtgcatgttcaaattcttc

SEQ ID NO: 789867 - DNA, 25 bp, Homo sapien
catggacttgaagacttctccagct

SEQ ID NO: 789868 - DNA, 25 bp, Homo sapien
tggacttgaagacttctccagctct

SEQ ID NO: 789869 - DNA, 25 bp, Homo sapien
tgatcaggcttgtttacatatactt

SEQ ID NO: 789870 - DNA, 25 bp, Homo sapien
gaacacatgtgatcaggcttgttta

SEQ ID NO: 789871 - DNA, 25 bp, Homo sapien
catgtgatcaggcttgtttacatat

SEQ ID NO: 789872 - DNA, 25 bp, Homo sapien
acacatgtgatcaggcttgtttaca

SEQ ID NO: 789873 - DNA, 25 bp, Homo sapien
ttttgatatatggtcctatttggac

SEQ ID NO: 789874 - DNA, 25 bp, Homo sapien
ggccgatgacactttccgtatttat

SEQ ID NO: 789875 - DNA, 25 bp, Homo sapien
tatttggacaattactgcctttgaa

SEQ ID NO: 789876 - DNA, 25 bp, Homo sapien
gaagatttgtgtttttaggccgatg

SEQ ID NO: 789877 - DNA, 25 bp, Homo sapien
gaccttgttctttctatggttacca

SEQ ID NO: 789878 - DNA, 25 bp, Homo sapien
accttgttctttctatggttaccat

SEQ ID NO: 789879 - DNA, 25 bp, Homo sapien
tgaccttgttctttctatggttacc

SEQ ID NO: 789880 - DNA, 25 bp, Homo sapien
aaacaatagcatgttttttaatagc

SEQ ID NO: 789881 - DNA, 25 bp, Homo sapien
gttttttaatagcatgaatggaaga

SEQ ID NO: 789882 - DNA, 25 bp, Homo sapien
catgttttttaatagcatgaatgga

SEQ ID NO: 789883 - DNA, 25 bp, Homo sapien
aaaacaatagcatgttttttaatag

SEQ ID NO: 789884 - DNA, 25 bp, Homo sapien
tcagggatgatgaacgccttgctca

SEQ ID NO: 789885 - DNA, 25 bp, Homo sapien
agggatgatgaacgccttgctcagc

SEQ ID NO: 789886 - DNA, 25 bp, Homo sapien
cagggatgatgaacgccttgctcag

SEQ ID NO: 789887 - DNA, 25 bp, Homo sapien
ctcccacggctttggtatcttcatc

SEQ ID NO: 789888 - DNA, 25 bp, Homo sapien
agtccaacaccaaacaggtaccaag

SEQ ID NO: 789889 - DNA, 25 bp, Homo sapien
cctcccacggctttggtatcttcat

SEQ ID NO: 789890 - DNA, 25 bp, Homo sapien
agttcaatagtccaacaccaaacag

SEQ ID NO: 789891 - DNA, 25 bp, Homo sapien
agtcatccttcccctcgtttcccat

SEQ ID NO: 789892 - DNA, 25 bp, Homo sapien
cgaagcttaacgattccaaagttgg

SEQ ID NO: 789893 - DNA, 25 bp, Homo sapien
tagggaatactcgtggactccttct

SEQ ID NO: 789894 - DNA, 25 bp, Homo sapien
taactatcccgaagcttaacgattc

SEQ ID NO: 789895 - DNA, 25 bp, Homo sapien
ggtccgtaaggcctctcttcggcta

SEQ ID NO: 789896 - DNA, 25 bp, Homo sapien
cattccttagtttagcaggcacagg

SEQ ID NO: 789897 - DNA, 25 bp, Homo sapien
ttggaggttaggcaagcagaagcaa

SEQ ID NO: 789898 - DNA, 25 bp, Homo sapien
gttaggcaagcagaagcaagcagta

SEQ ID NO: 789899 - DNA, 25 bp, Homo sapien
gggaattctctgtagtgtctgaaca

SEQ ID NO: 789900 - DNA, 25 bp, Homo sapien
tacgtgaatggtagttgttttcctc

SEQ ID NO: 789901 - DNA, 25 bp, Homo sapien
tgcttcttgcaactctccccgccta

SEQ ID NO: 789902 - DNA, 25 bp, Homo sapien
acccgcaaccatcctcagttccagc

SEQ ID NO: 789903 - DNA, 25 bp, Homo sapien
tcctacgtgaatggtagttgttttc

SEQ ID NO: 789904 - DNA, 25 bp, Homo sapien
gaattgtttgcttccttctgtgaag

SEQ ID NO: 789905 - DNA, 25 bp, Homo sapien
agaattgtttgcttccttctgtgaa

SEQ ID NO: 789906 - DNA, 25 bp, Homo sapien
tcttccttccacttactgctccact

SEQ ID NO: 789907 - DNA, 25 bp, Homo sapien
cctcccagtacacgtttcccatatt

SEQ ID NO: 789908 - DNA, 25 bp, Homo sapien
cccagtacacgtttcccatattgtt

SEQ ID NO: 789909 - DNA, 25 bp, Homo sapien
cttccttccacttactgctccactc

SEQ ID NO: 789910 - DNA, 25 bp, Homo sapien
caggattgaaacatttggctggttg

SEQ ID NO: 789911 - DNA, 25 bp, Homo sapien
aggattgaaacatttggctggttga

SEQ ID NO: 789912 - DNA, 25 bp, Homo sapien
tgtgttgtatgaagaaatccatgca

SEQ ID NO: 789913 - DNA, 25 bp, Homo sapien
ctgtgttgtatgaagaaatccatgc

SEQ ID NO: 789914 - DNA, 25 bp, Homo sapien
gtgttgtatgaagaaatccatgcat

SEQ ID NO: 789915 - DNA, 25 bp, Homo sapien
tgaagtaattggcttgtctttagag

SEQ ID NO: 789916 - DNA, 25 bp, Homo sapien
gaagtaattggcttgtctttagagg

SEQ ID NO: 789917 - DNA, 25 bp, Homo sapien
atgaagtaattggcttgtctttaga

SEQ ID NO: 789918 - DNA, 25 bp, Homo sapien
ctatagactttgttcactgacccat

SEQ ID NO: 789919 - DNA, 25 bp, Homo sapien
gactgttccctttctagctccatca

SEQ ID NO: 789920 - DNA, 25 bp, Homo sapien
ttctctctatagactttgttcactg

SEQ ID NO: 789921 - DNA, 25 bp, Homo sapien
ttcactgacccattcactttgctca

SEQ ID NO: 789922 - DNA, 25 bp, Homo sapien
gaaggaaagcacagaattcacgttc

SEQ ID NO: 789923 - DNA, 25 bp, Homo sapien
tgaagattacggagccatggacaca

SEQ ID NO: 789924 - DNA, 25 bp, Homo sapien
ggccattcatcacattgggcaacat

SEQ ID NO: 789925 - DNA, 25 bp, Homo sapien
ttttgtatgggatgcagacacatgc

SEQ ID NO: 789926 - DNA, 25 bp, Homo sapien
tggtctagacgttcagcctgaaata

SEQ ID NO: 789927 - DNA, 25 bp, Homo sapien
tcctgcctgctgttgtaagcaaatt

SEQ ID NO: 789928 - DNA, 25 bp, Homo sapien
aggtagtgaatggtctagacgttca

SEQ ID NO: 789929 - DNA, 25 bp, Homo sapien
gctgttgtaagcaaattccattcat

SEQ ID NO: 789930 - DNA, 25 bp, Homo sapien
tccctattttgtgacagtacacatc

SEQ ID NO: 789931 - DNA, 25 bp, Homo sapien
tgtccctattttgtgacagtacaca

SEQ ID NO: 789932 - DNA, 25 bp, Homo sapien
cctattttgtgacagtacacatcat

SEQ ID NO: 789933 - DNA, 25 bp, Homo sapien
tattttgtgacagtacacatcatcc

SEQ ID NO: 789934 - DNA, 25 bp, Homo sapien
cttgtccatgcgaggaacttccact

SEQ ID NO: 789935 - DNA, 25 bp, Homo sapien
catgcgaggaacttccactataacc

SEQ ID NO: 789936 - DNA, 25 bp, Homo sapien
tgtccatgcgaggaacttccactat

SEQ ID NO: 789937 - DNA, 25 bp, Homo sapien
tgcgaggaacttccactataacctg

SEQ ID NO: 789938 - DNA, 25 bp, Homo sapien
ttggcttggagcttgactgccctct

SEQ ID NO: 789939 - DNA, 25 bp, Homo sapien
gttgtaccgtcactttctctgaaca

SEQ ID NO: 789940 - DNA, 25 bp, Homo sapien
cagaggaatagtggtacccgttgta

SEQ ID NO: 789941 - DNA, 25 bp, Homo sapien
ctcttcagaggaatagtggtacccg

SEQ ID NO: 789942 - DNA, 25 bp, Homo sapien
ccctaatcataaacacaaacatggc

SEQ ID NO: 789943 - DNA, 25 bp, Homo sapien
agtcaagaacttccagccccctaat

SEQ ID NO: 789944 - DNA, 25 bp, Homo sapien
agccccctaatcataaacacaaaca

SEQ ID NO: 789945 - DNA, 25 bp, Homo sapien
ttagtcaagaacttccagcccccta

SEQ ID NO: 789946 - DNA, 25 bp, Homo sapien
cagtcatcaattggataggagtatt

SEQ ID NO: 789947 - DNA, 25 bp, Homo sapien
ccccttctttggcagtcacttgaag

SEQ ID NO: 789948 - DNA, 25 bp, Homo sapien
gaagtacagtcatcaattggatagg

SEQ ID NO: 789949 - DNA, 25 bp, Homo sapien
tggcagtcacttgaagtacagtcat

SEQ ID NO: 789950 - DNA, 25 bp, Homo sapien
aaatccacaaagtgagtcaaggttg

SEQ ID NO: 789951 - DNA, 25 bp, Homo sapien
gctaaaaatccacaaagtgagtcaa

SEQ ID NO: 789952 - DNA, 25 bp, Homo sapien
gagtcaaggttgctaaatttgacca

SEQ ID NO: 789953 - DNA, 25 bp, Homo sapien
cttggctaaaaatccacaaagtgag

SEQ ID NO: 789954 - DNA, 25 bp, Homo sapien
ccattcacaggaagtattgagggtg

SEQ ID NO: 789955 - DNA, 25 bp, Homo sapien
tctttggcctccattgtaatgatct

SEQ ID NO: 789956 - DNA, 25 bp, Homo sapien
ttttgttcccccctgaggcagtgta

SEQ ID NO: 789957 - DNA, 25 bp, Homo sapien
gaggcagtgtatgatgagaggcaga

SEQ ID NO: 789958 - DNA, 25 bp, Homo sapien
aaagccttcggcagagacattcaag

SEQ ID NO: 789959 - DNA, 25 bp, Homo sapien
tttcccagaggagaggaaataataa

SEQ ID NO: 789960 - DNA, 25 bp, Homo sapien
tcccagaggagaggaaataataaag

SEQ ID NO: 789961 - DNA, 25 bp, Homo sapien
cagaggagaggaaataataaagaca

SEQ ID NO: 789962 - DNA, 25 bp, Homo sapien
ccagaggagaggaaataataaagac

SEQ ID NO: 789963 - DNA, 25 bp, Homo sapien
cacgaaagttggcttccaatttcat

SEQ ID NO: 789964 - DNA, 25 bp, Homo sapien
cataattctgcagaacgcagtcagt

SEQ ID NO: 789965 - DNA, 25 bp, Homo sapien
cagtcagttgcggtcacagtctctg

SEQ ID NO: 789966 - DNA, 25 bp, Homo sapien
cagaacgcagtcagttgcggtcaca

SEQ ID NO: 789967 - DNA, 25 bp, Homo sapien
gcagatgctatctatattcttgcag

SEQ ID NO: 789968 - DNA, 25 bp, Homo sapien
aaccataattagctttctgcaaaac

SEQ ID NO: 789969 - DNA, 25 bp, Homo sapien
catcattgtattcctggactgagca

SEQ ID NO: 789970 - DNA, 25 bp, Homo sapien
cgagaacgcaatttttgatgcatta

SEQ ID NO: 789971 - DNA, 25 bp, Homo sapien
tcccttactgcatttacatgttcca

SEQ ID NO: 789972 - DNA, 25 bp, Homo sapien
taatttctttgggtcccttactgca

SEQ ID NO: 789973 - DNA, 25 bp, Homo sapien
taacaatgtattccccctgtttgca

SEQ ID NO: 789974 - DNA, 25 bp, Homo sapien
gaggaaccggtgaccttgcttaaca

SEQ ID NO: 789975 - DNA, 25 bp, Homo sapien
ctaacgactggttgctttatttttg

SEQ ID NO: 789976 - DNA, 25 bp, Homo sapien
ttctttctaacgactggttgcttta

SEQ ID NO: 789977 - DNA, 25 bp, Homo sapien
ttggtaaaacaaatgcatttttcat

SEQ ID NO: 789978 - DNA, 25 bp, Homo sapien
tttggtaaaacaaatgcatttttca

SEQ ID NO: 789979 - DNA, 25 bp, Homo sapien
caacctttctcagaaccctgggtga

SEQ ID NO: 789980 - DNA, 25 bp, Homo sapien
ctttctcagaaccctgggtgacagt

SEQ ID NO: 789981 - DNA, 25 bp, Homo sapien
tacggttgtactggcttaactggga

SEQ ID NO: 789982 - DNA, 25 bp, Homo sapien
tagtacggttgtactggcttaactg

SEQ ID NO: 789983 - DNA, 25 bp, Homo sapien
cggttgtactggcttaactgggaga

SEQ ID NO: 789984 - DNA, 25 bp, Homo sapien
ggttgtactggcttaactgggagat

SEQ ID NO: 789985 - DNA, 25 bp, Homo sapien
acgatgtttgttgatgttagggtgc

SEQ ID NO: 789986 - DNA, 25 bp, Homo sapien
gatgtttgttgatgttagggtgcat

SEQ ID NO: 789987 - DNA, 25 bp, Homo sapien
tacgatgtttgttgatgttagggtg

SEQ ID NO: 789988 - DNA, 25 bp, Homo sapien
cgatgtttgttgatgttagggtgca

SEQ ID NO: 789989 - DNA, 25 bp, Homo sapien
tattggtctgctaccggcagtttct

SEQ ID NO: 789990 - DNA, 25 bp, Homo sapien
cctcatattggtctgctaccggcag

SEQ ID NO: 789991 - DNA, 25 bp, Homo sapien
gtctgctaccggcagtttctcctca

SEQ ID NO: 789992 - DNA, 25 bp, Homo sapien
catagtaggagcctcatattggtct

SEQ ID NO: 789993 - DNA, 25 bp, Homo sapien
tgtgcatgtttattaacagttacat

SEQ ID NO: 789994 - DNA, 25 bp, Homo sapien
gacttcggtactagcaattgccaaa

SEQ ID NO: 789995 - DNA, 25 bp, Homo sapien
cacagcattgcagtgactagtaacc

SEQ ID NO: 789996 - DNA, 25 bp, Homo sapien
cagttacattggtggacacagcatt

SEQ ID NO: 789997 - DNA, 25 bp, Homo sapien
taatacacttgactcaatccatcgc

SEQ ID NO: 789998 - DNA, 25 bp, Homo sapien
ttctggaagtggtaatacacttgac

SEQ ID NO: 789999 - DNA, 25 bp, Homo sapien
cagaagtatatgaactttcatttgt

SEQ ID NO: 790000 - DNA, 25 bp, Homo sapien
tgactcaatccatcgcattttattt

SEQ ID NO: 790001 - DNA, 25 bp, Homo sapien
aaataaatctatgaggtaggtaaca

SEQ ID NO: 790002 - DNA, 25 bp, Homo sapien
tctatgaggtaggtaacattactac

SEQ ID NO: 790003 - DNA, 25 bp, Homo sapien
taaatctatgaggtaggtaacatta

SEQ ID NO: 790004 - DNA, 25 bp, Homo sapien
gaaataacccatctaagtccacagc

SEQ ID NO: 790005 - DNA, 25 bp, Homo sapien
ggtttcaactaaggtcgctgtgttc

SEQ ID NO: 790006 - DNA, 25 bp, Homo sapien
ggtcgctgtgttccagtatttctta

SEQ ID NO: 790007 - DNA, 25 bp, Homo sapien
atgtctttcatatggctacaggatt

SEQ ID NO: 790008 - DNA, 25 bp, Homo sapien
tcaagtccacaatttcaagtccaat

SEQ ID NO: 790009 - DNA, 25 bp, Homo sapien
ccagctttgcatcctaggattagca

SEQ ID NO: 790010 - DNA, 25 bp, Homo sapien
caaagagtgaccaccaggagcgaat

SEQ ID NO: 790011 - DNA, 25 bp, Homo sapien
tagccatgggtttgtcagttaaggc

SEQ ID NO: 790012 - DNA, 25 bp, Homo sapien
caaggagagatgatcttgtacaccc

SEQ ID NO: 790013 - DNA, 25 bp, Homo sapien
cctgaagagtacaagcaatgaaaac

SEQ ID NO: 790014 - DNA, 25 bp, Homo sapien
tggcttggcaaagcattcatgacta

SEQ ID NO: 790015 - DNA, 25 bp, Homo sapien
tgactaagacctgaagagtacaagc

SEQ ID NO: 790016 - DNA, 25 bp, Homo sapien
cgcgcctggcttggcaaagcattca

SEQ ID NO: 790017 - DNA, 25 bp, Homo sapien
cacagggccacttagctttgctttt

SEQ ID NO: 790018 - DNA, 25 bp, Homo sapien
ttgctttttcctcctccagagacct

SEQ ID NO: 790019 - DNA, 25 bp, Homo sapien
ctttttcctcctccagagacctcat

SEQ ID NO: 790020 - DNA, 25 bp, Homo sapien
cagggccacttagctttgctttttc

SEQ ID NO: 790021 - DNA, 25 bp, Homo sapien
tgcctgagctaagggcaatgacgcc

SEQ ID NO: 790022 - DNA, 25 bp, Homo sapien
tctttcactattgaccactgaggac

SEQ ID NO: 790023 - DNA, 25 bp, Homo sapien
tgacgcccatgaacagcacatttag

SEQ ID NO: 790024 - DNA, 25 bp, Homo sapien
aaagcccaagatattgttgcctgag

SEQ ID NO: 790025 - DNA, 25 bp, Homo sapien
cagttctgctagcctgaactagatt

SEQ ID NO: 790026 - DNA, 25 bp, Homo sapien
cagcagttctgctagcctgaactag

SEQ ID NO: 790027 - DNA, 25 bp, Homo sapien
gcagttctgctagcctgaactagat

SEQ ID NO: 790028 - DNA, 25 bp, Homo sapien
agcagttctgctagcctgaactaga

SEQ ID NO: 790029 - DNA, 25 bp, Homo sapien
ctgtagctctactgctagacagttc

SEQ ID NO: 790030 - DNA, 25 bp, Homo sapien
ctctactgctagacagttcaacctg

SEQ ID NO: 790031 - DNA, 25 bp, Homo sapien
tagcgctggtaccagggaaactcac

SEQ ID NO: 790032 - DNA, 25 bp, Homo sapien
gacaggctatgaaaccaatagtctt

SEQ ID NO: 790033 - DNA, 25 bp, Homo sapien
aaaatgactgccattgtaggaattc

SEQ ID NO: 790034 - DNA, 25 bp, Homo sapien
aatgactgccattgtaggaattctt

SEQ ID NO: 790035 - DNA, 25 bp, Homo sapien
tttcatcttggctacccataatttt

SEQ ID NO: 790036 - DNA, 25 bp, Homo sapien
ctcccaattcccagtcactcacatt

SEQ ID NO: 790037 - DNA, 25 bp, Homo sapien
atctgggcagtccacttatactcaa

SEQ ID NO: 790038 - DNA, 25 bp, Homo sapien
ctacagtaagtaaataactctactg

SEQ ID NO: 790039 - DNA, 25 bp, Homo sapien
agtaaataactctactgtactgctg

SEQ ID NO: 790040 - DNA, 25 bp, Homo sapien
cttatctgggcagtccacttatact

SEQ ID NO: 790041 - DNA, 25 bp, Homo sapien
gggcttggcaattatttaccgccat

SEQ ID NO: 790042 - DNA, 25 bp, Homo sapien
gaattggggcttggcaattatttac

SEQ ID NO: 790043 - DNA, 25 bp, Homo sapien
attggggcttggcaattatttaccg

SEQ ID NO: 790044 - DNA, 25 bp, Homo sapien
tggggcttggcaattatttaccgcc

SEQ ID NO: 790045 - DNA, 25 bp, Homo sapien
tccacaaagttatctttccctttga

SEQ ID NO: 790046 - DNA, 25 bp, Homo sapien
cacagtatttcaaatcagtgactct

SEQ ID NO: 790047 - DNA, 25 bp, Homo sapien
gtatttcaaatcagtgactcttccc

SEQ ID NO: 790048 - DNA, 25 bp, Homo sapien
ttcaaatcagtgactcttccctcca

SEQ ID NO: 790049 - DNA, 25 bp, Homo sapien
ctctctgcagtgttcgcatagtata

SEQ ID NO: 790050 - DNA, 25 bp, Homo sapien
tatgtttgaaaatcattggcatcaa

SEQ ID NO: 790051 - DNA, 25 bp, Homo sapien
cactattatcggaaactaaggagct

SEQ ID NO: 790052 - DNA, 25 bp, Homo sapien
gatattcactgtaactgcttttaac

SEQ ID NO: 790053 - DNA, 25 bp, Homo sapien
cgggcagtctgctcatcagttccag

SEQ ID NO: 790054 - DNA, 25 bp, Homo sapien
tcttttcacccatcaccaacttgtc

SEQ ID NO: 790055 - DNA, 25 bp, Homo sapien
cttccaagtacttcctctggaaaat

SEQ ID NO: 790056 - DNA, 25 bp, Homo sapien
tccagaggacactcctttcttttca

SEQ ID NO: 790057 - DNA, 25 bp, Homo sapien
taatgtgcactttatctgtccttca

SEQ ID NO: 790058 - DNA, 25 bp, Homo sapien
tatggtaatgtgcactttatctgtc

SEQ ID NO: 790059 - DNA, 25 bp, Homo sapien
tggtaatgtgcactttatctgtcct

SEQ ID NO: 790060 - DNA, 25 bp, Homo sapien
ttatggtaatgtgcactttatctgt

SEQ ID NO: 790061 - DNA, 25 bp, Homo sapien
taggggtggctggtgaacttgtcca

SEQ ID NO: 790062 - DNA, 25 bp, Homo sapien
gcattggaaatcatctctaatctta

SEQ ID NO: 790063 - DNA, 25 bp, Homo sapien
ttggaaatcatctctaatcttatgt

SEQ ID NO: 790064 - DNA, 25 bp, Homo sapien
tctaatcttatgtaggggtggctgg

SEQ ID NO: 790065 - DNA, 25 bp, Homo sapien
tgaaataaaggagcccagtcaaaag

SEQ ID NO: 790066 - DNA, 25 bp, Homo sapien
tgaatatacggttgaaataaaggag

SEQ ID NO: 790067 - DNA, 25 bp, Homo sapien
tataaccctttgaatatacggttga

SEQ ID NO: 790068 - DNA, 25 bp, Homo sapien
ctatatggtctataaccctttgaat

SEQ ID NO: 790069 - DNA, 25 bp, Homo sapien
cctacagacagatttcgactcaact

SEQ ID NO: 790070 - DNA, 25 bp, Homo sapien
tgaagtttgatagcgaccaaagctg

SEQ ID NO: 790071 - DNA, 25 bp, Homo sapien
ccaaagctgggataagcataatgta

SEQ ID NO: 790072 - DNA, 25 bp, Homo sapien
ccacttaggataaatggagaaggat

SEQ ID NO: 790073 - DNA, 25 bp, Homo sapien
ctgatctgggataagataatcttcc

SEQ ID NO: 790074 - DNA, 25 bp, Homo sapien
tgatctgggataagataatcttccc

SEQ ID NO: 790075 - DNA, 25 bp, Homo sapien
ctgggataagataatcttcccaaac

SEQ ID NO: 790076 - DNA, 25 bp, Homo sapien
gataagataatcttcccaaacttca

SEQ ID NO: 790077 - DNA, 25 bp, Homo sapien
ctatggaactagagagtcagccaga

SEQ ID NO: 790078 - DNA, 25 bp, Homo sapien
aactagagagtcagccagaatgcag

SEQ ID NO: 790079 - DNA, 25 bp, Homo sapien
tgcagccagcaagttccaactttat

SEQ ID NO: 790080 - DNA, 25 bp, Homo sapien
gccagcaagttccaactttatgaat

SEQ ID NO: 790081 - DNA, 25 bp, Homo sapien
tacgctttatctggatcagtggaga

SEQ ID NO: 790082 - DNA, 25 bp, Homo sapien
acgctttatctggatcagtggagac

SEQ ID NO: 790083 - DNA, 25 bp, Homo sapien
ttacgctttatctggatcagtggag

SEQ ID NO: 790084 - DNA, 25 bp, Homo sapien
tgagcttttgccatgacagcagatc

SEQ ID NO: 790085 - DNA, 25 bp, Homo sapien
gacagcagatccctgcatacgcaaa

SEQ ID NO: 790086 - DNA, 25 bp, Homo sapien
gatccctgcatacgcaaattgagca

SEQ ID NO: 790087 - DNA, 25 bp, Homo sapien
gagcagcggattcacaactttagtt

SEQ ID NO: 790088 - DNA, 25 bp, Homo sapien
gattcaacagcatacagctcctgtg

SEQ ID NO: 790089 - DNA, 25 bp, Homo sapien
gatacatttaatccatatttagttt

SEQ ID NO: 790090 - DNA, 25 bp, Homo sapien
tgagtccacattcaacatttttgat

SEQ ID NO: 790091 - DNA, 25 bp, Homo sapien
tactggttcacatttagcccaaaaa

SEQ ID NO: 790092 - DNA, 25 bp, Homo sapien
cagatttaagttttctgcgtgagaa

SEQ ID NO: 790093 - DNA, 25 bp, Homo sapien
aagtttgcatcagtgttgggggtga

SEQ ID NO: 790094 - DNA, 25 bp, Homo sapien
tgcattgactgccctaagttgttcc

SEQ ID NO: 790095 - DNA, 25 bp, Homo sapien
attgactgccctaagttgttccaaa

SEQ ID NO: 790096 - DNA, 25 bp, Homo sapien
gcattgactgccctaagttgttcca

SEQ ID NO: 790097 - DNA, 25 bp, Homo sapien
cttgcattgactgccctaagttgtt

SEQ ID NO: 790098 - DNA, 25 bp, Homo sapien
ggaaatacaatcgatgatgcagaaa

SEQ ID NO: 790099 - DNA, 25 bp, Homo sapien
caatcgatgatgcagaaaaatatct

SEQ ID NO: 790100 - DNA, 25 bp, Homo sapien
gatagtataggaaatacaatcgatg

SEQ ID NO: 790101 - DNA, 25 bp, Homo sapien
ttccaggtggtgatagtataggaaa

SEQ ID NO: 790102 - DNA, 25 bp, Homo sapien
cctggcaaattcttactcacgattt

SEQ ID NO: 790103 - DNA, 25 bp, Homo sapien
ggcaaattcttactcacgattttat

SEQ ID NO: 790104 - DNA, 25 bp, Homo sapien
tgttgactccctattatgtctatgt

SEQ ID NO: 790105 - DNA, 25 bp, Homo sapien
ttcaccttgtacttgttgactccct

SEQ ID NO: 790106 - DNA, 25 bp, Homo sapien
aacatatgttaaaaacatccacttt

SEQ ID NO: 790107 - DNA, 25 bp, Homo sapien
cataacatatgttaaaaacatccac

SEQ ID NO: 790108 - DNA, 25 bp, Homo sapien
ctcataacatatgttaaaaacatcc

SEQ ID NO: 790109 - DNA, 25 bp, Homo sapien
catatgttaaaaacatccacttttc

SEQ ID NO: 790110 - DNA, 25 bp, Homo sapien
tctcagatgctaactgcgccgacat

SEQ ID NO: 790111 - DNA, 25 bp, Homo sapien
cataaatttgatgcctgtgtttaga

SEQ ID NO: 790112 - DNA, 25 bp, Homo sapien
aagcataaatttgatgcctgtgttt

SEQ ID NO: 790113 - DNA, 25 bp, Homo sapien
gcataaatttgatgcctgtgtttag

SEQ ID NO: 790114 - DNA, 25 bp, Homo sapien
ataaatttgatgcctgtgtttagac

SEQ ID NO: 790115 - DNA, 25 bp, Homo sapien
gaggtagcaattaccacatcatttc

SEQ ID NO: 790116 - DNA, 25 bp, Homo sapien
ctctggtgaggtagcaattaccaca

SEQ ID NO: 790117 - DNA, 25 bp, Homo sapien
ggtgaggtagcaattaccacatcat

SEQ ID NO: 790118 - DNA, 25 bp, Homo sapien
ggtagcaattaccacatcatttcca

SEQ ID NO: 790119 - DNA, 25 bp, Homo sapien
gccttctggcttaccacgtgaacaa

SEQ ID NO: 790120 - DNA, 25 bp, Homo sapien
tctggcttaccacgtgaacaaattc

SEQ ID NO: 790121 - DNA, 25 bp, Homo sapien
ggcttaccacgtgaacaaattcata

SEQ ID NO: 790122 - DNA, 25 bp, Homo sapien
caagcacaaatgccttctggcttac

SEQ ID NO: 790123 - DNA, 25 bp, Homo sapien
tggaaatgtctataggcctttttag

SEQ ID NO: 790124 - DNA, 25 bp, Homo sapien
aaatctcaagtggaaatgtctatag

SEQ ID NO: 790125 - DNA, 25 bp, Homo sapien
gatgacagagataaatctcaagtgg

SEQ ID NO: 790126 - DNA, 25 bp, Homo sapien
gagataaatctcaagtggaaatgtc

SEQ ID NO: 790127 - DNA, 25 bp, Homo sapien
catgtggatagaggtagaacagttt

SEQ ID NO: 790128 - DNA, 25 bp, Homo sapien
gtggatagaggtagaacagtttggg

SEQ ID NO: 790129 - DNA, 25 bp, Homo sapien
tcatgtggatagaggtagaacagtt

SEQ ID NO: 790130 - DNA, 25 bp, Homo sapien
atgtggatagaggtagaacagtttg

SEQ ID NO: 790131 - DNA, 25 bp, Homo sapien
ttagtaaattgagagctgttggggc

SEQ ID NO: 790132 - DNA, 25 bp, Homo sapien
gggcattagtttgagtttgtcaagc

SEQ ID NO: 790133 - DNA, 25 bp, Homo sapien
gctgagactctcaaatggaaatggt

SEQ ID NO: 790134 - DNA, 25 bp, Homo sapien
aataagtttggcatgttcaaagaac

SEQ ID NO: 790135 - DNA, 25 bp, Homo sapien
tataatagtgactggagtgccaagg

SEQ ID NO: 790136 - DNA, 25 bp, Homo sapien
gctgccgcttccatgggaattagca

SEQ ID NO: 790137 - DNA, 25 bp, Homo sapien
ccatgggaattagcatcaacttgaa

SEQ ID NO: 790138 - DNA, 25 bp, Homo sapien
gaattagcatcaacttgaagaagca

SEQ ID NO: 790139 - DNA, 25 bp, Homo sapien
tgtacgctgccgcttccatgggaat

SEQ ID NO: 790140 - DNA, 25 bp, Homo sapien
gacctacaggatcgtctggcaaccg

SEQ ID NO: 790141 - DNA, 25 bp, Homo sapien
aagaagggtggccacacacggaaga

SEQ ID NO: 790142 - DNA, 25 bp, Homo sapien
tctggcaaccgcattgacagcttca

SEQ ID NO: 790143 - DNA, 25 bp, Homo sapien
catcactgacgtgcaactgatttcc

SEQ ID NO: 790144 - DNA, 25 bp, Homo sapien
tgtgagaaggcaaccactaggtggc

SEQ ID NO: 790145 - DNA, 25 bp, Homo sapien
ggtattttggcaatttcagaaagtg

SEQ ID NO: 790146 - DNA, 25 bp, Homo sapien
taccacctggtattttggcaatttc

SEQ ID NO: 790147 - DNA, 25 bp, Homo sapien
aaagtgctgacaatttcgcctccat

SEQ ID NO: 790148 - DNA, 25 bp, Homo sapien
tttcagaaagtgctgacaatttcgc

SEQ ID NO: 790149 - DNA, 25 bp, Homo sapien
cttagcaaactggaccattctcctc

SEQ ID NO: 790150 - DNA, 25 bp, Homo sapien
ctgattacttcaggttgggttcttg

SEQ ID NO: 790151 - DNA, 25 bp, Homo sapien
cctttgtgctctccttagcaaactg

SEQ ID NO: 790152 - DNA, 25 bp, Homo sapien
gattacttcaggttgggttcttgcc

SEQ ID NO: 790153 - DNA, 25 bp, Homo sapien
gtagcatgatgccactagctttgat

SEQ ID NO: 790154 - DNA, 25 bp, Homo sapien
gatgccactagctttgatcttttgg

SEQ ID NO: 790155 - DNA, 25 bp, Homo sapien
catgatgccactagctttgatcttt

SEQ ID NO: 790156 - DNA, 25 bp, Homo sapien
agcatgatgccactagctttgatct

SEQ ID NO: 790157 - DNA, 25 bp, Homo sapien
atattaatactttgctaatataccc

SEQ ID NO: 790158 - DNA, 25 bp, Homo sapien
aatattaatactttgctaatatacc

SEQ ID NO: 790159 - DNA, 25 bp, Homo sapien
ctgggtcacaggcaaaaatttcagt

SEQ ID NO: 790160 - DNA, 25 bp, Homo sapien
cttctgggtcacaggcaaaaatttc

SEQ ID NO: 790161 - DNA, 25 bp, Homo sapien
ctctgagacggagctcccataggca

SEQ ID NO: 790162 - DNA, 25 bp, Homo sapien
ggagctcccataggcaaccaaaagc

SEQ ID NO: 790163 - DNA, 25 bp, Homo sapien
tccagtagcggcagctctgtatttc

SEQ ID NO: 790164 - DNA, 25 bp, Homo sapien
ggctgaaaactccagtagcggcagc

SEQ ID NO: 790165 - DNA, 25 bp, Homo sapien
gacaggtgcagattcccagcacaac

SEQ ID NO: 790166 - DNA, 25 bp, Homo sapien
gattttagggatcatagattttagc

SEQ ID NO: 790167 - DNA, 25 bp, Homo sapien
ggattttagggatcatagattttag

SEQ ID NO: 790168 - DNA, 25 bp, Homo sapien
ttttagggatcatagattttagcat

SEQ ID NO: 790169 - DNA, 25 bp, Homo sapien
cccatgtgagtaggtcacatttgaa

SEQ ID NO: 790170 - DNA, 25 bp, Homo sapien
tctaaggagcatagatgtgtatctc

SEQ ID NO: 790171 - DNA, 25 bp, Homo sapien
gaatataggtaactctctaaggagc

SEQ ID NO: 790172 - DNA, 25 bp, Homo sapien
cctaaaggaccaacgataaagccat

SEQ ID NO: 790173 - DNA, 25 bp, Homo sapien
tagatgtgtatctcgcctaaaggac

SEQ ID NO: 790174 - DNA, 25 bp, Homo sapien
tctcctcttacggtatctcactaaa

SEQ ID NO: 790175 - DNA, 25 bp, Homo sapien
cctctcctcttacggtatctcacta

SEQ ID NO: 790176 - DNA, 25 bp, Homo sapien
tcttacggtatctcactaaacattt

SEQ ID NO: 790177 - DNA, 25 bp, Homo sapien
cctcttacggtatctcactaaacat

SEQ ID NO: 790178 - DNA, 25 bp, Homo sapien
ccctgtcctggagttgaaagtacat

SEQ ID NO: 790179 - DNA, 25 bp, Homo sapien
ggactgttgggaggcatcagctcta

SEQ ID NO: 790180 - DNA, 25 bp, Homo sapien
cacctctcaattattccatagggaa

SEQ ID NO: 790181 - DNA, 25 bp, Homo sapien
cgggtgctacatgtccacctctcaa

SEQ ID NO: 790182 - DNA, 25 bp, Homo sapien
cttgttcctggggtactaccacatc

SEQ ID NO: 790183 - DNA, 25 bp, Homo sapien
accacatcctctcttgggccctgag

SEQ ID NO: 790184 - DNA, 25 bp, Homo sapien
tcctctgcatcatgtactctgccag

SEQ ID NO: 790185 - DNA, 25 bp, Homo sapien
cctctgcatcatgtactctgccagt

SEQ ID NO: 790186 - DNA, 25 bp, Homo sapien
tcgaaatggccaacttgtgcgcgca

SEQ ID NO: 790187 - DNA, 25 bp, Homo sapien
gaccgcatgccagaggagattagga

SEQ ID NO: 790188 - DNA, 25 bp, Homo sapien
gaacatccaggcatccgagtcagtg

SEQ ID NO: 790189 - DNA, 25 bp, Homo sapien
tgaagccgtcgcatctaattgggac

SEQ ID NO: 790190 - DNA, 25 bp, Homo sapien
aaaagaggtagcttactggctttgt

SEQ ID NO: 790191 - DNA, 25 bp, Homo sapien
aaagaggtagcttactggctttgtc

SEQ ID NO: 790192 - DNA, 25 bp, Homo sapien
caaaagaggtagcttactggctttg

SEQ ID NO: 790193 - DNA, 25 bp, Homo sapien
aactggagctgaccgcggtggcagc

SEQ ID NO: 790194 - DNA, 25 bp, Homo sapien
cggcggcggtgagcctgcacccggg

SEQ ID NO: 790195 - DNA, 25 bp, Homo sapien
ctcgcaccgacaactcctggcagga

SEQ ID NO: 790196 - DNA, 25 bp, Homo sapien
caggaactggagctgaccgcggtgg

SEQ ID NO: 790197 - DNA, 25 bp, Homo sapien
cttccgcgccctggctgggcgccct

SEQ ID NO: 790198 - DNA, 25 bp, Homo sapien
tggtccatgctctacctcaactttc

SEQ ID NO: 790199 - DNA, 25 bp, Homo sapien
tgggcgccctccagagggacacgtc

SEQ ID NO: 790200 - DNA, 25 bp, Homo sapien
cacgcggcacccgagcttccgcgcc

SEQ ID NO: 790201 - DNA, 25 bp, Homo sapien
ctgtgcacaaagccttagggagccc

SEQ ID NO: 790202 - DNA, 25 bp, Homo sapien
gtgcacaaagccttagggagccccc

SEQ ID NO: 790203 - DNA, 25 bp, Homo sapien
tgtgcacaaagccttagggagcccc

SEQ ID NO: 790204 - DNA, 25 bp, Homo sapien
tcgatgaaaagatatgctccctgtc

SEQ ID NO: 790205 - DNA, 25 bp, Homo sapien
ccaaccctgcttgcgggagggcaaa

SEQ ID NO: 790206 - DNA, 25 bp, Homo sapien
catggaccaggtctcgctgaccgtt

SEQ ID NO: 790207 - DNA, 25 bp, Homo sapien
caaagggcagtgagttaaggctcct

SEQ ID NO: 790208 - DNA, 25 bp, Homo sapien
tcctttacaacgaagataataggac

SEQ ID NO: 790209 - DNA, 25 bp, Homo sapien
cttcctttacaacgaagataatagg

SEQ ID NO: 790210 - DNA, 25 bp, Homo sapien
ctttacaacgaagataataggacat

SEQ ID NO: 790211 - DNA, 25 bp, Homo sapien
acttcctttacaacgaagataatag

SEQ ID NO: 790212 - DNA, 25 bp, Homo sapien
cacaattctattttcggaatatatt

SEQ ID NO: 790213 - DNA, 25 bp, Homo sapien
tatttgcagggtaagtctatattag

SEQ ID NO: 790214 - DNA, 25 bp, Homo sapien
tgcagggtaagtctatattaggcag

SEQ ID NO: 790215 - DNA, 25 bp, Homo sapien
tattttcggaatatatttgcagggt

SEQ ID NO: 790216 - DNA, 25 bp, Homo sapien
tatacatggtaaagagtgctctgca

SEQ ID NO: 790217 - DNA, 25 bp, Homo sapien
tatctatttactgctcgctgcccca

SEQ ID NO: 790218 - DNA, 25 bp, Homo sapien
caagactatgtctcgtgacaccaga

SEQ ID NO: 790219 - DNA, 25 bp, Homo sapien
caggagcttagtagtttgtggcaac

SEQ ID NO: 790220 - DNA, 25 bp, Homo sapien
tattttatgtgcctagtatgtacca

SEQ ID NO: 790221 - DNA, 25 bp, Homo sapien
catttcatgacggatctgtccagtc

SEQ ID NO: 790222 - DNA, 25 bp, Homo sapien
gtaggtcctgaactgatgtgctgcc

SEQ ID NO: 790223 - DNA, 25 bp, Homo sapien
aaatccacctatctggacctgctca

SEQ ID NO: 790224 - DNA, 25 bp, Homo sapien
ggtcagttgttagagatatttccca

SEQ ID NO: 790225 - DNA, 25 bp, Homo sapien
acttcatttctgagtgagttatttg

SEQ ID NO: 790226 - DNA, 25 bp, Homo sapien
tttttaagaatgagtttgtacttca

SEQ ID NO: 790227 - DNA, 25 bp, Homo sapien
ttcaaaactgtatgcatctaagtga

SEQ ID NO: 790228 - DNA, 25 bp, Homo sapien
caaaagccctttcctcgatgcccat

SEQ ID NO: 790229 - DNA, 25 bp, Homo sapien
atttcaaaagccctttcctcgatgc

SEQ ID NO: 790230 - DNA, 25 bp, Homo sapien
tttcaaaagccctttcctcgatgcc

SEQ ID NO: 790231 - DNA, 25 bp, Homo sapien
atatttcaaaagccctttcctcgat

SEQ ID NO: 790232 - DNA, 25 bp, Homo sapien
cttgaatgacggagattgaccagtt

SEQ ID NO: 790233 - DNA, 25 bp, Homo sapien
attgccagtactgagacctctcctg

SEQ ID NO: 790234 - DNA, 25 bp, Homo sapien
tctcctgacagatagttatcactct

SEQ ID NO: 790235 - DNA, 25 bp, Homo sapien
tgcctctatcctggctgcaatgtca

SEQ ID NO: 790236 - DNA, 25 bp, Homo sapien
ctgccttcccatgaggatcttgaca

SEQ ID NO: 790237 - DNA, 25 bp, Homo sapien
cccatgaggatcttgacaacacctt

SEQ ID NO: 790238 - DNA, 25 bp, Homo sapien
ccttcccatgaggatcttgacaaca

SEQ ID NO: 790239 - DNA, 25 bp, Homo sapien
gaggatcttgacaacaccttcccca

SEQ ID NO: 790240 - DNA, 25 bp, Homo sapien
ctgagccatgtgtgaatttgacatc

SEQ ID NO: 790241 - DNA, 25 bp, Homo sapien
tctccttgactttgttcaaaagcat

SEQ ID NO: 790242 - DNA, 25 bp, Homo sapien
cttgctgagccatgtgtgaatttga

SEQ ID NO: 790243 - DNA, 25 bp, Homo sapien
catgtgtgaatttgacatcttccag

SEQ ID NO: 790244 - DNA, 25 bp, Homo sapien
caagctgcaaagtctaatagaagtt

SEQ ID NO: 790245 - DNA, 25 bp, Homo sapien
gaagtttcaggtttgtcagcataaa

SEQ ID NO: 790246 - DNA, 25 bp, Homo sapien
gtttgtcagcataaaccgagtgtag

SEQ ID NO: 790247 - DNA, 25 bp, Homo sapien
cataaaccgagtgtagaaactggat

SEQ ID NO: 790248 - DNA, 25 bp, Homo sapien
acacaagaaaacacaatgaactctg

SEQ ID NO: 790249 - DNA, 25 bp, Homo sapien
cacaagaaaacacaatgaactctgt

SEQ ID NO: 790250 - DNA, 25 bp, Homo sapien
aaaacacaatgaactctgttaccat

SEQ ID NO: 790251 - DNA, 25 bp, Homo sapien
aagaaaacacaatgaactctgttac

SEQ ID NO: 790252 - DNA, 25 bp, Homo sapien
caatggtggagccaatgtgtcatgc

SEQ ID NO: 790253 - DNA, 25 bp, Homo sapien
gccaatgtgtcatgctagtcctctc

SEQ ID NO: 790254 - DNA, 25 bp, Homo sapien
ggaacagactaacagagcctgtcac

SEQ ID NO: 790255 - DNA, 25 bp, Homo sapien
ggcctgtccttcaaataagggagga

SEQ ID NO: 790256 - DNA, 25 bp, Homo sapien
aagctaaggtaagaacttgcagtct

SEQ ID NO: 790257 - DNA, 25 bp, Homo sapien
taaggtaagaacttgcagtcttgtc

SEQ ID NO: 790258 - DNA, 25 bp, Homo sapien
aacaaagctaaggtaagaacttgca

SEQ ID NO: 790259 - DNA, 25 bp, Homo sapien
taagaacttgcagtcttgtcaacat

SEQ ID NO: 790260 - DNA, 25 bp, Homo sapien
gaatggcataggatccatcaggaca

SEQ ID NO: 790261 - DNA, 25 bp, Homo sapien
tggaaacactgctataagagccacc

SEQ ID NO: 790262 - DNA, 25 bp, Homo sapien
catcaggacacatatactcagcttc

SEQ ID NO: 790263 - DNA, 25 bp, Homo sapien
gattgctccaatgcataggtatccc

SEQ ID NO: 790264 - DNA, 25 bp, Homo sapien
aatcatagcgcgacttatcactgag

SEQ ID NO: 790265 - DNA, 25 bp, Homo sapien
gggcacggtcctggcaaagtaatca

SEQ ID NO: 790266 - DNA, 25 bp, Homo sapien
tgaagaagcgcaagatctcagccat

SEQ ID NO: 790267 - DNA, 25 bp, Homo sapien
cctcggaggctactgtggacacgta

SEQ ID NO: 790268 - DNA, 25 bp, Homo sapien
tcgtagttgctgctgtcgatggcca

SEQ ID NO: 790269 - DNA, 25 bp, Homo sapien
cattttgtgcaaagcgtgggccatg

SEQ ID NO: 790270 - DNA, 25 bp, Homo sapien
tctgcaacagttctcggatcacgct

SEQ ID NO: 790271 - DNA, 25 bp, Homo sapien
gcttgtcgcagacgcgcctgtggtt

SEQ ID NO: 790272 - DNA, 25 bp, Homo sapien
catctgagaagatgtttaaaggctc

SEQ ID NO: 790273 - DNA, 25 bp, Homo sapien
aagatgtttaaaggctcttggctta

SEQ ID NO: 790274 - DNA, 25 bp, Homo sapien
gtttgcatctgagaagatgtttaaa

SEQ ID NO: 790275 - DNA, 25 bp, Homo sapien
ctgagaagatgtttaaaggctcttg

SEQ ID NO: 790276 - DNA, 25 bp, Homo sapien
tcactgtgccttggatggccctgta

SEQ ID NO: 790277 - DNA, 25 bp, Homo sapien
catctaaagatgtggccattaccat

SEQ ID NO: 790278 - DNA, 25 bp, Homo sapien
aaatgttccaggggaggaagcaaga

SEQ ID NO: 790279 - DNA, 25 bp, Homo sapien
acaaatgttccaggggaggaagcaa

SEQ ID NO: 790280 - DNA, 25 bp, Homo sapien
ttcatctaaagatgtggccattacc

SEQ ID NO: 790281 - DNA, 25 bp, Homo sapien
tatgcaaagccattaagcaaagatt

SEQ ID NO: 790282 - DNA, 25 bp, Homo sapien
tctatgcaaagccattaagcaaaga

SEQ ID NO: 790283 - DNA, 25 bp, Homo sapien
tgcaaagccattaagcaaagattgt

SEQ ID NO: 790284 - DNA, 25 bp, Homo sapien
ctctatgcaaagccattaagcaaag

SEQ ID NO: 790285 - DNA, 25 bp, Homo sapien
taaccaccaggtttctgccagaacc

SEQ ID NO: 790286 - DNA, 25 bp, Homo sapien
tctgccagaacctgccatgttcagg

SEQ ID NO: 790287 - DNA, 25 bp, Homo sapien
tggtgcatttgacgcaaattgttct

SEQ ID NO: 790288 - DNA, 25 bp, Homo sapien
ttctgtccagcagatggtgcatttg

SEQ ID NO: 790289 - DNA, 25 bp, Homo sapien
aggtctgactggtgaatctaacatt

SEQ ID NO: 790290 - DNA, 25 bp, Homo sapien
caggtctgactggtgaatctaacat

SEQ ID NO: 790291 - DNA, 25 bp, Homo sapien
ggtctgactggtgaatctaacattc

SEQ ID NO: 790292 - DNA, 25 bp, Homo sapien
tctgactggtgaatctaacattctc

SEQ ID NO: 790293 - DNA, 25 bp, Homo sapien
taacaaccacagactattttgcctg

SEQ ID NO: 790294 - DNA, 25 bp, Homo sapien
tagctcctggtggtatgccggcaat

SEQ ID NO: 790295 - DNA, 25 bp, Homo sapien
taacttggttacctgtataagcact

SEQ ID NO: 790296 - DNA, 25 bp, Homo sapien
ctttagctgggttatcctagaagca

SEQ ID NO: 790297 - DNA, 25 bp, Homo sapien
tttgagctgaaagtccatagtggtc

SEQ ID NO: 790298 - DNA, 25 bp, Homo sapien
agcattaccagttcccttgttcccg

SEQ ID NO: 790299 - DNA, 25 bp, Homo sapien
ttgtcaatactctaggcaactcaga

SEQ ID NO: 790300 - DNA, 25 bp, Homo sapien
tcattgaatctttgcttagggacct

SEQ ID NO: 790301 - DNA, 25 bp, Homo sapien
catcacttcacctttcactggtgtt

SEQ ID NO: 790302 - DNA, 25 bp, Homo sapien
ttctgacccaattcagagcctgctc

SEQ ID NO: 790303 - DNA, 25 bp, Homo sapien
tctgacccaattcagagcctgctcc

SEQ ID NO: 790304 - DNA, 25 bp, Homo sapien
tcggcgcaatgcacagatgactggt

SEQ ID NO: 790305 - DNA, 25 bp, Homo sapien
gaaattgaacacgttgtatcgcccc

SEQ ID NO: 790306 - DNA, 25 bp, Homo sapien
cagccaggtattcgtagggttcaca

SEQ ID NO: 790307 - DNA, 25 bp, Homo sapien
taagatgtagcagagttctcggccc

SEQ ID NO: 790308 - DNA, 25 bp, Homo sapien
gagatgcacatggttgtcgtctgca

SEQ ID NO: 790309 - DNA, 25 bp, Homo sapien
actgagagtatgtggtcccagttcc

SEQ ID NO: 790310 - DNA, 25 bp, Homo sapien
tgaacctgttgaggtgcagtctgtg

SEQ ID NO: 790311 - DNA, 25 bp, Homo sapien
gaaccttgggtgcaaacaaacagcc

SEQ ID NO: 790312 - DNA, 25 bp, Homo sapien
tgaggtctggatatacgcaattttg

SEQ ID NO: 790313 - DNA, 25 bp, Homo sapien
tctatggaagacttatggactctgc

SEQ ID NO: 790314 - DNA, 25 bp, Homo sapien
gcaattttgaataacgtctatggaa

SEQ ID NO: 790315 - DNA, 25 bp, Homo sapien
taacgtctatggaagacttatggac

SEQ ID NO: 790316 - DNA, 25 bp, Homo sapien
gatggcatgtgcctcaagtgctgag

SEQ ID NO: 790317 - DNA, 25 bp, Homo sapien
cagaaatagcacttggtctcagtcc

SEQ ID NO: 790318 - DNA, 25 bp, Homo sapien
gactgcttcctctttatgacccaaa

SEQ ID NO: 790319 - DNA, 25 bp, Homo sapien
tatactgtgggataaaaatctgcaa

SEQ ID NO: 790320 - DNA, 25 bp, Homo sapien
ctaggagagcactctaggtcattca

SEQ ID NO: 790321 - DNA, 25 bp, Homo sapien
tattgtacctaattccagcttcatc

SEQ ID NO: 790322 - DNA, 25 bp, Homo sapien
catcaaatgtaggtaaggtaagaga

SEQ ID NO: 790323 - DNA, 25 bp, Homo sapien
gagattcaaaatgggttactggaaa

SEQ ID NO: 790324 - DNA, 25 bp, Homo sapien
gttggcacatacgtgcttgcagagg

SEQ ID NO: 790325 - DNA, 25 bp, Homo sapien
gcccattgcacaccgttggcacata

SEQ ID NO: 790326 - DNA, 25 bp, Homo sapien
tggtggagtcgaggacttcccgccc

SEQ ID NO: 790327 - DNA, 25 bp, Homo sapien
agtcgaggacttcccgcccattgca

SEQ ID NO: 790328 - DNA, 25 bp, Homo sapien
ttagtagactgaccatgtcagaccc

SEQ ID NO: 790329 - DNA, 25 bp, Homo sapien
ggcactagactcagcctagaaagtt

SEQ ID NO: 790330 - DNA, 25 bp, Homo sapien
cctgtcaccaatgctcagctctgta

SEQ ID NO: 790331 - DNA, 25 bp, Homo sapien
tattctggagctgcacgtgagcact

SEQ ID NO: 790332 - DNA, 25 bp, Homo sapien
caggtgggtcatgattgactgcttc

SEQ ID NO: 790333 - DNA, 25 bp, Homo sapien
ggtgggtcatgattgactgcttctt

SEQ ID NO: 790334 - DNA, 25 bp, Homo sapien
ccaggtgggtcatgattgactgctt

SEQ ID NO: 790335 - DNA, 25 bp, Homo sapien
gggtcatgattgactgcttcttcaa

SEQ ID NO: 790336 - DNA, 25 bp, Homo sapien
ggcttgactgaaagtttgaaggaat

SEQ ID NO: 790337 - DNA, 25 bp, Homo sapien
ctcgttggagctggtaagaagggct

SEQ ID NO: 790338 - DNA, 25 bp, Homo sapien
tgaaattccatcctcgttggagctg

SEQ ID NO: 790339 - DNA, 25 bp, Homo sapien
taagaagggcttgactgaaagtttg

SEQ ID NO: 790340 - DNA, 25 bp, Homo sapien
ctctataccctgtcttgcattctct

SEQ ID NO: 790341 - DNA, 25 bp, Homo sapien
cttcttttattactctataccctgt

SEQ ID NO: 790342 - DNA, 25 bp, Homo sapien
tattactctataccctgtcttgcat

SEQ ID NO: 790343 - DNA, 25 bp, Homo sapien
ttttattactctataccctgtcttg

SEQ ID NO: 790344 - DNA, 25 bp, Homo sapien
acaacaagcatcagaaatggtggcc

SEQ ID NO: 790345 - DNA, 25 bp, Homo sapien
taaagggattccacttgaaacttga

SEQ ID NO: 790346 - DNA, 25 bp, Homo sapien
cagccgcagacaacaagcatcagaa

SEQ ID NO: 790347 - DNA, 25 bp, Homo sapien
ttgaggcgaagacgcagccgcagac

SEQ ID NO: 790348 - DNA, 25 bp, Homo sapien
tacagaagtgcaggtaggctggagc

SEQ ID NO: 790349 - DNA, 25 bp, Homo sapien
ggagcttgcacgtttagacattttc

SEQ ID NO: 790350 - DNA, 25 bp, Homo sapien
gacattttctcctactgacctcacg

SEQ ID NO: 790351 - DNA, 25 bp, Homo sapien
tcctactgacctcacggctttcttg

SEQ ID NO: 790352 - DNA, 25 bp, Homo sapien
gtttggctgactccctcactatgcc

SEQ ID NO: 790353 - DNA, 25 bp, Homo sapien
aagttctccagccagaaactgagct

SEQ ID NO: 790354 - DNA, 25 bp, Homo sapien
gaggtttggctgactccctcactat

SEQ ID NO: 790355 - DNA, 25 bp, Homo sapien
ctccctcactatgccacttcctctg

SEQ ID NO: 790356 - DNA, 25 bp, Homo sapien
cagagatcctacttgttggctttgc

SEQ ID NO: 790357 - DNA, 25 bp, Homo sapien
ctgtagattctatgagaacagccct

SEQ ID NO: 790358 - DNA, 25 bp, Homo sapien
gtggctccaatagcacaacattgcc

SEQ ID NO: 790359 - DNA, 25 bp, Homo sapien
gaagactttgctttattagggctca

SEQ ID NO: 790360 - DNA, 25 bp, Homo sapien
tgtaaagtactgtgaatgagactct

SEQ ID NO: 790361 - DNA, 25 bp, Homo sapien
aaaatgtaaagtactgtgaatgaga

SEQ ID NO: 790362 - DNA, 25 bp, Homo sapien
tgaaaaatgtaaagtactgtgaatg

SEQ ID NO: 790363 - DNA, 25 bp, Homo sapien
cattggtaatacttaatgaaaaatg

SEQ ID NO: 790364 - DNA, 25 bp, Homo sapien
aacctagagctttatattttatcag

SEQ ID NO: 790365 - DNA, 25 bp, Homo sapien
ggagtcttgtccatccctatttcta

SEQ ID NO: 790366 - DNA, 25 bp, Homo sapien
aatggactgttaactgacaccctac

SEQ ID NO: 790367 - DNA, 25 bp, Homo sapien
gaaaatttgttgtgtaaagagccca

SEQ ID NO: 790368 - DNA, 25 bp, Homo sapien
ctgtaaatttttggggcattgctct

SEQ ID NO: 790369 - DNA, 25 bp, Homo sapien
tttctcctgtgatttctacccatct

SEQ ID NO: 790370 - DNA, 25 bp, Homo sapien
gtgatttctacccatcttgtaccca

SEQ ID NO: 790371 - DNA, 25 bp, Homo sapien
tcctgtgatttctacccatcttgta

SEQ ID NO: 790372 - DNA, 25 bp, Homo sapien
gagaactttttactttgggtgctgc

SEQ ID NO: 790373 - DNA, 25 bp, Homo sapien
tacttcagtatggtcagttcttaca

SEQ ID NO: 790374 - DNA, 25 bp, Homo sapien
ccttttccatggacattcagaaccc

SEQ ID NO: 790375 - DNA, 25 bp, Homo sapien
ccacgttgtgtagttactgggcgag

SEQ ID NO: 790376 - DNA, 25 bp, Homo sapien
atctcgtcttagaatccatcttttg

SEQ ID NO: 790377 - DNA, 25 bp, Homo sapien
atcttttgtagcagtaggtgatcac

SEQ ID NO: 790378 - DNA, 25 bp, Homo sapien
atgtcccatttaggcttatctcgtc

SEQ ID NO: 790379 - DNA, 25 bp, Homo sapien
tcttttgtagcagtaggtgatcacc

SEQ ID NO: 790380 - DNA, 25 bp, Homo sapien
tactagctgtggacctgttttatat

SEQ ID NO: 790381 - DNA, 25 bp, Homo sapien
gtgggcattcttgttgtgttcaaga

SEQ ID NO: 790382 - DNA, 25 bp, Homo sapien
cagtgggcattcttgttgtgttcaa

SEQ ID NO: 790383 - DNA, 25 bp, Homo sapien
tgatactagctgtggacctgtttta

SEQ ID NO: 790384 - DNA, 25 bp, Homo sapien
agtattgccgcggtgtattttatag

SEQ ID NO: 790385 - DNA, 25 bp, Homo sapien
ctggctgaagtattgccgcggtgta

SEQ ID NO: 790386 - DNA, 25 bp, Homo sapien
ccgcggtgtattttatagcttgtaa

SEQ ID NO: 790387 - DNA, 25 bp, Homo sapien
ggctgaagtattgccgcggtgtatt

SEQ ID NO: 790388 - DNA, 25 bp, Homo sapien
tgaaggctgagagcggttcctgttt

SEQ ID NO: 790389 - DNA, 25 bp, Homo sapien
ggatgcttttctgtccgcgcttgtg

SEQ ID NO: 790390 - DNA, 25 bp, Homo sapien
gactttgcggcgtcctttttggaca

SEQ ID NO: 790391 - DNA, 25 bp, Homo sapien
agggtgtgtggcttcgctgtctctc

SEQ ID NO: 790392 - DNA, 25 bp, Homo sapien
cgcccgcttcctccttgccaggagg

SEQ ID NO: 790393 - DNA, 25 bp, Homo sapien
tcctccttgccaggaggtgagcagc

SEQ ID NO: 790394 - DNA, 25 bp, Homo sapien
cagccgcccgcttcctccttgccag

SEQ ID NO: 790395 - DNA, 25 bp, Homo sapien
ccgcttcctccttgccaggaggtga

SEQ ID NO: 790396 - DNA, 25 bp, Homo sapien
tcttgagatccttgccactgaggaa

SEQ ID NO: 790397 - DNA, 25 bp, Homo sapien
gaaaaaacgaagagcacctcaatca

SEQ ID NO: 790398 - DNA, 25 bp, Homo sapien
tgaggaaggccttatgtccatcttg

SEQ ID NO: 790399 - DNA, 25 bp, Homo sapien
ccatcacctagttcagtatgttttt

SEQ ID NO: 790400 - DNA, 25 bp, Homo sapien
tggaaccgaaaaagagcccacatcg

SEQ ID NO: 790401 - DNA, 25 bp, Homo sapien
aaccgaaaaagagcccacatcgcca

SEQ ID NO: 790402 - DNA, 25 bp, Homo sapien
aataacgctgcatatctacaactat

SEQ ID NO: 790403 - DNA, 25 bp, Homo sapien
cgaaaaagagcccacatcgccaagt

SEQ ID NO: 790404 - DNA, 25 bp, Homo sapien
tccatcaggtaagtgggggttggtc

SEQ ID NO: 790405 - DNA, 25 bp, Homo sapien
acaaatccatcaggtaagtgggggt

SEQ ID NO: 790406 - DNA, 25 bp, Homo sapien
ggggttggtctgctggctttactac

SEQ ID NO: 790407 - DNA, 25 bp, Homo sapien
gggggttggtctgctggctttacta

SEQ ID NO: 790408 - DNA, 25 bp, Homo sapien
ggcatgttaagcactctctgggcag

SEQ ID NO: 790409 - DNA, 25 bp, Homo sapien
tatcaatctggttagcatttcctct

SEQ ID NO: 790410 - DNA, 25 bp, Homo sapien
ccttggtggcaattccaggttgatt

SEQ ID NO: 790411 - DNA, 25 bp, Homo sapien
tacagtagtaagaacgatgaccagc

SEQ ID NO: 790412 - DNA, 25 bp, Homo sapien
gcccagctgggagatagtactaata

SEQ ID NO: 790413 - DNA, 25 bp, Homo sapien
cagcttcagacttactatgagtgat

SEQ ID NO: 790414 - DNA, 25 bp, Homo sapien
taagattaatacctgaggattttca

SEQ ID NO: 790415 - DNA, 25 bp, Homo sapien
gatattattgtatgtgaggtgcaaa

SEQ ID NO: 790416 - DNA, 25 bp, Homo sapien
ggtttggacaccaatacatcactgt

SEQ ID NO: 790417 - DNA, 25 bp, Homo sapien
ctgccaacagcgtaggcaggtttgg

SEQ ID NO: 790418 - DNA, 25 bp, Homo sapien
gatgctgccaacagcgtaggcaggt

SEQ ID NO: 790419 - DNA, 25 bp, Homo sapien
acatcactgtcccatggtggggaca

SEQ ID NO: 790420 - DNA, 25 bp, Homo sapien
tctcacaggatgtaatcttctccag

SEQ ID NO: 790421 - DNA, 25 bp, Homo sapien
agatcccatgcagctcttcttctga

SEQ ID NO: 790422 - DNA, 25 bp, Homo sapien
tccagacttgtgagttgtatttgcc

SEQ ID NO: 790423 - DNA, 25 bp, Homo sapien
ttgtatttgcctggttgctgcactg

SEQ ID NO: 790424 - DNA, 25 bp, Homo sapien
caattgcttatcgtgctgtggtgac

SEQ ID NO: 790425 - DNA, 25 bp, Homo sapien
tctgatacagagcatccctcttggg

SEQ ID NO: 790426 - DNA, 25 bp, Homo sapien
cataagagcacggtgggaacggcaa

SEQ ID NO: 790427 - DNA, 25 bp, Homo sapien
cagggagctgctttcctcataagag

SEQ ID NO: 790428 - DNA, 25 bp, Homo sapien
catgaccccttggtattgcagagct

SEQ ID NO: 790429 - DNA, 25 bp, Homo sapien
tctttggaggaaatgtggcgttaca

SEQ ID NO: 790430 - DNA, 25 bp, Homo sapien
cacatcctgggagagtagaaattga

SEQ ID NO: 790431 - DNA, 25 bp, Homo sapien
caagtgcttttcttttgaggtccaa

SEQ ID NO: 790432 - DNA, 25 bp, Homo sapien
taccattgtagaccaattgctagag

SEQ ID NO: 790433 - DNA, 25 bp, Homo sapien
gaaatccgtctcctgctatgggtaa

SEQ ID NO: 790434 - DNA, 25 bp, Homo sapien
ggaaggaatccatggtactttacca

SEQ ID NO: 790435 - DNA, 25 bp, Homo sapien
gctgtctgccatggaatcattctct

SEQ ID NO: 790436 - DNA, 25 bp, Homo sapien
atagttccctgtggctccgagccga

SEQ ID NO: 790437 - DNA, 25 bp, Homo sapien
tgtcggcgcgcgaaaaaaggtcctg

SEQ ID NO: 790438 - DNA, 25 bp, Homo sapien
tatgacgcaactgtggttcctctgg

SEQ ID NO: 790439 - DNA, 25 bp, Homo sapien
aaagaggtccttctgctatgacgca

SEQ ID NO: 790440 - DNA, 25 bp, Homo sapien
cgcgacgagccaccggaaacggagc

SEQ ID NO: 790441 - DNA, 25 bp, Homo sapien
tgcagctggagtgagcgagcgcgac

SEQ ID NO: 790442 - DNA, 25 bp, Homo sapien
cgagcgcgacgagccaccggaaacg

SEQ ID NO: 790443 - DNA, 25 bp, Homo sapien
acgagccaccggaaacggagctgcg

SEQ ID NO: 790444 - DNA, 25 bp, Homo sapien
cagctgcaacgtcaggaaggccagg

SEQ ID NO: 790445 - DNA, 25 bp, Homo sapien
cgccgacagcttgcgccagccggcg

SEQ ID NO: 790446 - DNA, 25 bp, Homo sapien
ccggcgggagctagcgggcagcaag

SEQ ID NO: 790447 - DNA, 25 bp, Homo sapien
gggacggcagctgcaacgtcaggaa

SEQ ID NO: 790448 - DNA, 25 bp, Homo sapien
gctgtgcctcggcagccgctcgctt

SEQ ID NO: 790449 - DNA, 25 bp, Homo sapien
gggtcccggcgccatttagctcctc

SEQ ID NO: 790450 - DNA, 25 bp, Homo sapien
agctcctccgaagccgccgccattt

SEQ ID NO: 790451 - DNA, 25 bp, Homo sapien
gccgctgtgcctcggcagccgctcg

SEQ ID NO: 790452 - DNA, 25 bp, Homo sapien
tggcccagttctctactcaacctcc

SEQ ID NO: 790453 - DNA, 25 bp, Homo sapien
ggttttttccagatacaatcaggct

SEQ ID NO: 790454 - DNA, 25 bp, Homo sapien
ttttccagatacaatcaggctggtt

SEQ ID NO: 790455 - DNA, 25 bp, Homo sapien
ttccagatacaatcaggctggtttt

SEQ ID NO: 790456 - DNA, 25 bp, Homo sapien
ttttttccagatacaatcaggctgg

SEQ ID NO: 790457 - DNA, 25 bp, Homo sapien
gacagggcaatagcattttggctcc

SEQ ID NO: 790458 - DNA, 25 bp, Homo sapien
gcaggtgctaaatcagtccccaaaa

SEQ ID NO: 790459 - DNA, 25 bp, Homo sapien
ggctccaccattagctcaactgcaa

SEQ ID NO: 790460 - DNA, 25 bp, Homo sapien
gattcacgcagaatatgcaggtgct

SEQ ID NO: 790461 - DNA, 25 bp, Homo sapien
ccactttctcgggtcttcttgtatc

SEQ ID NO: 790462 - DNA, 25 bp, Homo sapien
tcttcttgtatcatttggagacata

SEQ ID NO: 790463 - DNA, 25 bp, Homo sapien
atcatttagtttaccactttctcgg

SEQ ID NO: 790464 - DNA, 25 bp, Homo sapien
tgtatcatttggagacataaaggag

SEQ ID NO: 790465 - DNA, 25 bp, Homo sapien
tctgatacgtaacacctgatgggaa

SEQ ID NO: 790466 - DNA, 25 bp, Homo sapien
tcatgcatggttcaggagcttacaa

SEQ ID NO: 790467 - DNA, 25 bp, Homo sapien
gtggaaaagtttgagcagcagagcc

SEQ ID NO: 790468 - DNA, 25 bp, Homo sapien
tttctacaaggcaccatcagaggct

SEQ ID NO: 790469 - DNA, 25 bp, Homo sapien
tataaccttatagctcccaatgaaa

SEQ ID NO: 790470 - DNA, 25 bp, Homo sapien
tctgggccacaaaagttgatagttt

SEQ ID NO: 790471 - DNA, 25 bp, Homo sapien
cacataaccttaagtgtggtacaaa

SEQ ID NO: 790472 - DNA, 25 bp, Homo sapien
caattgcaggtttgtacatgttgtc

SEQ ID NO: 790473 - DNA, 25 bp, Homo sapien
gcacaataccttagcacgttaaaga

SEQ ID NO: 790474 - DNA, 25 bp, Homo sapien
cctgagggtagcagcaaatccaaat

SEQ ID NO: 790475 - DNA, 25 bp, Homo sapien
cagttattagaaagctgtgcaagga

SEQ ID NO: 790476 - DNA, 25 bp, Homo sapien
gaaaaccatggacgatctgcttgag

SEQ ID NO: 790477 - DNA, 25 bp, Homo sapien
caaaaggaccaagtgcaatcaagac

SEQ ID NO: 790478 - DNA, 25 bp, Homo sapien
taaagacagtcatgtaacacgtaac

SEQ ID NO: 790479 - DNA, 25 bp, Homo sapien
tgttggactaagaaacggtggtgaa

SEQ ID NO: 790480 - DNA, 25 bp, Homo sapien
gaaaacaggaaaatcgccaactctg

SEQ ID NO: 790481 - DNA, 25 bp, Homo sapien
aatgtgcctggtcccgtcatcctaa

SEQ ID NO: 790482 - DNA, 25 bp, Homo sapien
tctagagcactccactaaatttggg

SEQ ID NO: 790483 - DNA, 25 bp, Homo sapien
tagagttcaacaggccaggattaga

SEQ ID NO: 790484 - DNA, 25 bp, Homo sapien
gaagtagctacgtaatctggcaata

SEQ ID NO: 790485 - DNA, 25 bp, Homo sapien
tctatgaactgtagactgtggtacc

SEQ ID NO: 790486 - DNA, 25 bp, Homo sapien
aaacttaacactgcaccaggcgtgg

SEQ ID NO: 790487 - DNA, 25 bp, Homo sapien
gaaaaaggtacagatcctgctggag

SEQ ID NO: 790488 - DNA, 25 bp, Homo sapien
tctcatcaggcagacaaacgttctc

SEQ ID NO: 790489 - DNA, 25 bp, Homo sapien
aaggacagaaatgatgactattcac

SEQ ID NO: 790490 - DNA, 25 bp, Homo sapien
gtattccccaatgaaggacagaaat

SEQ ID NO: 790491 - DNA, 25 bp, Homo sapien
gaaggacagaaatgatgactattca

SEQ ID NO: 790492 - DNA, 25 bp, Homo sapien
aaagtattccccaatgaaggacaga

SEQ ID NO: 790493 - DNA, 25 bp, Homo sapien
gcttaataagaacaaacgaatagta

SEQ ID NO: 790494 - DNA, 25 bp, Homo sapien
acaaacgaatagtatagcagtatgc

SEQ ID NO: 790495 - DNA, 25 bp, Homo sapien
tgctgatgacaatctaggcccaagc

SEQ ID NO: 790496 - DNA, 25 bp, Homo sapien
aagcctctgtgatatctcatctgga

SEQ ID NO: 790497 - DNA, 25 bp, Homo sapien
gacaacggatggatcagctacagcc

SEQ ID NO: 790498 - DNA, 25 bp, Homo sapien
tgttacccagattgtttctctccca

SEQ ID NO: 790499 - DNA, 25 bp, Homo sapien
gcatcactttcatgttacccagatt

SEQ ID NO: 790500 - DNA, 25 bp, Homo sapien
cagcccttcccacagaatcaagttg

SEQ ID NO: 790501 - DNA, 25 bp, Homo sapien
ggaaatcatgatctagttttgacaa

SEQ ID NO: 790502 - DNA, 25 bp, Homo sapien
aatcatgtgagatccttgcaacaga

SEQ ID NO: 790503 - DNA, 25 bp, Homo sapien
tcttaagggtcctagagccttgaac

SEQ ID NO: 790504 - DNA, 25 bp, Homo sapien
ctggctcctatacacaagatattag

SEQ ID NO: 790505 - DNA, 25 bp, Homo sapien
tcttgttcagacagatggaataact

SEQ ID NO: 790506 - DNA, 25 bp, Homo sapien
cagacagatggaataactagtctca

SEQ ID NO: 790507 - DNA, 25 bp, Homo sapien
tggaataactagtctcagaatatag

SEQ ID NO: 790508 - DNA, 25 bp, Homo sapien
cagatggaataactagtctcagaat

SEQ ID NO: 790509 - DNA, 25 bp, Homo sapien
tctgtgtcctgagtcaaagtcacag

SEQ ID NO: 790510 - DNA, 25 bp, Homo sapien
tcacagtttctactgttactgtgtc

SEQ ID NO: 790511 - DNA, 25 bp, Homo sapien
cagtgaagaatgagattcccttctg

SEQ ID NO: 790512 - DNA, 25 bp, Homo sapien
ctgagtcaaagtcacagagttcaca

SEQ ID NO: 790513 - DNA, 25 bp, Homo sapien
tcttctgagtctatttcatccgctt

SEQ ID NO: 790514 - DNA, 25 bp, Homo sapien
caactgatatgcaaggagtagaatc

SEQ ID NO: 790515 - DNA, 25 bp, Homo sapien
caaagccttttatgtggaggttcaa

SEQ ID NO: 790516 - DNA, 25 bp, Homo sapien
gagtagaatcatcaatactctgatc

SEQ ID NO: 790517 - DNA, 25 bp, Homo sapien
tggcagatgactacaaaaagaagtg

SEQ ID NO: 790518 - DNA, 25 bp, Homo sapien
cagaagtagcggtaggaaaacagaa

SEQ ID NO: 790519 - DNA, 25 bp, Homo sapien
aacataaggcttcagtgtgtcttcc

SEQ ID NO: 790520 - DNA, 25 bp, Homo sapien
gctatgacccaacattaagcagctc

SEQ ID NO: 790521 - DNA, 25 bp, Homo sapien
ttgtattcgttgtaaagacagagtt

SEQ ID NO: 790522 - DNA, 25 bp, Homo sapien
catgcctgaccagggactttttatt

SEQ ID NO: 790523 - DNA, 25 bp, Homo sapien
taacagtatgtttgtgatactgtgg

SEQ ID NO: 790524 - DNA, 25 bp, Homo sapien
tgggaatgactcagtagaagaaaaa

SEQ ID NO: 790525 - DNA, 25 bp, Homo sapien
gtcacttcaaagctctgatcatttt

SEQ ID NO: 790526 - DNA, 25 bp, Homo sapien
ggtcacttcaaagctctgatcattt

SEQ ID NO: 790527 - DNA, 25 bp, Homo sapien
cccctcagtaacctcatcatctgct

SEQ ID NO: 790528 - DNA, 25 bp, Homo sapien
tcatctgctacttctgtggttgcag

SEQ ID NO: 790529 - DNA, 25 bp, Homo sapien
atcatctgctacttctgtggttgca

SEQ ID NO: 790530 - DNA, 25 bp, Homo sapien
tgctgaaacttcctcgttacccaag

SEQ ID NO: 790531 - DNA, 25 bp, Homo sapien
gctaactgctgaaacttcctcgtta

SEQ ID NO: 790532 - DNA, 25 bp, Homo sapien
ctttagttgtaaaccatgcttggct

SEQ ID NO: 790533 - DNA, 25 bp, Homo sapien
tattagtcagagaatccttatcttc

SEQ ID NO: 790534 - DNA, 25 bp, Homo sapien
atcaatttcttccttggaccacatc

SEQ ID NO: 790535 - DNA, 25 bp, Homo sapien
ttaagatagcgttcaatattgttca

SEQ ID NO: 790536 - DNA, 25 bp, Homo sapien
tcaatttcttccttggaccacatcc

SEQ ID NO: 790537 - DNA, 25 bp, Homo sapien
tagcgttcaatattgttcatcaaaa

SEQ ID NO: 790538 - DNA, 25 bp, Homo sapien
cactgttaaagcaatccatgcctta

SEQ ID NO: 790539 - DNA, 25 bp, Homo sapien
ccagtctgcccaaatggatcactga

SEQ ID NO: 790540 - DNA, 25 bp, Homo sapien
gtttccagtctgcccaaatggatca

SEQ ID NO: 790541 - DNA, 25 bp, Homo sapien
aaacactgttaaagcaatccatgcc

SEQ ID NO: 790542 - DNA, 25 bp, Homo sapien
ggtcaaacgcattcactaacatagc

SEQ ID NO: 790543 - DNA, 25 bp, Homo sapien
taatattttagcacactgaacccag

SEQ ID NO: 790544 - DNA, 25 bp, Homo sapien
tcccacacagcgtcaaaattaagag

SEQ ID NO: 790545 - DNA, 25 bp, Homo sapien
gcataaccttaatagtgaaaccaga

SEQ ID NO: 790546 - DNA, 25 bp, Homo sapien
ggccggttcagaccccatgctatag

SEQ ID NO: 790547 - DNA, 25 bp, Homo sapien
tctataaactgcaaacaaaggccgg

SEQ ID NO: 790548 - DNA, 25 bp, Homo sapien
tctttcgtcttttgacatctcaaag

SEQ ID NO: 790549 - DNA, 25 bp, Homo sapien
cccacatggtttctgtcatcataca

SEQ ID NO: 790550 - DNA, 25 bp, Homo sapien
aaaggccactgacctaggaatgcta

SEQ ID NO: 790551 - DNA, 25 bp, Homo sapien
cagtaacagtatataatcattgcat

SEQ ID NO: 790552 - DNA, 25 bp, Homo sapien
caccatattcacaacatggacctgg

SEQ ID NO: 790553 - DNA, 25 bp, Homo sapien
taatgatgccttcccataaatgcta

SEQ ID NO: 790554 - DNA, 25 bp, Homo sapien
gagaaagagctccaacattagctcg

SEQ ID NO: 790555 - DNA, 25 bp, Homo sapien
tatctaataagccatactactgcca

SEQ ID NO: 790556 - DNA, 25 bp, Homo sapien
tagctcggcagtatctaataagcca

SEQ ID NO: 790557 - DNA, 25 bp, Homo sapien
ccaacattagctcggcagtatctaa

SEQ ID NO: 790558 - DNA, 25 bp, Homo sapien
tttacccaggtatggacatctgaca

SEQ ID NO: 790559 - DNA, 25 bp, Homo sapien
cagtaggcaagtactcaatacagcc

SEQ ID NO: 790560 - DNA, 25 bp, Homo sapien
gggtgacattgtaaactagagctaa

SEQ ID NO: 790561 - DNA, 25 bp, Homo sapien
taataattatgaaacgctgctcact

SEQ ID NO: 790562 - DNA, 25 bp, Homo sapien
gagcttctcaatttcttcaggtgta

SEQ ID NO: 790563 - DNA, 25 bp, Homo sapien
tgagcttctcaatttcttcaggtgt

SEQ ID NO: 790564 - DNA, 25 bp, Homo sapien
gcttctcaatttcttcaggtgtata

SEQ ID NO: 790565 - DNA, 25 bp, Homo sapien
cttgagcttctcaatttcttcaggt

SEQ ID NO: 790566 - DNA, 25 bp, Homo sapien
aaaaaaaacaggcagcaattgcctt

SEQ ID NO: 790567 - DNA, 25 bp, Homo sapien
aaaaaacaggcagcaattgcctttt

SEQ ID NO: 790568 - DNA, 25 bp, Homo sapien
aaaacaggcagcaattgcctttttc

SEQ ID NO: 790569 - DNA, 25 bp, Homo sapien
gaaaaaaaaacaggcagcaattgcc

SEQ ID NO: 790570 - DNA, 25 bp, Homo sapien
tcttcttcccatttgactggtttgg

SEQ ID NO: 790571 - DNA, 25 bp, Homo sapien
ctttgagagccaaagtttgaaagtg

SEQ ID NO: 790572 - DNA, 25 bp, Homo sapien
ttcttcccatttgactggtttggaa

SEQ ID NO: 790573 - DNA, 25 bp, Homo sapien
cttcttcttcccatttgactggttt

SEQ ID NO: 790574 - DNA, 25 bp, Homo sapien
ccaatcagcatttggttcaattgtt

SEQ ID NO: 790575 - DNA, 25 bp, Homo sapien
tgccaatcagcatttggttcaattg

SEQ ID NO: 790576 - DNA, 25 bp, Homo sapien
ctgccaatcagcatttggttcaatt

SEQ ID NO: 790577 - DNA, 25 bp, Homo sapien
gccaatcagcatttggttcaattgt

SEQ ID NO: 790578 - DNA, 25 bp, Homo sapien
gtcggcaccgatctttgacagaaga

SEQ ID NO: 790579 - DNA, 25 bp, Homo sapien
tgtgttgcaagtatccttcatcagt

SEQ ID NO: 790580 - DNA, 25 bp, Homo sapien
aagatgcacttcttcctagcgccgc

SEQ ID NO: 790581 - DNA, 25 bp, Homo sapien
tattgttgcccagtcattgccatgc

SEQ ID NO: 790582 - DNA, 25 bp, Homo sapien
ttaggtttaacagtatgatcaggac

SEQ ID NO: 790583 - DNA, 25 bp, Homo sapien
aaatgacagttaatagcagagccta

SEQ ID NO: 790584 - DNA, 25 bp, Homo sapien
ggacatctgcatgcattaagaggca

SEQ ID NO: 790585 - DNA, 25 bp, Homo sapien
tacgttgttggtcgcaaagattagg

SEQ ID NO: 790586 - DNA, 25 bp, Homo sapien
gaacgacattgcttttctgagcggg

SEQ ID NO: 790587 - DNA, 25 bp, Homo sapien
ggctcagtgcttgtcaactcatgaa

SEQ ID NO: 790588 - DNA, 25 bp, Homo sapien
gtttccaattcaggtagttgagcca

SEQ ID NO: 790589 - DNA, 25 bp, Homo sapien
tgagcgggtaccgactcgttcagcc

SEQ ID NO: 790590 - DNA, 25 bp, Homo sapien
ttgaagggcatggagactgaacagc

SEQ ID NO: 790591 - DNA, 25 bp, Homo sapien
tgtggaggtaactacagactgggcc

SEQ ID NO: 790592 - DNA, 25 bp, Homo sapien
tggaaaagctacactgccgctgcct

SEQ ID NO: 790593 - DNA, 25 bp, Homo sapien
tgattttcggtagggagtagccatg

SEQ ID NO: 790594 - DNA, 25 bp, Homo sapien
cagggaacgaaacatccttatggtt

SEQ ID NO: 790595 - DNA, 25 bp, Homo sapien
catttacttcgtagccattgtggtg

SEQ ID NO: 790596 - DNA, 25 bp, Homo sapien
cattgtggtgaacggacactactcc

SEQ ID NO: 790597 - DNA, 25 bp, Homo sapien
cagatcccagttaatgtcattttca

SEQ ID NO: 790598 - DNA, 25 bp, Homo sapien
gaagggcccttgactgttggtctag

SEQ ID NO: 790599 - DNA, 25 bp, Homo sapien
gcatgtcggcctggacaaccaagct

SEQ ID NO: 790600 - DNA, 25 bp, Homo sapien
tatggtattcttgcgcagggaagcc

SEQ ID NO: 790601 - DNA, 25 bp, Homo sapien
aatagtgtatgttttccccgccagg

SEQ ID NO: 790602 - DNA, 25 bp, Homo sapien
ggagatgggtagacaaaaagaacat

SEQ ID NO: 790603 - DNA, 25 bp, Homo sapien
gaacattgattctccgacagaccac

SEQ ID NO: 790604 - DNA, 25 bp, Homo sapien
aaaagaacattgattctccgacaga

SEQ ID NO: 790605 - DNA, 25 bp, Homo sapien
cattgattctccgacagaccaccat

SEQ ID NO: 790606 - DNA, 25 bp, Homo sapien
tttggttctcatgtaactgtttaag

SEQ ID NO: 790607 - DNA, 25 bp, Homo sapien
ctggaattggtattactgtttggaa

SEQ ID NO: 790608 - DNA, 25 bp, Homo sapien
tctcatgtaactgtttaagaccttt

SEQ ID NO: 790609 - DNA, 25 bp, Homo sapien
ttggtattactgtttggaactccag

SEQ ID NO: 790610 - DNA, 25 bp, Homo sapien
gagatggctgtattatcttccaagc

SEQ ID NO: 790611 - DNA, 25 bp, Homo sapien
tgtattatcttccaagcgggcaact

SEQ ID NO: 790612 - DNA, 25 bp, Homo sapien
catgggtgatctggactggaatctg

SEQ ID NO: 790613 - DNA, 25 bp, Homo sapien
aaacatgggtgatctggactggaat

SEQ ID NO: 790614 - DNA, 25 bp, Homo sapien
tattgtttctgagtcaacggtagca

SEQ ID NO: 790615 - DNA, 25 bp, Homo sapien
tccactgtttagtgttattgtttct

SEQ ID NO: 790616 - DNA, 25 bp, Homo sapien
aatctcaaatgtctgtagtgttcca

SEQ ID NO: 790617 - DNA, 25 bp, Homo sapien
ctgagtcaacggtagcaggagagtc

SEQ ID NO: 790618 - DNA, 25 bp, Homo sapien
tgctcatgattagtttgtccacaga

SEQ ID NO: 790619 - DNA, 25 bp, Homo sapien
taacctcttcaggagctacaacaca

SEQ ID NO: 790620 - DNA, 25 bp, Homo sapien
cccagtggctagtacagtgtttact

SEQ ID NO: 790621 - DNA, 25 bp, Homo sapien
ttagcactgggactgttacattttg

SEQ ID NO: 790622 - DNA, 25 bp, Homo sapien
gggagcccagtactatgtgatattt

SEQ ID NO: 790623 - DNA, 25 bp, Homo sapien
tcaaataaatgggagcccagtacta

SEQ ID NO: 790624 - DNA, 25 bp, Homo sapien
cactgatctacttttcgtctacaaa

SEQ ID NO: 790625 - DNA, 25 bp, Homo sapien
tgtgatattttgtgttgtctggttt

SEQ ID NO: 790626 - DNA, 25 bp, Homo sapien
gctgaaacaactctcctgggtacta

SEQ ID NO: 790627 - DNA, 25 bp, Homo sapien
gtttcagggcaccaagacagttgta

SEQ ID NO: 790628 - DNA, 25 bp, Homo sapien
tacccattgtgaaggtgcgaacaag

SEQ ID NO: 790629 - DNA, 25 bp, Homo sapien
tgtagcacgtaaaaactggcaggcc

SEQ ID NO: 790630 - DNA, 25 bp, Homo sapien
gcttgtttgaagtaggtaggtgcct

SEQ ID NO: 790631 - DNA, 25 bp, Homo sapien
gtaggtaggtgcctggagtgccagt

SEQ ID NO: 790632 - DNA, 25 bp, Homo sapien
tcagagttaggggaaggccttggct

SEQ ID NO: 790633 - DNA, 25 bp, Homo sapien
ctgtgggactagcagtcagagttag

SEQ ID NO: 790634 - DNA, 25 bp, Homo sapien
tagccatcttacataaagagaaggg

SEQ ID NO: 790635 - DNA, 25 bp, Homo sapien
tggtgtataacactgtgcctggaac

SEQ ID NO: 790636 - DNA, 25 bp, Homo sapien
tgtcctttacttgctagggcctttg

SEQ ID NO: 790637 - DNA, 25 bp, Homo sapien
taatcctggtctataacaggtactc

SEQ ID NO: 790638 - DNA, 25 bp, Homo sapien
tgcttctagggcgtctggaggctca

SEQ ID NO: 790639 - DNA, 25 bp, Homo sapien
aagaagtgatgtcctctgtggcaac

SEQ ID NO: 790640 - DNA, 25 bp, Homo sapien
aatgatgactcttggtgtgtgacac

SEQ ID NO: 790641 - DNA, 25 bp, Homo sapien
taagcactggctaaatcagagggtg

SEQ ID NO: 790642 - DNA, 25 bp, Homo sapien
aaactgcaggtttgaggctcaaggc

SEQ ID NO: 790643 - DNA, 25 bp, Homo sapien
caaaaggaactcataaggactaggt

SEQ ID NO: 790644 - DNA, 25 bp, Homo sapien
cctaggctgaaccacaaagattact

SEQ ID NO: 790645 - DNA, 25 bp, Homo sapien
tctcacagggacaaaagatgacctc

SEQ ID NO: 790646 - DNA, 25 bp, Homo sapien
caaaggcaagacagattcagtatct

SEQ ID NO: 790647 - DNA, 25 bp, Homo sapien
cagattcagtatctataacatcaga

SEQ ID NO: 790648 - DNA, 25 bp, Homo sapien
caagacagattcagtatctataaca

SEQ ID NO: 790649 - DNA, 25 bp, Homo sapien
tcatcatcaattgtttgatcaactt

SEQ ID NO: 790650 - DNA, 25 bp, Homo sapien
cacatagtaagtattatattacagt

SEQ ID NO: 790651 - DNA, 25 bp, Homo sapien
acatagtaagtattatattacagta

SEQ ID NO: 790652 - DNA, 25 bp, Homo sapien
gcacatagtaagtattatattacag

SEQ ID NO: 790653 - DNA, 25 bp, Homo sapien
tgacagtttaccaaatcttcgacat

SEQ ID NO: 790654 - DNA, 25 bp, Homo sapien
tcctgatgatgttggagtatgggat

SEQ ID NO: 790655 - DNA, 25 bp, Homo sapien
ctgcccaaggatgatccaatgatat

SEQ ID NO: 790656 - DNA, 25 bp, Homo sapien
ccaaatcttcgacatcctttgaatc

SEQ ID NO: 790657 - DNA, 25 bp, Homo sapien
gagaggttatattgtaccccaccag

SEQ ID NO: 790658 - DNA, 25 bp, Homo sapien
gaactacaaccaggcttgagaggag

SEQ ID NO: 790659 - DNA, 25 bp, Homo sapien
caacaatgtgtgtggcttaaggact

SEQ ID NO: 790660 - DNA, 25 bp, Homo sapien
taagctctagaccatgttgaagacc

SEQ ID NO: 790661 - DNA, 25 bp, Homo sapien
aatatacaattgttccctaggcaac

SEQ ID NO: 790662 - DNA, 25 bp, Homo sapien
atatacaattgttccctaggcaacc

SEQ ID NO: 790663 - DNA, 25 bp, Homo sapien
aatggctagaacttttaccagcaga

SEQ ID NO: 790664 - DNA, 25 bp, Homo sapien
gaagaacatatccattaccctttgg

SEQ ID NO: 790665 - DNA, 25 bp, Homo sapien
cagtatacatctgggagctattaca

SEQ ID NO: 790666 - DNA, 25 bp, Homo sapien
tggtcacagtgtatagtagttgtac

SEQ ID NO: 790667 - DNA, 25 bp, Homo sapien
gtcacccatgaggaaatcattcttg

SEQ ID NO: 790668 - DNA, 25 bp, Homo sapien
acagtgtagtactttgctaataggc

SEQ ID NO: 790669 - DNA, 25 bp, Homo sapien
cattcttgaaaggtaagcacagtgt

SEQ ID NO: 790670 - DNA, 25 bp, Homo sapien
taggctttttgaggtgtcatctgcc

SEQ ID NO: 790671 - DNA, 25 bp, Homo sapien
cctcctgaactctggatagtgtaaa

SEQ ID NO: 790672 - DNA, 25 bp, Homo sapien
cttctctggtagtctctccttgact

SEQ ID NO: 790673 - DNA, 25 bp, Homo sapien
tggtagtctctccttgactgtccaa

SEQ ID NO: 790674 - DNA, 25 bp, Homo sapien
tagtgtaaacttctggaaggtagag

SEQ ID NO: 790675 - DNA, 25 bp, Homo sapien
taggactgttagaccttttgaactg

SEQ ID NO: 790676 - DNA, 25 bp, Homo sapien
cagtcttctggaacctagttaccca

SEQ ID NO: 790677 - DNA, 25 bp, Homo sapien
aaagacatgaatccgtcaggcccag

SEQ ID NO: 790678 - DNA, 25 bp, Homo sapien
gattttttgccattacctagccgtg

SEQ ID NO: 790679 - DNA, 25 bp, Homo sapien
acacttgaaggtgtgaggtctaacc

SEQ ID NO: 790680 - DNA, 25 bp, Homo sapien
tcggattgagcacctggtaagggat

SEQ ID NO: 790681 - DNA, 25 bp, Homo sapien
gatgtgggtctataggactccctgc

SEQ ID NO: 790682 - DNA, 25 bp, Homo sapien
gtctataggactccctgcgatgctg

SEQ ID NO: 790683 - DNA, 25 bp, Homo sapien
tacctccggttgtctctagtgacag

SEQ ID NO: 790684 - DNA, 25 bp, Homo sapien
tgtgtggctgctatacctccggttg

SEQ ID NO: 790685 - DNA, 25 bp, Homo sapien
cagtgcaaggggaagctcctgtaca

SEQ ID NO: 790686 - DNA, 25 bp, Homo sapien
gaagctcctgtacagtcagagccat

SEQ ID NO: 790687 - DNA, 25 bp, Homo sapien
gcggagtccgggctgcgtctttctg

SEQ ID NO: 790688 - DNA, 25 bp, Homo sapien
aaggtgagtgcggattgtgactcca

SEQ ID NO: 790689 - DNA, 25 bp, Homo sapien
ggagacgtccgccaaggtgagtgcg

SEQ ID NO: 790690 - DNA, 25 bp, Homo sapien
tgtgactccagactgggatgggggg

SEQ ID NO: 790691 - DNA, 25 bp, Homo sapien
accactcgggttcggctatgcggga

SEQ ID NO: 790692 - DNA, 25 bp, Homo sapien
cctcgggaggtcatgctgtcttgct

SEQ ID NO: 790693 - DNA, 25 bp, Homo sapien
ttgcagtcgtggacctgagacctcg

SEQ ID NO: 790694 - DNA, 25 bp, Homo sapien
aaatggaggactttgctaccaggac

SEQ ID NO: 790695 - DNA, 25 bp, Homo sapien
cgattcctctcccacgcatctggcc

SEQ ID NO: 790696 - DNA, 25 bp, Homo sapien
gctgcgacgggaccgcgcgattcct

SEQ ID NO: 790697 - DNA, 25 bp, Homo sapien
gcgttcctgggcctcggcaccggat

SEQ ID NO: 790698 - DNA, 25 bp, Homo sapien
ggaggtgatccgcagcgctgcgacg

SEQ ID NO: 790699 - DNA, 25 bp, Homo sapien
acttgcgacggaggcagcgggtccg

SEQ ID NO: 790700 - DNA, 25 bp, Homo sapien
tagaaataaagctccgcagccaatg

SEQ ID NO: 790701 - DNA, 25 bp, Homo sapien
atgcggcgccttggcccgcgggatt

SEQ ID NO: 790702 - DNA, 25 bp, Homo sapien
gggattggcggcctcggtcgtgacg

SEQ ID NO: 790703 - DNA, 25 bp, Homo sapien
taaggagctgagaaacgtgcagccg

SEQ ID NO: 790704 - DNA, 25 bp, Homo sapien
ccccacggggaataagctggcacct

SEQ ID NO: 790705 - DNA, 25 bp, Homo sapien
tgcagccgcggagattggccgcccc

SEQ ID NO: 790706 - DNA, 25 bp, Homo sapien
gggctaaggagctgagaaacgtgca

SEQ ID NO: 790707 - DNA, 25 bp, Homo sapien
agtatctagcactgtcgcctcctga

SEQ ID NO: 790708 - DNA, 25 bp, Homo sapien
agcaccatcactggcggcatgagtg

SEQ ID NO: 790709 - DNA, 25 bp, Homo sapien
gattggtatgcgaagcgctggctcc

SEQ ID NO: 790710 - DNA, 25 bp, Homo sapien
tagagcctggaagacgagattggta

SEQ ID NO: 790711 - DNA, 25 bp, Homo sapien
ttatccatgattcgaaatgcagagt

SEQ ID NO: 790712 - DNA, 25 bp, Homo sapien
gcagagtgacgttgttacttttaac

SEQ ID NO: 790713 - DNA, 25 bp, Homo sapien
tgattcgaaatgcagagtgacgttg

SEQ ID NO: 790714 - DNA, 25 bp, Homo sapien
tcgaaatgcagagtgacgttgttac

SEQ ID NO: 790715 - DNA, 25 bp, Homo sapien
cttttaggaattttctatcggccat

SEQ ID NO: 790716 - DNA, 25 bp, Homo sapien
ttttctatcggccattccagcaacc

SEQ ID NO: 790717 - DNA, 25 bp, Homo sapien
ggaattttctatcggccattccagc

SEQ ID NO: 790718 - DNA, 25 bp, Homo sapien
taggaattttctatcggccattcca

SEQ ID NO: 790719 - DNA, 25 bp, Homo sapien
tctcttccctcaactgagagagtgc

SEQ ID NO: 790720 - DNA, 25 bp, Homo sapien
gcttcactttgcagatcaagatcca

SEQ ID NO: 790721 - DNA, 25 bp, Homo sapien
cctttaaggataaacaatcagagat

SEQ ID NO: 790722 - DNA, 25 bp, Homo sapien
gatggaagagtctaagttcatatga

SEQ ID NO: 790723 - DNA, 25 bp, Homo sapien
tggggtcgacctgggacgttggagc

SEQ ID NO: 790724 - DNA, 25 bp, Homo sapien
cagtctggggtcgacctgggacgtt

SEQ ID NO: 790725 - DNA, 25 bp, Homo sapien
tcgacctgggacgttggagctttgt

SEQ ID NO: 790726 - DNA, 25 bp, Homo sapien
gagctttgtggcaggagaagcgtcc

SEQ ID NO: 790727 - DNA, 25 bp, Homo sapien
tgtgaatacatctggtcctgctagc

SEQ ID NO: 790728 - DNA, 25 bp, Homo sapien
gtgaatacatctggtcctgctagct

SEQ ID NO: 790729 - DNA, 25 bp, Homo sapien
aaggagtaatagtatacagaaccat

SEQ ID NO: 790730 - DNA, 25 bp, Homo sapien
aggagtaatagtatacagaaccata

SEQ ID NO: 790731 - DNA, 25 bp, Homo sapien
aaaggagtaatagtatacagaacca

SEQ ID NO: 790732 - DNA, 25 bp, Homo sapien
acaccatggtagtgctttggaacac

SEQ ID NO: 790733 - DNA, 25 bp, Homo sapien
ttggaacaccgaaatttggtagctc

SEQ ID NO: 790734 - DNA, 25 bp, Homo sapien
accaggaaccagataaacaccatgg

SEQ ID NO: 790735 - DNA, 25 bp, Homo sapien
tagtgctttggaacaccgaaatttg

SEQ ID NO: 790736 - DNA, 25 bp, Homo sapien
aactgaagttgtctaaccaggacag

SEQ ID NO: 790737 - DNA, 25 bp, Homo sapien
gcacaggctgcctaatattgttttc

SEQ ID NO: 790738 - DNA, 25 bp, Homo sapien
aaccattatgacctcttcacagctg

SEQ ID NO: 790739 - DNA, 25 bp, Homo sapien
cctgggcaacttgatacacttagca

SEQ ID NO: 790740 - DNA, 25 bp, Homo sapien
gaagtgtcttggaaggtgttggttg

SEQ ID NO: 790741 - DNA, 25 bp, Homo sapien
ctgatggcttctggccaaagcaagg

SEQ ID NO: 790742 - DNA, 25 bp, Homo sapien
tctggccaaagcaaggaagtgtctt

SEQ ID NO: 790743 - DNA, 25 bp, Homo sapien
tggttggtgatggtgcgaaaagaca

SEQ ID NO: 790744 - DNA, 25 bp, Homo sapien
gctaaaaccaatgcatcagctgatg

SEQ ID NO: 790745 - DNA, 25 bp, Homo sapien
aatgcatcagctgatgatgacagca

SEQ ID NO: 790746 - DNA, 25 bp, Homo sapien
ccaatgcatcagctgatgatgacag

SEQ ID NO: 790747 - DNA, 25 bp, Homo sapien
aaacctgagctaaaaccaatgcatc

SEQ ID NO: 790748 - DNA, 25 bp, Homo sapien
tcctttaatcttcggaggctgagtt

SEQ ID NO: 790749 - DNA, 25 bp, Homo sapien
cgcagcacactacatcatctcgggt

SEQ ID NO: 790750 - DNA, 25 bp, Homo sapien
tgcccaactcaggtatgccgcagca

SEQ ID NO: 790751 - DNA, 25 bp, Homo sapien
gtccaccccgtgtcttggcaaaaga

SEQ ID NO: 790752 - DNA, 25 bp, Homo sapien
tgcaagggtcccgccccgtgcctga

SEQ ID NO: 790753 - DNA, 25 bp, Homo sapien
cgccccgtgcctgacgtcgggggcg

SEQ ID NO: 790754 - DNA, 25 bp, Homo sapien
cccgtgcctgacgtcgggggcgagc

SEQ ID NO: 790755 - DNA, 25 bp, Homo sapien
ctgcaagggtcccgccccgtgcctg

SEQ ID NO: 790756 - DNA, 25 bp, Homo sapien
ttgggcctcaaaggtgcgggaattg

SEQ ID NO: 790757 - DNA, 25 bp, Homo sapien
cattcgccggggaacaggattggat

SEQ ID NO: 790758 - DNA, 25 bp, Homo sapien
attggatagaaagccgcgagggtcc

SEQ ID NO: 790759 - DNA, 25 bp, Homo sapien
aattggactgaaggccgctagggtc

SEQ ID NO: 790760 - DNA, 25 bp, Homo sapien
gcgcctcgccgcctctgccgcagcc

SEQ ID NO: 790761 - DNA, 25 bp, Homo sapien
cgcgcctcgccgcctctgccgcagc

SEQ ID NO: 790762 - DNA, 25 bp, Homo sapien
tccgtcctcaccgcccgcgcctcgc

SEQ ID NO: 790763 - DNA, 25 bp, Homo sapien
ctgtccgtcctcaccgcccgcgcct

SEQ ID NO: 790764 - DNA, 25 bp, Homo sapien
gatcacagggaactggactaagtcg

SEQ ID NO: 790765 - DNA, 25 bp, Homo sapien
aactgcttgagactgccaggagcct

SEQ ID NO: 790766 - DNA, 25 bp, Homo sapien
ttgagatcacagggaactggactaa

SEQ ID NO: 790767 - DNA, 25 bp, Homo sapien
gagatcacagggaactggactaagt

SEQ ID NO: 790768 - DNA, 25 bp, Homo sapien
gagaatcctggtactgaaatgttcg

SEQ ID NO: 790769 - DNA, 25 bp, Homo sapien
aatcctggtactgaaatgttcgttc

SEQ ID NO: 790770 - DNA, 25 bp, Homo sapien
cctggtactgaaatgttcgttcttc

SEQ ID NO: 790771 - DNA, 25 bp, Homo sapien
gaagagaatcctggtactgaaatgt

SEQ ID NO: 790772 - DNA, 25 bp, Homo sapien
tcaagaccccttatctggtagcatg

SEQ ID NO: 790773 - DNA, 25 bp, Homo sapien
aagaccccttatctggtagcatgtt

SEQ ID NO: 790774 - DNA, 25 bp, Homo sapien
ggatcaagaccccttatctggtagc

SEQ ID NO: 790775 - DNA, 25 bp, Homo sapien
cttgaattccttcccgcgtgagatc

SEQ ID NO: 790776 - DNA, 25 bp, Homo sapien
atattcttcttgatttgcaaatggt

SEQ ID NO: 790777 - DNA, 25 bp, Homo sapien
tatattcttcttgatttgcaaatgg

SEQ ID NO: 790778 - DNA, 25 bp, Homo sapien
tcaagctagtcacctggacaaaatg

SEQ ID NO: 790779 - DNA, 25 bp, Homo sapien
gggcctcattccagccatgtgaatc

SEQ ID NO: 790780 - DNA, 25 bp, Homo sapien
gaatcagaatcacttatcccagcaa

SEQ ID NO: 790781 - DNA, 25 bp, Homo sapien
gcatggtctacagattacctgcagc

SEQ ID NO: 790782 - DNA, 25 bp, Homo sapien
tattattccatcacagatataaatg

SEQ ID NO: 790783 - DNA, 25 bp, Homo sapien
attattccatcacagatataaatgg

SEQ ID NO: 790784 - DNA, 25 bp, Homo sapien
tttattattccatcacagatataaa

SEQ ID NO: 790785 - DNA, 25 bp, Homo sapien
ttattattccatcacagatataaat

SEQ ID NO: 790786 - DNA, 25 bp, Homo sapien
caactcaaggctcaaaattgagaac

SEQ ID NO: 790787 - DNA, 25 bp, Homo sapien
tttaattaaaacaactcaaggctca

SEQ ID NO: 790788 - DNA, 25 bp, Homo sapien
taaaacaactcaaggctcaaaattg

SEQ ID NO: 790789 - DNA, 25 bp, Homo sapien
tcaaggctcaaaattgagaacaaag

SEQ ID NO: 790790 - DNA, 25 bp, Homo sapien
gcaggacccgcaaagttgacattca

SEQ ID NO: 790791 - DNA, 25 bp, Homo sapien
gaacatccagataggcaacattcag

SEQ ID NO: 790792 - DNA, 25 bp, Homo sapien
tagctgccagtagttcaagttatgc

SEQ ID NO: 790793 - DNA, 25 bp, Homo sapien
tagtgttcaaaatgagctgcaggac

SEQ ID NO: 790794 - DNA, 25 bp, Homo sapien
agaggagtatttccaactttatgaa

SEQ ID NO: 790795 - DNA, 25 bp, Homo sapien
tatttccaactttatgaacaggcac

SEQ ID NO: 790796 - DNA, 25 bp, Homo sapien
gagtatttccaactttatgaacagg

SEQ ID NO: 790797 - DNA, 25 bp, Homo sapien
ttccaactttatgaacaggcacttt

SEQ ID NO: 790798 - DNA, 25 bp, Homo sapien
taattcctggaaccttgcaggtaga

SEQ ID NO: 790799 - DNA, 25 bp, Homo sapien
tcataatggagtctctagtaattcc

SEQ ID NO: 790800 - DNA, 25 bp, Homo sapien
aaatagcattcggaattgattcata

SEQ ID NO: 790801 - DNA, 25 bp, Homo sapien
gaaccttgcaggtagaaaatagcat

SEQ ID NO: 790802 - DNA, 25 bp, Homo sapien
caaaagctcggcctcgacacagcac

SEQ ID NO: 790803 - DNA, 25 bp, Homo sapien
atcaaagacaaaagctcggcctcga

SEQ ID NO: 790804 - DNA, 25 bp, Homo sapien
aagacaaaagctcggcctcgacaca

SEQ ID NO: 790805 - DNA, 25 bp, Homo sapien
tcaaagacaaaagctcggcctcgac

SEQ ID NO: 790806 - DNA, 25 bp, Homo sapien
gctctggcggggtgaccaaacatcc

SEQ ID NO: 790807 - DNA, 25 bp, Homo sapien
tctggcggggtgaccaaacatcctt

SEQ ID NO: 790808 - DNA, 25 bp, Homo sapien
gagaagctctggcggggtgaccaaa

SEQ ID NO: 790809 - DNA, 25 bp, Homo sapien
tggcggggtgaccaaacatccttca

SEQ ID NO: 790810 - DNA, 25 bp, Homo sapien
tttttcagcttactatcaccttgaa

SEQ ID NO: 790811 - DNA, 25 bp, Homo sapien
taatgaaactcaagaaagtagtctg

SEQ ID NO: 790812 - DNA, 25 bp, Homo sapien
ttaaaaaagcatgcataaaattctt

SEQ ID NO: 790813 - DNA, 25 bp, Homo sapien
taattcaagcaacaccataagacct

SEQ ID NO: 790814 - DNA, 25 bp, Homo sapien
ggtacacgggagttatcattatata

SEQ ID NO: 790815 - DNA, 25 bp, Homo sapien
gaggtatagttgaaacagcattgac

SEQ ID NO: 790816 - DNA, 25 bp, Homo sapien
tgttgaagttaggagatgggtacac

SEQ ID NO: 790817 - DNA, 25 bp, Homo sapien
tataactgttgatgctaggagttgg

SEQ ID NO: 790818 - DNA, 25 bp, Homo sapien
agaaatgttctaatttttgacctgg

SEQ ID NO: 790819 - DNA, 25 bp, Homo sapien
tattagaaatgttctaatttttgac

SEQ ID NO: 790820 - DNA, 25 bp, Homo sapien
tagaaatgttctaatttttgacctg

SEQ ID NO: 790821 - DNA, 25 bp, Homo sapien
tgctgcaatcccaggtccatcaggt

SEQ ID NO: 790822 - DNA, 25 bp, Homo sapien
cttcttgtggatatatgtcagttgt

SEQ ID NO: 790823 - DNA, 25 bp, Homo sapien
ggttcactatggcacttcttgtgga

SEQ ID NO: 790824 - DNA, 25 bp, Homo sapien
gctcctcactagttaatgctgcaat

SEQ ID NO: 790825 - DNA, 25 bp, Homo sapien
taatcctctggtgttacatgtggac

SEQ ID NO: 790826 - DNA, 25 bp, Homo sapien
aagttctctggatcaagaccaatca

SEQ ID NO: 790827 - DNA, 25 bp, Homo sapien
tggatcaagaccaatcagatattct

SEQ ID NO: 790828 - DNA, 25 bp, Homo sapien
tgtggactgctatcctccatggaat

SEQ ID NO: 790829 - DNA, 25 bp, Homo sapien
tactttggcctattaatggatcatg

SEQ ID NO: 790830 - DNA, 25 bp, Homo sapien
tggatcatgaaattaactcagtgca

SEQ ID NO: 790831 - DNA, 25 bp, Homo sapien
aaatatcagtgtacctcacagacaa

SEQ ID NO: 790832 - DNA, 25 bp, Homo sapien
tgtgatatgcaaagtcaagagagag

SEQ ID NO: 790833 - DNA, 25 bp, Homo sapien
ctccaataaggatggctgcaataat

SEQ ID NO: 790834 - DNA, 25 bp, Homo sapien
gatctccaataaggatggctgcaat

SEQ ID NO: 790835 - DNA, 25 bp, Homo sapien
ttggatctccaataaggatggctgc

SEQ ID NO: 790836 - DNA, 25 bp, Homo sapien
ctgttggatctccaataaggatggc

SEQ ID NO: 790837 - DNA, 25 bp, Homo sapien
ggaaatcaagttataggatttgtca

SEQ ID NO: 790838 - DNA, 25 bp, Homo sapien
caattacagccaaatactccattag

SEQ ID NO: 790839 - DNA, 25 bp, Homo sapien
ttacagccaaatactccattagaaa

SEQ ID NO: 790840 - DNA, 25 bp, Homo sapien
aagttataggatttgtcaccccagc

SEQ ID NO: 790841 - DNA, 25 bp, Homo sapien
tgtcattaatttaacctaaaagatc

SEQ ID NO: 790842 - DNA, 25 bp, Homo sapien
gtcattaatttaacctaaaagatca

SEQ ID NO: 790843 - DNA, 25 bp, Homo sapien
tgttcaccataatcattgcatcaaa

SEQ ID NO: 790844 - DNA, 25 bp, Homo sapien
gttcaccataatcattgcatcaaaa

SEQ ID NO: 790845 - DNA, 25 bp, Homo sapien
ttttctcatccacataataactgat

SEQ ID NO: 790846 - DNA, 25 bp, Homo sapien
ctcatccacataataactgatgttc

SEQ ID NO: 790847 - DNA, 25 bp, Homo sapien
gagctcttctggaagtggtatatct

SEQ ID NO: 790848 - DNA, 25 bp, Homo sapien
gtatatctcgtaccttctctgaacc

SEQ ID NO: 790849 - DNA, 25 bp, Homo sapien
ctccctgagatactgggctttagct

SEQ ID NO: 790850 - DNA, 25 bp, Homo sapien
ctgggctttagcttggttgatgtca

SEQ ID NO: 790851 - DNA, 25 bp, Homo sapien
tcattattatttaagagaaaagtga

SEQ ID NO: 790852 - DNA, 25 bp, Homo sapien
cattattatttaagagaaaagtgaa

SEQ ID NO: 790853 - DNA, 25 bp, Homo sapien
atcattattatttaagagaaaagtg

SEQ ID NO: 790854 - DNA, 25 bp, Homo sapien
aatcattattatttaagagaaaagt

SEQ ID NO: 790855 - DNA, 25 bp, Homo sapien
cgtatccgggtgaagcatcttgttc

SEQ ID NO: 790856 - DNA, 25 bp, Homo sapien
ccatgaagtctgtaataggccagct

SEQ ID NO: 790857 - DNA, 25 bp, Homo sapien
tgcaagctgaataaacgtatccggg

SEQ ID NO: 790858 - DNA, 25 bp, Homo sapien
gcataagccgcaatctgtagatcag

SEQ ID NO: 790859 - DNA, 25 bp, Homo sapien
ttcaactgtgcatgatcgcatagtc

SEQ ID NO: 790860 - DNA, 25 bp, Homo sapien
gatcgcatagtctctgtacggccat

SEQ ID NO: 790861 - DNA, 25 bp, Homo sapien
tgataaaaatgtcttgtcatagctg

SEQ ID NO: 790862 - DNA, 25 bp, Homo sapien
cagaaggatcctgcatggactggca

SEQ ID NO: 790863 - DNA, 25 bp, Homo sapien
tttccagctgaacaatctttcatca

SEQ ID NO: 790864 - DNA, 25 bp, Homo sapien
acatcttttgctgccgctcacgaag

SEQ ID NO: 790865 - DNA, 25 bp, Homo sapien
cttgtaacatcttttgctgccgctc

SEQ ID NO: 790866 - DNA, 25 bp, Homo sapien
ccagctgaacaatctttcatcattt

SEQ ID NO: 790867 - DNA, 25 bp, Homo sapien
gaagaccttcctcttttgctatgag

SEQ ID NO: 790868 - DNA, 25 bp, Homo sapien
gaccttcctcttttgctatgagtaa

SEQ ID NO: 790869 - DNA, 25 bp, Homo sapien
tgggtccgtaaagagttctggaaca

SEQ ID NO: 790870 - DNA, 25 bp, Homo sapien
aggaagaccttcctcttttgctatg

SEQ ID NO: 790871 - DNA, 25 bp, Homo sapien
ggtagaaaaatccataaccattgtg

SEQ ID NO: 790872 - DNA, 25 bp, Homo sapien
cattgtgtaccatgggaactaccac

SEQ ID NO: 790873 - DNA, 25 bp, Homo sapien
ccaaccagacttgttgagagaacaa

SEQ ID NO: 790874 - DNA, 25 bp, Homo sapien
tgggaactaccactccctggactcg

SEQ ID NO: 790875 - DNA, 25 bp, Homo sapien
ttgccgaatcgacttgaaacagtgt

SEQ ID NO: 790876 - DNA, 25 bp, Homo sapien
ctgacaagtgtctcaaaagcaggac

SEQ ID NO: 790877 - DNA, 25 bp, Homo sapien
tgttctgcataaagacacctaaggg

SEQ ID NO: 790878 - DNA, 25 bp, Homo sapien
cacctaagggactaatctgacaagt

SEQ ID NO: 790879 - DNA, 25 bp, Homo sapien
ggcaccatataaagtctgtaagggc

SEQ ID NO: 790880 - DNA, 25 bp, Homo sapien
tgtgatctgctaaagagacaaactg

SEQ ID NO: 790881 - DNA, 25 bp, Homo sapien
gagaataaaccacgaaagatcactt

SEQ ID NO: 790882 - DNA, 25 bp, Homo sapien
gcacttgcagtatcactagaagcac

SEQ ID NO: 790883 - DNA, 25 bp, Homo sapien
gattatctaacatcagttctggcac

SEQ ID NO: 790884 - DNA, 25 bp, Homo sapien
aagggtccagtgcatgtcataaaag

SEQ ID NO: 790885 - DNA, 25 bp, Homo sapien
taaaatgcagtggtctagtcttggg

SEQ ID NO: 790886 - DNA, 25 bp, Homo sapien
tgtttctatactgtaccaacccttg

SEQ ID NO: 790887 - DNA, 25 bp, Homo sapien
tgatgaaatgagaaaggatacgttt

SEQ ID NO: 790888 - DNA, 25 bp, Homo sapien
atgagaaaggatacgtttataacct

SEQ ID NO: 790889 - DNA, 25 bp, Homo sapien
tataataactagagttggcaatggt

SEQ ID NO: 790890 - DNA, 25 bp, Homo sapien
tgatctagtgtaatccctcccaaag

SEQ ID NO: 790891 - DNA, 25 bp, Homo sapien
tgctctgaagctaggtcttactgcg

SEQ ID NO: 790892 - DNA, 25 bp, Homo sapien
taagaaatcccagatctggcaagtg

SEQ ID NO: 790893 - DNA, 25 bp, Homo sapien
caaattagctagagccctagagtgc

SEQ ID NO: 790894 - DNA, 25 bp, Homo sapien
cattagatgactagcacctagggac

SEQ ID NO: 790895 - DNA, 25 bp, Homo sapien
agctgaactagcttttccgcatcag

SEQ ID NO: 790896 - DNA, 25 bp, Homo sapien
gagtagagttcatcagctgtatcat

SEQ ID NO: 790897 - DNA, 25 bp, Homo sapien
gctgtatcatatcatgaaaagcaca

SEQ ID NO: 790898 - DNA, 25 bp, Homo sapien
ccgcatcagtctcgggacaggattt

SEQ ID NO: 790899 - DNA, 25 bp, Homo sapien
tatccctgtggtgaacatagaaggc

SEQ ID NO: 790900 - DNA, 25 bp, Homo sapien
caggctatagcataagggcacatca

SEQ ID NO: 790901 - DNA, 25 bp, Homo sapien
actacaaaattgaacagcgaggagg

SEQ ID NO: 790902 - DNA, 25 bp, Homo sapien
ggtctttcccatcaaacataacagg

SEQ ID NO: 790903 - DNA, 25 bp, Homo sapien
ggttcgcaaccccaagatccttctg

SEQ ID NO: 790904 - DNA, 25 bp, Homo sapien
tagaaatttgacaccctggttggag

SEQ ID NO: 790905 - DNA, 25 bp, Homo sapien
gatcgccattgcacgtgccctggtt

SEQ ID NO: 790906 - DNA, 25 bp, Homo sapien
gatgaggccacgtcagcattggaca

SEQ ID NO: 790907 - DNA, 25 bp, Homo sapien
tattaacaagcaacaaatgcccagc

SEQ ID NO: 790908 - DNA, 25 bp, Homo sapien
cattatgaacatgcgactctctgga

SEQ ID NO: 790909 - DNA, 25 bp, Homo sapien
tatgaatatatgaaggtaaccctgc

SEQ ID NO: 790910 - DNA, 25 bp, Homo sapien
catgtaagcaattgttgtcaaggga

SEQ ID NO: 790911 - DNA, 25 bp, Homo sapien
ggaattgctaaccagtgcacactgg

SEQ ID NO: 790912 - DNA, 25 bp, Homo sapien
tagaagttttaccatgccctgagag

SEQ ID NO: 790913 - DNA, 25 bp, Homo sapien
tttttaggagcattacatagggcca

SEQ ID NO: 790914 - DNA, 25 bp, Homo sapien
tagacccactcaggcaataaaatgc

SEQ ID NO: 790915 - DNA, 25 bp, Homo sapien
ggcttttccgttacacgccaatcag

SEQ ID NO: 790916 - DNA, 25 bp, Homo sapien
tacacgccaatcagcaggactaagt

SEQ ID NO: 790917 - DNA, 25 bp, Homo sapien
cgcggagggcgactttgaactgggc

SEQ ID NO: 790918 - DNA, 25 bp, Homo sapien
cgttacacgccaatcagcaggacta

SEQ ID NO: 790919 - DNA, 25 bp, Homo sapien
gatctgaccgcctgttagaccagtg

SEQ ID NO: 790920 - DNA, 25 bp, Homo sapien
gacaactttgtgaatcggctcagac

SEQ ID NO: 790921 - DNA, 25 bp, Homo sapien
tgctaagagggcaccaacagcgttc

SEQ ID NO: 790922 - DNA, 25 bp, Homo sapien
gataattgggttcagtgccacctgg

SEQ ID NO: 790923 - DNA, 25 bp, Homo sapien
gaaatccctcttacgattcctttga

SEQ ID NO: 790924 - DNA, 25 bp, Homo sapien
tctgattgtagtactcccgtcagca

SEQ ID NO: 790925 - DNA, 25 bp, Homo sapien
cccgtcagcatttcttgtgggacag

SEQ ID NO: 790926 - DNA, 25 bp, Homo sapien
gccattaaaagacctcgatgcattt

SEQ ID NO: 790927 - DNA, 25 bp, Homo sapien
actgttgtaggtttgttgatttgag

SEQ ID NO: 790928 - DNA, 25 bp, Homo sapien
tcttgtgggcaacagatcattcggt

SEQ ID NO: 790929 - DNA, 25 bp, Homo sapien
ccattcagtgactctatgacttttg

SEQ ID NO: 790930 - DNA, 25 bp, Homo sapien
gattggagagtctaggccatttata

SEQ ID NO: 790931 - DNA, 25 bp, Homo sapien
acaggaccaggggggatcctcctgg

SEQ ID NO: 790932 - DNA, 25 bp, Homo sapien
tcacaggaccaggggggatcctcct

SEQ ID NO: 790933 - DNA, 25 bp, Homo sapien
aggaccaggggggatcctcctggtg

SEQ ID NO: 790934 - DNA, 25 bp, Homo sapien
ggatcctcctggtgaaggttctgct

SEQ ID NO: 790935 - DNA, 25 bp, Homo sapien
tgagggccccgagctggacgcatgg

SEQ ID NO: 790936 - DNA, 25 bp, Homo sapien
ctgagggccccgagctggacgcatg

SEQ ID NO: 790937 - DNA, 25 bp, Homo sapien
gagggccccgagctggacgcatggg

SEQ ID NO: 790938 - DNA, 25 bp, Homo sapien
cagggcgccaggctgttccattcct

SEQ ID NO: 790939 - DNA, 25 bp, Homo sapien
gctgatgcccagttcaaagtcaccc

SEQ ID NO: 790940 - DNA, 25 bp, Homo sapien
gttccattccttgccacctcaagat

SEQ ID NO: 790941 - DNA, 25 bp, Homo sapien
tctgctgatgcccagttcaaagtca

SEQ ID NO: 790942 - DNA, 25 bp, Homo sapien
tcattggtcaaccaatgtagagctc

SEQ ID NO: 790943 - DNA, 25 bp, Homo sapien
aatgtagagctcaacctccaatgaa

SEQ ID NO: 790944 - DNA, 25 bp, Homo sapien
ccaatgtagagctcaacctccaatg

SEQ ID NO: 790945 - DNA, 25 bp, Homo sapien
aggctctcattggtcaaccaatgta

SEQ ID NO: 790946 - DNA, 25 bp, Homo sapien
aaagtcccttgagcgcttggtattt

SEQ ID NO: 790947 - DNA, 25 bp, Homo sapien
agtcccttgagcgcttggtatttgg

SEQ ID NO: 790948 - DNA, 25 bp, Homo sapien
tcccttgagcgcttggtatttggat

SEQ ID NO: 790949 - DNA, 25 bp, Homo sapien
ccaaagtcccttgagcgcttggtat

SEQ ID NO: 790950 - DNA, 25 bp, Homo sapien
ttcacagtatgggtatttctcagtg

SEQ ID NO: 790951 - DNA, 25 bp, Homo sapien
tttctcagtgacagtcttacccatg

SEQ ID NO: 790952 - DNA, 25 bp, Homo sapien
ctcagtgacagtcttacccatggag

SEQ ID NO: 790953 - DNA, 25 bp, Homo sapien
tcacagtatgggtatttctcagtga

SEQ ID NO: 790954 - DNA, 25 bp, Homo sapien
caaactgatggcctaatgtccttcc

SEQ ID NO: 790955 - DNA, 25 bp, Homo sapien
aagttctaaacaaagctagggctct

SEQ ID NO: 790956 - DNA, 25 bp, Homo sapien
gctctaggttttcagctgtgaatca

SEQ ID NO: 790957 - DNA, 25 bp, Homo sapien
gtatctttgaaagggcagtctcctt

SEQ ID NO: 790958 - DNA, 25 bp, Homo sapien
tcaggcaggatttatgtttgcttct

SEQ ID NO: 790959 - DNA, 25 bp, Homo sapien
taaacctaacagtcagtgccatctt

SEQ ID NO: 790960 - DNA, 25 bp, Homo sapien
tgctatggatctggattgaagtcca

SEQ ID NO: 790961 - DNA, 25 bp, Homo sapien
tgaagtccaattctatcaggcagga

SEQ ID NO: 790962 - DNA, 25 bp, Homo sapien
aaatacaataagatctctgggtacc

SEQ ID NO: 790963 - DNA, 25 bp, Homo sapien
taggaagaaaactgtcgttattcac

SEQ ID NO: 790964 - DNA, 25 bp, Homo sapien
tcacagacgataagattgtctacac

SEQ ID NO: 790965 - DNA, 25 bp, Homo sapien
cctgtaaaccaggaatgaacaatta

SEQ ID NO: 790966 - DNA, 25 bp, Homo sapien
ccacaagtgcctatgaattttttat

SEQ ID NO: 790967 - DNA, 25 bp, Homo sapien
gggatagatcaatgttacttacata

SEQ ID NO: 790968 - DNA, 25 bp, Homo sapien
acataaatgagtccacaagtgccta

SEQ ID NO: 790969 - DNA, 25 bp, Homo sapien
ttttatgccaagaagggatagatca

SEQ ID NO: 790970 - DNA, 25 bp, Homo sapien
gacatcataacaaggattgggtgag

SEQ ID NO: 790971 - DNA, 25 bp, Homo sapien
catcataacaaggattgggtgaggc

SEQ ID NO: 790972 - DNA, 25 bp, Homo sapien
ggattgggtgaggcacgtctcacat

SEQ ID NO: 790973 - DNA, 25 bp, Homo sapien
tgtgtgtgaaagctcaatcatcacg

SEQ ID NO: 790974 - DNA, 25 bp, Homo sapien
gggactgacggctcgcccttggcac

SEQ ID NO: 790975 - DNA, 25 bp, Homo sapien
tcccgagggacctcagcagacggcg

SEQ ID NO: 790976 - DNA, 25 bp, Homo sapien
cacacctgcttaagggggttctcgc

SEQ ID NO: 790977 - DNA, 25 bp, Homo sapien
gaagacagcagggactcgcacccgg

SEQ ID NO: 790978 - DNA, 25 bp, Homo sapien
caccgccgcggatcccgctcaggcc

SEQ ID NO: 790979 - DNA, 25 bp, Homo sapien
gccaccgccgcggatcccgctcagg

SEQ ID NO: 790980 - DNA, 25 bp, Homo sapien
accgccgcggatcccgctcaggccc

SEQ ID NO: 790981 - DNA, 25 bp, Homo sapien
ccgccaccgccgcggatcccgctca

SEQ ID NO: 790982 - DNA, 25 bp, Homo sapien
cagcattgcgggcgctcaggctttt

SEQ ID NO: 790983 - DNA, 25 bp, Homo sapien
ctccaccgcagcattgcgggcgctc

SEQ ID NO: 790984 - DNA, 25 bp, Homo sapien
caccgcagcattgcgggcgctcagg

SEQ ID NO: 790985 - DNA, 25 bp, Homo sapien
cctcctctccaccgcagcattgcgg

SEQ ID NO: 790986 - DNA, 25 bp, Homo sapien
tacgatattagctcaggagagacaa

SEQ ID NO: 790987 - DNA, 25 bp, Homo sapien
cacatatcatgggagggagcagatg

SEQ ID NO: 790988 - DNA, 25 bp, Homo sapien
tagaaacagaccacaaattatccag

SEQ ID NO: 790989 - DNA, 25 bp, Homo sapien
tatccagtcacctaagataaatgtg

SEQ ID NO: 790990 - DNA, 25 bp, Homo sapien
aattttgaacgttttctgcaacact

SEQ ID NO: 790991 - DNA, 25 bp, Homo sapien
aataagcatccatttatgatacaaa

SEQ ID NO: 790992 - DNA, 25 bp, Homo sapien
tattccagagtggtttaacatgcaa

SEQ ID NO: 790993 - DNA, 25 bp, Homo sapien
gcaaaagtcaacataattcactatg

SEQ ID NO: 790994 - DNA, 25 bp, Homo sapien
aagcgaagtccaaatatcccaaagc

SEQ ID NO: 790995 - DNA, 25 bp, Homo sapien
caatcagtagtcaacaaaatgcaca

SEQ ID NO: 790996 - DNA, 25 bp, Homo sapien
tcataggttacgttcctacagaaga

SEQ ID NO: 790997 - DNA, 25 bp, Homo sapien
gagacctatatggatcaatcagtag

SEQ ID NO: 790998 - DNA, 25 bp, Homo sapien
tagctgcaaaattgttaaattcagg

SEQ ID NO: 790999 - DNA, 25 bp, Homo sapien
gtctcaaagcaagaccgatcaatca

SEQ ID NO: 791000 - DNA, 25 bp, Homo sapien
caaaatagctgcaaaattgttaaat

SEQ ID NO: 791001 - DNA, 25 bp, Homo sapien
caagaccgatcaatcagggtcttca

SEQ ID NO: 791002 - DNA, 25 bp, Homo sapien
tatcctttcttcctgttattccaaa

SEQ ID NO: 791003 - DNA, 25 bp, Homo sapien
tactgtatcctttcttcctgttatt

SEQ ID NO: 791004 - DNA, 25 bp, Homo sapien
tgtatcctttcttcctgttattcca

SEQ ID NO: 791005 - DNA, 25 bp, Homo sapien
tgcagtggcatgatggcacgatcac

SEQ ID NO: 791006 - DNA, 25 bp, Homo sapien
ccttaatggctggttgcaatcaaca

SEQ ID NO: 791007 - DNA, 25 bp, Homo sapien
tgtaaggtctgtagtcatatgccct

SEQ ID NO: 791008 - DNA, 25 bp, Homo sapien
tataggactatttgtgttatctact

SEQ ID NO: 791009 - DNA, 25 bp, Homo sapien
cattgttggaaggttttaaatactg

SEQ ID NO: 791010 - DNA, 25 bp, Homo sapien
cacaggagttctaactcgttttaag

SEQ ID NO: 791011 - DNA, 25 bp, Homo sapien
caggagttctaactcgttttaagag

SEQ ID NO: 791012 - DNA, 25 bp, Homo sapien
tcacaggagttctaactcgttttaa

SEQ ID NO: 791013 - DNA, 25 bp, Homo sapien
tgaatttccaagtacataacttaaa

SEQ ID NO: 791014 - DNA, 25 bp, Homo sapien
ctgaatttccaagtacataacttaa

SEQ ID NO: 791015 - DNA, 25 bp, Homo sapien
cataacttaaaagggtgtttctcag

SEQ ID NO: 791016 - DNA, 25 bp, Homo sapien
ggtatttggagatgagccagccatc

SEQ ID NO: 791017 - DNA, 25 bp, Homo sapien
aagaggtatttggagatgagccagc

SEQ ID NO: 791018 - DNA, 25 bp, Homo sapien
atttggagatgagccagccatctgc

SEQ ID NO: 791019 - DNA, 25 bp, Homo sapien
agccatctgcaactttgggaaatct

SEQ ID NO: 791020 - DNA, 25 bp, Homo sapien
ccctaatccaactttactcccatca

SEQ ID NO: 791021 - DNA, 25 bp, Homo sapien
tccctaatccaactttactcccatc

SEQ ID NO: 791022 - DNA, 25 bp, Homo sapien
cctaatccaactttactcccatcat

SEQ ID NO: 791023 - DNA, 25 bp, Homo sapien
gatatagtcccagaagctacgagga

SEQ ID NO: 791024 - DNA, 25 bp, Homo sapien
cgaggactttcataaccaaaccagg

SEQ ID NO: 791025 - DNA, 25 bp, Homo sapien
aattctgtgaaactttccggcaagc

SEQ ID NO: 791026 - DNA, 25 bp, Homo sapien
aagccactctgatatagtcccagaa

SEQ ID NO: 791027 - DNA, 25 bp, Homo sapien
aaatatcaacacagcgaaaaggcaa

SEQ ID NO: 791028 - DNA, 25 bp, Homo sapien
ggaaattcatagtaagtagcttcac

SEQ ID NO: 791029 - DNA, 25 bp, Homo sapien
caacagttttatccaccattgtgtc

SEQ ID NO: 791030 - DNA, 25 bp, Homo sapien
gaaacgagtctctgaccaatgtctt

SEQ ID NO: 791031 - DNA, 25 bp, Homo sapien
ttactggcttaaatacgtgagacag

SEQ ID NO: 791032 - DNA, 25 bp, Homo sapien
gaaacagaggtcaaaggacaatagt

SEQ ID NO: 791033 - DNA, 25 bp, Homo sapien
gatgcaaaggggaattcacactgca

SEQ ID NO: 791034 - DNA, 25 bp, Homo sapien
gcttaaatacgtgagacagagaaga

SEQ ID NO: 791035 - DNA, 25 bp, Homo sapien
ttatggctaaactagtcacagacag

SEQ ID NO: 791036 - DNA, 25 bp, Homo sapien
gttccataacacctgcatatgacag

SEQ ID NO: 791037 - DNA, 25 bp, Homo sapien
ctattgttaggctatgtttaagtct

SEQ ID NO: 791038 - DNA, 25 bp, Homo sapien
taagtcttatggctaaactagtcac

SEQ ID NO: 791039 - DNA, 25 bp, Homo sapien
ttgttccttctgagtaagcctaggg

SEQ ID NO: 791040 - DNA, 25 bp, Homo sapien
cagtccattgttccttctgagtaag

SEQ ID NO: 791041 - DNA, 25 bp, Homo sapien
tctgagtaagcctaggggaacctgc

SEQ ID NO: 791042 - DNA, 25 bp, Homo sapien
ccctgtgctcagtccattgttcctt

SEQ ID NO: 791043 - DNA, 25 bp, Homo sapien
gagtgctactctgatccaggctcta

SEQ ID NO: 791044 - DNA, 25 bp, Homo sapien
agagctgtagagatgtattcagata

SEQ ID NO: 791045 - DNA, 25 bp, Homo sapien
gagctgtagagatgtattcagataa

SEQ ID NO: 791046 - DNA, 25 bp, Homo sapien
ctgtagagatgtattcagataaatg

SEQ ID NO: 791047 - DNA, 25 bp, Homo sapien
caactagttcaataagcaaagagag

SEQ ID NO: 791048 - DNA, 25 bp, Homo sapien
tatgcttgtgcctacttgttgccca

SEQ ID NO: 791049 - DNA, 25 bp, Homo sapien
tgatttctcaacgataccaactagt

SEQ ID NO: 791050 - DNA, 25 bp, Homo sapien
aaaagagagttggtagtgctgagct

SEQ ID NO: 791051 - DNA, 25 bp, Homo sapien
atttgcttcttcacccaagacaatt

SEQ ID NO: 791052 - DNA, 25 bp, Homo sapien
aagacaattgctccatcttcataaa

SEQ ID NO: 791053 - DNA, 25 bp, Homo sapien
agacaattgctccatcttcataaaa

SEQ ID NO: 791054 - DNA, 25 bp, Homo sapien
gagtcctagaagcatgccagcaagc

SEQ ID NO: 791055 - DNA, 25 bp, Homo sapien
cattgagtcctagaagcatgccagc

SEQ ID NO: 791056 - DNA, 25 bp, Homo sapien
aaatcaatagcattgagtcctagaa

SEQ ID NO: 791057 - DNA, 25 bp, Homo sapien
tagcattgagtcctagaagcatgcc

SEQ ID NO: 791058 - DNA, 25 bp, Homo sapien
cacttgttattttagtgtagaacca

SEQ ID NO: 791059 - DNA, 25 bp, Homo sapien
tctgggatcgattaaagaaatgcaa

SEQ ID NO: 791060 - DNA, 25 bp, Homo sapien
gggatcaaaaagacaaccttcacat

SEQ ID NO: 791061 - DNA, 25 bp, Homo sapien
caatataatgtaaaatctgggatcg

SEQ ID NO: 791062 - DNA, 25 bp, Homo sapien
tacttcaaatatggtgtatagtcta

SEQ ID NO: 791063 - DNA, 25 bp, Homo sapien
ttggatatacttcaaatatggtgta

SEQ ID NO: 791064 - DNA, 25 bp, Homo sapien
tctattacagcaggaaaactgccat

SEQ ID NO: 791065 - DNA, 25 bp, Homo sapien
tatggtgtatagtctattacagcag

SEQ ID NO: 791066 - DNA, 25 bp, Homo sapien
tgaggaaaggaggtccgacattctc

SEQ ID NO: 791067 - DNA, 25 bp, Homo sapien
gtactgctttcgctaccactgcttc

SEQ ID NO: 791068 - DNA, 25 bp, Homo sapien
gaaccaactgttctcatccatgagg

SEQ ID NO: 791069 - DNA, 25 bp, Homo sapien
tctcttacacttgttgaaccaactg

SEQ ID NO: 791070 - DNA, 25 bp, Homo sapien
gccagatcggaatcttcaatccttt

SEQ ID NO: 791071 - DNA, 25 bp, Homo sapien
gctgatcttgaagctccacaattat

SEQ ID NO: 791072 - DNA, 25 bp, Homo sapien
gatagttggttctctcgaagtcgta

SEQ ID NO: 791073 - DNA, 25 bp, Homo sapien
ccttctccagtttatgagccagatc

SEQ ID NO: 791074 - DNA, 25 bp, Homo sapien
catagggtgtatccttgagaatcat

SEQ ID NO: 791075 - DNA, 25 bp, Homo sapien
tgctttttcatccattaagtgactc

SEQ ID NO: 791076 - DNA, 25 bp, Homo sapien
tgactctatgtcttttcgttggaga

SEQ ID NO: 791077 - DNA, 25 bp, Homo sapien
tcaatgttgttatctataagaaggg

SEQ ID NO: 791078 - DNA, 25 bp, Homo sapien
aatattaagatggtgagtgcttttg

SEQ ID NO: 791079 - DNA, 25 bp, Homo sapien
tgaatattaagatggtgagtgcttt

SEQ ID NO: 791080 - DNA, 25 bp, Homo sapien
tattaagatggtgagtgcttttgtc

SEQ ID NO: 791081 - DNA, 25 bp, Homo sapien
ctgtgaatattaagatggtgagtgc

SEQ ID NO: 791082 - DNA, 25 bp, Homo sapien
gtgagatgggcagttaactcttgtc

SEQ ID NO: 791083 - DNA, 25 bp, Homo sapien
aaggcaacagcattgacatccagag

SEQ ID NO: 791084 - DNA, 25 bp, Homo sapien
cataccactgtttattgtgttttcg

SEQ ID NO: 791085 - DNA, 25 bp, Homo sapien
taaagcaacgtatccaaggcaacag

SEQ ID NO: 791086 - DNA, 25 bp, Homo sapien
cctggatctagtgaagtctgagaaa

SEQ ID NO: 791087 - DNA, 25 bp, Homo sapien
gctaacttctgctgataactggtca

SEQ ID NO: 791088 - DNA, 25 bp, Homo sapien
ctgagaaaggctaacttctgctgat

SEQ ID NO: 791089 - DNA, 25 bp, Homo sapien
gataactggtcaagactttgataac

SEQ ID NO: 791090 - DNA, 25 bp, Homo sapien
gagaccacctcatcctggatttcat

SEQ ID NO: 791091 - DNA, 25 bp, Homo sapien
ctgagaccacctcatcctggatttc

SEQ ID NO: 791092 - DNA, 25 bp, Homo sapien
tttcattgtccatatcattatcagc

SEQ ID NO: 791093 - DNA, 25 bp, Homo sapien
accacctcatcctggatttcattgt

SEQ ID NO: 791094 - DNA, 25 bp, Homo sapien
ctgttgtaggacttgcaaggtagtc

SEQ ID NO: 791095 - DNA, 25 bp, Homo sapien
tggagttaggcctggacttgtcatc

SEQ ID NO: 791096 - DNA, 25 bp, Homo sapien
tagagacttgtaacttgccactgac

SEQ ID NO: 791097 - DNA, 25 bp, Homo sapien
gccaagtaatgagggagtatcttcc

SEQ ID NO: 791098 - DNA, 25 bp, Homo sapien
cagtctctggccactaaggtgtatt

SEQ ID NO: 791099 - DNA, 25 bp, Homo sapien
gaaaacctgctttggatacttcact

SEQ ID NO: 791100 - DNA, 25 bp, Homo sapien
tacctttagtgtgaaacgaactctg

SEQ ID NO: 791101 - DNA, 25 bp, Homo sapien
tatagtacgcatcaaggcaacagaa

SEQ ID NO: 791102 - DNA, 25 bp, Homo sapien
caagtctttagtgctggtagaggaa

SEQ ID NO: 791103 - DNA, 25 bp, Homo sapien
gaaagtttatcttgaacagtgctct

SEQ ID NO: 791104 - DNA, 25 bp, Homo sapien
ggcttcttaaaatcatcactgtgct

SEQ ID NO: 791105 - DNA, 25 bp, Homo sapien
gaaagtgtttatatgtttcaccaga

SEQ ID NO: 791106 - DNA, 25 bp, Homo sapien
tatttccgtatttcagtaaagtaga

SEQ ID NO: 791107 - DNA, 25 bp, Homo sapien
tgaatgatgtacatagtctagaaga

SEQ ID NO: 791108 - DNA, 25 bp, Homo sapien
tgcacatttaaatcgtgtacataag

SEQ ID NO: 791109 - DNA, 25 bp, Homo sapien
tgtgtgctgaatgatgtacatagtc

SEQ ID NO: 791110 - DNA, 25 bp, Homo sapien
ttcctcattgtgatgtcaatttgtt

SEQ ID NO: 791111 - DNA, 25 bp, Homo sapien
tttcaagattgtttctcttttcgta

SEQ ID NO: 791112 - DNA, 25 bp, Homo sapien
caagattgtttctcttttcgtaatt

SEQ ID NO: 791113 - DNA, 25 bp, Homo sapien
tcaagattgtttctcttttcgtaat

SEQ ID NO: 791114 - DNA, 25 bp, Homo sapien
tttcttctggtcaaatagagaagat

SEQ ID NO: 791115 - DNA, 25 bp, Homo sapien
ttttcttctggtcaaatagagaaga

SEQ ID NO: 791116 - DNA, 25 bp, Homo sapien
cttctggtcaaatagagaagatatg

SEQ ID NO: 791117 - DNA, 25 bp, Homo sapien
tcttctggtcaaatagagaagatat

SEQ ID NO: 791118 - DNA, 25 bp, Homo sapien
cttcttgtagatgtagccaaatgac

SEQ ID NO: 791119 - DNA, 25 bp, Homo sapien
cagcttcttgtagatgtagccaaat

SEQ ID NO: 791120 - DNA, 25 bp, Homo sapien
agcttcttgtagatgtagccaaatg

SEQ ID NO: 791121 - DNA, 25 bp, Homo sapien
gcttcttgtagatgtagccaaatga

SEQ ID NO: 791122 - DNA, 25 bp, Homo sapien
ctctgggagtagcgttttgcctttt

SEQ ID NO: 791123 - DNA, 25 bp, Homo sapien
gtctctgggagtagcgttttgcctt

SEQ ID NO: 791124 - DNA, 25 bp, Homo sapien
tctctgggagtagcgttttgccttt

SEQ ID NO: 791125 - DNA, 25 bp, Homo sapien
aaaggattgaaaggcttgctcaagc

SEQ ID NO: 791126 - DNA, 25 bp, Homo sapien
aaggattgaaaggcttgctcaagcc

SEQ ID NO: 791127 - DNA, 25 bp, Homo sapien
aggattgaaaggcttgctcaagcct

SEQ ID NO: 791128 - DNA, 25 bp, Homo sapien
aaaaggattgaaaggcttgctcaag

SEQ ID NO: 791129 - DNA, 25 bp, Homo sapien
ctggtagctcaaggaagtcagagta

SEQ ID NO: 791130 - DNA, 25 bp, Homo sapien
cagcgttacggttttgcaggtaggt

SEQ ID NO: 791131 - DNA, 25 bp, Homo sapien
tcaaggaagtcagagtatcagcgtt

SEQ ID NO: 791132 - DNA, 25 bp, Homo sapien
gagtatcagcgttacggttttgcag

SEQ ID NO: 791133 - DNA, 25 bp, Homo sapien
tcttggcgcagcctcagagagttgg

SEQ ID NO: 791134 - DNA, 25 bp, Homo sapien
ctcggtccgccgcttcaggtcttgg

SEQ ID NO: 791135 - DNA, 25 bp, Homo sapien
tcagtctcagacccgggctctcggt

SEQ ID NO: 791136 - DNA, 25 bp, Homo sapien
tccgccgcttcaggtcttggcgcag

SEQ ID NO: 791137 - DNA, 25 bp, Homo sapien
aagatttgaaaacgcgtcacgcggc

SEQ ID NO: 791138 - DNA, 25 bp, Homo sapien
tcacgccgccgtccttctcgcgcct

SEQ ID NO: 791139 - DNA, 25 bp, Homo sapien
ttgaagatttgaaaacgcgtcacgc

SEQ ID NO: 791140 - DNA, 25 bp, Homo sapien
tccttctcgcgcctcgctctggccc

SEQ ID NO: 791141 - DNA, 25 bp, Homo sapien
gctacggcctctacgcagtagaggt

SEQ ID NO: 791142 - DNA, 25 bp, Homo sapien
cggcctctacgcagtagaggtaccg

SEQ ID NO: 791143 - DNA, 25 bp, Homo sapien
ctacgcagtagaggtaccgcgtctg

SEQ ID NO: 791144 - DNA, 25 bp, Homo sapien
ctctacgcagtagaggtaccgcgtc

SEQ ID NO: 791145 - DNA, 25 bp, Homo sapien
ggatcctcatggctccggagttcat

SEQ ID NO: 791146 - DNA, 25 bp, Homo sapien
gaaatgtcctttactgtggatcctc

SEQ ID NO: 791147 - DNA, 25 bp, Homo sapien
ctggaaatgtcctttactgtggatc

SEQ ID NO: 791148 - DNA, 25 bp, Homo sapien
atgtcctttactgtggatcctcatg

SEQ ID NO: 791149 - DNA, 25 bp, Homo sapien
taaattgaggatgcagtccgtcgcc

SEQ ID NO: 791150 - DNA, 25 bp, Homo sapien
gctagttttcaaccgaaggcacgac

SEQ ID NO: 791151 - DNA, 25 bp, Homo sapien
ggcacgaccgggaatcaatctggga

SEQ ID NO: 791152 - DNA, 25 bp, Homo sapien
taatcctgaagcgaaaagccacgag

SEQ ID NO: 791153 - DNA, 25 bp, Homo sapien
ttctggcctgttatcagttttcaga

SEQ ID NO: 791154 - DNA, 25 bp, Homo sapien
ctggcctgttatcagttttcagaga

SEQ ID NO: 791155 - DNA, 25 bp, Homo sapien
tggcctgttatcagttttcagagat

SEQ ID NO: 791156 - DNA, 25 bp, Homo sapien
tctggcctgttatcagttttcagag

SEQ ID NO: 791157 - DNA, 25 bp, Homo sapien
gtgacagaaggtaagtcaaggtaaa

SEQ ID NO: 791158 - DNA, 25 bp, Homo sapien
agtttttcagatatggtgacagaag

SEQ ID NO: 791159 - DNA, 25 bp, Homo sapien
ttttcagatatggtgacagaaggta

SEQ ID NO: 791160 - DNA, 25 bp, Homo sapien
tgacagaaggtaagtcaaggtaaaa

SEQ ID NO: 791161 - DNA, 25 bp, Homo sapien
cagtaagcagtcaatgagcagttcc

SEQ ID NO: 791162 - DNA, 25 bp, Homo sapien
cttctatgccagtgtacggttttca

SEQ ID NO: 791163 - DNA, 25 bp, Homo sapien
cctgaaaggtctgtcagtccacaaa

SEQ ID NO: 791164 - DNA, 25 bp, Homo sapien
gctgttatctggaggacattccaac

SEQ ID NO: 791165 - DNA, 25 bp, Homo sapien
gataactgatatctttgctgagaaa

SEQ ID NO: 791166 - DNA, 25 bp, Homo sapien
ctggtgacttaaatgaacttccatc

SEQ ID NO: 791167 - DNA, 25 bp, Homo sapien
caaggtttgtgcaaatttagcttcc

SEQ ID NO: 791168 - DNA, 25 bp, Homo sapien
gacttggtacaggagaaattcgacc

SEQ ID NO: 791169 - DNA, 25 bp, Homo sapien
ttttcaactaataattttcctctgc

SEQ ID NO: 791170 - DNA, 25 bp, Homo sapien
atggtccttgatagctttttcaact

SEQ ID NO: 791171 - DNA, 25 bp, Homo sapien
tgatagctttttcaactaataattt

SEQ ID NO: 791172 - DNA, 25 bp, Homo sapien
ggtccttgatagctttttcaactaa

SEQ ID NO: 791173 - DNA, 25 bp, Homo sapien
gaagaatttttactccccatgacaa

SEQ ID NO: 791174 - DNA, 25 bp, Homo sapien
agaatttttactccccatgacaagg

SEQ ID NO: 791175 - DNA, 25 bp, Homo sapien
aagaatttttactccccatgacaag

SEQ ID NO: 791176 - DNA, 25 bp, Homo sapien
cttttgttcaatgtagtatctaatg

SEQ ID NO: 791177 - DNA, 25 bp, Homo sapien
tcaatgccactaaaggctgtttcct

SEQ ID NO: 791178 - DNA, 25 bp, Homo sapien
ggtaaaactagccagattgactaag

SEQ ID NO: 791179 - DNA, 25 bp, Homo sapien
tacagttcccatagacattacaaag

SEQ ID NO: 791180 - DNA, 25 bp, Homo sapien
cagactaccaacatgcactgaagag

SEQ ID NO: 791181 - DNA, 25 bp, Homo sapien
aacattatggcataaaggttggtgg

SEQ ID NO: 791182 - DNA, 25 bp, Homo sapien
gtctggtgacattttcattataaga

SEQ ID NO: 791183 - DNA, 25 bp, Homo sapien
ttcattataagaagatgtactaaac

SEQ ID NO: 791184 - DNA, 25 bp, Homo sapien
ttgggctaaggccatcatgccacct

SEQ ID NO: 791185 - DNA, 25 bp, Homo sapien
ttgttttttgtgcaccactaccaac

SEQ ID NO: 791186 - DNA, 25 bp, Homo sapien
gttttttgtgcaccactaccaactc

SEQ ID NO: 791187 - DNA, 25 bp, Homo sapien
tgttttttgtgcaccactaccaact

SEQ ID NO: 791188 - DNA, 25 bp, Homo sapien
tcatcagttatgaactgcttgagca

SEQ ID NO: 791189 - DNA, 25 bp, Homo sapien
cagatgaggtacttccattatcacc

SEQ ID NO: 791190 - DNA, 25 bp, Homo sapien
ggaaccctcaaattaacaggattca

SEQ ID NO: 791191 - DNA, 25 bp, Homo sapien
gcagtacctgcgactttgatgctaa

SEQ ID NO: 791192 - DNA, 25 bp, Homo sapien
tcatatcttccacctttacaaaagg

SEQ ID NO: 791193 - DNA, 25 bp, Homo sapien
catatcttccacctttacaaaaggc

SEQ ID NO: 791194 - DNA, 25 bp, Homo sapien
gctcatatcttccacctttacaaaa

SEQ ID NO: 791195 - DNA, 25 bp, Homo sapien
tggctcatatcttccacctttacaa

SEQ ID NO: 791196 - DNA, 25 bp, Homo sapien
ggtttagatttgcaattccctcatg

SEQ ID NO: 791197 - DNA, 25 bp, Homo sapien
gatatatgacttgttcaacctgaga

SEQ ID NO: 791198 - DNA, 25 bp, Homo sapien
ttttggtgtcacgtccaggaaagca

SEQ ID NO: 791199 - DNA, 25 bp, Homo sapien
caggaaagcactgcaaatccaatgt

SEQ ID NO: 791200 - DNA, 25 bp, Homo sapien
ctgaagataaaatggcctataaagt

SEQ ID NO: 791201 - DNA, 25 bp, Homo sapien
taatttataaaaggcatattggtca

SEQ ID NO: 791202 - DNA, 25 bp, Homo sapien
gaatagaataatttataaaaggcat

SEQ ID NO: 791203 - DNA, 25 bp, Homo sapien
gaataatttataaaaggcatattgg

SEQ ID NO: 791204 - DNA, 25 bp, Homo sapien
ctgaatagaataatttataaaaggc

SEQ ID NO: 791205 - DNA, 25 bp, Homo sapien
ctacatcaaatggactgcagggctt

SEQ ID NO: 791206 - DNA, 25 bp, Homo sapien
gagtttgcttttgcatactagatgg

SEQ ID NO: 791207 - DNA, 25 bp, Homo sapien
ctgagtttgcttttgcatactagat

SEQ ID NO: 791208 - DNA, 25 bp, Homo sapien
gtttgcttttgcatactagatggct

SEQ ID NO: 791209 - DNA, 25 bp, Homo sapien
tgcttttgcatactagatggcttgt

SEQ ID NO: 791210 - DNA, 25 bp, Homo sapien
ctctttcaactggagttgaattgag

SEQ ID NO: 791211 - DNA, 25 bp, Homo sapien
tctctttcaactggagttgaattga

SEQ ID NO: 791212 - DNA, 25 bp, Homo sapien
catacttatcgccatctgtttggat

SEQ ID NO: 791213 - DNA, 25 bp, Homo sapien
ttccaccatacttatcgccatctgt

SEQ ID NO: 791214 - DNA, 25 bp, Homo sapien
tagatacaatatcatcaacaacttg

SEQ ID NO: 791215 - DNA, 25 bp, Homo sapien
tactggttactctgtgcaaagtttc

SEQ ID NO: 791216 - DNA, 25 bp, Homo sapien
catattccacaaagtcaaaaactaa

SEQ ID NO: 791217 - DNA, 25 bp, Homo sapien
tctttttaggtgtgtccttttcata

SEQ ID NO: 791218 - DNA, 25 bp, Homo sapien
aaggtaaggatctttgatagtaggg

SEQ ID NO: 791219 - DNA, 25 bp, Homo sapien
aagtagtctaaggtaaggatctttg

SEQ ID NO: 791220 - DNA, 25 bp, Homo sapien
tttacatcccgaaaatacatattcc

SEQ ID NO: 791221 - DNA, 25 bp, Homo sapien
agaagctactggtttttaaccatat

SEQ ID NO: 791222 - DNA, 25 bp, Homo sapien
cacacttaaaagtcctgtcagtacc

SEQ ID NO: 791223 - DNA, 25 bp, Homo sapien
ggcacagtagcccacatagttttaa

SEQ ID NO: 791224 - DNA, 25 bp, Homo sapien
tacccatcataaggtttaggcaaag

SEQ ID NO: 791225 - DNA, 25 bp, Homo sapien
cacctctagggtatatccatatgaa

SEQ ID NO: 791226 - DNA, 25 bp, Homo sapien
tctcattaagccctctcaattcatt

SEQ ID NO: 791227 - DNA, 25 bp, Homo sapien
ttttctcattaagccctctcaattc

SEQ ID NO: 791228 - DNA, 25 bp, Homo sapien
tcattaagccctctcaattcatttg

SEQ ID NO: 791229 - DNA, 25 bp, Homo sapien
aaaaatcctaagaatttccatacat

SEQ ID NO: 791230 - DNA, 25 bp, Homo sapien
catttgggtctgtaaacaaagctgg

SEQ ID NO: 791231 - DNA, 25 bp, Homo sapien
aagaatatgatccttatcacttctg

SEQ ID NO: 791232 - DNA, 25 bp, Homo sapien
atcacttctgaaaagtatgcatttt

SEQ ID NO: 791233 - DNA, 25 bp, Homo sapien
agaccagtcacaagtttattctgta

SEQ ID NO: 791234 - DNA, 25 bp, Homo sapien
aaacaagaccagtcacaagtttatt

SEQ ID NO: 791235 - DNA, 25 bp, Homo sapien
caagaccagtcacaagtttattctg

SEQ ID NO: 791236 - DNA, 25 bp, Homo sapien
acaagaccagtcacaagtttattct

SEQ ID NO: 791237 - DNA, 25 bp, Homo sapien
caaaatactagcatggtccaccagt

SEQ ID NO: 791238 - DNA, 25 bp, Homo sapien
tattgagcctacttcaggtactggt

SEQ ID NO: 791239 - DNA, 25 bp, Homo sapien
caaatgcttgtatcagtaagtgcca

SEQ ID NO: 791240 - DNA, 25 bp, Homo sapien
tattccacttggtagcctggttaag

SEQ ID NO: 791241 - DNA, 25 bp, Homo sapien
gcggccgtggcgctgcaacctccac

SEQ ID NO: 791242 - DNA, 25 bp, Homo sapien
gccgccgagtccgtttccctcgctc

SEQ ID NO: 791243 - DNA, 25 bp, Homo sapien
tgtgcttcgcggacgcttccgctgg

SEQ ID NO: 791244 - DNA, 25 bp, Homo sapien
agacgctcagctcctcatgccggcg

SEQ ID NO: 791245 - DNA, 25 bp, Homo sapien
tgcctggccgcagcgcgccggaggg

SEQ ID NO: 791246 - DNA, 25 bp, Homo sapien
cagcaagaagggcacggacacagcc

SEQ ID NO: 791247 - DNA, 25 bp, Homo sapien
agaagggcacggacacagccactgc

SEQ ID NO: 791248 - DNA, 25 bp, Homo sapien
gcagcgcgccggagggcaggtcccc

SEQ ID NO: 791249 - DNA, 25 bp, Homo sapien
ctgggaaggacgcagagacaccagc

SEQ ID NO: 791250 - DNA, 25 bp, Homo sapien
agagccttggaccagctcatccgag

SEQ ID NO: 791251 - DNA, 25 bp, Homo sapien
gctcatccgagagcaaccaggagcg

SEQ ID NO: 791252 - DNA, 25 bp, Homo sapien
cttggaccagctcatccgagagcaa

SEQ ID NO: 791253 - DNA, 25 bp, Homo sapien
aggcgaaaataatgaccctgaccct

SEQ ID NO: 791254 - DNA, 25 bp, Homo sapien
atcctgcagtcctacgtctccccta

SEQ ID NO: 791255 - DNA, 25 bp, Homo sapien
gcagtcctacgtctcccctacgaaa

SEQ ID NO: 791256 - DNA, 25 bp, Homo sapien
tccatcctgcagtcctacgtctccc

SEQ ID NO: 791257 - DNA, 25 bp, Homo sapien
cgtgtcgagcgcgtcgtgccgactt

SEQ ID NO: 791258 - DNA, 25 bp, Homo sapien
tcttcgccgcccgagcggtagatga

SEQ ID NO: 791259 - DNA, 25 bp, Homo sapien
cgcagtggcacgatgctctggcgct

SEQ ID NO: 791260 - DNA, 25 bp, Homo sapien
tctggcgctccacgaagcggttttc

SEQ ID NO: 791261 - DNA, 25 bp, Homo sapien
gaggcgcggaggaccacctcccgga

SEQ ID NO: 791262 - DNA, 25 bp, Homo sapien
ccagggcaaccgagcgcaatcgtgg

SEQ ID NO: 791263 - DNA, 25 bp, Homo sapien
caatcgtggggtctcgggtgggccg

SEQ ID NO: 791264 - DNA, 25 bp, Homo sapien
ggatctccagggcaaccgagcgcaa

SEQ ID NO: 791265 - DNA, 25 bp, Homo sapien
aatttcccctatcttcttatcactc

SEQ ID NO: 791266 - DNA, 25 bp, Homo sapien
gaacacttcttgaatttcccctatc

SEQ ID NO: 791267 - DNA, 25 bp, Homo sapien
ctagccagaatggcttcacctttgg

SEQ ID NO: 791268 - DNA, 25 bp, Homo sapien
tggtgacaggaatgaacacttcttg

SEQ ID NO: 791269 - DNA, 25 bp, Homo sapien
caccaagtcctgaacccctactgtg

SEQ ID NO: 791270 - DNA, 25 bp, Homo sapien
caccaccaagtcctgaacccctact

SEQ ID NO: 791271 - DNA, 25 bp, Homo sapien
tactgtgtacacaggtacctccagg

SEQ ID NO: 791272 - DNA, 25 bp, Homo sapien
ccaccaagtcctgaacccctactgt

SEQ ID NO: 791273 - DNA, 25 bp, Homo sapien
ctggtatatggtcttctgggattct

SEQ ID NO: 791274 - DNA, 25 bp, Homo sapien
tatctggtatatggtcttctgggat

SEQ ID NO: 791275 - DNA, 25 bp, Homo sapien
cttctgggattctgacttcaaaaac

SEQ ID NO: 791276 - DNA, 25 bp, Homo sapien
tctggtatatggtcttctgggattc

SEQ ID NO: 791277 - DNA, 25 bp, Homo sapien
ttttccaaggatatagtcaagaaat

SEQ ID NO: 791278 - DNA, 25 bp, Homo sapien
aagttttccaaggatatagtcaaga

SEQ ID NO: 791279 - DNA, 25 bp, Homo sapien
ttccaaggatatagtcaagaaatac

SEQ ID NO: 791280 - DNA, 25 bp, Homo sapien
agttttccaaggatatagtcaagaa

SEQ ID NO: 791281 - DNA, 25 bp, Homo sapien
tcaacctggaagcttgcttggtcaa

SEQ ID NO: 791282 - DNA, 25 bp, Homo sapien
tgaatgacgttccaaaggcatcaac

SEQ ID NO: 791283 - DNA, 25 bp, Homo sapien
tgatttagcacgacatcgagaatga

SEQ ID NO: 791284 - DNA, 25 bp, Homo sapien
aagcttgcttggtcaacatgagtca

SEQ ID NO: 791285 - DNA, 25 bp, Homo sapien
ctctaaatgagagaaggcaagactg

SEQ ID NO: 791286 - DNA, 25 bp, Homo sapien
caggatctgagagctgcacaacaga

SEQ ID NO: 791287 - DNA, 25 bp, Homo sapien
gcttcagttcctagttgtcctccca

SEQ ID NO: 791288 - DNA, 25 bp, Homo sapien
tcaagagccacagtataaagcaagc

SEQ ID NO: 791289 - DNA, 25 bp, Homo sapien
ggatcttccagcaccttccaataca

SEQ ID NO: 791290 - DNA, 25 bp, Homo sapien
agcaccttccaatacagttcccctt

SEQ ID NO: 791291 - DNA, 25 bp, Homo sapien
tcttccagcaccttccaatacagtt

SEQ ID NO: 791292 - DNA, 25 bp, Homo sapien
cagcaccttccaatacagttcccct

SEQ ID NO: 791293 - DNA, 25 bp, Homo sapien
agctttagtactggtctcttccttg

SEQ ID NO: 791294 - DNA, 25 bp, Homo sapien
atcctgtaagtctctagtccctggg

SEQ ID NO: 791295 - DNA, 25 bp, Homo sapien
gggtcctgttgcctctaggattcct

SEQ ID NO: 791296 - DNA, 25 bp, Homo sapien
acaatttcctaggtcttagctttag

SEQ ID NO: 791297 - DNA, 25 bp, Homo sapien
ctaactcaagcctagcacagtatcc

SEQ ID NO: 791298 - DNA, 25 bp, Homo sapien
taactcaagcctagcacagtatcct

SEQ ID NO: 791299 - DNA, 25 bp, Homo sapien
aactcaagcctagcacagtatcctc

SEQ ID NO: 791300 - DNA, 25 bp, Homo sapien
actcaagcctagcacagtatcctcc

SEQ ID NO: 791301 - DNA, 25 bp, Homo sapien
cctacttgtgtgattaactaggcag

SEQ ID NO: 791302 - DNA, 25 bp, Homo sapien
tacacactttaaatgcaaggtacac

SEQ ID NO: 791303 - DNA, 25 bp, Homo sapien
ctttgttgtctgttataatctgagc

SEQ ID NO: 791304 - DNA, 25 bp, Homo sapien
gaagtttctgtgacctctattaagc

SEQ ID NO: 791305 - DNA, 25 bp, Homo sapien
cgttaaatatattcaccctacggtg

SEQ ID NO: 791306 - DNA, 25 bp, Homo sapien
tttagttttctgtagcgacaaggtc

SEQ ID NO: 791307 - DNA, 25 bp, Homo sapien
ctctgttacctaggcctgtcaccca

SEQ ID NO: 791308 - DNA, 25 bp, Homo sapien
ccctacggtgctataaagcactaga

SEQ ID NO: 791309 - DNA, 25 bp, Homo sapien
gctagcatttatggtgtgccaggaa

SEQ ID NO: 791310 - DNA, 25 bp, Homo sapien
tagagagcacttgactgcatggaat

SEQ ID NO: 791311 - DNA, 25 bp, Homo sapien
tgaggaaataataccaccagctagc

SEQ ID NO: 791312 - DNA, 25 bp, Homo sapien
aatccaaaacatgcctgtgtgctca

SEQ ID NO: 791313 - DNA, 25 bp, Homo sapien
ccccagatgtaggagagaaacatca

SEQ ID NO: 791314 - DNA, 25 bp, Homo sapien
cccagatgtaggagagaaacatcat

SEQ ID NO: 791315 - DNA, 25 bp, Homo sapien
caggtgttattagcttgggacgact

SEQ ID NO: 791316 - DNA, 25 bp, Homo sapien
gcttgggacgactgctatctttggg

SEQ ID NO: 791317 - DNA, 25 bp, Homo sapien
ctctcagacacttgagcaggtgtta

SEQ ID NO: 791318 - DNA, 25 bp, Homo sapien
gacacttgagcaggtgttattagct

SEQ ID NO: 791319 - DNA, 25 bp, Homo sapien
cctccatgttcaatgtgtctctcta

SEQ ID NO: 791320 - DNA, 25 bp, Homo sapien
tctctctatgtattcagaggacagc

SEQ ID NO: 791321 - DNA, 25 bp, Homo sapien
tccatgttcaatgtgtctctctatg

SEQ ID NO: 791322 - DNA, 25 bp, Homo sapien
tgtctctctatgtattcagaggaca

SEQ ID NO: 791323 - DNA, 25 bp, Homo sapien
gatcggtggagatatcacctttgtc

SEQ ID NO: 791324 - DNA, 25 bp, Homo sapien
tcggtggagatatcacctttgtcat

SEQ ID NO: 791325 - DNA, 25 bp, Homo sapien
cggtggagatatcacctttgtcatt

SEQ ID NO: 791326 - DNA, 25 bp, Homo sapien
ggatcggtggagatatcacctttgt

SEQ ID NO: 791327 - DNA, 25 bp, Homo sapien
tccgtggcatgttgacaatgcaaca

SEQ ID NO: 791328 - DNA, 25 bp, Homo sapien
aatgagtcagggtttcctcggatat

SEQ ID NO: 791329 - DNA, 25 bp, Homo sapien
tgaagtccgtggcatgttgacaatg

SEQ ID NO: 791330 - DNA, 25 bp, Homo sapien
ttcctcggatatggccctggtagta

SEQ ID NO: 791331 - DNA, 25 bp, Homo sapien
tcccaggacttgtgtttcaatcgcc

SEQ ID NO: 791332 - DNA, 25 bp, Homo sapien
gaatgacacggtagctttataaggg

SEQ ID NO: 791333 - DNA, 25 bp, Homo sapien
ttggcctcctcatgagactgtgagc

SEQ ID NO: 791334 - DNA, 25 bp, Homo sapien
cattatcattatcgacaggatggag

SEQ ID NO: 791335 - DNA, 25 bp, Homo sapien
caacgacaaaaaaataattaggcat

SEQ ID NO: 791336 - DNA, 25 bp, Homo sapien
ctgccaacgacaaaaaaataattag

SEQ ID NO: 791337 - DNA, 25 bp, Homo sapien
gtggttcccgtcatagaacatccca

SEQ ID NO: 791338 - DNA, 25 bp, Homo sapien
atgagatatgtgtggttcccgtcat

SEQ ID NO: 791339 - DNA, 25 bp, Homo sapien
gatatgtgtggttcccgtcatagaa

SEQ ID NO: 791340 - DNA, 25 bp, Homo sapien
tgtgtggttcccgtcatagaacatc

SEQ ID NO: 791341 - DNA, 25 bp, Homo sapien
aaattcaaacagtctggatttgtaa

SEQ ID NO: 791342 - DNA, 25 bp, Homo sapien
aattcaaacagtctggatttgtaaa

SEQ ID NO: 791343 - DNA, 25 bp, Homo sapien
taaggagggcaaagtatgcatgcac

SEQ ID NO: 791344 - DNA, 25 bp, Homo sapien
tggaagcgactctcaaagcaacata

SEQ ID NO: 791345 - DNA, 25 bp, Homo sapien
caaagacaaacgctaactcaccctg

SEQ ID NO: 791346 - DNA, 25 bp, Homo sapien
ccttcctgtcatgtgaagacttgga

SEQ ID NO: 791347 - DNA, 25 bp, Homo sapien
taggacacaacatattcaataattt

SEQ ID NO: 791348 - DNA, 25 bp, Homo sapien
attcataggacacaacatattcaat

SEQ ID NO: 791349 - DNA, 25 bp, Homo sapien
gtggtatattcataggacacaacat

SEQ ID NO: 791350 - DNA, 25 bp, Homo sapien
tatattcataggacacaacatattc

SEQ ID NO: 791351 - DNA, 25 bp, Homo sapien
gataccaccacatacactagaatag

SEQ ID NO: 791352 - DNA, 25 bp, Homo sapien
aatgagcaagccaaagactgggaaa

SEQ ID NO: 791353 - DNA, 25 bp, Homo sapien
tcaaaacttgggagctagcaaaaat

SEQ ID NO: 791354 - DNA, 25 bp, Homo sapien
aaacagtggttctcacttggacaca

SEQ ID NO: 791355 - DNA, 25 bp, Homo sapien
catcttataagaccagtaaaaccct

SEQ ID NO: 791356 - DNA, 25 bp, Homo sapien
tacagtccaatatgctttctgaacc

SEQ ID NO: 791357 - DNA, 25 bp, Homo sapien
atataatctaccataaccaattggg

SEQ ID NO: 791358 - DNA, 25 bp, Homo sapien
aaattccttgaacgtgtgtatatat

SEQ ID NO: 791359 - DNA, 25 bp, Homo sapien
attttgatggagtaatgtttacttg

SEQ ID NO: 791360 - DNA, 25 bp, Homo sapien
tttgatggagtaatgtttacttgct

SEQ ID NO: 791361 - DNA, 25 bp, Homo sapien
aaattttgatggagtaatgtttact

SEQ ID NO: 791362 - DNA, 25 bp, Homo sapien
tgatggagtaatgtttacttgctga

SEQ ID NO: 791363 - DNA, 25 bp, Homo sapien
taaaataacacgacacaccactgtg

SEQ ID NO: 791364 - DNA, 25 bp, Homo sapien
aaaataacacgacacaccactgtga

SEQ ID NO: 791365 - DNA, 25 bp, Homo sapien
tttaaaataacacgacacaccactg

SEQ ID NO: 791366 - DNA, 25 bp, Homo sapien
ttaaaataacacgacacaccactgt

SEQ ID NO: 791367 - DNA, 25 bp, Homo sapien
cataaggtgatcattcacaatcatc

SEQ ID NO: 791368 - DNA, 25 bp, Homo sapien
cattcacaatcatcagttcaatgta

SEQ ID NO: 791369 - DNA, 25 bp, Homo sapien
tcttcttctacattacgaggatatc

SEQ ID NO: 791370 - DNA, 25 bp, Homo sapien
ctacattacgaggatatcgacgaag

SEQ ID NO: 791371 - DNA, 25 bp, Homo sapien
cacagatttcgcataggtattggta

SEQ ID NO: 791372 - DNA, 25 bp, Homo sapien
tggtatgtacaacggaaagccgatg

SEQ ID NO: 791373 - DNA, 25 bp, Homo sapien
ggtattggtatgtacaacggaaagc

SEQ ID NO: 791374 - DNA, 25 bp, Homo sapien
tatgtacaacggaaagccgatgttt

SEQ ID NO: 791375 - DNA, 25 bp, Homo sapien
tccatagcaaccaatactatcctgg

SEQ ID NO: 791376 - DNA, 25 bp, Homo sapien
tttcagatatggcaaacttgttgtc

SEQ ID NO: 791377 - DNA, 25 bp, Homo sapien
tactatcctggtcttaagttggtct

SEQ ID NO: 791378 - DNA, 25 bp, Homo sapien
gtcagtcgcccaggtttccatagca

SEQ ID NO: 791379 - DNA, 25 bp, Homo sapien
aaggtgaactgcatcacttttctct

SEQ ID NO: 791380 - DNA, 25 bp, Homo sapien
aggtgaactgcatcacttttctctt

SEQ ID NO: 791381 - DNA, 25 bp, Homo sapien
atacatcattacagaagttacgtac

SEQ ID NO: 791382 - DNA, 25 bp, Homo sapien
gggcatatgcaatttccttgtagta

SEQ ID NO: 791383 - DNA, 25 bp, Homo sapien
caacttactttcaagaggttcagga

SEQ ID NO: 791384 - DNA, 25 bp, Homo sapien
aacatcaggcattcccataatgagg

SEQ ID NO: 791385 - DNA, 25 bp, Homo sapien
taattgatgaatctgaatagagggc

SEQ ID NO: 791386 - DNA, 25 bp, Homo sapien
tcctttcagcaacgagcaaatccca

SEQ ID NO: 791387 - DNA, 25 bp, Homo sapien
agcaacgagcaaatcccaccaatat

SEQ ID NO: 791388 - DNA, 25 bp, Homo sapien
accaatataagctgccccgctccgg

SEQ ID NO: 791389 - DNA, 25 bp, Homo sapien
gctccggctactctcaaattgactt

SEQ ID NO: 791390 - DNA, 25 bp, Homo sapien
tgtattgtacagatgttcacaccta

SEQ ID NO: 791391 - DNA, 25 bp, Homo sapien
gtattgtacagatgttcacacctac

SEQ ID NO: 791392 - DNA, 25 bp, Homo sapien
actttgtattgtacagatgttcaca

SEQ ID NO: 791393 - DNA, 25 bp, Homo sapien
tttgtattgtacagatgttcacacc

SEQ ID NO: 791394 - DNA, 25 bp, Homo sapien
cagccattaaatcagttttcccaaa

SEQ ID NO: 791395 - DNA, 25 bp, Homo sapien
tatgggctaatgactgggcaagtgt

SEQ ID NO: 791396 - DNA, 25 bp, Homo sapien
gactgggcaagtgtaacagccatta

SEQ ID NO: 791397 - DNA, 25 bp, Homo sapien
aataccaatattatgggctaatgac

SEQ ID NO: 791398 - DNA, 25 bp, Homo sapien
attatgcacccggaccacgtgtcct

SEQ ID NO: 791399 - DNA, 25 bp, Homo sapien
cacgtgtcctcgcatttacattcac

SEQ ID NO: 791400 - DNA, 25 bp, Homo sapien
cggaccacgtgtcctcgcatttaca

SEQ ID NO: 791401 - DNA, 25 bp, Homo sapien
gtgtctcccattatgcacccggacc

SEQ ID NO: 791402 - DNA, 25 bp, Homo sapien
tgatactcttcaatattacactggg

SEQ ID NO: 791403 - DNA, 25 bp, Homo sapien
ctattcaggaagtcatgatactctt

SEQ ID NO: 791404 - DNA, 25 bp, Homo sapien
tcttcaatattacactgggtgaact

SEQ ID NO: 791405 - DNA, 25 bp, Homo sapien
aggcaccacctccactattcaggaa

SEQ ID NO: 791406 - DNA, 25 bp, Homo sapien
gtttcaatgaagccattgccacact

SEQ ID NO: 791407 - DNA, 25 bp, Homo sapien
tgaagccattgccacactcaggagg

SEQ ID NO: 791408 - DNA, 25 bp, Homo sapien
ggccggggttccacaatcacactcc

SEQ ID NO: 791409 - DNA, 25 bp, Homo sapien
tttcaatgaagccattgccacactc

SEQ ID NO: 791410 - DNA, 25 bp, Homo sapien
ttacaacactctgctccttcaagga

SEQ ID NO: 791411 - DNA, 25 bp, Homo sapien
gagtcttgagtcaaggtgcatttct

SEQ ID NO: 791412 - DNA, 25 bp, Homo sapien
tttttacagcaaagaccgtcactgc

SEQ ID NO: 791413 - DNA, 25 bp, Homo sapien
tcactgcattgagagtcttgagtca

SEQ ID NO: 791414 - DNA, 25 bp, Homo sapien
cgtttcacgaatatcacaatcattt

SEQ ID NO: 791415 - DNA, 25 bp, Homo sapien
tcatttactgcttctcggcacacag

SEQ ID NO: 791416 - DNA, 25 bp, Homo sapien
atttcctgagcacgtttcacgaata

SEQ ID NO: 791417 - DNA, 25 bp, Homo sapien
tgagcacgtttcacgaatatcacaa

SEQ ID NO: 791418 - DNA, 25 bp, Homo sapien
cacatgaatatccatccattttatg

SEQ ID NO: 791419 - DNA, 25 bp, Homo sapien
ctgaacaccatcacatgaatatcca

SEQ ID NO: 791420 - DNA, 25 bp, Homo sapien
ccattttatgaatattaggggcaca

SEQ ID NO: 791421 - DNA, 25 bp, Homo sapien
caccatcacatgaatatccatccat

SEQ ID NO: 791422 - DNA, 25 bp, Homo sapien
gcaaatacccattagcgatgcaata

SEQ ID NO: 791423 - DNA, 25 bp, Homo sapien
acggaaaagcaaatacccattagcg

SEQ ID NO: 791424 - DNA, 25 bp, Homo sapien
tacccattagcgatgcaatatctgc

SEQ ID NO: 791425 - DNA, 25 bp, Homo sapien
cgatgcaatatctgcttatgtcaga

SEQ ID NO: 791426 - DNA, 25 bp, Homo sapien
gtatttgcattgtctatctctggtt

SEQ ID NO: 791427 - DNA, 25 bp, Homo sapien
tgcatcttcctccaaagcaaattcc

SEQ ID NO: 791428 - DNA, 25 bp, Homo sapien
tttgcccccaaatgtatttgcattg

SEQ ID NO: 791429 - DNA, 25 bp, Homo sapien
cccaaatgtatttgcattgtctatc

SEQ ID NO: 791430 - DNA, 25 bp, Homo sapien
tgagggaagtacgatttggctgctc

SEQ ID NO: 791431 - DNA, 25 bp, Homo sapien
tcagtgagggaagtacgatttggct

SEQ ID NO: 791432 - DNA, 25 bp, Homo sapien
tatcagtgagggaagtacgatttgg

SEQ ID NO: 791433 - DNA, 25 bp, Homo sapien
gaagtacgatttggctgctcaaaag

SEQ ID NO: 791434 - DNA, 25 bp, Homo sapien
tgtctttcccacagttacccttctc

SEQ ID NO: 791435 - DNA, 25 bp, Homo sapien
cgtttgttgcactgtatccatgtgt

SEQ ID NO: 791436 - DNA, 25 bp, Homo sapien
ttctccgtcccttcaatattcagtt

SEQ ID NO: 791437 - DNA, 25 bp, Homo sapien
agcaatatttgtctgatgctgtcac

SEQ ID NO: 791438 - DNA, 25 bp, Homo sapien
tgtgatttcaccatcgagttctcca

SEQ ID NO: 791439 - DNA, 25 bp, Homo sapien
ccttgctgcacaactaaagtagatg

SEQ ID NO: 791440 - DNA, 25 bp, Homo sapien
tccaagccttgggatattgccaata

SEQ ID NO: 791441 - DNA, 25 bp, Homo sapien
ctgcagtttaatgttcttccttgct

SEQ ID NO: 791442 - DNA, 25 bp, Homo sapien
tttggggaccacaaggtgtcccatc

SEQ ID NO: 791443 - DNA, 25 bp, Homo sapien
gcaagtactaaagttgaaagaagcc

SEQ ID NO: 791444 - DNA, 25 bp, Homo sapien
gtgccttctttactgctcaagcaag

SEQ ID NO: 791445 - DNA, 25 bp, Homo sapien
tccatttcctgagcaaatagtgcct

SEQ ID NO: 791446 - DNA, 25 bp, Homo sapien
cattgtgagggaagtaagtgttgca

SEQ ID NO: 791447 - DNA, 25 bp, Homo sapien
tgttgcaatcagaacctatccagtg

SEQ ID NO: 791448 - DNA, 25 bp, Homo sapien
gacagagtgataccagtctttgcat

SEQ ID NO: 791449 - DNA, 25 bp, Homo sapien
gaacctatccagtgtctgttacaca

SEQ ID NO: 791450 - DNA, 25 bp, Homo sapien
tctgggcaatgatggctgtggcatt

SEQ ID NO: 791451 - DNA, 25 bp, Homo sapien
ttctgtgattactgcccaggtgatg

SEQ ID NO: 791452 - DNA, 25 bp, Homo sapien
tgggcttgtaattccccgtctgggc

SEQ ID NO: 791453 - DNA, 25 bp, Homo sapien
tgatgtaggtgatagaaacactggg

SEQ ID NO: 791454 - DNA, 25 bp, Homo sapien
actccattttgacaactaacgcaag

SEQ ID NO: 791455 - DNA, 25 bp, Homo sapien
tttgacaactaacgcaaggtcctta

SEQ ID NO: 791456 - DNA, 25 bp, Homo sapien
tccattttgacaactaacgcaaggt

SEQ ID NO: 791457 - DNA, 25 bp, Homo sapien
cattttgacaactaacgcaaggtcc

SEQ ID NO: 791458 - DNA, 25 bp, Homo sapien
ggtgccagcaattatgcctattatg

SEQ ID NO: 791459 - DNA, 25 bp, Homo sapien
cgcagttattcctaatatgagggcc

SEQ ID NO: 791460 - DNA, 25 bp, Homo sapien
gcctattatgatattggtgccagca

SEQ ID NO: 791461 - DNA, 25 bp, Homo sapien
ggccagcactaaaatggtgccagca

SEQ ID NO: 791462 - DNA, 25 bp, Homo sapien
tttgtgctgactccgggaggaatgt

SEQ ID NO: 791463 - DNA, 25 bp, Homo sapien
tccgggaggaatgtcgctataaaaa

SEQ ID NO: 791464 - DNA, 25 bp, Homo sapien
ttagaactagatgctgagtttgtgc

SEQ ID NO: 791465 - DNA, 25 bp, Homo sapien
gaggaatgtcgctataaaaagagtc

SEQ ID NO: 791466 - DNA, 25 bp, Homo sapien
cgaggtcgcccattttcacagatgt

SEQ ID NO: 791467 - DNA, 25 bp, Homo sapien
tcctttcactccaagaatgagagag

SEQ ID NO: 791468 - DNA, 25 bp, Homo sapien
ctttcactccaagaatgagagagcc

SEQ ID NO: 791469 - DNA, 25 bp, Homo sapien
cttgccaagagttacttcgaggtcg

SEQ ID NO: 791470 - DNA, 25 bp, Homo sapien
gacagattcagaatgccagcctcta

SEQ ID NO: 791471 - DNA, 25 bp, Homo sapien
ggaacaccgggtttgtcacactgta

SEQ ID NO: 791472 - DNA, 25 bp, Homo sapien
taattacgaggcatttcaagtgggt

SEQ ID NO: 791473 - DNA, 25 bp, Homo sapien
tgattgccctatgtctaattacgag

SEQ ID NO: 791474 - DNA, 25 bp, Homo sapien
ggtctaaatcttttgcctctgattt

SEQ ID NO: 791475 - DNA, 25 bp, Homo sapien
tgaattagaccgaggtctaaatctt

SEQ ID NO: 791476 - DNA, 25 bp, Homo sapien
tcagttgaattagaccgaggtctaa

SEQ ID NO: 791477 - DNA, 25 bp, Homo sapien
tagaccgaggtctaaatcttttgcc

SEQ ID NO: 791478 - DNA, 25 bp, Homo sapien
cttggagtgcctttttccattagag

SEQ ID NO: 791479 - DNA, 25 bp, Homo sapien
tctttgactatctgcttaatttact

SEQ ID NO: 791480 - DNA, 25 bp, Homo sapien
tgacactatttgcacaggaccttgg

SEQ ID NO: 791481 - DNA, 25 bp, Homo sapien
gacaaaaccaagaccggagacatgg

SEQ ID NO: 791482 - DNA, 25 bp, Homo sapien
gactgtctgggcgagggagtgccca

SEQ ID NO: 791483 - DNA, 25 bp, Homo sapien
cagagccccctgggcttatgccttg

SEQ ID NO: 791484 - DNA, 25 bp, Homo sapien
ctgggcttatgccttgggatgggac

SEQ ID NO: 791485 - DNA, 25 bp, Homo sapien
cttgggatgggactgtctgggcgag

SEQ ID NO: 791486 - DNA, 25 bp, Homo sapien
tatgttccagttggctctgcaagga

SEQ ID NO: 791487 - DNA, 25 bp, Homo sapien
caatctggcatttgggcatacaaca

SEQ ID NO: 791488 - DNA, 25 bp, Homo sapien
tgcaaggagcagatagggtcccact

SEQ ID NO: 791489 - DNA, 25 bp, Homo sapien
cattaggaaccaaccctcagaggtt

SEQ ID NO: 791490 - DNA, 25 bp, Homo sapien
tagtctcttttgaaccatgggttta

SEQ ID NO: 791491 - DNA, 25 bp, Homo sapien
ttattcacatcttctacccacttag

SEQ ID NO: 791492 - DNA, 25 bp, Homo sapien
cacttagctacattatagtctcttt

SEQ ID NO: 791493 - DNA, 25 bp, Homo sapien
catcttctacccacttagctacatt

SEQ ID NO: 791494 - DNA, 25 bp, Homo sapien
aagggtaatcctgaatgacctggcc

SEQ ID NO: 791495 - DNA, 25 bp, Homo sapien
taagcatagggttggcaaggcacaa

SEQ ID NO: 791496 - DNA, 25 bp, Homo sapien
gaagcagatctgagcctaagcatag

SEQ ID NO: 791497 - DNA, 25 bp, Homo sapien
gtgttaaacgttctgggccatctca

SEQ ID NO: 791498 - DNA, 25 bp, Homo sapien
cctggcactttgtcggttcactttc

SEQ ID NO: 791499 - DNA, 25 bp, Homo sapien
ggcattgggtaagggtattttctgc

SEQ ID NO: 791500 - DNA, 25 bp, Homo sapien
caatagacccagttgatgaagaagg

SEQ ID NO: 791501 - DNA, 25 bp, Homo sapien
ttctgctggaggcaatagacccagt

SEQ ID NO: 791502 - DNA, 25 bp, Homo sapien
cgatgtatcacatgtaaacagttga

SEQ ID NO: 791503 - DNA, 25 bp, Homo sapien
ttttcgatgtatcacatgtaaacag

SEQ ID NO: 791504 - DNA, 25 bp, Homo sapien
agttttcgatgtatcacatgtaaac

SEQ ID NO: 791505 - DNA, 25 bp, Homo sapien
ttcgatgtatcacatgtaaacagtt

SEQ ID NO: 791506 - DNA, 25 bp, Homo sapien
gcagatagatttgcagtgattccat

SEQ ID NO: 791507 - DNA, 25 bp, Homo sapien
aaactgcctccagactgtgcacagg

SEQ ID NO: 791508 - DNA, 25 bp, Homo sapien
caaatacgaattatggagagacaca

SEQ ID NO: 791509 - DNA, 25 bp, Homo sapien
gaggatgtgcctcagaacgtcaagt

SEQ ID NO: 791510 - DNA, 25 bp, Homo sapien
gagagacacatttacagcattgacc

SEQ ID NO: 791511 - DNA, 25 bp, Homo sapien
gagtatatctgaaaacctgtctgca

SEQ ID NO: 791512 - DNA, 25 bp, Homo sapien
cagagtgggctcctgcatcagcaaa

SEQ ID NO: 791513 - DNA, 25 bp, Homo sapien
tcaggccacaaagggttagagtatt

SEQ ID NO: 791514 - DNA, 25 bp, Homo sapien
cagagcagaccatgtgattgagccc

SEQ ID NO: 791515 - DNA, 25 bp, Homo sapien
tatgccaggactaaatgccccatgg

SEQ ID NO: 791516 - DNA, 25 bp, Homo sapien
tccatgccaggagaaaagttgctgc

SEQ ID NO: 791517 - DNA, 25 bp, Homo sapien
caattttcacaagagcagactgggc

SEQ ID NO: 791518 - DNA, 25 bp, Homo sapien
ttcctaatcgaagctccgggtgtct

SEQ ID NO: 791519 - DNA, 25 bp, Homo sapien
cattgatctggctaccactgggagt

SEQ ID NO: 791520 - DNA, 25 bp, Homo sapien
cacatagcagagtatcggaaagtat

SEQ ID NO: 791521 - DNA, 25 bp, Homo sapien
cattctccagtaagcaggtactaca

SEQ ID NO: 791522 - DNA, 25 bp, Homo sapien
tctgaattctaatgctggcttgtgc

SEQ ID NO: 791523 - DNA, 25 bp, Homo sapien
gcaagggttagcagtgcacaatacc

SEQ ID NO: 791524 - DNA, 25 bp, Homo sapien
tggaaatccccacgtaatacaacag

SEQ ID NO: 791525 - DNA, 25 bp, Homo sapien
ggtaagtgtctttgaccacggccat

SEQ ID NO: 791526 - DNA, 25 bp, Homo sapien
caataccttagtagtgtagggaaca

SEQ ID NO: 791527 - DNA, 25 bp, Homo sapien
gcacttgcgatagctgcttccagaa

SEQ ID NO: 791528 - DNA, 25 bp, Homo sapien
ttctgcacccagtgaataggagttt

SEQ ID NO: 791529 - DNA, 25 bp, Homo sapien
gatggtgatattaaagctcaagggc

SEQ ID NO: 791530 - DNA, 25 bp, Homo sapien
cagaacctggaagataggagcatgt

SEQ ID NO: 791531 - DNA, 25 bp, Homo sapien
tcactttggcaataacggacccatg

SEQ ID NO: 791532 - DNA, 25 bp, Homo sapien
gtttcaaagagacgtatgtagacag

SEQ ID NO: 791533 - DNA, 25 bp, Homo sapien
tattaagttaatcaccagcaacggg

SEQ ID NO: 791534 - DNA, 25 bp, Homo sapien
ggtggaatggttgtcaggaaatcca

SEQ ID NO: 791535 - DNA, 25 bp, Homo sapien
taataatgctgtgtagtaaaccacc

SEQ ID NO: 791536 - DNA, 25 bp, Homo sapien
gatcaattggctaccagagacacat

SEQ ID NO: 791537 - DNA, 25 bp, Homo sapien
tatgtgatacccttaaggcctagat

SEQ ID NO: 791538 - DNA, 25 bp, Homo sapien
catctgtaagacagttgggctttgg

SEQ ID NO: 791539 - DNA, 25 bp, Homo sapien
actaaacttctttactgctgatatg

SEQ ID NO: 791540 - DNA, 25 bp, Homo sapien
ccatgttaagggatgatggctttta

SEQ ID NO: 791541 - DNA, 25 bp, Homo sapien
tactgctgatatgtttcctgtattc

SEQ ID NO: 791542 - DNA, 25 bp, Homo sapien
tgtacactttccccatgttaaggga

SEQ ID NO: 791543 - DNA, 25 bp, Homo sapien
taaagtttaggtaccatccaggctg

SEQ ID NO: 791544 - DNA, 25 bp, Homo sapien
tcttttacttgagcattggttgatt

SEQ ID NO: 791545 - DNA, 25 bp, Homo sapien
agtctttggagttaaccatgctctt

SEQ ID NO: 791546 - DNA, 25 bp, Homo sapien
tgttatgcaaaacagttaggtgtgc

SEQ ID NO: 791547 - DNA, 25 bp, Homo sapien
ggtacacagaacacacgctccttca

SEQ ID NO: 791548 - DNA, 25 bp, Homo sapien
tgcactgataatgttgccaagccat

SEQ ID NO: 791549 - DNA, 25 bp, Homo sapien
tatctttgataaacccaagcaagga

SEQ ID NO: 791550 - DNA, 25 bp, Homo sapien
tgagggtgttgctttcatcgcacca

SEQ ID NO: 791551 - DNA, 25 bp, Homo sapien
tgattaaaagtatccatgtcttgga

SEQ ID NO: 791552 - DNA, 25 bp, Homo sapien
tctagtgaaatgaccccttgacttt

SEQ ID NO: 791553 - DNA, 25 bp, Homo sapien
aaaatggagggatatccccttggat

SEQ ID NO: 791554 - DNA, 25 bp, Homo sapien
tacatacgtatctatagagctggca

SEQ ID NO: 791555 - DNA, 25 bp, Homo sapien
caggagcccacgtggtaaaagcatt

SEQ ID NO: 791556 - DNA, 25 bp, Homo sapien
cttgctcatttggtgccaggagccc

SEQ ID NO: 791557 - DNA, 25 bp, Homo sapien
agcatttaacaccatctcagcctgg

SEQ ID NO: 791558 - DNA, 25 bp, Homo sapien
agcctgggctctccagtcaggagca

SEQ ID NO: 791559 - DNA, 25 bp, Homo sapien
atgggaagcctagttggaaacatcc

SEQ ID NO: 791560 - DNA, 25 bp, Homo sapien
agagaagtaaaattcaccagccagg

SEQ ID NO: 791561 - DNA, 25 bp, Homo sapien
tatgctggaatcctcaaaagctgga

SEQ ID NO: 791562 - DNA, 25 bp, Homo sapien
tggctctaacatcctcatgggaagc

SEQ ID NO: 791563 - DNA, 25 bp, Homo sapien
gatttatgctcagattcagccagga

SEQ ID NO: 791564 - DNA, 25 bp, Homo sapien
gatggtggtacacagatgggtccct

SEQ ID NO: 791565 - DNA, 25 bp, Homo sapien
accctagttctgaggtgtgtctgaa

SEQ ID NO: 791566 - DNA, 25 bp, Homo sapien
taatgaaagtgtgccagttgcctct

SEQ ID NO: 791567 - DNA, 25 bp, Homo sapien
acattcgtctgctctggccattaca

SEQ ID NO: 791568 - DNA, 25 bp, Homo sapien
cacattcgtctgctctggccattac

SEQ ID NO: 791569 - DNA, 25 bp, Homo sapien
atcctctctacacattcgtctgctc

SEQ ID NO: 791570 - DNA, 25 bp, Homo sapien
tctctacacattcgtctgctctggc

SEQ ID NO: 791571 - DNA, 25 bp, Homo sapien
ttttgagctcaagttaaattgtggc

SEQ ID NO: 791572 - DNA, 25 bp, Homo sapien
gataattaatggtcatcgctgattg

SEQ ID NO: 791573 - DNA, 25 bp, Homo sapien
cactgtggagcgtagaaataggaag

SEQ ID NO: 791574 - DNA, 25 bp, Homo sapien
cctgctctttttacagggtgtgaaa

SEQ ID NO: 791575 - DNA, 25 bp, Homo sapien
gcaagcttctaacttcctggagttt

SEQ ID NO: 791576 - DNA, 25 bp, Homo sapien
gctccgcgattcagcaagcttctaa

SEQ ID NO: 791577 - DNA, 25 bp, Homo sapien
taacttcctggagtttaaggctcat

SEQ ID NO: 791578 - DNA, 25 bp, Homo sapien
ctgaggctgctccgcgattcagcaa

SEQ ID NO: 791579 - DNA, 25 bp, Homo sapien
tcagcagcaccgcagtatagaagtt

SEQ ID NO: 791580 - DNA, 25 bp, Homo sapien
gaagttccggtccttccagctgctg

SEQ ID NO: 791581 - DNA, 25 bp, Homo sapien
gctgggattctcagcttgaactctt

SEQ ID NO: 791582 - DNA, 25 bp, Homo sapien
tccgcttctcttgcgaaatccagca

SEQ ID NO: 791583 - DNA, 25 bp, Homo sapien
tccacttccttctatataatgaatg

SEQ ID NO: 791584 - DNA, 25 bp, Homo sapien
gtctgaggcatcaaaactctttcgg

SEQ ID NO: 791585 - DNA, 25 bp, Homo sapien
tctttcggcagctgctgtacagttc

SEQ ID NO: 791586 - DNA, 25 bp, Homo sapien
tacagttctgttatgtgaagaggga

SEQ ID NO: 791587 - DNA, 25 bp, Homo sapien
ccctctagacaagtgaagctttact

SEQ ID NO: 791588 - DNA, 25 bp, Homo sapien
gtccatgaacttgactgaatctgtt

SEQ ID NO: 791589 - DNA, 25 bp, Homo sapien
ctagattgaagtccatgaacttgac

SEQ ID NO: 791590 - DNA, 25 bp, Homo sapien
tggatttctcgtgtcctttccttgg

SEQ ID NO: 791591 - DNA, 25 bp, Homo sapien
gggaatagccttacagcaatgagag

SEQ ID NO: 791592 - DNA, 25 bp, Homo sapien
tccacaggtatagtaggatgccact

SEQ ID NO: 791593 - DNA, 25 bp, Homo sapien
caaagcacatcaggagggaatagcc

SEQ ID NO: 791594 - DNA, 25 bp, Homo sapien
ccactaagtgtaatatgccctgaca

SEQ ID NO: 791595 - DNA, 25 bp, Homo sapien
gaacttttggttcataagcaagtac

SEQ ID NO: 791596 - DNA, 25 bp, Homo sapien
cttttggttcataagcaagtaccat

SEQ ID NO: 791597 - DNA, 25 bp, Homo sapien
acttttggttcataagcaagtacca

SEQ ID NO: 791598 - DNA, 25 bp, Homo sapien
gaagagtcgtggtaggctaaagccc

SEQ ID NO: 791599 - DNA, 25 bp, Homo sapien
ttgaacaataacagcaggcatagcc

SEQ ID NO: 791600 - DNA, 25 bp, Homo sapien
gatgtcattttagcacgcatgtgcc

SEQ ID NO: 791601 - DNA, 25 bp, Homo sapien
tgtgccataggaccaggtagtgagc

SEQ ID NO: 791602 - DNA, 25 bp, Homo sapien
gaaacctatgtaatatctcaagtct

SEQ ID NO: 791603 - DNA, 25 bp, Homo sapien
ggtgcactgagaaggcctcattgag

SEQ ID NO: 791604 - DNA, 25 bp, Homo sapien
tgggcaagagtcagaacttctggtt

SEQ ID NO: 791605 - DNA, 25 bp, Homo sapien
tccattatgtgtaacttgcccaggt

SEQ ID NO: 791606 - DNA, 25 bp, Homo sapien
gcctatttgagaaatcagggaccat

SEQ ID NO: 791607 - DNA, 25 bp, Homo sapien
gcattcagtactgtggaatatgtta

SEQ ID NO: 791608 - DNA, 25 bp, Homo sapien
cagtactgtggaatatgttagccta

SEQ ID NO: 791609 - DNA, 25 bp, Homo sapien
tgttagcctatttgagaaatcaggg

SEQ ID NO: 791610 - DNA, 25 bp, Homo sapien
agaatgtgatttgcaatggcttttt

SEQ ID NO: 791611 - DNA, 25 bp, Homo sapien
ctggttaagtcccttgaagaatgtg

SEQ ID NO: 791612 - DNA, 25 bp, Homo sapien
tggttaagtcccttgaagaatgtga

SEQ ID NO: 791613 - DNA, 25 bp, Homo sapien
cctgtgtccagtagtctccaaaata

SEQ ID NO: 791614 - DNA, 25 bp, Homo sapien
cacgaggatgttttggatcccctgg

SEQ ID NO: 791615 - DNA, 25 bp, Homo sapien
taactggaggaccacgaggatgttt

SEQ ID NO: 791616 - DNA, 25 bp, Homo sapien
cccctggaatcaatgtcagcagagc

SEQ ID NO: 791617 - DNA, 25 bp, Homo sapien
tcatctataagagcctgccaaatgc

SEQ ID NO: 791618 - DNA, 25 bp, Homo sapien
tgtgattcatctataagagcctgcc

SEQ ID NO: 791619 - DNA, 25 bp, Homo sapien
gattcatctataagagcctgccaaa

SEQ ID NO: 791620 - DNA, 25 bp, Homo sapien
ctataagagcctgccaaatgctcca

SEQ ID NO: 791621 - DNA, 25 bp, Homo sapien
gaaccatttgcgaaccaggccctac

SEQ ID NO: 791622 - DNA, 25 bp, Homo sapien
gaactccccataaggccattggtga

SEQ ID NO: 791623 - DNA, 25 bp, Homo sapien
catttgcgaaccaggccctactctt

SEQ ID NO: 791624 - DNA, 25 bp, Homo sapien
tcatgcagaaccatttgcgaaccag

SEQ ID NO: 791625 - DNA, 25 bp, Homo sapien
tgctttcttcatgtcatcctttaaa

SEQ ID NO: 791626 - DNA, 25 bp, Homo sapien
gctttcttcatgtcatcctttaaaa

SEQ ID NO: 791627 - DNA, 25 bp, Homo sapien
ctttcttcatgtcatcctttaaaat

SEQ ID NO: 791628 - DNA, 25 bp, Homo sapien
tctgacatgcacataagacgccatc

SEQ ID NO: 791629 - DNA, 25 bp, Homo sapien
tgtcccagggatcctctgacatgca

SEQ ID NO: 791630 - DNA, 25 bp, Homo sapien
cataagacgccatcagaaaccagtt

SEQ ID NO: 791631 - DNA, 25 bp, Homo sapien
gggatcctctgacatgcacataaga

SEQ ID NO: 791632 - DNA, 25 bp, Homo sapien
taaagaccggctattgtcccctgtc

SEQ ID NO: 791633 - DNA, 25 bp, Homo sapien
ccactacagtcattaactctgcctg

SEQ ID NO: 791634 - DNA, 25 bp, Homo sapien
tgtttggtccctgtactcacatgag

SEQ ID NO: 791635 - DNA, 25 bp, Homo sapien
ccacatgaagcaatgattgggaact

SEQ ID NO: 791636 - DNA, 25 bp, Homo sapien
aatggtttgcatgttttccatggaa

SEQ ID NO: 791637 - DNA, 25 bp, Homo sapien
aatatgttcaaaatggtttgcatgt

SEQ ID NO: 791638 - DNA, 25 bp, Homo sapien
tggaaaagactaccttgctacttcc

SEQ ID NO: 791639 - DNA, 25 bp, Homo sapien
tccatggaaaagactaccttgctac

SEQ ID NO: 791640 - DNA, 25 bp, Homo sapien
tttgcaaactcgcactttcgcagca

SEQ ID NO: 791641 - DNA, 25 bp, Homo sapien
gtgaaattttgcaaactcgcacttt

SEQ ID NO: 791642 - DNA, 25 bp, Homo sapien
ctttcaccctacacttagatgctgc

SEQ ID NO: 791643 - DNA, 25 bp, Homo sapien
cctacacttagatgctgctgagtga

SEQ ID NO: 791644 - DNA, 25 bp, Homo sapien
aatttaaaacatatctcaggaatga

SEQ ID NO: 791645 - DNA, 25 bp, Homo sapien
tatctcaggaatgattgtaccaatg

SEQ ID NO: 791646 - DNA, 25 bp, Homo sapien
gatagaagtctattcctaatcaact

SEQ ID NO: 791647 - DNA, 25 bp, Homo sapien
ataaacacgatatctgatagaagtc

SEQ ID NO: 791648 - DNA, 25 bp, Homo sapien
ctattccttctaagccacaaaccgg

SEQ ID NO: 791649 - DNA, 25 bp, Homo sapien
taagggtcatatacattcaggtgtc

SEQ ID NO: 791650 - DNA, 25 bp, Homo sapien
cacaaaccggtactgtatgttacgg

SEQ ID NO: 791651 - DNA, 25 bp, Homo sapien
cctactacacacctactcttgatgg

SEQ ID NO: 791652 - DNA, 25 bp, Homo sapien
attccaggtgagaggtttcttcctg

SEQ ID NO: 791653 - DNA, 25 bp, Homo sapien
gattccaggtgagaggtttcttcct

SEQ ID NO: 791654 - DNA, 25 bp, Homo sapien
ttccaggtgagaggtttcttcctga

SEQ ID NO: 791655 - DNA, 25 bp, Homo sapien
taatctctgatacggctggtacagg

SEQ ID NO: 791656 - DNA, 25 bp, Homo sapien
tcactggtaatctctgatacggctg

SEQ ID NO: 791657 - DNA, 25 bp, Homo sapien
ctctgatacggctggtacaggacag

SEQ ID NO: 791658 - DNA, 25 bp, Homo sapien
ctggtaatctctgatacggctggta

SEQ ID NO: 791659 - DNA, 25 bp, Homo sapien
ggtttagttttctggacatagttca

SEQ ID NO: 791660 - DNA, 25 bp, Homo sapien
tagttttctggacatagttcacgtc

SEQ ID NO: 791661 - DNA, 25 bp, Homo sapien
tttagttttctggacatagttcacg

SEQ ID NO: 791662 - DNA, 25 bp, Homo sapien
gttttctggacatagttcacgtcca

SEQ ID NO: 791663 - DNA, 25 bp, Homo sapien
taaaacggagaatatgagattgctt

SEQ ID NO: 791664 - DNA, 25 bp, Homo sapien
catcgtagttccctgtaggcaatga

SEQ ID NO: 791665 - DNA, 25 bp, Homo sapien
tttactgaagcaactacatcgtagt

SEQ ID NO: 791666 - DNA, 25 bp, Homo sapien
tgctttgtagcaggtagcaacgcct

SEQ ID NO: 791667 - DNA, 25 bp, Homo sapien
aattattccaatctcgtgcaaattg

SEQ ID NO: 791668 - DNA, 25 bp, Homo sapien
ggcaggaaccaaggcaactctacag

SEQ ID NO: 791669 - DNA, 25 bp, Homo sapien
cagccttgaaaataggaatcacaac

SEQ ID NO: 791670 - DNA, 25 bp, Homo sapien
tcagaaatatcgagagttcagagaa

SEQ ID NO: 791671 - DNA, 25 bp, Homo sapien
ggtcgacgcctcctcatttgtggat

SEQ ID NO: 791672 - DNA, 25 bp, Homo sapien
ctgatatgagtgtgttcctttccca

SEQ ID NO: 791673 - DNA, 25 bp, Homo sapien
tgacaacaatgctgatatgagtgtg

SEQ ID NO: 791674 - DNA, 25 bp, Homo sapien
ttcaatggttctttggtcgacgcct

SEQ ID NO: 791675 - DNA, 25 bp, Homo sapien
ctcatgggtgtgcccattcttagag

SEQ ID NO: 791676 - DNA, 25 bp, Homo sapien
gctcatgggtgtgcccattcttaga

SEQ ID NO: 791677 - DNA, 25 bp, Homo sapien
tgctcatgggtgtgcccattcttag

SEQ ID NO: 791678 - DNA, 25 bp, Homo sapien
taatgaaagtgctgacttctttaag

SEQ ID NO: 791679 - DNA, 25 bp, Homo sapien
gaaagtgctgacttctttaaggatt

SEQ ID NO: 791680 - DNA, 25 bp, Homo sapien
tgccaggggctgtagttaattttct

SEQ ID NO: 791681 - DNA, 25 bp, Homo sapien
cacaaatgctactactgtgccaggg

SEQ ID NO: 791682 - DNA, 25 bp, Homo sapien
ggcaagggcgagggcctgtcggttg

SEQ ID NO: 791683 - DNA, 25 bp, Homo sapien
tccactccgccaataggcaaagtag

SEQ ID NO: 791684 - DNA, 25 bp, Homo sapien
gcaaagtagcaacaccaccaatttt

SEQ ID NO: 791685 - DNA, 25 bp, Homo sapien
gcattgacatctttatgagtgactt

SEQ ID NO: 791686 - DNA, 25 bp, Homo sapien
gactttacttcaggtgtgtaacact

SEQ ID NO: 791687 - DNA, 25 bp, Homo sapien
aacagactttacttcaggtgtgtaa

SEQ ID NO: 791688 - DNA, 25 bp, Homo sapien
ctttacttcaggtgtgtaacactga

SEQ ID NO: 791689 - DNA, 25 bp, Homo sapien
cagactttacttcaggtgtgtaaca

SEQ ID NO: 791690 - DNA, 25 bp, Homo sapien
ctgagcagcgaagccagttgtttcc

SEQ ID NO: 791691 - DNA, 25 bp, Homo sapien
gcgaagccagttgtttccgttggtg

SEQ ID NO: 791692 - DNA, 25 bp, Homo sapien
cgttggtggatcatttttgttgtca

SEQ ID NO: 791693 - DNA, 25 bp, Homo sapien
tccgttggtggatcatttttgttgt

SEQ ID NO: 791694 - DNA, 25 bp, Homo sapien
tgtggcaatccagtagaggggaata

SEQ ID NO: 791695 - DNA, 25 bp, Homo sapien
caatccagtagaggggaatagccag

SEQ ID NO: 791696 - DNA, 25 bp, Homo sapien
gtagaggggaatagccagcactgat

SEQ ID NO: 791697 - DNA, 25 bp, Homo sapien
gcactgatttggactggatgcttca

SEQ ID NO: 791698 - DNA, 25 bp, Homo sapien
cagaatggcaatcaatcttttcctt

SEQ ID NO: 791699 - DNA, 25 bp, Homo sapien
tcagcaaatttgcatgcaatgtgat

SEQ ID NO: 791700 - DNA, 25 bp, Homo sapien
gctcagcaaatttgcatgcaatgtg

SEQ ID NO: 791701 - DNA, 25 bp, Homo sapien
cagctcagcaaatttgcatgcaatg

SEQ ID NO: 791702 - DNA, 25 bp, Homo sapien
aatttagggccatctttcagcttct

SEQ ID NO: 791703 - DNA, 25 bp, Homo sapien
caagaatttagggccatctttcagc

SEQ ID NO: 791704 - DNA, 25 bp, Homo sapien
cttcaagaatttagggccatctttc

SEQ ID NO: 791705 - DNA, 25 bp, Homo sapien
agaatttagggccatctttcagctt

SEQ ID NO: 791706 - DNA, 25 bp, Homo sapien
tttgatgacatccatggcaattctc

SEQ ID NO: 791707 - DNA, 25 bp, Homo sapien
ggcaattctccatctcatatcatga

SEQ ID NO: 791708 - DNA, 25 bp, Homo sapien
caagaatttggtggcaacatcacca

SEQ ID NO: 791709 - DNA, 25 bp, Homo sapien
ccaaaggaggatagtctgagaagac

SEQ ID NO: 791710 - DNA, 25 bp, Homo sapien
agccttctgaactttctgggcagac

SEQ ID NO: 791711 - DNA, 25 bp, Homo sapien
tagccttctgaactttctgggcaga

SEQ ID NO: 791712 - DNA, 25 bp, Homo sapien
ttatttagccttctgaactttctgg

SEQ ID NO: 791713 - DNA, 25 bp, Homo sapien
tttagccttctgaactttctgggca

SEQ ID NO: 791714 - DNA, 25 bp, Homo sapien
tttatgaggcattgttattgttaac

SEQ ID NO: 791715 - DNA, 25 bp, Homo sapien
gttttatgaggcattgttattgtta

SEQ ID NO: 791716 - DNA, 25 bp, Homo sapien
gaggcattgttattgttaaccagtc

SEQ ID NO: 791717 - DNA, 25 bp, Homo sapien
tatgaggcattgttattgttaacca

SEQ ID NO: 791718 - DNA, 25 bp, Homo sapien
ttttgctttctttcttcacacccca

SEQ ID NO: 791719 - DNA, 25 bp, Homo sapien
tattttgctttctttcttcacaccc

SEQ ID NO: 791720 - DNA, 25 bp, Homo sapien
tttgctttctttcttcacaccccat

SEQ ID NO: 791721 - DNA, 25 bp, Homo sapien
atattttgctttctttcttcacacc

SEQ ID NO: 791722 - DNA, 25 bp, Homo sapien
aagtcccacagtacagtgtaccgtg

SEQ ID NO: 791723 - DNA, 25 bp, Homo sapien
tctaaactgaagagggctataggat

SEQ ID NO: 791724 - DNA, 25 bp, Homo sapien
ggattttccaacaacctgtgagctc

SEQ ID NO: 791725 - DNA, 25 bp, Homo sapien
agtgggcagtagtcctctgttggct

SEQ ID NO: 791726 - DNA, 25 bp, Homo sapien
aacccgtggaaatcaccttagtctg

SEQ ID NO: 791727 - DNA, 25 bp, Homo sapien
accttagtctgtgtcctgcgctcat

SEQ ID NO: 791728 - DNA, 25 bp, Homo sapien
aaatcaccttagtctgtgtcctgcg

SEQ ID NO: 791729 - DNA, 25 bp, Homo sapien
ctgcaaggcaaacccgtggaaatca

SEQ ID NO: 791730 - DNA, 25 bp, Homo sapien
gccgctgcgcagccgttgtgcaggg

SEQ ID NO: 791731 - DNA, 25 bp, Homo sapien
tctctaacccaaccagctcgggagg

SEQ ID NO: 791732 - DNA, 25 bp, Homo sapien
tctcgggccgctttcctggccgctg

SEQ ID NO: 791733 - DNA, 25 bp, Homo sapien
gggccctgctaagcgctaggagcat

SEQ ID NO: 791734 - DNA, 25 bp, Homo sapien
agcaatgtgggcaacttctcctggg

SEQ ID NO: 791735 - DNA, 25 bp, Homo sapien
caccaccaccttgacctggagatgg

SEQ ID NO: 791736 - DNA, 25 bp, Homo sapien
ttcagaaccagagagctcggatacc

SEQ ID NO: 791737 - DNA, 25 bp, Homo sapien
aagttctcctctgagggcacgctgg

SEQ ID NO: 791738 - DNA, 25 bp, Homo sapien
gataaaaaaggagcatcctcaaatg

SEQ ID NO: 791739 - DNA, 25 bp, Homo sapien
agataaaaaaggagcatcctcaaat

SEQ ID NO: 791740 - DNA, 25 bp, Homo sapien
gacagcaattagactacatccacca

SEQ ID NO: 791741 - DNA, 25 bp, Homo sapien
catccaccaaactctcccactaagg

SEQ ID NO: 791742 - DNA, 25 bp, Homo sapien
tgatgctgacagcaattagactaca

SEQ ID NO: 791743 - DNA, 25 bp, Homo sapien
gcaattagactacatccaccaaact

SEQ ID NO: 791744 - DNA, 25 bp, Homo sapien
gcaatactctctgctggtaatccag

SEQ ID NO: 791745 - DNA, 25 bp, Homo sapien
gggcttagggtgctccctcatgcaa

SEQ ID NO: 791746 - DNA, 25 bp, Homo sapien
cagtgattaccgcaggccttggata

SEQ ID NO: 791747 - DNA, 25 bp, Homo sapien
gaacataagtggtcaccaggcagtg

SEQ ID NO: 791748 - DNA, 25 bp, Homo sapien
tgtggtggatatgtggagagactcc

SEQ ID NO: 791749 - DNA, 25 bp, Homo sapien
ggatgagacttagatgtgtgctagc

SEQ ID NO: 791750 - DNA, 25 bp, Homo sapien
gagacttagatgtgtgctagcttca

SEQ ID NO: 791751 - DNA, 25 bp, Homo sapien
gcacaatcccagctgtggtggatat

SEQ ID NO: 791752 - DNA, 25 bp, Homo sapien
tggttttctatcacagtagtcaaca

SEQ ID NO: 791753 - DNA, 25 bp, Homo sapien
ggttttctatcacagtagtcaacaa

SEQ ID NO: 791754 - DNA, 25 bp, Homo sapien
gttttctatcacagtagtcaacaaa

SEQ ID NO: 791755 - DNA, 25 bp, Homo sapien
tttctatcacagtagtcaacaaaca

SEQ ID NO: 791756 - DNA, 25 bp, Homo sapien
cacgatgtggatttttcttaccagg

SEQ ID NO: 791757 - DNA, 25 bp, Homo sapien
tgtcacgatgtggatttttcttacc

SEQ ID NO: 791758 - DNA, 25 bp, Homo sapien
tccgtgtcacgatgtggatttttct

SEQ ID NO: 791759 - DNA, 25 bp, Homo sapien
ctcttccgtgtcacgatgtggattt

SEQ ID NO: 791760 - DNA, 25 bp, Homo sapien
cttttgttttctcttcttcctccat

SEQ ID NO: 791761 - DNA, 25 bp, Homo sapien
cactgaagaacatgctttggggtcc

SEQ ID NO: 791762 - DNA, 25 bp, Homo sapien
tcactgaagaacatgctttggggtc

SEQ ID NO: 791763 - DNA, 25 bp, Homo sapien
tatgaggccacgtaatgcagcttgc

SEQ ID NO: 791764 - DNA, 25 bp, Homo sapien
aaatatgaggccacgtaatgcagct

SEQ ID NO: 791765 - DNA, 25 bp, Homo sapien
aaaatatgaggccacgtaatgcagc

SEQ ID NO: 791766 - DNA, 25 bp, Homo sapien
gaggccacgtaatgcagcttgcagt

SEQ ID NO: 791767 - DNA, 25 bp, Homo sapien
tctttcttcatagcgaccatttttc

SEQ ID NO: 791768 - DNA, 25 bp, Homo sapien
gcactctttcttcatagcgaccatt

SEQ ID NO: 791769 - DNA, 25 bp, Homo sapien
tgattgcactctttcttcatagcga

SEQ ID NO: 791770 - DNA, 25 bp, Homo sapien
ttgcactctttcttcatagcgacca

SEQ ID NO: 791771 - DNA, 25 bp, Homo sapien
tcagtgttttaaaagttttgtcaga

SEQ ID NO: 791772 - DNA, 25 bp, Homo sapien
agtgttttaaaagttttgtcagatg

SEQ ID NO: 791773 - DNA, 25 bp, Homo sapien
ctggaaaccaaaatagttcagtgtt

SEQ ID NO: 791774 - DNA, 25 bp, Homo sapien
tgttttaaaagttttgtcagatgta

SEQ ID NO: 791775 - DNA, 25 bp, Homo sapien
ctactggacatagatctcctcagct

SEQ ID NO: 791776 - DNA, 25 bp, Homo sapien
cagccactgccattcttgacctgga

SEQ ID NO: 791777 - DNA, 25 bp, Homo sapien
agccactgccattcttgacctggac

SEQ ID NO: 791778 - DNA, 25 bp, Homo sapien
tggacatagatctcctcagctgtag

SEQ ID NO: 791779 - DNA, 25 bp, Homo sapien
gatgagtcctcattccatggaagag

SEQ ID NO: 791780 - DNA, 25 bp, Homo sapien
aatggcaaagggcatggacttcagc

SEQ ID NO: 791781 - DNA, 25 bp, Homo sapien
catggaagaggatgtgaatggcaaa

SEQ ID NO: 791782 - DNA, 25 bp, Homo sapien
tcatgtgcaatttcacaaggtccat

SEQ ID NO: 791783 - DNA, 25 bp, Homo sapien
cacggacgaggaaagttttgggcag

SEQ ID NO: 791784 - DNA, 25 bp, Homo sapien
cgtggtagggaacgcacggacgagg

SEQ ID NO: 791785 - DNA, 25 bp, Homo sapien
cagacagattagatgcgccgtggta

SEQ ID NO: 791786 - DNA, 25 bp, Homo sapien
tatataaggtatagaaacgagacat

SEQ ID NO: 791787 - DNA, 25 bp, Homo sapien
tgacggcggcgttggcagaagcaac

SEQ ID NO: 791788 - DNA, 25 bp, Homo sapien
tactctttcgttgcctgctggcctt

SEQ ID NO: 791789 - DNA, 25 bp, Homo sapien
tctttactctttcgttgcctgctgg

SEQ ID NO: 791790 - DNA, 25 bp, Homo sapien
tttcttcagcgctctggctgacggc

SEQ ID NO: 791791 - DNA, 25 bp, Homo sapien
aggagggcagttagcgcctctgctg

SEQ ID NO: 791792 - DNA, 25 bp, Homo sapien
ggagggcagttagcgcctctgctgg

SEQ ID NO: 791793 - DNA, 25 bp, Homo sapien
gagggcagttagcgcctctgctggg

SEQ ID NO: 791794 - DNA, 25 bp, Homo sapien
aggacagggagttggggacgcggcg

SEQ ID NO: 791795 - DNA, 25 bp, Homo sapien
ctgcagtcgggagagggcggaggag

SEQ ID NO: 791796 - DNA, 25 bp, Homo sapien
tgaggacagggagttggggacgcgg

SEQ ID NO: 791797 - DNA, 25 bp, Homo sapien
gacagggagttggggacgcggcgac

SEQ ID NO: 791798 - DNA, 25 bp, Homo sapien
gagtccttgggagcgccaaagcgct

SEQ ID NO: 791799 - DNA, 25 bp, Homo sapien
cggggagtccttgggagcgccaaag

SEQ ID NO: 791800 - DNA, 25 bp, Homo sapien
cttgggagcgccaaagcgctgcccc

SEQ ID NO: 791801 - DNA, 25 bp, Homo sapien
tcaggcgcgggtacccatcgtccgg

SEQ ID NO: 791802 - DNA, 25 bp, Homo sapien
cgcgggccagcgatatatttattta

SEQ ID NO: 791803 - DNA, 25 bp, Homo sapien
gtttctcagcggcaacagcgactac

SEQ ID NO: 791804 - DNA, 25 bp, Homo sapien
gcggaggcgcagagtctcaactcct

SEQ ID NO: 791805 - DNA, 25 bp, Homo sapien
ctgacgaggtggctgctcaaccgcg

SEQ ID NO: 791806 - DNA, 25 bp, Homo sapien
taatgccccggtagtgcccattgct

SEQ ID NO: 791807 - DNA, 25 bp, Homo sapien
gagatgtctcgaactgatgaccagg

SEQ ID NO: 791808 - DNA, 25 bp, Homo sapien
agagggagatccgttcttgcacagg

SEQ ID NO: 791809 - DNA, 25 bp, Homo sapien
ggtcccctgaagactcctttaatgc

SEQ ID NO: 791810 - DNA, 25 bp, Homo sapien
tgtcagtgagtccagtagcaccagc

SEQ ID NO: 791811 - DNA, 25 bp, Homo sapien
aaggtcaggtggtttcagcagcagc

SEQ ID NO: 791812 - DNA, 25 bp, Homo sapien
gggctcatggatgcctgcaaagcaa

SEQ ID NO: 791813 - DNA, 25 bp, Homo sapien
gcagctgcagcactcccaggtacat

SEQ ID NO: 791814 - DNA, 25 bp, Homo sapien
ttttggcggtggcagaatcagcacc

SEQ ID NO: 791815 - DNA, 25 bp, Homo sapien
catcttagcgctcatgagttttggc

SEQ ID NO: 791816 - DNA, 25 bp, Homo sapien
ctcatgagttttggcggtggcagaa

SEQ ID NO: 791817 - DNA, 25 bp, Homo sapien
caactgccttagcatcttagcgctc

SEQ ID NO: 791818 - DNA, 25 bp, Homo sapien
tgaaggctctggtcaacatggacac

SEQ ID NO: 791819 - DNA, 25 bp, Homo sapien
ggcaccatggtttacatcttcggaa

SEQ ID NO: 791820 - DNA, 25 bp, Homo sapien
tgcagtatcatagaaaccaggagag

SEQ ID NO: 791821 - DNA, 25 bp, Homo sapien
gaagtagagcgagagatccaaccac

SEQ ID NO: 791822 - DNA, 25 bp, Homo sapien
tgctattcgtttcagtgaataacta

SEQ ID NO: 791823 - DNA, 25 bp, Homo sapien
catagtagttgttcattaatacata

SEQ ID NO: 791824 - DNA, 25 bp, Homo sapien
aaccatatcagatccaaattttatt

SEQ ID NO: 791825 - DNA, 25 bp, Homo sapien
tcaaatgtttgtcagtaattttgtt

SEQ ID NO: 791826 - DNA, 25 bp, Homo sapien
tggctggtgcctaagtactcaacta

SEQ ID NO: 791827 - DNA, 25 bp, Homo sapien
gctggtataaacatgggtgggcaaa

SEQ ID NO: 791828 - DNA, 25 bp, Homo sapien
tcattcgtgttgtagtgtgtgacag

SEQ ID NO: 791829 - DNA, 25 bp, Homo sapien
tcagtgtccagttgtgttgcttcca

SEQ ID NO: 791830 - DNA, 25 bp, Homo sapien
acagttcaatagtgtgaggtacatt

SEQ ID NO: 791831 - DNA, 25 bp, Homo sapien
ttataggcgtgagagaattaaacat

SEQ ID NO: 791832 - DNA, 25 bp, Homo sapien
ctctatataagatttatgggaaact

SEQ ID NO: 791833 - DNA, 25 bp, Homo sapien
ggcgtgagagaattaaacatgtttt

SEQ ID NO: 791834 - DNA, 25 bp, Homo sapien
taattagccaatatccaagagcaga

SEQ ID NO: 791835 - DNA, 25 bp, Homo sapien
gattatacatcaaacctcagaatgg

SEQ ID NO: 791836 - DNA, 25 bp, Homo sapien
gagtactatttagcctgatggtgca

SEQ ID NO: 791837 - DNA, 25 bp, Homo sapien
tacaaaacctagtgagtgcaaattc

SEQ ID NO: 791838 - DNA, 25 bp, Homo sapien
gagctaccttgcatgggatatcaga

SEQ ID NO: 791839 - DNA, 25 bp, Homo sapien
gattggttacatacaagggacatta

SEQ ID NO: 791840 - DNA, 25 bp, Homo sapien
ggaaggaacagcaacaatgtgagat

SEQ ID NO: 791841 - DNA, 25 bp, Homo sapien
aaagtgtcagaaaggtgtcagagcc

SEQ ID NO: 791842 - DNA, 25 bp, Homo sapien
tcggagtaggatagcaagagcattc

SEQ ID NO: 791843 - DNA, 25 bp, Homo sapien
tgggtgcggaggatatcctgccaaa

SEQ ID NO: 791844 - DNA, 25 bp, Homo sapien
ccagtgtaataggaagggaatctgc

SEQ ID NO: 791845 - DNA, 25 bp, Homo sapien
tcaacagcaagaggcctggtacggg

SEQ ID NO: 791846 - DNA, 25 bp, Homo sapien
cattgttcagttctcactatgaatg

SEQ ID NO: 791847 - DNA, 25 bp, Homo sapien
ctcattgttcagttctcactatgaa

SEQ ID NO: 791848 - DNA, 25 bp, Homo sapien
ttcagttctcactatgaatgagaac

SEQ ID NO: 791849 - DNA, 25 bp, Homo sapien
ttgttcagttctcactatgaatgag

SEQ ID NO: 791850 - DNA, 25 bp, Homo sapien
cattctgtagcctcttcaggtctta

SEQ ID NO: 791851 - DNA, 25 bp, Homo sapien
ctcctgcattctgtagcctcttcag

SEQ ID NO: 791852 - DNA, 25 bp, Homo sapien
gcctcttcaggtcttatgcttccat

SEQ ID NO: 791853 - DNA, 25 bp, Homo sapien
gccaccataggacctcctgcattct

SEQ ID NO: 791854 - DNA, 25 bp, Homo sapien
cagttgtccttagcattgggtcccc

SEQ ID NO: 791855 - DNA, 25 bp, Homo sapien
taattctaatcttatgctactgaaa

SEQ ID NO: 791856 - DNA, 25 bp, Homo sapien
taaagtatgtgctacatatctcaga

SEQ ID NO: 791857 - DNA, 25 bp, Homo sapien
tattatgatagctgctggaacactc

SEQ ID NO: 791858 - DNA, 25 bp, Homo sapien
cattttatgagttaaccccgtatag

SEQ ID NO: 791859 - DNA, 25 bp, Homo sapien
gtataaggccatttcaatcattaag

SEQ ID NO: 791860 - DNA, 25 bp, Homo sapien
tattggcaggcagtgtatagtataa

SEQ ID NO: 791861 - DNA, 25 bp, Homo sapien
taacctacacttagagtacaacttc

SEQ ID NO: 791862 - DNA, 25 bp, Homo sapien
tagcatcataactttgtcactgtct

SEQ ID NO: 791863 - DNA, 25 bp, Homo sapien
ggaagcatgtcacaattctgaagat

SEQ ID NO: 791864 - DNA, 25 bp, Homo sapien
ctgaagatcacctagcatcataact

SEQ ID NO: 791865 - DNA, 25 bp, Homo sapien
aggaagcatgtcacaattctgaaga

SEQ ID NO: 791866 - DNA, 25 bp, Homo sapien
tctctaagagagctaacaatactct

SEQ ID NO: 791867 - DNA, 25 bp, Homo sapien
cctaagagtcacctaagagagtact

SEQ ID NO: 791868 - DNA, 25 bp, Homo sapien
tctcctttgtaccttctcttattcc

SEQ ID NO: 791869 - DNA, 25 bp, Homo sapien
ttaacttagccctcacctaagagtc

SEQ ID NO: 791870 - DNA, 25 bp, Homo sapien
ggcagtgtccagttaaattaccaac

SEQ ID NO: 791871 - DNA, 25 bp, Homo sapien
cccaggcagtgtccagttaaattac

SEQ ID NO: 791872 - DNA, 25 bp, Homo sapien
cagtgtccagttaaattaccaacca

SEQ ID NO: 791873 - DNA, 25 bp, Homo sapien
caggcagtgtccagttaaattacca

SEQ ID NO: 791874 - DNA, 25 bp, Homo sapien
tttccaccatcaggccaaaattaga

SEQ ID NO: 791875 - DNA, 25 bp, Homo sapien
ccatcaggccaaaattagagatcat

SEQ ID NO: 791876 - DNA, 25 bp, Homo sapien
ccaccatcaggccaaaattagagat

SEQ ID NO: 791877 - DNA, 25 bp, Homo sapien
ctttccaccatcaggccaaaattag

SEQ ID NO: 791878 - DNA, 25 bp, Homo sapien
gccttgccgttcaaaaagtattgta

SEQ ID NO: 791879 - DNA, 25 bp, Homo sapien
tgaaggctcacatataacagtgcag

SEQ ID NO: 791880 - DNA, 25 bp, Homo sapien
tcagggatgagaccaaaatttgcat

SEQ ID NO: 791881 - DNA, 25 bp, Homo sapien
gatctctagattttagggccttgcc

SEQ ID NO: 791882 - DNA, 25 bp, Homo sapien
acaaatactcttggctatttacaag

SEQ ID NO: 791883 - DNA, 25 bp, Homo sapien
aaatactcttggctatttacaagaa

SEQ ID NO: 791884 - DNA, 25 bp, Homo sapien
caaatactcttggctatttacaaga

SEQ ID NO: 791885 - DNA, 25 bp, Homo sapien
gaacaaatacattcatcagggactt

SEQ ID NO: 791886 - DNA, 25 bp, Homo sapien
ttgtggaagtaaaccagatgtgcta

SEQ ID NO: 791887 - DNA, 25 bp, Homo sapien
tggtgtaagtattcacattataacc

SEQ ID NO: 791888 - DNA, 25 bp, Homo sapien
tccggtaatagctgagtactaaagt

SEQ ID NO: 791889 - DNA, 25 bp, Homo sapien
aggtctggatgatcccaagaacctg

SEQ ID NO: 791890 - DNA, 25 bp, Homo sapien
ccaggtctggatgatcccaagaacc

SEQ ID NO: 791891 - DNA, 25 bp, Homo sapien
ctccaggtctggatgatcccaagaa

SEQ ID NO: 791892 - DNA, 25 bp, Homo sapien
caggtctggatgatcccaagaacct

SEQ ID NO: 791893 - DNA, 25 bp, Homo sapien
gctccataatccagttccctgatga

SEQ ID NO: 791894 - DNA, 25 bp, Homo sapien
tgctccctgaatataccagtattga

SEQ ID NO: 791895 - DNA, 25 bp, Homo sapien
tgtaagttatcctgtcatgccaaag

SEQ ID NO: 791896 - DNA, 25 bp, Homo sapien
tggtttctcataacctccaaggtgc

SEQ ID NO: 791897 - DNA, 25 bp, Homo sapien
cagattgaacgttttcttggccaaa

SEQ ID NO: 791898 - DNA, 25 bp, Homo sapien
cttggccaaagacagagtcgagttt

SEQ ID NO: 791899 - DNA, 25 bp, Homo sapien
atttggcagttccttcagacacatg

SEQ ID NO: 791900 - DNA, 25 bp, Homo sapien
cagacacatggacttcaatgcatag

SEQ ID NO: 791901 - DNA, 25 bp, Homo sapien
tcagagagaccattaaacgtgttgc

SEQ ID NO: 791902 - DNA, 25 bp, Homo sapien
tagatcttgccacatccaataggat

SEQ ID NO: 791903 - DNA, 25 bp, Homo sapien
cctcatgtatgtagatggccagtca

SEQ ID NO: 791904 - DNA, 25 bp, Homo sapien
cctgccaggccttctacagaaatgt

SEQ ID NO: 791905 - DNA, 25 bp, Homo sapien
ctgcagacaacattgcaaaaatcat

SEQ ID NO: 791906 - DNA, 25 bp, Homo sapien
gctgtgacagccagctcatcaccaa

SEQ ID NO: 791907 - DNA, 25 bp, Homo sapien
tcaccaaaatcaggctgccagacac

SEQ ID NO: 791908 - DNA, 25 bp, Homo sapien
tgacagccagctcatcaccaaaatc

SEQ ID NO: 791909 - DNA, 25 bp, Homo sapien
atcaccaaaatcaggctgccagaca

SEQ ID NO: 791910 - DNA, 25 bp, Homo sapien
tccaaacataactctctcatacagc

SEQ ID NO: 791911 - DNA, 25 bp, Homo sapien
ttccaaacataactctctcatacag

SEQ ID NO: 791912 - DNA, 25 bp, Homo sapien
cttttaggatggcaaatgggccaca

SEQ ID NO: 791913 - DNA, 25 bp, Homo sapien
atgggccacagtcagcttccaaaca

SEQ ID NO: 791914 - DNA, 25 bp, Homo sapien
tgtttcagccattctccaggagcaa

SEQ ID NO: 791915 - DNA, 25 bp, Homo sapien
ttccaagctggcttcctactccttt

SEQ ID NO: 791916 - DNA, 25 bp, Homo sapien
ctactcctttcctgggtaacttctg

SEQ ID NO: 791917 - DNA, 25 bp, Homo sapien
tttcctgggtaacttctgtttcagc

SEQ ID NO: 791918 - DNA, 25 bp, Homo sapien
gaagatgagcaaagtttcatggagc

SEQ ID NO: 791919 - DNA, 25 bp, Homo sapien
taggtcatcttccatataactattc

SEQ ID NO: 791920 - DNA, 25 bp, Homo sapien
cataggcagatgtgacagatgcccc

SEQ ID NO: 791921 - DNA, 25 bp, Homo sapien
gctggagtggttgtcagttgcatca

SEQ ID NO: 791922 - DNA, 25 bp, Homo sapien
atctagagctcggatgaggtgacag

SEQ ID NO: 791923 - DNA, 25 bp, Homo sapien
tctctgtaaaccatagtatctagag

SEQ ID NO: 791924 - DNA, 25 bp, Homo sapien
tcggatgaggtgacaggtataccat

SEQ ID NO: 791925 - DNA, 25 bp, Homo sapien
taaaccatagtatctagagctcgga

SEQ ID NO: 791926 - DNA, 25 bp, Homo sapien
tgttcccactgttttataggaacag

SEQ ID NO: 791927 - DNA, 25 bp, Homo sapien
cccactgttttataggaacagtgaa

SEQ ID NO: 791928 - DNA, 25 bp, Homo sapien
tttgagacttgaagacgaactttct

SEQ ID NO: 791929 - DNA, 25 bp, Homo sapien
cactatttactggactaactgtttt

SEQ ID NO: 791930 - DNA, 25 bp, Homo sapien
ctttcactatttactggactaactg

SEQ ID NO: 791931 - DNA, 25 bp, Homo sapien
ttgaagacgaactttctctcacttt

SEQ ID NO: 791932 - DNA, 25 bp, Homo sapien
gcctacatttgtccaagattgtcac

SEQ ID NO: 791933 - DNA, 25 bp, Homo sapien
ccatactgtggcaaacagcctacat

SEQ ID NO: 791934 - DNA, 25 bp, Homo sapien
tgtattctaatggcagcgctgatgg

SEQ ID NO: 791935 - DNA, 25 bp, Homo sapien
gcttgtgagctggagtcagaaagcc

SEQ ID NO: 791936 - DNA, 25 bp, Homo sapien
ggagtcagaaagcctaattatctgg

SEQ ID NO: 791937 - DNA, 25 bp, Homo sapien
atctgtattctaatggcagcgctga

SEQ ID NO: 791938 - DNA, 25 bp, Homo sapien
gaaaacaatgtatggtataagaata

SEQ ID NO: 791939 - DNA, 25 bp, Homo sapien
ccatgccacatgatgactacagctg

SEQ ID NO: 791940 - DNA, 25 bp, Homo sapien
atgccacatgatgactacagctgca

SEQ ID NO: 791941 - DNA, 25 bp, Homo sapien
cagaaaacaatgtatggtataagaa

SEQ ID NO: 791942 - DNA, 25 bp, Homo sapien
tgagacatgaggtcaaaggagatca

SEQ ID NO: 791943 - DNA, 25 bp, Homo sapien
cctggatgtgagacatgaggtcaaa

SEQ ID NO: 791944 - DNA, 25 bp, Homo sapien
ttggcatcactgtgacctggatgtg

SEQ ID NO: 791945 - DNA, 25 bp, Homo sapien
ctttggcatcactgtgacctggatg

SEQ ID NO: 791946 - DNA, 25 bp, Homo sapien
gcccctctcatcacaggcccaaaga

SEQ ID NO: 791947 - DNA, 25 bp, Homo sapien
agcccctctcatcacaggcccaaag

SEQ ID NO: 791948 - DNA, 25 bp, Homo sapien
gcagcccctctcatcacaggcccaa

SEQ ID NO: 791949 - DNA, 25 bp, Homo sapien
cccctctcatcacaggcccaaagac

SEQ ID NO: 791950 - DNA, 25 bp, Homo sapien
caggatgccagactgttgactacat

SEQ ID NO: 791951 - DNA, 25 bp, Homo sapien
gcaggatgccagactgttgactaca

SEQ ID NO: 791952 - DNA, 25 bp, Homo sapien
ggcaggatgccagactgttgactac

SEQ ID NO: 791953 - DNA, 25 bp, Homo sapien
ggatgccagactgttgactacattt

SEQ ID NO: 791954 - DNA, 25 bp, Homo sapien
gagagaaagagtgaacaggaggagt

SEQ ID NO: 791955 - DNA, 25 bp, Homo sapien
gagaaagagtgaacaggaggagtat

SEQ ID NO: 791956 - DNA, 25 bp, Homo sapien
aaagagtgaacaggaggagtataaa

SEQ ID NO: 791957 - DNA, 25 bp, Homo sapien
gaaagagtgaacaggaggagtataa

SEQ ID NO: 791958 - DNA, 25 bp, Homo sapien
gacaatctccagggcatattctggc

SEQ ID NO: 791959 - DNA, 25 bp, Homo sapien
tctaaggtgctaatgacaatctcca

SEQ ID NO: 791960 - DNA, 25 bp, Homo sapien
caatctccagggcatattctggcct

SEQ ID NO: 791961 - DNA, 25 bp, Homo sapien
aaggtgctaatgacaatctccaggg

SEQ ID NO: 791962 - DNA, 25 bp, Homo sapien
tcctggtgtttgtgatactgcttgt

SEQ ID NO: 791963 - DNA, 25 bp, Homo sapien
atactgcttgtcacataattcacag

SEQ ID NO: 791964 - DNA, 25 bp, Homo sapien
tgtgatactgcttgtcacataattc

SEQ ID NO: 791965 - DNA, 25 bp, Homo sapien
tgtttgtgatactgcttgtcacata

SEQ ID NO: 791966 - DNA, 25 bp, Homo sapien
tatgaaggacttttcccactttgcc

SEQ ID NO: 791967 - DNA, 25 bp, Homo sapien
atacaggaatatgaaggacttttcc

SEQ ID NO: 791968 - DNA, 25 bp, Homo sapien
ctgaaggtataaatacaggaatatg

SEQ ID NO: 791969 - DNA, 25 bp, Homo sapien
caggaatatgaaggacttttcccac

SEQ ID NO: 791970 - DNA, 25 bp, Homo sapien
atggcagtaaataaggtcaaattca

SEQ ID NO: 791971 - DNA, 25 bp, Homo sapien
gcgcccctgtgccgccggagcctcc

SEQ ID NO: 791972 - DNA, 25 bp, Homo sapien
cgtgcgcccctgtgccgccggagcc

SEQ ID NO: 791973 - DNA, 25 bp, Homo sapien
aatagattcacactccattgtggaa

SEQ ID NO: 791974 - DNA, 25 bp, Homo sapien
gctttttggctaagttgaagaatta

SEQ ID NO: 791975 - DNA, 25 bp, Homo sapien
gcaaacaggtatgacattatgtcta

SEQ ID NO: 791976 - DNA, 25 bp, Homo sapien
aaaatgctaaggcttttactctatg

SEQ ID NO: 791977 - DNA, 25 bp, Homo sapien
tcttttttgccttacttgattcttc

SEQ ID NO: 791978 - DNA, 25 bp, Homo sapien
tttttgccttacttgattcttccca

SEQ ID NO: 791979 - DNA, 25 bp, Homo sapien
tcattcgtgcattttgaatcttttt

SEQ ID NO: 791980 - DNA, 25 bp, Homo sapien
atcttttttgccttacttgattctt

SEQ ID NO: 791981 - DNA, 25 bp, Homo sapien
aagtgtgaaagatcatagcatattg

SEQ ID NO: 791982 - DNA, 25 bp, Homo sapien
gaaagtgtgaaagatcatagcatat

SEQ ID NO: 791983 - DNA, 25 bp, Homo sapien
ggaaagtgtgaaagatcatagcata

SEQ ID NO: 791984 - DNA, 25 bp, Homo sapien
agtgtgaaagatcatagcatattgt

SEQ ID NO: 791985 - DNA, 25 bp, Homo sapien
taaaagtctcttggtacaaatgtga

SEQ ID NO: 791986 - DNA, 25 bp, Homo sapien
gaaagtgttactatagtctacgtac

SEQ ID NO: 791987 - DNA, 25 bp, Homo sapien
tactttttgcaatcaggtcattatg

SEQ ID NO: 791988 - DNA, 25 bp, Homo sapien
tcatcccagcacactagtattgaac

SEQ ID NO: 791989 - DNA, 25 bp, Homo sapien
gctggcatacagcggcccaaacaca

SEQ ID NO: 791990 - DNA, 25 bp, Homo sapien
ctggcatacagcggcccaaacacag

SEQ ID NO: 791991 - DNA, 25 bp, Homo sapien
ggcatacagcggcccaaacacagct

SEQ ID NO: 791992 - DNA, 25 bp, Homo sapien
catacagcggcccaaacacagctca

SEQ ID NO: 791993 - DNA, 25 bp, Homo sapien
gaggagatagtcgtacaggacaact

SEQ ID NO: 791994 - DNA, 25 bp, Homo sapien
aatgaaaagaggagatagtcgtaca

SEQ ID NO: 791995 - DNA, 25 bp, Homo sapien
gagatagtcgtacaggacaactaag

SEQ ID NO: 791996 - DNA, 25 bp, Homo sapien
aaaagaggagatagtcgtacaggac

SEQ ID NO: 791997 - DNA, 25 bp, Homo sapien
gttgcaagtgcccatactcagaaaa

SEQ ID NO: 791998 - DNA, 25 bp, Homo sapien
ttctcacagtcactaacgaagtatc

SEQ ID NO: 791999 - DNA, 25 bp, Homo sapien
aaacagctgccaagggatgccactt

SEQ ID NO: 792000 - DNA, 25 bp, Homo sapien
ctaacgaagtatccaagccacattt

SEQ ID NO: 792001 - DNA, 25 bp, Homo sapien
acaactaacaccaagggtccatcca

SEQ ID NO: 792002 - DNA, 25 bp, Homo sapien
caactaacaccaagggtccatccat

SEQ ID NO: 792003 - DNA, 25 bp, Homo sapien
tgaaacaactaacaccaagggtcca

SEQ ID NO: 792004 - DNA, 25 bp, Homo sapien
ctgctctgcagcaatctttccctgc

SEQ ID NO: 792005 - DNA, 25 bp, Homo sapien
ctttccctgctgtgcagctccttca

SEQ ID NO: 792006 - DNA, 25 bp, Homo sapien
ctctgcagcaatctttccctgctgt

SEQ ID NO: 792007 - DNA, 25 bp, Homo sapien
tttccctgctgtgcagctccttcat

SEQ ID NO: 792008 - DNA, 25 bp, Homo sapien
atctgtctattccagtaaccacttt

SEQ ID NO: 792009 - DNA, 25 bp, Homo sapien
tctgtctattccagtaaccactttc

SEQ ID NO: 792010 - DNA, 25 bp, Homo sapien
tagagcagttaagagcttgaagttt

SEQ ID NO: 792011 - DNA, 25 bp, Homo sapien
ctgttcaccagtaggaacttggtga

SEQ ID NO: 792012 - DNA, 25 bp, Homo sapien
tcaccagtaggaacttggtgaacag

SEQ ID NO: 792013 - DNA, 25 bp, Homo sapien
aacaggttagagcagttaagagctt

SEQ ID NO: 792014 - DNA, 25 bp, Homo sapien
cacaattgtacagaggtatttctta

SEQ ID NO: 792015 - DNA, 25 bp, Homo sapien
tgtacagaggtatttcttattttct

SEQ ID NO: 792016 - DNA, 25 bp, Homo sapien
cttattttctggttctacataattc

SEQ ID NO: 792017 - DNA, 25 bp, Homo sapien
acacacaattgtacagaggtatttc

SEQ ID NO: 792018 - DNA, 25 bp, Homo sapien
taaagactggatgagacttatgcac

SEQ ID NO: 792019 - DNA, 25 bp, Homo sapien
tgtggcatatggatcagtaaagact

SEQ ID NO: 792020 - DNA, 25 bp, Homo sapien
tgttgagtggtgaccttgcagaact

SEQ ID NO: 792021 - DNA, 25 bp, Homo sapien
tgctctgtctatactggttggccag

SEQ ID NO: 792022 - DNA, 25 bp, Homo sapien
ttgcagagcaagggccaaaaccttt

SEQ ID NO: 792023 - DNA, 25 bp, Homo sapien
gcagagcaagggccaaaacctttca

SEQ ID NO: 792024 - DNA, 25 bp, Homo sapien
tgcagagcaagggccaaaacctttc

SEQ ID NO: 792025 - DNA, 25 bp, Homo sapien
gagcaaattcccgttgctttaattc

SEQ ID NO: 792026 - DNA, 25 bp, Homo sapien
agattgctgccttaactcagccagc

SEQ ID NO: 792027 - DNA, 25 bp, Homo sapien
tctcatctttccatgacttagaagc

SEQ ID NO: 792028 - DNA, 25 bp, Homo sapien
ccagctgatgaagtcgtttaagtgc

SEQ ID NO: 792029 - DNA, 25 bp, Homo sapien
tagcaaacttggaacttctaaataa

SEQ ID NO: 792030 - DNA, 25 bp, Homo sapien
ggtagctctagcaaacttggaactt

SEQ ID NO: 792031 - DNA, 25 bp, Homo sapien
gctctagcaaacttggaacttctaa

SEQ ID NO: 792032 - DNA, 25 bp, Homo sapien
tgggtagctctagcaaacttggaac

SEQ ID NO: 792033 - DNA, 25 bp, Homo sapien
gtggaccgctgtttatcggatatga

SEQ ID NO: 792034 - DNA, 25 bp, Homo sapien
tgttctcactgaaaactgatgctga

SEQ ID NO: 792035 - DNA, 25 bp, Homo sapien
tgtcgatttggcatggtggaccgct

SEQ ID NO: 792036 - DNA, 25 bp, Homo sapien
tctgaagatgtttgcagtacctgat

SEQ ID NO: 792037 - DNA, 25 bp, Homo sapien
gcagaagttccgtaggccattgaag

SEQ ID NO: 792038 - DNA, 25 bp, Homo sapien
tgcttggcatgggtgattaacacaa

SEQ ID NO: 792039 - DNA, 25 bp, Homo sapien
ggttgcagccataagagatacaggg

SEQ ID NO: 792040 - DNA, 25 bp, Homo sapien
catccttgctttgaacgtggagaaa

SEQ ID NO: 792041 - DNA, 25 bp, Homo sapien
gaggactgcagggaatcaatttatg

SEQ ID NO: 792042 - DNA, 25 bp, Homo sapien
cgtttgtgcctttcaactgagtggt

SEQ ID NO: 792043 - DNA, 25 bp, Homo sapien
aatctgtcgtgctgagttccctggc

SEQ ID NO: 792044 - DNA, 25 bp, Homo sapien
tgccaatgggcccttgaagcttcct

SEQ ID NO: 792045 - DNA, 25 bp, Homo sapien
ccggagttacacttcatgggcctga

SEQ ID NO: 792046 - DNA, 25 bp, Homo sapien
aggcagctgatattcccggagttac

SEQ ID NO: 792047 - DNA, 25 bp, Homo sapien
gactgagactctgttactaggtgaa

SEQ ID NO: 792048 - DNA, 25 bp, Homo sapien
tgcatgggacttgcgaaggagcctc

SEQ ID NO: 792049 - DNA, 25 bp, Homo sapien
tcgaagatgctttgataggagttgc

SEQ ID NO: 792050 - DNA, 25 bp, Homo sapien
taatccgtcttcgactttgtcaggt

SEQ ID NO: 792051 - DNA, 25 bp, Homo sapien
ttattagacggaaaagcaccaggga

SEQ ID NO: 792052 - DNA, 25 bp, Homo sapien
gaattcatttggtactgggtcacag

SEQ ID NO: 792053 - DNA, 25 bp, Homo sapien
caaaatgctgcaggaacgtgtggtg

SEQ ID NO: 792054 - DNA, 25 bp, Homo sapien
catttagctgttgcatctggctaga

SEQ ID NO: 792055 - DNA, 25 bp, Homo sapien
tcttgaccttggaatactggttgga

SEQ ID NO: 792056 - DNA, 25 bp, Homo sapien
tgtggacacatttaaggcctctttc

SEQ ID NO: 792057 - DNA, 25 bp, Homo sapien
tagttgtgagaaggcttgattgcag

SEQ ID NO: 792058 - DNA, 25 bp, Homo sapien
ttcgtctgggcatcagtgagtctga

SEQ ID NO: 792059 - DNA, 25 bp, Homo sapien
gcatcttttatatgaggacatttcc

SEQ ID NO: 792060 - DNA, 25 bp, Homo sapien
ttcctgtttttagtggcatccgtga

SEQ ID NO: 792061 - DNA, 25 bp, Homo sapien
cctattactgcaaatcactggattt

SEQ ID NO: 792062 - DNA, 25 bp, Homo sapien
gtagctctttgatgcactgacttca

SEQ ID NO: 792063 - DNA, 25 bp, Homo sapien
gtgcctggcatgtttcactaaacac

SEQ ID NO: 792064 - DNA, 25 bp, Homo sapien
tctatccacaggtaaatgtcattct

SEQ ID NO: 792065 - DNA, 25 bp, Homo sapien
gatcacatagaattatatgcctggg

SEQ ID NO: 792066 - DNA, 25 bp, Homo sapien
cattggctgataatcctgcagttac

SEQ ID NO: 792067 - DNA, 25 bp, Homo sapien
catccaccacattagcattggctga

SEQ ID NO: 792068 - DNA, 25 bp, Homo sapien
cgttatagagacaagggatacaggc

SEQ ID NO: 792069 - DNA, 25 bp, Homo sapien
caatgaaaatttgcatgcgtgtgtg

SEQ ID NO: 792070 - DNA, 25 bp, Homo sapien
aatgaaaatttgcatgcgtgtgtgt

SEQ ID NO: 792071 - DNA, 25 bp, Homo sapien
tacaatgaaaatttgcatgcgtgtg

SEQ ID NO: 792072 - DNA, 25 bp, Homo sapien
agtagagtgacttatattcctctga

SEQ ID NO: 792073 - DNA, 25 bp, Homo sapien
tgattcttgatgttacgcacatcat

SEQ ID NO: 792074 - DNA, 25 bp, Homo sapien
ttcttgatgttacgcacatcatttc

SEQ ID NO: 792075 - DNA, 25 bp, Homo sapien
attcttgatgttacgcacatcattt

SEQ ID NO: 792076 - DNA, 25 bp, Homo sapien
gattcttgatgttacgcacatcatt

SEQ ID NO: 792077 - DNA, 25 bp, Homo sapien
tgttaagctattgcaccctgagagc

SEQ ID NO: 792078 - DNA, 25 bp, Homo sapien
cattcagttaggatctttgcaggaa

SEQ ID NO: 792079 - DNA, 25 bp, Homo sapien
aatagcttatgaagtagttatctca

SEQ ID NO: 792080 - DNA, 25 bp, Homo sapien
tgaggcacctagatcagcaattttg

SEQ ID NO: 792081 - DNA, 25 bp, Homo sapien
gagttgcttgcttgccacaccagca

SEQ ID NO: 792082 - DNA, 25 bp, Homo sapien
accagcaatttctcagccatctgtc

SEQ ID NO: 792083 - DNA, 25 bp, Homo sapien
cagtcagagttgcttgcttgccaca

SEQ ID NO: 792084 - DNA, 25 bp, Homo sapien
cagcaatttctcagccatctgtctg

SEQ ID NO: 792085 - DNA, 25 bp, Homo sapien
tcccccaagcaaatgagtctgccat

SEQ ID NO: 792086 - DNA, 25 bp, Homo sapien
tcctgtcccccaagcaaatgagtct

SEQ ID NO: 792087 - DNA, 25 bp, Homo sapien
cctgtcccccaagcaaatgagtctg

SEQ ID NO: 792088 - DNA, 25 bp, Homo sapien
tgtcccccaagcaaatgagtctgcc

SEQ ID NO: 792089 - DNA, 25 bp, Homo sapien
gaactttcatcaagggtgactttgt

SEQ ID NO: 792090 - DNA, 25 bp, Homo sapien
catcaagggtgactttgtgcttccc

SEQ ID NO: 792091 - DNA, 25 bp, Homo sapien
taattagagtaagtttgatgatctc

SEQ ID NO: 792092 - DNA, 25 bp, Homo sapien
tgactttgtgcttcccatgtgaacc

SEQ ID NO: 792093 - DNA, 25 bp, Homo sapien
ctcaatgtgcccctttctgaaaatg

SEQ ID NO: 792094 - DNA, 25 bp, Homo sapien
gaacaagtccttatgtctttgaaga

SEQ ID NO: 792095 - DNA, 25 bp, Homo sapien
tctttgaagaaagaagacggttctc

SEQ ID NO: 792096 - DNA, 25 bp, Homo sapien
caatatgagcaagaatcacagaggc

SEQ ID NO: 792097 - DNA, 25 bp, Homo sapien
cacttaactggaaatctagcatata

SEQ ID NO: 792098 - DNA, 25 bp, Homo sapien
acttaactggaaatctagcatatac

SEQ ID NO: 792099 - DNA, 25 bp, Homo sapien
agtcattctaatcagtggctccagc

SEQ ID NO: 792100 - DNA, 25 bp, Homo sapien
cagacatttgccaggtaagtcattc

SEQ ID NO: 792101 - DNA, 25 bp, Homo sapien
caggtaagtcattctaatcagtggc

SEQ ID NO: 792102 - DNA, 25 bp, Homo sapien
gcagacatttgccaggtaagtcatt

SEQ ID NO: 792103 - DNA, 25 bp, Homo sapien
caacttgttcatcaaacgtctttgt

SEQ ID NO: 792104 - DNA, 25 bp, Homo sapien
gggcagatgattcaagtacttaaca

SEQ ID NO: 792105 - DNA, 25 bp, Homo sapien
tgggaaacattaggatttcctatga

SEQ ID NO: 792106 - DNA, 25 bp, Homo sapien
aagtgcttcttatatgttgtttata

SEQ ID NO: 792107 - DNA, 25 bp, Homo sapien
gattaaatgcatgtgggccatcctg

SEQ ID NO: 792108 - DNA, 25 bp, Homo sapien
agattaaatgcatgtgggccatcct

SEQ ID NO: 792109 - DNA, 25 bp, Homo sapien
ccaaagttgatagagtggtaccata

SEQ ID NO: 792110 - DNA, 25 bp, Homo sapien
ggctcttggctagaaccatctttgg

SEQ ID NO: 792111 - DNA, 25 bp, Homo sapien
tggtaccatataggtccaaacccaa

SEQ ID NO: 792112 - DNA, 25 bp, Homo sapien
agaaaaaggtagcagcatggagctg

SEQ ID NO: 792113 - DNA, 25 bp, Homo sapien
atccttgctttgtctcaaccaattg

SEQ ID NO: 792114 - DNA, 25 bp, Homo sapien
tccctacatgatgtctcatcatatg

SEQ ID NO: 792115 - DNA, 25 bp, Homo sapien
tacatgatgtctcatcatatgactg

SEQ ID NO: 792116 - DNA, 25 bp, Homo sapien
gctttgtctcaaccaattgttcttc

SEQ ID NO: 792117 - DNA, 25 bp, Homo sapien
gatgttgacattgactatgtccaac

SEQ ID NO: 792118 - DNA, 25 bp, Homo sapien
caagatgttgacattgactatgtcc

SEQ ID NO: 792119 - DNA, 25 bp, Homo sapien
ttatgcaggcctcgtagatttgtga

SEQ ID NO: 792120 - DNA, 25 bp, Homo sapien
ggcctcgtagatttgtgaacaatca

SEQ ID NO: 792121 - DNA, 25 bp, Homo sapien
cttctggtaaccatgccaacaggtg

SEQ ID NO: 792122 - DNA, 25 bp, Homo sapien
ttctggtaaccatgccaacaggtgg

SEQ ID NO: 792123 - DNA, 25 bp, Homo sapien
ctggtaaccatgccaacaggtggat

SEQ ID NO: 792124 - DNA, 25 bp, Homo sapien
tctggtaaccatgccaacaggtgga

SEQ ID NO: 792125 - DNA, 25 bp, Homo sapien
caactcctggaattcatctgcgctt

SEQ ID NO: 792126 - DNA, 25 bp, Homo sapien
tcctggaattcatctgcgcttcttg

SEQ ID NO: 792127 - DNA, 25 bp, Homo sapien
gccatattccaactcctggaattca

SEQ ID NO: 792128 - DNA, 25 bp, Homo sapien
aattcatctgcgcttcttgtcttgg

SEQ ID NO: 792129 - DNA, 25 bp, Homo sapien
ctaagatttatactcatgccagaag

SEQ ID NO: 792130 - DNA, 25 bp, Homo sapien
tataactaacagcacagctggtctg

SEQ ID NO: 792131 - DNA, 25 bp, Homo sapien
aggactggaaactgtgaatctggca

SEQ ID NO: 792132 - DNA, 25 bp, Homo sapien
tctggcagttgtttatcaatatcgg

SEQ ID NO: 792133 - DNA, 25 bp, Homo sapien
ccttcattgcctgcatcgctgagca

SEQ ID NO: 792134 - DNA, 25 bp, Homo sapien
tgagcaaagttgtttcaaattctgg

SEQ ID NO: 792135 - DNA, 25 bp, Homo sapien
tcaaattctggtcttagcaagtcca

SEQ ID NO: 792136 - DNA, 25 bp, Homo sapien
tgcctgcatcgctgagcaaagttgt

SEQ ID NO: 792137 - DNA, 25 bp, Homo sapien
taagactttataggccgcctctttc

SEQ ID NO: 792138 - DNA, 25 bp, Homo sapien
tgggcttcccgcatggacagtgctt

SEQ ID NO: 792139 - DNA, 25 bp, Homo sapien
tcctaagactttataggccgcctct

SEQ ID NO: 792140 - DNA, 25 bp, Homo sapien
tttggaattcagcacgtgtgtattt

SEQ ID NO: 792141 - DNA, 25 bp, Homo sapien
gttccatggaggtcatgtagatgaa

SEQ ID NO: 792142 - DNA, 25 bp, Homo sapien
gccagattcccttgaggaccaaagt

SEQ ID NO: 792143 - DNA, 25 bp, Homo sapien
ttgattggcatatatccccttgtgt

SEQ ID NO: 792144 - DNA, 25 bp, Homo sapien
tctgtggccagattcccttgaggac

SEQ ID NO: 792145 - DNA, 25 bp, Homo sapien
cctaaaggtagaggctagcttcgcc

SEQ ID NO: 792146 - DNA, 25 bp, Homo sapien
agccaccaaggaggtagtcttcttg

SEQ ID NO: 792147 - DNA, 25 bp, Homo sapien
tcactaagataaaagaataggtatt

SEQ ID NO: 792148 - DNA, 25 bp, Homo sapien
tccttgtgccacagggaatttacaa

SEQ ID NO: 792149 - DNA, 25 bp, Homo sapien
aaccaggagcagcaagtgtggaacc

SEQ ID NO: 792150 - DNA, 25 bp, Homo sapien
cataatgattggcaacagatggatt

SEQ ID NO: 792151 - DNA, 25 bp, Homo sapien
gtaaacgcaaaccaggagcagcaag

SEQ ID NO: 792152 - DNA, 25 bp, Homo sapien
ctagtcataatgattggcaacagat

SEQ ID NO: 792153 - DNA, 25 bp, Homo sapien
ttataatgaaatttgattgtgtgga

SEQ ID NO: 792154 - DNA, 25 bp, Homo sapien
tataatgaaatttgattgtgtggat

SEQ ID NO: 792155 - DNA, 25 bp, Homo sapien
cttataatgaaatttgattgtgtgg

SEQ ID NO: 792156 - DNA, 25 bp, Homo sapien
taatgaaatttgattgtgtggatac

SEQ ID NO: 792157 - DNA, 25 bp, Homo sapien
tttccaaatcacctggcctcagtgt

SEQ ID NO: 792158 - DNA, 25 bp, Homo sapien
ttggaccatgaattgatttcttgtg

SEQ ID NO: 792159 - DNA, 25 bp, Homo sapien
tcacctggcctcagtgtataaaaaa

SEQ ID NO: 792160 - DNA, 25 bp, Homo sapien
ctggctccaagtagtagttcatttg

SEQ ID NO: 792161 - DNA, 25 bp, Homo sapien
ggttttctcaggatttcaggaagca

SEQ ID NO: 792162 - DNA, 25 bp, Homo sapien
gaagcaaaagtaccactgtagattg

SEQ ID NO: 792163 - DNA, 25 bp, Homo sapien
ggaactgtataaatgaggtctgaga

SEQ ID NO: 792164 - DNA, 25 bp, Homo sapien
tctgagaaatggtccagcagagagc

SEQ ID NO: 792165 - DNA, 25 bp, Homo sapien
tcatggtataaacgtaacccaaatc

SEQ ID NO: 792166 - DNA, 25 bp, Homo sapien
gtcctgactctgaaccaagtccaca

SEQ ID NO: 792167 - DNA, 25 bp, Homo sapien
tgactctgaaccaagtccacactca

SEQ ID NO: 792168 - DNA, 25 bp, Homo sapien
tgtggtcctgactctgaaccaagtc

SEQ ID NO: 792169 - DNA, 25 bp, Homo sapien
tcattcttcttgggcatcaccagcc

SEQ ID NO: 792170 - DNA, 25 bp, Homo sapien
caaagaaaccatcagtcgtctggca

SEQ ID NO: 792171 - DNA, 25 bp, Homo sapien
catctgttgggtatgagtcattgga

SEQ ID NO: 792172 - DNA, 25 bp, Homo sapien
gcactgtgacagatatagaccccta

SEQ ID NO: 792173 - DNA, 25 bp, Homo sapien
tgttgccagaatgaacaacttcaaa

SEQ ID NO: 792174 - DNA, 25 bp, Homo sapien
aagctgcagaatctaaaggtcagca

SEQ ID NO: 792175 - DNA, 25 bp, Homo sapien
aacttatttacataacacctatgaa

SEQ ID NO: 792176 - DNA, 25 bp, Homo sapien
gggtcagtatagtgttcttcataac

SEQ ID NO: 792177 - DNA, 25 bp, Homo sapien
catgcctctttgtgaggggtcagta

SEQ ID NO: 792178 - DNA, 25 bp, Homo sapien
tatagatacaaaggattaaaagcaa

SEQ ID NO: 792179 - DNA, 25 bp, Homo sapien
aatatagatacaaaggattaaaagc

SEQ ID NO: 792180 - DNA, 25 bp, Homo sapien
atatagatacaaaggattaaaagca

SEQ ID NO: 792181 - DNA, 25 bp, Homo sapien
tttggaagcctggagactacagttc

SEQ ID NO: 792182 - DNA, 25 bp, Homo sapien
cactctttagaggaggactgccttg

SEQ ID NO: 792183 - DNA, 25 bp, Homo sapien
gactgccttgtactctttgatttgg

SEQ ID NO: 792184 - DNA, 25 bp, Homo sapien
agtgactgagaaggcaatacgcgtc

SEQ ID NO: 792185 - DNA, 25 bp, Homo sapien
catgaacagatcctaagcagccctg

SEQ ID NO: 792186 - DNA, 25 bp, Homo sapien
tatcatgaacagatcctaagcagcc

SEQ ID NO: 792187 - DNA, 25 bp, Homo sapien
tgtatcatgaacagatcctaagcag

SEQ ID NO: 792188 - DNA, 25 bp, Homo sapien
tttgtgtatcatgaacagatcctaa

SEQ ID NO: 792189 - DNA, 25 bp, Homo sapien
actttgaaggactgtctccactttc

SEQ ID NO: 792190 - DNA, 25 bp, Homo sapien
tctttgactttgaaggactgtctcc

SEQ ID NO: 792191 - DNA, 25 bp, Homo sapien
tttgactttgaaggactgtctccac

SEQ ID NO: 792192 - DNA, 25 bp, Homo sapien
ttgctgcatctttgactttgaagga

SEQ ID NO: 792193 - DNA, 25 bp, Homo sapien
agtagactttgggagcttttgtgat

SEQ ID NO: 792194 - DNA, 25 bp, Homo sapien
tttgggagcttttgtgatgtagagc

SEQ ID NO: 792195 - DNA, 25 bp, Homo sapien
ccagagtagactttgggagcttttg

SEQ ID NO: 792196 - DNA, 25 bp, Homo sapien
gactttgggagcttttgtgatgtag

SEQ ID NO: 792197 - DNA, 25 bp, Homo sapien
gttccccttgtggtatggtgctcat

SEQ ID NO: 792198 - DNA, 25 bp, Homo sapien
tgtgttggcagtgggcattcattct

SEQ ID NO: 792199 - DNA, 25 bp, Homo sapien
caagttccccttgtggtatggtgct

SEQ ID NO: 792200 - DNA, 25 bp, Homo sapien
cccaagttccccttgtggtatggtg

SEQ ID NO: 792201 - DNA, 25 bp, Homo sapien
ttcatatgcaaaaagtccagtccat

SEQ ID NO: 792202 - DNA, 25 bp, Homo sapien
tcatatgcaaaaagtccagtccatt

SEQ ID NO: 792203 - DNA, 25 bp, Homo sapien
attcatatgcaaaaagtccagtcca

SEQ ID NO: 792204 - DNA, 25 bp, Homo sapien
aagacaaaggttcttgcattcattt

SEQ ID NO: 792205 - DNA, 25 bp, Homo sapien
gaaatgacacctgtcctcttttaca

SEQ ID NO: 792206 - DNA, 25 bp, Homo sapien
aaatgacacctgtcctcttttacat

SEQ ID NO: 792207 - DNA, 25 bp, Homo sapien
aaagacaaaggttcttgcattcatt

SEQ ID NO: 792208 - DNA, 25 bp, Homo sapien
cacaaagatagttcataatatggga

SEQ ID NO: 792209 - DNA, 25 bp, Homo sapien
gggagattcgacataactatcttgg

SEQ ID NO: 792210 - DNA, 25 bp, Homo sapien
actatcttggtcaacatgtcaatga

SEQ ID NO: 792211 - DNA, 25 bp, Homo sapien
aaaatgctaaacaagaccatgagaa

SEQ ID NO: 792212 - DNA, 25 bp, Homo sapien
gctttgggatgataatgttatgaat

SEQ ID NO: 792213 - DNA, 25 bp, Homo sapien
tgggatgataatgttatgaatttca

SEQ ID NO: 792214 - DNA, 25 bp, Homo sapien
ttgggatgataatgttatgaatttc

SEQ ID NO: 792215 - DNA, 25 bp, Homo sapien
ctggctttgggatgataatgttatg

SEQ ID NO: 792216 - DNA, 25 bp, Homo sapien
gctcagcagacagttcgtgaaatat

SEQ ID NO: 792217 - DNA, 25 bp, Homo sapien
tttgttcacttctttagctaatgtc

SEQ ID NO: 792218 - DNA, 25 bp, Homo sapien
acagttcgtgaaatataagtgaggg

SEQ ID NO: 792219 - DNA, 25 bp, Homo sapien
ttcacttctttagctaatgtcactc

SEQ ID NO: 792220 - DNA, 25 bp, Homo sapien
catatatggctgtgtagttggctcc

SEQ ID NO: 792221 - DNA, 25 bp, Homo sapien
tgtcaagagccatgggcattagtct

SEQ ID NO: 792222 - DNA, 25 bp, Homo sapien
ttgaggccaagagtaaagtagggac

SEQ ID NO: 792223 - DNA, 25 bp, Homo sapien
gttggctccattctcacgactctcg

SEQ ID NO: 792224 - DNA, 25 bp, Homo sapien
gagggtaccttgaaagcttctctgc

SEQ ID NO: 792225 - DNA, 25 bp, Homo sapien
tgttgtttgctccttaaaggtcagg

SEQ ID NO: 792226 - DNA, 25 bp, Homo sapien
gatgaaagagggtaccttgaaagct

SEQ ID NO: 792227 - DNA, 25 bp, Homo sapien
ttgctccttaaaggtcaggtttgga

SEQ ID NO: 792228 - DNA, 25 bp, Homo sapien
tccttcaaggaatccacatcccata

SEQ ID NO: 792229 - DNA, 25 bp, Homo sapien
ttagcatatcgctcctggcctgtct

SEQ ID NO: 792230 - DNA, 25 bp, Homo sapien
ctcctggcctgtctctgtatctgtt

SEQ ID NO: 792231 - DNA, 25 bp, Homo sapien
cctggcctgtctctgtatctgttct

SEQ ID NO: 792232 - DNA, 25 bp, Homo sapien
caccattagcatatcgctcctggcc

SEQ ID NO: 792233 - DNA, 25 bp, Homo sapien
ctccatggctgcacttgattcctgc

SEQ ID NO: 792234 - DNA, 25 bp, Homo sapien
catggctgcacttgattcctgcgct

SEQ ID NO: 792235 - DNA, 25 bp, Homo sapien
gctgcacttgattcctgcgctctga

SEQ ID NO: 792236 - DNA, 25 bp, Homo sapien
tggctgcacttgattcctgcgctct

SEQ ID NO: 792237 - DNA, 25 bp, Homo sapien
aatccctgatagagctgggtcaatt

SEQ ID NO: 792238 - DNA, 25 bp, Homo sapien
gggcgcatgcgttcgaagccattcg

SEQ ID NO: 792239 - DNA, 25 bp, Homo sapien
gttgcggacctaccggtcgtcatgg

SEQ ID NO: 792240 - DNA, 25 bp, Homo sapien
ttcgcgccggcagtccctgcgtgtt

SEQ ID NO: 792241 - DNA, 25 bp, Homo sapien
cgcaccgccgcttagactggctggg

SEQ ID NO: 792242 - DNA, 25 bp, Homo sapien
gcccgcaccgccgcttagactggct

SEQ ID NO: 792243 - DNA, 25 bp, Homo sapien
ccgcaccgccgcttagactggctgg

SEQ ID NO: 792244 - DNA, 25 bp, Homo sapien
tcggatcctccgccggaaggacctc

SEQ ID NO: 792245 - DNA, 25 bp, Homo sapien
cgattttccacatttcggatcctcc

SEQ ID NO: 792246 - DNA, 25 bp, Homo sapien
gattttccacatttcggatcctccg

SEQ ID NO: 792247 - DNA, 25 bp, Homo sapien
tttcattgtcgtcatggaggagtgc

SEQ ID NO: 792248 - DNA, 25 bp, Homo sapien
aacaaagaccattagacgccagcac

SEQ ID NO: 792249 - DNA, 25 bp, Homo sapien
tttacaagagccgagacctagaagc

SEQ ID NO: 792250 - DNA, 25 bp, Homo sapien
gactgtctgcaagcacggttgctat

SEQ ID NO: 792251 - DNA, 25 bp, Homo sapien
caggcttgcacactgaaagactcag

SEQ ID NO: 792252 - DNA, 25 bp, Homo sapien
atttccaattggcaggtgttgctaa

SEQ ID NO: 792253 - DNA, 25 bp, Homo sapien
taaccactgcagaatctttaacttc

SEQ ID NO: 792254 - DNA, 25 bp, Homo sapien
ggtgttgctaaaactttatcaccaa

SEQ ID NO: 792255 - DNA, 25 bp, Homo sapien
aagtcatctcccgttccaaagatga

SEQ ID NO: 792256 - DNA, 25 bp, Homo sapien
agaggtgagagaaatgacgataatt

SEQ ID NO: 792257 - DNA, 25 bp, Homo sapien
gagaaatgacgataattttcacaaa

SEQ ID NO: 792258 - DNA, 25 bp, Homo sapien
tcatctcccgttccaaagatgagag

SEQ ID NO: 792259 - DNA, 25 bp, Homo sapien
gaagaaacctaaccattttggtgca

SEQ ID NO: 792260 - DNA, 25 bp, Homo sapien
tcatagtctcgctattcttaaacca

SEQ ID NO: 792261 - DNA, 25 bp, Homo sapien
catctctacctcatagtctcgctat

SEQ ID NO: 792262 - DNA, 25 bp, Homo sapien
gaaatagactatgaccaacaagctt

SEQ ID NO: 792263 - DNA, 25 bp, Homo sapien
ggatccatttccaattgagaagcag

SEQ ID NO: 792264 - DNA, 25 bp, Homo sapien
tctaaaagtagaccgataccaccac

SEQ ID NO: 792265 - DNA, 25 bp, Homo sapien
caaaattgtctgctacaggaattca

SEQ ID NO: 792266 - DNA, 25 bp, Homo sapien
caattcccttgatggcatttggatc

SEQ ID NO: 792267 - DNA, 25 bp, Homo sapien
tctgtatctccccactagcttctta

SEQ ID NO: 792268 - DNA, 25 bp, Homo sapien
gtctgtatctccccactagcttctt

SEQ ID NO: 792269 - DNA, 25 bp, Homo sapien
aagtcctgataatctcccccagtga

SEQ ID NO: 792270 - DNA, 25 bp, Homo sapien
gtcctgataatctcccccagtgaac

SEQ ID NO: 792271 - DNA, 25 bp, Homo sapien
taaagtcctgataatctcccccagt

SEQ ID NO: 792272 - DNA, 25 bp, Homo sapien
aaagtcctgataatctcccccagtg

SEQ ID NO: 792273 - DNA, 25 bp, Homo sapien
tcatgactggatcccgcacagtctg

SEQ ID NO: 792274 - DNA, 25 bp, Homo sapien
cccctcaggagctaggctgatcatg

SEQ ID NO: 792275 - DNA, 25 bp, Homo sapien
taggctgatcatgactggatcccgc

SEQ ID NO: 792276 - DNA, 25 bp, Homo sapien
tgtgccacgcaaagcccctcaggag

SEQ ID NO: 792277 - DNA, 25 bp, Homo sapien
tgaccatgggtcctacccgatcctg

SEQ ID NO: 792278 - DNA, 25 bp, Homo sapien
ggtcctacccgatcctgctggtgac

SEQ ID NO: 792279 - DNA, 25 bp, Homo sapien
tagccactgtggtgaccatgggtcc

SEQ ID NO: 792280 - DNA, 25 bp, Homo sapien
agcactagccactgtggtgaccatg

SEQ ID NO: 792281 - DNA, 25 bp, Homo sapien
agcaactccatgttggtggttatgg

SEQ ID NO: 792282 - DNA, 25 bp, Homo sapien
tgtgtgccacccatctgctcttctg

SEQ ID NO: 792283 - DNA, 25 bp, Homo sapien
catgttagaatttactgacagagtt

SEQ ID NO: 792284 - DNA, 25 bp, Homo sapien
ctgtgtgccacccatctgctcttct

SEQ ID NO: 792285 - DNA, 25 bp, Homo sapien
tcaccagaatgcccgccaccagctg

SEQ ID NO: 792286 - DNA, 25 bp, Homo sapien
gtgcaggagtgaggccctggctcca

SEQ ID NO: 792287 - DNA, 25 bp, Homo sapien
ccaccagctgtcacagctccacggg

SEQ ID NO: 792288 - DNA, 25 bp, Homo sapien
cagaatgcccgccaccagctgtcac

SEQ ID NO: 792289 - DNA, 25 bp, Homo sapien
gcaaatgggtaccacacaacctgcc

SEQ ID NO: 792290 - DNA, 25 bp, Homo sapien
tgttctgatgaattacaccgagtcc

SEQ ID NO: 792291 - DNA, 25 bp, Homo sapien
ggcaaatgggtaccacacaacctgc

SEQ ID NO: 792292 - DNA, 25 bp, Homo sapien
aaggcaaatgggtaccacacaacct

SEQ ID NO: 792293 - DNA, 25 bp, Homo sapien
agggcaccctggctattcccttgct

SEQ ID NO: 792294 - DNA, 25 bp, Homo sapien
caccaagaggtggcaccaaacctgc

SEQ ID NO: 792295 - DNA, 25 bp, Homo sapien
caggtggctctggcaccaagaggtg

SEQ ID NO: 792296 - DNA, 25 bp, Homo sapien
cctggctattcccttgctccatgct

SEQ ID NO: 792297 - DNA, 25 bp, Homo sapien
cgctgctgcccagaggtgcgggccc

SEQ ID NO: 792298 - DNA, 25 bp, Homo sapien
tagcttgaccgtgagtctcggctgc

SEQ ID NO: 792299 - DNA, 25 bp, Homo sapien
cactcttcgccttagcttgaccgtg

SEQ ID NO: 792300 - DNA, 25 bp, Homo sapien
gcctccttgtccgttgcgcgtccag

SEQ ID NO: 792301 - DNA, 25 bp, Homo sapien
ttctataaaatagtatggcttcagc

SEQ ID NO: 792302 - DNA, 25 bp, Homo sapien
tataaaatagtatggcttcagccac

SEQ ID NO: 792303 - DNA, 25 bp, Homo sapien
aattctataaaatagtatggcttca

SEQ ID NO: 792304 - DNA, 25 bp, Homo sapien
tctataaaatagtatggcttcagcc

SEQ ID NO: 792305 - DNA, 25 bp, Homo sapien
cgtcttcttctaaatttctcctagg

SEQ ID NO: 792306 - DNA, 25 bp, Homo sapien
aaagttcttcttggtttgtgatgtc

SEQ ID NO: 792307 - DNA, 25 bp, Homo sapien
tctcctaggcttcattttccaaagt

SEQ ID NO: 792308 - DNA, 25 bp, Homo sapien
ccaaagttcttcttggtttgtgatg

SEQ ID NO: 792309 - DNA, 25 bp, Homo sapien
tctgaagggcagtcaaattcatcag

SEQ ID NO: 792310 - DNA, 25 bp, Homo sapien
caatgccaagagagtgatggaaacc

SEQ ID NO: 792311 - DNA, 25 bp, Homo sapien
ttttagcatgctggtctctcccgtg

SEQ ID NO: 792312 - DNA, 25 bp, Homo sapien
ggacaattgctgctatcacacctgg

SEQ ID NO: 792313 - DNA, 25 bp, Homo sapien
ttcccagagacacataaatctccat

SEQ ID NO: 792314 - DNA, 25 bp, Homo sapien
ccagagacacataaatctccattct

SEQ ID NO: 792315 - DNA, 25 bp, Homo sapien
agatggaatagatgtcacagccaac

SEQ ID NO: 792316 - DNA, 25 bp, Homo sapien
gaatagatgtcacagccaacagagc

SEQ ID NO: 792317 - DNA, 25 bp, Homo sapien
tctctccatgtcaaagagtcactca

SEQ ID NO: 792318 - DNA, 25 bp, Homo sapien
ctctccatgtcaaagagtcactcac

SEQ ID NO: 792319 - DNA, 25 bp, Homo sapien
tttatggggtaaagtcaacatattc

SEQ ID NO: 792320 - DNA, 25 bp, Homo sapien
tcaacatattctatatcataaacac

SEQ ID NO: 792321 - DNA, 25 bp, Homo sapien
gtcaacatattctatatcataaaca

SEQ ID NO: 792322 - DNA, 25 bp, Homo sapien
aacatattctatatcataaacacaa

SEQ ID NO: 792323 - DNA, 25 bp, Homo sapien
taattggcagtgttcatgactgaat

SEQ ID NO: 792324 - DNA, 25 bp, Homo sapien
gagtgattctggcacatcactcttc

SEQ ID NO: 792325 - DNA, 25 bp, Homo sapien
tccaaagatgtctacccataaacgg

SEQ ID NO: 792326 - DNA, 25 bp, Homo sapien
tttagtcctttgaatcttgtcagac

SEQ ID NO: 792327 - DNA, 25 bp, Homo sapien
cacactggactaattcagatggagg

SEQ ID NO: 792328 - DNA, 25 bp, Homo sapien
tgtcaagatgcagtcctaaattcct

SEQ ID NO: 792329 - DNA, 25 bp, Homo sapien
gaagggatagttgcgaatgtctgac

SEQ ID NO: 792330 - DNA, 25 bp, Homo sapien
gaactccagtggttatcaggctgaa

SEQ ID NO: 792331 - DNA, 25 bp, Homo sapien
tggatatgctctgttgcttggaaat

SEQ ID NO: 792332 - DNA, 25 bp, Homo sapien
tcttgtctccaagctgtctaagtga

SEQ ID NO: 792333 - DNA, 25 bp, Homo sapien
gattggttcaataagagtttatccc

SEQ ID NO: 792334 - DNA, 25 bp, Homo sapien
ctatcctcctcaccttacttttggg

SEQ ID NO: 792335 - DNA, 25 bp, Homo sapien
tcataaaagttggaggtgtatacca

SEQ ID NO: 792336 - DNA, 25 bp, Homo sapien
aaatcaatgcgtgtattgtgcccag

SEQ ID NO: 792337 - DNA, 25 bp, Homo sapien
tcttcttcctcaagcatggcaggaa

SEQ ID NO: 792338 - DNA, 25 bp, Homo sapien
gacaacaattggaaggaaaacagct

SEQ ID NO: 792339 - DNA, 25 bp, Homo sapien
aatacaaacttgaaatgttggtgat

SEQ ID NO: 792340 - DNA, 25 bp, Homo sapien
acaaacttgaaatgttggtgataaa

SEQ ID NO: 792341 - DNA, 25 bp, Homo sapien
caaatacaaacttgaaatgttggtg

SEQ ID NO: 792342 - DNA, 25 bp, Homo sapien
acaaatacaaacttgaaatgttggt

SEQ ID NO: 792343 - DNA, 25 bp, Homo sapien
gagactatggtacttgactgctgca

SEQ ID NO: 792344 - DNA, 25 bp, Homo sapien
taccatggctaacaagacagggctc

SEQ ID NO: 792345 - DNA, 25 bp, Homo sapien
gacagggctcccataatcaagccag

SEQ ID NO: 792346 - DNA, 25 bp, Homo sapien
agaactcggctattgtccctgaaag

SEQ ID NO: 792347 - DNA, 25 bp, Homo sapien
ttggtccaggaatatcataattacc

SEQ ID NO: 792348 - DNA, 25 bp, Homo sapien
ataattaccattgaggaaccccagg

SEQ ID NO: 792349 - DNA, 25 bp, Homo sapien
gacagcatgggcatccaaattcagt

SEQ ID NO: 792350 - DNA, 25 bp, Homo sapien
gggaaaactactatgtccttactgc

SEQ ID NO: 792351 - DNA, 25 bp, Homo sapien
ctcttcttaagagttttcttgtaag

SEQ ID NO: 792352 - DNA, 25 bp, Homo sapien
gacagcaagtataggcaactcttct

SEQ ID NO: 792353 - DNA, 25 bp, Homo sapien
aaactggagacagcaagtataggca

SEQ ID NO: 792354 - DNA, 25 bp, Homo sapien
taggaattggttcagagaatgggaa

SEQ ID NO: 792355 - DNA, 25 bp, Homo sapien
attattgccacagtttcagctcctg

SEQ ID NO: 792356 - DNA, 25 bp, Homo sapien
attgccacagtttcagctcctgtta

SEQ ID NO: 792357 - DNA, 25 bp, Homo sapien
ttgattattgccacagtttcagctc

SEQ ID NO: 792358 - DNA, 25 bp, Homo sapien
gattattgccacagtttcagctcct

SEQ ID NO: 792359 - DNA, 25 bp, Homo sapien
gagagcacctttggctctgggtttc

SEQ ID NO: 792360 - DNA, 25 bp, Homo sapien
tgagagcacctttggctctgggttt

SEQ ID NO: 792361 - DNA, 25 bp, Homo sapien
gagcacctttggctctgggtttctg

SEQ ID NO: 792362 - DNA, 25 bp, Homo sapien
agagcacctttggctctgggtttct

SEQ ID NO: 792363 - DNA, 25 bp, Homo sapien
tggaataaaatgttcggaaatgccc

SEQ ID NO: 792364 - DNA, 25 bp, Homo sapien
catgaaaactccctcggataggagg

SEQ ID NO: 792365 - DNA, 25 bp, Homo sapien
gactagactgtgtccttggaataaa

SEQ ID NO: 792366 - DNA, 25 bp, Homo sapien
gaccttcactctagctggtgccgcg

SEQ ID NO: 792367 - DNA, 25 bp, Homo sapien
ctccaagaaactgcgcttttttctt

SEQ ID NO: 792368 - DNA, 25 bp, Homo sapien
tgtggggtcacctttccgctctaga

SEQ ID NO: 792369 - DNA, 25 bp, Homo sapien
ttgtaatgtggggtcacctttccgc

SEQ ID NO: 792370 - DNA, 25 bp, Homo sapien
tggggtcacctttccgctctagaaa

SEQ ID NO: 792371 - DNA, 25 bp, Homo sapien
taatgtggggtcacctttccgctct

SEQ ID NO: 792372 - DNA, 25 bp, Homo sapien
gcccgaggaacgctgactggagtcg

SEQ ID NO: 792373 - DNA, 25 bp, Homo sapien
ctcgtggcgccgagggcccgaggaa

SEQ ID NO: 792374 - DNA, 25 bp, Homo sapien
gaggcgcgcggaggccggcttggca

SEQ ID NO: 792375 - DNA, 25 bp, Homo sapien
gcttggcagcgacgcgccgctaggg

SEQ ID NO: 792376 - DNA, 25 bp, Homo sapien
tgccgcggcggtcgcactccagctg

SEQ ID NO: 792377 - DNA, 25 bp, Homo sapien
gctgccgcggcggtcgcactccagc

SEQ ID NO: 792378 - DNA, 25 bp, Homo sapien
ggcggttgcagggtggctgccgcgg

SEQ ID NO: 792379 - DNA, 25 bp, Homo sapien
gtggctgccgcggcggtcgcactcc

SEQ ID NO: 792380 - DNA, 25 bp, Homo sapien
gggggccagggcctacggactgcac

SEQ ID NO: 792381 - DNA, 25 bp, Homo sapien
ccacgccgggcaggggcgagccttg

SEQ ID NO: 792382 - DNA, 25 bp, Homo sapien
cagctccccgggagcggcgccgact

SEQ ID NO: 792383 - DNA, 25 bp, Homo sapien
gagccttgcagctccccgggagcgg

SEQ ID NO: 792384 - DNA, 25 bp, Homo sapien
ggagcggcgccgactccccaagggc

SEQ ID NO: 792385 - DNA, 25 bp, Homo sapien
tcgcgctcctccccgacccgctcac

SEQ ID NO: 792386 - DNA, 25 bp, Homo sapien
ctttcgcgctcctccccgacccgct

SEQ ID NO: 792387 - DNA, 25 bp, Homo sapien
tttcgcgctcctccccgacccgctc

SEQ ID NO: 792388 - DNA, 25 bp, Homo sapien
tctttcgcgctcctccccgacccgc

SEQ ID NO: 792389 - DNA, 25 bp, Homo sapien
cccaacctcaggacttgcccttagc

SEQ ID NO: 792390 - DNA, 25 bp, Homo sapien
gcccaacctcaggacttgcccttag

SEQ ID NO: 792391 - DNA, 25 bp, Homo sapien
ccaacctcaggacttgcccttagct

SEQ ID NO: 792392 - DNA, 25 bp, Homo sapien
catatactgttccatctctatagca

SEQ ID NO: 792393 - DNA, 25 bp, Homo sapien
ttgggagctttccatatactgttcc

SEQ ID NO: 792394 - DNA, 25 bp, Homo sapien
atactgttccatctctatagcagaa

SEQ ID NO: 792395 - DNA, 25 bp, Homo sapien
cttgggagctttccatatactgttc

SEQ ID NO: 792396 - DNA, 25 bp, Homo sapien
gtatattgtccacccacagcattct

SEQ ID NO: 792397 - DNA, 25 bp, Homo sapien
tctgtatattgtccacccacagcat

SEQ ID NO: 792398 - DNA, 25 bp, Homo sapien
tgtatattgtccacccacagcattc

SEQ ID NO: 792399 - DNA, 25 bp, Homo sapien
tatattgtccacccacagcattctc

SEQ ID NO: 792400 - DNA, 25 bp, Homo sapien
gtggatgaaccattcaacttcaggg

SEQ ID NO: 792401 - DNA, 25 bp, Homo sapien
tctggctcccagtatatacatggtc

SEQ ID NO: 792402 - DNA, 25 bp, Homo sapien
gaaaacataattctccagggccatg

SEQ ID NO: 792403 - DNA, 25 bp, Homo sapien
tattattggatgacagcaactctga

SEQ ID NO: 792404 - DNA, 25 bp, Homo sapien
aatataggacgctgaataatatgca

SEQ ID NO: 792405 - DNA, 25 bp, Homo sapien
gaaggtccactcacaattttccaat

SEQ ID NO: 792406 - DNA, 25 bp, Homo sapien
aatatgcatgcagttctttcccctt

SEQ ID NO: 792407 - DNA, 25 bp, Homo sapien
ggaggagcagtatcagaaggtccac

SEQ ID NO: 792408 - DNA, 25 bp, Homo sapien
gataggagtggaggccattatgtta

SEQ ID NO: 792409 - DNA, 25 bp, Homo sapien
cactagcaaggatatggaatcaatc

SEQ ID NO: 792410 - DNA, 25 bp, Homo sapien
acactagcaaggatatggaatcaat

SEQ ID NO: 792411 - DNA, 25 bp, Homo sapien
tatgctcatagcagatgtggaccat

SEQ ID NO: 792412 - DNA, 25 bp, Homo sapien
cacaatttcttctatgctcatagca

SEQ ID NO: 792413 - DNA, 25 bp, Homo sapien
attgcacaatttcttctatgctcat

SEQ ID NO: 792414 - DNA, 25 bp, Homo sapien
ttctatgctcatagcagatgtggac

SEQ ID NO: 792415 - DNA, 25 bp, Homo sapien
gattctgattgagtagttctggagg

SEQ ID NO: 792416 - DNA, 25 bp, Homo sapien
ttctgattgagtagttctggaggga

SEQ ID NO: 792417 - DNA, 25 bp, Homo sapien
gagggaggctcaacattctgcattt

SEQ ID NO: 792418 - DNA, 25 bp, Homo sapien
tggagggaggctcaacattctgcat

SEQ ID NO: 792419 - DNA, 25 bp, Homo sapien
gatacggacacttccaagatcacca

SEQ ID NO: 792420 - DNA, 25 bp, Homo sapien
atacggacacttccaagatcaccaa

SEQ ID NO: 792421 - DNA, 25 bp, Homo sapien
tagggcttcccatcatagagattga

SEQ ID NO: 792422 - DNA, 25 bp, Homo sapien
tcccacagggaggtataatgttctc

SEQ ID NO: 792423 - DNA, 25 bp, Homo sapien
aagcagatgtctcaggtcccacagg

SEQ ID NO: 792424 - DNA, 25 bp, Homo sapien
gccggctggcatccttaggtcctaa

SEQ ID NO: 792425 - DNA, 25 bp, Homo sapien
caagtcaatgggaatgaaattcaac

SEQ ID NO: 792426 - DNA, 25 bp, Homo sapien
actggcgggcaagttcaataacctg

SEQ ID NO: 792427 - DNA, 25 bp, Homo sapien
tctccagagagtaaagagtcgtagg

SEQ ID NO: 792428 - DNA, 25 bp, Homo sapien
gctgatgataaggatcccaagtcaa

SEQ ID NO: 792429 - DNA, 25 bp, Homo sapien
aaagtcactctgttggtttctagca

SEQ ID NO: 792430 - DNA, 25 bp, Homo sapien
ggatgaatcacatctctgacaaagg

SEQ ID NO: 792431 - DNA, 25 bp, Homo sapien
gagcaaagtaatggcaactataggt

SEQ ID NO: 792432 - DNA, 25 bp, Homo sapien
aggttttattcacaatctctatagg

SEQ ID NO: 792433 - DNA, 25 bp, Homo sapien
cactgtaaccaggtttccaaccaag

SEQ ID NO: 792434 - DNA, 25 bp, Homo sapien
cttggtgccgtaataaagttgataa

SEQ ID NO: 792435 - DNA, 25 bp, Homo sapien
accaaggtggaaatctcctatactt

SEQ ID NO: 792436 - DNA, 25 bp, Homo sapien
tagtaatccaagctgttttctacac

SEQ ID NO: 792437 - DNA, 25 bp, Homo sapien
gcagaggctgtaggcaacatggacc

SEQ ID NO: 792438 - DNA, 25 bp, Homo sapien
gaggctgtaggcaacatggaccata

SEQ ID NO: 792439 - DNA, 25 bp, Homo sapien
gctgtaggcaacatggaccatagcg

SEQ ID NO: 792440 - DNA, 25 bp, Homo sapien
gtaagcagaggctgtaggcaacatg

SEQ ID NO: 792441 - DNA, 25 bp, Homo sapien
gctgataagccatgttgagaaacaa

SEQ ID NO: 792442 - DNA, 25 bp, Homo sapien
ctgataagccatgttgagaaacaaa

SEQ ID NO: 792443 - DNA, 25 bp, Homo sapien
tgctgataagccatgttgagaaaca

SEQ ID NO: 792444 - DNA, 25 bp, Homo sapien
ctgctgataagccatgttgagaaac

SEQ ID NO: 792445 - DNA, 25 bp, Homo sapien
taaaaagtattttactagcatcaga

SEQ ID NO: 792446 - DNA, 25 bp, Homo sapien
tactagcatcagataaataacaagc

SEQ ID NO: 792447 - DNA, 25 bp, Homo sapien
tttactagcatcagataaataacaa

SEQ ID NO: 792448 - DNA, 25 bp, Homo sapien
ctagcatcagataaataacaagcac

SEQ ID NO: 792449 - DNA, 25 bp, Homo sapien
cactcttagcagaggtgtattcgac

SEQ ID NO: 792450 - DNA, 25 bp, Homo sapien
tcattgtattgaaaatctcaaagcc

SEQ ID NO: 792451 - DNA, 25 bp, Homo sapien
ctcatcattttgtggagcacagcca

SEQ ID NO: 792452 - DNA, 25 bp, Homo sapien
gagaagctgtggagacactcttagc

SEQ ID NO: 792453 - DNA, 25 bp, Homo sapien
gccaaggctcattatgccaaaggag

SEQ ID NO: 792454 - DNA, 25 bp, Homo sapien
cagtttaaagcattgctcactgaag

SEQ ID NO: 792455 - DNA, 25 bp, Homo sapien
tcttcctcattccaagagttttcaa

SEQ ID NO: 792456 - DNA, 25 bp, Homo sapien
cactgaagggatagaagtgactgcc

SEQ ID NO: 792457 - DNA, 25 bp, Homo sapien
ggcagtgctgtcaaagtcttccagt

SEQ ID NO: 792458 - DNA, 25 bp, Homo sapien
gatgcataaatacagcctcaaaggc

SEQ ID NO: 792459 - DNA, 25 bp, Homo sapien
taaccagagcaatcctaagctggct

SEQ ID NO: 792460 - DNA, 25 bp, Homo sapien
gctggcttccagcataatgtatcta

SEQ ID NO: 792461 - DNA, 25 bp, Homo sapien
tcagataagcattttggccctgctt

SEQ ID NO: 792462 - DNA, 25 bp, Homo sapien
gagcaagaacaaagtttggtggtgt

SEQ ID NO: 792463 - DNA, 25 bp, Homo sapien
caaaagctcgtttccatccataaat

SEQ ID NO: 792464 - DNA, 25 bp, Homo sapien
tgtagtactcttcctcaaaagctcg

SEQ ID NO: 792465 - DNA, 25 bp, Homo sapien
tacttatgagcagagcgacatatcc

SEQ ID NO: 792466 - DNA, 25 bp, Homo sapien
gaggaattgttcctcccataccttc

SEQ ID NO: 792467 - DNA, 25 bp, Homo sapien
tcacattactgtgaccctctccggg

SEQ ID NO: 792468 - DNA, 25 bp, Homo sapien
cggcttatacatggaaggaataaaa

SEQ ID NO: 792469 - DNA, 25 bp, Homo sapien
ttcgttttagctttcggcttataca

SEQ ID NO: 792470 - DNA, 25 bp, Homo sapien
tggttaaggtgcgacaaaggtcagc

SEQ ID NO: 792471 - DNA, 25 bp, Homo sapien
aaaaccgtggcctctggaatatgac

SEQ ID NO: 792472 - DNA, 25 bp, Homo sapien
gactacctggacttgaatgctcact

SEQ ID NO: 792473 - DNA, 25 bp, Homo sapien
tatacagttcctaggattggtaccg

SEQ ID NO: 792474 - DNA, 25 bp, Homo sapien
taatgaatggttatgcaggcaggag

SEQ ID NO: 792475 - DNA, 25 bp, Homo sapien
caatttgttaacactgctagggccc

SEQ ID NO: 792476 - DNA, 25 bp, Homo sapien
ccttcactgcatagggaggcatatg

SEQ ID NO: 792477 - DNA, 25 bp, Homo sapien
tccaggctcatgttccaagcaagaa

SEQ ID NO: 792478 - DNA, 25 bp, Homo sapien
gagggtacaagataataaaattcac

SEQ ID NO: 792479 - DNA, 25 bp, Homo sapien
ggcagttggattcagtagtacctac

SEQ ID NO: 792480 - DNA, 25 bp, Homo sapien
tcactggtgggaaaggtagcctcta

SEQ ID NO: 792481 - DNA, 25 bp, Homo sapien
tcaggaagaggaacgcatataattg

SEQ ID NO: 792482 - DNA, 25 bp, Homo sapien
ttaaaggccccatttatctgtaaca

SEQ ID NO: 792483 - DNA, 25 bp, Homo sapien
tcattgcccaactgaattcctacca

SEQ ID NO: 792484 - DNA, 25 bp, Homo sapien
gaaagtacaagataataggccgggc

SEQ ID NO: 792485 - DNA, 25 bp, Homo sapien
taagcatagtgttaaaagagtggaa

SEQ ID NO: 792486 - DNA, 25 bp, Homo sapien
gaattcagtcctacttctgaggcca

SEQ ID NO: 792487 - DNA, 25 bp, Homo sapien
ctttctcacacctagcaatagtaga

SEQ ID NO: 792488 - DNA, 25 bp, Homo sapien
ggtagcaaatctccactgctctaag

SEQ ID NO: 792489 - DNA, 25 bp, Homo sapien
tgctctaaggttctcaccaccactt

SEQ ID NO: 792490 - DNA, 25 bp, Homo sapien
tagagctcattagccaacctgtatg

SEQ ID NO: 792491 - DNA, 25 bp, Homo sapien
gtagaattccttaatcaagccaagg

SEQ ID NO: 792492 - DNA, 25 bp, Homo sapien
gaacaattgaaggtagggtgtctca

SEQ ID NO: 792493 - DNA, 25 bp, Homo sapien
gggatttcatagactgacacaggaa

SEQ ID NO: 792494 - DNA, 25 bp, Homo sapien
tcagtctgggtatctgcaaagctgc

SEQ ID NO: 792495 - DNA, 25 bp, Homo sapien
ctgggtatctgcaaagctgcaaaag

SEQ ID NO: 792496 - DNA, 25 bp, Homo sapien
agtctgggtatctgcaaagctgcaa

SEQ ID NO: 792497 - DNA, 25 bp, Homo sapien
gggtatctgcaaagctgcaaaagat

SEQ ID NO: 792498 - DNA, 25 bp, Homo sapien
agaagtagagtcaataggaagacaa

SEQ ID NO: 792499 - DNA, 25 bp, Homo sapien
aaagaagtagagtcaataggaagac

SEQ ID NO: 792500 - DNA, 25 bp, Homo sapien
aagaagtagagtcaataggaagaca

SEQ ID NO: 792501 - DNA, 25 bp, Homo sapien
tgaggaatgtaatgggcagccgctt

SEQ ID NO: 792502 - DNA, 25 bp, Homo sapien
tgtggctttgatcctctggagacag

SEQ ID NO: 792503 - DNA, 25 bp, Homo sapien
taatctgccttactctttgggtgtg

SEQ ID NO: 792504 - DNA, 25 bp, Homo sapien
ggagacttcatctcactggccaaca

SEQ ID NO: 792505 - DNA, 25 bp, Homo sapien
aaatccacgtgtatacaacatttca

SEQ ID NO: 792506 - DNA, 25 bp, Homo sapien
aatccacgtgtatacaacatttcaa

SEQ ID NO: 792507 - DNA, 25 bp, Homo sapien
aaaatccacgtgtatacaacatttc

SEQ ID NO: 792508 - DNA, 25 bp, Homo sapien
ccatcatagatcacattatactaga

SEQ ID NO: 792509 - DNA, 25 bp, Homo sapien
acattatactagatactggggattt

SEQ ID NO: 792510 - DNA, 25 bp, Homo sapien
aatttctgctacggggagtttacag

SEQ ID NO: 792511 - DNA, 25 bp, Homo sapien
tatccatcatagatcacattatact

SEQ ID NO: 792512 - DNA, 25 bp, Homo sapien
cagaaactctttaggacaacagggt

SEQ ID NO: 792513 - DNA, 25 bp, Homo sapien
gactcctcaacatatagcagtgtgg

SEQ ID NO: 792514 - DNA, 25 bp, Homo sapien
gcagaaactctttaggacaacaggg

SEQ ID NO: 792515 - DNA, 25 bp, Homo sapien
gtggcacagtgtacaggactcctca

SEQ ID NO: 792516 - DNA, 25 bp, Homo sapien
gtgctgtacctccttgatcaaagtt

SEQ ID NO: 792517 - DNA, 25 bp, Homo sapien
caacaagtgcagttaattgctcggt

SEQ ID NO: 792518 - DNA, 25 bp, Homo sapien
tgagcttgtcatagctttgcaacaa

SEQ ID NO: 792519 - DNA, 25 bp, Homo sapien
tattagcacctaagcatttccaggc

SEQ ID NO: 792520 - DNA, 25 bp, Homo sapien
taatcaaggcacaaatggtattctc

SEQ ID NO: 792521 - DNA, 25 bp, Homo sapien
caggattggtttcatctcgaggcat

SEQ ID NO: 792522 - DNA, 25 bp, Homo sapien
ggttccccaagcctgccataaacaa

SEQ ID NO: 792523 - DNA, 25 bp, Homo sapien
tggtattctcgcctacaggacactg

SEQ ID NO: 792524 - DNA, 25 bp, Homo sapien
tagaactgtctttgttgtggagcaa

SEQ ID NO: 792525 - DNA, 25 bp, Homo sapien
gaagctgcaggaactactcgtgttt

SEQ ID NO: 792526 - DNA, 25 bp, Homo sapien
agtaaaagaatagtcacccctgaag

SEQ ID NO: 792527 - DNA, 25 bp, Homo sapien
tagttatagtgcaataaccccagga

SEQ ID NO: 792528 - DNA, 25 bp, Homo sapien
gaatatgtctaataagtatttgaga

SEQ ID NO: 792529 - DNA, 25 bp, Homo sapien
gtttatagcacatatgaaatctagt

SEQ ID NO: 792530 - DNA, 25 bp, Homo sapien
agaatgtttatagcacatatgaaat

SEQ ID NO: 792531 - DNA, 25 bp, Homo sapien
taataagtatttgagactatatatg

SEQ ID NO: 792532 - DNA, 25 bp, Homo sapien
aaatatattgcaaattgtggttcta

SEQ ID NO: 792533 - DNA, 25 bp, Homo sapien
aattgcaatttcttagtagcacctg

SEQ ID NO: 792534 - DNA, 25 bp, Homo sapien
tgtagacttaaagattaactagtag

SEQ ID NO: 792535 - DNA, 25 bp, Homo sapien
gaatgtggtaacaattctacagaat

SEQ ID NO: 792536 - DNA, 25 bp, Homo sapien
ctagagtcgcgaaaggtcccaaaat

SEQ ID NO: 792537 - DNA, 25 bp, Homo sapien
ggggcctaggccaccgccatacagt

SEQ ID NO: 792538 - DNA, 25 bp, Homo sapien
aaggcagcctgagagtcgctagagt

SEQ ID NO: 792539 - DNA, 25 bp, Homo sapien
ccatacagtccgcttagcgccgctg

SEQ ID NO: 792540 - DNA, 25 bp, Homo sapien
ggtggagagtggggggatcttcctg

SEQ ID NO: 792541 - DNA, 25 bp, Homo sapien
gccggtggcggcggggtggagagtg

SEQ ID NO: 792542 - DNA, 25 bp, Homo sapien
tggagagtggggggatcttcctgtc

SEQ ID NO: 792543 - DNA, 25 bp, Homo sapien
cggtggcggcggggtggagagtggg

SEQ ID NO: 792544 - DNA, 25 bp, Homo sapien
cgggatttgactggaactgctagac

SEQ ID NO: 792545 - DNA, 25 bp, Homo sapien
aactgctagacttgttcctgatgcc

SEQ ID NO: 792546 - DNA, 25 bp, Homo sapien
caaccaccgggatttgactggaact

SEQ ID NO: 792547 - DNA, 25 bp, Homo sapien
tagacttgttcctgatgccggattc

SEQ ID NO: 792548 - DNA, 25 bp, Homo sapien
cggcttttaaggcacgatcagggct

SEQ ID NO: 792549 - DNA, 25 bp, Homo sapien
ttcctccaggaattcgcggctttta

SEQ ID NO: 792550 - DNA, 25 bp, Homo sapien
tcgcggcttttaaggcacgatcagg

SEQ ID NO: 792551 - DNA, 25 bp, Homo sapien
aggaattcgcggcttttaaggcacg

SEQ ID NO: 792552 - DNA, 25 bp, Homo sapien
cctgacgcagcctgagatttgagaa

SEQ ID NO: 792553 - DNA, 25 bp, Homo sapien
ggaactctccaaggctccaggatgt

SEQ ID NO: 792554 - DNA, 25 bp, Homo sapien
ttgagaagcctcaacaggaattccc

SEQ ID NO: 792555 - DNA, 25 bp, Homo sapien
tccaggatgtgaacgcaagagacag

SEQ ID NO: 792556 - DNA, 25 bp, Homo sapien
gtaaagagcactgcacttgggccac

SEQ ID NO: 792557 - DNA, 25 bp, Homo sapien
ccgtaactagctgtaatcaattagc

SEQ ID NO: 792558 - DNA, 25 bp, Homo sapien
aaaggaagaaatccgtaactagctg

SEQ ID NO: 792559 - DNA, 25 bp, Homo sapien
ttagctgtaaagagcactgcacttg

SEQ ID NO: 792560 - DNA, 25 bp, Homo sapien
tttatcagtctcttcgaggagtttg

SEQ ID NO: 792561 - DNA, 25 bp, Homo sapien
cacgattaaggtccataggcttgaa

SEQ ID NO: 792562 - DNA, 25 bp, Homo sapien
tgacacgattaaggtccataggctt

SEQ ID NO: 792563 - DNA, 25 bp, Homo sapien
tcgaggagtttgatgacacgattaa

SEQ ID NO: 792564 - DNA, 25 bp, Homo sapien
tcttcaacataaaagtagacacttt

SEQ ID NO: 792565 - DNA, 25 bp, Homo sapien
gatcacctattttagttcttttgtg

SEQ ID NO: 792566 - DNA, 25 bp, Homo sapien
tgagatacctacagttccatgttta

SEQ ID NO: 792567 - DNA, 25 bp, Homo sapien
gaacgactgtatgatctagcaatct

SEQ ID NO: 792568 - DNA, 25 bp, Homo sapien
ccattctgataacactgtaccagtt

SEQ ID NO: 792569 - DNA, 25 bp, Homo sapien
tccattctgataacactgtaccagt

SEQ ID NO: 792570 - DNA, 25 bp, Homo sapien
acatcttgactttagtccactgagg

SEQ ID NO: 792571 - DNA, 25 bp, Homo sapien
ccaaaactgtatgataataacttta

SEQ ID NO: 792572 - DNA, 25 bp, Homo sapien
cagccctgtcaacatcttgacttta

SEQ ID NO: 792573 - DNA, 25 bp, Homo sapien
tgtcaacatcttgactttagtccac

SEQ ID NO: 792574 - DNA, 25 bp, Homo sapien
gattaggctcaattatacccttcat

SEQ ID NO: 792575 - DNA, 25 bp, Homo sapien
tgattaggctcaattatacccttca

SEQ ID NO: 792576 - DNA, 25 bp, Homo sapien
cagattctataaaacgaggctggtt

SEQ ID NO: 792577 - DNA, 25 bp, Homo sapien
tatgatatcatatgcagattctata

SEQ ID NO: 792578 - DNA, 25 bp, Homo sapien
taaatatctgtgctaaatcccttaa

SEQ ID NO: 792579 - DNA, 25 bp, Homo sapien
atatctgtgctaaatcccttaatgg

SEQ ID NO: 792580 - DNA, 25 bp, Homo sapien
aagtgcaattgaattagcagtatct

SEQ ID NO: 792581 - DNA, 25 bp, Homo sapien
cagaagtgcaattgaattagcagta

SEQ ID NO: 792582 - DNA, 25 bp, Homo sapien
gaagtgcaattgaattagcagtatc

SEQ ID NO: 792583 - DNA, 25 bp, Homo sapien
ccagaagtgcaattgaattagcagt

SEQ ID NO: 792584 - DNA, 25 bp, Homo sapien
aaatcaacaatacacttacaaattt

SEQ ID NO: 792585 - DNA, 25 bp, Homo sapien
acaatacacttacaaatttgtatcc

SEQ ID NO: 792586 - DNA, 25 bp, Homo sapien
aatcaacaatacacttacaaatttg

SEQ ID NO: 792587 - DNA, 25 bp, Homo sapien
tcaacaatacacttacaaatttgta

SEQ ID NO: 792588 - DNA, 25 bp, Homo sapien
gatgaccaaagagctcaagactaca

SEQ ID NO: 792589 - DNA, 25 bp, Homo sapien
aacaggatggagaatggccctggca

SEQ ID NO: 792590 - DNA, 25 bp, Homo sapien
taacattatatcctcacagtgcacg

SEQ ID NO: 792591 - DNA, 25 bp, Homo sapien
tggtcccaaccaattcagtgtggct

SEQ ID NO: 792592 - DNA, 25 bp, Homo sapien
tggcacacaagacatggcagtcttt

SEQ ID NO: 792593 - DNA, 25 bp, Homo sapien
gaaaactgcagcgtttgacactgag

SEQ ID NO: 792594 - DNA, 25 bp, Homo sapien
gatatgtctgcattcatgaactgcc

SEQ ID NO: 792595 - DNA, 25 bp, Homo sapien
tcaactctatttgggtggattccaa

SEQ ID NO: 792596 - DNA, 25 bp, Homo sapien
ctgatccctggtgtagtatttaaaa

SEQ ID NO: 792597 - DNA, 25 bp, Homo sapien
gtacaaatataagtggacatggctg

SEQ ID NO: 792598 - DNA, 25 bp, Homo sapien
cgcagcatagggatgggccacattt

SEQ ID NO: 792599 - DNA, 25 bp, Homo sapien
ttgttttcagtaggcctagtttgac

SEQ ID NO: 792600 - DNA, 25 bp, Homo sapien
tgtatgatgaactcgcttgctggta

SEQ ID NO: 792601 - DNA, 25 bp, Homo sapien
gactggaccattgtttttgctaatc

SEQ ID NO: 792602 - DNA, 25 bp, Homo sapien
tcaagcaaggtcattgactggacca

SEQ ID NO: 792603 - DNA, 25 bp, Homo sapien
gagatgctgcagaactttaagtacc

SEQ ID NO: 792604 - DNA, 25 bp, Homo sapien
tccaagttactaagctgttgtatga

SEQ ID NO: 792605 - DNA, 25 bp, Homo sapien
ggatctgggtcattgaggtgagtac

SEQ ID NO: 792606 - DNA, 25 bp, Homo sapien
gatctgggtcattgaggtgagtaca

SEQ ID NO: 792607 - DNA, 25 bp, Homo sapien
tactaagctgttgtatgacttcttc

SEQ ID NO: 792608 - DNA, 25 bp, Homo sapien
caagagccttccacatagaaaagtg

SEQ ID NO: 792609 - DNA, 25 bp, Homo sapien
gaacattcctatctaaccacatacg

SEQ ID NO: 792610 - DNA, 25 bp, Homo sapien
caaagatgttagttatgtcactggc

SEQ ID NO: 792611 - DNA, 25 bp, Homo sapien
tgttaagaagctacttcaagagcct

SEQ ID NO: 792612 - DNA, 25 bp, Homo sapien
catttctaagctgacggtcataatg

SEQ ID NO: 792613 - DNA, 25 bp, Homo sapien
cataatgactgaaacctctcataaa

SEQ ID NO: 792614 - DNA, 25 bp, Homo sapien
caggattttgagctataattgtagt

SEQ ID NO: 792615 - DNA, 25 bp, Homo sapien
tagtgatcactaatatgtcatttct

SEQ ID NO: 792616 - DNA, 25 bp, Homo sapien
gaatattgttgccaaggatctctat

SEQ ID NO: 792617 - DNA, 25 bp, Homo sapien
agtagtagctccgagagaaattctc

SEQ ID NO: 792618 - DNA, 25 bp, Homo sapien
aaggctcagcttctggtacagatga

SEQ ID NO: 792619 - DNA, 25 bp, Homo sapien
gttgccaaggatctctattaaataa

SEQ ID NO: 792620 - DNA, 25 bp, Homo sapien
taaaggtggcaaacagtatcaaatc

SEQ ID NO: 792621 - DNA, 25 bp, Homo sapien
tggcaaacagtatcaaatccttggt

SEQ ID NO: 792622 - DNA, 25 bp, Homo sapien
ggtggcaaacagtatcaaatccttg

SEQ ID NO: 792623 - DNA, 25 bp, Homo sapien
cattaaaggtggcaaacagtatcaa

SEQ ID NO: 792624 - DNA, 25 bp, Homo sapien
cacaattacgttgaatagtaatttc

SEQ ID NO: 792625 - DNA, 25 bp, Homo sapien
taagatcacaattacgttgaatagt

SEQ ID NO: 792626 - DNA, 25 bp, Homo sapien
tacagtaggtaaatctttacataag

SEQ ID NO: 792627 - DNA, 25 bp, Homo sapien
ctgtacagtaggtaaatctttacat

SEQ ID NO: 792628 - DNA, 25 bp, Homo sapien
tctcaggcttcttaacataggtaaa

SEQ ID NO: 792629 - DNA, 25 bp, Homo sapien
cttctcaggcttcttaacataggta

SEQ ID NO: 792630 - DNA, 25 bp, Homo sapien
tgctgcagaccagtcaattattttt

SEQ ID NO: 792631 - DNA, 25 bp, Homo sapien
tgcagaccagtcaattattttttgc

SEQ ID NO: 792632 - DNA, 25 bp, Homo sapien
tgcaaggactcgagcatttccctgg

SEQ ID NO: 792633 - DNA, 25 bp, Homo sapien
actcgagcatttccctggcatgaca

SEQ ID NO: 792634 - DNA, 25 bp, Homo sapien
caaggactcgagcatttccctggca

SEQ ID NO: 792635 - DNA, 25 bp, Homo sapien
gaaatgcaaggactcgagcatttcc

SEQ ID NO: 792636 - DNA, 25 bp, Homo sapien
gccacctgtaccatgaaaactgtta

SEQ ID NO: 792637 - DNA, 25 bp, Homo sapien
tcatcttcaaggtagaccacggctc

SEQ ID NO: 792638 - DNA, 25 bp, Homo sapien
gtcttaaactgtaacgcatctgggc

SEQ ID NO: 792639 - DNA, 25 bp, Homo sapien
aaacttgttgcctcggccacctgta

SEQ ID NO: 792640 - DNA, 25 bp, Homo sapien
agatcagcttctttccggttaaagg

SEQ ID NO: 792641 - DNA, 25 bp, Homo sapien
aacttaacataaagatcagcttctt

SEQ ID NO: 792642 - DNA, 25 bp, Homo sapien
taacataaagatcagcttctttccg

SEQ ID NO: 792643 - DNA, 25 bp, Homo sapien
ccctgcctctaagaacttaacataa

SEQ ID NO: 792644 - DNA, 25 bp, Homo sapien
caaaggccagataggataagtaata

SEQ ID NO: 792645 - DNA, 25 bp, Homo sapien
tctcacaaaggccagataggataag

SEQ ID NO: 792646 - DNA, 25 bp, Homo sapien
cacaaaggccagataggataagtaa

SEQ ID NO: 792647 - DNA, 25 bp, Homo sapien
ggataagtaatatatcagactggat

SEQ ID NO: 792648 - DNA, 25 bp, Homo sapien
acaaaactttcacaggcatacatac

SEQ ID NO: 792649 - DNA, 25 bp, Homo sapien
tgtatactgttgtatattctgtacc

SEQ ID NO: 792650 - DNA, 25 bp, Homo sapien
tatgagttaaatgggtgtatactgt

SEQ ID NO: 792651 - DNA, 25 bp, Homo sapien
tatagtgttaggtgactgggagacc

SEQ ID NO: 792652 - DNA, 25 bp, Homo sapien
tattgtgcgattccattgatataaa

SEQ ID NO: 792653 - DNA, 25 bp, Homo sapien
aaaagagtaaatattgtgcgattcc

SEQ ID NO: 792654 - DNA, 25 bp, Homo sapien
tgcgattccattgatataaacttaa

SEQ ID NO: 792655 - DNA, 25 bp, Homo sapien
gagtaaatattgtgcgattccattg

SEQ ID NO: 792656 - DNA, 25 bp, Homo sapien
caggcacagggtggtagaatatgat

SEQ ID NO: 792657 - DNA, 25 bp, Homo sapien
aagcttggagctaaacaggcgttca

SEQ ID NO: 792658 - DNA, 25 bp, Homo sapien
ctggttcccagtaagcaagattatg

SEQ ID NO: 792659 - DNA, 25 bp, Homo sapien
caggcgttcacttaaaatctatcta

SEQ ID NO: 792660 - DNA, 25 bp, Homo sapien
gctgtccaatgtactaaaaagaagt

SEQ ID NO: 792661 - DNA, 25 bp, Homo sapien
tcatcacatgaagaacgatatctac

SEQ ID NO: 792662 - DNA, 25 bp, Homo sapien
aaaagaagtacattatagcctaagc

SEQ ID NO: 792663 - DNA, 25 bp, Homo sapien
tagcctaagccactctgtaacttcc

SEQ ID NO: 792664 - DNA, 25 bp, Homo sapien
acttctgtctgggtcctaggctcca

SEQ ID NO: 792665 - DNA, 25 bp, Homo sapien
tgccaagagttaacagcgtaacaag

SEQ ID NO: 792666 - DNA, 25 bp, Homo sapien
cctgctttatggctaggtaaggcct

SEQ ID NO: 792667 - DNA, 25 bp, Homo sapien
tgggacacatggaataagatgctgg

SEQ ID NO: 792668 - DNA, 25 bp, Homo sapien
tggcaagccccgaagggacgatact

SEQ ID NO: 792669 - DNA, 25 bp, Homo sapien
tctggcaaccatggaagggacaata

SEQ ID NO: 792670 - DNA, 25 bp, Homo sapien
gaccgaccctggatttgaaggcaaa

SEQ ID NO: 792671 - DNA, 25 bp, Homo sapien
caaaccaaaggaaagagacgacagc

SEQ ID NO: 792672 - DNA, 25 bp, Homo sapien
cacatgacagtaggctctgaaagaa

SEQ ID NO: 792673 - DNA, 25 bp, Homo sapien
tgaccagtgagtattaacgttaaaa

SEQ ID NO: 792674 - DNA, 25 bp, Homo sapien
caaccaactgaacgaacccttctct

SEQ ID NO: 792675 - DNA, 25 bp, Homo sapien
ggcacaactgaccagtgagtattaa

SEQ ID NO: 792676 - DNA, 25 bp, Homo sapien
tctgagggataacatcccaaaatac

SEQ ID NO: 792677 - DNA, 25 bp, Homo sapien
tggaaacggcctttaatagacatat

SEQ ID NO: 792678 - DNA, 25 bp, Homo sapien
ttggaaacggcctttaatagacata

SEQ ID NO: 792679 - DNA, 25 bp, Homo sapien
attcatagacttgtgctctgtggca

SEQ ID NO: 792680 - DNA, 25 bp, Homo sapien
ttcatagacttgtgctctgtggcat

SEQ ID NO: 792681 - DNA, 25 bp, Homo sapien
tccaagtattagattacagaatttt

SEQ ID NO: 792682 - DNA, 25 bp, Homo sapien
ttccaagtattagattacagaattt

SEQ ID NO: 792683 - DNA, 25 bp, Homo sapien
tattccaagtattagattacagaat

SEQ ID NO: 792684 - DNA, 25 bp, Homo sapien
caagtattagattacagaatttttt

SEQ ID NO: 792685 - DNA, 25 bp, Homo sapien
gagctgcagttttgggattatcaca

SEQ ID NO: 792686 - DNA, 25 bp, Homo sapien
taattaaaagactagcagctgtctg

SEQ ID NO: 792687 - DNA, 25 bp, Homo sapien
tgacatgagctgcagttttgggatt

SEQ ID NO: 792688 - DNA, 25 bp, Homo sapien
aatttaattaaaagactagcagctg

SEQ ID NO: 792689 - DNA, 25 bp, Homo sapien
gacaacctaggcagtagcaatctgg

SEQ ID NO: 792690 - DNA, 25 bp, Homo sapien
gagcaacactacaggcatcacgtta

SEQ ID NO: 792691 - DNA, 25 bp, Homo sapien
tggcacaagacaggcatgcgctctt

SEQ ID NO: 792692 - DNA, 25 bp, Homo sapien
cagaaagagccccaatagccaagga

SEQ ID NO: 792693 - DNA, 25 bp, Homo sapien
aggcagtgggatgattttttgctct

SEQ ID NO: 792694 - DNA, 25 bp, Homo sapien
tcttgaaagctagtaaatagaggtt

SEQ ID NO: 792695 - DNA, 25 bp, Homo sapien
attctcagaaacatccataaccgca

SEQ ID NO: 792696 - DNA, 25 bp, Homo sapien
accgcaatagatgggcagttagcag

SEQ ID NO: 792697 - DNA, 25 bp, Homo sapien
ttctgtgagtagcttgtgagtaggc

SEQ ID NO: 792698 - DNA, 25 bp, Homo sapien
tctataacacatttctgccaggtca

SEQ ID NO: 792699 - DNA, 25 bp, Homo sapien
aatcctatctgcacattggaattgc

SEQ ID NO: 792700 - DNA, 25 bp, Homo sapien
ccaggtcatccaatatataggaatc

SEQ ID NO: 792701 - DNA, 25 bp, Homo sapien
gaattactttagcagagcaagtgat

SEQ ID NO: 792702 - DNA, 25 bp, Homo sapien
tttagcagagcaagtgattctaaga

SEQ ID NO: 792703 - DNA, 25 bp, Homo sapien
gcagagcaagtgattctaagaatct

SEQ ID NO: 792704 - DNA, 25 bp, Homo sapien
agaattactttagcagagcaagtga

SEQ ID NO: 792705 - DNA, 25 bp, Homo sapien
gatacaaagggtgacaaaatcttca

SEQ ID NO: 792706 - DNA, 25 bp, Homo sapien
caagatatctatgtatgatacaaag

SEQ ID NO: 792707 - DNA, 25 bp, Homo sapien
tctatgtatgatacaaagggtgaca

SEQ ID NO: 792708 - DNA, 25 bp, Homo sapien
ttaaaatcaagatatctatgtatga

SEQ ID NO: 792709 - DNA, 25 bp, Homo sapien
ggctggaggatcaaatgagcctggg

SEQ ID NO: 792710 - DNA, 25 bp, Homo sapien
tgtgatcatgcaactgcactttagg

SEQ ID NO: 792711 - DNA, 25 bp, Homo sapien
atgaggctggaggatcaaatgagcc

SEQ ID NO: 792712 - DNA, 25 bp, Homo sapien
aagatgaggctggaggatcaaatga

SEQ ID NO: 792713 - DNA, 25 bp, Homo sapien
tttgcatgtcttggcatgcttggct

SEQ ID NO: 792714 - DNA, 25 bp, Homo sapien
tgcttggctttcaattatatcactt

SEQ ID NO: 792715 - DNA, 25 bp, Homo sapien
gcagagaagcaaccatctttccaat

SEQ ID NO: 792716 - DNA, 25 bp, Homo sapien
tttttatctgtagtgactggtctta

SEQ ID NO: 792717 - DNA, 25 bp, Homo sapien
tccagtggcatgtctcaagtatctc

SEQ ID NO: 792718 - DNA, 25 bp, Homo sapien
tatcttatggataacttcatctggg

SEQ ID NO: 792719 - DNA, 25 bp, Homo sapien
tcttgtgccttaatggtatctgtgg

SEQ ID NO: 792720 - DNA, 25 bp, Homo sapien
caaggctgaaacacccacaagtaag

SEQ ID NO: 792721 - DNA, 25 bp, Homo sapien
gcgtttgatgttctagccaagaaat

SEQ ID NO: 792722 - DNA, 25 bp, Homo sapien
gaaatcttcccatgatttattagcc

SEQ ID NO: 792723 - DNA, 25 bp, Homo sapien
tttattagccagctctctttgcttg

SEQ ID NO: 792724 - DNA, 25 bp, Homo sapien
taacgttttagcgtttgatgttcta

SEQ ID NO: 792725 - DNA, 25 bp, Homo sapien
tcagtaatgatggtacttacaatga

SEQ ID NO: 792726 - DNA, 25 bp, Homo sapien
aatcagtaatgatggtacttacaat

SEQ ID NO: 792727 - DNA, 25 bp, Homo sapien
taaatcagtaatgatggtacttaca

SEQ ID NO: 792728 - DNA, 25 bp, Homo sapien
agtaatgatggtacttacaatgaaa

SEQ ID NO: 792729 - DNA, 25 bp, Homo sapien
tattgcattttgtggtcgtttatgg

SEQ ID NO: 792730 - DNA, 25 bp, Homo sapien
aatatgtgtttggtgaaatattgca

SEQ ID NO: 792731 - DNA, 25 bp, Homo sapien
tgtgttaaggcctttaatatgtgtt

SEQ ID NO: 792732 - DNA, 25 bp, Homo sapien
gaggcttctatagctttttcttgaa

SEQ ID NO: 792733 - DNA, 25 bp, Homo sapien
ccatttaatgggtaaaattcaatgg

SEQ ID NO: 792734 - DNA, 25 bp, Homo sapien
taattcaataccacacaatccatcc

SEQ ID NO: 792735 - DNA, 25 bp, Homo sapien
catttaatgggtaaaattcaatggt

SEQ ID NO: 792736 - DNA, 25 bp, Homo sapien
tcaataccacacaatccatccattt

SEQ ID NO: 792737 - DNA, 25 bp, Homo sapien
cacaaatgtaatgaataactaggag

SEQ ID NO: 792738 - DNA, 25 bp, Homo sapien
aactcattcatccttcagcttactt

SEQ ID NO: 792739 - DNA, 25 bp, Homo sapien
ggtataatagaaagataagggcatc

SEQ ID NO: 792740 - DNA, 25 bp, Homo sapien
actaggaggcagttatggtataata

SEQ ID NO: 792741 - DNA, 25 bp, Homo sapien
taagagcaatatccgtatcaaccag

SEQ ID NO: 792742 - DNA, 25 bp, Homo sapien
tctgcaaggctcctcctcgaatggg

SEQ ID NO: 792743 - DNA, 25 bp, Homo sapien
actgttactactccaccagagggca

SEQ ID NO: 792744 - DNA, 25 bp, Homo sapien
agaggtcctcctactaatcgggcag

SEQ ID NO: 792745 - DNA, 25 bp, Homo sapien
cgtaggaatactcttttttggtgca

SEQ ID NO: 792746 - DNA, 25 bp, Homo sapien
ttggtgcatccacaattttaactgc

SEQ ID NO: 792747 - DNA, 25 bp, Homo sapien
ggtgcatccacaattttaactgctt

SEQ ID NO: 792748 - DNA, 25 bp, Homo sapien
cttttttggtgcatccacaatttta

SEQ ID NO: 792749 - DNA, 25 bp, Homo sapien
taagagaatgtaagccaggagctgc

SEQ ID NO: 792750 - DNA, 25 bp, Homo sapien
tgaatggctcaggactaccgtaggc

SEQ ID NO: 792751 - DNA, 25 bp, Homo sapien
taccgtaggcatgtgggcaatcagg

SEQ ID NO: 792752 - DNA, 25 bp, Homo sapien
tagttcacatgcaaccaacagagtc

SEQ ID NO: 792753 - DNA, 25 bp, Homo sapien
gcaaacttgggtgaatctgtctacc

SEQ ID NO: 792754 - DNA, 25 bp, Homo sapien
caggatcgggtaggcatcatgtccc

SEQ ID NO: 792755 - DNA, 25 bp, Homo sapien
gaaagactgccagtagctgaggcca

SEQ ID NO: 792756 - DNA, 25 bp, Homo sapien
cattgttagccatggacacttcaca

SEQ ID NO: 792757 - DNA, 25 bp, Homo sapien
taaaagtttcagtttgaaagcttca

SEQ ID NO: 792758 - DNA, 25 bp, Homo sapien
ttcagtttgaaagcttcaaattttg

SEQ ID NO: 792759 - DNA, 25 bp, Homo sapien
cagtttgaaagcttcaaattttgtc

SEQ ID NO: 792760 - DNA, 25 bp, Homo sapien
aagtttcagtttgaaagcttcaaat

SEQ ID NO: 792761 - DNA, 25 bp, Homo sapien
caggatcccacgttacaccgagttg

SEQ ID NO: 792762 - DNA, 25 bp, Homo sapien
aatagctggaactacggttgtggtc

SEQ ID NO: 792763 - DNA, 25 bp, Homo sapien
gtcaggattgcactccattgcccaa

SEQ ID NO: 792764 - DNA, 25 bp, Homo sapien
gttgtcatgtcttctgaggttcctg

SEQ ID NO: 792765 - DNA, 25 bp, Homo sapien
tcttggataggcagtcaggagtctg

SEQ ID NO: 792766 - DNA, 25 bp, Homo sapien
cagtaactttgagacttaaacggtg

SEQ ID NO: 792767 - DNA, 25 bp, Homo sapien
tttgtgagatctagtaccatttggg

SEQ ID NO: 792768 - DNA, 25 bp, Homo sapien
gagtctgaagacttgcggaaccgta

SEQ ID NO: 792769 - DNA, 25 bp, Homo sapien
atcacctttgttttcgtgccacttc

SEQ ID NO: 792770 - DNA, 25 bp, Homo sapien
catgtatgtctacgttcatcttctc

SEQ ID NO: 792771 - DNA, 25 bp, Homo sapien
tcacctttgttttcgtgccacttca

SEQ ID NO: 792772 - DNA, 25 bp, Homo sapien
acttcatgtatgtctacgttcatct

SEQ ID NO: 792773 - DNA, 25 bp, Homo sapien
gacggttccgctgagcgagcttggg

SEQ ID NO: 792774 - DNA, 25 bp, Homo sapien
ggaaccccgcgtggccgcagcagaa

SEQ ID NO: 792775 - DNA, 25 bp, Homo sapien
cccagttcgcctgcctcgggaagtg

SEQ ID NO: 792776 - DNA, 25 bp, Homo sapien
atcgcggtcccagcggcgggtctgt

SEQ ID NO: 792777 - DNA, 25 bp, Homo sapien
ggaagccaacattaacccaaagatg

SEQ ID NO: 792778 - DNA, 25 bp, Homo sapien
ggatgttggattaggtcactctgca

SEQ ID NO: 792779 - DNA, 25 bp, Homo sapien
tggtttgttcacgtttcagctggga

SEQ ID NO: 792780 - DNA, 25 bp, Homo sapien
cacattggaaaacagctttggtggg

SEQ ID NO: 792781 - DNA, 25 bp, Homo sapien
ccgtcatttaggaattgcctgagaa

SEQ ID NO: 792782 - DNA, 25 bp, Homo sapien
tccctggttcaagagttttgttctc

SEQ ID NO: 792783 - DNA, 25 bp, Homo sapien
caagaagttcagactattattatga

SEQ ID NO: 792784 - DNA, 25 bp, Homo sapien
gcctgagaaattttaccatacatat

SEQ ID NO: 792785 - DNA, 25 bp, Homo sapien
gaagactgtacccttaacttgtgaa

SEQ ID NO: 792786 - DNA, 25 bp, Homo sapien
cctggcacattgtcagcaagttgca

SEQ ID NO: 792787 - DNA, 25 bp, Homo sapien
gtaatgtcagaattgcattgcacac

SEQ ID NO: 792788 - DNA, 25 bp, Homo sapien
gtgaaatttgacctcactctaggta

SEQ ID NO: 792789 - DNA, 25 bp, Homo sapien
gaccttcgtgatcagtgttactgct

SEQ ID NO: 792790 - DNA, 25 bp, Homo sapien
ttagaactcctaaggcagcaggtct

SEQ ID NO: 792791 - DNA, 25 bp, Homo sapien
agctacagaccttcgtgatcagtgt

SEQ ID NO: 792792 - DNA, 25 bp, Homo sapien
aagctgcaaacctccacggtgagca

SEQ ID NO: 792793 - DNA, 25 bp, Homo sapien
ccctcattcatcacgattggtttct

SEQ ID NO: 792794 - DNA, 25 bp, Homo sapien
agacaatgagagttcaagccctcat

SEQ ID NO: 792795 - DNA, 25 bp, Homo sapien
tttcttaccccacctgagttcctgc

SEQ ID NO: 792796 - DNA, 25 bp, Homo sapien
ttccacacgtaattatgtttctttc

SEQ ID NO: 792797 - DNA, 25 bp, Homo sapien
aaggggccgggcgcgcgcgcagtgg

SEQ ID NO: 792798 - DNA, 25 bp, Homo sapien
cggtaaggggccgggcgcgcgcgca

SEQ ID NO: 792799 - DNA, 25 bp, Homo sapien
gccgggcgcgcgcgcagtggctcac

SEQ ID NO: 792800 - DNA, 25 bp, Homo sapien
ggggccgggcgcgcgcgcagtggct

SEQ ID NO: 792801 - DNA, 25 bp, Homo sapien
cacctccaagtcgtgggaaacactc

SEQ ID NO: 792802 - DNA, 25 bp, Homo sapien
gcaatccacctccaagtcgtgggaa

SEQ ID NO: 792803 - DNA, 25 bp, Homo sapien
ggcaaatttaggagcgcgggccaat

SEQ ID NO: 792804 - DNA, 25 bp, Homo sapien
caccaaagtggttggtgggccaatt

SEQ ID NO: 792805 - DNA, 25 bp, Homo sapien
caattggagttatggggtatgccct

SEQ ID NO: 792806 - DNA, 25 bp, Homo sapien
ttgactgggaaatgtctactagtga

SEQ ID NO: 792807 - DNA, 25 bp, Homo sapien
aatgtctactagtgaggcaattgga

SEQ ID NO: 792808 - DNA, 25 bp, Homo sapien
tgggccgtttcctcaggccatatct

SEQ ID NO: 792809 - DNA, 25 bp, Homo sapien
cacacttgtagtctaagctgcctgt

SEQ ID NO: 792810 - DNA, 25 bp, Homo sapien
ccaaggcaggttggtctcttgagtc

SEQ ID NO: 792811 - DNA, 25 bp, Homo sapien
tcataaagcaataaccactgacagt

SEQ ID NO: 792812 - DNA, 25 bp, Homo sapien
tcttagataatatgaataagaaaca

SEQ ID NO: 792813 - DNA, 25 bp, Homo sapien
tatagcatacgaatcacctgaagtg

SEQ ID NO: 792814 - DNA, 25 bp, Homo sapien
tattctcaaagagagggcctcaggc

SEQ ID NO: 792815 - DNA, 25 bp, Homo sapien
ggcctcaggccatgtaattattgtc

SEQ ID NO: 792816 - DNA, 25 bp, Homo sapien
tcaagagtccctaacaaggtccgtc

SEQ ID NO: 792817 - DNA, 25 bp, Homo sapien
tttcaggaccagaagagagtagctc

SEQ ID NO: 792818 - DNA, 25 bp, Homo sapien
taagaggactctcctgtgcagtaag

SEQ ID NO: 792819 - DNA, 25 bp, Homo sapien
gcgttgccagccgtataactcttaa

SEQ ID NO: 792820 - DNA, 25 bp, Homo sapien
tgtatgcagctgaagtaaacggccc

SEQ ID NO: 792821 - DNA, 25 bp, Homo sapien
ctgtgctttgcaccccacgggtggg

SEQ ID NO: 792822 - DNA, 25 bp, Homo sapien
ctttgcaccccacgggtggggagag

SEQ ID NO: 792823 - DNA, 25 bp, Homo sapien
gctgtgctttgcaccccacgggtgg

SEQ ID NO: 792824 - DNA, 25 bp, Homo sapien
tgcaccccacgggtggggagagaag

SEQ ID NO: 792825 - DNA, 25 bp, Homo sapien
tgccgccgacgcgatttctcctccg

SEQ ID NO: 792826 - DNA, 25 bp, Homo sapien
ctggcgcatgcgttgtgtgatgctc

SEQ ID NO: 792827 - DNA, 25 bp, Homo sapien
gtgtgatgctctcgggcgccaccag

SEQ ID NO: 792828 - DNA, 25 bp, Homo sapien
cacacctgcggactggcgcatgcgt

SEQ ID NO: 792829 - DNA, 25 bp, Homo sapien
gaagcggcacaagccgcagtacagc

SEQ ID NO: 792830 - DNA, 25 bp, Homo sapien
aaccttcttgcggaagcggcacaag

SEQ ID NO: 792831 - DNA, 25 bp, Homo sapien
gccaggaaaccttcttgcggaagcg

SEQ ID NO: 792832 - DNA, 25 bp, Homo sapien
caagccgcagtacagcgcggccttt

SEQ ID NO: 792833 - DNA, 25 bp, Homo sapien
acaacacgcaactgcaatgcaccat

SEQ ID NO: 792834 - DNA, 25 bp, Homo sapien
tgaacaacacgcaactgcaatgcac

SEQ ID NO: 792835 - DNA, 25 bp, Homo sapien
ctttctgaacaacacgcaactgcaa

SEQ ID NO: 792836 - DNA, 25 bp, Homo sapien
ttctgaacaacacgcaactgcaatg

SEQ ID NO: 792837 - DNA, 25 bp, Homo sapien
gccactacaggaggggcggagaagt

SEQ ID NO: 792838 - DNA, 25 bp, Homo sapien
gcgccactacaggaggggcggagaa

SEQ ID NO: 792839 - DNA, 25 bp, Homo sapien
acaaagcgccactacaggaggggcg

SEQ ID NO: 792840 - DNA, 25 bp, Homo sapien
tgacaaagcgccactacaggagggg

SEQ ID NO: 792841 - DNA, 25 bp, Homo sapien
cctggtgaagagtcttagcttatcg

SEQ ID NO: 792842 - DNA, 25 bp, Homo sapien
tcccctggtgaagagtcttagctta

SEQ ID NO: 792843 - DNA, 25 bp, Homo sapien
ggtgaagagtcttagcttatcgatg

SEQ ID NO: 792844 - DNA, 25 bp, Homo sapien
gaagagtcttagcttatcgatgaaa

SEQ ID NO: 792845 - DNA, 25 bp, Homo sapien
taaagtcattctgttctgggctaca

SEQ ID NO: 792846 - DNA, 25 bp, Homo sapien
cacaaaccgtttccgaggatacctg

SEQ ID NO: 792847 - DNA, 25 bp, Homo sapien
tgttctgggctacaacccagacatc

SEQ ID NO: 792848 - DNA, 25 bp, Homo sapien
tctccacctaaacgaggataaccca

SEQ ID NO: 792849 - DNA, 25 bp, Homo sapien
acccacaggcacagggatttcacag

SEQ ID NO: 792850 - DNA, 25 bp, Homo sapien
ctttggagcctttcagtgcactaat

SEQ ID NO: 792851 - DNA, 25 bp, Homo sapien
catcagttactgaaatacccacagg

SEQ ID NO: 792852 - DNA, 25 bp, Homo sapien
caggcacagggatttcacagtcttt

SEQ ID NO: 792853 - DNA, 25 bp, Homo sapien
caagacctccttgagctaccaaaat

SEQ ID NO: 792854 - DNA, 25 bp, Homo sapien
caaggtgaattattcgtttctggcc

SEQ ID NO: 792855 - DNA, 25 bp, Homo sapien
cgtttctggcctttcaatggtaaga

SEQ ID NO: 792856 - DNA, 25 bp, Homo sapien
ggcctacatcagctataagttttag

SEQ ID NO: 792857 - DNA, 25 bp, Homo sapien
ttgtaaacaccattgacgctatgaa

SEQ ID NO: 792858 - DNA, 25 bp, Homo sapien
tggaaaggaacaactagcaccagac

SEQ ID NO: 792859 - DNA, 25 bp, Homo sapien
tgtaaacaccattgacgctatgaag

SEQ ID NO: 792860 - DNA, 25 bp, Homo sapien
acaactagcaccagacactgcaaaa

SEQ ID NO: 792861 - DNA, 25 bp, Homo sapien
tgcgtaatctgcaattgcaggtttt

SEQ ID NO: 792862 - DNA, 25 bp, Homo sapien
cgtaatctgcaattgcaggttttgc

SEQ ID NO: 792863 - DNA, 25 bp, Homo sapien
gcgtaatctgcaattgcaggttttg

SEQ ID NO: 792864 - DNA, 25 bp, Homo sapien
atgcgtaatctgcaattgcaggttt

SEQ ID NO: 792865 - DNA, 25 bp, Homo sapien
ccaagttcaggctttaatgttgtaa

SEQ ID NO: 792866 - DNA, 25 bp, Homo sapien
gtttgaaatcactgtacattatctt

SEQ ID NO: 792867 - DNA, 25 bp, Homo sapien
tacattatctttccaagttcaggct

SEQ ID NO: 792868 - DNA, 25 bp, Homo sapien
atcactgtacattatctttccaagt

SEQ ID NO: 792869 - DNA, 25 bp, Homo sapien
tatgaggttattaattcagcagaca

SEQ ID NO: 792870 - DNA, 25 bp, Homo sapien
tggcattacatgaggagcagagttc

SEQ ID NO: 792871 - DNA, 25 bp, Homo sapien
gacatttaccaggtacagctctgta

SEQ ID NO: 792872 - DNA, 25 bp, Homo sapien
tatcatctagaagttcattcacctg

SEQ ID NO: 792873 - DNA, 25 bp, Homo sapien
taaacccggaagatcagctactgat

SEQ ID NO: 792874 - DNA, 25 bp, Homo sapien
ccttctattaaacccggaagatcag

SEQ ID NO: 792875 - DNA, 25 bp, Homo sapien
tttctatatgcttgaggaatttgtg

SEQ ID NO: 792876 - DNA, 25 bp, Homo sapien
catatgtgctccttctattaaaccc

SEQ ID NO: 792877 - DNA, 25 bp, Homo sapien
tatggtttcaaaagctgtcctgtat

SEQ ID NO: 792878 - DNA, 25 bp, Homo sapien
taagcagtattatggtttcaaaagc

SEQ ID NO: 792879 - DNA, 25 bp, Homo sapien
caaaagctgtcctgtattgagtgtg

SEQ ID NO: 792880 - DNA, 25 bp, Homo sapien
tgtcctgtattgagtgtgagaagaa

SEQ ID NO: 792881 - DNA, 25 bp, Homo sapien
tggagctggctcatcaattcatgga

SEQ ID NO: 792882 - DNA, 25 bp, Homo sapien
ttcatggaacttatcttgggcatct

SEQ ID NO: 792883 - DNA, 25 bp, Homo sapien
cattttattaactgccaagagtgca

SEQ ID NO: 792884 - DNA, 25 bp, Homo sapien
taactgccaagagtgcaggttttgt

SEQ ID NO: 792885 - DNA, 25 bp, Homo sapien
taagagcagaaactgtcagttttcc

SEQ ID NO: 792886 - DNA, 25 bp, Homo sapien
tcaaacttgacttttaagagcagaa

SEQ ID NO: 792887 - DNA, 25 bp, Homo sapien
tcagttttccactgattataacagc

SEQ ID NO: 792888 - DNA, 25 bp, Homo sapien
tttccactgattataacagcattct

SEQ ID NO: 792889 - DNA, 25 bp, Homo sapien
ttcgattccttctccagtaactgca

SEQ ID NO: 792890 - DNA, 25 bp, Homo sapien
taactgcagatatggggatgatatg

SEQ ID NO: 792891 - DNA, 25 bp, Homo sapien
tgatatgttggaactctacagtcct

SEQ ID NO: 792892 - DNA, 25 bp, Homo sapien
tggaactctacagtcctctctggaa

SEQ ID NO: 792893 - DNA, 25 bp, Homo sapien
tagtaacagcatgctttgatggtgg

SEQ ID NO: 792894 - DNA, 25 bp, Homo sapien
gaagacattgtatcagaaatccaca

SEQ ID NO: 792895 - DNA, 25 bp, Homo sapien
ctttgatggtggctcagtagaagac

SEQ ID NO: 792896 - DNA, 25 bp, Homo sapien
acagcatgctttgatggtggctcag

SEQ ID NO: 792897 - DNA, 25 bp, Homo sapien
ttccatcaataccatttttaatata

SEQ ID NO: 792898 - DNA, 25 bp, Homo sapien
tccatcaataccatttttaatatat

SEQ ID NO: 792899 - DNA, 25 bp, Homo sapien
tccacagtgagattatgcagcattt

SEQ ID NO: 792900 - DNA, 25 bp, Homo sapien
gcgacctcgggttcattgtatcctc

SEQ ID NO: 792901 - DNA, 25 bp, Homo sapien
tgggctggccataaacttgtaaaat

SEQ ID NO: 792902 - DNA, 25 bp, Homo sapien
gaatgttattacaggtgggctggcc

SEQ ID NO: 792903 - DNA, 25 bp, Homo sapien
taaggtctccacaaaagataactat

SEQ ID NO: 792904 - DNA, 25 bp, Homo sapien
catgtaccgctatgtctggcctgca

SEQ ID NO: 792905 - DNA, 25 bp, Homo sapien
tagatcagtctcctccaattcagga

SEQ ID NO: 792906 - DNA, 25 bp, Homo sapien
gtatttgtgaaacactcaggtagaa

SEQ ID NO: 792907 - DNA, 25 bp, Homo sapien
caagatatacaaggacagtaggtcc

SEQ ID NO: 792908 - DNA, 25 bp, Homo sapien
ggcacacgacttggataacagctat

SEQ ID NO: 792909 - DNA, 25 bp, Homo sapien
ttgtagcacacaaaaccgaaggcat

SEQ ID NO: 792910 - DNA, 25 bp, Homo sapien
tcggttagtcatggagtggcaccct

SEQ ID NO: 792911 - DNA, 25 bp, Homo sapien
cttcatcagatacatttttcggcct

SEQ ID NO: 792912 - DNA, 25 bp, Homo sapien
ctttatatatttgggacctccggtg

SEQ ID NO: 792913 - DNA, 25 bp, Homo sapien
catttttcggcctaatttgcagttt

SEQ ID NO: 792914 - DNA, 25 bp, Homo sapien
ttcactccagtgttgcttcgatgat

SEQ ID NO: 792915 - DNA, 25 bp, Homo sapien
tggggatacttatgggccttgtctc

SEQ ID NO: 792916 - DNA, 25 bp, Homo sapien
cacgagtgcatgtgtgtaagtccag

SEQ ID NO: 792917 - DNA, 25 bp, Homo sapien
gtcattatcgcaaaaatgaattttg

SEQ ID NO: 792918 - DNA, 25 bp, Homo sapien
ggtatgatgccaataccagctgtgc

SEQ ID NO: 792919 - DNA, 25 bp, Homo sapien
tcattcccataacttgaaaggatat

SEQ ID NO: 792920 - DNA, 25 bp, Homo sapien
gaaaggatatggatcattccataga

SEQ ID NO: 792921 - DNA, 25 bp, Homo sapien
tttcctgtacataccaggtctccag

SEQ ID NO: 792922 - DNA, 25 bp, Homo sapien
taatgaagtaggtcttcattcccat

SEQ ID NO: 792923 - DNA, 25 bp, Homo sapien
ttttttatgtcccacatgagtgaaa

SEQ ID NO: 792924 - DNA, 25 bp, Homo sapien
gatagatgttcatagtgtttagaag

SEQ ID NO: 792925 - DNA, 25 bp, Homo sapien
ttgagatatacaacacattactgta

SEQ ID NO: 792926 - DNA, 25 bp, Homo sapien
tgtacccatcaatcaacttcttttc

SEQ ID NO: 792927 - DNA, 25 bp, Homo sapien
caatgccctggatggctgggactac

SEQ ID NO: 792928 - DNA, 25 bp, Homo sapien
agaatccactgggccgccagccgca

SEQ ID NO: 792929 - DNA, 25 bp, Homo sapien
ctgaacggcaatgccctggatggct

SEQ ID NO: 792930 - DNA, 25 bp, Homo sapien
ttcccagaatccactgggccgccag

SEQ ID NO: 792931 - DNA, 25 bp, Homo sapien
caggaagtgcgttcccagcgaggta

SEQ ID NO: 792932 - DNA, 25 bp, Homo sapien
attttactcgcccacactgaggagc

SEQ ID NO: 792933 - DNA, 25 bp, Homo sapien
gagcgcagtcaggttttcccgtggc

SEQ ID NO: 792934 - DNA, 25 bp, Homo sapien
gcttctcacacgcagggcattttac

SEQ ID NO: 792935 - DNA, 25 bp, Homo sapien
ctcccagtccttggcggctccggca

SEQ ID NO: 792936 - DNA, 25 bp, Homo sapien
acaaacccgcgccagcaaagctccc

SEQ ID NO: 792937 - DNA, 25 bp, Homo sapien
ggcaacacacctcgacatttccata

SEQ ID NO: 792938 - DNA, 25 bp, Homo sapien
aacccgcgccagcaaagctcccagt

SEQ ID NO: 792939 - DNA, 25 bp, Homo sapien
aatacagagtagcaataatctgagc

SEQ ID NO: 792940 - DNA, 25 bp, Homo sapien
gctttattcagcttagaagagacac

SEQ ID NO: 792941 - DNA, 25 bp, Homo sapien
ctgaatacagagtagcaataatctg

SEQ ID NO: 792942 - DNA, 25 bp, Homo sapien
tattcagcttagaagagacacatga

SEQ ID NO: 792943 - DNA, 25 bp, Homo sapien
ttgtactcacaagagaggtctgtcc

SEQ ID NO: 792944 - DNA, 25 bp, Homo sapien
tttctcatacagtcaggatctcgct

SEQ ID NO: 792945 - DNA, 25 bp, Homo sapien
ggtctgtcctatacctctattttgt

SEQ ID NO: 792946 - DNA, 25 bp, Homo sapien
tcattgttggcagatgtggtagcag

SEQ ID NO: 792947 - DNA, 25 bp, Homo sapien
tggaaaacgtgcaaggctaagaaca

SEQ ID NO: 792948 - DNA, 25 bp, Homo sapien
ttgtccaggagaccaaagacctgaa

SEQ ID NO: 792949 - DNA, 25 bp, Homo sapien
taggtcatacatacacataagtggt

SEQ ID NO: 792950 - DNA, 25 bp, Homo sapien
tcaagcagtcatgagtactagctgg

SEQ ID NO: 792951 - DNA, 25 bp, Homo sapien
tattaataaattccaggccaggtgc

SEQ ID NO: 792952 - DNA, 25 bp, Homo sapien
gatcaggatgtataactccattatt

SEQ ID NO: 792953 - DNA, 25 bp, Homo sapien
aactgccctgtaacactgattcctg

SEQ ID NO: 792954 - DNA, 25 bp, Homo sapien
taaatggagtgagaaacaagatcag

SEQ ID NO: 792955 - DNA, 25 bp, Homo sapien
gaccataagcacacgtcactatgtt

SEQ ID NO: 792956 - DNA, 25 bp, Homo sapien
ctgggaccataagcacacgtcacta

SEQ ID NO: 792957 - DNA, 25 bp, Homo sapien
agcacacgtcactatgttcagctaa

SEQ ID NO: 792958 - DNA, 25 bp, Homo sapien
cataagcacacgtcactatgttcag

SEQ ID NO: 792959 - DNA, 25 bp, Homo sapien
gagggcacaatgttctttagaaaac

SEQ ID NO: 792960 - DNA, 25 bp, Homo sapien
catgaattccagtgggagggcacaa

SEQ ID NO: 792961 - DNA, 25 bp, Homo sapien
atgaccaaaatgctaggaagctggc

SEQ ID NO: 792962 - DNA, 25 bp, Homo sapien
tgtttccaagctttcaggatcagaa

SEQ ID NO: 792963 - DNA, 25 bp, Homo sapien
cttgggccagattcagaacttccct

SEQ ID NO: 792964 - DNA, 25 bp, Homo sapien
gggccagattcagaacttccctgtg

SEQ ID NO: 792965 - DNA, 25 bp, Homo sapien
acttccctgtgcctcgttttcttca

SEQ ID NO: 792966 - DNA, 25 bp, Homo sapien
tcagaacttccctgtgcctcgtttt

SEQ ID NO: 792967 - DNA, 25 bp, Homo sapien
cacattccaatcaggcagagcagca

SEQ ID NO: 792968 - DNA, 25 bp, Homo sapien
cagtttgatgttgggcaccgaggac

SEQ ID NO: 792969 - DNA, 25 bp, Homo sapien
taccaagtagtgtcgtacatcaggc

SEQ ID NO: 792970 - DNA, 25 bp, Homo sapien
tgctactgaggcgattccacacagg

SEQ ID NO: 792971 - DNA, 25 bp, Homo sapien
tagggctgtgagtaagtatgcatac

SEQ ID NO: 792972 - DNA, 25 bp, Homo sapien
tacaatggttgccagaaaggagaag

SEQ ID NO: 792973 - DNA, 25 bp, Homo sapien
ggctcaaacttcttgttcagatgga

SEQ ID NO: 792974 - DNA, 25 bp, Homo sapien
tataagggaagtcataaacaggccc

SEQ ID NO: 792975 - DNA, 25 bp, Homo sapien
cactaagagattgtatatgggcacg

SEQ ID NO: 792976 - DNA, 25 bp, Homo sapien
tagccccgatagaagagttacagcc

SEQ ID NO: 792977 - DNA, 25 bp, Homo sapien
tcaattgtgatgcaggcctcttcca

SEQ ID NO: 792978 - DNA, 25 bp, Homo sapien
caaaatctaggctagcacaggtgcc

SEQ ID NO: 792979 - DNA, 25 bp, Homo sapien
ggcttcagccaaccctataggagtg

SEQ ID NO: 792980 - DNA, 25 bp, Homo sapien
aaatatctctgcgtggagtgacccc

SEQ ID NO: 792981 - DNA, 25 bp, Homo sapien
cgaggcccacggtgaataaaatata

SEQ ID NO: 792982 - DNA, 25 bp, Homo sapien
tagcctgggctcttatgttcactct

SEQ ID NO: 792983 - DNA, 25 bp, Homo sapien
gagaacagacgtccccgcaaaggag

SEQ ID NO: 792984 - DNA, 25 bp, Homo sapien
ccagagcaagcttagtgtatggagg

SEQ ID NO: 792985 - DNA, 25 bp, Homo sapien
tgggttggagaacagacgtccccgc

SEQ ID NO: 792986 - DNA, 25 bp, Homo sapien
gaagcagagttctccagagcaagct

SEQ ID NO: 792987 - DNA, 25 bp, Homo sapien
ccaagtaatcaccacggaataaaat

SEQ ID NO: 792988 - DNA, 25 bp, Homo sapien
tcataccaagtaatcaccacggaat

SEQ ID NO: 792989 - DNA, 25 bp, Homo sapien
gaagtcataccaagtaatcaccacg

SEQ ID NO: 792990 - DNA, 25 bp, Homo sapien
ttgaagtcataccaagtaatcacca

SEQ ID NO: 792991 - DNA, 25 bp, Homo sapien
tatcttcaaaagtagtactaaagtc

SEQ ID NO: 792992 - DNA, 25 bp, Homo sapien
ccttgaatgtagtccaacagttgaa

SEQ ID NO: 792993 - DNA, 25 bp, Homo sapien
aaagtgaagagttatgtttatcttc

SEQ ID NO: 792994 - DNA, 25 bp, Homo sapien
aagtcaacactgaaagcccttgaat

SEQ ID NO: 792995 - DNA, 25 bp, Homo sapien
tgagcaaagaaggaataacccttta

SEQ ID NO: 792996 - DNA, 25 bp, Homo sapien
actctgcagatcctccaggaatcta

SEQ ID NO: 792997 - DNA, 25 bp, Homo sapien
agcacattcctgatggccttggtga

SEQ ID NO: 792998 - DNA, 25 bp, Homo sapien
caggaatctaagaacttgcagcggg

SEQ ID NO: 792999 - DNA, 25 bp, Homo sapien
ggatactcctaatgttgactctgca

SEQ ID NO: 793000 - DNA, 25 bp, Homo sapien
ctggcaggcaccagctacagtgttg

SEQ ID NO: 793001 - DNA, 25 bp, Homo sapien
ggcaccagctacagtgttggacact

SEQ ID NO: 793002 - DNA, 25 bp, Homo sapien
caggcaccagctacagtgttggaca

SEQ ID NO: 793003 - DNA, 25 bp, Homo sapien
agctacagtgttggacactgagacc

SEQ ID NO: 793004 - DNA, 25 bp, Homo sapien
cattctctgagaagctgataagcaa

SEQ ID NO: 793005 - DNA, 25 bp, Homo sapien
gctgataagcaattggatgagaaag

SEQ ID NO: 793006 - DNA, 25 bp, Homo sapien
aaaaccattctctgagaagctgata

SEQ ID NO: 793007 - DNA, 25 bp, Homo sapien
gataagcaattggatgagaaagagg

SEQ ID NO: 793008 - DNA, 25 bp, Homo sapien
ctcttggtttctgattgttcctggg

SEQ ID NO: 793009 - DNA, 25 bp, Homo sapien
ccatctcttggtttctgattgttcc

SEQ ID NO: 793010 - DNA, 25 bp, Homo sapien
tctcttggtttctgattgttcctgg

SEQ ID NO: 793011 - DNA, 25 bp, Homo sapien
cctcttcattcccatctcttggttt

SEQ ID NO: 793012 - DNA, 25 bp, Homo sapien
gatgaaaattccagtgcaccaggat

SEQ ID NO: 793013 - DNA, 25 bp, Homo sapien
tatgtcataggtcatgcagaaagtg

SEQ ID NO: 793014 - DNA, 25 bp, Homo sapien
taagaaagaggaactatgaccattg

SEQ ID NO: 793015 - DNA, 25 bp, Homo sapien
ccattgagtgggtctgattagaaca

SEQ ID NO: 793016 - DNA, 25 bp, Homo sapien
agacgtgaaaaatttccggtatgag

SEQ ID NO: 793017 - DNA, 25 bp, Homo sapien
aaatttccggtatgagtccagtttg

SEQ ID NO: 793018 - DNA, 25 bp, Homo sapien
tgaaaaatttccggtatgagtccag

SEQ ID NO: 793019 - DNA, 25 bp, Homo sapien
gtgaaaaatttccggtatgagtcca

SEQ ID NO: 793020 - DNA, 25 bp, Homo sapien
tgttgcctgtcacttagggcacaat

SEQ ID NO: 793021 - DNA, 25 bp, Homo sapien
tcctgctgtggtttctagacgtgag

SEQ ID NO: 793022 - DNA, 25 bp, Homo sapien
aagacctttccctcttcaattctgc

SEQ ID NO: 793023 - DNA, 25 bp, Homo sapien
cccttcttagggagtgtcatgtcta

SEQ ID NO: 793024 - DNA, 25 bp, Homo sapien
caattctgccagctgtcacaagagc

SEQ ID NO: 793025 - DNA, 25 bp, Homo sapien
gcacaattgacaactcttctttaca

SEQ ID NO: 793026 - DNA, 25 bp, Homo sapien
ctgtgcacaattgacaactcttctt

SEQ ID NO: 793027 - DNA, 25 bp, Homo sapien
tgtgcacaattgacaactcttcttt

SEQ ID NO: 793028 - DNA, 25 bp, Homo sapien
caattgacaactcttctttacagca

SEQ ID NO: 793029 - DNA, 25 bp, Homo sapien
gaagcccaggtcctcattaaagtag

SEQ ID NO: 793030 - DNA, 25 bp, Homo sapien
caatggtagtatgaactggctggag

SEQ ID NO: 793031 - DNA, 25 bp, Homo sapien
tctgggtcatcgctggctgtggaaa

SEQ ID NO: 793032 - DNA, 25 bp, Homo sapien
tggaaagcatgtaaggcaatggtag

SEQ ID NO: 793033 - DNA, 25 bp, Homo sapien
tcaaagattacagcccacagagact

SEQ ID NO: 793034 - DNA, 25 bp, Homo sapien
aagtctagattcaaagattacagcc

SEQ ID NO: 793035 - DNA, 25 bp, Homo sapien
tctggccttggttgttagtactcag

SEQ ID NO: 793036 - DNA, 25 bp, Homo sapien
acagagacttctggccttggttgtt

SEQ ID NO: 793037 - DNA, 25 bp, Homo sapien
tgtttcacactggacaagattaacg

SEQ ID NO: 793038 - DNA, 25 bp, Homo sapien
gattaacggtcaaatcaagccattc

SEQ ID NO: 793039 - DNA, 25 bp, Homo sapien
tcctggacggttgccgaaagactgg

SEQ ID NO: 793040 - DNA, 25 bp, Homo sapien
tcactgaatgagtcttgtcctcctg

SEQ ID NO: 793041 - DNA, 25 bp, Homo sapien
atatatagaactgaatcgacaaccg

SEQ ID NO: 793042 - DNA, 25 bp, Homo sapien
gctttttcttcactacaccaaacac

SEQ ID NO: 793043 - DNA, 25 bp, Homo sapien
gaactgaatcgacaaccgaaatagg

SEQ ID NO: 793044 - DNA, 25 bp, Homo sapien
ctgaatcgacaaccgaaatagggaa

SEQ ID NO: 793045 - DNA, 25 bp, Homo sapien
tcctgcaggtaaaagtgataggcgc

SEQ ID NO: 793046 - DNA, 25 bp, Homo sapien
gaatcctgtaattaatactgcaatg

SEQ ID NO: 793047 - DNA, 25 bp, Homo sapien
tactgcaatgagtagaagcatcatg

SEQ ID NO: 793048 - DNA, 25 bp, Homo sapien
tgataggcgcagcagtaccaaacga

SEQ ID NO: 793049 - DNA, 25 bp, Homo sapien
gcggtcgtgaataggaactgtttct

SEQ ID NO: 793050 - DNA, 25 bp, Homo sapien
cgtgaataggaactgtttctcgtct

SEQ ID NO: 793051 - DNA, 25 bp, Homo sapien
ttccataaaaatagacacgatttct

SEQ ID NO: 793052 - DNA, 25 bp, Homo sapien
tgtttctcgtcttccataaaaatag

SEQ ID NO: 793053 - DNA, 25 bp, Homo sapien
tcctgggcttttctacattccctat

SEQ ID NO: 793054 - DNA, 25 bp, Homo sapien
cctgggcttttctacattccctatc

SEQ ID NO: 793055 - DNA, 25 bp, Homo sapien
gtcctgggcttttctacattcccta

SEQ ID NO: 793056 - DNA, 25 bp, Homo sapien
ttttaatatttagggctcaagtgac

SEQ ID NO: 793057 - DNA, 25 bp, Homo sapien
tagggctcaagtgacttaaggtact

SEQ ID NO: 793058 - DNA, 25 bp, Homo sapien
ggctcaagtgacttaaggtactatc

SEQ ID NO: 793059 - DNA, 25 bp, Homo sapien
tatttagggctcaagtgacttaagg

SEQ ID NO: 793060 - DNA, 25 bp, Homo sapien
tctggaggatctcttttcaattatc

SEQ ID NO: 793061 - DNA, 25 bp, Homo sapien
tctgctctttctggaggatctcttt

SEQ ID NO: 793062 - DNA, 25 bp, Homo sapien
tctttctggaggatctcttttcaat

SEQ ID NO: 793063 - DNA, 25 bp, Homo sapien
cattgaagaaacttccttctgctct

SEQ ID NO: 793064 - DNA, 25 bp, Homo sapien
gcctttttctgaaaaggcatcgaat

SEQ ID NO: 793065 - DNA, 25 bp, Homo sapien
tttttctgaaaaggcatcgaatacc

SEQ ID NO: 793066 - DNA, 25 bp, Homo sapien
ctgggcagcaagttggatgtagaaa

SEQ ID NO: 793067 - DNA, 25 bp, Homo sapien
atttggctgggcagcaagttggatg

SEQ ID NO: 793068 - DNA, 25 bp, Homo sapien
tccaacaatagctttctctgctaac

SEQ ID NO: 793069 - DNA, 25 bp, Homo sapien
caacaatagctttctctgctaacat

SEQ ID NO: 793070 - DNA, 25 bp, Homo sapien
cagtccaacaatagctttctctgct

SEQ ID NO: 793071 - DNA, 25 bp, Homo sapien
ctgcagtccaacaatagctttctct

SEQ ID NO: 793072 - DNA, 25 bp, Homo sapien
tgtcattctgccactcatactcact

SEQ ID NO: 793073 - DNA, 25 bp, Homo sapien
cagtgcggttaacaaagctattgtc

SEQ ID NO: 793074 - DNA, 25 bp, Homo sapien
ttctgccactcatactcactcttaa

SEQ ID NO: 793075 - DNA, 25 bp, Homo sapien
ctaatctacagtgcggttaacaaag

SEQ ID NO: 793076 - DNA, 25 bp, Homo sapien
ctcaaagaggctgtaaggatgatta

SEQ ID NO: 793077 - DNA, 25 bp, Homo sapien
tctcaaagaggctgtaaggatgatt

SEQ ID NO: 793078 - DNA, 25 bp, Homo sapien
attctcaaagaggctgtaaggatga

SEQ ID NO: 793079 - DNA, 25 bp, Homo sapien
caaagaggctgtaaggatgattaaa

SEQ ID NO: 793080 - DNA, 25 bp, Homo sapien
cactcccggctggtaatcttataaa

SEQ ID NO: 793081 - DNA, 25 bp, Homo sapien
gattaaagctctaacctgtggcaag

SEQ ID NO: 793082 - DNA, 25 bp, Homo sapien
caactaagggaaactcgagacagga

SEQ ID NO: 793083 - DNA, 25 bp, Homo sapien
ctcttaagtgaggacaaactcccag

SEQ ID NO: 793084 - DNA, 25 bp, Homo sapien
ttctaagggcagactagaagactgc

SEQ ID NO: 793085 - DNA, 25 bp, Homo sapien
ggaagtcttttatggcatgataacc

SEQ ID NO: 793086 - DNA, 25 bp, Homo sapien
gaatcagcttcttatgagacaaaag

SEQ ID NO: 793087 - DNA, 25 bp, Homo sapien
taaaggaaaaggttgagctgctatc

SEQ ID NO: 793088 - DNA, 25 bp, Homo sapien
gaaatgaaggcacctgaattcacca

SEQ ID NO: 793089 - DNA, 25 bp, Homo sapien
caggtgcgaggcctctagctctgtc

SEQ ID NO: 793090 - DNA, 25 bp, Homo sapien
tcgtcattgagtggaaggttctggt

SEQ ID NO: 793091 - DNA, 25 bp, Homo sapien
ggagcctccagaggtctctttctca

SEQ ID NO: 793092 - DNA, 25 bp, Homo sapien
ggccaaattcacaccataccttggg

SEQ ID NO: 793093 - DNA, 25 bp, Homo sapien
tatcaactatcctcctgtatttggg

SEQ ID NO: 793094 - DNA, 25 bp, Homo sapien
tgtgctgcagtataatttggccaaa

SEQ ID NO: 793095 - DNA, 25 bp, Homo sapien
tatgagcatgtgctgtgcagactat

SEQ ID NO: 793096 - DNA, 25 bp, Homo sapien
catgcaagagggtttgtacatccag

SEQ ID NO: 793097 - DNA, 25 bp, Homo sapien
tacatgtacttatttggtagggcct

SEQ ID NO: 793098 - DNA, 25 bp, Homo sapien
cactattgtattgagctgccctctg

SEQ ID NO: 793099 - DNA, 25 bp, Homo sapien
gagagcctcagtaataaagtacaga

SEQ ID NO: 793100 - DNA, 25 bp, Homo sapien
tcacccagatagtaagcttagtagc

SEQ ID NO: 793101 - DNA, 25 bp, Homo sapien
gtagccaatagtctttgaacccttg

SEQ ID NO: 793102 - DNA, 25 bp, Homo sapien
gtcttgctactgtgaaaaatgccgc

SEQ ID NO: 793103 - DNA, 25 bp, Homo sapien
aaaaatgcatgtgtctatctggtag

SEQ ID NO: 793104 - DNA, 25 bp, Homo sapien
aacgggccgagtccagttgtttgag

SEQ ID NO: 793105 - DNA, 25 bp, Homo sapien
tccacgagcgtgtgtgaaaaagcgc

SEQ ID NO: 793106 - DNA, 25 bp, Homo sapien
tattttgggccgagaaagctgtcaa

SEQ ID NO: 793107 - DNA, 25 bp, Homo sapien
ggccttagggatgcattcagatgta

SEQ ID NO: 793108 - DNA, 25 bp, Homo sapien
ctttgtaacggagagaagcgcggcc

SEQ ID NO: 793109 - DNA, 25 bp, Homo sapien
tgggcgcgggatcctagcacgacct

SEQ ID NO: 793110 - DNA, 25 bp, Homo sapien
gccgggtacaaggtgcgggagtcgc

SEQ ID NO: 793111 - DNA, 25 bp, Homo sapien
gagaagttctcagcccagagttgcg

SEQ ID NO: 793112 - DNA, 25 bp, Homo sapien
gctcagacaacggcgagggcgcgcg

SEQ ID NO: 793113 - DNA, 25 bp, Homo sapien
gcacagctcagacaacggcgagggc

SEQ ID NO: 793114 - DNA, 25 bp, Homo sapien
acagctcagacaacggcgagggcgc

SEQ ID NO: 793115 - DNA, 25 bp, Homo sapien
ggcacagctcagacaacggcgaggg

SEQ ID NO: 793116 - DNA, 25 bp, Homo sapien
ctgggcgacgcggagccccgacaac

SEQ ID NO: 793117 - DNA, 25 bp, Homo sapien
ggcgacgcggagccccgacaacttc

SEQ ID NO: 793118 - DNA, 25 bp, Homo sapien
tgggcgacgcggagccccgacaact

SEQ ID NO: 793119 - DNA, 25 bp, Homo sapien
gcgacgcggagccccgacaacttcc

SEQ ID NO: 793120 - DNA, 25 bp, Homo sapien
aatgcgactgaaactctccgacaaa

SEQ ID NO: 793121 - DNA, 25 bp, Homo sapien
ccggctgcggctcaatgaggtcaca

SEQ ID NO: 793122 - DNA, 25 bp, Homo sapien
tccgacaaagttctccgcaacttct

SEQ ID NO: 793123 - DNA, 25 bp, Homo sapien
ttgccgatcttctcggccggctgcg

SEQ ID NO: 793124 - DNA, 25 bp, Homo sapien
caataccagggcacagtctaacgtt

SEQ ID NO: 793125 - DNA, 25 bp, Homo sapien
tcagagacctcgagactgaacaccc

SEQ ID NO: 793126 - DNA, 25 bp, Homo sapien
aaatctcgctttccaggacccgaag

SEQ ID NO: 793127 - DNA, 25 bp, Homo sapien
cgaacaataggtcccaaggtaactg

SEQ ID NO: 793128 - DNA, 25 bp, Homo sapien
ctcatcaaaggtggtgtcatctttc

SEQ ID NO: 793129 - DNA, 25 bp, Homo sapien
tcatcaaaggtggtgtcatctttct

SEQ ID NO: 793130 - DNA, 25 bp, Homo sapien
ggaacactaaccacccttacagcag

SEQ ID NO: 793131 - DNA, 25 bp, Homo sapien
agcagagacttcctacaggctatac

SEQ ID NO: 793132 - DNA, 25 bp, Homo sapien
ggatgcagggtgctcacaacggaaa

SEQ ID NO: 793133 - DNA, 25 bp, Homo sapien
ggctatacagcctgccaccaggatg

SEQ ID NO: 793134 - DNA, 25 bp, Homo sapien
aaccccaatatgtaatgacccaagg

SEQ ID NO: 793135 - DNA, 25 bp, Homo sapien
aagccttttgcacacctgaacccca

SEQ ID NO: 793136 - DNA, 25 bp, Homo sapien
cttttgcacacctgaaccccaatat

SEQ ID NO: 793137 - DNA, 25 bp, Homo sapien
cccaatatgtaatgacccaaggatg

SEQ ID NO: 793138 - DNA, 25 bp, Homo sapien
gtggagaagcgtcactcaccgccgt

SEQ ID NO: 793139 - DNA, 25 bp, Homo sapien
ttcaggtggagaagcgtcactcacc

SEQ ID NO: 793140 - DNA, 25 bp, Homo sapien
gttgttcaggtggagaagcgtcact

SEQ ID NO: 793141 - DNA, 25 bp, Homo sapien
aggtggagaagcgtcactcaccgcc

SEQ ID NO: 793142 - DNA, 25 bp, Homo sapien
cctgtgaccctgtgctagttgctta

SEQ ID NO: 793143 - DNA, 25 bp, Homo sapien
cactagccctgtgaccctgtgctag

SEQ ID NO: 793144 - DNA, 25 bp, Homo sapien
tgaccctgtgctagttgcttaactt

SEQ ID NO: 793145 - DNA, 25 bp, Homo sapien
tgtctgggtcacctccacttctgga

SEQ ID NO: 793146 - DNA, 25 bp, Homo sapien
gtattcatgtggtcagcctacaccc

SEQ ID NO: 793147 - DNA, 25 bp, Homo sapien
tggtattcatgtggtcagcctacac

SEQ ID NO: 793148 - DNA, 25 bp, Homo sapien
tacgtatatgtctgggttagaggaa

SEQ ID NO: 793149 - DNA, 25 bp, Homo sapien
ctgtgcagttttagacctacgtata

SEQ ID NO: 793150 - DNA, 25 bp, Homo sapien
tcttagccaaactgccagtactgcc

SEQ ID NO: 793151 - DNA, 25 bp, Homo sapien
tttcctcttagccaaactgccagta

SEQ ID NO: 793152 - DNA, 25 bp, Homo sapien
tcaggggatggttgctagccacttc

SEQ ID NO: 793153 - DNA, 25 bp, Homo sapien
tgccagtactgcctccacagtttga

SEQ ID NO: 793154 - DNA, 25 bp, Homo sapien
gaatttactatgagccattcgccgt

SEQ ID NO: 793155 - DNA, 25 bp, Homo sapien
caggtttatgacaccaagcagctgg

SEQ ID NO: 793156 - DNA, 25 bp, Homo sapien
gaagcactgagattatgagccactg

SEQ ID NO: 793157 - DNA, 25 bp, Homo sapien
cacatagccaaggagtgttggagcc

SEQ ID NO: 793158 - DNA, 25 bp, Homo sapien
taaagccatctccaatctaggcaga

SEQ ID NO: 793159 - DNA, 25 bp, Homo sapien
tctaggcagattcctctcattcctg

SEQ ID NO: 793160 - DNA, 25 bp, Homo sapien
tggccgggggaacaatcccatcact

SEQ ID NO: 793161 - DNA, 25 bp, Homo sapien
ctgcttctgtagcatgctgggggat

SEQ ID NO: 793162 - DNA, 25 bp, Homo sapien
gcattgaagggtgaaacaccttcag

SEQ ID NO: 793163 - DNA, 25 bp, Homo sapien
cattgaagggtgaaacaccttcagt

SEQ ID NO: 793164 - DNA, 25 bp, Homo sapien
tgcattgaagggtgaaacaccttca

SEQ ID NO: 793165 - DNA, 25 bp, Homo sapien
acagaaaaattacgctattgggtgt

SEQ ID NO: 793166 - DNA, 25 bp, Homo sapien
aattacgctattgggtgtctaattt

SEQ ID NO: 793167 - DNA, 25 bp, Homo sapien
aacagaaaaattacgctattgggtg

SEQ ID NO: 793168 - DNA, 25 bp, Homo sapien
gaaaaattacgctattgggtgtcta

SEQ ID NO: 793169 - DNA, 25 bp, Homo sapien
gagaagatggattataactgcatgc

SEQ ID NO: 793170 - DNA, 25 bp, Homo sapien
agagaagatggattataactgcatg

SEQ ID NO: 793171 - DNA, 25 bp, Homo sapien
cagagaagatggattataactgcat

SEQ ID NO: 793172 - DNA, 25 bp, Homo sapien
tgtgacagtcttcactgcccccaaa

SEQ ID NO: 793173 - DNA, 25 bp, Homo sapien
gagggcactaaaggcaattaccacc

SEQ ID NO: 793174 - DNA, 25 bp, Homo sapien
ttcctggacacccagtggttcttct

SEQ ID NO: 793175 - DNA, 25 bp, Homo sapien
ttttgttatcttgaggggatgcctt

SEQ ID NO: 793176 - DNA, 25 bp, Homo sapien
aaagaagagggcactaaaggcaatt

SEQ ID NO: 793177 - DNA, 25 bp, Homo sapien
ggctacaagatagccatgctggtta

SEQ ID NO: 793178 - DNA, 25 bp, Homo sapien
tataggttggcatcttgcagcgcca

SEQ ID NO: 793179 - DNA, 25 bp, Homo sapien
tcttgcagcgccacacccatgataa

SEQ ID NO: 793180 - DNA, 25 bp, Homo sapien
ctttccaggctacaagatagccatg

SEQ ID NO: 793181 - DNA, 25 bp, Homo sapien
catgatttttaagcaacactcagaa

SEQ ID NO: 793182 - DNA, 25 bp, Homo sapien
atgatttttaagcaacactcagaaa

SEQ ID NO: 793183 - DNA, 25 bp, Homo sapien
tgatttttaagcaacactcagaaaa

SEQ ID NO: 793184 - DNA, 25 bp, Homo sapien
gatttttaagcaacactcagaaaaa

SEQ ID NO: 793185 - DNA, 25 bp, Homo sapien
gaaatagtctaagcttcaggcacag

SEQ ID NO: 793186 - DNA, 25 bp, Homo sapien
cctaaaaaggaatgtacaggctcat

SEQ ID NO: 793187 - DNA, 25 bp, Homo sapien
taggttgtcaagtccacaaaagcag

SEQ ID NO: 793188 - DNA, 25 bp, Homo sapien
taccaatggtagagtgtaacaacac

SEQ ID NO: 793189 - DNA, 25 bp, Homo sapien
actgaacagacacagagagcaccat

SEQ ID NO: 793190 - DNA, 25 bp, Homo sapien
ctgactgaacagacacagagagcac

SEQ ID NO: 793191 - DNA, 25 bp, Homo sapien
tgactgaacagacacagagagcacc

SEQ ID NO: 793192 - DNA, 25 bp, Homo sapien
gactgaacagacacagagagcacca

SEQ ID NO: 793193 - DNA, 25 bp, Homo sapien
tatagtataatactctgttagtggg

SEQ ID NO: 793194 - DNA, 25 bp, Homo sapien
tgttagtgggtatttgtctaagcac

SEQ ID NO: 793195 - DNA, 25 bp, Homo sapien
taatgacaagtcgatccagggaagt

SEQ ID NO: 793196 - DNA, 25 bp, Homo sapien
ttgcttccaaaataaacagtgatgt

SEQ ID NO: 793197 - DNA, 25 bp, Homo sapien
aaccagaaaccataataggatgatt

SEQ ID NO: 793198 - DNA, 25 bp, Homo sapien
aaaccagaaaccataataggatgat

SEQ ID NO: 793199 - DNA, 25 bp, Homo sapien
tctgggtatatctgtctgaaaacca

SEQ ID NO: 793200 - DNA, 25 bp, Homo sapien
tacaagactgattttccagagtggc

SEQ ID NO: 793201 - DNA, 25 bp, Homo sapien
ggctcttaagggatatcggtgtaca

SEQ ID NO: 793202 - DNA, 25 bp, Homo sapien
catatcattagtctgctgacagctg

SEQ ID NO: 793203 - DNA, 25 bp, Homo sapien
gttcccaacaacacagccgtgcatg

SEQ ID NO: 793204 - DNA, 25 bp, Homo sapien
tgtggtattacaaggaaaggcaaaa

SEQ ID NO: 793205 - DNA, 25 bp, Homo sapien
cagccgtgcatgtgtggtattacaa

SEQ ID NO: 793206 - DNA, 25 bp, Homo sapien
tggaagttcccaacaacacagccgt

SEQ ID NO: 793207 - DNA, 25 bp, Homo sapien
gagcaaccatttccaacaaaggcag

SEQ ID NO: 793208 - DNA, 25 bp, Homo sapien
tcaatgactaagtagatgttctgtc

SEQ ID NO: 793209 - DNA, 25 bp, Homo sapien
gcagaaggcccaatatcaatgacta

SEQ ID NO: 793210 - DNA, 25 bp, Homo sapien
gaaacaggatcattacgatgaatga

SEQ ID NO: 793211 - DNA, 25 bp, Homo sapien
atggggcagttcagctccatataat

SEQ ID NO: 793212 - DNA, 25 bp, Homo sapien
atataattcaaaggcactatgtaac

SEQ ID NO: 793213 - DNA, 25 bp, Homo sapien
ggggcagttcagctccatataattc

SEQ ID NO: 793214 - DNA, 25 bp, Homo sapien
ctccatataattcaaaggcactatg

SEQ ID NO: 793215 - DNA, 25 bp, Homo sapien
gtcatatttccccttgtaactacaa

SEQ ID NO: 793216 - DNA, 25 bp, Homo sapien
ttctcactgtcatatttccccttgt

SEQ ID NO: 793217 - DNA, 25 bp, Homo sapien
tcttcctttctcactgtcatatttc

SEQ ID NO: 793218 - DNA, 25 bp, Homo sapien
catatttccccttgtaactacaaag

SEQ ID NO: 793219 - DNA, 25 bp, Homo sapien
gtcaaggcaattcacaacacactgt

SEQ ID NO: 793220 - DNA, 25 bp, Homo sapien
aatgggagccaaacagctaatggtg

SEQ ID NO: 793221 - DNA, 25 bp, Homo sapien
cagggctgcttcagaagaatacaga

SEQ ID NO: 793222 - DNA, 25 bp, Homo sapien
gctaatggtgattgcataggaggaa

SEQ ID NO: 793223 - DNA, 25 bp, Homo sapien
tcccacgaaggcagagtaaccgggc

SEQ ID NO: 793224 - DNA, 25 bp, Homo sapien
cgaaggcagagtaaccgggctctgc

SEQ ID NO: 793225 - DNA, 25 bp, Homo sapien
aaggcagagtaaccgggctctgcag

SEQ ID NO: 793226 - DNA, 25 bp, Homo sapien
cacgaaggcagagtaaccgggctct

SEQ ID NO: 793227 - DNA, 25 bp, Homo sapien
ctccctcaggcttgattcacctgga

SEQ ID NO: 793228 - DNA, 25 bp, Homo sapien
cacctggaactctttaacatgtctc

SEQ ID NO: 793229 - DNA, 25 bp, Homo sapien
tctctagcaatgtgtttgcaccagg

SEQ ID NO: 793230 - DNA, 25 bp, Homo sapien
tagcaatgtgtttgcaccaggccag

SEQ ID NO: 793231 - DNA, 25 bp, Homo sapien
gaaaacatgctaaaacacggcagag

SEQ ID NO: 793232 - DNA, 25 bp, Homo sapien
taataatgacaaaagccatggccca

SEQ ID NO: 793233 - DNA, 25 bp, Homo sapien
taaagtacctgccagctctaagagt

SEQ ID NO: 793234 - DNA, 25 bp, Homo sapien
gactctgtaagaagacctcaacatg

SEQ ID NO: 793235 - DNA, 25 bp, Homo sapien
atccaacggaaaacttcttaatgtg

SEQ ID NO: 793236 - DNA, 25 bp, Homo sapien
ctcatccaacggaaaacttcttaat

SEQ ID NO: 793237 - DNA, 25 bp, Homo sapien
ggcatcaaatttacaccctctacta

SEQ ID NO: 793238 - DNA, 25 bp, Homo sapien
taatgtggcatcaaatttacaccct

SEQ ID NO: 793239 - DNA, 25 bp, Homo sapien
tgccactatgctccatgtactccag

SEQ ID NO: 793240 - DNA, 25 bp, Homo sapien
agtgagctgcagagtctgtgccact

SEQ ID NO: 793241 - DNA, 25 bp, Homo sapien
tggacagatctcttgagccagggag

SEQ ID NO: 793242 - DNA, 25 bp, Homo sapien
cagagtctgtgccactatgctccat

SEQ ID NO: 793243 - DNA, 25 bp, Homo sapien
tcctcaaactgatagagagcatcta

SEQ ID NO: 793244 - DNA, 25 bp, Homo sapien
catttaatggatctgactatggcac

SEQ ID NO: 793245 - DNA, 25 bp, Homo sapien
tacagaatctactgcaaagtacagc

SEQ ID NO: 793246 - DNA, 25 bp, Homo sapien
gccttaacggccttacaatacatac

SEQ ID NO: 793247 - DNA, 25 bp, Homo sapien
taaattcagaactcttcactgcaac

SEQ ID NO: 793248 - DNA, 25 bp, Homo sapien
ctgcaactttaatatcactaaacat

SEQ ID NO: 793249 - DNA, 25 bp, Homo sapien
tcactgcaactttaatatcactaaa

SEQ ID NO: 793250 - DNA, 25 bp, Homo sapien
aattcagaactcttcactgcaactt

SEQ ID NO: 793251 - DNA, 25 bp, Homo sapien
cattccctggcagttccgtgtagac

SEQ ID NO: 793252 - DNA, 25 bp, Homo sapien
taggtgactctttgccagtggagga

SEQ ID NO: 793253 - DNA, 25 bp, Homo sapien
tctcaaatgggtcaaaagtgctctg

SEQ ID NO: 793254 - DNA, 25 bp, Homo sapien
gcaccctctttacttgattagctgg

SEQ ID NO: 793255 - DNA, 25 bp, Homo sapien
tactgtagcataagatccttcccct

SEQ ID NO: 793256 - DNA, 25 bp, Homo sapien
tagcataagatccttcccctagttt

SEQ ID NO: 793257 - DNA, 25 bp, Homo sapien
ctgtagcataagatccttcccctag

SEQ ID NO: 793258 - DNA, 25 bp, Homo sapien
tgtagcataagatccttcccctagt

SEQ ID NO: 793259 - DNA, 25 bp, Homo sapien
tgaattctcattagacggttccaac

SEQ ID NO: 793260 - DNA, 25 bp, Homo sapien
ctggaaatgaattctcattagacgg

SEQ ID NO: 793261 - DNA, 25 bp, Homo sapien
aaatgaattctcattagacggttcc

SEQ ID NO: 793262 - DNA, 25 bp, Homo sapien
gaattctcattagacggttccaact

SEQ ID NO: 793263 - DNA, 25 bp, Homo sapien
atgagaaattaatcacataattcac

SEQ ID NO: 793264 - DNA, 25 bp, Homo sapien
tatgagaaattaatcacataattca

SEQ ID NO: 793265 - DNA, 25 bp, Homo sapien
ctatgagaaattaatcacataattc

SEQ ID NO: 793266 - DNA, 25 bp, Homo sapien
atctgtggagcccatagtgttctga

SEQ ID NO: 793267 - DNA, 25 bp, Homo sapien
gcagcttttacatacggctgtttgg

SEQ ID NO: 793268 - DNA, 25 bp, Homo sapien
gtaagaacctactgcagccaatgtg

SEQ ID NO: 793269 - DNA, 25 bp, Homo sapien
tgtttggtttgacctacagccagta

SEQ ID NO: 793270 - DNA, 25 bp, Homo sapien
gaccttagacatcctggtgagtaag

SEQ ID NO: 793271 - DNA, 25 bp, Homo sapien
tatagtgcctttacagaatctgtgg

SEQ ID NO: 793272 - DNA, 25 bp, Homo sapien
cgtatgaggcttatcttggtgggat

SEQ ID NO: 793273 - DNA, 25 bp, Homo sapien
tctctgtctcacttaggaatgccaa

SEQ ID NO: 793274 - DNA, 25 bp, Homo sapien
ctgtataggaatctcagttaacttc

SEQ ID NO: 793275 - DNA, 25 bp, Homo sapien
tataggaatctcagttaacttctct

SEQ ID NO: 793276 - DNA, 25 bp, Homo sapien
tgtataggaatctcagttaacttct

SEQ ID NO: 793277 - DNA, 25 bp, Homo sapien
gtataggaatctcagttaacttctc

SEQ ID NO: 793278 - DNA, 25 bp, Homo sapien
tctgttgggttacaacaggtctttc

SEQ ID NO: 793279 - DNA, 25 bp, Homo sapien
caactattaaccaaagtgcctgatg

SEQ ID NO: 793280 - DNA, 25 bp, Homo sapien
aatgcttgcagatctctaggatcat

SEQ ID NO: 793281 - DNA, 25 bp, Homo sapien
cctcagctcagacaatgcttgcaga

SEQ ID NO: 793282 - DNA, 25 bp, Homo sapien
aaatgaacattgtgtcttctaatta

SEQ ID NO: 793283 - DNA, 25 bp, Homo sapien
tatttgacagtctaagttactaact

SEQ ID NO: 793284 - DNA, 25 bp, Homo sapien
cttcaaacatataattcaaacgttg

SEQ ID NO: 793285 - DNA, 25 bp, Homo sapien
taaagtttaatatgacctgaaatat

SEQ ID NO: 793286 - DNA, 25 bp, Homo sapien
tgcaacttcttctcctgagtatatt

SEQ ID NO: 793287 - DNA, 25 bp, Homo sapien
tcttctcctgagtatattttcttga

SEQ ID NO: 793288 - DNA, 25 bp, Homo sapien
cttctcctgagtatattttcttgat

SEQ ID NO: 793289 - DNA, 25 bp, Homo sapien
cattctaaatatgtgttggcgccaa

SEQ ID NO: 793290 - DNA, 25 bp, Homo sapien
tacacaagacctatccaaagcagat

SEQ ID NO: 793291 - DNA, 25 bp, Homo sapien
tatctatattagtcccctccttgac

SEQ ID NO: 793292 - DNA, 25 bp, Homo sapien
tattttctacctacactgggcctag

SEQ ID NO: 793293 - DNA, 25 bp, Homo sapien
gatcaccttcagagctaccaacttc

SEQ ID NO: 793294 - DNA, 25 bp, Homo sapien
ttcctgcagcctgatcaccttcaga

SEQ ID NO: 793295 - DNA, 25 bp, Homo sapien
cttccctgatagctgtgaaaggtgt

SEQ ID NO: 793296 - DNA, 25 bp, Homo sapien
gatagctgtgaaaggtgtcccttct

SEQ ID NO: 793297 - DNA, 25 bp, Homo sapien
tggtccttcaataccactacgaacc

SEQ ID NO: 793298 - DNA, 25 bp, Homo sapien
ttcaataccactacgaaccttcttg

SEQ ID NO: 793299 - DNA, 25 bp, Homo sapien
acactggtccttcaataccactacg

SEQ ID NO: 793300 - DNA, 25 bp, Homo sapien
aataccactacgaaccttcttgtca

SEQ ID NO: 793301 - DNA, 25 bp, Homo sapien
ccatcacatattcaagaatctatga

SEQ ID NO: 793302 - DNA, 25 bp, Homo sapien
aaaagagacaactggttcattcacc

SEQ ID NO: 793303 - DNA, 25 bp, Homo sapien
aaaacgtggaagtctagaatacaat

SEQ ID NO: 793304 - DNA, 25 bp, Homo sapien
cattcacctcatgcctgtctaagaa

SEQ ID NO: 793305 - DNA, 25 bp, Homo sapien
catgctagcgttaaccttaggtgag

SEQ ID NO: 793306 - DNA, 25 bp, Homo sapien
ttaaccttaggtgagtgacttctcc

SEQ ID NO: 793307 - DNA, 25 bp, Homo sapien
tccaatcctaactttactaacctca

SEQ ID NO: 793308 - DNA, 25 bp, Homo sapien
ctaccacatgctagcgttaacctta

SEQ ID NO: 793309 - DNA, 25 bp, Homo sapien
catttactggcaagttttgtaacac

SEQ ID NO: 793310 - DNA, 25 bp, Homo sapien
gaactgtttatgtaatcctcctaaa

SEQ ID NO: 793311 - DNA, 25 bp, Homo sapien
tcccagtgtaaatcctaacagtcat

SEQ ID NO: 793312 - DNA, 25 bp, Homo sapien
tatttatgtctaggcctcaatttcc

SEQ ID NO: 793313 - DNA, 25 bp, Homo sapien
tttggccatcttcgccattcatata

SEQ ID NO: 793314 - DNA, 25 bp, Homo sapien
tatttggccatcttcgccattcata

SEQ ID NO: 793315 - DNA, 25 bp, Homo sapien
ggccatcttcgccattcatatattt

SEQ ID NO: 793316 - DNA, 25 bp, Homo sapien
ttggccatcttcgccattcatatat

SEQ ID NO: 793317 - DNA, 25 bp, Homo sapien
cagtatagggaatacaccaaaggtc

SEQ ID NO: 793318 - DNA, 25 bp, Homo sapien
gataaagcagtatagggaatacacc

SEQ ID NO: 793319 - DNA, 25 bp, Homo sapien
taaagcagtatagggaatacaccaa

SEQ ID NO: 793320 - DNA, 25 bp, Homo sapien
cttgataaagcagtatagggaatac

SEQ ID NO: 793321 - DNA, 25 bp, Homo sapien
tccaaaacctcttcggtactatgcc

SEQ ID NO: 793322 - DNA, 25 bp, Homo sapien
cggtactatgccctacaaacaccat

SEQ ID NO: 793323 - DNA, 25 bp, Homo sapien
ctgagagcaactgtttccaaaacct

SEQ ID NO: 793324 - DNA, 25 bp, Homo sapien
gagagcaactgtttccaaaacctct

SEQ ID NO: 793325 - DNA, 25 bp, Homo sapien
gagtctgaatattttcatagctaaa

SEQ ID NO: 793326 - DNA, 25 bp, Homo sapien
agtggagtctgaatattttcatagc

SEQ ID NO: 793327 - DNA, 25 bp, Homo sapien
tctgaatattttcatagctaaaata

SEQ ID NO: 793328 - DNA, 25 bp, Homo sapien
cagtggagtctgaatattttcatag

SEQ ID NO: 793329 - DNA, 25 bp, Homo sapien
taagggcccctgaatatcatgttgt

SEQ ID NO: 793330 - DNA, 25 bp, Homo sapien
caattattcaactagcccagtagcc

SEQ ID NO: 793331 - DNA, 25 bp, Homo sapien
gtatggtacataacacctagcctgc

SEQ ID NO: 793332 - DNA, 25 bp, Homo sapien
tagcctgcacgggaacttttcagat

SEQ ID NO: 793333 - DNA, 25 bp, Homo sapien
caattcaagtagagtattcaaaaca

SEQ ID NO: 793334 - DNA, 25 bp, Homo sapien
gcaggtccttgatcccttggcaaat

SEQ ID NO: 793335 - DNA, 25 bp, Homo sapien
tcagaatctagttgctgacactggt

SEQ ID NO: 793336 - DNA, 25 bp, Homo sapien
tctctttacagcaatgacaattcaa

SEQ ID NO: 793337 - DNA, 25 bp, Homo sapien
caggcttgttgctgtctcttaatgc

SEQ ID NO: 793338 - DNA, 25 bp, Homo sapien
tgggaagattcaagatcagaaaggc

SEQ ID NO: 793339 - DNA, 25 bp, Homo sapien
tgtcactctttgctatcacaggctt

SEQ ID NO: 793340 - DNA, 25 bp, Homo sapien
ttaagcctctatcagcttcccctgt

SEQ ID NO: 793341 - DNA, 25 bp, Homo sapien
catattcaaacacaagtgtcagcgt

SEQ ID NO: 793342 - DNA, 25 bp, Homo sapien
aacacaagtgtcagcgtctccttgg

SEQ ID NO: 793343 - DNA, 25 bp, Homo sapien
cgtctccttggtatggatgatgtca

SEQ ID NO: 793344 - DNA, 25 bp, Homo sapien
gtagcactatgttagcatgttttag

SEQ ID NO: 793345 - DNA, 25 bp, Homo sapien
tacatctgttcgcattctgtacttg

SEQ ID NO: 793346 - DNA, 25 bp, Homo sapien
acatctgttcgcattctgtacttgg

SEQ ID NO: 793347 - DNA, 25 bp, Homo sapien
catctgttcgcattctgtacttggt

SEQ ID NO: 793348 - DNA, 25 bp, Homo sapien
atctgttcgcattctgtacttggtt

SEQ ID NO: 793349 - DNA, 25 bp, Homo sapien
ggtgcttgtccatgtactgacataa

SEQ ID NO: 793350 - DNA, 25 bp, Homo sapien
gggtgcttgtccatgtactgacata

SEQ ID NO: 793351 - DNA, 25 bp, Homo sapien
cagggtgcttgtccatgtactgaca

SEQ ID NO: 793352 - DNA, 25 bp, Homo sapien
cccagggtgcttgtccatgtactga

SEQ ID NO: 793353 - DNA, 25 bp, Homo sapien
cccaggtgattcgactatggtataa

SEQ ID NO: 793354 - DNA, 25 bp, Homo sapien
cagtgtaactgaccactacaaaagc

SEQ ID NO: 793355 - DNA, 25 bp, Homo sapien
tggtataaagtgaagacctcttagt

SEQ ID NO: 793356 - DNA, 25 bp, Homo sapien
tgtaatactcaattggttctcagga

SEQ ID NO: 793357 - DNA, 25 bp, Homo sapien
cagaacgtatagtaaaaatgggaca

SEQ ID NO: 793358 - DNA, 25 bp, Homo sapien
aacagtaaccttgagacccatttct

SEQ ID NO: 793359 - DNA, 25 bp, Homo sapien
ccatgaccattaggagataagggaa

SEQ ID NO: 793360 - DNA, 25 bp, Homo sapien
tggaagaagcagaacgtatagtaaa

SEQ ID NO: 793361 - DNA, 25 bp, Homo sapien
tcccctgctggcagactgaggagca

SEQ ID NO: 793362 - DNA, 25 bp, Homo sapien
ctttgggatctagcagagtcttatc

SEQ ID NO: 793363 - DNA, 25 bp, Homo sapien
ctagcagagtcttatcagaatgtaa

SEQ ID NO: 793364 - DNA, 25 bp, Homo sapien
tgggatctagcagagtcttatcaga

SEQ ID NO: 793365 - DNA, 25 bp, Homo sapien
ctgatctttgggatctagcagagtc

SEQ ID NO: 793366 - DNA, 25 bp, Homo sapien
cgtgtcactgatcagaaggttctgt

SEQ ID NO: 793367 - DNA, 25 bp, Homo sapien
ccccgtgtcactgatcagaaggttc

SEQ ID NO: 793368 - DNA, 25 bp, Homo sapien
tctgtgcaaaatataacgctggtgg

SEQ ID NO: 793369 - DNA, 25 bp, Homo sapien
ggatgtaagacagacctcgcagcaa

SEQ ID NO: 793370 - DNA, 25 bp, Homo sapien
gacaaaatagactggtaattaactg

SEQ ID NO: 793371 - DNA, 25 bp, Homo sapien
caaaatagactggtaattaactgct

SEQ ID NO: 793372 - DNA, 25 bp, Homo sapien
tgacaaaatagactggtaattaact

SEQ ID NO: 793373 - DNA, 25 bp, Homo sapien
aatagactggtaattaactgctttc

SEQ ID NO: 793374 - DNA, 25 bp, Homo sapien
gatagaagaagtgcacctaaacaaa

SEQ ID NO: 793375 - DNA, 25 bp, Homo sapien
caggatctatgatgatagaagaagt

SEQ ID NO: 793376 - DNA, 25 bp, Homo sapien
gatctatgatgatagaagaagtgca

SEQ ID NO: 793377 - DNA, 25 bp, Homo sapien
atgatgatagaagaagtgcacctaa

SEQ ID NO: 793378 - DNA, 25 bp, Homo sapien
gcatgatttggctgaaactgaactc

SEQ ID NO: 793379 - DNA, 25 bp, Homo sapien
gatttactgccaacaattctgccct

SEQ ID NO: 793380 - DNA, 25 bp, Homo sapien
taagatgatcagtcctatgcgtagc

SEQ ID NO: 793381 - DNA, 25 bp, Homo sapien
catcatggctgctacttaaggttcc

SEQ ID NO: 793382 - DNA, 25 bp, Homo sapien
ttcaaaagtaacaccatctcccgct

SEQ ID NO: 793383 - DNA, 25 bp, Homo sapien
gcatgttgagaccttaatgataact

SEQ ID NO: 793384 - DNA, 25 bp, Homo sapien
gagcaaaatgctcacatgtcattat

SEQ ID NO: 793385 - DNA, 25 bp, Homo sapien
tatgattctatcaacaactggatga

SEQ ID NO: 793386 - DNA, 25 bp, Homo sapien
ccagccgcagaccacagtttcagaa

SEQ ID NO: 793387 - DNA, 25 bp, Homo sapien
tgtgaatgcctcagacaggaggcag

SEQ ID NO: 793388 - DNA, 25 bp, Homo sapien
ttttccgtcttgtaaattgtcaaca

SEQ ID NO: 793389 - DNA, 25 bp, Homo sapien
caacagccatcccacgaattgaggg

SEQ ID NO: 793390 - DNA, 25 bp, Homo sapien
aatggttggcaaacgctaaggtggt

SEQ ID NO: 793391 - DNA, 25 bp, Homo sapien
cagccaactgttattccttatggaa

SEQ ID NO: 793392 - DNA, 25 bp, Homo sapien
tggacagtacttttgataccaacaa

SEQ ID NO: 793393 - DNA, 25 bp, Homo sapien
taatcaccacgacataattggacag

SEQ ID NO: 793394 - DNA, 25 bp, Homo sapien
tacagccctctgtttacataacttc

SEQ ID NO: 793395 - DNA, 25 bp, Homo sapien
gcttaccctagtgtttcacatgagc

SEQ ID NO: 793396 - DNA, 25 bp, Homo sapien
tgaaaagatactacaggcaaagtgc

SEQ ID NO: 793397 - DNA, 25 bp, Homo sapien
tcacatgagcaacaaccaataaggc

SEQ ID NO: 793398 - DNA, 25 bp, Homo sapien
gagaccatctgacccataggctatg

SEQ ID NO: 793399 - DNA, 25 bp, Homo sapien
gaggttctggcactatctaggtttg

SEQ ID NO: 793400 - DNA, 25 bp, Homo sapien
tagcatgcatattggaagacttgtc

SEQ ID NO: 793401 - DNA, 25 bp, Homo sapien
gatgcttatgcactaaacagctgag

SEQ ID NO: 793402 - DNA, 25 bp, Homo sapien
tcattgacagctcagaccaggctag

SEQ ID NO: 793403 - DNA, 25 bp, Homo sapien
cacaagtcctgaaataggttctgac

SEQ ID NO: 793404 - DNA, 25 bp, Homo sapien
gaggccctgttgtcagaaagctaag

SEQ ID NO: 793405 - DNA, 25 bp, Homo sapien
ggatgctacaaacattccagcttga

SEQ ID NO: 793406 - DNA, 25 bp, Homo sapien
ctgttgagcctagaaggacatctgg

SEQ ID NO: 793407 - DNA, 25 bp, Homo sapien
gaggtctgtaccacaaggtaaccac

SEQ ID NO: 793408 - DNA, 25 bp, Homo sapien
cacttcgttggagtatgtgtggcta

SEQ ID NO: 793409 - DNA, 25 bp, Homo sapien
gctagggacggattttgctcttgca

SEQ ID NO: 793410 - DNA, 25 bp, Homo sapien
gacccagaccaagcactacagatag

SEQ ID NO: 793411 - DNA, 25 bp, Homo sapien
tgtttgtctaggcttgacccagacc

SEQ ID NO: 793412 - DNA, 25 bp, Homo sapien
tgcccctgtccatcaagaaccatta

SEQ ID NO: 793413 - DNA, 25 bp, Homo sapien
cctgttgccgtctggagatacatac

SEQ ID NO: 793414 - DNA, 25 bp, Homo sapien
tcaggatgtaaaaagtgtgaagctg

SEQ ID NO: 793415 - DNA, 25 bp, Homo sapien
aaaagtgtgaagctgagtctgacag

SEQ ID NO: 793416 - DNA, 25 bp, Homo sapien
tagtgggtgctgctcgagggcagga

SEQ ID NO: 793417 - DNA, 25 bp, Homo sapien
aaccaggtccttctcaccttgcacc

SEQ ID NO: 793418 - DNA, 25 bp, Homo sapien
accttgcacctctcgacattctgta

SEQ ID NO: 793419 - DNA, 25 bp, Homo sapien
tacaatgcagtagcgctagtgggtg

SEQ ID NO: 793420 - DNA, 25 bp, Homo sapien
cctttttcccaccataagctgcagt

SEQ ID NO: 793421 - DNA, 25 bp, Homo sapien
ttttcccaccataagctgcagttct

SEQ ID NO: 793422 - DNA, 25 bp, Homo sapien
taagctgcagttctgagtgtgaaga

SEQ ID NO: 793423 - DNA, 25 bp, Homo sapien
aagctgcagttctgagtgtgaagag

SEQ ID NO: 793424 - DNA, 25 bp, Homo sapien
cattctttcgcagcttgacctgcca

SEQ ID NO: 793425 - DNA, 25 bp, Homo sapien
catgctcgacattctttcgcagctt

SEQ ID NO: 793426 - DNA, 25 bp, Homo sapien
gacattctttcgcagcttgacctgc

SEQ ID NO: 793427 - DNA, 25 bp, Homo sapien
gctcgacattctttcgcagcttgac

SEQ ID NO: 793428 - DNA, 25 bp, Homo sapien
aaatattcgttcaagttgatcctga

SEQ ID NO: 793429 - DNA, 25 bp, Homo sapien
agaaatattcgttcaagttgatcct

SEQ ID NO: 793430 - DNA, 25 bp, Homo sapien
cagaaatattcgttcaagttgatcc

SEQ ID NO: 793431 - DNA, 25 bp, Homo sapien
gaaatattcgttcaagttgatcctg

SEQ ID NO: 793432 - DNA, 25 bp, Homo sapien
gtctccacacatgaaccactcaatg

SEQ ID NO: 793433 - DNA, 25 bp, Homo sapien
ctccacacatgaaccactcaatgtt

SEQ ID NO: 793434 - DNA, 25 bp, Homo sapien
tctccacacatgaaccactcaatgt

SEQ ID NO: 793435 - DNA, 25 bp, Homo sapien
acacagctctgctcaaataagcgaa

SEQ ID NO: 793436 - DNA, 25 bp, Homo sapien
tcaaataagcgaatgctgccatttt

SEQ ID NO: 793437 - DNA, 25 bp, Homo sapien
caaataagcgaatgctgccatttta

SEQ ID NO: 793438 - DNA, 25 bp, Homo sapien
cacagctctgctcaaataagcgaat

SEQ ID NO: 793439 - DNA, 25 bp, Homo sapien
gaaactatttcatatggcccagtca

SEQ ID NO: 793440 - DNA, 25 bp, Homo sapien
cagtgaattggaagtagcctacaga

SEQ ID NO: 793441 - DNA, 25 bp, Homo sapien
caagaggaagtgagcattctgctgt

SEQ ID NO: 793442 - DNA, 25 bp, Homo sapien
gcaaagaaataccaagcagttggct

SEQ ID NO: 793443 - DNA, 25 bp, Homo sapien
tagactggttcaagagttctggagc

SEQ ID NO: 793444 - DNA, 25 bp, Homo sapien
taacactggcactaaggtgggatgg

SEQ ID NO: 793445 - DNA, 25 bp, Homo sapien
aaaatgttcaaagtgcacccagcaa

SEQ ID NO: 793446 - DNA, 25 bp, Homo sapien
tgttaactcaagtgccaaccagtcc

SEQ ID NO: 793447 - DNA, 25 bp, Homo sapien
gagcaatcctaatccaatactggaa

SEQ ID NO: 793448 - DNA, 25 bp, Homo sapien
caaaggctgcaactcttacatggag

SEQ ID NO: 793449 - DNA, 25 bp, Homo sapien
tggtatacccagaatgagcaatcct

SEQ ID NO: 793450 - DNA, 25 bp, Homo sapien
caccctgtaaggctctggtataccc

SEQ ID NO: 793451 - DNA, 25 bp, Homo sapien
gatggatctcaaaatagttatgctc

SEQ ID NO: 793452 - DNA, 25 bp, Homo sapien
aaagaataaacaactgacactagca

SEQ ID NO: 793453 - DNA, 25 bp, Homo sapien
tatacaatggcatatcacttggcaa

SEQ ID NO: 793454 - DNA, 25 bp, Homo sapien
gcagacagatcagtagtcgcttggg

SEQ ID NO: 793455 - DNA, 25 bp, Homo sapien
tagttcattgtaccacctaggataa

SEQ ID NO: 793456 - DNA, 25 bp, Homo sapien
caaaagaggttgatagtctagctgg

SEQ ID NO: 793457 - DNA, 25 bp, Homo sapien
tatatgagagcatgtttaggaccgt

SEQ ID NO: 793458 - DNA, 25 bp, Homo sapien
tctagctggagccatatggtaccat

SEQ ID NO: 793459 - DNA, 25 bp, Homo sapien
cctctttcacaggggcacctacttg

SEQ ID NO: 793460 - DNA, 25 bp, Homo sapien
tctttcacaggggcacctacttgca

SEQ ID NO: 793461 - DNA, 25 bp, Homo sapien
ctcctctttcacaggggcacctact

SEQ ID NO: 793462 - DNA, 25 bp, Homo sapien
tcctctttcacaggggcacctactt

SEQ ID NO: 793463 - DNA, 25 bp, Homo sapien
gaaacatccttttctcaggacaagc

SEQ ID NO: 793464 - DNA, 25 bp, Homo sapien
gcccattccacctgattagttcctg

SEQ ID NO: 793465 - DNA, 25 bp, Homo sapien
taccattatagcactgtaggcttct

SEQ ID NO: 793466 - DNA, 25 bp, Homo sapien
taggtgtggatacaaggcctttaca

SEQ ID NO: 793467 - DNA, 25 bp, Homo sapien
gggaaagatgcaagtaagaggaaat

SEQ ID NO: 793468 - DNA, 25 bp, Homo sapien
tacagtgatagaaaaagcagaggtt

SEQ ID NO: 793469 - DNA, 25 bp, Homo sapien
gaaattataagagtggccaaggaca

SEQ ID NO: 793470 - DNA, 25 bp, Homo sapien
ggttgaaaggatggagtatattaag

SEQ ID NO: 793471 - DNA, 25 bp, Homo sapien
aattgtgtggagaacgctacctggc

SEQ ID NO: 793472 - DNA, 25 bp, Homo sapien
gaggccaggctctgaagacaccttg

SEQ ID NO: 793473 - DNA, 25 bp, Homo sapien
taagcttgggctgagaaataacccc

SEQ ID NO: 793474 - DNA, 25 bp, Homo sapien
taggtattactcaaagaacccgcag

SEQ ID NO: 793475 - DNA, 25 bp, Homo sapien
ctccaggccatgtgtcctcatttgg

SEQ ID NO: 793476 - DNA, 25 bp, Homo sapien
tacatccaaacttccaatcccctca

SEQ ID NO: 793477 - DNA, 25 bp, Homo sapien
atccaaacttccaatcccctcatct

SEQ ID NO: 793478 - DNA, 25 bp, Homo sapien
tgttttacatccaaacttccaatcc

SEQ ID NO: 793479 - DNA, 25 bp, Homo sapien
ttacatccaaacttccaatcccctc

SEQ ID NO: 793480 - DNA, 25 bp, Homo sapien
caatgatttaagcaaaaagccgtgg

SEQ ID NO: 793481 - DNA, 25 bp, Homo sapien
tccttttggctagaaggcacagtat

SEQ ID NO: 793482 - DNA, 25 bp, Homo sapien
aaaggctccagtcccttacaaggat

SEQ ID NO: 793483 - DNA, 25 bp, Homo sapien
gaagggcgcttcatcatctggtaga

SEQ ID NO: 793484 - DNA, 25 bp, Homo sapien
ggacattgcagaggatgatcccaac

SEQ ID NO: 793485 - DNA, 25 bp, Homo sapien
caattaatttgaacctgcaggctga

SEQ ID NO: 793486 - DNA, 25 bp, Homo sapien
cacttgctaagtgacagggcaggga

SEQ ID NO: 793487 - DNA, 25 bp, Homo sapien
gagagcttgccgagaagaaatcact

SEQ ID NO: 793488 - DNA, 25 bp, Homo sapien
gggcatttacttcaggccctattta

SEQ ID NO: 793489 - DNA, 25 bp, Homo sapien
tatttatctgtttcactcctgcacc

SEQ ID NO: 793490 - DNA, 25 bp, Homo sapien
tagaagctcctgtaaggtttttatc

SEQ ID NO: 793491 - DNA, 25 bp, Homo sapien
agagctgttgcgatcgtttgaagga

SEQ ID NO: 793492 - DNA, 25 bp, Homo sapien
ctaaggtttttagagctgtacaggg

SEQ ID NO: 793493 - DNA, 25 bp, Homo sapien
attccatgcttgtctaaggttttta

SEQ ID NO: 793494 - DNA, 25 bp, Homo sapien
ttattccatgcttgtctaaggtttt

SEQ ID NO: 793495 - DNA, 25 bp, Homo sapien
gtctaaggtttttagagctgtacag

SEQ ID NO: 793496 - DNA, 25 bp, Homo sapien
tcaaaaaacgcgtgtccaacagata

SEQ ID NO: 793497 - DNA, 25 bp, Homo sapien
gaggtgacaaacctcactggtaggg

SEQ ID NO: 793498 - DNA, 25 bp, Homo sapien
ggcacatactgccaattagtaagag

SEQ ID NO: 793499 - DNA, 25 bp, Homo sapien
catggtgcattacccagcagtgggc

SEQ ID NO: 793500 - DNA, 25 bp, Homo sapien
tctccttctagttgcaagtccttgc

SEQ ID NO: 793501 - DNA, 25 bp, Homo sapien
caagtccttgcctttgacttttcat

SEQ ID NO: 793502 - DNA, 25 bp, Homo sapien
ttctagttgcaagtccttgcctttg

SEQ ID NO: 793503 - DNA, 25 bp, Homo sapien
tccttctagttgcaagtccttgcct

SEQ ID NO: 793504 - DNA, 25 bp, Homo sapien
tcaggtccagattgatcaacgcaac

SEQ ID NO: 793505 - DNA, 25 bp, Homo sapien
gaatacttccaaatagagtgacacg

SEQ ID NO: 793506 - DNA, 25 bp, Homo sapien
cgttcccaatccttatgctcgaata

SEQ ID NO: 793507 - DNA, 25 bp, Homo sapien
tcaacgcaacagtgcaaaagcatgc

SEQ ID NO: 793508 - DNA, 25 bp, Homo sapien
tgctgtgttacacactaaagtatac

SEQ ID NO: 793509 - DNA, 25 bp, Homo sapien
taaaataagataatggtgaggtacc

SEQ ID NO: 793510 - DNA, 25 bp, Homo sapien
aagtatactactctctttgccaatc

SEQ ID NO: 793511 - DNA, 25 bp, Homo sapien
tatggtccaccatgattggttcctg

SEQ ID NO: 793512 - DNA, 25 bp, Homo sapien
ttcccattacacagaagacatggcc

SEQ ID NO: 793513 - DNA, 25 bp, Homo sapien
ggagatggaacccttgttctaaata

SEQ ID NO: 793514 - DNA, 25 bp, Homo sapien
caactacctggtgaatgatctcatc

SEQ ID NO: 793515 - DNA, 25 bp, Homo sapien
aactgcacactgaaccaactacctg

SEQ ID NO: 793516 - DNA, 25 bp, Homo sapien
tcactatgggcctatgtctgaagca

SEQ ID NO: 793517 - DNA, 25 bp, Homo sapien
cacctgcttgtataacaactaaggc

SEQ ID NO: 793518 - DNA, 25 bp, Homo sapien
aaatctctataaaactctccactgg

SEQ ID NO: 793519 - DNA, 25 bp, Homo sapien
gacgggatactattacactcactat

SEQ ID NO: 793520 - DNA, 25 bp, Homo sapien
tcacaagagcagtattgtaagttgc

SEQ ID NO: 793521 - DNA, 25 bp, Homo sapien
tggacaacgaacactagagctctcc

SEQ ID NO: 793522 - DNA, 25 bp, Homo sapien
tgtaggacaatactgctccaaagag

SEQ ID NO: 793523 - DNA, 25 bp, Homo sapien
tcaacaggcttggataaatggcagt

SEQ ID NO: 793524 - DNA, 25 bp, Homo sapien
ctgctgaaataaacagaagcaaaat

SEQ ID NO: 793525 - DNA, 25 bp, Homo sapien
ctgaaataaacagaagcaaaatgca

SEQ ID NO: 793526 - DNA, 25 bp, Homo sapien
tgaaataaacagaagcaaaatgcat

SEQ ID NO: 793527 - DNA, 25 bp, Homo sapien
gctgaaataaacagaagcaaaatgc

SEQ ID NO: 793528 - DNA, 25 bp, Homo sapien
taaaatactcgtggctcaaggcagc

SEQ ID NO: 793529 - DNA, 25 bp, Homo sapien
ttcccatagccgtggcggcaggtca

SEQ ID NO: 793530 - DNA, 25 bp, Homo sapien
attgtaggagcttggaggccaggtc

SEQ ID NO: 793531 - DNA, 25 bp, Homo sapien
tcaaggcagcctgtgccgacagtct

SEQ ID NO: 793532 - DNA, 25 bp, Homo sapien
cagcttctggttgcaatctcacatt

SEQ ID NO: 793533 - DNA, 25 bp, Homo sapien
tttcccaaaggcccgcatgctttct

SEQ ID NO: 793534 - DNA, 25 bp, Homo sapien
agcttctggttgcaatctcacattt

SEQ ID NO: 793535 - DNA, 25 bp, Homo sapien
ccagcttctggttgcaatctcacat

SEQ ID NO: 793536 - DNA, 25 bp, Homo sapien
cagtgcttgctgtttgatagacttt

SEQ ID NO: 793537 - DNA, 25 bp, Homo sapien
tgcttgctgtttgatagacttttgc

SEQ ID NO: 793538 - DNA, 25 bp, Homo sapien
tcagtgcttgctgtttgatagactt

SEQ ID NO: 793539 - DNA, 25 bp, Homo sapien
ttgctgtttgatagacttttgccat

SEQ ID NO: 793540 - DNA, 25 bp, Homo sapien
tgtgctcttgagaatgtgctgcttg

SEQ ID NO: 793541 - DNA, 25 bp, Homo sapien
tctaggcattacaaagaattgggac

SEQ ID NO: 793542 - DNA, 25 bp, Homo sapien
cttgtaactccccaaagagagatgg

SEQ ID NO: 793543 - DNA, 25 bp, Homo sapien
cagtcaatgaattcaacagcaacgc

SEQ ID NO: 793544 - DNA, 25 bp, Homo sapien
gagatggttaaaatgccggccggcc

SEQ ID NO: 793545 - DNA, 25 bp, Homo sapien
ctctctgcttcatgatgatggctac

SEQ ID NO: 793546 - DNA, 25 bp, Homo sapien
tggctacatcaatcagagccactct

SEQ ID NO: 793547 - DNA, 25 bp, Homo sapien
gatgatggctacatcaatcagagcc

SEQ ID NO: 793548 - DNA, 25 bp, Homo sapien
tgacacaacagctttgctctctgct

SEQ ID NO: 793549 - DNA, 25 bp, Homo sapien
tcccatgtgaagaatatcgcagaag

SEQ ID NO: 793550 - DNA, 25 bp, Homo sapien
gagtgacgagtatccatgggacagc

SEQ ID NO: 793551 - DNA, 25 bp, Homo sapien
tgtttaaggacatgaaaccctggct

SEQ ID NO: 793552 - DNA, 25 bp, Homo sapien
tttctacccagacaaagctcccatg

SEQ ID NO: 793553 - DNA, 25 bp, Homo sapien
gtgtgtgcatgcgttggttagcaga

SEQ ID NO: 793554 - DNA, 25 bp, Homo sapien
tgtgcatgcgttggttagcagagaa

SEQ ID NO: 793555 - DNA, 25 bp, Homo sapien
tgcgttggttagcagagaaagcagc

SEQ ID NO: 793556 - DNA, 25 bp, Homo sapien
catgcgttggttagcagagaaagca

SEQ ID NO: 793557 - DNA, 25 bp, Homo sapien
taacttgctaatgagccgagagctt

SEQ ID NO: 793558 - DNA, 25 bp, Homo sapien
ttaagcccgcatcctgtaacttgct

SEQ ID NO: 793559 - DNA, 25 bp, Homo sapien
tttcccatttcgaatgctgctggca

SEQ ID NO: 793560 - DNA, 25 bp, Homo sapien
catttgtcccctctagtgataaaca

SEQ ID NO: 793561 - DNA, 25 bp, Homo sapien
caagcgggcagtggacctctgagga

SEQ ID NO: 793562 - DNA, 25 bp, Homo sapien
aaatagttcaggtctgggcaagcgg

SEQ ID NO: 793563 - DNA, 25 bp, Homo sapien
tctgaggactgtagcatgttcttgc

SEQ ID NO: 793564 - DNA, 25 bp, Homo sapien
tcttgcaggtaggtcaacaatgcca

SEQ ID NO: 793565 - DNA, 25 bp, Homo sapien
tctcttcgcaaggagttgggaacac

SEQ ID NO: 793566 - DNA, 25 bp, Homo sapien
ttgggaacactgacctcgaatgatg

SEQ ID NO: 793567 - DNA, 25 bp, Homo sapien
tgcttgttattgcaaatcacaggac

SEQ ID NO: 793568 - DNA, 25 bp, Homo sapien
tagggctgattcacttgtctaagaa

SEQ ID NO: 793569 - DNA, 25 bp, Homo sapien
tttgaagtcgccagtgaaggtgcca

SEQ ID NO: 793570 - DNA, 25 bp, Homo sapien
gaggctcccaaatcttcagttctgc

SEQ ID NO: 793571 - DNA, 25 bp, Homo sapien
caagtcctattatgccagaggctcc

SEQ ID NO: 793572 - DNA, 25 bp, Homo sapien
tactgagggtcatgaaacttacact

SEQ ID NO: 793573 - DNA, 25 bp, Homo sapien
ctatagtcactagcctgtgtccatc

SEQ ID NO: 793574 - DNA, 25 bp, Homo sapien
tagtcactagcctgtgtccatctcc

SEQ ID NO: 793575 - DNA, 25 bp, Homo sapien
tctatagtcactagcctgtgtccat

SEQ ID NO: 793576 - DNA, 25 bp, Homo sapien
atagtcactagcctgtgtccatctc

SEQ ID NO: 793577 - DNA, 25 bp, Homo sapien
cagttccgataactcatctttattc

SEQ ID NO: 793578 - DNA, 25 bp, Homo sapien
tgctctgcggctgattttcagttcc

SEQ ID NO: 793579 - DNA, 25 bp, Homo sapien
ggctgattttcagttccgataactc

SEQ ID NO: 793580 - DNA, 25 bp, Homo sapien
tgattttcagttccgataactcatc

SEQ ID NO: 793581 - DNA, 25 bp, Homo sapien
ttactgtggtctggagcccattggc

SEQ ID NO: 793582 - DNA, 25 bp, Homo sapien
tccccggctcattgagattactgtg

SEQ ID NO: 793583 - DNA, 25 bp, Homo sapien
gcggactcttggttgtcatgcacaa

SEQ ID NO: 793584 - DNA, 25 bp, Homo sapien
ttttggtcccatcgcctaacttctg

SEQ ID NO: 793585 - DNA, 25 bp, Homo sapien
tacaggactttaatagggcctggca

SEQ ID NO: 793586 - DNA, 25 bp, Homo sapien
tgcaaaacttgagcccatgccttgg

SEQ ID NO: 793587 - DNA, 25 bp, Homo sapien
gtaatattgtatgctacgtgccctg

SEQ ID NO: 793588 - DNA, 25 bp, Homo sapien
tgtgttgccaacgttctgctatgta

SEQ ID NO: 793589 - DNA, 25 bp, Homo sapien
ttgtgactgtatgaaccaggccgca

SEQ ID NO: 793590 - DNA, 25 bp, Homo sapien
caacatatctgtggttggttgcaat

SEQ ID NO: 793591 - DNA, 25 bp, Homo sapien
tagttactactgtgcataatgcttg

SEQ ID NO: 793592 - DNA, 25 bp, Homo sapien
tgcaatgtactattagagcgtgggt

SEQ ID NO: 793593 - DNA, 25 bp, Homo sapien
ggttttctctacacatggcaggcag

SEQ ID NO: 793594 - DNA, 25 bp, Homo sapien
aggcagctgtcagaaccagtgtgag

SEQ ID NO: 793595 - DNA, 25 bp, Homo sapien
gctctgttaaatcatggggttccat

SEQ ID NO: 793596 - DNA, 25 bp, Homo sapien
ctgtgacagggtttcagcctgtgag

SEQ ID NO: 793597 - DNA, 25 bp, Homo sapien
tttgacctctaaggaacagctcgtg

SEQ ID NO: 793598 - DNA, 25 bp, Homo sapien
cacaatgctatttgggccgagtagg

SEQ ID NO: 793599 - DNA, 25 bp, Homo sapien
gaggcaatgcaaccaggcaacagga

SEQ ID NO: 793600 - DNA, 25 bp, Homo sapien
cattagccatgataacgcagggtac

SEQ ID NO: 793601 - DNA, 25 bp, Homo sapien
ttacacacacccacattgatttatt

SEQ ID NO: 793602 - DNA, 25 bp, Homo sapien
gccatcatcagaactaagcagtaga

SEQ ID NO: 793603 - DNA, 25 bp, Homo sapien
tggtaacccatgcaaataacaatat

SEQ ID NO: 793604 - DNA, 25 bp, Homo sapien
gagtaccaaggtgtcaaatatcatg

SEQ ID NO: 793605 - DNA, 25 bp, Homo sapien
aaaagggcgggaaatcaagagactg

SEQ ID NO: 793606 - DNA, 25 bp, Homo sapien
cacactgggccaagaaccatttctt

SEQ ID NO: 793607 - DNA, 25 bp, Homo sapien
tgtgcttggcataggccaggtgttc

SEQ ID NO: 793608 - DNA, 25 bp, Homo sapien
ggagagcctgtagtcatagcaagca

SEQ ID NO: 793609 - DNA, 25 bp, Homo sapien
taatgaggttgttgaacttaagacc

SEQ ID NO: 793610 - DNA, 25 bp, Homo sapien
ttgaagtcacagtcaatcacattct

SEQ ID NO: 793611 - DNA, 25 bp, Homo sapien
tctgtgatttaggctttcttctctg

SEQ ID NO: 793612 - DNA, 25 bp, Homo sapien
acagtcttgactctgtgatttaggc

SEQ ID NO: 793613 - DNA, 25 bp, Homo sapien
caacgaacaactgatcgaccaagga

SEQ ID NO: 793614 - DNA, 25 bp, Homo sapien
cactgaattcatccgtggaagcgaa

SEQ ID NO: 793615 - DNA, 25 bp, Homo sapien
gaagcgaagctctgtgtactacatg

SEQ ID NO: 793616 - DNA, 25 bp, Homo sapien
tgcttcacaacagtgccaacgaaca

SEQ ID NO: 793617 - DNA, 25 bp, Homo sapien
catccttgcttgattgtgcagatat

SEQ ID NO: 793618 - DNA, 25 bp, Homo sapien
gcttgtgggcagttctccataaggc

SEQ ID NO: 793619 - DNA, 25 bp, Homo sapien
cttgtgggcagttctccataaggct

SEQ ID NO: 793620 - DNA, 25 bp, Homo sapien
ccaccacagggagcgaaagaaaact

SEQ ID NO: 793621 - DNA, 25 bp, Homo sapien
gaagaagctgcctacgacagggaga

SEQ ID NO: 793622 - DNA, 25 bp, Homo sapien
caaggtatccaaatgcgtgcaaggt

SEQ ID NO: 793623 - DNA, 25 bp, Homo sapien
tgtaagccctaacaggccaagactg

SEQ ID NO: 793624 - DNA, 25 bp, Homo sapien
acatttcttaggtaccaatcccctg

SEQ ID NO: 793625 - DNA, 25 bp, Homo sapien
tgacagctgacaaaccattacatct

SEQ ID NO: 793626 - DNA, 25 bp, Homo sapien
caatcccctgttagaaagtacacat

SEQ ID NO: 793627 - DNA, 25 bp, Homo sapien
cactcccaactagagaatgtaggtt

SEQ ID NO: 793628 - DNA, 25 bp, Homo sapien
ctcgaactgggccatacaagctgca

SEQ ID NO: 793629 - DNA, 25 bp, Homo sapien
aatacctggtgaaccctcgaactgg

SEQ ID NO: 793630 - DNA, 25 bp, Homo sapien
taggtatcttacttccttagggagc

SEQ ID NO: 793631 - DNA, 25 bp, Homo sapien
taaagtggatctctttgtacctcaa

SEQ ID NO: 793632 - DNA, 25 bp, Homo sapien
agaaggcgtctgcagaaggatccat

SEQ ID NO: 793633 - DNA, 25 bp, Homo sapien
gagaaggcgtctgcagaaggatcca

SEQ ID NO: 793634 - DNA, 25 bp, Homo sapien
aggtggcaattgcagaaagtacaca

SEQ ID NO: 793635 - DNA, 25 bp, Homo sapien
gaggtggcaattgcagaaagtacac

SEQ ID NO: 793636 - DNA, 25 bp, Homo sapien
aggaggtggcaattgcagaaagtac

SEQ ID NO: 793637 - DNA, 25 bp, Homo sapien
ggaggtggcaattgcagaaagtaca

SEQ ID NO: 793638 - DNA, 25 bp, Homo sapien
cattagctgcattgactttcaaagc

SEQ ID NO: 793639 - DNA, 25 bp, Homo sapien
gatttggagcgtttcctacttgaag

SEQ ID NO: 793640 - DNA, 25 bp, Homo sapien
ctggagcaggaagatttggagcgtt

SEQ ID NO: 793641 - DNA, 25 bp, Homo sapien
ggagcgtttcctacttgaagttcat

SEQ ID NO: 793642 - DNA, 25 bp, Homo sapien
ctagcattaccaagtccgtagaaat

SEQ ID NO: 793643 - DNA, 25 bp, Homo sapien
cctctgtgactcactagcattacca

SEQ ID NO: 793644 - DNA, 25 bp, Homo sapien
ctctaatgagatgggttgagtcgct

SEQ ID NO: 793645 - DNA, 25 bp, Homo sapien
gaggtgcctcgttgactctaatgag

SEQ ID NO: 793646 - DNA, 25 bp, Homo sapien
tgctagtataccagctagccatcac

SEQ ID NO: 793647 - DNA, 25 bp, Homo sapien
gagcctctgatacccttttctgaca

SEQ ID NO: 793648 - DNA, 25 bp, Homo sapien
gcaaactggtgggagaattttactc

SEQ ID NO: 793649 - DNA, 25 bp, Homo sapien
caaactggtgggagaattttactct

SEQ ID NO: 793650 - DNA, 25 bp, Homo sapien
aaaacatctttgcttactataacaa

SEQ ID NO: 793651 - DNA, 25 bp, Homo sapien
aaaaacatctttgcttactataaca

SEQ ID NO: 793652 - DNA, 25 bp, Homo sapien
aaacatctttgcttactataacaac

SEQ ID NO: 793653 - DNA, 25 bp, Homo sapien
cgggagctgcactcgccggcagctt

SEQ ID NO: 793654 - DNA, 25 bp, Homo sapien
gtgggggcgcctctctgggatcgtc

SEQ ID NO: 793655 - DNA, 25 bp, Homo sapien
ggcgggagctgcactcgccggcagc

SEQ ID NO: 793656 - DNA, 25 bp, Homo sapien
tcgccgctccagaccgcagaggtgg

SEQ ID NO: 793657 - DNA, 25 bp, Homo sapien
gaggctcagggaccgtcgcccaatc

SEQ ID NO: 793658 - DNA, 25 bp, Homo sapien
gcttcccggcgcaaagggagccggc

SEQ ID NO: 793659 - DNA, 25 bp, Homo sapien
aggagccttgaaaccgacgcagaac

SEQ ID NO: 793660 - DNA, 25 bp, Homo sapien
tgaaaccgacgcagaactggaggct

SEQ ID NO: 793661 - DNA, 25 bp, Homo sapien
catttgtgtcaatccctcaactcgc

SEQ ID NO: 793662 - DNA, 25 bp, Homo sapien
cgcgcgccctcggaccggtttccag

SEQ ID NO: 793663 - DNA, 25 bp, Homo sapien
aggcgccccgtagtctgtctttcac

SEQ ID NO: 793664 - DNA, 25 bp, Homo sapien
cggtttccaggcgccccgtagtctg

SEQ ID NO: 793665 - DNA, 25 bp, Homo sapien
gtagagagcgcaactctccgcagcc

SEQ ID NO: 793666 - DNA, 25 bp, Homo sapien
ctctccgcagcccagcgggctcggc

SEQ ID NO: 793667 - DNA, 25 bp, Homo sapien
gcggccccgtagagagcgcaactct

SEQ ID NO: 793668 - DNA, 25 bp, Homo sapien
cggcgccgcgctagtggccgcggcc

SEQ ID NO: 793669 - DNA, 25 bp, Homo sapien
gtcgtgtcccgccttcctggccctc

SEQ ID NO: 793670 - DNA, 25 bp, Homo sapien
tcgtgtcccgccttcctggccctcg

SEQ ID NO: 793671 - DNA, 25 bp, Homo sapien
gccgccgcggaaacttgcgattcat

SEQ ID NO: 793672 - DNA, 25 bp, Homo sapien
cggctcctgttctgcgtaccgcagc

SEQ ID NO: 793673 - DNA, 25 bp, Homo sapien
tccgtcgagcccaagccgctttcgg

SEQ ID NO: 793674 - DNA, 25 bp, Homo sapien
ctctgcgcgggtgccctccgtcgag

SEQ ID NO: 793675 - DNA, 25 bp, Homo sapien
tttctcggctcctctcttggcgccg

SEQ ID NO: 793676 - DNA, 25 bp, Homo sapien
ttctcggctcctctcttggcgccgc

SEQ ID NO: 793677 - DNA, 25 bp, Homo sapien
ctcggctcctctcttggcgccgctc

SEQ ID NO: 793678 - DNA, 25 bp, Homo sapien
tctcggctcctctcttggcgccgct

SEQ ID NO: 793679 - DNA, 25 bp, Homo sapien
cgggacttcttaggcgcctcctcct

SEQ ID NO: 793680 - DNA, 25 bp, Homo sapien
gctggcgcgccaatcgccgggggtc

SEQ ID NO: 793681 - DNA, 25 bp, Homo sapien
agagcgccccggcacaaagttccca

SEQ ID NO: 793682 - DNA, 25 bp, Homo sapien
agcagcagctggcgcgccaatcgcc

SEQ ID NO: 793683 - DNA, 25 bp, Homo sapien
tccgccagccgggccgagagcgccc

SEQ ID NO: 793684 - DNA, 25 bp, Homo sapien
ggcctggcccctggcccgccgcctg

SEQ ID NO: 793685 - DNA, 25 bp, Homo sapien
cctggcccctggcccgccgcctggg

SEQ ID NO: 793686 - DNA, 25 bp, Homo sapien
ctggcctggcccctggcccgccgcc

SEQ ID NO: 793687 - DNA, 25 bp, Homo sapien
ctggcccctggcccgccgcctgggc

SEQ ID NO: 793688 - DNA, 25 bp, Homo sapien
ccaggcggccaggtgaaaatactgt

SEQ ID NO: 793689 - DNA, 25 bp, Homo sapien
taacagccggacaagaagatgatgg

SEQ ID NO: 793690 - DNA, 25 bp, Homo sapien
tgtccaccaggtacgtaagcaccgt

SEQ ID NO: 793691 - DNA, 25 bp, Homo sapien
cactgcactttcactagagggtaga

SEQ ID NO: 793692 - DNA, 25 bp, Homo sapien
gaaggcctgctcgtagaagtagcag

SEQ ID NO: 793693 - DNA, 25 bp, Homo sapien
tgggccacccagctgcgttcccact

SEQ ID NO: 793694 - DNA, 25 bp, Homo sapien
gctcgtagaagtagcaggcgatgac

SEQ ID NO: 793695 - DNA, 25 bp, Homo sapien
tgcgttcccactggtcccggaaggc

SEQ ID NO: 793696 - DNA, 25 bp, Homo sapien
tgtagtctccccttgtttgctgttg

SEQ ID NO: 793697 - DNA, 25 bp, Homo sapien
cacgatcagcgtcataaggtactta

SEQ ID NO: 793698 - DNA, 25 bp, Homo sapien
taatcatgaagaccgtgaagtccgg

SEQ ID NO: 793699 - DNA, 25 bp, Homo sapien
tggtgagcctcgtgtagaacttcct

SEQ ID NO: 793700 - DNA, 25 bp, Homo sapien
ccggtaaaatctaagcgcaggctgt

SEQ ID NO: 793701 - DNA, 25 bp, Homo sapien
taaaagcgaacagtcctggtaccag

SEQ ID NO: 793702 - DNA, 25 bp, Homo sapien
gatgtcaggattggcacgaactcca

SEQ ID NO: 793703 - DNA, 25 bp, Homo sapien
tcaaaggagcctgcgaaagagagtt

SEQ ID NO: 793704 - DNA, 25 bp, Homo sapien
ggattggctatgagacaccataaaa

SEQ ID NO: 793705 - DNA, 25 bp, Homo sapien
ctgtgggattggctatgagacacca

SEQ ID NO: 793706 - DNA, 25 bp, Homo sapien
gaatttttacactgtgggattggct

SEQ ID NO: 793707 - DNA, 25 bp, Homo sapien
ttttcttgggacttcacaaatgtca

SEQ ID NO: 793708 - DNA, 25 bp, Homo sapien
gaagagataagacaatacctctaaa

SEQ ID NO: 793709 - DNA, 25 bp, Homo sapien
gttttgtaatatccaagattatgga

SEQ ID NO: 793710 - DNA, 25 bp, Homo sapien
tgtaatatccaagattatggaagag

SEQ ID NO: 793711 - DNA, 25 bp, Homo sapien
tttgtaatatccaagattatggaag

SEQ ID NO: 793712 - DNA, 25 bp, Homo sapien
aaaggaccaggccagtaaactcagg

SEQ ID NO: 793713 - DNA, 25 bp, Homo sapien
gacacgtcctattttgccaccagta

SEQ ID NO: 793714 - DNA, 25 bp, Homo sapien
ggacagtgatctgcggccactcaag

SEQ ID NO: 793715 - DNA, 25 bp, Homo sapien
cagcaatgctaatgggacagtatcc

SEQ ID NO: 793716 - DNA, 25 bp, Homo sapien
tccacctctagacatacgtacgact

SEQ ID NO: 793717 - DNA, 25 bp, Homo sapien
ggttcctacacattaatcctgcaag

SEQ ID NO: 793718 - DNA, 25 bp, Homo sapien
aaatgttaagggctattggcatctg

SEQ ID NO: 793719 - DNA, 25 bp, Homo sapien
ggttctaagcaagctgttttgtcac

SEQ ID NO: 793720 - DNA, 25 bp, Homo sapien
gaactgccctctgaattaagtatta

SEQ ID NO: 793721 - DNA, 25 bp, Homo sapien
taaaaatgcatgtgccttagccttg

SEQ ID NO: 793722 - DNA, 25 bp, Homo sapien
atttgctatttggaaggaattgctc

SEQ ID NO: 793723 - DNA, 25 bp, Homo sapien
ggaattgctcctaaatgaccatcta

SEQ ID NO: 793724 - DNA, 25 bp, Homo sapien
tattgtacaactttttggaatacta

SEQ ID NO: 793725 - DNA, 25 bp, Homo sapien
ctgatgacgcagtaacatgatacct

SEQ ID NO: 793726 - DNA, 25 bp, Homo sapien
tgctgccaatgagccaactctttct

SEQ ID NO: 793727 - DNA, 25 bp, Homo sapien
catgatacctccagcgaaccaaatc

SEQ ID NO: 793728 - DNA, 25 bp, Homo sapien
ctccaatgaagtagggcacttttca

SEQ ID NO: 793729 - DNA, 25 bp, Homo sapien
tcatagatggcttcagctccagctt

SEQ ID NO: 793730 - DNA, 25 bp, Homo sapien
cagagttatagtcattggactggca

SEQ ID NO: 793731 - DNA, 25 bp, Homo sapien
caaaccagacagtgagctacttccc

SEQ ID NO: 793732 - DNA, 25 bp, Homo sapien
tctcaacttgtgtggagctatcaga

SEQ ID NO: 793733 - DNA, 25 bp, Homo sapien
tgtgtccttgagaaacaaccttgaa

SEQ ID NO: 793734 - DNA, 25 bp, Homo sapien
tccttgagaaacaaccttgaatgct

SEQ ID NO: 793735 - DNA, 25 bp, Homo sapien
ggtcccaagctgcaaggagccagcc

SEQ ID NO: 793736 - DNA, 25 bp, Homo sapien
gaaacaaccttgaatgctgtccaga

SEQ ID NO: 793737 - DNA, 25 bp, Homo sapien
tgtaggcacagcaatcataaggcat

SEQ ID NO: 793738 - DNA, 25 bp, Homo sapien
agacactttgctggcgcacgctgga

SEQ ID NO: 793739 - DNA, 25 bp, Homo sapien
cacgctggaagcgaatgttctccca

SEQ ID NO: 793740 - DNA, 25 bp, Homo sapien
tctgtgactgacatccggttaggag

SEQ ID NO: 793741 - DNA, 25 bp, Homo sapien
taaagctgacaaaaccgcacatctg

SEQ ID NO: 793742 - DNA, 25 bp, Homo sapien
tgcaggtgtttctctatcacaatga

SEQ ID NO: 793743 - DNA, 25 bp, Homo sapien
gcaggtgtttctctatcacaatgaa

SEQ ID NO: 793744 - DNA, 25 bp, Homo sapien
gacaaaaccgcacatctgaaatctg

SEQ ID NO: 793745 - DNA, 25 bp, Homo sapien
tcggttggaagtttggcacatagta

SEQ ID NO: 793746 - DNA, 25 bp, Homo sapien
aatcttcttaatcacatattgtgtt

SEQ ID NO: 793747 - DNA, 25 bp, Homo sapien
aattgttgtcaggattcggttggaa

SEQ ID NO: 793748 - DNA, 25 bp, Homo sapien
cttaaggaattgttgtcaggattcg

SEQ ID NO: 793749 - DNA, 25 bp, Homo sapien
tgtatgaacccggaaatgtcaacct

SEQ ID NO: 793750 - DNA, 25 bp, Homo sapien
gaacccggaaatgtcaacctcagtg

SEQ ID NO: 793751 - DNA, 25 bp, Homo sapien
tccttgttgtatgaacccggaaatg

SEQ ID NO: 793752 - DNA, 25 bp, Homo sapien
cccatccttgttgtatgaacccgga

SEQ ID NO: 793753 - DNA, 25 bp, Homo sapien
accatgaaagcagatctaagtgacc

SEQ ID NO: 793754 - DNA, 25 bp, Homo sapien
taagtgaccatgcatatctaaaaga

SEQ ID NO: 793755 - DNA, 25 bp, Homo sapien
taaaggtctgcagttacagtcattc

SEQ ID NO: 793756 - DNA, 25 bp, Homo sapien
gagctctcattgtccttgtaaaggt

SEQ ID NO: 793757 - DNA, 25 bp, Homo sapien
tctgtctccaccataagtctatatc

SEQ ID NO: 793758 - DNA, 25 bp, Homo sapien
ctctaggaagatgagctactttggg

SEQ ID NO: 793759 - DNA, 25 bp, Homo sapien
ctatatcttctaagtccataacttg

SEQ ID NO: 793760 - DNA, 25 bp, Homo sapien
gaagatgagctactttgggttatta

SEQ ID NO: 793761 - DNA, 25 bp, Homo sapien
tcattccagaaacaaccacgaaggg

SEQ ID NO: 793762 - DNA, 25 bp, Homo sapien
gctgagacactcaggcacccttgag

SEQ ID NO: 793763 - DNA, 25 bp, Homo sapien
ccacgaagggctttctggagacgct

SEQ ID NO: 793764 - DNA, 25 bp, Homo sapien
tgctaggcaaaatccaccatgagtc

SEQ ID NO: 793765 - DNA, 25 bp, Homo sapien
gacttatcgaaggacacatctcatg

SEQ ID NO: 793766 - DNA, 25 bp, Homo sapien
tgccttgaggtaatccactactgac

SEQ ID NO: 793767 - DNA, 25 bp, Homo sapien
tattggagccttagttgtcccctgc

SEQ ID NO: 793768 - DNA, 25 bp, Homo sapien
gcaattcatcctttctattggagcc

SEQ ID NO: 793769 - DNA, 25 bp, Homo sapien
gagaagctctgtagtggacaacgga

SEQ ID NO: 793770 - DNA, 25 bp, Homo sapien
tccagccatcagagaccaattccag

SEQ ID NO: 793771 - DNA, 25 bp, Homo sapien
ccatggccagcagtagaagctttgt

SEQ ID NO: 793772 - DNA, 25 bp, Homo sapien
cagggctccagtgtgaaagatccag

SEQ ID NO: 793773 - DNA, 25 bp, Homo sapien
gcctctatgcactggaagctagtag

SEQ ID NO: 793774 - DNA, 25 bp, Homo sapien
tttcgaaacattggccaaatcgccc

SEQ ID NO: 793775 - DNA, 25 bp, Homo sapien
gcccaggatccacagctagtaagct

SEQ ID NO: 793776 - DNA, 25 bp, Homo sapien
catagatgtaatgcttagggaagcc

SEQ ID NO: 793777 - DNA, 25 bp, Homo sapien
tcctaaacttcctagtgggctaaga

SEQ ID NO: 793778 - DNA, 25 bp, Homo sapien
ccagacactgcgctaaacattttac

SEQ ID NO: 793779 - DNA, 25 bp, Homo sapien
ttagatggacaaaaactattccctg

SEQ ID NO: 793780 - DNA, 25 bp, Homo sapien
gcaccagccccatgacgtaatatta

SEQ ID NO: 793781 - DNA, 25 bp, Homo sapien
tacaaactcgggcatcttccaggta

SEQ ID NO: 793782 - DNA, 25 bp, Homo sapien
tatactgatattccccagataacac

SEQ ID NO: 793783 - DNA, 25 bp, Homo sapien
ttagcctagcaccagaaaagcccaa

SEQ ID NO: 793784 - DNA, 25 bp, Homo sapien
ccagggatgatctccctttgatggg

SEQ ID NO: 793785 - DNA, 25 bp, Homo sapien
ttgaccataacagcaaggtccagcc

SEQ ID NO: 793786 - DNA, 25 bp, Homo sapien
tttgcttgaccataacagcaaggtc

SEQ ID NO: 793787 - DNA, 25 bp, Homo sapien
cccaggagtggctttttgcttgacc

SEQ ID NO: 793788 - DNA, 25 bp, Homo sapien
cagattggaatgtaatacccaggag

SEQ ID NO: 793789 - DNA, 25 bp, Homo sapien
cagaagaagtctctttaagagtgaa

SEQ ID NO: 793790 - DNA, 25 bp, Homo sapien
tgctcttagatgcagaggaaactgg

SEQ ID NO: 793791 - DNA, 25 bp, Homo sapien
gccaagcatgtctccatgctcttag

SEQ ID NO: 793792 - DNA, 25 bp, Homo sapien
aagagtgaagaatgccaagcatgtc

SEQ ID NO: 793793 - DNA, 25 bp, Homo sapien
tactaatattaacgttgatgtaaat

SEQ ID NO: 793794 - DNA, 25 bp, Homo sapien
aataaagatgtttatggtgacataa

SEQ ID NO: 793795 - DNA, 25 bp, Homo sapien
acaatactaatattaacgttgatgt

SEQ ID NO: 793796 - DNA, 25 bp, Homo sapien
attaacgttgatgtaaataaagatg

SEQ ID NO: 793797 - DNA, 25 bp, Homo sapien
cagagggagagtaaccacatgagtg

SEQ ID NO: 793798 - DNA, 25 bp, Homo sapien
tcagtgggccattatcacagtgctc

SEQ ID NO: 793799 - DNA, 25 bp, Homo sapien
gacatttcccttgcatgggtgaacg

SEQ ID NO: 793800 - DNA, 25 bp, Homo sapien
gcaatgagatcagcgttcaacagga

SEQ ID NO: 793801 - DNA, 25 bp, Homo sapien
gatgcctgtagatggacaatggttt

SEQ ID NO: 793802 - DNA, 25 bp, Homo sapien
gaagatgcctgtagatggacaatgg

SEQ ID NO: 793803 - DNA, 25 bp, Homo sapien
aggaagatgcctgtagatggacaat

SEQ ID NO: 793804 - DNA, 25 bp, Homo sapien
aagatgcctgtagatggacaatggt

SEQ ID NO: 793805 - DNA, 25 bp, Homo sapien
cctctctccacatggaattggcact

SEQ ID NO: 793806 - DNA, 25 bp, Homo sapien
ggaattggcactatatgcaatccaa

SEQ ID NO: 793807 - DNA, 25 bp, Homo sapien
gcaatccaatcactttaggttctcc

SEQ ID NO: 793808 - DNA, 25 bp, Homo sapien
tatgcaatccaatcactttaggttc

SEQ ID NO: 793809 - DNA, 25 bp, Homo sapien
cactgcgccgctgcttctactgcag

SEQ ID NO: 793810 - DNA, 25 bp, Homo sapien
attaacctgcactgcgccgctgctt

SEQ ID NO: 793811 - DNA, 25 bp, Homo sapien
accaggcagggggaaacaggagtct

SEQ ID NO: 793812 - DNA, 25 bp, Homo sapien
ccaggcagggggaaacaggagtctt

SEQ ID NO: 793813 - DNA, 25 bp, Homo sapien
ggcaggcaagctatttcctccggaa

SEQ ID NO: 793814 - DNA, 25 bp, Homo sapien
ctaggctgagatttctccttggtca

SEQ ID NO: 793815 - DNA, 25 bp, Homo sapien
aagctatttcctccggaaatggtgc

SEQ ID NO: 793816 - DNA, 25 bp, Homo sapien
ttaggctaggctgagatttctcctt

SEQ ID NO: 793817 - DNA, 25 bp, Homo sapien
cagctccagttccacgtataaagcc

SEQ ID NO: 793818 - DNA, 25 bp, Homo sapien
tccacgtataaagccctctactctt

SEQ ID NO: 793819 - DNA, 25 bp, Homo sapien
cagttccacgtataaagccctctac

SEQ ID NO: 793820 - DNA, 25 bp, Homo sapien
tccagttccacgtataaagccctct

SEQ ID NO: 793821 - DNA, 25 bp, Homo sapien
gagtccctattgagcagatacatcc

SEQ ID NO: 793822 - DNA, 25 bp, Homo sapien
tcctgctgtcagctgagtccctatt

SEQ ID NO: 793823 - DNA, 25 bp, Homo sapien
gctgagtccctattgagcagataca

SEQ ID NO: 793824 - DNA, 25 bp, Homo sapien
tgtcagctgagtccctattgagcag

SEQ ID NO: 793825 - DNA, 25 bp, Homo sapien
cattccatgtgggtggggaggcctc

SEQ ID NO: 793826 - DNA, 25 bp, Homo sapien
tccatgtgggtggggaggcctcaca

SEQ ID NO: 793827 - DNA, 25 bp, Homo sapien
ttccatgtgggtggggaggcctcac

SEQ ID NO: 793828 - DNA, 25 bp, Homo sapien
attccatgtgggtggggaggcctca

SEQ ID NO: 793829 - DNA, 25 bp, Homo sapien
gcagactgtataggcttctgctgct

SEQ ID NO: 793830 - DNA, 25 bp, Homo sapien
gttctgcagactgtataggcttctg

SEQ ID NO: 793831 - DNA, 25 bp, Homo sapien
tctgcagactgtataggcttctgct

SEQ ID NO: 793832 - DNA, 25 bp, Homo sapien
tgcagactgtataggcttctgctgc

SEQ ID NO: 793833 - DNA, 25 bp, Homo sapien
gaatgtagtcactgtccacgcagcc

SEQ ID NO: 793834 - DNA, 25 bp, Homo sapien
ccaaataggcatggagctgagaatg

SEQ ID NO: 793835 - DNA, 25 bp, Homo sapien
cagccaccttctgggtagaactcta

SEQ ID NO: 793836 - DNA, 25 bp, Homo sapien
tcttgaaatgggaatctccaagcca

SEQ ID NO: 793837 - DNA, 25 bp, Homo sapien
gaggtcattggaaaagtgactctcc

SEQ ID NO: 793838 - DNA, 25 bp, Homo sapien
cagttgccccactcttatttaggga

SEQ ID NO: 793839 - DNA, 25 bp, Homo sapien
catttgggattgtggtatttagcac

SEQ ID NO: 793840 - DNA, 25 bp, Homo sapien
gatcatttccgttcagcacaattaa

SEQ ID NO: 793841 - DNA, 25 bp, Homo sapien
gggtgaggagtgaaggcctcagacc

SEQ ID NO: 793842 - DNA, 25 bp, Homo sapien
ggaagggtgaggagtgaaggcctca

SEQ ID NO: 793843 - DNA, 25 bp, Homo sapien
gaagggtgaggagtgaaggcctcag

SEQ ID NO: 793844 - DNA, 25 bp, Homo sapien
aagggtgaggagtgaaggcctcaga

SEQ ID NO: 793845 - DNA, 25 bp, Homo sapien
gaggaacaacaccttgaagtttcag

SEQ ID NO: 793846 - DNA, 25 bp, Homo sapien
ctttcctttcgggtcttggattcag

SEQ ID NO: 793847 - DNA, 25 bp, Homo sapien
ctgctttgtgggcaaaacttccttt

SEQ ID NO: 793848 - DNA, 25 bp, Homo sapien
cagaaagcacttggagcattcatca

SEQ ID NO: 793849 - DNA, 25 bp, Homo sapien
cattagcagatgtcacagagattta

SEQ ID NO: 793850 - DNA, 25 bp, Homo sapien
gaggtgtttaaggaaatggcagaca

SEQ ID NO: 793851 - DNA, 25 bp, Homo sapien
ggaaatggcagacattagcagatgt

SEQ ID NO: 793852 - DNA, 25 bp, Homo sapien
tagaggtgtttaaggaaatggcaga

SEQ ID NO: 793853 - DNA, 25 bp, Homo sapien
attcaccaatctgtgtacacacagc

SEQ ID NO: 793854 - DNA, 25 bp, Homo sapien
aattcaccaatctgtgtacacacag

SEQ ID NO: 793855 - DNA, 25 bp, Homo sapien
ttcaccaatctgtgtacacacagct

SEQ ID NO: 793856 - DNA, 25 bp, Homo sapien
ttgccaggtgttttaggccaatgtc

SEQ ID NO: 793857 - DNA, 25 bp, Homo sapien
ccaaggatcttttgccaggtgtttt

SEQ ID NO: 793858 - DNA, 25 bp, Homo sapien
tgttttaggccaatgtcatatttct

SEQ ID NO: 793859 - DNA, 25 bp, Homo sapien
gatcttttgccaggtgttttaggcc

SEQ ID NO: 793860 - DNA, 25 bp, Homo sapien
gaatcctaagtgctttggctgtgga

SEQ ID NO: 793861 - DNA, 25 bp, Homo sapien
tgaattcattcagccgaaaaccact

SEQ ID NO: 793862 - DNA, 25 bp, Homo sapien
gacataagctctctgtgaaaggcca

SEQ ID NO: 793863 - DNA, 25 bp, Homo sapien
aaccactgagtggttgtagaatgcc

SEQ ID NO: 793864 - DNA, 25 bp, Homo sapien
gatgtttcaccacgtttagaattct

SEQ ID NO: 793865 - DNA, 25 bp, Homo sapien
gaggcaccagttctaccattggcat

SEQ ID NO: 793866 - DNA, 25 bp, Homo sapien
cattttcaacggatgtttcaccacg

SEQ ID NO: 793867 - DNA, 25 bp, Homo sapien
ctaaggcattttcaacggatgtttc

SEQ ID NO: 793868 - DNA, 25 bp, Homo sapien
ccaggaggaatcagcttgcacaaac

SEQ ID NO: 793869 - DNA, 25 bp, Homo sapien
gctcttattcggcatccaggaggaa

SEQ ID NO: 793870 - DNA, 25 bp, Homo sapien
ggcagttgctctccaccagcatggg

SEQ ID NO: 793871 - DNA, 25 bp, Homo sapien
gtagtcacagacgtccagctgctgc

SEQ ID NO: 793872 - DNA, 25 bp, Homo sapien
tattcaggtttcgtaggcagtgggt

SEQ ID NO: 793873 - DNA, 25 bp, Homo sapien
cctataaggaggattcaaattcgcc

SEQ ID NO: 793874 - DNA, 25 bp, Homo sapien
cagtccaatggagtgatagtcccag

SEQ ID NO: 793875 - DNA, 25 bp, Homo sapien
caagagtgcatcagctccagtccta

SEQ ID NO: 793876 - DNA, 25 bp, Homo sapien
tttaagtggggagaggagccattct

SEQ ID NO: 793877 - DNA, 25 bp, Homo sapien
gggagaggagccattcttctcaata

SEQ ID NO: 793878 - DNA, 25 bp, Homo sapien
gagaggagccattcttctcaataac

SEQ ID NO: 793879 - DNA, 25 bp, Homo sapien
tggggagaggagccattcttctcaa

SEQ ID NO: 793880 - DNA, 25 bp, Homo sapien
ctagagggccagaatctgcatgcat

SEQ ID NO: 793881 - DNA, 25 bp, Homo sapien
gtgcatagggtatctgttgtatata

SEQ ID NO: 793882 - DNA, 25 bp, Homo sapien
tgtatatagagactagagggccaga

SEQ ID NO: 793883 - DNA, 25 bp, Homo sapien
gggtatctgttgtatatagagacta

SEQ ID NO: 793884 - DNA, 25 bp, Homo sapien
tgtctctcccgctactgttttgtca

SEQ ID NO: 793885 - DNA, 25 bp, Homo sapien
gtcacctgccagctcaatttctagc

SEQ ID NO: 793886 - DNA, 25 bp, Homo sapien
aatttctagcctttcacaataggag

SEQ ID NO: 793887 - DNA, 25 bp, Homo sapien
ctcgtaacccacactggcatggcat

SEQ ID NO: 793888 - DNA, 25 bp, Homo sapien
taagtagataatgttcactctctat

SEQ ID NO: 793889 - DNA, 25 bp, Homo sapien
ggatttgatcatcattaagtagata

SEQ ID NO: 793890 - DNA, 25 bp, Homo sapien
aggattaaggatttgatcatcatta

SEQ ID NO: 793891 - DNA, 25 bp, Homo sapien
catcattaagtagataatgttcact

SEQ ID NO: 793892 - DNA, 25 bp, Homo sapien
cacgcatagccgaagcatttttaag

SEQ ID NO: 793893 - DNA, 25 bp, Homo sapien
aggtaccctgtaaggcaatctggaa

SEQ ID NO: 793894 - DNA, 25 bp, Homo sapien
gcagtaactttctaacagatgcata

SEQ ID NO: 793895 - DNA, 25 bp, Homo sapien
caatctggaattctagttgcttgca

SEQ ID NO: 793896 - DNA, 25 bp, Homo sapien
catctgtggtacatgacggctgcct

SEQ ID NO: 793897 - DNA, 25 bp, Homo sapien
ggtaagttagatgtaacagtgccaa

SEQ ID NO: 793898 - DNA, 25 bp, Homo sapien
ctgcttaggcagctcagcacgcaca

SEQ ID NO: 793899 - DNA, 25 bp, Homo sapien
tgcctcatctgtggtacatgacggc

SEQ ID NO: 793900 - DNA, 25 bp, Homo sapien
gctcttaggctcttaatgagtgaac

SEQ ID NO: 793901 - DNA, 25 bp, Homo sapien
tacaacttattgaagagctcttagg

SEQ ID NO: 793902 - DNA, 25 bp, Homo sapien
gaaactacgctgtttttgtcaggca

SEQ ID NO: 793903 - DNA, 25 bp, Homo sapien
gaagcttttataccacacgattaca

SEQ ID NO: 793904 - DNA, 25 bp, Homo sapien
tgtggcccacctctggtaactgcct

SEQ ID NO: 793905 - DNA, 25 bp, Homo sapien
tggcccacctctggtaactgcctgt

SEQ ID NO: 793906 - DNA, 25 bp, Homo sapien
ggcccacctctggtaactgcctgtg

SEQ ID NO: 793907 - DNA, 25 bp, Homo sapien
ccctgtggcccacctctggtaactg

SEQ ID NO: 793908 - DNA, 25 bp, Homo sapien
tttagctttcttcaggaggtaccgc

SEQ ID NO: 793909 - DNA, 25 bp, Homo sapien
ggaggtaccgcttgtccctatatac

SEQ ID NO: 793910 - DNA, 25 bp, Homo sapien
agctttcttcaggaggtaccgcttg

SEQ ID NO: 793911 - DNA, 25 bp, Homo sapien
taccgcttgtccctatatactgcca

SEQ ID NO: 793912 - DNA, 25 bp, Homo sapien
tcagatactgacaagacaccaaggg

SEQ ID NO: 793913 - DNA, 25 bp, Homo sapien
gacacaccgttggagtttagacaaa

SEQ ID NO: 793914 - DNA, 25 bp, Homo sapien
aggctgacagatcctgaaactttcc

SEQ ID NO: 793915 - DNA, 25 bp, Homo sapien
gggaaggtcagcctcagatactgac

SEQ ID NO: 793916 - DNA, 25 bp, Homo sapien
cacaggtgacctcaggtaggacgta

SEQ ID NO: 793917 - DNA, 25 bp, Homo sapien
ctcaggtaggacgtagttctgtgca

SEQ ID NO: 793918 - DNA, 25 bp, Homo sapien
gactgttctcacaggtgacctcagg

SEQ ID NO: 793919 - DNA, 25 bp, Homo sapien
tctgctgactgttctcacaggtgac

SEQ ID NO: 793920 - DNA, 25 bp, Homo sapien
atgctggggccagtttccaaccttg

SEQ ID NO: 793921 - DNA, 25 bp, Homo sapien
tggggccagtttccaaccttgagct

SEQ ID NO: 793922 - DNA, 25 bp, Homo sapien
gctggggccagtttccaaccttgag

SEQ ID NO: 793923 - DNA, 25 bp, Homo sapien
gggccagtttccaaccttgagctca

SEQ ID NO: 793924 - DNA, 25 bp, Homo sapien
gatgaaacgcgtctaaatggcctca

SEQ ID NO: 793925 - DNA, 25 bp, Homo sapien
cctcagaaggacttggaatgcagcc

SEQ ID NO: 793926 - DNA, 25 bp, Homo sapien
ctaaaacaacagtcgcaatgatgaa

SEQ ID NO: 793927 - DNA, 25 bp, Homo sapien
aatgcagccctgtctatactatcag

SEQ ID NO: 793928 - DNA, 25 bp, Homo sapien
tccaagaaggaggatgaccggggca

SEQ ID NO: 793929 - DNA, 25 bp, Homo sapien
ccaagaaggaggatgaccggggcat

SEQ ID NO: 793930 - DNA, 25 bp, Homo sapien
gtccaagaaggaggatgaccggggc

SEQ ID NO: 793931 - DNA, 25 bp, Homo sapien
agtccaagaaggaggatgaccgggg

SEQ ID NO: 793932 - DNA, 25 bp, Homo sapien
tgcggcgctatttctgagggctccg

SEQ ID NO: 793933 - DNA, 25 bp, Homo sapien
atgcggcgctatttctgagggctcc

SEQ ID NO: 793934 - DNA, 25 bp, Homo sapien
gctatttctgagggctccgttctgt

SEQ ID NO: 793935 - DNA, 25 bp, Homo sapien
tcctcacttctctcaatgctatatc

SEQ ID NO: 793936 - DNA, 25 bp, Homo sapien
tgaagtatgaactggtcctgtgttt

SEQ ID NO: 793937 - DNA, 25 bp, Homo sapien
tgctatatcctttatgaccatgagg

SEQ ID NO: 793938 - DNA, 25 bp, Homo sapien
tttatgaccatgaggtgagtctgcc

SEQ ID NO: 793939 - DNA, 25 bp, Homo sapien
tacagtgtcgctccatcaattaacc

SEQ ID NO: 793940 - DNA, 25 bp, Homo sapien
caccctctgcacatgaagctcttgg

SEQ ID NO: 793941 - DNA, 25 bp, Homo sapien
ctgtgatactccaataaggaaactc

SEQ ID NO: 793942 - DNA, 25 bp, Homo sapien
cagaatcagaatcccctgtgatact

SEQ ID NO: 793943 - DNA, 25 bp, Homo sapien
tgagaatgcctctagctggcaactc

SEQ ID NO: 793944 - DNA, 25 bp, Homo sapien
ctgagaatgcctctagctggcaact

SEQ ID NO: 793945 - DNA, 25 bp, Homo sapien
tagctggcaactccagcaaaggccc

SEQ ID NO: 793946 - DNA, 25 bp, Homo sapien
tatccgacatgtccagctgtgcaaa

SEQ ID NO: 793947 - DNA, 25 bp, Homo sapien
tgtgcaaacagcagcaccgagtgag

SEQ ID NO: 793948 - DNA, 25 bp, Homo sapien
gaagggatgaactcattctatccga

SEQ ID NO: 793949 - DNA, 25 bp, Homo sapien
caccgagtgagctgcagttagctgt

SEQ ID NO: 793950 - DNA, 25 bp, Homo sapien
gatttgctgcctgctacttgctcca

SEQ ID NO: 793951 - DNA, 25 bp, Homo sapien
gactgtgagttgaatattgaggcca

SEQ ID NO: 793952 - DNA, 25 bp, Homo sapien
gaagatcaaggtctgttcgactctg

SEQ ID NO: 793953 - DNA, 25 bp, Homo sapien
tattcctcctcggatatgtgggcct

SEQ ID NO: 793954 - DNA, 25 bp, Homo sapien
caaattggccctcgtctacaaaggt

SEQ ID NO: 793955 - DNA, 25 bp, Homo sapien
tacaatggcagaaaataagggcagg

SEQ ID NO: 793956 - DNA, 25 bp, Homo sapien
tgaatctgagataatgcttgccgct

SEQ ID NO: 793957 - DNA, 25 bp, Homo sapien
gctcttacagtgcatcgccttcgaa

SEQ ID NO: 793958 - DNA, 25 bp, Homo sapien
gtggactagccttactacaaacaag

SEQ ID NO: 793959 - DNA, 25 bp, Homo sapien
cacaattattgtgtgggtggacaat

SEQ ID NO: 793960 - DNA, 25 bp, Homo sapien
ggcctagaattattagaccacacaa

SEQ ID NO: 793961 - DNA, 25 bp, Homo sapien
gactagacttagatgacaatgggtt

SEQ ID NO: 793962 - DNA, 25 bp, Homo sapien
catactgtagaggtttggaaagcat

SEQ ID NO: 793963 - DNA, 25 bp, Homo sapien
gagtttggcgagtgaagtgacaggc

SEQ ID NO: 793964 - DNA, 25 bp, Homo sapien
gtgaaaaaatgtggagtgtctttca

SEQ ID NO: 793965 - DNA, 25 bp, Homo sapien
ttgaagcgagtttggcgagtgaagt

SEQ ID NO: 793966 - DNA, 25 bp, Homo sapien
gggaaacccatgcatctggacgccc

SEQ ID NO: 793967 - DNA, 25 bp, Homo sapien
tagggcatctgacaacctcttttgg

SEQ ID NO: 793968 - DNA, 25 bp, Homo sapien
cgtcacttgaggagattggagaaca

SEQ ID NO: 793969 - DNA, 25 bp, Homo sapien
agtactttggctatcctttggtgga

SEQ ID NO: 793970 - DNA, 25 bp, Homo sapien
gttacattgtgcagtgtgttcccag

SEQ ID NO: 793971 - DNA, 25 bp, Homo sapien
gaaaatacaacaaactccggtctga

SEQ ID NO: 793972 - DNA, 25 bp, Homo sapien
tccactgagagtagctttagacgag

SEQ ID NO: 793973 - DNA, 25 bp, Homo sapien
cacactgatttagcgagggcagcca

SEQ ID NO: 793974 - DNA, 25 bp, Homo sapien
gctcattgacatatgaaacccgcat

SEQ ID NO: 793975 - DNA, 25 bp, Homo sapien
catgtccaaggggctcattgacata

SEQ ID NO: 793976 - DNA, 25 bp, Homo sapien
tatcagcagaaactgcgtggattct

SEQ ID NO: 793977 - DNA, 25 bp, Homo sapien
aattactctgtagctcaaatactca

SEQ ID NO: 793978 - DNA, 25 bp, Homo sapien
aaatttggccattaggagactcttt

SEQ ID NO: 793979 - DNA, 25 bp, Homo sapien
tactgtaaggaagagtcatcatttt

SEQ ID NO: 793980 - DNA, 25 bp, Homo sapien
ggtggacccctttaatctcagtgac

SEQ ID NO: 793981 - DNA, 25 bp, Homo sapien
tggacccctttaatctcagtgactt

SEQ ID NO: 793982 - DNA, 25 bp, Homo sapien
gacccctttaatctcagtgacttct

SEQ ID NO: 793983 - DNA, 25 bp, Homo sapien
gggtggacccctttaatctcagtga

SEQ ID NO: 793984 - DNA, 25 bp, Homo sapien
tcagtttctcaaggctaagtaatat

SEQ ID NO: 793985 - DNA, 25 bp, Homo sapien
caaggctaagtaatatattatctag

SEQ ID NO: 793986 - DNA, 25 bp, Homo sapien
aggtgacacagtgggggatttctca

SEQ ID NO: 793987 - DNA, 25 bp, Homo sapien
tttctcagtttctcaaggctaagta

SEQ ID NO: 793988 - DNA, 25 bp, Homo sapien
tcagattttctctcacacctgcagt

SEQ ID NO: 793989 - DNA, 25 bp, Homo sapien
agtaggagtgacttgtctcttggag

SEQ ID NO: 793990 - DNA, 25 bp, Homo sapien
ctcttggagttgcaaagggttgaca

SEQ ID NO: 793991 - DNA, 25 bp, Homo sapien
taagcaaggcgataaaggagtgagc

SEQ ID NO: 793992 - DNA, 25 bp, Homo sapien
ttgatgaggagattgtacagccagc

SEQ ID NO: 793993 - DNA, 25 bp, Homo sapien
tgatgaggagattgtacagccagcc

SEQ ID NO: 793994 - DNA, 25 bp, Homo sapien
tgatgcaagattagggacccgactg

SEQ ID NO: 793995 - DNA, 25 bp, Homo sapien
gagagcctaaagtctgtgatgcaag

SEQ ID NO: 793996 - DNA, 25 bp, Homo sapien
ggattggactcatccttgctgggca

SEQ ID NO: 793997 - DNA, 25 bp, Homo sapien
gacccgactgcttgtgttaaaggag

SEQ ID NO: 793998 - DNA, 25 bp, Homo sapien
ccttgggtccacattgccaactgtt

SEQ ID NO: 793999 - DNA, 25 bp, Homo sapien
tctctaatttagccttaaccaaggc

SEQ ID NO: 794000 - DNA, 25 bp, Homo sapien
aaccaaggctacagcagcagccttt

SEQ ID NO: 794001 - DNA, 25 bp, Homo sapien
cttgggtccacattgccaactgttg

SEQ ID NO: 794002 - DNA, 25 bp, Homo sapien
atatcctggatttctttctgtttac

SEQ ID NO: 794003 - DNA, 25 bp, Homo sapien
aatatcctggatttctttctgttta

SEQ ID NO: 794004 - DNA, 25 bp, Homo sapien
agacactgcaatatcctggatttct

SEQ ID NO: 794005 - DNA, 25 bp, Homo sapien
ttaagacactgcaatatcctggatt

SEQ ID NO: 794006 - DNA, 25 bp, Homo sapien
acaaggaagttgaactcctgttgcc

SEQ ID NO: 794007 - DNA, 25 bp, Homo sapien
gatgatagtggccaatactggtggt

SEQ ID NO: 794008 - DNA, 25 bp, Homo sapien
tactggtggtttatatttaggacaa

SEQ ID NO: 794009 - DNA, 25 bp, Homo sapien
tcttccactatgctggagccctggc

SEQ ID NO: 794010 - DNA, 25 bp, Homo sapien
caaaattagtgcagttagatcagca

SEQ ID NO: 794011 - DNA, 25 bp, Homo sapien
tgcagttagggagaactgattgtca

SEQ ID NO: 794012 - DNA, 25 bp, Homo sapien
tcatataagtacaatacagctggct

SEQ ID NO: 794013 - DNA, 25 bp, Homo sapien
gatcagcattatcccactctgtatg

SEQ ID NO: 794014 - DNA, 25 bp, Homo sapien
gacctatacttaagtcaggccatga

SEQ ID NO: 794015 - DNA, 25 bp, Homo sapien
catgaactaaacactggtactaata

SEQ ID NO: 794016 - DNA, 25 bp, Homo sapien
gaatttaccgaaagcagctgacccg

SEQ ID NO: 794017 - DNA, 25 bp, Homo sapien
tggaacttgacttggacctatgggc

SEQ ID NO: 794018 - DNA, 25 bp, Homo sapien
tgtgctagcctcaagataatttgga

SEQ ID NO: 794019 - DNA, 25 bp, Homo sapien
caatggacattggaacaacatggaa

SEQ ID NO: 794020 - DNA, 25 bp, Homo sapien
gaaggaggttgccactttgtcaggt

SEQ ID NO: 794021 - DNA, 25 bp, Homo sapien
tgaagaaaggactgcaaaagactac

SEQ ID NO: 794022 - DNA, 25 bp, Homo sapien
ttaagcagatttgcctaaggatgcc

SEQ ID NO: 794023 - DNA, 25 bp, Homo sapien
cagattctccattagagtccccaga

SEQ ID NO: 794024 - DNA, 25 bp, Homo sapien
ggaggaagacaccttgagccaagga

SEQ ID NO: 794025 - DNA, 25 bp, Homo sapien
cagagtgatcctgtataagaaagac

SEQ ID NO: 794026 - DNA, 25 bp, Homo sapien
gaatctgtagattatgtgagccaca

SEQ ID NO: 794027 - DNA, 25 bp, Homo sapien
tctgtgagaatctgtagattatgtg

SEQ ID NO: 794028 - DNA, 25 bp, Homo sapien
attctgtgagaatctgtagattatg

SEQ ID NO: 794029 - DNA, 25 bp, Homo sapien
tgagaatctgtagattatgtgagcc

SEQ ID NO: 794030 - DNA, 25 bp, Homo sapien
atgttgtttgcaagaggtaatgcat

SEQ ID NO: 794031 - DNA, 25 bp, Homo sapien
aatgttgtttgcaagaggtaatgca

SEQ ID NO: 794032 - DNA, 25 bp, Homo sapien
aaatgttgtttgcaagaggtaatgc

SEQ ID NO: 794033 - DNA, 25 bp, Homo sapien
cgcgcgacccgaggccggaagttag

SEQ ID NO: 794034 - DNA, 25 bp, Homo sapien
gctgcgaagggctgaagtaccgcca

SEQ ID NO: 794035 - DNA, 25 bp, Homo sapien
caggcccctagcgtcgggctgcgaa

SEQ ID NO: 794036 - DNA, 25 bp, Homo sapien
gggcgcaggaccaacgacatcacct

SEQ ID NO: 794037 - DNA, 25 bp, Homo sapien
tgcaacacgcatgtaaataatagct

SEQ ID NO: 794038 - DNA, 25 bp, Homo sapien
taatagctacttttccaccacgtgt

SEQ ID NO: 794039 - DNA, 25 bp, Homo sapien
ataagatgccttacagttccccacg

SEQ ID NO: 794040 - DNA, 25 bp, Homo sapien
caccacgtgtcgtcggccggcagtg

SEQ ID NO: 794041 - DNA, 25 bp, Homo sapien
tgttcatcggcatcgcgttagtcac

SEQ ID NO: 794042 - DNA, 25 bp, Homo sapien
ttatcctgcaccaaaaaacgccgag

SEQ ID NO: 794043 - DNA, 25 bp, Homo sapien
caaaaaacgccgagatgttcatcgg

SEQ ID NO: 794044 - DNA, 25 bp, Homo sapien
cattagcagcagcaatcgcattatc

SEQ ID NO: 794045 - DNA, 25 bp, Homo sapien
gggtcataggataatagtggataga

SEQ ID NO: 794046 - DNA, 25 bp, Homo sapien
cataggataatagtggatagaaggt

SEQ ID NO: 794047 - DNA, 25 bp, Homo sapien
aggataatagtggatagaaggtcag

SEQ ID NO: 794048 - DNA, 25 bp, Homo sapien
ggataatagtggatagaaggtcagc

SEQ ID NO: 794049 - DNA, 25 bp, Homo sapien
ctctgaaaagtgggattcggggtgg

SEQ ID NO: 794050 - DNA, 25 bp, Homo sapien
tctgaaaagtgggattcggggtgga

SEQ ID NO: 794051 - DNA, 25 bp, Homo sapien
tcggggtggactttttatgaccata

SEQ ID NO: 794052 - DNA, 25 bp, Homo sapien
gtggactttttatgaccatagccat

SEQ ID NO: 794053 - DNA, 25 bp, Homo sapien
actaacaagcaaaaccaccagctaa

SEQ ID NO: 794054 - DNA, 25 bp, Homo sapien
aacaagcaaaaccaccagctaacat

SEQ ID NO: 794055 - DNA, 25 bp, Homo sapien
tcaactaacaagcaaaaccaccagc

SEQ ID NO: 794056 - DNA, 25 bp, Homo sapien
acaagcaaaaccaccagctaacatc

SEQ ID NO: 794057 - DNA, 25 bp, Homo sapien
catgcccggcttcagatcctgtaga

SEQ ID NO: 794058 - DNA, 25 bp, Homo sapien
gaatttgggccatagtactgtagtg

SEQ ID NO: 794059 - DNA, 25 bp, Homo sapien
tcacggacatttggctgctatgagg

SEQ ID NO: 794060 - DNA, 25 bp, Homo sapien
tactctgggtaagattaggagccat

SEQ ID NO: 794061 - DNA, 25 bp, Homo sapien
cctgagcctacctggaatttttgga

SEQ ID NO: 794062 - DNA, 25 bp, Homo sapien
cctgacatattaaaacgtcctgaat

SEQ ID NO: 794063 - DNA, 25 bp, Homo sapien
tgtgactgccctgacatattaaaac

SEQ ID NO: 794064 - DNA, 25 bp, Homo sapien
tccctgagcctacctggaatttttg

SEQ ID NO: 794065 - DNA, 25 bp, Homo sapien
gaacacctacaagctccaacggaaa

SEQ ID NO: 794066 - DNA, 25 bp, Homo sapien
cacctaatggtgaaattggcgaaca

SEQ ID NO: 794067 - DNA, 25 bp, Homo sapien
tagaacctcggttagggacaatgcc

SEQ ID NO: 794068 - DNA, 25 bp, Homo sapien
taacagtagtgttctgaaaggagcc

SEQ ID NO: 794069 - DNA, 25 bp, Homo sapien
tggcggatcgtcctcagccgcacgg

SEQ ID NO: 794070 - DNA, 25 bp, Homo sapien
tcagccgcacgggaagcgccgtcac

SEQ ID NO: 794071 - DNA, 25 bp, Homo sapien
agccgcacgggaagcgccgtcaccg

SEQ ID NO: 794072 - DNA, 25 bp, Homo sapien
ggatcgtcctcagccgcacgggaag

SEQ ID NO: 794073 - DNA, 25 bp, Homo sapien
gaagtggaagcagtctccgcgctca

SEQ ID NO: 794074 - DNA, 25 bp, Homo sapien
tcgatttggacggaggtgggacggc

SEQ ID NO: 794075 - DNA, 25 bp, Homo sapien
gtgggacggcaagctccacggccta

SEQ ID NO: 794076 - DNA, 25 bp, Homo sapien
tagagagccgattcggtccggcgct

SEQ ID NO: 794077 - DNA, 25 bp, Homo sapien
ttcttctgtctctcctcgtcctcca

SEQ ID NO: 794078 - DNA, 25 bp, Homo sapien
cagcttcttctgtctctcctcgtcc

SEQ ID NO: 794079 - DNA, 25 bp, Homo sapien
cttggctttgccggcctccagcttc

SEQ ID NO: 794080 - DNA, 25 bp, Homo sapien
gcttcttctgtctctcctcgtcctc

SEQ ID NO: 794081 - DNA, 25 bp, Homo sapien
gcaggcccggttgcctcgggctctc

SEQ ID NO: 794082 - DNA, 25 bp, Homo sapien
cgcaggcccggttgcctcgggctct

SEQ ID NO: 794083 - DNA, 25 bp, Homo sapien
gactgcattaacattccataggaca

SEQ ID NO: 794084 - DNA, 25 bp, Homo sapien
ttcggtcctcagaagttccattcac

SEQ ID NO: 794085 - DNA, 25 bp, Homo sapien
taggacacaaaagcgcatgccatga

SEQ ID NO: 794086 - DNA, 25 bp, Homo sapien
cacagactgcattaacattccatag

SEQ ID NO: 794087 - DNA, 25 bp, Homo sapien
tttaaagcaggaattctataggtgt

SEQ ID NO: 794088 - DNA, 25 bp, Homo sapien
ttctataggtgttggcatatggaac

SEQ ID NO: 794089 - DNA, 25 bp, Homo sapien
caggattcgccagagagatatataa

SEQ ID NO: 794090 - DNA, 25 bp, Homo sapien
cgccagagagatatataacaactaa

SEQ ID NO: 794091 - DNA, 25 bp, Homo sapien
cacattgggatctaaaactattagt

SEQ ID NO: 794092 - DNA, 25 bp, Homo sapien
attctaatacacattgggatctaaa

SEQ ID NO: 794093 - DNA, 25 bp, Homo sapien
ctttttgtagctataattctaatac

SEQ ID NO: 794094 - DNA, 25 bp, Homo sapien
tattgagatgtaaatcaggaagtag

SEQ ID NO: 794095 - DNA, 25 bp, Homo sapien
tgcacaactatgcaatgtaataaca

SEQ ID NO: 794096 - DNA, 25 bp, Homo sapien
tggttacactattgcacaactatgc

SEQ ID NO: 794097 - DNA, 25 bp, Homo sapien
tcaggtccatggttacactattgca

SEQ ID NO: 794098 - DNA, 25 bp, Homo sapien
taaaaaccaaggtgaatatcaggtc

SEQ ID NO: 794099 - DNA, 25 bp, Homo sapien
gagctctttggtcattctgagagga

SEQ ID NO: 794100 - DNA, 25 bp, Homo sapien
gaactttggtgtatctctgacttga

SEQ ID NO: 794101 - DNA, 25 bp, Homo sapien
gaccagttacaacaatggccagaaa

SEQ ID NO: 794102 - DNA, 25 bp, Homo sapien
gaagtctgagtttttagggtaggca

SEQ ID NO: 794103 - DNA, 25 bp, Homo sapien
gaaaagctaaagagagttcttcaat

SEQ ID NO: 794104 - DNA, 25 bp, Homo sapien
acaagaaaagctaaagagagttctt

SEQ ID NO: 794105 - DNA, 25 bp, Homo sapien
caagaaaagctaaagagagttcttc

SEQ ID NO: 794106 - DNA, 25 bp, Homo sapien
ctgtctgacaagaaaagctaaagag

SEQ ID NO: 794107 - DNA, 25 bp, Homo sapien
aaaaagcagctttgggagtctctct

SEQ ID NO: 794108 - DNA, 25 bp, Homo sapien
ggaaatcaggcactgtcattcactg

SEQ ID NO: 794109 - DNA, 25 bp, Homo sapien
gaataaacctactgaaatattgagg

SEQ ID NO: 794110 - DNA, 25 bp, Homo sapien
tctttaatgtaactactggaatgca

SEQ ID NO: 794111 - DNA, 25 bp, Homo sapien
tcaaatcatggtgtgctgacacatc

SEQ ID NO: 794112 - DNA, 25 bp, Homo sapien
gcttttctttgtcgaaactgggcaa

SEQ ID NO: 794113 - DNA, 25 bp, Homo sapien
ggttatttctccactatgtagagtt

SEQ ID NO: 794114 - DNA, 25 bp, Homo sapien
ttctgcttcttggaaggactctgcc

SEQ ID NO: 794115 - DNA, 25 bp, Homo sapien
ctgctgtggttgaaatttcactttc

SEQ ID NO: 794116 - DNA, 25 bp, Homo sapien
tctgctgtggttgaaatttcacttt

SEQ ID NO: 794117 - DNA, 25 bp, Homo sapien
atctgctgtggttgaaatttcactt

SEQ ID NO: 794118 - DNA, 25 bp, Homo sapien
ttcctggccagattactagtaagta

SEQ ID NO: 794119 - DNA, 25 bp, Homo sapien
gagttgctaaaccattcagagtaca

SEQ ID NO: 794120 - DNA, 25 bp, Homo sapien
aatatggatgccttgtaacagtcac

SEQ ID NO: 794121 - DNA, 25 bp, Homo sapien
caagatacttcccatagaggcaact

SEQ ID NO: 794122 - DNA, 25 bp, Homo sapien
aaatgatcaacactggtcatcagag

SEQ ID NO: 794123 - DNA, 25 bp, Homo sapien
ttaggaggtataccaaatgaaatga

SEQ ID NO: 794124 - DNA, 25 bp, Homo sapien
gaggtataccaaatgaaatgacgag

SEQ ID NO: 794125 - DNA, 25 bp, Homo sapien
aaaatgatcaacactggtcatcaga

SEQ ID NO: 794126 - DNA, 25 bp, Homo sapien
gcaataacctttaggtcaggcatgg

SEQ ID NO: 794127 - DNA, 25 bp, Homo sapien
taggcaataacctttaggtcaggca

SEQ ID NO: 794128 - DNA, 25 bp, Homo sapien
taacctttaggtcaggcatgggcaa

SEQ ID NO: 794129 - DNA, 25 bp, Homo sapien
acctaggcaataacctttaggtcag

SEQ ID NO: 794130 - DNA, 25 bp, Homo sapien
tatcttaccgtgtggaataaacagt

SEQ ID NO: 794131 - DNA, 25 bp, Homo sapien
agatgatgtctccctatgtagccaa

SEQ ID NO: 794132 - DNA, 25 bp, Homo sapien
gaataaacagtgacttagaagatta

SEQ ID NO: 794133 - DNA, 25 bp, Homo sapien
aaaaaactaaattgatgagctatct

SEQ ID NO: 794134 - DNA, 25 bp, Homo sapien
ttctcatcacaaaactgcaaccatt

SEQ ID NO: 794135 - DNA, 25 bp, Homo sapien
gctcttcaatctcatgctgcttccc

SEQ ID NO: 794136 - DNA, 25 bp, Homo sapien
tcactttccatcatctctagatgag

SEQ ID NO: 794137 - DNA, 25 bp, Homo sapien
tagatgagtcggactgtcttgtgct

SEQ ID NO: 794138 - DNA, 25 bp, Homo sapien
gctgcagtccttcagtcccataggt

SEQ ID NO: 794139 - DNA, 25 bp, Homo sapien
gacagttatggcagtctaaccacag

SEQ ID NO: 794140 - DNA, 25 bp, Homo sapien
caggctgattacaaaaacatctgtc

SEQ ID NO: 794141 - DNA, 25 bp, Homo sapien
gaggttacttacaaggacccactga

SEQ ID NO: 794142 - DNA, 25 bp, Homo sapien
gatgttagtctaaccacaagaggtt

SEQ ID NO: 794143 - DNA, 25 bp, Homo sapien
tgttctgtcaactctaaaaattctc

SEQ ID NO: 794144 - DNA, 25 bp, Homo sapien
tgcttgttgtaaattagcagtgagc

SEQ ID NO: 794145 - DNA, 25 bp, Homo sapien
catctctttgtttaatggcagcttc

SEQ ID NO: 794146 - DNA, 25 bp, Homo sapien
tctctcattgtctcatccttttctc

SEQ ID NO: 794147 - DNA, 25 bp, Homo sapien
tctaataagtggtcttgttcttcaa

SEQ ID NO: 794148 - DNA, 25 bp, Homo sapien
ctgctgttgatgagtgaggatctgt

SEQ ID NO: 794149 - DNA, 25 bp, Homo sapien
tgcagctgtgctactatgagtgctg

SEQ ID NO: 794150 - DNA, 25 bp, Homo sapien
tttggcttgtagtaagtctgcagct

SEQ ID NO: 794151 - DNA, 25 bp, Homo sapien
cacttttagggaactcagtaatgac

SEQ ID NO: 794152 - DNA, 25 bp, Homo sapien
ttgtgattcatgtgcctaacaaaaa

SEQ ID NO: 794153 - DNA, 25 bp, Homo sapien
ttcagtttaacataggctgatcact

SEQ ID NO: 794154 - DNA, 25 bp, Homo sapien
taaaaactacattactgagattccc

SEQ ID NO: 794155 - DNA, 25 bp, Homo sapien
gaggtagctcgtctcagttgacagg

SEQ ID NO: 794156 - DNA, 25 bp, Homo sapien
caatgaatgttatcctatgcagcct

SEQ ID NO: 794157 - DNA, 25 bp, Homo sapien
ttctgaacctacaagtcgaaggcca

SEQ ID NO: 794158 - DNA, 25 bp, Homo sapien
catgttattaccaagtcctgagcct

SEQ ID NO: 794159 - DNA, 25 bp, Homo sapien
taatttatcctttagctcaagagtt

SEQ ID NO: 794160 - DNA, 25 bp, Homo sapien
tttgcacaatctgttcttgtaattc

SEQ ID NO: 794161 - DNA, 25 bp, Homo sapien
gttgttaatttatcctttagctcaa

SEQ ID NO: 794162 - DNA, 25 bp, Homo sapien
gaattagtcagctctaatttcatgt

SEQ ID NO: 794163 - DNA, 25 bp, Homo sapien
gaagttcttcgactgtccccattaa

SEQ ID NO: 794164 - DNA, 25 bp, Homo sapien
tttgagaaggcaagcatactcctct

SEQ ID NO: 794165 - DNA, 25 bp, Homo sapien
cagctctgcccggagttgttctaac

SEQ ID NO: 794166 - DNA, 25 bp, Homo sapien
tcttcaacaaggtcttcaagctgtc

SEQ ID NO: 794167 - DNA, 25 bp, Homo sapien
tagaaactgatccttcagcacccct

SEQ ID NO: 794168 - DNA, 25 bp, Homo sapien
tacagatggtaagtgatccaaaatc

SEQ ID NO: 794169 - DNA, 25 bp, Homo sapien
tctgccctgttgtggttaataatga

SEQ ID NO: 794170 - DNA, 25 bp, Homo sapien
taagtgatgattcctttgttacaga

SEQ ID NO: 794171 - DNA, 25 bp, Homo sapien
ctgttctgatttaagtacattgagt

SEQ ID NO: 794172 - DNA, 25 bp, Homo sapien
gttctgatttaagtacattgagttc

SEQ ID NO: 794173 - DNA, 25 bp, Homo sapien
ctgatttaagtacattgagttcttt

SEQ ID NO: 794174 - DNA, 25 bp, Homo sapien
ttctgatttaagtacattgagttct

SEQ ID NO: 794175 - DNA, 25 bp, Homo sapien
aaatatctcgacatttgatataaga

SEQ ID NO: 794176 - DNA, 25 bp, Homo sapien
cgttaagcaattcgaatttcttgac

SEQ ID NO: 794177 - DNA, 25 bp, Homo sapien
caaagtctgcaagattctccaaggt

SEQ ID NO: 794178 - DNA, 25 bp, Homo sapien
tcttgactctatttaggcaagtaaa

SEQ ID NO: 794179 - DNA, 25 bp, Homo sapien
aagcctcctatccttcattaaagtg

SEQ ID NO: 794180 - DNA, 25 bp, Homo sapien
tggaactacataaggattacagatt

SEQ ID NO: 794181 - DNA, 25 bp, Homo sapien
cctctagaactaacagcttaacttg

SEQ ID NO: 794182 - DNA, 25 bp, Homo sapien
tgctctgatattctagcctctagaa

SEQ ID NO: 794183 - DNA, 25 bp, Homo sapien
catcctagcatcaaaccatactgtc

SEQ ID NO: 794184 - DNA, 25 bp, Homo sapien
gactggaagtacactgaatactgag

SEQ ID NO: 794185 - DNA, 25 bp, Homo sapien
aaggatctcaatgtgtttctgggct

SEQ ID NO: 794186 - DNA, 25 bp, Homo sapien
tagaatgcagtagaggctcactcag

SEQ ID NO: 794187 - DNA, 25 bp, Homo sapien
aaagattttaaacgtacagacatgg

SEQ ID NO: 794188 - DNA, 25 bp, Homo sapien
ttggtatagctagcatgactcatct

SEQ ID NO: 794189 - DNA, 25 bp, Homo sapien
ttttcaaggaaagtagcacaatgtt

SEQ ID NO: 794190 - DNA, 25 bp, Homo sapien
taaacatttatgtactcacaaccca

SEQ ID NO: 794191 - DNA, 25 bp, Homo sapien
aatgcgttgggcttccatctgtagc

SEQ ID NO: 794192 - DNA, 25 bp, Homo sapien
ctttaagactgcaaagagctttatc

SEQ ID NO: 794193 - DNA, 25 bp, Homo sapien
tgagttgaataaaccagagagaggc

SEQ ID NO: 794194 - DNA, 25 bp, Homo sapien
cacgaacctgatccacatgagttga

SEQ ID NO: 794195 - DNA, 25 bp, Homo sapien
gtgttttcatagtctgtagttctaa

SEQ ID NO: 794196 - DNA, 25 bp, Homo sapien
tgttttcatagtctgtagttctaac

SEQ ID NO: 794197 - DNA, 25 bp, Homo sapien
tgtgttttcatagtctgtagttcta

SEQ ID NO: 794198 - DNA, 25 bp, Homo sapien
tccaatgagcagatgtaaaggcttt

SEQ ID NO: 794199 - DNA, 25 bp, Homo sapien
agacactgccttttgaagttttcca

SEQ ID NO: 794200 - DNA, 25 bp, Homo sapien
cttcacattttaaagcaggagtata

SEQ ID NO: 794201 - DNA, 25 bp, Homo sapien
tttaaagcaggagtataatattcac

SEQ ID NO: 794202 - DNA, 25 bp, Homo sapien
cacattttaaagcaggagtataata

SEQ ID NO: 794203 - DNA, 25 bp, Homo sapien
aagcaggagtataatattcaccaag

SEQ ID NO: 794204 - DNA, 25 bp, Homo sapien
atctataatcttgtaattctggatc

SEQ ID NO: 794205 - DNA, 25 bp, Homo sapien
catatctataatcttgtaattctgg

SEQ ID NO: 794206 - DNA, 25 bp, Homo sapien
tataatcttgtaattctggatcttc

SEQ ID NO: 794207 - DNA, 25 bp, Homo sapien
taatcttgtaattctggatcttcat

SEQ ID NO: 794208 - DNA, 25 bp, Homo sapien
gttgagaagagtgtgcatattttct

SEQ ID NO: 794209 - DNA, 25 bp, Homo sapien
ttgaagtaccaagagtttgttgtat

SEQ ID NO: 794210 - DNA, 25 bp, Homo sapien
cttgcttagtcgtgtttgaagtacc

SEQ ID NO: 794211 - DNA, 25 bp, Homo sapien
ccaagagtttgttgtattcttctgt

SEQ ID NO: 794212 - DNA, 25 bp, Homo sapien
ttccaaattggtcatctgagaatgg

SEQ ID NO: 794213 - DNA, 25 bp, Homo sapien
cataccatctgtctgctgtccccag

SEQ ID NO: 794214 - DNA, 25 bp, Homo sapien
atgtcttccaaattggtcatctgag

SEQ ID NO: 794215 - DNA, 25 bp, Homo sapien
tctccaaattcaagtttcataccat

SEQ ID NO: 794216 - DNA, 25 bp, Homo sapien
gatatgaggctttctaattcttgaa

SEQ ID NO: 794217 - DNA, 25 bp, Homo sapien
tcaagatcttgcagagaagataact

SEQ ID NO: 794218 - DNA, 25 bp, Homo sapien
gataacttgcttttatgattgacat

SEQ ID NO: 794219 - DNA, 25 bp, Homo sapien
aagaggatatgaggctttctaattc

SEQ ID NO: 794220 - DNA, 25 bp, Homo sapien
ttctgtaaacagtggatctctgcct

SEQ ID NO: 794221 - DNA, 25 bp, Homo sapien
aatcagggtcaaatgcagatccgtc

SEQ ID NO: 794222 - DNA, 25 bp, Homo sapien
cagggtatctagctaaggctcttct

SEQ ID NO: 794223 - DNA, 25 bp, Homo sapien
aaacatctaattctacctccagggt

SEQ ID NO: 794224 - DNA, 25 bp, Homo sapien
gatccgtctgactaaaacccatgat

SEQ ID NO: 794225 - DNA, 25 bp, Homo sapien
ggtctcactacgttacataggttga

SEQ ID NO: 794226 - DNA, 25 bp, Homo sapien
tatggaaccataagtaccgactgtt

SEQ ID NO: 794227 - DNA, 25 bp, Homo sapien
tgtgcttggccagtactaacatttt

SEQ ID NO: 794228 - DNA, 25 bp, Homo sapien
gtattttaccaggtgatcaactgaa

SEQ ID NO: 794229 - DNA, 25 bp, Homo sapien
ctctattgtaccatcaatattcttt

SEQ ID NO: 794230 - DNA, 25 bp, Homo sapien
acacaacttccagggtacattgttc

SEQ ID NO: 794231 - DNA, 25 bp, Homo sapien
acaacttccagggtacattgttctc

SEQ ID NO: 794232 - DNA, 25 bp, Homo sapien
tcacacaacttccagggtacattgt

SEQ ID NO: 794233 - DNA, 25 bp, Homo sapien
tagctacttcttcttctaattgttc

SEQ ID NO: 794234 - DNA, 25 bp, Homo sapien
aacgatatttgtttcctctttcact

SEQ ID NO: 794235 - DNA, 25 bp, Homo sapien
ctctttcactccaaattcaccagaa

SEQ ID NO: 794236 - DNA, 25 bp, Homo sapien
tgtttttcaagcaacttaacgatat

SEQ ID NO: 794237 - DNA, 25 bp, Homo sapien
gccaggagctaattaatactcagtg

SEQ ID NO: 794238 - DNA, 25 bp, Homo sapien
gataatcctcccttagtatctgtag

SEQ ID NO: 794239 - DNA, 25 bp, Homo sapien
gacacagtggataagcatacagaga

SEQ ID NO: 794240 - DNA, 25 bp, Homo sapien
taaaagccaatcaggtatacacgtt

SEQ ID NO: 794241 - DNA, 25 bp, Homo sapien
gagcaaatgctatactcattgacac

SEQ ID NO: 794242 - DNA, 25 bp, Homo sapien
gaaaaccaatttgatcctgtgataa

SEQ ID NO: 794243 - DNA, 25 bp, Homo sapien
catccactgtctcaaaagtctgaaa

SEQ ID NO: 794244 - DNA, 25 bp, Homo sapien
ccccagatattctagacagttcagt

SEQ ID NO: 794245 - DNA, 25 bp, Homo sapien
gcttgacactgaaatctcatcatga

SEQ ID NO: 794246 - DNA, 25 bp, Homo sapien
ttgacactgaaatctcatcatgaat

SEQ ID NO: 794247 - DNA, 25 bp, Homo sapien
cttgacactgaaatctcatcatgaa

SEQ ID NO: 794248 - DNA, 25 bp, Homo sapien
tattgtcgtacaagttcctgtctca

SEQ ID NO: 794249 - DNA, 25 bp, Homo sapien
caacattagttgtctagaagcatcc

SEQ ID NO: 794250 - DNA, 25 bp, Homo sapien
caattccgttgcctgttgatgttct

SEQ ID NO: 794251 - DNA, 25 bp, Homo sapien
gccgcatatgtgcttgccttaacaa

SEQ ID NO: 794252 - DNA, 25 bp, Homo sapien
aataatgttttatgctcagctccca

SEQ ID NO: 794253 - DNA, 25 bp, Homo sapien
tacagcagttgacaagaatccagct

SEQ ID NO: 794254 - DNA, 25 bp, Homo sapien
taatggagcacctcagcacaatgtt

SEQ ID NO: 794255 - DNA, 25 bp, Homo sapien
ccttcgagatgctaattggtggact

SEQ ID NO: 794256 - DNA, 25 bp, Homo sapien
ctctcttccagctaaagacagctgc

SEQ ID NO: 794257 - DNA, 25 bp, Homo sapien
tccagctcctctaaaagcaccctct

SEQ ID NO: 794258 - DNA, 25 bp, Homo sapien
aagacagctgctttagtgcttccag

SEQ ID NO: 794259 - DNA, 25 bp, Homo sapien
cgtactgctgttgcgcagctcacaa

SEQ ID NO: 794260 - DNA, 25 bp, Homo sapien
cacaaatatgttaagctcagtacct

SEQ ID NO: 794261 - DNA, 25 bp, Homo sapien
tctttggtgaaacaatacttgctgt

SEQ ID NO: 794262 - DNA, 25 bp, Homo sapien
aaatgtaaggcattttgactccacc

SEQ ID NO: 794263 - DNA, 25 bp, Homo sapien
gaaaacctgtcaacttggaaacagc

SEQ ID NO: 794264 - DNA, 25 bp, Homo sapien
acaaaatctcaggaggcacatcttc

SEQ ID NO: 794265 - DNA, 25 bp, Homo sapien
gacaaaatctcaggaggcacatctt

SEQ ID NO: 794266 - DNA, 25 bp, Homo sapien
gaaaagttttgctaacatcaggtga

SEQ ID NO: 794267 - DNA, 25 bp, Homo sapien
tacatactacacatacatggacatg

SEQ ID NO: 794268 - DNA, 25 bp, Homo sapien
tggacatgtttcatacacagatggt

SEQ ID NO: 794269 - DNA, 25 bp, Homo sapien
gtctattacattgaaacaaccattt

SEQ ID NO: 794270 - DNA, 25 bp, Homo sapien
cactgtctttcttgtttgagttcca

SEQ ID NO: 794271 - DNA, 25 bp, Homo sapien
tgatccaatggggaagccaaaatct

SEQ ID NO: 794272 - DNA, 25 bp, Homo sapien
gagttccatactgactgcgttccat

SEQ ID NO: 794273 - DNA, 25 bp, Homo sapien
cgttccatactgatgatccaatggg

SEQ ID NO: 794274 - DNA, 25 bp, Homo sapien
tgtctttacaacttctaagaggatc

SEQ ID NO: 794275 - DNA, 25 bp, Homo sapien
caacttctaagaggatcttcaaaag

SEQ ID NO: 794276 - DNA, 25 bp, Homo sapien
tagatctatctagaatcccaaggac

SEQ ID NO: 794277 - DNA, 25 bp, Homo sapien
ggacatggcgaccaattgtttcttc

SEQ ID NO: 794278 - DNA, 25 bp, Homo sapien
gacctccaaattaggctggcagatg

SEQ ID NO: 794279 - DNA, 25 bp, Homo sapien
cacatgactttacagatgcctctgc

SEQ ID NO: 794280 - DNA, 25 bp, Homo sapien
ttctgacctccaaattaggctggca

SEQ ID NO: 794281 - DNA, 25 bp, Homo sapien
gtatgttcctcatggacacatgact

SEQ ID NO: 794282 - DNA, 25 bp, Homo sapien
gagaagtgcttgagtgtggaatggt

SEQ ID NO: 794283 - DNA, 25 bp, Homo sapien
gaactgtgggcttgatcttgtgagc

SEQ ID NO: 794284 - DNA, 25 bp, Homo sapien
aatggtagtgaactgtgggcttgat

SEQ ID NO: 794285 - DNA, 25 bp, Homo sapien
cttgagtgtggaatggtagtgaact

SEQ ID NO: 794286 - DNA, 25 bp, Homo sapien
tggcatatcacttccagaataagag

SEQ ID NO: 794287 - DNA, 25 bp, Homo sapien
catatcacttccagaataagaggga

SEQ ID NO: 794288 - DNA, 25 bp, Homo sapien
catttcttggcatatcacttccaga

SEQ ID NO: 794289 - DNA, 25 bp, Homo sapien
tcttggcatatcacttccagaataa

SEQ ID NO: 794290 - DNA, 25 bp, Homo sapien
cattttcagggtctatttcagttcc

SEQ ID NO: 794291 - DNA, 25 bp, Homo sapien
gcaaaaccactcctcacaagtcgtt

SEQ ID NO: 794292 - DNA, 25 bp, Homo sapien
aactgctgcttgtagtcgagagcta

SEQ ID NO: 794293 - DNA, 25 bp, Homo sapien
tcgagagctaatgttcagcataagt

SEQ ID NO: 794294 - DNA, 25 bp, Homo sapien
ctaattagacgagcaataaaactgc

SEQ ID NO: 794295 - DNA, 25 bp, Homo sapien
gtaagccttcaaagcagaacctggc

SEQ ID NO: 794296 - DNA, 25 bp, Homo sapien
gtttatcaagatctaccatagcagt

SEQ ID NO: 794297 - DNA, 25 bp, Homo sapien
tcaagtttgaaatctccatagcagc

SEQ ID NO: 794298 - DNA, 25 bp, Homo sapien
tgctcttctaaccacgagccactga

SEQ ID NO: 794299 - DNA, 25 bp, Homo sapien
aatatatgcccgtttcttttatgaa

SEQ ID NO: 794300 - DNA, 25 bp, Homo sapien
tgtggtaaaggcacgcgagattcaa

SEQ ID NO: 794301 - DNA, 25 bp, Homo sapien
gccactgactttgacagttgccaaa

SEQ ID NO: 794302 - DNA, 25 bp, Homo sapien
gactcacgcatcaactctgtctgtg

SEQ ID NO: 794303 - DNA, 25 bp, Homo sapien
tggactcctcatgaaggcgctctcg

SEQ ID NO: 794304 - DNA, 25 bp, Homo sapien
tctgtgtcactttcgcatgttcaag

SEQ ID NO: 794305 - DNA, 25 bp, Homo sapien
ggcgctctcgaagttcctcttggca

SEQ ID NO: 794306 - DNA, 25 bp, Homo sapien
gatctattatatcagttttttcctg

SEQ ID NO: 794307 - DNA, 25 bp, Homo sapien
tgcctccaattcttgcaacctgtta

SEQ ID NO: 794308 - DNA, 25 bp, Homo sapien
gttacttgcacataacaactcctgc

SEQ ID NO: 794309 - DNA, 25 bp, Homo sapien
actcctgctcaagacgatctattat

SEQ ID NO: 794310 - DNA, 25 bp, Homo sapien
aaaaacaagagttgaagacactgat

SEQ ID NO: 794311 - DNA, 25 bp, Homo sapien
tgagaagttccagtatttcttgaat

SEQ ID NO: 794312 - DNA, 25 bp, Homo sapien
gacatatactttccatattaaaaat

SEQ ID NO: 794313 - DNA, 25 bp, Homo sapien
gacactgattatcactggtaacatt

SEQ ID NO: 794314 - DNA, 25 bp, Homo sapien
gcatcgactgcagcatctactagtc

SEQ ID NO: 794315 - DNA, 25 bp, Homo sapien
cttgttccagctctataaacctact

SEQ ID NO: 794316 - DNA, 25 bp, Homo sapien
tttccaatgcttggttttgctgtct

SEQ ID NO: 794317 - DNA, 25 bp, Homo sapien
tttcagcttgacattgtacttctag

SEQ ID NO: 794318 - DNA, 25 bp, Homo sapien
gaaggtcatcacgtactttttcagc

SEQ ID NO: 794319 - DNA, 25 bp, Homo sapien
gaagagagtatcaggcttaagtgaa

SEQ ID NO: 794320 - DNA, 25 bp, Homo sapien
gaggaattccatgttagtttagcca

SEQ ID NO: 794321 - DNA, 25 bp, Homo sapien
tttggaagagagtaatggcagcatg

SEQ ID NO: 794322 - DNA, 25 bp, Homo sapien
tggcagcatgaccactgttccgggc

SEQ ID NO: 794323 - DNA, 25 bp, Homo sapien
ttgctgttctagtttctgtatttcc

SEQ ID NO: 794324 - DNA, 25 bp, Homo sapien
cctgttggaatacatctctctcatg

SEQ ID NO: 794325 - DNA, 25 bp, Homo sapien
tcctgttggaatacatctctctcat

SEQ ID NO: 794326 - DNA, 25 bp, Homo sapien
accttaagttgctgttctagtttct

SEQ ID NO: 794327 - DNA, 25 bp, Homo sapien
gatgttcactgataggctggaatcg

SEQ ID NO: 794328 - DNA, 25 bp, Homo sapien
tgttcactgataggctggaatcgag

SEQ ID NO: 794329 - DNA, 25 bp, Homo sapien
tttgatgttcactgataggctggaa

SEQ ID NO: 794330 - DNA, 25 bp, Homo sapien
cactgataggctggaatcgaggaac

SEQ ID NO: 794331 - DNA, 25 bp, Homo sapien
tatgtgccaggtcaacactcctatg

SEQ ID NO: 794332 - DNA, 25 bp, Homo sapien
tattggcactctgtacttcttcggc

SEQ ID NO: 794333 - DNA, 25 bp, Homo sapien
caaactgggattgccttaccctaag

SEQ ID NO: 794334 - DNA, 25 bp, Homo sapien
tggcagagccatgatacaaactggg

SEQ ID NO: 794335 - DNA, 25 bp, Homo sapien
tgctccagttctcttactctgaact

SEQ ID NO: 794336 - DNA, 25 bp, Homo sapien
cctttcttgtatatccctttgaagc

SEQ ID NO: 794337 - DNA, 25 bp, Homo sapien
tcagatgatttgctaactgttcaac

SEQ ID NO: 794338 - DNA, 25 bp, Homo sapien
tctgaactccagtttctctatttct

SEQ ID NO: 794339 - DNA, 25 bp, Homo sapien
ctgcaattgtacttctagggacaat

SEQ ID NO: 794340 - DNA, 25 bp, Homo sapien
tggtttagcttctacagctccaaag

SEQ ID NO: 794341 - DNA, 25 bp, Homo sapien
tagcttctacagctccaaagtgttt

SEQ ID NO: 794342 - DNA, 25 bp, Homo sapien
tagggacaattctggtttagcttct

SEQ ID NO: 794343 - DNA, 25 bp, Homo sapien
ttttcctttctgtctatggcatctc

SEQ ID NO: 794344 - DNA, 25 bp, Homo sapien
ttcctttctgtctatggcatctcgt

SEQ ID NO: 794345 - DNA, 25 bp, Homo sapien
ctttctgtctatggcatctcgttca

SEQ ID NO: 794346 - DNA, 25 bp, Homo sapien
ttctgtctatggcatctcgttcagc

SEQ ID NO: 794347 - DNA, 25 bp, Homo sapien
gagcctctcaggtaaacattactca

SEQ ID NO: 794348 - DNA, 25 bp, Homo sapien
gagaaggtctgtctttttaggcaac

SEQ ID NO: 794349 - DNA, 25 bp, Homo sapien
cagtcaactatcattgctttgggtc

SEQ ID NO: 794350 - DNA, 25 bp, Homo sapien
gatacttaattcaagatagcagtgc

SEQ ID NO: 794351 - DNA, 25 bp, Homo sapien
tagattccttgacgtccaccgctag

SEQ ID NO: 794352 - DNA, 25 bp, Homo sapien
tatagtatcacaagggcttcagact

SEQ ID NO: 794353 - DNA, 25 bp, Homo sapien
tgctacaggtgcattaagagctcac

SEQ ID NO: 794354 - DNA, 25 bp, Homo sapien
tacatttgggtactggtgctacagg

SEQ ID NO: 794355 - DNA, 25 bp, Homo sapien
tacatgtgcagaatgcataggttta

SEQ ID NO: 794356 - DNA, 25 bp, Homo sapien
cctaaaaggccctggtttgtgatgt

SEQ ID NO: 794357 - DNA, 25 bp, Homo sapien
aatgctatccctcctgtacccctca

SEQ ID NO: 794358 - DNA, 25 bp, Homo sapien
caggtacacacgtgccattgtagtt

SEQ ID NO: 794359 - DNA, 25 bp, Homo sapien
tcctgttcaagttcttgtaggcggg

SEQ ID NO: 794360 - DNA, 25 bp, Homo sapien
tcttgtaggcgggtagtagattcct

SEQ ID NO: 794361 - DNA, 25 bp, Homo sapien
tctaattgctcttctaagtttgtaa

SEQ ID NO: 794362 - DNA, 25 bp, Homo sapien
catatgtaattgttgaacttcttca

SEQ ID NO: 794363 - DNA, 25 bp, Homo sapien
cagattcctttatggcaagtcccag

SEQ ID NO: 794364 - DNA, 25 bp, Homo sapien
gctgctggagtttcgtaacttgttc

SEQ ID NO: 794365 - DNA, 25 bp, Homo sapien
catggcatcagattcctttatggca

SEQ ID NO: 794366 - DNA, 25 bp, Homo sapien
ttggtcttgagtagacatggcatca

SEQ ID NO: 794367 - DNA, 25 bp, Homo sapien
tcagatgatctatagccacgttaac

SEQ ID NO: 794368 - DNA, 25 bp, Homo sapien
tagcggtttctacttgctgttccaa

SEQ ID NO: 794369 - DNA, 25 bp, Homo sapien
tgttccaaggccagcttttcagcta

SEQ ID NO: 794370 - DNA, 25 bp, Homo sapien
tctaagtcctttgcactaacagtgc

SEQ ID NO: 794371 - DNA, 25 bp, Homo sapien
ctgatattctcaaggttaatgctga

SEQ ID NO: 794372 - DNA, 25 bp, Homo sapien
ttgagaacttcaacatcttgagggc

SEQ ID NO: 794373 - DNA, 25 bp, Homo sapien
tatgcatttcaacaacctggctttc

SEQ ID NO: 794374 - DNA, 25 bp, Homo sapien
tattcctgaactgcctcaagttgga

SEQ ID NO: 794375 - DNA, 25 bp, Homo sapien
tctgctttggtagccactgattcag

SEQ ID NO: 794376 - DNA, 25 bp, Homo sapien
taagagcctcgagttcattaaaaaa

SEQ ID NO: 794377 - DNA, 25 bp, Homo sapien
agctctaagagcctcgagttcatta

SEQ ID NO: 794378 - DNA, 25 bp, Homo sapien
ttctttataactggcaagttctgct

SEQ ID NO: 794379 - DNA, 25 bp, Homo sapien
tgcctctgcgaggtgatccctaact

SEQ ID NO: 794380 - DNA, 25 bp, Homo sapien
tctcttttgcctctgcgaggtgatc

SEQ ID NO: 794381 - DNA, 25 bp, Homo sapien
taacttggcttaagtctttctgaag

SEQ ID NO: 794382 - DNA, 25 bp, Homo sapien
tctgcgaggtgatccctaacttggc

SEQ ID NO: 794383 - DNA, 25 bp, Homo sapien
ttttataggaagtggctcaaacatg

SEQ ID NO: 794384 - DNA, 25 bp, Homo sapien
gcaatgctcttactcagttttatag

SEQ ID NO: 794385 - DNA, 25 bp, Homo sapien
tactgatcttcagagtcccatctgt

SEQ ID NO: 794386 - DNA, 25 bp, Homo sapien
ggctcaaacatgcaggcctttttgc

SEQ ID NO: 794387 - DNA, 25 bp, Homo sapien
aaattaatttgtattcctgcatttt

SEQ ID NO: 794388 - DNA, 25 bp, Homo sapien
aagaatttgtggagtctgattgctg

SEQ ID NO: 794389 - DNA, 25 bp, Homo sapien
gcatttttaacaagaatttgtggag

SEQ ID NO: 794390 - DNA, 25 bp, Homo sapien
aattaatttgtattcctgcattttt

SEQ ID NO: 794391 - DNA, 25 bp, Homo sapien
ttcagcagcatgtagttcttgcatc

SEQ ID NO: 794392 - DNA, 25 bp, Homo sapien
tatcactgccttcaaggtaccacat

SEQ ID NO: 794393 - DNA, 25 bp, Homo sapien
tgaaatatgtctggattccatgtcc

SEQ ID NO: 794394 - DNA, 25 bp, Homo sapien
tttcagtaactgaacggcaacatag

SEQ ID NO: 794395 - DNA, 25 bp, Homo sapien
caatgttgaaaaacacatattataa

SEQ ID NO: 794396 - DNA, 25 bp, Homo sapien
tgaaaaacacatattataaaaacca

SEQ ID NO: 794397 - DNA, 25 bp, Homo sapien
cacacaatgttgaaaaacacatatt

SEQ ID NO: 794398 - DNA, 25 bp, Homo sapien
cacaatgttgaaaaacacatattat

SEQ ID NO: 794399 - DNA, 25 bp, Homo sapien
tctagtctggtaagcatcagaatgt

SEQ ID NO: 794400 - DNA, 25 bp, Homo sapien
gtgctagctcaggaattgaggatcc

SEQ ID NO: 794401 - DNA, 25 bp, Homo sapien
taagcatcagaatgtgctagctcag

SEQ ID NO: 794402 - DNA, 25 bp, Homo sapien
tttctctagtctggtaagcatcaga

SEQ ID NO: 794403 - DNA, 25 bp, Homo sapien
tgtaagataaattccctgaccccag

SEQ ID NO: 794404 - DNA, 25 bp, Homo sapien
cttctgatgctatgtcaaatccctg

SEQ ID NO: 794405 - DNA, 25 bp, Homo sapien
ctgactgtgtgtaagataaattccc

SEQ ID NO: 794406 - DNA, 25 bp, Homo sapien
ctcctcggccttctgatgctatgtc

SEQ ID NO: 794407 - DNA, 25 bp, Homo sapien
gccaaggttctgaaacctgctgaat

SEQ ID NO: 794408 - DNA, 25 bp, Homo sapien
tgcatgccttcattatggacagctc

SEQ ID NO: 794409 - DNA, 25 bp, Homo sapien
tccatcactatagggagactcagtg

SEQ ID NO: 794410 - DNA, 25 bp, Homo sapien
cctgctgaatagaatggtcctctcc

SEQ ID NO: 794411 - DNA, 25 bp, Homo sapien
catctgtagtacctagagctgtcag

SEQ ID NO: 794412 - DNA, 25 bp, Homo sapien
gagctgtcagctccgtccgaaatgc

SEQ ID NO: 794413 - DNA, 25 bp, Homo sapien
agtagttcacctcgccagtctgaga

SEQ ID NO: 794414 - DNA, 25 bp, Homo sapien
tccgaaatgctgctagtaaaacact

SEQ ID NO: 794415 - DNA, 25 bp, Homo sapien
ggcatcgtgcccttcacattaggaa

SEQ ID NO: 794416 - DNA, 25 bp, Homo sapien
tagaatttggtcaattggagctcct

SEQ ID NO: 794417 - DNA, 25 bp, Homo sapien
catctgttgcgaactattgcctgaa

SEQ ID NO: 794418 - DNA, 25 bp, Homo sapien
catttactagctgtcattccatggt

SEQ ID NO: 794419 - DNA, 25 bp, Homo sapien
agataacaaactccttctatctgct

SEQ ID NO: 794420 - DNA, 25 bp, Homo sapien
gtaattttcctaccattcatttgtg

SEQ ID NO: 794421 - DNA, 25 bp, Homo sapien
tgtgcatgcagtgcctgaatttcag

SEQ ID NO: 794422 - DNA, 25 bp, Homo sapien
tctggaggcattccatagctgcttg

SEQ ID NO: 794423 - DNA, 25 bp, Homo sapien
cacctgtttgtgtaaccatatgagc

SEQ ID NO: 794424 - DNA, 25 bp, Homo sapien
taagttactcagaggagcatgtgct

SEQ ID NO: 794425 - DNA, 25 bp, Homo sapien
tccaatgggcttaaccttatcaggg

SEQ ID NO: 794426 - DNA, 25 bp, Homo sapien
gatactggctatattcacatgggtg

SEQ ID NO: 794427 - DNA, 25 bp, Homo sapien
gaagtctgactatactaactgttgg

SEQ ID NO: 794428 - DNA, 25 bp, Homo sapien
aagaatccactgcacacccatcaga

SEQ ID NO: 794429 - DNA, 25 bp, Homo sapien
cccttcaggaactagagaacagcca

SEQ ID NO: 794430 - DNA, 25 bp, Homo sapien
ccatcagattggcaacagaagtctg

SEQ ID NO: 794431 - DNA, 25 bp, Homo sapien
gacatcttcaattacgcctacgttt

SEQ ID NO: 794432 - DNA, 25 bp, Homo sapien
tcaatggtgttctatttaacctaag

SEQ ID NO: 794433 - DNA, 25 bp, Homo sapien
cattagctttagatgataatcaatc

SEQ ID NO: 794434 - DNA, 25 bp, Homo sapien
caattcatattactgacgttaggag

SEQ ID NO: 794435 - DNA, 25 bp, Homo sapien
tactacaatgatgagcactgctgat

SEQ ID NO: 794436 - DNA, 25 bp, Homo sapien
catagtgctagtggccaagatttca

SEQ ID NO: 794437 - DNA, 25 bp, Homo sapien
ggagacatatttacccaggtgttag

SEQ ID NO: 794438 - DNA, 25 bp, Homo sapien
caagagttggtaatgcagtccaggc

SEQ ID NO: 794439 - DNA, 25 bp, Homo sapien
tgcagttccgttgctctgtctttca

SEQ ID NO: 794440 - DNA, 25 bp, Homo sapien
tttctcagaactcagctgctcctgc

SEQ ID NO: 794441 - DNA, 25 bp, Homo sapien
tagtttgtgcaagctcactcttcag

SEQ ID NO: 794442 - DNA, 25 bp, Homo sapien
cattttctcagaactcagctgctcc

SEQ ID NO: 794443 - DNA, 25 bp, Homo sapien
tttatcccgttcttcactgcgtccc

SEQ ID NO: 794444 - DNA, 25 bp, Homo sapien
tctccaaagcccactggagctctct

SEQ ID NO: 794445 - DNA, 25 bp, Homo sapien
tcttcactgcgtcccaacttggctt

SEQ ID NO: 794446 - DNA, 25 bp, Homo sapien
tcacttgctaatgtgtcattaagca

SEQ ID NO: 794447 - DNA, 25 bp, Homo sapien
aagggtggccgagactgtccagtac

SEQ ID NO: 794448 - DNA, 25 bp, Homo sapien
tgcaattcccgctccctatctaggg

SEQ ID NO: 794449 - DNA, 25 bp, Homo sapien
gcatgattccttgtagtcgctgtcc

SEQ ID NO: 794450 - DNA, 25 bp, Homo sapien
ccagctggcgctgaagatcttccac

SEQ ID NO: 794451 - DNA, 25 bp, Homo sapien
gttctatcactggttaagctccacg

SEQ ID NO: 794452 - DNA, 25 bp, Homo sapien
tgttgaagaacccaatttctagttc

SEQ ID NO: 794453 - DNA, 25 bp, Homo sapien
ctagttctatcactggttaagctcc

SEQ ID NO: 794454 - DNA, 25 bp, Homo sapien
tatcactggttaagctccacgtggt

SEQ ID NO: 794455 - DNA, 25 bp, Homo sapien
attgaagcttttgtctgatcatttc

SEQ ID NO: 794456 - DNA, 25 bp, Homo sapien
taattcatgattacagccggttcct

SEQ ID NO: 794457 - DNA, 25 bp, Homo sapien
ggtagaacctgtagttttgaagcta

SEQ ID NO: 794458 - DNA, 25 bp, Homo sapien
tttcaatcaatttagcgtagtttga

SEQ ID NO: 794459 - DNA, 25 bp, Homo sapien
ccttgctggccagttaatttctgta

SEQ ID NO: 794460 - DNA, 25 bp, Homo sapien
accttgctggccagttaatttctgt

SEQ ID NO: 794461 - DNA, 25 bp, Homo sapien
cttgctggccagttaatttctgtag

SEQ ID NO: 794462 - DNA, 25 bp, Homo sapien
taccagctcctgtctgtcgatacca

SEQ ID NO: 794463 - DNA, 25 bp, Homo sapien
tagtctttcagtcaatgagccacaa

SEQ ID NO: 794464 - DNA, 25 bp, Homo sapien
cagctcagcattttgtctcagtagt

SEQ ID NO: 794465 - DNA, 25 bp, Homo sapien
taaccatgttccttaagtcattctt

SEQ ID NO: 794466 - DNA, 25 bp, Homo sapien
tggtccctaggtagcaaagtatctg

SEQ ID NO: 794467 - DNA, 25 bp, Homo sapien
tctcgtgtatctgttgttggtccct

SEQ ID NO: 794468 - DNA, 25 bp, Homo sapien
cagagtcgagtacagagatggtttc

SEQ ID NO: 794469 - DNA, 25 bp, Homo sapien
tgtatgtatacaacccagagtcgag

SEQ ID NO: 794470 - DNA, 25 bp, Homo sapien
catttcttagttcagctttcagttt

SEQ ID NO: 794471 - DNA, 25 bp, Homo sapien
ttcaatgttggcaccaccattcaat

SEQ ID NO: 794472 - DNA, 25 bp, Homo sapien
tttcagaggcaatgatggcttcaat

SEQ ID NO: 794473 - DNA, 25 bp, Homo sapien
ttcagtttgtatacttcagcctctg

SEQ ID NO: 794474 - DNA, 25 bp, Homo sapien
tctagatccgtgaaagctggctgcc

SEQ ID NO: 794475 - DNA, 25 bp, Homo sapien
cagcagcaggtatttcttctggtaa

SEQ ID NO: 794476 - DNA, 25 bp, Homo sapien
tgcaatggatactctgacggccgac

SEQ ID NO: 794477 - DNA, 25 bp, Homo sapien
tgagagcctttcgaaaactttctgc

SEQ ID NO: 794478 - DNA, 25 bp, Homo sapien
ttttgtacacttttagcagagatgg

SEQ ID NO: 794479 - DNA, 25 bp, Homo sapien
atggggtttcagcatagccaggatg

SEQ ID NO: 794480 - DNA, 25 bp, Homo sapien
atttttttgtacacttttagcagag

SEQ ID NO: 794481 - DNA, 25 bp, Homo sapien
gagatggggtttcagcatagccagg

SEQ ID NO: 794482 - DNA, 25 bp, Homo sapien
tttcacagcccatctataaacagta

SEQ ID NO: 794483 - DNA, 25 bp, Homo sapien
ctggaacggaagaatagggactcaa

SEQ ID NO: 794484 - DNA, 25 bp, Homo sapien
ttgtgacaaaatcaactggaacgga

SEQ ID NO: 794485 - DNA, 25 bp, Homo sapien
gcccagttaaactatgtcaatgcct

SEQ ID NO: 794486 - DNA, 25 bp, Homo sapien
gtgactcgatgccaccgtcgaacca

SEQ ID NO: 794487 - DNA, 25 bp, Homo sapien
tcgatgccaccgtcgaaccaaaaat

SEQ ID NO: 794488 - DNA, 25 bp, Homo sapien
cttgattcagtccaaagccatctct

SEQ ID NO: 794489 - DNA, 25 bp, Homo sapien
tgccaccgtcgaaccaaaaatttca

SEQ ID NO: 794490 - DNA, 25 bp, Homo sapien
taggtaactgctcaaaagactatta

SEQ ID NO: 794491 - DNA, 25 bp, Homo sapien
aggtaactgctcaaaagactattat

SEQ ID NO: 794492 - DNA, 25 bp, Homo sapien
ctacaaaataggtaactgctcaaaa

SEQ ID NO: 794493 - DNA, 25 bp, Homo sapien
tctacaaaataggtaactgctcaaa

SEQ ID NO: 794494 - DNA, 25 bp, Homo sapien
gatctgatcttgagcgatacgtagt

SEQ ID NO: 794495 - DNA, 25 bp, Homo sapien
tggttctccatataactccagccca

SEQ ID NO: 794496 - DNA, 25 bp, Homo sapien
cgatacgtagtatgtcttggttctc

SEQ ID NO: 794497 - DNA, 25 bp, Homo sapien
gggacctaatatagtccagatctga

SEQ ID NO: 794498 - DNA, 25 bp, Homo sapien
tagtctccaactagctggtcttgaa

SEQ ID NO: 794499 - DNA, 25 bp, Homo sapien
ttttggagaccaaatcttgctttgt

SEQ ID NO: 794500 - DNA, 25 bp, Homo sapien
ctcaatgcaaagaagtcaaagccct

SEQ ID NO: 794501 - DNA, 25 bp, Homo sapien
cagcttgtttgctatacccttggaa

SEQ ID NO: 794502 - DNA, 25 bp, Homo sapien
tctttgcagtgcctctagccgagtg

SEQ ID NO: 794503 - DNA, 25 bp, Homo sapien
caggatcgtaattctgaagctgaga

SEQ ID NO: 794504 - DNA, 25 bp, Homo sapien
tataatctgttagggctctgtcagg

SEQ ID NO: 794505 - DNA, 25 bp, Homo sapien
gtatagttccaagtcgtctttgcag

SEQ ID NO: 794506 - DNA, 25 bp, Homo sapien
tctgctggttacaagagtttaagct

SEQ ID NO: 794507 - DNA, 25 bp, Homo sapien
gaagctttgattatcctaatgagtg

SEQ ID NO: 794508 - DNA, 25 bp, Homo sapien
gctgccaagatgtggttaaactcag

SEQ ID NO: 794509 - DNA, 25 bp, Homo sapien
taattagctcatgcactaaactgga

SEQ ID NO: 794510 - DNA, 25 bp, Homo sapien
cagtccgctgaatgaacatagtagg

SEQ ID NO: 794511 - DNA, 25 bp, Homo sapien
tttgtgtcatcagtccgctgaatga

SEQ ID NO: 794512 - DNA, 25 bp, Homo sapien
tcatcagtccgctgaatgaacatag

SEQ ID NO: 794513 - DNA, 25 bp, Homo sapien
cgctgaatgaacatagtaggaaatc

SEQ ID NO: 794514 - DNA, 25 bp, Homo sapien
tgcggcacggccttaccactttctg

SEQ ID NO: 794515 - DNA, 25 bp, Homo sapien
actttctgccatgcgctacttagga

SEQ ID NO: 794516 - DNA, 25 bp, Homo sapien
taggaatacgttctccagttaggct

SEQ ID NO: 794517 - DNA, 25 bp, Homo sapien
ttaactccacccgatttgcatgcct

SEQ ID NO: 794518 - DNA, 25 bp, Homo sapien
tcaaagttggatgttctatacctca

SEQ ID NO: 794519 - DNA, 25 bp, Homo sapien
catgactggctctatggcaaggtag

SEQ ID NO: 794520 - DNA, 25 bp, Homo sapien
tgctacctgtatcagacccaccaga

SEQ ID NO: 794521 - DNA, 25 bp, Homo sapien
ggactatccacacatgccaccatgt

SEQ ID NO: 794522 - DNA, 25 bp, Homo sapien
tctcatgccagcatgaaattgagta

SEQ ID NO: 794523 - DNA, 25 bp, Homo sapien
gccagcatgaaattgagtagttgaa

SEQ ID NO: 794524 - DNA, 25 bp, Homo sapien
catgccagcatgaaattgagtagtt

SEQ ID NO: 794525 - DNA, 25 bp, Homo sapien
tcatgccagcatgaaattgagtagt

SEQ ID NO: 794526 - DNA, 25 bp, Homo sapien
gggatttgtatacaatcataagctg

SEQ ID NO: 794527 - DNA, 25 bp, Homo sapien
gaatattcacaatacaaaagcacaa

SEQ ID NO: 794528 - DNA, 25 bp, Homo sapien
cataagctgtgttcatattggtccc

SEQ ID NO: 794529 - DNA, 25 bp, Homo sapien
gcttatatatacaaattccagtttg

SEQ ID NO: 794530 - DNA, 25 bp, Homo sapien
gatattatctgtcttcatcaccagt

SEQ ID NO: 794531 - DNA, 25 bp, Homo sapien
aagaaaagtgcaggacacctcgagc

SEQ ID NO: 794532 - DNA, 25 bp, Homo sapien
aaaacatgtaacttcagtagcctta

SEQ ID NO: 794533 - DNA, 25 bp, Homo sapien
taggtctctacaagtgatattatct

SEQ ID NO: 794534 - DNA, 25 bp, Homo sapien
taccacatcgtctgttttcactagg

SEQ ID NO: 794535 - DNA, 25 bp, Homo sapien
cctaactatatgagatggctgaaaa

SEQ ID NO: 794536 - DNA, 25 bp, Homo sapien
taaaatgtgagatcagtgaactctg

SEQ ID NO: 794537 - DNA, 25 bp, Homo sapien
actctaattgtgaaggcagaatctc

SEQ ID NO: 794538 - DNA, 25 bp, Homo sapien
gttaactgaatggttctatcaaata

SEQ ID NO: 794539 - DNA, 25 bp, Homo sapien
taagagtactcatcgctcttgccaa

SEQ ID NO: 794540 - DNA, 25 bp, Homo sapien
gatacttatacatgtgctttcagga

SEQ ID NO: 794541 - DNA, 25 bp, Homo sapien
gggatctaggtaattggcagattct

SEQ ID NO: 794542 - DNA, 25 bp, Homo sapien
tggtagagacaaggttgtaccatat

SEQ ID NO: 794543 - DNA, 25 bp, Homo sapien
tgtatttttggtagagacaaggttg

SEQ ID NO: 794544 - DNA, 25 bp, Homo sapien
acaccaccacgcctggctaattttt

SEQ ID NO: 794545 - DNA, 25 bp, Homo sapien
cccaagtagctgggtacacaccacc

SEQ ID NO: 794546 - DNA, 25 bp, Homo sapien
tccatacattttctccccaattcca

SEQ ID NO: 794547 - DNA, 25 bp, Homo sapien
agaaaagtcctccatacattttctc

SEQ ID NO: 794548 - DNA, 25 bp, Homo sapien
catacattttctccccaattccatt

SEQ ID NO: 794549 - DNA, 25 bp, Homo sapien
tgtagaaaagtcctccatacatttt

SEQ ID NO: 794550 - DNA, 25 bp, Homo sapien
tgtaatctgcaggtctcattttgtg

SEQ ID NO: 794551 - DNA, 25 bp, Homo sapien
aaaactctaaaatcagtggctctag

SEQ ID NO: 794552 - DNA, 25 bp, Homo sapien
gctagagttcttgctagagctgatc

SEQ ID NO: 794553 - DNA, 25 bp, Homo sapien
ccaccagagaattgaggagtattac

SEQ ID NO: 794554 - DNA, 25 bp, Homo sapien
cctgatccgtctggccgccggccac

SEQ ID NO: 794555 - DNA, 25 bp, Homo sapien
tacctgatccgtctggccgccggcc

SEQ ID NO: 794556 - DNA, 25 bp, Homo sapien
ggtctacctgatccgtctggccgcc

SEQ ID NO: 794557 - DNA, 25 bp, Homo sapien
tctacctgatccgtctggccgccgg

SEQ ID NO: 794558 - DNA, 25 bp, Homo sapien
gctgacgcgatgtaggccgagatca

SEQ ID NO: 794559 - DNA, 25 bp, Homo sapien
ggtcgcccgcgattctcagggattg

SEQ ID NO: 794560 - DNA, 25 bp, Homo sapien
tacccttcggtatgaggccggcgtc

SEQ ID NO: 794561 - DNA, 25 bp, Homo sapien
gggattgatcgcctcttcaggtaag

SEQ ID NO: 794562 - DNA, 25 bp, Homo sapien
tctgttttcgtaaaacctagcatac

SEQ ID NO: 794563 - DNA, 25 bp, Homo sapien
tagcatacttaatcaccaacatttg

SEQ ID NO: 794564 - DNA, 25 bp, Homo sapien
tgttaacttcatggtggcatattaa

SEQ ID NO: 794565 - DNA, 25 bp, Homo sapien
taacttcatggtggcatattaatac

SEQ ID NO: 794566 - DNA, 25 bp, Homo sapien
tgaagccataggagcgaagattgat

SEQ ID NO: 794567 - DNA, 25 bp, Homo sapien
tcatgggagacgcttctgtgaagcc

SEQ ID NO: 794568 - DNA, 25 bp, Homo sapien
gctaaacctacagactaagtggcgt

SEQ ID NO: 794569 - DNA, 25 bp, Homo sapien
gattgtggcggcaggactgaactca

SEQ ID NO: 794570 - DNA, 25 bp, Homo sapien
cagataagcctctccacgcataggg

SEQ ID NO: 794571 - DNA, 25 bp, Homo sapien
aatatactcttaacccaggccttgg

SEQ ID NO: 794572 - DNA, 25 bp, Homo sapien
gatcaccggctcagtcggactaggg

SEQ ID NO: 794573 - DNA, 25 bp, Homo sapien
tgtgactttacagcagcgctaggga

SEQ ID NO: 794574 - DNA, 25 bp, Homo sapien
tcttttacacctggcttaatagaag

SEQ ID NO: 794575 - DNA, 25 bp, Homo sapien
tattagtgagaagaatggcatagtt

SEQ ID NO: 794576 - DNA, 25 bp, Homo sapien
tttgtaaatctcttttacacctggc

SEQ ID NO: 794577 - DNA, 25 bp, Homo sapien
gaagaatggcatagttttagatttt

SEQ ID NO: 794578 - DNA, 25 bp, Homo sapien
gaatttgcattgtcccagcactgaa

SEQ ID NO: 794579 - DNA, 25 bp, Homo sapien
catactgttgtagagacttgaggga

SEQ ID NO: 794580 - DNA, 25 bp, Homo sapien
tgtgcgcttggttcagtaagttacc

SEQ ID NO: 794581 - DNA, 25 bp, Homo sapien
tagacttgaggtgccaaatgggacc

SEQ ID NO: 794582 - DNA, 25 bp, Homo sapien
cgtgagggtcggcttcatacttgaa

SEQ ID NO: 794583 - DNA, 25 bp, Homo sapien
cacagtgtgtagtagtctgccgaga

SEQ ID NO: 794584 - DNA, 25 bp, Homo sapien
aagatgcactctttctgcgggtagg

SEQ ID NO: 794585 - DNA, 25 bp, Homo sapien
ggatctttttgcagagctactatgg

SEQ ID NO: 794586 - DNA, 25 bp, Homo sapien
tggaagggaaatcttctaaccagat

SEQ ID NO: 794587 - DNA, 25 bp, Homo sapien
ggaaatcttctaaccagatttatga

SEQ ID NO: 794588 - DNA, 25 bp, Homo sapien
tagacagaatacattagagtcaaca

SEQ ID NO: 794589 - DNA, 25 bp, Homo sapien
gatttatgaaacacatcctagacag

SEQ ID NO: 794590 - DNA, 25 bp, Homo sapien
gagttcatgtccaggtgacctgtgg

SEQ ID NO: 794591 - DNA, 25 bp, Homo sapien
gctggtaataatcgtggccctgtat

SEQ ID NO: 794592 - DNA, 25 bp, Homo sapien
taaaaaattgtatgcttggtgccag

SEQ ID NO: 794593 - DNA, 25 bp, Homo sapien
tagtcaagtacgcattctggatggg

SEQ ID NO: 794594 - DNA, 25 bp, Homo sapien
ttagcggaccccgaaatcaggcagg

SEQ ID NO: 794595 - DNA, 25 bp, Homo sapien
tcttagggaattgaatgcaggcccc

SEQ ID NO: 794596 - DNA, 25 bp, Homo sapien
tcaactgtggcaagctgggtcttcc

SEQ ID NO: 794597 - DNA, 25 bp, Homo sapien
taacgtgagtgaacctctgaggacc

SEQ ID NO: 794598 - DNA, 25 bp, Homo sapien
gctgagggccataaactaaaacaat

SEQ ID NO: 794599 - DNA, 25 bp, Homo sapien
ggtgctgcctcctaccctacaaata

SEQ ID NO: 794600 - DNA, 25 bp, Homo sapien
gagccgtgggctaaccatcctgtta

SEQ ID NO: 794601 - DNA, 25 bp, Homo sapien
tccacagaatagcatactgaaaggc

SEQ ID NO: 794602 - DNA, 25 bp, Homo sapien
tttttattcaagcttgggatcgttg

SEQ ID NO: 794603 - DNA, 25 bp, Homo sapien
ggatcgttgtgaattgtatttggaa

SEQ ID NO: 794604 - DNA, 25 bp, Homo sapien
aagcttgggatcgttgtgaattgta

SEQ ID NO: 794605 - DNA, 25 bp, Homo sapien
ctgtaggctaggatttctcaaatct

SEQ ID NO: 794606 - DNA, 25 bp, Homo sapien
gtacagattctcctaaaccacccag

SEQ ID NO: 794607 - DNA, 25 bp, Homo sapien
tgaggccactcgcatattgttagag

SEQ ID NO: 794608 - DNA, 25 bp, Homo sapien
ggaggacatgctgaaatagtacaga

SEQ ID NO: 794609 - DNA, 25 bp, Homo sapien
cacccagaaacggatagagtaagtt

SEQ ID NO: 794610 - DNA, 25 bp, Homo sapien
cagagaaagggaacgcttatatact

SEQ ID NO: 794611 - DNA, 25 bp, Homo sapien
gcagagaaagggaacgcttatatac

SEQ ID NO: 794612 - DNA, 25 bp, Homo sapien
gtgcagagcagctgtttagtttaag

SEQ ID NO: 794613 - DNA, 25 bp, Homo sapien
cctgagagactgcaggtccagtgaa

SEQ ID NO: 794614 - DNA, 25 bp, Homo sapien
agcaggaacggcagcagcccggccg

SEQ ID NO: 794615 - DNA, 25 bp, Homo sapien
tagtctcctagtcgcctgccaccag

SEQ ID NO: 794616 - DNA, 25 bp, Homo sapien
gactgcaggtccagtgaaaaggagc

SEQ ID NO: 794617 - DNA, 25 bp, Homo sapien
agcgctgcgtgagccgaaggcgccc

SEQ ID NO: 794618 - DNA, 25 bp, Homo sapien
cttctctcgctgagggtaagggtcg

SEQ ID NO: 794619 - DNA, 25 bp, Homo sapien
ctgatgtggccgagggtgcgcactg

SEQ ID NO: 794620 - DNA, 25 bp, Homo sapien
cctgcctctacagccgagctggtga

SEQ ID NO: 794621 - DNA, 25 bp, Homo sapien
ttatttattggcagtagtgcatgcc

SEQ ID NO: 794622 - DNA, 25 bp, Homo sapien
gcagttgggcgatctactcggctca

SEQ ID NO: 794623 - DNA, 25 bp, Homo sapien
ctagctatctaatgacatggcacat

SEQ ID NO: 794624 - DNA, 25 bp, Homo sapien
tctcaagactgttcataacgacttc

SEQ ID NO: 794625 - DNA, 25 bp, Homo sapien
tttcatcaacgagctaaagaaggtg

SEQ ID NO: 794626 - DNA, 25 bp, Homo sapien
ggagcataccctgtgtgttcgagga

SEQ ID NO: 794627 - DNA, 25 bp, Homo sapien
aaatagccagtgcatgcataggagc

SEQ ID NO: 794628 - DNA, 25 bp, Homo sapien
aaaggaggccagtgttactgtagca

SEQ ID NO: 794629 - DNA, 25 bp, Homo sapien
taaagcttgaagaatacatgtgtaa

SEQ ID NO: 794630 - DNA, 25 bp, Homo sapien
aatcctgtggtttatgtacctcctg

SEQ ID NO: 794631 - DNA, 25 bp, Homo sapien
gaagaaatgcaacttacaggtttaa

SEQ ID NO: 794632 - DNA, 25 bp, Homo sapien
caggacaaaatgttaaccaatggat

SEQ ID NO: 794633 - DNA, 25 bp, Homo sapien
tttaacacagtatcatttatcttta

SEQ ID NO: 794634 - DNA, 25 bp, Homo sapien
tccaacctttcaaaaactgactgta

SEQ ID NO: 794635 - DNA, 25 bp, Homo sapien
ttatctttatgaaatccaacctttc

SEQ ID NO: 794636 - DNA, 25 bp, Homo sapien
atctttatgaaatccaacctttcaa

SEQ ID NO: 794637 - DNA, 25 bp, Homo sapien
tatcatacttcggtgtttcagcaac

SEQ ID NO: 794638 - DNA, 25 bp, Homo sapien
taatggtaactatcagccagaaccc

SEQ ID NO: 794639 - DNA, 25 bp, Homo sapien
gaacagaggtcccttcaaatcccag

SEQ ID NO: 794640 - DNA, 25 bp, Homo sapien
tgttttggctactcacatggttcag

SEQ ID NO: 794641 - DNA, 25 bp, Homo sapien
aaagtgccgtcacctaagatacaag

SEQ ID NO: 794642 - DNA, 25 bp, Homo sapien
atgctgttggaactactagacatcc

SEQ ID NO: 794643 - DNA, 25 bp, Homo sapien
catgacctgggattagggagaattt

SEQ ID NO: 794644 - DNA, 25 bp, Homo sapien
ctcaaaggtatcatgctgaatgcaa

SEQ ID NO: 794645 - DNA, 25 bp, Homo sapien
ttctggaacacttctgcaacatctt

SEQ ID NO: 794646 - DNA, 25 bp, Homo sapien
tttttctgataggcagtggcacttt

SEQ ID NO: 794647 - DNA, 25 bp, Homo sapien
tggaacacttctgcaacatctttca

SEQ ID NO: 794648 - DNA, 25 bp, Homo sapien
ttttctgataggcagtggcactttt

SEQ ID NO: 794649 - DNA, 25 bp, Homo sapien
gagtattgtgctggtagggctcccc

SEQ ID NO: 794650 - DNA, 25 bp, Homo sapien
gatcaagagattcttttagctgagg

SEQ ID NO: 794651 - DNA, 25 bp, Homo sapien
tagggctccccataagatgtatttg

SEQ ID NO: 794652 - DNA, 25 bp, Homo sapien
caccattgatgagtgctttacggaa

SEQ ID NO: 794653 - DNA, 25 bp, Homo sapien
taagaaaactgcagtccagagtgac

SEQ ID NO: 794654 - DNA, 25 bp, Homo sapien
gagcccaaagcttacagtcgtctag

SEQ ID NO: 794655 - DNA, 25 bp, Homo sapien
ttcaaacaactaagctggaggtggc

SEQ ID NO: 794656 - DNA, 25 bp, Homo sapien
tctagctgggcaacaagcttcgcca

SEQ ID NO: 794657 - DNA, 25 bp, Homo sapien
tgtaagcctgagactaaatccagag

SEQ ID NO: 794658 - DNA, 25 bp, Homo sapien
ggtcatcagctaacctttgaaataa

SEQ ID NO: 794659 - DNA, 25 bp, Homo sapien
taaggcatatatttacacgatgtct

SEQ ID NO: 794660 - DNA, 25 bp, Homo sapien
gacaacaactactatattagtggca

SEQ ID NO: 794661 - DNA, 25 bp, Homo sapien
ttgaggtcccatacacaacaaatgc

SEQ ID NO: 794662 - DNA, 25 bp, Homo sapien
cacattccgtttatttggatttcca

SEQ ID NO: 794663 - DNA, 25 bp, Homo sapien
tttaagatcatctgcagacaatctg

SEQ ID NO: 794664 - DNA, 25 bp, Homo sapien
gggctccttcagatatcataatttg

SEQ ID NO: 794665 - DNA, 25 bp, Homo sapien
tctacacaggctttcatccctgagg

SEQ ID NO: 794666 - DNA, 25 bp, Homo sapien
gttatcaacagcatcaatagctgct

SEQ ID NO: 794667 - DNA, 25 bp, Homo sapien
acagcatcaatagctgctctctcat

SEQ ID NO: 794668 - DNA, 25 bp, Homo sapien
cagcagcatagtgcaagggtgtgtt

SEQ ID NO: 794669 - DNA, 25 bp, Homo sapien
ggagtcatcttaggccaaatcaaac

SEQ ID NO: 794670 - DNA, 25 bp, Homo sapien
tgtgtgctgagtatccattacatag

SEQ ID NO: 794671 - DNA, 25 bp, Homo sapien
caagtccattcctgttcccaagtag

SEQ ID NO: 794672 - DNA, 25 bp, Homo sapien
tataactgaagcttataggacctgt

SEQ ID NO: 794673 - DNA, 25 bp, Homo sapien
ctctgaataagcaagtagggcacag

SEQ ID NO: 794674 - DNA, 25 bp, Homo sapien
catgaagcagctacacttaaaactc

SEQ ID NO: 794675 - DNA, 25 bp, Homo sapien
gaagcagctacacttaaaactctga

SEQ ID NO: 794676 - DNA, 25 bp, Homo sapien
aaactctgaataagcaagtagggca

SEQ ID NO: 794677 - DNA, 25 bp, Homo sapien
ggttttatagtgacctctatttgat

SEQ ID NO: 794678 - DNA, 25 bp, Homo sapien
tggttttatagtgacctctatttga

SEQ ID NO: 794679 - DNA, 25 bp, Homo sapien
ttggttttatagtgacctctatttg

SEQ ID NO: 794680 - DNA, 25 bp, Homo sapien
ccaaagtgtcaaataggccctgtag

SEQ ID NO: 794681 - DNA, 25 bp, Homo sapien
tgtgaatggtttttacgacttttca

SEQ ID NO: 794682 - DNA, 25 bp, Homo sapien
ttcaatgaagtgtgaaacgctccca

SEQ ID NO: 794683 - DNA, 25 bp, Homo sapien
gaaacgctcccatagctgccaaagt

SEQ ID NO: 794684 - DNA, 25 bp, Homo sapien
acttttgggctcaagatacgctccc

SEQ ID NO: 794685 - DNA, 25 bp, Homo sapien
gggctcaagatacgctcccgcctcg

SEQ ID NO: 794686 - DNA, 25 bp, Homo sapien
ttttgggctcaagatacgctcccgc

SEQ ID NO: 794687 - DNA, 25 bp, Homo sapien
tgggctcaagatacgctcccgcctc

SEQ ID NO: 794688 - DNA, 25 bp, Homo sapien
catttgagattccagattgagggcc

SEQ ID NO: 794689 - DNA, 25 bp, Homo sapien
cttctatttcttcagcctcgggatc

SEQ ID NO: 794690 - DNA, 25 bp, Homo sapien
tgcttttcagcacaatcacaaggag

SEQ ID NO: 794691 - DNA, 25 bp, Homo sapien
ctcgggatcccgtgagaataccatt

SEQ ID NO: 794692 - DNA, 25 bp, Homo sapien
ttttcagactaaacaaaccagcaat

SEQ ID NO: 794693 - DNA, 25 bp, Homo sapien
aactgcttccattttcagactaaac

SEQ ID NO: 794694 - DNA, 25 bp, Homo sapien
gcaataaccttcaaagcagtcagta

SEQ ID NO: 794695 - DNA, 25 bp, Homo sapien
acaaaccagcaataaccttcaaagc

SEQ ID NO: 794696 - DNA, 25 bp, Homo sapien
aagcttcagcagtaaagagaggagc

SEQ ID NO: 794697 - DNA, 25 bp, Homo sapien
tgagctcgaagtaaagcttcagcag

SEQ ID NO: 794698 - DNA, 25 bp, Homo sapien
tttagtctacgaagatcctgaggcc

SEQ ID NO: 794699 - DNA, 25 bp, Homo sapien
aggagcctgaagcatgtctgcagtt

SEQ ID NO: 794700 - DNA, 25 bp, Homo sapien
tgtgagagctcccagaatgcctgtc

SEQ ID NO: 794701 - DNA, 25 bp, Homo sapien
gattatagggaacttaaactgagca

SEQ ID NO: 794702 - DNA, 25 bp, Homo sapien
ccagggctaggactatggatttcaa

SEQ ID NO: 794703 - DNA, 25 bp, Homo sapien
gacaatatatttccaaggtgaccct

SEQ ID NO: 794704 - DNA, 25 bp, Homo sapien
ggtccacttggtagacttgttcaca

SEQ ID NO: 794705 - DNA, 25 bp, Homo sapien
tttgggccttacactagacctaatg

SEQ ID NO: 794706 - DNA, 25 bp, Homo sapien
tgagtccagctgtgatcatccatag

SEQ ID NO: 794707 - DNA, 25 bp, Homo sapien
taatgacagccttaagtcagtggca

SEQ ID NO: 794708 - DNA, 25 bp, Homo sapien
catccctagggaaatggcatggagt

SEQ ID NO: 794709 - DNA, 25 bp, Homo sapien
tcagtttaggagtgataggcagtca

SEQ ID NO: 794710 - DNA, 25 bp, Homo sapien
tagaaaaccggagtcagggaggtca

SEQ ID NO: 794711 - DNA, 25 bp, Homo sapien
taggcagtcaatgaaaaatcgggac

SEQ ID NO: 794712 - DNA, 25 bp, Homo sapien
catgatatagtcatcaagacagact

SEQ ID NO: 794713 - DNA, 25 bp, Homo sapien
tatagaacactatgatgaacaactt

SEQ ID NO: 794714 - DNA, 25 bp, Homo sapien
tccttgtcaaatgcacatgatatag

SEQ ID NO: 794715 - DNA, 25 bp, Homo sapien
gacagactacatgcttaaacaagcc

SEQ ID NO: 794716 - DNA, 25 bp, Homo sapien
cttggctccccaagtgctaaaatta

SEQ ID NO: 794717 - DNA, 25 bp, Homo sapien
actacacctagccttaataatcttt

SEQ ID NO: 794718 - DNA, 25 bp, Homo sapien
ttctttgacttatcgttctccttct

SEQ ID NO: 794719 - DNA, 25 bp, Homo sapien
ttggctccccaagtgctaaaattac

SEQ ID NO: 794720 - DNA, 25 bp, Homo sapien
catttgaacacctgatcgttggcag

SEQ ID NO: 794721 - DNA, 25 bp, Homo sapien
tatacccacttggtggtggagttgg

SEQ ID NO: 794722 - DNA, 25 bp, Homo sapien
gacagaagagcgtgtagtccttgga

SEQ ID NO: 794723 - DNA, 25 bp, Homo sapien
tggtgtctaaatccccaggagataa

SEQ ID NO: 794724 - DNA, 25 bp, Homo sapien
atttactgaagcatggaaataaccg

SEQ ID NO: 794725 - DNA, 25 bp, Homo sapien
caaccagacactccatggaacaata

SEQ ID NO: 794726 - DNA, 25 bp, Homo sapien
gcatggaaataaccgaacctttcaa

SEQ ID NO: 794727 - DNA, 25 bp, Homo sapien
gaaagggataggattcaattacaag

SEQ ID NO: 794728 - DNA, 25 bp, Homo sapien
acatcctctacaaaagtcatgtcca

SEQ ID NO: 794729 - DNA, 25 bp, Homo sapien
caaatacagagatactgcacataca

SEQ ID NO: 794730 - DNA, 25 bp, Homo sapien
cttcaaatacagagatactgcacat

SEQ ID NO: 794731 - DNA, 25 bp, Homo sapien
tgtccacagggcatatccacagggt

SEQ ID NO: 794732 - DNA, 25 bp, Homo sapien
gcagtaagagatgctaaggtgctca

SEQ ID NO: 794733 - DNA, 25 bp, Homo sapien
ttattaacaaatcagagtgctatca

SEQ ID NO: 794734 - DNA, 25 bp, Homo sapien
cagagtgctatcatgcagtaagaga

SEQ ID NO: 794735 - DNA, 25 bp, Homo sapien
gatgctaaggtgctcatatactcac

SEQ ID NO: 794736 - DNA, 25 bp, Homo sapien
catagtattctctagctccctacac

SEQ ID NO: 794737 - DNA, 25 bp, Homo sapien
ccacatagtattctctagctcccta

SEQ ID NO: 794738 - DNA, 25 bp, Homo sapien
attctctagctccctacacttgcta

SEQ ID NO: 794739 - DNA, 25 bp, Homo sapien
ttctctagctccctacacttgctaa

SEQ ID NO: 794740 - DNA, 25 bp, Homo sapien
ctagtttgtgatgagtttgggagat

SEQ ID NO: 794741 - DNA, 25 bp, Homo sapien
aaactgatgataatcctaggaagca

SEQ ID NO: 794742 - DNA, 25 bp, Homo sapien
caggcaggctaccaattacctaaat

SEQ ID NO: 794743 - DNA, 25 bp, Homo sapien
ggaagcacatactattatcaccact

SEQ ID NO: 794744 - DNA, 25 bp, Homo sapien
agcccagtgacctattgtatccaga

SEQ ID NO: 794745 - DNA, 25 bp, Homo sapien
gatgatatcataggtaggctctctc

SEQ ID NO: 794746 - DNA, 25 bp, Homo sapien
cataggtaggctctctctgcttatt

SEQ ID NO: 794747 - DNA, 25 bp, Homo sapien
gatatcataggtaggctctctctgc

SEQ ID NO: 794748 - DNA, 25 bp, Homo sapien
tcacagatgatatcataggtaggct

SEQ ID NO: 794749 - DNA, 25 bp, Homo sapien
aatttatgagcagaacatggagttg

SEQ ID NO: 794750 - DNA, 25 bp, Homo sapien
taagtgtcactaaaagagagaaatc

SEQ ID NO: 794751 - DNA, 25 bp, Homo sapien
taaattacagaactgagaagacctc

SEQ ID NO: 794752 - DNA, 25 bp, Homo sapien
tagacatagttactacatgatgatg

SEQ ID NO: 794753 - DNA, 25 bp, Homo sapien
gatctgccaccaacaagccatatga

SEQ ID NO: 794754 - DNA, 25 bp, Homo sapien
acaaccttactgagaccttggcagg

SEQ ID NO: 794755 - DNA, 25 bp, Homo sapien
tatatgcgtgaactactgtgtctgg

SEQ ID NO: 794756 - DNA, 25 bp, Homo sapien
gctatatgctgctatgctgggctaa

SEQ ID NO: 794757 - DNA, 25 bp, Homo sapien
ggcaaaaaatgttgtgagcttcacc

SEQ ID NO: 794758 - DNA, 25 bp, Homo sapien
caagttggaagcaatcatatgcagg

SEQ ID NO: 794759 - DNA, 25 bp, Homo sapien
ctatgatatccacaggtacaagttg

SEQ ID NO: 794760 - DNA, 25 bp, Homo sapien
ctgtaggtatcgtttgtccatctcc

SEQ ID NO: 794761 - DNA, 25 bp, Homo sapien
gctgagtgtatcagatccagatgta

SEQ ID NO: 794762 - DNA, 25 bp, Homo sapien
ccagatgtatttgacccttgtttcg

SEQ ID NO: 794763 - DNA, 25 bp, Homo sapien
cagcctggagtaggacaccatttaa

SEQ ID NO: 794764 - DNA, 25 bp, Homo sapien
gttagtcttactgctctgtcacagc

SEQ ID NO: 794765 - DNA, 25 bp, Homo sapien
aaactcaaagtagggcccgtgatct

SEQ ID NO: 794766 - DNA, 25 bp, Homo sapien
ggtatatagtctccaatgcatcttg

SEQ ID NO: 794767 - DNA, 25 bp, Homo sapien
ccaatgcatcttgagtataaccagc

SEQ ID NO: 794768 - DNA, 25 bp, Homo sapien
ccttgaactgggataaaactcaaag

SEQ ID NO: 794769 - DNA, 25 bp, Homo sapien
ggatgtgcaaagatgggaacccttg

SEQ ID NO: 794770 - DNA, 25 bp, Homo sapien
tctaaggtatgagagaactgaaagc

SEQ ID NO: 794771 - DNA, 25 bp, Homo sapien
ccttgtgcactgctgatagaaatgt

SEQ ID NO: 794772 - DNA, 25 bp, Homo sapien
caaacttgtacaccaacattcacag

SEQ ID NO: 794773 - DNA, 25 bp, Homo sapien
cacggtgactaatgagagatggagc

SEQ ID NO: 794774 - DNA, 25 bp, Homo sapien
tgcagaagaacaggccccatgtgat

SEQ ID NO: 794775 - DNA, 25 bp, Homo sapien
tctccaggtaacagctagggtaact

SEQ ID NO: 794776 - DNA, 25 bp, Homo sapien
ggccattactgagcagctttttaga

SEQ ID NO: 794777 - DNA, 25 bp, Homo sapien
tggcagtcacaaggctcatgtgctt

SEQ ID NO: 794778 - DNA, 25 bp, Homo sapien
ggcagtcacaaggctcatgtgcttc

SEQ ID NO: 794779 - DNA, 25 bp, Homo sapien
ttggcagtcacaaggctcatgtgct

SEQ ID NO: 794780 - DNA, 25 bp, Homo sapien
tacctactacgaggcagagatgcta

SEQ ID NO: 794781 - DNA, 25 bp, Homo sapien
tgactaaacggtgcatgaacaggac

SEQ ID NO: 794782 - DNA, 25 bp, Homo sapien
gccctcaggcagtggtaaatcccct

SEQ ID NO: 794783 - DNA, 25 bp, Homo sapien
ctgtaaagtatcatggccgccaggc

SEQ ID NO: 794784 - DNA, 25 bp, Homo sapien
taatgaactgatcagactttactcc

SEQ ID NO: 794785 - DNA, 25 bp, Homo sapien
cacacttggtagaagatggtttgat

SEQ ID NO: 794786 - DNA, 25 bp, Homo sapien
agctgtggaggcaattccacttaca

SEQ ID NO: 794787 - DNA, 25 bp, Homo sapien
caaagagaaacagcggtaatgaact

SEQ ID NO: 794788 - DNA, 25 bp, Homo sapien
cagtgatctttttagaatacacacc

SEQ ID NO: 794789 - DNA, 25 bp, Homo sapien
tttgctccccattgactacaagata

SEQ ID NO: 794790 - DNA, 25 bp, Homo sapien
cttttaatttgctccccattgacta

SEQ ID NO: 794791 - DNA, 25 bp, Homo sapien
tttagaatacacaccacttaaaatc

SEQ ID NO: 794792 - DNA, 25 bp, Homo sapien
ggcatcctcgtaggcttcactaact

SEQ ID NO: 794793 - DNA, 25 bp, Homo sapien
gacaattggcggcatcctcgtaggc

SEQ ID NO: 794794 - DNA, 25 bp, Homo sapien
ttcttctgtattggagacttacagt

SEQ ID NO: 794795 - DNA, 25 bp, Homo sapien
ttacagttggcacaaggcttggagt

SEQ ID NO: 794796 - DNA, 25 bp, Homo sapien
tgagaataatcaagtccccgacaaa

SEQ ID NO: 794797 - DNA, 25 bp, Homo sapien
tattagcagacctaaagtctggcca

SEQ ID NO: 794798 - DNA, 25 bp, Homo sapien
ttcataaatgtaggtaggtagggat

SEQ ID NO: 794799 - DNA, 25 bp, Homo sapien
ttcagccaagtgaatcttggttggc

SEQ ID NO: 794800 - DNA, 25 bp, Homo sapien
gttagccaacattggttcatgaggt

SEQ ID NO: 794801 - DNA, 25 bp, Homo sapien
tagtaggagacagtgccatctagga

SEQ ID NO: 794802 - DNA, 25 bp, Homo sapien
tgaaactgctttctagtaggagaca

SEQ ID NO: 794803 - DNA, 25 bp, Homo sapien
caaagcttcgaagaatgggctgact

SEQ ID NO: 794804 - DNA, 25 bp, Homo sapien
ttcttatataggtggaagcatccct

SEQ ID NO: 794805 - DNA, 25 bp, Homo sapien
gggtgctcaattggtatactgcaaa

SEQ ID NO: 794806 - DNA, 25 bp, Homo sapien
tggatataccaataacacgaggtac

SEQ ID NO: 794807 - DNA, 25 bp, Homo sapien
aattctatcgtgaaactatcagggc

SEQ ID NO: 794808 - DNA, 25 bp, Homo sapien
gcctacttctgtcaactgtcaaagt

SEQ ID NO: 794809 - DNA, 25 bp, Homo sapien
cctccttcagctgggagaagtttgt

SEQ ID NO: 794810 - DNA, 25 bp, Homo sapien
tacttctgtcaactgtcaaagtcat

SEQ ID NO: 794811 - DNA, 25 bp, Homo sapien
cgaacttcctccttcagctgggaga

SEQ ID NO: 794812 - DNA, 25 bp, Homo sapien
tgtttcctgaacttgaatgttagct

SEQ ID NO: 794813 - DNA, 25 bp, Homo sapien
aacttgaatgttagcttgacttgct

SEQ ID NO: 794814 - DNA, 25 bp, Homo sapien
acttgaatgttagcttgacttgcta

SEQ ID NO: 794815 - DNA, 25 bp, Homo sapien
cctgaacttgaatgttagcttgact

SEQ ID NO: 794816 - DNA, 25 bp, Homo sapien
ttagtacttcctttaggagctctta

SEQ ID NO: 794817 - DNA, 25 bp, Homo sapien
ctttaggagctcttataaggcaggt

SEQ ID NO: 794818 - DNA, 25 bp, Homo sapien
gtacttcctttaggagctcttataa

SEQ ID NO: 794819 - DNA, 25 bp, Homo sapien
tttaggagctcttataaggcaggtc

SEQ ID NO: 794820 - DNA, 25 bp, Homo sapien
ttccactcttcaaggcaaatccagc

SEQ ID NO: 794821 - DNA, 25 bp, Homo sapien
gacttcatagcgagtacatctgtaa

SEQ ID NO: 794822 - DNA, 25 bp, Homo sapien
catctgtaataacctccagtggacg

SEQ ID NO: 794823 - DNA, 25 bp, Homo sapien
attgctcctccacgtgttgaatgac

SEQ ID NO: 794824 - DNA, 25 bp, Homo sapien
gcataaatctgtcaagttcctgaaa

SEQ ID NO: 794825 - DNA, 25 bp, Homo sapien
aatcttgtataatagtgcataaatc

SEQ ID NO: 794826 - DNA, 25 bp, Homo sapien
ataatagtgcataaatctgtcaagt

SEQ ID NO: 794827 - DNA, 25 bp, Homo sapien
gataactatgctcatggtttttaaa

SEQ ID NO: 794828 - DNA, 25 bp, Homo sapien
ctgttttaagaaggcgttgttctag

SEQ ID NO: 794829 - DNA, 25 bp, Homo sapien
gctgttttaagaaggcgttgttcta

SEQ ID NO: 794830 - DNA, 25 bp, Homo sapien
taagaacacttgagaatgcgccgag

SEQ ID NO: 794831 - DNA, 25 bp, Homo sapien
gcgccgagtttttaagagcacatga

SEQ ID NO: 794832 - DNA, 25 bp, Homo sapien
gcatcttcaatgaaagtggtatctg

SEQ ID NO: 794833 - DNA, 25 bp, Homo sapien
gagcacatgaactgcatcttcaatg

SEQ ID NO: 794834 - DNA, 25 bp, Homo sapien
tcttctgctgtacaaggcatgctgc

SEQ ID NO: 794835 - DNA, 25 bp, Homo sapien
gtaaggcctattgactttctgggca

SEQ ID NO: 794836 - DNA, 25 bp, Homo sapien
tttctgggcaaggtcttcagtgacc

SEQ ID NO: 794837 - DNA, 25 bp, Homo sapien
tgtgcgaaggtaaggcctattgact

SEQ ID NO: 794838 - DNA, 25 bp, Homo sapien
tctggtgatgcaaatcctaaatatt

SEQ ID NO: 794839 - DNA, 25 bp, Homo sapien
ctctggtgatgcaaatcctaaatat

SEQ ID NO: 794840 - DNA, 25 bp, Homo sapien
cctaaatattcccaatcccatgttc

SEQ ID NO: 794841 - DNA, 25 bp, Homo sapien
cccaatcccatgttccaccagcaaa

SEQ ID NO: 794842 - DNA, 25 bp, Homo sapien
ttttcttggatgtatctaccaatac

SEQ ID NO: 794843 - DNA, 25 bp, Homo sapien
tatctaccaatacaaaagccacagg

SEQ ID NO: 794844 - DNA, 25 bp, Homo sapien
acaggtgattgcaagtatcttcagc

SEQ ID NO: 794845 - DNA, 25 bp, Homo sapien
taaaatgtccagatcagggctctaa

SEQ ID NO: 794846 - DNA, 25 bp, Homo sapien
aaacaaacctttatgcttgccagac

SEQ ID NO: 794847 - DNA, 25 bp, Homo sapien
caggtgttcctcagactttatgcta

SEQ ID NO: 794848 - DNA, 25 bp, Homo sapien
ggcagttactcgatagtcatacaca

SEQ ID NO: 794849 - DNA, 25 bp, Homo sapien
taagttcaatctaagtctactggag

SEQ ID NO: 794850 - DNA, 25 bp, Homo sapien
ggccagggtacatgataccaacata

SEQ ID NO: 794851 - DNA, 25 bp, Homo sapien
tatcaccagagggtacaacctggga

SEQ ID NO: 794852 - DNA, 25 bp, Homo sapien
tatgggatgaacacagacttaggca

SEQ ID NO: 794853 - DNA, 25 bp, Homo sapien
ggaccatcgctattacctgggtata

SEQ ID NO: 794854 - DNA, 25 bp, Homo sapien
gattactgagtagactgtgaacatc

SEQ ID NO: 794855 - DNA, 25 bp, Homo sapien
tcagggtctggaggattactgagta

SEQ ID NO: 794856 - DNA, 25 bp, Homo sapien
tgtgaacatctcctcgacgacgttg

SEQ ID NO: 794857 - DNA, 25 bp, Homo sapien
tgcctcctccgatactgaaattcag

SEQ ID NO: 794858 - DNA, 25 bp, Homo sapien
gggtcatgaatccaagtttgcctaa

SEQ ID NO: 794859 - DNA, 25 bp, Homo sapien
ctaaggctaggagacaaatattcca

SEQ ID NO: 794860 - DNA, 25 bp, Homo sapien
cacaatgagcctataaggtggcact

SEQ ID NO: 794861 - DNA, 25 bp, Homo sapien
aaccttagagaggttgtgacctgac

SEQ ID NO: 794862 - DNA, 25 bp, Homo sapien
cacggatgtgccaggcctgcggctg

SEQ ID NO: 794863 - DNA, 25 bp, Homo sapien
ggcctgcggctgctgctgccgcctt

SEQ ID NO: 794864 - DNA, 25 bp, Homo sapien
gccaggcctgcggctgctgctgccg

SEQ ID NO: 794865 - DNA, 25 bp, Homo sapien
aggcctgcggctgctgctgccgcct

SEQ ID NO: 794866 - DNA, 25 bp, Homo sapien
gtgcagcacactcatagatgcagaa

SEQ ID NO: 794867 - DNA, 25 bp, Homo sapien
gtgtagtcacgcagggaagagctgt

SEQ ID NO: 794868 - DNA, 25 bp, Homo sapien
gcacactcatagatgcagaacttac

SEQ ID NO: 794869 - DNA, 25 bp, Homo sapien
tcctggttttcagagcgactggcag

SEQ ID NO: 794870 - DNA, 25 bp, Homo sapien
aaacattgaatcttctggcagcacc

SEQ ID NO: 794871 - DNA, 25 bp, Homo sapien
tctagtttcttcatcgagggccagc

SEQ ID NO: 794872 - DNA, 25 bp, Homo sapien
cctagtctcatgaggctgtcaccaa

SEQ ID NO: 794873 - DNA, 25 bp, Homo sapien
gaaaccaagccatgatgttgccgag

SEQ ID NO: 794874 - DNA, 25 bp, Homo sapien
tctctatcaagcatactccacctag

SEQ ID NO: 794875 - DNA, 25 bp, Homo sapien
tcatttagagcccagatgtgtgcag

SEQ ID NO: 794876 - DNA, 25 bp, Homo sapien
tgtattcaaccctaatgtcagtggt

SEQ ID NO: 794877 - DNA, 25 bp, Homo sapien
cctagcataccatctgtacctgtaa

SEQ ID NO: 794878 - DNA, 25 bp, Homo sapien
tattgcgcagtagaacaaacacatg

SEQ ID NO: 794879 - DNA, 25 bp, Homo sapien
caagtggcaccttttactcccgaga

SEQ ID NO: 794880 - DNA, 25 bp, Homo sapien
ccatttaggttaggcaaaggcacgg

SEQ ID NO: 794881 - DNA, 25 bp, Homo sapien
tataaatgcagtctccatggcaaca

SEQ ID NO: 794882 - DNA, 25 bp, Homo sapien
gacctttgatatccatggcatagga

SEQ ID NO: 794883 - DNA, 25 bp, Homo sapien
gacttctggtaacaatctggcaaaa

SEQ ID NO: 794884 - DNA, 25 bp, Homo sapien
taactgcagctgtgcaagatgcctc

SEQ ID NO: 794885 - DNA, 25 bp, Homo sapien
aaataaaggatactgcacaaggtgc

SEQ ID NO: 794886 - DNA, 25 bp, Homo sapien
gaaagtgcaaataacaagtcaaggt

SEQ ID NO: 794887 - DNA, 25 bp, Homo sapien
tcatttggccaaacatctacacgtt

SEQ ID NO: 794888 - DNA, 25 bp, Homo sapien
gaatcctactgtatataaagtggga

SEQ ID NO: 794889 - DNA, 25 bp, Homo sapien
taaagtgggaatgtatcaagtatag

SEQ ID NO: 794890 - DNA, 25 bp, Homo sapien
aatgttttaacacattgtcatgcag

SEQ ID NO: 794891 - DNA, 25 bp, Homo sapien
tattaggcactaatcaattacatgt

SEQ ID NO: 794892 - DNA, 25 bp, Homo sapien
tgctcagtaagtggctagtgtaaaa

SEQ ID NO: 794893 - DNA, 25 bp, Homo sapien
tacatgtaagaaccaaattgatccc

SEQ ID NO: 794894 - DNA, 25 bp, Homo sapien
ggcataaataagatgacgccacttt

SEQ ID NO: 794895 - DNA, 25 bp, Homo sapien
acattggtagttaagcttcagatcc

SEQ ID NO: 794896 - DNA, 25 bp, Homo sapien
gcatggtcaaatgtcatgggttatt

SEQ ID NO: 794897 - DNA, 25 bp, Homo sapien
taattcagcctatgaacattggtag

SEQ ID NO: 794898 - DNA, 25 bp, Homo sapien
tgcaggagtaacaaagcaccgtttg

SEQ ID NO: 794899 - DNA, 25 bp, Homo sapien
taacaaagcaccgtttgcactgttt

SEQ ID NO: 794900 - DNA, 25 bp, Homo sapien
ttgtttcaatctcacctcttgttgc

SEQ ID NO: 794901 - DNA, 25 bp, Homo sapien
tcacctcttgttgctaagcctctaa

SEQ ID NO: 794902 - DNA, 25 bp, Homo sapien
tttgtattgtgtctggaggaccacc

SEQ ID NO: 794903 - DNA, 25 bp, Homo sapien
gggagaatcccactgacaatcatca

SEQ ID NO: 794904 - DNA, 25 bp, Homo sapien
tattacctctgtacatgtgggagcc

SEQ ID NO: 794905 - DNA, 25 bp, Homo sapien
aaaaggcttgagtgctctgagtgca

SEQ ID NO: 794906 - DNA, 25 bp, Homo sapien
tagaggttcttaagttttgcctgcc

SEQ ID NO: 794907 - DNA, 25 bp, Homo sapien
tatcataccaattgttctggtgcca

SEQ ID NO: 794908 - DNA, 25 bp, Homo sapien
ccagttgacaatattagtgtgaggc

SEQ ID NO: 794909 - DNA, 25 bp, Homo sapien
tgcttagcctagatcttagaagact

SEQ ID NO: 794910 - DNA, 25 bp, Homo sapien
ggagggcaccgccattattccctgg

SEQ ID NO: 794911 - DNA, 25 bp, Homo sapien
ggtgatcgatgtgcagctcatgctg

SEQ ID NO: 794912 - DNA, 25 bp, Homo sapien
tacttggacatcatcgaccttttca

SEQ ID NO: 794913 - DNA, 25 bp, Homo sapien
tttgctatcctgaacatctacttgg

SEQ ID NO: 794914 - DNA, 25 bp, Homo sapien
agtagctaattcttccttttcttca

SEQ ID NO: 794915 - DNA, 25 bp, Homo sapien
gtagctaattcttccttttcttcaa

SEQ ID NO: 794916 - DNA, 25 bp, Homo sapien
gctaattcttccttttcttcaagta

SEQ ID NO: 794917 - DNA, 25 bp, Homo sapien
tagctaattcttccttttcttcaag

SEQ ID NO: 794918 - DNA, 25 bp, Homo sapien
catttgcaggcagagtaaaaacgat

SEQ ID NO: 794919 - DNA, 25 bp, Homo sapien
tgttgatgcttgctgtactgatgct

SEQ ID NO: 794920 - DNA, 25 bp, Homo sapien
aaacgattgtagactcaaacaggtc

SEQ ID NO: 794921 - DNA, 25 bp, Homo sapien
tactgatgcttgcaaacaacgtttc

SEQ ID NO: 794922 - DNA, 25 bp, Homo sapien
gtgtgagtctttgatacacatttcc

SEQ ID NO: 794923 - DNA, 25 bp, Homo sapien
gctaggagccgtatcagtgtgagtc

SEQ ID NO: 794924 - DNA, 25 bp, Homo sapien
gcttttctcggaatgtatgtgaaca

SEQ ID NO: 794925 - DNA, 25 bp, Homo sapien
cagctcttcaaggtctgcagctagg

SEQ ID NO: 794926 - DNA, 25 bp, Homo sapien
gctctacattgcttggagttttgtg

SEQ ID NO: 794927 - DNA, 25 bp, Homo sapien
tacattgcttggagttttgtggtca

SEQ ID NO: 794928 - DNA, 25 bp, Homo sapien
tggctgcagcatatagaccagtgct

SEQ ID NO: 794929 - DNA, 25 bp, Homo sapien
cagcatatagaccagtgcttagatt

SEQ ID NO: 794930 - DNA, 25 bp, Homo sapien
caatccatgctgtgtatggattgtt

SEQ ID NO: 794931 - DNA, 25 bp, Homo sapien
tgctgtgtatggattgttggggtca

SEQ ID NO: 794932 - DNA, 25 bp, Homo sapien
gctgtgtatggattgttggggtcat

SEQ ID NO: 794933 - DNA, 25 bp, Homo sapien
tccatgctgtgtatggattgttggg

SEQ ID NO: 794934 - DNA, 25 bp, Homo sapien
agcagaaaaaggccaacttgaactg

SEQ ID NO: 794935 - DNA, 25 bp, Homo sapien
ccagggcacgagcagttccagttaa

SEQ ID NO: 794936 - DNA, 25 bp, Homo sapien
ccccagggcacgagcagttccagtt

SEQ ID NO: 794937 - DNA, 25 bp, Homo sapien
gatcctctgcactatagtggaagca

SEQ ID NO: 794938 - DNA, 25 bp, Homo sapien
gggatagaggtccaggtgtttctac

SEQ ID NO: 794939 - DNA, 25 bp, Homo sapien
ttctatatgttctgctgacttctcc

SEQ ID NO: 794940 - DNA, 25 bp, Homo sapien
aggtgtttctacatgcattcctgca

SEQ ID NO: 794941 - DNA, 25 bp, Homo sapien
tcttctttggttgcagtggcctcag

SEQ ID NO: 794942 - DNA, 25 bp, Homo sapien
gaagagcggtgagagcgtcggcacg

SEQ ID NO: 794943 - DNA, 25 bp, Homo sapien
cactcccggcgataggaagagcggt

SEQ ID NO: 794944 - DNA, 25 bp, Homo sapien
ctgccggtgaaaggaccaggccgct

SEQ ID NO: 794945 - DNA, 25 bp, Homo sapien
agacacgggaatggcggacggtagc

SEQ ID NO: 794946 - DNA, 25 bp, Homo sapien
caggtgggcttcaggcccagcggca

SEQ ID NO: 794947 - DNA, 25 bp, Homo sapien
tgcaggtgggcttcaggcccagcgg

SEQ ID NO: 794948 - DNA, 25 bp, Homo sapien
gctgcaggtgggcttcaggcccagc

SEQ ID NO: 794949 - DNA, 25 bp, Homo sapien
aggtgggcttcaggcccagcggcat

SEQ ID NO: 794950 - DNA, 25 bp, Homo sapien
tggaggacgacgtggtcttgcatac

SEQ ID NO: 794951 - DNA, 25 bp, Homo sapien
gtgctggcgaaggtcgccgcgccga

SEQ ID NO: 794952 - DNA, 25 bp, Homo sapien
tcttccacatggaggacgacgtggt

SEQ ID NO: 794953 - DNA, 25 bp, Homo sapien
cggccagtgcaatgatggcagagga

SEQ ID NO: 794954 - DNA, 25 bp, Homo sapien
tgcttgccgcccccgcccccgttgc

SEQ ID NO: 794955 - DNA, 25 bp, Homo sapien
ctgcttgccgcccccgcccccgttg

SEQ ID NO: 794956 - DNA, 25 bp, Homo sapien
tggcatgacactgtatacgactgtg

SEQ ID NO: 794957 - DNA, 25 bp, Homo sapien
gagaacgtagtaggttatggcgccc

SEQ ID NO: 794958 - DNA, 25 bp, Homo sapien
ttaacaaggaatgaggtccagcgcc

SEQ ID NO: 794959 - DNA, 25 bp, Homo sapien
cctccaaaaggtgtgagctgcttgt

SEQ ID NO: 794960 - DNA, 25 bp, Homo sapien
cagcagccggagcagatttgtattt

SEQ ID NO: 794961 - DNA, 25 bp, Homo sapien
tgtatttagtgtttctgagccgagc

SEQ ID NO: 794962 - DNA, 25 bp, Homo sapien
gccgagcagacctcctgtgaatttc

SEQ ID NO: 794963 - DNA, 25 bp, Homo sapien
cagccggagcagatttgtatttagt

SEQ ID NO: 794964 - DNA, 25 bp, Homo sapien
gctttcaactacttccagcacaggt

SEQ ID NO: 794965 - DNA, 25 bp, Homo sapien
actttataaacagtgagcctcctgc

SEQ ID NO: 794966 - DNA, 25 bp, Homo sapien
agtgtacctggccatatcaagaacc

SEQ ID NO: 794967 - DNA, 25 bp, Homo sapien
tagtccataatgcactgtccactgt

SEQ ID NO: 794968 - DNA, 25 bp, Homo sapien
taattgctgagaacacggtatacca

SEQ ID NO: 794969 - DNA, 25 bp, Homo sapien
caacataggttttctagcaagctga

SEQ ID NO: 794970 - DNA, 25 bp, Homo sapien
gctctaatagcctgagcatgacaga

SEQ ID NO: 794971 - DNA, 25 bp, Homo sapien
gaaagtaggcctccccagatgtgtc

SEQ ID NO: 794972 - DNA, 25 bp, Homo sapien
gctgctgagatctaatgcaaagtcc

SEQ ID NO: 794973 - DNA, 25 bp, Homo sapien
aaaattgctgagacaaaggacaacc

SEQ ID NO: 794974 - DNA, 25 bp, Homo sapien
ggcattttcccagccctatgagagt

SEQ ID NO: 794975 - DNA, 25 bp, Homo sapien
gacaaccttctgattatgctgctga

SEQ ID NO: 794976 - DNA, 25 bp, Homo sapien
cagtgattatagtggaaactgactc

SEQ ID NO: 794977 - DNA, 25 bp, Homo sapien
attctgcagtgattatagtggaaac

SEQ ID NO: 794978 - DNA, 25 bp, Homo sapien
tctgcagtgattatagtggaaactg

SEQ ID NO: 794979 - DNA, 25 bp, Homo sapien
gattatagtggaaactgactcagga

SEQ ID NO: 794980 - DNA, 25 bp, Homo sapien
ccaggaactatgctctaggcttaag

SEQ ID NO: 794981 - DNA, 25 bp, Homo sapien
tcacttgctaaagctgtagagccag

SEQ ID NO: 794982 - DNA, 25 bp, Homo sapien
gaggttggtcctcgtcacatagcca

SEQ ID NO: 794983 - DNA, 25 bp, Homo sapien
tagtagtatccacctcatagagtga

SEQ ID NO: 794984 - DNA, 25 bp, Homo sapien
tctgggctctagctcagtggctggc

SEQ ID NO: 794985 - DNA, 25 bp, Homo sapien
tagtttaggcatcaccagatctgag

SEQ ID NO: 794986 - DNA, 25 bp, Homo sapien
tcttgaacttgccaccatggtgctg

SEQ ID NO: 794987 - DNA, 25 bp, Homo sapien
ggtccacacgagaacagcactagtt

SEQ ID NO: 794988 - DNA, 25 bp, Homo sapien
tatactgtccttgactacgggaaca

SEQ ID NO: 794989 - DNA, 25 bp, Homo sapien
tactagtatttctggcattcaaggc

SEQ ID NO: 794990 - DNA, 25 bp, Homo sapien
actacggatgggtctggtctatgca

SEQ ID NO: 794991 - DNA, 25 bp, Homo sapien
ggaccctttatccaagtgtctgagg

SEQ ID NO: 794992 - DNA, 25 bp, Homo sapien
gatttgagcatagtagggctttcca

SEQ ID NO: 794993 - DNA, 25 bp, Homo sapien
tctcgcaatactggtcctggataaa

SEQ ID NO: 794994 - DNA, 25 bp, Homo sapien
aatgagccacgtcagtgctgcactc

SEQ ID NO: 794995 - DNA, 25 bp, Homo sapien
tataggaggcgggatcaaattggtc

SEQ ID NO: 794996 - DNA, 25 bp, Homo sapien
gaaatactcagaaggtgcatgacaa

SEQ ID NO: 794997 - DNA, 25 bp, Homo sapien
catgagtccatatgtagcccttctc

SEQ ID NO: 794998 - DNA, 25 bp, Homo sapien
ttattgcaggagtaggcccaacatg

SEQ ID NO: 794999 - DNA, 25 bp, Homo sapien
tggtgatgaccgtgacttgaaatac

SEQ ID NO: 795000 - DNA, 25 bp, Homo sapien
gaaagagaatctgactccattgccc

SEQ ID NO: 795001 - DNA, 25 bp, Homo sapien
tgtttattactaggtagcaggagaa

SEQ ID NO: 795002 - DNA, 25 bp, Homo sapien
gtggtactaagaatattagagaact

SEQ ID NO: 795003 - DNA, 25 bp, Homo sapien
cacttttccagctaagaatttcatt

SEQ ID NO: 795004 - DNA, 25 bp, Homo sapien
caggcgatccacttcccgacctcag

SEQ ID NO: 795005 - DNA, 25 bp, Homo sapien
ggcgatccacttcccgacctcaggt

SEQ ID NO: 795006 - DNA, 25 bp, Homo sapien
tcaggcgatccacttcccgacctca

SEQ ID NO: 795007 - DNA, 25 bp, Homo sapien
aggcgatccacttcccgacctcagg

SEQ ID NO: 795008 - DNA, 25 bp, Homo sapien
gatatcaatgctaatggcctaccaa

SEQ ID NO: 795009 - DNA, 25 bp, Homo sapien
caacaggcctcttattatgggtcca

SEQ ID NO: 795010 - DNA, 25 bp, Homo sapien
tacttaaccggcaaagacctgcacc

SEQ ID NO: 795011 - DNA, 25 bp, Homo sapien
cctctgcggctttggtgaagctgac

SEQ ID NO: 795012 - DNA, 25 bp, Homo sapien
ccaaattctaagtacgatactgttt

SEQ ID NO: 795013 - DNA, 25 bp, Homo sapien
ctccaaattctaagtacgatactgt

SEQ ID NO: 795014 - DNA, 25 bp, Homo sapien
aattctaagtacgatactgttttgg

SEQ ID NO: 795015 - DNA, 25 bp, Homo sapien
agatggagtcatgccgtcacccaga

SEQ ID NO: 795016 - DNA, 25 bp, Homo sapien
tacacaaccatctgccaatttataa

SEQ ID NO: 795017 - DNA, 25 bp, Homo sapien
tataaacagatgatcaatttataga

SEQ ID NO: 795018 - DNA, 25 bp, Homo sapien
caaccatctgccaatttataaacag

SEQ ID NO: 795019 - DNA, 25 bp, Homo sapien
ttataaacagatgatcaatttatag

SEQ ID NO: 795020 - DNA, 25 bp, Homo sapien
tggagagaacagtatgaacaaggac

SEQ ID NO: 795021 - DNA, 25 bp, Homo sapien
cagaccagggccatatcaggtccgg

SEQ ID NO: 795022 - DNA, 25 bp, Homo sapien
caggagaaatataagcaatgggaac

SEQ ID NO: 795023 - DNA, 25 bp, Homo sapien
tagtggtaatgaggaaacaaggctg

SEQ ID NO: 795024 - DNA, 25 bp, Homo sapien
gggtcaccattaagaggtgcttaaa

SEQ ID NO: 795025 - DNA, 25 bp, Homo sapien
ttgtgaacctttccgctactacgag

SEQ ID NO: 795026 - DNA, 25 bp, Homo sapien
ctactacgagcaatcttccttgtgg

SEQ ID NO: 795027 - DNA, 25 bp, Homo sapien
ttactgtgcatttatgcatctgacc

SEQ ID NO: 795028 - DNA, 25 bp, Homo sapien
gccttaagtcagcagcgcaggcagt

SEQ ID NO: 795029 - DNA, 25 bp, Homo sapien
cttacacaattgttggagcttgctg

SEQ ID NO: 795030 - DNA, 25 bp, Homo sapien
tgctgaacactctgtgtaaggctgt

SEQ ID NO: 795031 - DNA, 25 bp, Homo sapien
tgtaaggctgttgcttctgtgtttg

SEQ ID NO: 795032 - DNA, 25 bp, Homo sapien
cacgttttgatcatccattcgtctg

SEQ ID NO: 795033 - DNA, 25 bp, Homo sapien
caccgcacccaggtatcaacctttt

SEQ ID NO: 795034 - DNA, 25 bp, Homo sapien
gaactctttggaagctcctctatgg

SEQ ID NO: 795035 - DNA, 25 bp, Homo sapien
gaaatgttcggcttacaaaacctga

SEQ ID NO: 795036 - DNA, 25 bp, Homo sapien
tgctctgaaaaacgatgcctttgct

SEQ ID NO: 795037 - DNA, 25 bp, Homo sapien
tcagggcatcaacatgctgggacac

SEQ ID NO: 795038 - DNA, 25 bp, Homo sapien
tcggatcctacgtatggcagttcag

SEQ ID NO: 795039 - DNA, 25 bp, Homo sapien
caatttctttcggatcctacgtatg

SEQ ID NO: 795040 - DNA, 25 bp, Homo sapien
tcctacgtatggcagttcagcagtg

SEQ ID NO: 795041 - DNA, 25 bp, Homo sapien
gcagtgacatttccatggtattttc

SEQ ID NO: 795042 - DNA, 25 bp, Homo sapien
gagatgatgttatgagaagttgaga

SEQ ID NO: 795043 - DNA, 25 bp, Homo sapien
gagaagttgagattaaggttgtagc

SEQ ID NO: 795044 - DNA, 25 bp, Homo sapien
taaacaacacaggttagtgattgct

SEQ ID NO: 795045 - DNA, 25 bp, Homo sapien
catgcctggcagattgtagcttttt

SEQ ID NO: 795046 - DNA, 25 bp, Homo sapien
agtggaacaatgtttcgacctggac

SEQ ID NO: 795047 - DNA, 25 bp, Homo sapien
tataattgtgtttgccaacaatcca

SEQ ID NO: 795048 - DNA, 25 bp, Homo sapien
tgtttcgacctggacagaaagtaac

SEQ ID NO: 795049 - DNA, 25 bp, Homo sapien
ttgctccgttttctattggagtgca

SEQ ID NO: 795050 - DNA, 25 bp, Homo sapien
gccaaattgcctgccagatatactg

SEQ ID NO: 795051 - DNA, 25 bp, Homo sapien
ggtggaattgtataacagggagctc

SEQ ID NO: 795052 - DNA, 25 bp, Homo sapien
tagtgtagctatgccacaatatcca

SEQ ID NO: 795053 - DNA, 25 bp, Homo sapien
tgctcccaggcaatgtggtaatgaa

SEQ ID NO: 795054 - DNA, 25 bp, Homo sapien
tatggcaattttcacttgatggtgg

SEQ ID NO: 795055 - DNA, 25 bp, Homo sapien
caattttcacttgatggtggttcta

SEQ ID NO: 795056 - DNA, 25 bp, Homo sapien
ttatggcaattttcacttgatggtg

SEQ ID NO: 795057 - DNA, 25 bp, Homo sapien
ggcaattttcacttgatggtggttc

SEQ ID NO: 795058 - DNA, 25 bp, Homo sapien
gagatgtccgagatccttccagatg

SEQ ID NO: 795059 - DNA, 25 bp, Homo sapien
tctttcttaaccatagcagtggctc

SEQ ID NO: 795060 - DNA, 25 bp, Homo sapien
gaatgtggcttagatcagtcccttg

SEQ ID NO: 795061 - DNA, 25 bp, Homo sapien
tccagctctgatagtgacctaagtc

SEQ ID NO: 795062 - DNA, 25 bp, Homo sapien
gaatgctgctctcgagtggactcca

SEQ ID NO: 795063 - DNA, 25 bp, Homo sapien
tgtacccactatggacaacagagtg

SEQ ID NO: 795064 - DNA, 25 bp, Homo sapien
tcagtgactctctacctctggcaga

SEQ ID NO: 795065 - DNA, 25 bp, Homo sapien
tcatggttgcacaaactgtacccac

SEQ ID NO: 795066 - DNA, 25 bp, Homo sapien
ccacctgttgccagatatggaatta

SEQ ID NO: 795067 - DNA, 25 bp, Homo sapien
ttagtctatccagaaggcatgggtc

SEQ ID NO: 795068 - DNA, 25 bp, Homo sapien
catcagactcagttttctaggagag

SEQ ID NO: 795069 - DNA, 25 bp, Homo sapien
tattaggtgttattcgccagacatc

SEQ ID NO: 795070 - DNA, 25 bp, Homo sapien
tagtggaaagcgacaacaagcagat

SEQ ID NO: 795071 - DNA, 25 bp, Homo sapien
gatgggactttgtcccttcttacac

SEQ ID NO: 795072 - DNA, 25 bp, Homo sapien
gatgctgattaaagtcatatctcta

SEQ ID NO: 795073 - DNA, 25 bp, Homo sapien
tatccaatacttatgtggcagacac

SEQ ID NO: 795074 - DNA, 25 bp, Homo sapien
cgtgcccggtcttgccttagttatt

SEQ ID NO: 795075 - DNA, 25 bp, Homo sapien
ctctgactgtattgaggaaatgtaa

SEQ ID NO: 795076 - DNA, 25 bp, Homo sapien
ccgtgcccggtcttgccttagttat

SEQ ID NO: 795077 - DNA, 25 bp, Homo sapien
gttccctcctctagtcctatagttc

SEQ ID NO: 795078 - DNA, 25 bp, Homo sapien
tcccatgacaatacacgagagtgcc

SEQ ID NO: 795079 - DNA, 25 bp, Homo sapien
aattttagcaccagacggaccttag

SEQ ID NO: 795080 - DNA, 25 bp, Homo sapien
gccaggagtccttagcttcttaggg

SEQ ID NO: 795081 - DNA, 25 bp, Homo sapien
tagccaagggtgctatacgtttaaa

SEQ ID NO: 795082 - DNA, 25 bp, Homo sapien
taaccactggtggagatacagcgtc

SEQ ID NO: 795083 - DNA, 25 bp, Homo sapien
cccatgagcgggaaaggttaataca

SEQ ID NO: 795084 - DNA, 25 bp, Homo sapien
aatacaatgatggttctgccctgcg

SEQ ID NO: 795085 - DNA, 25 bp, Homo sapien
aaatagaggcacatggtctcacgag

SEQ ID NO: 795086 - DNA, 25 bp, Homo sapien
actacaggcttacggcaggatgcgc

SEQ ID NO: 795087 - DNA, 25 bp, Homo sapien
ggccatcgtttcctgcgtgcgaaga

SEQ ID NO: 795088 - DNA, 25 bp, Homo sapien
aagatttgatgaacgaggtgccgcc

SEQ ID NO: 795089 - DNA, 25 bp, Homo sapien
ggagaatcgacagcgtcggccatcg

SEQ ID NO: 795090 - DNA, 25 bp, Homo sapien
gtccctctcgatatttggcccgtgt

SEQ ID NO: 795091 - DNA, 25 bp, Homo sapien
gtgtgtcgcataccgccctctggac

SEQ ID NO: 795092 - DNA, 25 bp, Homo sapien
atttggcccgtgtgtcgcataccgc

SEQ ID NO: 795093 - DNA, 25 bp, Homo sapien
cctctggacgtggtgatcaaataaa

SEQ ID NO: 795094 - DNA, 25 bp, Homo sapien
caaataagcctaggacgaatctgcc

SEQ ID NO: 795095 - DNA, 25 bp, Homo sapien
taatacttgaccaaaggcgtcgtga

SEQ ID NO: 795096 - DNA, 25 bp, Homo sapien
aactgaccgagggttcttcacgcca

SEQ ID NO: 795097 - DNA, 25 bp, Homo sapien
tccgtaggctggtcatatggcgcta

SEQ ID NO: 795098 - DNA, 25 bp, Homo sapien
caattgcaccatataaagcgaatcg

SEQ ID NO: 795099 - DNA, 25 bp, Homo sapien
tgttcaattgcaccatataaagcga

SEQ ID NO: 795100 - DNA, 25 bp, Homo sapien
tactgttcaattgcaccatataaag

SEQ ID NO: 795101 - DNA, 25 bp, Homo sapien
tgtactgttcaattgcaccatataa

SEQ ID NO: 795102 - DNA, 25 bp, Homo sapien
tatgccttccgcatttgtagttttt

SEQ ID NO: 795103 - DNA, 25 bp, Homo sapien
tccaccgaagaaactctgttcatcc

SEQ ID NO: 795104 - DNA, 25 bp, Homo sapien
aagcaatccaccgaagaaactctgt

SEQ ID NO: 795105 - DNA, 25 bp, Homo sapien
ccgaagaaactctgttcatccattt

SEQ ID NO: 795106 - DNA, 25 bp, Homo sapien
tgctgcagatgaaagagagcttaac

SEQ ID NO: 795107 - DNA, 25 bp, Homo sapien
tcttgtagaggctagaatgctgcag

SEQ ID NO: 795108 - DNA, 25 bp, Homo sapien
taaagtgtccaaggccaaacaagtc

SEQ ID NO: 795109 - DNA, 25 bp, Homo sapien
gcttgtcgcacttctagggctggca

SEQ ID NO: 795110 - DNA, 25 bp, Homo sapien
aacagaagtggtttattgttttcat

SEQ ID NO: 795111 - DNA, 25 bp, Homo sapien
catcattcagaatcatataatttaa

SEQ ID NO: 795112 - DNA, 25 bp, Homo sapien
caaattctactccaaaaaaatcatt

SEQ ID NO: 795113 - DNA, 25 bp, Homo sapien
aaatcatttcttgagaagggtatat

SEQ ID NO: 795114 - DNA, 25 bp, Homo sapien
ccatccttagaggagtctggtgctc

SEQ ID NO: 795115 - DNA, 25 bp, Homo sapien
ggtcccccggatgaacacatacatt

SEQ ID NO: 795116 - DNA, 25 bp, Homo sapien
tatgatggtttctaccatccttaga

SEQ ID NO: 795117 - DNA, 25 bp, Homo sapien
tggtgctctgtctacaggtcccccg

SEQ ID NO: 795118 - DNA, 25 bp, Homo sapien
tcttcttttgcgctcctgcagttgt

SEQ ID NO: 795119 - DNA, 25 bp, Homo sapien
aatcataatctcattaccagttggg

SEQ ID NO: 795120 - DNA, 25 bp, Homo sapien
agacgtaatagccttttgtgcacca

SEQ ID NO: 795121 - DNA, 25 bp, Homo sapien
taagtttatgccgaattaaattcgc

SEQ ID NO: 795122 - DNA, 25 bp, Homo sapien
catttgaaatgcatacctggaggcc

SEQ ID NO: 795123 - DNA, 25 bp, Homo sapien
ttggctcatattagaactacctggg

SEQ ID NO: 795124 - DNA, 25 bp, Homo sapien
tacctaggcagcacaatctgatccc

SEQ ID NO: 795125 - DNA, 25 bp, Homo sapien
tctgatcccgatcatttaagaagtc

SEQ ID NO: 795126 - DNA, 25 bp, Homo sapien
caaaactgtgcccacggattttaat

SEQ ID NO: 795127 - DNA, 25 bp, Homo sapien
agactcaagtacccttccacctaag

SEQ ID NO: 795128 - DNA, 25 bp, Homo sapien
gcttcaaaactgtgcccacggattt

SEQ ID NO: 795129 - DNA, 25 bp, Homo sapien
gtagctacaagagttcaccaccacg

SEQ ID NO: 795130 - DNA, 25 bp, Homo sapien
acaggtatgtatctatgtctatgcc

SEQ ID NO: 795131 - DNA, 25 bp, Homo sapien
gacaggtatgtatctatgtctatgc

SEQ ID NO: 795132 - DNA, 25 bp, Homo sapien
acttcacacgtttatcttgaaaatg

SEQ ID NO: 795133 - DNA, 25 bp, Homo sapien
tcttgaaaatgtaatcagctctggt

SEQ ID NO: 795134 - DNA, 25 bp, Homo sapien
gacttgtatgtacatcttctggctt

SEQ ID NO: 795135 - DNA, 25 bp, Homo sapien
atgacttgtatgtacatcttctggc

SEQ ID NO: 795136 - DNA, 25 bp, Homo sapien
tgacttgtatgtacatcttctggct

SEQ ID NO: 795137 - DNA, 25 bp, Homo sapien
actttagacaaatggcttgaatgaa

SEQ ID NO: 795138 - DNA, 25 bp, Homo sapien
catataattactgtacatgagagat

SEQ ID NO: 795139 - DNA, 25 bp, Homo sapien
tagtttctgcaacattaagtatggg

SEQ ID NO: 795140 - DNA, 25 bp, Homo sapien
catgagagataatgttatgacaaga

SEQ ID NO: 795141 - DNA, 25 bp, Homo sapien
ttttatcagtaaagaaaatggccag

SEQ ID NO: 795142 - DNA, 25 bp, Homo sapien
tatttttggattgccacaggtcaag

SEQ ID NO: 795143 - DNA, 25 bp, Homo sapien
ttgtcttgattttgaaaccctggca

SEQ ID NO: 795144 - DNA, 25 bp, Homo sapien
aaccctggcattcggaaacatcctg

SEQ ID NO: 795145 - DNA, 25 bp, Homo sapien
tcaggtaacgtttgtcatgcaacag

SEQ ID NO: 795146 - DNA, 25 bp, Homo sapien
gttagtaccatctaccacttggagc

SEQ ID NO: 795147 - DNA, 25 bp, Homo sapien
cctgaggtggagatcatagcaactt

SEQ ID NO: 795148 - DNA, 25 bp, Homo sapien
gtcacaggactatcaggaacccatt

SEQ ID NO: 795149 - DNA, 25 bp, Homo sapien
cctcatgatgaattatgttggtggg

SEQ ID NO: 795150 - DNA, 25 bp, Homo sapien
tgctgcttgacaccacaaaggtttc

SEQ ID NO: 795151 - DNA, 25 bp, Homo sapien
ggatgaggagtgctggcttccgcat

SEQ ID NO: 795152 - DNA, 25 bp, Homo sapien
ttctgtctctcctcatgatgaatta

SEQ ID NO: 795153 - DNA, 25 bp, Homo sapien
tgcttaggatggaacagccaaccgt

SEQ ID NO: 795154 - DNA, 25 bp, Homo sapien
gaatagagtttcagcaagtacacca

SEQ ID NO: 795155 - DNA, 25 bp, Homo sapien
tgtagcccagttatctagagccttg

SEQ ID NO: 795156 - DNA, 25 bp, Homo sapien
gcttgcttaagggatagaacactga

SEQ ID NO: 795157 - DNA, 25 bp, Homo sapien
gacttctgttggaggtgtttggacc

SEQ ID NO: 795158 - DNA, 25 bp, Homo sapien
tatagttactagtgccaatagccca

SEQ ID NO: 795159 - DNA, 25 bp, Homo sapien
caatagcccatatagattcaggaaa

SEQ ID NO: 795160 - DNA, 25 bp, Homo sapien
taaagggtcagagagtaatacttgc

SEQ ID NO: 795161 - DNA, 25 bp, Homo sapien
tacctgatgggctcccaagtaagag

SEQ ID NO: 795162 - DNA, 25 bp, Homo sapien
tgttacttccataactcccagtgcc

SEQ ID NO: 795163 - DNA, 25 bp, Homo sapien
cctttttacctgatgggctcccaag

SEQ ID NO: 795164 - DNA, 25 bp, Homo sapien
ttaaaggttcagcagtggtctgcaa

SEQ ID NO: 795165 - DNA, 25 bp, Homo sapien
agatggttacatttcttgagagcaa

SEQ ID NO: 795166 - DNA, 25 bp, Homo sapien
ggagatggttacatttcttgagagc

SEQ ID NO: 795167 - DNA, 25 bp, Homo sapien
gagatggttacatttcttgagagca

SEQ ID NO: 795168 - DNA, 25 bp, Homo sapien
attatttgaatggagatggttacat

SEQ ID NO: 795169 - DNA, 25 bp, Homo sapien
tctttgtcagcgatacagtgaaggg

SEQ ID NO: 795170 - DNA, 25 bp, Homo sapien
tgaagggtgtacttcgtttttgcac

SEQ ID NO: 795171 - DNA, 25 bp, Homo sapien
gacaccaaggacattactgattcac

SEQ ID NO: 795172 - DNA, 25 bp, Homo sapien
ttggatagtgcagatgagcagacac

SEQ ID NO: 795173 - DNA, 25 bp, Homo sapien
agtggcaagcctggtatgctgtgtc

SEQ ID NO: 795174 - DNA, 25 bp, Homo sapien
gagttacattattgctctccctgtg

SEQ ID NO: 795175 - DNA, 25 bp, Homo sapien
caattttgcctgttacaaagggtgt

SEQ ID NO: 795176 - DNA, 25 bp, Homo sapien
tactatgtttaatggcctacttgcc

SEQ ID NO: 795177 - DNA, 25 bp, Homo sapien
ggactattcagtagccactcagatg

SEQ ID NO: 795178 - DNA, 25 bp, Homo sapien
cagtgcttgataactctgggagata

SEQ ID NO: 795179 - DNA, 25 bp, Homo sapien
gccataaatgttgcctgctgcttga

SEQ ID NO: 795180 - DNA, 25 bp, Homo sapien
gaaggctgctagttcaagtcctgac

SEQ ID NO: 795181 - DNA, 25 bp, Homo sapien
taaaagcagtcatacaatatgcgac

SEQ ID NO: 795182 - DNA, 25 bp, Homo sapien
tgggtattctgactatggatttgcc

SEQ ID NO: 795183 - DNA, 25 bp, Homo sapien
ttcatcagcccataaaaacactcca

SEQ ID NO: 795184 - DNA, 25 bp, Homo sapien
tgtgtgtggcggatttcgccatcca

SEQ ID NO: 795185 - DNA, 25 bp, Homo sapien
gaaactggatgtcttactgggtgct

SEQ ID NO: 795186 - DNA, 25 bp, Homo sapien
tcagagggttgcataccaataatcc

SEQ ID NO: 795187 - DNA, 25 bp, Homo sapien
tatacccttcctatctgaggaggag

SEQ ID NO: 795188 - DNA, 25 bp, Homo sapien
taaaagtagctcaagtaagggatgc

SEQ ID NO: 795189 - DNA, 25 bp, Homo sapien
gcttatattgctacagaatgctctg

SEQ ID NO: 795190 - DNA, 25 bp, Homo sapien
tcttataagaatgttggcaggtgac

SEQ ID NO: 795191 - DNA, 25 bp, Homo sapien
ttctgcagacccaagaagcagtgtg

SEQ ID NO: 795192 - DNA, 25 bp, Homo sapien
cagggtacagacttataagggtgca

SEQ ID NO: 795193 - DNA, 25 bp, Homo sapien
tcagttttggctgtggtaccaagag

SEQ ID NO: 795194 - DNA, 25 bp, Homo sapien
ccaagtcattgtacagagcattcag

SEQ ID NO: 795195 - DNA, 25 bp, Homo sapien
cagttttggctgtggtaccaagaga

SEQ ID NO: 795196 - DNA, 25 bp, Homo sapien
tgtgatggtgaaagatatgcctgga

SEQ ID NO: 795197 - DNA, 25 bp, Homo sapien
taatcagcacacatagagccacaca

SEQ ID NO: 795198 - DNA, 25 bp, Homo sapien
tattgactgccaagaactatgactg

SEQ ID NO: 795199 - DNA, 25 bp, Homo sapien
gaaaaattccgttgatgtgcttagg

SEQ ID NO: 795200 - DNA, 25 bp, Homo sapien
tgctcccaggaactagagtccagtt

SEQ ID NO: 795201 - DNA, 25 bp, Homo sapien
tgagtggcagacactcgacggtgcc

SEQ ID NO: 795202 - DNA, 25 bp, Homo sapien
cagttaaagcccctatgcgaaaggc

SEQ ID NO: 795203 - DNA, 25 bp, Homo sapien
cctgagtggcaagcagatgagtctc

SEQ ID NO: 795204 - DNA, 25 bp, Homo sapien
tattccggtatattccacaaggtgg

SEQ ID NO: 795205 - DNA, 25 bp, Homo sapien
ccaggaagtgataacgtttagctaa

SEQ ID NO: 795206 - DNA, 25 bp, Homo sapien
ttcacactgtcctaagagatgagct

SEQ ID NO: 795207 - DNA, 25 bp, Homo sapien
gctaaatgagtagaagtggacttcc

SEQ ID NO: 795208 - DNA, 25 bp, Homo sapien
gctaccaaagtgtgccaagaaatgt

SEQ ID NO: 795209 - DNA, 25 bp, Homo sapien
tacacatgcctaagaacgttcattg

SEQ ID NO: 795210 - DNA, 25 bp, Homo sapien
ttcaagggaagaggcaaccacatga

SEQ ID NO: 795211 - DNA, 25 bp, Homo sapien
actaaggtcatctggtaactgtggg

SEQ ID NO: 795212 - DNA, 25 bp, Homo sapien
tacagagctgtggaggattgctatc

SEQ ID NO: 795213 - DNA, 25 bp, Homo sapien
gaacacctcggagctgaatacagcc

SEQ ID NO: 795214 - DNA, 25 bp, Homo sapien
aagaatatctgcctacagtgccctg

SEQ ID NO: 795215 - DNA, 25 bp, Homo sapien
cgccttaagctgatcctgcggagaa

SEQ ID NO: 795216 - DNA, 25 bp, Homo sapien
tctccttaatcctataccgttttgc

SEQ ID NO: 795217 - DNA, 25 bp, Homo sapien
tctggaccggttttacttcaagtgc

SEQ ID NO: 795218 - DNA, 25 bp, Homo sapien
gacggaacttcgtctcagattcttc

SEQ ID NO: 795219 - DNA, 25 bp, Homo sapien
tttctgccacggtctttccttgtca

SEQ ID NO: 795220 - DNA, 25 bp, Homo sapien
cagccggtcaatggcagacctggac

SEQ ID NO: 795221 - DNA, 25 bp, Homo sapien
aacacagggtgtgttgtcctgctac

SEQ ID NO: 795222 - DNA, 25 bp, Homo sapien
ccagtctggagggtcaacacagggt

SEQ ID NO: 795223 - DNA, 25 bp, Homo sapien
tcacagccggtcaatggcagacctg

SEQ ID NO: 795224 - DNA, 25 bp, Homo sapien
ttggatgaactttgcgaaacacaaa

SEQ ID NO: 795225 - DNA, 25 bp, Homo sapien
tgaactttgcgaaacacaaagacct

SEQ ID NO: 795226 - DNA, 25 bp, Homo sapien
acaaagacctttcctcttatccctg

SEQ ID NO: 795227 - DNA, 25 bp, Homo sapien
cctcttatccctgattctaaaggga

SEQ ID NO: 795228 - DNA, 25 bp, Homo sapien
ttcttttctttcatcatctttccta

SEQ ID NO: 795229 - DNA, 25 bp, Homo sapien
cttttctttcatcatctttcctaaa

SEQ ID NO: 795230 - DNA, 25 bp, Homo sapien
ttttctttcatcatctttcctaaag

SEQ ID NO: 795231 - DNA, 25 bp, Homo sapien
tcttttctttcatcatctttcctaa

SEQ ID NO: 795232 - DNA, 25 bp, Homo sapien
cattctccctgtaagggtccacgtg

SEQ ID NO: 795233 - DNA, 25 bp, Homo sapien
aaagaaaattggacccagttctctg

SEQ ID NO: 795234 - DNA, 25 bp, Homo sapien
tgaccactgcacagatagcactgag

SEQ ID NO: 795235 - DNA, 25 bp, Homo sapien
aagccttttggttgtgagtgccaca

SEQ ID NO: 795236 - DNA, 25 bp, Homo sapien
ctggtaatgtgtgaaccagtggaat

SEQ ID NO: 795237 - DNA, 25 bp, Homo sapien
ggtaatgtgtgaaccagtggaatac

SEQ ID NO: 795238 - DNA, 25 bp, Homo sapien
tggtaatgtgtgaaccagtggaata

SEQ ID NO: 795239 - DNA, 25 bp, Homo sapien
gacagcttcggtcagttgttgtgga

SEQ ID NO: 795240 - DNA, 25 bp, Homo sapien
tatgatagaagaaacctctaaggtc

SEQ ID NO: 795241 - DNA, 25 bp, Homo sapien
aagagtaggcgagtgtgctgatcca

SEQ ID NO: 795242 - DNA, 25 bp, Homo sapien
tcggtcagttgttgtggagttccac

SEQ ID NO: 795243 - DNA, 25 bp, Homo sapien
tggacatgcagcactgtcagtgcag

SEQ ID NO: 795244 - DNA, 25 bp, Homo sapien
ctctttggacatgcagcactgtcag

SEQ ID NO: 795245 - DNA, 25 bp, Homo sapien
agtgcagcgccaggccccatatctg

SEQ ID NO: 795246 - DNA, 25 bp, Homo sapien
tggccaagctgtaacagagagggct

SEQ ID NO: 795247 - DNA, 25 bp, Homo sapien
tcagcatttgcaccagattcccaat

SEQ ID NO: 795248 - DNA, 25 bp, Homo sapien
ggcagatgacacctgcaagcacgca

SEQ ID NO: 795249 - DNA, 25 bp, Homo sapien
caatagcagtagctacagtatcagc

SEQ ID NO: 795250 - DNA, 25 bp, Homo sapien
caaacctgctcatgctatagaggga

SEQ ID NO: 795251 - DNA, 25 bp, Homo sapien
agtaactccatacgggcccttgctg

SEQ ID NO: 795252 - DNA, 25 bp, Homo sapien
ggtagtgacaaaccaagtaactcca

SEQ ID NO: 795253 - DNA, 25 bp, Homo sapien
tgaaggagctggtgtctgataagac

SEQ ID NO: 795254 - DNA, 25 bp, Homo sapien
tgagcatctacctcccatctggtgt

SEQ ID NO: 795255 - DNA, 25 bp, Homo sapien
ttctcatgagcaggaggtacttcat

SEQ ID NO: 795256 - DNA, 25 bp, Homo sapien
tcatgagcaggaggtacttcatagc

SEQ ID NO: 795257 - DNA, 25 bp, Homo sapien
catgagcaggaggtacttcatagcc

SEQ ID NO: 795258 - DNA, 25 bp, Homo sapien
catctcatttttctcatgagcagga

SEQ ID NO: 795259 - DNA, 25 bp, Homo sapien
aattgtgtcctggatggaaagtcag

SEQ ID NO: 795260 - DNA, 25 bp, Homo sapien
taagaatgctcctatcctccaggtg

SEQ ID NO: 795261 - DNA, 25 bp, Homo sapien
cctccaggtgtagggtgggcacctc

SEQ ID NO: 795262 - DNA, 25 bp, Homo sapien
ggaaagtcagttcttaccagtctaa

SEQ ID NO: 795263 - DNA, 25 bp, Homo sapien
gctgatattgatgcagctgcctggc

SEQ ID NO: 795264 - DNA, 25 bp, Homo sapien
ggacaatgcaggtctaagtcatcaa

SEQ ID NO: 795265 - DNA, 25 bp, Homo sapien
taagtcagtgcccttctcattgaag

SEQ ID NO: 795266 - DNA, 25 bp, Homo sapien
ccacatgtactgattggacaatgca

SEQ ID NO: 795267 - DNA, 25 bp, Homo sapien
ccctcttactaacaactgctggttt

SEQ ID NO: 795268 - DNA, 25 bp, Homo sapien
catatcctaggtctgcctgttctgt

SEQ ID NO: 795269 - DNA, 25 bp, Homo sapien
tgtccacttcttgtcccactaggag

SEQ ID NO: 795270 - DNA, 25 bp, Homo sapien
taggatacctcgtgaagggcctggc

SEQ ID NO: 795271 - DNA, 25 bp, Homo sapien
taatatgactggcagcgcaataggt

SEQ ID NO: 795272 - DNA, 25 bp, Homo sapien
caataacgttaagatggctaggaga

SEQ ID NO: 795273 - DNA, 25 bp, Homo sapien
cagcaatagcaggtgatgggacatc

SEQ ID NO: 795274 - DNA, 25 bp, Homo sapien
atatctaaagggagccagtggcccc

SEQ ID NO: 795275 - DNA, 25 bp, Homo sapien
catatctaaagggagccagtggccc

SEQ ID NO: 795276 - DNA, 25 bp, Homo sapien
agcaatagcaggtgatgggacatcc

SEQ ID NO: 795277 - DNA, 25 bp, Homo sapien
tctccatatatacttcagtcttttc

SEQ ID NO: 795278 - DNA, 25 bp, Homo sapien
atttctccatatatacttcagtctt

SEQ ID NO: 795279 - DNA, 25 bp, Homo sapien
ttctccatatatacttcagtctttt

SEQ ID NO: 795280 - DNA, 25 bp, Homo sapien
tttctccatatatacttcagtcttt

SEQ ID NO: 795281 - DNA, 25 bp, Homo sapien
tgaaaagaacacgagacagacaaca

SEQ ID NO: 795282 - DNA, 25 bp, Homo sapien
gaaaagaacacgagacagacaacag

SEQ ID NO: 795283 - DNA, 25 bp, Homo sapien
aaaagaacacgagacagacaacagc

SEQ ID NO: 795284 - DNA, 25 bp, Homo sapien
gaagcgcaatcactacacatttctg

SEQ ID NO: 795285 - DNA, 25 bp, Homo sapien
ctaatgaagcgcaatcactacacat

SEQ ID NO: 795286 - DNA, 25 bp, Homo sapien
atgaagcgcaatcactacacatttc

SEQ ID NO: 795287 - DNA, 25 bp, Homo sapien
agcgcaatcactacacatttctgtt

SEQ ID NO: 795288 - DNA, 25 bp, Homo sapien
aacccagatccaataccgctgacat

SEQ ID NO: 795289 - DNA, 25 bp, Homo sapien
tgtccgtgggtctgacagcagattg

SEQ ID NO: 795290 - DNA, 25 bp, Homo sapien
actttgtacaacagagcacactccg

SEQ ID NO: 795291 - DNA, 25 bp, Homo sapien
acagagcacactccgaaacccagat

SEQ ID NO: 795292 - DNA, 25 bp, Homo sapien
ttgtttggcatcttcgggtacatgc

SEQ ID NO: 795293 - DNA, 25 bp, Homo sapien
gtttggcatcttcgggtacatgcat

SEQ ID NO: 795294 - DNA, 25 bp, Homo sapien
tgtttggcatcttcgggtacatgca

SEQ ID NO: 795295 - DNA, 25 bp, Homo sapien
cttgtttggcatcttcgggtacatg

SEQ ID NO: 795296 - DNA, 25 bp, Homo sapien
tactttcaaccactaggcaagtagt

SEQ ID NO: 795297 - DNA, 25 bp, Homo sapien
ggagcacagaccttcatggttgtgc

SEQ ID NO: 795298 - DNA, 25 bp, Homo sapien
ctaggcaagtagttgaggatggcac

SEQ ID NO: 795299 - DNA, 25 bp, Homo sapien
agaaaaattgagttgtggccctgga

SEQ ID NO: 795300 - DNA, 25 bp, Homo sapien
tcaggtccatggctgtaactttcat

SEQ ID NO: 795301 - DNA, 25 bp, Homo sapien
tcctgagtgcctctggccattgcct

SEQ ID NO: 795302 - DNA, 25 bp, Homo sapien
agcatgttctgacttcagccctttc

SEQ ID NO: 795303 - DNA, 25 bp, Homo sapien
tgactcaggtccatggctgtaactt

SEQ ID NO: 795304 - DNA, 25 bp, Homo sapien
aatcaagtaatttgcatatgggctt

SEQ ID NO: 795305 - DNA, 25 bp, Homo sapien
tactcattctaatcataaccacttt

SEQ ID NO: 795306 - DNA, 25 bp, Homo sapien
gctttcagtacagagcaacagagta

SEQ ID NO: 795307 - DNA, 25 bp, Homo sapien
tttgcatatgggctttggcaaagtt

SEQ ID NO: 795308 - DNA, 25 bp, Homo sapien
actggacttgatacccaggtgatgg

SEQ ID NO: 795309 - DNA, 25 bp, Homo sapien
aactgataagattcccaatattgct

SEQ ID NO: 795310 - DNA, 25 bp, Homo sapien
tgggatggtctgtgtagctgaccac

SEQ ID NO: 795311 - DNA, 25 bp, Homo sapien
catgagaagacttttattcgacagc

SEQ ID NO: 795312 - DNA, 25 bp, Homo sapien
gcagtgggtaggcagaaagcattct

SEQ ID NO: 795313 - DNA, 25 bp, Homo sapien
ttcacaccgagtagtgcatcgcgat

SEQ ID NO: 795314 - DNA, 25 bp, Homo sapien
taaaactcgctgacttcggccttgc

SEQ ID NO: 795315 - DNA, 25 bp, Homo sapien
tccagatggctctaacctcagtggt

SEQ ID NO: 795316 - DNA, 25 bp, Homo sapien
ccccacacatactgagagttttgaa

SEQ ID NO: 795317 - DNA, 25 bp, Homo sapien
gcacattgtagacccttattatgcc

SEQ ID NO: 795318 - DNA, 25 bp, Homo sapien
cctatattctgtggaagacgagctt

SEQ ID NO: 795319 - DNA, 25 bp, Homo sapien
gttttacctagttgatttatgcaca

SEQ ID NO: 795320 - DNA, 25 bp, Homo sapien
attcactcttgttaggcccttattt

SEQ ID NO: 795321 - DNA, 25 bp, Homo sapien
tcactcttgttaggcccttattttg

SEQ ID NO: 795322 - DNA, 25 bp, Homo sapien
ccacaggttttggggtctctcagtc

SEQ ID NO: 795323 - DNA, 25 bp, Homo sapien
agccacaggttttggggtctctcag

SEQ ID NO: 795324 - DNA, 25 bp, Homo sapien
tggagcacctccagtgttaacacat

SEQ ID NO: 795325 - DNA, 25 bp, Homo sapien
tgttaacacatcgaaggtgtccaag

SEQ ID NO: 795326 - DNA, 25 bp, Homo sapien
gagtgaggaggtgtttgacaaggcc

SEQ ID NO: 795327 - DNA, 25 bp, Homo sapien
caagatcccgttgttgtctggctga

SEQ ID NO: 795328 - DNA, 25 bp, Homo sapien
tagtagatcttcagggtcactggca

SEQ ID NO: 795329 - DNA, 25 bp, Homo sapien
cttcacagcacaggcggttcaaaat

SEQ ID NO: 795330 - DNA, 25 bp, Homo sapien
ttgctgtctgtagtagatcttcagg

SEQ ID NO: 795331 - DNA, 25 bp, Homo sapien
gcacaggcggttcaaaattgcctct

SEQ ID NO: 795332 - DNA, 25 bp, Homo sapien
ttttctctggttaagtgtgacatta

SEQ ID NO: 795333 - DNA, 25 bp, Homo sapien
gatggagttacactgtcatcttgaa

SEQ ID NO: 795334 - DNA, 25 bp, Homo sapien
tatcaggtagtagttgcaagggcaa

SEQ ID NO: 795335 - DNA, 25 bp, Homo sapien
actacggacataggagctgttcaac

SEQ ID NO: 795336 - DNA, 25 bp, Homo sapien
taagcccatgaaacttaatcagtgg

SEQ ID NO: 795337 - DNA, 25 bp, Homo sapien
gatgagaactgatgccacttggttc

SEQ ID NO: 795338 - DNA, 25 bp, Homo sapien
aacttctagctgattagatgagaac

SEQ ID NO: 795339 - DNA, 25 bp, Homo sapien
gagtggtaacattctgctaattctt

SEQ ID NO: 795340 - DNA, 25 bp, Homo sapien
tgaccagcagtacgaatgcgtggcg

SEQ ID NO: 795341 - DNA, 25 bp, Homo sapien
ttcgagcaccccaacgtggtcaggt

SEQ ID NO: 795342 - DNA, 25 bp, Homo sapien
taagttttgtcgacagagccgcgag

SEQ ID NO: 795343 - DNA, 25 bp, Homo sapien
caaggcccgcgacttgaagaacgga

SEQ ID NO: 795344 - DNA, 25 bp, Homo sapien
gagttaaacacacgccccgcagtga

SEQ ID NO: 795345 - DNA, 25 bp, Homo sapien
ttggagccccgcgaagacgcacgtt

SEQ ID NO: 795346 - DNA, 25 bp, Homo sapien
aagacgcacgtttgctgtagtttcc

SEQ ID NO: 795347 - DNA, 25 bp, Homo sapien
attggagttaaacacacgccccgca

SEQ ID NO: 795348 - DNA, 25 bp, Homo sapien
tgcggagagccgactgacactcgca

SEQ ID NO: 795349 - DNA, 25 bp, Homo sapien
gcgaggccgcggacacgtgcggaga

SEQ ID NO: 795350 - DNA, 25 bp, Homo sapien
ctgtgcgctcgggtgggtgggctgc

SEQ ID NO: 795351 - DNA, 25 bp, Homo sapien
cgacgcgactgggcccctcaggtga

SEQ ID NO: 795352 - DNA, 25 bp, Homo sapien
gatcagcaggtggaagcagaaacca

SEQ ID NO: 795353 - DNA, 25 bp, Homo sapien
gagatcagcaggtggaagcagaaac

SEQ ID NO: 795354 - DNA, 25 bp, Homo sapien
gaagcagaaaccagccaggggtgga

SEQ ID NO: 795355 - DNA, 25 bp, Homo sapien
tctgtgagatcagcaggtggaagca

SEQ ID NO: 795356 - DNA, 25 bp, Homo sapien
tgtttcatcactgttatcacctcac

SEQ ID NO: 795357 - DNA, 25 bp, Homo sapien
tttgaagattttgtttcatcactgt

SEQ ID NO: 795358 - DNA, 25 bp, Homo sapien
tgtgctgtggtttgaagattttgtt

SEQ ID NO: 795359 - DNA, 25 bp, Homo sapien
ttttgtttcatcactgttatcacct

SEQ ID NO: 795360 - DNA, 25 bp, Homo sapien
tgtaacctttctggaacgaataata

SEQ ID NO: 795361 - DNA, 25 bp, Homo sapien
caccagttttgagctatctagggca

SEQ ID NO: 795362 - DNA, 25 bp, Homo sapien
agaggcagaatggcatatgatgcag

SEQ ID NO: 795363 - DNA, 25 bp, Homo sapien
ggtgagacttgagaatcccaacttc

SEQ ID NO: 795364 - DNA, 25 bp, Homo sapien
tgtggtctcctaacataggccaaag

SEQ ID NO: 795365 - DNA, 25 bp, Homo sapien
taggccaaagggatagaggcagaca

SEQ ID NO: 795366 - DNA, 25 bp, Homo sapien
cagcagatgccagtggaagatcaag

SEQ ID NO: 795367 - DNA, 25 bp, Homo sapien
tagtcttcataaccaggaattctgt

SEQ ID NO: 795368 - DNA, 25 bp, Homo sapien
tataccacgggcagataagagagct

SEQ ID NO: 795369 - DNA, 25 bp, Homo sapien
agtttaggagtagcctcgagcaccc

SEQ ID NO: 795370 - DNA, 25 bp, Homo sapien
tctgcccctacaaggagaggtcttg

SEQ ID NO: 795371 - DNA, 25 bp, Homo sapien
tgtatatgtgactgaaaggaggcca

SEQ ID NO: 795372 - DNA, 25 bp, Homo sapien
taagcagtggcaaggtgatcccagg

SEQ ID NO: 795373 - DNA, 25 bp, Homo sapien
gtctggtaaaagtcaggctcccaaa

SEQ ID NO: 795374 - DNA, 25 bp, Homo sapien
tggtgaactgggttgggcaatcccc

SEQ ID NO: 795375 - DNA, 25 bp, Homo sapien
gcagcaacccctagtgatggcagtt

SEQ ID NO: 795376 - DNA, 25 bp, Homo sapien
agggaggaccccatatgacagctca

SEQ ID NO: 795377 - DNA, 25 bp, Homo sapien
gagggccgcttctgattcaccaaga

SEQ ID NO: 795378 - DNA, 25 bp, Homo sapien
tcttcttagtgaaatctccccaaag

SEQ ID NO: 795379 - DNA, 25 bp, Homo sapien
cccctggaagctgcatatcaatctt

SEQ ID NO: 795380 - DNA, 25 bp, Homo sapien
agtaacaacagggacaggagcacat

SEQ ID NO: 795381 - DNA, 25 bp, Homo sapien
tgtggtggtgttaatgttcagtatc

SEQ ID NO: 795382 - DNA, 25 bp, Homo sapien
ggaagtaacaacagggacaggagca

SEQ ID NO: 795383 - DNA, 25 bp, Homo sapien
tctgtggtggtgttaatgttcagta

SEQ ID NO: 795384 - DNA, 25 bp, Homo sapien
cagcaacaggaaagtccgtccccgt

SEQ ID NO: 795385 - DNA, 25 bp, Homo sapien
tcttgtgagaaatccatcacaagag

SEQ ID NO: 795386 - DNA, 25 bp, Homo sapien
tgagaaatccatcacaagagcagca

SEQ ID NO: 795387 - DNA, 25 bp, Homo sapien
aagtccgtccccgtgattcaatcac

SEQ ID NO: 795388 - DNA, 25 bp, Homo sapien
agatttaattagcttgcagttctgc

SEQ ID NO: 795389 - DNA, 25 bp, Homo sapien
caaacagatatagaggaaccttcaa

SEQ ID NO: 795390 - DNA, 25 bp, Homo sapien
taaaattgaatgcaaccaagatgtc

SEQ ID NO: 795391 - DNA, 25 bp, Homo sapien
gtacatccctacaatgtaatattaa

SEQ ID NO: 795392 - DNA, 25 bp, Homo sapien
taattgcctaaaattgaatgcaacc

SEQ ID NO: 795393 - DNA, 25 bp, Homo sapien
taatcaagaacaccttcccattagt

SEQ ID NO: 795394 - DNA, 25 bp, Homo sapien
ttcccattagtcatcttcatggcag

SEQ ID NO: 795395 - DNA, 25 bp, Homo sapien
tttaatataatcaagaacaccttcc

SEQ ID NO: 795396 - DNA, 25 bp, Homo sapien
tcatcttcatggcagatctcctcat

SEQ ID NO: 795397 - DNA, 25 bp, Homo sapien
cagggtgatctgtagttattcttgc

SEQ ID NO: 795398 - DNA, 25 bp, Homo sapien
taattcaactaggaatgcccaaagg

SEQ ID NO: 795399 - DNA, 25 bp, Homo sapien
gtaattgagcactgaactttttgcc

SEQ ID NO: 795400 - DNA, 25 bp, Homo sapien
gagcagaggtcaagacttctgatta

SEQ ID NO: 795401 - DNA, 25 bp, Homo sapien
tcaagaccttcatatgccaaatagc

SEQ ID NO: 795402 - DNA, 25 bp, Homo sapien
tactgaaatctcctaggtgttgcat

SEQ ID NO: 795403 - DNA, 25 bp, Homo sapien
ccaagatggttttctcaggtcaaga

SEQ ID NO: 795404 - DNA, 25 bp, Homo sapien
tccttgctgcagttatccaagatgg

SEQ ID NO: 795405 - DNA, 25 bp, Homo sapien
agacaagaggcatcatcagcggctc

SEQ ID NO: 795406 - DNA, 25 bp, Homo sapien
ttttcacggtgtggcagctttcagg

SEQ ID NO: 795407 - DNA, 25 bp, Homo sapien
cacagattaggttggcatgattcta

SEQ ID NO: 795408 - DNA, 25 bp, Homo sapien
gatcaatttaaggtaagtggcaggc

SEQ ID NO: 795409 - DNA, 25 bp, Homo sapien
tggctgaacatgtaaattaacctgc

SEQ ID NO: 795410 - DNA, 25 bp, Homo sapien
tgccccaagtcacatagtgagttac

SEQ ID NO: 795411 - DNA, 25 bp, Homo sapien
gagatatcaggaaggtcattcccct

SEQ ID NO: 795412 - DNA, 25 bp, Homo sapien
caattaaataggtctgctgcagagc

SEQ ID NO: 795413 - DNA, 25 bp, Homo sapien
aaggtgtgtgttcctgaggccaaga

SEQ ID NO: 795414 - DNA, 25 bp, Homo sapien
caggtttataagcaccatatgccta

SEQ ID NO: 795415 - DNA, 25 bp, Homo sapien
atcatttctggagggcccaccggaa

SEQ ID NO: 795416 - DNA, 25 bp, Homo sapien
taaaaagaatctaacaggtgcagct

SEQ ID NO: 795417 - DNA, 25 bp, Homo sapien
caaacatatctgcttcttcattcat

SEQ ID NO: 795418 - DNA, 25 bp, Homo sapien
tttcacaaacatatctgcttcttca

SEQ ID NO: 795419 - DNA, 25 bp, Homo sapien
ctttcacaaacatatctgcttcttc

SEQ ID NO: 795420 - DNA, 25 bp, Homo sapien
cacaaacatatctgcttcttcattc

SEQ ID NO: 795421 - DNA, 25 bp, Homo sapien
tttctgatcaggacatctttgatga

SEQ ID NO: 795422 - DNA, 25 bp, Homo sapien
tgatcaggacatctttgatgatcat

SEQ ID NO: 795423 - DNA, 25 bp, Homo sapien
ttctgatcaggacatctttgatgat

SEQ ID NO: 795424 - DNA, 25 bp, Homo sapien
tctgatcaggacatctttgatgatc

SEQ ID NO: 795425 - DNA, 25 bp, Homo sapien
ttgcttattgcaacagatgtgtaca

SEQ ID NO: 795426 - DNA, 25 bp, Homo sapien
cttcacagagcatgccacaactctt

SEQ ID NO: 795427 - DNA, 25 bp, Homo sapien
gaatgctcttatgatattttcaggc

SEQ ID NO: 795428 - DNA, 25 bp, Homo sapien
acagttctgcaggaggtttggccca

SEQ ID NO: 795429 - DNA, 25 bp, Homo sapien
cattgaatccacagtctgttacttg

SEQ ID NO: 795430 - DNA, 25 bp, Homo sapien
ttgctccccacagagatccaaatac

SEQ ID NO: 795431 - DNA, 25 bp, Homo sapien
acagtctgttacttgctccccacag

SEQ ID NO: 795432 - DNA, 25 bp, Homo sapien
tccatttcattgaatccacagtctg

SEQ ID NO: 795433 - DNA, 25 bp, Homo sapien
gtcgttgttaggtgatctgtaggcc

SEQ ID NO: 795434 - DNA, 25 bp, Homo sapien
ttgtacagcagagtcggatgcttgg

SEQ ID NO: 795435 - DNA, 25 bp, Homo sapien
gccaaatagccttccctttgtacag

SEQ ID NO: 795436 - DNA, 25 bp, Homo sapien
tgtaggcctacatgtcactgctgtg

SEQ ID NO: 795437 - DNA, 25 bp, Homo sapien
tagagtagagccaattccctatagc

SEQ ID NO: 795438 - DNA, 25 bp, Homo sapien
tgagcaggagccttaagataggagc

SEQ ID NO: 795439 - DNA, 25 bp, Homo sapien
gggtccaaatccttgtattatcaga

SEQ ID NO: 795440 - DNA, 25 bp, Homo sapien
cctatagcaacagagctcagggttt

SEQ ID NO: 795441 - DNA, 25 bp, Homo sapien
tgccctcacaccctgatgactggct

SEQ ID NO: 795442 - DNA, 25 bp, Homo sapien
ctggctgcttgaagggcctcgaggg

SEQ ID NO: 795443 - DNA, 25 bp, Homo sapien
tcacaccctgatgactggctgcttg

SEQ ID NO: 795444 - DNA, 25 bp, Homo sapien
ttgagggctctagggaaagcctctc

SEQ ID NO: 795445 - DNA, 25 bp, Homo sapien
gccaagccaggattgggatagcttt

SEQ ID NO: 795446 - DNA, 25 bp, Homo sapien
aatgtgttttatgttcccgcgtctc

SEQ ID NO: 795447 - DNA, 25 bp, Homo sapien
accacggtacatggaatgctccccg

SEQ ID NO: 795448 - DNA, 25 bp, Homo sapien
ttgcctgagtcatgaacaccacggt

SEQ ID NO: 795449 - DNA, 25 bp, Homo sapien
catgggtatattgcctgacactgag

SEQ ID NO: 795450 - DNA, 25 bp, Homo sapien
ccatggaccccagcgtctattgttc

SEQ ID NO: 795451 - DNA, 25 bp, Homo sapien
ccaacttagaagtgagaatatgcac

SEQ ID NO: 795452 - DNA, 25 bp, Homo sapien
gagcatagcacccactcggtagttt

SEQ ID NO: 795453 - DNA, 25 bp, Homo sapien
aacgattgcagcagtcacggcctga

SEQ ID NO: 795454 - DNA, 25 bp, Homo sapien
cctgttgccaattttgacagtagat

SEQ ID NO: 795455 - DNA, 25 bp, Homo sapien
tagatgaacgattgcagcagtcacg

SEQ ID NO: 795456 - DNA, 25 bp, Homo sapien
ttttgacagtagatgaacgattgca

SEQ ID NO: 795457 - DNA, 25 bp, Homo sapien
ggttgctgctcaagccacttgaaca

SEQ ID NO: 795458 - DNA, 25 bp, Homo sapien
gttgctgctcaagccacttgaacat

SEQ ID NO: 795459 - DNA, 25 bp, Homo sapien
atggttgctgctcaagccacttgaa

SEQ ID NO: 795460 - DNA, 25 bp, Homo sapien
ctatggttgctgctcaagccacttg

SEQ ID NO: 795461 - DNA, 25 bp, Homo sapien
ggcactcaaggatcttccaaaacag

SEQ ID NO: 795462 - DNA, 25 bp, Homo sapien
gaaccccactacttaccaggcatgg

SEQ ID NO: 795463 - DNA, 25 bp, Homo sapien
catcaatgtatcatgtgcttggcac

SEQ ID NO: 795464 - DNA, 25 bp, Homo sapien
tcaagatctatgctttaaaccggca

SEQ ID NO: 795465 - DNA, 25 bp, Homo sapien
catgagctattgcatccagccatac

SEQ ID NO: 795466 - DNA, 25 bp, Homo sapien
ccatacctcctactctcaaccctgg

SEQ ID NO: 795467 - DNA, 25 bp, Homo sapien
atacctcctactctcaaccctggcc

SEQ ID NO: 795468 - DNA, 25 bp, Homo sapien
tgagctattgcatccagccatacct

SEQ ID NO: 795469 - DNA, 25 bp, Homo sapien
tcctgaagtgtaacagcaatgcctt

SEQ ID NO: 795470 - DNA, 25 bp, Homo sapien
tagtgggcagtataagcccatcaca

SEQ ID NO: 795471 - DNA, 25 bp, Homo sapien
caagctccctgatgagcatggtcct

SEQ ID NO: 795472 - DNA, 25 bp, Homo sapien
tgttgtctctgtacggataattctc

SEQ ID NO: 795473 - DNA, 25 bp, Homo sapien
ggtatgatgtcagtgttctcacgac

SEQ ID NO: 795474 - DNA, 25 bp, Homo sapien
gatattgaagtcatcactgatggag

SEQ ID NO: 795475 - DNA, 25 bp, Homo sapien
agttcctggttggttcccgattgtg

SEQ ID NO: 795476 - DNA, 25 bp, Homo sapien
gatgttcattgtgatgatattgaag

SEQ ID NO: 795477 - DNA, 25 bp, Homo sapien
cagtcccaatttggcagatttgcag

SEQ ID NO: 795478 - DNA, 25 bp, Homo sapien
ccatttggtcttccaagaaaagttg

SEQ ID NO: 795479 - DNA, 25 bp, Homo sapien
ttccaagaaaagttggctccctgca

SEQ ID NO: 795480 - DNA, 25 bp, Homo sapien
ttctcagtcattggactattgaaat

SEQ ID NO: 795481 - DNA, 25 bp, Homo sapien
gcttgcttctcagtcattggactat

SEQ ID NO: 795482 - DNA, 25 bp, Homo sapien
gtgactctaatcacggcccagggct

SEQ ID NO: 795483 - DNA, 25 bp, Homo sapien
tctgaactgggtgctctgaccacct

SEQ ID NO: 795484 - DNA, 25 bp, Homo sapien
gattttcgtgttgggtggtgactct

SEQ ID NO: 795485 - DNA, 25 bp, Homo sapien
aaatccggaagtgtaaacaggtgat

SEQ ID NO: 795486 - DNA, 25 bp, Homo sapien
gtatatctcttcactaggtgaactt

SEQ ID NO: 795487 - DNA, 25 bp, Homo sapien
catgggctaaacagtacattcgagt

SEQ ID NO: 795488 - DNA, 25 bp, Homo sapien
cactaggtgaactttcatgggctaa

SEQ ID NO: 795489 - DNA, 25 bp, Homo sapien
gctaaacagtacattcgagtgaaat

SEQ ID NO: 795490 - DNA, 25 bp, Homo sapien
tcccttatccgtaatatccttctta

SEQ ID NO: 795491 - DNA, 25 bp, Homo sapien
taactgtctcccttatccgtaatat

SEQ ID NO: 795492 - DNA, 25 bp, Homo sapien
tgtctcccttatccgtaatatcctt

SEQ ID NO: 795493 - DNA, 25 bp, Homo sapien
tccataactgtctcccttatccgta

SEQ ID NO: 795494 - DNA, 25 bp, Homo sapien
tttttgtgtttgtcagttcatctat

SEQ ID NO: 795495 - DNA, 25 bp, Homo sapien
cttttttgtgtttgtcagttcatct

SEQ ID NO: 795496 - DNA, 25 bp, Homo sapien
ttttttgtgtttgtcagttcatcta

SEQ ID NO: 795497 - DNA, 25 bp, Homo sapien
taattggcaaatagtgtcaaaaggg

SEQ ID NO: 795498 - DNA, 25 bp, Homo sapien
gagtgttccacattccttggtactg

SEQ ID NO: 795499 - DNA, 25 bp, Homo sapien
gccacccttgcgcacataattggca

SEQ ID NO: 795500 - DNA, 25 bp, Homo sapien
tacttatttgcaatatgatgaggga

SEQ ID NO: 795501 - DNA, 25 bp, Homo sapien
tcctgaggagggtaccctgcctcaa

SEQ ID NO: 795502 - DNA, 25 bp, Homo sapien
caaagagctaacaaatcacaccgag

SEQ ID NO: 795503 - DNA, 25 bp, Homo sapien
taacaaatcacaccgagccactaca

SEQ ID NO: 795504 - DNA, 25 bp, Homo sapien
gtggtcacgtggaggagccgaccca

SEQ ID NO: 795505 - DNA, 25 bp, Homo sapien
ctgtcgggtcatgagagatttgatt

SEQ ID NO: 795506 - DNA, 25 bp, Homo sapien
caggtgagttttctagggtatgccc

SEQ ID NO: 795507 - DNA, 25 bp, Homo sapien
gaccttgcaaggaagctcgggctgt

SEQ ID NO: 795508 - DNA, 25 bp, Homo sapien
aagctgaggcattattacgaggtcc

SEQ ID NO: 795509 - DNA, 25 bp, Homo sapien
gctcgcatatgacagacagcctgga

SEQ ID NO: 795510 - DNA, 25 bp, Homo sapien
tttcactaaacgattaccttccaca

SEQ ID NO: 795511 - DNA, 25 bp, Homo sapien
ttcactaaacgattaccttccacat

SEQ ID NO: 795512 - DNA, 25 bp, Homo sapien
tcactaaacgattaccttccacatt

SEQ ID NO: 795513 - DNA, 25 bp, Homo sapien
actaaacgattaccttccacattct

SEQ ID NO: 795514 - DNA, 25 bp, Homo sapien
tctatggcaccaagatcactgaggc

SEQ ID NO: 795515 - DNA, 25 bp, Homo sapien
cagggacccggagactctctatggc

SEQ ID NO: 795516 - DNA, 25 bp, Homo sapien
cccggagactctctatggcaccaag

SEQ ID NO: 795517 - DNA, 25 bp, Homo sapien
tggcaccaagatcactgaggctttc

SEQ ID NO: 795518 - DNA, 25 bp, Homo sapien
tacagcagataaatcaatgagagag

SEQ ID NO: 795519 - DNA, 25 bp, Homo sapien
caactgctttcaggctaagaattta

SEQ ID NO: 795520 - DNA, 25 bp, Homo sapien
tgttaggagtataaaaagtcagtag

SEQ ID NO: 795521 - DNA, 25 bp, Homo sapien
ggagtataaaaagtcagtagtcaac

SEQ ID NO: 795522 - DNA, 25 bp, Homo sapien
tcaaaataatcatttgaattaacat

SEQ ID NO: 795523 - DNA, 25 bp, Homo sapien
acattttccattttgttaaaatgct

SEQ ID NO: 795524 - DNA, 25 bp, Homo sapien
ttaaaagatcttaaagatcttcttc

SEQ ID NO: 795525 - DNA, 25 bp, Homo sapien
aaagatcttaaagatcttcttcaat

SEQ ID NO: 795526 - DNA, 25 bp, Homo sapien
ggaacagtcttgtacctctctgcat

SEQ ID NO: 795527 - DNA, 25 bp, Homo sapien
cactcaggttgagttaggaacagtc

SEQ ID NO: 795528 - DNA, 25 bp, Homo sapien
caatgattagtaactgcctggttcc

SEQ ID NO: 795529 - DNA, 25 bp, Homo sapien
tcctagctgaactctgttgtgcctc

SEQ ID NO: 795530 - DNA, 25 bp, Homo sapien
ggcatcagacggtgggttcacatct

SEQ ID NO: 795531 - DNA, 25 bp, Homo sapien
tgtcacaagggagagtctgcatgta

SEQ ID NO: 795532 - DNA, 25 bp, Homo sapien
agaattcaacgttttagaggctgtg

SEQ ID NO: 795533 - DNA, 25 bp, Homo sapien
gcaataaagggtggcttccgcagga

SEQ ID NO: 795534 - DNA, 25 bp, Homo sapien
gtcacaatcaactttggagtcctga

SEQ ID NO: 795535 - DNA, 25 bp, Homo sapien
ctttggagtcctgaatagaagacat

SEQ ID NO: 795536 - DNA, 25 bp, Homo sapien
ttctgggtcacaatcaactttggag

SEQ ID NO: 795537 - DNA, 25 bp, Homo sapien
tcaactttggagtcctgaatagaag

SEQ ID NO: 795538 - DNA, 25 bp, Homo sapien
cagaagaaaactagccagtttgaat

SEQ ID NO: 795539 - DNA, 25 bp, Homo sapien
cattaacactaacaactacagaaga

SEQ ID NO: 795540 - DNA, 25 bp, Homo sapien
cctggaacgattctgaccaaggata

SEQ ID NO: 795541 - DNA, 25 bp, Homo sapien
tcacatctacctggaacgattctga

SEQ ID NO: 795542 - DNA, 25 bp, Homo sapien
gatcatttgtcttaacagtcacatc

SEQ ID NO: 795543 - DNA, 25 bp, Homo sapien
cacaggaaattaggaactagccgac

SEQ ID NO: 795544 - DNA, 25 bp, Homo sapien
tgttctcgaagttccctgaattctt

SEQ ID NO: 795545 - DNA, 25 bp, Homo sapien
gctgttctcgaagttccctgaattc

SEQ ID NO: 795546 - DNA, 25 bp, Homo sapien
gagggtcacttggctgttctcgaag

SEQ ID NO: 795547 - DNA, 25 bp, Homo sapien
gttctcgaagttccctgaattcttc

SEQ ID NO: 795548 - DNA, 25 bp, Homo sapien
tgcatacaaaacagtgtcacatccc

SEQ ID NO: 795549 - DNA, 25 bp, Homo sapien
tatacatctttagtacacagccctc

SEQ ID NO: 795550 - DNA, 25 bp, Homo sapien
gactagtgaactacaaactgtgcat

SEQ ID NO: 795551 - DNA, 25 bp, Homo sapien
tacctggacccttctgactagtgaa

SEQ ID NO: 795552 - DNA, 25 bp, Homo sapien
tatacgcctctaattcttgcaaatt

SEQ ID NO: 795553 - DNA, 25 bp, Homo sapien
tcaatttgtctctatacgcctctaa

SEQ ID NO: 795554 - DNA, 25 bp, Homo sapien
tgtttcaatttgtctctatacgcct

SEQ ID NO: 795555 - DNA, 25 bp, Homo sapien
gtctctatacgcctctaattcttgc

SEQ ID NO: 795556 - DNA, 25 bp, Homo sapien
taattccaccatttcagggtctctg

SEQ ID NO: 795557 - DNA, 25 bp, Homo sapien
taacagagatagcacatgaggcatg

SEQ ID NO: 795558 - DNA, 25 bp, Homo sapien
gaatttatggcgacaatatctggga

SEQ ID NO: 795559 - DNA, 25 bp, Homo sapien
tactaatagagagtactggtccgtg

SEQ ID NO: 795560 - DNA, 25 bp, Homo sapien
aagcaggctgtttttcaaggattaa

SEQ ID NO: 795561 - DNA, 25 bp, Homo sapien
tgtttttcaaggattaaatctgcca

SEQ ID NO: 795562 - DNA, 25 bp, Homo sapien
gattaaatctgccacttttttagat

SEQ ID NO: 795563 - DNA, 25 bp, Homo sapien
ttttcaaggattaaatctgccactt

SEQ ID NO: 795564 - DNA, 25 bp, Homo sapien
taacagcagctaattgaagacctgt

SEQ ID NO: 795565 - DNA, 25 bp, Homo sapien
gataacagcagctaattgaagacct

SEQ ID NO: 795566 - DNA, 25 bp, Homo sapien
aacagcagctaattgaagacctgtc

SEQ ID NO: 795567 - DNA, 25 bp, Homo sapien
cagcagctaattgaagacctgtctg

SEQ ID NO: 795568 - DNA, 25 bp, Homo sapien
tactcaatggccagtctaaaccagc

SEQ ID NO: 795569 - DNA, 25 bp, Homo sapien
ggtgccaattcacaacctgctagtg

SEQ ID NO: 795570 - DNA, 25 bp, Homo sapien
tactcagaacaccacgagaagattg

SEQ ID NO: 795571 - DNA, 25 bp, Homo sapien
taggtgctttacgacaaacagtttg

SEQ ID NO: 795572 - DNA, 25 bp, Homo sapien
gaaggcctaaactagcttgagtaaa

SEQ ID NO: 795573 - DNA, 25 bp, Homo sapien
tttgatttgcaagaaggcctaaact

SEQ ID NO: 795574 - DNA, 25 bp, Homo sapien
gatttcagaagtccaatcagcaact

SEQ ID NO: 795575 - DNA, 25 bp, Homo sapien
agcaactgacgtttcctttgatttg

SEQ ID NO: 795576 - DNA, 25 bp, Homo sapien
tcaaaggtaaaatctgtttcaacca

SEQ ID NO: 795577 - DNA, 25 bp, Homo sapien
tcacttaaccgtacatctgttcttt

SEQ ID NO: 795578 - DNA, 25 bp, Homo sapien
cacttaaccgtacatctgttctttg

SEQ ID NO: 795579 - DNA, 25 bp, Homo sapien
tttcacttaaccgtacatctgttct

SEQ ID NO: 795580 - DNA, 25 bp, Homo sapien
ttcacttaaccgtacatctgttctt

SEQ ID NO: 795581 - DNA, 25 bp, Homo sapien
aaaatctctgttcatattctaacca

SEQ ID NO: 795582 - DNA, 25 bp, Homo sapien
aggagtcattggaatagaaacattt

SEQ ID NO: 795583 - DNA, 25 bp, Homo sapien
ggagtcattggaatagaaacatttt

SEQ ID NO: 795584 - DNA, 25 bp, Homo sapien
tattctaaccaaaagttacagaatc

SEQ ID NO: 795585 - DNA, 25 bp, Homo sapien
gaatagctcctggataatcttcctc

SEQ ID NO: 795586 - DNA, 25 bp, Homo sapien
ctttttgacattcaaggcacaactg

SEQ ID NO: 795587 - DNA, 25 bp, Homo sapien
cattcaaggcacaactgaatagctc

SEQ ID NO: 795588 - DNA, 25 bp, Homo sapien
actgtaatgtttaaaagtgctggca

SEQ ID NO: 795589 - DNA, 25 bp, Homo sapien
cactgtatgcacaacttccttctct

SEQ ID NO: 795590 - DNA, 25 bp, Homo sapien
gatccgaatgcttccactgtatgca

SEQ ID NO: 795591 - DNA, 25 bp, Homo sapien
cctccttagtcttgatcccggaagg

SEQ ID NO: 795592 - DNA, 25 bp, Homo sapien
tgatcccggaaggagagttagatcc

SEQ ID NO: 795593 - DNA, 25 bp, Homo sapien
tgttccaaagtatcttgcagctttg

SEQ ID NO: 795594 - DNA, 25 bp, Homo sapien
aatctgttccaaagtatcttgcagc

SEQ ID NO: 795595 - DNA, 25 bp, Homo sapien
aaagtatcttgcagctttgaattca

SEQ ID NO: 795596 - DNA, 25 bp, Homo sapien
tccaaagtatcttgcagctttgaat

SEQ ID NO: 795597 - DNA, 25 bp, Homo sapien
tttttccaagaagtcgataagcttg

SEQ ID NO: 795598 - DNA, 25 bp, Homo sapien
tggaaagagctacgtccagctgttc

SEQ ID NO: 795599 - DNA, 25 bp, Homo sapien
accttggtataatggttaatgtcaa

SEQ ID NO: 795600 - DNA, 25 bp, Homo sapien
agattttggaaagagctacgtccag

SEQ ID NO: 795601 - DNA, 25 bp, Homo sapien
tgaaggacaacaaattcctgattaa

SEQ ID NO: 795602 - DNA, 25 bp, Homo sapien
aggacaacaaattcctgattaagga

SEQ ID NO: 795603 - DNA, 25 bp, Homo sapien
taatcatgaaggacaacaaattcct

SEQ ID NO: 795604 - DNA, 25 bp, Homo sapien
tcatgaaggacaacaaattcctgat

SEQ ID NO: 795605 - DNA, 25 bp, Homo sapien
gctggctatctaacaacacgtgaag

SEQ ID NO: 795606 - DNA, 25 bp, Homo sapien
cattttgagggagtcatgctggcta

SEQ ID NO: 795607 - DNA, 25 bp, Homo sapien
taccctctgagtctacaagaacaac

SEQ ID NO: 795608 - DNA, 25 bp, Homo sapien
taactttcaaaaccatggcacctgt

SEQ ID NO: 795609 - DNA, 25 bp, Homo sapien
atccttatattgcagcttttggaat

SEQ ID NO: 795610 - DNA, 25 bp, Homo sapien
gtgaagtgcatatgaagttgatcca

SEQ ID NO: 795611 - DNA, 25 bp, Homo sapien
acaacttgaaacacggtgttgtgaa

SEQ ID NO: 795612 - DNA, 25 bp, Homo sapien
ctgtgtttcctgcacatagttccac

SEQ ID NO: 795613 - DNA, 25 bp, Homo sapien
gaatagtaattaagtcactacatac

SEQ ID NO: 795614 - DNA, 25 bp, Homo sapien
atatgaatagtaattaagtcactac

SEQ ID NO: 795615 - DNA, 25 bp, Homo sapien
ctaaaggagagatatatgaatagta

SEQ ID NO: 795616 - DNA, 25 bp, Homo sapien
taaaggagagatatatgaatagtaa

SEQ ID NO: 795617 - DNA, 25 bp, Homo sapien
ttttcaaataggtatgtaccaagat

SEQ ID NO: 795618 - DNA, 25 bp, Homo sapien
tttcaaataggtatgtaccaagata

SEQ ID NO: 795619 - DNA, 25 bp, Homo sapien
ttcaaataggtatgtaccaagataa

SEQ ID NO: 795620 - DNA, 25 bp, Homo sapien
tcaaataggtatgtaccaagataaa

SEQ ID NO: 795621 - DNA, 25 bp, Homo sapien
tgaagcagtatcctcattgtcatgc

SEQ ID NO: 795622 - DNA, 25 bp, Homo sapien
tagtgctttgcacaggtctgcaagg

SEQ ID NO: 795623 - DNA, 25 bp, Homo sapien
taatagctgagcataacttcccata

SEQ ID NO: 795624 - DNA, 25 bp, Homo sapien
caaggcatggaatatagctgtctgg

SEQ ID NO: 795625 - DNA, 25 bp, Homo sapien
tcttttttatgtagccacgatcaaa

SEQ ID NO: 795626 - DNA, 25 bp, Homo sapien
tgtagccacgatcaaaattagtttc

SEQ ID NO: 795627 - DNA, 25 bp, Homo sapien
tcagtacctatcatattactccctt

SEQ ID NO: 795628 - DNA, 25 bp, Homo sapien
catattcgtgtaagtccatgttcta

SEQ ID NO: 795629 - DNA, 25 bp, Homo sapien
gaaatcatcatatttgaatatagac

SEQ ID NO: 795630 - DNA, 25 bp, Homo sapien
tgaatatagacaaatcagttccaag

SEQ ID NO: 795631 - DNA, 25 bp, Homo sapien
aaatcatcatatttgaatatagaca

SEQ ID NO: 795632 - DNA, 25 bp, Homo sapien
tctaatagattcctgtaaaacttca

SEQ ID NO: 795633 - DNA, 25 bp, Homo sapien
tatggtaattcttgaaataattgac

SEQ ID NO: 795634 - DNA, 25 bp, Homo sapien
aaaacttcagacttgctaccacaaa

SEQ ID NO: 795635 - DNA, 25 bp, Homo sapien
caaaattcttctccaacttgcatca

SEQ ID NO: 795636 - DNA, 25 bp, Homo sapien
tattaataggtttaaacccatcata

SEQ ID NO: 795637 - DNA, 25 bp, Homo sapien
taggtttaaacccatcatattgctg

SEQ ID NO: 795638 - DNA, 25 bp, Homo sapien
tttaaacccatcatattgctgtgtg

SEQ ID NO: 795639 - DNA, 25 bp, Homo sapien
taataggtttaaacccatcatattg

SEQ ID NO: 795640 - DNA, 25 bp, Homo sapien
gaacattctcagttcatcgagccgt

SEQ ID NO: 795641 - DNA, 25 bp, Homo sapien
tgaaatttgacttaacaggacaaag

SEQ ID NO: 795642 - DNA, 25 bp, Homo sapien
cattctcagttcatcgagccgtgtt

SEQ ID NO: 795643 - DNA, 25 bp, Homo sapien
gttgcaagatgctgaaatttgactt

SEQ ID NO: 795644 - DNA, 25 bp, Homo sapien
gagcgagactgttccatgaatttaa

SEQ ID NO: 795645 - DNA, 25 bp, Homo sapien
tgtggttggcctgaatttcaaatgg

SEQ ID NO: 795646 - DNA, 25 bp, Homo sapien
agtactgctcaaacaaggtcactgt

SEQ ID NO: 795647 - DNA, 25 bp, Homo sapien
tgagactggctgtttactaggtgaa

SEQ ID NO: 795648 - DNA, 25 bp, Homo sapien
tcctgtctgctcatccacatagtct

SEQ ID NO: 795649 - DNA, 25 bp, Homo sapien
cttgataggcactcttttcttgttc

SEQ ID NO: 795650 - DNA, 25 bp, Homo sapien
gtctcgtttgagttcctcaggaaca

SEQ ID NO: 795651 - DNA, 25 bp, Homo sapien
actgtcatactcttgataggcactc

SEQ ID NO: 795652 - DNA, 25 bp, Homo sapien
tttagactgtaatctgatttcttcc

SEQ ID NO: 795653 - DNA, 25 bp, Homo sapien
tgttgtatttgttaagataggtgca

SEQ ID NO: 795654 - DNA, 25 bp, Homo sapien
caacaagtcttatgacgttcaatgt

SEQ ID NO: 795655 - DNA, 25 bp, Homo sapien
ggtgcattcactttatttagactgt

SEQ ID NO: 795656 - DNA, 25 bp, Homo sapien
ttcactgactgatcttgctgtttgc

SEQ ID NO: 795657 - DNA, 25 bp, Homo sapien
gactgatcttgctgtttgcccttcc

SEQ ID NO: 795658 - DNA, 25 bp, Homo sapien
tgatcttgctgtttgcccttccagt

SEQ ID NO: 795659 - DNA, 25 bp, Homo sapien
cactgactgatcttgctgtttgccc

SEQ ID NO: 795660 - DNA, 25 bp, Homo sapien
cctaggcaacagagtgagactccgt

SEQ ID NO: 795661 - DNA, 25 bp, Homo sapien
tgagtggagatgcgccactgtactc

SEQ ID NO: 795662 - DNA, 25 bp, Homo sapien
cagtgagtggagatgcgccactgta

SEQ ID NO: 795663 - DNA, 25 bp, Homo sapien
cagcctaggcaacagagtgagactc

SEQ ID NO: 795664 - DNA, 25 bp, Homo sapien
tgacagacagtagatgggaacacgt

SEQ ID NO: 795665 - DNA, 25 bp, Homo sapien
gctacaggttcacatatgggacaaa

SEQ ID NO: 795666 - DNA, 25 bp, Homo sapien
tctccagcagttagaggtgtaggct

SEQ ID NO: 795667 - DNA, 25 bp, Homo sapien
ccataagagggccaaaaaggaggtg

SEQ ID NO: 795668 - DNA, 25 bp, Homo sapien
tgaatcattccgaccaaaaaaggta

SEQ ID NO: 795669 - DNA, 25 bp, Homo sapien
aaaaggtatatattgcatacaagta

SEQ ID NO: 795670 - DNA, 25 bp, Homo sapien
tatattgcatacaagtaataatcaa

SEQ ID NO: 795671 - DNA, 25 bp, Homo sapien
ggtatatattgcatacaagtaataa

SEQ ID NO: 795672 - DNA, 25 bp, Homo sapien
ggctcacctacaagactaaaacatt

SEQ ID NO: 795673 - DNA, 25 bp, Homo sapien
cattttgtcactggtcatattagca

SEQ ID NO: 795674 - DNA, 25 bp, Homo sapien
aaaacattaattctacggcaggtag

SEQ ID NO: 795675 - DNA, 25 bp, Homo sapien
gacatacttgtgatcacagcaagga

SEQ ID NO: 795676 - DNA, 25 bp, Homo sapien
tgggccgcatggactgcacttagaa

SEQ ID NO: 795677 - DNA, 25 bp, Homo sapien
tctcacagtccgagatataggtgga

SEQ ID NO: 795678 - DNA, 25 bp, Homo sapien
tttagtctgtcatacccggaattgg

SEQ ID NO: 795679 - DNA, 25 bp, Homo sapien
aactgttgtcaagtaagaaccttcg

SEQ ID NO: 795680 - DNA, 25 bp, Homo sapien
taaggccgagtccagttgattccaa

SEQ ID NO: 795681 - DNA, 25 bp, Homo sapien
tctgtttagagttgttcttagtcta

SEQ ID NO: 795682 - DNA, 25 bp, Homo sapien
tagtctactactactaaggccgagt

SEQ ID NO: 795683 - DNA, 25 bp, Homo sapien
gatcaataaggctttcttgtattct

SEQ ID NO: 795684 - DNA, 25 bp, Homo sapien
tactgtttggcaccaattggttgtc

SEQ ID NO: 795685 - DNA, 25 bp, Homo sapien
gtgcttcctctagggagaagcagga

SEQ ID NO: 795686 - DNA, 25 bp, Homo sapien
aaaacatgcctaaacagacacctct

SEQ ID NO: 795687 - DNA, 25 bp, Homo sapien
gaagcaggatcatggatccatgcaa

SEQ ID NO: 795688 - DNA, 25 bp, Homo sapien
ccatgtagtcaacaggagtgatgca

SEQ ID NO: 795689 - DNA, 25 bp, Homo sapien
gcaacgaatgccttggatatgagtt

SEQ ID NO: 795690 - DNA, 25 bp, Homo sapien
tgtggtcgggaaaactcatcggact

SEQ ID NO: 795691 - DNA, 25 bp, Homo sapien
ctttctaggtattctgatgccaggc

SEQ ID NO: 795692 - DNA, 25 bp, Homo sapien
tcaaaaccactaggtgactgaggtg

SEQ ID NO: 795693 - DNA, 25 bp, Homo sapien
gattccgtggctaccactctttctg

SEQ ID NO: 795694 - DNA, 25 bp, Homo sapien
ctgctgtgagtgtggcagtaggatc

SEQ ID NO: 795695 - DNA, 25 bp, Homo sapien
catacagcgtatccccagatgtcaa

SEQ ID NO: 795696 - DNA, 25 bp, Homo sapien
aggaactcaaactgttcagccaaga

SEQ ID NO: 795697 - DNA, 25 bp, Homo sapien
ctgaagaaagggctttttgactgca

SEQ ID NO: 795698 - DNA, 25 bp, Homo sapien
gaactcaaactgttcagccaagaat

SEQ ID NO: 795699 - DNA, 25 bp, Homo sapien
ctcaaactgttcagccaagaatacc

SEQ ID NO: 795700 - DNA, 25 bp, Homo sapien
gcagcatctgttcataatcaagggc

SEQ ID NO: 795701 - DNA, 25 bp, Homo sapien
ccagctacaatccagtaaattggtt

SEQ ID NO: 795702 - DNA, 25 bp, Homo sapien
taatcaagggctttaccagctacaa

SEQ ID NO: 795703 - DNA, 25 bp, Homo sapien
ttccgtagttcactggcggttgaga

SEQ ID NO: 795704 - DNA, 25 bp, Homo sapien
tatgttgtgctgtgacataatttct

SEQ ID NO: 795705 - DNA, 25 bp, Homo sapien
tgtgctgtgacataatttcttttac

SEQ ID NO: 795706 - DNA, 25 bp, Homo sapien
tgttgtgctgtgacataatttcttt

SEQ ID NO: 795707 - DNA, 25 bp, Homo sapien
atatatgttgtgctgtgacataatt

SEQ ID NO: 795708 - DNA, 25 bp, Homo sapien
tcccaaagtatattagacacaggca

SEQ ID NO: 795709 - DNA, 25 bp, Homo sapien
tagccaatcgtatacaatgttccca

SEQ ID NO: 795710 - DNA, 25 bp, Homo sapien
ctacaatagttcgattagccaatcg

SEQ ID NO: 795711 - DNA, 25 bp, Homo sapien
agggtatgcgaactctcttagaaac

SEQ ID NO: 795712 - DNA, 25 bp, Homo sapien
gaaaatccaattgcatcagggcacg

SEQ ID NO: 795713 - DNA, 25 bp, Homo sapien
gggcacgaccctcattactgcattt

SEQ ID NO: 795714 - DNA, 25 bp, Homo sapien
ccgttccatgtcattctcagttagg

SEQ ID NO: 795715 - DNA, 25 bp, Homo sapien
gtgctctttgatccaccgttccatg

SEQ ID NO: 795716 - DNA, 25 bp, Homo sapien
tgatgagtcaaagggcactgcttag

SEQ ID NO: 795717 - DNA, 25 bp, Homo sapien
cgtgtcagtgtgtaggatgttacca

SEQ ID NO: 795718 - DNA, 25 bp, Homo sapien
ccatttcatcgttgaggagtacgag

SEQ ID NO: 795719 - DNA, 25 bp, Homo sapien
cactgcttagatacggtgcccttaa

SEQ ID NO: 795720 - DNA, 25 bp, Homo sapien
gccatatacagaaaagcttcccata

SEQ ID NO: 795721 - DNA, 25 bp, Homo sapien
tacagaaaagcttcccataccaagc

SEQ ID NO: 795722 - DNA, 25 bp, Homo sapien
gtgtcaaaaattcggcatcctacgt

SEQ ID NO: 795723 - DNA, 25 bp, Homo sapien
tgtgtcaaaaattcggcatcctacg

SEQ ID NO: 795724 - DNA, 25 bp, Homo sapien
tgcttctaaagatccgaaactgagt

SEQ ID NO: 795725 - DNA, 25 bp, Homo sapien
tttacagtgttaaggccagaaagga

SEQ ID NO: 795726 - DNA, 25 bp, Homo sapien
tcacgccaatgtgaatgttctaggc

SEQ ID NO: 795727 - DNA, 25 bp, Homo sapien
gggacattcacacaagattcacgcc

SEQ ID NO: 795728 - DNA, 25 bp, Homo sapien
catcgtcagtgatcgctggactcat

SEQ ID NO: 795729 - DNA, 25 bp, Homo sapien
cacaaagtcagggagctgcaaataa

SEQ ID NO: 795730 - DNA, 25 bp, Homo sapien
tgtccccgcctggtaagtaatctca

SEQ ID NO: 795731 - DNA, 25 bp, Homo sapien
taaggtaacaaggatcacaaagtca

SEQ ID NO: 795732 - DNA, 25 bp, Homo sapien
gaatgtatctgatcagtgcaacaaa

SEQ ID NO: 795733 - DNA, 25 bp, Homo sapien
tgacatgcgtatgcttcttactgct

SEQ ID NO: 795734 - DNA, 25 bp, Homo sapien
aattacagttgggacatggaaggca

SEQ ID NO: 795735 - DNA, 25 bp, Homo sapien
aagaacaggcggatattcaggtgca

SEQ ID NO: 795736 - DNA, 25 bp, Homo sapien
tcaaagaagaaagatccaaatttag

SEQ ID NO: 795737 - DNA, 25 bp, Homo sapien
ctgctcaaagaagaaagatccaaat

SEQ ID NO: 795738 - DNA, 25 bp, Homo sapien
caaagaagaaagatccaaatttagt

SEQ ID NO: 795739 - DNA, 25 bp, Homo sapien
gctcaaagaagaaagatccaaattt

SEQ ID NO: 795740 - DNA, 25 bp, Homo sapien
tggtcagctgcttcgttgaatattc

SEQ ID NO: 795741 - DNA, 25 bp, Homo sapien
tgtcttgctttcttattgatatggg

SEQ ID NO: 795742 - DNA, 25 bp, Homo sapien
ggtctgtctatatcatctatagctg

SEQ ID NO: 795743 - DNA, 25 bp, Homo sapien
tatagctgctagaagtttttgtctt

SEQ ID NO: 795744 - DNA, 25 bp, Homo sapien
taaccattgttatgacaaggcggca

SEQ ID NO: 795745 - DNA, 25 bp, Homo sapien
cttagcagatagttgtcagaagtgc

SEQ ID NO: 795746 - DNA, 25 bp, Homo sapien
tcatgcagtgctcataattaggaga

SEQ ID NO: 795747 - DNA, 25 bp, Homo sapien
tatatgttgagtgaggatcaatgcc

SEQ ID NO: 795748 - DNA, 25 bp, Homo sapien
aaaacagagaacatactgatttttc

SEQ ID NO: 795749 - DNA, 25 bp, Homo sapien
tcaccattatgatcactttgttata

SEQ ID NO: 795750 - DNA, 25 bp, Homo sapien
tataactaaattaaccctgacataa

SEQ ID NO: 795751 - DNA, 25 bp, Homo sapien
gatcatactagagtatatttattaa

SEQ ID NO: 795752 - DNA, 25 bp, Homo sapien
ttggaccaatgccacacaagcttag

SEQ ID NO: 795753 - DNA, 25 bp, Homo sapien
catttacagacatcgcagggactga

SEQ ID NO: 795754 - DNA, 25 bp, Homo sapien
gaagactcataagacccaaggcctg

SEQ ID NO: 795755 - DNA, 25 bp, Homo sapien
tcagggcaaagtttagaggaacagc

SEQ ID NO: 795756 - DNA, 25 bp, Homo sapien
ggtaactctcttgtgattaggtaac

SEQ ID NO: 795757 - DNA, 25 bp, Homo sapien
tgataaaataccatatggccctggt

SEQ ID NO: 795758 - DNA, 25 bp, Homo sapien
catgctcccatggtaaattctacag

SEQ ID NO: 795759 - DNA, 25 bp, Homo sapien
gttcatttgaattgctatgtgcccc

SEQ ID NO: 795760 - DNA, 25 bp, Homo sapien
ccaggtgctgtcaaggatgcacagc

SEQ ID NO: 795761 - DNA, 25 bp, Homo sapien
tagctgagattctgtgccaggtgct

SEQ ID NO: 795762 - DNA, 25 bp, Homo sapien
acagcagaacacacagatgaagttc

SEQ ID NO: 795763 - DNA, 25 bp, Homo sapien
aagttctgggtctctcttctctaca

SEQ ID NO: 795764 - DNA, 25 bp, Homo sapien
ggcctgagtacttgcatttcatcca

SEQ ID NO: 795765 - DNA, 25 bp, Homo sapien
tcagtttaggcaaaaattctagttc

SEQ ID NO: 795766 - DNA, 25 bp, Homo sapien
caaagggcctgagtacttgcatttc

SEQ ID NO: 795767 - DNA, 25 bp, Homo sapien
gttcaaagggcctgagtacttgcat

SEQ ID NO: 795768 - DNA, 25 bp, Homo sapien
gcttctctctccacctgattcaatt

SEQ ID NO: 795769 - DNA, 25 bp, Homo sapien
ttctctctccacctgattcaattaa

SEQ ID NO: 795770 - DNA, 25 bp, Homo sapien
tggcttctctctccacctgattcaa

SEQ ID NO: 795771 - DNA, 25 bp, Homo sapien
caaatcatgaactggcttctctctc

SEQ ID NO: 795772 - DNA, 25 bp, Homo sapien
tcaactcatgtcaggcttgtggtaa

SEQ ID NO: 795773 - DNA, 25 bp, Homo sapien
aactcatgtcaggcttgtggtaagt

SEQ ID NO: 795774 - DNA, 25 bp, Homo sapien
caactcatgtcaggcttgtggtaag

SEQ ID NO: 795775 - DNA, 25 bp, Homo sapien
accctaaacagggtgctgcttctct

SEQ ID NO: 795776 - DNA, 25 bp, Homo sapien
ggtgctgcttctctctcagcatggg

SEQ ID NO: 795777 - DNA, 25 bp, Homo sapien
ctgcttctctctcagcatgggccat

SEQ ID NO: 795778 - DNA, 25 bp, Homo sapien
gctgcttctctctcagcatgggcca

SEQ ID NO: 795779 - DNA, 25 bp, Homo sapien
ttgttgacccgacacaggtcctggc

SEQ ID NO: 795780 - DNA, 25 bp, Homo sapien
cttgacttgtctcagattttgttga

SEQ ID NO: 795781 - DNA, 25 bp, Homo sapien
cagattttgttgacccgacacaggt

SEQ ID NO: 795782 - DNA, 25 bp, Homo sapien
tctcagattttgttgacccgacaca

SEQ ID NO: 795783 - DNA, 25 bp, Homo sapien
ccgaactttgtttccggctgtgtga

SEQ ID NO: 795784 - DNA, 25 bp, Homo sapien
tatcaaaaaatagagcagaagaagc

SEQ ID NO: 795785 - DNA, 25 bp, Homo sapien
tactactcatgtgctctgtaacggc

SEQ ID NO: 795786 - DNA, 25 bp, Homo sapien
tacagcatggttcatactggagccc

SEQ ID NO: 795787 - DNA, 25 bp, Homo sapien
gctctaccgagtcataagaaggaaa

SEQ ID NO: 795788 - DNA, 25 bp, Homo sapien
tctgggcccccgtgtaatttctcca

SEQ ID NO: 795789 - DNA, 25 bp, Homo sapien
ttccacgtcgggctcaactgtcagc

SEQ ID NO: 795790 - DNA, 25 bp, Homo sapien
tagccaggattgagtgggctcttgc

SEQ ID NO: 795791 - DNA, 25 bp, Homo sapien
ttgccccactgaatgcaagcccaga

SEQ ID NO: 795792 - DNA, 25 bp, Homo sapien
tttgccccactgaatgcaagcccag

SEQ ID NO: 795793 - DNA, 25 bp, Homo sapien
ctttgccccactgaatgcaagccca

SEQ ID NO: 795794 - DNA, 25 bp, Homo sapien
gccccactgaatgcaagcccagaaa

SEQ ID NO: 795795 - DNA, 25 bp, Homo sapien
ggctggcttcccttcactaagttca

SEQ ID NO: 795796 - DNA, 25 bp, Homo sapien
taagttcacatttgatccctggaga

SEQ ID NO: 795797 - DNA, 25 bp, Homo sapien
tcactaagttcacatttgatccctg

SEQ ID NO: 795798 - DNA, 25 bp, Homo sapien
cacatttgatccctggagagcattc

SEQ ID NO: 795799 - DNA, 25 bp, Homo sapien
agtttctggtaggtcctctggtaag

SEQ ID NO: 795800 - DNA, 25 bp, Homo sapien
tctggtaggtcctctggtaaggtca

SEQ ID NO: 795801 - DNA, 25 bp, Homo sapien
ttctggtaggtcctctggtaaggtc

SEQ ID NO: 795802 - DNA, 25 bp, Homo sapien
ctggtaggtcctctggtaaggtcac

SEQ ID NO: 795803 - DNA, 25 bp, Homo sapien
acactgcctgataatgtctggggaa

SEQ ID NO: 795804 - DNA, 25 bp, Homo sapien
cactgcctgataatgtctggggaag

SEQ ID NO: 795805 - DNA, 25 bp, Homo sapien
actgcctgataatgtctggggaagg

SEQ ID NO: 795806 - DNA, 25 bp, Homo sapien
tatcattgtgatcttgaggaacaaa

SEQ ID NO: 795807 - DNA, 25 bp, Homo sapien
atattatcattgtgatcttgaggaa

SEQ ID NO: 795808 - DNA, 25 bp, Homo sapien
ttatcattgtgatcttgaggaacaa

SEQ ID NO: 795809 - DNA, 25 bp, Homo sapien
cattgtgatcttgaggaacaaaaac

SEQ ID NO: 795810 - DNA, 25 bp, Homo sapien
aattcaaaattcagtggaaccagcg

SEQ ID NO: 795811 - DNA, 25 bp, Homo sapien
ccgtgaagcgccaatgggcccaatt

SEQ ID NO: 795812 - DNA, 25 bp, Homo sapien
cggaggctggcgacatcccaattta

SEQ ID NO: 795813 - DNA, 25 bp, Homo sapien
tcttccaggtccaaaccaccgtgaa

SEQ ID NO: 795814 - DNA, 25 bp, Homo sapien
acattgatctggtttagggtctgca

SEQ ID NO: 795815 - DNA, 25 bp, Homo sapien
tccacattgatctggtttagggtct

SEQ ID NO: 795816 - DNA, 25 bp, Homo sapien
tctaaatcagccacaacaatcagat

SEQ ID NO: 795817 - DNA, 25 bp, Homo sapien
ctaaatcagccacaacaatcagatt

SEQ ID NO: 795818 - DNA, 25 bp, Homo sapien
tttctggagagaagattagtggcaa

SEQ ID NO: 795819 - DNA, 25 bp, Homo sapien
ggcaagtgcccatttgtggatacaa

SEQ ID NO: 795820 - DNA, 25 bp, Homo sapien
accagtatagattcggttgtcccac

SEQ ID NO: 795821 - DNA, 25 bp, Homo sapien
tggatacaaaccagtatagattcgg

SEQ ID NO: 795822 - DNA, 25 bp, Homo sapien
ttcacagaataaatgattcccactg

SEQ ID NO: 795823 - DNA, 25 bp, Homo sapien
cacagaataaatgattcccactgat

SEQ ID NO: 795824 - DNA, 25 bp, Homo sapien
taaatgattcccactgatccaccca

SEQ ID NO: 795825 - DNA, 25 bp, Homo sapien
gaataaatgattcccactgatccac

SEQ ID NO: 795826 - DNA, 25 bp, Homo sapien
catcctctattctgggcaatttata

SEQ ID NO: 795827 - DNA, 25 bp, Homo sapien
cgcgataatttaagagtgatgcaac

SEQ ID NO: 795828 - DNA, 25 bp, Homo sapien
tattttatggaggacttctgacact

SEQ ID NO: 795829 - DNA, 25 bp, Homo sapien
tggatcttaaagtggtctcctaaaa

SEQ ID NO: 795830 - DNA, 25 bp, Homo sapien
ctcaaggacccagggacacaaacac

SEQ ID NO: 795831 - DNA, 25 bp, Homo sapien
tgcggaaggccgcagggtcctctgc

SEQ ID NO: 795832 - DNA, 25 bp, Homo sapien
cggaaggccgcagggtcctctgcct

SEQ ID NO: 795833 - DNA, 25 bp, Homo sapien
ctaatctcaaggacccagggacaca

SEQ ID NO: 795834 - DNA, 25 bp, Homo sapien
ttccgacaggcttgaaaaacggcgc

SEQ ID NO: 795835 - DNA, 25 bp, Homo sapien
cgacaggcttgaaaaacggcgcacc

SEQ ID NO: 795836 - DNA, 25 bp, Homo sapien
gcgcttttccgacaggcttgaaaaa

SEQ ID NO: 795837 - DNA, 25 bp, Homo sapien
ccgcatactgcgcttttccgacagg

SEQ ID NO: 795838 - DNA, 25 bp, Homo sapien
ggtgcgcgcaccgtgcgcgagccga

SEQ ID NO: 795839 - DNA, 25 bp, Homo sapien
caggtcagtgggtgcgcgcaccgtg

SEQ ID NO: 795840 - DNA, 25 bp, Homo sapien
tcagtgggtgcgcgcaccgtgcgcg

SEQ ID NO: 795841 - DNA, 25 bp, Homo sapien
ggtcagtgggtgcgcgcaccgtgcg

SEQ ID NO: 795842 - DNA, 25 bp, Homo sapien
cctgaccattggatatccttgtaaa

SEQ ID NO: 795843 - DNA, 25 bp, Homo sapien
acccagatctgaccatacttaactt

SEQ ID NO: 795844 - DNA, 25 bp, Homo sapien
gatatccttgtaaaggtcttcaccc

SEQ ID NO: 795845 - DNA, 25 bp, Homo sapien
gatctgaccatacttaacttcttcc

SEQ ID NO: 795846 - DNA, 25 bp, Homo sapien
ctagttattaaaagcacagggatca

SEQ ID NO: 795847 - DNA, 25 bp, Homo sapien
tagttattaaaagcacagggatcag

SEQ ID NO: 795848 - DNA, 25 bp, Homo sapien
agttattaaaagcacagggatcagg

SEQ ID NO: 795849 - DNA, 25 bp, Homo sapien
tacagtactacgtttgaattcaccc

SEQ ID NO: 795850 - DNA, 25 bp, Homo sapien
tctggaagactaagacaagtgaggt

SEQ ID NO: 795851 - DNA, 25 bp, Homo sapien
tagttccccgttattgcttccagag

SEQ ID NO: 795852 - DNA, 25 bp, Homo sapien
cgctaaagcttgatggtaaaaggcc

SEQ ID NO: 795853 - DNA, 25 bp, Homo sapien
gaagtgactaatcatgactaacaac

SEQ ID NO: 795854 - DNA, 25 bp, Homo sapien
ttcttttaacataagaggacacaag

SEQ ID NO: 795855 - DNA, 25 bp, Homo sapien
cagagaccaagattatgaagagggt

SEQ ID NO: 795856 - DNA, 25 bp, Homo sapien
gattctctacttcaagataatgcca

SEQ ID NO: 795857 - DNA, 25 bp, Homo sapien
atcataaaggcagtttccaccagac

SEQ ID NO: 795858 - DNA, 25 bp, Homo sapien
tttaaatatgttgtctcccacagaa

SEQ ID NO: 795859 - DNA, 25 bp, Homo sapien
ttttaaatatgttgtctcccacaga

SEQ ID NO: 795860 - DNA, 25 bp, Homo sapien
tctaggtcaattcagttgagtcccc

SEQ ID NO: 795861 - DNA, 25 bp, Homo sapien
tccccatactcttaacaggtgacag

SEQ ID NO: 795862 - DNA, 25 bp, Homo sapien
gattagttctacctcagagtgggag

SEQ ID NO: 795863 - DNA, 25 bp, Homo sapien
tggtttaatacagcgagatgatctc

SEQ ID NO: 795864 - DNA, 25 bp, Homo sapien
agaggcctgacataggttataaaac

SEQ ID NO: 795865 - DNA, 25 bp, Homo sapien
cagaggcctgacataggttataaaa

SEQ ID NO: 795866 - DNA, 25 bp, Homo sapien
gaggcctgacataggttataaaact

SEQ ID NO: 795867 - DNA, 25 bp, Homo sapien
ggcctgacataggttataaaactag

SEQ ID NO: 795868 - DNA, 25 bp, Homo sapien
gagattgaagtacgggccaggaaaa

SEQ ID NO: 795869 - DNA, 25 bp, Homo sapien
cgagattgaagtacgggccaggaaa

SEQ ID NO: 795870 - DNA, 25 bp, Homo sapien
gattgaagtacgggccaggaaaatg

SEQ ID NO: 795871 - DNA, 25 bp, Homo sapien
attgaagtacgggccaggaaaatgg

SEQ ID NO: 795872 - DNA, 25 bp, Homo sapien
gtgccaacctccctttatcaatggg

SEQ ID NO: 795873 - DNA, 25 bp, Homo sapien
tcaatgggatggcttgttagggcaa

SEQ ID NO: 795874 - DNA, 25 bp, Homo sapien
tatcaatgggatggcttgttagggc

SEQ ID NO: 795875 - DNA, 25 bp, Homo sapien
tcatttgcaacaggatgtgccaacc

SEQ ID NO: 795876 - DNA, 25 bp, Homo sapien
acaaactactaccaaagagtactat

SEQ ID NO: 795877 - DNA, 25 bp, Homo sapien
caaactactaccaaagagtactata

SEQ ID NO: 795878 - DNA, 25 bp, Homo sapien
tacaaactactaccaaagagtacta

SEQ ID NO: 795879 - DNA, 25 bp, Homo sapien
atacaaactactaccaaagagtact

SEQ ID NO: 795880 - DNA, 25 bp, Homo sapien
gggctgactaccaggaagggatctt

SEQ ID NO: 795881 - DNA, 25 bp, Homo sapien
acaatggctacattaggttgttcag

SEQ ID NO: 795882 - DNA, 25 bp, Homo sapien
tcaggtagcatatctgcattcagac

SEQ ID NO: 795883 - DNA, 25 bp, Homo sapien
tcattagaactgcaatctcctctca

SEQ ID NO: 795884 - DNA, 25 bp, Homo sapien
tcataaagcaccaacttccacgagg

SEQ ID NO: 795885 - DNA, 25 bp, Homo sapien
taaatctgggcccatgatagctctc

SEQ ID NO: 795886 - DNA, 25 bp, Homo sapien
ctcattccgggaagacttaggcatt

SEQ ID NO: 795887 - DNA, 25 bp, Homo sapien
ggaatctgataactgccaaccctca

SEQ ID NO: 795888 - DNA, 25 bp, Homo sapien
tgtgtaactgtctggtgggacatct

SEQ ID NO: 795889 - DNA, 25 bp, Homo sapien
gacctgttgtgtaactgtctggtgg

SEQ ID NO: 795890 - DNA, 25 bp, Homo sapien
ctccagacctgttgtgtaactgtct

SEQ ID NO: 795891 - DNA, 25 bp, Homo sapien
taactgtctggtgggacatctccat

SEQ ID NO: 795892 - DNA, 25 bp, Homo sapien
tgttggtctcgctgaagcaccttgc

SEQ ID NO: 795893 - DNA, 25 bp, Homo sapien
gaatgactacaatgcatccctttgc

SEQ ID NO: 795894 - DNA, 25 bp, Homo sapien
tcaaactatggaggccttttccctg

SEQ ID NO: 795895 - DNA, 25 bp, Homo sapien
catcattgtcaccagggatccactc

SEQ ID NO: 795896 - DNA, 25 bp, Homo sapien
tgctcatgaacctcgtggcacacgg

SEQ ID NO: 795897 - DNA, 25 bp, Homo sapien
tgcagctctacgaagatctcagtcg

SEQ ID NO: 795898 - DNA, 25 bp, Homo sapien
gaagacaaccgtatgcggcaacaca

SEQ ID NO: 795899 - DNA, 25 bp, Homo sapien
tggcacacggttcagcaggcaactt

SEQ ID NO: 795900 - DNA, 25 bp, Homo sapien
tctgtttccaaacacgcaacaagtt

SEQ ID NO: 795901 - DNA, 25 bp, Homo sapien
catgaaatcgtttctccttatctgg

SEQ ID NO: 795902 - DNA, 25 bp, Homo sapien
cactagcaagaattgaactcctgag

SEQ ID NO: 795903 - DNA, 25 bp, Homo sapien
tcaatgacacgaatttctgtaatgg

SEQ ID NO: 795904 - DNA, 25 bp, Homo sapien
aaggtggaaattgggatgccactca

SEQ ID NO: 795905 - DNA, 25 bp, Homo sapien
tggatggagagaatatagaatacct

SEQ ID NO: 795906 - DNA, 25 bp, Homo sapien
tgttttcttcacgtcctaccacaag

SEQ ID NO: 795907 - DNA, 25 bp, Homo sapien
cactcattgttaaaggtggcgacat

SEQ ID NO: 795908 - DNA, 25 bp, Homo sapien
ccttgcatctctgggccaaatctca

SEQ ID NO: 795909 - DNA, 25 bp, Homo sapien
ttgcatctctgggccaaatctcact

SEQ ID NO: 795910 - DNA, 25 bp, Homo sapien
tgatataatgtatcaactgattgat

SEQ ID NO: 795911 - DNA, 25 bp, Homo sapien
gatataatgtatcaactgattgatt

SEQ ID NO: 795912 - DNA, 25 bp, Homo sapien
aatcttctatctgtaaactttgctg

SEQ ID NO: 795913 - DNA, 25 bp, Homo sapien
ttattctccatttgatcactgttgg

SEQ ID NO: 795914 - DNA, 25 bp, Homo sapien
tagaacagctacagatttgtgtata

SEQ ID NO: 795915 - DNA, 25 bp, Homo sapien
tgttggtatatagaacagctacaga

SEQ ID NO: 795916 - DNA, 25 bp, Homo sapien
ctcacgtggcatttagaaggaagac

SEQ ID NO: 795917 - DNA, 25 bp, Homo sapien
tgactttggaccagggcctctcaga

SEQ ID NO: 795918 - DNA, 25 bp, Homo sapien
caatcaaggtgctagccagagtgac

SEQ ID NO: 795919 - DNA, 25 bp, Homo sapien
tctttggtgtcagggcacgcattct

SEQ ID NO: 795920 - DNA, 25 bp, Homo sapien
tttagcaacccaatgaactttcatg

SEQ ID NO: 795921 - DNA, 25 bp, Homo sapien
aaatagctcacaatacttgctaagc

SEQ ID NO: 795922 - DNA, 25 bp, Homo sapien
ggacttggcaaacaacagtgtacag

SEQ ID NO: 795923 - DNA, 25 bp, Homo sapien
cagtgtattataacttagcctaaat

SEQ ID NO: 795924 - DNA, 25 bp, Homo sapien
cagttgacaaaccttcacggccata

SEQ ID NO: 795925 - DNA, 25 bp, Homo sapien
tcccaaaatattgcatggtgagcag

SEQ ID NO: 795926 - DNA, 25 bp, Homo sapien
ttaagaagctgagatacaccagttg

SEQ ID NO: 795927 - DNA, 25 bp, Homo sapien
tcatattcagagcacccatggtccc

SEQ ID NO: 795928 - DNA, 25 bp, Homo sapien
tgttctatggtctgatgtgccgatc

SEQ ID NO: 795929 - DNA, 25 bp, Homo sapien
tacaccatccaagagacgaatgctc

SEQ ID NO: 795930 - DNA, 25 bp, Homo sapien
tgcatccccacgcaaagtctcatgt

SEQ ID NO: 795931 - DNA, 25 bp, Homo sapien
gacacctggcaatgttatctgagac

SEQ ID NO: 795932 - DNA, 25 bp, Homo sapien
ttccccactgccacagacaatcgac

SEQ ID NO: 795933 - DNA, 25 bp, Homo sapien
tgctggcaacttagcagcttttgta

SEQ ID NO: 795934 - DNA, 25 bp, Homo sapien
tggcaacttagcagcttttgtaatt

SEQ ID NO: 795935 - DNA, 25 bp, Homo sapien
tcctgctggcaacttagcagctttt

SEQ ID NO: 795936 - DNA, 25 bp, Homo sapien
tccagagtagttgtatcattttgca

SEQ ID NO: 795937 - DNA, 25 bp, Homo sapien
agttcatttgctggatcttaacaaa

SEQ ID NO: 795938 - DNA, 25 bp, Homo sapien
gcaatgaaggtagtccactttgacc

SEQ ID NO: 795939 - DNA, 25 bp, Homo sapien
tatatattagaggtcaaatttgcca

SEQ ID NO: 795940 - DNA, 25 bp, Homo sapien
catgctgaccttttatagacacgac

SEQ ID NO: 795941 - DNA, 25 bp, Homo sapien
agagatcagtcttcccttaagccag

SEQ ID NO: 795942 - DNA, 25 bp, Homo sapien
tttttgcgaccgtttgagactggct

SEQ ID NO: 795943 - DNA, 25 bp, Homo sapien
aagccagtcttcctcagtggtaaca

SEQ ID NO: 795944 - DNA, 25 bp, Homo sapien
tcagacattttccagagtacttact

SEQ ID NO: 795945 - DNA, 25 bp, Homo sapien
gtatccacacttatcattcagacat

SEQ ID NO: 795946 - DNA, 25 bp, Homo sapien
aatttaattcctcatgtgtatccac

SEQ ID NO: 795947 - DNA, 25 bp, Homo sapien
cagtcatatgtttgctctcagcctt

SEQ ID NO: 795948 - DNA, 25 bp, Homo sapien
tggcagtttccaaatagggagagta

SEQ ID NO: 795949 - DNA, 25 bp, Homo sapien
ttgataagcaatctcatcagcaacc

SEQ ID NO: 795950 - DNA, 25 bp, Homo sapien
aatagggagagtattcttgataagc

SEQ ID NO: 795951 - DNA, 25 bp, Homo sapien
tattcttgataagcaatctcatcag

SEQ ID NO: 795952 - DNA, 25 bp, Homo sapien
cgaagtattagtctgtggatgacca

SEQ ID NO: 795953 - DNA, 25 bp, Homo sapien
tcacaagcaagattgacagatcctg

SEQ ID NO: 795954 - DNA, 25 bp, Homo sapien
aatgaagagtgtggttctgcagaag

SEQ ID NO: 795955 - DNA, 25 bp, Homo sapien
tctgacgggtataatttcacgaagt

SEQ ID NO: 795956 - DNA, 25 bp, Homo sapien
tccgctgggttctctaggttgaaat

SEQ ID NO: 795957 - DNA, 25 bp, Homo sapien
tcctctggctcttgacgtgtttcag

SEQ ID NO: 795958 - DNA, 25 bp, Homo sapien
tcttgctgatttcccgttccgctgg

SEQ ID NO: 795959 - DNA, 25 bp, Homo sapien
tatatcaaagtgatagcctttgggc

SEQ ID NO: 795960 - DNA, 25 bp, Homo sapien
gtcttcatgagggaagattttgagt

SEQ ID NO: 795961 - DNA, 25 bp, Homo sapien
ttgtcttcatgagggaagattttga

SEQ ID NO: 795962 - DNA, 25 bp, Homo sapien
cttcatgagggaagattttgagttc

SEQ ID NO: 795963 - DNA, 25 bp, Homo sapien
ttcttgtcttcatgagggaagattt

SEQ ID NO: 795964 - DNA, 25 bp, Homo sapien
atgcgcagtccgcagggactcaggt

SEQ ID NO: 795965 - DNA, 25 bp, Homo sapien
tgaaacatgctgaaacatcattgct

SEQ ID NO: 795966 - DNA, 25 bp, Homo sapien
ttccctgagtgatgcgcagtccgca

SEQ ID NO: 795967 - DNA, 25 bp, Homo sapien
aggtgtgaaacatgctgaaacatca

SEQ ID NO: 795968 - DNA, 25 bp, Homo sapien
gaagggatcccaaggtggaggtgga

SEQ ID NO: 795969 - DNA, 25 bp, Homo sapien
ataatcattgagttgcatatggctg

SEQ ID NO: 795970 - DNA, 25 bp, Homo sapien
gggacatgagttgtagcctcctcac

SEQ ID NO: 795971 - DNA, 25 bp, Homo sapien
gaaactccttttctcatggtcccag

SEQ ID NO: 795972 - DNA, 25 bp, Homo sapien
gccttctagctgtggccttcagttc

SEQ ID NO: 795973 - DNA, 25 bp, Homo sapien
gttgttttgctaagccacttctcta

SEQ ID NO: 795974 - DNA, 25 bp, Homo sapien
ggaagttttactcctctgtgctgtg

SEQ ID NO: 795975 - DNA, 25 bp, Homo sapien
taaatcagctggtccttcagaggaa

SEQ ID NO: 795976 - DNA, 25 bp, Homo sapien
ggaatgtaggcccaccttgaatcca

SEQ ID NO: 795977 - DNA, 25 bp, Homo sapien
ttatgacctgatggacttactgcag

SEQ ID NO: 795978 - DNA, 25 bp, Homo sapien
gtggcaggaacttatctttataagc

SEQ ID NO: 795979 - DNA, 25 bp, Homo sapien
tgatggacttactgcagtggcagga

SEQ ID NO: 795980 - DNA, 25 bp, Homo sapien
gacctgatggacttactgcagtggc

SEQ ID NO: 795981 - DNA, 25 bp, Homo sapien
cttcgtctcccatgtagccaaagct

SEQ ID NO: 795982 - DNA, 25 bp, Homo sapien
tttgctcccttcgtctcccatgtag

SEQ ID NO: 795983 - DNA, 25 bp, Homo sapien
aagggaagctggatttggtatttgc

SEQ ID NO: 795984 - DNA, 25 bp, Homo sapien
atttggtatttgctcccttcgtctc

SEQ ID NO: 795985 - DNA, 25 bp, Homo sapien
gcaaaccaggtactcttcagtcagg

SEQ ID NO: 795986 - DNA, 25 bp, Homo sapien
gacaaagtcgcagattaacaacact

SEQ ID NO: 795987 - DNA, 25 bp, Homo sapien
ggatacataagaaacacagggccta

SEQ ID NO: 795988 - DNA, 25 bp, Homo sapien
tatgcctgagaactttgaatgatgc

SEQ ID NO: 795989 - DNA, 25 bp, Homo sapien
atttcttggggtcgtattcctgatt

SEQ ID NO: 795990 - DNA, 25 bp, Homo sapien
tcatttcttggggtcgtattcctga

SEQ ID NO: 795991 - DNA, 25 bp, Homo sapien
catttcttggggtcgtattcctgat

SEQ ID NO: 795992 - DNA, 25 bp, Homo sapien
gaatccggaaaattcggaagaagca

SEQ ID NO: 795993 - DNA, 25 bp, Homo sapien
tgtttgtctttatggcttatttgcc

SEQ ID NO: 795994 - DNA, 25 bp, Homo sapien
aaagcttcgctttgccagtagaatc

SEQ ID NO: 795995 - DNA, 25 bp, Homo sapien
cttgcaatgcataagatataaaagc

SEQ ID NO: 795996 - DNA, 25 bp, Homo sapien
gctgcgagggcaacgccaacaattt

SEQ ID NO: 795997 - DNA, 25 bp, Homo sapien
ccttcttcaggaaataacgcggaga

SEQ ID NO: 795998 - DNA, 25 bp, Homo sapien
tactacgacaggtacacgcagagct

SEQ ID NO: 795999 - DNA, 25 bp, Homo sapien
tgcttttcctgacggaggctgcact

SEQ ID NO: 796000 - DNA, 25 bp, Homo sapien
tagcaggtcatttccgtctagcttg

SEQ ID NO: 796001 - DNA, 25 bp, Homo sapien
tttacagcgcaatcactagcaggtc

SEQ ID NO: 796002 - DNA, 25 bp, Homo sapien
gggcgtccccgtctggactacagga

SEQ ID NO: 796003 - DNA, 25 bp, Homo sapien
gatttcccattactgacacaaacgc

SEQ ID NO: 796004 - DNA, 25 bp, Homo sapien
aagacaatcaaaaagtgtccagcac

SEQ ID NO: 796005 - DNA, 25 bp, Homo sapien
tttgtatgagcgaaagacaatcaaa

SEQ ID NO: 796006 - DNA, 25 bp, Homo sapien
tgttgggattactagcagaagccat

SEQ ID NO: 796007 - DNA, 25 bp, Homo sapien
ggattactagcagaagccattgtgt

SEQ ID NO: 796008 - DNA, 25 bp, Homo sapien
tagacactctgataaatacttaaca

SEQ ID NO: 796009 - DNA, 25 bp, Homo sapien
gtgagggagatgagttgaaatttac

SEQ ID NO: 796010 - DNA, 25 bp, Homo sapien
gatattagctattttggaacattca

SEQ ID NO: 796011 - DNA, 25 bp, Homo sapien
tttgtagcactcgaaagtgagggag

SEQ ID NO: 796012 - DNA, 25 bp, Homo sapien
catttgactccaaacacctgttcag

SEQ ID NO: 796013 - DNA, 25 bp, Homo sapien
taaaatacttaaagcgcctccttgc

SEQ ID NO: 796014 - DNA, 25 bp, Homo sapien
caattctagcaatgcacactagcct

SEQ ID NO: 796015 - DNA, 25 bp, Homo sapien
gcccctggtcttttgtatagtgtaa

SEQ ID NO: 796016 - DNA, 25 bp, Homo sapien
gctatgcatgaattgctggagttat

SEQ ID NO: 796017 - DNA, 25 bp, Homo sapien
aacaattccctcagctcttaactta

SEQ ID NO: 796018 - DNA, 25 bp, Homo sapien
aagtcagtcttagccaacaattccc

SEQ ID NO: 796019 - DNA, 25 bp, Homo sapien
gaaggttagcagctatgcatgaatt

SEQ ID NO: 796020 - DNA, 25 bp, Homo sapien
tcttgagctggtcaacttccatctt

SEQ ID NO: 796021 - DNA, 25 bp, Homo sapien
ggtcctcaatattgattactggcat

SEQ ID NO: 796022 - DNA, 25 bp, Homo sapien
cttctttcttgagctggtcaacttc

SEQ ID NO: 796023 - DNA, 25 bp, Homo sapien
tctgtcaggtcctcaatattgatta

SEQ ID NO: 796024 - DNA, 25 bp, Homo sapien
taactacattgagcctttccagcca

SEQ ID NO: 796025 - DNA, 25 bp, Homo sapien
atttatttgtaactacattgagcct

SEQ ID NO: 796026 - DNA, 25 bp, Homo sapien
tggtactcccacagtatctctagct

SEQ ID NO: 796027 - DNA, 25 bp, Homo sapien
cagccaatgttttctaacctggtac

SEQ ID NO: 796028 - DNA, 25 bp, Homo sapien
tgttcagtgtatcccagccatctag

SEQ ID NO: 796029 - DNA, 25 bp, Homo sapien
catggtggtgcactaggtgagcttc

SEQ ID NO: 796030 - DNA, 25 bp, Homo sapien
ttcacccagatgacaggaacagagg

SEQ ID NO: 796031 - DNA, 25 bp, Homo sapien
aacagaagtcaagggtgtcaccaga

SEQ ID NO: 796032 - DNA, 25 bp, Homo sapien
tcttcaacgtaatctcttacttctt

SEQ ID NO: 796033 - DNA, 25 bp, Homo sapien
ctgggatgccctttaccagtggatc

SEQ ID NO: 796034 - DNA, 25 bp, Homo sapien
tcgccagatcgttcttcaacgtaat

SEQ ID NO: 796035 - DNA, 25 bp, Homo sapien
taccagtggatcctcgccagatcgt

SEQ ID NO: 796036 - DNA, 25 bp, Homo sapien
gtagtaatagtatgcatgagaaaaa

SEQ ID NO: 796037 - DNA, 25 bp, Homo sapien
cttagtagtaatagtatgcatgaga

SEQ ID NO: 796038 - DNA, 25 bp, Homo sapien
cgtacatgcttagtagtaatagtat

SEQ ID NO: 796039 - DNA, 25 bp, Homo sapien
ttcacgtacatgcttagtagtaata

SEQ ID NO: 796040 - DNA, 25 bp, Homo sapien
ctgtgccagctatgttaagaaaaac

SEQ ID NO: 796041 - DNA, 25 bp, Homo sapien
tgtgttaaaccctgtgccagctatg

SEQ ID NO: 796042 - DNA, 25 bp, Homo sapien
taaaccctgtgccagctatgttaag

SEQ ID NO: 796043 - DNA, 25 bp, Homo sapien
caattatgtgttaaaccctgtgcca

SEQ ID NO: 796044 - DNA, 25 bp, Homo sapien
gcctcctttgagctctttgaaggga

SEQ ID NO: 796045 - DNA, 25 bp, Homo sapien
acagcctcctttgagctctttgaag

SEQ ID NO: 796046 - DNA, 25 bp, Homo sapien
tcctttgagctctttgaagggattt

SEQ ID NO: 796047 - DNA, 25 bp, Homo sapien
agggatttttgtcctctgggatgcc

SEQ ID NO: 796048 - DNA, 25 bp, Homo sapien
cgtcccgaaacaactgaaggcctgg

SEQ ID NO: 796049 - DNA, 25 bp, Homo sapien
ggctttctccgggacgcttgtcacg

SEQ ID NO: 796050 - DNA, 25 bp, Homo sapien
gtgccccagcttcctaggacctgag

SEQ ID NO: 796051 - DNA, 25 bp, Homo sapien
cacccgcgcaggatgtgactgcagc

SEQ ID NO: 796052 - DNA, 25 bp, Homo sapien
tctttgcgaagctgctcaacttcca

SEQ ID NO: 796053 - DNA, 25 bp, Homo sapien
cgaagctgctcaacttccattttca

SEQ ID NO: 796054 - DNA, 25 bp, Homo sapien
cacttctttgcgaagctgctcaact

SEQ ID NO: 796055 - DNA, 25 bp, Homo sapien
aacttcacttctttgcgaagctgct

SEQ ID NO: 796056 - DNA, 25 bp, Homo sapien
gaattccctttactagaggatcctc

SEQ ID NO: 796057 - DNA, 25 bp, Homo sapien
tccctttactagaggatcctctcca

SEQ ID NO: 796058 - DNA, 25 bp, Homo sapien
ttccctttactagaggatcctctcc

SEQ ID NO: 796059 - DNA, 25 bp, Homo sapien
aattccctttactagaggatcctct

SEQ ID NO: 796060 - DNA, 25 bp, Homo sapien
catagtgagcaaagatgagtagcac

SEQ ID NO: 796061 - DNA, 25 bp, Homo sapien
tccacttaggatgcagtttctccca

SEQ ID NO: 796062 - DNA, 25 bp, Homo sapien
gaagtgtcatgctcaagtaatgttc

SEQ ID NO: 796063 - DNA, 25 bp, Homo sapien
caagcaatatactgaaagaagtgtc

SEQ ID NO: 796064 - DNA, 25 bp, Homo sapien
aggaataagtactggctctcaaagc

SEQ ID NO: 796065 - DNA, 25 bp, Homo sapien
gaactggagtagtgccatgcccaag

SEQ ID NO: 796066 - DNA, 25 bp, Homo sapien
gcaagcatgagtgcagaggtccaag

SEQ ID NO: 796067 - DNA, 25 bp, Homo sapien
ggttagatcaaacacgttccagagg

SEQ ID NO: 796068 - DNA, 25 bp, Homo sapien
tattgcacttctacatgttggctgg

SEQ ID NO: 796069 - DNA, 25 bp, Homo sapien
caaaagctaggacttgggagtgtac

SEQ ID NO: 796070 - DNA, 25 bp, Homo sapien
gccttgccagtaaccggaataaatg

SEQ ID NO: 796071 - DNA, 25 bp, Homo sapien
aatcgcaactcccaacaagttaggg

SEQ ID NO: 796072 - DNA, 25 bp, Homo sapien
cccatgcctccatctgcaaacttgc

SEQ ID NO: 796073 - DNA, 25 bp, Homo sapien
tgattccacaacccatgcctccatc

SEQ ID NO: 796074 - DNA, 25 bp, Homo sapien
tgcaaacttgctatattattactat

SEQ ID NO: 796075 - DNA, 25 bp, Homo sapien
ctctatgtctactcctgattccaca

SEQ ID NO: 796076 - DNA, 25 bp, Homo sapien
gttggtcccgtggccaagaataaga

SEQ ID NO: 796077 - DNA, 25 bp, Homo sapien
aaaggagagtggtcaaagtgggagt

SEQ ID NO: 796078 - DNA, 25 bp, Homo sapien
gaagcttctgcatagagtgcccctg

SEQ ID NO: 796079 - DNA, 25 bp, Homo sapien
tcaaagtgggagttccaatttagga

SEQ ID NO: 796080 - DNA, 25 bp, Homo sapien
ccttggaccagttcccattggcact

SEQ ID NO: 796081 - DNA, 25 bp, Homo sapien
attggcactactgactgcaatgtct

SEQ ID NO: 796082 - DNA, 25 bp, Homo sapien
ttaatgccgtgacttctgccactgc

SEQ ID NO: 796083 - DNA, 25 bp, Homo sapien
actgcccactggtcttatagtttaa

SEQ ID NO: 796084 - DNA, 25 bp, Homo sapien
ccaacttaatggcttgcagtaccac

SEQ ID NO: 796085 - DNA, 25 bp, Homo sapien
cttagtgggagagtaacagaatgcc

SEQ ID NO: 796086 - DNA, 25 bp, Homo sapien
gaagtagtcagccagtttgtggtaa

SEQ ID NO: 796087 - DNA, 25 bp, Homo sapien
gagggtgtggctccactaatttcca

SEQ ID NO: 796088 - DNA, 25 bp, Homo sapien
tctttagtaatcctgtgcagtcccg

SEQ ID NO: 796089 - DNA, 25 bp, Homo sapien
ctgggacgattgaagccaccgtagt

SEQ ID NO: 796090 - DNA, 25 bp, Homo sapien
gccaccgtagtatattgcctcaaac

SEQ ID NO: 796091 - DNA, 25 bp, Homo sapien
tagtaatcctgtgcagtcccggtcc

SEQ ID NO: 796092 - DNA, 25 bp, Homo sapien
tttggggtccatgtcgagtggaaac

SEQ ID NO: 796093 - DNA, 25 bp, Homo sapien
aatcgaacctgtcttatgttcctgg

SEQ ID NO: 796094 - DNA, 25 bp, Homo sapien
aaaaacaggatgtctagaggggatc

SEQ ID NO: 796095 - DNA, 25 bp, Homo sapien
gcgcgggaggaaatcgaacctgtct

SEQ ID NO: 796096 - DNA, 25 bp, Homo sapien
agaagttggtgtttcgctgggccct

SEQ ID NO: 796097 - DNA, 25 bp, Homo sapien
aacacgttatgcgttggtgaactac

SEQ ID NO: 796098 - DNA, 25 bp, Homo sapien
tagactccactgatgtcgtggcgct

SEQ ID NO: 796099 - DNA, 25 bp, Homo sapien
catccggcgcggtgtttagactcca

SEQ ID NO: 796100 - DNA, 25 bp, Homo sapien
cccacatccattcgttgcattacca

SEQ ID NO: 796101 - DNA, 25 bp, Homo sapien
ccacatccattcgttgcattaccat

SEQ ID NO: 796102 - DNA, 25 bp, Homo sapien
tgagatgggattagagttcttgaaa

SEQ ID NO: 796103 - DNA, 25 bp, Homo sapien
gaaatttcaatctggtgtgtttggg

SEQ ID NO: 796104 - DNA, 25 bp, Homo sapien
tagtaatgagatgggattagagttc

SEQ ID NO: 796105 - DNA, 25 bp, Homo sapien
tcatggagaattcattaaatgcctt

SEQ ID NO: 796106 - DNA, 25 bp, Homo sapien
agcaaatacatccttcttcacgtgg

SEQ ID NO: 796107 - DNA, 25 bp, Homo sapien
gcaaatacatccttcttcacgtggt

SEQ ID NO: 796108 - DNA, 25 bp, Homo sapien
caaatacatccttcttcacgtggta

SEQ ID NO: 796109 - DNA, 25 bp, Homo sapien
acagaggaatagctgcaaaatctga

SEQ ID NO: 796110 - DNA, 25 bp, Homo sapien
acagcctgggttgcctgccgggcca

SEQ ID NO: 796111 - DNA, 25 bp, Homo sapien
ctgtgacagcctgggttgcctgccg

SEQ ID NO: 796112 - DNA, 25 bp, Homo sapien
gacagcctgggttgcctgccgggcc

SEQ ID NO: 796113 - DNA, 25 bp, Homo sapien
gctgctgtgacagcctgggttgcct

SEQ ID NO: 796114 - DNA, 25 bp, Homo sapien
ctttagaacttttattctgatgttt

SEQ ID NO: 796115 - DNA, 25 bp, Homo sapien
atgctttagaacttttattctgatg

SEQ ID NO: 796116 - DNA, 25 bp, Homo sapien
gctttagaacttttattctgatgtt

SEQ ID NO: 796117 - DNA, 25 bp, Homo sapien
gtgtctaaatgtagagcaatagggc

SEQ ID NO: 796118 - DNA, 25 bp, Homo sapien
taaatgtagagcaatagggctttgg

SEQ ID NO: 796119 - DNA, 25 bp, Homo sapien
cctggtcctatgaaggaatcttcct

SEQ ID NO: 796120 - DNA, 25 bp, Homo sapien
tagctgtcagtagacttgctattgc

SEQ ID NO: 796121 - DNA, 25 bp, Homo sapien
ccaggctggcgaatgttaaaacgca

SEQ ID NO: 796122 - DNA, 25 bp, Homo sapien
cacggtaatgtaatcaggtaacctt

SEQ ID NO: 796123 - DNA, 25 bp, Homo sapien
gctggcgaatgttaaaacgcaaaca

SEQ ID NO: 796124 - DNA, 25 bp, Homo sapien
aacctttgtctgtgacaagccccag

SEQ ID NO: 796125 - DNA, 25 bp, Homo sapien
tcatacttttataacctctctccat

SEQ ID NO: 796126 - DNA, 25 bp, Homo sapien
acagtagcctgaccagagttcatac

SEQ ID NO: 796127 - DNA, 25 bp, Homo sapien
cagtagcctgaccagagttcatact

SEQ ID NO: 796128 - DNA, 25 bp, Homo sapien
aagtctttctaaaaggctgtcttat

SEQ ID NO: 796129 - DNA, 25 bp, Homo sapien
catagtgagttagcctaatccgact

SEQ ID NO: 796130 - DNA, 25 bp, Homo sapien
gaagtcacagagtgactttaggtaa

SEQ ID NO: 796131 - DNA, 25 bp, Homo sapien
gatttaggtaactaacctgacactg

SEQ ID NO: 796132 - DNA, 25 bp, Homo sapien
taacttctccgtgccttttctatgt

SEQ ID NO: 796133 - DNA, 25 bp, Homo sapien
tctgggtttgctgctaacaggcttt

SEQ ID NO: 796134 - DNA, 25 bp, Homo sapien
gaactggcggtcataaatcttaggt

SEQ ID NO: 796135 - DNA, 25 bp, Homo sapien
tgttgattgctgaggatacatgacg

SEQ ID NO: 796136 - DNA, 25 bp, Homo sapien
cagattcgctggattacttcctgtt

SEQ ID NO: 796137 - DNA, 25 bp, Homo sapien
tccaccgctgttccagattcgctgg

SEQ ID NO: 796138 - DNA, 25 bp, Homo sapien
cttctaaattccaccgctgttccag

SEQ ID NO: 796139 - DNA, 25 bp, Homo sapien
tgtttggttgttcggtgttatcttc

SEQ ID NO: 796140 - DNA, 25 bp, Homo sapien
ctctagtctccatgtgcctcttcct

SEQ ID NO: 796141 - DNA, 25 bp, Homo sapien
tagtctccatgtgcctcttcctgaa

SEQ ID NO: 796142 - DNA, 25 bp, Homo sapien
tccatgtgcctcttcctgaatcatc

SEQ ID NO: 796143 - DNA, 25 bp, Homo sapien
tctccatgtgcctcttcctgaatca

SEQ ID NO: 796144 - DNA, 25 bp, Homo sapien
tttctctaggtcttagggtcctcat

SEQ ID NO: 796145 - DNA, 25 bp, Homo sapien
gtttctctaggtcttagggtcctca

SEQ ID NO: 796146 - DNA, 25 bp, Homo sapien
cacatgttgtactaaggatcaggag

SEQ ID NO: 796147 - DNA, 25 bp, Homo sapien
catttagcagttacagctgttgacc

SEQ ID NO: 796148 - DNA, 25 bp, Homo sapien
tagggaagccaaatcaaacacagct

SEQ ID NO: 796149 - DNA, 25 bp, Homo sapien
gaacaagagttatgggtcctgaatc

SEQ ID NO: 796150 - DNA, 25 bp, Homo sapien
catcctaaaacctggagcctgtgaa

SEQ ID NO: 796151 - DNA, 25 bp, Homo sapien
ttatcctggtgagccctaaatgcag

SEQ ID NO: 796152 - DNA, 25 bp, Homo sapien
ggataaccagtcacccaccagtagt

SEQ ID NO: 796153 - DNA, 25 bp, Homo sapien
cagtagtaggctggttgttcacccc

SEQ ID NO: 796154 - DNA, 25 bp, Homo sapien
ttagagcactgaccaagacagccaa

SEQ ID NO: 796155 - DNA, 25 bp, Homo sapien
gccctgaccaagtgattttaattcc

SEQ ID NO: 796156 - DNA, 25 bp, Homo sapien
tgaccaattacttcagagccctgac

SEQ ID NO: 796157 - DNA, 25 bp, Homo sapien
cagtgattttaattacttcagagca

SEQ ID NO: 796158 - DNA, 25 bp, Homo sapien
tgtgctgaactggaccagacgatgc

SEQ ID NO: 796159 - DNA, 25 bp, Homo sapien
taaggcagtcaacgaagagatggat

SEQ ID NO: 796160 - DNA, 25 bp, Homo sapien
tctcctaggcaggatagaacttgct

SEQ ID NO: 796161 - DNA, 25 bp, Homo sapien
ccaggagttaagtatttcagacagc

SEQ ID NO: 796162 - DNA, 25 bp, Homo sapien
tctccattatgactaaaccaggtgg

SEQ ID NO: 796163 - DNA, 25 bp, Homo sapien
gagaccagagcaaccaaacagaaat

SEQ ID NO: 796164 - DNA, 25 bp, Homo sapien
tcattcataggaagagcatcatgca

SEQ ID NO: 796165 - DNA, 25 bp, Homo sapien
gcatgtgtctgagcagttagactaa

SEQ ID NO: 796166 - DNA, 25 bp, Homo sapien
tctacgggttgtgctggtgctctgc

SEQ ID NO: 796167 - DNA, 25 bp, Homo sapien
ggaacactgagttatggcagccaat

SEQ ID NO: 796168 - DNA, 25 bp, Homo sapien
tactgggcacaatatgggagagaag

SEQ ID NO: 796169 - DNA, 25 bp, Homo sapien
tgaaactcctgagagtggagggcct

SEQ ID NO: 796170 - DNA, 25 bp, Homo sapien
tacaaatcttatcagaggcctcaca

SEQ ID NO: 796171 - DNA, 25 bp, Homo sapien
gaaatactcaacatgacagagctct

SEQ ID NO: 796172 - DNA, 25 bp, Homo sapien
gttaagtgcccaatagaagctgccc

SEQ ID NO: 796173 - DNA, 25 bp, Homo sapien
tcactgcgaggtcaagaaatactca

SEQ ID NO: 796174 - DNA, 25 bp, Homo sapien
agtttttccgcggtgtcttgctcta

SEQ ID NO: 796175 - DNA, 25 bp, Homo sapien
gagctccacagtcccattaggatca

SEQ ID NO: 796176 - DNA, 25 bp, Homo sapien
ggtgtcttgctctagccttgagctc

SEQ ID NO: 796177 - DNA, 25 bp, Homo sapien
tgcctcctggcgatttcatcatcac

SEQ ID NO: 796178 - DNA, 25 bp, Homo sapien
ctttttcccttgttctgagctccca

SEQ ID NO: 796179 - DNA, 25 bp, Homo sapien
tgagctcccatcaccatctttatcc

SEQ ID NO: 796180 - DNA, 25 bp, Homo sapien
tttctttttcccttgttctgagctc

SEQ ID NO: 796181 - DNA, 25 bp, Homo sapien
gagctcccatcaccatctttatccc

SEQ ID NO: 796182 - DNA, 25 bp, Homo sapien
aagactacctgccatttacattcat

SEQ ID NO: 796183 - DNA, 25 bp, Homo sapien
agcatctccactattacccaacttg

SEQ ID NO: 796184 - DNA, 25 bp, Homo sapien
agaagcatctccactattacccaac

SEQ ID NO: 796185 - DNA, 25 bp, Homo sapien
tctgccaaagactacctgccattta

SEQ ID NO: 796186 - DNA, 25 bp, Homo sapien
tcgaaaggaccagagtaggcaacag

SEQ ID NO: 796187 - DNA, 25 bp, Homo sapien
cacagcgagtcagggaacttcgaaa

SEQ ID NO: 796188 - DNA, 25 bp, Homo sapien
gccatcaggaatcagtagcagccgg

SEQ ID NO: 796189 - DNA, 25 bp, Homo sapien
gcagccgggatatcagcagctcatc

SEQ ID NO: 796190 - DNA, 25 bp, Homo sapien
aaatgcagaagaagtaattgttgag

SEQ ID NO: 796191 - DNA, 25 bp, Homo sapien
gaaaatactagtccaaaatgcagaa

SEQ ID NO: 796192 - DNA, 25 bp, Homo sapien
gttgagtagtggtataaatatggtg

SEQ ID NO: 796193 - DNA, 25 bp, Homo sapien
gaagtaattgttgagtagtggtata

SEQ ID NO: 796194 - DNA, 25 bp, Homo sapien
ttgacttctggtttgaatgggccat

SEQ ID NO: 796195 - DNA, 25 bp, Homo sapien
caggcatatgcctgatagatgtttg

SEQ ID NO: 796196 - DNA, 25 bp, Homo sapien
ggcatatgcctgatagatgtttgca

SEQ ID NO: 796197 - DNA, 25 bp, Homo sapien
ctgcacaggcatatgcctgatagat

SEQ ID NO: 796198 - DNA, 25 bp, Homo sapien
gcacaggcatatgcctgatagatgt

SEQ ID NO: 796199 - DNA, 25 bp, Homo sapien
ctttaagatgtaccccatatactcc

SEQ ID NO: 796200 - DNA, 25 bp, Homo sapien
ctgtgctgttgaaaacaataaccca

SEQ ID NO: 796201 - DNA, 25 bp, Homo sapien
cattcacttcccaacctttaagatg

SEQ ID NO: 796202 - DNA, 25 bp, Homo sapien
gctatgctataggatttatctctca

SEQ ID NO: 796203 - DNA, 25 bp, Homo sapien
gtatcctctgctattatcctgccta

SEQ ID NO: 796204 - DNA, 25 bp, Homo sapien
ctagatgtatcctctgctattatcc

SEQ ID NO: 796205 - DNA, 25 bp, Homo sapien
tgctattatcctgcctataccctca

SEQ ID NO: 796206 - DNA, 25 bp, Homo sapien
ctttctagatgtatcctctgctatt

SEQ ID NO: 796207 - DNA, 25 bp, Homo sapien
taaaagagatggtgctcagcattag

SEQ ID NO: 796208 - DNA, 25 bp, Homo sapien
ggtgctcagcattaggatgccagag

SEQ ID NO: 796209 - DNA, 25 bp, Homo sapien
gagatggtgctcagcattaggatgc

SEQ ID NO: 796210 - DNA, 25 bp, Homo sapien
tatagaagtaaaagagatggtgctc

SEQ ID NO: 796211 - DNA, 25 bp, Homo sapien
gaaattgttgtacttgcagggtgta

SEQ ID NO: 796212 - DNA, 25 bp, Homo sapien
aattgttgtacttgcagggtgtaga

SEQ ID NO: 796213 - DNA, 25 bp, Homo sapien
tgtacttgcagggtgtagacaaatc

SEQ ID NO: 796214 - DNA, 25 bp, Homo sapien
ttgttgtacttgcagggtgtagaca

SEQ ID NO: 796215 - DNA, 25 bp, Homo sapien
tattccctgcatactctttagcgta

SEQ ID NO: 796216 - DNA, 25 bp, Homo sapien
caactgcagggctccggtgcttcca

SEQ ID NO: 796217 - DNA, 25 bp, Homo sapien
actgttaggagagaatattccctgc

SEQ ID NO: 796218 - DNA, 25 bp, Homo sapien
agagtctgtagagactgttaggaga

SEQ ID NO: 796219 - DNA, 25 bp, Homo sapien
tttacaataccctcagggggcaatc

SEQ ID NO: 796220 - DNA, 25 bp, Homo sapien
ctgcagcgaccagtctaatttgaag

SEQ ID NO: 796221 - DNA, 25 bp, Homo sapien
ctcagggggcaatccttgaaggtgt

SEQ ID NO: 796222 - DNA, 25 bp, Homo sapien
tttgaagtttgcaaatccttttaca

SEQ ID NO: 796223 - DNA, 25 bp, Homo sapien
tgtcttacacttatgtttacttagg

SEQ ID NO: 796224 - DNA, 25 bp, Homo sapien
tctttgtgtctgtagggtccaggtg

SEQ ID NO: 796225 - DNA, 25 bp, Homo sapien
ttttataaacaaggctggcaatggc

SEQ ID NO: 796226 - DNA, 25 bp, Homo sapien
tctgtagggtccaggtgtcttacac

SEQ ID NO: 796227 - DNA, 25 bp, Homo sapien
ctgatgtgttaacttcagatatttc

SEQ ID NO: 796228 - DNA, 25 bp, Homo sapien
tgatgtgttaacttcagatatttct

SEQ ID NO: 796229 - DNA, 25 bp, Homo sapien
tgtctgatgtgttaacttcagatat

SEQ ID NO: 796230 - DNA, 25 bp, Homo sapien
gtctgatgtgttaacttcagatatt

SEQ ID NO: 796231 - DNA, 25 bp, Homo sapien
agtagctactggtccttcttctaga

SEQ ID NO: 796232 - DNA, 25 bp, Homo sapien
tttcctcaaaggaactcaggactat

SEQ ID NO: 796233 - DNA, 25 bp, Homo sapien
aggaactcaggactatagtagctac

SEQ ID NO: 796234 - DNA, 25 bp, Homo sapien
ttcttctagaccaatggggctaagt

SEQ ID NO: 796235 - DNA, 25 bp, Homo sapien
tcacagtgctaggtccgttctcatg

SEQ ID NO: 796236 - DNA, 25 bp, Homo sapien
taacagagtcctggctaagggctca

SEQ ID NO: 796237 - DNA, 25 bp, Homo sapien
tctcatgggatcgaataacagagtc

SEQ ID NO: 796238 - DNA, 25 bp, Homo sapien
tgccctgctcaaatcctcagacaat

SEQ ID NO: 796239 - DNA, 25 bp, Homo sapien
tcttcttcttcgacatcttgcagca

SEQ ID NO: 796240 - DNA, 25 bp, Homo sapien
tctcttcttcttcgacatcttgcag

SEQ ID NO: 796241 - DNA, 25 bp, Homo sapien
cttcttcttcgacatcttgcagcaa

SEQ ID NO: 796242 - DNA, 25 bp, Homo sapien
ggtctcttcttcttcgacatcttgc

SEQ ID NO: 796243 - DNA, 25 bp, Homo sapien
tgcagcgactactatcatttttttt

SEQ ID NO: 796244 - DNA, 25 bp, Homo sapien
cttgcagcgactactatcatttttt

SEQ ID NO: 796245 - DNA, 25 bp, Homo sapien
ttgcagcgactactatcattttttt

SEQ ID NO: 796246 - DNA, 25 bp, Homo sapien
gcagcgactactatcattttttttc

SEQ ID NO: 796247 - DNA, 25 bp, Homo sapien
tgccaaagcagttaatgtgatctgg

SEQ ID NO: 796248 - DNA, 25 bp, Homo sapien
tggtaaagaacacccactgcaaacc

SEQ ID NO: 796249 - DNA, 25 bp, Homo sapien
caaaacagcattgagtcggagagag

SEQ ID NO: 796250 - DNA, 25 bp, Homo sapien
tttgacaaccttggttcctgaatca

SEQ ID NO: 796251 - DNA, 25 bp, Homo sapien
tccttgactatacttgtctatgagg

SEQ ID NO: 796252 - DNA, 25 bp, Homo sapien
tgaggttgtaccacctaagatgata

SEQ ID NO: 796253 - DNA, 25 bp, Homo sapien
tcttgctgaatagagcgtaatttgg

SEQ ID NO: 796254 - DNA, 25 bp, Homo sapien
atgtccctgctctctattcctcttg

SEQ ID NO: 796255 - DNA, 25 bp, Homo sapien
ggcagaacaaccactctaagctgaa

SEQ ID NO: 796256 - DNA, 25 bp, Homo sapien
aatggccttaacatggagagtggca

SEQ ID NO: 796257 - DNA, 25 bp, Homo sapien
ggcagaatggcagaacaaccactct

SEQ ID NO: 796258 - DNA, 25 bp, Homo sapien
taatcatagaatctaccctccctgg

SEQ ID NO: 796259 - DNA, 25 bp, Homo sapien
taattcagggttcattgtgtccaga

SEQ ID NO: 796260 - DNA, 25 bp, Homo sapien
gggtacagactccagaagcataacc

SEQ ID NO: 796261 - DNA, 25 bp, Homo sapien
gagagaaattctcctccaacgcata

SEQ ID NO: 796262 - DNA, 25 bp, Homo sapien
gcataacccctggtatgtggtcagg

SEQ ID NO: 796263 - DNA, 25 bp, Homo sapien
ggctctttggactcttgaatctggc

SEQ ID NO: 796264 - DNA, 25 bp, Homo sapien
taggtatacattatcagtttgatcc

SEQ ID NO: 796265 - DNA, 25 bp, Homo sapien
tgtttccgcaggatgatgcctcccc

SEQ ID NO: 796266 - DNA, 25 bp, Homo sapien
tctggcatttgtctgtttccgcagg

SEQ ID NO: 796267 - DNA, 25 bp, Homo sapien
gtgcttgcacacagaaagcagaacc

SEQ ID NO: 796268 - DNA, 25 bp, Homo sapien
gcttgcacacagaaagcagaaccaa

SEQ ID NO: 796269 - DNA, 25 bp, Homo sapien
tgcttgcacacagaaagcagaacca

SEQ ID NO: 796270 - DNA, 25 bp, Homo sapien
ttgcacacagaaagcagaaccaatt

SEQ ID NO: 796271 - DNA, 25 bp, Homo sapien
cagttctttgaatgtttgccctttc

SEQ ID NO: 796272 - DNA, 25 bp, Homo sapien
aggatttcctggaagtatcagaggg

SEQ ID NO: 796273 - DNA, 25 bp, Homo sapien
cataccaatcctcagacctagaggg

SEQ ID NO: 796274 - DNA, 25 bp, Homo sapien
gaagcaggcattaagatcttccagt

SEQ ID NO: 796275 - DNA, 25 bp, Homo sapien
ggctgaggcacacaccctagttgtt

SEQ ID NO: 796276 - DNA, 25 bp, Homo sapien
tggggctgaggcacacaccctagtt

SEQ ID NO: 796277 - DNA, 25 bp, Homo sapien
gaggcacacaccctagttgttccca

SEQ ID NO: 796278 - DNA, 25 bp, Homo sapien
ggcacacaccctagttgttcccaat

SEQ ID NO: 796279 - DNA, 25 bp, Homo sapien
catttggtaaatgccccacatggcc

SEQ ID NO: 796280 - DNA, 25 bp, Homo sapien
gcggccgtctgtggtctcttcgaca

SEQ ID NO: 796281 - DNA, 25 bp, Homo sapien
tgctgtgtctctcgacgaggtggaa

SEQ ID NO: 796282 - DNA, 25 bp, Homo sapien
taaaagaatcattagtgtggtccag

SEQ ID NO: 796283 - DNA, 25 bp, Homo sapien
tagccagaaggaatcctattccaca

SEQ ID NO: 796284 - DNA, 25 bp, Homo sapien
gcttatagccagaaggaatcctatt

SEQ ID NO: 796285 - DNA, 25 bp, Homo sapien
ctgcttatagccagaaggaatccta

SEQ ID NO: 796286 - DNA, 25 bp, Homo sapien
cacacatcactttttcaagtaaatt

SEQ ID NO: 796287 - DNA, 25 bp, Homo sapien
ctgtctaagtaggagatgaatttcc

SEQ ID NO: 796288 - DNA, 25 bp, Homo sapien
taggagatgaatttccttccagaaa

SEQ ID NO: 796289 - DNA, 25 bp, Homo sapien
ctaagtaggagatgaatttccttcc

SEQ ID NO: 796290 - DNA, 25 bp, Homo sapien
ttaagtttactgtctaagtaggaga

SEQ ID NO: 796291 - DNA, 25 bp, Homo sapien
tatggaagatactggcaaaaatcac

SEQ ID NO: 796292 - DNA, 25 bp, Homo sapien
atatggaagatactggcaaaaatca

SEQ ID NO: 796293 - DNA, 25 bp, Homo sapien
cagtgttgaccacttttatggagcc

SEQ ID NO: 796294 - DNA, 25 bp, Homo sapien
cttagcttataaagacgaagatttg

SEQ ID NO: 796295 - DNA, 25 bp, Homo sapien
cgatctcctccagtgttgaccactt

SEQ ID NO: 796296 - DNA, 25 bp, Homo sapien
gtttttgcatgtatatgatcactct

SEQ ID NO: 796297 - DNA, 25 bp, Homo sapien
tcaggccctgtgatgacttttcaca

SEQ ID NO: 796298 - DNA, 25 bp, Homo sapien
tctcacagggggagattccatttgt

SEQ ID NO: 796299 - DNA, 25 bp, Homo sapien
gattccatttgtctgagcctgcaga

SEQ ID NO: 796300 - DNA, 25 bp, Homo sapien
ggaaatattcccttcaggccctgtg

SEQ ID NO: 796301 - DNA, 25 bp, Homo sapien
catgactgattagccacagtggttc

SEQ ID NO: 796302 - DNA, 25 bp, Homo sapien
tgacagtacccttttcacttgagga

SEQ ID NO: 796303 - DNA, 25 bp, Homo sapien
gctttttggccatgaaaacacgttg

SEQ ID NO: 796304 - DNA, 25 bp, Homo sapien
tcaattccaattctggtagggctgc

SEQ ID NO: 796305 - DNA, 25 bp, Homo sapien
tttcccaaagattctttgcatgcta

SEQ ID NO: 796306 - DNA, 25 bp, Homo sapien
tgcgcagtaggattctgaactcctt

SEQ ID NO: 796307 - DNA, 25 bp, Homo sapien
cttttccttcttgcgcagtaggatt

SEQ ID NO: 796308 - DNA, 25 bp, Homo sapien
aactcctttagatgatcaagcggca

SEQ ID NO: 796309 - DNA, 25 bp, Homo sapien
tcaagcggcaattgcagagcagagg

SEQ ID NO: 796310 - DNA, 25 bp, Homo sapien
aagtgaatacaaacacagctcggac

SEQ ID NO: 796311 - DNA, 25 bp, Homo sapien
aaagtgaagtgttccttccgtgctc

SEQ ID NO: 796312 - DNA, 25 bp, Homo sapien
tcttctcggccatttgttgtctctt

SEQ ID NO: 796313 - DNA, 25 bp, Homo sapien
ctccagttcttctcggccatttgtt

SEQ ID NO: 796314 - DNA, 25 bp, Homo sapien
cttgtgtttaacacttccatgactt

SEQ ID NO: 796315 - DNA, 25 bp, Homo sapien
ttcttattgctgacttgctgctccc

SEQ ID NO: 796316 - DNA, 25 bp, Homo sapien
gctcccctcttgtgtttaacacttc

SEQ ID NO: 796317 - DNA, 25 bp, Homo sapien
tcaggccttcttattgctgacttgc

SEQ ID NO: 796318 - DNA, 25 bp, Homo sapien
ttaaaggttgaacgctaattgttca

SEQ ID NO: 796319 - DNA, 25 bp, Homo sapien
cagtcactgtgaaggttaccgaaga

SEQ ID NO: 796320 - DNA, 25 bp, Homo sapien
gttcaatttgctctagtacatctag

SEQ ID NO: 796321 - DNA, 25 bp, Homo sapien
tgctttcttgcacccacaatggtac

SEQ ID NO: 796322 - DNA, 25 bp, Homo sapien
ttcacacttgcattgcagtggggca

SEQ ID NO: 796323 - DNA, 25 bp, Homo sapien
tcacacttgcattgcagtggggcat

SEQ ID NO: 796324 - DNA, 25 bp, Homo sapien
aggaagccactgatgacctaccaca

SEQ ID NO: 796325 - DNA, 25 bp, Homo sapien
ggaagccactgatgacctaccacat

SEQ ID NO: 796326 - DNA, 25 bp, Homo sapien
ggggttgagccacgctggcttctct

SEQ ID NO: 796327 - DNA, 25 bp, Homo sapien
gaggggttgagccacgctggcttct

SEQ ID NO: 796328 - DNA, 25 bp, Homo sapien
accctcacagagaggggttgagcca

SEQ ID NO: 796329 - DNA, 25 bp, Homo sapien
tcacagagaggggttgagccacgct

SEQ ID NO: 796330 - DNA, 25 bp, Homo sapien
aaagttgatatccagcagcaagcaa

SEQ ID NO: 796331 - DNA, 25 bp, Homo sapien
taaaatcccttgcaaagttgatatc

SEQ ID NO: 796332 - DNA, 25 bp, Homo sapien
catagcctctctccgcttagtaaaa

SEQ ID NO: 796333 - DNA, 25 bp, Homo sapien
caaaggaagcagcttgggctcgtta

SEQ ID NO: 796334 - DNA, 25 bp, Homo sapien
cctacacttgttgcggcagctgcat

SEQ ID NO: 796335 - DNA, 25 bp, Homo sapien
cagctgcattccttcgtgcaggacc

SEQ ID NO: 796336 - DNA, 25 bp, Homo sapien
tgatggccattctggcttattgtct

SEQ ID NO: 796337 - DNA, 25 bp, Homo sapien
caggactctacagtcctacacttgt

SEQ ID NO: 796338 - DNA, 25 bp, Homo sapien
gctgatgtggcagggtttgaagcag

SEQ ID NO: 796339 - DNA, 25 bp, Homo sapien
tgtggcagggtttgaagcaggcagc

SEQ ID NO: 796340 - DNA, 25 bp, Homo sapien
gatgtggcagggtttgaagcaggca

SEQ ID NO: 796341 - DNA, 25 bp, Homo sapien
ggcagggtttgaagcaggcagccgt

SEQ ID NO: 796342 - DNA, 25 bp, Homo sapien
aagcattcctggaaactgatgcaaa

SEQ ID NO: 796343 - DNA, 25 bp, Homo sapien
cattcctggaaactgatgcaaatac

SEQ ID NO: 796344 - DNA, 25 bp, Homo sapien
tgaaaagcattcctggaaactgatg

SEQ ID NO: 796345 - DNA, 25 bp, Homo sapien
aaaagcattcctggaaactgatgca

SEQ ID NO: 796346 - DNA, 25 bp, Homo sapien
agtaactgggagtgaaagaatttga

SEQ ID NO: 796347 - DNA, 25 bp, Homo sapien
gtaactgggagtgaaagaatttgaa

SEQ ID NO: 796348 - DNA, 25 bp, Homo sapien
tttggatgattttttgaagtaactg

SEQ ID NO: 796349 - DNA, 25 bp, Homo sapien
cagaggcccttctgattcgagcttg

SEQ ID NO: 796350 - DNA, 25 bp, Homo sapien
gcagtgcgcccaccaacgtggatgt

SEQ ID NO: 796351 - DNA, 25 bp, Homo sapien
gggtcttcgtagtcttcgctggtaa

SEQ ID NO: 796352 - DNA, 25 bp, Homo sapien
acgtggatgttaactctctccccag

SEQ ID NO: 796353 - DNA, 25 bp, Homo sapien
gggatggtctggcactccgacacga

SEQ ID NO: 796354 - DNA, 25 bp, Homo sapien
tggggaagtccttcgacctcctagc

SEQ ID NO: 796355 - DNA, 25 bp, Homo sapien
atggtctggcactccgacacgactc

SEQ ID NO: 796356 - DNA, 25 bp, Homo sapien
cgacctcctagcttgcctttgctga

SEQ ID NO: 796357 - DNA, 25 bp, Homo sapien
gtttggaaacactatgggacacgtc

SEQ ID NO: 796358 - DNA, 25 bp, Homo sapien
tgcagccccgacatgggcagaattt

SEQ ID NO: 796359 - DNA, 25 bp, Homo sapien
tctccggcgatcaaagcaggagctg

SEQ ID NO: 796360 - DNA, 25 bp, Homo sapien
ccctgtaggccacttgtagggtgga

SEQ ID NO: 796361 - DNA, 25 bp, Homo sapien
gacgtggacacttttgaggctttca

SEQ ID NO: 796362 - DNA, 25 bp, Homo sapien
cctgctgccgtggtgctaaaataat

SEQ ID NO: 796363 - DNA, 25 bp, Homo sapien
gaaactctgactcgttgtctgcata

SEQ ID NO: 796364 - DNA, 25 bp, Homo sapien
taaaataataaagcccggatctgcc

SEQ ID NO: 796365 - DNA, 25 bp, Homo sapien
tctagcacttagacatgcagactcc

SEQ ID NO: 796366 - DNA, 25 bp, Homo sapien
cctgggtcaccggcggaggtatcac

SEQ ID NO: 796367 - DNA, 25 bp, Homo sapien
gacatgcagactccttgtgtcgcag

SEQ ID NO: 796368 - DNA, 25 bp, Homo sapien
tccttgtgtcgcagagcccctgggt

SEQ ID NO: 796369 - DNA, 25 bp, Homo sapien
aagtccgcgtatccacaaagctgag

SEQ ID NO: 796370 - DNA, 25 bp, Homo sapien
caagcagcaacaaagtccgcgtatc

SEQ ID NO: 796371 - DNA, 25 bp, Homo sapien
ggcataaggttactgcaagcagcaa

SEQ ID NO: 796372 - DNA, 25 bp, Homo sapien
attggcatgttgctaggcataaggt

SEQ ID NO: 796373 - DNA, 25 bp, Homo sapien
tctctacccagtctcccccaaacaa

SEQ ID NO: 796374 - DNA, 25 bp, Homo sapien
agtctcccccaaacaagctgaaggc

SEQ ID NO: 796375 - DNA, 25 bp, Homo sapien
tctcccccaaacaagctgaaggcac

SEQ ID NO: 796376 - DNA, 25 bp, Homo sapien
ccagtctcccccaaacaagctgaag

SEQ ID NO: 796377 - DNA, 25 bp, Homo sapien
gaccgagttaactgtctcactctga

SEQ ID NO: 796378 - DNA, 25 bp, Homo sapien
aagctgaggagccagaccgagttaa

SEQ ID NO: 796379 - DNA, 25 bp, Homo sapien
gagccagaccgagttaactgtctca

SEQ ID NO: 796380 - DNA, 25 bp, Homo sapien
cgagttaactgtctcactctgaact

SEQ ID NO: 796381 - DNA, 25 bp, Homo sapien
ttacaaggtggacatcagtgcggtt

SEQ ID NO: 796382 - DNA, 25 bp, Homo sapien
ggtcgttaatatctcatccttaggg

SEQ ID NO: 796383 - DNA, 25 bp, Homo sapien
tcctccaccacattggtcgttaata

SEQ ID NO: 796384 - DNA, 25 bp, Homo sapien
ctgtggggtgcaggcccttgacttc

SEQ ID NO: 796385 - DNA, 25 bp, Homo sapien
tctggccatggaacctagagctgga

SEQ ID NO: 796386 - DNA, 25 bp, Homo sapien
tagaaaaggccgtttgacttgccca

SEQ ID NO: 796387 - DNA, 25 bp, Homo sapien
gaagggctttctaacgcaggcctca

SEQ ID NO: 796388 - DNA, 25 bp, Homo sapien
tctctgttgacatgaaagtctggcc

SEQ ID NO: 796389 - DNA, 25 bp, Homo sapien
tttgttcactgcaattactccttag

SEQ ID NO: 796390 - DNA, 25 bp, Homo sapien
gcctgacttgattaacggaagtcct

SEQ ID NO: 796391 - DNA, 25 bp, Homo sapien
tactccttagtatccacagtatgta

SEQ ID NO: 796392 - DNA, 25 bp, Homo sapien
ccttttaattactcagacatggacc

SEQ ID NO: 796393 - DNA, 25 bp, Homo sapien
tacaggatacaagtgtggccaagct

SEQ ID NO: 796394 - DNA, 25 bp, Homo sapien
taggatgaatcaccccaaaaattgc

SEQ ID NO: 796395 - DNA, 25 bp, Homo sapien
tcacaatttaggagggtggaccaca

SEQ ID NO: 796396 - DNA, 25 bp, Homo sapien
taggtggccaagaagtgcgttattt

SEQ ID NO: 796397 - DNA, 25 bp, Homo sapien
caaaggagtgaaaagattctctagc

SEQ ID NO: 796398 - DNA, 25 bp, Homo sapien
cagcttccattttggtgtagtatac

SEQ ID NO: 796399 - DNA, 25 bp, Homo sapien
tctctagctcagtgaaatcttctgc

SEQ ID NO: 796400 - DNA, 25 bp, Homo sapien
tacgtacctgtacttatgcctcaaa

SEQ ID NO: 796401 - DNA, 25 bp, Homo sapien
acgtggtcctctatctccggctggg

SEQ ID NO: 796402 - DNA, 25 bp, Homo sapien
gtggtcctctatctccggctgggcc

SEQ ID NO: 796403 - DNA, 25 bp, Homo sapien
tccacgtggtcctctatctccggct

SEQ ID NO: 796404 - DNA, 25 bp, Homo sapien
cacgtggtcctctatctccggctgg

SEQ ID NO: 796405 - DNA, 25 bp, Homo sapien
accaggagggcctgtgggaccatct

SEQ ID NO: 796406 - DNA, 25 bp, Homo sapien
gaccaggagggcctgtgggaccatc

SEQ ID NO: 796407 - DNA, 25 bp, Homo sapien
aaagagggcaatgtttttgatataa

SEQ ID NO: 796408 - DNA, 25 bp, Homo sapien
cctaaaaagttatgagagctgtacg

SEQ ID NO: 796409 - DNA, 25 bp, Homo sapien
tactagtcatgtagttcattttctc

SEQ ID NO: 796410 - DNA, 25 bp, Homo sapien
cttggccgacacctctttgaaatgg

SEQ ID NO: 796411 - DNA, 25 bp, Homo sapien
attggtccagggccaagtccaactc

SEQ ID NO: 796412 - DNA, 25 bp, Homo sapien
cattggtccagggccaagtccaact

SEQ ID NO: 796413 - DNA, 25 bp, Homo sapien
ggctaagataaacagataagcatac

SEQ ID NO: 796414 - DNA, 25 bp, Homo sapien
ttggctaagataaacagataagcat

SEQ ID NO: 796415 - DNA, 25 bp, Homo sapien
tggctaagataaacagataagcata

SEQ ID NO: 796416 - DNA, 25 bp, Homo sapien
tttggctaagataaacagataagca

SEQ ID NO: 796417 - DNA, 25 bp, Homo sapien
agaaaagtgaactccttaacttatg

SEQ ID NO: 796418 - DNA, 25 bp, Homo sapien
tattgagtgttaacttaggtagcta

SEQ ID NO: 796419 - DNA, 25 bp, Homo sapien
tagctaaataaatggcgtggtaaaa

SEQ ID NO: 796420 - DNA, 25 bp, Homo sapien
ataatctaagtattgagtgttaact

SEQ ID NO: 796421 - DNA, 25 bp, Homo sapien
tgagaaaagggcttaaactctccca

SEQ ID NO: 796422 - DNA, 25 bp, Homo sapien
tgatcctttccaacaagttcagaga

SEQ ID NO: 796423 - DNA, 25 bp, Homo sapien
tagctggactagatagaacttgttg

SEQ ID NO: 796424 - DNA, 25 bp, Homo sapien
gttctatgcctctaagtgttgctta

SEQ ID NO: 796425 - DNA, 25 bp, Homo sapien
tatagggaatgtttctaagcggtgc

SEQ ID NO: 796426 - DNA, 25 bp, Homo sapien
aaagaccttgttgactttgggcaga

SEQ ID NO: 796427 - DNA, 25 bp, Homo sapien
taagcggtgctccactgatagggta

SEQ ID NO: 796428 - DNA, 25 bp, Homo sapien
tgtgtaagctcatccgtagggtctg

SEQ ID NO: 796429 - DNA, 25 bp, Homo sapien
caggtgggcctctaggtcccattaa

SEQ ID NO: 796430 - DNA, 25 bp, Homo sapien
ggtgggcctctaggtcccattaagc

SEQ ID NO: 796431 - DNA, 25 bp, Homo sapien
accaggtgggcctctaggtcccatt

SEQ ID NO: 796432 - DNA, 25 bp, Homo sapien
gtgggcctctaggtcccattaagcc

SEQ ID NO: 796433 - DNA, 25 bp, Homo sapien
gcaggtccttggaaaccttgagggc

SEQ ID NO: 796434 - DNA, 25 bp, Homo sapien
agcaggtccttggaaaccttgaggg

SEQ ID NO: 796435 - DNA, 25 bp, Homo sapien
cagcaggtccttggaaaccttgagg

SEQ ID NO: 796436 - DNA, 25 bp, Homo sapien
gtttgaccaggttcaccaggctcac

SEQ ID NO: 796437 - DNA, 25 bp, Homo sapien
atcttcaccagccttgccaggaggg

SEQ ID NO: 796438 - DNA, 25 bp, Homo sapien
gagggccagctggaccacgagcacc

SEQ ID NO: 796439 - DNA, 25 bp, Homo sapien
cagctggaccacgagcacctgcagg

SEQ ID NO: 796440 - DNA, 25 bp, Homo sapien
gctggaccacgagcacctgcaggac

SEQ ID NO: 796441 - DNA, 25 bp, Homo sapien
tgtggtccaacaactcctctctcac

SEQ ID NO: 796442 - DNA, 25 bp, Homo sapien
ctgtggtccaacaactcctctctca

SEQ ID NO: 796443 - DNA, 25 bp, Homo sapien
taatgcctttgaagccaggaagtcc

SEQ ID NO: 796444 - DNA, 25 bp, Homo sapien
ccaggagttccagggaaaccacgag

SEQ ID NO: 796445 - DNA, 25 bp, Homo sapien
cctaatgcctttgaagccaggaagt

SEQ ID NO: 796446 - DNA, 25 bp, Homo sapien
ggagttccagggaaaccacgagcac

SEQ ID NO: 796447 - DNA, 25 bp, Homo sapien
tccatgatagtgtttggtcaaataa

SEQ ID NO: 796448 - DNA, 25 bp, Homo sapien
tataaaatgctgttccatgatagtg

SEQ ID NO: 796449 - DNA, 25 bp, Homo sapien
caggtcccagcaaactcagtctatt

SEQ ID NO: 796450 - DNA, 25 bp, Homo sapien
gggtaagtcttgtctgctgcagtag

SEQ ID NO: 796451 - DNA, 25 bp, Homo sapien
gggctgtcccttcaatccatccaga

SEQ ID NO: 796452 - DNA, 25 bp, Homo sapien
ggagcaccgggctgtcccttcaatc

SEQ ID NO: 796453 - DNA, 25 bp, Homo sapien
accgggctgtcccttcaatccatcc

SEQ ID NO: 796454 - DNA, 25 bp, Homo sapien
gcaccgggctgtcccttcaatccat

SEQ ID NO: 796455 - DNA, 25 bp, Homo sapien
tgggtagtcttcagtataatatact

SEQ ID NO: 796456 - DNA, 25 bp, Homo sapien
tatgggtagtcttcagtataatata

SEQ ID NO: 796457 - DNA, 25 bp, Homo sapien
tttggaggtcatggggaatttcaat

SEQ ID NO: 796458 - DNA, 25 bp, Homo sapien
gaatttcaatcaagtgcttaaaaac

SEQ ID NO: 796459 - DNA, 25 bp, Homo sapien
actggaattatagagggaggaaagg

SEQ ID NO: 796460 - DNA, 25 bp, Homo sapien
atacactggaattatagagggagga

SEQ ID NO: 796461 - DNA, 25 bp, Homo sapien
cactggaattatagagggaggaaag

SEQ ID NO: 796462 - DNA, 25 bp, Homo sapien
tacactggaattatagagggaggaa

SEQ ID NO: 796463 - DNA, 25 bp, Homo sapien
tttcaccaggggcaccaggttcacc

SEQ ID NO: 796464 - DNA, 25 bp, Homo sapien
gagttccattttcaccaggggcacc

SEQ ID NO: 796465 - DNA, 25 bp, Homo sapien
cattttcaccaggggcaccaggttc

SEQ ID NO: 796466 - DNA, 25 bp, Homo sapien
tgtttgacctggagttccattttca

SEQ ID NO: 796467 - DNA, 25 bp, Homo sapien
caccaacacgtcctctctcaccagg

SEQ ID NO: 796468 - DNA, 25 bp, Homo sapien
cacttccatcactgccacgggcacc

SEQ ID NO: 796469 - DNA, 25 bp, Homo sapien
tggagggccagcagacccaatggga

SEQ ID NO: 796470 - DNA, 25 bp, Homo sapien
cctggagggccagcagacccaatgg

SEQ ID NO: 796471 - DNA, 25 bp, Homo sapien
gcctggagggccagcagacccaatg

SEQ ID NO: 796472 - DNA, 25 bp, Homo sapien
gagggccagcagacccaatgggacc

SEQ ID NO: 796473 - DNA, 25 bp, Homo sapien
gcaggaccagcgttaccaacagctc

SEQ ID NO: 796474 - DNA, 25 bp, Homo sapien
tggaagacccacttcaccacgggga

SEQ ID NO: 796475 - DNA, 25 bp, Homo sapien
gcctggaagacccacttcaccacgg

SEQ ID NO: 796476 - DNA, 25 bp, Homo sapien
ccagcgttaccaacagctccaattt

SEQ ID NO: 796477 - DNA, 25 bp, Homo sapien
tggcaccagtaaggccgtttgctcc

SEQ ID NO: 796478 - DNA, 25 bp, Homo sapien
cacccttggcaccagtaaggccgtt

SEQ ID NO: 796479 - DNA, 25 bp, Homo sapien
accagtaaggccgtttgctccagga

SEQ ID NO: 796480 - DNA, 25 bp, Homo sapien
gtaaggccgtttgctccaggattac

SEQ ID NO: 796481 - DNA, 25 bp, Homo sapien
tctggcaccagtagcaccggcagca

SEQ ID NO: 796482 - DNA, 25 bp, Homo sapien
tcctctggcaccagtagcaccggca

SEQ ID NO: 796483 - DNA, 25 bp, Homo sapien
caggaataccgcggggtccagggag

SEQ ID NO: 796484 - DNA, 25 bp, Homo sapien
gtcctctggcaccagtagcaccggc

SEQ ID NO: 796485 - DNA, 25 bp, Homo sapien
ttgttaccgctctctcctttggagc

SEQ ID NO: 796486 - DNA, 25 bp, Homo sapien
gggctcacccttgttaccgctctct

SEQ ID NO: 796487 - DNA, 25 bp, Homo sapien
ccttgttaccgctctctcctttgga

SEQ ID NO: 796488 - DNA, 25 bp, Homo sapien
gttaccgctctctcctttggagcca

SEQ ID NO: 796489 - DNA, 25 bp, Homo sapien
ccggcagatccagcttccccattag

SEQ ID NO: 796490 - DNA, 25 bp, Homo sapien
gcagatccagcttccccattagggc

SEQ ID NO: 796491 - DNA, 25 bp, Homo sapien
cggcagatccagcttccccattagg

SEQ ID NO: 796492 - DNA, 25 bp, Homo sapien
ggcagatccagcttccccattaggg

SEQ ID NO: 796493 - DNA, 25 bp, Homo sapien
ggaagaccacgagaaccaggactac

SEQ ID NO: 796494 - DNA, 25 bp, Homo sapien
caggaagaccacgagaaccaggact

SEQ ID NO: 796495 - DNA, 25 bp, Homo sapien
gaagaccacgagaaccaggactacc

SEQ ID NO: 796496 - DNA, 25 bp, Homo sapien
aggaagaccacgagaaccaggacta

SEQ ID NO: 796497 - DNA, 25 bp, Homo sapien
tccattaggtcctcggactccagca

SEQ ID NO: 796498 - DNA, 25 bp, Homo sapien
ccagggcgaccagcatctccattag

SEQ ID NO: 796499 - DNA, 25 bp, Homo sapien
ttgcaccacgactaccaggagggcc

SEQ ID NO: 796500 - DNA, 25 bp, Homo sapien
tgggtcccatgagaccaggctcccc

SEQ ID NO: 796501 - DNA, 25 bp, Homo sapien
ccatagctagtgtgatgctgaatac

SEQ ID NO: 796502 - DNA, 25 bp, Homo sapien
tgtgattgctaggaaaaagacttca

SEQ ID NO: 796503 - DNA, 25 bp, Homo sapien
ggacctagaggttatttctccatag

SEQ ID NO: 796504 - DNA, 25 bp, Homo sapien
gattcatgctgataggaggaccaat

SEQ ID NO: 796505 - DNA, 25 bp, Homo sapien
ttttccagcggggccgatatttcca

SEQ ID NO: 796506 - DNA, 25 bp, Homo sapien
cagcggggccgatatttccagggga

SEQ ID NO: 796507 - DNA, 25 bp, Homo sapien
tccagcggggccgatatttccaggg

SEQ ID NO: 796508 - DNA, 25 bp, Homo sapien
tcttttccagcggggccgatatttc

SEQ ID NO: 796509 - DNA, 25 bp, Homo sapien
gctccagctgggccaattgggccag

SEQ ID NO: 796510 - DNA, 25 bp, Homo sapien
cagggaatccaatgttgccaggctc

SEQ ID NO: 796511 - DNA, 25 bp, Homo sapien
ccaggcctgccgtcgatgccaggga

SEQ ID NO: 796512 - DNA, 25 bp, Homo sapien
gaatccaatgttgccaggctctcct

SEQ ID NO: 796513 - DNA, 25 bp, Homo sapien
tttatcaccgtttttgccaggatca

SEQ ID NO: 796514 - DNA, 25 bp, Homo sapien
tatcaccgtttttgccaggatcacc

SEQ ID NO: 796515 - DNA, 25 bp, Homo sapien
gcatgacctttatcaccgtttttgc

SEQ ID NO: 796516 - DNA, 25 bp, Homo sapien
tgacctttatcaccgtttttgccag

SEQ ID NO: 796517 - DNA, 25 bp, Homo sapien
ggtccctgagcaccattgtttccat

SEQ ID NO: 796518 - DNA, 25 bp, Homo sapien
accattgtttccatcaggacctgga

SEQ ID NO: 796519 - DNA, 25 bp, Homo sapien
tgagcaccattgtttccatcaggac

SEQ ID NO: 796520 - DNA, 25 bp, Homo sapien
ccaggaggtccctgagcaccattgt

SEQ ID NO: 796521 - DNA, 25 bp, Homo sapien
ctgttcaccttttccaccttgaaca

SEQ ID NO: 796522 - DNA, 25 bp, Homo sapien
ctggaagcctggaggaccaggggga

SEQ ID NO: 796523 - DNA, 25 bp, Homo sapien
tggaggaccagggggaccctgttca

SEQ ID NO: 796524 - DNA, 25 bp, Homo sapien
tgttcaccttttccaccttgaacac

SEQ ID NO: 796525 - DNA, 25 bp, Homo sapien
ccaacttcaccagcgggacctgagg

SEQ ID NO: 796526 - DNA, 25 bp, Homo sapien
ggtttgccaacttcaccagcgggac

SEQ ID NO: 796527 - DNA, 25 bp, Homo sapien
cctggtttgccaacttcaccagcgg

SEQ ID NO: 796528 - DNA, 25 bp, Homo sapien
tttgccaacttcaccagcgggacct

SEQ ID NO: 796529 - DNA, 25 bp, Homo sapien
ggagaccaaactcaccatggagacc

SEQ ID NO: 796530 - DNA, 25 bp, Homo sapien
gggagaccaaactcaccatggagac

SEQ ID NO: 796531 - DNA, 25 bp, Homo sapien
gggtccagaaggacctcggcttcca

SEQ ID NO: 796532 - DNA, 25 bp, Homo sapien
ggaccagtaggaccggcagcaccac

SEQ ID NO: 796533 - DNA, 25 bp, Homo sapien
agtaggaccggcagcaccactctca

SEQ ID NO: 796534 - DNA, 25 bp, Homo sapien
aggacctcggcttccaataggacca

SEQ ID NO: 796535 - DNA, 25 bp, Homo sapien
tttagaataattcaggtccactgga

SEQ ID NO: 796536 - DNA, 25 bp, Homo sapien
gaatcggattgctgtttactgagag

SEQ ID NO: 796537 - DNA, 25 bp, Homo sapien
tgagagggaagtcatcacagaactg

SEQ ID NO: 796538 - DNA, 25 bp, Homo sapien
taaagggtctacttattccaggcag

SEQ ID NO: 796539 - DNA, 25 bp, Homo sapien
gatccctttgaaagtactacctcac

SEQ ID NO: 796540 - DNA, 25 bp, Homo sapien
taaaacctgttgactagcttctgag

SEQ ID NO: 796541 - DNA, 25 bp, Homo sapien
gaaagagaccttgtcaattgaggag

SEQ ID NO: 796542 - DNA, 25 bp, Homo sapien
gcttctgagatacatagatcccttt

SEQ ID NO: 796543 - DNA, 25 bp, Homo sapien
tagtgggagtgcacagctgcgattc

SEQ ID NO: 796544 - DNA, 25 bp, Homo sapien
gaattccaatttaaacagctagcta

SEQ ID NO: 796545 - DNA, 25 bp, Homo sapien
cagctagctagacaggcttcttgcc

SEQ ID NO: 796546 - DNA, 25 bp, Homo sapien
gatgctgttaatgacatggtgactg

SEQ ID NO: 796547 - DNA, 25 bp, Homo sapien
accagcagtgcccacagcaccaacc

SEQ ID NO: 796548 - DNA, 25 bp, Homo sapien
cctctctcctgggagtccactagga

SEQ ID NO: 796549 - DNA, 25 bp, Homo sapien
ccactaggaccagatggaccagcag

SEQ ID NO: 796550 - DNA, 25 bp, Homo sapien
ttgcctccaggtatgccagcagcac

SEQ ID NO: 796551 - DNA, 25 bp, Homo sapien
aatttcacctctgagaccaggttca

SEQ ID NO: 796552 - DNA, 25 bp, Homo sapien
ccagggttaccaatttcacctctga

SEQ ID NO: 796553 - DNA, 25 bp, Homo sapien
atctctgccagggttaccaatttca

SEQ ID NO: 796554 - DNA, 25 bp, Homo sapien
tttcacctctgagaccaggttcacc

SEQ ID NO: 796555 - DNA, 25 bp, Homo sapien
ctagtaccaaaaaggaaacatgtct

SEQ ID NO: 796556 - DNA, 25 bp, Homo sapien
ggtcacctgtggctccagcaggacc

SEQ ID NO: 796557 - DNA, 25 bp, Homo sapien
aggaccaggggcacctacagcacca

SEQ ID NO: 796558 - DNA, 25 bp, Homo sapien
accaggggcacctacagcaccagga

SEQ ID NO: 796559 - DNA, 25 bp, Homo sapien
agcaggaccaggggcacctacagca

SEQ ID NO: 796560 - DNA, 25 bp, Homo sapien
agggcttccccgaggaccagcagga

SEQ ID NO: 796561 - DNA, 25 bp, Homo sapien
gggcttccccgaggaccagcaggac

SEQ ID NO: 796562 - DNA, 25 bp, Homo sapien
ccagcaaatccattggggccagcag

SEQ ID NO: 796563 - DNA, 25 bp, Homo sapien
caggaccgacctcaccacgttcacc

SEQ ID NO: 796564 - DNA, 25 bp, Homo sapien
cacccttaggccctttggctcctct

SEQ ID NO: 796565 - DNA, 25 bp, Homo sapien
tttagcaccaggttgaccagcagca

SEQ ID NO: 796566 - DNA, 25 bp, Homo sapien
tgtgggaccaacaacaccgttttca

SEQ ID NO: 796567 - DNA, 25 bp, Homo sapien
tgggccagcagctccaacggggcct

SEQ ID NO: 796568 - DNA, 25 bp, Homo sapien
tggtatattccctgttgcatagcag

SEQ ID NO: 796569 - DNA, 25 bp, Homo sapien
taccacccttatgaggttatcagag

SEQ ID NO: 796570 - DNA, 25 bp, Homo sapien
ggatcattcccgcatctcttagaag

SEQ ID NO: 796571 - DNA, 25 bp, Homo sapien
gcatagcaggcacttgacggatata

SEQ ID NO: 796572 - DNA, 25 bp, Homo sapien
cagcaggaccggggggaccatttgg

SEQ ID NO: 796573 - DNA, 25 bp, Homo sapien
accacgacttccagcaggaccgggg

SEQ ID NO: 796574 - DNA, 25 bp, Homo sapien
caagtgagctgatagcaacatacac

SEQ ID NO: 796575 - DNA, 25 bp, Homo sapien
caagtgtccttaatagattctgaaa

SEQ ID NO: 796576 - DNA, 25 bp, Homo sapien
gaaaagcggcgagagtccattgtaa

SEQ ID NO: 796577 - DNA, 25 bp, Homo sapien
taacatcaatatcggaattgctctg

SEQ ID NO: 796578 - DNA, 25 bp, Homo sapien
catcaactccaagaatttgggtaag

SEQ ID NO: 796579 - DNA, 25 bp, Homo sapien
ttccttaccagcatattaccagttg

SEQ ID NO: 796580 - DNA, 25 bp, Homo sapien
gggcattatttagccaggaccctga

SEQ ID NO: 796581 - DNA, 25 bp, Homo sapien
tacatgtgaccaggaatagaccaag

SEQ ID NO: 796582 - DNA, 25 bp, Homo sapien
gggaccagtccgtccagcagcacca

SEQ ID NO: 796583 - DNA, 25 bp, Homo sapien
tgggggaccagtccgtccagcagca

SEQ ID NO: 796584 - DNA, 25 bp, Homo sapien
gtcctgggggaccagtccgtccagc

SEQ ID NO: 796585 - DNA, 25 bp, Homo sapien
tcctgggggaccagtccgtccagca

SEQ ID NO: 796586 - DNA, 25 bp, Homo sapien
tcctttatgaggctgtaaccaacca

SEQ ID NO: 796587 - DNA, 25 bp, Homo sapien
cttcagaccaggagagtaatagcga

SEQ ID NO: 796588 - DNA, 25 bp, Homo sapien
tctgttaatcaccaagggcctggaa

SEQ ID NO: 796589 - DNA, 25 bp, Homo sapien
taaattttcttgagtcctgacagga

SEQ ID NO: 796590 - DNA, 25 bp, Homo sapien
caactggaccttggtcaccacgagg

SEQ ID NO: 796591 - DNA, 25 bp, Homo sapien
cacgaggaccacgaagcccttcttt

SEQ ID NO: 796592 - DNA, 25 bp, Homo sapien
agagggacccttctcaccagcgaag

SEQ ID NO: 796593 - DNA, 25 bp, Homo sapien
tacttctccagttcggccaactgga

SEQ ID NO: 796594 - DNA, 25 bp, Homo sapien
tcctggtaccagtaaggtgccttca

SEQ ID NO: 796595 - DNA, 25 bp, Homo sapien
taatatgtagtaggatggccacagc

SEQ ID NO: 796596 - DNA, 25 bp, Homo sapien
tgtgtgctggacagatttcctggct

SEQ ID NO: 796597 - DNA, 25 bp, Homo sapien
gggcacctttcagagtagcactaat

SEQ ID NO: 796598 - DNA, 25 bp, Homo sapien
ggtagaccacgttcacctctcgagc

SEQ ID NO: 796599 - DNA, 25 bp, Homo sapien
cacgttcacctctcgagccagggag

SEQ ID NO: 796600 - DNA, 25 bp, Homo sapien
gttcacctctcgagccagggagacc

SEQ ID NO: 796601 - DNA, 25 bp, Homo sapien
tggtagaccacgttcacctctcgag

SEQ ID NO: 796602 - DNA, 25 bp, Homo sapien
tattcgatggaatgctaaccttccc

SEQ ID NO: 796603 - DNA, 25 bp, Homo sapien
ccttctccacatgtagatggccagc

SEQ ID NO: 796604 - DNA, 25 bp, Homo sapien
gagcctcgtgtcattcagtatccca

SEQ ID NO: 796605 - DNA, 25 bp, Homo sapien
gccagctttatgtaatcacgggatg

SEQ ID NO: 796606 - DNA, 25 bp, Homo sapien
gagcaccgttgactccaggactacc

SEQ ID NO: 796607 - DNA, 25 bp, Homo sapien
ggagggccggcaatgccaagaggac

SEQ ID NO: 796608 - DNA, 25 bp, Homo sapien
tcaccaggagcaccgttgactccag

SEQ ID NO: 796609 - DNA, 25 bp, Homo sapien
agcttcaccaggagcaccgttgact

SEQ ID NO: 796610 - DNA, 25 bp, Homo sapien
cttgtgtccgggttgaccatcgcga

SEQ ID NO: 796611 - DNA, 25 bp, Homo sapien
gtgtccgggttgaccatcgcgacct

SEQ ID NO: 796612 - DNA, 25 bp, Homo sapien
tccgggttgaccatcgcgacctggg

SEQ ID NO: 796613 - DNA, 25 bp, Homo sapien
gcgacctgggggaccatcgttccca

SEQ ID NO: 796614 - DNA, 25 bp, Homo sapien
gcaccaacgggaccaatattgccag

SEQ ID NO: 796615 - DNA, 25 bp, Homo sapien
tcaccacggtttccatgtttgccag

SEQ ID NO: 796616 - DNA, 25 bp, Homo sapien
gggccatgaggaccaggtgcacctg

SEQ ID NO: 796617 - DNA, 25 bp, Homo sapien
aatattgccagggtaaccgcgctct

SEQ ID NO: 796618 - DNA, 25 bp, Homo sapien
ctaggacctcttgggccaacagcac

SEQ ID NO: 796619 - DNA, 25 bp, Homo sapien
agcaggaccaacaggaccagaagga

SEQ ID NO: 796620 - DNA, 25 bp, Homo sapien
actaggacctcttgggccaacagca

SEQ ID NO: 796621 - DNA, 25 bp, Homo sapien
caacagcaccagcaggaccaacagg

SEQ ID NO: 796622 - DNA, 25 bp, Homo sapien
cagaaggatggataagacttaccgt

SEQ ID NO: 796623 - DNA, 25 bp, Homo sapien
gtaatggtttagctaggctctcacc

SEQ ID NO: 796624 - DNA, 25 bp, Homo sapien
tgctatctgtaaagtggctagatcc

SEQ ID NO: 796625 - DNA, 25 bp, Homo sapien
cacctctgctggtaatctgctttag

SEQ ID NO: 796626 - DNA, 25 bp, Homo sapien
gggctctcccttatcgccacgaatg

SEQ ID NO: 796627 - DNA, 25 bp, Homo sapien
tcccttatcgccacgaatgccttgt

SEQ ID NO: 796628 - DNA, 25 bp, Homo sapien
gaccttgcaatccattgtgtccctt

SEQ ID NO: 796629 - DNA, 25 bp, Homo sapien
agcgataccaggcagaccttgcaat

SEQ ID NO: 796630 - DNA, 25 bp, Homo sapien
tgaaaatccttctgagctgaaggcc

SEQ ID NO: 796631 - DNA, 25 bp, Homo sapien
cagtttatgtgcgagatggctacag

SEQ ID NO: 796632 - DNA, 25 bp, Homo sapien
tatgaaatagcattacctccaagag

SEQ ID NO: 796633 - DNA, 25 bp, Homo sapien
tcagcagtgcaatattagtcattcc

SEQ ID NO: 796634 - DNA, 25 bp, Homo sapien
gccaggagcaccttgatcaccatgg

SEQ ID NO: 796635 - DNA, 25 bp, Homo sapien
agccaggagcaccttgatcaccatg

SEQ ID NO: 796636 - DNA, 25 bp, Homo sapien
gggctcactgctcgctttagcctct

SEQ ID NO: 796637 - DNA, 25 bp, Homo sapien
gaactgtcttctcttgagtccacct

SEQ ID NO: 796638 - DNA, 25 bp, Homo sapien
tcagagatgaactgtcttctcttga

SEQ ID NO: 796639 - DNA, 25 bp, Homo sapien
cctctatttcagagatgaactgtct

SEQ ID NO: 796640 - DNA, 25 bp, Homo sapien
aggtacatgtgagctggtgaatccc

SEQ ID NO: 796641 - DNA, 25 bp, Homo sapien
aagacagacaccaggtacatgtgag

SEQ ID NO: 796642 - DNA, 25 bp, Homo sapien
caccaggtacatgtgagctggtgaa

SEQ ID NO: 796643 - DNA, 25 bp, Homo sapien
cagacaccaggtacatgtgagctgg

SEQ ID NO: 796644 - DNA, 25 bp, Homo sapien
taccaggatgtccagtgcgaccatc

SEQ ID NO: 796645 - DNA, 25 bp, Homo sapien
agcagggccttggtgaccctgaggg

SEQ ID NO: 796646 - DNA, 25 bp, Homo sapien
ccagcaggtccaactgtaccaggat

SEQ ID NO: 796647 - DNA, 25 bp, Homo sapien
tgagggcctcgaatgccagcaggtc

SEQ ID NO: 796648 - DNA, 25 bp, Homo sapien
gcttcacacggaagcatgttctcat

SEQ ID NO: 796649 - DNA, 25 bp, Homo sapien
tattttgttacagtgagagacatcc

SEQ ID NO: 796650 - DNA, 25 bp, Homo sapien
gaaaacattccttaggtccgtgatc

SEQ ID NO: 796651 - DNA, 25 bp, Homo sapien
gggatggacttaacaagcccattgc

SEQ ID NO: 796652 - DNA, 25 bp, Homo sapien
ggctggtcagccctgtagaagtctc

SEQ ID NO: 796653 - DNA, 25 bp, Homo sapien
tagaagtctccatcgtaaccaaagt

SEQ ID NO: 796654 - DNA, 25 bp, Homo sapien
tgagtctcaagtcacggcatgtgcg

SEQ ID NO: 796655 - DNA, 25 bp, Homo sapien
tagcatcaacttcatagtccttggg

SEQ ID NO: 796656 - DNA, 25 bp, Homo sapien
tcagatcatgaaacttctcattgag

SEQ ID NO: 796657 - DNA, 25 bp, Homo sapien
agatcatgaaacttctcattgagca

SEQ ID NO: 796658 - DNA, 25 bp, Homo sapien
aataacattcagatcatgaaacttc

SEQ ID NO: 796659 - DNA, 25 bp, Homo sapien
cattcagatcatgaaacttctcatt

SEQ ID NO: 796660 - DNA, 25 bp, Homo sapien
gatagcatccatagtgcatccttgg

SEQ ID NO: 796661 - DNA, 25 bp, Homo sapien
cggatacaggtttcgccagtagaga

SEQ ID NO: 796662 - DNA, 25 bp, Homo sapien
ggctgccagcattgatagtttctcc

SEQ ID NO: 796663 - DNA, 25 bp, Homo sapien
tcctagccagacgtgtttcttgtcc

SEQ ID NO: 796664 - DNA, 25 bp, Homo sapien
tgagaggcatagttggccagcaggc

SEQ ID NO: 796665 - DNA, 25 bp, Homo sapien
tagccatttccttggaagtcactcc

SEQ ID NO: 796666 - DNA, 25 bp, Homo sapien
catagttggccagcaggcgcatgaa

SEQ ID NO: 796667 - DNA, 25 bp, Homo sapien
tgaaggcaagttgggtagccatttc

SEQ ID NO: 796668 - DNA, 25 bp, Homo sapien
ccagtctcctcatccatgtatgcaa

SEQ ID NO: 796669 - DNA, 25 bp, Homo sapien
ttgccagtctcctcatccatgtatg

SEQ ID NO: 796670 - DNA, 25 bp, Homo sapien
caggttgccagtctcctcatccatg

SEQ ID NO: 796671 - DNA, 25 bp, Homo sapien
gttgccagtctcctcatccatgtat

SEQ ID NO: 796672 - DNA, 25 bp, Homo sapien
gtaagtgaacctgctgttgccctca

SEQ ID NO: 796673 - DNA, 25 bp, Homo sapien
cattagagccctgtagaatgacagc

SEQ ID NO: 796674 - DNA, 25 bp, Homo sapien
gccatctacaagaacagtgtaagtg

SEQ ID NO: 796675 - DNA, 25 bp, Homo sapien
ttgccctcagcaacaagttcaacat

SEQ ID NO: 796676 - DNA, 25 bp, Homo sapien
acctgggtgggtatgtagtcttgct

SEQ ID NO: 796677 - DNA, 25 bp, Homo sapien
gtctgtcccagataaataagttcat

SEQ ID NO: 796678 - DNA, 25 bp, Homo sapien
taagaaccactgtttggcatgtgtc

SEQ ID NO: 796679 - DNA, 25 bp, Homo sapien
gtttaggccactgaagtctcaagaa

SEQ ID NO: 796680 - DNA, 25 bp, Homo sapien
cgatgtccaaaggtgcaatatcaag

SEQ ID NO: 796681 - DNA, 25 bp, Homo sapien
caatgtccacaaagaattcctggtc

SEQ ID NO: 796682 - DNA, 25 bp, Homo sapien
ttgtattcaatgattgtctttcccc

SEQ ID NO: 796683 - DNA, 25 bp, Homo sapien
ctggtcagcaccaccgatgtccaaa

SEQ ID NO: 796684 - DNA, 25 bp, Homo sapien
tgcacaatgctctgatcaatccttc

SEQ ID NO: 796685 - DNA, 25 bp, Homo sapien
aactgtattgcacaatgctctgatc

SEQ ID NO: 796686 - DNA, 25 bp, Homo sapien
tcttttgcccacaatttaagcaagt

SEQ ID NO: 796687 - DNA, 25 bp, Homo sapien
gcccacaatttaagcaagtagatgt

SEQ ID NO: 796688 - DNA, 25 bp, Homo sapien
ttttccataacaggtgtaagagtgt

SEQ ID NO: 796689 - DNA, 25 bp, Homo sapien
ccataacaggtgtaagagtgttgaa

SEQ ID NO: 796690 - DNA, 25 bp, Homo sapien
ttccataacaggtgtaagagtgttg

SEQ ID NO: 796691 - DNA, 25 bp, Homo sapien
tccataacaggtgtaagagtgttga

SEQ ID NO: 796692 - DNA, 25 bp, Homo sapien
caagaaacaaagcttctgtggaacc

SEQ ID NO: 796693 - DNA, 25 bp, Homo sapien
cacacgatacaactcaatacaggag

SEQ ID NO: 796694 - DNA, 25 bp, Homo sapien
caatgtggatcacactcatgggaaa

SEQ ID NO: 796695 - DNA, 25 bp, Homo sapien
aaacaaggacctcagttcatctctg

SEQ ID NO: 796696 - DNA, 25 bp, Homo sapien
tttacatttggactggtgctggttg

SEQ ID NO: 796697 - DNA, 25 bp, Homo sapien
catttggactggtgctggttggttc

SEQ ID NO: 796698 - DNA, 25 bp, Homo sapien
tctcaggtcttagggtaggagaagc

SEQ ID NO: 796699 - DNA, 25 bp, Homo sapien
tgctggttggttctctcaggtctta

SEQ ID NO: 796700 - DNA, 25 bp, Homo sapien
ctctatgtatgtccctgtcacctga

SEQ ID NO: 796701 - DNA, 25 bp, Homo sapien
gtcacctgagcttccttgactggat

SEQ ID NO: 796702 - DNA, 25 bp, Homo sapien
tctctgttcgttttgcttaaataaa

SEQ ID NO: 796703 - DNA, 25 bp, Homo sapien
tccttgactggatctctgttcgttt

SEQ ID NO: 796704 - DNA, 25 bp, Homo sapien
tcataattactgctacgtttagaat

SEQ ID NO: 796705 - DNA, 25 bp, Homo sapien
taacagagactgattagcttaaatc

SEQ ID NO: 796706 - DNA, 25 bp, Homo sapien
aatttgtatatcatgttaacaacac

SEQ ID NO: 796707 - DNA, 25 bp, Homo sapien
cactcaatagtttgttaacagagac

SEQ ID NO: 796708 - DNA, 25 bp, Homo sapien
taatgagagtacttcatcatccctc

SEQ ID NO: 796709 - DNA, 25 bp, Homo sapien
tgcacttatccttggattccagacc

SEQ ID NO: 796710 - DNA, 25 bp, Homo sapien
gaaatatgcgtaaacactgtccatg

SEQ ID NO: 796711 - DNA, 25 bp, Homo sapien
tccagaccctcgcatgctttagtaa

SEQ ID NO: 796712 - DNA, 25 bp, Homo sapien
gtgtacgtgctgcctaactgaacaa

SEQ ID NO: 796713 - DNA, 25 bp, Homo sapien
agtgtacgtgctgcctaactgaaca

SEQ ID NO: 796714 - DNA, 25 bp, Homo sapien
gtgtggggagagagtactaggggta

SEQ ID NO: 796715 - DNA, 25 bp, Homo sapien
agagagtactaggggtacccgcctg

SEQ ID NO: 796716 - DNA, 25 bp, Homo sapien
tgtggggagagagtactaggggtac

SEQ ID NO: 796717 - DNA, 25 bp, Homo sapien
gtgccggttccccaggcgccctgga

SEQ ID NO: 796718 - DNA, 25 bp, Homo sapien
aggcgccctggacgcctgtctcctc

SEQ ID NO: 796719 - DNA, 25 bp, Homo sapien
atgcccagtgctccggggtcaccgg

SEQ ID NO: 796720 - DNA, 25 bp, Homo sapien
cttaatagcggctgcgcctgcgagg

SEQ ID NO: 796721 - DNA, 25 bp, Homo sapien
ccaggcgaggagcggccgccagctc

SEQ ID NO: 796722 - DNA, 25 bp, Homo sapien
ccatgacaacagtgcgcggcggagc

SEQ ID NO: 796723 - DNA, 25 bp, Homo sapien
aaaggggcgccgcacaggggcagca

SEQ ID NO: 796724 - DNA, 25 bp, Homo sapien
ggaaaggggcgccgcacaggggcag

SEQ ID NO: 796725 - DNA, 25 bp, Homo sapien
gcggagcgggaaaggggcgccgcac

SEQ ID NO: 796726 - DNA, 25 bp, Homo sapien
gaggtggcacgctgcgagcagcagc

SEQ ID NO: 796727 - DNA, 25 bp, Homo sapien
accttggcgctcctcacgctgaagt

SEQ ID NO: 796728 - DNA, 25 bp, Homo sapien
tcctcacgctgaagtagtggttgat

SEQ ID NO: 796729 - DNA, 25 bp, Homo sapien
tgatctcccgcttgcccaggttgta

SEQ ID NO: 796730 - DNA, 25 bp, Homo sapien
agaccgctcaggagccggacctcag

SEQ ID NO: 796731 - DNA, 25 bp, Homo sapien
caaggaccgcctgtccgacttcctg

SEQ ID NO: 796732 - DNA, 25 bp, Homo sapien
ccctgatctggagcgtctccccgaa

SEQ ID NO: 796733 - DNA, 25 bp, Homo sapien
ttcctgcacgcgagcccctgatctg

SEQ ID NO: 796734 - DNA, 25 bp, Homo sapien
caaaagctgggtggcacctcttcca

SEQ ID NO: 796735 - DNA, 25 bp, Homo sapien
caggcatcttttgccagctgtcgcc

SEQ ID NO: 796736 - DNA, 25 bp, Homo sapien
tgtgcactccgaagcctttaaacgt

SEQ ID NO: 796737 - DNA, 25 bp, Homo sapien
gctctggtgccttaactttgtaaaa

SEQ ID NO: 796738 - DNA, 25 bp, Homo sapien
ctaactcctaatgatacattccctg

SEQ ID NO: 796739 - DNA, 25 bp, Homo sapien
ctcctaatgatacattccctgctct

SEQ ID NO: 796740 - DNA, 25 bp, Homo sapien
aactcctaatgatacattccctgct

SEQ ID NO: 796741 - DNA, 25 bp, Homo sapien
tcctaatgatacattccctgctctg

SEQ ID NO: 796742 - DNA, 25 bp, Homo sapien
gagaaggtattcacacgaatcattg

SEQ ID NO: 796743 - DNA, 25 bp, Homo sapien
ttgagagaaggtattcacacgaatc

SEQ ID NO: 796744 - DNA, 25 bp, Homo sapien
cacttgagagaaggtattcacacga

SEQ ID NO: 796745 - DNA, 25 bp, Homo sapien
catacaactgtgaggttgccaaact

SEQ ID NO: 796746 - DNA, 25 bp, Homo sapien
ccataagataggtatccaggtgcca

SEQ ID NO: 796747 - DNA, 25 bp, Homo sapien
ccttagtgggcagggaaatcttcat

SEQ ID NO: 796748 - DNA, 25 bp, Homo sapien
cacctgagataaagcagattggcca

SEQ ID NO: 796749 - DNA, 25 bp, Homo sapien
taggcctagttatcacacacctgag

SEQ ID NO: 796750 - DNA, 25 bp, Homo sapien
gattgttacacataccattatattg

SEQ ID NO: 796751 - DNA, 25 bp, Homo sapien
atcagccatcctggcatttcaaagc

SEQ ID NO: 796752 - DNA, 25 bp, Homo sapien
gcacaccgtttttgaagaaagttga

SEQ ID NO: 796753 - DNA, 25 bp, Homo sapien
ttgatccagattgttacacatacca

SEQ ID NO: 796754 - DNA, 25 bp, Homo sapien
caattgacgaattctggaatctcca

SEQ ID NO: 796755 - DNA, 25 bp, Homo sapien
tatctacaaggcagttctttgcttc

SEQ ID NO: 796756 - DNA, 25 bp, Homo sapien
gacgaattctggaatctccaataaa

SEQ ID NO: 796757 - DNA, 25 bp, Homo sapien
gcaatatgtttatctacaaggcagt

SEQ ID NO: 796758 - DNA, 25 bp, Homo sapien
actcctcctgtaactattcagttgg

SEQ ID NO: 796759 - DNA, 25 bp, Homo sapien
tacaataaaaagcttgccaatgtct

SEQ ID NO: 796760 - DNA, 25 bp, Homo sapien
tctacagaagggaatagacaagttt

SEQ ID NO: 796761 - DNA, 25 bp, Homo sapien
caatctggagagacacactcctcct

SEQ ID NO: 796762 - DNA, 25 bp, Homo sapien
gttttaatttacagcatgatcaccc

SEQ ID NO: 796763 - DNA, 25 bp, Homo sapien
gatttaggacctggtatcatcatca

SEQ ID NO: 796764 - DNA, 25 bp, Homo sapien
tgatcacccaatgccagaaagtttg

SEQ ID NO: 796765 - DNA, 25 bp, Homo sapien
aataactacttagctgtgaaggctc

SEQ ID NO: 796766 - DNA, 25 bp, Homo sapien
ggctgcagactaaaccattatagct

SEQ ID NO: 796767 - DNA, 25 bp, Homo sapien
gataatcttgggataactgagcatc

SEQ ID NO: 796768 - DNA, 25 bp, Homo sapien
gaaacctaagtgttgcaactagggc

SEQ ID NO: 796769 - DNA, 25 bp, Homo sapien
caactagggctcagaaacaatgtac

SEQ ID NO: 796770 - DNA, 25 bp, Homo sapien
aagcacatgccaccacaatcagcta

SEQ ID NO: 796771 - DNA, 25 bp, Homo sapien
ttacaagcacatgccaccacaatca

SEQ ID NO: 796772 - DNA, 25 bp, Homo sapien
atcagctaattttttgcattttagt

SEQ ID NO: 796773 - DNA, 25 bp, Homo sapien
ttgcattttagtagagatggggttt

SEQ ID NO: 796774 - DNA, 25 bp, Homo sapien
gaatgacaccaattctctgatattg

SEQ ID NO: 796775 - DNA, 25 bp, Homo sapien
gatattgttggaacttgcttaatgg

SEQ ID NO: 796776 - DNA, 25 bp, Homo sapien
cttaaagcaagaatgacaccaattc

SEQ ID NO: 796777 - DNA, 25 bp, Homo sapien
gcttaatggtgtaatacacgttaaa

SEQ ID NO: 796778 - DNA, 25 bp, Homo sapien
gaattacactgaacctacagatcgg

SEQ ID NO: 796779 - DNA, 25 bp, Homo sapien
ccctagagatcatcaatggcatttc

SEQ ID NO: 796780 - DNA, 25 bp, Homo sapien
gagctctacagtctattctaatggt

SEQ ID NO: 796781 - DNA, 25 bp, Homo sapien
tgaacagaccttcctttccctagag

SEQ ID NO: 796782 - DNA, 25 bp, Homo sapien
tgaaccacctatgtggtcctttccc

SEQ ID NO: 796783 - DNA, 25 bp, Homo sapien
caaagctgacagaattaaacgaacg

SEQ ID NO: 796784 - DNA, 25 bp, Homo sapien
aacactcatgaatccatgatacaaa

SEQ ID NO: 796785 - DNA, 25 bp, Homo sapien
tgcttcacccaaagtaaaccactct

SEQ ID NO: 796786 - DNA, 25 bp, Homo sapien
cactttaactgatgcagtcttgtct

SEQ ID NO: 796787 - DNA, 25 bp, Homo sapien
ctttaactgatgcagtcttgtcttc

SEQ ID NO: 796788 - DNA, 25 bp, Homo sapien
tcttgtcttcaaaaggaatgttttc

SEQ ID NO: 796789 - DNA, 25 bp, Homo sapien
tgtcttcaaaaggaatgttttcatg

SEQ ID NO: 796790 - DNA, 25 bp, Homo sapien
atagaaccattaacttcaggatgcc

SEQ ID NO: 796791 - DNA, 25 bp, Homo sapien
ctcagtccacactttgatacactgt

SEQ ID NO: 796792 - DNA, 25 bp, Homo sapien
tcatagaaccattaacttcaggatg

SEQ ID NO: 796793 - DNA, 25 bp, Homo sapien
ccacactttgatacactgtttcata

SEQ ID NO: 796794 - DNA, 25 bp, Homo sapien
aaagtctgggataaacataatctgc

SEQ ID NO: 796795 - DNA, 25 bp, Homo sapien
tggtggctaggttcccacaggatcc

SEQ ID NO: 796796 - DNA, 25 bp, Homo sapien
gggtttgaatcagctgaactacagc

SEQ ID NO: 796797 - DNA, 25 bp, Homo sapien
catattagtcttgcctgctgggtca

SEQ ID NO: 796798 - DNA, 25 bp, Homo sapien
gtgttaaatcatccttatcctcaaa

SEQ ID NO: 796799 - DNA, 25 bp, Homo sapien
tgtcctccaactctcatagtatcaa

SEQ ID NO: 796800 - DNA, 25 bp, Homo sapien
gtcttacacctgtaaccaacagatt

SEQ ID NO: 796801 - DNA, 25 bp, Homo sapien
ttcacttctggagctatgatccatg

SEQ ID NO: 796802 - DNA, 25 bp, Homo sapien
ctaataggatattgctgaggcctgc

SEQ ID NO: 796803 - DNA, 25 bp, Homo sapien
aataaaattcatccgacaagtctgc

SEQ ID NO: 796804 - DNA, 25 bp, Homo sapien
ggcctgccaggtaagtcggaactta

SEQ ID NO: 796805 - DNA, 25 bp, Homo sapien
aatatagattcctgcctgccaccct

SEQ ID NO: 796806 - DNA, 25 bp, Homo sapien
tacaatcacatgtggctttgcaatg

SEQ ID NO: 796807 - DNA, 25 bp, Homo sapien
tgtggcagctcctgctacaatcaca

SEQ ID NO: 796808 - DNA, 25 bp, Homo sapien
gcagctcctgctacaatcacatgtg

SEQ ID NO: 796809 - DNA, 25 bp, Homo sapien
tcacatgtggctttgcaatggaatc

SEQ ID NO: 796810 - DNA, 25 bp, Homo sapien
tctaaaagtggtgctatggaggtga

SEQ ID NO: 796811 - DNA, 25 bp, Homo sapien
taccattgtgaatcttgatggacca

SEQ ID NO: 796812 - DNA, 25 bp, Homo sapien
gtaagacccaataaacatcactagt

SEQ ID NO: 796813 - DNA, 25 bp, Homo sapien
tgagaaagcgcttcactgctaccat

SEQ ID NO: 796814 - DNA, 25 bp, Homo sapien
tactgactgcagcttcattgtaagc

SEQ ID NO: 796815 - DNA, 25 bp, Homo sapien
acttaatagatcttcataaacagga

SEQ ID NO: 796816 - DNA, 25 bp, Homo sapien
tctggtgctactattcaaaatactg

SEQ ID NO: 796817 - DNA, 25 bp, Homo sapien
cattagtgatcatcttcctattttc

SEQ ID NO: 796818 - DNA, 25 bp, Homo sapien
gattccatgatggtttcttgagcaa

SEQ ID NO: 796819 - DNA, 25 bp, Homo sapien
tttcttgagcaattaatttggaaac

SEQ ID NO: 796820 - DNA, 25 bp, Homo sapien
gtttctctgctcgattcaggaagat

SEQ ID NO: 796821 - DNA, 25 bp, Homo sapien
tgtaagccatccaaagattccatga

SEQ ID NO: 796822 - DNA, 25 bp, Homo sapien
tattcaactagatgatagaaagcaa

SEQ ID NO: 796823 - DNA, 25 bp, Homo sapien
tatagtctccatctactgacatatg

SEQ ID NO: 796824 - DNA, 25 bp, Homo sapien
tataatgacttatggcttaaagcaa

SEQ ID NO: 796825 - DNA, 25 bp, Homo sapien
tctctcttagagtataccaaaactc

SEQ ID NO: 796826 - DNA, 25 bp, Homo sapien
tggcactcttgcagatactagcctg

SEQ ID NO: 796827 - DNA, 25 bp, Homo sapien
caaagggcttatgcaactctcacaa

SEQ ID NO: 796828 - DNA, 25 bp, Homo sapien
catagtttaggcatctgtggaactc

SEQ ID NO: 796829 - DNA, 25 bp, Homo sapien
tcaaaacagaagataccaggccact

SEQ ID NO: 796830 - DNA, 25 bp, Homo sapien
ccgaggttgacaacaggacccatct

SEQ ID NO: 796831 - DNA, 25 bp, Homo sapien
caggacccatctacaggcttcaaaa

SEQ ID NO: 796832 - DNA, 25 bp, Homo sapien
cttattgcaatacacattcataaga

SEQ ID NO: 796833 - DNA, 25 bp, Homo sapien
tcttattgcaatacacattcataag

SEQ ID NO: 796834 - DNA, 25 bp, Homo sapien
gaacagatttgcacggtcacacata

SEQ ID NO: 796835 - DNA, 25 bp, Homo sapien
tacacggcttattcttccgatgagc

SEQ ID NO: 796836 - DNA, 25 bp, Homo sapien
taatcaggccaagtttgcagaaaga

SEQ ID NO: 796837 - DNA, 25 bp, Homo sapien
cactttccaaatcagtacacggctt

SEQ ID NO: 796838 - DNA, 25 bp, Homo sapien
aatcaaaatcacaagttgcatccag

SEQ ID NO: 796839 - DNA, 25 bp, Homo sapien
aatcacaagttgcatccagcctttc

SEQ ID NO: 796840 - DNA, 25 bp, Homo sapien
tccagcctttccattcgtctgtttg

SEQ ID NO: 796841 - DNA, 25 bp, Homo sapien
tccattcgtctgtttgttctctatt

SEQ ID NO: 796842 - DNA, 25 bp, Homo sapien
gacatcacttcctatactttctgaa

SEQ ID NO: 796843 - DNA, 25 bp, Homo sapien
aataagaagggtctataactggtag

SEQ ID NO: 796844 - DNA, 25 bp, Homo sapien
gataacttcaaattagctgttcaat

SEQ ID NO: 796845 - DNA, 25 bp, Homo sapien
taaaataatacccttagatatcagc

SEQ ID NO: 796846 - DNA, 25 bp, Homo sapien
cagcatccacgctaagcaaacttac

SEQ ID NO: 796847 - DNA, 25 bp, Homo sapien
gttcctatagcacctacaatctaca

SEQ ID NO: 796848 - DNA, 25 bp, Homo sapien
cttagaccataagttctacacagca

SEQ ID NO: 796849 - DNA, 25 bp, Homo sapien
aactgatacttcttgtactcctttg

SEQ ID NO: 796850 - DNA, 25 bp, Homo sapien
tcatgtttctttttggacggatatt

SEQ ID NO: 796851 - DNA, 25 bp, Homo sapien
agtaattgagcagacacattaaata

SEQ ID NO: 796852 - DNA, 25 bp, Homo sapien
cagtaattgagcagacacattaaat

SEQ ID NO: 796853 - DNA, 25 bp, Homo sapien
gtaattgagcagacacattaaatag

SEQ ID NO: 796854 - DNA, 25 bp, Homo sapien
cgaatgtgcatgtatacaggcaaaa

SEQ ID NO: 796855 - DNA, 25 bp, Homo sapien
gaaataaatatgcagcaaccagaac

SEQ ID NO: 796856 - DNA, 25 bp, Homo sapien
atgcccataccctgtctgaaataaa

SEQ ID NO: 796857 - DNA, 25 bp, Homo sapien
aaaagtatgagaaatgcccataccc

SEQ ID NO: 796858 - DNA, 25 bp, Homo sapien
tcctctggctataactgccatcttg

SEQ ID NO: 796859 - DNA, 25 bp, Homo sapien
ctgagctgtcctctggctataactg

SEQ ID NO: 796860 - DNA, 25 bp, Homo sapien
gctgtcctctggctataactgccat

SEQ ID NO: 796861 - DNA, 25 bp, Homo sapien
tgtcctctggctataactgccatct

SEQ ID NO: 796862 - DNA, 25 bp, Homo sapien
aggcagattttctctgacagagtat

SEQ ID NO: 796863 - DNA, 25 bp, Homo sapien
tgttttcattctaggtacacacgaa

SEQ ID NO: 796864 - DNA, 25 bp, Homo sapien
taactaaatcccagcaaagcaccaa

SEQ ID NO: 796865 - DNA, 25 bp, Homo sapien
tacacacgaacagcaaaggcagatt

SEQ ID NO: 796866 - DNA, 25 bp, Homo sapien
ccactaccaggaaattgagacgaaa

SEQ ID NO: 796867 - DNA, 25 bp, Homo sapien
gataaggtcgatccattactataca

SEQ ID NO: 796868 - DNA, 25 bp, Homo sapien
ggacaaagtaatagaattgataagg

SEQ ID NO: 796869 - DNA, 25 bp, Homo sapien
tgaaccatacagtgaccaaggggac

SEQ ID NO: 796870 - DNA, 25 bp, Homo sapien
tatttgtggccatagtgctaaagta

SEQ ID NO: 796871 - DNA, 25 bp, Homo sapien
tttgtggccatagtgctaaagtaac

SEQ ID NO: 796872 - DNA, 25 bp, Homo sapien
gccatagtgctaaagtaacatatat

SEQ ID NO: 796873 - DNA, 25 bp, Homo sapien
tgtggccatagtgctaaagtaacat

SEQ ID NO: 796874 - DNA, 25 bp, Homo sapien
gaataacagcaaaaagcctagtttc

SEQ ID NO: 796875 - DNA, 25 bp, Homo sapien
taacagcaaaaagcctagtttcaac

SEQ ID NO: 796876 - DNA, 25 bp, Homo sapien
cagcaaaaagcctagtttcaacagt

SEQ ID NO: 796877 - DNA, 25 bp, Homo sapien
ctgagaatatgccaaaaaacatatg

SEQ ID NO: 796878 - DNA, 25 bp, Homo sapien
gaaccaccattcatatacattccct

SEQ ID NO: 796879 - DNA, 25 bp, Homo sapien
aacggtctaacctccatctgaacca

SEQ ID NO: 796880 - DNA, 25 bp, Homo sapien
cctttcagttcaaaacacttggaca

SEQ ID NO: 796881 - DNA, 25 bp, Homo sapien
ataacggtctaacctccatctgaac

SEQ ID NO: 796882 - DNA, 25 bp, Homo sapien
ctgaaaagtaaagagagaaaatttg

SEQ ID NO: 796883 - DNA, 25 bp, Homo sapien
aaagcaaacagcattccgtggaaaa

SEQ ID NO: 796884 - DNA, 25 bp, Homo sapien
agtatttgacgcttctgcaaagcca

SEQ ID NO: 796885 - DNA, 25 bp, Homo sapien
tccttcagaaagtatttgacgcttc

SEQ ID NO: 796886 - DNA, 25 bp, Homo sapien
taaaagcaaacagcattccgtggaa

SEQ ID NO: 796887 - DNA, 25 bp, Homo sapien
gaaaaataaggagatatacatcgcc

SEQ ID NO: 796888 - DNA, 25 bp, Homo sapien
gcaagtctggaagaggcataagcct

SEQ ID NO: 796889 - DNA, 25 bp, Homo sapien
gatggctctccatatgaaacacctt

SEQ ID NO: 796890 - DNA, 25 bp, Homo sapien
tagctatcctatcaattactgggag

SEQ ID NO: 796891 - DNA, 25 bp, Homo sapien
ggagttcattgcactctgctttgtt

SEQ ID NO: 796892 - DNA, 25 bp, Homo sapien
taccacagaaacagacggatggagt

SEQ ID NO: 796893 - DNA, 25 bp, Homo sapien
ttgtttttacaactgctagcccaga

SEQ ID NO: 796894 - DNA, 25 bp, Homo sapien
tttttacaactgctagcccagatgg

SEQ ID NO: 796895 - DNA, 25 bp, Homo sapien
ggtacttactatagcacaggttgtg

SEQ ID NO: 796896 - DNA, 25 bp, Homo sapien
gatttggtaaccactgcagcccttg

SEQ ID NO: 796897 - DNA, 25 bp, Homo sapien
ggctccataagagtaggaactatgt

SEQ ID NO: 796898 - DNA, 25 bp, Homo sapien
gcccttggcataatatctagcatgt

SEQ ID NO: 796899 - DNA, 25 bp, Homo sapien
gaatgtaccctccttataaaaagca

SEQ ID NO: 796900 - DNA, 25 bp, Homo sapien
gcttaccaagcaaagaatccttgcc

SEQ ID NO: 796901 - DNA, 25 bp, Homo sapien
tgagtgattctcatgggcaatagca

SEQ ID NO: 796902 - DNA, 25 bp, Homo sapien
gacaaatctgttcacacttcaggga

SEQ ID NO: 796903 - DNA, 25 bp, Homo sapien
aaatgaactgtaaactgaacgggca

SEQ ID NO: 796904 - DNA, 25 bp, Homo sapien
tgtttcttattaggatgaaggctaa

SEQ ID NO: 796905 - DNA, 25 bp, Homo sapien
ctgaacgggcatatccagggatgtt

SEQ ID NO: 796906 - DNA, 25 bp, Homo sapien
aactgtaaactgaacgggcatatcc

SEQ ID NO: 796907 - DNA, 25 bp, Homo sapien
tatcagtaccaagataccccttgtg

SEQ ID NO: 796908 - DNA, 25 bp, Homo sapien
gcatagggtttccaggtatcagtac

SEQ ID NO: 796909 - DNA, 25 bp, Homo sapien
gatctgagaaatttcatgtgccaca

SEQ ID NO: 796910 - DNA, 25 bp, Homo sapien
tgtgtccgctgccagccatatgtga

SEQ ID NO: 796911 - DNA, 25 bp, Homo sapien
ttatcttgaatggatgataagatga

SEQ ID NO: 796912 - DNA, 25 bp, Homo sapien
tttatcttgaatggatgataagatg

SEQ ID NO: 796913 - DNA, 25 bp, Homo sapien
tatcttgaatggatgataagatgag

SEQ ID NO: 796914 - DNA, 25 bp, Homo sapien
ttaaatggatccacagggtaactgg

SEQ ID NO: 796915 - DNA, 25 bp, Homo sapien
ttccaatgaaagaggaagttccaca

SEQ ID NO: 796916 - DNA, 25 bp, Homo sapien
tgcatacccgaaaaccacagttagg

SEQ ID NO: 796917 - DNA, 25 bp, Homo sapien
caatgaatacaggtgcagacagtct

SEQ ID NO: 796918 - DNA, 25 bp, Homo sapien
acatatagtttaattgatactttgc

SEQ ID NO: 796919 - DNA, 25 bp, Homo sapien
catatagtttaattgatactttgcc

SEQ ID NO: 796920 - DNA, 25 bp, Homo sapien
acacatatagtttaattgatacttt

SEQ ID NO: 796921 - DNA, 25 bp, Homo sapien
tatagtttaattgatactttgccaa

SEQ ID NO: 796922 - DNA, 25 bp, Homo sapien
tatcatttggtaacctacccctaca

SEQ ID NO: 796923 - DNA, 25 bp, Homo sapien
tatttgaaccaatcatgaatggatc

SEQ ID NO: 796924 - DNA, 25 bp, Homo sapien
tatcagtagcacataaatccagtgc

SEQ ID NO: 796925 - DNA, 25 bp, Homo sapien
cctctgaagctctgataactaaatg

SEQ ID NO: 796926 - DNA, 25 bp, Homo sapien
tccatcactttgtctctcccagtga

SEQ ID NO: 796927 - DNA, 25 bp, Homo sapien
cactttgtctctcccagtgacaggg

SEQ ID NO: 796928 - DNA, 25 bp, Homo sapien
tttccatcactttgtctctcccagt

SEQ ID NO: 796929 - DNA, 25 bp, Homo sapien
catcactttgtctctcccagtgaca

SEQ ID NO: 796930 - DNA, 25 bp, Homo sapien
gacaatcacgaagcaaaatctggta

SEQ ID NO: 796931 - DNA, 25 bp, Homo sapien
taaactgctagaggatccaccaggg

SEQ ID NO: 796932 - DNA, 25 bp, Homo sapien
cagacaaatggtcaattgagggccc

SEQ ID NO: 796933 - DNA, 25 bp, Homo sapien
ggtgtaaccaaaagcccactatggc

SEQ ID NO: 796934 - DNA, 25 bp, Homo sapien
ctttttactgtaagcaaaccaggca

SEQ ID NO: 796935 - DNA, 25 bp, Homo sapien
acttgaccatctttttgtgccacac

SEQ ID NO: 796936 - DNA, 25 bp, Homo sapien
cctcccttcatgtaggttcaaatac

SEQ ID NO: 796937 - DNA, 25 bp, Homo sapien
taggcttattttgccacacagagaa

SEQ ID NO: 796938 - DNA, 25 bp, Homo sapien
atatgcagaagattggaatttgtct

SEQ ID NO: 796939 - DNA, 25 bp, Homo sapien
tatgcagaagattggaatttgtctc

SEQ ID NO: 796940 - DNA, 25 bp, Homo sapien
atgcagaagattggaatttgtctcc

SEQ ID NO: 796941 - DNA, 25 bp, Homo sapien
tggacgggaaggaccgatattatta

SEQ ID NO: 796942 - DNA, 25 bp, Homo sapien
aaaatacctaagatacagctaatca

SEQ ID NO: 796943 - DNA, 25 bp, Homo sapien
gctggaggcactgtgttacctgatg

SEQ ID NO: 796944 - DNA, 25 bp, Homo sapien
gaaaaacttcccatgctcatggacg

SEQ ID NO: 796945 - DNA, 25 bp, Homo sapien
gatgatgggaatgttaccactgacc

SEQ ID NO: 796946 - DNA, 25 bp, Homo sapien
gatgggaatgttaccactgaccaca

SEQ ID NO: 796947 - DNA, 25 bp, Homo sapien
cagaaactactacgaatacctctat

SEQ ID NO: 796948 - DNA, 25 bp, Homo sapien
gaaactactacgaatacctctatgc

SEQ ID NO: 796949 - DNA, 25 bp, Homo sapien
taaattaacaacttaacatgacaac

SEQ ID NO: 796950 - DNA, 25 bp, Homo sapien
ttaaattaacaacttaacatgacaa

SEQ ID NO: 796951 - DNA, 25 bp, Homo sapien
cttaaattaacaacttaacatgaca

SEQ ID NO: 796952 - DNA, 25 bp, Homo sapien
taggaaagctcaccgaagccttggt

SEQ ID NO: 796953 - DNA, 25 bp, Homo sapien
cagtcaaactggtacagtgtagccc

SEQ ID NO: 796954 - DNA, 25 bp, Homo sapien
ggtcagtcacataggcatgcagtgc

SEQ ID NO: 796955 - DNA, 25 bp, Homo sapien
ttccaggaggaatgtgtgactacac

SEQ ID NO: 796956 - DNA, 25 bp, Homo sapien
caatgttgtcaaggctccagaggac

SEQ ID NO: 796957 - DNA, 25 bp, Homo sapien
catcagtgtcatggcctaggaggaa

SEQ ID NO: 796958 - DNA, 25 bp, Homo sapien
cctaagttaactagggcattgccac

SEQ ID NO: 796959 - DNA, 25 bp, Homo sapien
gaggaccagattttggcacagacac

SEQ ID NO: 796960 - DNA, 25 bp, Homo sapien
cattaggtttgatgccccttcaggt

SEQ ID NO: 796961 - DNA, 25 bp, Homo sapien
aaaggtacagttatacatcctgcag

SEQ ID NO: 796962 - DNA, 25 bp, Homo sapien
taagaaatgaactagctgctggtgt

SEQ ID NO: 796963 - DNA, 25 bp, Homo sapien
tgcactaacttttggactaggccca

SEQ ID NO: 796964 - DNA, 25 bp, Homo sapien
tctacgatagaaatgatagaacttc

SEQ ID NO: 796965 - DNA, 25 bp, Homo sapien
cttgagtagatgatattagggcaat

SEQ ID NO: 796966 - DNA, 25 bp, Homo sapien
tgtagcttccatctcgcctaagatt

SEQ ID NO: 796967 - DNA, 25 bp, Homo sapien
gagtgagtaggaagcaggcaatttc

SEQ ID NO: 796968 - DNA, 25 bp, Homo sapien
tttgtaagcattcaggagattgatg

SEQ ID NO: 796969 - DNA, 25 bp, Homo sapien
gatgtgttggtgctactttgtaagc

SEQ ID NO: 796970 - DNA, 25 bp, Homo sapien
cattcaggagattgatgaaggaaca

SEQ ID NO: 796971 - DNA, 25 bp, Homo sapien
caagactgttcaatatattgatgtg

SEQ ID NO: 796972 - DNA, 25 bp, Homo sapien
tgtagcacatgcctagaaatgaggt

SEQ ID NO: 796973 - DNA, 25 bp, Homo sapien
tcggtcattgacctcagaaggatct

SEQ ID NO: 796974 - DNA, 25 bp, Homo sapien
taatagagagttcccagatacgcct

SEQ ID NO: 796975 - DNA, 25 bp, Homo sapien
tacctatcctgatatctaggcaggg

SEQ ID NO: 796976 - DNA, 25 bp, Homo sapien
catgaaaacctgagaagaagatgaa

SEQ ID NO: 796977 - DNA, 25 bp, Homo sapien
gctgcaacagggtaatttaacacac

SEQ ID NO: 796978 - DNA, 25 bp, Homo sapien
tagccctatgtgttgcaagttcatt

SEQ ID NO: 796979 - DNA, 25 bp, Homo sapien
gaaatagggtcccttctgcaacctc

SEQ ID NO: 796980 - DNA, 25 bp, Homo sapien
gactcctctgcgaagacaggaagga

SEQ ID NO: 796981 - DNA, 25 bp, Homo sapien
gagtggctccggacgacagcccgct

SEQ ID NO: 796982 - DNA, 25 bp, Homo sapien
agggcgcagtcaggtttcttcgaca

SEQ ID NO: 796983 - DNA, 25 bp, Homo sapien
ggtggaccttctccgctgttctcct

SEQ ID NO: 796984 - DNA, 25 bp, Homo sapien
ccagtgaaggcgtgacaagttttgc

SEQ ID NO: 796985 - DNA, 25 bp, Homo sapien
cacttggtagcgcatttgaagagca

SEQ ID NO: 796986 - DNA, 25 bp, Homo sapien
gatctatagctcctgaccgtctgca

SEQ ID NO: 796987 - DNA, 25 bp, Homo sapien
tgcttgtagcgcatctgaagcgcca

SEQ ID NO: 796988 - DNA, 25 bp, Homo sapien
cagaggaattgtactccgcagctca

SEQ ID NO: 796989 - DNA, 25 bp, Homo sapien
tatttgtagcgcaaacggtctgcag

SEQ ID NO: 796990 - DNA, 25 bp, Homo sapien
taccagcaccatcatgcgagaaccg

SEQ ID NO: 796991 - DNA, 25 bp, Homo sapien
aatagagtgggagccattccaaaag

SEQ ID NO: 796992 - DNA, 25 bp, Homo sapien
tacatggtacctcttactagcaatc

SEQ ID NO: 796993 - DNA, 25 bp, Homo sapien
ttttgcaagctgaaacaacctatat

SEQ ID NO: 796994 - DNA, 25 bp, Homo sapien
cctatattttgtaatgtggccactt

SEQ ID NO: 796995 - DNA, 25 bp, Homo sapien
taccattaataatacacttgcccca

SEQ ID NO: 796996 - DNA, 25 bp, Homo sapien
taaaagagacaactgcccagggaac

SEQ ID NO: 796997 - DNA, 25 bp, Homo sapien
taaagccaagttgcctaggacagat

SEQ ID NO: 796998 - DNA, 25 bp, Homo sapien
cacaagttaacctgggacaagaagc

SEQ ID NO: 796999 - DNA, 25 bp, Homo sapien
tgtttaaacagcgactgaggcagca

SEQ ID NO: 797000 - DNA, 25 bp, Homo sapien
ttttgttattaaagaagccaggcca

SEQ ID NO: 797001 - DNA, 25 bp, Homo sapien
aaaggccacctgttcattatgattc

SEQ ID NO: 797002 - DNA, 25 bp, Homo sapien
caagagaaagttagtaatcagcacc

SEQ ID NO: 797003 - DNA, 25 bp, Homo sapien
taaattatcccttgctctacgtgct

SEQ ID NO: 797004 - DNA, 25 bp, Homo sapien
ctcccagctgtagcttcacttctgt

SEQ ID NO: 797005 - DNA, 25 bp, Homo sapien
cttcacttctgtggggatggaggcc

SEQ ID NO: 797006 - DNA, 25 bp, Homo sapien
gagacctcccagctgtagcttcact

SEQ ID NO: 797007 - DNA, 25 bp, Homo sapien
cccagctgtagcttcacttctgtgg

SEQ ID NO: 797008 - DNA, 25 bp, Homo sapien
tcttatggccggtgtgcttggagtt

SEQ ID NO: 797009 - DNA, 25 bp, Homo sapien
gttggggacacacgcactcttatgg

SEQ ID NO: 797010 - DNA, 25 bp, Homo sapien
cacgcactcttatggccggtgtgct

SEQ ID NO: 797011 - DNA, 25 bp, Homo sapien
gacacacgcactcttatggccggtg

SEQ ID NO: 797012 - DNA, 25 bp, Homo sapien
aatcagagcagacagcgacttggcg

SEQ ID NO: 797013 - DNA, 25 bp, Homo sapien
tactggtcaatcagcgcaggctcgt

SEQ ID NO: 797014 - DNA, 25 bp, Homo sapien
gctgaggccctcgtggtactggtca

SEQ ID NO: 797015 - DNA, 25 bp, Homo sapien
cattggagtagtcgatgacagaccc

SEQ ID NO: 797016 - DNA, 25 bp, Homo sapien
cttcctgcgtcaggcgcatgcgggc

SEQ ID NO: 797017 - DNA, 25 bp, Homo sapien
ttttcttcctgcgtcaggcgcatgc

SEQ ID NO: 797018 - DNA, 25 bp, Homo sapien
tctttttcttcctgcgtcaggcgca

SEQ ID NO: 797019 - DNA, 25 bp, Homo sapien
agtagaggcacaggttcagctttct

SEQ ID NO: 797020 - DNA, 25 bp, Homo sapien
ggcaggacaattgtcagcgtagtga

SEQ ID NO: 797021 - DNA, 25 bp, Homo sapien
cttggcaggacaattgtcagcgtag

SEQ ID NO: 797022 - DNA, 25 bp, Homo sapien
tggcaggacaattgtcagcgtagtg

SEQ ID NO: 797023 - DNA, 25 bp, Homo sapien
gcaggacaattgtcagcgtagtgac

SEQ ID NO: 797024 - DNA, 25 bp, Homo sapien
ttcccgccggcgaagactttgaggc

SEQ ID NO: 797025 - DNA, 25 bp, Homo sapien
tttctggcccggtcgctgaaggtcc

SEQ ID NO: 797026 - DNA, 25 bp, Homo sapien
ccttattatttctggcccggtcgct

SEQ ID NO: 797027 - DNA, 25 bp, Homo sapien
ttgtggggaccttattatttctggc

SEQ ID NO: 797028 - DNA, 25 bp, Homo sapien
catcttgtggggaccttattatttc

SEQ ID NO: 797029 - DNA, 25 bp, Homo sapien
gagtttcgtggacaactgggcccga

SEQ ID NO: 797030 - DNA, 25 bp, Homo sapien
tctcccaggtcaactatcaggtcgt

SEQ ID NO: 797031 - DNA, 25 bp, Homo sapien
tcgatcatggctcggacgaacaggg

SEQ ID NO: 797032 - DNA, 25 bp, Homo sapien
aattgcttccacaagtattggccag

SEQ ID NO: 797033 - DNA, 25 bp, Homo sapien
gaagaatggagactgagtcacatca

SEQ ID NO: 797034 - DNA, 25 bp, Homo sapien
ggaagaatggagactgagtcacatc

SEQ ID NO: 797035 - DNA, 25 bp, Homo sapien
gggaagaatggagactgagtcacat

SEQ ID NO: 797036 - DNA, 25 bp, Homo sapien
aagaatggagactgagtcacatcaa

SEQ ID NO: 797037 - DNA, 25 bp, Homo sapien
gatcatgtgtgctcagccagcgaac

SEQ ID NO: 797038 - DNA, 25 bp, Homo sapien
gatagatcgagtgctccatgtgata

SEQ ID NO: 797039 - DNA, 25 bp, Homo sapien
tcagaatcaaagacgatagatcgag

SEQ ID NO: 797040 - DNA, 25 bp, Homo sapien
tggtagcggcagtattcagaatcaa

SEQ ID NO: 797041 - DNA, 25 bp, Homo sapien
aatagagtggcggttgtggtgctgg

SEQ ID NO: 797042 - DNA, 25 bp, Homo sapien
gagcgatggtggtattggagaatac

SEQ ID NO: 797043 - DNA, 25 bp, Homo sapien
ctggataatagagtggcggttgtgg

SEQ ID NO: 797044 - DNA, 25 bp, Homo sapien
tgggagcgatggtggtattggagaa

SEQ ID NO: 797045 - DNA, 25 bp, Homo sapien
gacatagtaatacctcactggttgg

SEQ ID NO: 797046 - DNA, 25 bp, Homo sapien
tagtaatacctcactggttggtaaa

SEQ ID NO: 797047 - DNA, 25 bp, Homo sapien
catagtaatacctcactggttggta

SEQ ID NO: 797048 - DNA, 25 bp, Homo sapien
ggacatagtaatacctcactggttg

SEQ ID NO: 797049 - DNA, 25 bp, Homo sapien
tgccacaaaatctcgaagagctgcc

SEQ ID NO: 797050 - DNA, 25 bp, Homo sapien
tcatttctatgtgagggtcaaccag

SEQ ID NO: 797051 - DNA, 25 bp, Homo sapien
catgtccactgggaatactgtgtgc

SEQ ID NO: 797052 - DNA, 25 bp, Homo sapien
cggtgatctgggtagacgtgctcat

SEQ ID NO: 797053 - DNA, 25 bp, Homo sapien
ctggcggtaccagtgtggattccaa

SEQ ID NO: 797054 - DNA, 25 bp, Homo sapien
tacatatagtgatcttccttgtccg

SEQ ID NO: 797055 - DNA, 25 bp, Homo sapien
gtggattccaagtgatcatcacagg

SEQ ID NO: 797056 - DNA, 25 bp, Homo sapien
ttgtccgtctcgtcccactgggtac

SEQ ID NO: 797057 - DNA, 25 bp, Homo sapien
gcagagatcctgaaggacatgacag

SEQ ID NO: 797058 - DNA, 25 bp, Homo sapien
catgacaggtatttacagggtactg

SEQ ID NO: 797059 - DNA, 25 bp, Homo sapien
cagggtactgtaagatggaggcggc

SEQ ID NO: 797060 - DNA, 25 bp, Homo sapien
cacacagtcactgattgagaagctg

SEQ ID NO: 797061 - DNA, 25 bp, Homo sapien
cttccatagccgtttcagagaggat

SEQ ID NO: 797062 - DNA, 25 bp, Homo sapien
tttcagagaggatgtgcctcaggtg

SEQ ID NO: 797063 - DNA, 25 bp, Homo sapien
catagccgtttcagagaggatgtgc

SEQ ID NO: 797064 - DNA, 25 bp, Homo sapien
gcctcaggtggcctgaagatacagt

SEQ ID NO: 797065 - DNA, 25 bp, Homo sapien
ggcaaatactctgttgctctcagaa

SEQ ID NO: 797066 - DNA, 25 bp, Homo sapien
tcagcatttcctgcgtttgtatcag

SEQ ID NO: 797067 - DNA, 25 bp, Homo sapien
gatgtgtgccagtccagagtggccc

SEQ ID NO: 797068 - DNA, 25 bp, Homo sapien
ccgaaaccgcaagaaaagtcatgtc

SEQ ID NO: 797069 - DNA, 25 bp, Homo sapien
catgaacatctaacaacgctggagc

SEQ ID NO: 797070 - DNA, 25 bp, Homo sapien
caaagccggagtcattgggtacatg

SEQ ID NO: 797071 - DNA, 25 bp, Homo sapien
gattcttccaaaacgtcagctggtg

SEQ ID NO: 797072 - DNA, 25 bp, Homo sapien
tctaagggtgcagcgagaggatcac

SEQ ID NO: 797073 - DNA, 25 bp, Homo sapien
aaaatgtagcatggttcccgcaggg

SEQ ID NO: 797074 - DNA, 25 bp, Homo sapien
tcaattcagaagtccaagaggtacc

SEQ ID NO: 797075 - DNA, 25 bp, Homo sapien
tcaaggtagtagcaagggaccaggc

SEQ ID NO: 797076 - DNA, 25 bp, Homo sapien
caaatgtccgtgtgcacatgccagg

SEQ ID NO: 797077 - DNA, 25 bp, Homo sapien
taggggcaatggggttcagtggtag

SEQ ID NO: 797078 - DNA, 25 bp, Homo sapien
caatggggttcagtggtaggaggag

SEQ ID NO: 797079 - DNA, 25 bp, Homo sapien
atagagagaaatatagagtgaagag

SEQ ID NO: 797080 - DNA, 25 bp, Homo sapien
gggcaatggggttcagtggtaggag

SEQ ID NO: 797081 - DNA, 25 bp, Homo sapien
ttccttctcgtagtccttatgcaat

SEQ ID NO: 797082 - DNA, 25 bp, Homo sapien
gtagtccttatgcaattcgttagtg

SEQ ID NO: 797083 - DNA, 25 bp, Homo sapien
gatcaagagtgattcttatcctcat

SEQ ID NO: 797084 - DNA, 25 bp, Homo sapien
ttgaggtatggatcaagagtgattc

SEQ ID NO: 797085 - DNA, 25 bp, Homo sapien
aactgcactaggtgttgcagtccaa

SEQ ID NO: 797086 - DNA, 25 bp, Homo sapien
gttgcattcccctagaccaagccta

SEQ ID NO: 797087 - DNA, 25 bp, Homo sapien
ttgcagtccaaggtctgtgccctga

SEQ ID NO: 797088 - DNA, 25 bp, Homo sapien
ctgagttgcattcccctagaccaag

SEQ ID NO: 797089 - DNA, 25 bp, Homo sapien
gctatgtagggtatatactctgacc

SEQ ID NO: 797090 - DNA, 25 bp, Homo sapien
cttttgttcctctcccaagttattg

SEQ ID NO: 797091 - DNA, 25 bp, Homo sapien
tagggtatatactctgaccacatct

SEQ ID NO: 797092 - DNA, 25 bp, Homo sapien
cccaagttattgatgggtgtgaggc

SEQ ID NO: 797093 - DNA, 25 bp, Homo sapien
agcaactctttcaggattcattcca

SEQ ID NO: 797094 - DNA, 25 bp, Homo sapien
cacatacattttggcaagcaactct

SEQ ID NO: 797095 - DNA, 25 bp, Homo sapien
cattttggcaagcaactctttcagg

SEQ ID NO: 797096 - DNA, 25 bp, Homo sapien
ggcaagcaactctttcaggattcat

SEQ ID NO: 797097 - DNA, 25 bp, Homo sapien
gaaagtcattcactcacaatgtgtc

SEQ ID NO: 797098 - DNA, 25 bp, Homo sapien
tgcataggttacacacatagactcc

SEQ ID NO: 797099 - DNA, 25 bp, Homo sapien
gcccctagaaaggaatgcataggtt

SEQ ID NO: 797100 - DNA, 25 bp, Homo sapien
tgcaggcctgacattggagttaagt

SEQ ID NO: 797101 - DNA, 25 bp, Homo sapien
ttcgcaaatttgtgtgtcacacttg

SEQ ID NO: 797102 - DNA, 25 bp, Homo sapien
ttagtacacttgctgctgaagcaaa

SEQ ID NO: 797103 - DNA, 25 bp, Homo sapien
gcaaatttgtgtgtcacacttgtgc

SEQ ID NO: 797104 - DNA, 25 bp, Homo sapien
tgcttcgcaaatttgtgtgtcacac

SEQ ID NO: 797105 - DNA, 25 bp, Homo sapien
ttgtttcatgagtccagtaattcat

SEQ ID NO: 797106 - DNA, 25 bp, Homo sapien
gaggttgtagagggtaggacttggc

SEQ ID NO: 797107 - DNA, 25 bp, Homo sapien
ctccaagcacatagggtactgttac

SEQ ID NO: 797108 - DNA, 25 bp, Homo sapien
aagaggttgtagagggtaggacttg

SEQ ID NO: 797109 - DNA, 25 bp, Homo sapien
gctccaagcacatagggtactgtta

SEQ ID NO: 797110 - DNA, 25 bp, Homo sapien
gatactgtagagtaggagtaatcac

SEQ ID NO: 797111 - DNA, 25 bp, Homo sapien
actactgatactgtagagtaggagt

SEQ ID NO: 797112 - DNA, 25 bp, Homo sapien
ctgtagagtaggagtaatcacatat

SEQ ID NO: 797113 - DNA, 25 bp, Homo sapien
tagagtaggagtaatcacatatatt

SEQ ID NO: 797114 - DNA, 25 bp, Homo sapien
gagtttatcagctaatctccaatag

SEQ ID NO: 797115 - DNA, 25 bp, Homo sapien
tatcagctaatctccaatagatgca

SEQ ID NO: 797116 - DNA, 25 bp, Homo sapien
taatctccaatagatgcaccatatt

SEQ ID NO: 797117 - DNA, 25 bp, Homo sapien
attgagtttatcagctaatctccaa

SEQ ID NO: 797118 - DNA, 25 bp, Homo sapien
tatactctatgcagccatttccagt

SEQ ID NO: 797119 - DNA, 25 bp, Homo sapien
tctccaaatgaatcgtgtcctggat

SEQ ID NO: 797120 - DNA, 25 bp, Homo sapien
caaatgaatcgtgtcctggatttgt

SEQ ID NO: 797121 - DNA, 25 bp, Homo sapien
ttccagtaaataacctccaaagcca

SEQ ID NO: 797122 - DNA, 25 bp, Homo sapien
ctacatacacatatgatagtccagg

SEQ ID NO: 797123 - DNA, 25 bp, Homo sapien
gagcatgtgcttctccacccagttg

SEQ ID NO: 797124 - DNA, 25 bp, Homo sapien
cagctttagatttgtttgcaatgca

SEQ ID NO: 797125 - DNA, 25 bp, Homo sapien
tgggatggatacactgacagaactg

SEQ ID NO: 797126 - DNA, 25 bp, Homo sapien
catttagtcggtcagttgtttcagt

SEQ ID NO: 797127 - DNA, 25 bp, Homo sapien
ttgcacctgagcagaattataagtt

SEQ ID NO: 797128 - DNA, 25 bp, Homo sapien
tgcttttgcacctgagcagaattat

SEQ ID NO: 797129 - DNA, 25 bp, Homo sapien
cacctgagcagaattataagttact

SEQ ID NO: 797130 - DNA, 25 bp, Homo sapien
ttttgcacctgagcagaattataag

SEQ ID NO: 797131 - DNA, 25 bp, Homo sapien
taagttagaataaagatccactaca

SEQ ID NO: 797132 - DNA, 25 bp, Homo sapien
ccaggtgaaaggaaaggtattcact

SEQ ID NO: 797133 - DNA, 25 bp, Homo sapien
tagaggcacactgaataagttagaa

SEQ ID NO: 797134 - DNA, 25 bp, Homo sapien
tcctggtctagaggcacactgaata

SEQ ID NO: 797135 - DNA, 25 bp, Homo sapien
ccctgaacagtgcaatagggaattg

SEQ ID NO: 797136 - DNA, 25 bp, Homo sapien
cttttgccctgaacagtgcaatagg

SEQ ID NO: 797137 - DNA, 25 bp, Homo sapien
gaacagtgcaatagggaattgatgc

SEQ ID NO: 797138 - DNA, 25 bp, Homo sapien
tgcaatagggaattgatgcagccct

SEQ ID NO: 797139 - DNA, 25 bp, Homo sapien
gcgtcctcagaacagcagtccacac

SEQ ID NO: 797140 - DNA, 25 bp, Homo sapien
cagcagttatcagggtggccgtgca

SEQ ID NO: 797141 - DNA, 25 bp, Homo sapien
tccacaccagcagttatcagggtgg

SEQ ID NO: 797142 - DNA, 25 bp, Homo sapien
agggtggccgtgcagaatggaagcg

SEQ ID NO: 797143 - DNA, 25 bp, Homo sapien
ctcggaagaccttctccagagtgag

SEQ ID NO: 797144 - DNA, 25 bp, Homo sapien
ggaagaccttctccagagtgagctt

SEQ ID NO: 797145 - DNA, 25 bp, Homo sapien
tcggaagaccttctccagagtgagc

SEQ ID NO: 797146 - DNA, 25 bp, Homo sapien
cggaagaccttctccagagtgagct

SEQ ID NO: 797147 - DNA, 25 bp, Homo sapien
tgggtgatagcttctccaggccatg

SEQ ID NO: 797148 - DNA, 25 bp, Homo sapien
caacttccacccgggcaagtctaat

SEQ ID NO: 797149 - DNA, 25 bp, Homo sapien
cccgggcaagtctaatggtgcagcc

SEQ ID NO: 797150 - DNA, 25 bp, Homo sapien
accaatgggtgatagcttctccagg

SEQ ID NO: 797151 - DNA, 25 bp, Homo sapien
cagctactcatttattcttgatgga

SEQ ID NO: 797152 - DNA, 25 bp, Homo sapien
aacccaagcttgcagcttcaggagg

SEQ ID NO: 797153 - DNA, 25 bp, Homo sapien
tgctcttcaacccaagcttgcagct

SEQ ID NO: 797154 - DNA, 25 bp, Homo sapien
cctctgtgagagaagctcatgctct

SEQ ID NO: 797155 - DNA, 25 bp, Homo sapien
taggtggcctaaatgcaccagttcc

SEQ ID NO: 797156 - DNA, 25 bp, Homo sapien
gccaaaaatgctttcgaagaggttg

SEQ ID NO: 797157 - DNA, 25 bp, Homo sapien
ggccagatgttttcttggctgccca

SEQ ID NO: 797158 - DNA, 25 bp, Homo sapien
tgtggcacaggtaatgcagccccag

SEQ ID NO: 797159 - DNA, 25 bp, Homo sapien
gcacagtatgatgcacatggtgacc

SEQ ID NO: 797160 - DNA, 25 bp, Homo sapien
gaggagcaatgagagcgagagggtg

SEQ ID NO: 797161 - DNA, 25 bp, Homo sapien
gagagcgagagggtgttgcattcac

SEQ ID NO: 797162 - DNA, 25 bp, Homo sapien
ttacagcacagtatgatgcacatgg

SEQ ID NO: 797163 - DNA, 25 bp, Homo sapien
tgctgccatgtcaccctccaggtgt

SEQ ID NO: 797164 - DNA, 25 bp, Homo sapien
tcctgctgccatgtcaccctccagg

SEQ ID NO: 797165 - DNA, 25 bp, Homo sapien
gggaagtgaagagtgcctctgtcct

SEQ ID NO: 797166 - DNA, 25 bp, Homo sapien
gtgaagagtgcctctgtcctgctgc

SEQ ID NO: 797167 - DNA, 25 bp, Homo sapien
tagtctgagtctgcagttaactccg

SEQ ID NO: 797168 - DNA, 25 bp, Homo sapien
tggaaggccaagacgtaggcccaag

SEQ ID NO: 797169 - DNA, 25 bp, Homo sapien
tcctgttcgggtgttggctccggaa

SEQ ID NO: 797170 - DNA, 25 bp, Homo sapien
tgatgggattaactctagggccgca

SEQ ID NO: 797171 - DNA, 25 bp, Homo sapien
gaaggccggggtaacaggtgcctca

SEQ ID NO: 797172 - DNA, 25 bp, Homo sapien
ggcgcgctgcgctccccaacgccat

SEQ ID NO: 797173 - DNA, 25 bp, Homo sapien
gggcggccccgggaggcgcgctgcg

SEQ ID NO: 797174 - DNA, 25 bp, Homo sapien
gcgtcggcccccaggcgctccctgc

SEQ ID NO: 797175 - DNA, 25 bp, Homo sapien
cgcgcgtcggcccccaggcgctccc

SEQ ID NO: 797176 - DNA, 25 bp, Homo sapien
ggcgcagcgcgtagggcggctgcgg

SEQ ID NO: 797177 - DNA, 25 bp, Homo sapien
cgcagcgcgtagggcggctgcggcg

SEQ ID NO: 797178 - DNA, 25 bp, Homo sapien
gcgcagcgcgtagggcggctgcggc

SEQ ID NO: 797179 - DNA, 25 bp, Homo sapien
ggcgccggcccgctgggtacaccgc

SEQ ID NO: 797180 - DNA, 25 bp, Homo sapien
gctgggtacaccgcaacccgctcct

SEQ ID NO: 797181 - DNA, 25 bp, Homo sapien
tgggtacaccgcaacccgctcctca

SEQ ID NO: 797182 - DNA, 25 bp, Homo sapien
cgccggcccgctgggtacaccgcaa

SEQ ID NO: 797183 - DNA, 25 bp, Homo sapien
ctgtgacacggagagagacgagctc

SEQ ID NO: 797184 - DNA, 25 bp, Homo sapien
tgtgacacggagagagacgagctcc

SEQ ID NO: 797185 - DNA, 25 bp, Homo sapien
gctttgtgccaagaagcacctgaag

SEQ ID NO: 797186 - DNA, 25 bp, Homo sapien
gaagtcctaacacattggctgcagc

SEQ ID NO: 797187 - DNA, 25 bp, Homo sapien
ctatggtaggaggtcgcagtctagc

SEQ ID NO: 797188 - DNA, 25 bp, Homo sapien
gcacctgaagtcctaacacattggc

SEQ ID NO: 797189 - DNA, 25 bp, Homo sapien
cagccgattcccaagcccggttcgg

SEQ ID NO: 797190 - DNA, 25 bp, Homo sapien
ttcgggacgcaatccctcggccctg

SEQ ID NO: 797191 - DNA, 25 bp, Homo sapien
taacaccaacttgagaggcagccga

SEQ ID NO: 797192 - DNA, 25 bp, Homo sapien
gcaggaccgggagagcaggtgacgc

SEQ ID NO: 797193 - DNA, 25 bp, Homo sapien
tctaatcaccagtattgggtcaaga

SEQ ID NO: 797194 - DNA, 25 bp, Homo sapien
tgatcgtcccaacaggtgtattagg

SEQ ID NO: 797195 - DNA, 25 bp, Homo sapien
aaagtacctctcaaatggtatacgg

SEQ ID NO: 797196 - DNA, 25 bp, Homo sapien
tcacagtcaagagttacacagaatg

SEQ ID NO: 797197 - DNA, 25 bp, Homo sapien
ttcaggggtgaaaagccaatgttca

SEQ ID NO: 797198 - DNA, 25 bp, Homo sapien
gaaaagccaatgttcataatgatca

SEQ ID NO: 797199 - DNA, 25 bp, Homo sapien
gggtgaaaagccaatgttcataatg

SEQ ID NO: 797200 - DNA, 25 bp, Homo sapien
gccaatgttcataatgatcaaagaa

SEQ ID NO: 797201 - DNA, 25 bp, Homo sapien
tcaccaggtatcgaagctagagagg

SEQ ID NO: 797202 - DNA, 25 bp, Homo sapien
gaagggccatcgtacatagtgtcaa

SEQ ID NO: 797203 - DNA, 25 bp, Homo sapien
tcagttcgggagctaaggctgtcca

SEQ ID NO: 797204 - DNA, 25 bp, Homo sapien
tactgcctctgttggacttggaacc

SEQ ID NO: 797205 - DNA, 25 bp, Homo sapien
caatttccgagtactccatatcagg

SEQ ID NO: 797206 - DNA, 25 bp, Homo sapien
ggtgaaatcaccacctgcaagttct

SEQ ID NO: 797207 - DNA, 25 bp, Homo sapien
tcttttccacaactggatgcagaag

SEQ ID NO: 797208 - DNA, 25 bp, Homo sapien
gaattatacctggatctcaccctat

SEQ ID NO: 797209 - DNA, 25 bp, Homo sapien
gatgcgaatggcaaagtttaggagc

SEQ ID NO: 797210 - DNA, 25 bp, Homo sapien
ggcaaagtttaggagctcactggat

SEQ ID NO: 797211 - DNA, 25 bp, Homo sapien
ctaaagggtagaaagatgatgttca

SEQ ID NO: 797212 - DNA, 25 bp, Homo sapien
ttaggagctcactggataggcttgg

SEQ ID NO: 797213 - DNA, 25 bp, Homo sapien
taatgggctgtacacgtcccaccga

SEQ ID NO: 797214 - DNA, 25 bp, Homo sapien
acttccttaatgaggctgcagcaac

SEQ ID NO: 797215 - DNA, 25 bp, Homo sapien
tagcatggtccataacattctccca

SEQ ID NO: 797216 - DNA, 25 bp, Homo sapien
cagcctgagagcttccttaatgggc

SEQ ID NO: 797217 - DNA, 25 bp, Homo sapien
catgttgaactgtgctatgaagcta

SEQ ID NO: 797218 - DNA, 25 bp, Homo sapien
tacaggatggtaaagccgagaaaca

SEQ ID NO: 797219 - DNA, 25 bp, Homo sapien
ggcacacttgtccaacctgacagaa

SEQ ID NO: 797220 - DNA, 25 bp, Homo sapien
aaattcaaggcttcaagaggcacac

SEQ ID NO: 797221 - DNA, 25 bp, Homo sapien
ccagtacttcagagggcaaaacaac

SEQ ID NO: 797222 - DNA, 25 bp, Homo sapien
acttcagagggcaaaacaacagctg

SEQ ID NO: 797223 - DNA, 25 bp, Homo sapien
tctgaagactttaagatcattatag

SEQ ID NO: 797224 - DNA, 25 bp, Homo sapien
tcattatagacccagtacttcagag

SEQ ID NO: 797225 - DNA, 25 bp, Homo sapien
gcagtgccacagtcaacatactcat

SEQ ID NO: 797226 - DNA, 25 bp, Homo sapien
caatttgaaacaggaccagtcaaag

SEQ ID NO: 797227 - DNA, 25 bp, Homo sapien
cagtaattgtccaaaatctctgaag

SEQ ID NO: 797228 - DNA, 25 bp, Homo sapien
tttttcctagtaatagcagtgccac

SEQ ID NO: 797229 - DNA, 25 bp, Homo sapien
ccttagtagagaagcactcagtgga

SEQ ID NO: 797230 - DNA, 25 bp, Homo sapien
gcatgaaccattttggaatgcctcc

SEQ ID NO: 797231 - DNA, 25 bp, Homo sapien
caaagtgtttttgggatccttcata

SEQ ID NO: 797232 - DNA, 25 bp, Homo sapien
tcagtggaaaggagcaaactatctc

SEQ ID NO: 797233 - DNA, 25 bp, Homo sapien
caggctggacatggtaatcatacag

SEQ ID NO: 797234 - DNA, 25 bp, Homo sapien
taataactcagaagttctaagaaag

SEQ ID NO: 797235 - DNA, 25 bp, Homo sapien
tcttagccaaggaccggaaaattca

SEQ ID NO: 797236 - DNA, 25 bp, Homo sapien
gaagacactatccacaacagtagca

SEQ ID NO: 797237 - DNA, 25 bp, Homo sapien
aaatgaagaactcctaagtcctagt

SEQ ID NO: 797238 - DNA, 25 bp, Homo sapien
gatactggtagactttagtgacact

SEQ ID NO: 797239 - DNA, 25 bp, Homo sapien
aatgcattgagaatagctatacccg

SEQ ID NO: 797240 - DNA, 25 bp, Homo sapien
tcagtgcccagacagttaagggaac

SEQ ID NO: 797241 - DNA, 25 bp, Homo sapien
tccaagtatctatgactacagtaca

SEQ ID NO: 797242 - DNA, 25 bp, Homo sapien
acttctgctgatttacagaaattaa

SEQ ID NO: 797243 - DNA, 25 bp, Homo sapien
aaataaatcaatgaggtagtatttc

SEQ ID NO: 797244 - DNA, 25 bp, Homo sapien
tacaatgatattacagtatagtcct

SEQ ID NO: 797245 - DNA, 25 bp, Homo sapien
tacaggtcttggataaactctcaga

SEQ ID NO: 797246 - DNA, 25 bp, Homo sapien
tataacttacaggtcttggataaac

SEQ ID NO: 797247 - DNA, 25 bp, Homo sapien
aactcttccttcttataacttacag

SEQ ID NO: 797248 - DNA, 25 bp, Homo sapien
tcttggataaactctcagattgttc

SEQ ID NO: 797249 - DNA, 25 bp, Homo sapien
tacgcggcctctgtatgttaacatt

SEQ ID NO: 797250 - DNA, 25 bp, Homo sapien
ttgtccaagcaggtctaaagagtga

SEQ ID NO: 797251 - DNA, 25 bp, Homo sapien
caaagagggctattatgtcaatgca

SEQ ID NO: 797252 - DNA, 25 bp, Homo sapien
tttggtgcaaagaatatacgcggcc

SEQ ID NO: 797253 - DNA, 25 bp, Homo sapien
aatggtgataaactgcatctttgac

SEQ ID NO: 797254 - DNA, 25 bp, Homo sapien
ttggctagctacacaggaatggtga

SEQ ID NO: 797255 - DNA, 25 bp, Homo sapien
tgcaaccaagagaagcacggatgga

SEQ ID NO: 797256 - DNA, 25 bp, Homo sapien
cacggatggatacctttggctagct

SEQ ID NO: 797257 - DNA, 25 bp, Homo sapien
tctagaaattgaccagctaaagctg

SEQ ID NO: 797258 - DNA, 25 bp, Homo sapien
tcttcctgaatagtgagcttgctcc

SEQ ID NO: 797259 - DNA, 25 bp, Homo sapien
tcctacccttagtttgatgagtaaa

SEQ ID NO: 797260 - DNA, 25 bp, Homo sapien
tgctcctctagatctcagtttctca

SEQ ID NO: 797261 - DNA, 25 bp, Homo sapien
tattttgtaatatagcagactgtct

SEQ ID NO: 797262 - DNA, 25 bp, Homo sapien
tctaagaattagagacttctgaggt

SEQ ID NO: 797263 - DNA, 25 bp, Homo sapien
tccagacaacacaggctatatagcc

SEQ ID NO: 797264 - DNA, 25 bp, Homo sapien
taaaagaactcagtgacaattttcc

SEQ ID NO: 797265 - DNA, 25 bp, Homo sapien
catgatagacaatcgaagcttttcc

SEQ ID NO: 797266 - DNA, 25 bp, Homo sapien
tcatgatagacaatcgaagcttttc

SEQ ID NO: 797267 - DNA, 25 bp, Homo sapien
tgatagacaatcgaagcttttccag

SEQ ID NO: 797268 - DNA, 25 bp, Homo sapien
atagacaatcgaagcttttccagct

SEQ ID NO: 797269 - DNA, 25 bp, Homo sapien
taacaggccaagagtgacaatgctt

SEQ ID NO: 797270 - DNA, 25 bp, Homo sapien
gatattacaatagtgcaaacctggt

SEQ ID NO: 797271 - DNA, 25 bp, Homo sapien
tttcctgtgtatgaacgacagcagc

SEQ ID NO: 797272 - DNA, 25 bp, Homo sapien
tagaaaagtctctccactgggtaca

SEQ ID NO: 797273 - DNA, 25 bp, Homo sapien
tctaactctgaatggtatgttccaa

SEQ ID NO: 797274 - DNA, 25 bp, Homo sapien
gaggtactggtgaaagaagacaaac

SEQ ID NO: 797275 - DNA, 25 bp, Homo sapien
tatgttccaatagtagcaaactggg

SEQ ID NO: 797276 - DNA, 25 bp, Homo sapien
taaatagtgatggtcatggctgact

SEQ ID NO: 797277 - DNA, 25 bp, Homo sapien
ccaaaattgagtattggacttcact

SEQ ID NO: 797278 - DNA, 25 bp, Homo sapien
aaacagattctgtattgagctgcca

SEQ ID NO: 797279 - DNA, 25 bp, Homo sapien
tcttcaggattaggaatccaagttg

SEQ ID NO: 797280 - DNA, 25 bp, Homo sapien
ccttctcttcaggattaggaatcca

SEQ ID NO: 797281 - DNA, 25 bp, Homo sapien
ctcccaattcttgctaacagtcgtt

SEQ ID NO: 797282 - DNA, 25 bp, Homo sapien
ttgtctcccaattcttgctaacagt

SEQ ID NO: 797283 - DNA, 25 bp, Homo sapien
gtctcccaattcttgctaacagtcg

SEQ ID NO: 797284 - DNA, 25 bp, Homo sapien
cctggccgaatgtcacttcttgtct

SEQ ID NO: 797285 - DNA, 25 bp, Homo sapien
atgggagaatcgctaagtccagaag

SEQ ID NO: 797286 - DNA, 25 bp, Homo sapien
gggtatggcccagtgataagtaatg

SEQ ID NO: 797287 - DNA, 25 bp, Homo sapien
ttttacatccattggagaggccgag

SEQ ID NO: 797288 - DNA, 25 bp, Homo sapien
caggaactagtaaatcatgtgaggg

SEQ ID NO: 797289 - DNA, 25 bp, Homo sapien
agcggcacccggcccatgattcttc

SEQ ID NO: 797290 - DNA, 25 bp, Homo sapien
aatgtagacatctatccttttacta

SEQ ID NO: 797291 - DNA, 25 bp, Homo sapien
tccttcaaggttaaatgtagacatc

SEQ ID NO: 797292 - DNA, 25 bp, Homo sapien
tgccgcccaggatcaagagattttc

SEQ ID NO: 797293 - DNA, 25 bp, Homo sapien
tttcgtacttatatgccgcatttca

SEQ ID NO: 797294 - DNA, 25 bp, Homo sapien
catttgttaatgctattttcttgtt

SEQ ID NO: 797295 - DNA, 25 bp, Homo sapien
ctgtagtcctttcgtacttatatgc

SEQ ID NO: 797296 - DNA, 25 bp, Homo sapien
gtcctttcgtacttatatgccgcat

SEQ ID NO: 797297 - DNA, 25 bp, Homo sapien
taatgccgactgtattgtaagtcct

SEQ ID NO: 797298 - DNA, 25 bp, Homo sapien
tccataaagactgccaaaaaatgtt

SEQ ID NO: 797299 - DNA, 25 bp, Homo sapien
tcctcacagcgggatattgggaaaa

SEQ ID NO: 797300 - DNA, 25 bp, Homo sapien
agtcttcaattagctataatcacgc

SEQ ID NO: 797301 - DNA, 25 bp, Homo sapien
ggtactgttttcttcttgactttca

SEQ ID NO: 797302 - DNA, 25 bp, Homo sapien
ctgagtgggtactgttttcttcttg

SEQ ID NO: 797303 - DNA, 25 bp, Homo sapien
ctgttttcttcttgactttcaacat

SEQ ID NO: 797304 - DNA, 25 bp, Homo sapien
tactgttttcttcttgactttcaac

SEQ ID NO: 797305 - DNA, 25 bp, Homo sapien
ccagcttttctacacgtttttcaag

SEQ ID NO: 797306 - DNA, 25 bp, Homo sapien
gtcaacttcgtcatttctcctgtca

SEQ ID NO: 797307 - DNA, 25 bp, Homo sapien
tctcctgtcatagtcttcattggag

SEQ ID NO: 797308 - DNA, 25 bp, Homo sapien
aagttcatactcagctgaagcagcc

SEQ ID NO: 797309 - DNA, 25 bp, Homo sapien
gaaatcagaaggaagcctttctgct

SEQ ID NO: 797310 - DNA, 25 bp, Homo sapien
ggagagaaatcagaaggaagccttt

SEQ ID NO: 797311 - DNA, 25 bp, Homo sapien
tgggagagaaatcagaaggaagcct

SEQ ID NO: 797312 - DNA, 25 bp, Homo sapien
ccctgctctctttcaaccttctccc

SEQ ID NO: 797313 - DNA, 25 bp, Homo sapien
tactacagtaggcagggtgtcattc

SEQ ID NO: 797314 - DNA, 25 bp, Homo sapien
aatctctgatcccacgggtcagcag

SEQ ID NO: 797315 - DNA, 25 bp, Homo sapien
gtaatctctgatcccacgggtcagc

SEQ ID NO: 797316 - DNA, 25 bp, Homo sapien
tggtaatctctgatcccacgggtca

SEQ ID NO: 797317 - DNA, 25 bp, Homo sapien
atctctgatcccacgggtcagcagt

SEQ ID NO: 797318 - DNA, 25 bp, Homo sapien
taaaggccacttattattcctgtgg

SEQ ID NO: 797319 - DNA, 25 bp, Homo sapien
gagtgaagtctggaacctcatcctt

SEQ ID NO: 797320 - DNA, 25 bp, Homo sapien
tgtggctgacccatcgagaacccag

SEQ ID NO: 797321 - DNA, 25 bp, Homo sapien
gaacctcatccttaaaggccactta

SEQ ID NO: 797322 - DNA, 25 bp, Homo sapien
tccccttagtgtattgctcttgtgt

SEQ ID NO: 797323 - DNA, 25 bp, Homo sapien
aataccatagaatttctctcctgta

SEQ ID NO: 797324 - DNA, 25 bp, Homo sapien
ttcacactgatgaaggatgaatgat

SEQ ID NO: 797325 - DNA, 25 bp, Homo sapien
ttaagagatgatcaatgtagcctct

SEQ ID NO: 797326 - DNA, 25 bp, Homo sapien
caacacccattccaataatacttat

SEQ ID NO: 797327 - DNA, 25 bp, Homo sapien
tcttgacgaatattcccagcttttc

SEQ ID NO: 797328 - DNA, 25 bp, Homo sapien
tctgttactgtcttgacgaatattc

SEQ ID NO: 797329 - DNA, 25 bp, Homo sapien
taatacttataccaagaccatcctc

SEQ ID NO: 797330 - DNA, 25 bp, Homo sapien
taaacactgtgcaaatgaacacacc

SEQ ID NO: 797331 - DNA, 25 bp, Homo sapien
tgcttaccacaacctgcgatgtaga

SEQ ID NO: 797332 - DNA, 25 bp, Homo sapien
taagtaatttgttgaatatccccag

SEQ ID NO: 797333 - DNA, 25 bp, Homo sapien
tattattgactagaggaactgcact

SEQ ID NO: 797334 - DNA, 25 bp, Homo sapien
tggatagttacttattgacacagtg

SEQ ID NO: 797335 - DNA, 25 bp, Homo sapien
ggatagttacttattgacacagtgt

SEQ ID NO: 797336 - DNA, 25 bp, Homo sapien
atagttacttattgacacagtgttt

SEQ ID NO: 797337 - DNA, 25 bp, Homo sapien
gatagttacttattgacacagtgtt

SEQ ID NO: 797338 - DNA, 25 bp, Homo sapien
cacatgatataagaggtgggttcct

SEQ ID NO: 797339 - DNA, 25 bp, Homo sapien
aaagcaagttagatagttgatataa

SEQ ID NO: 797340 - DNA, 25 bp, Homo sapien
caggtcacatgatataagaggtggg

SEQ ID NO: 797341 - DNA, 25 bp, Homo sapien
caagttagatagttgatataatggg

SEQ ID NO: 797342 - DNA, 25 bp, Homo sapien
tggaaaatatcttggagtggaattg

SEQ ID NO: 797343 - DNA, 25 bp, Homo sapien
aagttgtcattcacatgcaagactt

SEQ ID NO: 797344 - DNA, 25 bp, Homo sapien
catgcaagactttatgtagacatat

SEQ ID NO: 797345 - DNA, 25 bp, Homo sapien
cacatgcaagactttatgtagacat

SEQ ID NO: 797346 - DNA, 25 bp, Homo sapien
gcagcgtccctaccttactggataa

SEQ ID NO: 797347 - DNA, 25 bp, Homo sapien
cattcagaagacatgaggcaaaagc

SEQ ID NO: 797348 - DNA, 25 bp, Homo sapien
gctgccaggccatacatcaataaga

SEQ ID NO: 797349 - DNA, 25 bp, Homo sapien
tactggataagatagtctagggcac

SEQ ID NO: 797350 - DNA, 25 bp, Homo sapien
ttcctctagctctaagtagtaatgc

SEQ ID NO: 797351 - DNA, 25 bp, Homo sapien
tagtaatgcctttggtagcaatgtg

SEQ ID NO: 797352 - DNA, 25 bp, Homo sapien
cctttggtagcaatgtggtagtagt

SEQ ID NO: 797353 - DNA, 25 bp, Homo sapien
atgtggtagtagtattagagatttg

SEQ ID NO: 797354 - DNA, 25 bp, Homo sapien
gatccaggccagtagtgtcagccaa

SEQ ID NO: 797355 - DNA, 25 bp, Homo sapien
caggtatgggatccaggccagtagt

SEQ ID NO: 797356 - DNA, 25 bp, Homo sapien
tccaggccagtagtgtcagccaagt

SEQ ID NO: 797357 - DNA, 25 bp, Homo sapien
ggccagtagtgtcagccaagtaaag

SEQ ID NO: 797358 - DNA, 25 bp, Homo sapien
aagggagcagcccatattgcggctg

SEQ ID NO: 797359 - DNA, 25 bp, Homo sapien
caggagctccacttccctagggtca

SEQ ID NO: 797360 - DNA, 25 bp, Homo sapien
cccatattgcggctgcagacccagg

SEQ ID NO: 797361 - DNA, 25 bp, Homo sapien
ggagctccacttccctagggtcaag

SEQ ID NO: 797362 - DNA, 25 bp, Homo sapien
acccaccaagctgattccatccact

SEQ ID NO: 797363 - DNA, 25 bp, Homo sapien
ttgctgcaaaattctgtgtcacacc

SEQ ID NO: 797364 - DNA, 25 bp, Homo sapien
tgtgtcacacccaccaagctgattc

SEQ ID NO: 797365 - DNA, 25 bp, Homo sapien
tgctgcaaaattctgtgtcacaccc

SEQ ID NO: 797366 - DNA, 25 bp, Homo sapien
ttcgctgagaaattttgcctctgtg

SEQ ID NO: 797367 - DNA, 25 bp, Homo sapien
tttcgctgagaaattttgcctctgt

SEQ ID NO: 797368 - DNA, 25 bp, Homo sapien
tatttcgctgagaaattttgcctct

SEQ ID NO: 797369 - DNA, 25 bp, Homo sapien
agtatttcgctgagaaattttgcct

SEQ ID NO: 797370 - DNA, 25 bp, Homo sapien
agagttttctcgtggagtcttcaaa

SEQ ID NO: 797371 - DNA, 25 bp, Homo sapien
ttgtaacctgtgactaactttactg

SEQ ID NO: 797372 - DNA, 25 bp, Homo sapien
tcatcttcaattgttacgcccacaa

SEQ ID NO: 797373 - DNA, 25 bp, Homo sapien
tctgaaaagagggaccgtttgacat

SEQ ID NO: 797374 - DNA, 25 bp, Homo sapien
gatacccatgtctagctccaattta

SEQ ID NO: 797375 - DNA, 25 bp, Homo sapien
tacctgcccctaataactaataatg

SEQ ID NO: 797376 - DNA, 25 bp, Homo sapien
tccccagtgtatattacctacagcg

SEQ ID NO: 797377 - DNA, 25 bp, Homo sapien
gaaatcttagtgttctagctgctgc

SEQ ID NO: 797378 - DNA, 25 bp, Homo sapien
tgatccgtactatgataggctgcct

SEQ ID NO: 797379 - DNA, 25 bp, Homo sapien
gccagtggtcaacaagacaggcaag

SEQ ID NO: 797380 - DNA, 25 bp, Homo sapien
taggtacaccaactatgccagtggt

SEQ ID NO: 797381 - DNA, 25 bp, Homo sapien
tctatccttgcatgtaggctggaca

SEQ ID NO: 797382 - DNA, 25 bp, Homo sapien
ctgttggtgagctactgtgattttt

SEQ ID NO: 797383 - DNA, 25 bp, Homo sapien
ccactgttggtgagctactgtgatt

SEQ ID NO: 797384 - DNA, 25 bp, Homo sapien
atccactgttggtgagctactgtga

SEQ ID NO: 797385 - DNA, 25 bp, Homo sapien
cactgttggtgagctactgtgattt

SEQ ID NO: 797386 - DNA, 25 bp, Homo sapien
cagctcccaaatatgtttaggattg

SEQ ID NO: 797387 - DNA, 25 bp, Homo sapien
taggtgtgcagctcccaaatatgtt

SEQ ID NO: 797388 - DNA, 25 bp, Homo sapien
tcctcttttaggtgtgcagctccca

SEQ ID NO: 797389 - DNA, 25 bp, Homo sapien
gggagctcctcttttaggtgtgcag

SEQ ID NO: 797390 - DNA, 25 bp, Homo sapien
tcaattgccccttgtactatagtgg

SEQ ID NO: 797391 - DNA, 25 bp, Homo sapien
tcaacattaaggagatctaacatcc

SEQ ID NO: 797392 - DNA, 25 bp, Homo sapien
gacaccagaaaatgcctcatcaagg

SEQ ID NO: 797393 - DNA, 25 bp, Homo sapien
catcttagggcaagcggtagtctta

SEQ ID NO: 797394 - DNA, 25 bp, Homo sapien
gttccagtgtctggcttatcaactg

SEQ ID NO: 797395 - DNA, 25 bp, Homo sapien
aactgggcaacctcgctcacttgtc

SEQ ID NO: 797396 - DNA, 25 bp, Homo sapien
ggcttatcaactgggcaacctcgct

SEQ ID NO: 797397 - DNA, 25 bp, Homo sapien
ggcaacctcgctcacttgtcctggt

SEQ ID NO: 797398 - DNA, 25 bp, Homo sapien
ttgttattgttattgcagttgccag

SEQ ID NO: 797399 - DNA, 25 bp, Homo sapien
tattgttattgcagttgccagacat

SEQ ID NO: 797400 - DNA, 25 bp, Homo sapien
ttattgttattgcagttgccagaca

SEQ ID NO: 797401 - DNA, 25 bp, Homo sapien
tgttattgttattgcagttgccaga

SEQ ID NO: 797402 - DNA, 25 bp, Homo sapien
aaaggtgcacaggattaagctgaca

SEQ ID NO: 797403 - DNA, 25 bp, Homo sapien
ttaaaagaccactagcccagcaatg

SEQ ID NO: 797404 - DNA, 25 bp, Homo sapien
tttctagggagtacaaagtctacac

SEQ ID NO: 797405 - DNA, 25 bp, Homo sapien
ttaaatggaaccctgaaaggtgcac

SEQ ID NO: 797406 - DNA, 25 bp, Homo sapien
aactgaggtcataaaggcattcttc

SEQ ID NO: 797407 - DNA, 25 bp, Homo sapien
tatatctacagtgctgtttctgggc

SEQ ID NO: 797408 - DNA, 25 bp, Homo sapien
catttacgtagtcagtccacttgag

SEQ ID NO: 797409 - DNA, 25 bp, Homo sapien
aattgcaccaaatcaacagttactg

SEQ ID NO: 797410 - DNA, 25 bp, Homo sapien
taaacattttactccagcgtatggt

SEQ ID NO: 797411 - DNA, 25 bp, Homo sapien
taatgtagtcagttttcttagtggc

SEQ ID NO: 797412 - DNA, 25 bp, Homo sapien
taaaagtattctttcgatgaacaga

SEQ ID NO: 797413 - DNA, 25 bp, Homo sapien
atccaaactatgtgtcattttgaca

SEQ ID NO: 797414 - DNA, 25 bp, Homo sapien
ttctgatgccagtagaactgtggga

SEQ ID NO: 797415 - DNA, 25 bp, Homo sapien
ttttacttgccaagagaacaatgaa

SEQ ID NO: 797416 - DNA, 25 bp, Homo sapien
tgatgccagtagaactgtgggaaga

SEQ ID NO: 797417 - DNA, 25 bp, Homo sapien
caatgaagtacttattctgatgcca

SEQ ID NO: 797418 - DNA, 25 bp, Homo sapien
aatttatccctgcaatcccggtgtg

SEQ ID NO: 797419 - DNA, 25 bp, Homo sapien
taaccgtgtacatgagaacatcctg

SEQ ID NO: 797420 - DNA, 25 bp, Homo sapien
tcagggaaactaaatggcgctaatc

SEQ ID NO: 797421 - DNA, 25 bp, Homo sapien
gagagtgccaggtacaatttatccc

SEQ ID NO: 797422 - DNA, 25 bp, Homo sapien
gttgttaagcgttcttcttgattct

SEQ ID NO: 797423 - DNA, 25 bp, Homo sapien
ttcttgattcttttgtggactttgc

SEQ ID NO: 797424 - DNA, 25 bp, Homo sapien
ccaaattacctgcagtactgttaaa

SEQ ID NO: 797425 - DNA, 25 bp, Homo sapien
tttgccagtatcctctccttcccaa

SEQ ID NO: 797426 - DNA, 25 bp, Homo sapien
tagttgcctccaaggtaatttgctg

SEQ ID NO: 797427 - DNA, 25 bp, Homo sapien
aaaacttccatgaacggtgtactga

SEQ ID NO: 797428 - DNA, 25 bp, Homo sapien
tgttccttcaggtagcacgttatct

SEQ ID NO: 797429 - DNA, 25 bp, Homo sapien
ccacctatgtttgcacgtgaaggaa

SEQ ID NO: 797430 - DNA, 25 bp, Homo sapien
aggtggaggtgagttatttgaaaat

SEQ ID NO: 797431 - DNA, 25 bp, Homo sapien
ggtggaggtgagttatttgaaaata

SEQ ID NO: 797432 - DNA, 25 bp, Homo sapien
caaagacttcaatggccatgtcgct

SEQ ID NO: 797433 - DNA, 25 bp, Homo sapien
gaaggacaggtcctacctcatcttc

SEQ ID NO: 797434 - DNA, 25 bp, Homo sapien
tgagcttgcttgtgtccagttctga

SEQ ID NO: 797435 - DNA, 25 bp, Homo sapien
tctttgaacttgtgactgagcttgc

SEQ ID NO: 797436 - DNA, 25 bp, Homo sapien
caaggttctattcttggcccttctc

SEQ ID NO: 797437 - DNA, 25 bp, Homo sapien
attgcctcaggagtctgatctcttc

SEQ ID NO: 797438 - DNA, 25 bp, Homo sapien
ccaaggttctattcttggcccttct

SEQ ID NO: 797439 - DNA, 25 bp, Homo sapien
ggttctattcttggcccttctctga

SEQ ID NO: 797440 - DNA, 25 bp, Homo sapien
agaccatcattttcatctcttcagt

SEQ ID NO: 797441 - DNA, 25 bp, Homo sapien
gaccatcattttcatctcttcagtc

SEQ ID NO: 797442 - DNA, 25 bp, Homo sapien
ccatcattttcatctcttcagtcat

SEQ ID NO: 797443 - DNA, 25 bp, Homo sapien
aagaccatcattttcatctcttcag

SEQ ID NO: 797444 - DNA, 25 bp, Homo sapien
tattagcaataagagtcacagttta

SEQ ID NO: 797445 - DNA, 25 bp, Homo sapien
ttttgaagactcagacccccaacag

SEQ ID NO: 797446 - DNA, 25 bp, Homo sapien
gaagaaggaactgaacgaatcattc

SEQ ID NO: 797447 - DNA, 25 bp, Homo sapien
acttatgggttcacaatttcttgtc

SEQ ID NO: 797448 - DNA, 25 bp, Homo sapien
gtgagttgcaagcacattctgatca

SEQ ID NO: 797449 - DNA, 25 bp, Homo sapien
aaatctgcaagaaaggtggcgctat

SEQ ID NO: 797450 - DNA, 25 bp, Homo sapien
ggcgctatggtcctgtgagttgcaa

SEQ ID NO: 797451 - DNA, 25 bp, Homo sapien
tgcaagaaaggtggcgctatggtcc

SEQ ID NO: 797452 - DNA, 25 bp, Homo sapien
tcaatttttgaatctctgcttctgt

SEQ ID NO: 797453 - DNA, 25 bp, Homo sapien
tggtcttcaatttttgaatctctgc

SEQ ID NO: 797454 - DNA, 25 bp, Homo sapien
ctgtaactgcatgtttgatttgcaa

SEQ ID NO: 797455 - DNA, 25 bp, Homo sapien
gcttctgtaactgcatgtttgattt

SEQ ID NO: 797456 - DNA, 25 bp, Homo sapien
taatgtttgggcctcaatccagtag

SEQ ID NO: 797457 - DNA, 25 bp, Homo sapien
tttccaaggcctgatactggctttg

SEQ ID NO: 797458 - DNA, 25 bp, Homo sapien
ttttgttgaaaatccttgatcaact

SEQ ID NO: 797459 - DNA, 25 bp, Homo sapien
tcactgtgtggcataatgtttgggc

SEQ ID NO: 797460 - DNA, 25 bp, Homo sapien
cctgtcttttgatgaaatcaagctc

SEQ ID NO: 797461 - DNA, 25 bp, Homo sapien
gcacttccacaagatgagctttttc

SEQ ID NO: 797462 - DNA, 25 bp, Homo sapien
ccacaagatgagctttttccaaatc

SEQ ID NO: 797463 - DNA, 25 bp, Homo sapien
ccgcacttggaggccttgcacttcc

SEQ ID NO: 797464 - DNA, 25 bp, Homo sapien
cttgacttaggccatcttggcaaga

SEQ ID NO: 797465 - DNA, 25 bp, Homo sapien
agttctccatggtatcccctttaga

SEQ ID NO: 797466 - DNA, 25 bp, Homo sapien
ttagagacttcaccaagagatgttc

SEQ ID NO: 797467 - DNA, 25 bp, Homo sapien
gttaacttgagtcccattttgcttc

SEQ ID NO: 797468 - DNA, 25 bp, Homo sapien
gaagcagcacttggtagcaatattc

SEQ ID NO: 797469 - DNA, 25 bp, Homo sapien
aactggtggtccactcactgagtag

SEQ ID NO: 797470 - DNA, 25 bp, Homo sapien
taccttgcagtataatcggcaggac

SEQ ID NO: 797471 - DNA, 25 bp, Homo sapien
tcggcaggacctagtactttctttc

SEQ ID NO: 797472 - DNA, 25 bp, Homo sapien
gggagagagtcaatcttataagctc

SEQ ID NO: 797473 - DNA, 25 bp, Homo sapien
tctatatttgtagctgcccattaag

SEQ ID NO: 797474 - DNA, 25 bp, Homo sapien
gttcattagttgtgataactgggag

SEQ ID NO: 797475 - DNA, 25 bp, Homo sapien
ttcctccttccgataaaatctatat

SEQ ID NO: 797476 - DNA, 25 bp, Homo sapien
ggtaaccagtaacatcaggtaagga

SEQ ID NO: 797477 - DNA, 25 bp, Homo sapien
taacatcaggtaaggatcaggtgac

SEQ ID NO: 797478 - DNA, 25 bp, Homo sapien
aaaatctcaaggtaaccagtaacat

SEQ ID NO: 797479 - DNA, 25 bp, Homo sapien
catcaggtaaggatcaggtgaccac

SEQ ID NO: 797480 - DNA, 25 bp, Homo sapien
aatattgaaagataatcagtgagag

SEQ ID NO: 797481 - DNA, 25 bp, Homo sapien
gaatattgaaagataatcagtgaga

SEQ ID NO: 797482 - DNA, 25 bp, Homo sapien
tattgaaagataatcagtgagagaa

SEQ ID NO: 797483 - DNA, 25 bp, Homo sapien
ttgaaagataatcagtgagagaaac

SEQ ID NO: 797484 - DNA, 25 bp, Homo sapien
tgtctctgggactgcttcattcaag

SEQ ID NO: 797485 - DNA, 25 bp, Homo sapien
tgcttttgaatccaggcgctctgtc

SEQ ID NO: 797486 - DNA, 25 bp, Homo sapien
tatcatacagtcttgtcctagaggg

SEQ ID NO: 797487 - DNA, 25 bp, Homo sapien
agagctgggctcgagttttcagtgc

SEQ ID NO: 797488 - DNA, 25 bp, Homo sapien
tcaggaaacggtcaagggtgctcac

SEQ ID NO: 797489 - DNA, 25 bp, Homo sapien
cagtacaaatcaggaaacggtcaag

SEQ ID NO: 797490 - DNA, 25 bp, Homo sapien
gatatactccaacagtacaaatcag

SEQ ID NO: 797491 - DNA, 25 bp, Homo sapien
taggaacaatgatatactccaacag

SEQ ID NO: 797492 - DNA, 25 bp, Homo sapien
catagactctgtttgcagaaaaatc

SEQ ID NO: 797493 - DNA, 25 bp, Homo sapien
caactaggacatagactctgtttgc

SEQ ID NO: 797494 - DNA, 25 bp, Homo sapien
taggacatagactctgtttgcagaa

SEQ ID NO: 797495 - DNA, 25 bp, Homo sapien
ctctgtttgcagaaaaatcataatc

SEQ ID NO: 797496 - DNA, 25 bp, Homo sapien
taaggaaggttatgccactgagtat

SEQ ID NO: 797497 - DNA, 25 bp, Homo sapien
cagatgagaatgcatggttcatacc

SEQ ID NO: 797498 - DNA, 25 bp, Homo sapien
tagtgaatccccatgaaaaccagtt

SEQ ID NO: 797499 - DNA, 25 bp, Homo sapien
cagataatgctcttggttagttcac

SEQ ID NO: 797500 - DNA, 25 bp, Homo sapien
gtggaagtaatttggtaatatgcat

SEQ ID NO: 797501 - DNA, 25 bp, Homo sapien
ggtggaagtaatttggtaatatgca

SEQ ID NO: 797502 - DNA, 25 bp, Homo sapien
tggtcagacgagaagggcacattgc

SEQ ID NO: 797503 - DNA, 25 bp, Homo sapien
ggcacattgctatccaccggggtga

SEQ ID NO: 797504 - DNA, 25 bp, Homo sapien
cttcttgaaattcagctatgtggtc

SEQ ID NO: 797505 - DNA, 25 bp, Homo sapien
agtgaagtgtctccccacatagagg

SEQ ID NO: 797506 - DNA, 25 bp, Homo sapien
ccttagtgatttgggatctttggca

SEQ ID NO: 797507 - DNA, 25 bp, Homo sapien
cgccaatgaactggatgcccttagt

SEQ ID NO: 797508 - DNA, 25 bp, Homo sapien
ccagatccacaaacttccgcttaat

SEQ ID NO: 797509 - DNA, 25 bp, Homo sapien
ttttcctccttgcaccgccaatgaa

SEQ ID NO: 797510 - DNA, 25 bp, Homo sapien
tgctggaattccttcgcaaaggcgc

SEQ ID NO: 797511 - DNA, 25 bp, Homo sapien
gctggaattccttcgcaaaggcgcc

SEQ ID NO: 797512 - DNA, 25 bp, Homo sapien
ggtggtcactcctacatacatgtgg

SEQ ID NO: 797513 - DNA, 25 bp, Homo sapien
cactagcattgtgggtagccaggca

SEQ ID NO: 797514 - DNA, 25 bp, Homo sapien
taagcatagttgacagtgcccacaa

SEQ ID NO: 797515 - DNA, 25 bp, Homo sapien
ccaagtgcagcaaaagatggtggtc

SEQ ID NO: 797516 - DNA, 25 bp, Homo sapien
caaagcaggcatcgactgtggtgaa

SEQ ID NO: 797517 - DNA, 25 bp, Homo sapien
taaaaatacagtggtggcgaggcag

SEQ ID NO: 797518 - DNA, 25 bp, Homo sapien
ggcgaggcagccaatctagaagtct

SEQ ID NO: 797519 - DNA, 25 bp, Homo sapien
ctagaagtctagctgtgggttcaaa

SEQ ID NO: 797520 - DNA, 25 bp, Homo sapien
tgagggaggccatctcacacatgcc

SEQ ID NO: 797521 - DNA, 25 bp, Homo sapien
gaggccatctcacacatgcctgtga

SEQ ID NO: 797522 - DNA, 25 bp, Homo sapien
gggaggccatctcacacatgcctgt

SEQ ID NO: 797523 - DNA, 25 bp, Homo sapien
gagggaggccatctcacacatgcct

SEQ ID NO: 797524 - DNA, 25 bp, Homo sapien
gccactgagcacatatttgaaaagg

SEQ ID NO: 797525 - DNA, 25 bp, Homo sapien
ttgaaaagggatggaaccaagtcat

SEQ ID NO: 797526 - DNA, 25 bp, Homo sapien
ttctctagttgtctcatgtcgcgca

SEQ ID NO: 797527 - DNA, 25 bp, Homo sapien
gccataggttatagctgaccaatga

SEQ ID NO: 797528 - DNA, 25 bp, Homo sapien
tgaggaaaaactggaccggatgatc

SEQ ID NO: 797529 - DNA, 25 bp, Homo sapien
cagtgaacagcctttgtaacaatgc

SEQ ID NO: 797530 - DNA, 25 bp, Homo sapien
tgacaatcttgtcctactcccagtg

SEQ ID NO: 797531 - DNA, 25 bp, Homo sapien
cctgtgcatccagcactgaggaggg

SEQ ID NO: 797532 - DNA, 25 bp, Homo sapien
aacttgtaggcgcaggcaggttcct

SEQ ID NO: 797533 - DNA, 25 bp, Homo sapien
ggaataggatcctttccggctgtca

SEQ ID NO: 797534 - DNA, 25 bp, Homo sapien
gctgttgaacatggcttgggtgtcc

SEQ ID NO: 797535 - DNA, 25 bp, Homo sapien
agtggaggtctgagctgttgaacat

SEQ ID NO: 797536 - DNA, 25 bp, Homo sapien
taagttgagaatgccttccaaagat

SEQ ID NO: 797537 - DNA, 25 bp, Homo sapien
gactacagacataagttgagaatgc

SEQ ID NO: 797538 - DNA, 25 bp, Homo sapien
ccttccaaagattgaagaagaggag

SEQ ID NO: 797539 - DNA, 25 bp, Homo sapien
cttttgtaatccatgtgttttctac

SEQ ID NO: 797540 - DNA, 25 bp, Homo sapien
tctgatgacagtgctaaggactgag

SEQ ID NO: 797541 - DNA, 25 bp, Homo sapien
actggtactgctgggactgaagtca

SEQ ID NO: 797542 - DNA, 25 bp, Homo sapien
ccctggtgttttaggttctgctcct

SEQ ID NO: 797543 - DNA, 25 bp, Homo sapien
ttctgctcctaagccgctgaggtct

SEQ ID NO: 797544 - DNA, 25 bp, Homo sapien
tgaggtatctttcacttgcaagagg

SEQ ID NO: 797545 - DNA, 25 bp, Homo sapien
tcttaacctatgagagccacattta

SEQ ID NO: 797546 - DNA, 25 bp, Homo sapien
ttgcaagaggagagcattaagctct

SEQ ID NO: 797547 - DNA, 25 bp, Homo sapien
cagtctggacagattataagatgta

SEQ ID NO: 797548 - DNA, 25 bp, Homo sapien
ttttgggcactgaattcagatacat

SEQ ID NO: 797549 - DNA, 25 bp, Homo sapien
tctccagtgatgttttgggcactga

SEQ ID NO: 797550 - DNA, 25 bp, Homo sapien
gctccagatttaggctcattaacca

SEQ ID NO: 797551 - DNA, 25 bp, Homo sapien
aacggcccgattctgacactgactg

SEQ ID NO: 797552 - DNA, 25 bp, Homo sapien
cctaagacagacatataattcttta

SEQ ID NO: 797553 - DNA, 25 bp, Homo sapien
ctggtaacctaagacagacatataa

SEQ ID NO: 797554 - DNA, 25 bp, Homo sapien
acctaagacagacatataattcttt

SEQ ID NO: 797555 - DNA, 25 bp, Homo sapien
gtaacctaagacagacatataattc

SEQ ID NO: 797556 - DNA, 25 bp, Homo sapien
acatggagttggctgtaagcacctt

SEQ ID NO: 797557 - DNA, 25 bp, Homo sapien
caccttggtctctaagagagatgga

SEQ ID NO: 797558 - DNA, 25 bp, Homo sapien
gagttggctgtaagcacctttttcc

SEQ ID NO: 797559 - DNA, 25 bp, Homo sapien
tcccaaagggatggatgccaccttg

SEQ ID NO: 797560 - DNA, 25 bp, Homo sapien
agagatactcgtctgcccgtcagcc

SEQ ID NO: 797561 - DNA, 25 bp, Homo sapien
ttgtcaagagatactcgtctgcccg

SEQ ID NO: 797562 - DNA, 25 bp, Homo sapien
tcaagagatactcgtctgcccgtca

SEQ ID NO: 797563 - DNA, 25 bp, Homo sapien
tgtcaagagatactcgtctgcccgt

SEQ ID NO: 797564 - DNA, 25 bp, Homo sapien
agcaggatgcatctatctatctccc

SEQ ID NO: 797565 - DNA, 25 bp, Homo sapien
cacaagctattgattgatctctaac

SEQ ID NO: 797566 - DNA, 25 bp, Homo sapien
ctttgggctgtaggcatttacgggt

SEQ ID NO: 797567 - DNA, 25 bp, Homo sapien
gaagggcaagaagaattgaaatggc

SEQ ID NO: 797568 - DNA, 25 bp, Homo sapien
ttcaaagcataggagtgagcacctg

SEQ ID NO: 797569 - DNA, 25 bp, Homo sapien
ggtaaaggtattgctaaactcatca

SEQ ID NO: 797570 - DNA, 25 bp, Homo sapien
ttctcttgggccttccgagccttct

SEQ ID NO: 797571 - DNA, 25 bp, Homo sapien
ctctagagacatcttcatttccttg

SEQ ID NO: 797572 - DNA, 25 bp, Homo sapien
ccactgctcggtcctgggatgctgt

SEQ ID NO: 797573 - DNA, 25 bp, Homo sapien
ggccttccgagccttctctagagac

SEQ ID NO: 797574 - DNA, 25 bp, Homo sapien
ctcggctgtagttgacgtcatcttt

SEQ ID NO: 797575 - DNA, 25 bp, Homo sapien
cctcggctgtagttgacgtcatctt

SEQ ID NO: 797576 - DNA, 25 bp, Homo sapien
aagaggtggggacttctcttggagc

SEQ ID NO: 797577 - DNA, 25 bp, Homo sapien
ggtggggacttctcttggagcatct

SEQ ID NO: 797578 - DNA, 25 bp, Homo sapien
gaggtggggacttctcttggagcat

SEQ ID NO: 797579 - DNA, 25 bp, Homo sapien
gtggggacttctcttggagcatctc

SEQ ID NO: 797580 - DNA, 25 bp, Homo sapien
tgtgcaattgccatttcaggatccc

SEQ ID NO: 797581 - DNA, 25 bp, Homo sapien
cacattggagtaggtgttgcagtcc

SEQ ID NO: 797582 - DNA, 25 bp, Homo sapien
taactacagagcagagcacccatgt

SEQ ID NO: 797583 - DNA, 25 bp, Homo sapien
cggcgctccattaacaacaccaggg

SEQ ID NO: 797584 - DNA, 25 bp, Homo sapien
tgacgcataaccgacaatactctgg

SEQ ID NO: 797585 - DNA, 25 bp, Homo sapien
tgttacactcaaaagccttgccgag

SEQ ID NO: 797586 - DNA, 25 bp, Homo sapien
aaaatactaactgagcccacctggg

SEQ ID NO: 797587 - DNA, 25 bp, Homo sapien
gcagtagcaaggtcaacagatccca

SEQ ID NO: 797588 - DNA, 25 bp, Homo sapien
taacggccgaggtgctagatcaaac

SEQ ID NO: 797589 - DNA, 25 bp, Homo sapien
gattacagggtcacagatagtggca

SEQ ID NO: 797590 - DNA, 25 bp, Homo sapien
gctaattctggtgcacaatgaaccc

SEQ ID NO: 797591 - DNA, 25 bp, Homo sapien
taggtgacgtgaaccctagtgacca

SEQ ID NO: 797592 - DNA, 25 bp, Homo sapien
caacgcaagaagtggcaataaggct

SEQ ID NO: 797593 - DNA, 25 bp, Homo sapien
tcacagactgtgctgggtccacacg

SEQ ID NO: 797594 - DNA, 25 bp, Homo sapien
tctgaacatctacacaaacggcatg

SEQ ID NO: 797595 - DNA, 25 bp, Homo sapien
gagaacaattcagacgtggcactat

SEQ ID NO: 797596 - DNA, 25 bp, Homo sapien
tggtgagctataacaaacaatttgc

SEQ ID NO: 797597 - DNA, 25 bp, Homo sapien
tctggagactgcattttgggtagca

SEQ ID NO: 797598 - DNA, 25 bp, Homo sapien
tagagtccgtaacatatgcttagag

SEQ ID NO: 797599 - DNA, 25 bp, Homo sapien
caggtatagatacgtcagtagtgca

SEQ ID NO: 797600 - DNA, 25 bp, Homo sapien
tttatgctcattgcaaacaatgcca

SEQ ID NO: 797601 - DNA, 25 bp, Homo sapien
tcagttgtgtgggagcactgtaata

SEQ ID NO: 797602 - DNA, 25 bp, Homo sapien
gtagaatccactgcacaaaatgtga

SEQ ID NO: 797603 - DNA, 25 bp, Homo sapien
tctgagactatatccttaggataca

SEQ ID NO: 797604 - DNA, 25 bp, Homo sapien
ccactaagtgtagaaatacctatca

SEQ ID NO: 797605 - DNA, 25 bp, Homo sapien
cactagatatcttatggtgcgattg

SEQ ID NO: 797606 - DNA, 25 bp, Homo sapien
catctcagttgattaaggctcagga

SEQ ID NO: 797607 - DNA, 25 bp, Homo sapien
gctagatcagatgacttagtaccac

SEQ ID NO: 797608 - DNA, 25 bp, Homo sapien
cctacctttgcaacttattataatt

SEQ ID NO: 797609 - DNA, 25 bp, Homo sapien
tgcctacctttgcaacttattataa

SEQ ID NO: 797610 - DNA, 25 bp, Homo sapien
gactgcctacctttgcaacttatta

SEQ ID NO: 797611 - DNA, 25 bp, Homo sapien
actgcctacctttgcaacttattat

SEQ ID NO: 797612 - DNA, 25 bp, Homo sapien
tggaataaactggaaccatgttgcc

SEQ ID NO: 797613 - DNA, 25 bp, Homo sapien
tcctgccaaagtacacagagcccta

SEQ ID NO: 797614 - DNA, 25 bp, Homo sapien
gactttccacctaggagtccttaca

SEQ ID NO: 797615 - DNA, 25 bp, Homo sapien
ttacacactgatgaaattgctcctg

SEQ ID NO: 797616 - DNA, 25 bp, Homo sapien
cacgtcggtaagaattttatctagc

SEQ ID NO: 797617 - DNA, 25 bp, Homo sapien
tcctatcattttgtaccacgtcggt

SEQ ID NO: 797618 - DNA, 25 bp, Homo sapien
tagcgtgtctgttccgcctgtagcc

SEQ ID NO: 797619 - DNA, 25 bp, Homo sapien
tgtgagttcaagtcatcaggaggac

SEQ ID NO: 797620 - DNA, 25 bp, Homo sapien
ctaagctctgcccttggtttctctg

SEQ ID NO: 797621 - DNA, 25 bp, Homo sapien
gcctgtacataggagatttttgccc

SEQ ID NO: 797622 - DNA, 25 bp, Homo sapien
gataaacacaataatggtctcccaa

SEQ ID NO: 797623 - DNA, 25 bp, Homo sapien
tcttaggactatgaaggcctgtaca

SEQ ID NO: 797624 - DNA, 25 bp, Homo sapien
acaaccaattctgccatcaaccaag

SEQ ID NO: 797625 - DNA, 25 bp, Homo sapien
catacacccacaaccaattctgcca

SEQ ID NO: 797626 - DNA, 25 bp, Homo sapien
ccacaaccaattctgccatcaacca

SEQ ID NO: 797627 - DNA, 25 bp, Homo sapien
aacatacacccacaaccaattctgc

SEQ ID NO: 797628 - DNA, 25 bp, Homo sapien
cagagttccatctctccaagcttta

SEQ ID NO: 797629 - DNA, 25 bp, Homo sapien
tgaagaggccccttcggactggagt

SEQ ID NO: 797630 - DNA, 25 bp, Homo sapien
ttaatggctctaagggtgaagaggc

SEQ ID NO: 797631 - DNA, 25 bp, Homo sapien
cggactggagttagttgggaattca

SEQ ID NO: 797632 - DNA, 25 bp, Homo sapien
tctccctgccgttttagcagaagag

SEQ ID NO: 797633 - DNA, 25 bp, Homo sapien
taagctctccctgccgttttagcag

SEQ ID NO: 797634 - DNA, 25 bp, Homo sapien
ccctgccgttttagcagaagagctg

SEQ ID NO: 797635 - DNA, 25 bp, Homo sapien
aataagctctccctgccgttttagc

SEQ ID NO: 797636 - DNA, 25 bp, Homo sapien
taactgtactggaaagagccccaac

SEQ ID NO: 797637 - DNA, 25 bp, Homo sapien
tcttattggccgtaatgcaaatagg

SEQ ID NO: 797638 - DNA, 25 bp, Homo sapien
caagaaggctatttgcaggcccaaa

SEQ ID NO: 797639 - DNA, 25 bp, Homo sapien
caagttcgttggttaggatctacag

SEQ ID NO: 797640 - DNA, 25 bp, Homo sapien
cataggcaccgtatttcacaaaact

SEQ ID NO: 797641 - DNA, 25 bp, Homo sapien
cacaaaactctgtactgtgagctct

SEQ ID NO: 797642 - DNA, 25 bp, Homo sapien
gccaacaatggctctgtgcttcagg

SEQ ID NO: 797643 - DNA, 25 bp, Homo sapien
gtgagcaccgtgtatgccaacaatg

SEQ ID NO: 797644 - DNA, 25 bp, Homo sapien
gcatcttaactccttctgtaaggga

SEQ ID NO: 797645 - DNA, 25 bp, Homo sapien
tcctgggatcaataacagtactagg

SEQ ID NO: 797646 - DNA, 25 bp, Homo sapien
cagtactaggcagtgatgtgtcaaa

SEQ ID NO: 797647 - DNA, 25 bp, Homo sapien
gggaggaccaccatccacttgagaa

SEQ ID NO: 797648 - DNA, 25 bp, Homo sapien
cctaggaggaccacagtctctatca

SEQ ID NO: 797649 - DNA, 25 bp, Homo sapien
catggtgaagcaagcagtggttctt

SEQ ID NO: 797650 - DNA, 25 bp, Homo sapien
ccagtgtaggtgatttagggactca

SEQ ID NO: 797651 - DNA, 25 bp, Homo sapien
tatgataacaggacagcaaaaccct

SEQ ID NO: 797652 - DNA, 25 bp, Homo sapien
taatcgatgtaggaatgggaacaat

SEQ ID NO: 797653 - DNA, 25 bp, Homo sapien
tagttatagaataccaggaccggaa

SEQ ID NO: 797654 - DNA, 25 bp, Homo sapien
ttaaactatacaccccttctctctg

SEQ ID NO: 797655 - DNA, 25 bp, Homo sapien
gtttgccactacatgatataatcga

SEQ ID NO: 797656 - DNA, 25 bp, Homo sapien
tgagtaaagcattcatgtcagaatt

SEQ ID NO: 797657 - DNA, 25 bp, Homo sapien
gctacctgatcctaatagtagaaag

SEQ ID NO: 797658 - DNA, 25 bp, Homo sapien
tgatcctaatagtagaaaggaccac

SEQ ID NO: 797659 - DNA, 25 bp, Homo sapien
agaattttcagacatacctatagga

SEQ ID NO: 797660 - DNA, 25 bp, Homo sapien
ttctagtctatttagggatgacaaa

SEQ ID NO: 797661 - DNA, 25 bp, Homo sapien
cctgccttgggacttgacatgcttc

SEQ ID NO: 797662 - DNA, 25 bp, Homo sapien
tatttctagtctatttagggatgac

SEQ ID NO: 797663 - DNA, 25 bp, Homo sapien
gccttgggacttgacatgcttctct

SEQ ID NO: 797664 - DNA, 25 bp, Homo sapien
ttcgcgggtgttaggagcaaactcc

SEQ ID NO: 797665 - DNA, 25 bp, Homo sapien
gtctcgggagcaattcagtgtcgcc

SEQ ID NO: 797666 - DNA, 25 bp, Homo sapien
gctattcacaagtccgtctgggcag

SEQ ID NO: 797667 - DNA, 25 bp, Homo sapien
tgagtggcatcttgacagggcgtct

SEQ ID NO: 797668 - DNA, 25 bp, Homo sapien
tcaacaaatagtttactcggtggaa

SEQ ID NO: 797669 - DNA, 25 bp, Homo sapien
tcggtggaacctaacagaactaata

SEQ ID NO: 797670 - DNA, 25 bp, Homo sapien
tcaagacctagaagaaagagggcct

SEQ ID NO: 797671 - DNA, 25 bp, Homo sapien
gaatgtgctactttgcccgaactcc

SEQ ID NO: 797672 - DNA, 25 bp, Homo sapien
taaaacgtatcaagcacagtgcaga

SEQ ID NO: 797673 - DNA, 25 bp, Homo sapien
aatgcgatggagtccttcccacagg

SEQ ID NO: 797674 - DNA, 25 bp, Homo sapien
tctatggatggcacgggaaaaccca

SEQ ID NO: 797675 - DNA, 25 bp, Homo sapien
ggaaaacccagtgatcaatgcgatg

SEQ ID NO: 797676 - DNA, 25 bp, Homo sapien
ttaatgccatgtagtcgtacccagg

SEQ ID NO: 797677 - DNA, 25 bp, Homo sapien
gagcagcactagactcattaatgcc

SEQ ID NO: 797678 - DNA, 25 bp, Homo sapien
tacagagggtcgtacagtaaaagca

SEQ ID NO: 797679 - DNA, 25 bp, Homo sapien
aatacaaatatctggtcctctagca

SEQ ID NO: 797680 - DNA, 25 bp, Homo sapien
ctggcaaagtgtggcccctcaagga

SEQ ID NO: 797681 - DNA, 25 bp, Homo sapien
tgtgttccaaactagagtcgctgag

SEQ ID NO: 797682 - DNA, 25 bp, Homo sapien
gaaccctggtgctcatcctgctaaa

SEQ ID NO: 797683 - DNA, 25 bp, Homo sapien
taaatctggaaagaaccttcctggc

SEQ ID NO: 797684 - DNA, 25 bp, Homo sapien
ctatgctcatcacttgggtgacagg

SEQ ID NO: 797685 - DNA, 25 bp, Homo sapien
ggtaacaactctacacctgtactct

SEQ ID NO: 797686 - DNA, 25 bp, Homo sapien
gggtgacaggaccatccatatccca

SEQ ID NO: 797687 - DNA, 25 bp, Homo sapien
gaggctatgggctgaaaaactaact

SEQ ID NO: 797688 - DNA, 25 bp, Homo sapien
ttaaatattgcagacctagggatcc

SEQ ID NO: 797689 - DNA, 25 bp, Homo sapien
tatatcagactatctaaaaagctac

SEQ ID NO: 797690 - DNA, 25 bp, Homo sapien
caaatgaagaactagatgttttaga

SEQ ID NO: 797691 - DNA, 25 bp, Homo sapien
ctggaatacagtaggcataaaacaa

SEQ ID NO: 797692 - DNA, 25 bp, Homo sapien
gattttggactcatacaggcctggg

SEQ ID NO: 797693 - DNA, 25 bp, Homo sapien
ccagggcactggctaaatggttcta

SEQ ID NO: 797694 - DNA, 25 bp, Homo sapien
tagaactatttgctcaaacagtgtg

SEQ ID NO: 797695 - DNA, 25 bp, Homo sapien
tctgtagaacagacccctagaaata

SEQ ID NO: 797696 - DNA, 25 bp, Homo sapien
tcttcagttgtggtgctggccaaat

SEQ ID NO: 797697 - DNA, 25 bp, Homo sapien
ttcacctgatgataagtatggcccc

SEQ ID NO: 797698 - DNA, 25 bp, Homo sapien
tgacatcacagctgttggaccggca

SEQ ID NO: 797699 - DNA, 25 bp, Homo sapien
ggaccggcacatttctatgccacaa

SEQ ID NO: 797700 - DNA, 25 bp, Homo sapien
ggcctgacctaaagctgtagtaatt

SEQ ID NO: 797701 - DNA, 25 bp, Homo sapien
ccacagtcagtatgtagatgtcact

SEQ ID NO: 797702 - DNA, 25 bp, Homo sapien
gcagtgaacaaatttccacagtcag

SEQ ID NO: 797703 - DNA, 25 bp, Homo sapien
gtacagttcccatgttagtccataa

SEQ ID NO: 797704 - DNA, 25 bp, Homo sapien
tctcagtgagtaccaaaaagcattt

SEQ ID NO: 797705 - DNA, 25 bp, Homo sapien
tcttgatggtgaagcattggctgca

SEQ ID NO: 797706 - DNA, 25 bp, Homo sapien
tcaccattttagatagactgatagg

SEQ ID NO: 797707 - DNA, 25 bp, Homo sapien
aaaagacctatatcatctcagtgag

SEQ ID NO: 797708 - DNA, 25 bp, Homo sapien
tgagggtcacctcaaaactaatgtc

SEQ ID NO: 797709 - DNA, 25 bp, Homo sapien
gtttgttctacttaccaggcttgcc

SEQ ID NO: 797710 - DNA, 25 bp, Homo sapien
taaggagtgcgaacataaccatgac

SEQ ID NO: 797711 - DNA, 25 bp, Homo sapien
ggactctgggtttgtttaggagcac

SEQ ID NO: 797712 - DNA, 25 bp, Homo sapien
gggcagacataggagttcttggcat

SEQ ID NO: 797713 - DNA, 25 bp, Homo sapien
ccctggcttgggcagacataggagt

SEQ ID NO: 797714 - DNA, 25 bp, Homo sapien
tggaggaagaagtaaccaactctga

SEQ ID NO: 797715 - DNA, 25 bp, Homo sapien
tctgacacctgactgtaattattcc

SEQ ID NO: 797716 - DNA, 25 bp, Homo sapien
gaatagccaatcataagtggaaagt

SEQ ID NO: 797717 - DNA, 25 bp, Homo sapien
cccctgaatagccaatcataagtgg

SEQ ID NO: 797718 - DNA, 25 bp, Homo sapien
gccaatcataagtggaaagtcattg

SEQ ID NO: 797719 - DNA, 25 bp, Homo sapien
cataagtggaaagtcattgagttta

SEQ ID NO: 797720 - DNA, 25 bp, Homo sapien
ctgcagaacagtaagttgcttttaa

SEQ ID NO: 797721 - DNA, 25 bp, Homo sapien
cattttccaaaatgcattctgaaga

SEQ ID NO: 797722 - DNA, 25 bp, Homo sapien
tgcagaacagtaagttgcttttaaa

SEQ ID NO: 797723 - DNA, 25 bp, Homo sapien
aattcattttccaaaatgcattctg

SEQ ID NO: 797724 - DNA, 25 bp, Homo sapien
gacatacttcccaatggtctggctt

SEQ ID NO: 797725 - DNA, 25 bp, Homo sapien
tcagcagaggagatacaagggtatt

SEQ ID NO: 797726 - DNA, 25 bp, Homo sapien
caaattcagcagaggagatacaagg

SEQ ID NO: 797727 - DNA, 25 bp, Homo sapien
tgacatacttcccaatggtctggct

SEQ ID NO: 797728 - DNA, 25 bp, Homo sapien
acagtcactctgataaagtaaacag

SEQ ID NO: 797729 - DNA, 25 bp, Homo sapien
taacaaataacagaacttgaacatg

SEQ ID NO: 797730 - DNA, 25 bp, Homo sapien
aaaacatcagaaccatccctaaaga

SEQ ID NO: 797731 - DNA, 25 bp, Homo sapien
gtcccagttatgctctgtgtaacaa

SEQ ID NO: 797732 - DNA, 25 bp, Homo sapien
gcctttaagtcagagcaaaggcttt

SEQ ID NO: 797733 - DNA, 25 bp, Homo sapien
taaagaaaagtgcaggatattcatt

SEQ ID NO: 797734 - DNA, 25 bp, Homo sapien
aacatatggaattgaccacaattga

SEQ ID NO: 797735 - DNA, 25 bp, Homo sapien
agtgaagtggctttacagaggaatc

SEQ ID NO: 797736 - DNA, 25 bp, Homo sapien
tctcttaaatgtatggtatgtggga

SEQ ID NO: 797737 - DNA, 25 bp, Homo sapien
ggtacaacctatgagtcattctggg

SEQ ID NO: 797738 - DNA, 25 bp, Homo sapien
cagtgtctagacctcagaagctgtc

SEQ ID NO: 797739 - DNA, 25 bp, Homo sapien
tctgggttatctagaagaaactggt

SEQ ID NO: 797740 - DNA, 25 bp, Homo sapien
gattccaaatacagtttgccccagc

SEQ ID NO: 797741 - DNA, 25 bp, Homo sapien
ctgtaaatactgaggttagagaggt

SEQ ID NO: 797742 - DNA, 25 bp, Homo sapien
tagccataagtgatcctaccgcatc

SEQ ID NO: 797743 - DNA, 25 bp, Homo sapien
gaataattagtgctgaacctgtcgc

SEQ ID NO: 797744 - DNA, 25 bp, Homo sapien
agccaagattgagccactggactcc

SEQ ID NO: 797745 - DNA, 25 bp, Homo sapien
caagattgagccactggactccagc

SEQ ID NO: 797746 - DNA, 25 bp, Homo sapien
ttgcttgaaccccagaggtagaggt

SEQ ID NO: 797747 - DNA, 25 bp, Homo sapien
tgcagtgagccaagattgagccact

SEQ ID NO: 797748 - DNA, 25 bp, Homo sapien
ggcaagaccaccaaaattcacaagc

SEQ ID NO: 797749 - DNA, 25 bp, Homo sapien
gttggaagttttctcaacagtcaaa

SEQ ID NO: 797750 - DNA, 25 bp, Homo sapien
acagaatgcctgatagtttatttac

SEQ ID NO: 797751 - DNA, 25 bp, Homo sapien
atgtgtaagccaccagtttttctgc

SEQ ID NO: 797752 - DNA, 25 bp, Homo sapien
tgctaccagagtttgtgccacagct

SEQ ID NO: 797753 - DNA, 25 bp, Homo sapien
gggagaagtcaaaggtgctaccaga

SEQ ID NO: 797754 - DNA, 25 bp, Homo sapien
taatgcccattgtgctctacagaac

SEQ ID NO: 797755 - DNA, 25 bp, Homo sapien
ggttaaggtattgcagtaggtcaga

SEQ ID NO: 797756 - DNA, 25 bp, Homo sapien
taatttataaactatggtgtctacc

SEQ ID NO: 797757 - DNA, 25 bp, Homo sapien
tggtgtctacctaccagagattttt

SEQ ID NO: 797758 - DNA, 25 bp, Homo sapien
gtgcataatgtaagaacagtggctg

SEQ ID NO: 797759 - DNA, 25 bp, Homo sapien
gtattgtttggcaagctggcttcag

SEQ ID NO: 797760 - DNA, 25 bp, Homo sapien
gtgagctatgattgtgccaatgtac

SEQ ID NO: 797761 - DNA, 25 bp, Homo sapien
tgaggctggagggtcccttgagtcc

SEQ ID NO: 797762 - DNA, 25 bp, Homo sapien
tgtgccaatgtactccagcctaggc

SEQ ID NO: 797763 - DNA, 25 bp, Homo sapien
ttgagtccgggaggtccagactgca

SEQ ID NO: 797764 - DNA, 25 bp, Homo sapien
tctgttaagattaccaccttgttga

SEQ ID NO: 797765 - DNA, 25 bp, Homo sapien
tgcatattgtcttccttgataacgc

SEQ ID NO: 797766 - DNA, 25 bp, Homo sapien
acgctttagtaattatctgttaaga

SEQ ID NO: 797767 - DNA, 25 bp, Homo sapien
tcttaagaaatagatcagtgatgca

SEQ ID NO: 797768 - DNA, 25 bp, Homo sapien
taaactgtcagacttgacctcactg

SEQ ID NO: 797769 - DNA, 25 bp, Homo sapien
tgtaattcaggtgttccttccctgg

SEQ ID NO: 797770 - DNA, 25 bp, Homo sapien
ccttccctggcattggatggtctgg

SEQ ID NO: 797771 - DNA, 25 bp, Homo sapien
tgcaccaccagcagttgtaattcag

SEQ ID NO: 797772 - DNA, 25 bp, Homo sapien
catggttttggaccttattgcaata

SEQ ID NO: 797773 - DNA, 25 bp, Homo sapien
gaaacagaagaactccatatctaat

SEQ ID NO: 797774 - DNA, 25 bp, Homo sapien
caataccaagtattaaagagtgtgg

SEQ ID NO: 797775 - DNA, 25 bp, Homo sapien
catatactataccacaaaagagatc

SEQ ID NO: 797776 - DNA, 25 bp, Homo sapien
tgatgttaccattcaggtgtccaca

SEQ ID NO: 797777 - DNA, 25 bp, Homo sapien
tatttgtgaaaccattgtgcgttcc

SEQ ID NO: 797778 - DNA, 25 bp, Homo sapien
agatgtggctgataatgatgttacc

SEQ ID NO: 797779 - DNA, 25 bp, Homo sapien
tctctccctgtatttgaagatgtgg

SEQ ID NO: 797780 - DNA, 25 bp, Homo sapien
gcaatttctcggaaaccactattta

SEQ ID NO: 797781 - DNA, 25 bp, Homo sapien
tgctgttgaataaccccaggaaggc

SEQ ID NO: 797782 - DNA, 25 bp, Homo sapien
tgccacagtgcaatttctcggaaac

SEQ ID NO: 797783 - DNA, 25 bp, Homo sapien
gctgttgaataaccccaggaaggca

SEQ ID NO: 797784 - DNA, 25 bp, Homo sapien
ctcgtgggctctgtacaggaggcat

SEQ ID NO: 797785 - DNA, 25 bp, Homo sapien
ctgggagcctcgtgggctctgtaca

SEQ ID NO: 797786 - DNA, 25 bp, Homo sapien
cctcgtgggctctgtacaggaggca

SEQ ID NO: 797787 - DNA, 25 bp, Homo sapien
gagcctcgtgggctctgtacaggag

SEQ ID NO: 797788 - DNA, 25 bp, Homo sapien
caggatggggctactccattcagaa

SEQ ID NO: 797789 - DNA, 25 bp, Homo sapien
caggaagaggctctatgcacagtat

SEQ ID NO: 797790 - DNA, 25 bp, Homo sapien
gctctatgcacagtatcaggatggg

SEQ ID NO: 797791 - DNA, 25 bp, Homo sapien
tggggctactccattcagaatctgt

SEQ ID NO: 797792 - DNA, 25 bp, Homo sapien
tggatgggacagtgccttgaaaagt

SEQ ID NO: 797793 - DNA, 25 bp, Homo sapien
cctttcttcttagattcagtcgcca

SEQ ID NO: 797794 - DNA, 25 bp, Homo sapien
ttaatggatgggacagtgccttgaa

SEQ ID NO: 797795 - DNA, 25 bp, Homo sapien
cagcctttcttcttagattcagtcg

SEQ ID NO: 797796 - DNA, 25 bp, Homo sapien
ccacccggagagttattatgttaat

SEQ ID NO: 797797 - DNA, 25 bp, Homo sapien
tggcatcaactaaatcatttcaggc

SEQ ID NO: 797798 - DNA, 25 bp, Homo sapien
agtaggagttgaatttagggctctg

SEQ ID NO: 797799 - DNA, 25 bp, Homo sapien
acaagaacgaaatcaatatggcatc

SEQ ID NO: 797800 - DNA, 25 bp, Homo sapien
cactgacagtgttggaagagccttc

SEQ ID NO: 797801 - DNA, 25 bp, Homo sapien
tggaaggtccctgaagcaaccactc

SEQ ID NO: 797802 - DNA, 25 bp, Homo sapien
aggaaagaggacaatagcaatggcc

SEQ ID NO: 797803 - DNA, 25 bp, Homo sapien
tttgcaaatgaggaagcgtgcagga

SEQ ID NO: 797804 - DNA, 25 bp, Homo sapien
tagtagttgtgcacccttgggcaag

SEQ ID NO: 797805 - DNA, 25 bp, Homo sapien
aatggaatagcacaatacttaagcg

SEQ ID NO: 797806 - DNA, 25 bp, Homo sapien
caatactactagtagttgtgcaccc

SEQ ID NO: 797807 - DNA, 25 bp, Homo sapien
ttaagcgtatagactcaatactact

SEQ ID NO: 797808 - DNA, 25 bp, Homo sapien
ggaaccgcttcttcaatcctctcct

SEQ ID NO: 797809 - DNA, 25 bp, Homo sapien
cttcttcaatcctctcctgaattcc

SEQ ID NO: 797810 - DNA, 25 bp, Homo sapien
aaccgcttcttcaatcctctcctga

SEQ ID NO: 797811 - DNA, 25 bp, Homo sapien
ctgtctctccagcaatgattgcaaa

SEQ ID NO: 797812 - DNA, 25 bp, Homo sapien
ttaaatcaggcctggagtccctgac

SEQ ID NO: 797813 - DNA, 25 bp, Homo sapien
gcgactctctttacaggtggtggat

SEQ ID NO: 797814 - DNA, 25 bp, Homo sapien
cataagcagtaaccaagcactggcc

SEQ ID NO: 797815 - DNA, 25 bp, Homo sapien
tccggagaatcttggtcgctggcac

SEQ ID NO: 797816 - DNA, 25 bp, Homo sapien
tcgctggcacgatgctagattgttc

SEQ ID NO: 797817 - DNA, 25 bp, Homo sapien
cagaggtctgatccagaagttctca

SEQ ID NO: 797818 - DNA, 25 bp, Homo sapien
taagcagcagatataacactcaagc

SEQ ID NO: 797819 - DNA, 25 bp, Homo sapien
gatcttgacactcccaaccaatgtt

SEQ ID NO: 797820 - DNA, 25 bp, Homo sapien
tctcaatgtcaacaaggctcttcca

SEQ ID NO: 797821 - DNA, 25 bp, Homo sapien
gagtgcagcttacgagacctcatgg

SEQ ID NO: 797822 - DNA, 25 bp, Homo sapien
aaattaccagtatggccagaccacg

SEQ ID NO: 797823 - DNA, 25 bp, Homo sapien
tatctccgtggcagaatgggtcgtc

SEQ ID NO: 797824 - DNA, 25 bp, Homo sapien
gatgttctcaaacgctgcagcccgt

SEQ ID NO: 797825 - DNA, 25 bp, Homo sapien
caagggattggctcccaactgactc

SEQ ID NO: 797826 - DNA, 25 bp, Homo sapien
gatgggaatccctagatcgcctcca

SEQ ID NO: 797827 - DNA, 25 bp, Homo sapien
aaatccctgcccgtgtgtaacttag

SEQ ID NO: 797828 - DNA, 25 bp, Homo sapien
tggaaatacttcctcaaccaaggga

SEQ ID NO: 797829 - DNA, 25 bp, Homo sapien
taaatgcaagaaattggcaagttac

SEQ ID NO: 797830 - DNA, 25 bp, Homo sapien
tgaggttaaaccatagactagttca

SEQ ID NO: 797831 - DNA, 25 bp, Homo sapien
caagttacaggtatacagcttgtca

SEQ ID NO: 797832 - DNA, 25 bp, Homo sapien
tgtcctcttctaatcaaaacacctg

SEQ ID NO: 797833 - DNA, 25 bp, Homo sapien
tttatcccaaagttatgctgatccg

SEQ ID NO: 797834 - DNA, 25 bp, Homo sapien
gcaccgagcaaacaggcgcatgctg

SEQ ID NO: 797835 - DNA, 25 bp, Homo sapien
gagtccacaaactgtcggctaattt

SEQ ID NO: 797836 - DNA, 25 bp, Homo sapien
gatttatcgagagaacagcaccgag

SEQ ID NO: 797837 - DNA, 25 bp, Homo sapien
ctcttaactaacttggcagctccag

SEQ ID NO: 797838 - DNA, 25 bp, Homo sapien
cattggactttagcgcctcaaggaa

SEQ ID NO: 797839 - DNA, 25 bp, Homo sapien
ctcatcttcgacttcaaaaacagtg

SEQ ID NO: 797840 - DNA, 25 bp, Homo sapien
tgcctttggatcaaaatagccttca

SEQ ID NO: 797841 - DNA, 25 bp, Homo sapien
cttgcagaagagttctgtttgaata

SEQ ID NO: 797842 - DNA, 25 bp, Homo sapien
gcagaagagttctgtttgaataaga

SEQ ID NO: 797843 - DNA, 25 bp, Homo sapien
agttctgtttgaataagaagctcca

SEQ ID NO: 797844 - DNA, 25 bp, Homo sapien
gaagagttctgtttgaataagaagc

SEQ ID NO: 797845 - DNA, 25 bp, Homo sapien
tgcaaagctgtgtgtccacttaagg

SEQ ID NO: 797846 - DNA, 25 bp, Homo sapien
tagcaattgagctttgccccacgat

SEQ ID NO: 797847 - DNA, 25 bp, Homo sapien
gattgtagcattgtggtccagtagc

SEQ ID NO: 797848 - DNA, 25 bp, Homo sapien
gacttcaatttatagctaggcaacc

SEQ ID NO: 797849 - DNA, 25 bp, Homo sapien
ctgatgcataataggagctaaataa

SEQ ID NO: 797850 - DNA, 25 bp, Homo sapien
agacaacaatgttggccacccagaa

SEQ ID NO: 797851 - DNA, 25 bp, Homo sapien
tttttagggccttctgtactaggca

SEQ ID NO: 797852 - DNA, 25 bp, Homo sapien
atgtgatcatcattgaattacctga

SEQ ID NO: 797853 - DNA, 25 bp, Homo sapien
cctatctgagcttgcccctggtgca

SEQ ID NO: 797854 - DNA, 25 bp, Homo sapien
ccaggcaatgatacttgggacttcc

SEQ ID NO: 797855 - DNA, 25 bp, Homo sapien
tactaaaacctgaaaccaggcaatg

SEQ ID NO: 797856 - DNA, 25 bp, Homo sapien
taatgattatccctacataggtgcc

SEQ ID NO: 797857 - DNA, 25 bp, Homo sapien
tttcctaacatgtggttgacttgtg

SEQ ID NO: 797858 - DNA, 25 bp, Homo sapien
ggaatttcctaacatgtggttgact

SEQ ID NO: 797859 - DNA, 25 bp, Homo sapien
catgttccacttcattgaccaggga

SEQ ID NO: 797860 - DNA, 25 bp, Homo sapien
cctaacatgtggttgacttgtgtca

SEQ ID NO: 797861 - DNA, 25 bp, Homo sapien
tttcctaacatgtggttgacttgtg

SEQ ID NO: 797862 - DNA, 25 bp, Homo sapien
ggaatttcctaacatgtggttgact

SEQ ID NO: 797863 - DNA, 25 bp, Homo sapien
catgttccacttcattgaccaggga

SEQ ID NO: 797864 - DNA, 25 bp, Homo sapien
cctaacatgtggttgacttgtgtca

SEQ ID NO: 797865 - DNA, 25 bp, Homo sapien
gatgaaaagatggaacgcggtgagg

SEQ ID NO: 797866 - DNA, 25 bp, Homo sapien
ttacaatgtataacgcagaagatga

SEQ ID NO: 797867 - DNA, 25 bp, Homo sapien
ggaacgcggtgaggtggtaagagca

SEQ ID NO: 797868 - DNA, 25 bp, Homo sapien
agagcagcgtctgtccagcaggcat

SEQ ID NO: 797869 - DNA, 25 bp, Homo sapien
tggaacatgctttacgggactggag

SEQ ID NO: 797870 - DNA, 25 bp, Homo sapien
tgtgtttcctgaagtgtggtatgat

SEQ ID NO: 797871 - DNA, 25 bp, Homo sapien
tggtatgatttttcgtggaacatgc

SEQ ID NO: 797872 - DNA, 25 bp, Homo sapien
tacgggactggagtaactgctgact

SEQ ID NO: 797873 - DNA, 25 bp, Homo sapien
ttttacctgctctggatctcatttc

SEQ ID NO: 797874 - DNA, 25 bp, Homo sapien
tctgcctctggctacgatagaacag

SEQ ID NO: 797875 - DNA, 25 bp, Homo sapien
tcaatgtctgccctactggtggatt

SEQ ID NO: 797876 - DNA, 25 bp, Homo sapien
aatgctcaggtttctatcatctaaa

SEQ ID NO: 797877 - DNA, 25 bp, Homo sapien
aaaagcaagggtgatggtgcccatc

SEQ ID NO: 797878 - DNA, 25 bp, Homo sapien
gatggtgcccatctctggagcagcc

SEQ ID NO: 797879 - DNA, 25 bp, Homo sapien
agcaagggtgatggtgcccatctct

SEQ ID NO: 797880 - DNA, 25 bp, Homo sapien
agcagcaaaagcaagggtgatggtg

SEQ ID NO: 797881 - DNA, 25 bp, Homo sapien
tatccatgagattggcttcggcgcc

SEQ ID NO: 797882 - DNA, 25 bp, Homo sapien
gaggtgaccttcagcacgtactgga

SEQ ID NO: 797883 - DNA, 25 bp, Homo sapien
tgtagtcaagcagcatgcggcagac

SEQ ID NO: 797884 - DNA, 25 bp, Homo sapien
tggagggtatattcgggcagcccca

SEQ ID NO: 797885 - DNA, 25 bp, Homo sapien
tgccatttgaatcttcctcaacctg

SEQ ID NO: 797886 - DNA, 25 bp, Homo sapien
ggctgccatttgaatcttcctcaac

SEQ ID NO: 797887 - DNA, 25 bp, Homo sapien
tgctgaccactgggcagagcctcac

SEQ ID NO: 797888 - DNA, 25 bp, Homo sapien
ctgctgaccactgggcagagcctca

SEQ ID NO: 797889 - DNA, 25 bp, Homo sapien
caatttcaagcaaacctagactagg

SEQ ID NO: 797890 - DNA, 25 bp, Homo sapien
taacactattcacctttctggcaga

SEQ ID NO: 797891 - DNA, 25 bp, Homo sapien
tcgggtggccctttcatggctacaa

SEQ ID NO: 797892 - DNA, 25 bp, Homo sapien
cagaggtagttagcccaggactcaa

SEQ ID NO: 797893 - DNA, 25 bp, Homo sapien
gagctaccaagaaaagccagcaggg

SEQ ID NO: 797894 - DNA, 25 bp, Homo sapien
tagcatacagccaaactaaaggaac

SEQ ID NO: 797895 - DNA, 25 bp, Homo sapien
tgaacactagggttgaatgccacta

SEQ ID NO: 797896 - DNA, 25 bp, Homo sapien
tatgctggaccaagagcacatgttg

SEQ ID NO: 797897 - DNA, 25 bp, Homo sapien
catcatcggggatagctcttctcca

SEQ ID NO: 797898 - DNA, 25 bp, Homo sapien
gtcatcatcggggatagctcttctc

SEQ ID NO: 797899 - DNA, 25 bp, Homo sapien
atctgatgtgttcataggcattgac

SEQ ID NO: 797900 - DNA, 25 bp, Homo sapien
gacaagaatggcaggcctgtatcac

SEQ ID NO: 797901 - DNA, 25 bp, Homo sapien
tgaaaactattagaagggaatcgat

SEQ ID NO: 797902 - DNA, 25 bp, Homo sapien
cagtctggaagtacttgatagtgaa

SEQ ID NO: 797903 - DNA, 25 bp, Homo sapien
caaacctgcattttataaccctttg

SEQ ID NO: 797904 - DNA, 25 bp, Homo sapien
cattgcatttgagtacgctttaaag

SEQ ID NO: 797905 - DNA, 25 bp, Homo sapien
ttcaatgacaatgggagggaaagca

SEQ ID NO: 797906 - DNA, 25 bp, Homo sapien
gaaagcaaaggaattgctctatggc

SEQ ID NO: 797907 - DNA, 25 bp, Homo sapien
gcatctgttgtgtaatgttcttcta

SEQ ID NO: 797908 - DNA, 25 bp, Homo sapien
tgttcttctaatggcacatctcgat

SEQ ID NO: 797909 - DNA, 25 bp, Homo sapien
tgacttttcttacacagccctggga

SEQ ID NO: 797910 - DNA, 25 bp, Homo sapien
ctaaatggtgagatcctggaaggca

SEQ ID NO: 797911 - DNA, 25 bp, Homo sapien
aatacgccttaagatgcagggcagc

SEQ ID NO: 797912 - DNA, 25 bp, Homo sapien
taggcaaactgtgtctacccagcaa

SEQ ID NO: 797913 - DNA, 25 bp, Homo sapien
gaagagctttatttaagttctctaa

SEQ ID NO: 797914 - DNA, 25 bp, Homo sapien
agagctttatttaagttctctaaat

SEQ ID NO: 797915 - DNA, 25 bp, Homo sapien
gagctttatttaagttctctaaata

SEQ ID NO: 797916 - DNA, 25 bp, Homo sapien
ggaagggccccaatcttctgccgat

SEQ ID NO: 797917 - DNA, 25 bp, Homo sapien
ccttgtttagagaatgggcagctca

SEQ ID NO: 797918 - DNA, 25 bp, Homo sapien
tcagtcagatccctagaggaaatgg

SEQ ID NO: 797919 - DNA, 25 bp, Homo sapien
ccatggactgaaccctctaggaagc

SEQ ID NO: 797920 - DNA, 25 bp, Homo sapien
gaggaacagcaacaactcagactct

SEQ ID NO: 797921 - DNA, 25 bp, Homo sapien
aatgaggaacagcaacaactcagac

SEQ ID NO: 797922 - DNA, 25 bp, Homo sapien
tgaggaacagcaacaactcagactc

SEQ ID NO: 797923 - DNA, 25 bp, Homo sapien
aggaacagcaacaactcagactctt

SEQ ID NO: 797924 - DNA, 25 bp, Homo sapien
gttgttgtgacctctgtcctccatg

SEQ ID NO: 797925 - DNA, 25 bp, Homo sapien
cataggaaatcgactcctgtagacc

SEQ ID NO: 797926 - DNA, 25 bp, Homo sapien
ttgtgacctctgtcctccatgtagc

SEQ ID NO: 797927 - DNA, 25 bp, Homo sapien
ttcattgcacaacctcctttcatag

SEQ ID NO: 797928 - DNA, 25 bp, Homo sapien
gagttagttactaacccagcagctg

SEQ ID NO: 797929 - DNA, 25 bp, Homo sapien
tggagttagttactaacccagcagc

SEQ ID NO: 797930 - DNA, 25 bp, Homo sapien
ggagttagttactaacccagcagct

SEQ ID NO: 797931 - DNA, 25 bp, Homo sapien
gttggagttagttactaacccagca

SEQ ID NO: 797932 - DNA, 25 bp, Homo sapien
gagaaaaagccaggctttgacatgg

SEQ ID NO: 797933 - DNA, 25 bp, Homo sapien
aagccaggctttgacatggcctcca

SEQ ID NO: 797934 - DNA, 25 bp, Homo sapien
aaaagccaggctttgacatggcctc

SEQ ID NO: 797935 - DNA, 25 bp, Homo sapien
caggctttgacatggcctccatacc

SEQ ID NO: 797936 - DNA, 25 bp, Homo sapien
caatggttgattgactcatgccatt

SEQ ID NO: 797937 - DNA, 25 bp, Homo sapien
tgattgactcatgccattccaatgg

SEQ ID NO: 797938 - DNA, 25 bp, Homo sapien
catgccattccaatggtcataaaac

SEQ ID NO: 797939 - DNA, 25 bp, Homo sapien
tcagaggagctcagcaatggttgat

SEQ ID NO: 797940 - DNA, 25 bp, Homo sapien
gctgtgaagctatttttttggtttg

SEQ ID NO: 797941 - DNA, 25 bp, Homo sapien
tccttatttcatgtatgatttacat

SEQ ID NO: 797942 - DNA, 25 bp, Homo sapien
caagaccaatgtcaatgtctctagg

SEQ ID NO: 797943 - DNA, 25 bp, Homo sapien
ccaatgtcaatgtctctaggttttc

SEQ ID NO: 797944 - DNA, 25 bp, Homo sapien
catttcttaatggtgggagtccagc

SEQ ID NO: 797945 - DNA, 25 bp, Homo sapien
tcatcagaagtcctagacagtgaca

SEQ ID NO: 797946 - DNA, 25 bp, Homo sapien
gatggatactgaatactcaggccca

SEQ ID NO: 797947 - DNA, 25 bp, Homo sapien
ctggtaatggtaatagaagctcaac

SEQ ID NO: 797948 - DNA, 25 bp, Homo sapien
tagcctggacgtaagagattctcat

SEQ ID NO: 797949 - DNA, 25 bp, Homo sapien
gaccagttgcgctgattactcttag

SEQ ID NO: 797950 - DNA, 25 bp, Homo sapien
tataatttgaaggttggcagaccag

SEQ ID NO: 797951 - DNA, 25 bp, Homo sapien
taaacacttattgtcaggtgcctag

SEQ ID NO: 797952 - DNA, 25 bp, Homo sapien
gtatcaatgctttacagccaagagg

SEQ ID NO: 797953 - DNA, 25 bp, Homo sapien
caaagtacatgtagctcattgtagc

SEQ ID NO: 797954 - DNA, 25 bp, Homo sapien
ttattcgccacaaaacagaagcctc

SEQ ID NO: 797955 - DNA, 25 bp, Homo sapien
gaatgcttctagtcctcctaagaga

SEQ ID NO: 797956 - DNA, 25 bp, Homo sapien
caccctttttccgtcacagccgcgg

SEQ ID NO: 797957 - DNA, 25 bp, Homo sapien
ccaccctttttccgtcacagccgcg

SEQ ID NO: 797958 - DNA, 25 bp, Homo sapien
gcaccggtgccagggcactccgtgg

SEQ ID NO: 797959 - DNA, 25 bp, Homo sapien
aagtaaatgtatctgggcagcccct

SEQ ID NO: 797960 - DNA, 25 bp, Homo sapien
tctgatcaccgcaaaaggtaaggca

SEQ ID NO: 797961 - DNA, 25 bp, Homo sapien
gccatgtgccggtctcttctgaaga

SEQ ID NO: 797962 - DNA, 25 bp, Homo sapien
taaggacatttcgtacagggcagag

SEQ ID NO: 797963 - DNA, 25 bp, Homo sapien
tctccaagcctcgtggtatgcccga

SEQ ID NO: 797964 - DNA, 25 bp, Homo sapien
aatagtaagggagaaatctgattgc

SEQ ID NO: 797965 - DNA, 25 bp, Homo sapien
tcaggttttgagtctccaagcctcg

SEQ ID NO: 797966 - DNA, 25 bp, Homo sapien
cccgagcttgtgagaaatcgaaggc

SEQ ID NO: 797967 - DNA, 25 bp, Homo sapien
tctcaatccccagaagagtgtgaca

SEQ ID NO: 797968 - DNA, 25 bp, Homo sapien
caatccccagaagagtgtgacaagg

SEQ ID NO: 797969 - DNA, 25 bp, Homo sapien
cttctcaatccccagaagagtgtga

SEQ ID NO: 797970 - DNA, 25 bp, Homo sapien
tcaatccccagaagagtgtgacaag

SEQ ID NO: 797971 - DNA, 25 bp, Homo sapien
caagacgtcaggaaaatgtcactgt

SEQ ID NO: 797972 - DNA, 25 bp, Homo sapien
gcctttaagtactagcaagacgtca

SEQ ID NO: 797973 - DNA, 25 bp, Homo sapien
cctgtggctgacctggaactgcctc

SEQ ID NO: 797974 - DNA, 25 bp, Homo sapien
tagactagaccattagacacctttc

SEQ ID NO: 797975 - DNA, 25 bp, Homo sapien
gactccttgaggtttggaatccact

SEQ ID NO: 797976 - DNA, 25 bp, Homo sapien
gattttagaaggtcaacactcagct

SEQ ID NO: 797977 - DNA, 25 bp, Homo sapien
cctgcaggtgcttaccggagtagca

SEQ ID NO: 797978 - DNA, 25 bp, Homo sapien
tcccatgagcaagagtgatggctct

SEQ ID NO: 797979 - DNA, 25 bp, Homo sapien
ccaccaatacatagaacatggatga

SEQ ID NO: 797980 - DNA, 25 bp, Homo sapien
cattgcctggaccagagattcggag

SEQ ID NO: 797981 - DNA, 25 bp, Homo sapien
gattcggagaggattaactgcaaag

SEQ ID NO: 797982 - DNA, 25 bp, Homo sapien
gagaaacagtcttatggcccatcac

SEQ ID NO: 797983 - DNA, 25 bp, Homo sapien
cagaagactaggcaggtgaccgcta

SEQ ID NO: 797984 - DNA, 25 bp, Homo sapien
tcagccagctgtgaatggaggtaga

SEQ ID NO: 797985 - DNA, 25 bp, Homo sapien
ggaggtagaatagaactccaggccc

SEQ ID NO: 797986 - DNA, 25 bp, Homo sapien
tctcaatatgaagaatacagcctga

SEQ ID NO: 797987 - DNA, 25 bp, Homo sapien
ggatcttcgggtaatctgtgaatag

SEQ ID NO: 797988 - DNA, 25 bp, Homo sapien
gtgacactctttatagcaaggttat

SEQ ID NO: 797989 - DNA, 25 bp, Homo sapien
actataagtcatcttgtgcacagga

SEQ ID NO: 797990 - DNA, 25 bp, Homo sapien
ggtaatctgtgaatagtgacactct

SEQ ID NO: 797991 - DNA, 25 bp, Homo sapien
tagtgttttatatccagacttcacc

SEQ ID NO: 797992 - DNA, 25 bp, Homo sapien
tacagtttggtttggcgtttcagac

SEQ ID NO: 797993 - DNA, 25 bp, Homo sapien
gcaatggtttgattcgctgtacagt

SEQ ID NO: 797994 - DNA, 25 bp, Homo sapien
tcatctgagttgaccacaacttgca

SEQ ID NO: 797995 - DNA, 25 bp, Homo sapien
aatgccttccttgtatggtttgtaa

SEQ ID NO: 797996 - DNA, 25 bp, Homo sapien
gtaatttttgccatgagctctcttc

SEQ ID NO: 797997 - DNA, 25 bp, Homo sapien
gagtgtccctccagagtgtttggtt

SEQ ID NO: 797998 - DNA, 25 bp, Homo sapien
cttctggcctgcatgtgagagtgtc

SEQ ID NO: 797999 - DNA, 25 bp, Homo sapien
gaagaaatcagtgcattgaaaccca

SEQ ID NO: 798000 - DNA, 25 bp, Homo sapien
aatcagtgcattgaaacccaacaaa

SEQ ID NO: 798001 - DNA, 25 bp, Homo sapien
gtgtttagtacatcctccttcttca

SEQ ID NO: 798002 - DNA, 25 bp, Homo sapien
caaaacttcaatgtaccatcccttt

SEQ ID NO: 798003 - DNA, 25 bp, Homo sapien
ggcatttgagcatttcatccacatt

SEQ ID NO: 798004 - DNA, 25 bp, Homo sapien
catttgagcatttcatccacattgc

SEQ ID NO: 798005 - DNA, 25 bp, Homo sapien
taatttatggtccatgttggctggt

SEQ ID NO: 798006 - DNA, 25 bp, Homo sapien
ccaaatttaatttatggtccatgtt

SEQ ID NO: 798007 - DNA, 25 bp, Homo sapien
tggtttaattgaccaaatgttttgc

SEQ ID NO: 798008 - DNA, 25 bp, Homo sapien
cataggttgattggaaaagccagga

SEQ ID NO: 798009 - DNA, 25 bp, Homo sapien
ctgttttgtgagcttgttagaggcc

SEQ ID NO: 798010 - DNA, 25 bp, Homo sapien
gcttttagatgaacatagcttcagc

SEQ ID NO: 798011 - DNA, 25 bp, Homo sapien
gccactcttgccacgggataactct

SEQ ID NO: 798012 - DNA, 25 bp, Homo sapien
cttgccacgggataactcttttcag

SEQ ID NO: 798013 - DNA, 25 bp, Homo sapien
tgtgccctgtaggtgccactcttgc

SEQ ID NO: 798014 - DNA, 25 bp, Homo sapien
ctgtaggtgccactcttgccacggg

SEQ ID NO: 798015 - DNA, 25 bp, Homo sapien
gatgagttctccacaaggatctcct

SEQ ID NO: 798016 - DNA, 25 bp, Homo sapien
tgtgagctccttagccaatctggct

SEQ ID NO: 798017 - DNA, 25 bp, Homo sapien
cttatcttccgtggccctgacgaac

SEQ ID NO: 798018 - DNA, 25 bp, Homo sapien
ggatctccttgtcccttatcttccg

SEQ ID NO: 798019 - DNA, 25 bp, Homo sapien
ttccagctcttcaactctgatttct

SEQ ID NO: 798020 - DNA, 25 bp, Homo sapien
tcagtttatcctacaggtgccacta

SEQ ID NO: 798021 - DNA, 25 bp, Homo sapien
gatttctcagggctgccatagacca

SEQ ID NO: 798022 - DNA, 25 bp, Homo sapien
gccactataaccatataatatctct

SEQ ID NO: 798023 - DNA, 25 bp, Homo sapien
gaatataaaagtcacttacatccat

SEQ ID NO: 798024 - DNA, 25 bp, Homo sapien
ctgaatataaaagtcacttacatcc

SEQ ID NO: 798025 - DNA, 25 bp, Homo sapien
tgaatataaaagtcacttacatcca

SEQ ID NO: 798026 - DNA, 25 bp, Homo sapien
ccacaaagtgtcaggcatgaaccac

SEQ ID NO: 798027 - DNA, 25 bp, Homo sapien
tagggagagtgtgcaattccagcca

SEQ ID NO: 798028 - DNA, 25 bp, Homo sapien
cagaacagtgccaggttgtcaagct

SEQ ID NO: 798029 - DNA, 25 bp, Homo sapien
cctaggagtggatcagagaggcccc

SEQ ID NO: 798030 - DNA, 25 bp, Homo sapien
agcaaagtgctatccctaggcctgg

SEQ ID NO: 798031 - DNA, 25 bp, Homo sapien
cacgtggagtatatgaattctgtca

SEQ ID NO: 798032 - DNA, 25 bp, Homo sapien
tgaattctgtcatgggtcctggtgt

SEQ ID NO: 798033 - DNA, 25 bp, Homo sapien
ctgccccacgtggagtatatgaatt

SEQ ID NO: 798034 - DNA, 25 bp, Homo sapien
ggtcctggtgtcagtgtactgaagc

SEQ ID NO: 798035 - DNA, 25 bp, Homo sapien
atctgtgcaagtggcctggtctccc

SEQ ID NO: 798036 - DNA, 25 bp, Homo sapien
cttcttagggcggtagttacaccat

SEQ ID NO: 798037 - DNA, 25 bp, Homo sapien
cttagggcggtagttacaccatcct

SEQ ID NO: 798038 - DNA, 25 bp, Homo sapien
aatctgtgcaagtggcctggtctcc

SEQ ID NO: 798039 - DNA, 25 bp, Homo sapien
cactgattaagttcaccacgcttaa

SEQ ID NO: 798040 - DNA, 25 bp, Homo sapien
actgattaagttcaccacgcttaaa

SEQ ID NO: 798041 - DNA, 25 bp, Homo sapien
tgattaagttcaccacgcttaaatt

SEQ ID NO: 798042 - DNA, 25 bp, Homo sapien
acactgattaagttcaccacgctta

SEQ ID NO: 798043 - DNA, 25 bp, Homo sapien
tggaatgattaatcctaatagaaga

SEQ ID NO: 798044 - DNA, 25 bp, Homo sapien
tcctaatagaagagtgatacacctg

SEQ ID NO: 798045 - DNA, 25 bp, Homo sapien
gctccttggaatgattaatcctaat

SEQ ID NO: 798046 - DNA, 25 bp, Homo sapien
gaagagtgatacacctgtctgccat

SEQ ID NO: 798047 - DNA, 25 bp, Homo sapien
atgtgctgtctcacgctgcgccggc

SEQ ID NO: 798048 - DNA, 25 bp, Homo sapien
tccgggagcgatcacttcctctctc

SEQ ID NO: 798049 - DNA, 25 bp, Homo sapien
gcaggatgtgctgtctcacgctgcg

SEQ ID NO: 798050 - DNA, 25 bp, Homo sapien
gctcctccgggagcgatcacttcct

SEQ ID NO: 798051 - DNA, 25 bp, Homo sapien
gcagcgttggtgcaggcggctcccg

SEQ ID NO: 798052 - DNA, 25 bp, Homo sapien
gcggcagcgttggtgcaggcggctc

SEQ ID NO: 798053 - DNA, 25 bp, Homo sapien
cggcagcgttggtgcaggcggctcc

SEQ ID NO: 798054 - DNA, 25 bp, Homo sapien
ggcggcagcgttggtgcaggcggct

SEQ ID NO: 798055 - DNA, 25 bp, Homo sapien
tcggcagcggcggaactgggctccc

SEQ ID NO: 798056 - DNA, 25 bp, Homo sapien
ggacgcgctcggcagcggcggaact

SEQ ID NO: 798057 - DNA, 25 bp, Homo sapien
ctggacgcgctcggcagcggcggaa

SEQ ID NO: 798058 - DNA, 25 bp, Homo sapien
acgcgctcggcagcggcggaactgg

SEQ ID NO: 798059 - DNA, 25 bp, Homo sapien
agacattggcccctacgatctgtaa

SEQ ID NO: 798060 - DNA, 25 bp, Homo sapien
taacactgatgtctggtcagtctgc

SEQ ID NO: 798061 - DNA, 25 bp, Homo sapien
ccacagcacaacactaggaagtaga

SEQ ID NO: 798062 - DNA, 25 bp, Homo sapien
gggcccagacacacaagacgtggta

SEQ ID NO: 798063 - DNA, 25 bp, Homo sapien
ttgaaatggcatatttgtctactct

SEQ ID NO: 798064 - DNA, 25 bp, Homo sapien
tgtctaagttggcagccgtttggga

SEQ ID NO: 798065 - DNA, 25 bp, Homo sapien
ctctatttcctttcggttgtctaag

SEQ ID NO: 798066 - DNA, 25 bp, Homo sapien
caaagcttagcttttgaacaatata

SEQ ID NO: 798067 - DNA, 25 bp, Homo sapien
ttggcagccgtttgggattccattc

SEQ ID NO: 798068 - DNA, 25 bp, Homo sapien
caaaactgtctcgtgcaacttcagc

SEQ ID NO: 798069 - DNA, 25 bp, Homo sapien
aaactgtctcgtgcaacttcagcaa

SEQ ID NO: 798070 - DNA, 25 bp, Homo sapien
aaaactgtctcgtgcaacttcagca

SEQ ID NO: 798071 - DNA, 25 bp, Homo sapien
tgcattagcgagagcacagccaaga

SEQ ID NO: 798072 - DNA, 25 bp, Homo sapien
cttagtagcctttaaatatggaagc

SEQ ID NO: 798073 - DNA, 25 bp, Homo sapien
aatggtaggcgaatgtggagacaga

SEQ ID NO: 798074 - DNA, 25 bp, Homo sapien
gagggaccaaggaactcttagtagc

SEQ ID NO: 798075 - DNA, 25 bp, Homo sapien
cagccgctgaagaccgaacatgtta

SEQ ID NO: 798076 - DNA, 25 bp, Homo sapien
tttgcatcagggaagacagccgctg

SEQ ID NO: 798077 - DNA, 25 bp, Homo sapien
ggagatttcattttgcctaacatta

SEQ ID NO: 798078 - DNA, 25 bp, Homo sapien
cctccactgagctcggatgcatgga

SEQ ID NO: 798079 - DNA, 25 bp, Homo sapien
tatctgtgctaagcgctgctttttg

SEQ ID NO: 798080 - DNA, 25 bp, Homo sapien
tgcgctctagctcagcttttaagtc

SEQ ID NO: 798081 - DNA, 25 bp, Homo sapien
tctcttatctgtgctaagcgctgct

SEQ ID NO: 798082 - DNA, 25 bp, Homo sapien
taagcgctgctttttgcgctctagc

SEQ ID NO: 798083 - DNA, 25 bp, Homo sapien
acctacacactgattataaactaag

SEQ ID NO: 798084 - DNA, 25 bp, Homo sapien
cctacacactgattataaactaagt

SEQ ID NO: 798085 - DNA, 25 bp, Homo sapien
ctacacactgattataaactaagtg

SEQ ID NO: 798086 - DNA, 25 bp, Homo sapien
ttgcagcaaagcctctgtctctcgt

SEQ ID NO: 798087 - DNA, 25 bp, Homo sapien
cagagtcgtcctgaacgggttcttt

SEQ ID NO: 798088 - DNA, 25 bp, Homo sapien
tgtctctcgtcgtttgcgatccaga

SEQ ID NO: 798089 - DNA, 25 bp, Homo sapien
ctagaggcggctccggtgagatacc

SEQ ID NO: 798090 - DNA, 25 bp, Homo sapien
gtcccctaggttacatcttccacaa

SEQ ID NO: 798091 - DNA, 25 bp, Homo sapien
ggtccatcagtcaaatataacgtcc

SEQ ID NO: 798092 - DNA, 25 bp, Homo sapien
gcaatgtgtctaactcatatcagat

SEQ ID NO: 798093 - DNA, 25 bp, Homo sapien
aaatgtgtatcagctcctaagtaga

SEQ ID NO: 798094 - DNA, 25 bp, Homo sapien
gggcccttgccagagtccgttggca

SEQ ID NO: 798095 - DNA, 25 bp, Homo sapien
tcagagggtaagtcgaagagatggc

SEQ ID NO: 798096 - DNA, 25 bp, Homo sapien
gtccgttggcagtaatgcaaggata

SEQ ID NO: 798097 - DNA, 25 bp, Homo sapien
ctctgagtaagctcagagggtaagt

SEQ ID NO: 798098 - DNA, 25 bp, Homo sapien
tgccatgtgcacagaagtaagctgc

SEQ ID NO: 798099 - DNA, 25 bp, Homo sapien
gcatcccattgtactgtttactgtc

SEQ ID NO: 798100 - DNA, 25 bp, Homo sapien
ttaatagttgcatcccattgtactg

SEQ ID NO: 798101 - DNA, 25 bp, Homo sapien
cctccagcagctctagaagaccctg

SEQ ID NO: 798102 - DNA, 25 bp, Homo sapien
caggtatcccatgttaaaaaatgca

SEQ ID NO: 798103 - DNA, 25 bp, Homo sapien
acaggtatcccatgttaaaaaatgc

SEQ ID NO: 798104 - DNA, 25 bp, Homo sapien
gaaaataacaggtatcccatgttaa

SEQ ID NO: 798105 - DNA, 25 bp, Homo sapien
aacaggtatcccatgttaaaaaatg

SEQ ID NO: 798106 - DNA, 25 bp, Homo sapien
aatggccccagatcgcctgagtctt

SEQ ID NO: 798107 - DNA, 25 bp, Homo sapien
ccccagatcgcctgagtcttggctt

SEQ ID NO: 798108 - DNA, 25 bp, Homo sapien
ttcactgggagtgctcactgatttc

SEQ ID NO: 798109 - DNA, 25 bp, Homo sapien
cactgatttcgaggagggagacata

SEQ ID NO: 798110 - DNA, 25 bp, Homo sapien
aacaagggcagaatttactaaggca

SEQ ID NO: 798111 - DNA, 25 bp, Homo sapien
tcaaagatgtgtcttctacataaaa

SEQ ID NO: 798112 - DNA, 25 bp, Homo sapien
tatatgtgcctttagctacggccag

SEQ ID NO: 798113 - DNA, 25 bp, Homo sapien
cattgagtaggccaatttgcagatt

SEQ ID NO: 798114 - DNA, 25 bp, Homo sapien
gggcttaaatgtcttgattgattgg

SEQ ID NO: 798115 - DNA, 25 bp, Homo sapien
cttaaatgtcttgattgattggaaa

SEQ ID NO: 798116 - DNA, 25 bp, Homo sapien
gaggagggcttaaatgtcttgattg

SEQ ID NO: 798117 - DNA, 25 bp, Homo sapien
aaatgtcttgattgattggaaagta

SEQ ID NO: 798118 - DNA, 25 bp, Homo sapien
aaatacacaggtgttgtttctataa

SEQ ID NO: 798119 - DNA, 25 bp, Homo sapien
gaaatttgaagatagtgtagatact

SEQ ID NO: 798120 - DNA, 25 bp, Homo sapien
aaagcaggttcaacagttttcacag

SEQ ID NO: 798121 - DNA, 25 bp, Homo sapien
gagtgctactctggtggtggaaaca

SEQ ID NO: 798122 - DNA, 25 bp, Homo sapien
agcttttaccaacaacaagttggtg

SEQ ID NO: 798123 - DNA, 25 bp, Homo sapien
gctgtagacaaaagagcagactctg

SEQ ID NO: 798124 - DNA, 25 bp, Homo sapien
tctgatgggctgatttttagtgacc

SEQ ID NO: 798125 - DNA, 25 bp, Homo sapien
gatggtctggctcttctgatactta

SEQ ID NO: 798126 - DNA, 25 bp, Homo sapien
tccttgcaaggagtaggatcaacta

SEQ ID NO: 798127 - DNA, 25 bp, Homo sapien
caagttctgagtctgactgcagctg

SEQ ID NO: 798128 - DNA, 25 bp, Homo sapien
cactgaggggtctgtgtcccactgc

SEQ ID NO: 798129 - DNA, 25 bp, Homo sapien
gcagctggagcactgaggggtctgt

SEQ ID NO: 798130 - DNA, 25 bp, Homo sapien
ccaagttctgagtctgactgcagct

SEQ ID NO: 798131 - DNA, 25 bp, Homo sapien
cagactgatgcgtggcaagaggagt

SEQ ID NO: 798132 - DNA, 25 bp, Homo sapien
tgggtgacctttgacacgcccagtt

SEQ ID NO: 798133 - DNA, 25 bp, Homo sapien
tgacacgcccagtttatgcagtctt

SEQ ID NO: 798134 - DNA, 25 bp, Homo sapien
ttggcaggaaatccacttgggtgac

SEQ ID NO: 798135 - DNA, 25 bp, Homo sapien
ctccttcctccagtgtggcttgcat

SEQ ID NO: 798136 - DNA, 25 bp, Homo sapien
cctcctccttcctccagtgtggctt

SEQ ID NO: 798137 - DNA, 25 bp, Homo sapien
caggttgtagaaatttcctcctcct

SEQ ID NO: 798138 - DNA, 25 bp, Homo sapien
tcctccttcctccagtgtggcttgc

SEQ ID NO: 798139 - DNA, 25 bp, Homo sapien
aagctgtagctggtatctttaagac

SEQ ID NO: 798140 - DNA, 25 bp, Homo sapien
agcatcatgtcagcaggacctggag

SEQ ID NO: 798141 - DNA, 25 bp, Homo sapien
gaagctgtagctggtatctttaaga

SEQ ID NO: 798142 - DNA, 25 bp, Homo sapien
catcatgtcagcaggacctggagag

SEQ ID NO: 798143 - DNA, 25 bp, Homo sapien
tatctgtagcccttgtcaatctcac

SEQ ID NO: 798144 - DNA, 25 bp, Homo sapien
ctatctgtagcccttgtcaatctca

SEQ ID NO: 798145 - DNA, 25 bp, Homo sapien
gatacacaatccagtcgatagcagc

SEQ ID NO: 798146 - DNA, 25 bp, Homo sapien
ttagagatcctacccttatgacttc

SEQ ID NO: 798147 - DNA, 25 bp, Homo sapien
taataaggccaccaattagagatcc

SEQ ID NO: 798148 - DNA, 25 bp, Homo sapien
atttacaaacatagtcgtattaggg

SEQ ID NO: 798149 - DNA, 25 bp, Homo sapien
cttaaatattctgaggcatgggcac

SEQ ID NO: 798150 - DNA, 25 bp, Homo sapien
catgggcaccaaagcgagagtcagt

SEQ ID NO: 798151 - DNA, 25 bp, Homo sapien
tttgggaatctgaaaagagaccacc

SEQ ID NO: 798152 - DNA, 25 bp, Homo sapien
caaaggacatcatgccagagggcaa

SEQ ID NO: 798153 - DNA, 25 bp, Homo sapien
ggaagtagattcatggaccatctca

SEQ ID NO: 798154 - DNA, 25 bp, Homo sapien
catatcagttgttactctccaggga

SEQ ID NO: 798155 - DNA, 25 bp, Homo sapien
gatattcaccctagtgtacctaggg

SEQ ID NO: 798156 - DNA, 25 bp, Homo sapien
ctcttgtgtctactttatgctggaa

SEQ ID NO: 798157 - DNA, 25 bp, Homo sapien
cacaggtaaggctggacctgacagg

SEQ ID NO: 798158 - DNA, 25 bp, Homo sapien
taaggctggacctgacaggcatccc

SEQ ID NO: 798159 - DNA, 25 bp, Homo sapien
caggtaaggctggacctgacaggca

SEQ ID NO: 798160 - DNA, 25 bp, Homo sapien
tgcatgtgacttgagtatgactcat

SEQ ID NO: 798161 - DNA, 25 bp, Homo sapien
tggtcccagatgaacatgaatttac

SEQ ID NO: 798162 - DNA, 25 bp, Homo sapien
gatgctcaaacttcctatccaggac

SEQ ID NO: 798163 - DNA, 25 bp, Homo sapien
gcccacccaaggatctttctagcag

SEQ ID NO: 798164 - DNA, 25 bp, Homo sapien
gactgctgaagttaccactgtgaat

SEQ ID NO: 798165 - DNA, 25 bp, Homo sapien
cacagcctgagtttctcatgacctt

SEQ ID NO: 798166 - DNA, 25 bp, Homo sapien
tcttcattgttcatgcctgtagttc

SEQ ID NO: 798167 - DNA, 25 bp, Homo sapien
ttccttgctcactggaaggctacag

SEQ ID NO: 798168 - DNA, 25 bp, Homo sapien
gcccggccaagctgttgtctctatt

SEQ ID NO: 798169 - DNA, 25 bp, Homo sapien
tgactctaatatgcagcccggattg

SEQ ID NO: 798170 - DNA, 25 bp, Homo sapien
gaggcgtcctgcacttagccaagaa

SEQ ID NO: 798171 - DNA, 25 bp, Homo sapien
gactggctgagtagaggacctccta

SEQ ID NO: 798172 - DNA, 25 bp, Homo sapien
gaaaactgccctgtcgtatacactg

SEQ ID NO: 798173 - DNA, 25 bp, Homo sapien
gagctgtgcccaactctctaatttc

SEQ ID NO: 798174 - DNA, 25 bp, Homo sapien
cctactccctggcttgtaatgcagt

SEQ ID NO: 798175 - DNA, 25 bp, Homo sapien
aagtctctctttggtatttcatcag

SEQ ID NO: 798176 - DNA, 25 bp, Homo sapien
tgccgtcccatagtcctcccatcaa

SEQ ID NO: 798177 - DNA, 25 bp, Homo sapien
tctgtggctcgcactgccaagctcg

SEQ ID NO: 798178 - DNA, 25 bp, Homo sapien
tcgcactgccaagctcgaagaggca

SEQ ID NO: 798179 - DNA, 25 bp, Homo sapien
ggctcgcactgccaagctcgaagag

SEQ ID NO: 798180 - DNA, 25 bp, Homo sapien
gcactgccaagctcgaagaggcaaa

SEQ ID NO: 798181 - DNA, 25 bp, Homo sapien
tcctaacaagggctataatttggga

SEQ ID NO: 798182 - DNA, 25 bp, Homo sapien
tattggcagttaaccaggtgaactt

SEQ ID NO: 798183 - DNA, 25 bp, Homo sapien
agtattttataagttcagccacagg

SEQ ID NO: 798184 - DNA, 25 bp, Homo sapien
gttttacaatgaggacttgccttca

SEQ ID NO: 798185 - DNA, 25 bp, Homo sapien
aatgcaatgtagttgcaagcaattg

SEQ ID NO: 798186 - DNA, 25 bp, Homo sapien
tcgagactcagaaactttatcaagt

SEQ ID NO: 798187 - DNA, 25 bp, Homo sapien
tgtagttgcaagcaattgacttctg

SEQ ID NO: 798188 - DNA, 25 bp, Homo sapien
tgacttctgtttttcgagactcaga

SEQ ID NO: 798189 - DNA, 25 bp, Homo sapien
gacataggtaatcgtgtcacggtgg

SEQ ID NO: 798190 - DNA, 25 bp, Homo sapien
taaaatggtgccctcatactcaatg

SEQ ID NO: 798191 - DNA, 25 bp, Homo sapien
gcatctaagataggacttggctcag

SEQ ID NO: 798192 - DNA, 25 bp, Homo sapien
ggctcagggtatgcacttactagat

SEQ ID NO: 798193 - DNA, 25 bp, Homo sapien
gagagaatttacagtgcaacagggc

SEQ ID NO: 798194 - DNA, 25 bp, Homo sapien
tgcctgtctaagcttggaaaagagg

SEQ ID NO: 798195 - DNA, 25 bp, Homo sapien
gaactggagagatatcagggtttag

SEQ ID NO: 798196 - DNA, 25 bp, Homo sapien
cacataaccgtgatgcttgaaaagg

SEQ ID NO: 798197 - DNA, 25 bp, Homo sapien
atcccctcttgcttgccatgggcca

SEQ ID NO: 798198 - DNA, 25 bp, Homo sapien
tcatcatcgccatcccctcttgctt

SEQ ID NO: 798199 - DNA, 25 bp, Homo sapien
atcatcatcgccatcccctcttgct

SEQ ID NO: 798200 - DNA, 25 bp, Homo sapien
cttgccatgggccacatcccctcct

SEQ ID NO: 798201 - DNA, 25 bp, Homo sapien
ttaatttgatctacattcgaccacc

SEQ ID NO: 798202 - DNA, 25 bp, Homo sapien
atttgatctacattcgaccaccctc

SEQ ID NO: 798203 - DNA, 25 bp, Homo sapien
tctacattcgaccaccctccttaat

SEQ ID NO: 798204 - DNA, 25 bp, Homo sapien
ccttaatttctccttgaagtccaat

SEQ ID NO: 798205 - DNA, 25 bp, Homo sapien
tagaattaagtcacaagtaaagcac

SEQ ID NO: 798206 - DNA, 25 bp, Homo sapien
gtgttgaaccaaggtgtttgtgcct

SEQ ID NO: 798207 - DNA, 25 bp, Homo sapien
gcctgcatagaattaagtcacaagt

SEQ ID NO: 798208 - DNA, 25 bp, Homo sapien
aagcacttatttctgacagcagatt

SEQ ID NO: 798209 - DNA, 25 bp, Homo sapien
cggcccattgtccatacatctttaa

SEQ ID NO: 798210 - DNA, 25 bp, Homo sapien
catttaacataaagtcagaatatta

SEQ ID NO: 798211 - DNA, 25 bp, Homo sapien
catctttaaacaagaagacatttaa

SEQ ID NO: 798212 - DNA, 25 bp, Homo sapien
catgcccggcccattgtccatacat

SEQ ID NO: 798213 - DNA, 25 bp, Homo sapien
gctaaactttatgatggccacacaa

SEQ ID NO: 798214 - DNA, 25 bp, Homo sapien
ggcattcatgcagggaaacgacaaa

SEQ ID NO: 798215 - DNA, 25 bp, Homo sapien
ccaacctcagtggtgctaggagaga

SEQ ID NO: 798216 - DNA, 25 bp, Homo sapien
catgctgggtgtcctcaatccaacc

SEQ ID NO: 798217 - DNA, 25 bp, Homo sapien
tacagcctttatgatgcaactccag

SEQ ID NO: 798218 - DNA, 25 bp, Homo sapien
gcctttatgatgcaactccagcagc

SEQ ID NO: 798219 - DNA, 25 bp, Homo sapien
gcctgtctttacagcctttatgatg

SEQ ID NO: 798220 - DNA, 25 bp, Homo sapien
ctttacagcctttatgatgcaactc

SEQ ID NO: 798221 - DNA, 25 bp, Homo sapien
ctaaggctggctcgggtggagagtg

SEQ ID NO: 798222 - DNA, 25 bp, Homo sapien
caggaagaccgctaaggctggctcg

SEQ ID NO: 798223 - DNA, 25 bp, Homo sapien
ctcaggaagaccgctaaggctggct

SEQ ID NO: 798224 - DNA, 25 bp, Homo sapien
tcaggaagaccgctaaggctggctc

SEQ ID NO: 798225 - DNA, 25 bp, Homo sapien
ttgctttcctcagccctcttagggc

SEQ ID NO: 798226 - DNA, 25 bp, Homo sapien
caaaactttgggataagaggatctg

SEQ ID NO: 798227 - DNA, 25 bp, Homo sapien
tcctgccagagcccttgatgctctg

SEQ ID NO: 798228 - DNA, 25 bp, Homo sapien
tgtgttttacgagtccactgggttc

SEQ ID NO: 798229 - DNA, 25 bp, Homo sapien
ttccagtaagtcccaccagagatga

SEQ ID NO: 798230 - DNA, 25 bp, Homo sapien
gaggcgttgtcagcaccagatttcc

SEQ ID NO: 798231 - DNA, 25 bp, Homo sapien
ataaatcccactagaggcgttgtca

SEQ ID NO: 798232 - DNA, 25 bp, Homo sapien
aaccagaaccctcaacgacacaagg

SEQ ID NO: 798233 - DNA, 25 bp, Homo sapien
ttttggaggaaaacgcagtagcagc

SEQ ID NO: 798234 - DNA, 25 bp, Homo sapien
cctggcaagattgttccagaggccc

SEQ ID NO: 798235 - DNA, 25 bp, Homo sapien
agtagcagcagtgacgcccaacatc

SEQ ID NO: 798236 - DNA, 25 bp, Homo sapien
tcagactggtcgctcctaactcagg

SEQ ID NO: 798237 - DNA, 25 bp, Homo sapien
caatccggattggtgatatgctgga

SEQ ID NO: 798238 - DNA, 25 bp, Homo sapien
ggattggtgatatgctggatcctac

SEQ ID NO: 798239 - DNA, 25 bp, Homo sapien
ctttgcagcaatccggattggtgat

SEQ ID NO: 798240 - DNA, 25 bp, Homo sapien
gcagcaatccggattggtgatatgc

SEQ ID NO: 798241 - DNA, 25 bp, Homo sapien
gacatttctttaacagattcagcag

SEQ ID NO: 798242 - DNA, 25 bp, Homo sapien
gagacatttctttaacagattcagc

SEQ ID NO: 798243 - DNA, 25 bp, Homo sapien
ctggagacatttctttaacagattc

SEQ ID NO: 798244 - DNA, 25 bp, Homo sapien
atttctttaacagattcagcagcca

SEQ ID NO: 798245 - DNA, 25 bp, Homo sapien
ctctgaagcttcttcgaagatggcc

SEQ ID NO: 798246 - DNA, 25 bp, Homo sapien
acagggaacacctgttgtacagatg

SEQ ID NO: 798247 - DNA, 25 bp, Homo sapien
gaagcttcttcgaagatggcccagg

SEQ ID NO: 798248 - DNA, 25 bp, Homo sapien
cccacagggaacacctgttgtacag

SEQ ID NO: 798249 - DNA, 25 bp, Homo sapien
cagttctgagtcctggccaacttta

SEQ ID NO: 798250 - DNA, 25 bp, Homo sapien
gattttccagttctgagtcctggcc

SEQ ID NO: 798251 - DNA, 25 bp, Homo sapien
cctggccaactttagattccaccat

SEQ ID NO: 798252 - DNA, 25 bp, Homo sapien
gtcctgattttccagttctgagtcc

SEQ ID NO: 798253 - DNA, 25 bp, Homo sapien
tactgaaattgtggacgttttgcac

SEQ ID NO: 798254 - DNA, 25 bp, Homo sapien
gcagagttactagcgttgatcacta

SEQ ID NO: 798255 - DNA, 25 bp, Homo sapien
cctccttatacaggcagagttgcag

SEQ ID NO: 798256 - DNA, 25 bp, Homo sapien
ctattatgaggagggcaacagggta

SEQ ID NO: 798257 - DNA, 25 bp, Homo sapien
gatctgctgtttttcttcctctgtc

SEQ ID NO: 798258 - DNA, 25 bp, Homo sapien
ctgaatgaaggatctgctgtttttc

SEQ ID NO: 798259 - DNA, 25 bp, Homo sapien
tctgctgtttttcttcctctgtcaa

SEQ ID NO: 798260 - DNA, 25 bp, Homo sapien
atctgctgtttttcttcctctgtca

SEQ ID NO: 798261 - DNA, 25 bp, Homo sapien
tcggccgctgtagtcaaaaaagatg

SEQ ID NO: 798262 - DNA, 25 bp, Homo sapien
ttcctctaactctcggccgctgtag

SEQ ID NO: 798263 - DNA, 25 bp, Homo sapien
gatgtcggaatcttcagccagggct

SEQ ID NO: 798264 - DNA, 25 bp, Homo sapien
cgtattgtccggtcaaaaaagatga

SEQ ID NO: 798265 - DNA, 25 bp, Homo sapien
gcttggaccaatgttcatcatagaa

SEQ ID NO: 798266 - DNA, 25 bp, Homo sapien
tgaaagaaagattggctccagcctg

SEQ ID NO: 798267 - DNA, 25 bp, Homo sapien
aagtgaccactcgatgcttggacca

SEQ ID NO: 798268 - DNA, 25 bp, Homo sapien
catcatagaactgacgattgaaaga

SEQ ID NO: 798269 - DNA, 25 bp, Homo sapien
acttcatgttccaaaccaaggccac

SEQ ID NO: 798270 - DNA, 25 bp, Homo sapien
ctggttcatggggagcatcttcatt

SEQ ID NO: 798271 - DNA, 25 bp, Homo sapien
catggccagagttagaggttactca

SEQ ID NO: 798272 - DNA, 25 bp, Homo sapien
caatcaggttgaggctgggactcta

SEQ ID NO: 798273 - DNA, 25 bp, Homo sapien
tatttaccatacagaactagacttc

SEQ ID NO: 798274 - DNA, 25 bp, Homo sapien
tgggactctattccagcagctccta

SEQ ID NO: 798275 - DNA, 25 bp, Homo sapien
taatccttacagtattttcctggga

SEQ ID NO: 798276 - DNA, 25 bp, Homo sapien
tctatgtttacagaaggagcatatc

SEQ ID NO: 798277 - DNA, 25 bp, Homo sapien
tacagaaggagcatatcaagctgac

SEQ ID NO: 798278 - DNA, 25 bp, Homo sapien
gaaggagcatatcaagctgacttga

SEQ ID NO: 798279 - DNA, 25 bp, Homo sapien
tgataattctaacttccccagatgt

SEQ ID NO: 798280 - DNA, 25 bp, Homo sapien
gataattctaacttccccagatgtg

SEQ ID NO: 798281 - DNA, 25 bp, Homo sapien
gctggtaggatacacgataatatac

SEQ ID NO: 798282 - DNA, 25 bp, Homo sapien
gctgctggtaggatacacgataata

SEQ ID NO: 798283 - DNA, 25 bp, Homo sapien
tatgctgctggtaggatacacgata

SEQ ID NO: 798284 - DNA, 25 bp, Homo sapien
gtaggatacacgataatatacatca

SEQ ID NO: 798285 - DNA, 25 bp, Homo sapien
caacatatctgccgaatgttttcat

SEQ ID NO: 798286 - DNA, 25 bp, Homo sapien
tcaacatatctgccgaatgttttca

SEQ ID NO: 798287 - DNA, 25 bp, Homo sapien
actgggccactttgagtcaagccct

SEQ ID NO: 798288 - DNA, 25 bp, Homo sapien
aagcccttcaaagcctagcaacggc

SEQ ID NO: 798289 - DNA, 25 bp, Homo sapien
gagtgagcgttcttccagtggcaat

SEQ ID NO: 798290 - DNA, 25 bp, Homo sapien
tgagtccttgagtgagcgttcttcc

SEQ ID NO: 798291 - DNA, 25 bp, Homo sapien
tagcttcacgggcagtcattggaac

SEQ ID NO: 798292 - DNA, 25 bp, Homo sapien
tcatgaacacatttgcaatatcctc

SEQ ID NO: 798293 - DNA, 25 bp, Homo sapien
tgcttttagcttcacgggcagtcat

SEQ ID NO: 798294 - DNA, 25 bp, Homo sapien
gcagtcattggaaccttattcatga

SEQ ID NO: 798295 - DNA, 25 bp, Homo sapien
ttttcccgaggcaatcaggccagga

SEQ ID NO: 798296 - DNA, 25 bp, Homo sapien
tagataatggctgtagctaagctca

SEQ ID NO: 798297 - DNA, 25 bp, Homo sapien
caagaaatgtcaccccttggtggca

SEQ ID NO: 798298 - DNA, 25 bp, Homo sapien
tatggcaaatgcaaggtactgtgga

SEQ ID NO: 798299 - DNA, 25 bp, Homo sapien
tacattagtggaactactctctcag

SEQ ID NO: 798300 - DNA, 25 bp, Homo sapien
gctgttatttgcaacccatgagtgc

SEQ ID NO: 798301 - DNA, 25 bp, Homo sapien
gagacgcacagagcatactgtagac

SEQ ID NO: 798302 - DNA, 25 bp, Homo sapien
tgagacagctaaagttccaggcaga

SEQ ID NO: 798303 - DNA, 25 bp, Homo sapien
cacaccttgaattagagctggactc

SEQ ID NO: 798304 - DNA, 25 bp, Homo sapien
tcgcctgtaccttagcatcagttgg

SEQ ID NO: 798305 - DNA, 25 bp, Homo sapien
tcagtactactccaaattcgcctgt

SEQ ID NO: 798306 - DNA, 25 bp, Homo sapien
tgttactacatcatttcttacgtgg

SEQ ID NO: 798307 - DNA, 25 bp, Homo sapien
caaatctttctccaataatttcagt

SEQ ID NO: 798308 - DNA, 25 bp, Homo sapien
ctcctgattcgaagaaaaatctcta

SEQ ID NO: 798309 - DNA, 25 bp, Homo sapien
tcctgtcctgttgatggaggttgtc

SEQ ID NO: 798310 - DNA, 25 bp, Homo sapien
ctcaacaaatctttctccaataatt

SEQ ID NO: 798311 - DNA, 25 bp, Homo sapien
cagataaacaatatattcccatata

SEQ ID NO: 798312 - DNA, 25 bp, Homo sapien
acagataaacaatatattcccatat

SEQ ID NO: 798313 - DNA, 25 bp, Homo sapien
ccctggggctgttggaagatttgaa

SEQ ID NO: 798314 - DNA, 25 bp, Homo sapien
ggctgttggaagatttgaattaggt

SEQ ID NO: 798315 - DNA, 25 bp, Homo sapien
cctttctgagaattccttggaattt

SEQ ID NO: 798316 - DNA, 25 bp, Homo sapien
taaaatttgatttcccatagattag

SEQ ID NO: 798317 - DNA, 25 bp, Homo sapien
gattagaaacccatcatcctgataa

SEQ ID NO: 798318 - DNA, 25 bp, Homo sapien
tcttgacactctttatactaagaaa

SEQ ID NO: 798319 - DNA, 25 bp, Homo sapien
tgtataaggaaggcactgtaccagg

SEQ ID NO: 798320 - DNA, 25 bp, Homo sapien
gtaggaataaaagggtagtcactgc

SEQ ID NO: 798321 - DNA, 25 bp, Homo sapien
catgtataaggaaggcactgtacca

SEQ ID NO: 798322 - DNA, 25 bp, Homo sapien
taggaataaaagggtagtcactgcc

SEQ ID NO: 798323 - DNA, 25 bp, Homo sapien
tcgatgactgcgattgtcccagagg

SEQ ID NO: 798324 - DNA, 25 bp, Homo sapien
caccaagttaggatggaaacgggcg

SEQ ID NO: 798325 - DNA, 25 bp, Homo sapien
tgtccgctgcactggagtccttcga

SEQ ID NO: 798326 - DNA, 25 bp, Homo sapien
agaggacaatctggcccgagtaagt

SEQ ID NO: 798327 - DNA, 25 bp, Homo sapien
gacagtatcagtcttacccttggtg

SEQ ID NO: 798328 - DNA, 25 bp, Homo sapien
ctttgtgcaaatagctgacagtatc

SEQ ID NO: 798329 - DNA, 25 bp, Homo sapien
cttacccttggtgagttactgtcca

SEQ ID NO: 798330 - DNA, 25 bp, Homo sapien
tactgtccataatacctagccacaa

SEQ ID NO: 798331 - DNA, 25 bp, Homo sapien
ggttatgagcattctgggtcccaac

SEQ ID NO: 798332 - DNA, 25 bp, Homo sapien
gatgaggttatgagcattctgggtc

SEQ ID NO: 798333 - DNA, 25 bp, Homo sapien
ggagttgagagcatgtccaggctcc

SEQ ID NO: 798334 - DNA, 25 bp, Homo sapien
tggagttgagagcatgtccaggctc

SEQ ID NO: 798335 - DNA, 25 bp, Homo sapien
cagcgacaggcttggacttattgta

SEQ ID NO: 798336 - DNA, 25 bp, Homo sapien
tgggaaagccattccggtaacagcg

SEQ ID NO: 798337 - DNA, 25 bp, Homo sapien
tgccaaccacgaagttattgacgtc

SEQ ID NO: 798338 - DNA, 25 bp, Homo sapien
gacaagccgtgtagactgtaccttc

SEQ ID NO: 798339 - DNA, 25 bp, Homo sapien
gccaatgcctgctacgttacaatgt

SEQ ID NO: 798340 - DNA, 25 bp, Homo sapien
cagtgcgtgttccatgtaacaggca

SEQ ID NO: 798341 - DNA, 25 bp, Homo sapien
gaacccgaggaactgatctttgaag

SEQ ID NO: 798342 - DNA, 25 bp, Homo sapien
ttagaatgactacaaagccaatgcc

SEQ ID NO: 798343 - DNA, 25 bp, Homo sapien
gagcacacatgagcagaattccagt

SEQ ID NO: 798344 - DNA, 25 bp, Homo sapien
tgtaggaagagcacacatgagcaga

SEQ ID NO: 798345 - DNA, 25 bp, Homo sapien
cacatgagcagaattccagtgacct

SEQ ID NO: 798346 - DNA, 25 bp, Homo sapien
ggaagagcacacatgagcagaattc

SEQ ID NO: 798347 - DNA, 25 bp, Homo sapien
gacaaacaggtgagaaaagtcgatt

SEQ ID NO: 798348 - DNA, 25 bp, Homo sapien
ttcaaagacctcaccaatacctgct

SEQ ID NO: 798349 - DNA, 25 bp, Homo sapien
ggtggtccacagtttgacagtccag

SEQ ID NO: 798350 - DNA, 25 bp, Homo sapien
tcgattgggcccactgccatgtggc

SEQ ID NO: 798351 - DNA, 25 bp, Homo sapien
ctccataatagaacatagaagtctt

SEQ ID NO: 798352 - DNA, 25 bp, Homo sapien
gcttcctgtcttgctataagtaact

SEQ ID NO: 798353 - DNA, 25 bp, Homo sapien
ttagggatcactccataatagaaca

SEQ ID NO: 798354 - DNA, 25 bp, Homo sapien
taaaaatgtatcttagggatcactc

SEQ ID NO: 798355 - DNA, 25 bp, Homo sapien
cattgcctagattatggtgtttgca

SEQ ID NO: 798356 - DNA, 25 bp, Homo sapien
gagtgtaagcctacttcaaaggtgg

SEQ ID NO: 798357 - DNA, 25 bp, Homo sapien
tgcatccctgtggtgttatttaatg

SEQ ID NO: 798358 - DNA, 25 bp, Homo sapien
caggtgtcccgtagatatgccagcg

SEQ ID NO: 798359 - DNA, 25 bp, Homo sapien
tttggatgaaaatggctgcttggac

SEQ ID NO: 798360 - DNA, 25 bp, Homo sapien
catttgttgactcagctgcctggaa

SEQ ID NO: 798361 - DNA, 25 bp, Homo sapien
ccctgacagtggttaatgatgaaac

SEQ ID NO: 798362 - DNA, 25 bp, Homo sapien
tctgtttgccaggtaaaccactccg

SEQ ID NO: 798363 - DNA, 25 bp, Homo sapien
tattgatttcacagtagttgcttga

SEQ ID NO: 798364 - DNA, 25 bp, Homo sapien
accccatcagaggatgtaaaagtga

SEQ ID NO: 798365 - DNA, 25 bp, Homo sapien
aattattcttttctagtagctaaca

SEQ ID NO: 798366 - DNA, 25 bp, Homo sapien
cagggaaaacaatcagctaagacag

SEQ ID NO: 798367 - DNA, 25 bp, Homo sapien
acactgaggcctggttccctagaat

SEQ ID NO: 798368 - DNA, 25 bp, Homo sapien
cctggttccctagaatttatgggag

SEQ ID NO: 798369 - DNA, 25 bp, Homo sapien
agaatttatgggagggccagttact

SEQ ID NO: 798370 - DNA, 25 bp, Homo sapien
ccagaaacttccacaaagctggtgc

SEQ ID NO: 798371 - DNA, 25 bp, Homo sapien
tgccttgggcttagatcaagtcaat

SEQ ID NO: 798372 - DNA, 25 bp, Homo sapien
tgggcttagatcaagtcaatgaacc

SEQ ID NO: 798373 - DNA, 25 bp, Homo sapien
ggcttagatcaagtcaatgaaccag

SEQ ID NO: 798374 - DNA, 25 bp, Homo sapien
ttttgccttgggcttagatcaagtc

SEQ ID NO: 798375 - DNA, 25 bp, Homo sapien
aatggtcctaatagcagaagacagc

SEQ ID NO: 798376 - DNA, 25 bp, Homo sapien
gaagccaagtgtctcatgcataacc

SEQ ID NO: 798377 - DNA, 25 bp, Homo sapien
cctcctggattggtgacccgtcaaa

SEQ ID NO: 798378 - DNA, 25 bp, Homo sapien
gatggtctatggattgctaccttaa

SEQ ID NO: 798379 - DNA, 25 bp, Homo sapien
tggagttcctacacccaggagcacc

SEQ ID NO: 798380 - DNA, 25 bp, Homo sapien
acaagttctttaattctccctggag

SEQ ID NO: 798381 - DNA, 25 bp, Homo sapien
aggagcaccacacacttctccagta

SEQ ID NO: 798382 - DNA, 25 bp, Homo sapien
acacttctccagtaactttacctgc

SEQ ID NO: 798383 - DNA, 25 bp, Homo sapien
tcagacgtagaaaaggcccagtttc

SEQ ID NO: 798384 - DNA, 25 bp, Homo sapien
ttcaaggactctgactcgcacagac

SEQ ID NO: 798385 - DNA, 25 bp, Homo sapien
ctctgactcgcacagactgagcaca

SEQ ID NO: 798386 - DNA, 25 bp, Homo sapien
cagactgagcacacccatttccaaa

SEQ ID NO: 798387 - DNA, 25 bp, Homo sapien
ggaagtcagcccgatagtcatactg

SEQ ID NO: 798388 - DNA, 25 bp, Homo sapien
gattcgtatctattaaagtgtcccc

SEQ ID NO: 798389 - DNA, 25 bp, Homo sapien
tagtcacccagctcaaacagttctt

SEQ ID NO: 798390 - DNA, 25 bp, Homo sapien
gagtctaagccacttagtaggccaa

SEQ ID NO: 798391 - DNA, 25 bp, Homo sapien
gagggttcggagattccactgtggg

SEQ ID NO: 798392 - DNA, 25 bp, Homo sapien
tgggagggttcggagattccactgt

SEQ ID NO: 798393 - DNA, 25 bp, Homo sapien
gtgggagggttcggagattccactg

SEQ ID NO: 798394 - DNA, 25 bp, Homo sapien
ttcggagattccactgtgggggcct

SEQ ID NO: 798395 - DNA, 25 bp, Homo sapien
tacgatgatcaggttgattagagac

SEQ ID NO: 798396 - DNA, 25 bp, Homo sapien
gacctagaggcagctagatatgtgg

SEQ ID NO: 798397 - DNA, 25 bp, Homo sapien
ccaacatggtattatttagacaaag

SEQ ID NO: 798398 - DNA, 25 bp, Homo sapien
tatgtggttgtatcagggcctggaa

SEQ ID NO: 798399 - DNA, 25 bp, Homo sapien
gaaagatcatgtggcagtaaaggag

SEQ ID NO: 798400 - DNA, 25 bp, Homo sapien
gaggcaagcaggttcaaaagagccc

SEQ ID NO: 798401 - DNA, 25 bp, Homo sapien
tagcaaaattgaggcagctgttctc

SEQ ID NO: 798402 - DNA, 25 bp, Homo sapien
tccaaaaccaggttcagccaagctg

SEQ ID NO: 798403 - DNA, 25 bp, Homo sapien
aaaagacaatagatctgttacctct

SEQ ID NO: 798404 - DNA, 25 bp, Homo sapien
tctatttgctgggactatatggtcc

SEQ ID NO: 798405 - DNA, 25 bp, Homo sapien
ggttctcaggttttcctagctgtta

SEQ ID NO: 798406 - DNA, 25 bp, Homo sapien
taaaatctctgtaaagtagacggta

SEQ ID NO: 798407 - DNA, 25 bp, Homo sapien
tctatgtcatgttcagtatcagcaa

SEQ ID NO: 798408 - DNA, 25 bp, Homo sapien
ttctatgtcatgttcagtatcagca

SEQ ID NO: 798409 - DNA, 25 bp, Homo sapien
ttccttttctatgtcatgttcagta

SEQ ID NO: 798410 - DNA, 25 bp, Homo sapien
ctgtgtttccttttctatgtcatgt

SEQ ID NO: 798411 - DNA, 25 bp, Homo sapien
tcctcgtctgtagctgcaacagctg

SEQ ID NO: 798412 - DNA, 25 bp, Homo sapien
tgccacctcgtggtcctcgtctgta

SEQ ID NO: 798413 - DNA, 25 bp, Homo sapien
ggatgttctgaagccccggcggtcc

SEQ ID NO: 798414 - DNA, 25 bp, Homo sapien
gccccgaaccctttcattgaaggca

SEQ ID NO: 798415 - DNA, 25 bp, Homo sapien
aaacttcccgagatgaaagtcctcg

SEQ ID NO: 798416 - DNA, 25 bp, Homo sapien
gtcctcgagaaggtgaaccggagct

SEQ ID NO: 798417 - DNA, 25 bp, Homo sapien
agtcctcgagaaggtgaaccggagc

SEQ ID NO: 798418 - DNA, 25 bp, Homo sapien
aaaaactttgcacattcacaaagtg

SEQ ID NO: 798419 - DNA, 25 bp, Homo sapien
tgaagactttgtggcgctgctgctg

SEQ ID NO: 798420 - DNA, 25 bp, Homo sapien
tgtaaagcagagagaccgtgaagac

SEQ ID NO: 798421 - DNA, 25 bp, Homo sapien
tgctgcctcgggctgtctagagagc

SEQ ID NO: 798422 - DNA, 25 bp, Homo sapien
gacatcgtacacatagtctgcattg

SEQ ID NO: 798423 - DNA, 25 bp, Homo sapien
cgtccacgcaggcaaaaagcgcagg

SEQ ID NO: 798424 - DNA, 25 bp, Homo sapien
ggatgcacgggggaccacatgacat

SEQ ID NO: 798425 - DNA, 25 bp, Homo sapien
tgtcttcaaaggagtagagcggctt

SEQ ID NO: 798426 - DNA, 25 bp, Homo sapien
caacttctttgccagcttgggccca

SEQ ID NO: 798427 - DNA, 25 bp, Homo sapien
tttagggcggatgccccctcaatgg

SEQ ID NO: 798428 - DNA, 25 bp, Homo sapien
cgtcatagacccaaatacggccttc

SEQ ID NO: 798429 - DNA, 25 bp, Homo sapien
cagcttgggcccaacgaacacggtt

SEQ ID NO: 798430 - DNA, 25 bp, Homo sapien
tatcaatagtcaccagaccatttgc

SEQ ID NO: 798431 - DNA, 25 bp, Homo sapien
gactcagagggtattctctttccca

SEQ ID NO: 798432 - DNA, 25 bp, Homo sapien
tactggcggtatttccgactcagag

SEQ ID NO: 798433 - DNA, 25 bp, Homo sapien
ctggggccaatattaacagagtttt

SEQ ID NO: 798434 - DNA, 25 bp, Homo sapien
ttaagacaatgacccaagctcaggg

SEQ ID NO: 798435 - DNA, 25 bp, Homo sapien
cattgtgtgctctaaaaaacctacc

SEQ ID NO: 798436 - DNA, 25 bp, Homo sapien
taacactctagttgacaggaccggc

SEQ ID NO: 798437 - DNA, 25 bp, Homo sapien
aaatgtggcgttccttcctgacaaa

SEQ ID NO: 798438 - DNA, 25 bp, Homo sapien
ggatgactcagatattccaactgct

SEQ ID NO: 798439 - DNA, 25 bp, Homo sapien
ctgagttcaccaacagccagtccat

SEQ ID NO: 798440 - DNA, 25 bp, Homo sapien
tctaagtcaatgtggatctggaaac

SEQ ID NO: 798441 - DNA, 25 bp, Homo sapien
caactgcttcatcgactgagttcac

SEQ ID NO: 798442 - DNA, 25 bp, Homo sapien
ctggctcttctcacgtggtagtctc

SEQ ID NO: 798443 - DNA, 25 bp, Homo sapien
tggctcttctcacgtggtagtctct

SEQ ID NO: 798444 - DNA, 25 bp, Homo sapien
gctatcagctctgttagcacgaatt

SEQ ID NO: 798445 - DNA, 25 bp, Homo sapien
tcctcctcgctatcagctctgttag

SEQ ID NO: 798446 - DNA, 25 bp, Homo sapien
ggtcctggcaaatcgggtccattca

SEQ ID NO: 798447 - DNA, 25 bp, Homo sapien
cgaatttccacaagggtcctggcaa

SEQ ID NO: 798448 - DNA, 25 bp, Homo sapien
tacaagagacttgactgcagacgct

SEQ ID NO: 798449 - DNA, 25 bp, Homo sapien
gcaaagctggcacaatatggcaccc

SEQ ID NO: 798450 - DNA, 25 bp, Homo sapien
ttaataggactatgccaggagtgca

SEQ ID NO: 798451 - DNA, 25 bp, Homo sapien
caaataaatacgttccatgcagcac

SEQ ID NO: 798452 - DNA, 25 bp, Homo sapien
actaaggctccagtgcctaccgctg

SEQ ID NO: 798453 - DNA, 25 bp, Homo sapien
cagtgcctaccgctgctttggacag

SEQ ID NO: 798454 - DNA, 25 bp, Homo sapien
ctaccgctgctttggacagggcttc

SEQ ID NO: 798455 - DNA, 25 bp, Homo sapien
gctgctttggacagggcttcggccc

SEQ ID NO: 798456 - DNA, 25 bp, Homo sapien
tgtgacatgccctgaacaggactgc

SEQ ID NO: 798457 - DNA, 25 bp, Homo sapien
caggactgcaatcaccgtgtggtga

SEQ ID NO: 798458 - DNA, 25 bp, Homo sapien
caatccgttgtcgtcgtcagtggtg

SEQ ID NO: 798459 - DNA, 25 bp, Homo sapien
tgaggaactgaagctggtaactccc

SEQ ID NO: 798460 - DNA, 25 bp, Homo sapien
ccttgcataatggtcagaggcgcat

SEQ ID NO: 798461 - DNA, 25 bp, Homo sapien
tcattggtacccacttgcttttaaa

SEQ ID NO: 798462 - DNA, 25 bp, Homo sapien
gaaaaactgctcatatgatgtacat

SEQ ID NO: 798463 - DNA, 25 bp, Homo sapien
gatgtacatgtactgattactgcct

SEQ ID NO: 798464 - DNA, 25 bp, Homo sapien
caatctcttaatgccaggaattcaa

SEQ ID NO: 798465 - DNA, 25 bp, Homo sapien
gagaacaaagatatggccgagcatg

SEQ ID NO: 798466 - DNA, 25 bp, Homo sapien
aagtccctgctcacagtatattggg

SEQ ID NO: 798467 - DNA, 25 bp, Homo sapien
gacagggcagctatcaagagaacaa

SEQ ID NO: 798468 - DNA, 25 bp, Homo sapien
cacagaggatgtaggtgactgaagt

SEQ ID NO: 798469 - DNA, 25 bp, Homo sapien
cccagtaagtggcaattagaatact

SEQ ID NO: 798470 - DNA, 25 bp, Homo sapien
tagagagatttagttatagcacaga

SEQ ID NO: 798471 - DNA, 25 bp, Homo sapien
aagcccccctctaaaatgctaacat

SEQ ID NO: 798472 - DNA, 25 bp, Homo sapien
tagttcaggtgaatagaggctgcca

SEQ ID NO: 798473 - DNA, 25 bp, Homo sapien
gaggctgccaaccatggtatctgag

SEQ ID NO: 798474 - DNA, 25 bp, Homo sapien
ctgcaaatgatacaatactgggact

SEQ ID NO: 798475 - DNA, 25 bp, Homo sapien
caagtttgagcaagagaactctccc

SEQ ID NO: 798476 - DNA, 25 bp, Homo sapien
gaagattgaatataaagtgatgccc

SEQ ID NO: 798477 - DNA, 25 bp, Homo sapien
taacctgagttttgcaagtgacctc

SEQ ID NO: 798478 - DNA, 25 bp, Homo sapien
cccgaatggtactctgcttctccag

SEQ ID NO: 798479 - DNA, 25 bp, Homo sapien
ttgtgagatcctcctcccagaaata

SEQ ID NO: 798480 - DNA, 25 bp, Homo sapien
tgttgactgcatagtatctccatgc

SEQ ID NO: 798481 - DNA, 25 bp, Homo sapien
aggccatccttgtagctagttctaa

SEQ ID NO: 798482 - DNA, 25 bp, Homo sapien
gaggtgaggcatctagccattgctg

SEQ ID NO: 798483 - DNA, 25 bp, Homo sapien
tctccatgcatgaacatactcaagt

SEQ ID NO: 798484 - DNA, 25 bp, Homo sapien
tctctaattataagggcaccagtca

SEQ ID NO: 798485 - DNA, 25 bp, Homo sapien
aaatgcctcataccacagagcggga

SEQ ID NO: 798486 - DNA, 25 bp, Homo sapien
gagatgtgcatttggtcagacagtc

SEQ ID NO: 798487 - DNA, 25 bp, Homo sapien
agtgtattcgtttggtcaggctgcc

SEQ ID NO: 798488 - DNA, 25 bp, Homo sapien
gtttatgccagtttgtccagccacg

SEQ ID NO: 798489 - DNA, 25 bp, Homo sapien
cactggttctaaaagggactggtga

SEQ ID NO: 798490 - DNA, 25 bp, Homo sapien
taagtaggaccctaatgcagtttcc

SEQ ID NO: 798491 - DNA, 25 bp, Homo sapien
tggtgattcccatatgcatgatgtg

SEQ ID NO: 798492 - DNA, 25 bp, Homo sapien
ggttgtgtcacatgagcggttcctc

SEQ ID NO: 798493 - DNA, 25 bp, Homo sapien
gagtcagtcacacaccttagagggt

SEQ ID NO: 798494 - DNA, 25 bp, Homo sapien
ctgagaattagtacacatggctgac

SEQ ID NO: 798495 - DNA, 25 bp, Homo sapien
cttagagggttgttgtgagttccac

SEQ ID NO: 798496 - DNA, 25 bp, Homo sapien
agaaaacaatgactgactgacctga

SEQ ID NO: 798497 - DNA, 25 bp, Homo sapien
tttactgcatgaaccctagtgggcc

SEQ ID NO: 798498 - DNA, 25 bp, Homo sapien
gcaattcacaatggccttacctgga

SEQ ID NO: 798499 - DNA, 25 bp, Homo sapien
gaaatgattcgctgccgcttagagg

SEQ ID NO: 798500 - DNA, 25 bp, Homo sapien
ctagtgggcccgacaaattcaagca

SEQ ID NO: 798501 - DNA, 25 bp, Homo sapien
atctgtgtagagtctggacaggtcc

SEQ ID NO: 798502 - DNA, 25 bp, Homo sapien
caggtccccacccactaaggtgttg

SEQ ID NO: 798503 - DNA, 25 bp, Homo sapien
tctgtgtagagtctggacaggtccc

SEQ ID NO: 798504 - DNA, 25 bp, Homo sapien
gtccccacccactaaggtgttggca

SEQ ID NO: 798505 - DNA, 25 bp, Homo sapien
gccagttttaatgtctaccattggg

SEQ ID NO: 798506 - DNA, 25 bp, Homo sapien
cagttttaatgtctaccattgggtt

SEQ ID NO: 798507 - DNA, 25 bp, Homo sapien
atgccagttttaatgtctaccattg

SEQ ID NO: 798508 - DNA, 25 bp, Homo sapien
ccagttttaatgtctaccattgggt

SEQ ID NO: 798509 - DNA, 25 bp, Homo sapien
tcagatggagaatgtaatgtgagtt

SEQ ID NO: 798510 - DNA, 25 bp, Homo sapien
tgtaatgtgagttgccggatttttg

SEQ ID NO: 798511 - DNA, 25 bp, Homo sapien
gctgtttccacaggacattgttgtg

SEQ ID NO: 798512 - DNA, 25 bp, Homo sapien
gagttgccggatttttgctgctgtt

SEQ ID NO: 798513 - DNA, 25 bp, Homo sapien
gctcgataaagtgttggactttttc

SEQ ID NO: 798514 - DNA, 25 bp, Homo sapien
tgtcttcacgtgcagctcgataaag

SEQ ID NO: 798515 - DNA, 25 bp, Homo sapien
tctttgtcttcacgtgcagctcgat

SEQ ID NO: 798516 - DNA, 25 bp, Homo sapien
cgtgcagctcgataaagtgttggac

SEQ ID NO: 798517 - DNA, 25 bp, Homo sapien
caacaagaaacctcgtaccacacct

SEQ ID NO: 798518 - DNA, 25 bp, Homo sapien
tggaccaccatttctggggagcaga

SEQ ID NO: 798519 - DNA, 25 bp, Homo sapien
tgccaaacatgtagaataggcattg

SEQ ID NO: 798520 - DNA, 25 bp, Homo sapien
agctggtggactctcctcccgcatc

SEQ ID NO: 798521 - DNA, 25 bp, Homo sapien
agcagagattgcgtccctagaactg

SEQ ID NO: 798522 - DNA, 25 bp, Homo sapien
ttggtggattccaaccattcggcat

SEQ ID NO: 798523 - DNA, 25 bp, Homo sapien
actgctgttcaggcttcatgatacc

SEQ ID NO: 798524 - DNA, 25 bp, Homo sapien
tgctgttcaggcttcatgataccag

SEQ ID NO: 798525 - DNA, 25 bp, Homo sapien
gttcaggcttcatgataccagcaag

SEQ ID NO: 798526 - DNA, 25 bp, Homo sapien
ctgttcaggcttcatgataccagca

SEQ ID NO: 798527 - DNA, 25 bp, Homo sapien
cattgtagactcctctacttttgcc

SEQ ID NO: 798528 - DNA, 25 bp, Homo sapien
gggcattgtagactcctctactttt

SEQ ID NO: 798529 - DNA, 25 bp, Homo sapien
tgggggcattgtagactcctctact

SEQ ID NO: 798530 - DNA, 25 bp, Homo sapien
ggcattgtagactcctctacttttg

SEQ ID NO: 798531 - DNA, 25 bp, Homo sapien
ctccgagcgaggcgcaggatatatt

SEQ ID NO: 798532 - DNA, 25 bp, Homo sapien
tccgagcgaggcgcaggatatattc

SEQ ID NO: 798533 - DNA, 25 bp, Homo sapien
ccgagcgaggcgcaggatatattct

SEQ ID NO: 798534 - DNA, 25 bp, Homo sapien
cgagcgaggcgcaggatatattctc

SEQ ID NO: 798535 - DNA, 25 bp, Homo sapien
aggacttctctacgctggttatttt

SEQ ID NO: 798536 - DNA, 25 bp, Homo sapien
catttgtcacatagttcttgtgcca

SEQ ID NO: 798537 - DNA, 25 bp, Homo sapien
acttctctacgctggttattttagt

SEQ ID NO: 798538 - DNA, 25 bp, Homo sapien
gtgcatttgtcacatagttcttgtg

SEQ ID NO: 798539 - DNA, 25 bp, Homo sapien
cataagggctcttttgtgttggcct

SEQ ID NO: 798540 - DNA, 25 bp, Homo sapien
tttccctgtggatagcaacatgggt

SEQ ID NO: 798541 - DNA, 25 bp, Homo sapien
gtgggaacccagtctcatgatgttt

SEQ ID NO: 798542 - DNA, 25 bp, Homo sapien
cactgtttggttccacataagggct

SEQ ID NO: 798543 - DNA, 25 bp, Homo sapien
tctcagaacagccttcactagctca

SEQ ID NO: 798544 - DNA, 25 bp, Homo sapien
ctgaagcttttagggcagcagagtc

SEQ ID NO: 798545 - DNA, 25 bp, Homo sapien
aagcttttagggcagcagagtcatt

SEQ ID NO: 798546 - DNA, 25 bp, Homo sapien
ctctgaagcttttagggcagcagag

SEQ ID NO: 798547 - DNA, 25 bp, Homo sapien
gcttttagggcagcagagtcattca

SEQ ID NO: 798548 - DNA, 25 bp, Homo sapien
ttctcttgtgttcgtcctaccctac

SEQ ID NO: 798549 - DNA, 25 bp, Homo sapien
ttctgctcttaaagtggaggatggg

SEQ ID NO: 798550 - DNA, 25 bp, Homo sapien
gatttttctgctcttaaagtggagg

SEQ ID NO: 798551 - DNA, 25 bp, Homo sapien
ggatgggggcattttatgctgtccc

SEQ ID NO: 798552 - DNA, 25 bp, Homo sapien
gtttggctgctgtactcccatcgta

SEQ ID NO: 798553 - DNA, 25 bp, Homo sapien
ccatcgtaggagaacaagaggaaga

SEQ ID NO: 798554 - DNA, 25 bp, Homo sapien
ggctcaaaaggcaagcagtctccat

SEQ ID NO: 798555 - DNA, 25 bp, Homo sapien
gctgtactcccatcgtaggagaaca

SEQ ID NO: 798556 - DNA, 25 bp, Homo sapien
tgggttcctccttcttctcgtttgc

SEQ ID NO: 798557 - DNA, 25 bp, Homo sapien
ccttcttctcgtttgcctttttctg

SEQ ID NO: 798558 - DNA, 25 bp, Homo sapien
tttctgcttctgctgcatgatctcc

SEQ ID NO: 798559 - DNA, 25 bp, Homo sapien
ctgcttctgctgcatgatctcctga

SEQ ID NO: 798560 - DNA, 25 bp, Homo sapien
gcaagagagattggagtgaagccac

SEQ ID NO: 798561 - DNA, 25 bp, Homo sapien
ggcaagagagattggagtgaagcca

SEQ ID NO: 798562 - DNA, 25 bp, Homo sapien
caagagagattggagtgaagccaca

SEQ ID NO: 798563 - DNA, 25 bp, Homo sapien
agggcaagagagattggagtgaagc

SEQ ID NO: 798564 - DNA, 25 bp, Homo sapien
aggagtggcccatagggagagaggc

SEQ ID NO: 798565 - DNA, 25 bp, Homo sapien
ccaggagtggcccatagggagagag

SEQ ID NO: 798566 - DNA, 25 bp, Homo sapien
aaaagggacccaccgcagactcatg

SEQ ID NO: 798567 - DNA, 25 bp, Homo sapien
ccccaggagtggcccatagggagag

SEQ ID NO: 798568 - DNA, 25 bp, Homo sapien
aagggcataagtgacgacgactgtt

SEQ ID NO: 798569 - DNA, 25 bp, Homo sapien
ccgtgttcatgggtacagtacttag

SEQ ID NO: 798570 - DNA, 25 bp, Homo sapien
gacgactgtttgtcagtgcctacac

SEQ ID NO: 798571 - DNA, 25 bp, Homo sapien
ataatagcactaccgtgttcatggg

SEQ ID NO: 798572 - DNA, 25 bp, Homo sapien
gtgaaacccttctacggccatggag

SEQ ID NO: 798573 - DNA, 25 bp, Homo sapien
tcagcctgaattggatgtggcaaaa

SEQ ID NO: 798574 - DNA, 25 bp, Homo sapien
caaaagaggtggatcagtgaaaccc

SEQ ID NO: 798575 - DNA, 25 bp, Homo sapien
ttatgggcagataggagagacacca

SEQ ID NO: 798576 - DNA, 25 bp, Homo sapien
ttaggggttcttatcttgttggagc

SEQ ID NO: 798577 - DNA, 25 bp, Homo sapien
aatttatgttaacacaatgatcttt

SEQ ID NO: 798578 - DNA, 25 bp, Homo sapien
gaatttatgttaacacaatgatctt

SEQ ID NO: 798579 - DNA, 25 bp, Homo sapien
ggaatttatgttaacacaatgatct

SEQ ID NO: 798580 - DNA, 25 bp, Homo sapien
agcacaggcggtcggtgcagagacc

SEQ ID NO: 798581 - DNA, 25 bp, Homo sapien
cgctcacgtgtctgggttggtgcca

SEQ ID NO: 798582 - DNA, 25 bp, Homo sapien
gccgttccaccttgcggctgctgga

SEQ ID NO: 798583 - DNA, 25 bp, Homo sapien
gcccgacctcgcagcggaaactttg

SEQ ID NO: 798584 - DNA, 25 bp, Homo sapien
agcatccacatgacccgcgccggcg

SEQ ID NO: 798585 - DNA, 25 bp, Homo sapien
ccaatgggcgggcagcatccacatg

SEQ ID NO: 798586 - DNA, 25 bp, Homo sapien
cgcaccccggcggccaaggctgggc

SEQ ID NO: 798587 - DNA, 25 bp, Homo sapien
gcgcaccccggcggccaaggctggg

SEQ ID NO: 798588 - DNA, 25 bp, Homo sapien
gacatcctggtagttcagttggaac

SEQ ID NO: 798589 - DNA, 25 bp, Homo sapien
aaggtgcatacccttcagcaaggcg

SEQ ID NO: 798590 - DNA, 25 bp, Homo sapien
ccttcaaaggtgaggaatgctatgt

SEQ ID NO: 798591 - DNA, 25 bp, Homo sapien
tatatcgaaaacctagtcatgctgc

SEQ ID NO: 798592 - DNA, 25 bp, Homo sapien
gctttgtggattgcctatcatcctt

SEQ ID NO: 798593 - DNA, 25 bp, Homo sapien
aatgctttgtggattgcctatcatc

SEQ ID NO: 798594 - DNA, 25 bp, Homo sapien
gaaatgctttgtggattgcctatca

SEQ ID NO: 798595 - DNA, 25 bp, Homo sapien
tatgaaatgctttgtggattgccta

SEQ ID NO: 798596 - DNA, 25 bp, Homo sapien
ctttgcaacttcagggcagggccat

SEQ ID NO: 798597 - DNA, 25 bp, Homo sapien
gagatctgccccctgatgaaaagac

SEQ ID NO: 798598 - DNA, 25 bp, Homo sapien
ccatcgctgtccttaatatatacca

SEQ ID NO: 798599 - DNA, 25 bp, Homo sapien
ggcttatgagtccaaccagggtaaa

SEQ ID NO: 798600 - DNA, 25 bp, Homo sapien
gaatatgggacacttcatgaattta

SEQ ID NO: 798601 - DNA, 25 bp, Homo sapien
gctaatcttctctgtatcattccaa

SEQ ID NO: 798602 - DNA, 25 bp, Homo sapien
agtatatgtgccgtcaaagcgaaca

SEQ ID NO: 798603 - DNA, 25 bp, Homo sapien
catgtcatccttgcacgggggccat

SEQ ID NO: 798604 - DNA, 25 bp, Homo sapien
tgcactcctcagatgtgtagtcaaa

SEQ ID NO: 798605 - DNA, 25 bp, Homo sapien
gatgtgtagtcaaattctctccgca

SEQ ID NO: 798606 - DNA, 25 bp, Homo sapien
tagtcaaattctctccgcagtttca

SEQ ID NO: 798607 - DNA, 25 bp, Homo sapien
cctactgtcctatgatcttgcagct

SEQ ID NO: 798608 - DNA, 25 bp, Homo sapien
tttcctcatgatttctgctaaagtc

SEQ ID NO: 798609 - DNA, 25 bp, Homo sapien
agagtttcctcatgatttctgctaa

SEQ ID NO: 798610 - DNA, 25 bp, Homo sapien
ccaccttgtttctgcctagagtcac

SEQ ID NO: 798611 - DNA, 25 bp, Homo sapien
accaccttgtttctgcctagagtca

SEQ ID NO: 798612 - DNA, 25 bp, Homo sapien
aggcacccattactgctcccgatcc

SEQ ID NO: 798613 - DNA, 25 bp, Homo sapien
tccatggaggcacccattactgctc

SEQ ID NO: 798614 - DNA, 25 bp, Homo sapien
gtccatggaggcacccattactgct

SEQ ID NO: 798615 - DNA, 25 bp, Homo sapien
cacccattactgctcccgatccggc

SEQ ID NO: 798616 - DNA, 25 bp, Homo sapien
tttaagacattatccagagtacaca

SEQ ID NO: 798617 - DNA, 25 bp, Homo sapien
aagacattatccagagtacacatcc

SEQ ID NO: 798618 - DNA, 25 bp, Homo sapien
caactttaagacattatccagagta

SEQ ID NO: 798619 - DNA, 25 bp, Homo sapien
actttaagacattatccagagtaca

SEQ ID NO: 798620 - DNA, 25 bp, Homo sapien
ttggagccaggtgcataatgtcatg

SEQ ID NO: 798621 - DNA, 25 bp, Homo sapien
ggtgcataatgtcatgagaaattgt

SEQ ID NO: 798622 - DNA, 25 bp, Homo sapien
gtgtccagctcatgaaataagaaat

SEQ ID NO: 798623 - DNA, 25 bp, Homo sapien
aataatagcagcattggagccaggt

SEQ ID NO: 798624 - DNA, 25 bp, Homo sapien
ttcctttcccattgccgtgtagcga

SEQ ID NO: 798625 - DNA, 25 bp, Homo sapien
cccacagtagttttggcccaaatca

SEQ ID NO: 798626 - DNA, 25 bp, Homo sapien
cattgccgtgtagcgaagtgtgatg

SEQ ID NO: 798627 - DNA, 25 bp, Homo sapien
atggctgtcccacagtagttttggc

SEQ ID NO: 798628 - DNA, 25 bp, Homo sapien
cattcatagaatccaagtttctttt

SEQ ID NO: 798629 - DNA, 25 bp, Homo sapien
tattcacattcatagaatccaagtt

SEQ ID NO: 798630 - DNA, 25 bp, Homo sapien
tcacattcatagaatccaagtttct

SEQ ID NO: 798631 - DNA, 25 bp, Homo sapien
ctattcacattcatagaatccaagt

SEQ ID NO: 798632 - DNA, 25 bp, Homo sapien
tataatttggatgatcggcattcat

SEQ ID NO: 798633 - DNA, 25 bp, Homo sapien
atataatttggatgatcggcattca

SEQ ID NO: 798634 - DNA, 25 bp, Homo sapien
gatataatttggatgatcggcattc

SEQ ID NO: 798635 - DNA, 25 bp, Homo sapien
cctccgctttcaggatcttgcgaca

SEQ ID NO: 798636 - DNA, 25 bp, Homo sapien
gagctgagtcttcagccttatcagg

SEQ ID NO: 798637 - DNA, 25 bp, Homo sapien
tcttgcgacacctagaatgattctt

SEQ ID NO: 798638 - DNA, 25 bp, Homo sapien
gatcccagtatatctagcctgagct

SEQ ID NO: 798639 - DNA, 25 bp, Homo sapien
ggttccatgcccatactgctcttct

SEQ ID NO: 798640 - DNA, 25 bp, Homo sapien
ctcttcttgaaatttgcctaaacca

SEQ ID NO: 798641 - DNA, 25 bp, Homo sapien
catactgctcttcttgaaatttgcc

SEQ ID NO: 798642 - DNA, 25 bp, Homo sapien
tccagcctggttccatgcccatact

SEQ ID NO: 798643 - DNA, 25 bp, Homo sapien
gtggtgactgtccaacagggcgcca

SEQ ID NO: 798644 - DNA, 25 bp, Homo sapien
agtacaaccaggtcgtgccagtgag

SEQ ID NO: 798645 - DNA, 25 bp, Homo sapien
aggaacatcccatggacaagccagg

SEQ ID NO: 798646 - DNA, 25 bp, Homo sapien
gctgcttcctttggtctgccgatgg

SEQ ID NO: 798647 - DNA, 25 bp, Homo sapien
taatgcaagacctctgaacagccat

SEQ ID NO: 798648 - DNA, 25 bp, Homo sapien
gaatgtccttgtgcccagtctgagc

SEQ ID NO: 798649 - DNA, 25 bp, Homo sapien
tcttatggaaggtagcaaaccaaca

SEQ ID NO: 798650 - DNA, 25 bp, Homo sapien
tcaccaggatggaaatgccaggatc

SEQ ID NO: 798651 - DNA, 25 bp, Homo sapien
caattggccttgtgttctcccaggc

SEQ ID NO: 798652 - DNA, 25 bp, Homo sapien
ccagtgctgctctgtagacttattg

SEQ ID NO: 798653 - DNA, 25 bp, Homo sapien
gtggcagcttcctcggtccctttga

SEQ ID NO: 798654 - DNA, 25 bp, Homo sapien
cttgcctcacaattggccttgtgtt

SEQ ID NO: 798655 - DNA, 25 bp, Homo sapien
gggacaagaaacactgccctccctg

SEQ ID NO: 798656 - DNA, 25 bp, Homo sapien
tcttgggctcccatatttccgctct

SEQ ID NO: 798657 - DNA, 25 bp, Homo sapien
ctaaaccacatcttgagggacaaga

SEQ ID NO: 798658 - DNA, 25 bp, Homo sapien
caacaagcccaggtggcttttctct

SEQ ID NO: 798659 - DNA, 25 bp, Homo sapien
catcccatggtggatagtgcctagc

SEQ ID NO: 798660 - DNA, 25 bp, Homo sapien
taaagcagtgcagagctacacagga

SEQ ID NO: 798661 - DNA, 25 bp, Homo sapien
cagaccctaggctcttgaacggaaa

SEQ ID NO: 798662 - DNA, 25 bp, Homo sapien
tacaacatgatttcctgctgagcag

SEQ ID NO: 798663 - DNA, 25 bp, Homo sapien
atttccttctgggtggagctttgtt

SEQ ID NO: 798664 - DNA, 25 bp, Homo sapien
aatttccttctgggtggagctttgt

SEQ ID NO: 798665 - DNA, 25 bp, Homo sapien
gcagaaaattatagccaacatttcg

SEQ ID NO: 798666 - DNA, 25 bp, Homo sapien
gagggcatgtgacaaattgcagaaa

SEQ ID NO: 798667 - DNA, 25 bp, Homo sapien
ccctgggttacacactagcagaggc

SEQ ID NO: 798668 - DNA, 25 bp, Homo sapien
acatttcgtggttgctgatcttccc

SEQ ID NO: 798669 - DNA, 25 bp, Homo sapien
tttgtgtgaaagtgttgttacatac

SEQ ID NO: 798670 - DNA, 25 bp, Homo sapien
aaagtgttgttacatactggcttct

SEQ ID NO: 798671 - DNA, 25 bp, Homo sapien
aagtgttgttacatactggcttcta

SEQ ID NO: 798672 - DNA, 25 bp, Homo sapien
ttgtgtgaaagtgttgttacatact

SEQ ID NO: 798673 - DNA, 25 bp, Homo sapien
cgcctctggacttctggcaggccat

SEQ ID NO: 798674 - DNA, 25 bp, Homo sapien
tcatttaagggtcggagacctttga

SEQ ID NO: 798675 - DNA, 25 bp, Homo sapien
ttgaaaagcagctcaccgaggttcc

SEQ ID NO: 798676 - DNA, 25 bp, Homo sapien
gctcaccgaggttcccgcctctgga

SEQ ID NO: 798677 - DNA, 25 bp, Homo sapien
ctccctttgggtttcaatgatggca

SEQ ID NO: 798678 - DNA, 25 bp, Homo sapien
gggtttcaatgatggcagggaccag

SEQ ID NO: 798679 - DNA, 25 bp, Homo sapien
tccctttgggtttcaatgatggcag

SEQ ID NO: 798680 - DNA, 25 bp, Homo sapien
tttgggtttcaatgatggcagggac

SEQ ID NO: 798681 - DNA, 25 bp, Homo sapien
tacaagcaacttcaagacatctagg

SEQ ID NO: 798682 - DNA, 25 bp, Homo sapien
agacatctagggagtagctcctcac

SEQ ID NO: 798683 - DNA, 25 bp, Homo sapien
ccacagtggtggtaagctgaattct

SEQ ID NO: 798684 - DNA, 25 bp, Homo sapien
ctttattagagaggctaaaagccac

SEQ ID NO: 798685 - DNA, 25 bp, Homo sapien
aattggacagccacccatctgaagg

SEQ ID NO: 798686 - DNA, 25 bp, Homo sapien
tctaacagactttccacagagatgg

SEQ ID NO: 798687 - DNA, 25 bp, Homo sapien
aaacacagcgaaggaagcgtgggca

SEQ ID NO: 798688 - DNA, 25 bp, Homo sapien
tgggaagtaagcagaggctccacca

SEQ ID NO: 798689 - DNA, 25 bp, Homo sapien
tagcagcagggaagcctgagttctg

SEQ ID NO: 798690 - DNA, 25 bp, Homo sapien
aagcctgagttctggggatagtgaa
